United States Patent Application Publication US 2026/0022371 A1 - sequence listing, part 3

SEQ ID NO: 33569 - DNA, 120 bp, synthetic construct
  source 1..120: mol_type = other DNA
ctcatctgtaaaatgcggctgagtatccccagtcgaggatgaaaggagactgtggatgtgagtgtctagcatggctgcctgcagagcacctgctattattggaggtttttaactggggag

SEQ ID NO: 33570 - DNA, 120 bp, synthetic construct
  source 1..120: mol_type = other DNA
cgtacaccacgccctcgatcatgcgccgcgcttcatgactcagctcctgaatcaggtcgaagttcagccgcatccaccggtagctcttcttcttcttgcgctccaggatgtagcctggct

SEQ ID NO: 33571 - DNA, 120 bp, synthetic construct
  source 1..120: mol_type = other DNA
tccatccggtgcccttgcactcacccaggatgggctgcccgccatcgtaggcaggcggctcccactgtactgtgcaggagtcctctcccacgttgctgatcttgggggccgcaggtgcgt

SEQ ID NO: 33572 - DNA, 120 bp, synthetic construct; identical to SEQ ID NO: 9841
  source 1..120: mol_type = other DNA

SEQ ID NO: 33573 - DNA, 120 bp, synthetic construct
  source 1..120: mol_type = other DNA
cctgacatgtttcattcattctccacacccaaaaggccctttccctcctccacccctttgtacacagtttcctctgcctgggatgcctttcctcaccatcttctcagcctcctaaaggca

SEQ ID NO: 33574 - DNA, 120 bp, synthetic construct
  source 1..120: mol_type = other DNA
tgcctccatctcccccagagcggggctccttttgggcagaaaaacctgtcctgttgccgctcggctcagggagcatgcccgtgatgtttgtcgagtggctgaatgagcgaacggatgggc

SEQ ID NO: 33575 - DNA, 120 bp, synthetic construct
  source 1..120: mol_type = other DNA
accgtgtagacgccctcatcttccttctctgccccctcgaccgtgaagatgctgcggtccttggtggtctccacgcggacccggccctcggtctcacacagcagctgggggggtgcagag

SEQ ID NO: 33576 - DNA, 120 bp, synthetic construct
  source 1..120: mol_type = other DNA
tcagcatctagttcaaaatcatctctgtggcaccgactgagggcaggggctcgggttctagctttgtcacgggacctggggcaaccacctgtcctctcagatgagctatcatgaggaccc

SEQ ID NO: 33577 - DNA, 120 bp, synthetic construct; identical to SEQ ID NO: 9842
  source 1..120: mol_type = other DNA

SEQ ID NO: 33578 - DNA, 120 bp, synthetic construct
  source 1..120: mol_type = other DNA
cgtaggtagaaagtgatgaaagacaaacgagcctcctcctgacctcagtctcactcaccttcttgtcaaacacccactcatcgctgtcacctgtgtcctctggggcatctggggctggcc

SEQ ID NO: 33579 - DNA, 120 bp, synthetic construct
  source 1..120: mol_type = other DNA
ctgcccaccttgcctgccccctgaccagtctctcccatggggtagccaacagcagggcgtgcacatgtgggtggggtgtgcagcaggtcctagcacttggctggttccacacacccatct

SEQ ID NO: 33580 - DNA, 120 bp, synthetic construct
  source 1..120: mol_type = other DNA
tccagctacaaccacaatggtgtctggtatgcggcctgggcagtccaggtggatcttgggaggttctgcagaagacacaatgtagttcagagaaacgggagagccaggaggagcacaggt

SEQ ID NO: 33581 - DNA, 120 bp, synthetic construct; identical to SEQ ID NO: 9843
  source 1..120: mol_type = other DNA

SEQ ID NO: 33582 - DNA, 120 bp, synthetic construct
  source 1..120: mol_type = other DNA
cacaaatacacatacatacacgcacacacacagacacagacacacatatatacatacacacacagacacatgcacacacacacacgcgcgcacacatgcacgcacacatgcacacattaa

SEQ ID NO: 33583 - DNA, 120 bp, synthetic construct
  source 1..120: mol_type = other DNA
tgagatcaggagatcgaaaccatcctggctaacatggtgaaaccccgtctctactaaaaatacaaaaaataattagctgggcatggtggcgggcgcctgtagtcccagctactcaggagg

SEQ ID NO: 33584 - DNA, 120 bp, synthetic construct; identical to SEQ ID NO: 9844
  source 1..120: mol_type = other DNA

SEQ ID NO: 33585 - DNA, 120 bp, synthetic construct
  source 1..120: mol_type = other DNA
tcttccctctgtgagtggaggggaggcctgcgtgggtgggttgcgggaaagtgagcagaaccaagactcaggggccccaagacttaccctgcctgggtacgaagtcaatcttgacctctg

SEQ ID NO: 33586 - DNA, 120 bp, synthetic construct
  source 1..120: mol_type = other DNA
tggagcttggctgacaggttgcaggcgaagccctcgggcacaaagctgtagtcagcctcgtcggcaggtgtgacgtcgtcaatggtcagtttgtggaccctgcaggggagcagtggctca

SEQ ID NO: 33587 - DNA, 120 bp, synthetic construct
  source 1..120: mol_type = other DNA
tttttttttctatattatctaattttccagctttttaatgtgccttcagaggtaggcagcgtaaaagtgatttctacatcaaagcatctccttggctgggcccttggagactgggcaggg

SEQ ID NO: 33588 - DNA, 120 bp, synthetic construct
  source 1..120: mol_type = other DNA
ctccttggtggcctcctgccctgccctggtcacaagctgggggagggtgctggggagcgctcgaccccgtccgtgtctctccctgctgcctctttgtctctgtccctctgttcttctctg

SEQ ID NO: 33589 - DNA, 120 bp, synthetic construct; identical to SEQ ID NO: 9845
  source 1..120: mol_type = other DNA

SEQ ID NO: 33590 - DNA, 120 bp, synthetic construct
  source 1..120: mol_type = other DNA
ttctcatctgagacctcacatttgaacaccgcctggtcctttgcgcccaccatcaggtctgcgatgctctggtacacctccagcttcttttctgcagggcagggcagagccattgagctc

SEQ ID NO: 33591 - DNA, 120 bp, synthetic construct
  source 1..120: mol_type = other DNA
tttgcctgtgatggtgcagtgcacataaggaacctcaagtgtctgaggggtggtgatgctcaccaggcccgtatgaccctctcagtaccctctggagcggtcacctcagcatcgtcattt

SEQ ID NO: 33592 - DNA, 120 bp, synthetic construct
  source 1..120: mol_type = other DNA
aaagcctcatgtgcccccccagccaggctcaccctgcacaatgagctcagccagcgcctggcccccgctagtgcacagtgcatagtgccccgcgtcctccagcatggcctcgttgatgat

SEQ ID NO: 33593 - DNA, 120 bp, synthetic construct; identical to SEQ ID NO: 9846
  source 1..120: mol_type = other DNA

SEQ ID NO: 33594 - DNA, 120 bp, synthetic construct
  source 1..120: mol_type = other DNA
cccacctttcacaaagagctccgtgctacacttctcgccacccaccacgcactggtaggctgcgtcgtccgccaatgagcactggctgatggtcagggtacgcttggcaccgatggactc

SEQ ID NO: 33595 - DNA, 120 bp, synthetic construct
  source 1..120: mol_type = other DNA
agaggggaacttacttgctgtagaacagaaggggccgttgaagtgttcccgacgggaggaagtgagcccgagacaaaaggagagagagagagggaccggcaggagcaaaaggatgggaaa

SEQ ID NO: 33596 - DNA, 120 bp, synthetic construct
  source 1..120: mol_type = other DNA
ccaccccaggctgcacctgccgctcatctggatctcctggccattcttgagccatttgacctcagcgtcatggtcagccagttccacggtcagccggatcttgtggcctttgctcacctg

SEQ ID NO: 33597 - DNA, 120 bp, synthetic construct; identical to SEQ ID NO: 9847
  source 1..120: mol_type = other DNA

SEQ ID NO: 33598 - DNA, 120 bp, synthetic construct
  source 1..120: mol_type = other DNA
gtgccaccacgcccagctaatttttgtatttttagtagagacggggttttaccatgttggccgggctggtcttgaaatcctgacctcaggtgatgcgcccgcctcagcctcccaaagtgc

SEQ ID NO: 33599 - DNA, 120 bp, synthetic construct
  source 1..120: mol_type = other DNA
cacctgctcagctcagggattgggttaggggcttccagaaagacagaagcttgtcaggagaactggggctgggacagctgtgccttctcttctctcagcaacccctgagttgtgtactct

SEQ ID NO: 33600 - DNA, 120 bp, synthetic construct
  source 1..120: mol_type = other DNA
tcagagaggcgactggcccaatgccaccagcccagcaggtgtgtggcagagctgggtcttgagcccagccctgctccacaacaatgcctcctcttgcggccgtgtttgtaaaagcccatg

SEQ ID NO: 33601 - DNA, 120 bp, synthetic construct; identical to SEQ ID NO: 9848
  source 1..120: mol_type = other DNA

SEQ ID NO: 33602 - DNA, 120 bp, synthetic construct
  source 1..120: mol_type = other DNA
ctgcaacctctgcctcccgggttcaagtgattctcctgcctcagcctccggagtagctgggattacaggcgcctgccaccatgcccaggtaattttgtatttttagtagagacggggttt

SEQ ID NO: 33603 - DNA, 120 bp, synthetic construct
  source 1..120: mol_type = other DNA
tactgttgttgctattcctggaagacacccctaccctcggaggtccccatctgccttgccagcctccatcttttcctccttgggcacctacagtcctttgcttggtgccctctgggctca

SEQ ID NO: 33604 - DNA, 120 bp, synthetic construct
  source 1..120: mol_type = other DNA
aggctgagacaacagggaggcagggcagagggataaggggcctgggggaggtcagcagggagggactaaccagctcctctccccgtccccatgatcgtgtgtgttttgtgtgtgtgcttt

SEQ ID NO: 33605 - DNA, 120 bp, synthetic construct; identical to SEQ ID NO: 9849
  source 1..120: mol_type = other DNA

SEQ ID NO: 33606 - DNA, 120 bp, synthetic construct
  source 1..120: mol_type = other DNA
ttcatttcttttcagaagagggtagagaaagaaagtgtagcctgatttttccttggtgaggagggttaacctgagctctgtccttttccttgtggctgtcctggcctaacttttgctctt

SEQ ID NO: 33607 - DNA, 120 bp, synthetic construct
  source 1..120: mol_type = other DNA
tccgctctttccatgtatgtggacgaggtggggggctaacctgtgccctctcctctcccctgtggggaagggctaacctatgccctctcctctcctgtgtagggaagggctagcctgtgc

SEQ ID NO: 33608 - DNA, 120 bp, synthetic construct
  source 1..120: mol_type = other DNA
ggcgatgcgctcgtactcagatgggggtgcctgccgtaggatctcccacacgtcctcctctgctggtgcctccagcttcgagtccctgtgtcccgcagtctaggctgtggccgggggcaa

SEQ ID NO: 33609 - DNA, 120 bp, synthetic construct; identical to SEQ ID NO: 9850
  source 1..120: mol_type = other DNA

SEQ ID NO: 33610 - DNA, 120 bp, synthetic construct
  source 1..120: mol_type = other DNA
ccctattttccgcacttgcactccctgtgttgtggggcacccatgctgctccggaggctctggcaggacctcctgtgtgcattactttttcttatccctcctaagctctgacagataggt

SEQ ID NO: 33611 - DNA, 120 bp, synthetic construct
  source 1..120: mol_type = other DNA
agcgccctgccgcccccaaacacccagaccccgattcttactctctgggccacagcagcagcagccataatggaggggccgggggagagggagagagagggcagagagaacataagtcag

SEQ ID NO: 33612 - DNA, 120 bp, synthetic construct; identical to SEQ ID NO: 9851
  source 1..120: mol_type = other DNA

SEQ ID NO: 33613 - DNA, 120 bp, synthetic construct
  source 1..120: mol_type = other DNA
cctcatggctatcactatggagagggacccccagtgaggctgcagtgagggactggaaagggattaggagcaggatgggagtggagtggggagggagaaagggacactagccagattggg

SEQ ID NO: 33614 - DNA, 120 bp, synthetic construct
  source 1..120: mol_type = other DNA
cacctgcctgggaagcttgctctcccctgcagcccccactgacttcagctccgccccgcaaatcatccccagccctgacccccagtcgagaccctgaagggcctcagactccagcactgg

SEQ ID NO: 33615 - DNA, 120 bp, synthetic construct
  source 1..120: mol_type = other DNA
agggggccgtttgagaagccctgccctgggggcggcctctgagtattcacagacttgcccattcatgaccccatgaggctgggcatctgccccaggatctcaccttcccagcctttccca

SEQ ID NO: 33616 - DNA, 120 bp, synthetic construct
  source 1..120: mol_type = other DNA
acaccaagatgataaaacagagtcccacccagatgagacccggactcagccctaagcccccacgcctaccctgcaagccttggggtttctctcacaccctgtgtgtgcagcactgggcac

SEQ ID NO: 33617 - DNA, 120 bp, synthetic construct; identical to SEQ ID NO: 9852
  source 1..120: mol_type = other DNA

SEQ ID NO: 33618 - DNA, 120 bp, synthetic construct
  source 1..120: mol_type = other DNA
ggcggatcacataagaccaggagctccagaccagcctggccaacgtggtgaaattccgtctctactaaaaataacgaaaattagccaagtatggtggtgcacacctctagtttcagctac

SEQ ID NO: 33619 - DNA, 120 bp, synthetic construct
  source 1..120: mol_type = other DNA
atatatatatatttaaaggaggctgggagtgacaaatgctcatcgatcttcgcaccctcaggctttagttaacccatacagagtttttgtacagagaaaggggactatctcgaaacccat

SEQ ID NO: 33620 - DNA, 120 bp, synthetic construct; identical to SEQ ID NO: 9853
  source 1..120: mol_type = other DNA

SEQ ID NO: 33621 - DNA, 120 bp, synthetic construct
  source 1..120: mol_type = other DNA
tgagcccttagccctgatactcacccatccaggggctttacaaccccactagctggtgcccccatgcttcacagtgtcctccaggcttcctgaccaccctgggcgaccccccacccccgg

SEQ ID NO: 33622 - DNA, 120 bp, synthetic construct
  source 1..120: mol_type = other DNA
atctccctgtgggcccctggcccctccacctgcctcccagattccccacaccccttgcttgcagctcgtgtgtgcctctgggtctcatggtgccctctgtgtgccttgtgccttctaggg

SEQ ID NO: 33623 - DNA, 120 bp, synthetic construct
  source 1..120: mol_type = other DNA
ccacccatttgcccttgaaccacttgaccacaggcggcttcaggaggctggcgccggccacgcgggctgagaaggtgatgctgccacctgcaaaggcaggggcgacaggcccggcttggg

SEQ ID NO: 33624 - DNA, 120 bp, synthetic construct; identical to SEQ ID NO: 9854
  source 1..120: mol_type = other DNA

SEQ ID NO: 33625 - DNA, 120 bp, synthetic construct
  source 1..120: mol_type = other DNA
tttgtatttttagtagagatggggtttcatcatgttagccaggatggtctcaatctcctgacctcatgatccgcccacctcggcctcccaaagtactggggattataggcctgagccacc

SEQ ID NO: 33626 - DNA, 120 bp, synthetic construct
  source 1..120: mol_type = other DNA
ccagctcagcggctggggccggggcttctccaggggctccagtggcctcagcaggggcaggggcaggggccagcatgggctctgccttctctggaggggatcagatgggagtcgtggtgc

SEQ ID NO: 33627 - DNA, 120 bp, synthetic construct
  source 1..120: mol_type = other DNA
cagaggcagctcatgctgagctggagagccagcctgcctctcacattctcctccccgtcccaggccatcagttcccatgtcctctgcatctgccctgaacagctccaggtccatccctgc

SEQ ID NO: 33628 - DNA, 120 bp, synthetic construct
  source 1..120: mol_type = other DNA
gggggagagtggggttgtgtcttgttcatctctcccacctaccccatggctggaacaagccaggatggcacatgggggtactcagagaggtcatgtgcagaaaagggggaaagggcgttc

SEQ ID NO: 33629 - DNA, 120 bp, synthetic construct; identical to SEQ ID NO: 9855
  source 1..120: mol_type = other DNA

SEQ ID NO: 33630 - DNA, 120 bp, synthetic construct
  source 1..120: mol_type = other DNA
acacggcagggctgcctgcggccacttccactgaccgtggcttcttgctaaaagctgagactgaagggccaggtggaggctacagcggcccctggttggagcgtgcaccccgcccctgca

SEQ ID NO: 33631 - DNA, 120 bp, synthetic construct
  source 1..120: mol_type = other DNA
actgaggctcagagaagctaagcggctcctccaagatcacacagctagcagtcgggagagccagggctgtggtcctgacctcccaacaagactttttctgcatgtgtccactttccctgc

SEQ ID NO: 33632 - DNA, 120 bp, synthetic construct
  source 1..120: mol_type = other DNA
gtcctccaaggacctcaggctgggtatcagcaactgagataaagctggcctgggagggcgctgggggatggggacctggatctctgccctggacaaccttcataagggcacagcccaggc

SEQ ID NO: 33633 - DNA, 120 bp, synthetic construct; identical to SEQ ID NO: 9856
  source 1..120: mol_type = other DNA

SEQ ID NO: 33634 - DNA, 120 bp, synthetic construct
  source 1..120: mol_type = other DNA
agaatgggttgaccccgggtgcttcctgtcttggctgtgtcccctctctgcgtccctgaccttgggtttaccttcacctctcatcagagggatgggaaaaagaaaccgagaatcaaaaaa

SEQ ID NO: 33635 - DNA, 120 bp, synthetic construct
  source 1..120: mol_type = other DNA
cacccccctgctcccacacttagacccaaccccagtcctaaagctacctggcttcttccccggctcaggcatcctgagagacgtcacaccaggcacgaagcaggcacaggtcacccaaag

SEQ ID NO: 33636 - DNA, 120 bp, synthetic construct; identical to SEQ ID NO: 9857
  source 1..120: mol_type = other DNA

SEQ ID NO: 33637 - DNA, 120 bp, synthetic construct
  source 1..120: mol_type = other DNA
gggggccggcggcacccatttcggtgactttctccccatttcatgtaaacagaattgccagggaccggttaccgtggatatgtttttctaaaaactcagtgtctgcacaatccattgata

SEQ ID NO: 33638 - DNA, 120 bp, synthetic construct
  source 1..120: mol_type = other DNA
acaggggtagtaggggtggtggtggtggtggtggttgagacagggtctctgttgcccaggctggagtgcaatgatgcaattatagctcattgcagcctcgaagtcctgggctggagcgtt

SEQ ID NO: 33639 - DNA, 120 bp, synthetic construct
  source 1..120: mol_type = other DNA
ttttatattccttgtgtgaggggtgtctgtgatatttggaatttgagaatggatttagacaatgctaagtacagtctgctgggttttgctttgttctgggttgttgttgggttttttttg

SEQ ID NO: 33640 - DNA, 120 bp, synthetic construct; identical to SEQ ID NO: 9858
  source 1..120: mol_type = other DNA

SEQ ID NO: 33641 - DNA, 120 bp, synthetic construct
  source 1..120: mol_type = other DNA
acacggcacaaataagatgcagatattcaagttgaagtcaacaaatcattgccagtcttaaggcatgagtgattgaatttaatcagctgaaattggttgcgggggtgggtggagaaggtt

SEQ ID NO: 33642 - DNA, 120 bp, synthetic construct
  source 1..120: mol_type = other DNA
gggattttgtcttctgactttattcatagcccatggggcagagttgaagagagaacatactgtttttcttctgtatctcctcacccccattcgccttagaggtgagttttcaagatttga

SEQ ID NO: 33643 - DNA, 120 bp, synthetic construct; identical to SEQ ID NO: 9859
  source 1..120: mol_type = other DNA

SEQ ID NO: 33644 - DNA, 120 bp, synthetic construct
  source 1..120: mol_type = other DNA
ggccttcaaggtggatttaaaaaagaaatttaagagtctctctcacccaggctggagtgcagtggcatgatcttggctcactgcaacctctgcctcctgagttccagcagtccttgagcc

SEQ ID NO: 33645 - DNA, 120 bp, synthetic construct
  source 1..120: mol_type = other DNA
caaacgatccacctgtcttagcctctcaaagtgttgggattacaggtgtgtgccagtgcacctggcctctgaggtggattttagctccagccagtaggacacccctgtctctccttaatg

SEQ ID NO: 33646 - DNA, 120 bp, synthetic construct; identical to SEQ ID NO: 9860
  source 1..120: mol_type = other DNA

SEQ ID NO: 33647 - DNA, 120 bp, synthetic construct
  source 1..120: mol_type = other DNA
gacaggtcttattttaggacatcaaagaagagagcagacttttgctccccacgcaagggttggataagaagccataaggatgaacacaactcagtgaccaattctttagtcaaaaggaac

SEQ ID NO: 33648 - DNA, 120 bp, synthetic construct
  source 1..120: mol_type = other DNA
atcgagaccatcctggctaacatggtgaaaccgtgtctctactaaaaatacaaaaaattagccgggcgtgctggcgggtgcctgtagtcccagctactcgggagggaggctgaggcagga

SEQ ID NO: 33649 - DNA, 120 bp, synthetic construct
  source 1..120: mol_type = other DNA
agagattcatgatcactgagaagaggaattcgcaaatgacccttttgttgacagaggatgggagagaccccggctgggaaagcccacctggctataaaggatgggacttcccgcagtgca

SEQ ID NO: 33650 - DNA, 120 bp, synthetic construct; identical to SEQ ID NO: 9861
  source 1..120: mol_type = other DNA

SEQ ID NO: 33651 - DNA, 120 bp, synthetic construct
  source 1..120: mol_type = other DNA
gtcagttgttcgaggccatcctggccaatatggtgaaaccccgtctctactaaatatactaaattagccgtgcgtggtggcaggcgcctggaatcccagtcactcaggaggctgaggcag

SEQ ID NO: 33652 - DNA, 120 bp, synthetic construct
  source 1..120: mol_type = other DNA
tgggaagtagtccctaacctccacatcagtgctctaggcactctctttttggctcttggaagagtctatttgctaactggaaaagcttaatggataaatttgctcccttgacctaagaaa

SEQ ID NO: 33653 - DNA, 120 bp, synthetic construct; identical to SEQ ID NO: 9862
  source 1..120: mol_type = other DNA

SEQ ID NO: 33654 - DNA, 120 bp, synthetic construct
  source 1..120: mol_type = other DNA
actacagacatgccaccactcctggctaatttttgtatttttaggagagacggggttttaccatgttggccaggctggtcctgacctcaagttatctgcccgcctcggcctcccaaagtg

SEQ ID NO: 33655 - DNA, 120 bp, synthetic construct
  source 1..120: mol_type = other DNA
tcagtttcccactgaccagtgggttctgcacttcagcccaccctggaatttggcttatcctatgatcccaatcagctggtaggagagctgcttgaagtgtcctagaaactcatctgctcc

SEQ ID NO: 33656 - DNA, 120 bp, synthetic construct
  source 1..120: mol_type = other DNA
catgaggtgaagtcagatccacatggcctaacttcacctgtgaaaagttggtcatgcttgtaatcccagcatttggggaggccaaggcgcgcggatcacctgaagtcaggagtttgagac

SEQ ID NO: 33657 - DNA, 120 bp, synthetic construct
  source 1..120: mol_type = other DNA
ccaggaggcaaaggttgcggtgagccaagattgcgccattgcactccagagcgagactccgtctcaaaaaaaaaaaaaaaaaaaagcaaaatcccagagcagcagagacctcttcatgct

SEQ ID NO: 33658 - DNA, 120 bp, synthetic construct; identical to SEQ ID NO: 9863
  source 1..120: mol_type = other DNA

SEQ ID NO: 33659 - DNA, 120 bp, synthetic construct
  source 1..120: mol_type = other DNA
gcccagatagtggaactgtcatattcattcagtgcagtgtcttcactggacaagggaggacagcactgctgagtgccctaaccacgtaagagtggcttttggcatgaaaggaagaaaaat

SEQ ID NO: 33660 - DNA, 120 bp, synthetic construct
  source 1..120: mol_type = other DNA
gtctatttgtcatcctgatcttggtttcaatgaaagctttgcacaaagatatccaagcctccagattttgcaagaatctcgtggaaatgtgcaagggtttaaaaattggggtgggcagag

SEQ ID NO: 33661 - DNA, 120 bp, synthetic construct
  source 1..120: mol_type = other DNA
agaatccccggaggttaccatcagcaaacaagaaggagcccggttaagtatattcttaattgttaaagacatttgcttcgatttaataattaaaggcactcttttttattttgagatagt

SEQ ID NO: 33662 - DNA, 120 bp, synthetic construct; identical to SEQ ID NO: 9864
  source 1..120: mol_type = other DNA

SEQ ID NO: 33663 - DNA, 120 bp, synthetic construct
  source 1..120: mol_type = other DNA
atctatctctgctcactgcaacctccacctcccgggttcaagcgattctcctgcctcagcctcccgagtagctgggattacaggcatgcaccaccgtggctggctaattttcatattttt

SEQ ID NO: 33664 - DNA, 120 bp, synthetic construct
  source 1..120: mol_type = other DNA
cagttttttaaatggaaaggaaaatgtctgtcctttagagctacttttaagaacctcctataaatcccatgattgcatactggttcagggaagtaaaagcatttgagcaagctagtttga

SEQ ID NO: 33665 - DNA, 120 bp, synthetic construct; identical to SEQ ID NO: 9865
  source 1..120: mol_type = other DNA

SEQ ID NO: 33666 - DNA, 120 bp, synthetic construct
  source 1..120: mol_type = other DNA
tccacctgcattatgtgtgtattcgtgtcggaactggcaaaaatggtctttttgttccactttgcccttggctgcccaagaaggctcaagtgtctggggcagaacccacaggaggtgtcc

SEQ ID NO: 33667 - DNA, 120 bp, synthetic construct
  source 1..120: mol_type = other DNA
gtatggtgaaaccttgccactactaaaaatacaaaaattagccaggtgtggtggcacgcacctgtaatctcagctacttgggaggctgaggcaggagaatcgcttgaacctgggaggcaa

SEQ ID NO: 33668 - DNA, 120 bp, synthetic construct
  source 1..120: mol_type = other DNA
cagcagtggggtagggagtcagagtggctgtatccccatcgctcagcccagccactcaggagaggcagggggactggttgccagcagagcacatctgagggtttttgttttttgtttttt

SEQ ID NO: 33669 - DNA, 120 bp, synthetic construct
  source 1..120: mol_type = other DNA
ttacaggcatctgccaccacgcctagctgatttttgtgtttttagtagagatgaagtttcaccatgttggccaggctggtctcgaactcctgacctcaggtgatcagcccacctcagcct

SEQ ID NO: 33670 - DNA, 120 bp, synthetic construct; identical to SEQ ID NO: 9866
  source 1..120: mol_type = other DNA

SEQ ID NO: 33671 - DNA, 120 bp, synthetic construct
  source 1..120: mol_type = other DNA
tcctttccaactctttttaaacaagtctaattatgatgtcagagagagtctatttggtgctaatggctgttgtcactccctttttagtggagaagtaggcttcaggtcttggtgatcaag

SEQ ID NO: 33672 - DNA, 120 bp, synthetic construct
  source 1..120: mol_type = other DNA
ttatattcatgtatgattaaaactgttaaaagatcaagtcattggtattaaaggtagtaagaggctcagcacatggctgtggtggtatgagaatgaagcggggaaaatatctaggacccg

SEQ ID NO: 33673 - DNA, 120 bp, synthetic construct
  source 1..120: mol_type = other DNA
ctgtgtctcccaggttcaagcgattctcctgcctcagcctccctagtagctgggattacaggcacgccccaccatacccggctaatttttgtgtttttagtagagacggggtttcaccat

SEQ ID NO: 33674 - DNA, 120 bp, synthetic construct; identical to SEQ ID NO: 9867
  source 1..120: mol_type = other DNA

SEQ ID NO: 33675 - DNA, 120 bp, synthetic construct
  source 1..120: mol_type = other DNA
aagctagggcttctcagagatgaactgaggagtcattagatatacatggaattctaaagcgccaagattagttgagacctctcacctagcgctggggagagatgaaaacaactaaggccg

SEQ ID NO: 33676 - DNA, 120 bp, synthetic construct
  source 1..120: mol_type = other DNA
aacagagcaagactctgcccaaaagagaactaagttgataccctggggcggtctagtggcaagcaggtttcgaggtgagggatcagcagaggagaggaagagggacaaccccacaggtcg

SEQ ID NO: 33677 - DNA, 120 bp, synthetic construct; identical to SEQ ID NO: 9868
  source 1..120: mol_type = other DNA

SEQ ID NO: 33678 - DNA, 120 bp, synthetic construct
  source 1..120: mol_type = other DNA
attcacatccagttttgtagtaagggtagcaaggtagacatggggctaagaggttattccatttgctgatggagcaaatgaaagagaaaaccttgcaaaataaggatttttggagctatg

SEQ ID NO: 33679 - DNA, 120 bp, synthetic construct
  source 1..120: mol_type = other DNA
tgaggcagtgggagcttgtgcacgtttcatgatcatttctgcttttgagttaagtaggaagtaaggtccccagctgagagagaatggggaggagcgatcataagttcaaagaaaaagtga

SEQ ID NO: 33680 - DNA, 120 bp, synthetic construct
  source 1..120: mol_type = other DNA
catccagggtaagtgcattggctagatcatggctcactgcagccttgacctctggggctccactgatcgtcccacctcagcctcctgagtagctgggattttaggtttgcgccatcccac

SEQ ID NO: 33681 - DNA, 120 bp, synthetic construct; identical to SEQ ID NO: 9869
  source 1..120: mol_type = other DNA

SEQ ID NO: 33682 - DNA, 120 bp, synthetic construct
  source 1..120: mol_type = other DNA
tactggttggcccggtagaagcagcaggatcacccagagggtcaaggaaccgagaggctgcgtcgcccacctggatgttgaaatcatggagaactgtgaggagtggtgtgggagacagga

SEQ ID NO: 33683 - DNA, 120 bp, synthetic construct
  source 1..120: mol_type = other DNA
cccccaaggtaccagaggcatgggagagaaaacagcccccactccagtgacagcaggaattctcagcggggtggcagtcgtaccctcccatctctagaggacttctggcaacatctagag

SEQ ID NO: 33684 - DNA, 120 bp, synthetic construct
  source 1..120: mol_type = other DNA
acagcccccatacccgagaataatgcagcccagatggcagcagtgctgagggggagaaaggaggagcagagcatgtcaggaaggaggtgaagtggcggggggtggtgttgcagcttcaat

SEQ ID NO: 33685 - DNA, 120 bp, synthetic construct; identical to SEQ ID NO: 9870
  source 1..120: mol_type = other DNA

SEQ ID NO: 33686 - DNA, 120 bp, synthetic construct
  source 1..120: mol_type = other DNA
ctcgcggcccatggcctcgttgctctccgtggcctcatccagctcccgctgcagcttcctgcggttggcgttgatgcgctgggactcctcctctgcctcctccagctgcctcttgagctg

SEQ ID NO: 33687 - DNA, 120 bp, synthetic construct
  source 1..120: mol_type = other DNA
actgctcggccatcttgcgctcgtcctccacctgcagcaagatttccttcagcttcttgtctttctgcttcagcgacttggtggccgcctgtttctctctgcaaacagcaaggaaaacag

SEQ ID NO: 33688 - DNA, 120 bp, synthetic construct; identical to SEQ ID NO: 9871
  source 1..120: mol_type = other DNA

SEQ ID NO: 33689 - DNA, 120 bp, synthetic construct
  source 1..120: mol_type = other DNA
atggggtttctattttttttgcggggaggaggcaaggtcttgctgtgtgacccaggttggagtgcagtggtgctccaatgcctgctcttcaccctagttcatagttcactgcagccttga

SEQ ID NO: 33690 - DNA, 120 bp, synthetic construct
  source 1..120: mol_type = other DNA
gtggctcatgcctgtaatcccagtactctgggaggccgaggtgggcagatcacctgtggtcaggagttcgagaccagcctggccaacatggtgaaaccccatccctactaaaaaatacaa

SEQ ID NO: 33691 - DNA, 120 bp, synthetic construct
  source 1..120: mol_type = other DNA
tgtctcaaaaaaataaaaataaaaaagtcttgctatgctgcccagactggtctcgaactcctggactcaagtgctgctcccacctacctcagcctcccaaagtgccgggattatgggcat

SEQ ID NO: 33692 - DNA, 120 bp, synthetic construct; identical to SEQ ID NO: 9872
  source 1..120: mol_type = other DNA

SEQ ID NO: 33693 - DNA, 120 bp, synthetic construct
  source 1..120: mol_type = other DNA
gcagtggcacaatctcggctcactgcaacctccacgtgtcacgttggagtgattctcctgcctcagtctcctgagtagctgagataataggcatgtgccaccacactcggctaatttttg

SEQ ID NO: 33694 - DNA, 120 bp, synthetic construct
  source 1..120: mol_type = other DNA
ggttggatttttgatctgtcagcatgctatccctgcagaggctgggaaaagtcatatgtactgctgggaaggcaggttaatgtcaggaggaccatggagatgctaagagcagctcacact

SEQ ID NO: 33695 - DNA, 120 bp, synthetic construct
  source 1..120: mol_type = other DNA
gctgtgtttacgttcagttctcacaacatacctgcactgtaggcatcacagagcttgcttcttacaagccagaactgatgctggaagaggttccctgacttcactatgactcctgctgtc

SEQ ID NO: 33696 - DNA, 120 bp, synthetic construct
  source 1..120: mol_type = other DNA
gacttgacggccccctccatctcgtggagcttgctccggagctccttgttctgccgctcgagctgctgccgggcactctcattcttctgggccgtgctgcgctctgtggccagctcgttg

SEQ ID NO: 33697 - DNA, 120 bp, synthetic construct; identical to SEQ ID NO: 9873
  source 1..120: mol_type = other DNA

SEQ ID NO: 33698 - DNA, 120 bp, synthetic construct
  source 1..120: mol_type = other DNA
ttgaagcaggagaatcccttgaacttgggaggcagaggttgcagtgagccaagattgcgccactgcactccagcctgggccacagagagaccctgtctccaaaaaaaagaggtgcttcca

SEQ ID NO: 33699 - DNA, 120 bp, synthetic construct
  source 1..120: mol_type = other DNA
gtccctagtgcccaccatggaactagtgctcagtgacatcaccaagggctcactggataaggtcagagcttcagctaggggaaaacgcaatgaaagagcatcccaaggcccggactccag

SEQ ID NO: 33700 - DNA, 120 bp, synthetic construct; identical to SEQ ID NO: 9874
  source 1..120: mol_type = other DNA

SEQ ID NO: 33701 - DNA, 120 bp, synthetic construct
  source 1..120: mol_type = other DNA
cgcttctcgtcctggagtgcgttcctgggggaagggcggccatggtgggggcctctaccctcccccgccttaaaagatgccccctccttggagtcatgcctcaggggtattgccctcatc

SEQ ID NO: 33702 - DNA, 120 bp, synthetic construct
  source 1..120: mol_type = other DNA
gggaccagcacactcctccctgactcttcctggcctccccttctccccacacagctacttattgggaatgaatgaaagcagccacacccccaaacaggcatgaaagcgctgacggaaaac

SEQ ID NO: 33703 - DNA, 120 bp, synthetic construct
  source 1..120: mol_type = other DNA
aggtaggaggatcacctaaggtcaggagttcaagactagcctggccaacatggtgaaaccccacctctactaaaaatataaaaattagccaggcatggtggtacacacctgtagtctcag

SEQ ID NO: 33704 - DNA, 120 bp, synthetic construct
  source 1..120: mol_type = other DNA
tttaaaaaataaaatgggggtcgaggatgctgcctgtccccccatcctctgcttcagagccctcttcctccattcagtttcctaccttcccgacaggctactggccagctcctctgccag

SEQ ID NO: 33705 - DNA, 120 bp, synthetic construct; identical to SEQ ID NO: 9875
  source 1..120: mol_type = other DNA

SEQ ID NO: 33706 - DNA, 120 bp, synthetic construct
  source 1..120: mol_type = other DNA
gaggctttacctcttgtagctgcatgaggtctgcttccaagctcttggctttcttctcattctctttggctgtggcaaagatctcatctctggaggcacgggcatcttccagctctcttt

SEQ ID NO: 33707 - DNA, 120 bp, synthetic construct
  source 1..120: mol_type = other DNA
agttcagctttgcacacccaccccttggattttctgcagttgaccacaaagaagttcccattgcacgagcatggctctcagttccaggtggctggtggtgcgctgggagcaccattctgg

SEQ ID NO: 33708 - DNA, 120 bp, synthetic construct
  source 1..120: mol_type = other DNA
ccagaaaaaccccagctgaacccacaccaatggcaggtgcaggcttgcttcctggagcccgctctgctgacttcggtggcctgaggggaactgtgccctccctccacccatgccccaagc

SEQ ID NO: 33709 - DNA, 120 bp, synthetic construct; identical to SEQ ID NO: 9876
  source 1..120: mol_type = other DNA

SEQ ID NO: 33710 - DNA, 120 bp, synthetic construct
  source 1..120: mol_type = other DNA
ccagcactttgggaggccaacaggagaatggatcacttgaggccaggagttcaagaccagcctggccaacatggtgaaaccttgtctccactgaaaaaaaaaaaaaaattagctaggtat

SEQ ID NO: 33711 - DNA, 120 bp, synthetic construct
  source 1..120: mol_type = other DNA
aaaaaaataaagaaaacgaagtttccacaccaaccatgagagtggtgataggaatgaaaaaggccacccgacctccctctgctggcctccccggcagcacgcacctgtctctgcagttgc

SEQ ID NO: 33712 - DNA, 120 bp, synthetic construct
  source 1..120: mol_type = other DNA
tccagctcttccagctgcgtcttcatctcctccatctgggtctccagggcccgcttggacttctccagctcatggacctgccggcagagcgggcagccccattctatgaggctcaacttc

SEQ ID NO: 33713 - DNA, 120 bp, synthetic construct; identical to SEQ ID NO: 9877
  source 1..120: mol_type = other DNA

SEQ ID NO: 33714 - DNA, 120 bp, synthetic construct
  source 1..120: mol_type = other DNA
gtcttccatttcggctttgagcattttgttggtccgctcgagttcctctttggcttccaaggcctcttcaagggcccgagccagggacagggccttggtttccttctccctggcttctgc

SEQ ID NO: 33715 - DNA, 120 bp, synthetic construct
  source 1..120: mol_type = other DNA
taaataccgggggaagccctgtgtcctgctgaatgtattgaggtgcaggtgtaagcagtgtaggttagctatgggagtaatttatataatcatctggcgttctgacttctacatcaacct

SEQ ID NO: 33716 - DNA, 120 bp, synthetic construct
  source 1..120: mol_type = other DNA
gcaacctccgcctcgtgggttcaagcgattctcctgcctcagcctccagagtagttgggattacaggtgcccaccaccacacctggctaatttttgtattttaagtagagatgtggtttt

SEQ ID NO: 33717 - DNA, 120 bp, synthetic construct; identical to SEQ ID NO: 9878
  source 1..120: mol_type = other DNA

SEQ ID NO: 33718 - DNA, 120 bp, synthetic construct
  source 1..120: mol_type = other DNA
agagaacattccatgctcacgttaatctcatcttcagagagaacagagcagattataaattgtaacatccaaaagccaaacttccagtattcagcaaagacagggacctctaaatggcac

SEQ ID NO: 33719 - DNA, 120 bp, synthetic construct
  source 1..120: mol_type = other DNA
tcaaccagataacgaagcattgaagatgagctgacagcccagaggagaggtagctgatgggaagaggagaaactgggatgttatctagaatcctgacactaggaggtcagtcagggaggg

SEQ ID NO: 33720 - DNA, 120 bp, synthetic construct
  source 1..120: mol_type = other DNA
actgcaacctccaccccaccctgggttcaagcgattctcctgcctcagcttccagagtagcagggattacaggcgtgcgccaccacgcccggctaattttggtatttttagtagagacaa

SEQ ID NO: 33721 - DNA, 120 bp, synthetic construct; identical to SEQ ID NO: 9879
  source 1..120: mol_type = other DNA

SEQ ID NO: 33722 - DNA, 120 bp, synthetic construct
  source 1..120: mol_type = other DNA
caatgttgaggtgtggaaggggaaatgtactgacatctgtaatttgctctgaaatgtacccaagagataaggcatgatagatagaattagtctttataaataaatatgtgggccgggcat

SEQ ID NO: 33723 - DNA, 120 bp, synthetic construct
  source 1..120: mol_type = other DNA
tggacaacatggcaaaaccccatctctactaaaaatacaaaaattagccagacatagtggtgtgctcctataatcccggctacatgaaaggctgaagcaggagaatcgcttgaacccagt

SEQ ID NO: 33724 - DNA, 120 bp, synthetic construct
  source 1..120: mol_type = other DNA
ccaggtggtggccttaaaggtgttcaccgtacaattctgtcaactttgctgtgtacttggaattttacagaatgaaatcttagggaagagtggtattaaaagtatagaaactgaattact

SEQ ID NO: 33725 - DNA, 120 bp, synthetic construct; identical to SEQ ID NO: 9880
  source 1..120: mol_type = other DNA

SEQ ID NO: 33726 - DNA, 120 bp, synthetic construct
  source 1..120: mol_type = other DNA
ggagaggggatgcaggcacaggccagagccacgcgtcatactctgcagagctgattccccaacccagcgtccatggccagagtgggggacaccccacgccctctacctgatcaaatttcc

SEQ ID NO: 33727 - DNA, 120 bp, synthetic construct
  source 1..120: mol_type = other DNA
tctcctcgtactgctgggtgaggttctcgatctccttctggaacctcttcttcccctcttccagagcttccacggtgctggcaaagtcctgcagcttcttcttcgagtcggagagctaca

SEQ ID NO: 33728 - DNA, 120 bp, synthetic construct; identical to SEQ ID NO: 9881
  source 1..120: mol_type = other DNA

SEQ ID NO: 33729 - DNA, 120 bp, synthetic construct
  source 1..120: mol_type = other DNA
gccgggtttcttcttgaagcagctcctgcaaaagggatgcaaagaggtcccagggacctgccccgaggaaggccaccccccaggtcccctggatgatgtggcaggacactcacctgggtg

SEQ ID NO: 33730 - DNA, 120 bp, synthetic construct
  source 1..120: mol_type = other DNA
tagtcaaagcctctagaaggggatcctcgttgaaaggagccctttttactcaaaacacatgggctagtacttgaggtgttcactgattgagaaaatacccgtgaggtatgggactctgat

SEQ ID NO: 33731 - DNA, 120 bp, synthetic construct
  source 1..120: mol_type = other DNA
gccccaatggtattgactgggacctgatcccactaaatggatcctagatccctgccaaggttggtagagacaaagcagcaggtctgagagtccagacgaggtgctctggctggtccactc

SEQ ID NO: 33732 - DNA, 120 bp, synthetic construct
  source 1..120: mol_type = other DNA
aaaggtaaaaacgtcctctctgtattctctggcttttactccctagtgtctctgcataagtccctttgaggctgttagcctacccctccatctcttccattgacaaggaggatatgaatg

SEQ ID NO: 33733 - DNA, 120 bp, synthetic construct; identical to SEQ ID NO: 9882
  source 1..120: mol_type = other DNA

SEQ ID NO: 33734 - DNA, 120 bp, synthetic construct
  source 1..120: mol_type = other DNA
aaagaccatgtcattcagcagcttaaaacccctcaacagcttcacattgcccagagtaaggatcaacatacatgtaataggttctcaaaagccctacatcatctgggtacaagctccccc

SEQ ID NO: 33735 - DNA, 120 bp, synthetic construct
  source 1..120: mol_type = other DNA
cctttcgtggctcctcctcccccaggttaggccccctggttatttacacttgggcatcatgtgccttccctttgctgcatcatttgacattcatttgtgtgattattcatgtctttccct

SEQ ID NO: 33736 - DNA, 120 bp, synthetic construct; identical to SEQ ID NO: 9883
  source 1..120: mol_type = other DNA

SEQ ID NO: 33737 - DNA, 120 bp, synthetic construct
  source 1..120: mol_type = other DNA
ccagactggtctcaaacccctgacctcaggtgatccacccacctctgtctcccaaagtgctgggattacaggcatgagccaccgtgcctggccagaaggtttttttaatatttaattgaa

SEQ ID NO: 33738 - DNA, 120 bp, synthetic construct
  source 1..120: mol_type = other DNA
actgcccaccacaccaccgcgccacctcctcacctgcagcttgtggactttgtcattgagctccgcccgggcccgctccccatcgctgcacttggactgcagctcctgcacctgcgcctc

SEQ ID NO: 33739 - DNA, 120 bp, synthetic construct
  source 1..120: mol_type = other DNA
ctggcgaaggaagcagaggggagggataacagggaggctgtggccgggagaacgtttcaggccctgccctttcctccctcagagaggtccaggaaggcacacaacagggggcacacaatc

SEQ ID NO: 33740 - DNA, 120 bp, synthetic construct
  source 1..120: mol_type = other DNA
ggttcaaactattctcctgcctcagctgcccaagtagctgggattacaggcgcccgccaccatgcccgactaatttttgtatttttagtagagacgaggtttcaccatgttagccaggct

SEQ ID NO: 33741 - DNA, 120 bp, synthetic construct; identical to SEQ ID NO: 9884
  source 1..120: mol_type = other DNA

SEQ ID NO: 33742 - DNA, 120 bp, synthetic construct
  source 1..120: mol_type = other DNA
ccagcctgggcaatgtagtgagacccccatctctactaaaataaaacattagctgggtgtggggggcacacaccagcaatcccagctactcaggaggcggatggcaggcttgcttgagcc

SEQ ID NO: 33743 - DNA, 120 bp, synthetic construct
  source 1..120: mol_type = other DNA
ggtgaggagttcgagaccagcctggccaacatggcgaaactgcatctctactaaaaatggaaaaattagccgggcatggtggcgcacgcctgtagtcccagctactggggtggctaaggc

SEQ ID NO: 33744 - DNA, 120 bp, synthetic construct
  source 1..120: mol_type = other DNA
tatgtggtgactgtggtggtggtagttacacaatacacatttgttaaaattaatggagcagtaaaatggataaattttactacatatgcctcagtaatcctaaacttaaaaacaaaaaca

SEQ ID NO: 33745 - DNA, 120 bp, synthetic construct; identical to SEQ ID NO: 9885
  source 1..120: mol_type = other DNA

SEQ ID NO: 33746 - DNA, 120 bp, synthetic construct
  source 1..120: mol_type = other DNA
tttgagaccagcctggccaacatggtgaaaccccgtctctactaaaaatataaaaattagccgggcatggtggcagtcacctgtaatcccagctgctgaggaggctgaagcaggagaatt

SEQ ID NO: 33747 - DNA, 120 bp, synthetic construct
  source 1..120: mol_type = other DNA
gtctcaaaaaaaaaagcgtgttgggcaaaagtaggacgcggtgaggggcttctttccaggttgtagagaaggggaaagagaagcgcaagtatcccgagaggacgagacccaccactcagt

SEQ ID NO: 33748 - DNA, 120 bp, synthetic construct
  source 1..120: mol_type = other DNA
taacaaagcagtgaagcggggaccctaggggacatgggctcccagaaaccttagcccagcctaagaccccagaactggggccaaaccgcacgagggcctggggagcccaggtaggagctg

SEQ ID NO: 33749 - DNA, 120 bp, synthetic construct; identical to SEQ ID NO: 9886
  source 1..120: mol_type = other DNA

SEQ ID NO: 33750 - DNA, 120 bp, synthetic construct
  source 1..120: mol_type = other DNA
atcttggctcactgcaacctttacctcctgggttcaagtgattttcatgtctcagcctcccaagtagctgggattacaggcgaccgccaccacgtccagctaatttttgtatttttagta

SEQ ID NO: 33751 - DNA, 120 bp, synthetic construct
  source 1..120: mol_type = other DNA
tttatgtatttttagtagagatggggtttcactatgttggtcaggctagtcttgaactcctgacttggtgatccgcctatctcagcctcccaaagtgctgggattataagcatgagccac

SEQ ID NO: 33752 - DNA, 120 bp, synthetic construct; identical to SEQ ID NO: 9887
  source 1..120: mol_type = other DNA

SEQ ID NO: 33753 - DNA, 120 bp, synthetic construct
  source 1..120: mol_type = other DNA
cagcctggccaacatggcaaaaccccatctctactaaaaaaaaaaaaaaaaaaaaaaattagccgggcatggtggtgtgtgcctgtagtcccagctacttgggaggctgaggcaggagaa

SEQ ID NO: 33754 - DNA, 120 bp, synthetic construct
  source 1..120: mol_type = other DNA
tttctgtagagcagtgcaacaacggaccaatacactagtgatagaaccaaatgcaaattccccaaaatttttaggcaatgctgcacccacttaatctagcagaaccaaaagcttccactg

SEQ ID NO: 33755 - DNA, 120 bp, synthetic construct
  source 1..120: mol_type = other DNA
ccaaaggagagaagagcacccaagattcagcattcggtactgctatttaccagctcccactcccatacaccgcaaagagttccaacaacgggagagtgatttgacctagtcattctcaaa

SEQ ID NO: 33756 - DNA, 120 bp, synthetic construct; identical to SEQ ID NO: 9888
  source 1..120: mol_type = other DNA

SEQ ID NO: 33757 - DNA, 120 bp, synthetic construct
  source 1..120: mol_type = other DNA
agtttcatttaaatctccccgaaagtgttgttacacctttgcttatccctgaagggcagtatattgataggccccacccatcctataggccttcagtcctgtagaggccagaaagtgggg

SEQ ID NO: 33758 - DNA, 120 bp, synthetic construct
  source 1..120: mol_type = other DNA
tttaatagtacacgtctcacagggtggttgtgaagattaattgacatactgtatgagaagcatttctattcattcttttttttttttctttttttgagatggcggctcactctgtcgccc

SEQ ID NO: 33759 - DNA, 120 bp, synthetic construct
  source 1..120: mol_type = other DNA
ctaattctttatatttttggtagagatggggtttcaccatgttggccaggctggtctcgaactcctgagctcaagtgatttgcccgccttgcctcccaaattgctgggattacagacatg

SEQ ID NO: 33760 - DNA, 120 bp, synthetic construct; identical to SEQ ID NO: 9889
  source 1..120: mol_type = other DNA

SEQ ID NO: 33761 - DNA, 120 bp, synthetic construct
  source 1..120: mol_type = other DNA
ctggtctcgaactcctgacctcaggtgatccacccagtttggcctcccaaagtgctgggattacaggcttgagccaccacgcctggcctacttttttaaaattttagtagaaacaaggtc

SEQ ID NO: 33762 - DNA, 120 bp, synthetic construct
  source 1..120: mol_type = other DNA
ttgtaaataaatataagctgctatcatcatcattagaatcttatgtaacttgttttttgtctttatgcagaccctgacctgtagtaatttgaggctgctgatgtcactcttatgtgtcat

SEQ ID NO: 33763 - DNA, 120 bp, synthetic construct
  source 1..120: mol_type = other DNA
gtctcttcatccagggccttcttcagcaccgtcacctcctgctccctcttggcccttggtgggaggaacacagtgaatggcagttgggtggagacagagggtcatctcagtgccgtgcaa

SEQ ID NO: 33764 - DNA, 120 bp, synthetic construct
  source 1..120: mol_type = other DNA
gtggagcatatcacctgcctaggacatctgtaatgactggcaaacaaatacacaaagtaatagaattgaaaggatgtctgtgaactgcaaaattttgcttaaatattaatgttggctctt

SEQ ID NO: 33765 - DNA, 120 bp, synthetic construct; identical to SEQ ID NO: 9890
  source 1..120: mol_type = other DNA

SEQ ID NO: 33766 - DNA, 120 bp, synthetic construct
  source 1..120: mol_type = other DNA
actcctgacctcaggtgatccacccgcctcagcctcccaaagtgctgggattacaggtgtgagccaccgcactcagcctggttttttgttttgtttgtttgtttttcttatcgagtcttg

SEQ ID NO: 33767 - DNA, 120 bp, synthetic construct
  source 1..120: mol_type = other DNA
accacgcccggctaatttttgtctttttagtagagacaggttttcatgatgttggccaggctggtctcgaactcctgacctcaggtgatctgtctgcttcagcctcccaaagtgctggga

SEQ ID NO: 33768 - DNA, 120 bp, synthetic construct; identical to SEQ ID NO: 9891
  source 1..120: mol_type = other DNA

SEQ ID NO: 33769 - DNA, 120 bp, synthetic construct
  source 1..120: mol_type = other DNA
taacacaaaagtgatacacacacatacttgggaattggagcttggggactgactgatacacacacagacaggaaggaatttctcaagaatgttaactggtgtgactaagggtgatttttt

SEQ ID NO: 33770 - DNA, 120 bp, synthetic construct
  source 1..120: mol_type = other DNA
tgcaacctctgcctcccagattcaagtgactctactgcctcagcctcctgagtagctgggatttacaggcatgcgccaccacgcccaggtaatttttggatttatagtagagacagggtt

SEQ ID NO: 33771 - DNA, 120 bp, synthetic construct; identical to SEQ ID NO: 9892
  source 1..120: mol_type = other DNA

SEQ ID NO: 33772 - DNA, 120 bp, synthetic construct
  source 1..120: mol_type = other DNA
ttcttccaatgtggccaagggaagccaaaagattgtacatccctggtatatactactcttctgatgagaaataagatgatgagggtcgggtgcagtggctcacacatgtaataccagcag

SEQ ID NO: 33773 - DNA, 120 bp, synthetic construct
  source 1..120: mol_type = other DNA
tgtaatcccagctactcaggaggctgaggcatgagaatcgcttaaatctcagaggtggaggttgcagtgagccaagatggcacaactgcactccagcctaggcaacaaagccagactgcc

SEQ ID NO: 33774 - DNA, 120 bp, synthetic construct
  source 1..120: mol_type = other DNA
tgtcccctcttctgcccccatcccattggtgcagtgggatagcaggatggtgggattgatgggcccctcacctgagctcctgctgagtggctgtgctgtccagtgtgtcttccagctctg

SEQ ID NO: 33775 - DNA, 120 bp, synthetic construct
  source 1..120: mol_type = other DNA
tcttcttcagggcattgttcttctgagcgatttcatcgtcaagccttccagggagagacccagcagaatgaacccccaggtcccttggtttcctctcttacaatgtggccaaaaactttt

SEQ ID NO: 33776 - DNA, 120 bp, synthetic construct; identical to SEQ ID NO: 9893
  source 1..120: mol_type = other DNA

SEQ ID NO: 33777 - DNA, 120 bp, synthetic construct
  source 1..120: mol_type = other DNA
ctggcaactgtctgttctttctgcatttgctcagtgactgagtacccgccccatgcacagcatttggccagccactgcttgcgggggatattcagactggggctctgcatctggtggagg

SEQ ID NO: 33778 - DNA, 120 bp, synthetic construct
  source 1..120: mol_type = other DNA
aatagttgggttggggtgagactgcagagggtggatgggctctgagggtgaggctaaggaaactggattttccctagtaagccagtgaagttaggtttttgttttgttgttattattgtt

SEQ ID NO: 33779 - DNA, 120 bp, synthetic construct
  source 1..120: mol_type = other DNA
ctcaagtgatcctcccatctcagcctcctgagtagctgggactacaggcacacaccaccatgcctggctcattttttaactttttgtagggacagggtcttgctatgttgcccatgttgg

SEQ ID NO: 33780 - DNA, 120 bp, synthetic construct; identical to SEQ ID NO: 9894
  source 1..120: mol_type = other DNA

SEQ ID NO: 33781 - DNA, 120 bp, synthetic construct
  source 1..120: mol_type = other DNA
gtctgcaaaggtattgcttgaaaagaacttagcaccgagtgagcaggtaaataatcattcatagtggctgctgcagtattagcattagtgtaaatccagctaagagccaggaagagggaa

SEQ ID NO: 33782 - DNA, 120 bp, synthetic construct
  source 1..120: mol_type = other DNA
caaaggaggagattggtgttcacaaaaaagagggcccttagagggaggggctggggaaaggaaggtcattcccgccttagacaggggtgtttgagatgacggtggaaattgactcattgg

SEQ ID NO: 33783 - DNA, 120 bp, synthetic construct; identical to SEQ ID NO: 9895
  source 1..120: mol_type = other DNA

SEQ ID NO: 33784 - DNA, 120 bp, synthetic construct
  source 1..120: mol_type = other DNA
agggccgcctgcagctcctcctccttcttggccagctgcatcttgagctctgcgatctgcgcctggaggtcagcgatctgctcgtggaagtcgctggcatcaccctccagcttccgtttc

SEQ ID NO: 33785 - DNA, 120 bp, synthetic construct
  source 1..120: mol_type = other DNA
cattttacccggaggagatgaacacatcccccaatcagtaaccatcatagtcacggtctggaccattatctcccgatgaacagcaccttatattgtcataatattattattagttgagat

SEQ ID NO: 33786 - DNA, 120 bp, synthetic construct
  source 1..120: mol_type = other DNA
caattctcctgcctcagcctcccgagtagctgggattacaggcgcccgccaccacgcctggctaatttttgtattttgagacagggtttcaccatgttggccaggctggtctccaactct

SEQ ID NO: 33787 - DNA, 120 bp, synthetic construct; identical to SEQ ID NO: 9896
  source 1..120: mol_type = other DNA

SEQ ID NO: 33788 - DNA, 120 bp, synthetic construct
  source 1..120: mol_type = other DNA
atctctacaaaataaaaaataaaaaaaaattagctgggtgtggtgatgcacgcctgtagtctcagctgctcaggaggctgaggcaggaggatcactggagcttaggagtttcgggctgca

SEQ ID NO: 33789 - DNA, 120 bp, synthetic construct
  source 1..120: mol_type = other DNA
tgaaatcatagattcatgcttgtttttcagcttggtaagattcttggccttttcttcctcttctgcaagatttgtcgttaagtcactaatcctctcctcaaggagttttcgttccttttt

SEQ ID NO: 33790 - DNA, 120 bp, synthetic construct
  source 1..120: mol_type = other DNA
agttttaaatggtaaagagaagtcccataacaatttccaaaaactggccatttctcatctcgtgccagtttgtccctcatattgtatggtcagctaaaggtaccctccttccattcctgc

SEQ ID NO: 33791 - DNA, 120 bp, synthetic construct; identical to SEQ ID NO: 9897
  source 1..120: mol_type = other DNA

SEQ ID NO: 33792 - DNA, 120 bp, synthetic construct
  source 1..120: mol_type = other DNA
tcagcctcccgagtagctgggactacaggcgcccgccaacacacccaactaattttttgtatttttagtagagatggggttttaccgtgttggccaggctggtctccaactcctgacctc

SEQ ID NO: 33793 - DNA, 120 bp, synthetic construct
  source 1..120: mol_type = other DNA
aatatggtgaacgtttccttcagagccctgatcaccatggtaaatgacgattatttgccatctcactacagtataaaccccacaagggaagggtcctccttcaccatgcatacctgcatc

SEQ ID NO: 33794 - DNA, 120 bp, synthetic construct
  source 1..120: mol_type = other DNA
ctactgactacggtgaccagcttgtcctggttttctaagggcttttctgctttgagaactgaaagtcccaaatccccaaaatctccctgatcctggtaagcctgttgtttttaatgcaga

SEQ ID NO: 33795 - DNA, 120 bp, synthetic construct
  source 1..120: mol_type = other DNA
ccacacctggctaatctttgtatttttagtagagatggagttttaccctgttggccaggctagtctcaaactcctggcctcaagtgatccacataccttggcctcccaaagtgctcggat

SEQ ID NO: 33796 - DNA, 120 bp, synthetic construct; identical to SEQ ID NO: 9898
  source 1..120: mol_type = other DNA

SEQ ID NO: 33797 - DNA, 120 bp, synthetic construct
  source 1..120: mol_type = other DNA
aggtgggtggatcacttgaggtcaggaattcaagaccagcctggccaacatggtgaaaccccgtctctactaaaaatacaaaaaaaattagccaggcatggtggtgggctcctgtaatcc

SEQ ID NO: 33798 - DNA, 120 bp, synthetic construct
  source 1..120: mol_type = other DNA
aaaaaaaaaaaataaagacctgggtaagctgctctgcttcatggaacctcaacctcctcatctataaaatgagcacagtaggtaccatggtggttttaaaatctatccacaagttctttg

SEQ ID NO: 33799 - DNA, 120 bp, synthetic construct; identical to SEQ ID NO: 9899
  source 1..120: mol_type = other DNA

SEQ ID NO: 33800 - DNA, 120 bp, synthetic construct
  source 1..120: mol_type = other DNA
ctcagccaacaccttgactgcaacctcaggccggaccctcagccagaaccactcacctaagccactctcaaattcctgactatgcaatactttttatttttagctgctgagtttggcatg

SEQ ID NO: 33801 - DNA, 120 bp, synthetic construct
  source 1..120: mol_type = other DNA
ttttgttatgtagcaatagctaacaaatacaattatcctccattcaggcttgctgttaggagaaaaggggttagcacatgcaaggcagggcaatagaacagagtgggctcactgtgttcc

SEQ ID NO: 33802 - DNA, 120 bp, synthetic construct
  source 1..120: mol_type = other DNA
ggtcaagtgatttgctacccaccacgggctgcccctgtgacaccttaccagcatctgctgggccatcttcttcctttcagcctgtagctgctggcccctgtcttcctcctcctccaggcg

SEQ ID NO: 33803 - DNA, 120 bp, synthetic construct
  source 1..120: mol_type = other DNA
cttctcctcggtcagctgcacgcaggtggtggggaggaggcgggtgagccccacggggccaagtcctgttccccagcaaccccagccatgcatccatacaggtacctgcgagtgcttctg

SEQ ID NO: 33804 - DNA, 120 bp, synthetic construct; identical to SEQ ID NO: 9900
  source 1..120: mol_type = other DNA

SEQ ID NO: 33805 - DNA, 120 bp, synthetic construct
  source 1..120: mol_type = other DNA
attagtcaccccaaaatatcaacagtggcaagactgaggagctctaaatcagagcaccagaaaaggtacaaagtgaaaggaaaaagtctcatcttccccactttagaaccatcccaacag

SEQ ID NO: 33806 - DNA, 120 bp, synthetic construct
  source 1..120: mol_type = other DNA
aagggagaaaaaaaatctttcatatcccacccacctccctatcaaagtcattattaacattgtttacatttccttcctggctctttttctatgtttaaaaaatagacttaagaccatgct

SEQ ID NO: 33807 - DNA, 120 bp, synthetic construct
  source 1..120: mol_type = other DNA
gggaccagcctgggcaacatcatgagaccccatctctacaaaaacaagtaaccaggcatggtggtgtgtgcctgtagtcccagctagtgaggggtctgaggcaggaagatcgcttgaacc

SEQ ID NO: 33808 - DNA, 120 bp, synthetic construct; identical to SEQ ID NO: 9901
  source 1..120: mol_type = other DNA

SEQ ID NO: 33809 - DNA, 120 bp, synthetic construct
  source 1..120: mol_type = other DNA
ttagcagacctattcagtagccaaagccatcattttaatagctgaaaacattccattgatagatgaaccattattgaactcatcattcagctaggactggacactgaaattctgctattg

SEQ ID NO: 33810 - DNA, 120 bp, synthetic construct
  source 1..120: mol_type = other DNA
gcctcctcggttcaagtgattctcctgcctcaatctcctgagtagctgggattacaggtgcccaccaccacacctggctaatttttgtattttcagtagagatagggtttcgccatgttg

SEQ ID NO: 33811 - DNA, 120 bp, synthetic construct
  source 1..120: mol_type = other DNA
caccacacctggctaagacgattttcttaggatagtttttcagaagttggttcagtggggacgaacatttccaaaaagcagcatctgctgtccttccctgggctgcctcctaactctttg

SEQ ID NO: 33812 - DNA, 120 bp, synthetic construct; identical to SEQ ID NO: 9902
  source 1..120: mol_type = other DNA

SEQ ID NO: 33813 - DNA, 120 bp, synthetic construct
  source 1..120: mol_type = other DNA
ataaggagaagcctagtctattgcaacagagcatgtctttgtgccatggggacaatgcaaccagtgccactacaggaaccagttgagtcctctggaggccctgactctgccagaaataaa

SEQ ID NO: 33814 - DNA, 120 bp, synthetic construct; identical to SEQ ID NO: 9903
  source 1..120: mol_type = other DNA

SEQ ID NO: 33815 - DNA, 120 bp, synthetic construct
  source 1..120: mol_type = other DNA
caggcgtttgccaccacgcccagctaatttttgtacatttagtagagacagggtttcaccatcttggccaggatggtcttgatttcttgactttgtgatccacccgcctcggcctcccaa

SEQ ID NO: 33816 - DNA, 120 bp, synthetic construct
  source 1..120: mol_type = other DNA
tcactgcaacctctgtctcctgagttcaagagattctcctgccttagcctcctgagtatctgggattacaggtgcctgccaccatacccagctaatttttgtattttaagtagagacagg

SEQ ID NO: 33817 - DNA, 120 bp, synthetic construct; identical to SEQ ID NO: 9904
  source 1..120: mol_type = other DNA

SEQ ID NO: 33818 - DNA, 120 bp, synthetic construct
  source 1..120: mol_type = other DNA
ccaaatgtgaaggctccagagtgaagaagcagggctgggggcccctgggaagggggctggggcagagcactcactttggtgaaaagcctccaccactgccagttccgcagcttgaggtag

SEQ ID NO: 33819 - DNA, 120 bp, synthetic construct; identical to SEQ ID NO: 9905
  source 1..120: mol_type = other DNA

SEQ ID NO: 33820 - DNA, 120 bp, synthetic construct
  source 1..120: mol_type = other DNA
gctcccgtactccccagctgcactagctgtttcttttttctttctttcttttttttttttttttttttttgagatagagtttcgctcttgttgcccaggctggagtgcggtggcacgatc

SEQ ID NO: 33821 - DNA, 120 bp, synthetic construct
  source 1..120: mol_type = other DNA
atggggtttcccatgttggccaggtgggtctcaaactcctgacctcaggtgatccacccaccttggcctcccaaagtgctgggattacaggtaggagccaccatgcccagcctacaccag

SEQ ID NO: 33822 - DNA, 120 bp, synthetic construct
  source 1..120: mol_type = other DNA
taaatgatcctcctgcctcagcctcccaagtagttgggactacgggcacatgctaccatgcccagctaatttttaaagttttttttttttggtagagataggggtctcgccatgttgccc

SEQ ID NO: 33823 - DNA, 120 bp, synthetic construct; identical to SEQ ID NO: 9906
  source 1..120: mol_type = other DNA

SEQ ID NO: 33824 - DNA, 120 bp, synthetic construct
  source 1..120: mol_type = other DNA
caagttaggtctgttgcgggagggccaagagctcccaaagctggccttgaccatcttgggtccatgtgtcaatgaatgaacctgacacatcagggtcctactggtgagggtgtggtctct

SEQ ID NO: 33825 - DNA, 120 bp, synthetic construct
  source 1..120: mol_type = other DNA
tgggacatcacaccctccaaaaccctgccttataaatcccactgggacacggggatctagacaccgtcaagtcctctttcctcaatggtttatccaattctaacatgtctaggctgggcg

SEQ ID NO: 33826 - DNA, 120 bp, synthetic construct
  source 1..120: mol_type = other DNA
aaaattaggccagtgtggtggtgggcgcctctaattccagccactcgggaggctcagacacgagaattgcttgagtccaagaggcagaggttgcagtgagttgagactgcgccactgcac

SEQ ID NO: 33827 - DNA, 120 bp, synthetic construct; identical to SEQ ID NO: 9907
  source 1..120: mol_type = other DNA

SEQ ID NO: 33828 - DNA, 120 bp, synthetic construct
  source 1..120: mol_type = other DNA
aaagtagaagcatttcttccccttcaagaaaaggctgtcattcagtcaatgatgcatcttaaacaggtggcctcttagaatcagggaatcagaacagaaaggcccctgtttgtgattcgc

SEQ ID NO: 33829 - DNA, 120 bp, synthetic construct
  source 1..120: mol_type = other DNA
ccaggacgccagttcggaagaagattttgctctgccctatcctgtataagttggggtcaagttccagggctttgatctgcaaaaggaaggaaaggaagagctcctgatttccactgtgcc

SEQ ID NO: 33830 - DNA, 120 bp, synthetic construct
  source 1..120: mol_type = other DNA
cccgtccatgaagcctttggggatggcattcgccgccaggatctcgtagcttgaaacacagagcagaagtcaccccgggtacctccagcatccattcctccacccagtcccgctcacccc

SEQ ID NO: 33831 - DNA, 120 bp, synthetic construct
  source 1..120: mol_type = other DNA
gctccagcaccaggaacgcatccagcttgccggactgcaaaggtcaaagagggcagtggatccctggggccagaaaccatggcgcagcaaagccccaaacctcctacctggatgacccac

SEQ ID NO: 33832 - DNA, 120 bp, synthetic construct; identical to SEQ ID NO: 9908
  source 1..120: mol_type = other DNA

SEQ ID NO: 33833 - DNA, 120 bp, synthetic construct
  source 1..120: mol_type = other DNA
cctggtctctctctctggtcttgcctctcccctcaatccctttgtcctttttattttttgagatagggtcccattctgtcagccaggctggagtccagtggtgcgatcatggctcactgc

SEQ ID NO: 33834 - DNA, 120 bp, synthetic construct
  source 1..120: mol_type = other DNA
ctggaaaatttttaaaaatgtttttgtagatatagggtcttgctatgttgcccaggctagccttgaacacctggtctcaagtgatcctcccacctcaacctcccaaagtgttgggattat

SEQ ID NO: 33835 - DNA, 120 bp, synthetic construct
  source 1..120: mol_type = other DNA
gaaagaacacaaggagcaccacgatctagcccctgcctacccattcagcctcaatcctacctcacaccatctgattcctacctcatgccatcacacatttgcaacatgaaatgacctatt

SEQ ID NO: 33836 - DNA, 120 bp, synthetic construct; identical to SEQ ID NO: 9909
  source 1..120: mol_type = other DNA

SEQ ID NO: 33837 - DNA, 120 bp, synthetic construct
  source 1..120: mol_type = other DNA
tgaggctgtgggaggagccctggctctttggtgttctcctaactgaccacattccatcaccatcatcagctgtatgtttacctctccccgtgtctcccataacctcagcactactggcat

SEQ ID NO: 33838 - DNA, 120 bp, synthetic construct
  source 1..120: mol_type = other DNA
aaaaatgtctgtagcatgtccatatagaggacacaatcgccccaagctgaagatgcctgcaccagattatgagaaacccacagggaagggctacaatttttctaacactgctccccagca

SEQ ID NO: 33839 - DNA, 120 bp, synthetic construct; identical to SEQ ID NO: 9910
  source 1..120: mol_type = other DNA

SEQ ID NO: 33840 - DNA, 120 bp, synthetic construct
  source 1..120: mol_type = other DNA
ttgggcgtggtgttgcgtagcgtggtcatcagcttgcccagctgctccttgtacagctgccccactgtgcggaacatgcccttcttggtcttggaggcgctgggcagcgagctctccgtc

SEQ ID NO: 33841 - DNA, 120 bp, synthetic construct
  source 1..120: mol_type = other DNA
caacctgcccactccaatctttccttccatcaccaacgcctccttcggcagtcagggtttccaagtattgtctattggggaaatcctgagagcacctgagtggcagaaagaacaaattcc

SEQ ID NO: 33842 - DNA, 120 bp, synthetic construct
  source 1..120: mol_type = other DNA
ctgtgcctcagtctccctttctacaaaagggaggtaataataccgtctaccttctagggcaggggtaaaaaaaaataaggcacagaaggcacttattccctgccagcctccaatctttca

SEQ ID NO: 33843 - DNA, 120 bp, synthetic construct; identical to SEQ ID NO: 9911
  source 1..120: mol_type = other DNA

SEQ ID NO: 33844 - DNA, 120 bp, synthetic construct
  source 1..120: mol_type = other DNA
gggtaaccatgtaggtatccacggaagaaatattctgaggcagaagatacagcacacactccgagatagcctggcacatcagtaagtgctcaacaaaaagtaggtattattattattatt

SEQ ID NO: 33845 - DNA, 120 bp, synthetic construct
  source 1..120: mol_type = other DNA
ggttccagcaattctcccgcctcagcctcccagtagctgggattacaggcatgcgccaccacgcccggctcattttttttatatttttagtagagacagagtttctccatgttggtcagg

SEQ ID NO: 33846 - DNA, 120 bp, synthetic construct
  source 1..120: mol_type = other DNA
cacctccaaggttctttttctaccagcccagcaggtcctgcacatgccaagcccaacccacaggccatggatggcaccatttcttcaccttctactcagattctgtgtaacaatcttttt

SEQ ID NO: 33847 - DNA, 120 bp, synthetic construct; identical to SEQ ID NO: 9912
  source 1..120: mol_type = other DNA

SEQ ID NO: 33848 - DNA, 120 bp, synthetic construct
  source 1..120: mol_type = other DNA
agagatggggtttcgccacgttggccagactggtctcgaactcttgacctcaactgatcctcctgcctcagcctcccaaagtgctgagattacaggtgtgagccaccatgcgcagcctca

SEQ ID NO: 33849 - DNA, 120 bp, synthetic construct
  source 1..120: mol_type = other DNA
ttgttccctaggcccagagcctggcatatggttagggcacagctggcccctcctggagccctttttttagcatgcttaaaacaaggggagaccagtcctgtaagccccaggcccatgggc

SEQ ID NO: 33850 - DNA, 120 bp, synthetic construct
  source 1..120: mol_type = other DNA
gggagccggagtgtggtccctagaccagcagcatcacctgggatgaatgttttcaggcccgccccatccctggccccagacctgcagaattagatcttagggtaggcccagccatctggg

SEQ ID NO: 33851 - DNA, 120 bp, synthetic construct
  source 1..120: mol_type = other DNA
atgggggaaccccgtctctactaaaaatacaaaaattagccaggtatggtggtgtgtgcctgtaatgctagctacttgggaggctgaggcaggaaaatcactggaacccagaaggtggag

SEQ ID NO: 33852 - DNA, 120 bp, synthetic construct; identical to SEQ ID NO: 9913
  source 1..120: mol_type = other DNA

SEQ ID NO: 33853 - DNA, 120 bp, synthetic construct
  source 1..120: mol_type = other DNA
atgctgtttctcctctattgcctgagccctgacctcaggacctcaatcccctcgggacatgtaggattgaggggctcagggacccccactcaggaagaaattgtttcaacgagacatcac

SEQ ID NO: 33854 - DNA, 120 bp, synthetic construct
  source 1..120: mol_type = other DNA
cgagcagagaaggccttaccgtccttccacaggtcggccacaaacttgtcggaggaggcattgagcagggaagtcacgttgtcattcagcgggtccatattcttggtcagccaggcactc

SEQ ID NO: 33855 - DNA, 120 bp, synthetic construct
  source 1..120: mol_type = other DNA
agaggaaatgacgtttatgaccaccatgatgggactccacaaacaccagtgaagagaccaacagcccagggacctgtgcccacgtagtaggacatcagccagtgatagccattgctggga

SEQ ID NO: 33856 - DNA, 120 bp, synthetic construct; identical to SEQ ID NO: 9914
  source 1..120: mol_type = other DNA

SEQ ID NO: 33857 - DNA, 120 bp, synthetic construct
  source 1..120: mol_type = other DNA
gaccaacatggtgaaaccccatgtctactaaaaatacaaaaaaaaaaaaaaaattagccaggcatggtggtgcacacctgtaatgccagctactcgggaggctgaggcaggagaatcgct

SEQ ID NO: 33858 - DNA, 120 bp, synthetic construct
  source 1..120: mol_type = other DNA
ctattttccactctctaatgagcataatttgtaactcagagatcctgatatatggatatacagaaaaaggacatataggctttttacattcctgactcaaacaatgacaatgcccaaagc

SEQ ID NO: 33859 - DNA, 120 bp, synthetic construct
  source 1..120: mol_type = other DNA
taataataaaaaaaatccactgatgaagtagggaaaagaaaagtgttgtctctatatgcttaaaggaacatatacccccttgaatataggctaggagttgggaaacttttggtgaaggcc

SEQ ID NO: 33860 - DNA, 120 bp, synthetic construct; identical to SEQ ID NO: 9915
  source 1..120: mol_type = other DNA

SEQ ID NO: 33861 - DNA, 120 bp, synthetic construct
  source 1..120: mol_type = other DNA
cttggtgctggggttacaggcgtgagccaccacacccagccaagtcatacagtctttgtcgcagctactcaactctagcactgtagtatacaaaagcagccagccatagacattatgcat

SEQ ID NO: 33862 - DNA, 120 bp, synthetic construct
  source 1..120: mol_type = other DNA
cctggtagagagcattgtttgtgcccatgatgcagtggaggtactgaggagtcaatagaatactacaattctgcaagccagactaagctatgtcctttgtacattatccaggactcttga

SEQ ID NO: 33863 - DNA, 120 bp, synthetic construct; identical to SEQ ID NO: 9916
  source 1..120: mol_type = other DNA

SEQ ID NO: 33864 - DNA, 120 bp, synthetic construct
  source 1..120: mol_type = other DNA
cccatatctatacataatttaaaaatttagctgggcggccaggcacggtggctcatgcctgtaatcctagcaccttgggaggccgaggcgggtggatcacctgaggtcaggagtttgaga

SEQ ID NO: 33865 - DNA, 120 bp, synthetic construct
  source 1..120: mol_type = other DNA
ccggagggagaggttgcagttagcagagatcacgccattgcactccagcctggatgacaagagcaaaattccatctcaaaaaggaaaaaagattttagctgggcatggtggtgtacacct

SEQ ID NO: 33866 - DNA, 120 bp, synthetic construct
  source 1..120: mol_type = other DNA
ctccaacaaaaacagaaagaaataactgtctggacgtcacggttggaaaacatgagagtggctacagctgatgccttacagatgcgtagacaaattacgaataggacttggttgggattc

SEQ ID NO: 33867 - DNA, 120 bp, synthetic construct
  source 1..120: mol_type = other DNA
tggtaccttcccagcataatggatgatggagaactcagtcttgtccttgagctgcttgggcttctggaacttggggtggctgccctgctccgtgcacagcttctccacgaaagacttgtc

SEQ ID NO: 33868 - DNA, 120 bp, synthetic construct; identical to SEQ ID NO: 9917
  source 1..120: mol_type = other DNA

SEQ ID NO: 33869 - DNA, 120 bp, synthetic construct
  source 1..120: mol_type = other DNA
tgagacagagttttgccttgtcgcccaggcagacggtgcagtggcgcgatctcgactcactgcaagctccgcttcctgggttcacgccattctcctgcctcagcctcccgagtagctggg

SEQ ID NO: 33870 - DNA, 120 bp, synthetic construct
  source 1..120: mol_type = other DNA
cccaaagtgctgggattacaggcatgagccaccgcgcccggccgagttcataattcttgcaaatgaatttgttgcttgacttgaattcacctagggttcctgttagaaaagttttttttg

SEQ ID NO: 33871 - DNA, 120 bp, synthetic construct
  source 1..120: mol_type = other DNA
cacaggcgtgcaccaccaggcccggctaattagtagaaaccctgtctctactgaaaatacaaaagttaggtgggcgtggtggtgcacgcctgtagtctcagccacttgggaggctgaggc

SEQ ID NO: 33872 - DNA, 120 bp, synthetic construct; identical to SEQ ID NO: 9918
  source 1..120: mol_type = other DNA

SEQ ID NO: 33873 - DNA, 120 bp, synthetic construct
  source 1..120: mol_type = other DNA
cacacacgtgtacaaggtgtgacggagccccgcacgcccacgtgcccctcaccggtcgctcgatgagctcgatgcagggctgtaggtccagcccaaagtcgatgaagttccactcgatgc

SEQ ID NO: 33874 - DNA, 120 bp, synthetic construct
  source 1..120: mol_type = other DNA
tgggggcggggcgtgagcatcttggtatgaagtcagaagacaaggagccccacagaagctccacccgacagcgcccccatggcccgcccacatcctgttctgccatcccagcacccagac

SEQ ID NO: 33875 - DNA, 120 bp, synthetic construct; identical to SEQ ID NO: 9919
  source 1..120: mol_type = other DNA

SEQ ID NO: 33876 - DNA, 120 bp, synthetic construct
  source 1..120: mol_type = other DNA
cctctctccactaaaaatacaaaaattggccaagcacagtggctcatacctgtaatcccagcactttgggaggccgaggctggtggatcatttgagatcaggagtttgagactagcctgg

SEQ ID NO: 33877 - DNA, 120 bp, synthetic construct
  source 1..120: mol_type = other DNA
ggttgcggtgagccaagattgcactactgcactccggcctgggcaacagagcgagactctgtctaaaaaaaaaaaaaaaattagctgggcacagtggtacactcctgtagtcccagctac

SEQ ID NO: 33878 - DNA, 120 bp, synthetic construct
  source 1..120: mol_type = other DNA
aacaagacaagacaaaaaaaaaaccttccctttctctgagaactttcttcaaacccatgggtaaaggatccaatatccatgtttctactacatgaggtattgcaagctcctgcaaacagt

SEQ ID NO: 33879 - DNA, 120 bp, synthetic construct
  source 1..120: mol_type = other DNA
ctgttagaaaagagatatgtgctttttttttttttttttttttaccaggattactgagaggcagtctggagctgtggcagccatcttgcccccgtgaggggagagcctgcttgagaatgg

SEQ ID NO: 33880 - DNA, 120 bp, synthetic construct; identical to SEQ ID NO: 9920
  source 1..120: mol_type = other DNA

SEQ ID NO: 33881 - DNA, 120 bp, synthetic construct
  source 1..120: mol_type = other DNA
ttcacgcgggtgagtatccagcggaaaaggcgctcatatgttgccttggccaaagcctctacagcaaagtcagcctgcagagggcaaccaggggaacccggttattctcaatgggctcca

SEQ ID NO: 33882 - DNA, 120 bp, synthetic construct
  source 1..120: mol_type = other DNA
aagaccagcctgaccaacaaggcaaaaacccttctctactaaaaatacaaaaattagccaggcgttgtggtgcatgcctgtagtcccagctgcttgggggactgaggcaggagaatcgtt

SEQ ID NO: 33883 - DNA, 120 bp, synthetic construct; identical to SEQ ID NO: 9921
  source 1..120: mol_type = other DNA

SEQ ID NO: 33884 - DNA, 120 bp, synthetic construct
  source 1..120: mol_type = other DNA
tagatgggcagatgaatggatggatggatggatggatgaacagacagatgaatgagtgggtagaaagatggatggatggacagatgcagaggcagaccatgggtgaatggattaatgaat

SEQ ID NO: 33885 - DNA, 120 bp, synthetic construct
  source 1..120: mol_type = other DNA
attacctgttcttttgtctgagctttctgtaccacatctcgcccaaccttgatacgaggagtgaggatggatctggtgaaatctgtcacattaattcccatgaggtggcaaactttctga

SEQ ID NO: 33886 - DNA, 120 bp, synthetic construct
  source 1..120: mol_type = other DNA
ttgtgatctgtgaatacagcgggttctcttggggaaatgggacccgctgaccatgaatatagcttgaagtgtcctaaaggctgctgtcattagtggtcacactccccagtattttgctga

SEQ ID NO: 33887 - DNA, 120 bp, synthetic construct; identical to SEQ ID NO: 9922
  source 1..120: mol_type = other DNA

SEQ ID NO: 33888 - DNA, 120 bp, synthetic construct
  source 1..120: mol_type = other DNA
attctcctgcctcagcctcccgagtagctggcattataggtgcctgccaccacacccagctaatttcttttgtattttagttgagatggagttacaccgtgttgcccaggctggtctcga

SEQ ID NO: 33889 - DNA, 120 bp, synthetic construct
  source 1..120: mol_type = other DNA
tagtaacatttattgaacagttactgttcaataaatatttctttcacccttctaggatatgtgttgcagcattgtttgcaatagcaaaatgctagagtcaacctaaatgctcttctttta

SEQ ID NO: 33890 - DNA, 120 bp, synthetic construct
  source 1..120: mol_type = other DNA
gtgattttaggatttttttttccccatctcttggcaagagcactttttcatttctctttccctgaggtctttccttggcatccggattccattaatttgccagatttagggactctaata

SEQ ID NO: 33891 - DNA, 120 bp, synthetic construct; identical to SEQ ID NO: 9923
  source 1..120: mol_type = other DNA

SEQ ID NO: 33892 - DNA, 120 bp, synthetic construct
  source 1..120: mol_type = other DNA
atgttggcgaggctggtcttgaactcctgacttcaagtgatccacctgcctgggcctcccaaaatcctaggattacaggcatgagccaccacgcctagcctcttagtttatagtttaaaa

SEQ ID NO: 33893 - DNA, 120 bp, synthetic construct
  source 1..120: mol_type = other DNA
tacaagagtctgaccctccctaaattgctcctggggataacatcactattgtaaaacctaagaccagtacttgagatatttttgcggaccctggcaccaggtggatcagctgacaccacc

SEQ ID NO: 33894 - DNA, 120 bp, synthetic construct
  source 1..120: mol_type = other DNA
tcactggcctccccctaaccacattatgcttaaaaactctgatccacgaatgctcaaggagattgatttgagtaataataaaactctgttctcccatgcagccggctctgcgtgagttac

SEQ ID NO: 33895 - DNA, 120 bp, synthetic construct; identical to SEQ ID NO: 9924
  source 1..120: mol_type = other DNA

SEQ ID NO: 33896 - DNA, 120 bp, synthetic construct
  source 1..120: mol_type = other DNA
ttttggtataatcacggtccaaatgttacaagggacataattaaaatttaaaaaaaggtttgttgtttacctaaaattgaaatttatctggacatcctgtattttatctggcacccctaa

SEQ ID NO: 33897 - DNA, 120 bp, synthetic construct
  source 1..120: mol_type = other DNA
gtatcccagtggcatattgcaggggcttgagaaatatttctttaacaaaacaattaagtggggtattttagaagagatggtccctcgggatcttgtctggtcactattaggggtaggacg

SEQ ID NO: 33898 - DNA, 120 bp, synthetic construct
  source 1..120: mol_type = other DNA
aaaattttgtatttaaaaaaaagaacaaataaataaaactattaggtttgtttttttttaatccctgcgctctgattcaataactttccacatagggtcttgagcactgaaaagtttgaa

SEQ ID NO: 33899 - DNA, 120 bp, synthetic construct
  source 1..120: mol_type = other DNA
tcaggaaaaagtggcaagtacctgtgttatctggcatggacgcctggtctgtgtttctttccttcttgaagacgatatttccaagctgcaggaccgatgataccaccttcaatatggctg

SEQ ID NO: 33900 - DNA, 120 bp, synthetic construct; identical to SEQ ID NO: 9925
  source 1..120: mol_type = other DNA

SEQ ID NO: 33901 - DNA, 120 bp, synthetic construct
  source 1..120: mol_type = other DNA
taatgagttgcaacaaagatcgtctggcctacaaaggctaaagaatttactatctgaccctttacagaaaaatgtgttagcaacccctgccacagaacagtgagaatgaatgagctacaa

SEQ ID NO: 33902 - DNA, 120 bp, synthetic construct
  source 1..120: mol_type = other DNA
ctgacatatcttccagacacaaataccgaacaaaagaggacagatggaaacaagaacatactgtctaagtccatatatagaccgtccattcaagaagaggcaaaactaatcgatgctgtt

SEQ ID NO: 33903 - DNA, 120 bp, synthetic construct
  source 1..120: mol_type = other DNA
cagtttataataattctttgcactgcacgctatggcatacacaattttctccatgtaaatcatatgtcaataaaaggatttttgaaataaaaaccctgtgcttcttacatactcttctgg

SEQ ID NO: 33904 - DNA, 120 bp, synthetic construct; identical to SEQ ID NO: 9926
  source 1..120: mol_type = other DNA

SEQ ID NO: 33905 - DNA, 120 bp, synthetic construct
  source 1..120: mol_type = other DNA
aggatagatggatgaatagaggatggattgatggatgaataattcatggatagaggatagacggatgatggatggatggatagaggatagatggatagatggaatggacagaggattgat

SEQ ID NO: 33906 - DNA, 120 bp, synthetic construct
  source 1..120: mol_type = other DNA
atggatggatgatgattaatgcaaattcttggcttagcttaactcaggtacaaatcacccagagttctggcttcaaatcagtcactatgttccaggaacaaagcctagagatcccagact

SEQ ID NO: 33907 - DNA, 120 bp, synthetic construct; identical to SEQ ID NO: 9927
  source 1..120: mol_type = other DNA

SEQ ID NO: 33908 - DNA, 120 bp, synthetic construct
  source 1..120: mol_type = other DNA
gccagataattctctattgtggggagctgtcctgggtatcatgggaagtttagtagcatccctggcctctaaccactagatgtcagtggtggttaccctgacagagttgtgacaaccaca

SEQ ID NO: 33909 - DNA, 120 bp, synthetic construct
  source 1..120: mol_type = other DNA
cccatctgaaggggccagcagctactccgtcattgccacaggggatataagccaagtgttgctggaacttctgatttttctagataatggaaacccagagtttttatgtgaagtgtaccc

SEQ ID NO: 33910 - DNA, 120 bp, synthetic construct
  source 1..120: mol_type = other DNA
gcgcttcccaggttcaggggaattctcctgcctcagcctccagagtagctgggattacaggcgtgtgccaccacacccggctaatttttctatttttagtagagacggagtttcaccatg

SEQ ID NO: 33911 - DNA, 120 bp, synthetic construct; identical to SEQ ID NO: 9928
  source 1..120: mol_type = other DNA

SEQ ID NO: 33912 - DNA, 120 bp, synthetic construct
  source 1..120: mol_type = other DNA
gctttgcttcttataaatctcattatctctgaatttccaaatcctagttccgggtccagatacacatggggagggagggagatggatggatggcagatggagggtgaatggatggatgaa

SEQ ID NO: 33913 - DNA, 120 bp, synthetic construct
  source 1..120: mol_type = other DNA
atggaaggatgagtagaggatagatggatgatagaggatggattgatggatgaatcatggatgaatagaggatagagactctacatgagtctcaataagtcccatgagcctcagtttccc

SEQ ID NO: 33914 - DNA, 120 bp, synthetic construct
  source 1..120: mol_type = other DNA
tgaagtttaggtcttgtaagatgctgagcaagggcctggcctagtaggtgataaagagtggaagccacctatattaggttgaatgttggtctttctaaaatatgtccacctggaacctgt

SEQ ID NO: 33915 - DNA, 120 bp, synthetic construct
  source 1..120: mol_type = other DNA
aggtctcgaactcctgggctcaagctatcctcccgcctctgcctccctgagagctgggactacaggcgtgaaccaccgcgcccagcctgaacgtggcctattttggaaaaaatcggtctt

SEQ ID NO: 33916 - DNA, 120 bp, synthetic construct; identical to SEQ ID NO: 9929
  source 1..120: mol_type = other DNA

SEQ ID NO: 33917 - DNA, 120 bp, synthetic construct
  source 1..120: mol_type = other DNA
gctatgttgctcaggctggtcttgaactcctggcctcaaacgatcctcttgccttggcctcccaaagtgctgggattacaggcatgagccattatgcccggctcctgccgacaccctgat

SEQ ID NO: 33918 - DNA, 120 bp, synthetic construct
  source 1..120: mol_type = other DNA
ggactttccaacatcagacatgtgtaccaccagggatacacaggatggacaatttaggtgattttattttttatcttcaaaatacattagaagcagtataaccaggccaggcatggtggc

SEQ ID NO: 33919 - DNA, 120 bp, synthetic construct
  source 1..120: mol_type = other DNA
cccttctccataggccccttgatggagggtttggaagtagctcttggtttataaatggggttggtgtacatttaggactaagttggttcctatgagagttcgtcatttgcacgccatcgt

SEQ ID NO: 33920 - DNA, 120 bp, synthetic construct; identical to SEQ ID NO: 9930
  source 1..120: mol_type = other DNA

SEQ ID NO: 33921 - DNA, 120 bp, synthetic construct
  source 1..120: mol_type = other DNA
caggagttcaagaccagagaatactggataacatggtgaagccttgtctctacccacccctccaaaaatcaaaccaaaacaaaacaaaaaaccccaggccaggcacggtggctcatgcct

SEQ ID NO: 33922 - DNA, 120 bp, synthetic construct
  source 1..120: mol_type = other DNA
gcatggtggtgggcgcctataatcccagctacccaggaggctcagccaagagaattgcttgaacccaggaggcagaggttgcagtgagccgaggtcgtgccactgcactccagcctgggt

SEQ ID NO: 33923 - DNA, 120 bp, synthetic construct
  source 1..120: mol_type = other DNA
gcttgagcctgcaaggcagagattgcagtgagctgagactgcgccaccgtactccagcctaggtgacagagtggtgtgatctcggctcactgcagcttcgacctcctgggctcaagcaat

SEQ ID NO: 33924 - DNA, 120 bp, synthetic construct; identical to SEQ ID NO: 9931
  source 1..120: mol_type = other DNA

SEQ ID NO: 33925 - DNA, 120 bp, synthetic construct
  source 1..120: mol_type = other DNA
aagcaatcctcttgcctcagtgtctccaaatgctgggattacaggcatgagccactgtgcccagcctgttccagttttttattatttaaataaaactatactgaacagtgtagtacatca

SEQ ID NO: 33926 - DNA, 120 bp, synthetic construct
  source 1..120: mol_type = other DNA
ggagggcctatgtcattcagacaaggaggctatcagcactagattctgatgtgggaccctggccaagacccacatacaccatccatttgtcaactgacccatacagcctaattttccaga

SEQ ID NO: 33927 - DNA, 120 bp, synthetic construct; identical to SEQ ID NO: 9932
  source 1..120: mol_type = other DNA

SEQ ID NO: 33928 - DNA, 120 bp, synthetic construct
  source 1..120: mol_type = other DNA
aaaagcctgagtaaatccactgcctcgatcactccccctcccctaaaccctgcccacatgttcctgatgaggccaacatctctaccttcagctccaagaatccattcttagggaccataa

SEQ ID NO: 33929 - DNA, 120 bp, synthetic construct
  source 1..120: mol_type = other DNA
ctactctgttctttggacataaacccaaagaatataagggctggaacccagctatgttgctgtcaacaaactgcatcctatagagaaacaatgtagtcgagagagatagaagacaagaaa

SEQ ID NO: 33930 - DNA, 120 bp, synthetic construct
  source 1..120: mol_type = other DNA
tgtaatcttggctcactgcaacctctgccttccgggttcaagcaatcctcccacctcagcctcctgagtagctaggactacaagtgtgcaccaccagccctggctaattttttttttgta

SEQ ID NO: 33931 - DNA, 120 bp, synthetic construct; identical to SEQ ID NO: 9933
  source 1..120: mol_type = other DNA

SEQ ID NO: 33932 - DNA, 120 bp, synthetic construct
  source 1..120: mol_type = other DNA
ccagagaagagttcttaacaggttccactggtatccaggcaagctaccctccagactcaaggtgtgaggcttacatagctgctcctcctcgctgaaacccatgattgccatggcctccac

SEQ ID NO: 33933 - DNA, 120 bp, synthetic construct
  source 1..120: mol_type = other DNA
cagggtcaataagacatacttctaatttcaacatgagaccgagatctggtcaagggtctgggccatcataattcctttccctttatcaaggcttgaaccgtttaaagccctcacgcatcg

SEQ ID NO: 33934 - DNA, 120 bp, synthetic construct
  source 1..120: mol_type = other DNA
acgaagttacatttacctggaggaagggatgcctttacctcaattgtctagaggcaccctgccttcagccttcagagacaaagctgtcagaagagttagatcaacctttactcttttttt

SEQ ID NO: 33935 - DNA, 120 bp, synthetic construct
  source 1..120: mol_type = other DNA
ctgagtagctgggattacaggcgcccgccaccacgcccggctaaattttgtatttttagtagagatggggtttcaccatgttgaccacactagacttgaactcctgacctcaggtgatcc

SEQ ID NO: 33936 - DNA, 120 bp, synthetic construct; identical to SEQ ID NO: 9934
  source 1..120: mol_type = other DNA

SEQ ID NO: 33937 - DNA, 120 bp, synthetic construct
  source 1..120: mol_type = other DNA
ctatctctctgtacaataggcttgctatatatactagcctattataatgtatataccattatgtattacatatcataggccaagggttccccaacccataggccatagaccagtaccggt

SEQ ID NO: 33938 - DNA, 120 bp, synthetic construct
  source 1..120: mol_type = other DNA
ctatcgtgagctgcacatgtgccctccttataacactctaatgcctgataatctgtcactgtcccccatcaccccccgatgggactgcaggaaaacaagctcccaatgattctacattat

SEQ ID NO: 33939 - DNA, 120 bp, synthetic construct; identical to SEQ ID NO: 9935
  source 1..120: mol_type = other DNA

SEQ ID NO: 33940 - DNA, 120 bp, synthetic construct
  source 1..120: mol_type = other DNA
tggagtgcagtggtgcgatattggctgctcactgcaacctctgcctcccggattcaagcaattctcctgcctctcgagtagctgggattacaggcacccaccaccatgcccaggtaattt

SEQ ID NO: 33941 - DNA, 120 bp, synthetic construct
  source 1..120: mol_type = other DNA
cgtgcccagccacccccagctatttttagttgaatcaatatataaggcttatatcacaggttggcaaatctggtcccctgttgtttttgtaaataaagttttattgaaacacagctgctc

SEQ ID NO: 33942 - DNA, 120 bp, synthetic construct
  source 1..120: mol_type = other DNA
cagtttgccaactccctttttatgacattaattagatattctgtgtcaaactgtatcctatgattacatttcctttgttgttgttcagcttctcccccacccccaactttataattgcct

SEQ ID NO: 33943 - DNA, 120 bp, synthetic construct
  source 1..120: mol_type = other DNA
tggattcggttatacttttggagagacgtcagcaagatatttttctttcaaaatcaaggtcttttatgggtcaagtcacttggaagctgcttgataaactcgaggttaaattgactgaag

SEQ ID NO: 33944 - DNA, 120 bp, synthetic construct; identical to SEQ ID NO: 9936
  source 1..120: mol_type = other DNA

SEQ ID NO: 33945 - DNA, 120 bp, synthetic construct
  source 1..120: mol_type = other DNA
cattccacagggtcctgcactgtaactgctaatataccatgtttgctggtacataaaaaatccattcagcattccccctttaccaaaaattgctccacctcatagcctatgttcctgaaa

SEQ ID NO: 33946 - DNA, 120 bp, synthetic construct
  source 1..120: mol_type = other DNA
ttctcctgcctcagcctcccaagtagctgggatgacaggcgccagccaccacacctggctaatttttgtatttttggggagacagggtttcactatcttggccgagctggtctcaaactc

SEQ ID NO: 33947 - DNA, 120 bp, synthetic construct; identical to SEQ ID NO: 9937
  source 1..120: mol_type = other DNA

SEQ ID NO: 33948 - DNA, 120 bp, synthetic construct
  source 1..120: mol_type = other DNA
agctgcaggtccagaactcataacttcctactggagtttggtatacagtgtattatatttacataaaaaaacttttccctacaacagaggtcagcaaacttctgcacactgcctgttttt

SEQ ID NO: 33949 - DNA, 120 bp, synthetic construct
  source 1..120: mol_type = other DNA
ggtttatgtgttgcctgagctcactggtttatgtgttgcctgagctcactggtttatgtgttgcctgcactcattggtttatatattgcctgtggctgctcttgtattacaatggcagag

SEQ ID NO: 33950 - DNA, 120 bp, synthetic construct
  source 1..120: mol_type = other DNA
aaatgcttagtcctgctgcccctgcaaattccttataaaaccagaatgcatcttttatatttgcaagttttataaattggcaagtaaggcaaatgtctttctccctttccttgaaggcgt

SEQ ID NO: 33951 - DNA, 120 bp, synthetic construct; identical to SEQ ID NO: 9938
  source 1..120: mol_type = other DNA

SEQ ID NO: 33952 - DNA, 120 bp, synthetic construct
  source 1..120: mol_type = other DNA
acatgtcattgctagtcacttacttctcatcttctccttggctccagcaatcatgtagtaaaagatgtggaatgtcctctcgtctctggcttggcgaattgcccgtgatttttctagcag

SEQ ID NO: 33953 - DNA, 120 bp, synthetic construct
  source 1..120: mol_type = other DNA
ggtaatgtctaactttgaccattgcccctatggacaaatggaaccgctgggtgctgccagcagacttcagatgcaaaaaaaagggaggggaatagagtgaaaagaaaaagcataaaaagg

SEQ ID NO: 33954 - DNA, 120 bp, synthetic construct
  source 1..120: mol_type = other DNA
tatgatttatgattcattcctgtgtgaaatgattgatataaattgtctcactgaagcctcacaaagtatgctaggaaataagtgcaactattatcggtgttttcaataaggggaaactga

SEQ ID NO: 33955 - DNA, 120 bp, synthetic construct
  source 1..120: mol_type = other DNA
agtggggtctgacgggatggaggcgagagagaccgtaaacacgccacactaattaatttcaggagagcttctccgcgatgcggggtggcaggagggagagcagaggggagggcaggtgag

SEQ ID NO: 33956 - DNA, 120 bp, synthetic construct; identical to SEQ ID NO: 9939
  source 1..120: mol_type = other DNA

SEQ ID NO: 33957 - DNA, 120 bp, synthetic construct
  source 1..120: mol_type = other DNA
ggatccaagcaattctcctgcctcagcctcctgagtagctgggactacaggtgcatgccaccacgcctggataatttttgtatttttagtagagacagggtttcaccatattggccaggt

SEQ ID NO: 33958 - DNA, 120 bp, synthetic construct
  source 1..120: mol_type = other DNA
ctgatgctgctggtttggaaacatactttgagaaccactgatctaaaaggaaggctgaggccagaaggacggggctatgcctggggctcgctctaaacacaggaaatgaattgctgagag

SEQ ID NO: 33959 - DNA, 120 bp, synthetic construct; identical to SEQ ID NO: 9940
  source 1..120: mol_type = other DNA

SEQ ID NO: 33960 - DNA, 120 bp, synthetic construct
  source 1..120: mol_type = other DNA
cagcttagacaagtacagtggagaggaagctactccacaacccaccctcttatccagggcacataacgtggaaaaatgggaccactaggtgctgctagaggacctcaggtgcagaaagaa

SEQ ID NO: 33961 - DNA, 120 bp, synthetic construct
  source 1..120: mol_type = other DNA
ttcccccacgtccagaaatttctaacttggctccacttcaccgctcaggttcatgaaagagatgctctacttgttccttgcgataccagcattcttctgggtaaactctgttttcatcaa

SEQ ID NO: 33962 - DNA, 120 bp, synthetic construct
  source 1..120: mol_type = other DNA
gctgaataaggatgaagtgaagatcatacgatagacactacgtagccagcccttactctgcacctcgcatggtgcctagagctttatatgagttcattcactctattctcacatttctat

SEQ ID NO: 33963 - DNA, 120 bp, synthetic construct; identical to SEQ ID NO: 9941
  source 1..120: mol_type = other DNA

SEQ ID NO: 33964 - DNA, 120 bp, synthetic construct
  source 1..120: mol_type = other DNA
gatacaggtctcaatgttggctcccacgatgtaacccgtgacgtcgaagttgatgcggatgaatttgccctgccaacaggaaaacacagttcaggctttgctgcccaacttcagccgtta

SEQ ID NO: 33965 - DNA, 120 bp, synthetic construct
  source 1..120: mol_type = other DNA
gagctgaaaccaccccaggcctgacagcaacagaacgtgtaaaacatgttcacagatcaatttcattcggcttttgcaatgaccgtagtccatcatggctatccctatttaaaaaaactt

SEQ ID NO: 33966 - DNA, 120 bp, synthetic construct
  source 1..120: mol_type = other DNA
gaactcctgggctcaagcaatccccttttccccatgacctcaccctcccaagcagctaggactacaggcatgcaccaccatatctggctaatttttaaatttttttttgtagagatagga

SEQ ID NO: 33967 - DNA, 120 bp, synthetic construct; identical to SEQ ID NO: 9942
  source 1..120: mol_type = other DNA

SEQ ID NO: 33968 - DNA, 120 bp, synthetic construct
  source 1..120: mol_type = other DNA
gtcctttaggcaggaatggctcatgttcctggccctagaggctcaacaagtatctccaaagatggccctatctacctgcctcagctaagccatgaaaccaaggatggaacccaatcctcc

SEQ ID NO: 33969 - DNA, 120 bp, synthetic construct
  source 1..120: mol_type = other DNA
tggtgggaagtgttggcgtgtgtggacacaatcccctaggcttgctcagtccttgacaaaaccttcaaactttccccattgggaaacatgcagtagagtgatttgggatgaccatatccc

SEQ ID NO: 33970 - DNA, 120 bp, synthetic construct
  source 1..120: mol_type = other DNA
gtgcttccatttatgacaggctagaaacattgcacagaattggaacatgcaaacgcagtgcttctcagtggaggcggcacatctgctatggagattttggaaatcggtggaagccattat

SEQ ID NO: 33971 - DNA, 120 bp, synthetic construct; identical to SEQ ID NO: 9943
  source 1..120: mol_type = other DNA

SEQ ID NO: 33972 - DNA, 120 bp, synthetic construct
  source 1..120: mol_type = other DNA
cgggttcaaggaattctcccacctcagcctcccgagtagctgggaatacaggcatgtgtcactgcgcccagctaatttttgtatttttagtagagacagggtttcaccatgttagccagg

SEQ ID NO: 33973 - DNA, 120 bp, synthetic construct
  source 1..120: mol_type = other DNA
aacaagtgtttaaaatgttgttctaatacaagaatatcccatctgtgtgactctagagaagattgttctttggttcagcgcttcactgagagtcagttgccattctggaaaatcccatgc

SEQ ID NO: 33974 - DNA, 120 bp, synthetic construct
  source 1..120: mol_type = other DNA
tatgctgaaatgcactttatttatttatttttgtagagatggggtttccccatgttgcccaggctggtctcaaactcttgagctcaagtgatctgcccgcctcagtctcccaaagtactg

SEQ ID NO: 33975 - DNA, 120 bp, synthetic construct
  source 1..120: mol_type = other DNA
acgtgtaggaggtgatactatctatgattctaatttcgggcgaggaaaggagacattatgtaattgtttgttactaaaatgggccttggggatcacagggtcagggaccaccatgtgcat

SEQ ID NO: 33976 - DNA, 120 bp, synthetic construct; identical to SEQ ID NO: 9944
  source 1..120: mol_type = other DNA

SEQ ID NO: 33977 - DNA, 120 bp, synthetic construct
  source 1..120: mol_type = other DNA
agttggaagaaccagcttcatgaaggctggaaccatatctgaactattcatcgcaatcctgtgagactcgctgagtgcctggtatacagtaggcacttaataaaaacagcaaatgagaaa

SEQ ID NO: 33978 - DNA, 120 bp, synthetic construct
  source 1..120: mol_type = other DNA
gaggaggtgtgtgcctggtacacagttggcactcaattcatgttttgttacataaaatggtatcggatataagggtctagcccataccaggtgctcaatacctaattttttaaattttat

SEQ ID NO: 33979 - DNA, 120 bp, synthetic construct; identical to SEQ ID NO: 9945
  source 1..120: mol_type = other DNA

SEQ ID NO: 33980 - DNA, 120 bp, synthetic construct
  source 1..120: mol_type = other DNA
tttggcgttgccgaaagcctccagaatcgggtttgcttgtagaagctgcttttccagctctccctaaaattcattcacatctagttattggagaaagcaacctaggtcctgacagttcta

SEQ ID NO: 33981 - DNA, 120 bp, synthetic construct
  source 1..120: mol_type = other DNA
gctaatgttcagatttacaggaggatttcagaagagaagcaactgtctgagctctctaatagctaggacatctgctccctaggaaggtcacttttttcaagaccagggcctgctcatctg

SEQ ID NO: 33982 - DNA, 120 bp, synthetic construct
  source 1..120: mol_type = other DNA
gtcgtgctgctgttcatgtttaacaagcagccttcttcaagttaaaccactacaagcctccttctaattattttagtgcaattttttttaagttgcaattttttctttctcaggactggt

SEQ ID NO: 33983 - DNA, 120 bp, synthetic construct; identical to SEQ ID NO: 9946
  source 1..120: mol_type = other DNA

SEQ ID NO: 33984 - DNA, 120 bp, synthetic construct
  source 1..120: mol_type = other DNA
aacgagctgctcttggcctagccctaaaacatggcggctgcagttgggccccgaggcctccaggccctggattctgggagtttttctccttgtcctcccctcctgctttcccttccttat

SEQ ID NO: 33985 - DNA, 120 bp, synthetic construct
  source 1..120: mol_type = other DNA
acaggacaaagcaggaagctgctatttgtttctgttttgatttgtccacacatcctcctttttgtagctcccagagaaagatgaagcaaaagcctcatccgcatacaaatctcagctaca

SEQ ID NO: 33986 - DNA, 120 bp, synthetic construct
  source 1..120: mol_type = other DNA
aaggaatcacttttgttcacataaacttggggtctccatgctctctgaaaaaggctccctttctagaatggggattctggcaggtaaggttgaaaagtcttggcaagagagctttaaatc

SEQ ID NO: 33987 - DNA, 120 bp, synthetic construct; identical to SEQ ID NO: 9947
  source 1..120: mol_type = other DNA

SEQ ID NO: 33988 - DNA, 120 bp, synthetic construct
  source 1..120: mol_type = other DNA
accaaagctagtgcatcgcgacctccaagactgtttctggaggcttgagtcaagcaaccagcatgcaagagacagacacgcactgcacacgcatgcacagggacacactggtgcaccagg

SEQ ID NO: 33989 - DNA, 120 bp, synthetic construct
  source 1..120: mol_type = other DNA
cactcagccagatgggacagacatctctgtctaggttgttccagtcaagggtaccaggagcggatgctttgaagggtgcaggggttcattctgaaccggagaaatccatttcaggctgga

SEQ ID NO: 33990 - DNA, 120 bp, synthetic construct
  source 1..120: mol_type = other DNA
aggatggtattttggtgcatttactgatttaagttgtgaaactctagggcctaccccatttctaccaccagctacgggactcggtgggtgcaagaggatcatgcagatctaagttcactc

SEQ ID NO: 33991 - DNA, 120 bp, synthetic construct; identical to SEQ ID NO: 9948
  source 1..120: mol_type = other DNA

SEQ ID NO: 33992 - DNA, 120 bp, synthetic construct
  source 1..120: mol_type = other DNA
gcaatcctcctgcctcagcctcccaagtagctaagactacaggcatgcacaccaggcccagctaattctcttgatttttttttttttttttttttggtacagacagggtctcactatgtc

SEQ ID NO: 33993 - DNA, 120 bp, synthetic construct
  source 1..120: mol_type = other DNA
cccatgctcagccattccctcctttttctaatttcttagagatccagacatttcaaaggttttcataattactggggccacattaggctccttaaaacagtatccagtgagacaatgtct

SEQ ID NO: 33994 - DNA, 120 bp, synthetic construct
  source 1..120: mol_type = other DNA
ctgtgtttaaactgccacacagcctctggggccattgttcccactcactatggctggaaaccaacttgccagagacaattctaggatgctgaatcttgagtttcctgcatttgtttggag

SEQ ID NO: 33995 - DNA, 120 bp, synthetic construct
  source 1..120: mol_type = other DNA
cccagagtcccctctgaggacgcaaagtgacatctggaatggcgaacactggagacaccccatgccgtggtcagatctccatcctaccatcttcccacccacaaacctgcagacggaggc

SEQ ID NO: 33996 - DNA, 120 bp, synthetic construct; identical to SEQ ID NO: 9949
  source 1..120: mol_type = other DNA

SEQ ID NO: 33997 - DNA, 120 bp, synthetic construct
  source 1..120: mol_type = other DNA
cccagggacagggggacacgtggaggaatccgggaacccaaaaggtaccttaacccctgggacgttacagagattcatgaaaggagtgcttctcaatcaagggcaactgtcccaccccag

SEQ ID NO: 33998 - DNA, 120 bp, synthetic construct
  source 1..120: mol_type = other DNA
cccctccaaggaagagttatctggtccaaaatgacatcagtgccaccactgagaagccccgacgtggaggaagatctcgctatggaaggaaagggcttattctcatttcacaaaacgggc

SEQ ID NO: 33999 - DNA, 120 bp, synthetic construct; identical to SEQ ID NO: 9950
  source 1..120: mol_type = other DNA

SEQ ID NO: 34000 - DNA, 120 bp, synthetic construct
  source 1..120: mol_type = other DNA
gacctttccgcagttccatgagccaggcaggacaataatgatcatcaccaccatttcccagagggtgaaacagaggctcccagaggggaagtaacttgcccaaggccacatctctggtag

SEQ ID NO: 34001 - DNA, 120 bp, synthetic construct
  source 1..120: mol_type = other DNA
tgatcccagcacttggggaggctgaggtgggaggatcatttgagcccaggagtgtgagaccagctcagcaacacagagagacactgcctctagaaaaagatttaaaaattagccaggcat

SEQ ID NO: 34002 - DNA, 120 bp, synthetic construct
  source 1..120: mol_type = other DNA
aaaattaaccaggcttggtggtgcatgcctgtagtcccagctactcaggaggctgaggtgggaggatggcttgagcccaggagtttgaggccacagtgagccatgatcacaccactgcac

SEQ ID NO: 34003 - DNA, 120 bp, synthetic construct
  source 1..120: mol_type = other DNA
tttttttgagatggagtctcactctgtccccaggctggagtacagtggcacaatttcagctcactgcaagctccacctccctggttctcctgcctcagcctcccaagtagctgggactac

SEQ ID NO: 34004 - DNA, 120 bp, synthetic construct; identical to SEQ ID NO: 9951
  source 1..120: mol_type = other DNA

SEQ ID NO: 34005 - DNA, 120 bp, synthetic construct
  source 1..120: mol_type = other DNA
gctgatgatctcagccaagtatctaagaataaacccagttgaagtaattcacactaaagtgtaaatgactgatatgtttagatcagcacgacatggtttgtcgtatcaaaaaagtatgtc

SEQ ID NO: 34006 - DNA, 120 bp, synthetic construct
  source 1..120: mol_type = other DNA
gcctctatgttccaccactcctagtgaaagataaggacagtgccttgaccaaaacttcacttgtttatcgtcttcttctatttttcagtttacttttgttttttgtgtttcctttctttg

SEQ ID NO: 34007 - DNA, 120 bp, synthetic construct; identical to SEQ ID NO: 9952
  source 1..120: mol_type = other DNA

SEQ ID NO: 34008 - DNA, 120 bp, synthetic construct
  source 1..120: mol_type = other DNA
actttgtgtggtcccttcccttcctagaggccttccttcccaatggccacattatttcacatggcctcagaggcagtttatgaaatggggaccatgaaggcattaccccatttccccaga

SEQ ID NO: 34009 - DNA, 120 bp, synthetic construct
  source 1..120: mol_type = other DNA
agctactcaggaggctgagttgggaggatgccttgaggccaggagtttgagagaagcctgggcaacatagcaagatcccatctcttaagacagagaagaattggcgtttgtcattggggg

SEQ ID NO: 34010 - DNA, 120 bp, synthetic construct
  source 1..120: mol_type = other DNA
ctaggtcacacagcaaagaagggatacagtcagaatggaaagtcaggtctctgattctaatgcagtcagaattccttttactacatttcaccaagttgttccatgacacaggcccaaccc

SEQ ID NO: 34011 - DNA, 120 bp, synthetic construct; identical to SEQ ID NO: 9953
  source 1..120: mol_type = other DNA

SEQ ID NO: 34012 - DNA, 120 bp, synthetic construct
  source 1..120: mol_type = other DNA
cactggaattctgccatatattccaggaggctttacttgccccaatcaatgaaccaagccactcagtcattcacacctaagtatgaattacttcaatcaggctaacgtcagaaccttgct

SEQ ID NO: 34013 - DNA, 120 bp, synthetic construct
  source 1..120: mol_type = other DNA
aatcaggacagcagtgtgcacaaacaacatgtgtggatcacactcttcatgctgacaaaccagtgctcctagactgctgctgctcacttctcctttcccacaatagttccttcctttcca

SEQ ID NO: 34014 - DNA, 120 bp, synthetic construct
  source 1..120: mol_type = other DNA
aggagttcaagaccagcctggccaacatggtgaaaccctgtctctactaaaaatacaaaaagtagctgggcatggtggtgggtgcctgtagtcccagctacttggggagctgaggcagga

SEQ ID NO: 34015 - DNA, 120 bp, synthetic construct
  source 1..120: mol_type = other DNA
cagacaaaaaaaaaaacaaagacatcaatgtgccctatccgtggctatggtctcccactttgcctgggatggggagtgggacataaactctgggcatctaccccttcccatgttgctgct

SEQ ID NO: 34016 - DNA, 120 bp, synthetic construct; identical to SEQ ID NO: 9954
  source 1..120: mol_type = other DNA

SEQ ID NO: 34017 - DNA, 120 bp, synthetic construct
  source 1..120: mol_type = other DNA
cacttaatcccccagccaggctggcttcatgagtgtgacctgtaccgtctcacagggaccaccctgtgcttcatactctaatgttgccatctggaaattcttcctaattctttataaacg

SEQ ID NO: 34018 - DNA, 120 bp, synthetic construct
  source 1..120: mol_type = other DNA
aagtgattctcctgcctcaacctcccaagtagctggaactacaggtgcccgccactatgcctgggtaatttttatatttttagtagagatgggatttcaccatgttggcgaggctggcct

SEQ ID NO: 34019 - DNA, 120 bp, synthetic construct; identical to SEQ ID NO: 9955
  source 1..120: mol_type = other DNA

SEQ ID NO: 34020 - DNA, 120 bp, synthetic construct
  source 1..120: mol_type = other DNA
acacgtcctgcaaaaccccaggcagaagcaacgcctctctcccctatagcatcaattggcagaatagcataatgggctccaggaccaggttgctcaagttcaaatccctcctctgccagt

SEQ ID NO: 34021 - DNA, 120 bp, synthetic construct
  source 1..120: mol_type = other DNA
aacacttaccttgtatgatttttttttttttttttttgagacaagatctcactctgtggcccaggctggagtgcagtgatgcaatcatagctcactgcagctgagaattcctaggctcaa

SEQ ID NO: 34022 - DNA, 120 bp, synthetic construct
  source 1..120: mol_type = other DNA
gaactcctggtctcaagtgatctctagcctcagcctcccaaagtgctgggactacaggcatgagccaccatgcctgaccttttatatgattcttatgaggattaaatgagtgaacattta

SEQ ID NO: 34023 - DNA, 120 bp, synthetic construct; identical to SEQ ID NO: 9956
  source 1..120: mol_type = other DNA

SEQ ID NO: 34024 - DNA, 120 bp, synthetic construct
  source 1..120: mol_type = other DNA
tccacagaagttatatattgtttgtataatgattttcagcattcatcctatcattacaatataaataatattcacattttcccactgtttaagctaggagttagcaaactctttttgtaa

SEQ ID NO: 34025 - DNA, 120 bp, synthetic construct
  source 1..120: mol_type = other DNA
aaaactttatctggaacagacagacaagggcctgatttgacccactggttaaactttgtccttccttggcttgagtcccttagcacgttctcatccatttcatttatttattttattgtt

SEQ ID NO: 34026 - DNA, 120 bp, synthetic construct
  source 1..120: mol_type = other DNA
atcctcctaagtagctgggactacaggcacatgccatcacgctcagctaatttttgtttttgtagagagggggtttggccatgttggccaggctggtcttgaactcctgagctcaagcga

SEQ ID NO: 34027 - DNA, 120 bp, synthetic construct; identical to SEQ ID NO: 9957
  source 1..120: mol_type = other DNA

SEQ ID NO: 34028 - DNA, 120 bp, synthetic construct
  source 1..120: mol_type = other DNA
ccaggctgaggtgcagtggtgccatcatagctcacttagcctctaactcccaagctcaagtgatcctccctccccaacctcctgagtagctgggactacaggcatgcaccatcccaccta

SEQ ID NO: 34029 - DNA, 120 bp, synthetic construct
  source 1..120: mol_type = other DNA
aagccaccacacccagccaattttcagtttcttttcttttcttttttttttttttttttttttgagacagagtctcgctctgtcacccaggctggagtgcactggcgtgatctcagctca

SEQ ID NO: 34030 - DNA, 120 bp, synthetic construct
  source 1..120: mol_type = other DNA
gggtttcaccgtgttagccaggatggtctcgaactcctgacctcgtgatccacccgcctcggcctcccaaagtgctgggattacaggcgtgagccacggtgcgtggccaattttcagttt

SEQ ID NO: 34031 - DNA, 120 bp, synthetic construct
  source 1..120: mol_type = other DNA
tgcctcagcctcctgaatagctgggactacaggcacccgccaccatgcccagctaatttttttgtatttttttagtagagatggggtttcaccgtgttagccaggatggtctcgaactcc

SEQ ID NO: 34032 - DNA, 120 bp, synthetic construct; identical to SEQ ID NO: 9958
  source 1..120: mol_type = other DNA

SEQ ID NO: 34033 - DNA, 120 bp, synthetic construct
  source 1..120: mol_type = other DNA
caagtccttgctaacgctgcattccaggagatggagatacacaatagccaagtaaacaaataatcaagatagttcgtggtggagatatcattgctacatctgggtgatgtgactgagaag

SEQ ID NO: 34034 - DNA, 120 bp, synthetic construct
  source 1..120: mol_type = other DNA
aacagtatggacagaggtccaagggagggaaatgctgggcccaggtatgagacagaatggctcccagcatggctggagggccacaacagaggaggacagcaggaagtgaagagggaagag

SEQ ID NO: 34035 - DNA, 120 bp, synthetic construct; identical to SEQ ID NO: 9959
  source 1..120: mol_type = other DNA

SEQ ID NO: 34036 - DNA, 120 bp, synthetic construct
  source 1..120: mol_type = other DNA
cccaggaggcgggggttgcagtgagccaagatcgcaccactgcactccagcctgggcaacagagtgagactctgtctcaacaaaaaaatcaacaacaacaacaaactgcaggatgggcca

SEQ ID NO: 34037 - DNA, 120 bp, synthetic construct
  source 1..120: mol_type = other DNA
cagcctgaccaacatgacaaaaccctgtctctactaaaaatacaaaattagccaggcatggtggtacatgcctgttatcccagctactcgggaggctgaggcaggagaatcacttgaacc

SEQ ID NO: 34038 - DNA, 120 bp, synthetic construct
  source 1..120: mol_type = other DNA
ctggattgcaggaaggatttttaaaaaatagtgagcactttcactacaatagcagctgatccttacaaagtgctcaccatggggcagtggcctgtttctcagttcttcacatgtagtgac

SEQ ID NO: 34039 - DNA, 120 bp, synthetic construct; identical to SEQ ID NO: 9960
  source 1..120: mol_type = other DNA

SEQ ID NO: 34040 - DNA, 120 bp, synthetic construct
  source 1..120: mol_type = other DNA
tgaactaggaagaggcggtggagtcagaggaatggacagagatgagaaatatttcagcatcataccgtccaaggcaggaaccgctatctaaattaactaaaatcttaaaaattcagttct

SEQ ID NO: 34041 - DNA, 120 bp, synthetic construct
  source 1..120: mol_type = other DNA
gcaatatacttgccactttttaagagctcaattaagtgaacttttaagtgaactttgtgctcatcacaaagttcttttggatagcaccgttttagatgaaacagcacctgctgatggcat

SEQ ID NO: 34042 - DNA, 120 bp, synthetic construct
  source 1..120: mol_type = other DNA
acccgtgcatagctacatagctaggaagccatctgaaagtcctactctttcctgcacctctctgttaccacacttaattcattcactcaacagagggcagttgagctacactattttggt

SEQ ID NO: 34043 - DNA, 120 bp, synthetic construct; identical to SEQ ID NO: 9961
  source 1..120: mol_type = other DNA

SEQ ID NO: 34044 - DNA, 120 bp, synthetic construct
  source 1..120: mol_type = other DNA
gaaaccaagtcggcaggttgttttagcatttatatcctcatagctaggtagcattatatctctagatccagactattcattgtcaaacatcaaatgtgtacatcctaccatggaatatga

SEQ ID NO: 34045 - DNA, 120 bp, synthetic construct
  source 1..120: mol_type = other DNA
actccaaacttgcacagctgggctccttagtccaatgtgattacttctccttccatcccaacttttgttttttcctggagtttataattgcctttgttttattgtttccaggttttctat

SEQ ID NO: 34046 - DNA, 120 bp, synthetic construct
  source 1..120: mol_type = other DNA
tttcatgcaaataggaaacatatgcacgtccatgcaatcctgctctttttaaagacacacacggttacattatgcatatgctggtttgcccctgtgttttccactcaacggtattatcta

SEQ ID NO: 34047 - DNA, 120 bp, synthetic construct
  source 1..120: mol_type = other DNA
taaagagcgttctctctcagcataaatagatcagcctcactctttgtagtggctacctggaaatgctatattttatttaaataacctctgttgattatagctttagttgcttccagacct

SEQ ID NO: 34048 - DNA, 120 bp, synthetic construct; identical to SEQ ID NO: 9962
  source 1..120: mol_type = other DNA

SEQ ID NO: 34049 - DNA, 120 bp, synthetic construct
  source 1..120: mol_type = other DNA
gcacacatacaaaaatgtccccagcatagtgctcaagtgttggctcatgtttccaagcacaataaagttgtgatacccattatgtaataaatacacatcagataaacttcatccaggcat

SEQ ID NO: 34050 - DNA, 120 bp, synthetic construct
  source 1..120: mol_type = other DNA
ctatcttctgcctatgtacctaggtcttcaaagaaacagtgataccaatcaccaaatatggcactgatgtgtttgtggcttgataaatgtgaaatactaaagtgacagtttaacatcttc

SEQ ID NO: 34051 - DNA, 120 bp, synthetic construct
  source 1..120: mol_type = other DNA
atggaaccaaatgatagcaggtgtcattaagagtttaagtttgcctgcctccgcagaagaccatatatcacaaatgtttagtgagcatctacatggtgccaggtataaagagaggcactt

SEQ ID NO: 34052 - DNA, 120 bp, synthetic construct; identical to SEQ ID NO: 9963
  source 1..120: mol_type = other DNA

SEQ ID NO: 34053 - DNA, 120 bp, synthetic construct
  source 1..120: mol_type = other DNA
ccccagaaagatgctggagcctgactgatccaggagtcattagcatccagccacatcagctctggaggtgtcccgggaggcccaccccacccagattaggttagggaccaaacgcagatg

SEQ ID NO: 34054 - DNA, 120 bp, synthetic construct
  source 1..120: mol_type = other DNA
tcagttccttcatctgtaatatagtattgtgcacatttgtgtttttttgtaaatccagcatccatttcctcttcttccagaagcatcctgtggtccttgaggtttcccccatcaccccta

SEQ ID NO: 34055 - DNA, 120 bp, synthetic construct
  source 1..120: mol_type = other DNA
ttcaacaaagaggtaagaatgtgttccaggctgcattggtcagactctctggcctaaaactccaagctcagtcaaggacagggaagcacagcaggtggacagagccctgaggcagacttc

SEQ ID NO: 34056 - DNA, 120 bp, synthetic construct; identical to SEQ ID NO: 9964
  source 1..120: mol_type = other DNA

SEQ ID NO: 34057 - DNA, 120 bp, synthetic construct
  source 1..120: mol_type = other DNA
caatgccacagtggcaagcatttcttaaatccactccctggcttcagtcctactagttcagtgctcagctctcacaagcttcatttcatcaaaaatctcctaggcttggttttacattgt

SEQ ID NO: 34058 - DNA, 120 bp, synthetic construct
  source 1..120: mol_type = other DNA
gaagggtagatgggtgaatggaagggtgggtagatgggtaggtagatggatgggtgggtgggtggatgaatagacagatggacgggagggtggataagcagatgagtaggtgagtaggtg

SEQ ID NO: 34059 - DNA, 120 bp, synthetic construct
  source 1..120: mol_type = other DNA
gaagaaaggatgggtggatggaagaatggatggataggtaaatggacgggaggataaatggatgggaggctgggtgaataggcagacagatggctggatggaaggatggatagatggaca

SEQ ID NO: 34060 - DNA, 120 bp, synthetic construct
  source 1..120: mol_type = other DNA
ggtgtgtagatgggtagatgggtgggtatatagctggttggacggatggttggacggaggagggaaggatgagtgagtggatgagagagtggatgggtgggtgaatgggagggaggacag

SEQ ID NO: 34061 - DNA, 120 bp, synthetic construct; identical to SEQ ID NO: 9965
  source 1..120: mol_type = other DNA

SEQ ID NO: 34062 - DNA, 120 bp, synthetic construct
  source 1..120: mol_type = other DNA
atcagttctctctctcttccctcggattatagatggatgtttgggtggcctggttgaacgaaatcctcaagacaaaaggcctaaagactagtcagctctggggtttcaattctggtgtgt

SEQ ID NO: 34063 - DNA, 120 bp, synthetic construct
  source 1..120: mol_type = other DNA
ggctaacatggtgaaaccccatctccactaaaaatacaaaaattagttgggtgtcatggcacacgcttgtaatcccagctactcagaaggctgaggcaggaaaattgcttgaactcagga

SEQ ID NO: 34064 - DNA, 120 bp, synthetic construct
  source 1..120: mol_type = other DNA
agaaccaggcagagctttgtggatggacacagaaaaatatccaaaatatattaagctaaaaataaaagatgaggtagcatagtgttataccttttgtgttttaaaaagacagatatatag

SEQ ID NO: 34065 - DNA, 120 bp, synthetic construct; identical to SEQ ID NO: 9966
  source 1..120: mol_type = other DNA

SEQ ID NO: 34066 - DNA, 120 bp, synthetic construct
  source 1..120: mol_type = other DNA
tcacttgaggtcaggagttcaagaccagcctggccaacatggtgaaacgctgtctctactaaaaatacaaaaattagctgggcatggtagcatgcacctgtaatccaaggtactccggag

SEQ ID NO: 34067 - DNA, 120 bp, synthetic construct
  source 1..120: mol_type = other DNA
aaaaaccaacaaacaggcctgagcctgaagtattgagaaaagggacaggaggaagacctactttcacccattctacttctatcctggttatgtttgtgctatgaacacatacaatctttt

SEQ ID NO: 34068 - DNA, 120 bp, synthetic construct; identical to SEQ ID NO: 9967
  source 1..120: mol_type = other DNA

SEQ ID NO: 34069 - DNA, 120 bp, synthetic construct
  source 1..120: mol_type = other DNA
acaaataaggagagtgaggttcagaagtgaggcaacttgcccaaggtcactagggtgggttgaactgtgactcccaaaagctatgttcactcagaacctcagactgcgatgttattgact

SEQ ID NO: 34070 - DNA, 120 bp, synthetic construct
  source 1..120: mol_type = other DNA
tgtagctgggactataggcacatgccagcatgcccggctaatttttgtattttttgtagagattgggtcttgctatgttgcccaggctggtttcacactcttgggctcaagtgacccacc

SEQ ID NO: 34071 - DNA, 120 bp, synthetic construct
  source 1..120: mol_type = other DNA
cctggcttggagtgagacctaaatcaatggtgtccctatttataagagaaaggaggccgggcgtggtggctcacacctgtaatcccagcacgtgggtggatcacctgaggtcaggagttc

SEQ ID NO: 34072 - DNA, 120 bp, synthetic construct; identical to SEQ ID NO: 9968
  source 1..120: mol_type = other DNA

SEQ ID NO: 34073 - DNA, 120 bp, synthetic construct
  source 1..120: mol_type = other DNA
gaaatggagtctcgctctgtcacccaggctggagtgcagtggctcgatcttggctcactgcaacctctgcctcctggtttcaagcaattcttccacctcggccccccgagtagctgggac

SEQ ID NO: 34074 - DNA, 120 bp, synthetic construct
  source 1..120: mol_type = other DNA
ccaaagtactaaaaagtgattttttaaaagagggtgaaggatagaagaaccaggtaccctgtgattagaacccagacagagagaacctcctgggaccggcccagacaacctccactatct

SEQ ID NO: 34075 - DNA, 120 bp, synthetic construct
  source 1..120: mol_type = other DNA
gctcagatgctcacagggcccccaggagagggagcgggctccaggagaaggcctgggagctgccagcgcggctccgagctgggggctgctgggagacctctggcctgacgttcccatcaa

SEQ ID NO: 34076 - DNA, 120 bp, synthetic construct
  source 1..120: mol_type = other DNA
tttatctgattccttccccaagcctgagcttgtgttggactcaaaagcagtgttctccaccgtacaaagcagtttcactccctccttgctttgcacaagtgatttcttctgcccagtgca

SEQ ID NO: 34077 - DNA, 120 bp, synthetic construct; identical to SEQ ID NO: 9969
  source 1..120: mol_type = other DNA

SEQ ID NO: 34078 - DNA, 120 bp, synthetic construct
  source 1..120: mol_type = other DNA
ctgggtgacagagggagactccatctcaaaaaatagtaataaagataaaaaaataactaaagtgcataattcaggagcatttagtacattcacaatgttacgtaactaccacctttatct

SEQ ID NO: 34079 - DNA, 120 bp, synthetic construct
  source 1..120: mol_type = other DNA
atttttgcataaatggaattataacatgtgcggcctttcatgtctgacttctttcactcagcatgtggctgaagttcatccatgttgtagcaggtcccagactttatgcctatttgtggc

SEQ ID NO: 34080 - DNA, 120 bp, synthetic construct
  source 1..120: mol_type = other DNA
acaagttttagtttgagtaccttttcaattcttcgggtacataccctaatctgtatctgaaacatcgtcttgggagtcaactcttctatgataccttctctaactctgcacttttctaga

SEQ ID NO: 34081 - DNA, 120 bp, synthetic construct; identical to SEQ ID NO: 9970
  source 1..120: mol_type = other DNA

SEQ ID NO: 34082 - DNA, 120 bp, synthetic construct
  source 1..120: mol_type = other DNA
ggcattcagagtttttcttgtttttcttttccatattggtaaaaattatggactttattcataatatccaaaaaatagaaacaaccaaatgttcatcaatgggtagatggataaacaaaa

SEQ ID NO: 34083 - DNA, 120 bp, synthetic construct
  source 1..120: mol_type = other DNA
tgagcccgggagtccgaaaccagcctgggcaacatggtgaaaccctatctctacaaaaaaaaatgcaaacattagctgggcatagtggcacaatccctgtggtctcagctactcaagagg

SEQ ID NO: 34084 - DNA, 120 bp, synthetic construct
  source 1..120: mol_type = other DNA
tgaatccatgatacaacgtggatgaaccttgacaacattatactaagtgaaagaagctagccggctgggcacggtggctcacacctgtaatcccagcactttgggaggctgaggtgggca

SEQ ID NO: 34085 - DNA, 120 bp, synthetic construct
  source 1..120: mol_type = other DNA
gctgaggcaggagaatcacttgaacccaggaggcagagtttgtggtgagccgagaccacatcactgcactccagcccgggcgagtgcagtgagacactctgtctcaaaaaaaaaaaaaaa

SEQ ID NO: 34086 - DNA, 120 bp, synthetic construct; identical to SEQ ID NO: 9971
  source 1..120: mol_type = other DNA

SEQ ID NO: 34087 - DNA, 120 bp, synthetic construct
  source 1..120: mol_type = other DNA
cctctgaatgattataaatctgacttcttccacttcatgcagctctattaggtttccaacaattacaaaattgttcattttcaatgcttttcccctgaaccaatgagctcctgaaggtac

SEQ ID NO: 34088 - DNA, 120 bp, synthetic construct
  source 1..120: mol_type = other DNA
aaggtagaagcaatggaaaatgcatattcacgtgttcacatattcattcaacaaacgagtcctgagccaggtaccgaaagcacaaaagtcaataagatctgcttttttttttcttttctt

SEQ ID NO: 34089 - DNA, 120 bp, synthetic construct; identical to SEQ ID NO: 9972
  source 1..120: mol_type = other DNA

SEQ ID NO: 34090 - DNA, 120 bp, synthetic construct
  source 1..120: mol_type = other DNA
atgacttgcttatccttgcttttgagaagttcatgacccagggtgggagtcagatgggcaaagaaatgaccgtaagagatgagcagtgctacgatggatgtgaacccaagtgctatagac

SEQ ID NO: 34091 - DNA, 120 bp, synthetic construct
  source 1..120: mol_type = other DNA
cgaggcagagcatcccaagcagagggcctgggacagaagctccaaagtgggcggggacacagtaccgagcctccgtggagtctgggaaggctggagctgggggcggccggccatcatcag

SEQ ID NO: 34092 - DNA, 120 bp, synthetic construct
  source 1..120: mol_type = other DNA
tgtaaggccccaggcacgtttcctgagaagataaagggcttcagcggttcctcccccgctgtgggcctgaggactcccaggaggtacccagctccccacagaccagctatttcggcccaa

SEQ ID NO: 34093 - DNA, 120 bp, synthetic construct
  source 1..120: mol_type = other DNA
ctggtaacaggctgctgggggatccagtgagaggtaatcaaaacccgtctctgcagggccatcaatacccctgggctagtaaagaagaaaggtctcagcctccattgcctgcagaaaagt

SEQ ID NO: 34094 - DNA, 120 bp, synthetic construct; identical to SEQ ID NO: 9973
  source 1..120: mol_type = other DNA

SEQ ID NO: 34095 - DNA, 120 bp, synthetic construct
  source 1..120: mol_type = other DNA
ccggcagagttggttaggatgacatgctgagtaagaagagatactttgagagcctttgctgcaacccaacaggtgttttccaaacctacaggaagccctggtattgtaaaagcagaactg

SEQ ID NO: 34096 - DNA, 120 bp, synthetic construct
  source 1..120: mol_type = other DNA
gagactcaaagcgagacccctatctctatgaaaaaaaaattttttttaattagctgtggacagaggtgtgtgcctgtagccccagctatttggaaggctgaggcaggaaaattgcttgag

SEQ ID NO: 34097 - DNA, 120 bp, synthetic construct
  source 1..120: mol_type = other DNA
aaaatatataataaataaaaacatgaaagcagaactggccagtgaaggggtgtaggagacaggaaaaccaacgctctccctcttgggcctccactcctacctcctacattctcccccttc

SEQ ID NO: 34098 - DNA, 120 bp, synthetic construct; identical to SEQ ID NO: 9974
  source 1..120: mol_type = other DNA

SEQ ID NO: 34099 - DNA, 120 bp, synthetic construct
  source 1..120: mol_type = other DNA
tcaaaaaattagccaggcgtgatgatctgtgcctgtggtcccagctacttgggaggctgagaggggaggatcacttgagcccaggagttggaggctggagtgagctatgagtgtgccact

SEQ ID NO: 34100 - DNA, 120 bp, synthetic construct
  source 1..120: mol_type = other DNA
acatgcaatttaacaaggaaggtgctggccaggcactgtgggtcacgcctataatcccagcactttgggaggccgaggtaggtggattgcttgggctcaggagttcaaggccagcctgaa

SEQ ID NO: 34101 - DNA, 120 bp, synthetic construct; identical to SEQ ID NO: 9975
  source 1..120: mol_type = other DNA

SEQ ID NO: 34102 - DNA, 120 bp, synthetic construct
  source 1..120: mol_type = other DNA
gcaatctcggctcactgcaacctctacctcccaggttcaagcgattctcctgcctcagcctcccgagtagctgggattatagtcgcccaccaccatgcctggctaattttttgtattttt

SEQ ID NO: 34103 - DNA, 120 bp, synthetic construct
  source 1..120: mol_type = other DNA
aatatttactattttataacaaataattctcctttgctgtctcccttccctgtaatgcaccatgggtaccaaaaataaaaataaaataaagataaaaacgtgaacttttcatgattagtc

SEQ ID NO: 34104 - DNA, 120 bp, synthetic construct
  source 1..120: mol_type = other DNA
actgcaaaacccacaagagacagagaagcatttggctgtaccccttcctggagatgtgtttgtagcagcactgcctctgcagagaaacagctgggaattacttcttggctccaccctatc

SEQ ID NO: 34105 - DNA, 120 bp, synthetic construct; identical to SEQ ID NO: 9976
  source 1..120: mol_type = other DNA

SEQ ID NO: 34106 - DNA, 120 bp, synthetic construct
  source 1..120: mol_type = other DNA
gaatccttacccctaaagtgatgatattaggaggtggggcctttgggaggtgatgagatcatgggggttcaatcctcattgggggagagacccagagagctagcaggtcccttccaccat

SEQ ID NO: 34107 - DNA, 120 bp, synthetic construct
  source 1..120: mol_type = other DNA
attttgatatagcagccttaacaggctaagacacaaggcctatgctagtcccttagccttctgggggcctcagtttcctcttccgttatatggggacaagaatactacactatctatacc

SEQ ID NO: 34108 - DNA, 120 bp, synthetic construct
  source 1..120: mol_type = other DNA
ctgccacccaccctgtgtggtgctagtgagggccgagcaatgtgggattgatggagcagtgaacccaggtcctgacctattgcaggggccctgaggacatcagtgcccttcctctctctg

SEQ ID NO: 34109 - DNA, 120 bp, synthetic construct
  source 1..120: mol_type = other DNA
tggatcactccacccgcagagttgtcttaagcttaaagaggaattagccaagagccccaagctgataaaggctggctgttatttctttttttaatcccctgagtgtggccatttgttgct

SEQ ID NO: 34110 - DNA, 120 bp, synthetic construct; identical to SEQ ID NO: 9977
  source 1..120: mol_type = other DNA

SEQ ID NO: 34111 - DNA, 120 bp, synthetic construct
  source 1..120: mol_type = other DNA
aacaaatctgcagcaagttctccactcctctgagtctgttttcccagctgtaaaagggagctaataatagctcttgcggctagcgttggatcacccaataaaccttgtaagcatatgctg

SEQ ID NO: 34112 - DNA, 120 bp, synthetic construct
  source 1..120: mol_type = other DNA
acccataatcccagcactttgggaggtcaaggcaggaggatcacttgaggccaggaatgagagaccagcctgggcaacacagtaagatcttatctctaaaaaaaaaaaaaaaaaaaaaaa

SEQ ID NO: 34113 - DNA, 120 bp, synthetic construct; identical to SEQ ID NO: 9978
  source 1..120: mol_type = other DNA

SEQ ID NO: 34114 - DNA, 120 bp, synthetic construct
  source 1..120: mol_type = other DNA
ggtgggtggatcacctgaggtcaggagttcaagaccagtctggtcaacacggtgaaacaccatctctactaaaagtacaaaaattagctgggcatggtggcatgtgcctgtaatcccagc

SEQ ID NO: 34115 - DNA, 120 bp, synthetic construct
  source 1..120: mol_type = other DNA
acaaacaaaaaacagttgtttttttttaattagctgagcatggtggtacatctctgtagtctcagctacttgggaagctgaggcaggattgctgaacccaggagtttgaggctgcagtga

SEQ ID NO: 34116 - DNA, 120 bp, synthetic construct
  source 1..120: mol_type = other DNA
gacatatgcctgcaccttaatagtttcagggcttaattttaaaattcctaatctggtcctgtccaccttgtaggtttgtggtaaagattaactgagaatatttctgtaaagccctgagct

SEQ ID NO: 34117 - DNA, 120 bp, synthetic construct; identical to SEQ ID NO: 9979
  source 1..120: mol_type = other DNA

SEQ ID NO: 34118 - DNA, 120 bp, synthetic construct
  source 1..120: mol_type = other DNA
tggagcccaggagttcaagacctgcctggaaaatataacaagaccccattctccacacaaaagaggggggaaaaggcaaaaaaaaaaaagtgtaaaaaggccgggcgtggtggttcacgc

SEQ ID NO: 34119 - DNA, 120 bp, synthetic construct
  source 1..120: mol_type = other DNA
ctctactaaaaatacagaaattagctgggcatggtggcatgcacctgtaatcccagctactcaggaggctgaggctgcagaatcgcttgatcctgggaggtggaggctgcagtgagcaga

SEQ ID NO: 34120 - DNA, 120 bp, synthetic construct
  source 1..120: mol_type = other DNA
acatgaggcagtttaaaaagaactagagaggggagaacagcaaagccatcttggaagacagaaaatgggataagcgttgaaaagtaccaagaaaaagtccagacaccgtggctcacgcct

SEQ ID NO: 34121 - DNA, 120 bp, synthetic construct
  source 1..120: mol_type = other DNA
gaaccccatctctatttaaaatacaaaaattagccgggtgtggtggcggatgcctgtaatcccagctacttgggaggctgaggcaggagaatcacttgaacccgggaggtggaggttgca

SEQ ID NO: 34122 - DNA, 120 bp, synthetic construct; identical to SEQ ID NO: 9980
  source 1..120: mol_type = other DNA

SEQ ID NO: 34123 - DNA, 120 bp, synthetic construct
  source 1..120: mol_type = other DNA
ttaaacagagggtctccgtcctggggggacaccaggaaccatactgaaagaaggaaggtataatgtacaaatttcactgcacattttgaaaccctcagcttcttttcaactagaccctca

SEQ ID NO: 34124 - DNA, 120 bp, synthetic construct
  source 1..120: mol_type = other DNA
aacaaaagactgaaagacgaaacagaagtgtcctaatggggtagcccagtgctttcatattatagccaagcacatcagcaagcccatcctataagcactgagcttccatcaacaatttgg

SEQ ID NO: 34125 - DNA, 120 bp, synthetic construct
  source 1..120: mol_type = other DNA
acagaagttaaaacaattaggaaaatatgtatcttggaggaaatagactctgcattaaatatcctctgagaaacaggatattgcaaccacagaaaaagaatgtcatatgaaagaaacatt

SEQ ID NO: 34126 - DNA, 120 bp, synthetic construct; identical to SEQ ID NO: 9981
  source 1..120: mol_type = other DNA

SEQ ID NO: 34127 - DNA, 120 bp, synthetic construct
  source 1..120: mol_type = other DNA
taggggtacaaagacagtctaaaagcttctagagaaggaggaaaaacaaaaactggtcatgtacaaaggatcaagaatattcccagccaggaaggtgaatataatcacacacacacacac

SEQ ID NO: 34128 - DNA, 120 bp, synthetic construct
  source 1..120: mol_type = other DNA
aaacaactttcttgcctgaaattttaaacccaactaaactatcctttaagtgttagagaagcatcaagcctctcagatatggaagttctcaatgcctcaagatcacgtacattctttctt

SEQ ID NO: 34129 - DNA, 120 bp, synthetic construct; identical to SEQ ID NO: 9982
  source 1..120: mol_type = other DNA

SEQ ID NO: 34130 - DNA, 120 bp, synthetic construct
  source 1..120: mol_type = other DNA
ggcagaattggtggttaaatacatggaaaacaagattggggaaaaaaaaggcaattgctaactccaggaaaaagaaaagtcatacagaaagaagaaaaatagtcacaaagcagtgcaaag

SEQ ID NO: 34131 - DNA, 120 bp, synthetic construct
  source 1..120: mol_type = other DNA
gactctgatatgaggcatgtgtgttggaacgaggaaataggggcaaatccagagggtgaatgagctaaatttcatctttcatggaggaaagtcaatagatgatacctaaaattgaaaaca

SEQ ID NO: 34132 - DNA, 120 bp, synthetic construct
  source 1..120: mol_type = other DNA
taagccttcaaaaattacttgactctaagccgtctgcatgaatacttttaacaaaaataaaaaccaattttttaaaaaagggaacaaggaattcctacatgcactgatatgtaacatcct

SEQ ID NO: 34133 - DNA, 120 bp, synthetic construct; identical to SEQ ID NO: 9983
  source 1..120: mol_type = other DNA

SEQ ID NO: 34134 - DNA, 120 bp, synthetic construct
  source 1..120: mol_type = other DNA
cagcctggccaacatggcaaaaccccatctctactaaaaatacaaaaattagccaggcatggtggtgtgtgcctgtagtcccagctactcaggaggctgaggcacaagaattgcttgaac

SEQ ID NO: 34135 - DNA, 120 bp, synthetic construct
  source 1..120: mol_type = other DNA
aaaaataaacatgacataatttatgcatatgcagatataagatacatattttaaatatcagcttctcttcccataccctcaaggggcttggcttccacttgggagggtgccatgttgtga

SEQ ID NO: 34136 - DNA, 120 bp, synthetic construct
  source 1..120: mol_type = other DNA
acactcatcatacccattctcacccctacatttatgcttttattattcttggctagaaagccatccctgcccccttctctcaccttagcaaaccattcttcgaggcttataaagccccac

SEQ ID NO: 34137 - DNA, 120 bp, synthetic construct; identical to SEQ ID NO: 9984
  source 1..120: mol_type = other DNA

SEQ ID NO: 34138 - DNA, 120 bp, synthetic construct
  source 1..120: mol_type = other DNA
cagtgacttaacagaatgagatcgtgccatttatcaatggagtcaacacactgggcctacgtgtttcttcacaaaaaccaatttcctacttgggaatggagaaaaaattaagcaggtgaa

SEQ ID NO: 34139 - DNA, 120 bp, synthetic construct
  source 1..120: mol_type = other DNA
tgatctcggctcactgcaagctccgcctcttgggttcacaccattctcctgcctcagcaccccctgagtagctgggactacaggcgcctgccactgtgcctggctagttttttttgtatt

SEQ ID NO: 34140 - DNA, 120 bp, synthetic construct
  source 1..120: mol_type = other DNA
tctttttatttttggagtccgccatcaatgatttgccagaaagcaccaggtcatgccaaaatagacgagggcatagcaggtgttggttaacatttaaattaagtaaagagtttatctttt

SEQ ID NO: 34141 - DNA, 120 bp, synthetic construct
  source 1..120: mol_type = other DNA
gctcaagccatcctcctgcctcagcctccagagtagctaggactacagactcacgcactgtggccagctaattatttttttgtagagacaagagctcactatgttggccaggctggtctc

SEQ ID NO: 34142 - DNA, 120 bp, synthetic construct; identical to SEQ ID NO: 9985
  source 1..120: mol_type = other DNA

SEQ ID NO: 34143 - DNA, 120 bp, synthetic construct
  source 1..120: mol_type = other DNA
ctgcttcctctcagatcagaggcggcattagactcttatagaaccaccaaccctactgtgaactgcacataagagggatccaggctgtgtgctccttatgagaatctaatgcctgatgat

SEQ ID NO: 34144 - DNA, 120 bp, synthetic construct
  source 1..120: mol_type = other DNA
taatcatagaaataaagtgcacaataaatgtaatgcgctcgaatcatcccgaaccatctctcccctgcggtccatggaaaaactgacttctatgaaactggtccctggtgtcaaaaaggt

SEQ ID NO: 34145 - DNA, 120 bp, synthetic construct; identical to SEQ ID NO: 9986
  source 1..120: mol_type = other DNA

SEQ ID NO: 34146 - DNA, 120 bp, synthetic construct
  source 1..120: mol_type = other DNA
tctactaaaaatacaaaattagcctggtgtgatggtgcatgcctgtaatcccagcactatgggaggctgaggcgggcagatcacaatgtcaggagatcgagaccatcctgggtaacatgg

SEQ ID NO: 34147 - DNA, 120 bp, synthetic construct
  source 1..120: mol_type = other DNA
agtgagctgagatcacaccattgcactccaacctgggcaccaagagggaaactccatccggaaaaaaaaaaaaaaaaagaaagaaagaaagacaaaagaaagaaaaagattcagggcaat

SEQ ID NO: 34148 - DNA, 120 bp, synthetic construct
  source 1..120: mol_type = other DNA
tagctcgggctgcagaagtcaagcatgacatgaagatgtcgttttatgctcacatgatttcatccctcagcccagaaaaagttacagaaaaaaaccccacacccactcttaattcatttt

SEQ ID NO: 34149 - DNA, 120 bp, synthetic construct; identical to SEQ ID NO: 9987
  source 1..120: mol_type = other DNA

SEQ ID NO: 34150 - DNA, 120 bp, synthetic construct
  source 1..120: mol_type = other DNA
aatgtcatttttcaagctcagtcaaatattttgcccactctctttccctcctccacacacatactatctacagtgaaactttggtctctgttttaagtgatctttttctggaacgaatta

SEQ ID NO: 34151 - DNA, 120 bp, synthetic construct
  source 1..120: mol_type = other DNA
tcttcagatagtaaaaatttccttcatttcatgccatttagttcagttagtgtaatgaaaggtcacgtaacaaaatgttaatggtgatgagttttggatgatagaatcataggtgccagc

SEQ ID NO: 34152 - DNA, 120 bp, synthetic construct
  source 1..120: mol_type = other DNA
cgctccccctccttctcctttgctaacagaattttctttctttttggtatttagattaaaatgtgcttagtgggacctcagctccagaaaagaaccaggaattgctgggtatggtggctt

SEQ ID NO: 34153 - DNA, 120 bp, synthetic construct
  source 1..120: mol_type = other DNA
gggcgcggtggcgggcgcctgtagtcccagctactcgggaggctgaggcaggagaatggcgtgaacccgggaagcggagcttgcagtgagccgagattgcgccactgcagtccgcagtcc

SEQ ID NO: 34154 - DNA, 120 bp, synthetic construct; identical to SEQ ID NO: 9988
  source 1..120: mol_type = other DNA

SEQ ID NO: 34155 - DNA, 120 bp, synthetic construct
  source 1..120: mol_type = other DNA
cagagggggtgtgagttttcgagtttcttgtactcttcgcctgacctggtacacttgtttgcattaactgcctagtccctctgtttgacttgggggtggctatttcaggggctccaaagt

SEQ ID NO: 34156 - DNA, 120 bp, synthetic construct
  source 1..120: mol_type = other DNA
aagatcctgtcacttccaaaaacaaaacaaaacaaaacaaaaacaaaacaaaaaaacccacctttttaaaattagcttgacatgacagtccacacctatagtcccagctacttgggaggc

SEQ ID NO: 34157 - DNA, 120 bp, synthetic construct; identical to SEQ ID NO: 9989
  source 1..120: mol_type = other DNA

SEQ ID NO: 34158 - DNA, 120 bp, synthetic construct
  source 1..120: mol_type = other DNA
atcctttgcagacagctggcccgacggggaccttgggcagcgagccccggagctggagctggagcgggcccatgcccgtatttgcccaagctcttggctctccctcaccctcccaggctg

SEQ ID NO: 34159 - DNA, 120 bp, synthetic construct
  source 1..120: mol_type = other DNA
ctccctggagctggccccgtgcagccctgagttcactcaccttgaagcatgctccggtaggccgtgtctgcgatggcgtagatgtgaggcggcatctcgtgcctcttcttgcccttgtac

SEQ ID NO: 34160 - DNA, 120 bp, synthetic construct; identical to SEQ ID NO: 2826
  source 1..120: mol_type = other DNA

SEQ ID NO: 34161 - DNA, 120 bp, synthetic construct
  source 1..120: mol_type = other DNA
actcactgaaaccttgacctttctggactcaggtgatcctcctacctcagcctcctgagtagccaggactacaggcgggcgccaccaggcctggctgatgtttatattttctgtagagac

SEQ ID NO: 34162 - DNA, 120 bp, synthetic construct; identical to SEQ ID NO: 9990
  source 1..120: mol_type = other DNA

SEQ ID NO: 34163 - DNA, 120 bp, synthetic construct
  source 1..120: mol_type = other DNA
agaaaatgaacagtgtgcttaagatattaactcaggaacatttaataaagaaagtgtttacagatatgtgtgcagaattaaagaaacccaaccagtgacgggagcagttaagtctgaaga

SEQ ID NO: 34164 - DNA, 120 bp, synthetic construct
  source 1..120: mol_type = other DNA
ttaagtgatcctctcgcctcagcctcccaagtaggtggtaccacaggtgtgcacaaccatgcccaggtaatttttattttgttttttgtagagacagggtttcaccatattgcccaggct

SEQ ID NO: 34165 - DNA, 120 bp, synthetic construct
  source 1..120: mol_type = other DNA
tcagccagagagggaatgtcgttaactgaacattggaggcatagaaagccacacacccctaaaaaggggctgtccagagggatccgcagtcatacagaaacacagctgccaaaactgtgg

SEQ ID NO: 34166 - DNA, 120 bp, synthetic construct; identical to SEQ ID NO: 9991
  source 1..120: mol_type = other DNA

SEQ ID NO: 34167 - DNA, 120 bp, synthetic construct
  source 1..120: mol_type = other DNA
tctgcaaaacagagaccaacactgacatgagctctccaatgtggatgaagcttgaaaatatgcctagtgaaagaagccaggcacgaaaagtcacgtactctatcatctcatttatgtgaa

SEQ ID NO: 34168 - DNA, 120 bp, synthetic construct
  source 1..120: mol_type = other DNA
aaaatgctctggggccaagtgtagtggctcatgcctgtaatcccagcactttgggaggccaaggtgggaggattgcttcaggctaagtgtttgagaccagctcaggcaacaacagccgga

SEQ ID NO: 34169 - DNA, 120 bp, synthetic construct; identical to SEQ ID NO: 9992
  source 1..120: mol_type = other DNA

SEQ ID NO: 34170 - DNA, 120 bp, synthetic construct
  source 1..120: mol_type = other DNA
gcatctgaaaataatcagatcagggacggaggagtcaaggcacaaggcgagtcccgccatgctgtacgtggtaaggcactattgtcatgatttttccttactggatactagattttccca

SEQ ID NO: 34171 - DNA, 120 bp, synthetic construct
  source 1..120: mol_type = other DNA
gcaagtgacttagggagaaccacagatccatctctcagttacagctagggtgaaccaagcaacagagggttaagtgacttgaccgaggtcaccaaagaagatcctggcagcaccaagccc

SEQ ID NO: 34172 - DNA, 120 bp, synthetic construct
  source 1..120: mol_type = other DNA
ttcattctgtacgtcccagatgccatgcaaaaggtgctgggactacattagaacattaaaaaaacacaggatcccagccctcaagggccttttagtcaagggctggagccaattagagag

SEQ ID NO: 34173 - DNA, 120 bp, synthetic construct; identical to SEQ ID NO: 9993
  source 1..120: mol_type = other DNA

SEQ ID NO: 34174 - DNA, 120 bp, synthetic construct
  source 1..120: mol_type = other DNA
atggtatgtaatgtctgggggtgctgcagaggaatattctttgaaggtacaggattgttgggcgcagtggttcacacctatgatcccagtactttgggagaccaaggagggcagattgct

SEQ ID NO: 34175 - DNA, 120 bp, synthetic construct
  source 1..120: mol_type = other DNA
aggcaggagaatcacttgaacctgggaggtggagggaggttgtagtgagccaaggtggtgccattgcactccagcctgggtgacagagggagaacccatctcaaaaaaaaaaaaaaaaaa

SEQ ID NO: 34176 - DNA, 120 bp, synthetic construct
  source 1..120: mol_type = other DNA
taccacatctgtgtcagaggctggagataaagaaatcaatgatagctcctgcccttaaagaacttaaatcagagggggagacaagtacattaaaacacgtcgtaagaacagagaatgata

SEQ ID NO: 34177 - DNA, 120 bp, synthetic construct
  source 1..120: mol_type = other DNA
gcagggacatgggcagaaaaacaggacacggggtccgtgggggtgaactataagcagcttggtataagcggctccatcggaccgaaatggagaagcaaagcaagggttagaggtaagcgg

SEQ ID NO: 34178 - DNA, 120 bp, synthetic construct; identical to SEQ ID NO: 9994
  source 1..120: mol_type = other DNA

SEQ ID NO: 34179 - DNA, 120 bp, synthetic construct
  source 1..120: mol_type = other DNA
acactgagccaggccaggggctatttcctgttcaatcagtgtcccctgtccccaggacaagcctcccaaagagaagagcccagtctgtggtcacctgaacaaaggtcaatcaagccccac

SEQ ID NO: 34180 - DNA, 120 bp, synthetic construct
  source 1..120: mol_type = other DNA
ggcagtaaagggcagtggctaagggctcagaactgggtatggggtacttgaatttgaaccttcactttgctacttcttcgctgtgtgaccctgggcaagtcccttaacctctctgagtct

SEQ ID NO: 34181 - DNA, 120 bp, synthetic construct; identical to SEQ ID NO: 9995
  source 1..120: mol_type = other DNA

SEQ ID NO: 34182 - DNA, 120 bp, synthetic construct
  source 1..120: mol_type = other DNA
gtaatcccagcacttcgggtggccaaggaggtcagatcacttgaggtcaggagttcgagaccagcctggccaacatggcaaaaccccgtctctactaaaaatacaaaaattagccaggca

SEQ ID NO: 34183 - DNA, 120 bp, synthetic construct
  source 1..120: mol_type = other DNA
agagtgagactctaaaaaaaaaaaaaaaagaaggaaggaaggaaggaaagtaagaaagaaaggaagaaagagagatgagagatagagaaaagaaaagaataaaaggaatttttaaaaaga

SEQ ID NO: 34184 - DNA, 120 bp, synthetic construct
  source 1..120: mol_type = other DNA
ctttactaaaaatacaaaaattagctgggtgtggtggcgcatgcctgtaatcccagctactcaggagtctgaggcaggagagtcacctgaaccaaggaggcagaggttatgtgagccgag

SEQ ID NO: 34185 - DNA, 120 bp, synthetic construct; identical to SEQ ID NO: 9996
  source 1..120: mol_type = other DNA

SEQ ID NO: 34186 - DNA, 120 bp, synthetic construct
  source 1..120: mol_type = other DNA
ttattcagccacttctccttcacctcgacccagcccaaccatagttggctgtgtttctgcctctctggccccacgagcccctctccagctggttaaattcagaggtttcaacatcccagc

SEQ ID NO: 34187 - DNA, 120 bp, synthetic construct
  source 1..120: mol_type = other DNA
accgtattaggaagcagctccagtttttctctgacgctttatatggtcagccacagagccctgagcagggggtgctcccggggcctgcagcagaaatgaggaacagggagggaagggagg

SEQ ID NO: 34188 - DNA, 120 bp, synthetic construct
  source 1..120: mol_type = other DNA
gaccagcccggccaacacagtgaaacctcatctctactaaaaatacaaaaattagcaaggtgtggtggcgcgtgcctgtaatcccagctactcgggaagctgaggcaggagaactgcttg

SEQ ID NO: 34189 - DNA, 120 bp, synthetic construct
  source 1..120: mol_type = other DNA
ttgccttatcacctgcctgacttgtgcatacagacctacccctgagcttcctcagtaaagtgatggataatcacggcttctttatgaagctgcagtgcaatatcacggctttctaaatac

SEQ ID NO: 34190 - DNA, 120 bp, synthetic construct; identical to SEQ ID NO: 9997
  source 1..120: mol_type = other DNA

SEQ ID NO: 34191 - DNA, 120 bp, synthetic construct
  source 1..120: mol_type = other DNA
cacctgtaattgtagcactttgggaggctgaggtgggtggatcacttgaggtcaggagttcaagaccagcctggctaacatggcaaaaacccatctttacaaaaaatacaaaaattatct

SEQ ID NO: 34192 - DNA, 120 bp, synthetic construct
  source 1..120: mol_type = other DNA
ttgcaggagccgagatcgcaccattgcactccagcctgggtgacagagtgagactttatcacaaaaaaagcaataggctgggcacagtggcttaagcctgtaatcccagcaccttggcag

SEQ ID NO: 34193 - DNA, 120 bp, synthetic construct
  source 1..120: mol_type = other DNA
tacaaaaatcagctgggtgtggtagtacacgcctgtagtctcagctacttgggaggctgagggaggagaattgcttgaacctgggagggggctgttgcagtgagccaagatcatgccact

SEQ ID NO: 34194 - DNA, 120 bp, synthetic construct; identical to SEQ ID NO: 9998
  source 1..120: mol_type = other DNA

SEQ ID NO: 34195 - DNA, 120 bp, synthetic construct
  source 1..120: mol_type = other DNA
gtgtacatacatgaacctgtgaatcatgtttgcctccagggaagagggctgctttttgtgatacatacttatttttaaatattctcctgaggtctttgcatagattatccttgtattact

SEQ ID NO: 34196 - DNA, 120 bp, synthetic construct
  source 1..120: mol_type = other DNA
tcaagaccaacctggccaacatggtgaaaccacttctctactaaaaatacaaaaattagctgggcgtggtggcatgtgcctgtaatcccagctactgggaggctgaggcacaagaatcgc

SEQ ID NO: 34197 - DNA, 120 bp, synthetic construct
  source 1..120: mol_type = other DNA
gttaaaaaaaaaaaaagatcagaagggctaatgcttggggcttgacaaagggcagcttccagttacagtgtctttctaccctctagggaccagtgcagtggctggcacccaggaggcctc

SEQ ID NO: 34198 - DNA, 120 bp, synthetic construct; identical to SEQ ID NO: 9999
  source 1..120: mol_type = other DNA

SEQ ID NO: 34199 - DNA, 120 bp, synthetic construct
  source 1..120: mol_type = other DNA
taaggcatgagtgaagcagggcgtgtgtgagtgaacaaaagaggtgccacggtcaatggttaccatggcctgggagacgacagggagtggtgaggtctgcggaaaagcagagcaaaaagc

SEQ ID NO: 34200 - DNA, 120 bp, synthetic construct
  source 1..120: mol_type = other DNA
caaaaatcactcctctgtgttagcaggttgtaatcattagtctagcacctagttaggtgctcaaggaatcataataaaaggttcaattccttcttgctctgcacttaaagcttgtctacc

SEQ ID NO: 34201 - DNA, 120 bp, synthetic construct
  source 1..120: mol_type = other DNA
caagagccctttgctactaatcataggtagtcaccctggccctggactcacacagaccttgtctgaatcccagctctgcccaccttccagtggtgggactaagcacatctgagcttcagc

SEQ ID NO: 34202 - DNA, 120 bp, synthetic construct; identical to SEQ ID NO: 10000
  source 1..120: mol_type = other DNA

SEQ ID NO: 34203 - DNA, 120 bp, synthetic construct
  source 1..120: mol_type = other DNA
tcaaaagaaagaaaaagaaaaaagaagaaagaaaaaagaagacagaaagacagagaaagaaaggaagaaagagagagggagggagggagggaggaaggaaggaaggaaggaaggaaggga

SEQ ID NO: 34204 - DNA, 120 bp, synthetic construct
  source 1..120: mol_type = other DNA
cttcagcagtttaggtagactgctggacattgctgagcccagaacctgcatctctaagattaggaggaaagctcctctggcttctatagactcttctagatccaagagcacaagaggtct

SEQ ID NO: 34205 - DNA, 120 bp, synthetic construct
  source 1..120: mol_type = other DNA
tgcagaacggaggagaaagtttatcttcatcacagagggcaaagtcatgcatgccagaccacggacctggtatcacctcactacccgcctattaacaagactcatgcatgctgctattat

SEQ ID NO: 34206 - DNA, 120 bp, synthetic construct; identical to SEQ ID NO: 10001
  source 1..120: mol_type = other DNA

SEQ ID NO: 34207 - DNA, 120 bp, synthetic construct
  source 1..120: mol_type = other DNA
actccctagatggtgatgatacgtcttagatgaaagacctgggccccaaagagtccaattttccctctagctccctacagacgggcctctttagaaatatccaacatactggctgggcgt

SEQ ID NO: 34208 - DNA, 120 bp, synthetic construct
  source 1..120: mol_type = other DNA
aatcagccaggcatggtggcacatccctgcaatcccagctactcgggaggctgaagcaggagaatcacttcaacccgggaggtggaggttgcaatgagccaagatcgctccacttcactc

SEQ ID NO: 34209 - DNA, 120 bp, synthetic construct; identical to SEQ ID NO: 10002
  source 1..120: mol_type = other DNA

SEQ ID NO: 34210 - DNA, 120 bp, synthetic construct
  source 1..120: mol_type = other DNA
ggccaggagtttgagaccagcctgggcaatatagtgagatcccagtctctacagaagtttttttttttttttttaattagccaggtgtggtggtgcacacctgtggtccacagctactca

SEQ ID NO: 34211 - DNA, 120 bp, synthetic construct
  source 1..120: mol_type = other DNA
aagttatgagttgctaagttgctcactcttaccatttggctctttaaaaagccactctaactccttctgaaatatctataagaacagtggaaaaatggcctatccccatgacagattcta

SEQ ID NO: 34212 - DNA, 120 bp, synthetic construct
  source 1..120: mol_type = other DNA
aatatgtaaacagataccatgctcacaaagagacaaagaatgcaccgcatctctggttaaggactaatttttctgttttgtgttcactatgctttctgaactctccaagtgttccatagt

SEQ ID NO: 34213 - DNA, 120 bp, synthetic construct; identical to SEQ ID NO: 10003
  source 1..120: mol_type = other DNA

SEQ ID NO: 34214 - DNA, 120 bp, synthetic construct
  source 1..120: mol_type = other DNA
acaatcatagctcactgcagccttgaactcctgggctcaagtgatcctcctgcctcagcctccctgagtagctgggattatgagtacgcaccactgcacctggctaatttatttttgcag

SEQ ID NO: 34215 - DNA, 120 bp, synthetic construct
  source 1..120: mol_type = other DNA
gaggctggcactattcttgcatccattttacagaaaaggaaacaaagcttcagaggcatgaggtaacctgctcgagggtgagcaaggcctttcagagagaagacatagacataggccggg

SEQ ID NO: 34216 - DNA, 120 bp, synthetic construct
  source 1..120: mol_type = other DNA
acaacatcacactccaagccccaatcatctagtccaagcagtccaacagaactttctatgataatgggaacattctgcacttatgctacccagtacaccagccactagccacaggtggct

SEQ ID NO: 34217 - DNA, 120 bp, synthetic construct; identical to SEQ ID NO: 10004
  source 1..120: mol_type = other DNA

SEQ ID NO: 34218 - DNA, 120 bp, synthetic construct
  source 1..120: mol_type = other DNA
cagctaataaattttttaatgtttcttttttttttttttttttttttgagatggagtttcgctcttattgcccaggctggagtgcaacggcaccatctcggctcactgcaacctctgcct

SEQ ID NO: 34219 - DNA, 120 bp, synthetic construct
  source 1..120: mol_type = other DNA
ggctggtctcaaactcctgacctcaagtgatctacccgccttggcctcccagcgtgctgggattacaggcatgagtcgccaaacctggtctaatgtttcttttaattaatttaaatctaa

SEQ ID NO: 34220 - DNA, 120 bp, synthetic construct
  source 1..120: mol_type = other DNA
aaggcctccctaaaacctagccacatcctcatgtctcctacccacctggctgccaagacaaaccagcctttccaaagtggttatgagctcttctttactttcaagaggaaggaaggacag

SEQ ID NO: 34221 - DNA, 120 bp, synthetic construct; identical to SEQ ID NO: 10005
  source 1..120: mol_type = other DNA

SEQ ID NO: 34222 - DNA, 120 bp, synthetic construct
  source 1..120: mol_type = other DNA
ctccccagtagctgggattacagatgcgcaccaccacccttggctactttttgtatttttagtagagacggcatttcatcatgttggccagcgtggtctcgaacttctgacctcaggtga

SEQ ID NO: 34223 - DNA, 120 bp, synthetic construct
  source 1..120: mol_type = other DNA
ctgcaatactcacatatattagccctgagaagtaccgctccctcaggttgtgtagcacggaggcttcgttgaggcacgtcagctccgccatgtcctccaccttggagaacttgggtgggt

SEQ ID NO: 34224 - DNA, 120 bp, synthetic construct
  source 1..120: mol_type = other DNA
aggggacccagacgagtctcttggcggcccagtcagcctgggccactgggctgttgatgaagtttttgtccacaaagaggaacttctcatcgtcactgagttggcccttctgcgccatgg

SEQ ID NO: 34225 - DNA, 120 bp, synthetic construct; identical to SEQ ID NO: 10006
  source 1..120: mol_type = other DNA

SEQ ID NO: 34226 - DNA, 120 bp, synthetic construct
  source 1..120: mol_type = other DNA
tgtgggaggccgaggtgggcaaatcacttgaggccaggagttcaagaccagcctggccaacatggtgaaaccccgtctctactgaaaatacaaaaattagccaggtgtgatggtgtgcac

SEQ ID NO: 34227 - DNA, 120 bp, synthetic construct
  source 1..120: mol_type = other DNA
tcaaaaaaaaaaaaaaaaaaagaagaagaagccggaagtaagtgtacacgtgctaatatgggaagatggtcaagtctaactgtgcgctgcaaaataagagtcctcatacgattaaacata

SEQ ID NO: 34228 - DNA, 120 bp, synthetic construct
  source 1..120: mol_type = other DNA
agctacttgggaggctgaggtgggagaatcacctgagcctgggaggtcaagattgcagtgagccaagatcaagccactgcactccagcctgggtgacagagtgagactctgccttaaaaa

SEQ ID NO: 34229 - DNA, 120 bp, synthetic construct; identical to SEQ ID NO: 10007
  source 1..120: mol_type = other DNA

SEQ ID NO: 34230 - DNA, 120 bp, synthetic construct
  source 1..120: mol_type = other DNA
tcccagctactcaggaggctgaggcaagaggattgcttgaacccaggaggcggaggttgcagtgagctgagatcgcgccactgcactccagcctcggcgacagagcgagactctgtctcg

SEQ ID NO: 34231 - DNA, 120 bp, synthetic construct
  source 1..120: mol_type = other DNA
caaggcaggggggatcacttgaggtcaggagtttgaaaccagcctgcccaatgtggtaaaaccccatctctactaaaaatacaaaaattagccgggcatggtggtgcacacctgtaatcc

SEQ ID NO: 34232 - DNA, 120 bp, synthetic construct
  source 1..120: mol_type = other DNA
aaattaaaaaaaagagttgccagtggcaaggaaaggaatggattagtaagaggcacagaagaggtacataagaggtaagaggcaccacctttcggggtgataaaagtattccctgtggtc

SEQ ID NO: 34233 - DNA, 120 bp, synthetic construct
  source 1..120: mol_type = other DNA
cattgaatgttcccaacacaaagagatgataaatgtcattatataggaagtagcaaaataaaagtaatggcaaatgcttgagatgatggatatgctaattatcctgatcttatctcccca

SEQ ID NO: 34234 - DNA, 120 bp, synthetic construct; identical to SEQ ID NO: 10008
  source 1..120: mol_type = other DNA

SEQ ID NO: 34235 - DNA, 120 bp, synthetic construct
  source 1..120: mol_type = other DNA
atgaacatgtatgattatttgtcaattaagaaataaattttttaagttgaaaaaactcactcaagctgtacacttaaaaaaacttgaatttgttttaaatcggtgagttttactttatat

SEQ ID NO: 34236 - DNA, 120 bp, synthetic construct
  source 1..120: mol_type = other DNA
gttctatctggtcaaatacgagacagtgtgaatatcaataagaaaaataattatatgtccatcaccctaacaccccaaaaagggtggaaagacaaatatatttaaatgcatttgttcaaa

SEQ ID NO: 34237 - DNA, 120 bp, synthetic construct
  source 1..120: mol_type = other DNA
agcttcccgagtaactaggattacaggcgtgcaccatcacacccagctaatttttgtatttttagtagagacggggcttcgccaagttggccaggctggtctcaaactcctgacctcaag

SEQ ID NO: 34238 - DNA, 120 bp, synthetic construct; identical to SEQ ID NO: 10009
  source 1..120: mol_type = other DNA

SEQ ID NO: 34239 - DNA, 120 bp, synthetic construct
  source 1..120: mol_type = other DNA
ctggaaacactggcttacagccccttctacctcttgctgctgggctccaaagaactgagttgctggctaagtgaggacatatggccaccaggatctatgcgtggttgacatccctccttc

SEQ ID NO: 34240 - DNA, 120 bp, synthetic construct
  source 1..120: mol_type = other DNA
ctcctgaaacccaaccttttgggtgatgcagattttgcaagacagaatgggagtggcagatattccaatacctatttttttcctttcagggctgaaaataataattaaaaaactaatttt

SEQ ID NO: 34241 - DNA, 120 bp, synthetic construct
  source 1..120: mol_type = other DNA
atctctactaaaaatacgaaaagttgctgggcgtggtagcatgcgcctacaatcccagctactcgggaggctgaggcaggagaatcacttgaacccgggaggtggaggttgcagtgagcc

SEQ ID NO: 34242 - DNA, 120 bp, synthetic construct; identical to SEQ ID NO: 10010
  source 1..120: mol_type = other DNA

SEQ ID NO: 34243 - DNA, 120 bp, synthetic construct
  source 1..120: mol_type = other DNA
cagaggttgcagtgagctgagatggtgccactgcactctggcccaggcaacagagcaagacttcatccaaaaaaaaaaaaaaaaaaaaaaaaaaaagggcagagaaatgaggaaatccca

SEQ ID NO: 34244 - DNA, 120 bp, synthetic construct; identical to SEQ ID NO: 10011
  source 1..120: mol_type = other DNA

SEQ ID NO: 34245 - DNA, 120 bp, synthetic construct
  source 1..120: mol_type = other DNA
gcctggtcaacatgggaaaaccctgtctctactaaaaaatacaaaaattagctgggcatagtggcatgtgcctgtaattccagctactcaggaggctgaggcaggagaattacttgaact

SEQ ID NO: 34246 - DNA, 120 bp, synthetic construct
  source 1..120: mol_type = other DNA
gcacagtggctcacacctgtaatcccagcactttgggaggctgaggcgggcagatcacgaagtcaagagatcgagaccatcctggctaacacggcaaaaccctgtctctactaaaaaaaa

SEQ ID NO: 34247 - DNA, 120 bp, synthetic construct; identical to SEQ ID NO: 10012
  source 1..120: mol_type = other DNA

SEQ ID NO: 34248 - DNA, 120 bp, synthetic construct
  source 1..120: mol_type = other DNA
tagggtccccaccacaagactgactatatcagatgaagagctcttgtggaatttttaagggatgggtccgcctgccatcacctaaatctactaattaaccctaacatcacaaaaagagag

SEQ ID NO: 34249 - DNA, 120 bp, synthetic construct; identical to SEQ ID NO: 10013
  source 1..120: mol_type = other DNA

SEQ ID NO: 34250 - DNA, 120 bp, synthetic construct
  source 1..120: mol_type = other DNA
tttagtagagacggggtttcaccatattgtccaggctggtctcaaactcctgacctcaggtgatctaccggccttggcctctcaaagtgctgacattacaggtgtgagccaccacgctcg

SEQ ID NO: 34251 - DNA, 120 bp, synthetic construct
  source 1..120: mol_type = other DNA
ggaggccaaggcaggaggattgcttgagcccaggagttcgagaccagactgggcattatagcaagaccccatcccttaaaaaaaatatcagccaggcatgatgatgcgtgcttgtagtcc

SEQ ID NO: 34252 - DNA, 120 bp, synthetic construct
  source 1..120: mol_type = other DNA
agagaaagccacagagaacgagaacatttcataaatatagggcattttcattagcctaaaagatctttctgagcctaaataaagtacaagttcattggtgctggcaacatttgattggtt

SEQ ID NO: 34253 - DNA, 120 bp, synthetic construct; identical to SEQ ID NO: 10014
  source 1..120: mol_type = other DNA

SEQ ID NO: 34254 - DNA, 120 bp, synthetic construct
  source 1..120: mol_type = other DNA
gcgatttttttttttttttttagctcatcagctatcattagtgctagtgtattttacgtgtggcccaagacaattcttctttttctggggtggcccagggaagccaaaagataggacacc

SEQ ID NO: 34255 - DNA, 120 bp, synthetic construct
  source 1..120: mol_type = other DNA
tttctggacagccatagtcacagaagtggcttgatacgacgcgtcttcttttaatagtataaccaaggttagtttaaacaggcagcaaaataggaaatgcggcaaaatattcaatcattc

SEQ ID NO: 34256 - DNA, 120 bp, synthetic construct
  source 1..120: mol_type = other DNA
agggtgtgaagatgaagtaagattgatcacaagtaggccgagtgtgatggctcatgcctataatcccagaactttgggaggctgaggtgggaggataacttgaggtcaggagtttgagac

SEQ ID NO: 34257 - DNA, 120 bp, synthetic construct
  source 1..120: mol_type = other DNA
cttgaacccgggaggtggaggttgccgtaagccgacatcataccactacactccagccttggcgacagagtcagcctccatctcaaaaaaaaagaagtgtcagagctgggacccaaacct

SEQ ID NO: 34258 - DNA, 120 bp, synthetic construct; identical to SEQ ID NO: 10015
  source 1..120: mol_type = other DNA

SEQ ID NO: 34259 - DNA, 120 bp, synthetic construct
  source 1..120: mol_type = other DNA
caatgattgcaaggacagaacgtgaggggggcttgtgagggttgacctctagatcttcatctgaatgccagccctatgagtgttcactttctgaaaattcatcaaactgttgggccaggt

SEQ ID NO: 34260 - DNA, 120 bp, synthetic construct
  source 1..120: mol_type = other DNA
tttttaattacctgtgtggaagactgaggtaggaggataacctgagcccaggaggctgagaccggcctggtcaacatggtgaaaccttgtctctagcaaacatacaaaaattaaccggtt

SEQ ID NO: 34261 - DNA, 120 bp, synthetic construct
  source 1..120: mol_type = other DNA
cagagtgagacccccatctataaaaaatatatcctcttgaaaattcatcaagctgcacacttttttgcacatcaagcgtacttttttggttgtaaagtacacttcattttccttccctct

SEQ ID NO: 34262 - DNA, 120 bp, synthetic construct; identical to SEQ ID NO: 10016
  source 1..120: mol_type = other DNA

SEQ ID NO: 34263 - DNA, 120 bp, synthetic construct
  source 1..120: mol_type = other DNA
caaatagttgggaccacaggcacctgccaccatgcccagctattttcctgtattctttgtagagacggggtttcaccatgttgtccaggctgaggtcttgaactcctgacctcaagtgat

SEQ ID NO: 34264 - DNA, 120 bp, synthetic construct
  source 1..120: mol_type = other DNA
gccatgtggatgagttgccttaaaagtcagaaaaaatagcaaaagctacaacagaaaaataaaaggacacgcacgcctccattgcctgggaccctgtctaacctcagacttaaaaacaca

SEQ ID NO: 34265 - DNA, 120 bp, synthetic construct; identical to SEQ ID NO: 10017
  source 1..120: mol_type = other DNA

SEQ ID NO: 34266 - DNA, 120 bp, synthetic construct
  source 1..120: mol_type = other DNA
caaaacacacaacaggacacttgagtctctggcagatccggaaacctgaaagctgttttgctcctacgagccttgggtccccaaaacaacatttagccacagatttgccaaatgttttga

SEQ ID NO: 34267 - DNA, 120 bp, synthetic construct
  source 1..120: mol_type = other DNA
cagagtctcgctctgttacccaggctggagtgcagtgacgcaatctcagctcactgcaacctccacgtttctgggttcaagtgattctcgtgcctcagcctcccaagtagctgggactac

SEQ ID NO: 34268 - DNA, 120 bp, synthetic construct
  source 1..120: mol_type = other DNA
aagtgctgggattacaggcgtgagccaccgcagctggccacaaactctgcactgtgactcttgggctgcgtcattctgtgtcgtgaggggagctcttccgtgcattgtgggatgttccgc

SEQ ID NO: 34269 - DNA, 120 bp, synthetic construct; identical to SEQ ID NO: 10018
  source 1..120: mol_type = other DNA

SEQ ID NO: 34270 - DNA, 120 bp, synthetic construct
  source 1..120: mol_type = other DNA
tgcatcagctccaagggctgaaaggacatctctgaaattactacccagaactgctgaccacgaagtacagttcactcatcaagagctgctctcaatgtttttggttgggggaagggtctc

SEQ ID NO: 34271 - DNA, 120 bp, synthetic construct
  source 1..120: mol_type = other DNA
acctcaggtgtgggccactatgcccggcttattttttgtagagatgggggtcttgctattttgcctaggctggtctcaaactcctgatctcaaatgatcctcctgccttggcttcccaaa

SEQ ID NO: 34272 - DNA, 120 bp, synthetic construct
  source 1..120: mol_type = other DNA
tcgaatgtttggatgaaaacaaatgactctgtcacctttggcattagcgatgtttgacacatctgagtgtgtcagccttgtttacagtcctgtcctgaccaacaactgcttcattctttt

SEQ ID NO: 34273 - DNA, 120 bp, synthetic construct; identical to SEQ ID NO: 10019
  source 1..120: mol_type = other DNA

SEQ ID NO: 34274 - DNA, 120 bp, synthetic construct
  source 1..120: mol_type = other DNA
agccaccgcgcccaggctgcttcattttttgagcacaaacaagctaatcattagcctctggaagaccttaggatgtcaagtaacgagtctcagctttgccccaaacctgctgggtgactc

SEQ ID NO: 34275 - DNA, 120 bp, synthetic construct
  source 1..120: mol_type = other DNA
tgaaactggaccaactgagaatgtcaggttgctttagtttgttttaccatcagtttcatttttcccagaagaactcaggggcaaaagatcttgccctctctgcttcagcattaataaaaa

SEQ ID NO: 34276 - DNA, 120 bp, synthetic construct
  source 1..120: mol_type = other DNA
tctctactaaaaatacaaaaaatagccaggtgtggtggtgggcgcctgtaataccagctactcaggaggctgaggaaggagaatcgcttgaacccaggaggtggagggtgcagtgagctg

SEQ ID NO: 34277 - DNA, 120 bp, synthetic construct; identical to SEQ ID NO: 10020
  source 1..120: mol_type = other DNA

SEQ ID NO: 34278 - DNA, 120 bp, synthetic construct
  source 1..120: mol_type = other DNA
caccagcctgcgcaacatggtgaaaccccatctctacagaaaatacaaaaattagccaggcatggcagcacatgccggtagtcccagctactcgggaggctgaggtgggaagatcgcttg

SEQ ID NO: 34279 - DNA, 120 bp, synthetic construct
  source 1..120: mol_type = other DNA
aaatgtcataaagggctggatacagtggttcacacctgtaatccaagaactatgggaggccaagccaagaggattgcttgaattaggagctctagactagcctgggcagcacagtgagat

SEQ ID NO: 34280 - DNA, 120 bp, synthetic construct
  source 1..120: mol_type = other DNA
tcaaggcctggtccaggtgtagggaggcatcaaatgtgtcgcagggagaggcactgggcactctaaatgcacctgcttggcaggtccccagtagtaccaaaaaggcagtttagatctatt

SEQ ID NO: 34281 - DNA, 120 bp, synthetic construct; identical to SEQ ID NO: 10021
  source 1..120: mol_type = other DNA

SEQ ID NO: 34282 - DNA, 120 bp, synthetic construct
  source 1..120: mol_type = other DNA
agccctacttcacttttacaggaaaaaaagtgaatggtgaacctgtcacattcttattgccttgtgacatctgcctaatcatctgaataccaatggtttcaagtaactccagaaagaagt

SEQ ID NO: 34283 - DNA, 120 bp, synthetic construct
  source 1..120: mol_type = other DNA
aaaagccccactgtgttttatattttacaattctggcataccacagcttaaaataaatgtatagtctcctatgtcaggggtccccaacccttgtgctgcagtatcagtcaatggcctgtt

SEQ ID NO: 34284 - DNA, 120 bp, synthetic construct
  source 1..120: mol_type = other DNA
ccacctgcaagggatctaggttgtacgttccttatgagaatctaaccaatgcctgatgatgaggtgggacagtttcatcccaaaaccatcctccccactccaccctggaaaatattgtct

SEQ ID NO: 34285 - DNA, 120 bp, synthetic construct; identical to SEQ ID NO: 10022
  source 1..120: mol_type = other DNA

SEQ ID NO: 34286 - DNA, 120 bp, synthetic construct
  source 1..120: mol_type = other DNA
agtcatttgcaatatctattaattttagatacgcatgccctttaactcagcaagcgcatttctgggaatttatcctacagataaattcatataattagacaaaaagtccaaggatgaaag

SEQ ID NO: 34287 - DNA, 120 bp, synthetic construct
  source 1..120: mol_type = other DNA
cctaatttactcagagatggcattagcgatgtttgacacatctgaatatgtcagccctattcacagtcctgtcctaacaactcactgcttcatcccttgagcacaaacaagctattcatt

SEQ ID NO: 34288 - DNA, 120 bp, synthetic construct
  source 1..120: mol_type = other DNA
taaagttctatgcccctcaccttttttttgagacagagtctcactctgttgcccaggctagagaacagtgatgcaatcagggcccacggcagccttgaactcctgggctcaagcaatcct

SEQ ID NO: 34289 - DNA, 120 bp, synthetic construct
  source 1..120: mol_type = other DNA
ctcctgacttcaagccatccccccacctcagcctcccaaattgctgggattacaggtatgacctgccatacctggcctctatggccctttcctagcaactttgatgaggttgttcctcct

SEQ ID NO: 34290 - DNA, 120 bp, synthetic construct; identical to SEQ ID NO: 10023
  source 1..120: mol_type = other DNA

SEQ ID NO: 34291 - DNA, 120 bp, synthetic construct
  source 1..120: mol_type = other DNA
tctactaaaaatacaaaaaattagccaggcatggtggtgggcgcctataaacccagctactctctactcaggaggctgaggctggagaagtgcctgaacctaggaggcggaggttgcagt

SEQ ID NO: 34292 - DNA, 120 bp, synthetic construct
  source 1..120: mol_type = other DNA
aggaatggtagcttaatatattaaagattctaatcaccactttcagcccaaatagaaacgaggtttatgagatcaaagggaagaaaattaagagaagcttctcctttaacggccacatag

SEQ ID NO: 34293 - DNA, 120 bp, synthetic construct
  source 1..120: mol_type = other DNA
ctaaacccttcatacacattagctcatcaaatcctcccatgagggtaatctgtgaaactctggagttagaaagacctagatttgtagaatcttcttttccttactggttagctgagctat

SEQ ID NO: 34294 - DNA, 120 bp, synthetic construct; identical to SEQ ID NO: 10024
  source 1..120: mol_type = other DNA

SEQ ID NO: 34295 - DNA, 120 bp, synthetic construct
  source 1..120: mol_type = other DNA
ggagacaattccctcccaccccccacccaaaaaaatcaaacctctgaataagagggggtaggaaaaaagaatcccactttcctcccaaatctcttctccttagggtttctccactagttc

SEQ ID NO: 34296 - DNA, 120 bp, synthetic construct
  source 1..120: mol_type = other DNA
tgggcatgtttgcctcaatctctgccctcccacggaaaagtaatgataacaaatccataacagataccttgtacggaataacacatctatttcggacatgataataaaaaaacatggtgt

SEQ ID NO: 34297 - DNA, 120 bp, synthetic construct; identical to SEQ ID NO: 10025
  source 1..120: mol_type = other DNA

SEQ ID NO: 34298 - DNA, 120 bp, synthetic construct
  source 1..120: mol_type = other DNA
agtttgtgtccatggtaaagaagaaagatagtggggtcaagggtatgaacttggactcaaactgacccgggaatgggttctaccacttgctggctgtgtgacactttacctctctgagcc

SEQ ID NO: 34299 - DNA, 120 bp, synthetic construct
  source 1..120: mol_type = other DNA
aacggtagctatctcaaagggaaaacatcaatttccttcaaacaaaattctctatcttatttcacaccctgccacctaatgactttcagttcagcgtcaagttccgtctctgaacaattc

SEQ ID NO: 34300 - DNA, 120 bp, synthetic construct
  source 1..120: mol_type = other DNA
tcatactgcaactaaacactcccaccttgggtttctaaatattttcttttacttcttgacaagcatggctttggatggtaccttttctcaagtggcaaaatccctaccagaccctgtgct

SEQ ID NO: 34301 - DNA, 120 bp, synthetic construct
  source 1..120: mol_type = other DNA
gcacctgcagatcgtggaagcaaatggagactttggagcccacctgggtatctgggggccctttggggtcaacctgggtgagttgttttttttttttttaatttggagaagaggaaaaag

SEQ ID NO: 34302 - DNA, 120 bp, synthetic construct; identical to SEQ ID NO: 10026
  source 1..120: mol_type = other DNA

SEQ ID NO: 34303 - DNA, 120 bp, synthetic construct
  source 1..120: mol_type = other DNA
taatttttttttttttaaggcagtttttctggggattctagagttgggaaatggagttgggtccaggcattgatatcgttaataagcacccccaaaatggtacttctcactggcaatctt

SEQ ID NO: 34304 - DNA, 120 bp, synthetic construct
  source 1..120: mol_type = other DNA
caccccagcccctatagaataccctataggacttttaacacccccctgccctgcaatctgcccccagaatgacaactactacttacagatctccaactggggggactagtggagaggaaa

SEQ ID NO: 34305 - DNA, 120 bp, synthetic construct; identical to SEQ ID NO: 10027
  source 1..120: mol_type = other DNA

SEQ ID NO: 34306 - DNA, 120 bp, synthetic construct
  source 1..120: mol_type = other DNA
ccgggttctctgggatgtccattttaggtttgagttacaagattgcaggacaaaattaggtggaagggaactggaaactagcagttggggggaaactgggatatactggttgtatataaa

SEQ ID NO: 34307 - DNA, 120 bp, synthetic construct
  source 1..120: mol_type = other DNA
aggctgaggcgagtggatcacaaggtcaggagttcaagaccagcctggccaacatggtgaaaccgcatctctactaaaatataaaaattagctagacatggtagcacatgcctataatcc

SEQ ID NO: 34308 - DNA, 120 bp, synthetic construct; identical to SEQ ID NO: 10028
  source 1..120: mol_type = other DNA

SEQ ID NO: 34309 - DNA, 120 bp, synthetic construct
  source 1..120: mol_type = other DNA
cctgggactcggcgatgtccgcccgctcctctgcctcatccagctcgtgctgcaccttgcggaacttggacaggttggtgttggcttgctcctcctgcgggaggtgggagcatgaggtga

SEQ ID NO: 34310 - DNA, 120 bp, synthetic construct
  source 1..120: mol_type = other DNA
aggccttgacctttagctgcagcttgtctaccaggtcctgcagccgcagcaggtttttcctgtcctcctccgtctgggggccagagggtaggcagggggtgaagatggcacagtcataga

SEQ ID NO: 34311 - DNA, 120 bp, synthetic construct; identical to SEQ ID NO: 10029
  source 1..120: mol_type = other DNA

SEQ ID NO: 34312 - DNA, 120 bp, synthetic construct
  source 1..120: mol_type = other DNA
atctaagttaaggacaaagtgtgcttagagagatagtgacatcctggattggaaaagaaacaaattctaattcagagtctgattctagaaaacacctcagaaagctagagtccacactgc

SEQ ID NO: 34313 - DNA, 120 bp, synthetic construct
  source 1..120: mol_type = other DNA
tgagctttgtctggaattctgtgtgtgtcccctggcgatgggctaagagtgggtgttgagatggagctcccaggccaggaggctcagagactgacctctgagctaggggacattcagagt

SEQ ID NO: 34314 - DNA, 120 bp, synthetic construct
  source 1..120: mol_type = other DNA
tgcctggagtcaccgcccgtcgcacctggtaggtgagctccttgatgcgccgctcgctcttcctcatgcccttcaccgactctgcgttgcgcttctgctcggcctccagctcattctcca

SEQ ID NO: 34315 - DNA, 120 bp, synthetic construct; identical to SEQ ID NO: 10030
  source 1..120: mol_type = other DNA

SEQ ID NO: 34316 - DNA, 120 bp, synthetic construct
  source 1..120: mol_type = other DNA
ccacttcagtctggagctgggacaggtcagcatccatcttcttcttctggttgatgaggctggtgttctgggttgggggagggttgggcagagcaggaaaagcattgagcatctatgcat

SEQ ID NO: 34317 - DNA, 120 bp, synthetic construct
  source 1..120: mol_type = other DNA
gctcctgctccgccagcttccgggaccgctctgtctgctccaccacggcacgcaactcctccagctcagcctgcagcaggttgttgcgccgctccacgatggcgatgttctccttcaggt

SEQ ID NO: 34318 - DNA, 120 bp, synthetic construct; identical to SEQ ID NO: 10031
  source 1..120: mol_type = other DNA

SEQ ID NO: 34319 - DNA, 120 bp, synthetic construct
  source 1..120: mol_type = other DNA
cgtccagggaggtctgcagcgagtccaccacccgcaggtggttgcgcttggcctgttccatctcctcgtccttctctgccagcttccgctcgatctctgccttgatctggttgaactcca

SEQ ID NO: 34320 - DNA, 120 bp, synthetic construct
  source 1..120: mol_type = other DNA
cactaatcatggatacgaagtgacttcaagagtggtgtaagtggttcaaagaagcagaaggtggaggaaaagagaatctaagagaaaataaaaataagcctaagagaaagtgattcaggc

SEQ ID NO: 34321 - DNA, 120 bp, synthetic construct
  source 1..120: mol_type = other DNA
accgggaggtatgtggaaatgggaagctcagctaagatgcaatgggtaaaatgtttatgtgaagagagttcagtgactggtcattcattcactccacaaatcttcactgaatgcctacta

SEQ ID NO: 34322 - DNA, 120 bp, synthetic construct; identical to SEQ ID NO: 10032
  source 1..120: mol_type = other DNA

SEQ ID NO: 34323 - DNA, 120 bp, synthetic construct
  source 1..120: mol_type = other DNA
gagcccttgggtggcaccatatgggaacactgccagtgcagcccctccccagcctcttgggcccccagcacaccctgcaggtttttgttctcccgcttgaaggtctccagatgttccagg

SEQ ID NO: 34324 - DNA, 120 bp, synthetic construct
  source 1..120: mol_type = other DNA
ggccaggatctgcccggggacaaggctcactcttcagccccccagcctcagccccatgtccagggtctgtctcaggacctgcctgggctcagccctcctcccccacctccaaggaggatg

SEQ ID NO: 34325 - DNA, 120 bp, synthetic construct
  source 1..120: mol_type = other DNA
gcagcagcattggagcgctctacgtccaccatcaagtcctcgatctcattctgtagccggtgcttggtcttctccagcgaggagcacttggcattaacagcctccacggcctcctcagct

SEQ ID NO: 34326 - DNA, 120 bp, synthetic construct
  source 1..120: mol_type = other DNA
acaatccttgaaacctcagaagtgtagctggagaagcctgaggacaggtcccaggggccgagaacatcaggcagaggatcccagcagggcgtggagacccaggcaccctctgaccctggc

SEQ ID NO: 34327 - DNA, 120 bp, synthetic construct; identical to SEQ ID NO: 10033
  source 1..120: mol_type = other DNA

SEQ ID NO: 34328 - DNA, 120 bp, synthetic construct
  source 1..120: mol_type = other DNA
atggcgtccgtctcatacttggtcctccactgggccacctccgagttggccttggaaaggacgcgctgcagctcggccttggcctccgtctcctcctcgtactgctcccgcagcaggtcg

SEQ ID NO: 34329 - DNA, 120 bp, synthetic construct; identical to SEQ ID NO: 2865
  source 1..120: mol_type = other DNA

SEQ ID NO: 34330 - DNA, 120 bp, synthetic construct; identical to SEQ ID NO: 10034
  source 1..120: mol_type = other DNA

SEQ ID NO: 34331 - DNA, 120 bp, synthetic construct
  source 1..120: mol_type = other DNA
tcattttctctcctccttctcacaccctgcctcccgtccagggatgcagcagaagcagagggcctcagcctggggagtagatggcatgtggcagggtttgggctgtgatttctttttaga

SEQ ID NO: 34332 - DNA, 120 bp, synthetic construct
  source 1..120: mol_type = other DNA
aacctcctcctccagctgcctcttgaggtcctccagctgctgggtgtaggtgagcttgcctcgggtcagctgggagatcagtgcctccttctcatccagctgccgggacagctcacctgg

SEQ ID NO: 34333 - DNA, 120 bp, synthetic construct
  source 1..120: mol_type = other DNA
ggagtggctcaggaggttggggagactgtggtgggaaccatggagcccctgctctaggctcaccattctcggtttgcaacttggcccgctggctggtgaggtcgttgacagaacgctggg

SEQ ID NO: 34334 - DNA, 120 bp, synthetic construct; identical to SEQ ID NO: 10035
  source 1..120: mol_type = other DNA

SEQ ID NO: 34335 - DNA, 120 bp, synthetic construct
  source 1..120: mol_type = other DNA
ctccagcttgaactcgctcttctccttctccagcttctgcttcacccgctgcaggttgtcgatctgctcgcccagctcggccacgctgtcggcgtgcttcttgcgcagggccgcggcagt

SEQ ID NO: 34336 - DNA, 120 bp, synthetic construct
  source 1..120: mol_type = other DNA
ccagccgctcgctgatctcctccagctcccgagacaggtctgagcgcagcttctccaccttagccctggcggtgcgctcggcctccagctcctcctccagctcctcgatgcgtgcctggt

SEQ ID NO: 34337 - DNA, 120 bp, synthetic construct
  source 1..120: mol_type = other DNA
gagaggtgggaattaaaggatttggggaagatagtttgaagagccttcctttaggcgagggcctgacagtctacatgctctttattggaaggaaagtggttgaaacttgctcttaaagat

SEQ ID NO: 34338 - DNA, 120 bp, synthetic construct; identical to SEQ ID NO: 10036
  source 1..120: mol_type = other DNA

SEQ ID NO: 34339 - DNA, 120 bp, synthetic construct
  source 1..120: mol_type = other DNA
ggatgtatccatgggcacactgtgatagctgcgtgcctgcctccatggacacataatcagttcctgtaatgctgtgaacaggacaccctagaggagggggcaggggaaacagaaccagcc

SEQ ID NO: 34340 - DNA, 120 bp, synthetic construct
  source 1..120: mol_type = other DNA
aagtcttttctgtggggaaggagggatggtgaggtaagggagactcgtggggcctcaggagggtccaccagtggttgaaaatggtaatgatacaggtaaagagtaggatttcattagaaa

SEQ ID NO: 34341 - DNA, 120 bp, synthetic construct
  source 1..120: mol_type = other DNA
gggctctacaggacattcccatctttggtccttgttttctcataatgtaaaatgagggggtcggactagattgtttcaaaggtcctttttagctctgatggtctttaattttgtcactat

SEQ ID NO: 34342 - DNA, 120 bp, synthetic construct
  source 1..120: mol_type = other DNA
tttattcatttattcaacacattctgtgcctgggaaggtatgaagattcctgtgcaaacacaaacttgatgaggatgtagattatgatgattctcaaagcctttcaaagtcctgagcctg

SEQ ID NO: 34343 - DNA, 120 bp, synthetic construct; identical to SEQ ID NO: 10037
  source 1..120: mol_type = other DNA

SEQ ID NO: 34344 - DNA, 120 bp, synthetic construct
  source 1..120: mol_type = other DNA
aggctgttattttcattcccactgagtgcctaacaagaagaaaggactcatgggatacaatggactttttgccagggaggaccatctaactaaccctgatatctgggactaggggaggaa

SEQ ID NO: 34345 - DNA, 120 bp, synthetic construct
  source 1..120: mol_type = other DNA
gctggggaggaggaagggcagcagggaggggacacagtactttttcagccgctcatccagctgctgcttgtcattctccaggtccatgatgctctcctgggtcagcttcaggtcgccctc

SEQ ID NO: 34346 - DNA, 120 bp, synthetic construct; identical to SEQ ID NO: 10038
  source 1..120: mol_type = other DNA

SEQ ID NO: 34347 - DNA, 120 bp, synthetic construct
  source 1..120: mol_type = other DNA
tattaggggactgtgagattgcctagatataggggatgctgaatcaatattttatagataaaggaataaatgactgtgggatgaaaccccaaagccgtattctttctttctttccctttc

SEQ ID NO: 34348 - DNA, 120 bp, synthetic construct
  source 1..120: mol_type = other DNA
ggctcactgcaacctccgcctccctggttcaagggattattctgcctcagcctcctgagtagctgggactacaggcgcacgccaccacatccagctaatttttgtatttttagtagagat

SEQ ID NO: 34349 - DNA, 120 bp, synthetic construct
  source 1..120: mol_type = other DNA
ccgtattcattctttcagcatcctataaacacctactgggcatcaggctctgtgctaagcactgcagtccccaaattgaatagatctaagttcctatctaaaggaagcttgtagtcttat

SEQ ID NO: 34350 - DNA, 120 bp, synthetic construct
  source 1..120: mol_type = other DNA
acagagtgataagtgagtcaacagacatatgtgcatcagagggaacaatgatcagattctgccttaaatattggaatttcaaaaattctacttggggagcctcacaaaatttccaaagaa

SEQ ID NO: 34351 - DNA, 120 bp, synthetic construct; identical to SEQ ID NO: 2870
  source 1..120: mol_type = other DNA

SEQ ID NO: 34352 - DNA, 120 bp, synthetic construct
  source 1..120: mol_type = other DNA
actctcaatctactcacatcatccacttgctgctccagcttgactttggccttagtcagggtgttgaccttgtcctcctcggcctgaaggtcatccagagcctgttggtgggcctcttgc

SEQ ID NO: 34353 - DNA, 120 bp, synthetic construct
  source 1..120: mol_type = other DNA
ggtcaccagcttggtgccatctgtggggagctccatgtcaaggtccatgctgctctctggatgccgagtggctagcctgggtcaaggtcagtatggtctgagagtcctgatgagacccgg

SEQ ID NO: 34354 - DNA, 120 bp, synthetic construct
  source 1..120: mol_type = other DNA
actcatcttccagcttgcgcttcttggcagtgagctcagcattcatctcctcctcatcctccagcctctcgttcatctccttcaccttggcctccagctgaatcttgtttttgatcagct

SEQ ID NO: 34355 - DNA, 120 bp, synthetic construct
  source 1..120: mol_type = other DNA
gagggaaggagaggcacatcactcaaataggagggtaactctaggatatccccacttggcaagagcttcagaagtatggggaggggaagagtttcaggatagtataacttgggaacactg

SEQ ID NO: 34356 - DNA, 120 bp, synthetic construct; identical to SEQ ID NO: 10040
  source 1..120: mol_type = other DNA

SEQ ID NO: 34357 - DNA, 120 bp, synthetic construct
  source 1..120: mol_type = other DNA
aaggaacaagacagtgagcccctgtgcagggaggtgcagggttgtgggaagtgaaggcagagcagggtggaagagccaacagtagcccaggagcctcaccgcctgcacttggagctgcag

SEQ ID NO: 34358 - DNA, 120 bp, synthetic construct
  source 1..120: mol_type = other DNA
ctctctttctgcactcttcagcagcggcttgatcttgaagtagagcttcatccagggccaattcttgacccccatgaaggcccgaatgttccactggattaccagcagggagtctctgca

SEQ ID NO: 34359 - DNA, 120 bp, synthetic construct; identical to SEQ ID NO: 10041
  source 1..120: mol_type = other DNA

SEQ ID NO: 34360 - DNA, 120 bp, synthetic construct
  source 1..120: mol_type = other DNA
agccccagcagcccggccttgaagaacacctgcaggcaaggtgtgtgttggccatgactagggaggggtacgagggaaagagatggtggggattaccttaggaagggtaacagcctagaa

SEQ ID NO: 34361 - DNA, 120 bp, synthetic construct
  source 1..120: mol_type = other DNA
tacaacaggaaaagcatcagaggagtcaatggaaaagagatgtcttcctttaattaattagtctcctttcctcaccttggtgtggccaaacttgtactggttgtgatcaatgtccaggga

SEQ ID NO: 34362 - DNA, 120 bp, synthetic construct
  source 1..120: mol_type = other DNA
atctgctctgcccatagaattccagggtcacctgcagatcccattcccatcagggcagcctggctccccctgttctatgagctctggtgcaccctcatacccacctctgccggaagtccc

SEQ ID NO: 34363 - DNA, 120 bp, synthetic construct; identical to SEQ ID NO: 10042
  source 1..120: mol_type = other DNA

SEQ ID NO: 34364 - DNA, 120 bp, synthetic construct
  source 1..120: mol_type = other DNA
gttatgggactggcccaagttcactaagctgatcaagaacagagccaggtcttgaacccaggtccctgagcctctgtctcctaattagccaaaaatggattaacaatttgaatatgtctc

SEQ ID NO: 34365 - DNA, 120 bp, synthetic construct
  source 1..120: mol_type = other DNA
agagtgccttacacatcaccctcattacacactgcaagtgcaaggtagcgctgagagggaggtaccctgggaggcctcatgcgggatgggaggagaagaatgtggtttggaaaccactgt

SEQ ID NO: 34366 - DNA, 120 bp, synthetic construct
  source 1..120: mol_type = other DNA
atgatacaacgtacaaagtggggatgggtggagcgcaagttggtcatcagcttgttcagattttcctgtggccaaaaatgcaatagagaaaagtaaagaaaatgccagaaagagatgcag

SEQ ID NO: 34367 - DNA, 120 bp, synthetic construct
  source 1..120: mol_type = other DNA
agaagggaaagaggagagaagggagatgggaagtaaataagtgaagaggccaggagatgacgggaagagaagacagagtgaaaatggtcccgaatgcaccaaggagacagggaacgggag

SEQ ID NO: 34368 - DNA, 120 bp, synthetic construct; identical to SEQ ID NO: 10043
  source 1..120: mol_type = other DNA

SEQ ID NO: 34369 - DNA, 120 bp, synthetic construct
  source 1..120: mol_type = other DNA
tgtaaaccttggggtacaacctgacattgaagtggtggggtgtagcaattgacctggctcagaaccttggcagaatccctgctcctctgtaccgggagcctcagtccctacttacgcgca

SEQ ID NO: 34370 - DNA, 120 bp, synthetic construct
  source 1..120: mol_type = other DNA
aatgatgttgtagtccacgatgccggcatagtggatcagggagaagtgggcttcaggcttccccttgatattgcgtggcttctggaagttggcggatttgcccaggtggttgtcaaacag

SEQ ID NO: 34371 - DNA, 120 bp, synthetic construct; identical to SEQ ID NO: 10044
  source 1..120: mol_type = other DNA

SEQ ID NO: 34372 - DNA, 120 bp, synthetic construct
  source 1..120: mol_type = other DNA
ctgagatgctagggttgaaaataggtgcactcttatgatcccctacaccaccctcacacttcctgatccttggatgcataaaccaggcccaataaacatgcaggtgtgggaggtcatcat

SEQ ID NO: 34373 - DNA, 120 bp, synthetic construct
  source 1..120: mol_type = other DNA
tatttttatattccccagaagggagaggggctgctattttgtctatggtgttcttgttgggtgtgcagggagaattcaggtggtaaggccaaagaggcaccttctcgatgaggtcaatgc

SEQ ID NO: 34374 - DNA, 120 bp, synthetic construct
  source 1..120: mol_type = other DNA
agttgatgcagagctgctcaaagctgttgaactgcagggggcatgaggggtgggagcagtcagaaagtgggtgtgagtggccattggggctgtgcccgtccactgtgcctgagcccagca

SEQ ID NO: 34375 - DNA, 120 bp, synthetic construct
  source 1..120: mol_type = other DNA
ggctctaagcaaatagctgttgaatgtgggagcgagtgagtgattgttctcccactcccaggggtcccaactcacatcgaagatctcgaagccagcgatgtccaggactcctatgaagta

SEQ ID NO: 34376 - DNA, 120 bp, synthetic construct; identical to SEQ ID NO: 10045
  source 1..120: mol_type = other DNA

SEQ ID NO: 34377 - DNA, 120 bp, synthetic construct
  source 1..120: mol_type = other DNA
ggaaggaaaaggcaagtagcaaagttggtaaagagatgactgctggccaggtgtggtggttcatgcctgtaatcccagcactttgggaggccaaggcaggcggatcacttgaggtcagga

SEQ ID NO: 34378 - DNA, 120 bp, synthetic construct
  source 1..120: mol_type = other DNA
cacttgaacccaggatgtggaggtggcagtgagccaagatcgtgccactgcgctccagcctgggcaacagagcaagactccatctcaaaaaaaaaaaaaaaagaaaaaagagaagagaga

SEQ ID NO: 34379 - DNA, 120 bp, synthetic construct; identical to SEQ ID NO: 10046
  source 1..120: mol_type = other DNA

SEQ ID NO: 34380 - DNA, 120 bp, synthetic construct
  source 1..120: mol_type = other DNA
caaaacaaaggatgtaagatgcagggaactccaaaacaaaggatgtaagatgcaagagcagagcagacgtcagttggccgcagccccagtgtcagtggccacagcttttctgagttaccc

SEQ ID NO: 34381 - DNA, 120 bp, synthetic construct
  source 1..120: mol_type = other DNA
ctcgtcctgctccctcggtgatgcttgtttcttggcttgtgtgtctctctgtctcatggctttcagctcttcctggtttgatagaacaccagatactggccagtcctgtctcacctcatc

SEQ ID NO: 34382 - DNA, 120 bp, synthetic construct
  source 1..120: mol_type = other DNA
cccctcactgccaatcctcccaccccctggctgggtcctcacacactcacatcagtggccatgagctcctcagcgtcatcaatggaggccacggtggtctctccttgggagatgaatgca

SEQ ID NO: 34383 - DNA, 120 bp, synthetic construct
  source 1..120: mol_type = other DNA
tgaggaagagcacaggacagggcttggcttggccccacatcccactgaattgaatccagcagtgccatgaaacccagggcatgccagctgagtccagccacaagcagaggggaccaggtt

SEQ ID NO: 34384 - DNA, 120 bp, synthetic construct; identical to SEQ ID NO: 10047
  source 1..120: mol_type = other DNA

SEQ ID NO: 34385 - DNA, 120 bp, synthetic construct
  source 1..120: mol_type = other DNA
agaaagacacctagccatgcagagacagaaatggagaaagatgcagaggaagtctcagagagagacagatatgtagacctgaagacagagacacctacagacagagacttaaagaggaga

SEQ ID NO: 34386 - DNA, 120 bp, synthetic construct
  source 1..120: mol_type = other DNA
gtctctatgtctgcagatgccaactttcctgttgccccaaaatgaattcgaatgaatttcccctggagagatggaagagagtggtgatgagttgggggaaggctcatatctgagaccatt

SEQ ID NO: 34387 - DNA, 120 bp, synthetic construct
  source 1..120: mol_type = other DNA
ctggtcctccagggtgccctgcagaggccaagaaggaggcaggtgagagctcttctccctccctttctgcggtacaggaccttggagggcagcaggcctaccttgcccgggctctggtcc

SEQ ID NO: 34388 - DNA, 120 bp, synthetic construct; identical to SEQ ID NO: 10048
  source 1..120: mol_type = other DNA

SEQ ID NO: 34389 - DNA, 120 bp, synthetic construct
  source 1..120: mol_type = other DNA
tgggctgttttgggaaaagttggtagggctggaagaatgggaaatgtttctgaagggaaagaaaatgcagaggtgaagacatggcgataatgagcttctggataaacgcgtgatgagttg

SEQ ID NO: 34390 - DNA, 120 bp, synthetic construct
  source 1..120: mol_type = other DNA
ttggggggaaagaggctgagtctatgcctcggggcctgggacacctgatggggctggaggctgggatcagggagattctgaaagggaatacagtagcagctacactcacgtgatcaggat

SEQ ID NO: 34391 - DNA, 120 bp, synthetic construct
  source 1..120: mol_type = other DNA
ttcaggaagacccttccagggcctctcacctgtcagcatgtactgataggcgttgtcggagatggagaagatgtggggcggggcctcgctcctcttcttgccccggtaggcagccaccac

SEQ ID NO: 34392 - DNA, 120 bp, synthetic construct; identical to SEQ ID NO: 2880
  source 1..120: mol_type = other DNA

SEQ ID NO: 34393 - DNA, 120 bp, synthetic construct
  source 1..120: mol_type = other DNA
catccaggagccgtagcgatccttgaggttgtagagcaccgcgggctcatgcaggaaggtcagcatggccatgtcctcgattttgtcgaacttgggtgggttctgctgcatcacctggtc

SEQ ID NO: 34394 - DNA, 120 bp, synthetic construct
  source 1..120: mol_type = other DNA
gaaggaaccaggatctcacagggaagacagaagggatattgggaaggagagggctctttggagggtctggattcttccccaaagggaaggagaatgggaccatcctcaggtctgcatggg

SEQ ID NO: 34395 - DNA, 120 bp, synthetic construct; identical to SEQ ID NO: 10050
  source 1..120: mol_type = other DNA

SEQ ID NO: 34396 - DNA, 120 bp, synthetic construct
  source 1..120: mol_type = other DNA
tagcaccatgctcaagagtcaagaggagttaccagtgagtcccttcctctttgaggttaccccttaaccagaggagcagcctagcaaacctgccagggtaaaaggaacaactaactattg

SEQ ID NO: 34397 - DNA, 120 bp, synthetic construct
  source 1..120: mol_type = other DNA
acaggtaagtagctcttgatagccaagatattctctccagcacatggcagaaactagagttccataggctggctttggggctctaatgcccagtcttactagattttcaacactctagct

SEQ ID NO: 34398 - DNA, 120 bp, synthetic construct
  source 1..120: mol_type = other DNA
agtcccaccttcctgcttctccctggctctgttcttcagcatccaccctcttccaaaacaaggtggaaagggtggtcagcttctctggtcccatccttcttgtttttcaaaccctattcc

SEQ ID NO: 34399 - DNA, 120 bp, synthetic construct; identical to SEQ ID NO: 10051
  source 1..120: mol_type = other DNA

SEQ ID NO: 34400 - DNA, 120 bp, synthetic construct
  source 1..120: mol_type = other DNA
ccccattttgttgtcagactttgtggacattctcagagagaagacactgtgggcttcctctcacagacacacccatcacatagccaaacaccctccacaagccctctgatgaacactcat

SEQ ID NO: 34401 - DNA, 120 bp, synthetic construct
  source 1..120: mol_type = other DNA
tcaggatgtgtgccacgtaagtagatcacatcactgcgtgttcttcagtacacaaagacctggaacatcctacacccccgtgcctgtgagttccttctgcagagggtacagatactataa

SEQ ID NO: 34402 - DNA, 120 bp, synthetic construct
  source 1..120: mol_type = other DNA
cattctttctccctccctgcaaaggaacctcctcgttcacagacgtgatcatacacccacatctcccacttgatatttctgtatcagtcagtgaggtacataccctttctcacattcaga

SEQ ID NO: 34403 - DNA, 120 bp, synthetic construct; identical to SEQ ID NO: 10052
  source 1..120: mol_type = other DNA

SEQ ID NO: 34404 - DNA, 120 bp, synthetic construct; identical to SEQ ID NO: 10053
  source 1..120: mol_type = other DNA

SEQ ID NO: 34405 - DNA, 120 bp, synthetic construct
  source 1..120: mol_type = other DNA
agcccagggcgcagcagcgagccccctcctagtccttctcttctccgtgggtgatgatgtgcaccaggttcttgtagtccaagttgccagtcacgtcaggggggaaggcggcgaacatct

SEQ ID NO: 34406 - DNA, 120 bp, synthetic construct
  source 1..120: mol_type = other DNA
ggggatgggaacatgggccactcagagggtcctccggggaaggacttccccagctgctgcagggccccctcgcccaaggtcatgccctttctggggcagcccacagccagcggatgggat

SEQ ID NO: 34407 - DNA, 120 bp, synthetic construct
  source 1..120: mol_type = other DNA
aatcttggctcaacttcttccttcatgcacttttccttccttgcccttccctgttcttcctttcttgcccttccctgttcttccttccctgaccccaagggccctcccaagtaaacatca

SEQ ID NO: 34408 - DNA, 120 bp, synthetic construct; identical to SEQ ID NO: 10054
  source 1..120: mol_type = other DNA

SEQ ID NO: 34409 - DNA, 120 bp, synthetic construct; identical to SEQ ID NO: 10055
  source 1..120: mol_type = other DNA

SEQ ID NO: 34410 - DNA, 120 bp, synthetic construct
  source 1..120: mol_type = other DNA
catacagaagctttggcaaattagcaaaagtgccccttctaccaaactcactaccgcaccacctgagttgaaaaaaaaaaaaattattaccagacactttactgccagttctggaaagct

SEQ ID NO: 34411 - DNA, 120 bp, synthetic construct
  source 1..120: mol_type = other DNA
tcatgctctaagcaggtctctatgcatcgtgagcaaggcagaacctgcagtcacgcagacctaggtttgaatctaggtcctggcatttactattagtgttgttattttattttatttttg

SEQ ID NO: 34412 - DNA, 120 bp, synthetic construct
  source 1..120: mol_type = other DNA
ggaatacaggcgtccaccaccatgcccagctaatttttgtatttttagtagagacagggtttcctcatgttggctaggctggtctcaaactcctggtctcaagtgatcctcctgccttgg

SEQ ID NO: 34413 - DNA, 120 bp, synthetic construct
  source 1..120: mol_type = other DNA
ggtggcagagaatgaaatgaggccaggcctcagaagacgatagctggttctctgtcagtgtggggtcaggggtgctttagacgagaggggagacggagccccccagaaggagaacccagg

SEQ ID NO: 34414 - DNA, 120 bp, synthetic construct; identical to SEQ ID NO: 10056
  source 1..120: mol_type = other DNA

SEQ ID NO: 34415 - DNA, 120 bp, synthetic construct
  source 1..120: mol_type = other DNA
gccagagcaaggctgctttgcatggaggaaaaagaccctgctttcgtctgatcactgagcctctgtatttcgaagagagggctgagaacccaaggtcaaacatcatctagatttgaaagc

SEQ ID NO: 34416 - DNA, 120 bp, synthetic construct
  source 1..120: mol_type = other DNA
aagaatagagcatacctcctagttgctattaagtggggtaatgcatataaagtggttagcatgaggtctgacttaggttaagtcttggagcaatgttagttgctgtgtttttgttttgtt

SEQ ID NO: 34417 - DNA, 120 bp, synthetic construct
  source 1..120: mol_type = other DNA
agtacctgggactacaggtgcacaccaccatgcctggctaatttttttgtgtgtttttagtacagatggggtttcaccatgttggccaggttggtcttgaactcctgacctcaagtgatc

SEQ ID NO: 34418 - DNA, 120 bp, synthetic construct; identical to SEQ ID NO: 10057
  source 1..120: mol_type = other DNA

SEQ ID NO: 34419 - DNA, 120 bp, synthetic construct
  source 1..120: mol_type = other DNA
tctagaaatcatcagagatggggtggatggaggcaaagatcttttctgagaagatgttcttgacagtgttatttataataaccaaatgactggaagcgaccctaacatctgatgtgggaa

SEQ ID NO: 34420 - DNA, 120 bp, synthetic construct
  source 1..120: mol_type = other DNA
agcgattctcgtgcctcagcctcccaagtagctgggattgcaggtgcatgccaccatgcctggctaatttttgtagttttttggacagacagggttttgccatgttgcccaggcaggtct

SEQ ID NO: 34421 - DNA, 120 bp, synthetic construct; identical to SEQ ID NO: 10058
  source 1..120: mol_type = other DNA

SEQ ID NO: 34422 - DNA, 120 bp, synthetic construct
  source 1..120: mol_type = other DNA
tgttttaagtataaaaagctacactcactacaaatgtgaatacttccctgtagaattgtgcagtgcgcagtctgcacagctgtgtatggttgccctgagttctaaggtcaggagtaagtg

SEQ ID NO: 34423 - DNA, 120 bp, synthetic construct
  source 1..120: mol_type = other DNA
aaaaaactaaaacccaaacctaacagacatgtctagaaagacttagaggagggactggaatgttcacagtggaatatgaccttctgggtgatgtcattttctcctttatacttttctgca

SEQ ID NO: 34424 - DNA, 120 bp, synthetic construct
  source 1..120: mol_type = other DNA
ctgaaatttgtcttaaagaccagttgtggcagagttgtttctttgggaaatgacaccatcttgagcttttctgatggtcccacctcctgctcctcatggatgtgagataaagagaccctc

SEQ ID NO: 34425 - DNA, 120 bp, synthetic construct; identical to SEQ ID NO: 10059
  source 1..120: mol_type = other DNA

SEQ ID NO: 34426 - DNA, 120 bp, synthetic construct
  source 1..120: mol_type = other DNA
cacaaggctgggcacagtggctcacgcctgtaatcccagcactttgggaggcctaggcccgtgggttacttgaggtcaggaattcaagaccagcctggccaacatggtgaaactccgtct

SEQ ID NO: 34427 - DNA, 120 bp, synthetic construct
  source 1..120: mol_type = other DNA
tgagctgagatcatgccactgcattccaacctggatgacagagcaagactccatctcggaaaacaaaaacaaaaacaaaaaaacctgaacacaaatgtgtatagcagcatcgttcacagt

SEQ ID NO: 34428 - DNA, 120 bp, synthetic construct
  source 1..120: mol_type = other DNA
ctacaaaggttacaacatggatgagccttaaaacatcagtgaaagaagccagacacaaataccacatattgtatgattcaatttctatgaaatgtccagaacaggaaattcatggagaca

SEQ ID NO: 34429 - DNA, 120 bp, synthetic construct; identical to SEQ ID NO: 10060
  source 1..120: mol_type = other DNA

SEQ ID NO: 34430 - DNA, 120 bp, synthetic construct
  source 1..120: mol_type = other DNA
agcgattctcctgcctcagcctcccgagtagctgggagtatagacgcgcatcaccaatgcccagcttatttttctttagtagagtcagggtttcaccacgttggccaggctggtctcaac

SEQ ID NO: 34431 - DNA, 120 bp, synthetic construct; identical to SEQ ID NO: 2889
  source 1..120: mol_type = other DNA

SEQ ID NO: 34432 - DNA, 120 bp, synthetic construct
  source 1..120: mol_type = other DNA
cacagtgaaaccctgtctctagtaaaaatacaaaaaaattagccaggcatggtggtgagtacctgtaatcccatttactcagacaaacaaacaaacaaacaaacaaacaaacagaccaaa

SEQ ID NO: 34433 - DNA, 120 bp, synthetic construct; identical to SEQ ID NO: 10061
  source 1..120: mol_type = other DNA

SEQ ID NO: 34434 - DNA, 120 bp, synthetic construct
  source 1..120: mol_type = other DNA
gaattgctcgagcccaggagtttgagaccagcctgggcaacacagggggactcaatctttacaaaaatcacaaaaattagctgggcacagtggtgtgtacctgtggtcccagctactcag

SEQ ID NO: 34435 - DNA, 120 bp, synthetic construct
  source 1..120: mol_type = other DNA
aaaaaaagaaagcagtctggtctctttagcatcattttagcatagttccctctggaaagccaggtgggaatgtggatgagtcagtgtgagccctcgcaacggctggaaaatgaattctga

SEQ ID NO: 34436 - DNA, 120 bp, synthetic construct
  source 1..120: mol_type = other DNA
taatcaaagactgtaaaatgtaaaacccagaagatactgcttttcacctctcagactggcaaaaaaaaattgtgactattaatacccagcgttgatggaaatgtggggaaaggcacgagg

SEQ ID NO: 34437 - DNA, 120 bp, synthetic construct; identical to SEQ ID NO: 10062
  source 1..120: mol_type = other DNA

SEQ ID NO: 34438 - DNA, 120 bp, synthetic construct
  source 1..120: mol_type = other DNA
aatggtttgaagggtatatactaaaatgtgaactgattatctctgggtaatagaattgtaggtagtttttatttccttttctgtgcttttctgaaaaattttccaacatttttcaacatg

SEQ ID NO: 34439 - DNA, 120 bp, synthetic construct
  source 1..120: mol_type = other DNA
atatggaacaaaaagaaggttctccctcgtgggtgggatttccatccaggcggatgattcaatagctgcacccacctccttaaattcctggatttgggtctgttcgaacatggagaacac

SEQ ID NO: 34440 - DNA, 120 bp, synthetic construct
  source 1..120: mol_type = other DNA
gtgttcatctctgttgcagggctcagctgcccatctgtgaaatgtgggtacagcatccacactcaggtctccaaacggtgatgctggagggagcaaaggacatgacatgaagtttctcca

SEQ ID NO: 34441 - DNA, 120 bp, synthetic construct; identical to SEQ ID NO: 10063
  source 1..120: mol_type = other DNA

SEQ ID NO: 34442 - DNA, 120 bp, synthetic construct
  source 1..120: mol_type = other DNA
acatcaatagggcagagaagagcgagttgacctttcttccccaccccacttctctctgactttcaataacagcaaatgattcggtactctacatatgtattatttaattctcataaccac

SEQ ID NO: 34443 - DNA, 120 bp, synthetic construct
  source 1..120: mol_type = other DNA
caagatcacacagccacacacacagaaggcagagccggagttgaacttgggcgttgaacttggggagttgaacttgggcattctgactccagagttcctgcctctaaccactctccctcc

SEQ ID NO: 34444 - DNA, 120 bp, synthetic construct
  source 1..120: mol_type = other DNA
ttctttttcccagctgcctgaacaagagaaaagaattacaatttgatccttaaaagcattcaatcccattttgcaagtcctgggagttattgattcctcgagaggtcagtagacaagcca

SEQ ID NO: 34445 - DNA, 120 bp, synthetic construct
  source 1..120: mol_type = other DNA
agtcaatggggctttttccacaaggggctggaggctttgagggccgccttcctccccctccgccgtggtccctcgcttgtagtggcttcctctcctcgcccacccggcatcatcacctcc

SEQ ID NO: 34446 - DNA, 120 bp, synthetic construct; identical to SEQ ID NO: 10064
  source 1..120: mol_type = other DNA

SEQ ID NO: 34447 - DNA, 120 bp, synthetic construct; identical to SEQ ID NO: 2893
  source 1..120: mol_type = other DNA

SEQ ID NO: 34448 - DNA, 120 bp, synthetic construct
  source 1..120: mol_type = other DNA
tggctcatgcctgaaatcccagcacggcgggaggccgaggcgggaagattgcttgagcctaggagtttgcgaccagcctgggtgacatagggagatgcctgtctctacgcaaaagaaaaa

SEQ ID NO: 34449 - DNA, 120 bp, synthetic construct; identical to SEQ ID NO: 10065
  source 1..120: mol_type = other DNA

SEQ ID NO: 34450 - DNA, 120 bp, synthetic construct; identical to SEQ ID NO: 10066
  source 1..120: mol_type = other DNA

SEQ ID NO: 34451 - DNA, 120 bp, synthetic construct
  source 1..120: mol_type = other DNA
tatcttctaagaacttaaaaggaggagccaggcgtacaggcagaatatgaaagtggacaaggagcatgaccactgaagcacagcaccacagggagatgtttaagcctccggatgactgca

SEQ ID NO: 34452 - DNA, 120 bp, synthetic construct
  source 1..120: mol_type = other DNA
ctgctagaccaaggtctgctaagcaacgggtgccttcccaggcactggcgctaccactagaccaaggatctctcaagaagcccttatctgggcatgacagagggctcacgctcttgtctt

SEQ ID NO: 34453 - DNA, 120 bp, synthetic construct
  source 1..120: mol_type = other DNA
gattaataataatcatacctatatcttatttctagtataacttttcttaatttaattattttctttattatactggaacagcttgtgccttcagtctcttgcctgggcacctgggtggct

SEQ ID NO: 34454 - DNA, 120 bp, synthetic construct; identical to SEQ ID NO: 10067
  source 1..120: mol_type = other DNA

SEQ ID NO: 34455 - DNA, 120 bp, synthetic construct
  source 1..120: mol_type = other DNA
acagagcaggactctgcctcaaaaataaaaataaacaagtaaacatgtaaagcaagggtgtccaatcttttggctttcctgggccacactggaagaagaattgtcttggaccacacacaa

SEQ ID NO: 34456 - DNA, 120 bp, synthetic construct
  source 1..120: mol_type = other DNA
cccatgggccgcaggttggactagcttgatgtagagtcactttcacctgcctgtttggtatctacaaatggacaccagcaaactgaattcagaatttctggtaaatgtactcttggtaaa

SEQ ID NO: 34457 - DNA, 120 bp, synthetic construct
  source 1..120: mol_type = other DNA
agcaaaatcttgcagttctttttgtaaggaagccttctccccctgggttatactttgtatctgtccttctagagtttgctgggatctgactgtacttattaggtgtagaggcagtaaaga

SEQ ID NO: 34458 - DNA, 120 bp, synthetic construct; identical to SEQ ID NO: 10068
  source 1..120: mol_type = other DNA

SEQ ID NO: 34459 - DNA, 120 bp, synthetic construct
  source 1..120: mol_type = other DNA
tggtctcactctttcccaatcaatgccctgacttttatgtaagaattataatgaagctgttaattccatttatgttgaaattcagcagcccaaaagatgagatactacattttattttca

SEQ ID NO: 34460 - DNA, 120 bp, synthetic construct
  source 1..120: mol_type = other DNA
aataagtaaccagtcctccccacagtccttatatctttcatttccacaataacatctattgtggcagcctgttatcttttaatgaactgtgaaaggcagagtgtggcctagagtaagact

SEQ ID NO: 34461 - DNA, 120 bp, synthetic construct
  source 1..120: mol_type = other DNA
tcaagagaaagattagaggaagggcaagagaccaaagaaagccttgcccgcagtgcagtctttggggaggtgagcaaaagccactgtgggaaagtcatgacatctggcctggatcctcta

SEQ ID NO: 34462 - DNA, 120 bp, synthetic construct
  source 1..120: mol_type = other DNA
acttccagggcacaggtaaaagcctgttatagctgggtgaagataacattaaataccctctatttctcggggaagagtagcaaactgtcctgctccaaacttttaaagactatctattct

SEQ ID NO: 34463 - DNA, 120 bp, synthetic construct; identical to SEQ ID NO: 10069
  source 1..120: mol_type = other DNA

SEQ ID NO: 34464 - DNA, 120 bp, synthetic construct
  source 1..120: mol_type = other DNA
accatactaacaacaaaacctgacagagttgtctcaatgcctcctccttaaagaaaaggcatgtccatttttgcacataaatagtgtttacccaagtctccactagccttcacaagaagg

SEQ ID NO: 34465 - DNA, 120 bp, synthetic construct
  source 1..120: mol_type = other DNA
aaccagactcagctgtgacatggattttggaactattacacggggagttgaaaacactatgatggatatatctgtagactctagttcataggtcaacaaacgttttctgcaaagggccag

SEQ ID NO: 34466 - DNA, 120 bp, synthetic construct
  source 1..120: mol_type = other DNA
tattcgctgattcagatctactaatgagaggaataaaattgttttgaggggagtataacattttacttattggggttcaagttagtgttctctattgtcaaaatcaattgcacattttct

SEQ ID NO: 34467 - DNA, 120 bp, synthetic construct
  source 1..120: mol_type = other DNA
gttttgaggggagtataacattttacttattggggttcaagttagtgttctctattgtcaaaatcaattgcacattttctgttaatggtgagctgtaatgatattttgtgcacttcatct

SEQ ID NO: 34468 - DNA, 120 bp, synthetic construct; identical to SEQ ID NO: 10070
  source 1..120: mol_type = other DNA

SEQ ID NO: 34469 - DNA, 120 bp, synthetic construct
  source 1..120: mol_type = other DNA
cctgggcttgctacagtatatcatctaagatgtcttcttcgaaatggaaaaattacagaacaggcaaagaaacaggaaagtttggtcacttcacaggagaaaaaagcaaggtaatagaaa

SEQ ID NO: 34470 - DNA, 120 bp, synthetic construct
  source 1..120: mol_type = other DNA
tttggtcacttcacaggagaaaaaagcaaggtaatagaaattatctttgaagggccccctatctttggcatagtagacaaagacttcaaaatgactatttgaagtatcttcaaaggacta

SEQ ID NO: 34471 - DNA, 120 bp, synthetic construct; identical to SEQ ID NO: 10071
  source 1..120: mol_type = other DNA

SEQ ID NO: 34472 - DNA, 120 bp, synthetic construct
  source 1..120: mol_type = other DNA
aaaaaattttttttttttttagacggagtctcgctctgttgcccaggctgaagtgcaatggcatgatctcagctcactgcaaactccgcctcccgggttcatgccattctcctgcctcag

SEQ ID NO: 34473 - DNA, 120 bp, synthetic construct
  source 1..120: mol_type = other DNA
atctgcctgcctcggcctcacaaagtgctgggattacaggcgtgagctgccgtgcccagccacaaaaaaaaatttttttaattagccaagtatggcggcatatgtctgtagtcctaggtg

SEQ ID NO: 34474 - DNA, 120 bp, synthetic construct
  source 1..120: mol_type = other DNA
agaaggaaggaaggaagggagggaggaagggagggaggaaggacggaaggaaggaaggaaagaaggaagggagggagggaaggagggagaaaggaaggaagaaaggagaaaatgaataga

SEQ ID NO: 34475 - DNA, 120 bp, synthetic construct; identical to SEQ ID NO: 10072
  source 1..120: mol_type = other DNA

SEQ ID NO: 34476 - DNA, 120 bp, synthetic construct
  source 1..120: mol_type = other DNA
ataaaatggagggctgaagatagtgtgacaacttacttgaaggactgaaagaaaaatgttcaatccagaatgttatatccagcaagtccatgtttttaaaatgaagatgatgaaagtgag

SEQ ID NO: 34477 - DNA, 120 bp, synthetic construct
  source 1..120: mol_type = other DNA
aagattgaaccttgaaaaaatagaaaatctgagtagacctataactagtaaggagactgaattagtaatcaaaaatctcccaacaaagaaaaactgtggatcagatggcttcactggtga

SEQ ID NO: 34478 - DNA, 120 bp, synthetic construct
  source 1..120: mol_type = other DNA
agacaaatacattataagaaaaaactacaggtgcatattccttatgaacattgatgcaaaactcctcagtcacatactagcaaaatgaatttagcagcatattaaaaggattatacccaa

SEQ ID NO: 34479 - DNA, 120 bp, synthetic construct; identical to SEQ ID NO: 10073
  source 1..120: mol_type = other DNA

SEQ ID NO: 34480 - DNA, 120 bp, synthetic construct
  source 1..120: mol_type = other DNA
cacatacgaaaaaccaccatctaacatcatgctcaatgatttaagactaaaagcttttctctcaagatcaggaacaagacaaggatgcttactttcaccacttctattcaacattgtatt

SEQ ID NO: 34481 - DNA, 120 bp, synthetic construct
  source 1..120: mol_type = other DNA
agactccaccctaaaactcccacaaaagcctgttagagataataaacaaattcagaaaagttgaaggatacaaaatcaacttataaaaattagttgcatttctataactgtgaatgatca

SEQ ID NO: 34482 - DNA, 120 bp, synthetic construct
  source 1..120: mol_type = other DNA
atgaaattaaagaatacttaaataaatggaaagatattccatattcgtggattggaagacttaatattattaaggtgacaataattatccaaattaactcaattcaatccctatcaaaac

SEQ ID NO: 34483 - DNA, 120 bp, synthetic construct; identical to SEQ ID NO: 10074
  source 1..120: mol_type = other DNA

SEQ ID NO: 34484 - DNA, 120 bp, synthetic construct
  source 1..120: mol_type = other DNA
tcatatacaaaaattaacccaaaatgtatcaaaagccccatgtacgagttaaactataaaactcttagaagaaaacataggagaatatcttcatgatattggatttggcaatgatttctt

SEQ ID NO: 34485 - DNA, 120 bp, synthetic construct
  source 1..120: mol_type = other DNA
atgggagaaaatattttcaaatcatatacctgataagggattaatatccagaatatataaagaactcctacaactcaaaaacaaaaggacaattctattttaaatgggcaaataaatttg

SEQ ID NO: 34486 - DNA, 120 bp, synthetic construct
  source 1..120: mol_type = other DNA
tcatacccaccaagatggttaattaaaaagaaacgagcagaacagaaaataacatgtattggagaggacatgaagaaattggaatgtcgtgccttgctggtaggaatgtcaaatggtgca

SEQ ID NO: 34487 - DNA, 120 bp, synthetic construct; identical to SEQ ID NO: 10075
  source 1..120: mol_type = other DNA

SEQ ID NO: 34488 - DNA, 120 bp, synthetic construct
  source 1..120: mol_type = other DNA
taaggaatgctggtgacctctagaatctataaaaatcaaggaaacaaatcctcctcttggcatccaggaggaactggccctacctggctaattttatttatttatttatttatttattta

SEQ ID NO: 34489 - DNA, 120 bp, synthetic construct
  source 1..120: mol_type = other DNA
caggcataagccaccagacccagctgcaaatgttctgtaacaaccattctcagctcatgggctaacaagaggcggccagatgtggtctatactcaaatattgcctcctcaatgaggcctt

SEQ ID NO: 34490 - DNA, 120 bp, synthetic construct
  source 1..120: mol_type = other DNA
cctaggacaccctcaaaaactgtgtcccccatccttccaaatcctccttatcctcctttaatttttcccatagtacttcgcacagtctaacatactatgtatttttctcacacatattac

SEQ ID NO: 34491 - DNA, 120 bp, synthetic construct
  source 1..120: mol_type = other DNA
tatcttcctctttcataaattcttcctcttgtaaactttatgtgggcagatttttttgtctgtcttgcttattgctgtattcccagcacctgaaacatgtctggcactcgataaacatct

SEQ ID NO: 34492 - DNA, 120 bp, synthetic construct; identical to SEQ ID NO: 10076
  source 1..120: mol_type = other DNA

SEQ ID NO: 34493 - DNA, 120 bp, synthetic construct
  source 1..120: mol_type = other DNA
atctttgtccctcaattacagatgggacttctggactctccacagtgcctcaggcagagtccccctaagatatcctgaacccgactgcctgcttctactctcctccattctgttcccccc

SEQ ID NO: 34494 - DNA, 120 bp, synthetic construct
  source 1..120: mol_type = other DNA
cctttgctgacaccctccccaaccttttggtgcccacagcctccccccgaccccccaccgtgctgatcccttacgaagcactctcattctgctggaacctctgtgctgtccctgtctccc

SEQ ID NO: 34495 - DNA, 120 bp, synthetic construct; identical to SEQ ID NO: 10077
  source 1..120: mol_type = other DNA

SEQ ID NO: 34496 - DNA, 120 bp, synthetic construct
  source 1..120: mol_type = other DNA
ccaacggctgagatgggacgagaagccagcgcctcctccctgcgcgtctgtctgcaggccaggggctcacacgggagccggctcctgccccctggcccagggccagccgtcatccccatg

SEQ ID NO: 34497 - DNA, 120 bp, synthetic construct
  source 1..120: mol_type = other DNA
tgggcagggcctggccagggccctgaggcgggaggcttgagctgcagtacctggtcagggtgtcccgggagctgcggggagaggaagtggaggggacagccccagtccggcagtcgcggg

SEQ ID NO: 34498 - DNA, 120 bp, synthetic construct
  source 1..120: mol_type = other DNA
caccccccaccccggcccggggacaaatctcaggcagtgggcaaggcctgagaaaaagcaggctcatggcgataagtccctcctcttccggggtaggcagccgccacccgcgcccctgtg

SEQ ID NO: 34499 - DNA, 120 bp, synthetic construct
  source 1..120: mol_type = other DNA
gccagcacaggccgccctgcatctggagcgagttagggttggcggcctggcgggcggcggcgtgagctcatcccggcccgccccgctgcggtttccacgcggctgtgaagggaacagaac

SEQ ID NO: 34500 - DNA, 120 bp, synthetic construct; identical to SEQ ID NO: 10078
  source 1..120: mol_type = other DNA

SEQ ID NO: 34501 - DNA, 120 bp, synthetic construct
  source 1..120: mol_type = other DNA
gctctggaccaaccagcccaggtgtctggcagggcccagggcccacctccccagacacacacatacttttcctggtcactgcccccctcacactccccccaaggagcccaggcatcttct

SEQ ID NO: 34502 - DNA, 120 bp, synthetic construct
  source 1..120: mol_type = other DNA
ggaaagcactcctgctcttggaatcctagttgggagagcccaccagcaggctgtgaggcagtggcaaggcttgaaaaggcttcttggtgagatgccccttccctctgccaggggctggga

SEQ ID NO: 34503 - DNA, 120 bp, synthetic construct
  source 1..120: mol_type = other DNA
ccaaggtggggatatgggcactgtagtgatattgatcaccagacaccggggggggagctgggctggagtgggtgcttcggagcatccaaggttccctccacccatcaggccagtcctcac

SEQ ID NO: 34504 - DNA, 120 bp, synthetic construct; identical to SEQ ID NO: 10079
  source 1..120: mol_type = other DNA

SEQ ID NO: 34505 - DNA, 120 bp, synthetic construct
  source 1..120: mol_type = other DNA
cacagggtgcctaaactgtaaagtgcatctgcagtacccacgggggtcttcagctcccaaaacactggggcaagctgggtgagggatgttatttaactggaatggctatggtttgcagaa

SEQ ID NO: 34506 - DNA, 120 bp, synthetic construct
  source 1..120: mol_type = other DNA
taattaacatgtgcttgaaaaacaatggttttcattaaagtgggtgggggagagaagggactgtaggggagaatatttcaaggagctccaagttccaggccagacttcttaaaaataaag

SEQ ID NO: 34507 - DNA, 120 bp, synthetic construct; identical to SEQ ID NO: 10080
  source 1..120: mol_type = other DNA

SEQ ID NO: 34508 - DNA, 120 bp, synthetic construct
  source 1..120: mol_type = other DNA
tagtagagacagggttttgcattgttggccaggctggtcttgaactcctgacctcaagtgatctgcctgcctcggcctcccaaagtgctgagattacaggcatgagccaccgcgcctggc

SEQ ID NO: 34509 - DNA, 120 bp, synthetic construct
  source 1..120: mol_type = other DNA
caagccccagggagattggggcagggaggctgagctggtgccaaggacagaagggtgggaagggaggatgacctcacatggagcagaggggatatgtgaggaactggccagaggaagtgg

SEQ ID NO: 34510 - DNA, 120 bp, synthetic construct
  source 1..120: mol_type = other DNA
agcatggagaaggcatgccatcggtgttcaataaatgcatgtagaagggtgagaatgaagagatgatccctccgagtcaaccacaccttctcctatttctggccttttggggacagggtt

SEQ ID NO: 34511 - DNA, 120 bp, synthetic construct
  source 1..120: mol_type = other DNA
ggggtcgggtcagatgcccagaacccccagctcccggcagcctgcccaggaccctgtttctcatttggggccttcttgcttcccccaacccacacccccacatgaaacgtgcctgcctat

SEQ ID NO: 34512 - DNA, 120 bp, synthetic construct; identical to SEQ ID NO: 10081
  source 1..120: mol_type = other DNA

SEQ ID NO: 34513 - DNA, 120 bp, synthetic construct
  source 1..120: mol_type = other DNA
gttccaccctccacacaggtgaccacagtggtcccttcataacacaaacacaacccctgcctcccccactggagcaggtgctagaagaattatcaaagtccctgccctgctcaggcccct

SEQ ID NO: 34514 - DNA, 120 bp, synthetic construct
  source 1..120: mol_type = other DNA
ctggagactcaatttcagagaaacggggaggccctagacagatttctcccctacatctgagagctgcccatgcagagcttccttagcaagggctaagatccctgttgcatttaagcaagc

SEQ ID NO: 34515 - DNA, 120 bp, synthetic construct; identical to SEQ ID NO: 10082
  source 1..120: mol_type = other DNA

SEQ ID NO: 34516 - DNA, 120 bp, synthetic construct
  source 1..120: mol_type = other DNA
gccccctcttgaagacggactgcacagagcctgagtcagccctcagagcaggcccctttccagcaatagagctgtcccagcctagagcttgggatccggccatgtcaccctcccagagct

SEQ ID NO: 34517 - DNA, 120 bp, synthetic construct
  source 1..120: mol_type = other DNA
cttcctgccacagcagccaccatcccacaccttgtgctgcagctatggatgagaggtcactgccatgagcttccccacctccagctgcaggccccagaggtgaaaacaggtatggacatc

SEQ ID NO: 34518 - DNA, 120 bp, synthetic construct
  source 1..120: mol_type = other DNA
caggctcatcagcacctccctgccaagttcccattccccactccatcccagtggcaaggctgggcctctgttacttatcacaggtcggcacagttagcacctgaaaattacatgatggat

SEQ ID NO: 34519 - DNA, 120 bp, synthetic construct
  source 1..120: mol_type = other DNA
ctctatccaggggttttgggaaatgctgactacaacaaaccgtgaaatttcttcaaaacttaaaaactgacttgtaaggtaagctcttattttgccaagtagagatatggaaaacaacag

SEQ ID NO: 34520 - DNA, 120 bp, synthetic construct; identical to SEQ ID NO: 10083
  source 1..120: mol_type = other DNA

SEQ ID NO: 34521 - DNA, 120 bp, synthetic construct
  source 1..120: mol_type = other DNA
gatggcagaggtgttgaggggagggaagaccaaggcttccagccccagggcataggtgtggtaaggtaaagggcatactcatgtttagctggaccaaagtagaaaaatcaggaagctgcc

SEQ ID NO: 34522 - DNA, 120 bp, synthetic construct
  source 1..120: mol_type = other DNA
ccttggtagatatgtgaggtacccaagcccatagaccagaggtggaggtggagaatggaaaaaaatggtggaacctcaggagtcctcaggcagtggagaggagggtgcaggcaggaaccc

SEQ ID NO: 34523 - DNA, 120 bp, synthetic construct; identical to SEQ ID NO: 10084
  source 1..120: mol_type = other DNA

SEQ ID NO: 34524 - DNA, 120 bp, synthetic construct
  source 1..120: mol_type = other DNA
ggcccgccctctccctgaccccacaactctcactactacccatggccccaggaccgaccacggaggacaccccaaacacccccttatgcaacacaaggagctcctgtcacactgctgcca

SEQ ID NO: 34525 - DNA, 120 bp, synthetic construct
  source 1..120: mol_type = other DNA
tttcccacagctgcactgatttccttccttcttgtggcctggcaaaattttcatccaatgcctgacttcttcaagatcccacctgacttctttctatctcggcctgaatttctggccttc

SEQ ID NO: 34526 - DNA, 120 bp, synthetic construct
  source 1..120: mol_type = other DNA
atgcaggaacatccgagcagcggagggacgctttgttctgggaccatcgcgggcccagctccgataatcctctgtcccttgtgctcaagttctagatccccaaactctgccctaaagctg

SEQ ID NO: 34527 - DNA, 120 bp, synthetic construct; identical to SEQ ID NO: 10085
  source 1..120: mol_type = other DNA

SEQ ID NO: 34528 - DNA, 120 bp, synthetic construct
  source 1..120: mol_type = other DNA
ccacagggccataggctggaccaccctgcttgagggggaagctgggaccagtgtttatgccactgtagggaggccacagcctgcctaggagtgccacctgcccagcgccagtgctgattc

SEQ ID NO: 34529 - DNA, 120 bp, synthetic construct
  source 1..120: mol_type = other DNA
gacacacatatacaacacacatacaaacacaagcccacattcacttacagacacagatccacaggcatacatgcacaactgtggacctatgcacacatacacacgcacatttcacccagc

SEQ ID NO: 34530 - DNA, 120 bp, synthetic construct
  source 1..120: mol_type = other DNA
acatgtggtcagcagagccacatatgagaggtaaatggccccagggtagcaacatggccatggctgggccagaggcacattctaagtggagctgagctgcaacaagtggaaccaagctgc

SEQ ID NO: 34531 - DNA, 120 bp, synthetic construct
  source 1..120: mol_type = other DNA
agaagaataggggctgggaattgcaagatgctcccttctaccaccaagccaaaccaagtgggacagtagctcccagggactagggaagcctgcaagaagaagggtatgtttggggaaggc

SEQ ID NO: 34532 - DNA, 120 bp, synthetic construct; identical to SEQ ID NO: 10086
  source 1..120: mol_type = other DNA

SEQ ID NO: 34533 - DNA, 120 bp, synthetic construct
  source 1..120: mol_type = other DNA
ggatctgctcccctctgtgtgggtcctcagtcactcatgggccaggaaggctggccagagcccgccaagatcacacacacacatgaagatgccctcattggccaagtgcactgcaacggg

SEQ ID NO: 34534 - DNA, 120 bp, synthetic construct
  source 1..120: mol_type = other DNA
gattacgactccttcccctgaattagatctgaggctggagtggactgaaccagaaggccttgaaatctgtccttgatgttgctgaggatgttttcaaaacagccctggaatctgaccact

SEQ ID NO: 34535 - DNA, 120 bp, synthetic construct
  source 1..120: mol_type = other DNA
gcccctgtggcccccacagtctcttctccacacagcggccagggtggcactgagaaaacatctccccagggcgcatgctgcagccctccctgacctctctgactcaggacctgtccctct

SEQ ID NO: 34536 - DNA, 120 bp, synthetic construct; identical to SEQ ID NO: 10087
  source 1..120: mol_type = other DNA

SEQ ID NO: 34537 - DNA, 120 bp, synthetic construct
  source 1..120: mol_type = other DNA
ccacgctccctggaatcaccttccagggagactacttgcaggtagtccttgatctggtccttgtctcagggattacttctgggggagcccagcctaagacacttcatctctcccttttcc

SEQ ID NO: 34538 - DNA, 120 bp, synthetic construct
  source 1..120: mol_type = other DNA
cccttagataagtggactctacagtattttgtgtgtgtgtgactggcttatttcacttagtgtaacatcctcaaggttcacccgcattgttgcgtgtgtcggcatggccttgctttgtca

SEQ ID NO: 34539 - DNA, 120 bp, synthetic construct; identical to SEQ ID NO: 10088
  source 1..120: mol_type = other DNA

SEQ ID NO: 34540 - DNA, 120 bp, synthetic construct
  source 1..120: mol_type = other DNA
atctcattatggttttaatgtgcatttctgtaatgattagtgatgttcagcatctttgcatgtgcttattggttatctgtatatcctttggtgttttgttttgttttgttttgttttgtt

SEQ ID NO: 34541 - DNA, 120 bp, synthetic construct
  source 1..120: mol_type = other DNA
tggattacaggcaccggccatcatgctgggctaattcttgtatttttgtagaggtggggtttcaccatgttggccaggctggtcttgaactcctggcctcatgtgatccacccgcctcag

SEQ ID NO: 34542 - DNA, 120 bp, synthetic construct
  source 1..120: mol_type = other DNA
tttttgagttatagaagttctttatatattctaaatattatcttctctcctttaaatctttgctcaactatttcctgcccagataatccttgacctcattatttaacatgtcacccacct

SEQ ID NO: 34543 - DNA, 120 bp, synthetic construct; identical to SEQ ID NO: 10089
  source 1..120: mol_type = other DNA

SEQ ID NO: 34544 - DNA, 120 bp, synthetic construct
  source 1..120: mol_type = other DNA
agtctgatccacgcaggccttccaagttgctctcaccccaccacatcccccctgccacgcagacacgcgcatccacacgaggtcatgaaaaggcgccccctggagctgccctgactcctg

SEQ ID NO: 34545 - DNA, 120 bp, synthetic construct
  source 1..120: mol_type = other DNA
tcacatcaagcctgcgtgaatcatctcctcgaggaagcctcccctctctatcctcatcaggctccaggactcaggggaggggccctggccccagagcaggggatagaatggggcaggggt

SEQ ID NO: 34546 - DNA, 120 bp, synthetic construct
  source 1..120: mol_type = other DNA
ggctcagtttcaccatcggagtcagggcaaggggtcagctctgacagcctggggacaaagttagctcctgccctgccacccattcccaatgtcactcaggcaaggccattccctgtgctg

SEQ ID NO: 34547 - DNA, 120 bp, synthetic construct
  source 1..120: mol_type = other DNA
cctgtgttagcggccccagcatggctgcctcctgcagaaggctaggtgaggggcaagcgcaacagagaagcactcggcctcctccagctcagcgtccatgggccacagaattcacatagg

SEQ ID NO: 34548 - DNA, 120 bp, synthetic construct; identical to SEQ ID NO: 10090
  source 1..120: mol_type = other DNA

SEQ ID NO: 34549 - DNA, 120 bp, synthetic construct
  source 1..120: mol_type = other DNA
aggaaggccggcaagaagccatttattcatgaggcccatggggtggggacagagctgctgtcacaggtaagcacagcctgagaggggccagagacggcaaccacgtggagaggtccaagg

SEQ ID NO: 34550 - DNA, 120 bp, synthetic construct
  source 1..120: mol_type = other DNA
aaggcagtgcagattacagaggaggagggagacggaggcagcaggatgtcaagtgagcactgcagctggtggagtgtgggcaggtggcagcagcgggttcaggagggagtgggtgcctac

SEQ ID NO: 34551 - DNA, 120 bp, synthetic construct; identical to SEQ ID NO: 10091
  source 1..120: mol_type = other DNA

SEQ ID NO: 34552 - DNA, 120 bp, synthetic construct
  source 1..120: mol_type = other DNA
ccttggccatcaccccatttctgaggccaggagaatcagtgacaagttaagaaggggcctggggtgcagtacgtgctgtcctctgtcccactaggctgggagggggtccctccgccagga

SEQ ID NO: 34553 - DNA, 120 bp, synthetic construct
  source 1..120: mol_type = other DNA
gctgctccccaagtctggtattctcctgcctccgtacttctgtgtgctgtgctggccccccttcaaaatgccagccgcagctcccccttcttacccccacctttagacacacatgcacac

SEQ ID NO: 34554 - DNA, 120 bp, synthetic construct
  source 1..120: mol_type = other DNA
gtataagtgggaggtacacagggctccacagaggtcaggatccccccaggcggcaggcacttgacctgcttgaccacttagggctgtggccctggaatttgaccttggagtaatgaccac

SEQ ID NO: 34555 - DNA, 120 bp, synthetic construct
  source 1..120: mol_type = other DNA
tttactctcctcctaagtaacatttctgttgtctgccattgaggctccctaattatgtaactctctccatttcaccaatgggtcacaggcctggggggcaacagagtggtttctcccagg

SEQ ID NO: 34556 - DNA, 120 bp, synthetic construct; identical to SEQ ID NO: 10092
  source 1..120: mol_type = other DNA

SEQ ID NO: 34557 - DNA, 120 bp, synthetic construct
  source 1..120: mol_type = other DNA
tacaacagtctacaccagttctcacagcagtctacaccagtttgccatttaaaagcaaactaccatcgcgaggcactttacagtctactgagcaatgcactgtttccatagccctttgct

SEQ ID NO: 34558 - DNA, 120 bp, synthetic construct
  source 1..120: mol_type = other DNA
acctgtgattgggtcaggagcagctaggccaatcagagaccttccctgggacttttgaacccttggtgggggcttgggcctcactcctttttttttttttagctttaaaattttattcat

SEQ ID NO: 34559 - DNA, 120 bp, synthetic construct; identical to SEQ ID NO: 10093
  source 1..120: mol_type = other DNA

SEQ ID NO: 34560 - DNA, 120 bp, synthetic construct
  source 1..120: mol_type = other DNA
aaatcagcatggatccagatgctccagcaaaccattactgcatgtcacctggtcggcatggccctgtgactggcctcggtgccctcatcgggacaatgcgagatgtcaggaaagattctc

SEQ ID NO: 34561 - DNA, 120 bp, synthetic construct
  source 1..120: mol_type = other DNA
tctgcctgtgtggggttctggcccagcgcccgcaggacatccccacactgcccgtaggtgatcttcatctcacacttgggtgtgcggtcgaacagcatgaaggcttccttgaactctgcc

SEQ ID NO: 34562 - DNA, 120 bp, synthetic construct
  source 1..120: mol_type = other DNA
cctgctcaccttcaatctgctcaggtgtgaactcaatctgaaaagagaccccaaagactcagatgcccggcttaaaaggtggggccacacctcctcctgggcactcggtggccagcccag

SEQ ID NO: 34563 - DNA, 120 bp, synthetic construct
  source 1..120: mol_type = other DNA
ccttgaggctgtgtgcaccgaggccctgatgctcggtggaccctggcaggggtagcagtgaggagggaggccacatgcccaaggcctcaggccagcgtgggccttacctgatgctcccgg

SEQ ID NO: 34564 - DNA, 120 bp, synthetic construct; identical to SEQ ID NO: 10094
  source 1..120: mol_type = other DNA

SEQ ID NO: 34565 - DNA, 120 bp, synthetic construct
  source 1..120: mol_type = other DNA
gctgaagtcacattggggccaccttgattgacgtcaatcaagaggcctcccgggatccagtgtccccctcctcaccggataccaggtctatttttatcactgcagtcactcgccccaagg

SEQ ID NO: 34566 - DNA, 120 bp, synthetic construct
  source 1..120: mol_type = other DNA
tcagggccaccctaccatgactgtccctcctggcttctggcttgacccagtgttgggaagaacaggttgtcattcctggctccctgagagctctctccaccaggaagcctactgagatta

SEQ ID NO: 34567 - DNA, 120 bp, synthetic construct
  source 1..120: mol_type = other DNA
cattgtccccacctctcagaaggaagtctgtgccaacctaaggcctggcgagaaaggacaatgccactatgggccgtggctgtggtcacagcctcaccatgaggcctgcagaatgcaagc

SEQ ID NO: 34568 - DNA, 120 bp, synthetic construct; identical to SEQ ID NO: 10095
  source 1..120: mol_type = other DNA

SEQ ID NO: 34569 - DNA, 120 bp, synthetic construct
  source 1..120: mol_type = other DNA
taccacaggtgggagtcatggctccctccaagtttagactctgagaaagactttgcagttggggaagggctcctggggccactggtcatagctccatgaccagcttcctgcacagctttc

SEQ ID NO: 34570 - DNA, 120 bp, synthetic construct
  source 1..120: mol_type = other DNA
tcttcttactccctatctcatccacgctgggagcgtgtatggacttgggacccctcagctgaacaaggaaaatccctgcctggctccagctgactccaggattccccaaggatgagaagt

SEQ ID NO: 34571 - DNA, 120 bp, synthetic construct; identical to SEQ ID NO: 10096
  source 1..120: mol_type = other DNA

SEQ ID NO: 34572 - DNA, 120 bp, synthetic construct
  source 1..120: mol_type = other DNA
ggaagcatcaaactcgacctccttagggcgctcaggctcagggggaggtgcgggagctggagctgccttgggggctgccttggcatcatccttcttgggctctggctttttgggggccat

SEQ ID NO: 34573 - DNA, 120 bp, synthetic construct
  source 1..120: mol_type = other DNA
agtgcacaatagggacagggccataaaaggatatggctaggcttaggggctattttggggcctggggagggcattgttcaggctcaggaatgggtagtggaggagggatctccattcctc

SEQ ID NO: 34574 - DNA, 120 bp, synthetic construct
  source 1..120: mol_type = other DNA
tgcctctctgcaggtccgtaagttgaagaggtgaagaagggtggaccaagtacatgctacgtgttgtgttggggccagaaggactgggatgatctaagggcacctctgaacttaagctct

SEQ ID NO: 34575 - DNA, 120 bp, synthetic construct
  source 1..120: mol_type = other DNA
gttgtctgtgtctgtgtcggggtgtctatgtgtctgtgggtctctctgtgtctgtgtttgtgtggaggggggtctgtgtacacctgtgtgtattgtctgggtgcctccgtggtggggggc

SEQ ID NO: 34576 - DNA, 120 bp, synthetic construct; identical to SEQ ID NO: 10097
  source 1..120: mol_type = other DNA

SEQ ID NO: 34577 - DNA, 120 bp, synthetic construct
  source 1..120: mol_type = other DNA
agcccctgctggcccagggaccagtttctcagctttcacccctagattcctacttcccctctctacaggccccagggatgcacatttccctacacaccccaggcctggctccccactgca

SEQ ID NO: 34578 - DNA, 120 bp, synthetic construct
  source 1..120: mol_type = other DNA
cccttttggcaggggctctgagagggtctgcctctctgaggaaccccaagctgccaagcagggtctgccccagtgcagtgatgctcattccctgttcctaccactcagtgcccaccccca

SEQ ID NO: 34579 - DNA, 120 bp, synthetic construct; identical to SEQ ID NO: 10098
  source 1..120: mol_type = other DNA

SEQ ID NO: 34580 - DNA, 120 bp, synthetic construct
  source 1..120: mol_type = other DNA
tgtcttcctactgggcccagtccctctcatcctgtcactccgcctcacagggagggacagcagtccagggctggggccagcccgctcctgactggaacacgttctgcctctcatctggag

SEQ ID NO: 34581 - DNA, 120 bp, synthetic construct
  source 1..120: mol_type = other DNA
agtggagacgagccagaaataccacaagaggagaagacagccagagggccacacagaggggccccggggaggccccaccacccaggcctgccgaccctcaggacaacgggctctggaagt

SEQ ID NO: 34582 - DNA, 120 bp, synthetic construct; identical to SEQ ID NO: 2925
  source 1..120: mol_type = other DNA

SEQ ID NO: 34583 - DNA, 120 bp, synthetic construct; identical to SEQ ID NO: 10099
  source 1..120: mol_type = other DNA

SEQ ID NO: 34584 - DNA, 120 bp, synthetic construct
  source 1..120: mol_type = other DNA
tggggtgaacaggaggcaggaaggtgggcagggagttgggggtggagggagggagggtgggcagcagttggcggtaagaacaggccacaccatgcctggcacttccctctctctcccaca

SEQ ID NO: 34585 - DNA, 120 bp, synthetic construct
  source 1..120: mol_type = other DNA
tctgatgtctgagctgcagcccagtgtgctgcaggctggcacacgccatgtcccagagccctctcaggcagccacttacctctcccttcccccagccaaggagaatgcggggaagatatg

SEQ ID NO: 34586 - DNA, 120 bp, synthetic construct
  source 1..120: mol_type = other DNA
cacaggagggaggaatgttctgctcttccacagctacattttcccaggacctggtacaccacaggcattcaataaatgctggatgaacaaatgttccaaatatctcagtttacccacctc

SEQ ID NO: 34587 - DNA, 120 bp, synthetic construct
  source 1..120: mol_type = other DNA
tgcggccagcagctgcctccaagcccacccaccacttccccatgcccaccccaattcaggcgtgctcttcacagactaaagaggtgagggtgacccctgtggtacaggcagtgactggac

SEQ ID NO: 34588 - DNA, 120 bp, synthetic construct; identical to SEQ ID NO: 10100
  source 1..120: mol_type = other DNA

SEQ ID NO: 34589 - DNA, 120 bp, synthetic construct
  source 1..120: mol_type = other DNA
ctctaaacccagacttccaggactgcaaacccaaaccccagacccaggacccaggacaagggctgacggatttccagatcagcgtggccctgtgtggacaaggccagtgggaaggggcac

SEQ ID NO: 34590 - DNA, 120 bp, synthetic construct
  source 1..120: mol_type = other DNA
atggttgccacgtggagggtgggcagaaggaggtaagggccagctgtcccctgggcctaagagccagaggcagggaaacagggtcgggctccccacgtgcccttgtcccctgggccgcag

SEQ ID NO: 34591 - DNA, 120 bp, synthetic construct
  source 1..120: mol_type = other DNA
acccagagccttagaagtaggtcaaatgttgccgcgcagcaggtcctggggaccctgtcctggtgtgggcaggcccgtaggctgcagctcacttaccagggcccacttgtgtgtccacat

SEQ ID NO: 34592 - DNA, 120 bp, synthetic construct; identical to SEQ ID NO: 10101
  source 1..120: mol_type = other DNA

SEQ ID NO: 34593 - DNA, 120 bp, synthetic construct
  source 1..120: mol_type = other DNA
acccgggctggtccctgctcctcttggcctcagtttccccacctgtaccatggccatgggtggggcactgtgattccaggttcagaggacagtctctgcccctgagtcccagcccatcct

SEQ ID NO: 34594 - DNA, 120 bp, synthetic construct
  source 1..120: mol_type = other DNA
gggtgggggtggcagggcccagcgggctggcaggcaaaccctggttttggcccagggacctataatcagctcctgcccctctgatcccggcccaggactgacgcttagggctgtggtgtc

SEQ ID NO: 34595 - DNA, 120 bp, synthetic construct
  source 1..120: mol_type = other DNA
gccaggcttggtccattctggaagaagggcatggccctgacttctcaggggcctggactgggggacctcagccccactctcagcagctagtctcaggagggagattgaaaatgtgtctgg

SEQ ID NO: 34596 - DNA, 120 bp, synthetic construct; identical to SEQ ID NO: 10102
  source 1..120: mol_type = other DNA

SEQ ID NO: 34597 - DNA, 120 bp, synthetic construct
  source 1..120: mol_type = other DNA
tactctcccaccagcagcttcccaaagagcaaatatttattgtccttggaagaaaaaaaaagactccccttttaggatcggggtctgggagctgctattgaggtttgcaggggctcagca

SEQ ID NO: 34598 - DNA, 120 bp, synthetic construct
  source 1..120: mol_type = other DNA
tccatttccccaaggtttccccagaataggtgtgaggacatgcagacactgccacacgaggtgtgaacatgtgtgactggacgggtgtggatagtctatgtgtgtgtaaccatggacaag

SEQ ID NO: 34599 - DNA, 120 bp, synthetic construct
  source 1..120: mol_type = other DNA
tgtgtgcatgtctgtctgcaagcctgttcatctgttggcatgggtggggaaggggcatgtggacacaacctctgttgaatggccaattcagtcaaaaatgcaagtaaatttagcaggaga

SEQ ID NO: 34600 - DNA, 120 bp, synthetic construct; identical to SEQ ID NO: 10103
  source 1..120: mol_type = other DNA

SEQ ID NO: 34601 - DNA, 120 bp, synthetic construct
  source 1..120: mol_type = other DNA
gagagacagagaaagagagagatggggcagtcagaaacaggggggagagagggttggtaggagggtcagggacaaatgttgccccaggaaaggatgtaccttcctggagcctgcagacac

SEQ ID NO: 34602 - DNA, 120 bp, synthetic construct
  source 1..120: mol_type = other DNA
ccaggatgcaaggagagagggtgggcatgggcacctggacagagggacaggatgacagatgaagaaggcagtgccgaggacagggacaacagtgatggaggtgaagacaggagggtgaca

SEQ ID NO: 34603 - DNA, 120 bp, synthetic construct
  source 1..120: mol_type = other DNA
ccccgccagaaccagctgtggccttgcctccagtggccatacaaaaatcctctgtggcccagggtgtggatgctgcaataaaaatggcccaagctcccagccaggaatagttagggtcaa

SEQ ID NO: 34604 - DNA, 120 bp, synthetic construct; identical to SEQ ID NO: 10104
  source 1..120: mol_type = other DNA

SEQ ID NO: 34605 - DNA, 120 bp, synthetic construct
  source 1..120: mol_type = other DNA
ttcacgcgcctgtgcacacatatccacactcctttgtacacatatacttttgcacacatgtatacacacattcacatgcctttgcatacacatccatgcactctcccacatacacctaat

SEQ ID NO: 34606 - DNA, 120 bp, synthetic construct
  source 1..120: mol_type = other DNA
gcctgcctggcacggtagtgtccgcatctgtttgtgtgtgaacgtgtgtgtctggacatttgggagctttccactgcctcctctcaccccaccctaccctgttcacagaaggggaaacag

SEQ ID NO: 34607 - DNA, 120 bp, synthetic construct; identical to SEQ ID NO: 10105
  source 1..120: mol_type = other DNA

SEQ ID NO: 34608 - DNA, 120 bp, synthetic construct
  source 1..120: mol_type = other DNA
gcctacgggtaagggtgaggccaggagcccagctctctgcagcatctggccttggagccctctgctccagggagcctcatgcggttttagagccagggctgaggtaaatacctctgtgcc

SEQ ID NO: 34609 - DNA, 120 bp, synthetic construct
  source 1..120: mol_type = other DNA
gttgggttggctggggagagagaactcagttctggtgctggccccttcactgactcctggaacctcttcccctctggagacctcagtgttcacacctgcacagtggggcgagagttccct

SEQ ID NO: 34610 - DNA, 120 bp, synthetic construct
  source 1..120: mol_type = other DNA
gcagagggctggagcttgaagccaagacaacaggggaacaattggctggaattctgcataaacagaggggctcatccaaggctgcagatgagctgggaggggctggggagttcctgcgcc

SEQ ID NO: 34611 - DNA, 120 bp, synthetic construct; identical to SEQ ID NO: 10106
  source 1..120: mol_type = other DNA

SEQ ID NO: 34612 - DNA, 120 bp, synthetic construct
  source 1..120: mol_type = other DNA
cagccaggctggtctgggatgggggtcgagggtgggtcctctctgccagctccaggttcagctgctgtctcagggttaggctccagctcaacccctggggctgctccctggctttctgag

SEQ ID NO: 34613 - DNA, 120 bp, synthetic construct
  source 1..120: mol_type = other DNA
agcctacccatggcaactgagagacaaagaggtaagggagcagggtgtttggaatccacagctctggccaataggtgtgccctcccccaagagatggaggcttctcagcagagccacaga

SEQ ID NO: 34614 - DNA, 120 bp, synthetic construct
  source 1..120: mol_type = other DNA
tgaaaggtgcagatccaggaaggcttcagagaggagggggcctttggagggcatacaagagccacccaggcagagaagggaaggacaagtcagatggcaagaagtgcaggggcagaggcc

SEQ ID NO: 34615 - DNA, 120 bp, synthetic construct
  source 1..120: mol_type = other DNA
caggcaggggccacggaaggcagggctgagcttgcagaacacattgttcctcctcctcctcttcttcctcctcctctgtttgcgaggtcatcacttccttgcccccctccacccccaagg

SEQ ID NO: 34616 - DNA, 120 bp, synthetic construct; identical to SEQ ID NO: 10107
  source 1..120: mol_type = other DNA

SEQ ID NO: 34617 - DNA, 120 bp, synthetic construct
  source 1..120: mol_type = other DNA
tgggcagaggcctgacctcactgggccagaccagctgccagtgtcccctccagcttcagggaggcatctgagttatgcctagccacctcccgttaagcccagaacctcctccacactggc

SEQ ID NO: 34618 - DNA, 120 bp, synthetic construct
  source 1..120: mol_type = other DNA
attgcccttctctggatgtcgctttcccatacacggttttataaacttccctgagtgcttcccctctccagccagttcagccaatgtccacggtgcctctgggccaggcttggtgcagcc

SEQ ID NO: 34619 - DNA, 120 bp, synthetic construct
  source 1..120: mol_type = other DNA
aggcccagagatttggcaaggcacgacaaaggaccacccacatagagggttcctccaggcctaacagggcaggagtgtcaggactaggggttctccactcgagggctcccggccacagcc

SEQ ID NO: 34620 - DNA, 120 bp, synthetic construct; identical to SEQ ID NO: 2934
  source 1..120: mol_type = other DNA

SEQ ID NO: 34621 - DNA, 120 bp, synthetic construct
  source 1..120: mol_type = other DNA
cccgctttggacccccaaccagtgtccccagtggctggccaggttgcccgggcatgtgggggcactgatgaaaggggatctggtggggaggcctttctcctaccccactccccgccacca

SEQ ID NO: 34622 - DNA, 120 bp, synthetic construct
  source 1..120: mol_type = other DNA
attgttaccaggtcatgggaaagctggacaagatttggacccccaagccacagttcttcccattgaacactgttgctgcctcccttccatttccagggaccacgggacggtgctctaact

SEQ ID NO: 34623 - DNA, 120 bp, synthetic construct
  source 1..120: mol_type = other DNA
cctgctgaacagatgaggaacagaccagagacttgccctactccagtgggatgcaagcccatgcccacactgccagggagtggactgtcaacaacccaaggccaggtatgcagcctcagc

SEQ ID NO: 34624 - DNA, 120 bp, synthetic construct; identical to SEQ ID NO: 10109
  source 1..120: mol_type = other DNA

SEQ ID NO: 34625 - DNA, 120 bp, synthetic construct
  source 1..120: mol_type = other DNA
aggcgttctgaacctcagggagccccaaagggtttatgggtctcccaatgaatgggagcctgttgagctcggagggggccgggcccgagtaaacatggctgggtctgagctgccattctc

SEQ ID NO: 34626 - DNA, 120 bp, synthetic construct
  source 1..120: mol_type = other DNA
cccaaggctcgaggagagaaaggccttcaggttttcagactcccaggtctgcttgcatccaagacccaagtgcctgggcactttacagatcccctttgagcctgaaactgcccaactgtt

SEQ ID NO: 34627 - DNA, 120 bp, synthetic construct
  source 1..120: mol_type = other DNA
gcagggtagggcagtgcatgtggactcaggggaggtagaggctctggcagtcaagagccagggcaacagggaggcttgacagagcacaggggaactctccctcctttgggcacaactgcc

SEQ ID NO: 34628 - DNA, 120 bp, synthetic construct; identical to SEQ ID NO: 10110
  source 1..120: mol_type = other DNA

SEQ ID NO: 34629 - DNA, 120 bp, synthetic construct
  source 1..120: mol_type = other DNA
ggccagctgcctcacatgcagggcactgggggctacagctggaatgtgctgagtggcagctgccacgtgaatcattatacctcatcaggctgagcctaggacttccagacacaaaccagc

SEQ ID NO: 34630 - DNA, 120 bp, synthetic construct
  source 1..120: mol_type = other DNA
ctctgcctccctgtctgcccacatcttcatcctgagcaaccagccctggttctgaacacagctcgttctacagacccacagagagaagtcatcctgtccacagccccctgcctttgagac

SEQ ID NO: 34631 - DNA, 120 bp, synthetic construct
  source 1..120: mol_type = other DNA
ggctgtggggctgtaggggtcaggacacgggctggagtggaatgacggccccctccatctcttccgtctaggagccactgggtacccagtgctggcagatcaggctttcttgggcctcag

SEQ ID NO: 34632 - DNA, 120 bp, synthetic construct; identical to SEQ ID NO: 10111
  source 1..120: mol_type = other DNA

SEQ ID NO: 34633 - DNA, 120 bp, synthetic construct
  source 1..120: mol_type = other DNA
aaagtcctgggccagtgtagggcttggtaaaaaataattaattttcttttcaagtggaagctctgactcaggtcttttcttgtccccagcagcactatccttgcttaggcctgagccaca

SEQ ID NO: 34634 - DNA, 120 bp, synthetic construct
  source 1..120: mol_type = other DNA
gcctgagcacagctgggaagcccaagtctgtggtttccctgggggtgagtgtctaaatacctgggccgtgctatggggcagacaagacatgcccgcatggagacacatctgtggacctgg

SEQ ID NO: 34635 - DNA, 120 bp, synthetic construct
  source 1..120: mol_type = other DNA
gcccccatcgcccctcccttcaccttcctgagaggcaagaaagccaggcagccatgcttctgctgcaagggaagggggctacccagccagctgccatgggagcctccagcgactcagctg

SEQ ID NO: 34636 - DNA, 120 bp, synthetic construct; identical to SEQ ID NO: 10112
  source 1..120: mol_type = other DNA

SEQ ID NO: 34637 - DNA, 120 bp, synthetic construct
  source 1..120: mol_type = other DNA
gggaaatataaggactcagaaatagatgtgagccattagtcccagagaacccctggtctggccaaggggttttctgagggaggaaggccaggctgcattgctcagacagctgagcctctt

SEQ ID NO: 34638 - DNA, 120 bp, synthetic construct
  source 1..120: mol_type = other DNA
caggggtggggccagagtctggcccctactgcagttctgagatccagtgaccaccctggctcctcctcctaggccccagcctggggattagagacagggactcactcctactccccaccc

SEQ ID NO: 34639 - DNA, 120 bp, synthetic construct
  source 1..120: mol_type = other DNA
ggtgctaccagttaatgtgtgacacccccaccctcatggtagcactttaaccagaggcccgagggtgagagagatgatctgtggccccacccacagctgtggaatgtccagcaggggact

SEQ ID NO: 34640 - DNA, 120 bp, synthetic construct; identical to SEQ ID NO: 10113
  source 1..120: mol_type = other DNA

SEQ ID NO: 34641 - DNA, 120 bp, synthetic construct
  source 1..120: mol_type = other DNA
agaactcctcccctcagcctctagttttatctctcagtccttccaatccctccattaatgttcttttctcatcaccaagggggaaagcagggtggaagatcagtggtcacagaaccataa

SEQ ID NO: 34642 - DNA, 120 bp, synthetic construct
  source 1..120: mol_type = other DNA
taggcaacaaagtgagacctcgtctctacaaaaaaaaaattttttaattacccaggtgtggtagctcatgcctgtggtgccagctacatgagaggctgaggtgagaggattgcttgagcc

SEQ ID NO: 34643 - DNA, 120 bp, synthetic construct
  source 1..120: mol_type = other DNA
caacactttgggaggccgagacaggatcacttgaggccaggagtttgaaaccagcctggccaacatggagaaaccccatctccactacaaatgcaaaaattagccaggcgtggtggtgca

SEQ ID NO: 34644 - DNA, 120 bp, synthetic construct
  source 1..120: mol_type = other DNA
caaaaaagaaaagaaacagaggcataataaagctgagaccattaaaatataacactgaagaaccacaagtgttctttaggtgcccattctggcacctgggcctccgtcccaaggaggcta

SEQ ID NO: 34645 - DNA, 120 bp, synthetic construct; identical to SEQ ID NO: 10114
  source 1..120: mol_type = other DNA

SEQ ID NO: 34646 - DNA, 120 bp, synthetic construct
  source 1..120: mol_type = other DNA
aggtggatcacttgaggtcaggggttcgtgaccagcctggtcaacatggtgaaaccccgtctctaccaagaaatgcaaaaattagccaggttggtggtacacacctgtagtcccagctac

SEQ ID NO: 34647 - DNA, 120 bp, synthetic construct
  source 1..120: mol_type = other DNA
gaagaaagaagaagaaagtagcagcagaagaaatacatggggaatgcacctgggagtgcagtctggaagctggatgggcttgagccagcagaagggtggctgcagctggatcctaggcct

SEQ ID NO: 34648 - DNA, 120 bp, synthetic construct
  source 1..120: mol_type = other DNA
gagtcttgagagcccctggagcccatgggccaggatgcccaccctcgtggaaactaaacagtaaagttaacattgcccttgaatcagctggccaacctctccattttgcagatgaggaaa

SEQ ID NO: 34649 - DNA, 120 bp, synthetic construct; identical to SEQ ID NO: 10115
  source 1..120: mol_type = other DNA

SEQ ID NO: 34650 - DNA, 120 bp, synthetic construct
  source 1..120: mol_type = other DNA
cgagggtcccaggcggcccggtccgagccggccgatagcttttgggagtgggggtgggaacgggggagggaggtgaagcctgagagtgggtgtctggattgagccccaggtctggcagcc

SEQ ID NO: 34651 - DNA, 120 bp, synthetic construct
  source 1..120: mol_type = other DNA
tgcagacctgggcgggggtcggggctggcctagggccgagaggaacgacaggcctgggatgggactgagggcaggggacgaggcgagggtggggctggacgtgggggagggcggcagcag

SEQ ID NO: 34652 - DNA, 120 bp, synthetic construct
  source 1..120: mol_type = other DNA
tcctcaggggattcgcccatgatgaaagagggctcgcttctcggctcagggtctctattcgccagcgggggccggatgatcaagggaaaaaaaatttaaaagcccgtgctttccagaaga

SEQ ID NO: 34653 - DNA, 120 bp, synthetic construct; identical to SEQ ID NO: 10116
  source 1..120: mol_type = other DNA

SEQ ID NO: 34654 - DNA, 120 bp, synthetic construct; identical to SEQ ID NO: 10117
  source 1..120: mol_type = other DNA

SEQ ID NO: 34655 - DNA, 120 bp, synthetic construct
  source 1..120: mol_type = other DNA
aaggtcccggctcctgtgccctccctgcagccgtcagggcccgtcccccaactcccctttccgctcaggcagggtcctcgcggcccatgctggccgctggggacccgcgcagcccagacc

SEQ ID NO: 34656 - DNA, 120 bp, synthetic construct
  source 1..120: mol_type = other DNA
gccatggccggggccatcgcttcccgcatgagcttcagctctctcaagaggaagcaacccaagacgttcaccgtgaggatcgtcaccatggacgccgagatggagttcaattgcgaggta

SEQ ID NO: 34657 - DNA, 120 bp, synthetic construct; identical to SEQ ID NO: 10118
  source 1..120: mol_type = other DNA

SEQ ID NO: 34658 - DNA, 120 bp, synthetic construct
  source 1..120: mol_type = other DNA
atgtacccaggtattagaagttgcgtcttgtttattggaaagccaatacttgtttcccttttctaaagcttgcatattctgggaaaaaaaaccctttgaagaacgatataacatctcata

SEQ ID NO: 34659 - DNA, 120 bp, synthetic construct
  source 1..120: mol_type = other DNA
tttaatcctcagaacaaacccatttatctagtaaatggcaaggtggggttttgaaccaagctcacagcccgtacagtactgcttctcaagtaatttaagttcttgctgctaaaagtgtgg

SEQ ID NO: 34660 - DNA, 120 bp, synthetic construct
  source 1..120: mol_type = other DNA
tcttcaactctaccattgtaacacaaaagcagccttagataagatcagcttccagcatgacagcttaaggaacccattcctctgtaaaactggtgaaaattcttttttgttttgtttcgt

SEQ ID NO: 34661 - DNA, 120 bp, synthetic construct
  source 1..120: mol_type = other DNA
ctgggaccacaggcgtgtgccaccacacctggctaattttttttttttttttttttttgagacggagtctcgctctgtcacccagagtgcaccgggctagagtgcaatggcgcgatcttg

SEQ ID NO: 34662 - DNA, 120 bp, synthetic construct; identical to SEQ ID NO: 10119
  source 1..120: mol_type = other DNA

SEQ ID NO: 34663 - DNA, 120 bp, synthetic construct
  source 1..120: mol_type = other DNA
accacgcctggcccaaaaattctttttttaaaatcaactatttaaaccctccggcaatggtcctgagggcaaacaacaaatgaaaaaacacctattcaagaaaatctacaaattcggtaa

SEQ ID NO: 34664 - DNA, 120 bp, synthetic construct
  source 1..120: mol_type = other DNA
cagctcccaatcaaatgctttcttcccaggaaaagcaggacatcagcatttctcatcctacctagagctacttgttgctgaggttaaaacctgtgtgagtgcaattgaaagttggagctc

SEQ ID NO: 34665 - DNA, 120 bp, synthetic construct
  source 1..120: mol_type = other DNA
tcccaagtagctgggattgcaggcttgcgccaccatgtctggctaattttgtatttttagtagaggcagggtttctccatgttggtcaggctggtcttgaactccctacctcaggtgatc

SEQ ID NO: 34666 - DNA, 120 bp, synthetic construct; identical to SEQ ID NO: 10120
  source 1..120: mol_type = other DNA

SEQ ID NO: 34667 - DNA, 120 bp, synthetic construct
  source 1..120: mol_type = other DNA
cagtgacttcatttgcaacacagtgtggagaaattcatgcctaagggcaatctggagatgtgaaggttttggtaagaggcaactgggagatctgcggatttaatggagatgcagcctaga

SEQ ID NO: 34668 - DNA, 120 bp, synthetic construct
  source 1..120: mol_type = other DNA
agcactttgggaggctgaggcaggcagatcatctgaggtcgggagtttgagaccagcttgaccaatatggtgaaccccatctctactaaaaatacaaaaattagctgggcatgggggcat

SEQ ID NO: 34669 - DNA, 120 bp, synthetic construct; identical to SEQ ID NO: 10121
  source 1..120: mol_type = other DNA

SEQ ID NO: 34670 - DNA, 120 bp, synthetic construct
  source 1..120: mol_type = other DNA
tccaaacagccacaatttgattgtatcagtttgtagagtaagagcaagttatgcctcagtgtgttgttgaaaataatagaacaatatgccacaattagtggagcttcatagctgggtgtg

SEQ ID NO: 34671 - DNA, 120 bp, synthetic construct
  source 1..120: mol_type = other DNA
ccctgaagagcaatatcataggccttaacacttttcaggggaaatggatttcactcaaataatccagccagtcgctaaacaaataaataacaattggccctggagagggggtaccaatcc

SEQ ID NO: 34672 - DNA, 120 bp, synthetic construct
  source 1..120: mol_type = other DNA
tgacacatacactggaaaaaagctggcagcagcaactgcctgtgagacaaggggccaaattaatgaaaaaggcttcaaactggcctatatatatattcacagtactatatatattcacaa

SEQ ID NO: 34673 - DNA, 120 bp, synthetic construct
  source 1..120: mol_type = other DNA
tgaaagtacaataacagctgggcgcggtggctcacacctgtaatcccagcactttgggaggctgaggcgggcggatcacctgaggtcgggagttcgagaccagcctgaccaacatggtaa

SEQ ID NO: 34674 - DNA, 120 bp, synthetic construct; identical to SEQ ID NO: 10122
  source 1..120: mol_type = other DNA

SEQ ID NO: 34675 - DNA, 120 bp, synthetic construct
  source 1..120: mol_type = other DNA
gcaacctctgcctccctggttcaagcgattctcctgcctcagccaccgcacagtggctttgggagtactctgggaggctgaggtgggtggatcacctgaggtcaggagttcaagaccagc

SEQ ID NO: 34676 - DNA, 120 bp, synthetic construct
  source 1..120: mol_type = other DNA
gaggcggaggttgtagtgagcagagatcgtgccactgccctccaacctgggtgacagagcgagactccatccctgccctgaaaaaaaaaaaaaagatgtgaaacacatacaaaaaaaagt

SEQ ID NO: 34677 - DNA, 120 bp, synthetic construct; identical to SEQ ID NO: 10123
  source 1..120: mol_type = other DNA

SEQ ID NO: 34678 - DNA, 120 bp, synthetic construct
  source 1..120: mol_type = other DNA
aggagccaatcagtacatctttcatctcgaggaaactgagaacccaggggctttgattaaagacattcaggagaatgggatgaaggttggccttgccataaaaccaggaacctcagttca

SEQ ID NO: 34679 - DNA, 120 bp, synthetic construct
  source 1..120: mol_type = other DNA
gttcccatctttggctatagaggtcgctggtggaatagatcctgacactgtccataggtgtgcagaggcgaagctaacatgattgtgtctggcagtgctatggtgaggagtgaagaccct

SEQ ID NO: 34680 - DNA, 120 bp, synthetic construct
  source 1..120: mol_type = other DNA
caggaatattgactaccaaatcatagtgtagttgaagccattctgcgtttttgagcagttattcgtttcagtgattataattgattgtgcagagtattctaagaagttagaaattggtgt

SEQ ID NO: 34681 - DNA, 120 bp, synthetic construct
  source 1..120: mol_type = other DNA
gtgtcttaatgtctaaggagggcatattagctacactataaaaacaatttttttctgtatttctgaaaagaattttgttgtttctcagttgttttccaaaagcaaaggaagtcttaatgt

SEQ ID NO: 34682 - DNA, 120 bp, synthetic construct; identical to SEQ ID NO: 10124
  source 1..120: mol_type = other DNA

SEQ ID NO: 34683 - DNA, 120 bp, synthetic construct
  source 1..120: mol_type = other DNA
gttgaggaggcagtgagctatgattgtgccacagtgcttcagccagggtgacagagtgagaccctgtctcttaaaaaaaagaaaagaggctgggtgcagtggctcatgcctgtaatccca

SEQ ID NO: 34684 - DNA, 120 bp, synthetic construct
  source 1..120: mol_type = other DNA
gcctgtagtcccagctactcgagaggctgaggcaggagaatcgcttgaacccgggaagttggaggttgcagtgagctgagattgcgccactgcactccagcctgggtgacaaagtgagac

SEQ ID NO: 34685 - DNA, 120 bp, synthetic construct; identical to SEQ ID NO: 10125
  source 1..120: mol_type = other DNA

SEQ ID NO: 34686 - DNA, 120 bp, synthetic construct
  source 1..120: mol_type = other DNA
gagtgcaaggttggtttaacatccaaaaatgaattagtgtaaataatgtaatgcattatatcaatagaataaaaaacaaaaatcaccttgtcatctcagtagacacagaaaaagcatttg

SEQ ID NO: 34687 - DNA, 120 bp, synthetic construct
  source 1..120: mol_type = other DNA
ctgaggccaggcacagtggctcacgcctgtaatcctaacactttaggaggccaaggttggagggatcacttgaggtcaggagttcaagaacagcctggccaacatggtgaaaccctgtct

SEQ ID NO: 34688 - DNA, 120 bp, synthetic construct
  source 1..120: mol_type = other DNA
gagatagcactactgcacacaataggctgggcgacagagctcaaaacaaacaaacaaacaaacaaaatagtgaaagactgtatgcttatccttaagattaggaaaaagagagataagtct

SEQ ID NO: 34689 - DNA, 120 bp, synthetic construct
  source 1..120: mol_type = other DNA
atgatcttgcatatagaccctgaggaatccactaccaaagtattggaactaataaattattagtttagtaaggttataggatacaagatcattacacaaaacttagttgtaaatgtatcc

SEQ ID NO: 34690 - DNA, 120 bp, synthetic construct; identical to SEQ ID NO: 10126
  source 1..120: mol_type = other DNA

SEQ ID NO: 34691 - DNA, 120 bp, synthetic construct
  source 1..120: mol_type = other DNA
gggggtttcaccatgttggccaggctggtctcgaactcctgacctcaggtgatccacccgcctcagcctctgaaagtcctgggattacaggcgtgagctagtgcgcccagcctggccttt

SEQ ID NO: 34692 - DNA, 120 bp, synthetic construct
  source 1..120: mol_type = other DNA
tatcagcctcccaagcagctcagaccacaggcatgcgcgatcatccctagctttttttttttgtttgtttgttttttaatttcttgtagagacagagtctccctgtgttacccaggctgg

SEQ ID NO: 34693 - DNA, 120 bp, synthetic construct; identical to SEQ ID NO: 10127
  source 1..120: mol_type = other DNA

SEQ ID NO: 34694 - DNA, 120 bp, synthetic construct
  source 1..120: mol_type = other DNA
acctgaggtcaggagttcaagaccagcctggccaacatggagaaaccctgtctctactaaaactacaaaattagccgggtgtggtggcacatacctgtaatcccaggtactcgggaggct

SEQ ID NO: 34695 - DNA, 120 bp, synthetic construct
  source 1..120: mol_type = other DNA
acaagtcaattcataaattcctatggaatcgcaagggacccacaatagctaaatcttgaaaaagaacaaagcagaaagactcacgctttgtgatttcaagacatactataaaacaactaa

SEQ ID NO: 34696 - DNA, 120 bp, synthetic construct
  source 1..120: mol_type = other DNA
cttgtctctaccaaaaatacaaaaattaaccgggcgtgggggtgcacacttgtagtccaagctgcttgggagggctgaggcacaagaatcccttgaacccaggaggtggaggttgcagtg

SEQ ID NO: 34697 - DNA, 120 bp, synthetic construct; identical to SEQ ID NO: 10128
  source 1..120: mol_type = other DNA

SEQ ID NO: 34698 - DNA, 120 bp, synthetic construct
  source 1..120: mol_type = other DNA
tgcaacctccgcctcctgggttcaagtgattttcctgcctcagcctcctgagtacctggactacaggcgcctgtcacaacgcccggctaatttttgtatttttagtagagatagggttcc

SEQ ID NO: 34699 - DNA, 120 bp, synthetic construct
  source 1..120: mol_type = other DNA
atggagctgagacaactggatagccacatgcaaaaaaaagaagaaattaaacccttacctcacactacatacaaaaattaactcatggctgggcacggtggctcacacctgtaatcccag

SEQ ID NO: 34700 - DNA, 120 bp, synthetic construct
  source 1..120: mol_type = other DNA
cacctgtaatcccagcacttcgggaggccgaggtgggtggctcacgaggtcaggagatcaagaccatcctggctaacatggtgaaaccctgtctgtactaaaaatacaaaaacaaaatta

SEQ ID NO: 34701 - DNA, 120 bp, synthetic construct
  source 1..120: mol_type = other DNA
tgggcgacagagggagactccatctaaaaaaaaaaaaaaaaattagctgggcatggtggcgggcacctgtaatcacagctacttgggaggctgaggcaggagaatcgcttgaacccaggg

SEQ ID NO: 34702 - DNA, 120 bp, synthetic construct; identical to SEQ ID NO: 10129
  source 1..120: mol_type = other DNA

SEQ ID NO: 34703 - DNA, 120 bp, synthetic construct
  source 1..120: mol_type = other DNA
caacatagcaaaaccccatctctactaaaaatacaaaaattagccagccgtggtggcatgctcttgtagtgccatctactctggaggctgagacatgagaatcacttgaactcgggaggt

SEQ ID NO: 34704 - DNA, 120 bp, synthetic construct
  source 1..120: mol_type = other DNA
acaaaaacaaaaaacaaatgtggagaaatgtgaacccttttacactgctggtaagaccgtaaaatggtgcagccagtttgaaaagcaaactagttagccaggcatggtgggtcatacatg

SEQ ID NO: 34705 - DNA, 120 bp, synthetic construct
  source 1..120: mol_type = other DNA
ggtggcttgcacctgtagtcttagttacttgggaggttgaggtgggaggatcacttgagcctgggagaggctatagtgaggcatgactgcaccactgcacctccagcctggtaatcaaag

SEQ ID NO: 34706 - DNA, 120 bp, synthetic construct; identical to SEQ ID NO: 10130
  source 1..120: mol_type = other DNA

SEQ ID NO: 34707 - DNA, 120 bp, synthetic construct
  source 1..120: mol_type = other DNA
acagttcaaatatacatcagctgatgaatggataaacaaaatgtggtctatccttactatggaattacttggcaataaaatagaatgaagtaccagcacgtgcttcaacatggatggacc

SEQ ID NO: 34708 - DNA, 120 bp, synthetic construct
  source 1..120: mol_type = other DNA
catatctacagagacaaagtagatcagtggttgttcagggctgggaaaaatgggtggggtagagggtgtgatagctgaaatatacaaggttttatttatgaagtgatgaaaatactctaa

SEQ ID NO: 34709 - DNA, 120 bp, synthetic construct; identical to SEQ ID NO: 10131
  source 1..120: mol_type = other DNA

SEQ ID NO: 34710 - DNA, 120 bp, synthetic construct
  source 1..120: mol_type = other DNA
gctgggcgtgatggcacacgcctgtaatcccagctactcgggaggctgaggcaggagaatcacttgaacctggaaggcggaggttgtggtgagctgagatcacgccgttgcactccagcc

SEQ ID NO: 34711 - DNA, 120 bp, synthetic construct
  source 1..120: mol_type = other DNA
tgctgatctctgatctaagttactatttgatagatgttagatgttgtgagagggtaagagagactagcctataaggaaagggattttagttttttgggggtttttttttttgagacggag

SEQ ID NO: 34712 - DNA, 120 bp, synthetic construct
  source 1..120: mol_type = other DNA
gtgccaccatgcccggctaatttttgtatttttagtagagatgggctttcaccatgttggccaggctgatcttgaactcctgacttcaggtgatccgccctccttggtctcccaaagtgc

SEQ ID NO: 34713 - DNA, 120 bp, synthetic construct; identical to SEQ ID NO: 10132
  source 1..120: mol_type = other DNA

SEQ ID NO: 34714 - DNA, 120 bp, synthetic construct
  source 1..120: mol_type = other DNA
atctcctctttctccctacccaacctccatgaccacattgagaaccactgatctatagaaaaggataatagtagtgacattcagagaggcaggatggtatagtgcaaagcttgccaaact

SEQ ID NO: 34715 - DNA, 120 bp, synthetic construct
  source 1..120: mol_type = other DNA
accggcccaaggaccacactttgaatagcagagcagtagtagaaagtgcatcggctttgaaagaagacagacctgggcttgaattctagctaaaatacttctactttggacaagttacat

SEQ ID NO: 34716 - DNA, 120 bp, synthetic construct
  source 1..120: mol_type = other DNA
tataattggcctaaagtaggaggctctggttaccatgggcactgccctgttgtgatttatcaagccattacacctcactgaacctcagatttccagtggaaaaacctgtttgtaaaccat

SEQ ID NO: 34717 - DNA, 120 bp, synthetic construct
  source 1..120: mol_type = other DNA
gcaaggagatggcagatgcattttgaaaaaaaaggagagagagagtacttgtagaattcttgactttattgaggtcaaatgtaggtggcttttcaagaaggactcaatttcagaaccggt

SEQ ID NO: 34718 - DNA, 120 bp, synthetic construct; identical to SEQ ID NO: 10133
  source 1..120: mol_type = other DNA

SEQ ID NO: 34719 - DNA, 120 bp, synthetic construct
  source 1..120: mol_type = other DNA
caaagcctccttctcctgttgtttggcattctaaatgttttcacatacctaagtgagattatgattgtattaaataccaacattgcagatcattccagcatacaagtggacgtaagttgt

SEQ ID NO: 34720 - DNA, 120 bp, synthetic construct; identical to SEQ ID NO: 10134
  source 1..120: mol_type = other DNA

SEQ ID NO: 34721 - DNA, 120 bp, synthetic construct
  source 1..120: mol_type = other DNA
agcctcagcctcccgaatagctgggaatacaggcatgtgccaacacgccctgctaatttttagatttttagtaaagacagggtttctccatgttggtcatgctggtctcgaactcctgac

SEQ ID NO: 34722 - DNA, 120 bp, synthetic construct
  source 1..120: mol_type = other DNA
ttgtttgtttgtttgttttgagatggagtctcgctctgttgcccaggctggagtgcagtggcgtgatctcagctcacttcaacctctgtctcctgggttcaagcaattctcctgcctcaa

SEQ ID NO: 34723 - DNA, 120 bp, synthetic construct; identical to SEQ ID NO: 10135
  source 1..120: mol_type = other DNA

SEQ ID NO: 34724 - DNA, 120 bp, synthetic construct
  source 1..120: mol_type = other DNA
actagcagttactttgtgctaggtaccatgctaaatgctttaaatgcacactacctcatttgatataacagggactcatttattcattcaagagatattataaaataggctaggcacagt

SEQ ID NO: 34725 - DNA, 120 bp, synthetic construct
  source 1..120: mol_type = other DNA
aggcgtggtagtgggcgcctgtagtcccagctactccggaggttgaggcaggagaattgcttgaacctgggaggtgagggttgcagtgagctgagatcgcgtcactgcactccagcctgg

SEQ ID NO: 34726 - DNA, 120 bp, synthetic construct; identical to SEQ ID NO: 10136
  source 1..120: mol_type = other DNA

SEQ ID NO: 34727 - DNA, 120 bp, synthetic construct
  source 1..120: mol_type = other DNA
gggggcaatggcatgtgcctgtaattccagctacttgggaggctgaggcaggataattgcctgaggtggaggttgcctgagattgagccactgcactccagcctggatgacagggagaga

SEQ ID NO: 34728 - DNA, 120 bp, synthetic construct
  source 1..120: mol_type = other DNA
aggtgtgaaccaccacacgcagctctgatttactgggtgcccacgttgaccaggcagggaacacctcctagcagtgatcaaggactactttggacctaggttctgtaactgacttcatct

SEQ ID NO: 34729 - DNA, 120 bp, synthetic construct; identical to SEQ ID NO: 10137
  source 1..120: mol_type = other DNA

SEQ ID NO: 34730 - DNA, 120 bp, synthetic construct
  source 1..120: mol_type = other DNA
gcctctgttccctaactgtaaaatggtgaatgtaattaattcttcctgcatagtgttacaagaattaaatttgagtaattactggtaaagtacgtagaatagtacctaacacaagataag

SEQ ID NO: 34731 - DNA, 120 bp, synthetic construct
  source 1..120: mol_type = other DNA
tctcgggaggctgaggtgggaggatcacatgagcctgggaggtcgaggttgccataagcttcctgattgcaccactgcactccagcctgggtgacagagtgagaccttgtctcaaaaaat

SEQ ID NO: 34732 - DNA, 120 bp, synthetic construct
  source 1..120: mol_type = other DNA
tcctggtccctccttcacactgccacatctttgcataggctgttctctttgcctggaatgccattctcatttgttgcttggcagaactgaactcattctccttctaggctctgctcaagg

SEQ ID NO: 34733 - DNA, 120 bp, synthetic construct; identical to SEQ ID NO: 10138
  source 1..120: mol_type = other DNA

SEQ ID NO: 34734 - DNA, 120 bp, synthetic construct
  source 1..120: mol_type = other DNA
gtgctacattacctcagtgtctagtttgtcattttgaatcaagtggacattttctgtaagtgaatcattttcacttgctcatgatataatgagaattccttacctttggcttaaaatgag

SEQ ID NO: 34735 - DNA, 120 bp, synthetic construct
  source 1..120: mol_type = other DNA
aacatctttattctgagactctttcatgtatggattttgaaaagttagttaactgttcagacgacattgtttctttgacttttacaatccgcttccctctcactgacagttcagttttgg

SEQ ID NO: 34736 - DNA, 120 bp, synthetic construct
  source 1..120: mol_type = other DNA
agcaattctcttgcctcagcctcctgagtagctgggattatgggtgtgcaccaccacacatggctaatttttgtatttttagtagagacgaagtttcaccatgttggccaggacggtctc

SEQ ID NO: 34737 - DNA, 120 bp, synthetic construct
  source 1..120: mol_type = other DNA
actggagtgcagtggtgctatcacagctcactacagacttgacctgctgggctcaagtgattctcctgcctaagcctcccaagtagctgggactacaggcacatgccaccaatacctggc

SEQ ID NO: 34738 - DNA, 120 bp, synthetic construct; identical to SEQ ID NO: 10139
  source 1..120: mol_type = other DNA

SEQ ID NO: 34739 - DNA, 120 bp, synthetic construct
  source 1..120: mol_type = other DNA
aggaaacaattagaaggcaaacgctttgggcaaggtatcacattgaaacctgaacagcagtgggacttgctgggggttgggacaaaactaggcagatgtaagcatctagtgaatctagag

SEQ ID NO: 34740 - DNA, 120 bp, synthetic construct
  source 1..120: mol_type = other DNA
tcaagctggccagagttgagctcaggaagtcagtgcactttctcttgtctggttcctgcatcgttttacttgtgtaaaatcatcaagatccctaaaccgatgtctgaacaccaggcttct

SEQ ID NO: 34741 - DNA, 120 bp, synthetic construct
  source 1..120: mol_type = other DNA
actcacattcaaaggccctcagctttagcgtcttattttaggtgatctgggcagaagagtctcactgtgctcctctccctttcatatttcctgctttggtaggaagtcatctcaagactt

SEQ ID NO: 34742 - DNA, 120 bp, synthetic construct; identical to SEQ ID NO: 10140
  source 1..120: mol_type = other DNA

SEQ ID NO: 34743 - DNA, 120 bp, synthetic construct
  source 1..120: mol_type = other DNA
cggctcactgcaacctttgcctcccgggttcaagcgattctcgtgcctcagcctcctgagtagctgggattataggagtgcaccaccacgcctagctaatttttgtatttttagtagaga

SEQ ID NO: 34744 - DNA, 120 bp, synthetic construct
  source 1..120: mol_type = other DNA
tttgagacatgaatgaggtggacctttacaggcacttggttcagggcctgacccgtagtgagcatttgataaatgttacctatctatgttgtcatgggctgggagtgtgggaacaggaag

SEQ ID NO: 34745 - DNA, 120 bp, synthetic construct
  source 1..120: mol_type = other DNA
aataaaatggactcaccttatgccatgttcttgttgaagggtcctctttctttctttctttctttctttctttctttctttctttctttctttctttctttctttctttctttctctttc

SEQ ID NO: 34746 - DNA, 120 bp, synthetic construct; identical to SEQ ID NO: 10141
  source 1..120: mol_type = other DNA

SEQ ID NO: 34747 - DNA, 120 bp, synthetic construct
  source 1..120: mol_type = other DNA
tttttgtaacatgctaagtaatacaatctctatttagcttgatgtccacggtgatagcaggattcttttcggatttctgccatagttaattattctgcattcttttgtccctagtgtgtc

SEQ ID NO: 34748 - DNA, 120 bp, synthetic construct
  source 1..120: mol_type = other DNA
cgtttgaggttttaaaaacccagaattgagttttctcagagctgctaatctttctagccagctggtgacgaggcttctcaattcttgttacaggatgatgtgttctgtcctcctgtctgt

SEQ ID NO: 34749 - DNA, 120 bp, synthetic construct; identical to SEQ ID NO: 10142
  source 1..120: mol_type = other DNA

SEQ ID NO: 34750 - DNA, 120 bp, synthetic construct
  source 1..120: mol_type = other DNA
gttttgatagtttgacattcagataaaacttaaaactgaagcccaaagtaattactaaatgtatctcgactgatctgtggttttaaattcaccaacagtgcatctccctacttgcttaat

SEQ ID NO: 34751 - DNA, 120 bp, synthetic construct
  source 1..120: mol_type = other DNA
caggctggagtacagtggcgccatctcagctcatggcaatctctgcctcctgggttcaagcgattctcttgcctcagcctcccgagtagctgggactacaggtgcttgctaccacgccca

SEQ ID NO: 34752 - DNA, 120 bp, synthetic construct
  source 1..120: mol_type = other DNA
gccaccacgcccagccccatctgcagatatttttaccagtcctatccactcatgcctgtaccttctaatgttattaaagtcagttttattatcattgatgaccatgagacttaatcaaaa

SEQ ID NO: 34753 - DNA, 120 bp, synthetic construct; identical to SEQ ID NO: 10143
  source 1..120: mol_type = other DNA

SEQ ID NO: 34754 - DNA, 120 bp, synthetic construct
  source 1..120: mol_type = other DNA
atcaataacatgctaggtgataagaacttctatttttcagcagcattatcattcccaattttactacatcagagagttcatcattatacagtcaactcatgattattaggagtaaggaac

SEQ ID NO: 34755 - DNA, 120 bp, synthetic construct
  source 1..120: mol_type = other DNA
aaaattatcgtagcaatgaaaaatgctacatggtttatacaaagtcatgtcaagctcatagactcagagagtggtgttaatcctgaagaccacttgatgattatggaagccgagacccaa

SEQ ID NO: 34756 - DNA, 120 bp, synthetic construct
  source 1..120: mol_type = other DNA
tgtggggactgtattgctttcatagcatgatggttgtattgtttctttttgctttgtcatctgtcagtcaactttgaagtgaatcttctttgtttacagcatagtaaaatatggtgattg

SEQ ID NO: 34757 - DNA, 120 bp, synthetic construct; identical to SEQ ID NO: 10144
  source 1..120: mol_type = other DNA

SEQ ID NO: 34758 - DNA, 120 bp, synthetic construct
  source 1..120: mol_type = other DNA
agagtttaaaagctccattttgtggcttcccaaggtgctgtgatttgtttcttactagtctcctttgttctgtggaaaattttcttctttggttgtttgagatttagatttccttgccaa

SEQ ID NO: 34759 - DNA, 120 bp, synthetic construct
  source 1..120: mol_type = other DNA
tcattaattggaagactgttctgctcagaagcctcatctagttatcatgattatcatcaacatcgtcaaccaaccacaagcatcaagcatttatggagtatccacagattatgcagcact

SEQ ID NO: 34760 - DNA, 120 bp, synthetic construct
  source 1..120: mol_type = other DNA
gaaaacttggggaaagacaagtacctcatttttcaatatgtgtaaagcccatactgattcatgtatgtggcattgggggacatggacagcagggagacaaagggatagatcttagaaagg

SEQ ID NO: 34761 - DNA, 120 bp, synthetic construct; identical to SEQ ID NO: 10145
  source 1..120: mol_type = other DNA

SEQ ID NO: 34762 - DNA, 120 bp, synthetic construct
  source 1..120: mol_type = other DNA
tgcctcccaagttcaagcgattctcctgcctcagcttcccaagtagctgggactacaggtatgcgccaccacgcccaactagtttttgtatttttagtagagacggggtttcaccatgtt

SEQ ID NO: 34763 - DNA, 120 bp, synthetic construct
  source 1..120: mol_type = other DNA
atttaaatgaaggatgtggggttcaggattggtacagcagaggaaaaaagtctctctctctccccactcccctctttttgctgtgatctattttttttcccacacttttcacaggtgttg

SEQ ID NO: 34764 - DNA, 120 bp, synthetic construct
  source 1..120: mol_type = other DNA
tgagacacaagaacagcttttgttgtgtggtgataccataccctgaattgagattatcagtgtcagacatatattactgcacttttttatcttcttcgcttaatcaaaatagattttaat

SEQ ID NO: 34765 - DNA, 120 bp, synthetic construct
  source 1..120: mol_type = other DNA
taggtttggatctggtatattagcatcttaaattctcaagtctcctataaacctgttctcttaggccagctatggctgcagaagtcagttatagataaacattgagaggggagatcacat

SEQ ID NO: 34766 - DNA, 120 bp, synthetic construct; identical to SEQ ID NO: 10146
  source 1..120: mol_type = other DNA

SEQ ID NO: 34767 - DNA, 120 bp, synthetic construct
  source 1..120: mol_type = other DNA
atttcatatatagtagccaaattcagttcactttcttcaagaaagttgtccttttcaaactgtggccttttcctgtcatgggtctggtttcttactcaccccgcactgttgtatcagcag

SEQ ID NO: 34768 - DNA, 120 bp, synthetic construct
  source 1..120: mol_type = other DNA
gatggctgttcagtagatgttattcctaatgcttccctggttaatagaactcaatcagtcctgcaggttattggtgctggttgcttcctataacagaaaagtactgcattccagctacgt

SEQ ID NO: 34769 - DNA, 120 bp, synthetic construct; identical to SEQ ID NO: 10147
  source 1..120: mol_type = other DNA

SEQ ID NO: 34770 - DNA, 120 bp, synthetic construct
  source 1..120: mol_type = other DNA
tctctttcttcttcccgcaagtcacctttctcacgccctccacctctctctttccttctgcaaaatgagcatctgcctcttagcctccctcttcgtcactaggctgagatgaggcaggga

SEQ ID NO: 34771 - DNA, 120 bp, synthetic construct
  source 1..120: mol_type = other DNA
accctaacaaaaaggccctcaagtggcacgagtgcagggcctgaaagcgttacgtgccatcagttatccaaaaagaacattttttaaccagaaaataaacatgagactcatcccactagt

SEQ ID NO: 34772 - DNA, 120 bp, synthetic construct
  source 1..120: mol_type = other DNA
atcagcgtggagagtcagaattgtcacacgcactgggctgaagctgcatattcagtactgcattgaacattcagtactgcagataggataattatgctgtttgtcagatactagaaaagt

SEQ ID NO: 34773 - DNA, 120 bp, synthetic construct
  source 1..120: mol_type = other DNA
ctttcaagatacagctcaaacagcatctctcctcaggaaagaccttactcccggagacccaggcccgagttgtgttgccactgtaccctgttctgttagcacttaccaggttgcattttt

SEQ ID NO: 34774 - DNA, 120 bp, synthetic construct; identical to SEQ ID NO: 10148
  source 1..120: mol_type = other DNA

SEQ ID NO: 34775 - DNA, 120 bp, synthetic construct
  source 1..120: mol_type = other DNA
accccttactgagtatttatttgctatgggccaagcactctcttagggtttttaaatgaatcaatgcacttaatccttagatcaatctgctaagacgagttctgtttattatcccctttg

SEQ ID NO: 34776 - DNA, 120 bp, synthetic construct
  source 1..120: mol_type = other DNA
aagccctcatgtcctgaggcatccatcttaggtaacaatttaacttctctcttgtttctagaatggtattagtgtgttccctacttgggagaatggagaaaatggtcaccagataacttt

SEQ ID NO: 34777 - DNA, 120 bp, synthetic construct; identical to SEQ ID NO: 10149
  source 1..120: mol_type = other DNA

SEQ ID NO: 34778 - DNA, 120 bp, synthetic construct
  source 1..120: mol_type = other DNA
tggttcctcttttctaccatgagccagtttagatgtcatttccctacctgcccaggataggaggttcccacagccgctgggtgtcctgttgtggcactcacaagtgttatagtgctgaaa

SEQ ID NO: 34779 - DNA, 120 bp, synthetic construct
  source 1..120: mol_type = other DNA
cttgggcggtgcttggacacaatgtgtgtgttcactaactatttgtggaagaggtgggtgagcgggagttaactggctttaagtctttgagttttgggtttttgaagtagtcaagtccgt

SEQ ID NO: 34780 - DNA, 120 bp, synthetic construct
  source 1..120: mol_type = other DNA
cgggagatgttcagaggacagtgagtcacttcacagcatcagcatggtatagtggatgagtgatgacactgaagatgagcttggtcatattctggcaagttggctgacacctggaagtcc

SEQ ID NO: 34781 - DNA, 120 bp, synthetic construct; identical to SEQ ID NO: 10150
  source 1..120: mol_type = other DNA

SEQ ID NO: 34782 - DNA, 120 bp, synthetic construct
  source 1..120: mol_type = other DNA
agtggaattagggctttaaatcaaatatgtttgaacgtctttacttggtttcctcaggcaccttcactcatcttgtctaaaacttaattgctggtctatccctgccagatttgctgcttc

SEQ ID NO: 34783 - DNA, 120 bp, synthetic construct
  source 1..120: mol_type = other DNA
tttccgtttctcaggctgccttctctcccttctactgccttccttatgtcaggggttggcctactttctggccttcttgatccagggcttcttttgttcaactcatactccaccctgttg

SEQ ID NO: 34784 - DNA, 120 bp, synthetic construct
  source 1..120: mol_type = other DNA
catgccacctcctgtctgtttaagctttacaagatgacttgcagtttcctgtagaaagcatgacttttaaaaaaagacttatttccttctctcctgcatctaactctcacttgctcttta

SEQ ID NO: 34785 - DNA, 120 bp, synthetic construct; identical to SEQ ID NO: 10151
  source 1..120: mol_type = other DNA

SEQ ID NO: 34786 - DNA, 120 bp, synthetic construct
  source 1..120: mol_type = other DNA
aagaatcctgtgactcagtttccttatttgcacaaaaagggtatgagtctacattaggtaattactcatgctcatttccaactcttgacagtctacgatcctttgtgtcaaagttaaaaa

SEQ ID NO: 34787 - DNA, 120 bp, synthetic construct
  source 1..120: mol_type = other DNA
acaaagtagaagggaatacaggaaaactgcattaatacaattttatgctggagaatttaaactcccatgtcaggaaattcactcatcattcccttggcagcttttgtttctctgcactgc

SEQ ID NO: 34788 - DNA, 120 bp, synthetic construct
  source 1..120: mol_type = other DNA
cccagccatgaccatgagttatggcagattgggaatcgttaccttgatcttctcaacccttgggtgtttaccttttccaagttaatgcctgttctttaatgttacattatcttgtagcaa

SEQ ID NO: 34789 - DNA, 120 bp, synthetic construct
  source 1..120: mol_type = other DNA
ttccaaaataacatttcttcagtgaagtctgcctgtaggaattaaaacttttggtgaattaaaaagctttttgtcctattgtcagactgggaaatggatgtgcccattactcagccttaa

SEQ ID NO: 34790 - DNA, 120 bp, synthetic construct; identical to SEQ ID NO: 10152
  source 1..120: mol_type = other DNA

SEQ ID NO: 34791 - DNA, 120 bp, synthetic construct
  source 1..120: mol_type = other DNA
catatgtgttaaaaatgaaaagcctacttgaaaactcccctgtagaatcaggttttagcaaaaaccaatcaggtatcagaggtctaacttatttttcccttcttggttttatagcaagtc

SEQ ID NO: 34792 - DNA, 120 bp, synthetic construct
  source 1..120: mol_type = other DNA
cccctgcctcagcctcccgagtagctgggactacaggcatgcgctaccacacctggctaattttttagtattttactagagacagggtttcaccatgttggccaggatggtctcgatctc

SEQ ID NO: 34793 - DNA, 120 bp, synthetic construct
  source 1..120: mol_type = other DNA
ccaagactttgagtggagatttctaatgagggcaggaagggacggatgcttctgcaattgagtggtctcatttttcccatgtctgtcgaaagattactctttcatgaccaccatttctat

SEQ ID NO: 34794 - DNA, 120 bp, synthetic construct; identical to SEQ ID NO: 10153
  source 1..120: mol_type = other DNA

SEQ ID NO: 34795 - DNA, 120 bp, synthetic construct
  source 1..120: mol_type = other DNA
tgagtagcttcccctttggcctcagttaggcatccttgacaggacagacctgtgattggactgtctggtctctcatggttctttttctccatgatttatgactttgattatgatttcttt

SEQ ID NO: 34796 - DNA, 120 bp, synthetic construct
  source 1..120: mol_type = other DNA
aaaaaaaaaatcaacaacaaaatttcaagggaatgaatgtccctagaagctagccatctccccgagttaacttaagaggctagactctcctaaatgaggatgcttatttaccagctttcc

SEQ ID NO: 34797 - DNA, 120 bp, synthetic construct; identical to SEQ ID NO: 10154
  source 1..120: mol_type = other DNA

SEQ ID NO: 34798 - DNA, 120 bp, synthetic construct
  source 1..120: mol_type = other DNA
caatcaaggacacagtggcctggctcaaaatggacaagaaggttgggctagaactcgatgaaactggtggggctgacgtgagctttccagtttttccctgagcaggcgcctagctcatca

SEQ ID NO: 34799 - DNA, 120 bp, synthetic construct
  source 1..120: mol_type = other DNA
aagttaccaggattagactgctgctggccctggcttctttacccattgttaccagcctgattgcttctggctttatgcctttcagtttatgaataaaaacttcatgaataaaaattactg

SEQ ID NO: 34800 - DNA, 120 bp, synthetic construct
  source 1..120: mol_type = other DNA
agtctttttgaggaacaccatagtctgacatgaagtaatcattaatatgatctaaggaatagagagtgcctggtccccagggtgaaagaatgtccattttgtcctcaggattctctgggg

SEQ ID NO: 34801 - DNA, 120 bp, synthetic construct; identical to SEQ ID NO: 10155
  source 1..120: mol_type = other DNA

SEQ ID NO: 34802 - DNA, 120 bp, synthetic construct
  source 1..120: mol_type = other DNA
tcaaagcttaagtgttcgaattgtgttcacatatgtacacagtaatctaaataatcacatgggaatccctgctggttgtaagttcaatggtaattcccaatgatcatgagcatctaagtg

SEQ ID NO: 34803 - DNA, 120 bp, synthetic construct
  source 1..120: mol_type = other DNA
gtatgtttttcatgattcttagcaaagtgaattttaatgatagctgagtgtaggccaaatggatattagactgggggcatcaggagccgtggaacttgctgctcaagggaaatacatcat

SEQ ID NO: 34804 - DNA, 120 bp, synthetic construct
  source 1..120: mol_type = other DNA
gcagtggtttacagactgtgcttcaagtattttgtggggcatctctggaggttccttgaaacaaagggttgccatgatggacacattttattctgttgctcagttaatgtttagatgact

SEQ ID NO: 34805 - DNA, 120 bp, synthetic construct
  source 1..120: mol_type = other DNA
tacctcctgggttcaagagattctcctgcctcagcctcccgagtagctggaattacaggtgtccaccaccacacctggctaattttttgtatttttagtagagatggggtttcaccatgt

SEQ ID NO: 34806 - DNA, 120 bp, synthetic construct; identical to SEQ ID NO: 10156
  source 1..120: mol_type = other DNA

SEQ ID NO: 34807 - DNA, 120 bp, synthetic construct
  source 1..120: mol_type = other DNA
tgccttaatcctagctctgctcacttcttggggctattgattaatttgtttcagaaacaccataggaagtgaatattacctcttgctataggtgactttgtgaatacttcaaactgtaaa

SEQ ID NO: 34808 - DNA, 120 bp, synthetic construct
  source 1..120: mol_type = other DNA
cacaggaggaagtgccaatatagtgtgtttgtcttttgctctgcaattctgcaggtactggatcatgatgtttcaaaggaagaaccagtcacctttcacttcttggccaaattttatcct

SEQ ID NO: 34809 - DNA, 120 bp, synthetic construct; identical to SEQ ID NO: 10157
  source 1..120: mol_type = other DNA

SEQ ID NO: 34810 - DNA, 120 bp, synthetic construct
  source 1..120: mol_type = other DNA
atagtttcaaaggaaggctaaagagagagtcttataaagcagtagttcttccaaaagtttaaaatctgctctcattaagagaggactggccgggcatggtggctcaggcctgtaatccca

SEQ ID NO: 34811 - DNA, 120 bp, synthetic construct
  source 1..120: mol_type = other DNA
cctgtagtcccagctactcgggaggctgaggcaggagaatcacttgaacctggaagatggaggttgcagtgagccaagatcgcgccactgcactccagcttgggcaacagagtgaggttc

SEQ ID NO: 34812 - DNA, 120 bp, synthetic construct
  source 1..120: mol_type = other DNA
accagcctgaccaacatggtgaaactccatgtctactaaaaatacaaaaattagccaggcatggtgatgcatgcctgtaatcccagctactcaggaggctgaggcaggagaatcacttga

SEQ ID NO: 34813 - DNA, 120 bp, synthetic construct
  source 1..120: mol_type = other DNA
tagtgacacttggtttgtcccccatatgtggtacttcagacatcgtgcttcatgctatgctgtgtctctaattgtcctatttcttccttaattcctcattagattgtaagccccttaaag

SEQ ID NO: 34814 - DNA, 120 bp, synthetic construct; identical to SEQ ID NO: 10158
  source 1..120: mol_type = other DNA

SEQ ID NO: 34815 - DNA, 120 bp, synthetic construct
  source 1..120: mol_type = other DNA
cccagagatagttgggtagtctgtcacatagccctcctgtaattaatttcagcctcagtatattgtggtcagcaaatattaagttaaatataataaaaccccctaaattctttttaaaaa

SEQ ID NO: 34816 - DNA, 120 bp, synthetic construct
  source 1..120: mol_type = other DNA
ctgaggtcaggagtttgagaccaccctgaccaacatggagaaaccccgtccctactaaaaatacaaaattagccgggcatggtggcacatgcctgtaatcccagctacttgggagactga

SEQ ID NO: 34817 - DNA, 120 bp, synthetic construct
  source 1..120: mol_type = other DNA
agtttttctatagcgttgctttttcccccctctctttggaaatgaaaccaagggattagaaagttgcactgcttgagaaacatctcaggtttcattttctctctaagaatgtaaaatcac

SEQ ID NO: 34818 - DNA, 120 bp, synthetic construct; identical to SEQ ID NO: 10159
  source 1..120: mol_type = other DNA

SEQ ID NO: 34819 - DNA, 120 bp, synthetic construct
  source 1..120: mol_type = other DNA
ttaattcaacattatggcttaagaattatatttcctggacctcacgtgtacttaaaagttgaatcgatcaaattttattgcttccttttcccttagagcagcacgttgagagtgatggtt

SEQ ID NO: 34820 - DNA, 120 bp, synthetic construct
  source 1..120: mol_type = other DNA
gagctgctcttgacacttcttgagttcatagcgctctgtcacacagcctctgttgtaactacagagaccgtttttactcttcagcattgatcatgaagagaagagataaggggtttttat

SEQ ID NO: 34821 - DNA, 120 bp, synthetic construct
  source 1..120: mol_type = other DNA
aacgccgtgaggccatctgttgtgatcagcctacacacctcacttccactcacagagtatcatgtctcccttgttgctcctttcaggtaaagaagcagattttagatgaaaagatctact

SEQ ID NO: 34822 - DNA, 120 bp, synthetic construct; identical to SEQ ID NO: 10160
  source 1..120: mol_type = other DNA

SEQ ID NO: 34823 - DNA, 120 bp, synthetic construct
  source 1..120: mol_type = other DNA
acctttctattagccaggaaaaatgaatttatggtctccaattttagccaaacatggcctttaggtcagaaaggcccaggtcctcactccaaactcatttgcaaacaagctgccttgtgt

SEQ ID NO: 34824 - DNA, 120 bp, synthetic construct; identical to SEQ ID NO: 10161
  source 1..120: mol_type = other DNA

SEQ ID NO: 34825 - DNA, 120 bp, synthetic construct
  source 1..120: mol_type = other DNA
atttttatagagatggggtctcactatgttgtccaggctggtcttgaactcctgagctcaagtgatccttccaccttggcctcccaaagtgctgggattacaggtctgagtcaccatgcc

SEQ ID NO: 34826 - DNA, 120 bp, synthetic construct
  source 1..120: mol_type = other DNA
tgaacaaaggtctctggttttcctaggcagaggaccctgcggacttccgcagcgtttgtgtccctgggtacttgagattagggagtggtgatgactcttaatgagcatgctgccttcaag

SEQ ID NO: 34827 - DNA, 120 bp, synthetic construct
  source 1..120: mol_type = other DNA
gcagaagaatttttcttagtacagaacaaaatgaaaagtctcccgtgtctacttctttctacacagacacggcaaccatccgatttctcaatcttttccccacctttcccccctttctat

SEQ ID NO: 34828 - DNA, 120 bp, synthetic construct
  source 1..120: mol_type = other DNA
ggcgcccctcacctcccggatggggcggctggccgggcggggggctgaccccccaacctccctcccggacggggcggctggcctggcggggggctgacccccccacctccctcccggacg

SEQ ID NO: 34829 - DNA, 120 bp, synthetic construct; identical to SEQ ID NO: 10162
  source 1..120: mol_type = other DNA

SEQ ID NO: 34830 - DNA, 120 bp, synthetic construct
  source 1..120: mol_type = other DNA
atgtgatggcggccgggaagaggcgctcctcacttcccagatgggatggcggctgggcagagacgctcctcactttccagactgggcagccaggcagaggggctcctcacatcccagacg

SEQ ID NO: 34831 - DNA, 120 bp, synthetic construct
  source 1..120: mol_type = other DNA
ccgagatcacgccactgcactccagcctgggcaccattgagcactgagtgaacgagactccgtctgcaatcccggcacctcgggaggccgaggctggcggatcactcgcggttaggagct

SEQ ID NO: 34832 - DNA, 120 bp, synthetic construct
  source 1..120: mol_type = other DNA
aggcagggaggttgcagtgagccgagatggcagcagtatagtccagctttggctcggcatgagagggagaccgtggaaagagagggagagggagaccatggggagagggagaccatgggg

SEQ ID NO: 34833 - DNA, 120 bp, synthetic construct; identical to SEQ ID NO: 10163
  source 1..120: mol_type = other DNA

SEQ ID NO: 34834 - DNA, 120 bp, synthetic construct
  source 1..120: mol_type = other DNA
tcagtgatttgcccaagatcattcagacaatcttgggcaaagctaagagcagaagggtagaattcatggctttgagattgcattttgtgcctccaatattctactttcctgaaaaattag

SEQ ID NO: 34835 - DNA, 120 bp, synthetic construct
  source 1..120: mol_type = other DNA
catatgcttccttttatgctttgatcaagaatattagtaagaggaaaaatgtgtcctttcaatcagtatcaccccgacagtgatgaagcagtcattggcactttgattaaatccgagcac

SEQ ID NO: 34836 - DNA, 120 bp, synthetic construct
  source 1..120: mol_type = other DNA
catggatttttgggccacaaattcaaaggccacctgtagaaaaaaattacttttcagtgaaccagcagatgtttgcttaaacaggtttcactgtaggaaagccctgctaatttggatcgt

SEQ ID NO: 34837 - DNA, 120 bp, synthetic construct
  source 1..120: mol_type = other DNA
ttaaagtcttcatttgggaaactaaggcttactatgacatacttccagtttctaggactgctggttaatagttaaaggatatctgattataatattaataagatcttacatgcccatagt

SEQ ID NO: 34838 - DNA, 120 bp, synthetic construct; identical to SEQ ID NO: 10164
  source 1..120: mol_type = other DNA

SEQ ID NO: 34839 - DNA, 120 bp, synthetic construct
  source 1..120: mol_type = other DNA
gggtagcaaccactgcctttcactaaaggctagtttcatttatatgatcacatttgtctaagttcttcagtaagtcatactggttccttccattatattcagcttgttttcttccacaac

SEQ ID NO: 34840 - DNA, 120 bp, synthetic construct
  source 1..120: mol_type = other DNA
atagacacagttaattccaaagcataaagaaacaattaccctcaaagtataaatacaatactaatcacatggttcagttaacaagaaccatatatgagttatacttgaatcaaaagtgta

SEQ ID NO: 34841 - DNA, 120 bp, synthetic construct
  source 1..120: mol_type = other DNA
tctactaaaaatacaaaaattagccaggcgtggtggtgtagtcccagctacttgggaggctgagacaggaggattgcttgaacctgggaggtggaggttacagtgagctgagattgagcc

SEQ ID NO: 34842 - DNA, 120 bp, synthetic construct; identical to SEQ ID NO: 10165
  source 1..120: mol_type = other DNA

SEQ ID NO: 34843 - DNA, 120 bp, synthetic construct
  source 1..120: mol_type = other DNA
tagagagtggcaagagttgaggctggagaggtatgcaaaaaatcagatcttaaaaggtcttaactttatcctgtaggcgatgcagtgaagggtttatattttagatagagcctgtagtgg

SEQ ID NO: 34844 - DNA, 120 bp, synthetic construct
  source 1..120: mol_type = other DNA
gggctgactgatttaaaaatatccaggagataaaaagttgattagatggtgctatactctgcatatccctttttttcatatccttttacagaatggtatttttcttcccactcagcatct

SEQ ID NO: 34845 - DNA, 120 bp, synthetic construct; identical to SEQ ID NO: 10166
  source 1..120: mol_type = other DNA

SEQ ID NO: 34846 - DNA, 120 bp, synthetic construct
  source 1..120: mol_type = other DNA
agccaagatcacaccactgcactccagcctggacgacagagtgagactccatctcaaaataaataaataaataaataaataaataaataaagtaaaaaaattaaaaaaggtaggtgtcta

SEQ ID NO: 34847 - DNA, 120 bp, synthetic construct
  source 1..120: mol_type = other DNA
caagaatggtcataaatacaaaaagatgtttcatctcacaggtaatcaagaaaaagaaaaaacaacaataaggcaacatttcaaacccataagattggcagggattactagattgggtaa

SEQ ID NO: 34848 - DNA, 120 bp, synthetic construct
  source 1..120: mol_type = other DNA
acgggtggaagtgaggagacacaccgctggctgttccaggtggctactccagaggaatctctgcacacacatccttttcacttaaaactgtcacaacagatagacccacttcattttctt

SEQ ID NO: 34849 - DNA, 120 bp, synthetic construct; identical to SEQ ID NO: 10167
  source 1..120: mol_type = other DNA

SEQ ID NO: 34850 - DNA, 120 bp, synthetic construct
  source 1..120: mol_type = other DNA
ttgtttttctattggtgaaacagatgcaatggacatccttgaatatgcatctttgggcatatatggataatatctctctataatagatatcaagacatggtataactgggttaaagaata

SEQ ID NO: 34851 - DNA, 120 bp, synthetic construct
  source 1..120: mol_type = other DNA
agaaagtagatttagtggttgccagggaaagggagaaggaggaaattaggagtgactgatactggccaggcacggtggctcacacctgtaatcccaacactttgggaggctgaagtgggt

SEQ ID NO: 34852 - DNA, 120 bp, synthetic construct
  source 1..120: mol_type = other DNA
aggatagcttgagcccaggagttcgagacctgcctgggcaatatagcgagacccctttctccagaaaaaggcaaaaacaaaacaaaacaaaacaaaacaaaagacaaaaaatatataaaa

SEQ ID NO: 34853 - DNA, 120 bp, synthetic construct; identical to SEQ ID NO: 10168
  source 1..120: mol_type = other DNA

SEQ ID NO: 34854 - DNA, 120 bp, synthetic construct
  source 1..120: mol_type = other DNA
tgaggggatggacaccccattctccatgatgtgattatttcacattgcacaccgtatcaaaacatctcaggtaccacacaaatatatatatacctactatgtacccacaaacattaaaaa

SEQ ID NO: 34855 - DNA, 120 bp, synthetic construct
  source 1..120: mol_type = other DNA
caagattctgaatatactaaaaaacactgaattgtacacttaatgtaaattttatgtatataaattttatctcaataaaaaatttaaatagatatagccaaatcaccctccaaaactgat

SEQ ID NO: 34856 - DNA, 120 bp, synthetic construct; identical to SEQ ID NO: 2989
  source 1..120: mol_type = other DNA

SEQ ID NO: 34857 - DNA, 120 bp, synthetic construct
  source 1..120: mol_type = other DNA
tgctcccctcccctccccttctgtttctttttcttttctttcttcctttcttcctttcccaggttcaagtgatccatccgcctcagcctccagaggagccgggactataggcatgcgcca

SEQ ID NO: 34858 - DNA, 120 bp, synthetic construct; identical to SEQ ID NO: 10169
  source 1..120: mol_type = other DNA

SEQ ID NO: 34859 - DNA, 120 bp, synthetic construct
  source 1..120: mol_type = other DNA
actggtgtgtgggtatagtagggagggggtctgtcttttttctatatatgtagtaatctaacctttatgtttttgtgaaatcctactcagagcattttatctcatttctcatagttatag

SEQ ID NO: 34860 - DNA, 120 bp, synthetic construct
  source 1..120: mol_type = other DNA
caggttttctgggtctgaattttaataatttaggggattgtctttaatgcaagagtaccaaattaggtacaggcatatgaaggtgcagagacctgaaatccaagcttccttagcttccca

SEQ ID NO: 34861 - DNA, 120 bp, synthetic construct
  source 1..120: mol_type = other DNA
ggatttttttcttcccttgttgtttaaagagacatttaagagcagacacatacatcaaggtggctttaatgttggaagcagagttagtccagtggagaagttctttcagcagggtctttg

SEQ ID NO: 34862 - DNA, 120 bp, synthetic construct; identical to SEQ ID NO: 10170
  source 1..120: mol_type = other DNA

SEQ ID NO: 34863 - DNA, 120 bp, synthetic construct
  source 1..120: mol_type = other DNA
ataaggcagatgctattatgaccctcactctacagatgaggaagttgaggcttagagagaggatgccttactcaaggcctcagaaggggtacttcagcacccccccacttcccttcagga

SEQ ID NO: 34864 - DNA, 120 bp, synthetic construct
  source 1..120: mol_type = other DNA
ttttttgagatggagttttgctcttgttgcccaggctgtagtgcaatggcatgatcttggctcactgcaacctccgcctcccgggttcaagcgattctcctgcctcagcctcccgaatag

SEQ ID NO: 34865 - DNA, 120 bp, synthetic construct; identical to SEQ ID NO: 10171
  source 1..120: mol_type = other DNA

SEQ ID NO: 34866 - DNA, 120 bp, synthetic construct
  source 1..120: mol_type = other DNA
ccctcactctacagctgccttgcagggagtactgttaaagcttagtacagttacgacttactgcatcacatctctgagcctcccagaaatagagagataccaaggcctttcatttataat

SEQ ID NO: 34867 - DNA, 120 bp, synthetic construct
  source 1..120: mol_type = other DNA
tggcctcccaaagtcctaggattacaggcatgagccatggtgcccaccctatttttttaaatgaagaaatgcctaaactgtgttacaaaaactgtggcatgtttaaaatgtttaaatttg

SEQ ID NO: 34868 - DNA, 120 bp, synthetic construct
  source 1..120: mol_type = other DNA
tctactaaaaatacagaaattagcccggggtggtggcgtgcacctgtaatcccagttgctcaggatactgaggcaggagaattgcttgaacctgggaggtggaggttgcggtgagctgag

SEQ ID NO: 34869 - DNA, 120 bp, synthetic construct; identical to SEQ ID NO: 10172
  source 1..120: mol_type = other DNA

SEQ ID NO: 34870 - DNA, 120 bp, synthetic construct
  source 1..120: mol_type = other DNA
cttgtgcctgacctttgttttttcactgttggtggctaaaagaataaatgtttatagattatactgaagtactgagctttgttgtttttggtaaaatgaagagccactgtacgctgattg

SEQ ID NO: 34871 - DNA, 120 bp, synthetic construct
  source 1..120: mol_type = other DNA
tttttaatcagagaataaatttccaagtcattgtccccggagggataaattaaaatgcagggcctatttccaaccgcattagtgacttctctgtagctttaggaagatcaattaaccttt

SEQ ID NO: 34872 - DNA, 120 bp, synthetic construct
  source 1..120: mol_type = other DNA
cctagtaatgggctccaattaccagtcacttataagaatttataggtaagactcttatcatatgttgttaatcacaactttcacagttgtgatttggtgttttaattcaaaagctactgt

SEQ ID NO: 34873 - DNA, 120 bp, synthetic construct; identical to SEQ ID NO: 2993
  source 1..120: mol_type = other DNA

SEQ ID NO: 34874 - DNA, 120 bp, synthetic construct
  source 1..120: mol_type = other DNA
gtgttcacaagcggggatttttggcccaagaggaattgcttccaaaaagggtaagagattaaattcccttttcaggaagacatagcagatatgtggtctaaaagaaagctaaccaaagga

SEQ ID NO: 34875 - DNA, 120 bp, synthetic construct
  source 1..120: mol_type = other DNA
ggggtcaccaggactagcatggcctgtaaatgttttttctagcgtggttgttttttcagatgcagttgagcatcattgattcccaaagaggaggctggagcagagtgtattcagcttggg

SEQ ID NO: 34876 - DNA, 120 bp, synthetic construct
  source 1..120: mol_type = other DNA
tcccttttgctcctgccgattttacagccctcactcatctgtcactgggtaataaaggcccgtttctcacctctcactctctttacctgtccctcgatggcttctgagcatgtgaaggcc

SEQ ID NO: 34877 - DNA, 120 bp, synthetic construct; identical to SEQ ID NO: 2994
  source 1..120: mol_type = other DNA

SEQ ID NO: 34878 - DNA, 120 bp, synthetic construct; identical to SEQ ID NO: 10174
  source 1..120: mol_type = other DNA

SEQ ID NO: 34879 - DNA, 120 bp, synthetic construct
  source 1..120: mol_type = other DNA
gacatgcttgttaaacaaaatgcagtactgaagtctataaaagaaaaggggagagctggggagctgggagtaacgttggtcttcagttttgtgtgtgtccttttctagtacgtatgacat

SEQ ID NO: 34880 - DNA, 120 bp, synthetic construct
  source 1..120: mol_type = other DNA
tggcgccatctcagctcactgcagccttgacctcctgggttcaagcaaacctcctgcctcagcacccccagtagctggcactacaggcacacgccaccatgcccagctagtttttctatt

SEQ ID NO: 34881 - DNA, 120 bp, synthetic construct; identical to SEQ ID NO: 10175
  source 1..120: mol_type = other DNA

SEQ ID NO: 34882 - DNA, 120 bp, synthetic construct
  source 1..120: mol_type = other DNA
gatctcggctcactgcatctccgcctcccaggttcacgccattctcctgcctcagcctcccgagtagctgggactacaggcacccgccaccacgcctaggctaattttttgtgtttttag

SEQ ID NO: 34883 - DNA, 120 bp, synthetic construct
  source 1..120: mol_type = other DNA
tattctttaaaacaagagttgttgggacaaaggatgtgagcattttgcattttgccaggtaccaccaaattgttctccaaaaaggctgtacctgtttatacatgcctgtcgacaagtgtt

SEQ ID NO: 34884 - DNA, 120 bp, synthetic construct
  source 1..120: mol_type = other DNA
aaaggctgtacctgtttatacatgcctgtcgacaagtgttatgagagtgtcccaccccccacccccagtctatcctcaacaattgtttttatcagtctaatttttgtaatctaaaaagtg

SEQ ID NO: 34885 - DNA, 120 bp, synthetic construct; identical to SEQ ID NO: 10176
  source 1..120: mol_type = other DNA

SEQ ID NO: 34886 - DNA, 120 bp, synthetic construct
  source 1..120: mol_type = other DNA
gtttgtggcatgtggcaatagttttctcattttcattgctgtatagacttccactgtattagtatattaaaaattatttattcattctactaatgatggacagttaggttgttgggttgt

SEQ ID NO: 34887 - DNA, 120 bp, synthetic construct
  source 1..120: mol_type = other DNA
ggctgggtttttaaaaattcattgagagcatttggagattggagagagaaggaagaggacaaggtcatagggagacttgagttaaaatatttcagtatgatacctgtttgggagttttct

SEQ ID NO: 34888 - DNA, 120 bp, synthetic construct
  source 1..120: mol_type = other DNA
taactcttgccctaacctccaacaatactcaggaagcttgcagagagagctgtttcatttccagaaccttccaggtaaagaaagtacacaaaggaaaagcaagaacttaaataaaattcc

SEQ ID NO: 34889 - DNA, 120 bp, synthetic construct
  source 1..120: mol_type = other DNA
tgagtctgttctctgactatcttttgatggggatgggaaattctgcttgacctcagtgtgtttaatagactcagggccgggcagagctttgctggtgtctgctgtggcttttgtcttctg

SEQ ID NO: 34890 - DNA, 120 bp, synthetic construct; identical to SEQ ID NO: 10177
  source 1..120: mol_type = other DNA

SEQ ID NO: 34891 - DNA, 120 bp, synthetic construct
  source 1..120: mol_type = other DNA
gacttcaattagatcataggtaattaagtgtcacttgagccttgggggacttggacctggttctgctctcagcagaaacctgtttgaatgctctgagtgtaagatttgattatttctggc

SEQ ID NO: 34892 - DNA, 120 bp, synthetic construct
  source 1..120: mol_type = other DNA
gattactgatttgtttgggattctcactatgaggctaattggttttctattcagactattaatagtctgctgtctgctgggaacccactgcttctgcagggagaggcatttgtgtgcagc

SEQ ID NO: 34893 - DNA, 120 bp, synthetic construct; identical to SEQ ID NO: 10178
  source 1..120: mol_type = other DNA

SEQ ID NO: 34894 - DNA, 120 bp, synthetic construct
  source 1..120: mol_type = other DNA
agtacaggaagttcttttctaaagttctgtcagtttgtatttgctaattgcttggtttctttaaggtcaaactaatgtaacacatttctgtggttttgtcaactcaactcctcttgcccc

SEQ ID NO: 34895 - DNA, 120 bp, synthetic construct
  source 1..120: mol_type = other DNA
tagctggggagtatcactgtgcctggctgaaaaggtttcttattagggaatatttctacatcagtcagactaatggatactgttttttgtgtgtgtttcctatattgagcaatagacaaa

SEQ ID NO: 34896 - DNA, 120 bp, synthetic construct
  source 1..120: mol_type = other DNA
aaatctcaccattaactaaggaagatgtatgcttaaaacagtttaaaaggggctgcttgagtcctcacctctctctctgtttaatctctaggagtgttggagtcataatggtaggaggca

SEQ ID NO: 34897 - DNA, 120 bp, synthetic construct; identical to SEQ ID NO: 10179
  source 1..120: mol_type = other DNA

SEQ ID NO: 34898 - DNA, 120 bp, synthetic construct
  source 1..120: mol_type = other DNA
cttcacagtcccagtaccttctcagtttgcagacctgtttttctgcccttgagtcttggttcagtttccattatcgtcaaggggtcaggagctgtagtatccttgtgcagcgagtttcct

SEQ ID NO: 34899 - DNA, 120 bp, synthetic construct; identical to SEQ ID NO: 2999
  source 1..120: mol_type = other DNA

SEQ ID NO: 34900 - DNA, 120 bp, synthetic construct
  source 1..120: mol_type = other DNA
accagacttgctttatcacatgaagactacattttatcataaaatgagaccatccagccccaggcactgaaaattttcttcctagtagtccaacaatggtttctttaaatataagaaatc

SEQ ID NO: 34901 - DNA, 120 bp, synthetic construct
  source 1..120: mol_type = other DNA
ctcagctcactgcagccttctgggttcaaccagttctcctgctcagcctcctgagtagctgggattacaggcgcgtgccaccatgcccggctaatttttttgtgtgtatttttagtagag

SEQ ID NO: 34902 - DNA, 120 bp, synthetic construct; identical to SEQ ID NO: 10180
  source 1..120: mol_type = other DNA

SEQ ID NO: 34903 - DNA, 120 bp, synthetic construct
  source 1..120: mol_type = other DNA
cccaattcagaaagctgaaatcttcttggtttataagacagctgtgacttctgttgggacctgctgaaacttgtcacatgtgacagtgtgtgccagattctttggaaggttgaataaaat

SEQ ID NO: 34904 - DNA, 120 bp, synthetic construct
  source 1..120: mol_type = other DNA
actgacccccaagatctccttcccgtggaatgaaatccgaaacatctcgtacagtgacaaggaggtaggacatgtgtgtactgcagatgggtccagcagatctttccctgtctgcccccc

SEQ ID NO: 34905 - DNA, 120 bp, synthetic construct
  source 1..120: mol_type = other DNA
accccactatgactaataggaaactgggaagctcaactggccagggagaaaccccaaagaatagtgaacaaaaacagtaacattttcttattacttggctttctatttttgtcgatacat

SEQ ID NO: 34906 - DNA, 120 bp, synthetic construct; identical to SEQ ID NO: 10181
  source 1..120: mol_type = other DNA

SEQ ID NO: 34907 - DNA, 120 bp, synthetic construct
  source 1..120: mol_type = other DNA
gctcttagaatttaaatatttccatatagggtggtgacttttaccaaaaaggtcccataatgtataatcttatgtttactcatccatccattcattcattcactcatccattcattcatt

SEQ ID NO: 34908 - DNA, 120 bp, synthetic construct
  source 1..120: mol_type = other DNA
gtgatcctctcacctcagcctcccaggtaacagactacaggcgtgtgccaccacatctggctaattttttgtagagatggggttttgccacattgcccaccaggctggtcttgaacttct

SEQ ID NO: 34909 - DNA, 120 bp, synthetic construct; identical to SEQ ID NO: 10182
  source 1..120: mol_type = other DNA

SEQ ID NO: 34910 - DNA, 120 bp, synthetic construct
  source 1..120: mol_type = other DNA
ttgtcaatatctctgtgtcacatcaggaagcagagacacagaaggatcaagtgacctgtgtctgagtgaagtagcagagattaggagccagagttgctgatgccacagcccccgcctttc

SEQ ID NO: 34911 - DNA, 120 bp, synthetic construct
  source 1..120: mol_type = other DNA
agcttatgttgctgcctgcagagccccaaacctgagcatatttcctgttttctctttttcatggcaactcaaggaagggaacaccaggcccctggtttccagtatatggttgggatctac

SEQ ID NO: 34912 - DNA, 120 bp, synthetic construct
  source 1..120: mol_type = other DNA
attgaaagttccacatgacataaagctgtatgtgtgccaccgtatggtagtttttcatctcccaatttcataaagtctgtttattgcacgtccacacatttgtgtgctaaaggctcccta

SEQ ID NO: 34913 - DNA, 120 bp, synthetic construct
  source 1..120: mol_type = other DNA
catgcagtaagcagaccccaagctgacttgacataaaagaagtagtcttggtagttatgcatgacagccatgctgtcaaaacagaaatgttagtttattttaaatgatccattgattctt

SEQ ID NO: 34914 - DNA, 120 bp, synthetic construct; identical to SEQ ID NO: 10183
  source 1..120: mol_type = other DNA

SEQ ID NO: 34915 - DNA, 120 bp, synthetic construct
  source 1..120: mol_type = other DNA
ttcccaaacatatttatctgcttagcaagtctttcttgggaatggatatccattttgtaagtgcatcttggaaatctaggatctgtttggtcttatcgggagtggttgagagcagcagcc

SEQ ID NO: 34916 - DNA, 120 bp, synthetic construct
  source 1..120: mol_type = other DNA
cccttctactatagtccattttttccccatttgattctattaacagcttttaccaaattattcccatgttcagaaacctgtggtgagctcaggtatcctgtcacatcaaacctaaaccct

SEQ ID NO: 34917 - DNA, 120 bp, synthetic construct
  source 1..120: mol_type = other DNA
gtgttgggattacgggtgtgagccaccatatctggccgcctctgacttttattctcactgccagcccctacacccaccccttcctccctctcaggctaaacctattatatcatcttagtc

SEQ ID NO: 34918 - DNA, 120 bp, synthetic construct; identical to SEQ ID NO: 10184
  source 1..120: mol_type = other DNA

SEQ ID NO: 34919 - DNA, 120 bp, synthetic construct
  source 1..120: mol_type = other DNA
attaaggatgcttattttaggttgtcaagaatcccttcccacactcatgcctaagatggtctagagagcgtacctttagggtcctgagcttccacagcccgagacttggtgctcctaatt

SEQ ID NO: 34920 - DNA, 120 bp, synthetic construct
  source 1..120: mol_type = other DNA
atttgtggaatttccaattgctggtaacattccaggctgtcggactgaaactgtgttctgcttcattcttccagtttactattaaaccactggataagaaaattgatgtcttcaagttta

SEQ ID NO: 34921 - DNA, 120 bp, synthetic construct; identical to SEQ ID NO: 10185
  source 1..120: mol_type = other DNA

SEQ ID NO: 34922 - DNA, 120 bp, synthetic construct
  source 1..120: mol_type = other DNA
tcactgcaacgtccgcctcccagattcaagagattctcctggctcagcctcccaagtagctgggattacaggcatgagacaccatgcccagctaatttttgtattttcagtagagacggg

SEQ ID NO: 34923 - DNA, 120 bp, synthetic construct
  source 1..120: mol_type = other DNA
ttaaaaaggatttttaatgcagtatttcatacatataaaaggataagtgtaacatatgaattataaagaataacaaaagtgaatagctgtgtacccacaaccccactttaagaaatagca

SEQ ID NO: 34924 - DNA, 120 bp, synthetic construct
  source 1..120: mol_type = other DNA
agcacagtcccaatactgttgagacccttcatgttaacaccctgctggtctctcctttccctctccccaagggtgatcactgttttgagttgagtattcatcatcctcttgcttttcaac

SEQ ID NO: 34925 - DNA, 120 bp, synthetic construct; identical to SEQ ID NO: 10186
  source 1..120: mol_type = other DNA

SEQ ID NO: 34926 - DNA, 120 bp, synthetic construct
  source 1..120: mol_type = other DNA
atttaagcaattctcctgcctcagcctcctgagtagctgggattacaggcggccactaccacgcccggctaatttttgtatttttagtagagatggtgtttcaccatgttggtcaggctg

SEQ ID NO: 34927 - DNA, 120 bp, synthetic construct
  source 1..120: mol_type = other DNA
gccacttctatactgttttaacaggctgttatgaaaacttttgtatctgcctcctggtgcacataggcaatagtttctttggagtcttgagtatactgggctaggtggggtggctcacgc

SEQ ID NO: 34928 - DNA, 120 bp, synthetic construct
  source 1..120: mol_type = other DNA
caagaccctgtctccaaaaaaatgaaaataaataaaatttttaaataataaaaaagagggccaggcacagtggctcaactcctgtaatcccagcactttgggaggctgaggcaggcggat

SEQ ID NO: 34929 - DNA, 120 bp, synthetic construct
  source 1..120: mol_type = other DNA
ctgaggcaggagatcgcttgaacccaggaggtggaggttgcagtgagccgagatcatgccattgcactccagcctgggcaacaagagtaaaacttcgtctccaaaaaaaaaataaataca

SEQ ID NO: 34930 - DNA, 120 bp, synthetic construct; identical to SEQ ID NO: 10187
  source 1..120: mol_type = other DNA

SEQ ID NO: 34931 - DNA, 120 bp, synthetic construct
  source 1..120: mol_type = other DNA
cagcatggacctgcccaggctcagtgatcctcccacctcaccctccccagtagctgggactacagacacacaccaccatgcccagctaattttttgtattttttttatagagacaaagtt

SEQ ID NO: 34932 - DNA, 120 bp, synthetic construct
  source 1..120: mol_type = other DNA
tttgagttttttgtggagatggcgtctcactatgtcacccaggctggtcttgaactcctgggctcaaggatcctctcaccttggcctccgaaagtgctgggattacaggtgtgagctact

SEQ ID NO: 34933 - DNA, 120 bp, synthetic construct
  source 1..120: mol_type = other DNA
aatcactttttgtgtcttacttggcatcttctcttatcctatgatcataaagatattcttctatattgtcttctaaaagtttcaagggcttaatctttgcatttaagtatttaatccttc

SEQ ID NO: 34934 - DNA, 120 bp, synthetic construct; identical to SEQ ID NO: 10188
  source 1..120: mol_type = other DNA

SEQ ID NO: 34935 - DNA, 120 bp, synthetic construct
  source 1..120: mol_type = other DNA
taggcagtgaagtaaatttgtggatattaacctttttgtctgcttctgtggccacagattctccagctatgtatcgggaaccatgatctatttatgaggagaaggaaagccgattctttg

SEQ ID NO: 34936 - DNA, 120 bp, synthetic construct
  source 1..120: mol_type = other DNA
gtcatgggctggcaggagtcttttggccgtggacatacctgctcttgttttataccttttggatcttcatttgccgatgcctacctggtgggatgtcatctctggaaatgaggaataaac

SEQ ID NO: 34937 - DNA, 120 bp, synthetic construct
  source 1..120: mol_type = other DNA
ctagcttgctttctttttttgcctgtctgcctccttgtgcagccttctccttttctaattagatggtgatagaatgccaggtggcatttcagtgcttgcggctggaatgctaatttgact

SEQ ID NO: 34938 - DNA, 120 bp, synthetic construct; identical to SEQ ID NO: 10189
  source 1..120: mol_type = other DNA

SEQ ID NO: 34939 - DNA, 120 bp, synthetic construct
  source 1..120: mol_type = other DNA
ctttgctttctgaggtagtgggccacaaatgtgttctttgggatgctttcagggtgatgggatggatttgttggacaaagaaatcctactgagccagcatggggtcatagtggcagtttc

SEQ ID NO: 34940 - DNA, 120 bp, synthetic construct
  source 1..120: mol_type = other DNA
cagcctgggtgaccaagcaagaccctgttttaaaacagaagcagaaacaaaataccaaaataaataaataaataagtaaataaataagaaggaggaggagagctttctttgacctttttc

SEQ ID NO: 34941 - DNA, 120 bp, synthetic construct
  source 1..120: mol_type = other DNA
cacaaacctggcatctgggcaaccacagatcaggtggacagacactgaccttggagccagatctgaaatttagaatgtgagtaagtcaatgacttaccttccagaccttagttttctcat

SEQ ID NO: 34942 - DNA, 120 bp, synthetic construct; identical to SEQ ID NO: 10190
  source 1..120: mol_type = other DNA

SEQ ID NO: 34943 - DNA, 120 bp, synthetic construct
  source 1..120: mol_type = other DNA
acctagttaattttaattgtttcgtagagatcaggtcttgctatgttacccaggctgatctcaaactcctgggctcaaacattcctcctacttcagccccccaaagtgctagggttacag

SEQ ID NO: 34944 - DNA, 120 bp, synthetic construct
  source 1..120: mol_type = other DNA
tggaaattagagaacaaattggccaagcttttcattgacttacaaggagaaaattggagaagaactttcactgttttattgcttgtctttgcattatctttttgagcttgtgtgtgtgtg

SEQ ID NO: 34945 - DNA, 120 bp, synthetic construct; identical to SEQ ID NO: 10191
  source 1..120: mol_type = other DNA

SEQ ID NO: 34946 - DNA, 120 bp, synthetic construct
  source 1..120: mol_type = other DNA
gctcaggagttgtctccacatgaggctgtgcaagtctgtgctgtggctgttgcagctcccccctgtgaaatacaatgtgtgaactattgatgcatcacgtagaatgattccatcttctct

SEQ ID NO: 34947 - DNA, 120 bp, synthetic construct
  source 1..120: mol_type = other DNA
agagatgtgagaggggtccatgtggattagaaatggtgagatggcttgcctgcccagatgagaaagctgcttatttctggggctctatctgagggaggaggtcctgcattgcatcccatc

SEQ ID NO: 34948 - DNA, 120 bp, synthetic construct
  source 1..120: mol_type = other DNA
atcccagcactttgggaggccaaggtgggtggatcataaggtcaggagttcaagaccagcctggccaatatggtgaaacctgatctctactaaaaatacaaaaattagccaggcatggtg

SEQ ID NO: 34949 - DNA, 120 bp, synthetic construct; identical to SEQ ID NO: 10192
  source 1..120: mol_type = other DNA

SEQ ID NO: 34950 - DNA, 120 bp, synthetic construct
  source 1..120: mol_type = other DNA
tttgggcccttgtggcaccctaggtctcgagccctgtgattcaatgactgtttttcttcacccctcgcagatggagcggcagcgcctcgctcgagagaagcagatgagggaggaggctga

SEQ ID NO: 34951 - DNA, 120 bp, synthetic construct
  source 1..120: mol_type = other DNA
ttggcttttctggagcttggtctcctgaaaaccatgagttagcagcgtttgctttgaaatacttaatttcagctttgaaaaaatcagtgccttttcttttcacctgtgttggcagaagca

SEQ ID NO: 34952 - DNA, 120 bp, synthetic construct; identical to SEQ ID NO: 10193
  source 1..120: mol_type = other DNA

SEQ ID NO: 34953 - DNA, 120 bp, synthetic construct
  source 1..120: mol_type = other DNA
cctgagcagctgggattacaggcatgcatcaccatgcccagctaatttttgtatttttagtagagatggggtttccccatgttggtcaggctggtttcgaactcctgacctcgtgatctg

SEQ ID NO: 34954 - DNA, 120 bp, synthetic construct
  source 1..120: mol_type = other DNA
catgatcttggctcactgcaacctccgcctcctgggttcaagcgattctcctgcctcagcctcccaagtagctgggattacaggtgcgcgccaacacatccagcttttttttttttgtat

SEQ ID NO: 34955 - DNA, 120 bp, synthetic construct; identical to SEQ ID NO: 10194
  source 1..120: mol_type = other DNA

SEQ ID NO: 34956 - DNA, 120 bp, synthetic construct
  source 1..120: mol_type = other DNA
gcagggccccaggagtccgagactctggtttgtcccatctcagtgttcaaggcagatctgggcgggagaacagcacatgatcccacttcagctaagagcactgtgccctccagatgcggt

SEQ ID NO: 34957 - DNA, 120 bp, synthetic construct
  source 1..120: mol_type = other DNA
ttcgcacggaggaggagaagcgcctgatggagcagaaggtgctggaagccgaggtgctggcactgaagatggctgaggagtcagagaggaggtgagggggcaccgggcaccagactggcg

SEQ ID NO: 34958 - DNA, 120 bp, synthetic construct; identical to SEQ ID NO: 10195
  source 1..120: mol_type = other DNA

SEQ ID NO: 34959 - DNA, 120 bp, synthetic construct
  source 1..120: mol_type = other DNA
ctgcaggagaacagcagctgcctacctttaaagggaagctagtgcctgcatcccccagcctttcttggcacatgggggaggagggctaggatgatctctgtgactgggatgtcccactca

SEQ ID NO: 34960 - DNA, 120 bp, synthetic construct
  source 1..120: mol_type = other DNA
tgaatttggcttttagctaccaaggtgcattcactacagttttcctcaccacgctttgcatgtcgttctgggaatatggttcctttttgcctgccctgcttcaggccccttactgtattc

SEQ ID NO: 34961 - DNA, 120 bp, synthetic construct
  source 1..120: mol_type = other DNA
actgggctcatctttctgctggagaaagtgggcacaaggcccactggtgttttatccgggggctgtgaagacgcagttcttgcacattctgccctttgcgatccaatataagaactttga

SEQ ID NO: 34962 - DNA, 120 bp, synthetic construct; identical to SEQ ID NO: 3013
  source 1..120: mol_type = other DNA

SEQ ID NO: 34963 - DNA, 120 bp, synthetic construct
  source 1..120: mol_type = other DNA
ccctcttctgtgaagctgacatctcatcctttccttgcagggccaaagaggcagatcagctgaagcaggacctgcaggaagcacgcgaggcggagcgaagagccaagcagaagctcctgg

SEQ ID NO: 34964 - DNA, 120 bp, synthetic construct
  source 1..120: mol_type = other DNA
gaccattcaggcaaacacatggctggatgagaggtgcagagagcctgcagttagggactgggtagaacatcctggtctgccatttggctttggactagttagttgtctctttggttgcct

SEQ ID NO: 34965 - DNA, 120 bp, synthetic construct
  source 1..120: mol_type = other DNA
agaatttgctctcttgcctcttaatgctgagctgaatgtaatcttcaactatcagtatataccatatatcataattatagttctgggaagggattggctgtacacctcagagtgaattac

SEQ ID NO: 34966 - DNA, 120 bp, synthetic construct; identical to SEQ ID NO: 10197
  source 1..120: mol_type = other DNA

SEQ ID NO: 34967 - DNA, 120 bp, synthetic construct
  source 1..120: mol_type = other DNA
acatagggtattcagggtgagggcacagatgcacacatggcccagactcacacacagcacagtcatctacatggcacagacacacacacgtacccatacatacattgatgcacatagcac

SEQ ID NO: 34968 - DNA, 120 bp, synthetic construct
  source 1..120: mol_type = other DNA
gtggggaaaatgtaagcagtttgctgttgccgtatatcccggttctccgttactgtgtaacaacccacccaagccagctgtgtggctttgttagtacctctggtggcttgttgggttgac

SEQ ID NO: 34969 - DNA, 120 bp, synthetic construct; identical to SEQ ID NO: 10198
  source 1..120: mol_type = other DNA

SEQ ID NO: 34970 - DNA, 120 bp, synthetic construct
  source 1..120: mol_type = other DNA
aaactcccgagctcaagtgatctgcctgcctcagcttcccaaagtgctgggattataggcatgagccactgtgcccagcctatatgtgttgtttttaaaatatacactggagcaaagctt

SEQ ID NO: 34971 - DNA, 120 bp, synthetic construct
  source 1..120: mol_type = other DNA
gttgtgtggatggattgtaatttatttaaccagtccctcatggatgagtatttagtctgttttcttttgcaattttgaacaaaatgacactgaacatccctgaacacaaatcttgacaca

SEQ ID NO: 34972 - DNA, 120 bp, synthetic construct
  source 1..120: mol_type = other DNA
agtcataccagttcatgctctcactagtggtgcagcaactagtacgcgtttttgctgaaaatttttatgatgtgtaacatacacatagagaagtgcccaaattacaactgtacagtttga

SEQ ID NO: 34973 - DNA, 120 bp, synthetic construct; identical to SEQ ID NO: 10199
  source 1..120: mol_type = other DNA

SEQ ID NO: 34974 - DNA, 120 bp, synthetic construct
  source 1..120: mol_type = other DNA
tagaaaggctttggtgagagatcgtggtgtttgagaagggccttgaaagagggatggagcatagggaggagaaatgggataggcaggggtacagagatgggaaggcagtagtccagggga

SEQ ID NO: 34975 - DNA, 120 bp, synthetic construct
  source 1..120: mol_type = other DNA
accctttgtgctgggatgaaagtccaaaaaaaaaaaaaactacaccacccctgcttcaggccctactccggttccattgtccaagcccaagcccctcggtgggccggtggggagcccttt

SEQ ID NO: 34976 - DNA, 120 bp, synthetic construct
  source 1..120: mol_type = other DNA
gccttggatcccagcaaaagcagcatctcttctagcctctgttcgctccctggctacagtgtttaccttttttaacagtgatgatctgtgaacacatctatttcctgaacaagactttca

SEQ ID NO: 34977 - DNA, 120 bp, synthetic construct; identical to SEQ ID NO: 10200
  source 1..120: mol_type = other DNA

SEQ ID NO: 34978 - DNA, 120 bp, synthetic construct
  source 1..120: mol_type = other DNA
gtatgacccaagctcctaatccgaaatttctcattaacagcccatgaacccaattccagcaccgttgcctcctgacataccaagcttcaacctcattggtgacagcctgtctttcgactt

SEQ ID NO: 34979 - DNA, 120 bp, synthetic construct
  source 1..120: mol_type = other DNA
ggcagaggtgagaggtcgctgcagcagcctgtcattactcctgcaaaggtttgctctgctcttacaccctggaggaagaatttccttaatcagaaattaaggacaacagatcagcattca

SEQ ID NO: 34980 - DNA, 120 bp, synthetic construct
  source 1..120: mol_type = other DNA
tgagtcagttcaactgctgttatactactggactgtagtcacctcctagttgtgttctccagcaactgggatctgtggtggttcccatgtctagaacaaacaaaggtgagagaagagact

SEQ ID NO: 34981 - DNA, 120 bp, synthetic construct
  source 1..120: mol_type = other DNA
ccctttattgtgggtagaagtggatcagagatggaaaggaaaggatccccactgcagaggaaatctaagcgagggcccctagttcccagagctagcggtaagttggttaactgctgctgc

SEQ ID NO: 34982 - DNA, 120 bp, synthetic construct; identical to SEQ ID NO: 10201
  source 1..120: mol_type = other DNA

SEQ ID NO: 34983 - DNA, 120 bp, synthetic construct
  source 1..120: mol_type = other DNA
cccaggctgtttttctttgggctctcacactgagggtatagctaagtagccaatgaaccagagcctctagctgtcatatctgctgtccatgttcctttcaccattatccagacatataca

SEQ ID NO: 34984 - DNA, 120 bp, synthetic construct
  source 1..120: mol_type = other DNA
agcttataaacaacagaaatttatttcttggccaggcacagtggctcatgcctgtaattccagcactttgggagtccaaggggggcagatctcttgagccaggagttcaagaccagcctg

SEQ ID NO: 34985 - DNA, 120 bp, synthetic construct
  source 1..120: mol_type = other DNA
gcagaggttgcagtgagcccagattgcaccactgcactccagcctgggcaacagagagacaccctgtctcaaaaaaaaaaaaaagaaaagaaagaaattgatttctcacagtttgggagg

SEQ ID NO: 34986 - DNA, 120 bp, synthetic construct; identical to SEQ ID NO: 10202
  source 1..120: mol_type = other DNA

SEQ ID NO: 34987 - DNA, 120 bp, synthetic construct
  source 1..120: mol_type = other DNA
taacttttgtatttttagtagagatggggtttcaccatgttggtcaggctggtctcgaactcctgacctcatgatccgcccaccttggcctcccaaagtgttgggattacaggcgtgagc

SEQ ID NO: 34988 - DNA, 120 bp, synthetic construct
  source 1..120: mol_type = other DNA
cctatggagtgtttttggtatttgtattgcatggtttttctggccatgccttgtagttggacactttgtgggtggtttccagattttcaccatcatagatgctgtcactcagtgttatct

SEQ ID NO: 34989 - DNA, 120 bp, synthetic construct
  source 1..120: mol_type = other DNA
tctcagaacaagtgggaatgtggatgtggcctatcaaaagagatcacgtgaagctgggcgctgtggcttatgcctataatcccagccctttgagaccaggggttcaaagccagcctgggc

SEQ ID NO: 34990 - DNA, 120 bp, synthetic construct; identical to SEQ ID NO: 10203
  source 1..120: mol_type = other DNA

SEQ ID NO: 34991 - DNA, 120 bp, synthetic construct
  source 1..120: mol_type = other DNA
actgttttatttaatcctaaccacggccctgtgatcattatcccaattttaatgatgaggaaacattcatagcatttaagtgaccagcccaagctcccatggcctgtgagtggccaagta

SEQ ID NO: 34992 - DNA, 120 bp, synthetic construct
  source 1..120: mol_type = other DNA
cagagtggaatacatggaaaagagcaagcatctgcaggagcagctcaatgaactcaagacagaaatcgaggccttgaaactgaaagagagggagacagctctggatattctgcacaatga

SEQ ID NO: 34993 - DNA, 120 bp, synthetic construct
  source 1..120: mol_type = other DNA
cctcagtagccaagtcactagactattggcatcttttgtatgtacttagttgaggaaattttttaacttatgccagaaagggaatttaatctgccaatgactatgaacccattggctgga

SEQ ID NO: 34994 - DNA, 120 bp, synthetic construct; identical to SEQ ID NO: 10204
  source 1..120: mol_type = other DNA

SEQ ID NO: 34995 - DNA, 120 bp, synthetic construct
  source 1..120: mol_type = other DNA
ttcatatctttctctactggtattttgagctttcagcattgtcgagattcagaagctaaattccatactaattatcagcccaagagcatacctctctcatttgggccaagcagaagggtc

SEQ ID NO: 34996 - DNA, 120 bp, synthetic construct
  source 1..120: mol_type = other DNA
ttttttattctttacctcagtctttaaaataggcttccagttttatggactgtctctgtttttagtggttaagctgtatctgaaaactccaggggatctgtttctgcctgccttcgttgt

SEQ ID NO: 34997 - DNA, 120 bp, synthetic construct; identical to SEQ ID NO: 10205
  source 1..120: mol_type = other DNA

SEQ ID NO: 34998 - DNA, 120 bp, synthetic construct
  source 1..120: mol_type = other DNA
agaccccgttccaagccattaaaacaaacaaaatcactcatcacgatttcaggcctatccaagcattttgcagatggcacttatggcattgttgatatcacagggtatgtttttgttttt

SEQ ID NO: 34999 - DNA, 120 bp, synthetic construct
  source 1..120: mol_type = other DNA
tactaacccgtgcatgagcttgcctgtctctgtcctcgggccacactgagcccttacgagggcaggtggtgcctgggtactggccgcagcatgctttgagtctaaaagtaggcacccacc

SEQ ID NO: 35000 - DNA, 120 bp, synthetic construct
  source 1..120: mol_type = other DNA
atggcttcttgtccagtcaggtgtgtctaaaagtcctttgtcttggtggcatactcctagcatggaaatggggtcaatctgggcactttggagactggtgtgtttaactcaagatcaaga

SEQ ID NO: 35001 - DNA, 120 bp, synthetic construct
  source 1..120: mol_type = other DNA
ctggctcattttcctttagagctttccctttctgcacacatcccttttcttttcaaataaagcaaacccagagcacagggtctgatatgtgagtccacggggagtggactgtctgttcat

SEQ ID NO: 35002 - DNA, 120 bp, synthetic construct; identical to SEQ ID NO: 10206
  source 1..120: mol_type = other DNA

SEQ ID NO: 35003 - DNA, 120 bp, synthetic construct
  source 1..120: mol_type = other DNA
ttggaacctttctaacaaaaagagatctggcataagatagatcctacttgtggtcgttatcccatcaagagaggtcagctgttaaagtccctgatagatcttattaaaaggtacacttga

SEQ ID NO: 35004 - DNA, 120 bp, synthetic construct
  source 1..120: mol_type = other DNA
acagtccgcgctctgagcagggcagttatggccagcattgtcacgggcaggccagctcatggcacccagagcagccaggtggacccaccttggtttactgaactttttgtaaccatgggg

SEQ ID NO: 35005 - DNA, 120 bp, synthetic construct
  source 1..120: mol_type = other DNA
aaattcttcagggtcctgattttgactgtcatttctcactgagcttttactgcagacaaaagaagtttcatttttagttaaatttgcactgctcctgggacatacatggatgcatttatt

SEQ ID NO: 35006 - DNA, 120 bp, synthetic construct; identical to SEQ ID NO: 10207
  source 1..120: mol_type = other DNA

SEQ ID NO: 35007 - DNA, 120 bp, synthetic construct
  source 1..120: mol_type = other DNA
atgtcaagggcagaactccatctagaatgcctggggatgagatgcaaaagctgatagtgaatggaacagtttccaatgtccaaaagcttgctaatctgggatcaaaccagcctgtgttga

SEQ ID NO: 35008 - DNA, 120 bp, synthetic construct
  source 1..120: mol_type = other DNA
tagctgagactagaggtactagccaccacactcaactaatttttgtattttttatagagatggggtttcgccatgttgcccaggctggtctcgaactcctgagctcaaccaatctgcccg

SEQ ID NO: 35009 - DNA, 120 bp, synthetic construct
  source 1..120: mol_type = other DNA
accttggtgacagcctcgacctcctgggctcaagcgatcctcccacgtcagcctcccaagtagctgggactacaggcatttgccaccatgcctgactgatttttttatttttatttttgt

SEQ ID NO: 35010 - DNA, 120 bp, synthetic construct; identical to SEQ ID NO: 10208
  source 1..120: mol_type = other DNA

SEQ ID NO: 35011 - DNA, 120 bp, synthetic construct; identical to SEQ ID NO: 3025
  source 1..120: mol_type = other DNA

SEQ ID NO: 35012 - DNA, 120 bp, synthetic construct
  source 1..120: mol_type = other DNA
gggcgaaggacggcatgtgggccacaccgccacatctaggtacactgcttgtgctgggcatattcattcattgtattaattgctacgtggctgaaagtaaaaacttttaaaaagccataa

SEQ ID NO: 35013 - DNA, 120 bp, synthetic construct
  source 1..120: mol_type = other DNA
ccaaaaatacaaaatttgccaggtgtggtggcgcatgcctgtaaacccagctacttgggaggctgaggcaggagaattgcttgaacctgggaggtgggggttgcagtgagccaagatcgt

SEQ ID NO: 35014 - DNA, 120 bp, synthetic construct; identical to SEQ ID NO: 10209
  source 1..120: mol_type = other DNA

SEQ ID NO: 35015 - DNA, 120 bp, synthetic construct
  source 1..120: mol_type = other DNA
agcctggctttcgtgccttcagagccacagtgccaatgatgggagtggtggcttggtgtggcgtaactgtaccaccataccttgatggtagaatgcagtcctggaatatatacattcagg

SEQ ID NO: 35016 - DNA, 120 bp, synthetic construct
  source 1..120: mol_type = other DNA
tcacttttgtgcctgtggtctcccaaggagcacaggatttccaaggaaattgacggatgagaaatcatgggggtggtggagcttagaaagcttatttcattagtaaatggtttgaaccgt

SEQ ID NO: 35017 - DNA, 120 bp, synthetic construct
  source 1..120: mol_type = other DNA
ctcttggatcaggaagacataaaagtccaatgtcatcttcaatttgtgcaggctccccttggagttgcagagccagtgaagtgaagtagaacagttaaaaaaacacccggggaagtgata

SEQ ID NO: 35018 - DNA, 120 bp, synthetic construct; identical to SEQ ID NO: 10210
  source 1..120: mol_type = other DNA

SEQ ID NO: 35019 - DNA, 120 bp, synthetic construct
  source 1..120: mol_type = other DNA
agcagcaccagatgtgggcatagcacactgggaagaaattgcagtggcgatctgaactcttcctctccgcctcctggctctgtggaagcccagggaaggcattaggaactgcaggctgct

SEQ ID NO: 35020 - DNA, 120 bp, synthetic construct
  source 1..120: mol_type = other DNA
tgtctcgtaactgttgagagcttagttttcttgcttgtttctggtagctctagatagaagactgtatcggcctcttctaaaagtcaacaagccaatcctgtttttggttaagagacttta

SEQ ID NO: 35021 - DNA, 120 bp, synthetic construct
  source 1..120: mol_type = other DNA
cctggtcaagcagttgttctttgggaggtgttgaagagcctacaaacctgccttgcctgcctaggtactttaccaccatttggagatgcctgaggatattaccaggccttatttgaggca

SEQ ID NO: 35022 - DNA, 120 bp, synthetic construct; identical to SEQ ID NO: 10211
  source 1..120: mol_type = other DNA

SEQ ID NO: 35023 - DNA, 120 bp, synthetic construct
  source 1..120: mol_type = other DNA
acaggttttcaggcagcttttgctgctttgggtccctcagggattaatacacaaaaagggccccttgggtattcagtggcagatttctcttgagagcagataaagtcgctaataacaaat

SEQ ID NO: 35024 - DNA, 120 bp, synthetic construct
  source 1..120: mol_type = other DNA
agatttctcttgagagcagataaagtcgctaataacaaattggatttgttcattggggtggacttggcctttcgttccacctctgtgtaggataagtgtgtggatagtgctcccactgtg

SEQ ID NO: 35025 - DNA, 120 bp, synthetic construct
  source 1..120: mol_type = other DNA
ggatcacgaagtcaagagattgagaccatcctggccaacatggtgaaaccctgtctctactaaaaatacaaaaattagctgggcgtggtggcatgcgcctgtagttccagctactcagga

SEQ ID NO: 35026 - DNA, 120 bp, synthetic construct; identical to SEQ ID NO: 10212
  source 1..120: mol_type = other DNA

SEQ ID NO: 35027 - DNA, 120 bp, synthetic construct
  source 1..120: mol_type = other DNA
ccttcgttttcaatatgtagtagtggagaggaagtgtaacatgattttagggctcacatttcaattccactgcatttttatgggacaagcagagacccagcgcctggagttattaggtta

SEQ ID NO: 35028 - DNA, 120 bp, synthetic construct
  source 1..120: mol_type = other DNA
gtatctaaaatgggttcagtactgtgagtcttattgtttaaaatgaatgagatggtcccctcctaccttcttttctcctcccctgggatgagtggattgaggcaaggcccccagagacta

SEQ ID NO: 35029 - DNA, 120 bp, synthetic construct; identical to SEQ ID NO: 10213
  source 1..120: mol_type = other DNA

SEQ ID NO: 35030 - DNA, 120 bp, synthetic construct
  source 1..120: mol_type = other DNA
tggcggaggctttgtagctggaagccgtctgctgctggcagggcagcaggagaatgtttgtcacaggtgccttccaggcttgctttctccagaccctggggccatttctcagaagtaccc

SEQ ID NO: 35031 - DNA, 120 bp, synthetic construct
  source 1..120: mol_type = other DNA
tttttaagtagacagatgtgtctcctgaatctgaacttgtttagattgggtggatgtgtctgtttttgtcacaccacacacaatttggggagcgtaaggaggcccagctctgccagaatg

SEQ ID NO: 35032 - DNA, 120 bp, synthetic construct
  source 1..120: mol_type = other DNA
ggcaggaagtaaaagccaggacccaacaagtggatcagaggggggatgtgaagatgaacagtcagatagcaataaagcctcatagatctgccccagagaaagaaaaggaagttcgtctcc

SEQ ID NO: 35033 - DNA, 120 bp, synthetic construct
  source 1..120: mol_type = other DNA
gagcagcgggtcagcccatgcctggtgcggaggcttcatgttcttgtaggcatcttcagggaactggcaggagcgctttgggttggagactctgagcagggcccttgggtttatagcctg

SEQ ID NO: 35034 - DNA, 120 bp, synthetic construct; identical to SEQ ID NO: 10214
  source 1..120: mol_type = other DNA

SEQ ID NO: 35035 - DNA, 120 bp, synthetic construct
  source 1..120: mol_type = other DNA
ctgttgctggattgccaaagggagcatggacatttttgtttggaattcagggtgggaatgggactcaccagagtggcttcagtgctcaactcacagtgcaacataggacaaggtgaaggc

SEQ ID NO: 35036 - DNA, 120 bp, synthetic construct
  source 1..120: mol_type = other DNA
tatgagagcatcgcaggggaaccaggaaacttgttagctggttttcatgtgtttaaaaagaagactcggaggcagagtttattttatgaagggctagctttttgccatttcttctgagct

SEQ ID NO: 35037 - DNA, 120 bp, synthetic construct; identical to SEQ ID NO: 10215
  source 1..120: mol_type = other DNA

SEQ ID NO: 35038 - DNA, 120 bp, synthetic construct
  source 1..120: mol_type = other DNA
gtagaaaaactgcctgagggcaaatggctccactgagctgctacctgcaggaaagaagctcaagggctctcctcgtctcactgcctgccttcttcacctgctgggaggagggcattgtgg

SEQ ID NO: 35039 - DNA, 120 bp, synthetic construct
  source 1..120: mol_type = other DNA
taggaattgcacaatgagggtaaaggatggggcggcagcagccaggtctgtctaaggggcgagcagcagtggccgaaggctcccagggccctcgggcagcagcccttgctgaccagtgca

SEQ ID NO: 35040 - DNA, 120 bp, synthetic construct
  source 1..120: mol_type = other DNA
tgggcagactgatttccctctctacctttacttgtggctgaggcgaagctcctgctcttgcaagataagaggtggggctgaggcgctgcagtgcagctcaggtggggctcaggaagcacc

SEQ ID NO: 35041 - DNA, 120 bp, synthetic construct
  source 1..120: mol_type = other DNA
cgggtggaggatccaggaattcttggagccaacattgcacaaatgggcaggagcctctcaaggcccccacagcctgggctccctgcctggggaagtggccaggcttcataggggcatcac

SEQ ID NO: 35042 - DNA, 120 bp, synthetic construct; identical to SEQ ID NO: 10216
  source 1..120: mol_type = other DNA

SEQ ID NO: 35043 - DNA, 120 bp, synthetic construct
  source 1..120: mol_type = other DNA
ctgactgtgcctgtatctgactcaaagtggctgttcttttcagaaacctgagcggagatactgggctcacatgctttcatttaaaccctctctcatttttgccccagtagttatctggca

SEQ ID NO: 35044 - DNA, 120 bp, synthetic construct
  source 1..120: mol_type = other DNA
cccttctagagggagttccatttaggcaaaaaagcgctctccattcccatcagaaccgggctttccaaagggctctgaaattggttccactgaagaaggcagctgagctgcctccccaca

SEQ ID NO: 35045 - DNA, 120 bp, synthetic construct
  source 1..120: mol_type = other DNA
gtttggagtctccctcccctgccctttatggagccgccgatagtaccgaggactcttcacatgcagactcgaggggtccagagaatgggccagaccatcttgcctgccccatggcaacct

SEQ ID NO: 35046 - DNA, 120 bp, synthetic construct; identical to SEQ ID NO: 10217
  source 1..120: mol_type = other DNA

SEQ ID NO: 35047 - DNA, 120 bp, synthetic construct
  source 1..120: mol_type = other DNA
tctatccagggagatgctgggaagtggcccagagtcaagggcttaggaggttgcaaacctcactatgccaagagctcggtccctgatccaccccatccccttccacatctccctgactgt

SEQ ID NO: 35048 - DNA, 120 bp, synthetic construct
  source 1..120: mol_type = other DNA
acgtcatgagcaagtttgcttcgggaccacctgggaaaccaggagtagaaggggtaaactcttcctcatctgccacaggcctgccttgcctcaggccacgtcaccttaccccagccatgt

SEQ ID NO: 35049 - DNA, 120 bp, synthetic construct; identical to SEQ ID NO: 10218
  source 1..120: mol_type = other DNA

SEQ ID NO: 35050 - DNA, 120 bp, synthetic construct
  source 1..120: mol_type = other DNA
caagtggcaggacaggaccctgtgtgacagagcggaggtcttgtgccctctcagcttcttctctgctttcttacagctcaccttgcagagcgccaagtcccgagtggccttctttgaaga

SEQ ID NO: 35051 - DNA, 120 bp, synthetic construct; identical to SEQ ID NO: 3034
  source 1..120: mol_type = other DNA

SEQ ID NO: 35052 - DNA, 120 bp, synthetic construct
  source 1..120: mol_type = other DNA
catcatccccaccccgcccagggttccggaacattcattcccccaccggtgaggacctggcatgcagcgaagcagcccagcccggcggatcccaggccagcacgcctgccggcttctcat

SEQ ID NO: 35053 - DNA, 120 bp, synthetic construct; identical to SEQ ID NO: 10219
  source 1..120: mol_type = other DNA

SEQ ID NO: 35054 - DNA, 120 bp, synthetic construct
  source 1..120: mol_type = other DNA
gaccagggatctgtaagccctgtggctccacaggtgctgcttctcactggcccagactctgagctccaccggcccagtctgcacggcccatctgcttcaccttccctcccagccacgtgc

SEQ ID NO: 35055 - DNA, 120 bp, synthetic construct
  source 1..120: mol_type = other DNA
cccctcccagcacaggcctgatgcaggtgtccactcacaggtggcgctcacctaggctgtcacaggacccacctccatgccaggcaacagagggccacagaaccacccccacggctcact

SEQ ID NO: 35056 - DNA, 120 bp, synthetic construct
  source 1..120: mol_type = other DNA
ctccacctcctgagttcaagcaattctcctgcctcagcctcccaagtagctgggactacaggcatgcaccaccacacttggccaatgttctgtatttttaatagggacggggttttgcca

SEQ ID NO: 35057 - DNA, 120 bp, synthetic construct; identical to SEQ ID NO: 10220
  source 1..120: mol_type = other DNA

SEQ ID NO: 35058 - DNA, 120 bp, synthetic construct
  source 1..120: mol_type = other DNA
ccagccctgggtgccacccagccacttagggtctacagggtgggactccagacctagagcgtaagtatggatgttgtggccctgtgtcttcctagtgtgacccagccaggagcggaagct

SEQ ID NO: 35059 - DNA, 120 bp, synthetic construct
  source 1..120: mol_type = other DNA
tcacgatctcagctcactgcaacctccgcctcccaggtacaagagattctcctgcctcagcctcccgagtagctgggactacaggcgtgtgccaccatgcctggctaatttttgtatttt

SEQ ID NO: 35060 - DNA, 120 bp, synthetic construct
  source 1..120: mol_type = other DNA
ctcttctcagtcttgaagcccatccctggatttccaccaggagttactttcctcctgacctgtaaatttgttctttaacaatggctgcaggtgggagcatatggtggtttataaaaacgc

SEQ ID NO: 35061 - DNA, 120 bp, synthetic construct
  source 1..120: mol_type = other DNA
gctggctggtgtttgagctgtggcagaagcacctggggctccagggagcaggctgggaactgcaggaccttgctcagccaggagcacttccccctccttgaggcaggaatactgaggtgc

SEQ ID NO: 35062 - DNA, 120 bp, synthetic construct; identical to SEQ ID NO: 10221
  source 1..120: mol_type = other DNA

SEQ ID NO: 35063 - DNA, 120 bp, synthetic construct
  source 1..120: mol_type = other DNA
gggtttctccatgtcggtcaggctggtctcgaactcccgacctcaggtgatctgcccacctcggcctcccaaagtgctgggattacaggcatgagccaccgcgcttggccagactgcgtc

SEQ ID NO: 35064 - DNA, 120 bp, synthetic construct
  source 1..120: mol_type = other DNA
agccccacagcaccgggaccattcatgaggtcactgcccagctcatgatgtccgtgaggctgtccttttggccagtagccgtgtgcagctgtgtggcacagatggcttcgttcatcctga

SEQ ID NO: 35065 - DNA, 120 bp, synthetic construct
  source 1..120: mol_type = other DNA
ctgtgtcttgtaattttggggacaggtttctctctttccctctcttttttttgtcaaaagcccagagactgacaaccagctgcagtgtctaagtgttcctcactgacagggtggggcctc

SEQ ID NO: 35066 - DNA, 120 bp, synthetic construct; identical to SEQ ID NO: 10222
  source 1..120: mol_type = other DNA

SEQ ID NO: 35067 - DNA, 120 bp, synthetic construct
  source 1..120: mol_type = other DNA
gctccctcactgcaactgaacacatttcttagtttttaggtggcccccgctggctaacttgctgtggagttttcaagggcatagaatcgtcctttacacaattaaaagaagatgctgttt

SEQ ID NO: 35068 - DNA, 120 bp, synthetic construct; identical to SEQ ID NO: 10223
  source 1..120: mol_type = other DNA

SEQ ID NO: 35069 - DNA, 120 bp, synthetic construct; identical to SEQ ID NO: 3038
  source 1..120: mol_type = other DNA

SEQ ID NO: 35070 - DNA, 120 bp, synthetic construct
  source 1..120: mol_type = other DNA
atactgacaaagctgctgcaaagacgccttatatgtgatggggataacgacatttttaaataaaatacaagtttgaaaaccatccctgaaattcttgctggcatgtgcaaagcaggctgt

SEQ ID NO: 35071 - DNA, 120 bp, synthetic construct
  source 1..120: mol_type = other DNA
tgagttagctgggtaaacaaggccatcaggtggagacatcactaccagaaagcttctagaacagtttcatgttaataatgagacagaatttcttcagagcctctttataacctaaagcaa

SEQ ID NO: 35072 - DNA, 120 bp, synthetic construct
  source 1..120: mol_type = other DNA
ctctggactccaccattagcactacttctttagtgaatataaggctctcagaagtcagaatgataccgtaaataatattgtaaattaagcccataatattagacctagttgagacctcag

SEQ ID NO: 35073 - DNA, 120 bp, synthetic construct; identical to SEQ ID NO: 10224
  source 1..120: mol_type = other DNA

SEQ ID NO: 35074 - DNA, 120 bp, synthetic construct
  source 1..120: mol_type = other DNA
tgaacatctactttgtgccatgccctatcaaggagttggagatacggtggtaaataacgtaaaaatatacttcactccagctacatgaattcatagtctagtgataatcagtgagataat

SEQ ID NO: 35075 - DNA, 120 bp, synthetic construct
  source 1..120: mol_type = other DNA
aatgtgatgaaattttattctatagcttttaacaaggaatcatcactgagttgaaaacacccaactgaatgaataatcaaagcctggaacttaaacttatactgttctttgaaaactaca

SEQ ID NO: 35076 - DNA, 120 bp, synthetic construct; identical to SEQ ID NO: 10225
  source 1..120: mol_type = other DNA

SEQ ID NO: 35077 - DNA, 120 bp, synthetic construct
  source 1..120: mol_type = other DNA
tcacgtggcataggtatttttctttcctactgtattggttagttgcactacctgtcagctagataaattcagaatttctggtctccaataagacttacaacctttgacaaagccctcaac

SEQ ID NO: 35078 - DNA, 120 bp, synthetic construct
  source 1..120: mol_type = other DNA
tttttttctcccacatctcttgggaaaggtggagggcccttgttatgtaacataccacgtgagtttactactccagaataataggaaatatgtggttagaatttgatggtgccacaaaat

SEQ ID NO: 35079 - DNA, 120 bp, synthetic construct
  source 1..120: mol_type = other DNA
ttttttaacaagatcgataggatcagaaaccaagactgctgaaaacacccaattcacaggctttccatgtcataaacaaggctctaaagccttgctgtgtttggataatagagaatatcc

SEQ ID NO: 35080 - DNA, 120 bp, synthetic construct
  source 1..120: mol_type = other DNA
aagaccaatttgtaagtgcagttcaatttcatctcacaaatagaaatttcttcagagaatattgagctaagctactcaattctgtggaggttatggattggagccagaggtgactagttt

SEQ ID NO: 35081 - DNA, 120 bp, synthetic construct; identical to SEQ ID NO: 10226
  source 1..120: mol_type = other DNA

SEQ ID NO: 35082 - DNA, 120 bp, synthetic construct
  source 1..120: mol_type = other DNA
caggagttccagaccagtttggccagcatggcaaaaccctgtccctgttaaaaatacaaaaaaagaaaaagaattagctgggcctggtggcatgcacctgtagtcccagctactcaggag

SEQ ID NO: 35083 - DNA, 120 bp, synthetic construct
  source 1..120: mol_type = other DNA
aaaaaaaaaatcacttcacttcagaaaaccatacaagagatgggaccaaaagttgaatggggtcatgatgttttccttggccaacagtggaatttgtttcctagtttatttttagtaatt

SEQ ID NO: 35084 - DNA, 120 bp, synthetic construct; identical to SEQ ID NO: 10227
  source 1..120: mol_type = other DNA

SEQ ID NO: 35085 - DNA, 120 bp, synthetic construct
  source 1..120: mol_type = other DNA
ctgttaacaggcccccatctcacagactgaatgccaggttaccacacaggaacaggagaggcctagctcctccccactccaaaaggtgcagtgcgaacttccccaaggccccaccctgtc

SEQ ID NO: 35086 - DNA, 120 bp, synthetic construct
  source 1..120: mol_type = other DNA
acgtggggtttcgctgggggtcgcgggtttgggggcccttggctgccccttgtctctatcaataatttatatcacatatgggtatgtggcaacagtgaggagggtttcaagtaaactttt

SEQ ID NO: 35087 - DNA, 120 bp, synthetic construct
  source 1..120: mol_type = other DNA
tgcatgcattctaatatgcctttttgagaaggaaagaaagggatagaattaaagttaggccactgaaaattcatgtggctccagtttacaaacttcatgagtgtgggggaagacatagac

SEQ ID NO: 35088 - DNA, 120 bp, synthetic construct; identical to SEQ ID NO: 10228
  source 1..120: mol_type = other DNA

SEQ ID NO: 35089 - DNA, 120 bp, synthetic construct
  source 1..120: mol_type = other DNA
ctccagaagttaaagtctttatctcaaattgtccatggggatcagagtatcatttaacactgaattttttcctactctggcaaaatcagtttctgactgaccacattttactcaaatcaa

SEQ ID NO: 35090 - DNA, 120 bp, synthetic construct
  source 1..120: mol_type = other DNA
agcaaatactcttccattttgtagctaggaagatatttgggtaaagttaatacaaggatctcttattaccttggcttagcttcttagcattcagtgatttggggttaagaaatctctgta

SEQ ID NO: 35091 - DNA, 120 bp, synthetic construct
  source 1..120: mol_type = other DNA
ttcccacaacattgtatcctccctcttatgtgcagcctgaataataataatgtggtttgtgtctggtgtaccaaggagatttcttgtttactctgatttacttcttgtacactttggtac

SEQ ID NO: 35092 - DNA, 120 bp, synthetic construct; identical to SEQ ID NO: 10229
  source 1..120: mol_type = other DNA

SEQ ID NO: 35093 - DNA, 120 bp, synthetic construct
  source 1..120: mol_type = other DNA
gggaccattgtatttgctttccttccagtgataaatttccctggttagttctcgatatctatgaaaaacagctctttttcccaagctaacatttcctgccccacctcctggatggaattg

SEQ ID NO: 35094 - DNA, 120 bp, synthetic construct
  source 1..120: mol_type = other DNA
ggctggagtgcaacggcgcgatctcagctcaccacaacctctgcttccagagttcaagtgattctcctgcctcagcctcccgagtagctgggattacagacgtctgccaccatgcccagc

SEQ ID NO: 35095 - DNA, 120 bp, synthetic construct
  source 1..120: mol_type = other DNA
gccaccgcacccggccagctgtggtgcaattttaaaagaaattctagttaatcactcaagccctcagatgctggtatgaccagatatatagcatctacctctctaccgcttttgtcccca

SEQ ID NO: 35096 - DNA, 120 bp, synthetic construct; identical to SEQ ID NO: 10230
  source 1..120: mol_type = other DNA

SEQ ID NO: 35097 - DNA, 120 bp, synthetic construct
  source 1..120: mol_type = other DNA
atttcagctttagcaacacactaggccacagtcaattatcctccatgattttcaggccttgtgttcagcctgggccataccctatatttgctcttccctcaacataaattttgtcttttt

SEQ ID NO: 35098 - DNA, 120 bp, synthetic construct
  source 1..120: mol_type = other DNA
aatagctgggattacaggccctcaccaccatgcccagctaattttttgtatttttagtagagacggggtttcatcatattggtcaggctggtctcgaactcctgacgtcaggtgatctgc

SEQ ID NO: 35099 - DNA, 120 bp, synthetic construct; identical to SEQ ID NO: 10231
  source 1..120: mol_type = other DNA

SEQ ID NO: 35100 - DNA, 120 bp, synthetic construct
  source 1..120: mol_type = other DNA
tcctgccccagcctcccaaggagtagctgggattacaggtgcctgccaccacgcccggctaatttttatatttttagtagagacggggtttcaccatgttggccaggctggtctagaact

SEQ ID NO: 35101 - DNA, 120 bp, synthetic construct
  source 1..120: mol_type = other DNA
tgactactacattccaagcactgtactaagcaccgggtatatattagtgaataaaataggaaaggtccctgctatttgtggatcatatgtaatccagtgagaagagtaaaagtagcaata

SEQ ID NO: 35102 - DNA, 120 bp, synthetic construct
  source 1..120: mol_type = other DNA
acaaacaaaatgaaggtaaagtgaagactacttagacagtagagtcaggaaaggaatctcttaggaagtgatatttaagcttacagcctgagaatgagaaggagccagctttgagagttg

SEQ ID NO: 35103 - DNA, 120 bp, synthetic construct
  source 1..120: mol_type = other DNA
ctttgcgatatcccaatgtgcacaaatttcaattaccacagtttagttaataacactaggccactacgaacacagttcaaatttcagtcaacatggcatattaattatgagtaattcata

SEQ ID NO: 35104 - DNA, 120 bp, synthetic construct; identical to SEQ ID NO: 10232
  source 1..120: mol_type = other DNA

SEQ ID NO: 35105 - DNA, 120 bp, synthetic construct
  source 1..120: mol_type = other DNA
ccagcctggtcaacatggtgaaactccatttctactaaaaaacacaaaaattagccaggcgtggtggcagacgcttgtaatcccagctactcaggaggcttaggcaggagaatcgcttga

SEQ ID NO: 35106 - DNA, 120 bp, synthetic construct
  source 1..120: mol_type = other DNA
gaatgtaaatcgagttatggaagaaacagctgactatgtgattgttaccctgctgctgtttgagaggctgtagatatacagccagaggaacttagtgaagacaaagttattgacataact

SEQ ID NO: 35107 - DNA, 120 bp, synthetic construct
  source 1..120: mol_type = other DNA
gttgaaagtttatccaaacttagaaagaattatgacagtttaccaaaacatagaaaagatgcttgctctatatcataggttctaagatgagaaagcaagcactgttcaaattactcttga

SEQ ID NO: 35108 - DNA, 120 bp, synthetic construct
  source 1..120: mol_type = other DNA
acaataaaagtttttaatgttctgacaattttttaaaagtcacagaacgattacaattttcccactaaatattaaggttactttacatggcttcagatttaatggctattcacagtccca

SEQ ID NO: 35109 - DNA, 120 bp, synthetic construct; identical to SEQ ID NO: 10233
  source 1..120: mol_type = other DNA

SEQ ID NO: 35110 - DNA, 120 bp, synthetic construct
  source 1..120: mol_type = other DNA
aacagcaaacaaaaacacaaaggggcacaaggaaactctggggtgggggaaggttatctgctaacatttattggagatgtgattcaagggcagcaagagtgagggcagcattatcagctg

SEQ ID NO: 35111 - DNA, 120 bp, synthetic construct
  source 1..120: mol_type = other DNA
aaggaaagcttcaagcaggatgtttgtgtgttctttctacctttatattcaaatcttctgtcagtggagaaatagaaacagcagcatctcacaatgcaaacccacagcagaacattaacc

SEQ ID NO: 35112 - DNA, 120 bp, synthetic construct; identical to SEQ ID NO: 10234
  source 1..120: mol_type = other DNA

SEQ ID NO: 35113 - DNA, 120 bp, synthetic construct
  source 1..120: mol_type = other DNA
caattctaagatctatgacattctcttaaataaagcctgtagccttgtgagcattcagaagtaagaggatacaacaaaatcccgcagaggctgagaataggggatgatattgaatccttt

SEQ ID NO: 35114 - DNA, 120 bp, synthetic construct
  source 1..120: mol_type = other DNA
ttgatggatgtgagttcaacagctatagtgatgtttctcaaattccttgaaacagagggagtggggttttccagcaaagtattcttccccttttaaaataatattagaggaagtcttaag

SEQ ID NO: 35115 - DNA, 120 bp, synthetic construct
  source 1..120: mol_type = other DNA
attgagaaagattaagctgccgtgccttcatttcaggccacatatgcaaatctgttttataatccccagaagaagatttcagttgaccctgaaaaatgcatgactgttagtcagtgctta

SEQ ID NO: 35116 - DNA, 120 bp, synthetic construct; identical to SEQ ID NO: 10235
  source 1..120: mol_type = other DNA

SEQ ID NO: 35117 - DNA, 120 bp, synthetic construct
  source 1..120: mol_type = other DNA
acctcaggtcaggagttcaagaccagcctggccaacatggtgaaaccctgtctctaccaaaaatacaaaaattagctgggcgtggtggcacatgcctgtagtcccagctactcgggaggc

SEQ ID NO: 35118 - DNA, 120 bp, synthetic construct
  source 1..120: mol_type = other DNA
aatataataaaatatttggttcttcttagtctaaaccttttaaatttttattttcgtgtatgttttgttatgtacataatctattagtatagcagcacatataaacaaataaaacataca

SEQ ID NO: 35119 - DNA, 120 bp, synthetic construct
  source 1..120: mol_type = other DNA
gacaataatacatctttgaaatagcaatgttaactaaaattttgtttctacatataagctgaaaacagtaatttctatttgtagttgaatatgtcatcaatgtcttagattaaatcagtc

SEQ ID NO: 35120 - DNA, 120 bp, synthetic construct
  source 1..120: mol_type = other DNA
tactaaaaatacaaaaattagccaggtgtggtggcaggtgcctgtaatcccagctactcaggaggctgaggcacaagaattgcttcaacccaggaggtggaggctgcaatgagccgagat

SEQ ID NO: 35121 - DNA, 120 bp, synthetic construct; identical to SEQ ID NO: 10236
  source 1..120: mol_type = other DNA

SEQ ID NO: 35122 - DNA, 120 bp, synthetic construct
  source 1..120: mol_type = other DNA
attaactcttcatcccaagtagcacaggctctcttgttaggttagaattaaagcatgatcattttgtgacagttattttacttctagtaaaattaatgtttagtacacgtggtgaaccac

SEQ ID NO: 35123 - DNA, 120 bp, synthetic construct
  source 1..120: mol_type = other DNA
ataacaattattgtcatcacaatataacaaaatgttaaaattgatctttttcggttttggtttctgtccaggcccagtaggtactgattcttccctcattctaaagagatgctagaccac

SEQ ID NO: 35124 - DNA, 120 bp, synthetic construct
  source 1..120: mol_type = other DNA
gcagaaaccaagagaggggttggaaattagaagataatttatagagagtgtttctattgtgtatcatgtgcctcctcccccatgaaggggatactcttccttcacttcaagcccaacaaa

SEQ ID NO: 35125 - DNA, 120 bp, synthetic construct; identical to SEQ ID NO: 10237
  source 1..120: mol_type = other DNA

SEQ ID NO: 35126 - DNA, 120 bp, synthetic construct
  source 1..120: mol_type = other DNA
cttggatgccagaggaaatgtaattgtctgtatcaaagactgctatgagaaattcctaatgataagcgggggttctccaaaggacctccaaaaacacatcacaagagagtcaggtgttgg

SEQ ID NO: 35127 - DNA, 120 bp, synthetic construct
  source 1..120: mol_type = other DNA
attggcccctctttccccatagaggaggccagctttaatcaggcataagctggaagggaaaaggtgttaacctgcagcaaatttcttaaggtttttttaaaatcactattattattatta

SEQ ID NO: 35128 - DNA, 120 bp, synthetic construct
  source 1..120: mol_type = other DNA
gtagaaaagttacagcgtccattgtattttcatccagggataaaaagaacaagctccaagaacagatttgaagggcagtagggggaaaatacgaaattattttctattgtgcattacaaa

SEQ ID NO: 35129 - DNA, 120 bp, synthetic construct; identical to SEQ ID NO: 10238
  source 1..120: mol_type = other DNA

SEQ ID NO: 35130 - DNA, 120 bp, synthetic construct
  source 1..120: mol_type = other DNA
ggccatatcaaatttcaacgcattaacactttgcagagacacatgaggttatatgtgatttgctgtgctttatcaagaataagaagataaagcatttgctgtgctttatcaagaggccga

SEQ ID NO: 35131 - DNA, 120 bp, synthetic construct
  source 1..120: mol_type = other DNA
tacttgggtggctgaagcaggagaatcgcttgaacctgggaggcagaggctgcagtgaactgagattgtgccacactccagcctgggccacagagtgagaacctgtctcaaaaaaaaaaa

SEQ ID NO: 35132 - DNA, 120 bp, synthetic construct; identical to SEQ ID NO: 10239
  source 1..120: mol_type = other DNA

SEQ ID NO: 35133 - DNA, 120 bp, synthetic construct
  source 1..120: mol_type = other DNA
tgaaacctcacagtcaaggtaattgattatcatggagcatacaggcatacaaaaaagcataaaaatcagttattgaatgacaagtcattgcacttttttcacgtggaatgctgaaattca

SEQ ID NO: 35134 - DNA, 120 bp, synthetic construct
  source 1..120: mol_type = other DNA
tggctcactgcaacttctgcctcccaggttcaaggaattctcccgcctcagcctcccaagtagctgggattacaggtgcataccaccacacctggctaatttttgtatttttagtagaga

SEQ ID NO: 35135 - DNA, 120 bp, synthetic construct
  source 1..120: mol_type = other DNA
atttttataccccttttcttttctctgtgtattttctatcaagtcaaaaatgaaggccaggcgcagtggctcatgcctgtaatcccagcacttagggaggccaggcaggcaaatcacctg

SEQ ID NO: 35136 - DNA, 120 bp, synthetic construct; identical to SEQ ID NO: 10240
  source 1..120: mol_type = other DNA

SEQ ID NO: 35137 - DNA, 120 bp, synthetic construct
  source 1..120: mol_type = other DNA
taatggtatccaggtaggagaagagatgggatatggttcttagctataagcataattctgcattttgagcaatttatcttcgaaagacaattaatacagtagcttcatttggactgctta

SEQ ID NO: 35138 - DNA, 120 bp, synthetic construct
  source 1..120: mol_type = other DNA
aaaaactgaggacaggagtgaccgcaactgctatgggttgatgttcctataaaacacctgaaataagagaaaaggtctccccaggcccaggcctatgttcttgacactttgtggatgagg

SEQ ID NO: 35139 - DNA, 120 bp, synthetic construct
  source 1..120: mol_type = other DNA
acttccagaagcaaagtctttgtattcccatgaggatgcatgatgaatgtgtagctaaaacactagggcttcatcattgatctaagtgaaagttgtagtgccccatgttgtaacagagta

SEQ ID NO: 35140 - DNA, 120 bp, synthetic construct
  source 1..120: mol_type = other DNA
ttggaaaaaattcacatgttgaacccagaacaattaatactgctttctaattacatgtcaataagctgtgggagttactgttctcttcccccatttgtatagtacataaaaaaacatttt

SEQ ID NO: 35141 - DNA, 120 bp, synthetic construct; identical to SEQ ID NO: 10241
  source 1..120: mol_type = other DNA

SEQ ID NO: 35142 - DNA, 120 bp, synthetic construct
  source 1..120: mol_type = other DNA
ttattacttattttctaataaagaatatgttttaaaacataatttatatataagatatattttaattctattcttgtccttgatttatagtatttgcctttattgcaagggaagtcctta

SEQ ID NO: 35143 - DNA, 120 bp, synthetic construct
  source 1..120: mol_type = other DNA
acccagtgcggggatttgtctgcctctagcaaccacaaagaaaaaatcatttttactgggagcagcaatgcaagcctgtgaatgagatttccagttctcataaaagctgcaagcagaaaa

SEQ ID NO: 35144 - DNA, 120 bp, synthetic construct
  source 1..120: mol_type = other DNA
gtgggcacacattttcaggccttgaactcacgtgggtaagaaatatgtctatttttctagcatgcaaagaacatttccttgtgtgtctcaattctgctagatggtggaaatttaatcttt

SEQ ID NO: 35145 - DNA, 120 bp, synthetic construct; identical to SEQ ID NO: 10242
  source 1..120: mol_type = other DNA

SEQ ID NO: 35146 - DNA, 120 bp, synthetic construct
  source 1..120: mol_type = other DNA
ccatttgcgcggggaagagctggcctctcctgttccgaggtggaaactgggattcaatctgagaggcgggaagacaactagcaggactcttgctctgctgagagtccctgttttcctttt

SEQ ID NO: 35147 - DNA, 120 bp, synthetic construct
  source 1..120: mol_type = other DNA
caacctcttagcagctctccaagacacattaggcacagaggtactacaaggctgcctctactctattgttccttcctcatgctgggtgccatggagctctataacatttactgccttcta

SEQ ID NO: 35148 - DNA, 120 bp, synthetic construct
  source 1..120: mol_type = other DNA
cagtatcaaaggtccatcagtttttatttctgttgcttctcctctcttgcttctcttcttcccctttcagttcccagtattggaggccaggaaataaagcaggaggaaaaactggctctg

SEQ ID NO: 35149 - DNA, 120 bp, synthetic construct; identical to SEQ ID NO: 10243
  source 1..120: mol_type = other DNA

SEQ ID NO: 35150 - DNA, 120 bp, synthetic construct
  source 1..120: mol_type = other DNA
aatagatatcaaaaagaaagttcagggggattaagcgacttgccaaattcactcaattaatacagatagcaccaagattcagatctgaagcccactattcttactaatgcacactccttc

SEQ ID NO: 35151 - DNA, 120 bp, synthetic construct
  source 1..120: mol_type = other DNA
tgatatctgacagatggtagggaaaaaatgaataaaccagtcagcaattctcaaattctgctccctttcaacactagtattccatgagttgggtagaattttattttatttcattttatc

SEQ ID NO: 35152 - DNA, 120 bp, synthetic construct
  source 1..120: mol_type = other DNA
ttttgctgagttcatggcatttctatgacttttccctgttcaaatgttatgtttgaaaccagaatatttctgaataaatgattggtttcaccatttataataatgtggtagttaatctat

SEQ ID NO: 35153 - DNA, 120 bp, synthetic construct; identical to SEQ ID NO: 10244
  source 1..120: mol_type = other DNA

SEQ ID NO: 35154 - DNA, 120 bp, synthetic construct
  source 1..120: mol_type = other DNA
taaatgaagcaaggagagtatgactgttaaaacttatagttcatggagcatttgtcattatcctcaataattgcatatggcatcctgccaaactcaacagtagaatcactgaaagcgagt

SEQ ID NO: 35155 - DNA, 120 bp, synthetic construct
  source 1..120: mol_type = other DNA
ctgttactttggtgcttagaattaaaataggtgtaattataactgttactgccccaaatctgtgccagcccctgacatgatcctcacaggacagtccttggcaattctgttccaagcctg

SEQ ID NO: 35156 - DNA, 120 bp, synthetic construct; identical to SEQ ID NO: 10245
  source 1..120: mol_type = other DNA

SEQ ID NO: 35157 - DNA, 120 bp, synthetic construct
  source 1..120: mol_type = other DNA
cgctcttttgtgtctgacttcgttcgcttaacattatgagatgtatcgatgtagctgtgtgtagttgtagatcattcatgcctcatccactctttgtgtgtgcctgcctggcaaaccaga

SEQ ID NO: 35158 - DNA, 120 bp, synthetic construct
  source 1..120: mol_type = other DNA
ctcagtaaatgcagtagctgataaaagatgcaaaaggcattctaagagatggttcttttcattatttaacattggtatttcactttcaaggtgaaatagaaactggtgttttaacggctg

SEQ ID NO: 35159 - DNA, 120 bp, synthetic construct
  source 1..120: mol_type = other DNA
aggttaataactgccttagttctaccagcaaaggtactcggatcccttatatttccaaggaatgaattctatttatactctttttaccaaagcaggcagggatctatggggaagtaaaag

SEQ ID NO: 35160 - DNA, 120 bp, synthetic construct
  source 1..120: mol_type = other DNA
cgaggtcaggatgtcgagaccatcctggctaacacagtgaaaccccatctctactaaaaatacaaaaaattagccagacgtggtggcgggcgcctgtagtcccagccaatcgggaggctg

SEQ ID NO: 35161 - DNA, 120 bp, synthetic construct; identical to SEQ ID NO: 10246
  source 1..120: mol_type = other DNA

SEQ ID NO: 35162 - DNA, 120 bp, synthetic construct
  source 1..120: mol_type = other DNA
gcttttgggctgggatctgaggcttctttttgatctgtgacaaaaattgcaaaggcaatttcttctcagaggtagtatttcctccccatttaatctttttcatgaactgctgaagtcttt

SEQ ID NO: 35163 - DNA, 120 bp, synthetic construct
  source 1..120: mol_type = other DNA
tgagttgctatagcaaaatgacttatcatcaaagaaagagtgtgacttggaatagacctaccaggaggtccgaaactttgtttgaagtcttcatccatagtcctcaaccctcaatggtac

SEQ ID NO: 35164 - DNA, 120 bp, synthetic construct
  source 1..120: mol_type = other DNA
ttagtgattataatcaccactaaacttcattacgttgcttcatagataatagaaatttctcttctttctgttagcaaaatgagaggctgttcacaaatgagaagaatgggtcctttcttc

SEQ ID NO: 35165 - DNA, 120 bp, synthetic construct; identical to SEQ ID NO: 10247
  source 1..120: mol_type = other DNA

SEQ ID NO: 35166 - DNA, 120 bp, synthetic construct
  source 1..120: mol_type = other DNA
gggacatgatctacttgcattttaaaaggatccctctgactgagaataaactgtggaatagactgtggggagcccagggtgaaagcaaggtagaagtagtgaagcctgtcaatagatagc

SEQ ID NO: 35167 - DNA, 120 bp, synthetic construct
  source 1..120: mol_type = other DNA
gtcaaggatgactttaagatttctgcctgagcaaatgtgaaggctggtgatggaacaaatggaaaggggaaggttgggaattcggtcttagatatattgagtttgaagtgtctattagac

SEQ ID NO: 35168 - DNA, 120 bp, synthetic construct
  source 1..120: mol_type = other DNA
ggatacaattataaagagagtaagtgtagattgaaggatgagaggagaaccaagggctagtcctggggcacaccaacattcagaagtcaagaaaaatagaaggaaccaacaatggtgact

SEQ ID NO: 35169 - DNA, 120 bp, synthetic construct; identical to SEQ ID NO: 10248
  source 1..120: mol_type = other DNA

SEQ ID NO: 35170 - DNA, 120 bp, synthetic construct
  source 1..120: mol_type = other DNA
cagggaaattaggacaaagagaaatctgtatctgtttttaaataatgtgtgaaaaatgagaacaacccattcaagatgttggtgacataagggagaaagggaggaattgctagagcaatg

SEQ ID NO: 35171 - DNA, 120 bp, synthetic construct
  source 1..120: mol_type = other DNA
atagaaaggaaagcagagtatatgagtacagatgctgactagtcgggaaatggagtagagtctggaagttctcctcttattcctgtaattttttcagtgaggtagaaagcaaggtgaaca

SEQ ID NO: 35172 - DNA, 120 bp, synthetic construct
  source 1..120: mol_type = other DNA
aaatagatttcaagacaaaaactggataaaaagacaaggccattatgtaatgataaaggggccaattcagcaagagaatataacaacaataaatatatatgaacccaatgctagagcacc

SEQ ID NO: 35173 - DNA, 120 bp, synthetic construct; identical to SEQ ID NO: 10249
  source 1..120: mol_type = other DNA

SEQ ID NO: 35174 - DNA, 120 bp, synthetic construct
  source 1..120: mol_type = other DNA
ggaaatttaaaaatgtgctcctgaatgaccattaagtcactgacaaaattaagaagaaaatttaaatagttcttgaaacaaatgaaaatggaagcacagcatattaaaacttgtgggata

SEQ ID NO: 35175 - DNA, 120 bp, synthetic construct
  source 1..120: mol_type = other DNA
acccaaaatttgtagaagaaaagaaataatacagatcaaaacagaaatatacaaaacagagactaaaaaaaataaaagatcaatgaaataaaaagttggttttttgaaaagatacacttt

SEQ ID NO: 35176 - DNA, 120 bp, synthetic construct; identical to SEQ ID NO: 10250
  source 1..120: mol_type = other DNA

SEQ ID NO: 35177 - DNA, 120 bp, synthetic construct
  source 1..120: mol_type = other DNA
ggctcactgcaaccttcacctcccgagttcaagtgatcctcctgcctcagcctcccgagtagctgggattacaggcgcccgccaccatgccaggctaatttttgtatttttagtagagat

SEQ ID NO: 35178 - DNA, 120 bp, synthetic construct
  source 1..120: mol_type = other DNA
tcttgaacccaccaatcatgaccttcacacaggaactttgcacatgctcttcccactatctcgtatgttttctatggttcacctatccatcttcctcaggtctttactcaaaagtcccac

SEQ ID NO: 35179 - DNA, 120 bp, synthetic construct
  source 1..120: mol_type = other DNA
gtatttcttatagcacttatcagtatctaacatacaatatatttaatttactcattcagtttgtactctgtctctccccatttgaaagacaaaaactggaaaaaaaagacaaggccatta

SEQ ID NO: 35180 - DNA, 120 bp, synthetic construct
  source 1..120: mol_type = other DNA
acttgtatcttgtttacaatgctttcttcagtgcctagaacagcaccaggcacatattttcagaatgaatgaatttcagaatcatacagtgaggccaggacttgttgtgttgtgtagtta

SEQ ID NO: 35181 - DNA, 120 bp, synthetic construct; identical to SEQ ID NO: 10251
  source 1..120: mol_type = other DNA

SEQ ID NO: 35182 - DNA, 120 bp, synthetic construct
  source 1..120: mol_type = other DNA
gctgaagggtcaggcagggagaggtggacagtcaaacatcagaaatggggtcagaatgttcattacaggtcccatagcaagtaggactgtttgggcatttcatattctttgatcctacct

SEQ ID NO: 35183 - DNA, 120 bp, synthetic construct
  source 1..120: mol_type = other DNA
tgagctgactcaatagctggcttccctatggcaaggcctagggctgtggagacttaaaaacaatcttgcgcaattttttagactctgactctcagaacccttttctataaaattcttgta

SEQ ID NO: 35184 - DNA, 120 bp, synthetic construct; identical to SEQ ID NO: 10252
  source 1..120: mol_type = other DNA

SEQ ID NO: 35185 - DNA, 120 bp, synthetic construct
  source 1..120: mol_type = other DNA
tgcaagctctgcctcccaggttcatgccatcctcctgcctcagcctcccgagtagctgggactacaggcgcccaccaccacgcctggctaattttttgtatttttagtagagatgggatt

SEQ ID NO: 35186 - DNA, 120 bp, synthetic construct
  source 1..120: mol_type = other DNA
cataccaataccctttacatcagtctaacaattgttaatatgttgccttcttcgtctacttgttttggttgttgaactaaagtaaattaaagttacaatgatattttaccccaaaataca

SEQ ID NO: 35187 - DNA, 120 bp, synthetic construct
  source 1..120: mol_type = other DNA
taaggcttcagtaggatgtttcatgagattttgagtcaaattctcctttgtggatctgaaactcctcattccccaattcaccgtgcaattaatgatttcttccctgtttatgggaaacag

SEQ ID NO: 35188 - DNA, 120 bp, synthetic construct; identical to SEQ ID NO: 10253
  source 1..120: mol_type = other DNA

SEQ ID NO: 35189 - DNA, 120 bp, synthetic construct
  source 1..120: mol_type = other DNA
aagtaaaagggccactttactgttttccttatcttccaatcaagacagcgtcatatattttattttattttttatttttttcagacagagtcttgctctgttgctcaggctggagtgcag

SEQ ID NO: 35190 - DNA, 120 bp, synthetic construct
  source 1..120: mol_type = other DNA
ttacaggcgcctgccaccacgtccggctaatttttgtatttttagtagagacagggttttgccatgttggccaggctggtcttgaacttctgacctcaggagatccacctgcctcagcct

SEQ ID NO: 35191 - DNA, 120 bp, synthetic construct
  source 1..120: mol_type = other DNA
aataagagggtggagaaatgggcacacatgtgaaggagagttaattacttgagcacaaaattttatctacttccctcaattcctcattttgctttgcatgggaattctgtatcagagaag

SEQ ID NO: 35192 - DNA, 120 bp, synthetic construct; identical to SEQ ID NO: 10254
  source 1..120: mol_type = other DNA

SEQ ID NO: 35193 - DNA, 120 bp, synthetic construct
  source 1..120: mol_type = other DNA
tcctgtggccactttccatcggttgaaataatttttcttggcaattttttgaagaagcttctgatcataaaatttcaaacttatggaaattttgagttcatcaagtatgactcttagatt

SEQ ID NO: 35194 - DNA, 120 bp, synthetic construct
  source 1..120: mol_type = other DNA
tgtgctaggtatttttctgacttgtttaatccttataacaacccagattgtcataaagaagtgaaacaacttaattaggcacagactagctgctataacacaaaatctcaaatgtcaata

SEQ ID NO: 35195 - DNA, 120 bp, synthetic construct
  source 1..120: mol_type = other DNA
ggtcagtttgggtgttaacatccagccaggaccaaggagaatagagcatggagaaggcatacttgtttcaaagccaccttagcagggaagcagtacaaacaattccacttatatttcatt

SEQ ID NO: 35196 - DNA, 120 bp, synthetic construct; identical to SEQ ID NO: 10255
  source 1..120: mol_type = other DNA

SEQ ID NO: 35197 - DNA, 120 bp, synthetic construct
  source 1..120: mol_type = other DNA
gaattcacctcatttgacttgctgaagagatttcaaataactcttctttaaaccttttagttatgttatttcagatgggacaatgaaagtattaagaagtgtgattagcttctggattct

SEQ ID NO: 35198 - DNA, 120 bp, synthetic construct
  source 1..120: mol_type = other DNA
aaatattacaagctgatcaagggatgaagccagagacatacccaagcaaagtttcagtgaggatcctctatataggaccaggtgaaagatggtgaatgagtcatatgtaaagcactggtt

SEQ ID NO: 35199 - DNA, 120 bp, synthetic construct
  source 1..120: mol_type = other DNA
aagagacaaacagccaagcatgggctgaaaattgaggatgggtataaacgtgctcttttctgggcttgctctccacacaattctcactgcaagtccttagttagaggagctctacataga

SEQ ID NO: 35200 - DNA, 120 bp, synthetic construct
  source 1..120: mol_type = other DNA
gaaatggagtccatataattcattttgaccattttgtcttatccaaaacactgaaaataatagctactccttaaagattgtctgccgtggacctcttgtgctattatctctaaatctttt

SEQ ID NO: 35201 - DNA, 120 bp, synthetic construct; identical to SEQ ID NO: 10256
  source 1..120: mol_type = other DNA

SEQ ID NO: 35202 - DNA, 120 bp, synthetic construct
  source 1..120: mol_type = other DNA
cgtctctactaaaaatacaaaaattagccgggcgtggtggcgcatgcctgtaatcccagctactcaggaggctgaggcaggagagttgcttaaactcgggaggcggaggttgcagtgagc

SEQ ID NO: 35203 - DNA, 120 bp, synthetic construct
  source 1..120: mol_type = other DNA
agaggtccccaggacaacccagaggtttgatgattcactaggagggctcacaggactgagcatatagtcatactcatagttatgatttattacaatgaaagtataccaagcacaatcaat

SEQ ID NO: 35204 - DNA, 120 bp, synthetic construct; identical to SEQ ID NO: 10257
  source 1..120: mol_type = other DNA

SEQ ID NO: 35205 - DNA, 120 bp, synthetic construct
  source 1..120: mol_type = other DNA
ctattgtagaaatctgactttcttttgtgtacgtcattactgcttaatctgccaaaatatctgacaaacaagatatgctgggactcagaaattcaataaagctaaattgaagaagacaag

SEQ ID NO: 35206 - DNA, 120 bp, synthetic construct
  source 1..120: mol_type = other DNA
gtagaagtttaacattttaaggtgcaaagggattggaggatgattaaatgacattgctggccctttcaaatcaaaagaatcatgcatgcctgacactgattgacggtgttgcttcttcat

SEQ ID NO: 35207 - DNA, 120 bp, synthetic construct
  source 1..120: mol_type = other DNA
aaaccgggccagtctcttgaaagctgttaaatgcaatttccatagtgccacttatttgttcaaatgatttaattgttcatttattcagaaatagttattgaatgcctcatttttcttcca

SEQ ID NO: 35208 - DNA, 120 bp, synthetic construct
  source 1..120: mol_type = other DNA
tcaggaccagcctggccaacatggcgaaaccccatctctactaaaaatacaaaaattagctgggtgtggtggcgggcacctgtaatcccagctactcaggaggttgaggcaggagaatca

SEQ ID NO: 35209 - DNA, 120 bp, synthetic construct; identical to SEQ ID NO: 10258
  source 1..120: mol_type = other DNA

SEQ ID NO: 35210 - DNA, 120 bp, synthetic construct
  source 1..120: mol_type = other DNA
agtgtcacagaaagaactgctgatgcataagcctaaggcagcaacaagctggatgtgttcaggaacagaagggaagccattaatgttctaaaatcttcaaacaaatacattttgaacctg

SEQ ID NO: 35211 - DNA, 120 bp, synthetic construct
  source 1..120: mol_type = other DNA
aataaaaatcctaaatacacattcaaaatccaatgtattgtacagcagatctttagaacttatttatggccgggtgtgttggctcacgcctgtaatcccagcactttgagaggccgaggc

SEQ ID NO: 35212 - DNA, 120 bp, synthetic construct; identical to SEQ ID NO: 10259
  source 1..120: mol_type = other DNA

SEQ ID NO: 35213 - DNA, 120 bp, synthetic construct
  source 1..120: mol_type = other DNA
agccaggcgtggtggcgtgtgcctgtaatcccagctactcaggaggcagaggcaggagaatcgcttgaacccaggaggtggaggttgtagtgagctgaggtcacagcactgcaccccagc

SEQ ID NO: 35214 - DNA, 120 bp, synthetic construct
  source 1..120: mol_type = other DNA
cacctccaacccctggcaaccaccattctactttctccttttatgtatttgactattttaatacttcacataggtggactcatgcaatatttgtccttctgtgactgacttatctcactt

SEQ ID NO: 35215 - DNA, 120 bp, synthetic construct
  source 1..120: mol_type = other DNA
atgaatacttaggttgtttccacttattggctattgtgaatagtgctgcaaggaacacaataatacaaatatctctttgagtttctgatttcaattactttggctaaatacccagaagtg

SEQ ID NO: 35216 - DNA, 120 bp, synthetic construct
  source 1..120: mol_type = other DNA
ccttgtcaacacttgttatcttttgtcattttgataatagtcatcctaacaggtgtgaagtgatattgcactgtggttttaatttgcatttccctaattattagtaatattgagcacatt

SEQ ID NO: 35217 - DNA, 120 bp, synthetic construct; identical to SEQ ID NO: 10260
  source 1..120: mol_type = other DNA

SEQ ID NO: 35218 - DNA, 120 bp, synthetic construct
  source 1..120: mol_type = other DNA
ttcttttcttccttgttacaataataaaacctattcactatacagaatattgtggctgaaatctcgttagcttggtctgagttgcattttgtataatctagaggtgactgaaggggagca

SEQ ID NO: 35219 - DNA, 120 bp, synthetic construct
  source 1..120: mol_type = other DNA
tggctaagatttatcacaacaaaagaaacaaagcaacatcagccaagaaaaaaggtgcatgaggtaaagtctaggggagactaggcacaagcttccacaagtcccctcccagtggtgtca

SEQ ID NO: 35220 - DNA, 120 bp, synthetic construct
  source 1..120: mol_type = other DNA
gttcagcataaaacatagtgcatatccaaacagtttgggcacagtggaccacccttctcatttctgggaatggtgggaaccctcctaaagtccaagttcctagatgctagccaagggtca

SEQ ID NO: 35221 - DNA, 120 bp, synthetic construct; identical to SEQ ID NO: 10261
  source 1..120: mol_type = other DNA

SEQ ID NO: 35222 - DNA, 120 bp, synthetic construct
  source 1..120: mol_type = other DNA
cttctcaccccctaacatatcagaaaacacaaaacatacacatagatattcagttaagtttacttcagatgtgagggtattttcagattttgtcatttaccaggtgctctactggggtta

SEQ ID NO: 35223 - DNA, 120 bp, synthetic construct
  source 1..120: mol_type = other DNA
tggaatttagcaacagcaagtggggcattatcactccagtttcaaggctttctgtttcttctgtaatgacagcttttcatgcctaatgctcagcgtactactgaaaagtgcataatagct

SEQ ID NO: 35224 - DNA, 120 bp, synthetic construct
  source 1..120: mol_type = other DNA
agatgtaatttacttatggtagtgattgctaaaatgtgttcagctaatttgtaaaaccagtagaaaagaaaatgaatgtagaccactatattagtttcctatggccaccacaacaaatta

SEQ ID NO: 35225 - DNA, 120 bp, synthetic construct; identical to SEQ ID NO: 10262
  source 1..120: mol_type = other DNA

SEQ ID NO: 35226 - DNA, 120 bp, synthetic construct
  source 1..120: mol_type = other DNA
ccacatgtccctatgacaccataaaaggggtttccaatcattgctattctcaaataatgaaagttatagagggatttgtggatgaggcccaatcctcaagaggagtgaaccattgtcata

SEQ ID NO: 35227 - DNA, 120 bp, synthetic construct
  source 1..120: mol_type = other DNA
tggtacctaatgggaaatatatatctcatgaggtagtaataaattggtacctaatgggaaatatgatacttccatgaatctttacagagaacaccaagaacccagcaggtatgaaaattc

SEQ ID NO: 35228 - DNA, 120 bp, synthetic construct; identical to SEQ ID NO: 10263
  source 1..120: mol_type = other DNA

SEQ ID NO: 35229 - DNA, 120 bp, synthetic construct
  source 1..120: mol_type = other DNA
gggtaaatgagatcgtgcttgtaaaggacacacgcacagaagaaattcaagtaatgttggttgaatcaagttatgatctaacccaatctcaagacaagcactgactcaattttggctatc

SEQ ID NO: 35230 - DNA, 120 bp, synthetic construct
  source 1..120: mol_type = other DNA
atctaacatttaaatcaaaacaacctggccattatagatccttcattaataaattgaatatggcaattttattcaacatctctggcttcttccaacaccagcccatttgacaagaaccca

SEQ ID NO: 35231 - DNA, 120 bp, synthetic construct
  source 1..120: mol_type = other DNA
tgccagagggctagaatattctgtttcccagagggagattcagagagtttatctcataatcaatttacattggggatagagattaagtctgcttaagtctccttttgggacttggctgaa

SEQ ID NO: 35232 - DNA, 120 bp, synthetic construct; identical to SEQ ID NO: 10264
  source 1..120: mol_type = other DNA

SEQ ID NO: 35233 - DNA, 120 bp, synthetic construct
  source 1..120: mol_type = other DNA
tgattgtccatctcatcaacatccatgtttgctcatcaacatccatgtttgatctggcccagcacactacttgttttttattttttagtgtttgttcacccaaccacactaactctgcac

SEQ ID NO: 35234 - DNA, 120 bp, synthetic construct
  source 1..120: mol_type = other DNA
caaaagaaaaaacaccaagcaacaacagaaactaagggttggaaaggatttatttatagcaaccatccttttcatggagagagtgaccatcactctctcaaaatggtcattgagccctgc

SEQ ID NO: 35235 - DNA, 120 bp, synthetic construct
  source 1..120: mol_type = other DNA
acacaccagagcctgttgtggggtgggggaaggggggagggatagtattaggagatatacctaatgttaaatgacgagttgatgggtgcagcacaccaacatggcacatgtatacatatg

SEQ ID NO: 35236 - DNA, 120 bp, synthetic construct
  source 1..120: mol_type = other DNA
tctcatcaaaagtttatacaatctgactgagaattatctttgaaattgagttagaattggtcttgctatgattcttctcattgttctcccattttattagtatctttataaactcattgg

SEQ ID NO: 35237 - DNA, 120 bp, synthetic construct; identical to SEQ ID NO: 10265
  source 1..120: mol_type = other DNA

SEQ ID NO: 35238 - DNA, 120 bp, synthetic construct
  source 1..120: mol_type = other DNA
taccaccatcatccagaaataatggatgttaacattttatctctggaaccatctttccacttaaagtttcatgccgtgcctttcctttttctaaacagtaggaaaagagatgatgaatga

SEQ ID NO: 35239 - DNA, 120 bp, synthetic construct
  source 1..120: mol_type = other DNA
ttggccattaaacttccagggcaagctggtatatgtgggaaactttaaatttgagtaatttggattttgcaaaagtctttttgctaccattgttggctaatgccaaagattgtctgcaga

SEQ ID NO: 35240 - DNA, 120 bp, synthetic construct
  source 1..120: mol_type = other DNA
tgtagcatgtataataaagctcttacaatgtttaaagctggggttttagattgatggagagctctataaatcccagattactattaatgtgcttgtagtccagctctagttacagggttg

SEQ ID NO: 35241 - DNA, 120 bp, synthetic construct; identical to SEQ ID NO: 10266
  source 1..120: mol_type = other DNA

SEQ ID NO: 35242 - DNA, 120 bp, synthetic construct
  source 1..120: mol_type = other DNA
gtgctttaacctccaaggggctttttgtgcctacagggatattccgcactctttgtcctttgtttacagtccaatttcataaccttatgaatttgtcaaacatttagcattttttaaacc

SEQ ID NO: 35243 - DNA, 120 bp, synthetic construct
  source 1..120: mol_type = other DNA
tggctgtattttaccaagtcctcctggtaattctgatgcatattcaaattttcattgctttaaatattcacacactacttatacaaccaataaatcaaatgtatattaagtgaacaaaac

SEQ ID NO: 35244 - DNA, 120 bp, synthetic construct
  source 1..120: mol_type = other DNA
tttcagatttccctgcattaaacatcttacaaaggaaaaaatacacgtaaaataccacgttgtttacatagccgattattattttgacaacaaaactgggcacaaagctattaatatcat

SEQ ID NO: 35245 - DNA, 120 bp, synthetic construct; identical to SEQ ID NO: 10267
  source 1..120: mol_type = other DNA

SEQ ID NO: 35246 - DNA, 120 bp, synthetic construct
  source 1..120: mol_type = other DNA
tcatggaatctatattgttttctcattgctgctttaacaaattaccacatacttagtggcttaaaacaatacaaatatattatcttacagttctggagggcagaagtctaacatgagtgt

SEQ ID NO: 35247 - DNA, 120 bp, synthetic construct
  source 1..120: mol_type = other DNA
cttgggcttgaggccccctttttccatcttcaaacctagtgtcttcatagcttctcctctcatttctaacctcctgcctctctcttattctctagtgttatattgggcccacccagggta

SEQ ID NO: 35248 - DNA, 120 bp, synthetic construct
  source 1..120: mol_type = other DNA
ttttgtctaccacatgacactttttgtcaatgtatttcacatttttactgtgcatacacatatacacaatgtattttttaattaggctttacaatatataattttattgcccggtttaca

SEQ ID NO: 35249 - DNA, 120 bp, synthetic construct; identical to SEQ ID NO: 10268
  source 1..120: mol_type = other DNA

SEQ ID NO: 35250 - DNA, 120 bp, synthetic construct
  source 1..120: mol_type = other DNA
ctttctgatccttccctccatggcctccctttaatgaggctttctttcattttaaagagaccattttaattgattttgatcaactctactcaaaactttatcctcagtttcgcattagga

SEQ ID NO: 35251 - DNA, 120 bp, synthetic construct
  source 1..120: mol_type = other DNA
tttcttttgaaaaaggaaagtagtttctgggggggggcagggcagaggtaagaagtaattggtacgtgaaggaagtgaggaagtgttagggaccattatggaaatgtattctttttttgt

SEQ ID NO: 35252 - DNA, 120 bp, synthetic construct
  source 1..120: mol_type = other DNA
gagactacagtcgcatgccaccacaaccggctaatttttgtatttttagtagagacggggtttcactatgttggccaggctggtctcgaactcctgaccttgtgatctgcctgcctcaga

SEQ ID NO: 35253 - DNA, 120 bp, synthetic construct; identical to SEQ ID NO: 10269
  source 1..120: mol_type = other DNA

SEQ ID NO: 35254 - DNA, 120 bp, synthetic construct
  source 1..120: mol_type = other DNA
agttctctctgcacacaacatgctcacagttccatccataggaggaagggaagacacaaaagcaccccagcgtgcaggttcccccatttggacagcaggttctgttttgttccttactgt

SEQ ID NO: 35255 - DNA, 120 bp, synthetic construct
  source 1..120: mol_type = other DNA
ggcccaacccaacctggccaactaattctagttcaaatgcttttgaaatggccatgatcaaaattacactccgtcattgtcccctgaacgtttaggcaggccagaggatgagagagagca

SEQ ID NO: 35256 - DNA, 120 bp, synthetic construct
  source 1..120: mol_type = other DNA
cctcagcctcctgagtagctgggattataggcacatgccaccacgcccggctaattttttttttttttgtatttttagtagaaatggggtttcaccatgttagccaagctggtctcgaac

SEQ ID NO: 35257 - DNA, 120 bp, synthetic construct; identical to SEQ ID NO: 10270
  source 1..120: mol_type = other DNA

SEQ ID NO: 35258 - DNA, 120 bp, synthetic construct
  source 1..120: mol_type = other DNA
ggtgatcacctgaggtcaggagtttgaaaccagccaggccaacatggtgaaacctcgtctttactaataacacaaaaattagccgggcgtagtggcgcatgcctctaatccaagctactt

SEQ ID NO: 35259 - DNA, 120 bp, synthetic construct
  source 1..120: mol_type = other DNA
ttagactactttttatggacatttaactaagttagtattttggagtaaatggttattatcgttttcctcattggaaattgcatatgcgactggtgctagccaaccgctggactccttttc

SEQ ID NO: 35260 - DNA, 120 bp, synthetic construct
  source 1..120: mol_type = other DNA
ataaaaacaatacatatctatactatatgaacagaaatatacttaacaaaaacccacaaatatctatctatagttatatataaacactttcctacttatgtaagtaaataaatttacatg

SEQ ID NO: 35261 - DNA, 120 bp, synthetic construct; identical to SEQ ID NO: 10271
  source 1..120: mol_type = other DNA

SEQ ID NO: 35262 - DNA, 120 bp, synthetic construct
  source 1..120: mol_type = other DNA
gggatgtttacaagtgtcaagtggggaaagactacagctactgctgctgccttgggacttctcttgctagcgactgagcttaaagaaaatacgtcttttataagtgtgtaaaatcttgtt

SEQ ID NO: 35263 - DNA, 120 bp, synthetic construct
  source 1..120: mol_type = other DNA
ccactttcctcccacctcctctctcactccgttttctaggacaatggttctcagcctagtcttcatactggattagcttggggagctttaaaaatgttgatatgggtctcactatcatag

SEQ ID NO: 35264 - DNA, 120 bp, synthetic construct
  source 1..120: mol_type = other DNA
aataaagccaaccaggcatactcccatgaaattacaccacagaggttccagggataccagcttgacattataaacagaaaaattaaatgcatgcttatcttttgactgctttgcttcagg

SEQ ID NO: 35265 - DNA, 120 bp, synthetic construct
  source 1..120: mol_type = other DNA
ctttcagtctcatcttcctcactccttcctaaccttgctctaattacttcaaggttttaaaaggccttgatttcttcatctttgaggttaagataatgtctgcatgtgacacacactaaa

SEQ ID NO: 35266 - DNA, 120 bp, synthetic construct; identical to SEQ ID NO: 10272
  source 1..120: mol_type = other DNA

SEQ ID NO: 35267 - DNA, 120 bp, synthetic construct
  source 1..120: mol_type = other DNA
tgacatatctacctccacttaagttacttttccatgacagaagcttgcattcttatagtatgaaaaacagaatgtctgttttagtaagaggacaaaggcctaggacctactctatttctg

SEQ ID NO: 35268 - DNA, 120 bp, synthetic construct
  source 1..120: mol_type = other DNA
ttagtaagaggacaaaggcctaggacctactctatttctgtgtaatctattagtattagttcttcacttagttccgatacacacccaagtctgggaaccattgtcttagggcatcaaata

SEQ ID NO: 35269 - DNA, 120 bp, synthetic construct
  source 1..120: mol_type = other DNA
acagagtcttctgtttttgtgggctgccatctcagaagctttgtctagtcttgatatattgcctggttaggattttaagaaaataatagatgatgctttcaaaaatatggcagtctcaat

SEQ ID NO: 35270 - DNA, 120 bp, synthetic construct; identical to SEQ ID NO: 10273
  source 1..120: mol_type = other DNA

SEQ ID NO: 35271 - DNA, 120 bp, synthetic construct
  source 1..120: mol_type = other DNA
tggggggccgaggtgggcggatcacctgaggtcaggagtttgagaccagcctggccaacatgacaaaaccctgtctctactaaaaatacaaaaattagctgggtgtggtggcgagcctgt

SEQ ID NO: 35272 - DNA, 120 bp, synthetic construct
  source 1..120: mol_type = other DNA
caaaaaaaacaaacaaacattctccaagtgactttcatgtgcagcaaaatttgaaaaccccttgtcttagtccaccatcaaaagttaaccaatatcacatttttttaaaaatggctcttt

SEQ ID NO: 35273 - DNA, 120 bp, synthetic construct; identical to SEQ ID NO: 10274
  source 1..120: mol_type = other DNA

SEQ ID NO: 35274 - DNA, 120 bp, synthetic construct
  source 1..120: mol_type = other DNA
tgctcttaatttggtaaataaagagttgcaaatcttatgttgatctccacatatttttggaaatcttgctggttcatgaaatttgaaaatctgggagccatgggcatgataaatccatta

SEQ ID NO: 35275 - DNA, 120 bp, synthetic construct
  source 1..120: mol_type = other DNA
cctggggccaagcagtccttgaattttgtaagcaccagagtttattgctttctgtgtcagttcaggtccactaagcagatttcaagaaggaattagacttgcaagagatttattgaggga

SEQ ID NO: 35276 - DNA, 120 bp, synthetic construct
  source 1..120: mol_type = other DNA
tagcgcagctctgagaaagtctcagccaggctggtggggagccccagagcacagactgtctatcagagaggtccctgtcacgcaggaatggcccagcgctattctccccactgtgttctg

SEQ ID NO: 35277 - DNA, 120 bp, synthetic construct; identical to SEQ ID NO: 10275
  source 1..120: mol_type = other DNA

SEQ ID NO: 35278 - DNA, 120 bp, synthetic construct
  source 1..120: mol_type = other DNA
tgggcccacaattatctccataaaaaatgtaaaatcgctggtcactggataagtcgtgggaggtagaacatctggcttatgtaatgaatacatgtttaatattaccttttaaacctgtaa

SEQ ID NO: 35279 - DNA, 120 bp, synthetic construct
  source 1..120: mol_type = other DNA
ttgccacagtgtattgtctagcatggcagatgcagtattggctcgagtgtataaacaatcagatttggacaccctggctaaagaagcatccatcccaattatcaatgggctgtcagattt

SEQ ID NO: 35280 - DNA, 120 bp, synthetic construct
  source 1..120: mol_type = other DNA
aatcatggtattggtgttttattttcaaataccagcttgacaaagaattacagcttgtgtgtgcattttctggggaaaacaggacattgttaaaaacagactctaagatcgctctgcact

SEQ ID NO: 35281 - DNA, 120 bp, synthetic construct; identical to SEQ ID NO: 10276
  source 1..120: mol_type = other DNA

SEQ ID NO: 35282 - DNA, 120 bp, synthetic construct
  source 1..120: mol_type = other DNA
cattctagtcctcccaaattaggaacttgaataactttgaaagattcctcttgtttggtttgccacagccaatctacattatattgcccctggaaatcctaacagccatggtttctatgt

SEQ ID NO: 35283 - DNA, 120 bp, synthetic construct
  source 1..120: mol_type = other DNA
atgagatccatgcagagaagatgatataattatgtcagataccaaagtggctgtctgtgggtgtggctttacatatacaccagataatttaatgcttccccctggggctttatcattact

SEQ ID NO: 35284 - DNA, 120 bp, synthetic construct
  source 1..120: mol_type = other DNA
ataggagacacttaaagtaggagctgaatgaataaatagcagcttgttaagagcatggaatctaaatcagatggatctggaattaaattctagcttagccaactagtagttctgtgatct

SEQ ID NO: 35285 - DNA, 120 bp, synthetic construct; identical to SEQ ID NO: 10277
  source 1..120: mol_type = other DNA

SEQ ID NO: 35286 - DNA, 120 bp, synthetic construct
  source 1..120: mol_type = other DNA
gtgcagtggcatgatctcaactcactgcaacctccgcctcccgggttcaagcgattcttgtgcctcagcctccggagtagctgggattacaagtgtgtgccacgcctggctaatttttgt

SEQ ID NO: 35287 - DNA, 120 bp, synthetic construct
  source 1..120: mol_type = other DNA
ctggccaactaacagtattattgagcatctttgtcaacttcgtataatgggaacatgctctgagccactatgctacactgttccaggtattctgtatttcccctttctcataccaaagaa

SEQ ID NO: 35288 - DNA, 120 bp, synthetic construct
  source 1..120: mol_type = other DNA
tattgtatctccagggccaaggacagtgtctcagtgtctggatgttaatggtgctcatttgtatccaatgagtgaatacaactaagactcagatttgaaatgtatgaaactcttagtctc

SEQ ID NO: 35289 - DNA, 120 bp, synthetic construct
  source 1..120: mol_type = other DNA
ttctaacaaggcactaatactgagattaagactatttattttaaccttagtaattgctacacataagcgaatttacgcctggatttcatctccttcatcccgtgccttttaggaacacta

SEQ ID NO: 35290 - DNA, 120 bp, synthetic construct; identical to SEQ ID NO: 10278
  source 1..120: mol_type = other DNA

SEQ ID NO: 35291 - DNA, 120 bp, synthetic construct
  source 1..120: mol_type = other DNA
gtctgaattattcctttgaataccctgctgtaggccattatgatgactggcattgtgcattaccaccacaaaggctgaagaaagcaataaaatccaggcagcatagaattctcaacccat

SEQ ID NO: 35292 - DNA, 120 bp, synthetic construct
  source 1..120: mol_type = other DNA
ttttggcttagaaaatttgagccccacatggctatgaaaatgacccctgcatacttcctaccttgctgctctctcacagcatgtatggaatacatgacttctttcataggcccaatgtaa

SEQ ID NO: 35293 - DNA, 120 bp, synthetic construct; identical to SEQ ID NO: 10279
  source 1..120: mol_type = other DNA

SEQ ID NO: 35294 - DNA, 120 bp, synthetic construct
  source 1..120: mol_type = other DNA
tttgtgtacaggtgatttattaaggaagtactgccaagggagatccctaagggattagggggagcaggacagggaaagggaagaatctaagcaaggatgccatttacagtgaccaaccat

SEQ ID NO: 35295 - DNA, 120 bp, synthetic construct
  source 1..120: mol_type = other DNA
gaaagtagcttcagcctgatctcacaggtgagctctggagtgtaagttatgccctaaagttatcccagcattggtcaagggcagcagaagaggtggagtggtaaatcccctggcactttt

SEQ ID NO: 35296 - DNA, 120 bp, synthetic construct
  source 1..120: mol_type = other DNA
ggcctctgagtagatcaccaacatcatctgctgcatccagccaaaacaaaactaaccaccaccaaatgcttcaccaggtgtttttatcttgctgtcttggattcttagggctgccataac

SEQ ID NO: 35297 - DNA, 120 bp, synthetic construct
  source 1..120: mol_type = other DNA
gatccttttttgcctcttcctgcttctggtagccccaggcattcccattttccctctgtgtctgtgtctctctgtacaaatccccctcttcttatagggacaccagacatattaaattta

SEQ ID NO: 35298 - DNA, 120 bp, synthetic construct; identical to SEQ ID NO: 10280
  source 1..120: mol_type = other DNA

SEQ ID NO: 35299 - DNA, 120 bp, synthetic construct
  source 1..120: mol_type = other DNA
cggcttttattcactttatgggaagggtgagtacactctctatacaaagctagtttgaagaaaggctctgtattaatgcaaactcttattgcatttggttcccacagatgaaacatacat

SEQ ID NO: 35300 - DNA, 120 bp, synthetic construct
  source 1..120: mol_type = other DNA
tctaatattacagagtaattgcagtattgttcttaaggagaaactcatttaaatgataaagagtactaaaacctggttaaaccttggtgggagtaagagttttgcaaagtcttctggaaa

SEQ ID NO: 35301 - DNA, 120 bp, synthetic construct
  source 1..120: mol_type = other DNA
ggagatttattgtaaattttagaaacactgaaacgtttccaaggccatgattaatctatttccccattctttaaccaagaataacttacatgttcaagaaaaaataattttgtccatgat

SEQ ID NO: 35302 - DNA, 120 bp, synthetic construct; identical to SEQ ID NO: 10281
  source 1..120: mol_type = other DNA

SEQ ID NO: 35303 - DNA, 120 bp, synthetic construct
  source 1..120: mol_type = other DNA
taaattttcagggtaggaggcacctgggggaatatccaagtctcttcatttatgtttaccagtatggctgttcacaacattagttgctaaattagctagcctttattaattactttcccc

SEQ ID NO: 35304 - DNA, 120 bp, synthetic construct
  source 1..120: mol_type = other DNA
gaagaagaaactatggtagacaatcatgtgcaaataaacacaatttcacaaataaacctagacatgcctgtcacaggttgggtttcttgggaagcagactcagagtttagtgtgcaggac

SEQ ID NO: 35305 - DNA, 120 bp, synthetic construct
  source 1..120: mol_type = other DNA
tcttatggaaagttctggatctgagatgtccattcatctgtctggagttgggcagaggagggtcaggttttcataccctcctgtcaatcagccattgaatgtgggttgccccaaaagggt

SEQ ID NO: 35306 - DNA, 120 bp, synthetic construct; identical to SEQ ID NO: 10282
  source 1..120: mol_type = other DNA

SEQ ID NO: 35307 - DNA, 120 bp, synthetic construct
  source 1..120: mol_type = other DNA
acaagagaggaggtgttcaagggtgaaaggctgtgatggcagaaaagggcaagatgtgtacagggatgacaataagattggctttcctgcagcaagatgttgagaagaattaaaagagac

SEQ ID NO: 35308 - DNA, 120 bp, synthetic construct
  source 1..120: mol_type = other DNA
ttcagagaaaacagttcttgctgctgtgtacagaataggttggagagtgagggtagaggcagggaggctgcctgtgggaatctgggataccttggggagctttagctgttcccatgatgt

SEQ ID NO: 35309 - DNA, 120 bp, synthetic construct; identical to SEQ ID NO: 10283
  source 1..120: mol_type = other DNA

SEQ ID NO: 35310 - DNA, 120 bp, synthetic construct
  source 1..120: mol_type = other DNA
acatttcaactgagacctgaaaaagttatccacatggaatgggtggaagaaagaatttcagacaagaaaggatagcatgtgcaaagatagacaaacatgcattcatttgcacacttctga

SEQ ID NO: 35311 - DNA, 120 bp, synthetic construct
  source 1..120: mol_type = other DNA
tggttgtctctttaaattccaaaaggcactattgagttttggaattctagatgtaaaaatcatattctactgaacatggtgggaccacatcttgaaaaagggaaggagacgcgatattga

SEQ ID NO: 35312 - DNA, 120 bp, synthetic construct
  source 1..120: mol_type = other DNA
atgagccggatgctagtgtaaccaagttggcagagcagtatgccaaagaggtatgctctttacatgtaaagctattattgccttttactgtcccatgaagttatttaaccagcgtgttta

SEQ ID NO: 35313 - DNA, 120 bp, synthetic construct; identical to SEQ ID NO: 10284
  source 1..120: mol_type = other DNA

SEQ ID NO: 35314 - DNA, 120 bp, synthetic construct
  source 1..120: mol_type = other DNA
aatttgaaacccactgagaagagaggagcaggcttttccctctcacaagaatcgaggcattgcagtgttttactctttgtgtgtttagagaaattaggttacttctgatgcatgcagttt

SEQ ID NO: 35315 - DNA, 120 bp, synthetic construct
  source 1..120: mol_type = other DNA
aatccagtttagttttgctaatgccctccagggcattcccaggggactcatctgtttggctgtcttccagtaagatctggaacaatgcttctcagtcttgagcaggtattagcatcacca

SEQ ID NO: 35316 - DNA, 120 bp, synthetic construct
  source 1..120: mol_type = other DNA
ctccagggccacactttgagaagcaatgttctggaggaataccctgaaagccaaatgcacaggggttttgtcagcaaagcaacaaatctactttggtggagaaagggattaagcaagtac

SEQ ID NO: 35317 - DNA, 120 bp, synthetic construct; identical to SEQ ID NO: 10285
  source 1..120: mol_type = other DNA

SEQ ID NO: 35318 - DNA, 120 bp, synthetic construct
  source 1..120: mol_type = other DNA
aaaggataagtggaaccataatttacttaaaatgtttcctattgataaattaggctatttctgagaatgccgattacaaaaatgctgcaatgaacttgcttatccatatttctttgtgca

SEQ ID NO: 35319 - DNA, 120 bp, synthetic construct
  source 1..120: mol_type = other DNA
gggtgaagtggtataaattttttaaaatatgagagtgctgctaaattgcttacccaaagaagattaaaaatgtatactgctgcagctgtatattatagttatttttccatatcctctcca

SEQ ID NO: 35320 - DNA, 120 bp, synthetic construct
  source 1..120: mol_type = other DNA
tgggcattgcccttttttctataaattgctattacattttttgcccattttctatttttttgccttttctattattggttataggagctctttatatattatggctaatcccttatcatg

SEQ ID NO: 35321 - DNA, 120 bp, synthetic construct; identical to SEQ ID NO: 10286
  source 1..120: mol_type = other DNA

SEQ ID NO: 35322 - DNA, 120 bp, synthetic construct
  source 1..120: mol_type = other DNA
gtaactttcagcaattaactgttggagaaaattaaaactgctagtacatttgcattaagaatgaaaaatctaatgcatagtgcttataatcctgtttaattcacccctacctcattacct

SEQ ID NO: 35323 - DNA, 120 bp, synthetic construct
  source 1..120: mol_type = other DNA
taattggtgacttttgctatcagccacatattacattagtagagttctttactgaaaggtctactgttccactaaatagaataacagaaaactgagttactggtgtaacttgaagtggta

SEQ ID NO: 35324 - DNA, 120 bp, synthetic construct
  source 1..120: mol_type = other DNA
aaccagcctggccaatatggtgaaatcccgtctctactaaaaatacaaaaattcactgggcatggtggcacatgcctgtagtcccagctactcaggaagctgaggcaggagaattgcttg

SEQ ID NO: 35325 - DNA, 120 bp, synthetic construct
  source 1..120: mol_type = other DNA
ctaggtgtcttgagataaaaccatcactctgctcctttgtctctccctttgcattgatgtctgactactggccatgtgtgtttttagatactgaagaaaacaaatatgactgccacatat

SEQ ID NO: 35326 - DNA, 120 bp, synthetic construct; identical to SEQ ID NO: 10287
  source 1..120: mol_type = other DNA

SEQ ID NO: 35327 - DNA, 120 bp, synthetic construct
  source 1..120: mol_type = other DNA
atggagtgagattaatctcctttcaaataaatccattttaaccaaaattcttaccacccttgatccgcctgagcaccagccaccagtttgccaaccattataagtcatataattcttatt

SEQ ID NO: 35328 - DNA, 120 bp, synthetic construct
  source 1..120: mol_type = other DNA
tcccttctctttttcctcattccatgccttactttatgactggactagatacttgttttcgttctttgagtttggccatagggatatatgtgtttttaggtatagaacatttccaaattt

SEQ ID NO: 35329 - DNA, 120 bp, synthetic construct; identical to SEQ ID NO: 10288
  source 1..120: mol_type = other DNA

SEQ ID NO: 35330 - DNA, 120 bp, synthetic construct
  source 1..120: mol_type = other DNA
gcagaaaaattgcccaatgacactgtggttcttttgtagccagaacaccactgacacagcctggtacctgaggctcttgaaaccagatgtcagatactccattatagccaccacagctga

SEQ ID NO: 35331 - DNA, 120 bp, synthetic construct
  source 1..120: mol_type = other DNA
taccctagctgcaagggagtttgggaaaggcagtttttagctttcagcctctggagtagagaaaagcaagctggaaaggactagcttctaattatttatctaatctataaattggaatag

SEQ ID NO: 35332 - DNA, 120 bp, synthetic construct
  source 1..120: mol_type = other DNA
ctgatacagaccctataaaataagcaggggttcaagctcaactatggctgcttggcagccaaccgtgactcccttttcaatagaagtttgtatattaggcctaaatttgtcatatctaat

SEQ ID NO: 35333 - DNA, 120 bp, synthetic construct; identical to SEQ ID NO: 10289
  source 1..120: mol_type = other DNA

SEQ ID NO: 35334 - DNA, 120 bp, synthetic construct
  source 1..120: mol_type = other DNA
cagcctcacaagtagctgggattacaggcaggtgacaccatgcatagctaatttttgtatttttagtggcgggtaggggggtttcatcatgttgcccaggctggtctcgaactcctgacc

SEQ ID NO: 35335 - DNA, 120 bp, synthetic construct
  source 1..120: mol_type = other DNA
cattttgagtagcaaagatctagatgacaaagaaaatgtgagctctccaaccacatacctcaggaagagacacagcaaaacattttccttgagctctgtttttcatcagaagacaattga

SEQ ID NO: 35336 - DNA, 120 bp, synthetic construct
  source 1..120: mol_type = other DNA
cttgaaaaattaaatacgtaatgtattcacatggttgaaatatttatggtgaaatcttacatccacccatttttccatccatctagatcttaccgccatctccccattccccatacccct

SEQ ID NO: 35337 - DNA, 120 bp, synthetic construct; identical to SEQ ID NO: 10290
  source 1..120: mol_type = other DNA

SEQ ID NO: 35338 - DNA, 120 bp, synthetic construct
  source 1..120: mol_type = other DNA
tgagacagaaagagtggcataactgattagcgtgccttacacggacgctagaaaggaggtggtgatacatgtgttgcgctctttatgtctctgagctagatgatttggaggtccctttga

SEQ ID NO: 35339 - DNA, 120 bp, synthetic construct
  source 1..120: mol_type = other DNA
gagaatagtatgcagccaccacacagcctgtacagttcatagaagcataacattttcaagtgggatgagaccttagagactatccacgctaaattcctattctataggcaaataaattat

SEQ ID NO: 35340 - DNA, 120 bp, synthetic construct
  source 1..120: mol_type = other DNA
ctcctgcctcagcctcccaagtagctgggattacaggtgcccgccactgtgcccggctaatttttgtatttttagtagaggcagggcttcaccatattggccaggctggtctcgaactcc

SEQ ID NO: 35341 - DNA, 120 bp, synthetic construct; identical to SEQ ID NO: 10291
  source 1..120: mol_type = other DNA

SEQ ID NO: 35342 - DNA, 120 bp, synthetic construct
  source 1..120: mol_type = other DNA
aacatggtaaaactctgtctctactaaaaatacaaaaatattagcctggcatggtggcgcacatctgtaatcccagctactcaggaggctgaggcaggagaattgcttgaacctgggagg

SEQ ID NO: 35343 - DNA, 120 bp, synthetic construct
  source 1..120: mol_type = other DNA
tggctggtggctacactattggtattggacagcacagacatcgaacacttccatcactgccgagagctctattggacagcactactctagggaataatttccacgcatgcaacttgattt

SEQ ID NO: 35344 - DNA, 120 bp, synthetic construct
  source 1..120: mol_type = other DNA
agcattttttaaagcagaagtgtcctctttcagcactcagagtagctttttaaggcctccatgctaagagatttccagtagtgctgttcagaacgcttcactaatcgcatcattctcttc

SEQ ID NO: 35345 - DNA, 120 bp, synthetic construct; identical to SEQ ID NO: 10292
  source 1..120: mol_type = other DNA

SEQ ID NO: 35346 - DNA, 120 bp, synthetic construct
  source 1..120: mol_type = other DNA
ataatttttagtctaagtatgtctcatgtactatttagaacatacagtaaaatatatatttgttgttatctgaaattcttatttaactgtttgtccgtgtttatttaactgaatctgaca

SEQ ID NO: 35347 - DNA, 120 bp, synthetic construct
  source 1..120: mol_type = other DNA
gtgtcttttacctggtagacattcttatgccaaagtttgccctggctaaactagttccttcttgtcattcagacatcaccttaaatgttactgttgagcaagatcttcccacaccaccca

SEQ ID NO: 35348 - DNA, 120 bp, synthetic construct
  source 1..120: mol_type = other DNA
cttctttatgaaggcagtaaacctgtctgtaacgttctttattatacctagaagtttgcctgacacatactttaaatatggactcaatacatttttgcagcctaaaggcaatatagggaa

SEQ ID NO: 35349 - DNA, 120 bp, synthetic construct; identical to SEQ ID NO: 10293
  source 1..120: mol_type = other DNA

SEQ ID NO: 35350 - DNA, 120 bp, synthetic construct
  source 1..120: mol_type = other DNA
gcctggcatgtgataactttgataagtatattcagttaacacttttgaaatataagacctgcacttttgatataggctaggaacacatgtacagtgtggttgaagtgtaagaacaaggac

SEQ ID NO: 35351 - DNA, 120 bp, synthetic construct
  source 1..120: mol_type = other DNA
ttttctctatccattcatccattgatggacacttaggttgattccatatcttagctattgtaaataatgctgcagtgaacatggaagtgcagatatccctgcaccagattggtttcagtt

SEQ ID NO: 35352 - DNA, 120 bp, synthetic construct
  source 1..120: mol_type = other DNA
aatgcacaggagatccccccctctctgcattcctgtcaacacttatctttcatttttttaaaaataaaagccactctaataggtgtgtggtgatatctcattgtggtttaatttgcattg

SEQ ID NO: 35353 - DNA, 120 bp, synthetic construct; identical to SEQ ID NO: 10294
  source 1..120: mol_type = other DNA

SEQ ID NO: 35354 - DNA, 120 bp, synthetic construct
  source 1..120: mol_type = other DNA
ccacccaaatctcatattggattgtagctcccataattcccacatgttgtgggagggactggtgggagataattgaatcacaggggcagtttcccccatactgttcttatggtactgaat

SEQ ID NO: 35355 - DNA, 120 bp, synthetic construct
  source 1..120: mol_type = other DNA
ccctagccattggaactgtgagtccattaaacctctttttctttataaatttcccagtctcgggtatgtctttatcagcagcgtgaaaaaggactaagacagagctttttccctatgttt

SEQ ID NO: 35356 - DNA, 120 bp, synthetic construct
  source 1..120: mol_type = other DNA
ttctcaacaccatttgctgaagagactgtcctttccccattatgtgttcttggcacctctgtcaaaaagcaattgaccataaatgcatgggttcatttctgggctttccttactgttttg

SEQ ID NO: 35357 - DNA, 120 bp, synthetic construct; identical to SEQ ID NO: 10295
  source 1..120: mol_type = other DNA

SEQ ID NO: 35358 - DNA, 120 bp, synthetic construct
  source 1..120: mol_type = other DNA
accttcttgatacaatttatacctaagtaattttttgttgctgttgcaaatgtgattattttcttaattttcttttcagatagttcattattagtatattagaaatgttactgatttatg

SEQ ID NO: 35359 - DNA, 120 bp, synthetic construct
  source 1..120: mol_type = other DNA
acttatatgtggactctaaaaaagttgaactcatagaagtagagagtagaatgatgattaccagaggatgggggatgggaaggaaggcaatggggagttgttgatcaaagggtacaaagt

SEQ ID NO: 35360 - DNA, 120 bp, synthetic construct
  source 1..120: mol_type = other DNA
agataggtaagtaaggtgatggatatgttcattagcttgatttaatcattgcacattgtatacatatatcaaaacatcatgctgtactccataaatgtatacaattataatttatcaatc

SEQ ID NO: 35361 - DNA, 120 bp, synthetic construct
  source 1..120: mol_type = other DNA
ccttagaattttgttgtattaaatgagataatgcatgaacattttcctctagctcaccaaagctcctggcacagtgcttgaaaaatatttcttgaccaatacatgatatggtacttagta

SEQ ID NO: 35362 - DNA, 120 bp, synthetic construct; identical to SEQ ID NO: 10296
  source 1..120: mol_type = other DNA

SEQ ID NO: 35363 - DNA, 120 bp, synthetic construct
  source 1..120: mol_type = other DNA
atctcatttcaactctgtgacccactagtcctggaatgaggcctaattatgcagtgtttgtgtgtctagatcagtctgatctctgttgactttcatttataccctcctccaataaataaa

SEQ ID NO: 35364 - DNA, 120 bp, synthetic construct
  source 1..120: mol_type = other DNA
gtttatccatttctttctttctttgttgtgtcatcaggctgtcatggtgtccctgctgacagattactcacctcagctccagaagcctaaattttgatgttgtgttacttgtcaagaaag

SEQ ID NO: 35365 - DNA, 120 bp, synthetic construct; identical to SEQ ID NO: 10297
  source 1..120: mol_type = other DNA

SEQ ID NO: 35366 - DNA, 120 bp, synthetic construct; identical to SEQ ID NO: 10298
  source 1..120: mol_type = other DNA

SEQ ID NO: 35367 - DNA, 120 bp, synthetic construct
  source 1..120: mol_type = other DNA
gttttcactttaccctaacttatgaatagtggtatacaaatatatttccatctttttgtccagccagcaaatgagagtctgtacccgaccatttcacaaaagaccaatgttggtcagaga

SEQ ID NO: 35368 - DNA, 120 bp, synthetic construct
  source 1..120: mol_type = other DNA
ccaaatggcaattgttccagaagtcaagattgctgctgcacagtgatctttcacgtcaccttccaggaacctgatagcatacaaagaagatataattcagattacatatccaaaaaacaa

SEQ ID NO: 35369 - DNA, 120 bp, synthetic construct
  source 1..120: mol_type = other DNA
tttggacagaatcacatgtccagttcctgccaatctctctgatgcatcttgtagcaattgaaggctggcgcacagtggccttccttccactctccatcactctggccaaactcagtccca

SEQ ID NO: 35370 - DNA, 120 bp, synthetic construct; identical to SEQ ID NO: 10299
  source 1..120: mol_type = other DNA

SEQ ID NO: 35371 - DNA, 120 bp, synthetic construct
  source 1..120: mol_type = other DNA
ctgtgcaaccctgggcaaattatttaactttatcagtacaatagggatgattttaagagcacatacttgacaggactgtggtgaggttaaatgaaacagttcctataaaaggcttagcgc

SEQ ID NO: 35372 - DNA, 120 bp, synthetic construct
  source 1..120: mol_type = other DNA
ctactaaaaatacaaaattagccaggcgtggtggcacatgcctgtaatcccagctactcgggaggctgaagcacaagaattgcttgaacatgggaggtggaggttgcagtgagccaagat

SEQ ID NO: 35373 - DNA, 120 bp, synthetic construct
  source 1..120: mol_type = other DNA
aaggcaggcagatcacctgaggtaaggagttcacgactagcctggccaacatggtgaaaccccgtctctactaaaaatacaaaaattagctgggcatggtggcacgtgcctgtaatccca

SEQ ID NO: 35374 - DNA, 120 bp, synthetic construct; identical to SEQ ID NO: 10300
  source 1..120: mol_type = other DNA

SEQ ID NO: 35375 - DNA, 120 bp, synthetic construct
  source 1..120: mol_type = other DNA
aattaaggtgcccacctctccactcttgtgctctcaaacagtgcaagcttcatgtattgtattttgtgcactgaacaacagtcactagttttcccttctaatttccataaaattagaaat

SEQ ID NO: 35376 - DNA, 120 bp, synthetic construct
  source 1..120: mol_type = other DNA
tgtctcagcctccccaatagctgggattactggtgcacaccatcgcacccagctcatttttgtatttttagtggagacagggtttcaccatgttggccaggctggtcgcgaactcctgac

SEQ ID NO: 35377 - DNA, 120 bp, synthetic construct; identical to SEQ ID NO: 10301
  source 1..120: mol_type = other DNA

SEQ ID NO: 35378 - DNA, 120 bp, synthetic construct
  source 1..120: mol_type = other DNA
tattttgttgtagcagcctaatagaactaagatatgcttcctacaggattggtaccaaacaggctttcaaggattcctgaacagatgagtttgaaaagtgacaaaggaaatgcttgacca

SEQ ID NO: 35379 - DNA, 120 bp, synthetic construct
  source 1..120: mol_type = other DNA
agcagttatctttatctttaatctctagggccaacgactatcgttctctcttcaaatccaaggaagcaagttttatatgaaagcacatactgcagatgatagttctgaggttcttaggtt

SEQ ID NO: 35380 - DNA, 120 bp, synthetic construct; identical to SEQ ID NO: 10302
  source 1..120: mol_type = other DNA

SEQ ID NO: 35381 - DNA, 120 bp, synthetic construct
  source 1..120: mol_type = other DNA
ctcagcctcctgagtagctgggattacaggcacgcactaccatgcccagctaatttttgtatgttagtagagacggggtttcaccgtgttggtcaggctggtctcgaactcctgacctca

SEQ ID NO: 35382 - DNA, 120 bp, synthetic construct
  source 1..120: mol_type = other DNA
ggcacgatctcggctcactgcaacctctgcctcccaggttcaagtgaccccagcctcccgagtagctgggattataggtgcctgccaccgtgcccagctaatttttgtatttttagtaga

SEQ ID NO: 35383 - DNA, 120 bp, synthetic construct
  source 1..120: mol_type = other DNA
ctatagataaatataaactgcctgcatgatagaggctcagtcaaactcagtcagatttcaaagtaaagatgtcttcctaaagtaccttaaattttccttaatttaggtttagggaaagaa

SEQ ID NO: 35384 - DNA, 120 bp, synthetic construct
  source 1..120: mol_type = other DNA
ctcactgcagcctccacctcccaggttcaagccatcctcccacctcagcctcccgagtagctggaagtacagatgcatgccagcatgtttggctaatatatatatatattttttttggta

SEQ ID NO: 35385 - DNA, 120 bp, synthetic construct; identical to SEQ ID NO: 10303
  source 1..120: mol_type = other DNA

SEQ ID NO: 35386 - DNA, 120 bp, synthetic construct
  source 1..120: mol_type = other DNA
catgttttccattcttctaagtgacacaaaaatatctagtttttgtgtttgcacagtgcctttcagaatgtcccacccatagagtagcagttatgcacacttgcctgccagcctgccctg

SEQ ID NO: 35387 - DNA, 120 bp, synthetic construct
  source 1..120: mol_type = other DNA
aacgactcactctctttggcacagggatgactcaggacaataaagagaagcccctaatttcggagaaaaataaatatcccaaatagactgtcaagagtatgtcaggaaaaataaagatct

SEQ ID NO: 35388 - DNA, 120 bp, synthetic construct
  source 1..120: mol_type = other DNA
tggacttctggcttcttgttcttcttctttttttttttagagacaaggccttcctgtgttacccaggctgttgttgaacacctggcctcaagggatcctcccacctcagcctcccaaagt

SEQ ID NO: 35389 - DNA, 120 bp, synthetic construct; identical to SEQ ID NO: 10304
  source 1..120: mol_type = other DNA

SEQ ID NO: 35390 - DNA, 120 bp, synthetic construct
  source 1..120: mol_type = other DNA
gggtgaccaaaaaaagataccatcacctatggctgtttctgtgagaaaatgtgttaaagttctctcctggctttaaaattacaggctctaataataatattactgtatgtgtgtatatat

SEQ ID NO: 35391 - DNA, 120 bp, synthetic construct
  source 1..120: mol_type = other DNA
caggttcaagtgattctcctgcctcagcctcccaagtagctgggattacaggtatgcgccaccatgcctggctaatttttgtatttttagtagagacagggtttcaccacgttgaccagg

SEQ ID NO: 35392 - DNA, 120 bp, synthetic construct; identical to SEQ ID NO: 10305
  source 1..120: mol_type = other DNA

SEQ ID NO: 35393 - DNA, 120 bp, synthetic construct
  source 1..120: mol_type = other DNA
gaatgagagagtgagaccctatctctaaaagggaaaaaaactgaggatttaaaaatgttaaatgctatacagttaagaagaggctgacaaactatggcccaccaggtaaatctaacccaa

SEQ ID NO: 35394 - DNA, 120 bp, synthetic construct
  source 1..120: mol_type = other DNA
cccgagtagctggaactacaggcgcccgccaccacgcccggctaattttttgtacttttagtagagcggggtttcactgtgttagccaggatggtctcgatctcctgacctcatgatccg

SEQ ID NO: 35395 - DNA, 120 bp, synthetic construct
  source 1..120: mol_type = other DNA
tcagctcactgcagccttgaattcctggcctcaagcaatcctccctccttggcctcccaaagcactggaattacagctgtgagccaccatgcctggccccagtgcttatttttccatggc

SEQ ID NO: 35396 - DNA, 120 bp, synthetic construct; identical to SEQ ID NO: 10306
  source 1..120: mol_type = other DNA

SEQ ID NO: 35397 - DNA, 120 bp, synthetic construct
  source 1..120: mol_type = other DNA
gtgcagtggcaggatgtcgtctcactgcaacctctgcctcctggattcaagcaattctccttcctcagcctcccaactaactgggactacaggtgcgcaccaccatgcccagctaatttt

SEQ ID NO: 35398 - DNA, 120 bp, synthetic construct
  source 1..120: mol_type = other DNA
cctggcattaaatattatttctgaagattggctttatgggggacttttacttactatcttacacatgtctgtgtgaaatgttttaatatcaagtgggtattgatgttgtaatataaaagg

SEQ ID NO: 35399 - DNA, 120 bp, synthetic construct
  source 1..120: mol_type = other DNA
agcctggccaacttggtgaaaccccgtctctactaaagatacaaaaaaattagccaggcatggcggcaggcacacctgtaatcccagctacttgggaggctgaggcacagaattgcttga

SEQ ID NO: 35400 - DNA, 120 bp, synthetic construct; identical to SEQ ID NO: 10307
  source 1..120: mol_type = other DNA

SEQ ID NO: 35401 - DNA, 120 bp, synthetic construct
  source 1..120: mol_type = other DNA
attataagcacctgccaccatgcccagctaatttttgtattttttagtagagacagggtttcatcatgttggtcaggctgggtcttgaactcctgacctcaggtgatccacctgcctcag

SEQ ID NO: 35402 - DNA, 120 bp, synthetic construct
  source 1..120: mol_type = other DNA
acactctcggctcactacaacctctgccccctgggttcaagcaattctcctgccttagcttccctagtagttgggactacaggcgcacacaccacacccatgtaaattttgtatttttag

SEQ ID NO: 35403 - DNA, 120 bp, synthetic construct
  source 1..120: mol_type = other DNA
agtgttgagattacaggcgtgagccactgcacctggactattagttatttttgggacagggtctcactctatcgcccaggctggagtacagtggtgccatcatggctcactgcagcctgg

SEQ ID NO: 35404 - DNA, 120 bp, synthetic construct; identical to SEQ ID NO: 10308
  source 1..120: mol_type = other DNA

SEQ ID NO: 35405 - DNA, 120 bp, synthetic construct
  source 1..120: mol_type = other DNA
attgtgagtcaaggctttttatttatttatttatttattttgagacagagtcttgctctgtcacccagggtgcagtggcacgatctcggctcactgcaacctccacctcctgggttcaag

SEQ ID NO: 35406 - DNA, 120 bp, synthetic construct
  source 1..120: mol_type = other DNA
aactactgacctcacatgatacacccacatcggcctcccaaagtgctgggattataggtgtgagccaccatgccaggccaagactttttttttttttttttttttgagacaggttcccac

SEQ ID NO: 35407 - DNA, 120 bp, synthetic construct
  source 1..120: mol_type = other DNA
ccatgcctggctaatttttgtctttttttatagtgatggggttttgccacattgcccaaggtaaaactttttttttttctttttgttttttgagacggagtctcgctctgtcgcccaggc

SEQ ID NO: 35408 - DNA, 120 bp, synthetic construct
  source 1..120: mol_type = other DNA
tttttgtatttttagtagaggtgggctttcaccatattggtcaggctggtctcaaactccttacctcaggtgttccacccactttggcctcccaaagcgtttttttttttttattaatac

SEQ ID NO: 35409 - DNA, 120 bp, synthetic construct; identical to SEQ ID NO: 10309
  source 1..120: mol_type = other DNA

SEQ ID NO: 35410 - DNA, 120 bp, synthetic construct
  source 1..120: mol_type = other DNA
ttgggaggctgaggcgggtggatcacctgaggtcaggagttcgagacaagcctggccaacatggcaaaaccccatctctactaaaaatacaaaaattagccgggtgtggtggcgggcacc

SEQ ID NO: 35411 - DNA, 120 bp, synthetic construct
  source 1..120: mol_type = other DNA
atcccaaaaaaaaaaaaaagtatttctgggattattggatcatttaatcatccttcctaaggctacttaaacatggcaatgtggctgggagtcaagtctgataacaggcataatagttct

SEQ ID NO: 35412 - DNA, 120 bp, synthetic construct
  source 1..120: mol_type = other DNA
tgctatccaattttgaaaaaagatgccacggggaaggtttgttcattactgcttatgacttactgctctcacttaatgagaccaacagtaacacacaaagtggtcccagccagtcattac

SEQ ID NO: 35413 - DNA, 120 bp, synthetic construct
  source 1..120: mol_type = other DNA
cacattcttccaacaaaccagttttcagaaaatattttcttattcatcatagcatgtcttaggaggtgaccagggaaaaaactaagagctccttagttttctttagtcatagatttaggt

SEQ ID NO: 35414 - DNA, 120 bp, synthetic construct; identical to SEQ ID NO: 10310
  source 1..120: mol_type = other DNA

SEQ ID NO: 35415 - DNA, 120 bp, synthetic construct
  source 1..120: mol_type = other DNA
attacatgtatttatactacaactagaccaaaataatggatagaaggaaggattgaagtggggtaggaagagaggggtgaatataaagaagaaaaaagataaagtttgttggaatcactt

SEQ ID NO: 35416 - DNA, 120 bp, synthetic construct
  source 1..120: mol_type = other DNA
cctgcctcagcctcccgagtagctgggactacaggcgcccgccactacgcccggctaattttttgtatttttagtagagacggggtttcaccgttttagccgggatggtcttgatctcct

SEQ ID NO: 35417 - DNA, 120 bp, synthetic construct
  source 1..120: mol_type = other DNA
gtgcagtggtgccatcttggctcactgcaatctgcacctcccaggttccagcaattcttccacctcagccttccaagtagctgggattacaggcacccaccaccatgcctggctaatttc

SEQ ID NO: 35418 - DNA, 120 bp, synthetic construct; identical to SEQ ID NO: 10311
  source 1..120: mol_type = other DNA

SEQ ID NO: 35419 - DNA, 120 bp, synthetic construct
  source 1..120: mol_type = other DNA
ttttttgtagagacagggtttcactatattgcccaggctggtcttgaactcctgggctcaagcaatcctcccacctcagcctcccaaagtgctgggattacaggtgtgagagactgcacc

SEQ ID NO: 35420 - DNA, 120 bp, synthetic construct
  source 1..120: mol_type = other DNA
aatggcacagcctcggctcactgcaacctctgcctcccaggttcaagcaattctcctgcctcagcctcctgagtagcagggattacaggcaggcgccaccacacccagctaatttttgta

SEQ ID NO: 35421 - DNA, 120 bp, synthetic construct
  source 1..120: mol_type = other DNA
ggtggtatttataactctcatgaatccagcagtgcaatatttacattatcactcattgctccatttcctgaaatctttctgcctgaagaacatatgcatttccttgactctagactttgc

SEQ ID NO: 35422 - DNA, 120 bp, synthetic construct; identical to SEQ ID NO: 10312
  source 1..120: mol_type = other DNA

SEQ ID NO: 35423 - DNA, 120 bp, synthetic construct
  source 1..120: mol_type = other DNA
gcatatgcaaagttttcctcctatcagggacaccagatgggtgtcctacagagtttcatacatggtctgtatttagtaattgttctttcctcaaatcccaaatcactttgaccttatgtg

SEQ ID NO: 35424 - DNA, 120 bp, synthetic construct
  source 1..120: mol_type = other DNA
cagagaatgggacataagtagagacccagatacctactgaatgtttggaagatattaaatgaaatgtctcagtgaatatggacagcaagacttccttacacactggcccctcagtgttta

SEQ ID NO: 35425 - DNA, 120 bp, synthetic construct
  source 1..120: mol_type = other DNA
tccgctcactgcaagctccacctcccgggttcatgccattctcctgcctcagcctcccgagtagctgggactacaggcacccaccaccacgcctggcgaattttttgtatttttagtaga

SEQ ID NO: 35426 - DNA, 120 bp, synthetic construct; identical to SEQ ID NO: 10313
  source 1..120: mol_type = other DNA

SEQ ID NO: 35427 - DNA, 120 bp, synthetic construct
  source 1..120: mol_type = other DNA
ccctaaacatggagctaaggcaggcaccaagaatagatatgagacatggtacctgtcttcaaaaacgagagaggataaataacacaaagcagcaaatactaaattaaaaatcaaggcagg

SEQ ID NO: 35428 - DNA, 120 bp, synthetic construct
  source 1..120: mol_type = other DNA
aaaaaattaaaaaaaaaaaaatttttttttttttaattagtcaaggctggtggcatgcatctgtagtcctgctactcaggaggctgaggtgggaggactgcttgagcctgagaggttgag

SEQ ID NO: 35429 - DNA, 120 bp, synthetic construct; identical to SEQ ID NO: 10314
  source 1..120: mol_type = other DNA

SEQ ID NO: 35430 - DNA, 120 bp, synthetic construct
  source 1..120: mol_type = other DNA
aaagaaaaagaaaaattagccaggcatggtggtgtacatctgtggtctcggcactttgggaggctgaagtgggaggattgcttgtgccaaggagttcaagaccagcctgagtaacatacc

SEQ ID NO: 35431 - DNA, 120 bp, synthetic construct
  source 1..120: mol_type = other DNA
agtgagctacctcaaaatgcagtgagtcatgcccatgcactccagcctgggtactgagtgagactctgtttcagaaagaaatcccttcccaatctcaaattcctttgtgacctcttatat

SEQ ID NO: 35432 - DNA, 120 bp, synthetic construct
  source 1..120: mol_type = other DNA
taaaagctgaaggaaagcaaacatgggcccctgtaaaggttttcttttgagggatgagggtagagttgaagaaagagtatttacaatgtagtcgaataaaaaatgacctgcgtttgagcc

SEQ ID NO: 35433 - DNA, 120 bp, synthetic construct
  source 1..120: mol_type = other DNA
gcaaggagatgaactactagattattttaacagttcaggagacagataatgaaggtgtggactatggaaatagcacaaagaatagaaaagacaacttctggaagagcaccatcctcaaat

SEQ ID NO: 35434 - DNA, 120 bp, synthetic construct; identical to SEQ ID NO: 10315
  source 1..120: mol_type = other DNA

SEQ ID NO: 35435 - DNA, 120 bp, synthetic construct
  source 1..120: mol_type = other DNA
aacagttaatagacaaggcttctgagaaaagaaaaaacatcaatctattttcctaatacaaattaaacttgcaagtaagtgcctgtggctgggtatggttctccctatagtcagaaaaga

SEQ ID NO: 35436 - DNA, 120 bp, synthetic construct
  source 1..120: mol_type = other DNA
tgcagtggcgcgatctcggctcactgcaacctctgcctcctaggttccagcgattctcctgccttagcctcgcaccaccaggcctggctaatttttgtgtctttagtagagacgaggtat

SEQ ID NO: 35437 - DNA, 120 bp, synthetic construct; identical to SEQ ID NO: 10316
  source 1..120: mol_type = other DNA

SEQ ID NO: 35438 - DNA, 120 bp, synthetic construct
  source 1..120: mol_type = other DNA
agcgattctcctacctcagcctcctgagtagctggaattacaggtgtgcaccaccacgcctggctaatttttgtatttttagtagagctggggttttgccttgttggccaggctggtctc

SEQ ID NO: 35439 - DNA, 120 bp, synthetic construct
  source 1..120: mol_type = other DNA
agttaacttggctgaacttgaactccaaatgccgaaactgaaattcgttctttcagtcttacctgagctgctttcagtcttaccagactccaagcagtctgacctatgaatatgcagttt

SEQ ID NO: 35440 - DNA, 120 bp, synthetic construct
  source 1..120: mol_type = other DNA
gaactctgtcctttggttctctaagccagtgggacagaagatcttctattaggcttccagtcacccagtgagcagagtgggccttgccccctagcttaaagccataataggaatgttgcc

SEQ ID NO: 35441 - DNA, 120 bp, synthetic construct
  source 1..120: mol_type = other DNA
aggtagacagttggtctgacagaaactactcaaccactaaccaaaagcagaaagaagtgtacatctttgaaaacagaattccatttagttttaaatagtctactcagactgatctttttt

SEQ ID NO: 35442 - DNA, 120 bp, synthetic construct; identical to SEQ ID NO: 10317
  source 1..120: mol_type = other DNA

SEQ ID NO: 35443 - DNA, 120 bp, synthetic construct
  source 1..120: mol_type = other DNA
catgcctataatcccagctactcgggaggctgaggcaggagaatcacttgaatccaggaggcagaggttgcagtgagccgagatcataccactgtactcccacctgggtgataggaggag

SEQ ID NO: 35444 - DNA, 120 bp, synthetic construct
  source 1..120: mol_type = other DNA
tactacagatgagggaactgaggacctagagggaaagcttaccaaataacaatgttgttcataatagtagtaccaagcagagcttcttgcatcccttggacctcagcaaaagttagtata

SEQ ID NO: 35445 - DNA, 120 bp, synthetic construct
  source 1..120: mol_type = other DNA
agcagtctctaggtagcccttctccgcattgttgaactgcataatataaactaacctaatatcaggaaaaaaaaatctaacccagaaaacgtgtatactaaactttctacaatgaacata

SEQ ID NO: 35446 - DNA, 120 bp, synthetic construct; identical to SEQ ID NO: 10318
  source 1..120: mol_type = other DNA

SEQ ID NO: 35447 - DNA, 120 bp, synthetic construct
  source 1..120: mol_type = other DNA
ctctcagaaatctgtctgcttcttcccatctccactaacatacccctaatttaagcaaacaattatcatctcttgcctagattactgcaacagatcatgaataaataagccaaagttccc

SEQ ID NO: 35448 - DNA, 120 bp, synthetic construct
  source 1..120: mol_type = other DNA
atttaaggtgtccccaatacgtctaataaataggcctgcaggtctagagctcaagaaagagctcagaggtagaaatgtatgtttgcaagtagtcagcaccaagatggtcagtgaagcaat

SEQ ID NO: 35449 - DNA, 120 bp, synthetic construct
  source 1..120: mol_type = other DNA
gatggagtgtggtggcgtgatcacagctcactgcacccttgaactcctgagctcaagtgatccttccacctcagactccctagtagctgggaccacaaggcatgctctgccacacccagc

SEQ ID NO: 35450 - DNA, 120 bp, synthetic construct; identical to SEQ ID NO: 10319
  source 1..120: mol_type = other DNA

SEQ ID NO: 35451 - DNA, 120 bp, synthetic construct
  source 1..120: mol_type = other DNA
aaaatcattcttcatctaatagttaaaaatcaatcaatgcttttcttaccctccatcttctgcaaacgtcatgacttctacttgttgatcagaaagggtcccactgctactaactagcct

SEQ ID NO: 35452 - DNA, 120 bp, synthetic construct
  source 1..120: mol_type = other DNA
atgtgaggagtaaccttttaatattaaaggactaggttcactttttttttttttttttttttgagacagagtcttgctctgtcgcctaggctggagtgcagtggcacaatcttggctcac

SEQ ID NO: 35453 - DNA, 120 bp, synthetic construct
  source 1..120: mol_type = other DNA
caccatgttggtcaggctggtctcgaactcctgacctcgtgatccacctgcctcggcctcccaaagtgctgggattacaggtgtgagccaccatacccggcctttttttttttttttttt

SEQ ID NO: 35454 - DNA, 120 bp, synthetic construct; identical to SEQ ID NO: 10320
  source 1..120: mol_type = other DNA

SEQ ID NO: 35455 - DNA, 120 bp, synthetic construct
  source 1..120: mol_type = other DNA
acaaatctctctctctttagatctttcagattctttcaagactcaagcctaggttattacctgcacttaaaaccagctgacagagacaaagatgaaggaaaaacaaatcactccttggga

SEQ ID NO: 35456 - DNA, 120 bp, synthetic construct
  source 1..120: mol_type = other DNA
ctgtaatactggaacctaaataaaacaaagcagccaaaaattatgcttggttgtttcatttttgtttaatccagattttccaaaatttatcacattcttttgtattctcactgtacaagg

SEQ ID NO: 35457 - DNA, 120 bp, synthetic construct; identical to SEQ ID NO: 10321
  source 1..120: mol_type = other DNA

SEQ ID NO: 35458 - DNA, 120 bp, synthetic construct
  source 1..120: mol_type = other DNA
cttgagtgcaatggcacaatctcagctcattgcaacttccacctcctgggttcaagcgattctcctgcctcagcctcctgagtagctgggattacaggcattcgccaccacacctggcta

SEQ ID NO: 35459 - DNA, 120 bp, synthetic construct
  source 1..120: mol_type = other DNA
ctcgcctggccagaaaaatgtttatatgtatggtgagaaaagacagatctaaaaattttaagcacactaagattgcaagcttgtaagatgtatatgatggtgggaaaagaccagaaggaa

SEQ ID NO: 35460 - DNA, 120 bp, synthetic construct
  source 1..120: mol_type = other DNA
gcaaggagtacaaatatcagcaagtgtcaaagtcagaatagacataaaattctaagctcctccaacaggtctagtgtaaaaacccgtctctaggctgggtgtagagctcatgcctgtaac

SEQ ID NO: 35461 - DNA, 120 bp, synthetic construct
  source 1..120: mol_type = other DNA
gtgggcgcctgtagtcccagctactcgggaggctgaggcaggagaattgcttgaacccgggaagcggagattgcagtaagccaagatcgccccactgcactccagcctgggcaacagagt

SEQ ID NO: 35462 - DNA, 120 bp, synthetic construct; identical to SEQ ID NO: 10322
  source 1..120: mol_type = other DNA

SEQ ID NO: 35463 - DNA, 120 bp, synthetic construct
  source 1..120: mol_type = other DNA
ccagctactcaggaggctgaggcacaagaatcccttgaacctgggcggcagaggttgacagtgagccgagatcatgccactgcactccagcctgggtgacagagcaggactccatctcaa

SEQ ID NO: 35464 - DNA, 120 bp, synthetic construct
  source 1..120: mol_type = other DNA
gcagtgagccgtgatcatgccactgcactccagcctgcatgacagagtgagaccctgtctcaaacaaacaaacaaaaatttgtgataaagcgaacaaagcaggatgttaatggtagagtc

SEQ ID NO: 35465 - DNA, 120 bp, synthetic construct
  source 1..120: mol_type = other DNA
attttggtaagctgcccatctacattatcaggcaaatggctgcaaagatctctttcagctcgagattcccacttacctctgcgaagtgccaggtataaagtttttcccactgccaagcat

SEQ ID NO: 35466 - DNA, 120 bp, synthetic construct; identical to SEQ ID NO: 10323
  source 1..120: mol_type = other DNA

SEQ ID NO: 35467 - DNA, 120 bp, synthetic construct
  source 1..120: mol_type = other DNA
tttttatttattttattaattttaatttttgggtgtttttgggactgagtctcactttatcacccaggctggagtgcagtggtgcaatctcggcttactgcaaccttcgcctcccgggtt

SEQ ID NO: 35468 - DNA, 120 bp, synthetic construct
  source 1..120: mol_type = other DNA
tgaactcctgacctcaagtgatccacccacctcggcctcccaaagtgctggggttacaggcatgagccaccgtgcccggcccatgaaagattttaaaatgtatagtccagatggaataaa

SEQ ID NO: 35469 - DNA, 120 bp, synthetic construct; identical to SEQ ID NO: 10324
  source 1..120: mol_type = other DNA

SEQ ID NO: 35470 - DNA, 120 bp, synthetic construct
  source 1..120: mol_type = other DNA
gatcgagaccatcctggctaacaaggtgaaaccccgtctctactaaaaatacaaaaaattagctgggcgcggtggcgggcgcctgtagtcccagctactcgggaggctgaggcaggagaa

SEQ ID NO: 35471 - DNA, 120 bp, synthetic construct
  source 1..120: mol_type = other DNA
ataatcacaaaggcatttttaagaaaacaagaaagattaaaatcaagtaagcatgcagctcaggaagtcagtacaagaacaaaataagaacaataaaaaaaagtaggaaggaatgattta

SEQ ID NO: 35472 - DNA, 120 bp, synthetic construct
  source 1..120: mol_type = other DNA
cacgtaatggccaactctcgagtctaatgtagaaaaacaataatttagaaatgggagaatggggaagagaggcttaattacatatacacagattttaataatctataagaagtaactttt

SEQ ID NO: 35473 - DNA, 120 bp, synthetic construct
  source 1..120: mol_type = other DNA
gatcccctgaggtcaggagttcaagaccagcctggccaacatggcaaaaccccatttctactaaaaatacaaaaattagcaaggcgtggtggcgcacacttgtaatcccagctactatgg

SEQ ID NO: 35474 - DNA, 120 bp, synthetic construct; identical to SEQ ID NO: 10325
  source 1..120: mol_type = other DNA

SEQ ID NO: 35475 - DNA, 120 bp, synthetic construct
  source 1..120: mol_type = other DNA
ccccatcttcaaccctacacctaggacatttagtaatgcaacattttcagttaccacactgcacagaaaagattaaccactagaactgctccccattttcttataaatcaccataagtga

SEQ ID NO: 35476 - DNA, 120 bp, synthetic construct
  source 1..120: mol_type = other DNA
ggctggagtgcagtggtaagatcttggctcactgcaacgtctgtctcccagttcaagtattctcttccctcagcctccctagcagctgggattataggcgcccaccaccacgcccggcta

SEQ ID NO: 35477 - DNA, 120 bp, synthetic construct
  source 1..120: mol_type = other DNA
caccgtgcccagctccctaacttagatttagacatgaagttcagttacttagcctaagttgttcttgccaataggttggcatagaaactttaagaggagagctcaaaacataaacagagg

SEQ ID NO: 35478 - DNA, 120 bp, synthetic construct; identical to SEQ ID NO: 10326
  source 1..120: mol_type = other DNA

SEQ ID NO: 35479 - DNA, 120 bp, synthetic construct
  source 1..120: mol_type = other DNA
atgtctgcctgcattacccactcatcaaaatgtctacttcgtattgtctttatttcctcttataacagcagcaaagctccaaatgcaaactgtttcactgataacaaagagaataggacc

SEQ ID NO: 35480 - DNA, 120 bp, synthetic construct
  source 1..120: mol_type = other DNA
cgcaagcaagtcatgctgtttacattcactaaggcatttcattccttcagagaaaatttcacagaggaaatggattgtacctgttcgacggaatgtttatgcagctcctggcatgtgttt

SEQ ID NO: 35481 - DNA, 120 bp, synthetic construct
  source 1..120: mol_type = other DNA
ggttttgctgggctgcctgaactgtcgaattgtttagtatcactggcaagacagactgagtctttcaaatgagcaagttggggtgtgcagcaagttcgtccagcaacttctgtagatgct

SEQ ID NO: 35482 - DNA, 120 bp, synthetic construct; identical to SEQ ID NO: 10327
  source 1..120: mol_type = other DNA

SEQ ID NO: 35483 - DNA, 120 bp, synthetic construct
  source 1..120: mol_type = other DNA
aaagggctccactggtttttctgagcaggacttcactttttcaagcttaagaggtccaaagtcttcatcaggtaactgaaagtctgtgatactgagaaaagacagtagttgctttaaact

SEQ ID NO: 35484 - DNA, 120 bp, synthetic construct
  source 1..120: mol_type = other DNA
aaaataagtcacaaaatagtaacaaaacccaacaaaacagacaatctgtttcactgatgacaaagagaataggatctcctagatttaaaagaaacattttaatgaaccttaatttcccca

SEQ ID NO: 35485 - DNA, 120 bp, synthetic construct; identical to SEQ ID NO: 10328
  source 1..120: mol_type = other DNA

SEQ ID NO: 35486 - DNA, 120 bp, synthetic construct
  source 1..120: mol_type = other DNA
aaataaaaattaaaaaaaataaggccaggcatggtgcctcacacttgtagtctcagcactttcagaggctgaggcaggcggatcacttgaggtcaggagttcaagaccagcctggccaac

SEQ ID NO: 35487 - DNA, 120 bp, synthetic construct
  source 1..120: mol_type = other DNA
aacccaggaggcggagcttgcagttagcggagatggcaccactgcactccagcctgggcgacagagtgagactctgtctcaaaaaaaaaaaaaaaaaaaaaaaaaactaaactaaaaaaa

SEQ ID NO: 35488 - DNA, 120 bp, synthetic construct
  source 1..120: mol_type = other DNA
gcctgggcaacagagcgagattctgtctcaaaaaataaataaataaataaaaccaaaccaaacaaaacagtgtatggccaacagtataaataaataaatacataaataaataaaaccaaa

SEQ ID NO: 35489 - DNA, 120 bp, synthetic construct; identical to SEQ ID NO: 10329
  source 1..120: mol_type = other DNA

SEQ ID NO: 35490 - DNA, 120 bp, synthetic construct
  source 1..120: mol_type = other DNA
catcagcctcctgagtagcaatttaccgctcttattgcaaatggtatcccacatcattcaaaatgttgctatatcctcaatgatgaatgcataaacaaactgtggtatatacatacaatg

SEQ ID NO: 35491 - DNA, 120 bp, synthetic construct
  source 1..120: mol_type = other DNA
tgagaggctgaaggcaggtggatcacttgaggtcaggagtttgaggccagcctggacaacatggtgaaaccccgtctctactaaaaatacaaaaattacccaggcatggtggcaggcgcc

SEQ ID NO: 35492 - DNA, 120 bp, synthetic construct
  source 1..120: mol_type = other DNA
tctcaaaaacaaacaaacccattatgctgagcagccagacacaaaaggtcacatattgtatgattccatatatatgaaatacccagaacaggtaaatccatagagatagaatgcagattg

SEQ ID NO: 35493 - DNA, 120 bp, synthetic construct; identical to SEQ ID NO: 10330
  source 1..120: mol_type = other DNA

SEQ ID NO: 35494 - DNA, 120 bp, synthetic construct
  source 1..120: mol_type = other DNA
cccatctctactgaaaatataaaaattagctgggtgtggtggtgggcacctgtaatctcagctactcagggggctgaggtgggagaatcgcttgaacctgggaggcagaggttgcagtga

SEQ ID NO: 35495 - DNA, 120 bp, synthetic construct
  source 1..120: mol_type = other DNA
gatgactttgtatccttgttcgcttaaaagatgatgaaaagtcacaattattatttttggattaattagtcacagcttatagaccaagtccatgtccaatggtacagagcagcctgctac

SEQ ID NO: 35496 - DNA, 120 bp, synthetic construct
  source 1..120: mol_type = other DNA
tagttgagacagacagaacacaaagactaaaatctgtgctatctggcccattctagaaagtatgctgatccctagtttagagccacaatgaattacccagattttgtgcttagttcatca

SEQ ID NO: 35497 - DNA, 120 bp, synthetic construct
  source 1..120: mol_type = other DNA
tcccttggaggccttagagacactgcattagatattttatccaaaaaagttgcttaggccttttcattacatgatgacttctaaaagagatagtcagtggagtcttagtcttgttttttt

SEQ ID NO: 35498 - DNA, 120 bp, synthetic construct; identical to SEQ ID NO: 10331
  source 1..120: mol_type = other DNA

SEQ ID NO: 35499 - DNA, 120 bp, synthetic construct
  source 1..120: mol_type = other DNA
ccaaagaattgtattgaacctgaatatgtaatattacgtaaacaaccaatacattttccttttcagtgttgaattgtttcagctctattagtgaactctggcaccataccgccaggtttg

SEQ ID NO: 35500 - DNA, 120 bp, synthetic construct
  source 1..120: mol_type = other DNA
atgattcaatgagttagtatctgtacaacatttagaaagtgccaggcaagctggacacagtggctcacgtctgtaatcccagcactttgagaggctgtggtgggaggattgtttgaggcc

SEQ ID NO: 35501 - DNA, 120 bp, synthetic construct; identical to SEQ ID NO: 10332
  source 1..120: mol_type = other DNA

SEQ ID NO: 35502 - DNA, 120 bp, synthetic construct
  source 1..120: mol_type = other DNA
catcaaacacatcttgatttacctttcacttgaataaataatttttcgtgctgatatttgtgtgaggtgacttcttccttggacctgttaacaatcgacaggctagaagttggcaaaagt

SEQ ID NO: 35503 - DNA, 120 bp, synthetic construct
  source 1..120: mol_type = other DNA
gagctgactttagttaatgagagaagtttctgagaggttcttgaacttggttgtcctgtgcatgtgccagacatcctaatttcactttggtcagtttcctcattggaaaggtttaaattt

SEQ ID NO: 35504 - DNA, 120 bp, synthetic construct
  source 1..120: mol_type = other DNA
taatattctgcaggaaacagaaggccttcaggcactgtgcaagaatgtttttctgcagaaagaggagaggttgcttccaggctaagactcttaggttgacttagaatctcactttcctga

SEQ ID NO: 35505 - DNA, 120 bp, synthetic construct; identical to SEQ ID NO: 10333
  source 1..120: mol_type = other DNA

SEQ ID NO: 35506 - DNA, 120 bp, synthetic construct
  source 1..120: mol_type = other DNA
ggaactgtagtcgccctggtgaaattaggtcttcttaggaatgtatcaacacctttttctggttgggcagttggtggaattaatacactgtcttcattaatttctgtaactggttctgga

SEQ ID NO: 35507 - DNA, 120 bp, synthetic construct
  source 1..120: mol_type = other DNA
ttatttcagttactggtgatctagcaggatttttgctactgatttcttcctgttcctttagtcttttcccagacaatctgagtgaatcagtgccaaagacacagtctctctcctgtgaaa

SEQ ID NO: 35508 - DNA, 120 bp, synthetic construct
  source 1..120: mol_type = other DNA
atcctcctgggccatctccagggttaaaggactcaggcccaacatcaagtgtgatagatgtcttttctccagtttcttcatcaagatgggttttgatgtgtaacttgtcataaacacata

SEQ ID NO: 35509 - DNA, 120 bp, synthetic construct; identical to SEQ ID NO: 10334
  source 1..120: mol_type = other DNA

SEQ ID NO: 35510 - DNA, 120 bp, synthetic construct
  source 1..120: mol_type = other DNA
aaacagcattgtgctaaaaatgttttttaaacgaacagagtattctttatcacacaatctcttctcttaacttctaaatctcaactagttttctatctcatgtatttctttctttatttt

SEQ ID NO: 35511 - DNA, 120 bp, synthetic construct
  source 1..120: mol_type = other DNA
agaatttttctctgttcatatatacttacatttttaaaaaaaacctttcactgggcacggtggctcacacctgtaatcccagcactttgggaggctgaggcaggcagatctcaaggtcag

SEQ ID NO: 35512 - DNA, 120 bp, synthetic construct
  source 1..120: mol_type = other DNA
cgcctgtagtcccaggtactcgggaggctgaggcaggagaattgcttgaacccaggaggtggaggctgcagtgagctgtgattgagccactgtactccagccttgatgacagagtgagac

SEQ ID NO: 35513 - DNA, 120 bp, synthetic construct; identical to SEQ ID NO: 10335
  source 1..120: mol_type = other DNA

SEQ ID NO: 35514 - DNA, 120 bp, synthetic construct
  source 1..120: mol_type = other DNA
aggtgtggtagtgcacgtgcctgtagtcccagctactcaggaggctgaggcacgagaatcacttgagcctgggagttggaggttgtagtgagccaagattgtgccactgcactccagcct

SEQ ID NO: 35515 - DNA, 120 bp, synthetic construct
  source 1..120: mol_type = other DNA
acctgggaaatgaataataaagcaggcataagtgaatggtctagatttacctgagtgttttagctgcggtgagagatcctgctgagacaaacaatcttgttcttctactgttttcttaat

SEQ ID NO: 35516 - DNA, 120 bp, synthetic construct
  source 1..120: mol_type = other DNA
caccttaatttgagaatacgattcacttacctgaaggcgggctagtgtcttgctgtattcccttttcaagaatgctaatttctcctttaactggaagaagaaaaacaccaacaatactgg

SEQ ID NO: 35517 - DNA, 120 bp, synthetic construct; identical to SEQ ID NO: 10336
  source 1..120: mol_type = other DNA

SEQ ID NO: 35518 - DNA, 120 bp, synthetic construct
  source 1..120: mol_type = other DNA
ggaactgccatcctcagtcactcaacaaatgaatcttctatttatccgttaatggtccaggtatctctagtacctggaataataattgatacccactatgtgtcaattagtgctccagat

SEQ ID NO: 35519 - DNA, 120 bp, synthetic construct
  source 1..120: mol_type = other DNA
tttatccgttaatggtccaggtatctctagtacctggaataataattgatacccactatgtgtcaattagtgctccagatgctattctagatgcaatttacatacagtgagggagacaga

SEQ ID NO: 35520 - DNA, 120 bp, synthetic construct
  source 1..120: mol_type = other DNA
gaggcatttttgactatcatttgagcctaagactgaatgaggaaggagctagttttgggaagatcagagggaacggtaccccaggcagagggaaccacaaatataaaagctctgcagtgg

SEQ ID NO: 35521 - DNA, 120 bp, synthetic construct
  source 1..120: mol_type = other DNA
attgggctgaatcaaattactgttctctgaaagcctagattccctcgtctctctggcttctttgcttcaaaggattctctcagcagcaaagccagcctcggtttttctgctttttagcaa

SEQ ID NO: 35522 - DNA, 120 bp, synthetic construct; identical to SEQ ID NO: 10337
  source 1..120: mol_type = other DNA

SEQ ID NO: 35523 - DNA, 120 bp, synthetic construct
  source 1..120: mol_type = other DNA
aaaaaaaaaaaaaaaaaaggccgggtgcagtggctcacacctgtaatcccagcactttggaaggccaaggcgggcagattacctgaggtcaggagttcaaaaccagcctggccaacatgg

SEQ ID NO: 35524 - DNA, 120 bp, synthetic construct
  source 1..120: mol_type = other DNA
cagtgagccaagatcgagccactgcactccagcctgggagatagagcggagagtctgtctcaaaaacaaacaaaacaaaacctatgtgcaaaacatgctactagacaagttgccaaccgt

SEQ ID NO: 35525 - DNA, 120 bp, synthetic construct
  source 1..120: mol_type = other DNA
atcagcctctgaggcctgagcctctgggactacaggctggcgtcaccacacccggctaatttttgtatttttagtagagacggggtttcactacgttgcctaggctggtctcaaactctg

SEQ ID NO: 35526 - DNA, 120 bp, synthetic construct; identical to SEQ ID NO: 10338
  source 1..120: mol_type = other DNA

SEQ ID NO: 35527 - DNA, 120 bp, synthetic construct
  source 1..120: mol_type = other DNA
agaaaaggaagaaaaaagaaacaaaacgagggcacttccaaactacaacatactgtctagaacttaaaaaagaaagcaaggtagataaacatgtcctgacaggaaagctaaacggaacct

SEQ ID NO: 35528 - DNA, 120 bp, synthetic construct
  source 1..120: mol_type = other DNA
gcagaaccattcagatcataccatttatgaacattcccttctccaaaaaatatacataggattcctttttggtggttagggatacgcccctcctccaccacccacattaacacacgaaag

SEQ ID NO: 35529 - DNA, 120 bp, synthetic construct
  source 1..120: mol_type = other DNA
acacattgtattaatgcgctgctactgtaatgaaatttgttctttaaacgccaccacgtgagcaccacgctatttccacattttcattttctgtgccccctcagccctaagaggaggggg

SEQ ID NO: 35530 - DNA, 120 bp, synthetic construct; identical to SEQ ID NO: 10339
  source 1..120: mol_type = other DNA

SEQ ID NO: 35531 - DNA, 120 bp, synthetic construct; identical to SEQ ID NO: 10340
  source 1..120: mol_type = other DNA

SEQ ID NO: 35532 - DNA, 120 bp, synthetic construct
  source 1..120: mol_type = other DNA
ccaggattccgcgcgccccttcacgcgccctgctcctgaacttcagctcctgcacagtcctccccaccgcaaggctcaaggcgccgccggcgtggaccgcgcacggcctctaggtctcct

SEQ ID NO: 35533 - DNA, 120 bp, synthetic construct
  source 1..120: mol_type = other DNA
gcaggaggacgaggacggcgactacgaggagctggtgctagccttgcgttccgaggaggacggcctggccgaagcacccgagcacggaaccacagccaccttccaccgctgcgccaaggt

SEQ ID NO: 35534 - DNA, 120 bp, synthetic construct
  source 1..120: mol_type = other DNA
tcttcgcttggcacgatcttggggactgcaggcaaggcggcgggggaggacgggtagtggggagcacggtggagagcggggacggccggctctttggggacttgctggggcgtgcggctg

SEQ ID NO: 35535 - DNA, 120 bp, synthetic construct; identical to SEQ ID NO: 10341
  source 1..120: mol_type = other DNA

SEQ ID NO: 35536 - DNA, 120 bp, synthetic construct
  source 1..120: mol_type = other DNA
aagaaaagaaccagctgaaggggcaggggagaaggggcggaggtattctcgaggcccattggcgtcctttaggactcaggcagggaagggcccttggtgctctggagccggaggtggtgc

SEQ ID NO: 35537 - DNA, 120 bp, synthetic construct
  source 1..120: mol_type = other DNA
agcttcttcccggggcgagaccactagctttttctaagtattaccagcccaggacttggctgaggttctgtgtcccccagcttggagtcagatgtggggttgaatcttggcttcctctca

SEQ ID NO: 35538 - DNA, 120 bp, synthetic construct; identical to SEQ ID NO: 10342
  source 1..120: mol_type = other DNA

SEQ ID NO: 35539 - DNA, 120 bp, synthetic construct
  source 1..120: mol_type = other DNA
tgactttctcgagggatgttgtggggttgtggccaggataagaaagggcatttcaagttaccactgctccaaaacaactgttctggaaatagtgagtaccccatcctgagaggtgagtaa

SEQ ID NO: 35540 - DNA, 120 bp, synthetic construct
  source 1..120: mol_type = other DNA
tcgaatttagaatgaaaatattttttggcaagcagaaaataatttttagaccaatccttttcttttagtcatgagaaactgaggcccagagagaggaggtcaccccaggtgcattagaac

SEQ ID NO: 35541 - DNA, 120 bp, synthetic construct; identical to SEQ ID NO: 10343
  source 1..120: mol_type = other DNA

SEQ ID NO: 35542 - DNA, 120 bp, synthetic construct
  source 1..120: mol_type = other DNA
tgcagtctcagctcactgcaacatctgtctcccgggttcaagtggttctcctgcctcagcctcccaagaagctgggattacaggtacctgccaccacgcccggctaatttttgtattttt

SEQ ID NO: 35543 - DNA, 120 bp, synthetic construct
  source 1..120: mol_type = other DNA
gccaccacgcctggcctccacagttctttatccaccgtctgaaatgtaaaatgttacgaaaaccaaaagttttttttgtgatttatttgatggtagcacctgacgtgaactgacatgaga

SEQ ID NO: 35544 - DNA, 120 bp, synthetic construct; identical to SEQ ID NO: 10344
  source 1..120: mol_type = other DNA

SEQ ID NO: 35545 - DNA, 120 bp, synthetic construct
  source 1..120: mol_type = other DNA
gtttggacttgattcatgaggctgtggggagccagtgaaggttcttaagcaggtatgtctgcctgagagcagttggagcagacaagagctaaaaaccaaacaaatcaccatagatagtgg

SEQ ID NO: 35546 - DNA, 120 bp, synthetic construct
  source 1..120: mol_type = other DNA
gccgtccttgtgataatgagtaagttctcccgctatgatttcccttgaaggctgattattaaaaagagcttggcacctccctctcttctctcttgcttcttctcttgccatgtgattgat

SEQ ID NO: 35547 - DNA, 120 bp, synthetic construct
  source 1..120: mol_type = other DNA
aatcccttttccttgtaaattactcaccttcaggtattcctttatatagcaacacaaaaggactaagacagtggccttgacttttctctctctttaagaagtgttgcctttgctcactta

SEQ ID NO: 35548 - DNA, 120 bp, synthetic construct
  source 1..120: mol_type = other DNA
atctgaggctccgagaggttgagtgacttgctcatggctgcacaaccagtaaatattggagctggaattcaggtccacggtttcctggctccaaagcccatgattttttccctcaattta

SEQ ID NO: 35549 - DNA, 120 bp, synthetic construct; identical to SEQ ID NO: 10345
  source 1..120: mol_type = other DNA

SEQ ID NO: 35550 - DNA, 120 bp, synthetic construct
  source 1..120: mol_type = other DNA
atttgctttttggtccgcatttggtaacttctttatcatctactatactctgttgtgtctcttttgttgtaatttgtaagtaggggtgagataaagtacacctagggtttgctgggtttc

SEQ ID NO: 35551 - DNA, 120 bp, synthetic construct
  source 1..120: mol_type = other DNA
ctgcaggcccaggctgcccgccggggatacctcaccaagatcctgcatgtcttccatggccttcttcctggcttcctggtgaagatgagtggcgacctgctggagctggtgagccaccct

SEQ ID NO: 35552 - DNA, 120 bp, synthetic construct; identical to SEQ ID NO: 10346
  source 1..120: mol_type = other DNA

SEQ ID NO: 35553 - DNA, 120 bp, synthetic construct
  source 1..120: mol_type = other DNA
gcctgagtcattttataaaaaagcatgactctagggtccaaaattcctttgaagctgttgctatccagagtgaagtcccttctttaggacagggtggccctcctccctcctggatgtcac

SEQ ID NO: 35554 - DNA, 120 bp, synthetic construct
  source 1..120: mol_type = other DNA
cctggcctctaacttgatgagagcgtgtgtcattttcacactgattctccacatggcaggcggtgcttcttagcctcctgcagacagtgaggccccacggtcttgtccaaggtcacacag

SEQ ID NO: 35555 - DNA, 120 bp, synthetic construct
  source 1..120: mol_type = other DNA
gcctgtggcgccatgacagggattgacagggtccctgccttggaaacccgtagtctaagtagaggagactgacaagtcaatgccttccatcagtctgctcaacacacgtttaccaagtgc

SEQ ID NO: 35556 - DNA, 120 bp, synthetic construct
  source 1..120: mol_type = other DNA
ccttggggagagacgaagaaggtacccgtatagcaccagatgacaggcacgagccccacaggccagggcagctgctcagaggagagtaggccaagcagaaggcaaacagaaggctgcagg

SEQ ID NO: 35557 - DNA, 120 bp, synthetic construct; identical to SEQ ID NO: 10347
  source 1..120: mol_type = other DNA

SEQ ID NO: 35558 - DNA, 120 bp, synthetic construct
  source 1..120: mol_type = other DNA
ggagaggctgcctgtggggaatcacccgagggttcaccgctgccatgcgcagggagtcaggaggtagggagggagtggggcagatgcacaccatttttttttttttttgagactctgttg

SEQ ID NO: 35559 - DNA, 120 bp, synthetic construct
  source 1..120: mol_type = other DNA
ctacaggtgtgtgccaccatgcctggctaatttttgtatttttaatagagatggggtttcaccatgttggccaggctggtctcgaactctcgacctcaggtgatcccccacctcggcctc

SEQ ID NO: 35560 - DNA, 120 bp, synthetic construct; identical to SEQ ID NO: 10348
  source 1..120: mol_type = other DNA

SEQ ID NO: 35561 - DNA, 120 bp, synthetic construct
  source 1..120: mol_type = other DNA
tgggctcccagcctgatcaaggagcgagaaaactcaggctcctagtctgtcctccggggcactagcagggacaaggtgggaggctgctgggctgggatgtggggacaggtttgatcaggt

SEQ ID NO: 35562 - DNA, 120 bp, synthetic construct
  source 1..120: mol_type = other DNA
tgtctttgcccagagcatcccgtggaacctggagcggattacccctccacggtaccgggcggatgaataccagccccccggtaagacccccatctgtgccctgccccaccccatctgagc

SEQ ID NO: 35563 - DNA, 120 bp, synthetic construct
  source 1..120: mol_type = other DNA
gcccccactgcctgccttcctgttgccccacaaatgcaaaagtcttgccttaaatgatcctcttttccttcttttctcttgttttccttttctcaccatttggaatggcccagcaggctg

SEQ ID NO: 35564 - DNA, 120 bp, synthetic construct
  source 1..120: mol_type = other DNA
ctgggatgcctctgcctaccttcctgttttgctgctccacctgcctccagctccgtttggcttcctggggctccctgcctgggccactttgtgtcttccctctaggcctttctttccact

SEQ ID NO: 35565 - DNA, 120 bp, synthetic construct; identical to SEQ ID NO: 10349
  source 1..120: mol_type = other DNA

SEQ ID NO: 35566 - DNA, 120 bp, synthetic construct
  source 1..120: mol_type = other DNA
aaccctgtccctgtccttctcacaggttgctgtgagactccaatgagttgaaggatgtgcagatgcttttggaagtgaaaagttggggggctactgtgtgactttgcatacacccaaact

SEQ ID NO: 35567 - DNA, 120 bp, synthetic construct
  source 1..120: mol_type = other DNA
aggggcctggtcggtcatgtgtgctgacccggcctgggcagcctgtggccagggagaggacagctcctctgtaggaagagcctgttcctttccaaccaggtgagacctcttcagtggagc

SEQ ID NO: 35568 - DNA, 120 bp, synthetic construct
  source 1..120: mol_type = other DNA
aagatcttgccccctaagttagtttcctagcactgctgtgacaaattaccaccccctcggttggaacaagttgattctctgcagtcctggaggccagaagcctgaatcagtgtcggcagg

SEQ ID NO: 35569 - DNA, 120 bp, synthetic construct; identical to SEQ ID NO: 10350
  source 1..120: mol_type = other DNA

SEQ ID NO: 35570 - DNA, 120 bp, synthetic construct
  source 1..120: mol_type = other DNA
cccccttcccgcttcccccgagtgtctgtgggaggtggcaggaatggcaggcaggggtgtggaaccccttctggagtcatatcaagggcttggctggaggaagtcctcctggagctgttg

SEQ ID NO: 35571 - DNA, 120 bp, synthetic construct
  source 1..120: mol_type = other DNA
gtgaccttgcatacgtcactcaccctctctgatcttcaggttcctctgcaaaagggaggtaatgataaccctcactctggggggctgtttggagggttaaatcagttattgctgtagcat

SEQ ID NO: 35572 - DNA, 120 bp, synthetic construct; identical to SEQ ID NO: 10351
  source 1..120: mol_type = other DNA

SEQ ID NO: 35573 - DNA, 120 bp, synthetic construct
  source 1..120: mol_type = other DNA
acggtgtccaagcagtggaatgaacgtggattgaagctgtgaggcaggagggagtgtggcctgtgcagaagggaccgaggctggtgagaccaggagggcctgggtggcctccaggtcaga

SEQ ID NO: 35574 - DNA, 120 bp, synthetic construct
  source 1..120: mol_type = other DNA
agaggccacagagctttccagaggctggaagaggccactccaaggcctctttgcccctgagagtggtggctcttcttgaggccaccttgccacgctgtcacagggaactagcagcccctg

SEQ ID NO: 35575 - DNA, 120 bp, synthetic construct
  source 1..120: mol_type = other DNA
ttaccaggcccacctgccctctgctggccatgcttgcagcctcctgaccctgtcccagcaggacagtgggctggtgtgagcgggcaggaaccgcctgcacttagaaggtgtggggctgcc

SEQ ID NO: 35576 - DNA, 120 bp, synthetic construct; identical to SEQ ID NO: 10352
  source 1..120: mol_type = other DNA

SEQ ID NO: 35577 - DNA, 120 bp, synthetic construct
  source 1..120: mol_type = other DNA
gggaaaaccttgggctgcttcctgagcacctgtatcccctgcagccagcccggggcctctgctaggagcagactgagcatggcttatgggcctggcaccatctggcctctgcccaccttg

SEQ ID NO: 35578 - DNA, 120 bp, synthetic construct
  source 1..120: mol_type = other DNA
ctctcagccaccccttcccagtgtagcaccgggcacatggtagatgcctattgatgagtgaaagctcctaacacactcagagagcaaggactccgcctcatcccacagcctgggaggaga

SEQ ID NO: 35579 - DNA, 120 bp, synthetic construct
  source 1..120: mol_type = other DNA
aggctggggactcacagttcggactgtgcccagacctactagcatagtgggtgggtgggaggatgcgggactgggggccgaccttgcctgaaattcatgtgggatctcagagcagccact

SEQ ID NO: 35580 - DNA, 120 bp, synthetic construct; identical to SEQ ID NO: 10353
  source 1..120: mol_type = other DNA

SEQ ID NO: 35581 - DNA, 120 bp, synthetic construct
  source 1..120: mol_type = other DNA
gggtacacgccctgagcctcccacacttgctcacctgtcctgagatgagaatctctactctgcagcatatttggaggatcactgcgggggccacagaggtgctgttcagatggcacttca

SEQ ID NO: 35582 - DNA, 120 bp, synthetic construct
  source 1..120: mol_type = other DNA
gctggcgcaggactctgctagcagcaacctgcctgaagtcttcctttggcctggctgagagtttctgagacctgcgctggagcggaggtgcttccttccttgcttcctttcttcctctct

SEQ ID NO: 35583 - DNA, 120 bp, synthetic construct
  source 1..120: mol_type = other DNA
cccagtgcctgcttcttggagaatccaaactgatccagttagggatgataaagtgtagggtaggcgctcggtgactgttttctctgaggttgtgactcgtgtgaggcagaagcagtcccc

SEQ ID NO: 35584 - DNA, 120 bp, synthetic construct
  source 1..120: mol_type = other DNA
ggccagacatcactgttattctcctttgagtctttaaatcttgttgtctttcttgcagactcggtgagctgtgaaaggctataataggggctttattttacactttgatactattttttg

SEQ ID NO: 35585 - DNA, 120 bp, synthetic construct; identical to SEQ ID NO: 10354
  source 1..120: mol_type = other DNA

SEQ ID NO: 35586 - DNA, 120 bp, synthetic construct
  source 1..120: mol_type = other DNA
tgaccaccgggaaatcgagggcagggtcatggtcaccgacttcgagaatgtgcccgaggaggacgggacccgcttccacagacaggtaagcacggccgtctgatgggagggctgcctctg

SEQ ID NO: 35587 - DNA, 120 bp, synthetic construct
  source 1..120: mol_type = other DNA
cgttcatccatccagccacctgctgatttgttatagggtggagggggggtctttctcatgtggtccttgtgttcgtcgagcaggccagcaagtgtgacagtcatggcacccacctggcag

SEQ ID NO: 35588 - DNA, 120 bp, synthetic construct
  source 1..120: mol_type = other DNA
agacgctggtctctctccatctggacctggcctgggaggtggcttgggctgggcccagggagagctaatgtctcctaaccaagaatgctgtggcagcctctgccgcagagccagagaacc

SEQ ID NO: 35589 - DNA, 120 bp, synthetic construct; identical to SEQ ID NO: 10355
  source 1..120: mol_type = other DNA

SEQ ID NO: 35590 - DNA, 120 bp, synthetic construct
  source 1..120: mol_type = other DNA
gaactggcagaggactttttctagactgtgactacatttagtccacccagcggcccccctatgaagtccagttgagaactaggactctgggggccggtggacagagaagagggagggttc

SEQ ID NO: 35591 - DNA, 120 bp, synthetic construct
  source 1..120: mol_type = other DNA
tgactgccagggtcgcacagctcaagctggggaactcgctgggaaaactgtcagctctgggcagcagcttgacttccactgtaagccccagcccccagggtcaaacactggctctggtgc

SEQ ID NO: 35592 - DNA, 120 bp, synthetic construct
  source 1..120: mol_type = other DNA
aaggcaagaatcaataaccttctgccccatcaggtgaccccttgtgcctgtcccacccctttattgactgacctcggctcagtcaggtcagttcctgaaggtcagtgtgtggaggggagg

SEQ ID NO: 35593 - DNA, 120 bp, synthetic construct; identical to SEQ ID NO: 10356
  source 1..120: mol_type = other DNA

SEQ ID NO: 35594 - DNA, 120 bp, synthetic construct
  source 1..120: mol_type = other DNA
aaccccgtctctactaaaaatacaaaaattagccaggcatggtggtgggtgtctgtatcccagctacttgggaggctaaggcaggagaatcgcttgaacccaggaggtggaggttgcagt

SEQ ID NO: 35595 - DNA, 120 bp, synthetic construct
  source 1..120: mol_type = other DNA
gtgccactccactccctccctccgtggtgtgaggggcctcactagctgtctcctaggaggagcatggctgtgagattccagctccatccttggccacggctcctggagacatcttagagg

SEQ ID NO: 35596 - DNA, 120 bp, synthetic construct; identical to SEQ ID NO: 10357
  source 1..120: mol_type = other DNA

SEQ ID NO: 35597 - DNA, 120 bp, synthetic construct
  source 1..120: mol_type = other DNA
cccgggaggcggagcttgcagtgagccgagattgcgccactgcactccagcctgggcaatagagcgagactccgtctggaaagaaaaaaaaaaaaaagagctgttactgttgacagtagc

SEQ ID NO: 35598 - DNA, 120 bp, synthetic construct
  source 1..120: mol_type = other DNA
attctttagacaatcctgggagcaactgtccctgtttcacagagggcggggccacacagctggtgagtgggcagccaagactctgttcaagtttgtgtgggtccaacacttgcggccacg

SEQ ID NO: 35599 - DNA, 120 bp, synthetic construct
  source 1..120: mol_type = other DNA
taaggttattgtgaggatcccctgagttcgtatattcagacgcttagacagagccaggcacagagaagggcccggggttggctagtttgattgctggtgtaattgctaatatcttccagt

SEQ ID NO: 35600 - DNA, 120 bp, synthetic construct; identical to SEQ ID NO: 10358
  source 1..120: mol_type = other DNA

SEQ ID NO: 35601 - DNA, 120 bp, synthetic construct
  source 1..120: mol_type = other DNA
acaaagttgatccccaaaattaaccatcactctgtgcctgtaagggaggggctgggaaaggggagcaggtctccccaaggggtgaccttggctttgttcctcccaggcctggagtttatt

SEQ ID NO: 35602 - DNA, 120 bp, synthetic construct
  source 1..120: mol_type = other DNA
gtcaccgctgccggcaacttccgggacgatgcctgcctctactccccagcctcagctcccgaggtaggtgctggggctgctgccccaaggcgcgggtagggggcggagggcggagggcgg

SEQ ID NO: 35603 - DNA, 120 bp, synthetic construct
  source 1..120: mol_type = other DNA
ctggggaggaaggggctcgaaacctccatcatcgcagagtctgaatagcagtggccccgccatgcgcccacgtagcggcgcctacgtagccacgcccccacaccccgtcctggccactct

SEQ ID NO: 35604 - DNA, 120 bp, synthetic construct; identical to SEQ ID NO: 10359
  source 1..120: mol_type = other DNA

SEQ ID NO: 35605 - DNA, 120 bp, synthetic construct
  source 1..120: mol_type = other DNA
cttcaagtctgtgtgtgtgcgtgcgcgcgcgcgcgttgggggtgggggttgcagagcagatgcgtacctgacagcggtaacctaggtcccccctggcctatcaaggcttccctggcggcc

SEQ ID NO: 35606 - DNA, 120 bp, synthetic construct
  source 1..120: mol_type = other DNA
tgtaaactccacaggggcattgggaatgctgcctggctatggtagggacagaggggagcaccagggcggggcaggggtgccagagttctgcctgggcagtcagattttccttaggagggg

SEQ ID NO: 35607 - DNA, 120 bp, synthetic construct
  source 1..120: mol_type = other DNA
ccaggtcatcacagttggggccaccaatgcccaagaccagccggtgaccctggggactttggggaccaactttggccgctgtgtggacctctttgccccaggggaggacatcattggtgc

SEQ ID NO: 35608 - DNA, 120 bp, synthetic construct
  source 1..120: mol_type = other DNA
cagtcagggtctgtgccgggacctccagtgccaggctctgtgcagggggaccagagatgaagtaggcctgatggtgccttcaaggacactcagtctgatgagggaggcgagtgcacagag

SEQ ID NO: 35609 - DNA, 120 bp, synthetic construct; identical to SEQ ID NO: 10360
  source 1..120: mol_type = other DNA

SEQ ID NO: 35610 - DNA, 120 bp, synthetic construct
  source 1..120: mol_type = other DNA
atgatgctgtctgccgagccggagctcaccctggccgagttgaggcagagactgatccacttctctgccaaagatgtcatcaatgaggcctggttccctgaggaccagcgggtactgacc

SEQ ID NO: 35611 - DNA, 120 bp, synthetic construct
  source 1..120: mol_type = other DNA
cccttgtctgtgtaaggaggatgacgccaccttaaataggattaaatgagaatggggctctgaaagggctgtgcaatattttcataacgtgtttttatagagacagttgagtatgttctt

SEQ ID NO: 35612 - DNA, 120 bp, synthetic construct
  source 1..120: mol_type = other DNA
gtcagcacactcggggcctacacggatggccacagccgtcgcccgctgcgccccagatgaggagctgctgagctgctccagtttctccaggagtgggaagcggcggggcgagcgcatgga

SEQ ID NO: 35613 - DNA, 120 bp, synthetic construct; identical to SEQ ID NO: 10361
  source 1..120: mol_type = other DNA

SEQ ID NO: 35614 - DNA, 120 bp, synthetic construct
  source 1..120: mol_type = other DNA
catggttctgggagctgagaaatctcaaaccagcaaaaaagtggaattgatgttgatgctacaggatagtgcacagatgccatctggttgcagcattttggtggaagggcagtgcccagc

SEQ ID NO: 35615 - DNA, 120 bp, synthetic construct
  source 1..120: mol_type = other DNA
gtggagctggctggatccttgctttggcctcctggatttctctctatctccattttgaaaccactctgtgtttggaagaacttttgagtattcagagctgcccactggcagaacagtctt

SEQ ID NO: 35616 - DNA, 120 bp, synthetic construct; identical to SEQ ID NO: 10362
  source 1..120: mol_type = other DNA

SEQ ID NO: 35617 - DNA, 120 bp, synthetic construct
  source 1..120: mol_type = other DNA
gggccacgtcctcacaggtaggaggctgggcttgccctggggtgaggaggggtctctttctccttatgcacccactgcccgcgaggcttggtcctcacaagtgtgatccatgagactcaa

SEQ ID NO: 35618 - DNA, 120 bp, synthetic construct
  source 1..120: mol_type = other DNA
gcctcattgtgttgcaaggagatgggcagcatctagggcactggcctggagtatcgcaggtgctttgcctaaggtggtgcagtccaggagaggcagctccagagagaggcccccggctgg

SEQ ID NO: 35619 - DNA, 120 bp, synthetic construct
  source 1..120: mol_type = other DNA
gtgccgggacaatataaattctagctatcgttactattgttttcatcacccgttgctttaaaatccagcctctggtataggcaactattgacgggctaccctgtgtcgaaaacatgccca

SEQ ID NO: 35620 - DNA, 120 bp, synthetic construct
  source 1..120: mol_type = other DNA
ctggaataagaggctcagagttgattctcgtctgagcacgtccaggggaaccactgagggtttgggaacaggagagtgagggtgagaacctggttctgggcacagcaggctggcatgtag

SEQ ID NO: 35621 - DNA, 120 bp, synthetic construct; identical to SEQ ID NO: 10363
  source 1..120: mol_type = other DNA

SEQ ID NO: 35622 - DNA, 120 bp, synthetic construct
  source 1..120: mol_type = other DNA
ttcacagtgtccctgtgagtaggtgtggtttctctttccatcttacaaatgagtaaacagagcctcagtgtagctaagtaaccactattttaggtttcttagccaatgggtgtgtctgac

SEQ ID NO: 35623 - DNA, 120 bp, synthetic construct
  source 1..120: mol_type = other DNA
gggaggggctggggggagtttgagcatctcaggccatagagcccctgcctcactgtctccatctctgggtggaaagatggtgttttccctgagaaactaaggctcagagaggttgaatgg

SEQ ID NO: 35624 - DNA, 120 bp, synthetic construct; identical to SEQ ID NO: 10364
  source 1..120: mol_type = other DNA

SEQ ID NO: 35625 - DNA, 120 bp, synthetic construct
  source 1..120: mol_type = other DNA
ttcctgctgccatgccccaggtctggaatgcaaagtcaaggagcatggaatcccggcccctcaggagcaggtgaagaggcccgtgaggccgggtgggtggggtgctgcgtgtctctcctg

SEQ ID NO: 35626 - DNA, 120 bp, synthetic construct
  source 1..120: mol_type = other DNA
tgtgtggctgggtctgtttttgcttttgtccagatcagtaaggtttgctacctgggtaccccactccacttggagtagaatgtgcataaatatggcataaagaaatgcaatatgcatgca

SEQ ID NO: 35627 - DNA, 120 bp, synthetic construct
  source 1..120: mol_type = other DNA
catgagccgctgcacctggcctctctgatctatttaacaaacctgctgggagggtctcagggtcaggagcagcactgggctctgaggacacagagctcactcagccgtgacccagagggg

SEQ ID NO: 35628 - DNA, 120 bp, synthetic construct
  source 1..120: mol_type = other DNA
gagtgtataactctccttaaaagccagtaggagctcctcaaaaggcagccctaaggagtccactcttaaatgaactcagagtcagttttaaaatgcaagtctgtgttgattctggtctgg

SEQ ID NO: 35629 - DNA, 120 bp, synthetic construct; identical to SEQ ID NO: 10365
  source 1..120: mol_type = other DNA

SEQ ID NO: 35630 - DNA, 120 bp, synthetic construct
  source 1..120: mol_type = other DNA
aggaagacagaaaacaaaccattaatatagagtactgaaaagatgcgatggagaaaactatagcaaggaagggaatggggtgggagagaggtcaggagaggtctcgctgacaaggtggac

SEQ ID NO: 35631 - DNA, 120 bp, synthetic construct
  source 1..120: mol_type = other DNA
gaggggacagggccaagtcaggtgagacctgagggtcacagtcagcagtgagctggggccatgcaggggtctggcctcagaggagtgtggtctggcctggatctgaacctctcactgtgg

SEQ ID NO: 35632 - DNA, 120 bp, synthetic construct
  source 1..120: mol_type = other DNA
gcaggcctggtgggtggatgtgggtgggagagggggaggatggcaccaaggctcgggcccctggacagatggagttgccattaagtgggatggggcaggctatggggccatcagtttcag

SEQ ID NO: 35633 - DNA, 120 bp, synthetic construct; identical to SEQ ID NO: 10366
  source 1..120: mol_type = other DNA

SEQ ID NO: 35634 - DNA, 120 bp, synthetic construct
  source 1..120: mol_type = other DNA
tacgccgtagacaacacgtgtgtagtcaggagccgggacgtcagcactacaggcagcaccagcgaaggggccgtgacagccgttgccatctgctgccggagccggcacctggcgcaggcc

SEQ ID NO: 35635 - DNA, 120 bp, synthetic construct
  source 1..120: mol_type = other DNA
gaggggatggggatgcttccgcctttccggggctgctggcctggcccttgagtggggcagcctccttgcctggaactcactcactctgggtgcctcctccccaggtggaggtgccaggaa

SEQ ID NO: 35636 - DNA, 120 bp, synthetic construct
  source 1..120: mol_type = other DNA
tccgtgccaggcattcaatcctcaggtctccaccaaggaggcaggattcttcccatggataggggagggggcggtaggggctgcagggacaaacatcgttggggggtgagtgtgaaaggt

SEQ ID NO: 35637 - DNA, 120 bp, synthetic construct
  source 1..120: mol_type = other DNA
tcacaggctgtgccttggtttcctgagccacctttactctgctctatgccaggctgtgctagcaacacccaaaggtggcctgcggggagccatcacctaggactgactcggcagtgtgca

SEQ ID NO: 35638 - DNA, 120 bp, synthetic construct; identical to SEQ ID NO: 10367
  source 1..120: mol_type = other DNA

SEQ ID NO: 35639 - DNA, 120 bp, synthetic construct
  source 1..120: mol_type = other DNA
gccaacaactgtccctccttgagcaccagccccacccaagcaagcagacatttatcttttgggtctgtcctctctgttgcctttttacagccaacttttctagacctgttttgcttttgt

SEQ ID NO: 35640 - DNA, 120 bp, synthetic construct
  source 1..120: mol_type = other DNA
caagcagacatttatcttttgggtctgtcctctctgttgcctttttacagccaacttttctagacctgttttgcttttgtaacttgaagatatttattctgggttttgtagcatttttat

SEQ ID NO: 35641 - DNA, 120 bp, synthetic construct; identical to SEQ ID NO: 10368
  source 1..120: mol_type = other DNA

SEQ ID NO: 35642 - DNA, 120 bp, synthetic construct
  source 1..120: mol_type = other DNA
caaaatttattttctgttacagttttcttgccaaaaggagttgaagaatttttttgcttatcttacttaggacaaatgttgtcagattaaaaaaaaaaataacagaatagtagttgtaaa

SEQ ID NO: 35643 - DNA, 120 bp, synthetic construct
  source 1..120: mol_type = other DNA
tggtcttgacacattcttacatcttcttcaacatgacttcttcacttttcttctctagagttttcttgagttaaaataatggcttgaagaagatcatatgagatctagtggctctgtgat

SEQ ID NO: 35644 - DNA, 120 bp, synthetic construct; identical to SEQ ID NO: 10369
  source 1..120: mol_type = other DNA

SEQ ID NO: 35645 - DNA, 120 bp, synthetic construct
  source 1..120: mol_type = other DNA
taagttctgggaggaaaagacttctttaatttgctatgatcacttcctctcaatttctttttcttacagtcatgcatactctgtaatctaaatttcttaagtttatttaaaaatcagaga

SEQ ID NO: 35646 - DNA, 120 bp, synthetic construct
  source 1..120: mol_type = other DNA
tgcagaacaatacactggaggcccaatggcgaagcaatgtgcacatgagtgacaaaacatgggaaccagaaaaggaatataaatgtaaatcaaacttttaaaatcccagtaatgcaacag

SEQ ID NO: 35647 - DNA, 120 bp, synthetic construct; identical to SEQ ID NO: 10370
  source 1..120: mol_type = other DNA

SEQ ID NO: 35648 - DNA, 120 bp, synthetic construct
  source 1..120: mol_type = other DNA
tgacaaaatctgtcttcttaaactgagcctttggaataagcaaacagaaacgtgaaaggtaacaaaactggcacacaagaaaatgcagttttttagcgatttcttcccagggtcaagtca

SEQ ID NO: 35649 - DNA, 120 bp, synthetic construct
  source 1..120: mol_type = other DNA
gctttacttgctttgttggaggcatagctgaaaagaaaaggacattctgagatcagggagaatgagtgaggcttctggatgcggcctgtgggtgttctgtaagacctcttcgctcctcaa

SEQ ID NO: 35650 - DNA, 120 bp, synthetic construct
  source 1..120: mol_type = other DNA
gtgctaataaataaatagtttataggccaggtggggtggctcacgcctgtaatcccagcacttttgggaggctgaggtgggtagatcacgaggtcagaccatcctggccaacatggtgaa

SEQ ID NO: 35651 - DNA, 120 bp, synthetic construct; identical to SEQ ID NO: 10371
  source 1..120: mol_type = other DNA

SEQ ID NO: 35652 - DNA, 120 bp, synthetic construct
  source 1..120: mol_type = other DNA
tacgattttgtgacatcatgaatgtaggagtaatttttcaagtcaataaaagaaattcttgtggcagcccttgttaaagcagtttcaaaatctctttacgtttccatatagagcaaatgg

SEQ ID NO: 35653 - DNA, 120 bp, synthetic construct
  source 1..120: mol_type = other DNA
ggctcactgcaacctccgtctcccaggttcaagcgattctcctgcctcagcctccgaagtagctgggactacaggcgcatgccaccacgccaggctaattttttgtatttttagtagaga

SEQ ID NO: 35654 - DNA, 120 bp, synthetic construct
  source 1..120: mol_type = other DNA
ttttaactttatcctaaatgtcccacctctggcttagatcagtgccgccttagatctctttctcttctatcacctgattagcacatggctgattttttttcttaaacaaagattcttttt

SEQ ID NO: 35655 - DNA, 120 bp, synthetic construct; identical to SEQ ID NO: 3175
  source 1..120: mol_type = other DNA

SEQ ID NO: 35656 - DNA, 120 bp, synthetic construct
  source 1..120: mol_type = other DNA
attcaaagatgtaatgttataaatgataattagttcccaggctagtccacaaacggtaggtcagatatataacactctagtaaggaaagagcagcagacaccactggcaagaagctcctt

SEQ ID NO: 35657 - DNA, 120 bp, synthetic construct
  source 1..120: mol_type = other DNA
gttaacttttgtttttgagacagggcatgtgaggactcacaagtggacactcggaaataaacaagtaacagagtagctcaccccttatcttgctaagctaccagaagtttccaaaagtaa

SEQ ID NO: 35658 - DNA, 120 bp, synthetic construct
  source 1..120: mol_type = other DNA
ggaagtttggatgactatttggaagaaaagtcatttctgttttgcaacagtaattcactctttccacaaagactgagcaactctaatactatctgccagcctctggggatgggtgaatat

SEQ ID NO: 35659 - DNA, 120 bp, synthetic construct; identical to SEQ ID NO: 10373
  source 1..120: mol_type = other DNA

SEQ ID NO: 35660 - DNA, 120 bp, synthetic construct
  source 1..120: mol_type = other DNA
actaatagtaaataatttggttatacaaggtttttcattctcctcctttttttttttaatagggaaaagttgaaaacaggaacacagatgtggaatgacatgcattggaccttctattat

SEQ ID NO: 35661 - DNA, 120 bp, synthetic construct
  source 1..120: mol_type = other DNA
caaaagggaataagatgcggaagagataagacagagaaaaaactgtgaaagcaagactttctcatcaggctaccccctgactgcttctcctgtgtcatcactgctgctgctgcttttttt

SEQ ID NO: 35662 - DNA, 120 bp, synthetic construct
  source 1..120: mol_type = other DNA
caagtagctagaattacagacacgcaccaccacacccagctaatttttgtatttttactagagacagggttttgccatgtcggccaggctggtctcgaacttctgacctcaagtgatcca

SEQ ID NO: 35663 - DNA, 120 bp, synthetic construct; identical to SEQ ID NO: 10374
  source 1..120: mol_type = other DNA

SEQ ID NO: 35664 - DNA, 120 bp, synthetic construct
  source 1..120: mol_type = other DNA
ttacatcctgtttgctgccatgttgcacatgatggtcatgaccgcacattcacaaccggattatttacacacaggctggtgaggggaaagggaggcagctgacgggcagaactgaaggac

SEQ ID NO: 35665 - DNA, 120 bp, synthetic construct
  source 1..120: mol_type = other DNA
agtttcaatgagaaggtcagtactcgggactgtgtcaggaatgatggaaaccaaatcagggagagtttctttggctacaaaatgaaaaaaaaaacaaaacacttgattaaaaagattgtt

SEQ ID NO: 35666 - DNA, 120 bp, synthetic construct
  source 1..120: mol_type = other DNA
ctctgcctcccgggttcacgccattctcttgcctcagcctcccgagtagttgggactacaggcacccgccaccacgcctggctaatttttttatttttttatttttttttattttcagta

SEQ ID NO: 35667 - DNA, 120 bp, synthetic construct
  source 1..120: mol_type = other DNA
tttcttaaaaagaaacacagctggttaacaacacatggaaagatgtaatttccctaataacaaatttttaaaaatatttgaaaagaggatactctgtgctcagtatattgaaaatctttt

SEQ ID NO: 35668 - DNA, 120 bp, synthetic construct; identical to SEQ ID NO: 10375
  source 1..120: mol_type = other DNA

SEQ ID NO: 35669 - DNA, 120 bp, synthetic construct
  source 1..120: mol_type = other DNA
atcccagcactttgggaggctgaggtgggtggatcacttaaggtcaggagttcaggaccagcctggccaacatggtgaaaccctgtctctattaaaaatacaaaaattagctgggcgtag

SEQ ID NO: 35670 - DNA, 120 bp, synthetic construct
  source 1..120: mol_type = other DNA
aacagagagagaccctgtctcaaaaaaaaaaaaaaaaagaatacatactattaccaaaaaacccacgtaagaaacctgaggaaaaatgttaataggagctgtttttctacaacaatatta

SEQ ID NO: 35671 - DNA, 120 bp, synthetic construct
  source 1..120: mol_type = other DNA
cctgcctcagcctcccgagtagctgggattacaggtgcccgccaccacgccgggctaatttttttgtatttttagtagagacggggtttcaccttgttagccaggatgatcttgatctcc

SEQ ID NO: 35672 - DNA, 120 bp, synthetic construct; identical to SEQ ID NO: 10376
  source 1..120: mol_type = other DNA

SEQ ID NO: 35673 - DNA, 120 bp, synthetic construct
  source 1..120: mol_type = other DNA
cacgatctcatctcactgcaacctccgcctcccaggttcaagcaattctcctgcctcagcctcccgagtagctaggattacaggtacgcaccaccatgcccggctaattttttgtatatt

SEQ ID NO: 35674 - DNA, 120 bp, synthetic construct
  source 1..120: mol_type = other DNA
ctggcctactattttaaaaagagaaataaactattttaaatgtacttttctactatgtatataacttcttggttataagttttgagtttggctttttttttttgtactaacaagaaaggt

SEQ ID NO: 35675 - DNA, 120 bp, synthetic construct; identical to SEQ ID NO: 10377
  source 1..120: mol_type = other DNA

SEQ ID NO: 35676 - DNA, 120 bp, synthetic construct
  source 1..120: mol_type = other DNA
tcatgaccaagaacccaaaagcaaatgcaacaaaaccaaaaataagtaaatgggatccaattaaactaaaaagcttctgcacagcaaaataaataatcagcagagtaaacagacacccca

SEQ ID NO: 35677 - DNA, 120 bp, synthetic construct
  source 1..120: mol_type = other DNA
atgaatagacaattctcaaaagaagatatacaaatggcataagaaaaattttttgatacgcctcatacatatgaaaaaatgctcaacatcactaattatcatggaaatgcaaattaaaag

SEQ ID NO: 35678 - DNA, 120 bp, synthetic construct
  source 1..120: mol_type = other DNA
actagtacaaccactatggaaaacagtatagagattccttaaagaactaaaagtagaactaccatttgatccagcaataccactactgggtatctacccaaaggaaaagaagtcattata

SEQ ID NO: 35679 - DNA, 120 bp, synthetic construct; identical to SEQ ID NO: 10378
  source 1..120: mol_type = other DNA

SEQ ID NO: 35680 - DNA, 120 bp, synthetic construct
  source 1..120: mol_type = other DNA
tacagtgtacactgctcaggtgacatgtgcaccaacatttcagaaataatcactaaataacttttgcatgtaactgaacaccacctgtacccaaaaatctattgaaaattcttaaaaggt

SEQ ID NO: 35681 - DNA, 120 bp, synthetic construct
  source 1..120: mol_type = other DNA
ccactttagactcttcttaaaagatagagagcatgcatcttttgcttttgctgatccccacagcttctgaatacgtgttgtgtttatcagcaattaacaaatactgcctaattttattgt

SEQ ID NO: 35682 - DNA, 120 bp, synthetic construct
  source 1..120: mol_type = other DNA
tctcaacttcagatgaggctgtgggttccttgaagccaattatcttacttatttctgtgtttacagcgttgatcattattcctgaaatggacaagtactcaataaaaggcactgaatgat

SEQ ID NO: 35683 - DNA, 120 bp, synthetic construct; identical to SEQ ID NO: 10379
  source 1..120: mol_type = other DNA

SEQ ID NO: 35684 - DNA, 120 bp, synthetic construct
  source 1..120: mol_type = other DNA
cagtggatgctattatcagaagtctccctccttttagtaagttaaactacagaatgaaaggccttgactggcaaaatagcactgtgagatacaaacccatgttttctgtgtgaaatctgt

SEQ ID NO: 35685 - DNA, 120 bp, synthetic construct
  source 1..120: mol_type = other DNA
taaaacataacaactttattgcaggtgagaacagggaaagttacctggcttagaaagctctcatgagaaacacaaagcatgtgttcaagctgactttcacttatttcttgctattaaaat

SEQ ID NO: 35686 - DNA, 120 bp, synthetic construct
  source 1..120: mol_type = other DNA
aagcctcttttctctgttatccttaaagtgaagtttatcaacagaatcctctaatataaaccatgtggctacagctataccttcccgacatttaggggactgcagaacctgaggccaaca

SEQ ID NO: 35687 - DNA, 120 bp, synthetic construct; identical to SEQ ID NO: 10380
  source 1..120: mol_type = other DNA

SEQ ID NO: 35688 - DNA, 120 bp, synthetic construct
  source 1..120: mol_type = other DNA
actgcagcctttaatatctctggggctatatatgtgcatatttaaaaatctaatccattaaaacaggcaaaatattgtttataatttttgtgaaatgtgaaaaaccgaatttgagttgtt

SEQ ID NO: 35689 - DNA, 120 bp, synthetic construct
  source 1..120: mol_type = other DNA
agcaaacaaataaaaaagtaccgttatcatctctgtcaataatacagtcaaaggcaaaatatgtctcatcacagttactcaaaaaaaatccatgccaaatttgctatattcagtgactcc

SEQ ID NO: 35690 - DNA, 120 bp, synthetic construct
  source 1..120: mol_type = other DNA
agagagccacagagagaacattctgaaagacaactatatggattagaaagacttcattggatggtgtgactgagggtgccacccagtgaaaaatatcaacaatattacttatcttgttaa

SEQ ID NO: 35691 - DNA, 120 bp, synthetic construct; identical to SEQ ID NO: 10381
  source 1..120: mol_type = other DNA

SEQ ID NO: 35692 - DNA, 120 bp, synthetic construct
  source 1..120: mol_type = other DNA
gctgcaggccactttccttctggacaactgtctgagccactgatgtcggcatctgttttgtgagacatatcctataagtgctattgtatttgatttcacgataacattaagttttctgta

SEQ ID NO: 35693 - DNA, 120 bp, synthetic construct
  source 1..120: mol_type = other DNA
acctcccaggttcaagtgattctcctgcctcagcctccagactagctgggattacaggtgtgtgccaccacgcccagctaattttttggaattttagtagagatggtgtttcaccatgtt

SEQ ID NO: 35694 - DNA, 120 bp, synthetic construct; identical to SEQ ID NO: 3184
  source 1..120: mol_type = other DNA

SEQ ID NO: 35695 - DNA, 120 bp, synthetic construct
  source 1..120: mol_type = other DNA
tagccaggcgtggtggcacgtgcctgtagtcccagctactcaagaggctggggcaggagaatcgcttgaacctgggagacagaggttgcagagagccaagatcatgccactgcgctcagc

SEQ ID NO: 35696 - DNA, 120 bp, synthetic construct; identical to SEQ ID NO: 10382
  source 1..120: mol_type = other DNA

SEQ ID NO: 35697 - DNA, 120 bp, synthetic construct
  source 1..120: mol_type = other DNA
ttcatttatctttcatatgcaccttacgctcatagcctagaggtcattttatccaatatttgtaataattctgtgcatgaaatagtttatatacgaggagccactggaaagcaaaggtgt

SEQ ID NO: 35698 - DNA, 120 bp, synthetic construct; identical to SEQ ID NO: 10383
  source 1..120: mol_type = other DNA

SEQ ID NO: 35699 - DNA, 120 bp, synthetic construct
  source 1..120: mol_type = other DNA
ccttcaacttttaagctcaggggtacatgtgtaggatgtgtaggtttgttagacaggttaatgtgtaccatggtggtttgctgcacagatcatccaatcacctaggtattaagcccagcg

SEQ ID NO: 35700 - DNA, 120 bp, synthetic construct
  source 1..120: mol_type = other DNA
cgtggtacttggctttctgttcctacattagtttgccaaggataacagcctccagctccatccatgtccctgcaaaggacatgatctcgttcctttttatggctgcacagtattccatgg

SEQ ID NO: 35701 - DNA, 120 bp, synthetic construct
  source 1..120: mol_type = other DNA
aggacgatttatattcctttgggtatatacccaataatgggattgctgggtcaaatggtatttctgcctctagatctttgagaaagcaccacactgttctccacaatggttgaactaatt

SEQ ID NO: 35702 - DNA, 120 bp, synthetic construct; identical to SEQ ID NO: 10384
  source 1..120: mol_type = other DNA

SEQ ID NO: 35703 - DNA, 120 bp, synthetic construct
  source 1..120: mol_type = other DNA
ctgatgatagtttcttttgctgtgcagaagctctttagtttgattgcatcccatttgtcaatttttgctttcattgctattgcttttggtgtttttgtcatgaaatctttgccagtgcct

SEQ ID NO: 35704 - DNA, 120 bp, synthetic construct
  source 1..120: mol_type = other DNA
ttcaattttctgcatatgactagccagttctcccagcaccgtttattaaatagggaatcctttccccattgcttgcttttgtcaggtttgttgaagatcagattgttgtaggtgtgcagt

SEQ ID NO: 35705 - DNA, 120 bp, synthetic construct
  source 1..120: mol_type = other DNA
ctctagctttgatctttttgcttaggactgtcttggctattcggctctttttcaattccatatgaattttaaaatagttttttccaattctgtgaagaatgtcaatggtagtctaacggg

SEQ ID NO: 35706 - DNA, 120 bp, synthetic construct
  source 1..120: mol_type = other DNA
tgtagttctgtttatgtgatgaatcacgtttattgatttgcgaatgttgaaccaaccttgcatcctggggatgaaacccacttgatggtggtggataagctttttgatatgctgctagat

SEQ ID NO: 35707 - DNA, 120 bp, synthetic construct; identical to SEQ ID NO: 10385
  source 1..120: mol_type = other DNA

SEQ ID NO: 35708 - DNA, 120 bp, synthetic construct
  source 1..120: mol_type = other DNA
tatccatgtttttctagattttctagtttatgtgcatagaggtattcatagtattctctgatggttgtatgtatttctgtggggtcagtggtgatatcccacttatcatttctgattgtg

SEQ ID NO: 35709 - DNA, 120 bp, synthetic construct
  source 1..120: mol_type = other DNA
tctgtatctccttcagttccactctgatcttggctatttcttgccttggggtttgtttggtctggttttctagttcttttagttgtgatgttaggttgataccttgagatctttctagct

SEQ ID NO: 35710 - DNA, 120 bp, synthetic construct
  source 1..120: mol_type = other DNA
ccttaatttcgttatttatccacaagtaattcaggagcaggctgttcaatttctatgtacttgtgtggttttgagtgaatttcttaatcttgagttctaatttggttgcaccgttgtctg

SEQ ID NO: 35711 - DNA, 120 bp, synthetic construct; identical to SEQ ID NO: 10386
  source 1..120: mol_type = other DNA

SEQ ID NO: 35712 - DNA, 120 bp, synthetic construct
  source 1..120: mol_type = other DNA
gcatgtgagatgggtctcttgaagacagcacaccaatgggggttggctctttatccagtttgccattttgtgtctttcaattggtgcatttagcccgtttacatttaaggctagtattgt

SEQ ID NO: 35713 - DNA, 120 bp, synthetic construct
  source 1..120: mol_type = other DNA
atggtttttcctttccacatttagtgcttccttcaggagcttttgcatggtaggcctggtattgacgaattccctcaacatttgcttgtctgaaaaggatcttatttctcttttgtttat

SEQ ID NO: 35714 - DNA, 120 bp, synthetic construct; identical to SEQ ID NO: 10387
  source 1..120: mol_type = other DNA

SEQ ID NO: 35715 - DNA, 120 bp, synthetic construct
  source 1..120: mol_type = other DNA
ctccttcaggtaccccagtcagttgcaggttccatctctttacataatcccacatttcttggaggttttgttcattccttttcattcttttttctctattcttgtctgcctgtcttattt

SEQ ID NO: 35716 - DNA, 120 bp, synthetic construct
  source 1..120: mol_type = other DNA
tgttcctctctaaactggctattctggttatcagctcctgtattgttttatcatgattcttagcttctttgcattgggttacgacatgctcctttatctcagcgaagtttgttatttccc

SEQ ID NO: 35717 - DNA, 120 bp, synthetic construct
  source 1..120: mol_type = other DNA
gtttttgcattgattctttctcatctttgtgggcttatctaccttcgacctttgaggctgctgacttctgaaaaggtttctgtggggtcttttttgttgatgttgttgttgtttttttct

SEQ ID NO: 35718 - DNA, 120 bp, synthetic construct; identical to SEQ ID NO: 10388
  source 1..120: mol_type = other DNA

SEQ ID NO: 35719 - DNA, 120 bp, synthetic construct
  source 1..120: mol_type = other DNA
taggcaagctggaacagctcagttgactgaaccacagagatggcagcctcccctccttctgggagctgcatcccagggagagatcagagctctctgtccatataagcccggctggagtga

SEQ ID NO: 35720 - DNA, 120 bp, synthetic construct
  source 1..120: mol_type = other DNA
catctggaccacccagactctctggagctggcaggctggaatgtgcagttgaccaaaccacagaaatggtagccacccctcccacagggaactccatcctgtttcaggcagactcactgt

SEQ ID NO: 35721 - DNA, 120 bp, synthetic construct
  source 1..120: mol_type = other DNA
ggtacaaagggatctgtcaccttgctggaaattccggggccggagtatgtaaaactcttgtctctgtgtgtacctgtgctgagactccgcacagctctgtttattggacccaaggccctg

SEQ ID NO: 35722 - DNA, 120 bp, synthetic construct
  source 1..120: mol_type = other DNA
ctttggctccgtgaggctcctgggtgggccactgacccactctgcttttctttattctctctggatcagggtgattgtttagtcagtcccaatgcgagaacctggatatttcagttgaag

SEQ ID NO: 35723 - DNA, 120 bp, synthetic construct; identical to SEQ ID NO: 10389
  source 1..120: mol_type = other DNA

SEQ ID NO: 35724 - DNA, 120 bp, synthetic construct
  source 1..120: mol_type = other DNA
actgacagattgtgaaggtctatttttttgcaaaggtaaggagttcagccatcatttttttttctcacttgacatatataatccttcaaagtcaccatctggtgacttcattaccagtcg

SEQ ID NO: 35725 - DNA, 120 bp, synthetic construct
  source 1..120: mol_type = other DNA
taaactccttttgaacactttctcacacccacacctctgcacactgctggtagctagcatgctatttaagaaaagtgtttttttaatctactctttattgatctaaggatactctggtca

SEQ ID NO: 35726 - DNA, 120 bp, synthetic construct
  source 1..120: mol_type = other DNA
gatctcggctcactgcaagctccgcctcccgggttcacgccattctcctgcctcagcctcccgagtagctgggactacaggcgcccgccactacgcccggctaattttttgtatttttag

SEQ ID NO: 35727 - DNA, 120 bp, synthetic construct; identical to SEQ ID NO: 3192
  source 1..120: mol_type = other DNA

SEQ ID NO: 35728 - DNA, 120 bp, synthetic construct
  source 1..120: mol_type = other DNA
tcccagcatattctgttcttggcagccttaattctagtaggtgctgtctcatcagctgtagtcagtgtctttctgaggcaatgatgccaaaacagtgatgtttcatcagcattatagact

SEQ ID NO: 35729 - DNA, 120 bp, synthetic construct
  source 1..120: mol_type = other DNA
ttcttaaatttctgcaaccagactattgattattcacagttccttttaattttcagttcatcattggcctttgtttcatggtcagcataccactatgtgccatgtgttcactgtgacgtg

SEQ ID NO: 35730 - DNA, 120 bp, synthetic construct
  source 1..120: mol_type = other DNA
gacagatccgcactttcaatacatgatcaaaatcttcatgtttggctttatgcagttttctaatcttcactaacttctgtgaatcagtttcagcacagaacttcagcggtgtatccttct

SEQ ID NO: 35731 - DNA, 120 bp, synthetic construct; identical to SEQ ID NO: 10391
  source 1..120: mol_type = other DNA

SEQ ID NO: 35732 - DNA, 120 bp, synthetic construct
  source 1..120: mol_type = other DNA
tgggagggtttttttttttttttttttctgcttgaggatgctgagtaaactgtgtattgtgtgcctgcgttttgactgtgactcgtcacataaggtcaagtataacattttcaacgcatg

SEQ ID NO: 35733 - DNA, 120 bp, synthetic construct
  source 1..120: mol_type = other DNA
aatctgtgttcacccagaaagctaactgagctgagaaaaaatcttaaagggagatgtctttcattatttcagtttatttactggttgatgattagtcatcttttctgtttcttcttgttc

SEQ ID NO: 35734 - DNA, 120 bp, synthetic construct
  source 1..120: mol_type = other DNA
ctctgcctcctgggttcaagcaattctcctgcctcagtctcctgagtagctgggactacaggcgcccaccaccatgcctggctaattttttgtatttttagtagagacggggtttcacca

SEQ ID NO: 35735 - DNA, 120 bp, synthetic construct; identical to SEQ ID NO: 10392
  source 1..120: mol_type = other DNA

SEQ ID NO: 35736 - DNA, 120 bp, synthetic construct
  source 1..120: mol_type = other DNA
tgacttccaggagcttactagagaaataaaaaattgtagcctgcagttttcaaaaccaattcatcacaagattgaaggttataaatctaaataatggtcagtattagcccaatagtgacc

SEQ ID NO: 35737 - DNA, 120 bp, synthetic construct
  source 1..120: mol_type = other DNA
aaatggactaagccataaggacctcttgtgaactctcatatggatgtctggattttaggaacaggattatcagatcagtgggagaaaatgtataaacattgggaagtagaatcatttcaa

SEQ ID NO: 35738 - DNA, 120 bp, synthetic construct
  source 1..120: mol_type = other DNA
atctttttttcaatattaaaaatagtaggaagaagctgggcctggtggctcatgcctgtaattccagcactttgggaggctgaggcaggaggattgcttgaggccaggagtttgagacca

SEQ ID NO: 35739 - DNA, 120 bp, synthetic construct; identical to SEQ ID NO: 10393
  source 1..120: mol_type = other DNA

SEQ ID NO: 35740 - DNA, 120 bp, synthetic construct; identical to SEQ ID NO: 3195
  source 1..120: mol_type = other DNA

SEQ ID NO: 35741 - DNA, 120 bp, synthetic construct
  source 1..120: mol_type = other DNA
cccccacagcattttctttgctatcacaaggcctattattctttcctcaacatttgctggaggctttggagcccagttcacagccttctccacctcctattcatatacctcatcaaaatg

SEQ ID NO: 35742 - DNA, 120 bp, synthetic construct
  source 1..120: mol_type = other DNA
ttcatctcttccatacatcagccactcacttccatggtcacacagagcctgtgttcactcagagacatgttgcctctgaaaacataaactcagcaatgtcaggctctgaacatagtttcc

SEQ ID NO: 35743 - DNA, 120 bp, synthetic construct; identical to SEQ ID NO: 10394
  source 1..120: mol_type = other DNA

SEQ ID NO: 35744 - DNA, 120 bp, synthetic construct
  source 1..120: mol_type = other DNA
catggtggttggcgcctgtaatctcagctacttgggaggctgaggtaggagaatcacttgaacccaggaggcggaggttgcagtgagctgagatcgtgccactggactccaccctaggcg

SEQ ID NO: 35745 - DNA, 120 bp, synthetic construct
  source 1..120: mol_type = other DNA
ttttctgattttatacttgtctaccaaatattgctagggcgaacaatgcatttgcagaagaaccaatctgcaaattatggcctccaatctctacaaggaactcaatgttgctagtaaact

SEQ ID NO: 35746 - DNA, 120 bp, synthetic construct
  source 1..120: mol_type = other DNA
acacctcagatttaaaccctttcatgactcttcatcgccttccgaatgatgttcaaacatcttagtatggctcatacagtcctctgtagcctgacattttctttcatttccttccttacc

SEQ ID NO: 35747 - DNA, 120 bp, synthetic construct; identical to SEQ ID NO: 10395
  source 1..120: mol_type = other DNA

SEQ ID NO: 35748 - DNA, 120 bp, synthetic construct
  source 1..120: mol_type = other DNA
atgctgagatataataaagagcattaatgttttcatgttaatttgtaagaacaatcattgaaaacatgtgactctagatgaggtctgattccttaaatgctgtttgctcagcttggggac

SEQ ID NO: 35749 - DNA, 120 bp, synthetic construct
  source 1..120: mol_type = other DNA
ctgtattctagcttttgtaagtatgtgagaatgactgttaattctctggtcaactgtttgcaaataacacttctaattcatattgccttgatcattaatgaggttgaaaaatgttttcaa

SEQ ID NO: 35750 - DNA, 120 bp, synthetic construct
  source 1..120: mol_type = other DNA
ggtagtaagcatagtacataatagttagtttttcatccctttccccctccttctctccctcttcttgtagtccccagtgtctattgttgccatctgtatgtccatgagtaaccatggttt

SEQ ID NO: 35751 - DNA, 120 bp, synthetic construct; identical to SEQ ID NO: 10396
  source 1..120: mol_type = other DNA

SEQ ID NO: 35752 - DNA, 120 bp, synthetic construct
  source 1..120: mol_type = other DNA
ctgccttccacagtggctgaactaatttatattcccaccaatagtatgtaagtgttcccttctctccaaagcctcaccagcatctgttgttttttgactttttaatagtagccattctaa

SEQ ID NO: 35753 - DNA, 120 bp, synthetic construct
  source 1..120: mol_type = other DNA
catgtctttggctccctttttaaatggggttatttagtttttgcttgctgaattttttaagttccttacagattctggatttaaacctttaccagatacatactttgtgaacattttctc

SEQ ID NO: 35754 - DNA, 120 bp, synthetic construct
  source 1..120: mol_type = other DNA
tggtctttgacaaagttgacaaaaataagcaatggggaaaggactccctattcaataaatggtgctgggataactggctagtcatatgcagaacaaaactgaacttctacctttcactat

SEQ ID NO: 35755 - DNA, 120 bp, synthetic construct; identical to SEQ ID NO: 10397
  source 1..120: mol_type = other DNA

SEQ ID NO: 35756 - DNA, 120 bp, synthetic construct
  source 1..120: mol_type = other DNA
tttactttaaggctagtcctttttgtgtccattttaatgaagtctttccctgtttcaggtcatgaagatattcttccatgtaattgtttagcatctttattgttttacctttcatattta

SEQ ID NO: 35757 - DNA, 120 bp, synthetic construct
  source 1..120: mol_type = other DNA
agcagtgagcgagtattattagtgcttgagctccacttcctgtcagatccgcagtgacattagattctcatgggggcgcaaaccctattgtgaaccgcacatgagggatctaggctgtgt

SEQ ID NO: 35758 - DNA, 120 bp, synthetic construct
  source 1..120: mol_type = other DNA
aactgtcttccatgaaaccagtccctggtgccaaaaaggttgggggccgctgagggaatatgtttcatttttttccgatcgatattaaataaagggcttttaaaactgtttatttcaggc

SEQ ID NO: 35759 - DNA, 120 bp, synthetic construct; identical to SEQ ID NO: 10398
  source 1..120: mol_type = other DNA

SEQ ID NO: 35760 - DNA, 120 bp, synthetic construct
  source 1..120: mol_type = other DNA
acttttaacttttactatacaatgtttaatcttttaatttatattatatttaaaagcttgctaaataagtaaattttattattccatccttttgctactagagtgaccattataactgaa

SEQ ID NO: 35761 - DNA, 120 bp, synthetic construct; identical to SEQ ID NO: 3200
  source 1..120: mol_type = other DNA

SEQ ID NO: 35762 - DNA, 120 bp, synthetic construct
  source 1..120: mol_type = other DNA
acatatgtcaaaattttaaaaagcatcccgtaacttaaaagaataaagggaggctgagtgcggtggctcacacctataatcccagcactctgggaggctgaggctggtggatcacctgag

SEQ ID NO: 35763 - DNA, 120 bp, synthetic construct
  source 1..120: mol_type = other DNA
ggagaattgcttgaacccgggaggcagaagttgcagtgagccaagattgtgccactggattccagcctgggcaacagagtgagattccgcctcaaaataaatacaatacaatacaataca

SEQ ID NO: 35764 - DNA, 120 bp, synthetic construct; identical to SEQ ID NO: 10399
  source 1..120: mol_type = other DNA

SEQ ID NO: 35765 - DNA, 120 bp, synthetic construct
  source 1..120: mol_type = other DNA
gttcagcaaatgaatgtaggaactaggtaatacactaatattgagagattaagtggcataaatatccctgtatcctcagaaaaatgaaagcacccctggtctggattctgtgggaggctc

SEQ ID NO: 35766 - DNA, 120 bp, synthetic construct
  source 1..120: mol_type = other DNA
cacacacacacgcacacacaacccccccccccccatttaattttcttttatgttagctgggaattaaaaagagggcttctatagtttagcaaagtaagagaaatggttttgggaaaccta

SEQ ID NO: 35767 - DNA, 120 bp, synthetic construct; identical to SEQ ID NO: 10400
  source 1..120: mol_type = other DNA

SEQ ID NO: 35768 - DNA, 120 bp, synthetic construct
  source 1..120: mol_type = other DNA
tttctctacagagataattggagactagacagacaatgagctatttggggggagtttattctaatcgtttcatgaccaaggcaaagaatacaagcttagtttaaatcattaaatacttac

SEQ ID NO: 35769 - DNA, 120 bp, synthetic construct
  source 1..120: mol_type = other DNA
tttattttgtagttgaatttctgggacacaaaagcacagatggcctttccaactccatactgcagtagacatctgctgttgtttttgccttcccagcatttattcctccttcctttggta

SEQ ID NO: 35770 - DNA, 120 bp, synthetic construct
  source 1..120: mol_type = other DNA
tccagacttggccaattagaacatcatagcctcatagacacaggtattggttcagaaatgggcaagaggcccaagccagcccgtgagacatattctccaacttcttaacaacactattgg

SEQ ID NO: 35771 - DNA, 120 bp, synthetic construct; identical to SEQ ID NO: 10401
  source 1..120: mol_type = other DNA

SEQ ID NO: 35772 - DNA, 120 bp, synthetic construct
  source 1..120: mol_type = other DNA
ccctggagttttcagtgccataagccaaaaatttcctcttttttgcttaaaccagcttgaggcaggattctgagatctgtaactgaaagagtactgacttgacttgtcagtcaagcagcc

SEQ ID NO: 35773 - DNA, 120 bp, synthetic construct
  source 1..120: mol_type = other DNA
ctcttccctcactgtttcatctctgaattgaatgtaggtatgtctacaatatcattattttaaaaagtaggaaatcaggcccaatactcactggtccacttccggccgtgaggttctgca

SEQ ID NO: 35774 - DNA, 120 bp, synthetic construct
  source 1..120: mol_type = other DNA
ccggcatcggcacgtcctggtattgctgaccacacacaaaaggaatccagaattaatgcatgtcaggtgatggctataatttcacactcaaaccaggagaccagaaatactgtctagaaa

SEQ ID NO: 35775 - DNA, 120 bp, synthetic construct; identical to SEQ ID NO: 10402
  source 1..120: mol_type = other DNA

SEQ ID NO: 35776 - DNA, 120 bp, synthetic construct
  source 1..120: mol_type = other DNA
cacaaataccacgatactcagagaaggaggggaggttacattctcttagttttcatatcagtatggaaataaatatgtattccttcctatgaggtttgcttttagtatgtccaaagtttg

SEQ ID NO: 35777 - DNA, 120 bp, synthetic construct
  source 1..120: mol_type = other DNA
tgggtagcaatgaaaatctggagccagactgcctggcattgtattcaatctcttccacttatttgctgaattattccaggaaaattaatcttactgtgtctctgtttcctcactggtaaa

SEQ ID NO: 35778 - DNA, 120 bp, synthetic construct
  source 1..120: mol_type = other DNA
attctctccctttctcattctttcaaaaacttcccaatatacctcttttactttcctgcttcgactgccaaaacatccaatacttttgttgttgtcagtctggatattccggttttgaat

SEQ ID NO: 35779 - DNA, 120 bp, synthetic construct; identical to SEQ ID NO: 10403
  source 1..120: mol_type = other DNA

SEQ ID NO: 35780 - DNA, 120 bp, synthetic construct
  source 1..120: mol_type = other DNA
aatgctaagaagtagaggctgagtctttttagtttactttctaaagagtgtgtccagaacaactgtatagcttagatacgtaacttactagccatgttgagctggagaaggggaggagat

SEQ ID NO: 35781 - DNA, 120 bp, synthetic construct
  source 1..120: mol_type = other DNA
tagagggaagtgtaagaactgaaagccttttcagaggtagacagcacacaattactcagatttccatcttcttttggtggatggtgatgattattaagaaggattatagtccaggtgctg

SEQ ID NO: 35782 - DNA, 120 bp, synthetic construct
  source 1..120: mol_type = other DNA
ccaacatggcaaaaccctgtctctactaaaaatacaaaaaaaattagctgggcatggtggcgtacacctgtaatcccagttatttgggaagctgaggcaggagaattgcttgaacccagg

SEQ ID NO: 35783 - DNA, 120 bp, synthetic construct; identical to SEQ ID NO: 10404
  source 1..120: mol_type = other DNA

SEQ ID NO: 35784 - DNA, 120 bp, synthetic construct
  source 1..120: mol_type = other DNA
attctcctgcctcagcctcctgagtagctggaactacaggtgcccgccaccacgcccggctatattttttgtatttttagtagagacggggtttcaccatgttatccaggatggtctcaa

SEQ ID NO: 35785 - DNA, 120 bp, synthetic construct
  source 1..120: mol_type = other DNA
gtaaatgaatcagtgaataaacctaaaaccaagcggctatcttaagaatattctgaagcatcttagtaagacaaaacaggatatttatctcttgaattaccttgtcatctggctggtaat

SEQ ID NO: 35786 - DNA, 120 bp, synthetic construct
  source 1..120: mol_type = other DNA
aaaaagtaagtctaggctgtgtatccaacaggtctttgttttgaagttttacttgatgcttcttccaggtgtttggaaactggcaaatttgtaaaagtgtggcagacttgcccagtcaac

SEQ ID NO: 35787 - DNA, 120 bp, synthetic construct; identical to SEQ ID NO: 10405
  source 1..120: mol_type = other DNA

SEQ ID NO: 35788 - DNA, 120 bp, synthetic construct
  source 1..120: mol_type = other DNA
attaaatcagatgctctaaaatgcgattattttatcattaaaatggcagagagatgttacagaaaacatgagagtttgcagtgtgtaaggcttcagtcaaaagtatgacctataaatatc

SEQ ID NO: 35789 - DNA, 120 bp, synthetic construct
  source 1..120: mol_type = other DNA
cctttctataaacagtaactaaacctataattggaagttgtttactgatagagaaatgaaacttatcaaatacaggaaagtaatgcatttggggattacagtgcagattcagatcatgtg

SEQ ID NO: 35790 - DNA, 120 bp, synthetic construct
  source 1..120: mol_type = other DNA
ttttccaaaaatgtcaatacctcagtcaacaagaatgacaaaaaatagggccttcaggttttaagaacttgagaatcacctctattcccaactttaattgctaagaactgtccctataaa

SEQ ID NO: 35791 - DNA, 120 bp, synthetic construct
  source 1..120: mol_type = other DNA
ttcaagcgattctcctgcctcagcctcccgagtagctgggactacaggcgtgcgtcactatgcccagctaatttttgtatttttagtagagacggggtttcaccatgttggttggccagg

SEQ ID NO: 35792 - DNA, 120 bp, synthetic construct; identical to SEQ ID NO: 10406
  source 1..120: mol_type = other DNA

SEQ ID NO: 35793 - DNA, 120 bp, synthetic construct
  source 1..120: mol_type = other DNA
ccagcctgggcaacatggctaaaccctgtctctatgaaaaaatacaaaaaattagctacgcatggtggcatgtgcctgtagtcccagctacctgggagactgaggaagaagattgcttga

SEQ ID NO: 35794 - DNA, 120 bp, synthetic construct
  source 1..120: mol_type = other DNA
aaataaagtaatataatataagtgatttccaaaaggccttctgcctcaaaatactgctttcagtgcatatttgtcaaagaaacaaaggtgcctaagcattacatcaagaactaaaggtgg

SEQ ID NO: 35795 - DNA, 120 bp, synthetic construct
  source 1..120: mol_type = other DNA
taccaaacaaaattagccaggcatggtggtgggcgcctgtattcccagctactcgggaagctgaggcaggagaatggtgtgaactcggaaggtggagcttgcagtgagccgagatcgtgc

SEQ ID NO: 35796 - DNA, 120 bp, synthetic construct; identical to SEQ ID NO: 10407
  source 1..120: mol_type = other DNA

SEQ ID NO: 35797 - DNA, 120 bp, synthetic construct
  source 1..120: mol_type = other DNA
agtttgttcatttaaaaaaaaatgaatgggttcataagctggaaataaaacaattttttacttagcttttttcaaagaatgatcatttcaaccaagatcctctatctactttgtgagccc

SEQ ID NO: 35798 - DNA, 120 bp, synthetic construct
  source 1..120: mol_type = other DNA
caaattagtggtaaagtcaggaaaagagggctgttctttattctacacccagggtggcccagaacagagcaaatcccagctagcattcattcagtctgcaaataccatatgtccccaact

SEQ ID NO: 35799 - DNA, 120 bp, synthetic construct; identical to SEQ ID NO: 10408
  source 1..120: mol_type = other DNA

SEQ ID NO: 35800 - DNA, 120 bp, synthetic construct
  source 1..120: mol_type = other DNA
aaagtgcatggaaccccattgctttagtatttgctcctgcatatcaaaaatagttcccaccttactcaactacacagaaatatgaatgataagggtagattattttataccactgcatcc

SEQ ID NO: 35801 - DNA, 120 bp, synthetic construct
  source 1..120: mol_type = other DNA
cttgtgggaatcagaaaattaacatggctacctttaggcagaattgatcttttttacaacgtatctcttgaatcataagaactatttattgattggtttcccatacattacccaatggtg

SEQ ID NO: 35802 - DNA, 120 bp, synthetic construct
  source 1..120: mol_type = other DNA
agttaccaatagaatatattaaaaacgtgtaatttagtgcctgtcgtttgcatttgattaaacgatgggtttatttcctctggtataatcaagcctaagtctgagtaaatatctgcagac

SEQ ID NO: 35803 - DNA, 120 bp, synthetic construct
  source 1..120: mol_type = other DNA
ctttaagaaaactaaaactgcatactgttatatactgaaatttaaaaacaggtccttaggggttgaaggcaaggggccagggccttaggagaagtagagtgaggaaggagacaaattact

SEQ ID NO: 35804 - DNA, 120 bp, synthetic construct; identical to SEQ ID NO: 10409
  source 1..120: mol_type = other DNA

SEQ ID NO: 35805 - DNA, 120 bp, synthetic construct
  source 1..120: mol_type = other DNA
aatgacagtgtgagtaaatcttagattcatatggtaaaccaaagaatggacagtgacaaatggaaaaaaacagctgcaatttagtgtttgcactagacattatggtaggcaacttataaa

SEQ ID NO: 35806 - DNA, 120 bp, synthetic construct
  source 1..120: mol_type = other DNA
tacaggctcttccacataaggtaggatataaagtagtttgtctgtggctatgtgcaggggtgctgtcaaatatgcttaattgaccagtgctgaaaggaagtttgttacaacacagaacat

SEQ ID NO: 35807 - DNA, 120 bp, synthetic construct; identical to SEQ ID NO: 10410
  source 1..120: mol_type = other DNA

SEQ ID NO: 35808 - DNA, 120 bp, synthetic construct
  source 1..120: mol_type = other DNA
aggtgcgactataggcatgcactgccgagcccagctaatttattttttgtacagacagagtctatgttgcccaggctggtcttgaactcttcgcctcatgtgatcctccagcctggcccc

SEQ ID NO: 35809 - DNA, 120 bp, synthetic construct
  source 1..120: mol_type = other DNA
agtgtggtggcacaatcacagctcactgcagccttaacctcctcggctcaagggatcttcccacctcagcctcctgagtagctgggactacaggcgcatgtcaccatgctcagtggattt

SEQ ID NO: 35810 - DNA, 120 bp, synthetic construct
  source 1..120: mol_type = other DNA
tttgttttttaaatgggactattgctacttgataatgggtatggttttttaactaacacacagtttatgtgcatgtattgtatacaaggcctggtggctgtgggaccagtcttttatttt

SEQ ID NO: 35811 - DNA, 120 bp, synthetic construct
  source 1..120: mol_type = other DNA
ccgctgcccaagttcaacgggttctccttcctcagcctcctgagtagctgggatcacaagtgtgtgccactgcgcccagctaatttttgtatttttagtagagacagggtttcaccatgt

SEQ ID NO: 35812 - DNA, 120 bp, synthetic construct; identical to SEQ ID NO: 10411
  source 1..120: mol_type = other DNA

SEQ ID NO: 35813 - DNA, 120 bp, synthetic construct
  source 1..120: mol_type = other DNA
gaagcatccttcttcctcttgttatttgagatttaggcttgggcttttgtttaactcccacctgatacatatcaaacagttgggccttgtctgtgattaactaagagaagcagtacagtc

SEQ ID NO: 35814 - DNA, 120 bp, synthetic construct
  source 1..120: mol_type = other DNA
agcaaacatcagccaaagtcagctgttcattctgcaaatagagaacattgggaggtagaacaaggccctacaacctacacatcttggtcctacggggataagaaaaattaatggaaaaaa

SEQ ID NO: 35815 - DNA, 120 bp, synthetic construct
  source 1..120: mol_type = other DNA
gggagaccgaggtgggcagatcacctgaggtcaggagttcaagaccgcctggccaacatggtgaaaccctgtctctattaaaaataaaaaaattagctgggtgtagtagcgcatgcctgt

SEQ ID NO: 35816 - DNA, 120 bp, synthetic construct; identical to SEQ ID NO: 10412
  source 1..120: mol_type = other DNA

SEQ ID NO: 35817 - DNA, 120 bp, synthetic construct
  source 1..120: mol_type = other DNA
tgacatgtaaaggagatgtttggaatgtcagaccaggaataagaaagatgtttaagacctagagtagaataatatgatgctcaatccatacctccaagataggcacagattttaaccaca

SEQ ID NO: 35818 - DNA, 120 bp, synthetic construct
  source 1..120: mol_type = other DNA
ggaataagaccttgtgtcacaaaatacagttcataaaacaccaatttgagctatacacagatatttttctttaaacatgaagatggtattaaaagtatctgagaaagacattcttgtgaa

SEQ ID NO: 35819 - DNA, 120 bp, synthetic construct
  source 1..120: mol_type = other DNA
ctctgtattgttcctattcatgtattttcaggcagtcaatatttatgcactgattgataagaataaagagtctctttagcaaagagaagtgttacataatttctgtaaagtacaactttt

SEQ ID NO: 35820 - DNA, 120 bp, synthetic construct; identical to SEQ ID NO: 10413
  source 1..120: mol_type = other DNA

SEQ ID NO: 35821 - DNA, 120 bp, synthetic construct
  source 1..120: mol_type = other DNA
aggcggggtggctcctgtaatcccagcaccttgggaggccaaggcaggcagatcacgagatcagaagattgagactatcctggccaacatggtgaaaccccgtctctactaaaaatacaa

SEQ ID NO: 35822 - DNA, 120 bp, synthetic construct
  source 1..120: mol_type = other DNA
tccagcctggtgacagaatgagagtctgtctcaaaaaaagaaaaaaaaaaaatttacaaagtaatttaattaattaaaccatgtacttgtttgtatatctaaagtaaccaacagaaaata

SEQ ID NO: 35823 - DNA, 120 bp, synthetic construct; identical to SEQ ID NO: 3214
  source 1..120: mol_type = other DNA

SEQ ID NO: 35824 - DNA, 120 bp, synthetic construct
  source 1..120: mol_type = other DNA
tgatagtcaagaaaattagaccctgatttaattatcttcttaattatctgggactatgcacaaggctagatcaaataagtcatgagtattcagaataagatatggatgagcaaaggtaac

SEQ ID NO: 35825 - DNA, 120 bp, synthetic construct
  source 1..120: mol_type = other DNA
aaaccccgtctctactaaaaatatgaaaaccagctgggcgaggtgccgtgcacctgtagtcccagctactcgggaggctgagacaggagaattgcttgaacctggcaggcagaggttgca

SEQ ID NO: 35826 - DNA, 120 bp, synthetic construct
  source 1..120: mol_type = other DNA
agatgcagtaaatttctaaagtttggtaccaagatacgcattaaaaattatatttggtatgtggtttttttggtgtgtatgtgctggagaagacagttgtaactgaatgcattaaaaatg

SEQ ID NO: 35827 - DNA, 120 bp, synthetic construct; identical to SEQ ID NO: 10415
  source 1..120: mol_type = other DNA

SEQ ID NO: 35828 - DNA, 120 bp, synthetic construct
  source 1..120: mol_type = other DNA
caaattgcttttcttctttaaccagcatacacaggcataaaatgcattgagaaaaaagaatatgttttaaaatgtgtaatgacaaattctggggaggccttcacaaagcagactgcacct

SEQ ID NO: 35829 - DNA, 120 bp, synthetic construct
  source 1..120: mol_type = other DNA
ttagggctttatgaattcacatttttaatatgactacagtatttaagaacgttggtgatgacctaatgatagaatgatgaactaaagactgagagggacatttaaacacctactcatcct

SEQ ID NO: 35830 - DNA, 120 bp, synthetic construct
  source 1..120: mol_type = other DNA
tctcttaaatctcttaccaaatgcattgtcatgatctcttcaggtgccagtttcctccacgaaacccagagttcctccagggcaaaaataggtcccattcccttttgaaatctcagaaat

SEQ ID NO: 35831 - DNA, 120 bp, synthetic construct; identical to SEQ ID NO: 10416
  source 1..120: mol_type = other DNA

SEQ ID NO: 35832 - DNA, 120 bp, synthetic construct
  source 1..120: mol_type = other DNA
taccattcctcatggtcttacacctgcccacttaagtgcctacctgaactctgaggcattttaatttattacctctaaattgcttccagttcttgtcctttaagagaagaaagaagactg

SEQ ID NO: 35833 - DNA, 120 bp, synthetic construct
  source 1..120: mol_type = other DNA
gttttattgatgctacatccaggggttttccaatcagtgatgtagaaaacagagttaatagtcaggtcacaccaatgccctaggaactgatactatgagccacagtataaattcacacta

SEQ ID NO: 35834 - DNA, 120 bp, synthetic construct
  source 1..120: mol_type = other DNA
tttttttgaagtagagtcttgctctgttgcccggactggagtgcagtggcgcgacttcggctcactgcaagctctgcctcccgggttcaagcgattctcctacctcagcctcccgagtag

SEQ ID NO: 35835 - DNA, 120 bp, synthetic construct
  source 1..120: mol_type = other DNA
gcccggcctacttttgggtagtttaaaattctaagcctattatataaatattttggaatttaaaatatttggaagagcaatctgataactgcaatacatattttaactaagttatacttc

SEQ ID NO: 35836 - DNA, 120 bp, synthetic construct; identical to SEQ ID NO: 10417
  source 1..120: mol_type = other DNA

SEQ ID NO: 35837 - DNA, 120 bp, synthetic construct
  source 1..120: mol_type = other DNA
ctttctttgtttttagagatgggtccatgtagcccaggctggacctctgggctcaagcaatcctcctgcctcagcctcccaagttgttgagactactggcacacaccaccatgcctggct

SEQ ID NO: 35838 - DNA, 120 bp, synthetic construct
  source 1..120: mol_type = other DNA
cacactggagtgtacaatttattttcctctcctatcttggattttcccactcattaagctagtgtagtattacttaagaaaaaattggaaacttacgtgggcacatggttatccctattg

SEQ ID NO: 35839 - DNA, 120 bp, synthetic construct; identical to SEQ ID NO: 10418
  source 1..120: mol_type = other DNA

SEQ ID NO: 35840 - DNA, 120 bp, synthetic construct
  source 1..120: mol_type = other DNA
cggagaaagttcactgttgtatgcacaagtttttctccaaaatggatggaaataatttactatagtaatctaaatcaaacacaatgcctgaaatactactcaatttagttcactgtcggc

SEQ ID NO: 35841 - DNA, 120 bp, synthetic construct
  source 1..120: mol_type = other DNA
atctgtcttaagatttttaagagtgagctgtagacataaatgagcaactactcagcagatacctctatgtcctggaaatcaatgctacgtgactgcaggttccatggagttcttttctta

SEQ ID NO: 35842 - DNA, 120 bp, synthetic construct
  source 1..120: mol_type = other DNA
tgccatctcctaccttggaaaggtgtcccatttcatatgcttcatctttgtatcttctttgattatatgaaatgcagtgcagagttctacatgcacagaacttcaaaaagaacaacactg

SEQ ID NO: 35843 - DNA, 120 bp, synthetic construct; identical to SEQ ID NO: 10419
  source 1..120: mol_type = other DNA

SEQ ID NO: 35844 - DNA, 120 bp, synthetic construct
  source 1..120: mol_type = other DNA
tacattatggcactcacttcccagattttggctatattctgcttttggaaggtgaaattcaaatgagtggtctggactgttttgcaaacactgtttaaaacagtgctattctgactggag

SEQ ID NO: 35845 - DNA, 120 bp, synthetic construct
  source 1..120: mol_type = other DNA
aacatcgttgcctttagatttttaccttcacaatacacctttcctgttaatactattattcttcttcttcccacaaaaattatcatatctctgtcctccatactagctaattttgcttac

SEQ ID NO: 35846 - DNA, 120 bp, synthetic construct
  source 1..120: mol_type = other DNA
atgcgctcgcatgttcatcgcaggactgttcgcaataacaaagacatggctaggttcccatcaataggggactggataaggagaatgtggtatacatacaccatggaatactacacagcc

SEQ ID NO: 35847 - DNA, 120 bp, synthetic construct; identical to SEQ ID NO: 10420
  source 1..120: mol_type = other DNA

SEQ ID NO: 35848 - DNA, 120 bp, synthetic construct
  source 1..120: mol_type = other DNA
taatgtgatcctcaagatcgccactatctggctttagcctatgtttccaatttctgtttgattactttctatcacaaactccatactcttatcagacttgattattcaccaatttcacca

SEQ ID NO: 35849 - DNA, 120 bp, synthetic construct
  source 1..120: mol_type = other DNA
tgtaaacaactatcatataacagcaatgtgacaaaatcagtaacagtggtgacttggctatgaactcccgtttgaaccctcaggaacaagcactagcttttgctggggaagctggaaaat

SEQ ID NO: 35850 - DNA, 120 bp, synthetic construct; identical to SEQ ID NO: 10421
  source 1..120: mol_type = other DNA

SEQ ID NO: 35851 - DNA, 120 bp, synthetic construct
  source 1..120: mol_type = other DNA
cttggacaatccaggccaacagttgctcaaatgatgtgcccctttctgaatcaaggccaggaaaaaactttccctgtgattggcacaatcattttaagaaagatgtgcactttttttttt

SEQ ID NO: 35852 - DNA, 120 bp, synthetic construct
  source 1..120: mol_type = other DNA
tacaaacagaaaaagagtgagtcctaggaatgctgaattctgtcccaaaaagggaatacggtcatggttcctggtatacttccttcacttcctcaagtgacctgcaatatctcagccaca

SEQ ID NO: 35853 - DNA, 120 bp, synthetic construct
  source 1..120: mol_type = other DNA
gagctggagagaaactttaagacgtgaaatatgtttaagcaggtgagcgatggatcaaagtgcactagaaaagcagattcaatgggcagtacagaagatggattcgaggaaggccactta

SEQ ID NO: 35854 - DNA, 120 bp, synthetic construct
  source 1..120: mol_type = other DNA
ccagatgccatgaatggtcctttgttctgcattcccgcagcacttcacttgcacctttgacatcctagttcgcaaacttcagtgactgtcagaatcacctagaggcttgttaaaactaga

SEQ ID NO: 35855 - DNA, 120 bp, synthetic construct; identical to SEQ ID NO: 10422
  source 1..120: mol_type = other DNA

SEQ ID NO: 35856 - DNA, 120 bp, synthetic construct
  source 1..120: mol_type = other DNA
gtaggtgggactacatgtgcacaccaccatgtccagctaattttttcatttttttgtggagacagggtcttgctatgttgcctaggctggtctcgaactcctgacctcaactgatccttc

SEQ ID NO: 35857 - DNA, 120 bp, synthetic construct
  source 1..120: mol_type = other DNA
atttgatatgtattactgtgtgattaactatggagataaaataaacatcttatcataataaattctttcagttaccatccaaataaagtctctcaaaaaataaactgtgtaggccgggca

SEQ ID NO: 35858 - DNA, 120 bp, synthetic construct; identical to SEQ ID NO: 3222
  source 1..120: mol_type = other DNA

SEQ ID NO: 35859 - DNA, 120 bp, synthetic construct
  source 1..120: mol_type = other DNA
aatgcttctgttatcatgagattcttgagtttgtcattagatgacaaattccacagcaaacctagaaaagcacagagttaccatgaaaacagtgcagggtgggaccaaaatgaccgctga

SEQ ID NO: 35860 - DNA, 120 bp, synthetic construct
  source 1..120: mol_type = other DNA
ggaggctgacccacatgagcaataaatacatggcttaggctacaaactgtgcaggtttaaactaatcagatatacaaataaaggccagacatgcttaagcatttattgctgtttctccta

SEQ ID NO: 35861 - DNA, 120 bp, synthetic construct
  source 1..120: mol_type = other DNA
gtaactaaaacttcaacatttttaaagagtcatatttttttctcccttagatacacatgggaaaatatcttccctgcctccttccccactaactgtaactttcacctgacattgtgcctc

SEQ ID NO: 35862 - DNA, 120 bp, synthetic construct; identical to SEQ ID NO: 10424
  source 1..120: mol_type = other DNA

SEQ ID NO: 35863 - DNA, 120 bp, synthetic construct
  source 1..120: mol_type = other DNA
gacatacagactgaggctgagtactgagagaaaatagaaagtggcatatacgtttaggattttttttgtttttgaaatttggagctcgaatccttctgattcagtggaaggaagactgta

SEQ ID NO: 35864 - DNA, 120 bp, synthetic construct
  source 1..120: mol_type = other DNA
tgatctcggttcattgcaatctccacctcccaggttcaagcaatgctcctgcctcagcctcccaagtagctggaattacaggcgcccgccaccatgcctgactaatttttgtattttcgg

SEQ ID NO: 35865 - DNA, 120 bp, synthetic construct; identical to SEQ ID NO: 10425
  source 1..120: mol_type = other DNA

SEQ ID NO: 35866 - DNA, 120 bp, synthetic construct
  source 1..120: mol_type = other DNA
ctgcctcagcttcccgagtagctgggattacaggcacacaccaccatgcctggctaatttttgtattctcagtagagacggggtttcaccatgttggccaggctggtctcgaacccttga

SEQ ID NO: 35867 - DNA, 120 bp, synthetic construct
  source 1..120: mol_type = other DNA
gctggagtgtagtggcacaatcttggctcactgcaacttctgcctcccgggttcaagtgattctcctgcctcagtctcctgagtagctgggattacaggcgcagaccacgacacccggct

SEQ ID NO: 35868 - DNA, 120 bp, synthetic construct
  source 1..120: mol_type = other DNA
gccaccgcgcccggccagccattcctacttcttaaattgactgtatggtctgtacaaaggaaagaggaagcataggtactcagggcaggctcctttatgaacacagcaaatgtggcagac

SEQ ID NO: 35869 - DNA, 120 bp, synthetic construct
  source 1..120: mol_type = other DNA
gcagtcttttgggcttaaacagtttgcttctgctgtgcacaggtagctactttttgaaactgtaaccagatttccactggagcctacacagagcttccattagatacagtgacactgtgt

SEQ ID NO: 35870 - DNA, 120 bp, synthetic construct; identical to SEQ ID NO: 10426
  source 1..120: mol_type = other DNA

SEQ ID NO: 35871 - DNA, 120 bp, synthetic construct
  source 1..120: mol_type = other DNA
cttttaaaaaggaccacacaggacactcaaagaaaaagtacaccttacaataaaaaccagagaggattaattggaacaaagggagtggaattttccttcaacagtcaatatcctttagag

SEQ ID NO: 35872 - DNA, 120 bp, synthetic construct
  source 1..120: mol_type = other DNA
tgaaagctgtgaaagaactaagatgttcaatagagattcagaattacatatgctcatacacacataccctcacacaaaatcagtgagtaaccaactacaaactgggaaaatatgtacaat

SEQ ID NO: 35873 - DNA, 120 bp, synthetic construct
  source 1..120: mol_type = other DNA
gtacacaggaatccatgttctctagtaactaaagaaatacaaatttaaacaactagatatcattttccatgactagaggaggcaaaaccagaaccgatgagtggaaattctaaagaagga

SEQ ID NO: 35874 - DNA, 120 bp, synthetic construct; identical to SEQ ID NO: 10427
  source 1..120: mol_type = other DNA

SEQ ID NO: 35875 - DNA, 120 bp, synthetic construct
  source 1..120: mol_type = other DNA
ctaatataatatttacggtttgggttttcatgtgtctcatccttaacttctgatcaattttttcatagtgtcttaatgtctactagtatagctctttgttgcagatggtctgtctgcctg

SEQ ID NO: 35876 - DNA, 120 bp, synthetic construct
  source 1..120: mol_type = other DNA
accaattataagagacaataactccattagccagaaatttactgccaaccgtgatgtttgtaaaaaatagctaaccagtaaagggagcttagatattacaactcatgttaaataataatg

SEQ ID NO: 35877 - DNA, 120 bp, synthetic construct
  source 1..120: mol_type = other DNA
ctaaaaatacaaaaaaaattagccaggcgtggtggcgggtgcctgtagtcccatctacttgggaggctgaggcaggagaatggcgtgaacccgggaggcggagcttgcagtgagccgaga

SEQ ID NO: 35878 - DNA, 120 bp, synthetic construct; identical to SEQ ID NO: 3227
  source 1..120: mol_type = other DNA

SEQ ID NO: 35879 - DNA, 120 bp, synthetic construct
  source 1..120: mol_type = other DNA
cttgcatagatatacccctcctttcacctaaattttgcaaatcttaactggaatatcagattattgaaacggccacgtattccaagttatatataaacccagggtaccttgttacacatt

SEQ ID NO: 35880 - DNA, 120 bp, synthetic construct
  source 1..120: mol_type = other DNA
atgcagggattaatatgcagttttaacacatttcactgacaattaccctgactctttcatatgtaatgaaagagggataagaacccctgctgcactcttatcatgacttgtccgttttaa

SEQ ID NO: 35881 - DNA, 120 bp, synthetic construct
  source 1..120: mol_type = other DNA
tagtaagggagaaagaacaatctcaccggggtggggggagtgggggtgtctttgatcctgaagttctttcattagaagagaagatcctaggctactactgcagaagtagagcgagagatg

SEQ ID NO: 35882 - DNA, 120 bp, synthetic construct
  source 1..120: mol_type = other DNA
gaccagcctgaccaacatggagaaacctccatctctactaaaaatacaaaattagccaggcatagtggcgcatgcctgtaatcccagctacttgggaggctaaggcaggagaatcgcttg

SEQ ID NO: 35883 - DNA, 120 bp, synthetic construct; identical to SEQ ID NO: 10429
  source 1..120: mol_type = other DNA

SEQ ID NO: 35884 - DNA, 120 bp, synthetic construct
  source 1..120: mol_type = other DNA
cactgatcatatgtaagtcaccaattatgctttcacctcttacggagttgtcaggagaaatagggataaaaaaacagaaagccttagcttagtgaccaacacataataggggttcagaaa

SEQ ID NO: 35885 - DNA, 120 bp, synthetic construct
  source 1..120: mol_type = other DNA
agcccttatttagctcttctattagtagagccaaagggagtaatttagaaggatttgtatcagatgttcaaatgtctgtttggttcaattagcatgtaatgaacaccctccagtagggat

SEQ ID NO: 35886 - DNA, 120 bp, synthetic construct; identical to SEQ ID NO: 10430
  source 1..120: mol_type = other DNA

SEQ ID NO: 35887 - DNA, 120 bp, synthetic construct; identical to SEQ ID NO: 3229
  source 1..120: mol_type = other DNA

SEQ ID NO: 35888 - DNA, 120 bp, synthetic construct
  source 1..120: mol_type = other DNA
tctttcaaaacaccaatccaaagcctattccttttttaaggtccacaatgaaacataaccccttcaggaagtatttcctgactataaaactagtagatggagaaacaaaatccaacgcgg

SEQ ID NO: 35889 - DNA, 120 bp, synthetic construct
  source 1..120: mol_type = other DNA
acaaaaaaaccccaaatccacaccgtccctaggctgtgattctcagtacctgacccctgaaagctgctctgtaaatgttggttaaatgaatggaatcacttttaatttctacaggcattt

SEQ ID NO: 35890 - DNA, 120 bp, synthetic construct
  source 1..120: mol_type = other DNA
cgcggaggcaggcggatcgcctgaggtcaggagctcaagaccagcctgatcaacgtggcgaaaccccgtctctactaaaaatacaaaaaattagctgggcgtggtggtgggcacctgtaa

SEQ ID NO: 35891 - DNA, 120 bp, synthetic construct; identical to SEQ ID NO: 10431
  source 1..120: mol_type = other DNA

SEQ ID NO: 35892 - DNA, 120 bp, synthetic construct
  source 1..120: mol_type = other DNA
ggacttaaagatgaataaaagagggaggaaaggacgggggcaagggttgaaaaactatctgttgggtactatgctgagtacctgggtgacaggaccattcgtatcccaaacctcagcatc

SEQ ID NO: 35893 - DNA, 120 bp, synthetic construct
  source 1..120: mol_type = other DNA
ctttatagaaaaattaaacctattatataactaaatgaagcaggtagaagagcaaaatatattcaatttactttaaaacaatatttgtggagtatttccgttaaaagtatttaccagaac

SEQ ID NO: 35894 - DNA, 120 bp, synthetic construct
  source 1..120: mol_type = other DNA
acccaaggtttctgtgataattaaattagaaaatgtacgtatatcgctgagacattgaagatatttaacaaaaatttactgatgattgcactcagttatgcctcctgcaatctttgttaa

SEQ ID NO: 35895 - DNA, 120 bp, synthetic construct; identical to SEQ ID NO: 10432
  source 1..120: mol_type = other DNA

SEQ ID NO: 35896 - DNA, 120 bp, synthetic construct
  source 1..120: mol_type = other DNA
gtgcttattctggaacatcaacaaatcatcttctcttttatcatacgactgttcatttaaatgaaagtagccccttctcttcatgcttagaggacatattactaacactgctgttttaat

SEQ ID NO: 35897 - DNA, 120 bp, synthetic construct
  source 1..120: mol_type = other DNA
ttcttctttaaggtttcagtgagctaaggaggtggtactgagaggagtccagataatggaaagattggaaaaaacagtttctaatatttgattacattgatcctccacactggaaaacta

SEQ ID NO: 35898 - DNA, 120 bp, synthetic construct; identical to SEQ ID NO: 10433
  source 1..120: mol_type = other DNA

SEQ ID NO: 35899 - DNA, 120 bp, synthetic construct
  source 1..120: mol_type = other DNA
agttcgagaccagcctggccaacatggtgaaactaaactttagtagaaacatcgtctctactaaaaatacaaaaattagccaggtgtggtagcacatgcctgtaatcccagctactaggg

SEQ ID NO: 35900 - DNA, 120 bp, synthetic construct
  source 1..120: mol_type = other DNA
tcgaatgtggctcaaatctggagtctaagccagcaggtaacaatgttcctttaaagccttctctagcataacaatgagcccatcaatcatttgctccaggaaacttaagaaaaagagatg

SEQ ID NO: 35901 - DNA, 120 bp, synthetic construct
  source 1..120: mol_type = other DNA
tcaatgttcagtaagcactacctgttatttgttttttagtctccaagtctctggtttgcttcagcacctggagcagccgaggtaccccatttagttcagccacctccaatttgttgtcat

SEQ ID NO: 35902 - DNA, 120 bp, synthetic construct; identical to SEQ ID NO: 10434
  source 1..120: mol_type = other DNA

SEQ ID NO: 35903 - DNA, 120 bp, synthetic construct
  source 1..120: mol_type = other DNA
agactgaaacctatgaaataattgaaggggaagattaagtgataaagggtgcataggtactagttaaacaaagttaagtgataaaagcttggagcataataaaaatgaaaagaattggga

SEQ ID NO: 35904 - DNA, 120 bp, synthetic construct
  source 1..120: mol_type = other DNA
aaatgcatttaccatgtcagcctcagtagtaatgcaaactaaccctaaattcttttttgtttgagatgcagtctggctctgtcacccaggctggaatgcagtggcgggatgtcggctcac

SEQ ID NO: 35905 - DNA, 120 bp, synthetic construct
  source 1..120: mol_type = other DNA
tcaccatgttagctgggatggtctcgatctcctgaccttgtgatccacccgcctcggcctcccaaagtgctgggattacaggcgtgagccactgcgcccggccactaaccctaaattctt

SEQ ID NO: 35906 - DNA, 120 bp, synthetic construct; identical to SEQ ID NO: 10435
  source 1..120: mol_type = other DNA

SEQ ID NO: 35907 - DNA, 120 bp, synthetic construct
  source 1..120: mol_type = other DNA
ctgttggtaaagatctcattttcactatcttcatgaagaaattttgaggaaataagttttcatgaacgggcatgaacttgcctttcagacgaagtttgtcacttaggaaggacaccctaa

SEQ ID NO: 35908 - DNA, 120 bp, synthetic construct
  source 1..120: mol_type = other DNA
gccctccaatattacatattcctttgacaggattggagaaaagactagaaaggcggaaataaacatcagaaatgtaaaacaatctaaataatagccacaacaataacaaccacagtcatc

SEQ ID NO: 35909 - DNA, 120 bp, synthetic construct
  source 1..120: mol_type = other DNA
aagtactcttgattcctttaaggcttcactggacgtaataaggagtaaatacttccacttgctggctcccttctgaggagacatttgcagaacaagagacagatgggagagtggccacag

SEQ ID NO: 35910 - DNA, 120 bp, synthetic construct
  source 1..120: mol_type = other DNA
tgaggtcaggagttcgagaccagcctggccaacatagtgaaaccccatttctactaaaaatacaaaaaaattagccaggcatggtggtgggtgcctgtaatcccagctacttgggaggct

SEQ ID NO: 35911 - DNA, 120 bp, synthetic construct; identical to SEQ ID NO: 10436
  source 1..120: mol_type = other DNA

SEQ ID NO: 35912 - DNA, 120 bp, synthetic construct
  source 1..120: mol_type = other DNA
caagcattttggataagtgatacttaacctgtattacatttccttaaacgaaaaaaaaaaaaaaaaaaccaaaatacacaatttatgttaaaacaacctgtaattcacgtttccctaatt

SEQ ID NO: 35913 - DNA, 120 bp, synthetic construct
  source 1..120: mol_type = other DNA
caatctccgccccctgggttcaagcaattctcctgtctcactcagcctccctaattgcagggattacaggcgcgccctaccatgcccagctaatttttgtattcttagtggagatggggt

SEQ ID NO: 35914 - DNA, 120 bp, synthetic construct; identical to SEQ ID NO: 10437
  source 1..120: mol_type = other DNA

SEQ ID NO: 35915 - DNA, 120 bp, synthetic construct
  source 1..120: mol_type = other DNA
cctgaggtactttggcagctttagaaatattttattaacttaattcataatttataagttgctttcttcaaaatatgatgggaaatggcttactggccatattgcatttcaagctgcaat

SEQ ID NO: 35916 - DNA, 120 bp, synthetic construct
  source 1..120: mol_type = other DNA
gacataccagtgcttagataaaggccgaaatccggctacagctctacttactgtataacttgactccctagtgtctggcacttatcccaagcttaaaaatagattttagttactttcatc

SEQ ID NO: 35917 - DNA, 120 bp, synthetic construct
  source 1..120: mol_type = other DNA
gtaggtgatgaatcctatccacattaggaccaatgtcaaatatgctgctattgtcccttaacgttcagggaagcagctggaaccagggaggtttgatgagtttcccaattatactgaatc

SEQ ID NO: 35918 - DNA, 120 bp, synthetic construct
  source 1..120: mol_type = other DNA
acatatgagaattttaactctctctgtggctttattctatcttccctgccaattataaaataagtaaatgacgaggacttctggttgcaaataagcatagggaacacacagcctctgctg

SEQ ID NO: 35919 - DNA, 120 bp, synthetic construct; identical to SEQ ID NO: 10438
  source 1..120: mol_type = other DNA

SEQ ID NO: 35920 - DNA, 120 bp, synthetic construct
  source 1..120: mol_type = other DNA
tacatcttttgtaatagcagaaaataagaaaccattaacatccagcaatgggggaagactggttgatggttgtcacatacccacatgttgaggtatccacgggagaggcagagctgacac

SEQ ID NO: 35921 - DNA, 120 bp, synthetic construct
  source 1..120: mol_type = other DNA
atgttaactgaaatttataaaatattaatgttataaaaattcatatgtcatttaaaaaatggaataaggccgggcatgatggctcacgcctgtaatcccagcactttggaaggccgaggc

SEQ ID NO: 35922 - DNA, 120 bp, synthetic construct
  source 1..120: mol_type = other DNA
actggggaggctgaggcagaagaattgcttgaacccgggaggcagaggttgcagtgagccgagatcaagcctctgcactccagcctgggcgacagagagactccatctcaaaaaaaaaaa

SEQ ID NO: 35923 - DNA, 120 bp, synthetic construct; identical to SEQ ID NO: 10439
  source 1..120: mol_type = other DNA

SEQ ID NO: 35924 - DNA, 120 bp, synthetic construct
  source 1..120: mol_type = other DNA
tttttgcaagatacttatggcagtgactacttcagtgatgagatatgaaacaggcatgaaaataagaccacgttaagaagggtcttacagactaaattaagggatttgtcttttatcctg

SEQ ID NO: 35925 - DNA, 120 bp, synthetic construct
  source 1..120: mol_type = other DNA
tggtgctgggaccaagacagtatctctgagtagggagggaaagatgtgggtagattccaaatacttttagaagtagcattaacaggacctgaagactgagtgactatgagaggtaaggaa

SEQ ID NO: 35926 - DNA, 120 bp, synthetic construct
  source 1..120: mol_type = other DNA
gatagcattaggagatatacctaatgtaaatgacgagttaatgggtgcagcacactaacatggcatatgtatacatatgtaacaaacctgcacgttgtgcacatgtaccctagaacttaa

SEQ ID NO: 35927 - DNA, 120 bp, synthetic construct; identical to SEQ ID NO: 10440
  source 1..120: mol_type = other DNA

SEQ ID NO: 35928 - DNA, 120 bp, synthetic construct
  source 1..120: mol_type = other DNA
gagtagagaagaaaagcaaaagaagataatatgttcaggccaggcgcaacagctcatgtctgtaatcctagcactttgggaggccaaggtgggaagactgcttaagcccaggagtttgag

SEQ ID NO: 35929 - DNA, 120 bp, synthetic construct
  source 1..120: mol_type = other DNA
gagctcagaaggttgaggctgcagtgagccatgatagtgctactgcactccagcctgggcaacagagtgagaacatgtctcaaaaaaaaagaaaaaagagagagagagagagatcaacag

SEQ ID NO: 35930 - DNA, 120 bp, synthetic construct
  source 1..120: mol_type = other DNA
tacatttaaaaactatagcaccatgtttaacctaagaaggatttttcaaatgttcttgggttgtgatattatacttcttagattttctatgaagcatatacatttttaggtttgcatata

SEQ ID NO: 35931 - DNA, 120 bp, synthetic construct; identical to SEQ ID NO: 10441
  source 1..120: mol_type = other DNA

SEQ ID NO: 35932 - DNA, 120 bp, synthetic construct
  source 1..120: mol_type = other DNA
aaaaaaaaaaaaaaaaaaaaatatatatatatatatatatatatatatatatttatatatattttatatttatatatatatatatataaatatatataaaagccaggcgagtccatgcct

SEQ ID NO: 35933 - DNA, 120 bp, synthetic construct
  source 1..120: mol_type = other DNA
aacaaacaaacaaaacgccccaaaaaaccaggaataaaaaaagatttaaagatttatctctgactagctattaaaggatcaatattcagccccattcccttcacctatatgtataaagaa

SEQ ID NO: 35934 - DNA, 120 bp, synthetic construct
  source 1..120: mol_type = other DNA
tgctccataattatacaacttttgaaacggcaaagtctagatgtagggataggtcttttaaagcaatatctaaaatatagacatcgagatgaaaaatatttagtttgatctcataagaat

SEQ ID NO: 35935 - DNA, 120 bp, synthetic construct; identical to SEQ ID NO: 10442
  source 1..120: mol_type = other DNA

SEQ ID NO: 35936 - DNA, 120 bp, synthetic construct
  source 1..120: mol_type = other DNA
ttctcagagtactatcaaagctggtaggttactctatttgagcctttgcacttctatttctaccagttgagttacatgtttaccaacagtaatttaggtttgcttcccagggtatttatg

SEQ ID NO: 35937 - DNA, 120 bp, synthetic construct
  source 1..120: mol_type = other DNA
aaaggtgaaaagcttaagagagctctgtaattagtgatggatagaattaatgtaagagactaggatttgaactcagatgaattagttccattaagttctcattccactttaaacttaaac

SEQ ID NO: 35938 - DNA, 120 bp, synthetic construct; identical to SEQ ID NO: 10443
  source 1..120: mol_type = other DNA

SEQ ID NO: 35939 - DNA, 120 bp, synthetic construct
  source 1..120: mol_type = other DNA
tatacctggccctcaataactgtttgattggacaactattagtcttgatttcaaatataagaaaatttctatgataatgaaatgcctatttttgcttatcagattaacaaaaacaaacaa

SEQ ID NO: 35940 - DNA, 120 bp, synthetic construct
  source 1..120: mol_type = other DNA
aaaaatgactcgatagtaactaacaactcaacttactgcctgaaacaaaaattggacaaaacatacaatggtttcaataactgaaaatgagtaaatgatggatagcgatcccttagatat

SEQ ID NO: 35941 - DNA, 120 bp, synthetic construct
  source 1..120: mol_type = other DNA
aaagagtaccacagagaaaagagctgaacagaaacagaactcctgagatgtgcagaggacctgcctgctagtattcagtagagtattaattagtacatgtggtatgaggaaactgtctga

SEQ ID NO: 35942 - DNA, 120 bp, synthetic construct; identical to SEQ ID NO: 10444
  source 1..120: mol_type = other DNA

SEQ ID NO: 35943 - DNA, 120 bp, synthetic construct
  source 1..120: mol_type = other DNA
tcccaaagcttcaagtaaaattttttttaaaaagtagaatttggtctgggcgcggtggtgcatgcctgtagtcccagcactttgggaggccaaggtggacagatcacgaggtcaggagtt

SEQ ID NO: 35944 - DNA, 120 bp, synthetic construct
  source 1..120: mol_type = other DNA
ttgaactcgggaggtggaggttgcagtgagctgagattgtaccactgcactccagcctgggtgacagagcaagactctgtctcaaaacaaacaaacaaacaaacaaacaaagcagaattt

SEQ ID NO: 35945 - DNA, 120 bp, synthetic construct
  source 1..120: mol_type = other DNA
tgccaggcatgcaaagaagaagaaaaatatgacccataatatggagaaaaaccaatcaatcaaaagctacctagaatagacacagatattagaattagcagacaaggacattaaggtagc

SEQ ID NO: 35946 - DNA, 120 bp, synthetic construct
  source 1..120: mol_type = other DNA
gaagaaaaaatacactgagtaagattaatggcatattaaacacattaatgtattaatggcatattaaacacatattaagagattagcaaatgtaaagcataggaattgaacttatctaaa

SEQ ID NO: 35947 - DNA, 120 bp, synthetic construct; identical to SEQ ID NO: 10445
  source 1..120: mol_type = other DNA

SEQ ID NO: 35948 - DNA, 120 bp, synthetic construct
  source 1..120: mol_type = other DNA
tctttgagacagagagagagtctcactctgttgcccaggctggagtgcagtggtgtgatctcagcttactgcaaccttcgcctcctgggttcaagcaattctcctgcctcagcctcctaa

SEQ ID NO: 35949 - DNA, 120 bp, synthetic construct
  source 1..120: mol_type = other DNA
ccacgccgtggccaactttcagtactaatatttagaaactgttaacctggaattctaaagccagtgaaaatacctttcaaaagcaaagatgaaattctttttcagacatacagaagctga

SEQ ID NO: 35950 - DNA, 120 bp, synthetic construct
  source 1..120: mol_type = other DNA
tcacctgaagtcgggagtttgagaccagcctgaccaacatggagaaaccccatctctactaaaaatacaaattagccgggcatggtggcgcatgcctgtaatcccagctactcgggaggc

SEQ ID NO: 35951 - DNA, 120 bp, synthetic construct; identical to SEQ ID NO: 10446
  source 1..120: mol_type = other DNA

SEQ ID NO: 35952 - DNA, 120 bp, synthetic construct
  source 1..120: mol_type = other DNA
aggagaattgcatgaacacgaaaggtggaggttgcagtgagctaagatcgcgccactgcattccagcctgggtgacagagtgagactctgtctcataaagaaataaagaaagaaataaag

SEQ ID NO: 35953 - DNA, 120 bp, synthetic construct
  source 1..120: mol_type = other DNA
tataagtgcggtctccagaacaaaagggaacacatctcttcttaaaattaaaggtgtttatgcccgagatgaaacagaattctacttgggcaagagatgtccttatgtatacaaagcaaa

SEQ ID NO: 35954 - DNA, 120 bp, synthetic construct
  source 1..120: mol_type = other DNA
gtggcatggtttgtgccaaattccgaagcaatcttcctgctagagctattggacacagagtccgagtgatgctgtacccctcaaggatttaaactaatgaaacaataataaataaaagtg

SEQ ID NO: 35955 - DNA, 120 bp, synthetic construct; identical to SEQ ID NO: 10447
  source 1..120: mol_type = other DNA

SEQ ID NO: 35956 - DNA, 120 bp, synthetic construct
  source 1..120: mol_type = other DNA
taaaagtacagatcatgtcttttacacagacgtaaaatttcttaacaagattttagcaaatctagtcataaaacctacaaagtgacagtacatcataaccaggtggggtttatgaatgga

SEQ ID NO: 35957 - DNA, 120 bp, synthetic construct
  source 1..120: mol_type = other DNA
ttcaaaaactccattaaagcaggagtagaagggaagttcttcaacttgatatggtcatttataaaaaacctacaggtagcataatatttaagggtgaaagaaagactgaatacttttgcc

SEQ ID NO: 35958 - DNA, 120 bp, synthetic construct
  source 1..120: mol_type = other DNA
cgtaaatatatatattatatatatattatctattctatatactagcaatgaacaaccaaaaatagaaattaaaaagtaccatttataatagcatctggaaatatgataaacttagggata

SEQ ID NO: 35959 - DNA, 120 bp, synthetic construct; identical to SEQ ID NO: 10448
  source 1..120: mol_type = other DNA

SEQ ID NO: 35960 - DNA, 120 bp, synthetic construct
  source 1..120: mol_type = other DNA
gtcttcatctttgctgaagactaattactctgggattattatctaacatgtctgtttctctgaatcagatgatgagaagttggcccctttctgggtgaaggctttttgaaagtaggatgt

SEQ ID NO: 35961 - DNA, 120 bp, synthetic construct
  source 1..120: mol_type = other DNA
tcaattttctcaaaattcatttaggaaataatacttgggaatagtaaacattcaaaaataatcttacaggctgggtgtggtggctcacacctgtaatcccagcactttgggaggctgagg

SEQ ID NO: 35962 - DNA, 120 bp, synthetic construct
  source 1..120: mol_type = other DNA
ttcagaaggctgaggcaggagaatcacttgaagccagaaggcggaggttgcagtgagccaagatcatgccactgcactccagcatgagtgacagagcaagactccatctcagaaaaaaaa

SEQ ID NO: 35963 - DNA, 120 bp, synthetic construct; identical to SEQ ID NO: 10449
  source 1..120: mol_type = other DNA

SEQ ID NO: 35964 - DNA, 120 bp, synthetic construct
  source 1..120: mol_type = other DNA
ttgatcaattccttttcagcaaagatacaaagacaatttagcagtgaaataaaagtctttgcaacaaatgacacctgaacaattaaatttacatataccaaaaaaaggaacttcagtcca

SEQ ID NO: 35965 - DNA, 120 bp, synthetic construct
  source 1..120: mol_type = other DNA
tttcttggatacacatgaaaagcagaaaccataaagggaaaaaactgaataaattaaatcccattaaaatgaaaacctattaggagaatgaaaaaacagagcacaactgggagaaaatat

SEQ ID NO: 35966 - DNA, 120 bp, synthetic construct
  source 1..120: mol_type = other DNA
taaagaagatatgtaagtggcaaataaacacataaagagatgttctggctgggtgtggtggctcatgcctgtaatcccatcactttgggaggccaaggtagctggctcctttgaacttgg

SEQ ID NO: 35967 - DNA, 120 bp, synthetic construct; identical to SEQ ID NO: 10450
  source 1..120: mol_type = other DNA

SEQ ID NO: 35968 - DNA, 120 bp, synthetic construct
  source 1..120: mol_type = other DNA
ataaattgtgagtgggaatgtgaaatggcacagctactttgtaaaatggtttagcagtttcttaaaaagtcaaacatacacctaccataccatccaggcatttactcctaggtatttact

SEQ ID NO: 35969 - DNA, 120 bp, synthetic construct
  source 1..120: mol_type = other DNA
ctgagtaaaataattcaaaccaaaaaaatcttatattctatatgattccatttatataaaattcgagaaaattcaatctatagtgacagaaaccagatcatggctgagcatggtggctca

SEQ ID NO: 35970 - DNA, 120 bp, synthetic construct
  source 1..120: mol_type = other DNA
agtgagacccccatctctacaaaaaatacaaaaattagctgggcatggttgtgtgcgcctatggtcccagctacccaggaggctggggtgggaggattgcttgagcccagaaagttgagg

SEQ ID NO: 35971 - DNA, 120 bp, synthetic construct; identical to SEQ ID NO: 10451
  source 1..120: mol_type = other DNA

SEQ ID NO: 35972 - DNA, 120 bp, synthetic construct
  source 1..120: mol_type = other DNA
tgatacatttagacaacagaaatctatgcagcatcttaaaagaatgagtaagattaatacatattgaagatttccaagatacggtataaaaaaataaagtattataagtagtaagttatc

SEQ ID NO: 35973 - DNA, 120 bp, synthetic construct
  source 1..120: mol_type = other DNA
attgaaagagacagaacagagagaatatataggctggagtttggagtagaagagacttacttttcactgaacacctttttgagctgtgattcctcctccctcacaaatgtatcacttttt

SEQ ID NO: 35974 - DNA, 120 bp, synthetic construct; identical to SEQ ID NO: 10452
  source 1..120: mol_type = other DNA

SEQ ID NO: 35975 - DNA, 120 bp, synthetic construct
  source 1..120: mol_type = other DNA
gtgcagtggtgcaatcttggctcactgcagcctctgcctcccgggttcaagcaattctcctgcctcagcctcccaagtagctggggttacaggcatgtgccaccacacatggctaatttt

SEQ ID NO: 35976 - DNA, 120 bp, synthetic construct
  source 1..120: mol_type = other DNA
ctgcacccggttgattttttcttttcttttttttctgagatggagtcttgttctgtcacccaggctggagtgcagtggcgcgaactcagttcaccgcaacctccgccttctggcttcaag

SEQ ID NO: 35977 - DNA, 120 bp, synthetic construct
  source 1..120: mol_type = other DNA
aattcttgaccttgtgatccacctgcctcggcctcccaaagtgctgggaatataggcgtgaaccaccacgcacggtcccaatttttaaaaatttaaataaattattggtttcagtgtgca

SEQ ID NO: 35978 - DNA, 120 bp, synthetic construct
  source 1..120: mol_type = other DNA
tttctggaagcactcgtgctgtatgaaagtagctgcagcagaaatcctggatggcagcatgtggtctgcctcgagcatactcactgctcgctccagagtcatctccatgtctgcattcct

SEQ ID NO: 35979 - DNA, 120 bp, synthetic construct; identical to SEQ ID NO: 10453
  source 1..120: mol_type = other DNA

SEQ ID NO: 35980 - DNA, 120 bp, synthetic construct
  source 1..120: mol_type = other DNA
aaataaaaaaaattagctgggtgtggtggtatacacctgtaatctcaggtgtaatactgtaatactcaggaggctgaggcaggagaatcacttgaacccaggaggtggagatttcagtga

SEQ ID NO: 35981 - DNA, 120 bp, synthetic construct
  source 1..120: mol_type = other DNA
ataaatatgtatcctatgattcttacatcttataaaagcaactttaaaggcacaataagacttttaaaagaatccaaaagaaatctgtttacagaaattaaaaattatttctaggctggg

SEQ ID NO: 35982 - DNA, 120 bp, synthetic construct
  source 1..120: mol_type = other DNA
aacagacaaacaaaatcagctgggtgtggtggcatgtgcctgtagacccagctacttggaaggctgaggtgggaggatcgcttgagcttgggaggtcaaggctgcaatgagccttggtca

SEQ ID NO: 35983 - DNA, 120 bp, synthetic construct; identical to SEQ ID NO: 10454
  source 1..120: mol_type = other DNA

SEQ ID NO: 35984 - DNA, 120 bp, synthetic construct
  source 1..120: mol_type = other DNA
catgaccaaaaactaataccccctgcttctgaaacacgtgttcaaacacagaagggttacctcataagtataaagggtattaaaagtgaagcagaaaatctctggcatctatactgagaa

SEQ ID NO: 35985 - DNA, 120 bp, synthetic construct
  source 1..120: mol_type = other DNA
taatattagaggatattacaccttttaaaggagatgggaatattttacattcatggactgaggcctttacagagaagtcaaaactctgtaagtctagtctcaagctcaatggcaaagtct

SEQ ID NO: 35986 - DNA, 120 bp, synthetic construct
  source 1..120: mol_type = other DNA
actcaggaaagtttgaatttcccatctctaacacccacaaataattccactactctaatcctttattttcctgaacatgattcacatagaagctctgtgttcacacttaggcaatccaat

SEQ ID NO: 35987 - DNA, 120 bp, synthetic construct; identical to SEQ ID NO: 10455
  source 1..120: mol_type = other DNA

SEQ ID NO: 35988 - DNA, 120 bp, synthetic construct
  source 1..120: mol_type = other DNA
aacactgccaccttcttcacaagccaccttctttgacttttccaggaagcttatcatactacctaattctcacccattcttcaagactcaattcaagtatcttcatttcttcttgttctt

SEQ ID NO: 35989 - DNA, 120 bp, synthetic construct
  source 1..120: mol_type = other DNA
tcctgggctcaagcgatcctcccacttcagccttctgaatagctgggactacaggtgcacgccaccatacccggctaattttttttttttattttttttgagacggagtcttgctctgtc

SEQ ID NO: 35990 - DNA, 120 bp, synthetic construct
  source 1..120: mol_type = other DNA
ccggctaatttttctatttgtagtagagatggggtttcaccatgttggccaggctggtctcgaactcctgacctcgtgatccacccacctcagcctcccaaagtgctgggattacaggcg

SEQ ID NO: 35991 - DNA, 120 bp, synthetic construct; identical to SEQ ID NO: 10456
  source 1..120: mol_type = other DNA

SEQ ID NO: 35992 - DNA, 120 bp, synthetic construct; identical to SEQ ID NO: 3254
  source 1..120: mol_type = other DNA

SEQ ID NO: 35993 - DNA, 120 bp, synthetic construct
  source 1..120: mol_type = other DNA
ttgggaggctgaggcaggagaattgcttgaacctgggagatggaggttgcagtgagccgagatcgtgccattgcactccagcctgggcaacaagagtgaaagtctgtctcaaaaaaaaac

SEQ ID NO: 35994 - DNA, 120 bp, synthetic construct; identical to SEQ ID NO: 10457
  source 1..120: mol_type = other DNA

SEQ ID NO: 35995 - DNA, 120 bp, synthetic construct
  source 1..120: mol_type = other DNA
aggtagagttgaaagagatgaaaaattaaagaactaaagcaggtagtaattaagaggacgtggagggaagtcaatatgatctgttttctgctctgcagtgctcttggtcacaaatttgac

SEQ ID NO: 35996 - DNA, 120 bp, synthetic construct
  source 1..120: mol_type = other DNA
gctggagtgcagtgtcacgatcatggctgactgcagcctggacctcccaggctcaagtgattctgttgcctcagcctcctgagtagttggggctacaggcatgcaccaccatgcccagct

SEQ ID NO: 35997 - DNA, 120 bp, synthetic construct; identical to SEQ ID NO: 3255
  source 1..120: mol_type = other DNA

SEQ ID NO: 35998 - DNA, 120 bp, synthetic construct
  source 1..120: mol_type = other DNA
gttcaagcaattttcctgcctcagcctcctgagtagctgggataacaggcatccaccaccatgcctggctaacttttgtatttttagtagagacgggttttcaccatgttggccaggctg

SEQ ID NO: 35999 - DNA, 120 bp, synthetic construct
  source 1..120: mol_type = other DNA
cggcccattttcatcttttgtgatgcttactgggaaggacctatgaagatcctactactcatttgcagaaccatcagcctccaactggtcataaatcatggttttagaaaaattcatcta

SEQ ID NO: 36000 - DNA, 120 bp, synthetic construct
  source 1..120: mol_type = other DNA
acactccaagtctcagtttttagctgcattagtaactgtttaaccagccattcttcttttggaaagccaggtccattgtttaataccttaagtcattatgcaggtttatggttttgtcca

SEQ ID NO: 36001 - DNA, 120 bp, synthetic construct
  source 1..120: mol_type = other DNA
gttaatattcaacatatatgaaagaatactcctttacatgtgggagtttcactaggcataaaaacttaaatcccccccaaaaaagggctggacaaagtttgacaatgcgggaccaaagag

SEQ ID NO: 36002 - DNA, 120 bp, synthetic construct; identical to SEQ ID NO: 10459
  source 1..120: mol_type = other DNA

SEQ ID NO: 36003 - DNA, 120 bp, synthetic construct
  source 1..120: mol_type = other DNA
aataatccaaaaatagtatgactaatacttctagaatttgagcaacaaaagaacctagatggcaaaaagtaaaatttatatttcatttctccttcctttaattccttcactctttcacca

SEQ ID NO: 36004 - DNA, 120 bp, synthetic construct
  source 1..120: mol_type = other DNA
caacctccctggctcaagcaatcctcccacttcagcctccggagtagctgggaccacaggtgggcactatcacgccaggctaagttgtttatctttaatagaagtggggtctcggggtct

SEQ ID NO: 36005 - DNA, 120 bp, synthetic construct
  source 1..120: mol_type = other DNA
agatgtgagccactgtgctggcctcatcatatatttatacagtgcctactataggcctacttccattttagggtgctgagaatataaagatgattgagcattcacaaaaatctcaaagtc

SEQ ID NO: 36006 - DNA, 120 bp, synthetic construct
  source 1..120: mol_type = other DNA
gcacctaagctagactgggaaggaagtggtcagaaaataggtggtatctgagctaaatccagaattataagtagtcagacaaaagtagagctgcatatgtaaaggtgtggagtgggggaa

SEQ ID NO: 36007 - DNA, 120 bp, synthetic construct; identical to SEQ ID NO: 10460
  source 1..120: mol_type = other DNA

SEQ ID NO: 36008 - DNA, 120 bp, synthetic construct
  source 1..120: mol_type = other DNA
tggaaatggaaagaagggtaaaaattcaagacccatcatagaaggaaaaatatggcttggtgataggtgactacagagggagaagataagaatgacttccaggtttgaaaatagtagact

SEQ ID NO: 36009 - DNA, 120 bp, synthetic construct
  source 1..120: mol_type = other DNA
ggaggttgttacattttcatataggtccagaatttggcatcaaggatggaattgcagacaaaactttgagaaccataaggataaaagtgaggtacacagagcctctctggaagagcatca

SEQ ID NO: 36010 - DNA, 120 bp, synthetic construct; identical to SEQ ID NO: 10461
  source 1..120: mol_type = other DNA

SEQ ID NO: 36011 - DNA, 120 bp, synthetic construct
  source 1..120: mol_type = other DNA
agatggagggagagaatgccagttgttggaggatgtcagataataattttgttactgttaaaatcattttgctaaaactgtggctatcacaaatcctaggctatggtaggcattccataa

SEQ ID NO: 36012 - DNA, 120 bp, synthetic construct
  source 1..120: mol_type = other DNA
gtggcacaaatcttggctcactgcaacctccatctcctgggctcaagtaatcctcccgcctcagcctctcgagtagttaggaccacacgtgcacacaaccacacccagctaatatttgta

SEQ ID NO: 36013 - DNA, 120 bp, synthetic construct
  source 1..120: mol_type = other DNA
cggcttatttttcctctttgtaagtatgctcatattgcctaaggtctgcttactataagaaatgttagaaatctcatggtgaattttacatcataaaaaatatttcctgtgttaagatta

SEQ ID NO: 36014 - DNA, 120 bp, synthetic construct
  source 1..120: mol_type = other DNA
caatcaaatgacaataacatatctaatgttttagcctaatgatgttagatcattattgcaggagttactgatctaatcagccatccatttctcaatctttctcttagtaacgtgcacagt

SEQ ID NO: 36015 - DNA, 120 bp, synthetic construct; identical to SEQ ID NO: 10462
  source 1..120: mol_type = other DNA

SEQ ID NO: 36016 - DNA, 120 bp, synthetic construct; identical to SEQ ID NO: 3259
  source 1..120: mol_type = other DNA

SEQ ID NO: 36017 - DNA, 120 bp, synthetic construct
  source 1..120: mol_type = other DNA
ctgcctgaaaagtcattattttaatcacttatctctggaagcccttctctcaagccccagaagtgccagctcatgctgtcagggctgtgggaacagaatgtgctggcaatgactgaactg

SEQ ID NO: 36018 - DNA, 120 bp, synthetic construct
  source 1..120: mol_type = other DNA
gaatccacggcgacactgggcccagcttccctcagcgtgcgggtgctgtggaaggagctctgatgccaggaggacctggaagccctgttctgagtgacgggctgcaggggcaccagcggc

SEQ ID NO: 36019 - DNA, 120 bp, synthetic construct; identical to SEQ ID NO: 10463
  source 1..120: mol_type = other DNA

SEQ ID NO: 36020 - DNA, 120 bp, synthetic construct
  source 1..120: mol_type = other DNA
ggagaaatctccagtctcctcagaggatgcctcaaggacctttcttccacggacttctgggagctgtactgtgctgttcctcttccccagcgaccttcataagtggcagttgtgccagcc

SEQ ID NO: 36021 - DNA, 120 bp, synthetic construct
  source 1..120: mol_type = other DNA
ttgcccctttctgggtaaaggctttttgaaaataagacttggttgacttgagtcatatttatttgcactaggatgtaagaatgtttcacatccctagttttccatggtatcctcataaat

SEQ ID NO: 36022 - DNA, 120 bp, synthetic construct
  source 1..120: mol_type = other DNA
tctttgatatcctacctttagcatgtcataggttttaggaacaggggaacggcctccaacaaaatcattttcaaccaagtgtaggttgtagacatactcaggaacactgctggttcggtg

SEQ ID NO: 36023 - DNA, 120 bp, synthetic construct; identical to SEQ ID NO: 10464
  source 1..120: mol_type = other DNA

SEQ ID NO: 36024 - DNA, 120 bp, synthetic construct
  source 1..120: mol_type = other DNA
agctgggcatagtggcgggcatctgtaatcccagctactcaggaggctgaggcaggagaatcacttgaactcgggagacagaggttgcagtgagccaagatcacacaattgcactccagc

SEQ ID NO: 36025 - DNA, 120 bp, synthetic construct
  source 1..120: mol_type = other DNA
tcaagagcagcctggccaacatggtgaaagcccctctctactaaaactacaaaaaattagctgtgcgtggtggcaggcacctgtaatcccaactattcgggaggctgtggcaggagaatc

SEQ ID NO: 36026 - DNA, 120 bp, synthetic construct
  source 1..120: mol_type = other DNA
ttgaatttaaaaaaagaaaaagaagggagaggaaattcacaaaaatctaaaaatgtttggttgttatagtgctgaaaaatttgggactcattgtctggtttagctggtcgagactataaa

SEQ ID NO: 36027 - DNA, 120 bp, synthetic construct; identical to SEQ ID NO: 10465
  source 1..120: mol_type = other DNA

SEQ ID NO: 36028 - DNA, 120 bp, synthetic construct
  source 1..120: mol_type = other DNA
accggtctctcctaaaaatacaaaaattagtcgggggtggtggtgggcgcctgtaatcccagctactcgggaggctgaggcaggagaatcgcttgaacccgggaggcagaggttgcagtg

SEQ ID NO: 36029 - DNA, 120 bp, synthetic construct
  source 1..120: mol_type = other DNA
atcaacttcaggccaatgctggggttgagatatttggcaacaggagagttaggcaggaaaggaaatcaacctctatgctccatccaaatggctgcttttgtggaatcacctggcccctct

SEQ ID NO: 36030 - DNA, 120 bp, synthetic construct; identical to SEQ ID NO: 10466
  source 1..120: mol_type = other DNA

SEQ ID NO: 36031 - DNA, 120 bp, synthetic construct
  source 1..120: mol_type = other DNA
cattttttagaaatcagagggaaaatatactcaattaactcttctaggcttcagagactcatgaaagatgttgagaatacaacaacacagggtgctcctttccagtacaatgggaacaca

SEQ ID NO: 36032 - DNA, 120 bp, synthetic construct
  source 1..120: mol_type = other DNA
atccatcctaaattatgtttgtacacgtgtccttatttcctatagccaaacaatctgcctgataaacaattttcaggcctcaaggagtcttgtgaggaggcagtggcaggcttgtaactg

SEQ ID NO: 36033 - DNA, 120 bp, synthetic construct
  source 1..120: mol_type = other DNA
tcctgtttccaggggcttgatttctccacaagggctggcaaaaggtcaggcagccacttaatttttaatctctatggcaaagaacggctggaacttggaccttaaataaagaaaaaaaat

SEQ ID NO: 36034 - DNA, 120 bp, synthetic construct; identical to SEQ ID NO: 10467
  source 1..120: mol_type = other DNA

SEQ ID NO: 36035 - DNA, 120 bp, synthetic construct
  source 1..120: mol_type = other DNA
cctgggttcaaggaattctcctgcctcagcctctgtgagccaccgtgtctggcctcatattattattttatgttggctgaggctcgcgcctaggctaaccctttatcctctactctgcac

SEQ ID NO: 36036 - DNA, 120 bp, synthetic construct
  source 1..120: mol_type = other DNA
gtacagggaacataaaaaggttctaatcctgaagagtccgggggccagagtaccctcagcactgggaatatgcagaaaggggaagggttcggggtagagggatgtggctggggagagtgc

SEQ ID NO: 36037 - DNA, 120 bp, synthetic construct
  source 1..120: mol_type = other DNA
gggctatccatgttcaaacctttagaccacatgaaaactgaattaggaaagtcagggacaatctagaatggcaaagtactaatggtcatttatggaccgtagctggaaccattaattcct

SEQ ID NO: 36038 - DNA, 120 bp, synthetic construct; identical to SEQ ID NO: 10468
  source 1..120: mol_type = other DNA

SEQ ID NO: 36039 - DNA, 120 bp, synthetic construct
  source 1..120: mol_type = other DNA
gtgtgaactccttacatttcaatgtgacttttcctttaaggagctcaaattattttatgttcctttataatattctgtgatgcggagccagctactatcatctctgtttataaataggga

SEQ ID NO: 36040 - DNA, 120 bp, synthetic construct
  source 1..120: mol_type = other DNA
ccctggtctctgctgtctgactgcaaggtggctactatgacattgtcatttatcaaggccttagagggattattattatagttttgatctgaggacaaaaaaattatttttctttcctct

SEQ ID NO: 36041 - DNA, 120 bp, synthetic construct
  source 1..120: mol_type = other DNA
gcttcttcagttttcagatgaatgaactgaggctgttttaatggttcgccaaataactacaaagtagttggaaacagggaaaaaaataagattgaatttttaaatcacagacactctccc

SEQ ID NO: 36042 - DNA, 120 bp, synthetic construct
  source 1..120: mol_type = other DNA
ccaatctcaaacaacaaatactgcagactaatttgcctaggcagtcatgagtttgagatcagtatgctggattaaagatgaattaatagctgtgttctaagattttaaagaaattttgga

SEQ ID NO: 36043 - DNA, 120 bp, synthetic construct; identical to SEQ ID NO: 10469
  source 1..120: mol_type = other DNA

SEQ ID NO: 36044 - DNA, 120 bp, synthetic construct
  source 1..120: mol_type = other DNA
atcagttagatgcctgtttcccgtaattccagctactaataggactgctgagagagagggtttacctgagaaagcatagactcaaacgctttcaaaattgtgaagtgatgggtttcagga

SEQ ID NO: 36045 - DNA, 120 bp, synthetic construct
  source 1..120: mol_type = other DNA
ccttctcccttgaagcagaccatataaaatcaagctgaccttcctttgaattaggtcaaagactcattccagaaggatcctccctatacctggaggaaaggaatgtcataaagggaagaa

SEQ ID NO: 36046 - DNA, 120 bp, synthetic construct; identical to SEQ ID NO: 10470
  source 1..120: mol_type = other DNA

SEQ ID NO: 36047 - DNA, 120 bp, synthetic construct
  source 1..120: mol_type = other DNA
cagaagttgcagtgagtcaagatcacgccattgcactccagcctgggcaacagagtgagactccatctcaagaaaaaaaataaatatacagtcttccctgtttctttgggtcttcatttc

SEQ ID NO: 36048 - DNA, 120 bp, synthetic construct
  source 1..120: mol_type = other DNA
gggtctcaggcataaacctggtgacgggtaagaaaagaaaacttttctcctctacacaagcaatatgcaaaaatgagataaggtttctaaatagaatttgagtcataaaaatttgatttt

SEQ ID NO: 36049 - DNA, 120 bp, synthetic construct
  source 1..120: mol_type = other DNA
ttttttttttttctgctaagtttaccactggtcttgaattggactttttctggtgacttctgattgacccgtcactgaggagcacgatgatattactgtgttttccagccattcatttca

SEQ ID NO: 36050 - DNA, 120 bp, synthetic construct; identical to SEQ ID NO: 10471
  source 1..120: mol_type = other DNA

SEQ ID NO: 36051 - DNA, 120 bp, synthetic construct
  source 1..120: mol_type = other DNA
atatgattcctaagcagctgttatggaaaaagaagctttgtgtttggtcaccaatacaaacattgctcgaaataatgaattattgtcagggttaaaatagtcaataaggccaggcatagt

SEQ ID NO: 36052 - DNA, 120 bp, synthetic construct
  source 1..120: mol_type = other DNA
accctgtctctaaaatacaaaaattagctaggtgtgctgttgggcacctgtaattccagctacttgggggccgggcttgaacccaggaggcagaggttgcggtgaggtgagactgtgcca

SEQ ID NO: 36053 - DNA, 120 bp, synthetic construct
  source 1..120: mol_type = other DNA
tatttatgaaatcaaattgacaagtctctattgtggttccattacctgtttctgggcatatttataaaaaaccaactacagtttcttttatagtaagcaaatgacagagaactgctaaac

SEQ ID NO: 36054 - DNA, 120 bp, synthetic construct
  source 1..120: mol_type = other DNA
tcttctagcactgagtgtggtttaaaaaaagtgatttggttcacactgagctctaaaaggaggatttctggagatgaagatacatgtagaggtgcccacaaaaacaggtgtggttaaatg

SEQ ID NO: 36055 - DNA, 120 bp, synthetic construct; identical to SEQ ID NO: 10472
  source 1..120: mol_type = other DNA

SEQ ID NO: 36056 - DNA, 120 bp, synthetic construct
  source 1..120: mol_type = other DNA
tttgaatggatccttaaagtcatttactagcaatagtaggagcttaaaagaaagcagaaaatatactgagactcatcaaagaccatacgtatgtccgcactcctgagttggtgaaggaat

SEQ ID NO: 36057 - DNA, 120 bp, synthetic construct
  source 1..120: mol_type = other DNA
ttttatcttctattcttactttccaagaagaacaaccagatattgatggaaatcacaacagcccaagtaagcatttgcttaggctggaaaataagtagaatttgttggtttagaaaacta

SEQ ID NO: 36058 - DNA, 120 bp, synthetic construct; identical to SEQ ID NO: 10473
  source 1..120: mol_type = other DNA

SEQ ID NO: 36059 - DNA, 120 bp, synthetic construct
  source 1..120: mol_type = other DNA
taaagttttatactattgaaaatttaaccaatagttgtacagtgctatattttgtgaccagttagctcacataatcaaccatgagaaacaacttggtgtatcaggtatatgctagaaagt

SEQ ID NO: 36060 - DNA, 120 bp, synthetic construct
  source 1..120: mol_type = other DNA
gccagtgtgcgactgactaatccattgctgttatcactcacacgatataccagccactagagtccttatttttcaggagccccctaagcaattcaagagctatcttctgatataccaatt

SEQ ID NO: 36061 - DNA, 120 bp, synthetic construct
  source 1..120: mol_type = other DNA
gtgcagcggtgcgatcttggctcactgaaacctcttcctctcaggatcaagcgattcttgtgcctcagccttccgagtagctggactacaggtgtgtgccaccatgctgactaatttttg

SEQ ID NO: 36062 - DNA, 120 bp, synthetic construct
  source 1..120: mol_type = other DNA
ggctcccaaagtgccagcgctttaggcgtgagccattaaatggcccttttatatcacaggtgttcatgtcatattttgtttgaggtattagaatatgtaattgtagaatttgttattata

SEQ ID NO: 36063 - DNA, 120 bp, synthetic construct; identical to SEQ ID NO: 10474
  source 1..120: mol_type = other DNA

SEQ ID NO: 36064 - DNA, 120 bp, synthetic construct
  source 1..120: mol_type = other DNA
atgaatacactgttcatttctgtaactgtgtctttactttggcattcctgccaattatttgctgagatatctcatgagactttaagacttgtaagactttataacttccatggcaaatat

SEQ ID NO: 36065 - DNA, 120 bp, synthetic construct
  source 1..120: mol_type = other DNA
agaactcacaaattattttttgctttaaaatacttactacaggttttctttgtaatgactttcaagtcattatatttcccctgcctctcacgtgccagggttaacccctcccaactgatt

SEQ ID NO: 36066 - DNA, 120 bp, synthetic construct
  source 1..120: mol_type = other DNA
gttcaagtgattctcctgcctcagcctcccaagtagctgggattacaggcatgcgccaccacgcccagcttattttttctgtacttttagtagagacagggtttctccatgttgatcagg

SEQ ID NO: 36067 - DNA, 120 bp, synthetic construct; identical to SEQ ID NO: 10475
  source 1..120: mol_type = other DNA

SEQ ID NO: 36068 - DNA, 120 bp, synthetic construct
  source 1..120: mol_type = other DNA
caaatgtattttcacaaaactcctgcacttttcatgtttcttccctgtggaaatatctgtgactcacaattatcaaattctttaacttgcattcaagatcagaggagaggggtgaaggag

SEQ ID NO: 36069 - DNA, 120 bp, synthetic construct; identical to SEQ ID NO: 3271
  source 1..120: mol_type = other DNA

SEQ ID NO: 36070 - DNA, 120 bp, synthetic construct
  source 1..120: mol_type = other DNA
tagcagctgtgtggagaatggattggagtggggccacgttaaaacaaagaggttattttctcttccaaagagattttgacagaaagaactgtatcttacactaccacttctagcacagtc

SEQ ID NO: 36071 - DNA, 120 bp, synthetic construct; identical to SEQ ID NO: 10476
  source 1..120: mol_type = other DNA

SEQ ID NO: 36072 - DNA, 120 bp, synthetic construct
  source 1..120: mol_type = other DNA
aggagatcgagaccatcctggctaacatggtgaaactccatctctactaaaaatacaaaaattagccgggtgtggtggcacacacctgtaatcccacttacttgagaggctgaggcagga

SEQ ID NO: 36073 - DNA, 120 bp, synthetic construct
  source 1..120: mol_type = other DNA
tgactttgttcattttggcaaggttgtttctatatttgaataatatatgtttactatcattcttttatctgtatggcttgtgtatttatctgtaatattttggtggcctataaattcata

SEQ ID NO: 36074 - DNA, 120 bp, synthetic construct; identical to SEQ ID NO: 10477
  source 1..120: mol_type = other DNA

SEQ ID NO: 36075 - DNA, 120 bp, synthetic construct
  source 1..120: mol_type = other DNA
caactgtccatttttatttaaatctacatattgagctctcaagcttttgtctttaaacactttaagaacattacaactgtttttatgtccaatatccaattaccagaaatggcattatag

SEQ ID NO: 36076 - DNA, 120 bp, synthetic construct
  source 1..120: mol_type = other DNA
cctgtctctactaaaaatacaaaaaattagctgggcttggtggcgggtgcctgtaatcccagctactcgggaggctgaggcaggaaaatcgcttgaactcgggaggcagaggttgcagtg

SEQ ID NO: 36077 - DNA, 120 bp, synthetic construct
  source 1..120: mol_type = other DNA
gtttgtttagtagtcttactctactagtcaggggagccaggtggctcactctaatagaaaaataaagttttctcctaatttattgtctattcccacttgcattgctgccttttactgcta

SEQ ID NO: 36078 - DNA, 120 bp, synthetic construct
  source 1..120: mol_type = other DNA
agatggaaataaatcatcttataggccatattaatcatctgatttataaactccagaggttttagcatcatatttattatatttcattactatcatagtttgccaataatatgcttgttc

SEQ ID NO: 36079 - DNA, 120 bp, synthetic construct; identical to SEQ ID NO: 10478
  source 1..120: mol_type = other DNA

SEQ ID NO: 36080 - DNA, 120 bp, synthetic construct
  source 1..120: mol_type = other DNA
tcttatctgtcacatatagaacaatgtactttcataatcaaaccctgctactctgggtctacttgtggtttcttacagttccacggattctgaagcatccttactttaccctcacacaaa

SEQ ID NO: 36081 - DNA, 120 bp, synthetic construct
  source 1..120: mol_type = other DNA
ttaacattctatttcacttactataatcagaaggatttctttaattatttttggacttaccgaactcaatctgcttggccctggacaaaaagtggctcacaggccatattacacagacac

SEQ ID NO: 36082 - DNA, 120 bp, synthetic construct; identical to SEQ ID NO: 10479
  source 1..120: mol_type = other DNA

SEQ ID NO: 36083 - DNA, 120 bp, synthetic construct
  source 1..120: mol_type = other DNA
tcactgaaacctctgactcccaggttcaagcaattctcctgcctcaggctccctagtagctgggattacaggtatgcaccaccacacctggctaatttgttttttatttttagtagacac

SEQ ID NO: 36084 - DNA, 120 bp, synthetic construct
  source 1..120: mol_type = other DNA
ctttgatcacagatattgaaaagcagcttcaccaaggaaatcacctaagataatagtgtgcctcaagttttgtggtggatttccaaagaggttgtaaatataattgcattaggagattgt

SEQ ID NO: 36085 - DNA, 120 bp, synthetic construct
  source 1..120: mol_type = other DNA
ggggggagaactgtgtagcaagtagtacttttaaggcaagtgtaataaataggatatggatgcttttaatttttccctttgccaatacttgcaattcttaaatgtcttctattttagaaa

SEQ ID NO: 36086 - DNA, 120 bp, synthetic construct; identical to SEQ ID NO: 10480
  source 1..120: mol_type = other DNA

SEQ ID NO: 36087 - DNA, 120 bp, synthetic construct
  source 1..120: mol_type = other DNA
cttgtgttgatacaggattttttccagaccagcactgtttcaacaattgcttgtctgtttcaacttgagagacaggatagtaacatggaaataataaaaattatactcagaaccaccacg

SEQ ID NO: 36088 - DNA, 120 bp, synthetic construct
  source 1..120: mol_type = other DNA
aaagctgaggctttaaagtaagtaggtgttgtttgctgccttatctctctgtctgatttgtacttctgtgtaggctgcagagtgtatttcagcttactggaaagctgctgttgcaatcaa

SEQ ID NO: 36089 - DNA, 120 bp, synthetic construct
  source 1..120: mol_type = other DNA
aatattcattctgttccctcctagaatgatctttctccagtcacctccctatgtccagtcctactgaatttttgagatctacctccaggaagcttttcaaaatttcctgccaccaggagt

SEQ ID NO: 36090 - DNA, 120 bp, synthetic construct
  source 1..120: mol_type = other DNA
ttctcctgcctcagccttccgagtagctgagtagctgggattaccggcatgtgccaccacgcccggctaattttgtatttttagtagagatgggattttaccatgttggtcaggctggtc

SEQ ID NO: 36091 - DNA, 120 bp, synthetic construct; identical to SEQ ID NO: 10481
  source 1..120: mol_type = other DNA

SEQ ID NO: 36092 - DNA, 120 bp, synthetic construct
  source 1..120: mol_type = other DNA
cagacacatacttcatatgtgagatggattctcatatctatctcagcaattgtttcaagaatataatgaagattctggaataggcacatagtagatgctcagcaacattcccttttcttc

SEQ ID NO: 36093 - DNA, 120 bp, synthetic construct
  source 1..120: mol_type = other DNA
gggaagctgatttggtttcagtttagcactggacctatgggcacagagaatgaatgggtgtaatggctccacttttcaaagactggcctcactcatcccgcagtctttagtcagacccct

SEQ ID NO: 36094 - DNA, 120 bp, synthetic construct
  source 1..120: mol_type = other DNA
ggagaggcttagcatctaacaaatcccactttgtattaatcattttaaaacttaatgataaaactgataagtttaaaattcaggtttgggagtttaaataccagctctgccacttaccat

SEQ ID NO: 36095 - DNA, 120 bp, synthetic construct; identical to SEQ ID NO: 10482
  source 1..120: mol_type = other DNA

SEQ ID NO: 36096 - DNA, 120 bp, synthetic construct
  source 1..120: mol_type = other DNA
tagaaactagaatgggttagcctacattcgccaatgcccaagttacttcatacagaaacaactgaacgttgcaggaaacagatattccaacttaattgctcaatttctttcctcttcttt

SEQ ID NO: 36097 - DNA, 120 bp, synthetic construct
  source 1..120: mol_type = other DNA
tcatgatctctaattttcacaagtggcttgccatcttctttcccttccacctcccccgtctatcaatcatgaacatagtgtgcatgtgtgtgcttacacccctttcaccttcgggtttaa

SEQ ID NO: 36098 - DNA, 120 bp, synthetic construct
  source 1..120: mol_type = other DNA
tccctggaccaaagcctcctaactacttttcttcactccctagatccaccactcgcctcccacacagggtggagcgccccgaagtacttgcataagacagcacaatcccaatttataggt

SEQ ID NO: 36099 - DNA, 120 bp, synthetic construct; identical to SEQ ID NO: 10483
  source 1..120: mol_type = other DNA

SEQ ID NO: 36100 - DNA, 120 bp, synthetic construct
  source 1..120: mol_type = other DNA
gcgagcaacaggtgggcagaacacggggtcccgcactcccagcacgcggggtgagggcgggataggaggaggtgaccgggtgtggggcagggggcggcgccggggagcggcgggctccac

SEQ ID NO: 36101 - DNA, 120 bp, synthetic construct
  source 1..120: mol_type = other DNA
gcctcggagggcagcgccaggctggagctgtccagttgtcccaggatctgctggcccaggacggtccggatgtagccgtactcagctggggcgccgggggctgccatggggccggtgggg

SEQ ID NO: 36102 - DNA, 120 bp, synthetic construct; identical to SEQ ID NO: 10484
  source 1..120: mol_type = other DNA

SEQ ID NO: 36103 - DNA, 120 bp, synthetic construct
  source 1..120: mol_type = other DNA
actttatttctactattattacattgtaacatataattaaataattctacaactcaccatcacagagactcagtgggagccctgagcttgttttcctgcaactagacagccccatctggg

SEQ ID NO: 36104 - DNA, 120 bp, synthetic construct
  source 1..120: mol_type = other DNA
ccgctgatgtgacaggaggcggagctcgggtggtaacgccagcgacggggagtggctataaatacagatgaagcttcgctggcttgccggcccctaacctgctgtgcaccccacttccta

SEQ ID NO: 36105 - DNA, 120 bp, synthetic construct
  source 1..120: mol_type = other DNA
ctctggccagcagggaaaggtctccacctttgaaggactcacccaatggactgggcccacccagacaatccaggataatctctctgttgcaagatccttaactcagccaggcatgatggc

SEQ ID NO: 36106 - DNA, 120 bp, synthetic construct
  source 1..120: mol_type = other DNA
gccagtatggttctggacacctgtaatcccagctactcgggaggctgaggtgggagaatcacttgaacctgggaggcagaggctgcagtgagctgagatcatgctattgaactccagcct

SEQ ID NO: 36107 - DNA, 120 bp, synthetic construct; identical to SEQ ID NO: 10485
  source 1..120: mol_type = other DNA

SEQ ID NO: 36108 - DNA, 120 bp, synthetic construct
  source 1..120: mol_type = other DNA
cttccattttcagccaagttcaaacaggacaaggttccatgaaaactatttgaaaagacagacagggattcttatattcccagaaccattcaaggccagtaactggaatgttctacagtt

SEQ ID NO: 36109 - DNA, 120 bp, synthetic construct
  source 1..120: mol_type = other DNA
cctgtcccatccagtcattttcttccagccgggcagagaatcccccgtgtttaaaaatttaatgtgaatcagggctgagaatcactaactgaaaaggaccctacttttaaatttatgaaa

SEQ ID NO: 36110 - DNA, 120 bp, synthetic construct
  source 1..120: mol_type = other DNA
tttgttttgttttttgagacacagtcttgttctatctcacccaggctggagcgcagtggcgcaatctcggttcactgcaacctccgtctcccgggttcaagcgattctcctgcctcagcc

SEQ ID NO: 36111 - DNA, 120 bp, synthetic construct
  source 1..120: mol_type = other DNA
cgccggcctcggcctcccaaagtgctgcgatcacaggcatgagccaccatgcccagcccaagtgttcttatttttataaaatgtgttcttgcctggacacacacacacgagcgcatgcaa

SEQ ID NO: 36112 - DNA, 120 bp, synthetic construct; identical to SEQ ID NO: 10486
  source 1..120: mol_type = other DNA

SEQ ID NO: 36113 - DNA, 120 bp, synthetic construct
  source 1..120: mol_type = other DNA
caacgttttagtagttttttgacgtcagaatggcagctcttcagaagcattcttctctaaaataaggctggacaagattacagctcaaaaactaccttccctgaaaaaccttcccccaga

SEQ ID NO: 36114 - DNA, 120 bp, synthetic construct
  source 1..120: mol_type = other DNA
tgccctctcaccctggcaggtgcagcagcctcccagcaggcctccctgccccactgcgacccctccgagccgctctccactcagcagccagtgattacttttaaagggctgtcaggttat

SEQ ID NO: 36115 - DNA, 120 bp, synthetic construct
  source 1..120: mol_type = other DNA
ctgcacccccacctccaagcacgaatgcctcccttcctcaccccagctgcactgctactcccttcctcttgcacaggcccatcacgcaaacacctgccttgggactgtggcactcccggg

SEQ ID NO: 36116 - DNA, 120 bp, synthetic construct; identical to SEQ ID NO: 10487
  source 1..120: mol_type = other DNA

SEQ ID NO: 36117 - DNA, 120 bp, synthetic construct
  source 1..120: mol_type = other DNA
ggtggcaaacccaggtagagaggagagtagggagaaagggtgtaaggcagggaggagactgaggcgagcgtggaactggaaggcagctacatggctggaagctacatggtggggagatgg

SEQ ID NO: 36118 - DNA, 120 bp, synthetic construct
  source 1..120: mol_type = other DNA
gagtcacactaaactcaggacatcaaaactgcccggctatgagctcagctccacgctctcactcacagactccaagactggaagatccatattatgtcttttattttggtgaggtcaggg

SEQ ID NO: 36119 - DNA, 120 bp, synthetic construct
  source 1..120: mol_type = other DNA
gcaattctcccgcttcagcctcccgagtagctgggattacaggcgcccaccaccatgcccagctaattttcgtacttttagtagggatggggtttcaccatgttggccaagctggtctca

SEQ ID NO: 36120 - DNA, 120 bp, synthetic construct; identical to SEQ ID NO: 10488
  source 1..120: mol_type = other DNA

SEQ ID NO: 36121 - DNA, 120 bp, synthetic construct
  source 1..120: mol_type = other DNA
ccttccagtctgttctctctccagcagctgcaatcacgggactccttcccgtctgttctctccagtggctcgtgccacacacagcacagacccccagggtctaggtatgaccggcaacac

SEQ ID NO: 36122 - DNA, 120 bp, synthetic construct
  source 1..120: mol_type = other DNA
ctccattctaccttttttttttttttttttgagacaaggtcttactctgtcacccaggctggagtgcagttgcgtgatgttggctcattgtaacctcgacctccctggctcaagtgatcc

SEQ ID NO: 36123 - DNA, 120 bp, synthetic construct; identical to SEQ ID NO: 10489
  source 1..120: mol_type = other DNA

SEQ ID NO: 36124 - DNA, 120 bp, synthetic construct
  source 1..120: mol_type = other DNA
ccaaggcgggcagatcatgaggtcaggagatcaacaccagcctgaccaacatggtgaaaccccatctctattaaaaatataaaaattagccaggtgtggtgggtgcctgtagtcccagct

SEQ ID NO: 36125 - DNA, 120 bp, synthetic construct
  source 1..120: mol_type = other DNA
aaagaaaaatgctgtttgaatctcttgactgtgcttactggcatctaatgcgtgtcatttatttgtggtgatgcctatttctccccactgtctgctccacaggggcaggggctgcagccg

SEQ ID NO: 36126 - DNA, 120 bp, synthetic construct
  source 1..120: mol_type = other DNA
acacagtcacttttcttggacatcaggctaatccccactgcaggcagaaccactgctgccaccttcccacaccaaccgaagcagcggcagtgacgccacgtgcaatgacaaccacggcac

SEQ ID NO: 36127 - DNA, 120 bp, synthetic construct; identical to SEQ ID NO: 10490
  source 1..120: mol_type = other DNA

SEQ ID NO: 36128 - DNA, 120 bp, synthetic construct
  source 1..120: mol_type = other DNA
aggctgcagtgagctgtgattgtgccactgcactccagcctgggggacagagggagaatctgtctaaaaaaaaaaaaaagaagaattctgggttttttttgtttttttgagacggagtct

SEQ ID NO: 36129 - DNA, 120 bp, synthetic construct
  source 1..120: mol_type = other DNA
acaccacgcccggctaatttttttgtatttttagtagagacgggctttcaccatgttagccaggatggtctcgatctcctgaactcgtgatccgcccgcctcagcttcccaaagtgctgg

SEQ ID NO: 36130 - DNA, 120 bp, synthetic construct
  source 1..120: mol_type = other DNA
cgctgcacgtagctctctgtgtaaaatgacccctggcaatcacaaaggcgtttacaaccttgaccaaatcaggagctgggctgagaccttcctcgactgcaagcttgagcagctgagctg

SEQ ID NO: 36131 - DNA, 120 bp, synthetic construct; identical to SEQ ID NO: 10491
  source 1..120: mol_type = other DNA

SEQ ID NO: 36132 - DNA, 120 bp, synthetic construct
  source 1..120: mol_type = other DNA
tgaggccagcggatcatgaggtcaggagatacagaccatcctggctaacatggtgaaaccccgtctctactaaaaaatagaaaaaattagctgggtgtggtggcaggcacctgtagtccc

SEQ ID NO: 36133 - DNA, 120 bp, synthetic construct
  source 1..120: mol_type = other DNA
aaaaaaaaagtgaacacctgaaagagaggaaactcacaaaatgctttttggaggaactttttaatcttttataaaattaaaaaaaactggtctatatgacctgaaagattattcccagct

SEQ ID NO: 36134 - DNA, 120 bp, synthetic construct
  source 1..120: mol_type = other DNA
ggttcaagcgattctcccacctcagcctcctgagtagctgggattacaggcacccgccaccacgcccggctactttttgtattttcagtagagatggggtttcaccatgttagccaggct

SEQ ID NO: 36135 - DNA, 120 bp, synthetic construct; identical to SEQ ID NO: 10492
  source 1..120: mol_type = other DNA

SEQ ID NO: 36136 - DNA, 120 bp, synthetic construct
  source 1..120: mol_type = other DNA
aacaacacaaataacaacactactcagctaagtgtcacaaaacttcctgagaagttccttttaattttctctttcttaaagttctttttagaagttaaagtagctacaggccaggtgcgg

SEQ ID NO: 36137 - DNA, 120 bp, synthetic construct
  source 1..120: mol_type = other DNA
gtcaacacagcgaaacactctctctactaaaaatataaaaattaggccaggcatggtggcgcacgcctgtagtcccagctacttgggaggcttaggcatgagattcgtttgaacccagga

SEQ ID NO: 36138 - DNA, 120 bp, synthetic construct
  source 1..120: mol_type = other DNA
aaaaaaaaaaaaaaaaaaacacccataaaaacaaaaattagctggaagtggtggctcatgcctgtaatcccagctactcgggaggctgaggcactagaattgcttgaacccaggaggtgg

SEQ ID NO: 36139 - DNA, 120 bp, synthetic construct; identical to SEQ ID NO: 10493
  source 1..120: mol_type = other DNA

SEQ ID NO: 36140 - DNA, 120 bp, synthetic construct
  source 1..120: mol_type = other DNA
cgttatttttttcaaagatagagacagggtctcactatgttgcccaggctgctctcaaactcctgggctcaagcgatccttccacttcagcctcccaaagtgctgggattacgagtgtga

SEQ ID NO: 36141 - DNA, 120 bp, synthetic construct
  source 1..120: mol_type = other DNA
agcaaatactcaggcaagtcgattatgatgagaaacgacaggaaggtcaggaagaaaaagcagccagtgtcatagagagacttcaccctggggtcaggaagtgacctttgagctgagtcc

SEQ ID NO: 36142 - DNA, 120 bp, synthetic construct
  source 1..120: mol_type = other DNA
ccacacataaagatatccttcattctgcttagtggccacatagggattcatcaggcctgccaagggaaaaagaaagacagccagagaggcttgagtacagggaacaaggggaagacgaac

SEQ ID NO: 36143 - DNA, 120 bp, synthetic construct; identical to SEQ ID NO: 10494
  source 1..120: mol_type = other DNA

SEQ ID NO: 36144 - DNA, 120 bp, synthetic construct
  source 1..120: mol_type = other DNA
gcctgacaaacatggcaaaactccctatctattaaaaatccaaaaattagccaggtgtggtggcgggtgcctgtaatcccagctactcgggaggctgaggcaggagaatcacttgaaccc

SEQ ID NO: 36145 - DNA, 120 bp, synthetic construct
  source 1..120: mol_type = other DNA
gatataaagtagcttactaaatgtctattattaccattgcctcctactgagaataaaaacaattcacgcattccacaggagagtactcagcaaactacacaggagagtactcagcaaact

SEQ ID NO: 36146 - DNA, 120 bp, synthetic construct
  source 1..120: mol_type = other DNA
ttaatttcccacacgaaaatccatgacctcttcttctaactttgctgaagacaagactttggttttacatgatactatcacacctgacctttgtgaagtagtcagggtaaaacattccag

SEQ ID NO: 36147 - DNA, 120 bp, synthetic construct; identical to SEQ ID NO: 3289
  source 1..120: mol_type = other DNA

SEQ ID NO: 36148 - DNA, 120 bp, synthetic construct
  source 1..120: mol_type = other DNA
gcctcaatctcctgggctcaaacgatcctcccacctcagcctcccgaatagctgggaccacaggcacacaccatcaagtctgactaattttttacatttgttgtagagacaaggtttcac

SEQ ID NO: 36149 - DNA, 120 bp, synthetic construct; identical to SEQ ID NO: 10495
  source 1..120: mol_type = other DNA

SEQ ID NO: 36150 - DNA, 120 bp, synthetic construct
  source 1..120: mol_type = other DNA
gcttgtggaatggtgatggtaacagtaacaaccccataggtttttgaggattaaaggaactaatacacatacattatttcaacagtgcctggcagattctaggcactgaataaatggtaa

SEQ ID NO: 36151 - DNA, 120 bp, synthetic construct
  source 1..120: mol_type = other DNA
tcgctctgtcacccaggctggagtgcagtggtgcgatctcggctcactgcaacctctgtctcccaggttcaagcgattctcctacctcagtctcctgagtagctggaattacaggcgtgc

SEQ ID NO: 36152 - DNA, 120 bp, synthetic construct
  source 1..120: mol_type = other DNA
aaactccgcctcccgggttcaagcgattctcctgcctcagcctcccaagtagctgggactacaggcgcccgccaccacgcctggctaattttgtatttttagtagagacaggtctcacca

SEQ ID NO: 36153 - DNA, 120 bp, synthetic construct; identical to SEQ ID NO: 10496
  source 1..120: mol_type = other DNA

SEQ ID NO: 36154 - DNA, 120 bp, synthetic construct
  source 1..120: mol_type = other DNA
gcctctattagatcttcaatttgagggggagtctgggaatgaacactaaacacactcacgctatgagcctctgcccctggagcacggtgtgctgctgcagcatctcgaagttatacttct

SEQ ID NO: 36155 - DNA, 120 bp, synthetic construct
  source 1..120: mol_type = other DNA
cagtttggttattataaatcccaggttaaactgaccaatgatttccatttctgcaaacatcgttttactgcaggtagaaaatgttaattatcagacattttacaagattatttttctgat

SEQ ID NO: 36156 - DNA, 120 bp, synthetic construct
  source 1..120: mol_type = other DNA
tgcaatggcacaatcttggctcactgcaacctccacctcccgggttcgagtgattcttctgcctcagcctcctgagtagctgggattacaggtgcgccaccatgcccagctaatttttgt

SEQ ID NO: 36157 - DNA, 120 bp, synthetic construct; identical to SEQ ID NO: 10497
  source 1..120: mol_type = other DNA

SEQ ID NO: 36158 - DNA, 120 bp, synthetic construct
  source 1..120: mol_type = other DNA
aacaagttttcagacctgtacacatagatctacttcattattttttctttttttttttcttttaagacggagtctcactctctgttgcccaggctggactgcagtggcgtgaccgtggct

SEQ ID NO: 36159 - DNA, 120 bp, synthetic construct
  source 1..120: mol_type = other DNA
ccaagcccggctaatttttttatttttagtagagacaaggtttcaccatgttggctaggctggtcttgaactcccgacctcaagtgatccacctgcctcggcctcccaaagtgctgggat

SEQ ID NO: 36160 - DNA, 120 bp, synthetic construct
  source 1..120: mol_type = other DNA
tttccaatttcaatagcgcactcaaagctgcaacaaatacttctgtgcataaacctactcatctgtgggtgcatttccgtgagacagacgctagagggagaactacatatgtacttcttg

SEQ ID NO: 36161 - DNA, 120 bp, synthetic construct; identical to SEQ ID NO: 10498
  source 1..120: mol_type = other DNA

SEQ ID NO: 36162 - DNA, 120 bp, synthetic construct
  source 1..120: mol_type = other DNA
atgtaatcccagcactttgggaagacaaggtgggcagatcatttgaggttgggagttcaagaccagcctggccaacatggtgaaaccccatctctactaaaaataaaaaaattagccagg

SEQ ID NO: 36163 - DNA, 120 bp, synthetic construct
  source 1..120: mol_type = other DNA
aaagagtgagactcttgtctcaaaaaaaaaacaaaggagctgatattgttgtttctttctataagtgctccaggaagacccggtcccatgccaccatgctcgtcaccatcacaatcaacc

SEQ ID NO: 36164 - DNA, 120 bp, synthetic construct
  source 1..120: mol_type = other DNA
aaatcctatctttgagggtctgtttcctggtaccaattccagatcaggcagagtgcaatcaatcaagagacaaaaaccacaccagtgattttaacagggacttttttttttaagacaggg

SEQ ID NO: 36165 - DNA, 120 bp, synthetic construct; identical to SEQ ID NO: 10499
  source 1..120: mol_type = other DNA

SEQ ID NO: 36166 - DNA, 120 bp, synthetic construct
  source 1..120: mol_type = other DNA
cctgaggaggaaaaatgtataataaggcattacacaaactagtaaaaggtggttaactactatgctaagaaatacaggaatggaaaatgctactatcctagggaagagggagagtcctca

SEQ ID NO: 36167 - DNA, 120 bp, synthetic construct
  source 1..120: mol_type = other DNA
ccgggttcaagcaattctcctgcctcagcctcccaagtagctgggattacaggcatgcaccaccatatcccactaattttgcatttttagtagagaaaaggtttctccatgttggtcagc

SEQ ID NO: 36168 - DNA, 120 bp, synthetic construct
  source 1..120: mol_type = other DNA
gcccagcagaaaaggaactcttgtaagaggctcctacccactcaggctgagtttcagacctccttggagcaggagtggccgcagcctgctggatggagagaagctgccagagtgagtgat

SEQ ID NO: 36169 - DNA, 120 bp, synthetic construct; identical to SEQ ID NO: 10500
  source 1..120: mol_type = other DNA

SEQ ID NO: 36170 - DNA, 120 bp, synthetic construct
  source 1..120: mol_type = other DNA
ttggcttggcctcccaaagtactgggattacaggtgtgagccaccacacctagcctcaaaatactcttaagaaaaaactttacctggccgggtgtggtggctcacacctgtaatcccagc

SEQ ID NO: 36171 - DNA, 120 bp, synthetic construct
  source 1..120: mol_type = other DNA
acctgtaatcccagctactcaggaggctgaggcaggagaaacgcttgaacccgggaggtggaggctgcagtgagccaagatcatgccactgcattccagcctgcgcaacagagcaagact

SEQ ID NO: 36172 - DNA, 120 bp, synthetic construct; identical to SEQ ID NO: 10501
  source 1..120: mol_type = other DNA

SEQ ID NO: 36173 - DNA, 120 bp, synthetic construct
  source 1..120: mol_type = other DNA
gggttgcgagattagttggctgaggcaaaactcgaaatttacatccggtatcttcctggtttgaatggcagtccacatctgaaaaagagtcgtcagttttaggcgctttctcctgagagt

SEQ ID NO: 36174 - DNA, 120 bp, synthetic construct
  source 1..120: mol_type = other DNA
agtccttctccacctccgctctgtccgtagggtcactgggtccgtgactggaactcactgcctctttctgaggtctcaggacgcctttgtcagagatggcacctgaagtgctagaagaca

SEQ ID NO: 36175 - DNA, 120 bp, synthetic construct
  source 1..120: mol_type = other DNA
cttttttttcttctccagtccttaatgaaggggattgatcctgcttttctaccatgggcttttccaaatccgctgcatgcatttttattaagttacctaagcaaacgtggacggagaaga

SEQ ID NO: 36176 - DNA, 120 bp, synthetic construct; identical to SEQ ID NO: 10502
  source 1..120: mol_type = other DNA

SEQ ID NO: 36177 - DNA, 120 bp, synthetic construct
  source 1..120: mol_type = other DNA
atgccaccactgctctccagcctgggtgacagagcaacactctgtctcaaaaaaaaaaaaaaaaaaaaaaaaaaccacaacacaatgcaatatggccatatactcaccagaatggtaaaa

SEQ ID NO: 36178 - DNA, 120 bp, synthetic construct
  source 1..120: mol_type = other DNA
aatgtatgcacacctgcaacccagcatagctactcctatcagaagtgcctattggccggcacagtggctcacgcctgtaatcctagccctttgaggtcaggagttcaagaccagcctgac

SEQ ID NO: 36179 - DNA, 120 bp, synthetic construct
  source 1..120: mol_type = other DNA
acctggaaggcagggttgcagcgagccaagatcactccactgcactccagcctgggcgacagagtgagactccctctcaaaaaaaagaaagaagtgcctatctatgctcgtcaaaaagac

SEQ ID NO: 36180 - DNA, 120 bp, synthetic construct; identical to SEQ ID NO: 10503
  source 1..120: mol_type = other DNA

SEQ ID NO: 36181 - DNA, 120 bp, synthetic construct
  source 1..120: mol_type = other DNA
cctgagtcagcctcctgagtagctgggactacaggcgcccgccaccacgcccggctaattttttgtatttttagtagagacagagtttcaccgtgttagatagtctcgatctcctgacct

SEQ ID NO: 36182 - DNA, 120 bp, synthetic construct
  source 1..120: mol_type = other DNA
aggactgcttgagctcaagagtttgagaccagcctgggcatcatggagaaaccccatctctaatgacaatacaaacattagccaggtgtggtggtgggcgcctgtaatcccagctactca

SEQ ID NO: 36183 - DNA, 120 bp, synthetic construct
  source 1..120: mol_type = other DNA
catgacaagggagttaaaaatgcagtcactgcagacttcttctaatcatatatcttatatgacttcatccgtttacagtttacaaaaaactagaggtacttggaggcagctacttgggag

SEQ ID NO: 36184 - DNA, 120 bp, synthetic construct; identical to SEQ ID NO: 10504
  source 1..120: mol_type = other DNA

SEQ ID NO: 36185 - DNA, 120 bp, synthetic construct
  source 1..120: mol_type = other DNA
catcactatcaaacattcctatcaaagaggtctttaaaactgccaacaaaagcttttcctcttgtagcaaaatttgccttttatctggagtaacattgatatcaacgcattctaaggcaa

SEQ ID NO: 36186 - DNA, 120 bp, synthetic construct
  source 1..120: mol_type = other DNA
gcaacctccgcctcctgggttcaagtgattctccctgcctcagcctccgaagtagctaggattacaggcaagtgccaccacactggctaatttttgtatttttagtagagatggggtttc

SEQ ID NO: 36187 - DNA, 120 bp, synthetic construct
  source 1..120: mol_type = other DNA
tagaaatttccccatctattatttcattcacttgtatttatcacaagtgctattaaaaacattacagtgtccaggttaagattcataagttatgaaatcagctttttcaaataaatgagc

SEQ ID NO: 36188 - DNA, 120 bp, synthetic construct; identical to SEQ ID NO: 10505
  source 1..120: mol_type = other DNA

SEQ ID NO: 36189 - DNA, 120 bp, synthetic construct
  source 1..120: mol_type = other DNA
gcactttgggaggctgagacgaacagataagttaaggtcaggagttcaagaccagcctggccaacatggcgaaaccccgtctctactaaaaacacaaaaaattagtcaggcatggtggca

SEQ ID NO: 36190 - DNA, 120 bp, synthetic construct
  source 1..120: mol_type = other DNA
atattacaccactgcactccagcttgggagacagagcaagactctgtctcaaaaaatatctaataataaagatgcagataatgatttaattataaggaaagtatttataatttccaaaaa

SEQ ID NO: 36191 - DNA, 120 bp, synthetic construct
  source 1..120: mol_type = other DNA
aaaaccacatttctgatcaatttctaataacatggaaaagaaaacattcacatctaaggataaagagcagtatacaaaattattttctcatcccaaagaatatgggagtaggggagagag

SEQ ID NO: 36192 - DNA, 120 bp, synthetic construct; identical to SEQ ID NO: 10506
  source 1..120: mol_type = other DNA

SEQ ID NO: 36193 - DNA, 120 bp, synthetic construct
  source 1..120: mol_type = other DNA
ctggctaacacggtgaaaccctgtctctactaaaaatacaaaaaattagccaggtgtggtggcacgcacctgtagtcccagctacttgggaggctgagtcaggagaatcgcttgaacccg

SEQ ID NO: 36194 - DNA, 120 bp, synthetic construct
  source 1..120: mol_type = other DNA
tcattccagtcatagcagagctgtagaatttcattttattctttgaggcattagtcactagttgtactgaaatgccaatggaacttacctgaatcaacagaaatgttaagaacaacaaat

SEQ ID NO: 36195 - DNA, 120 bp, synthetic construct
  source 1..120: mol_type = other DNA
cgagtctgcagacctgcacaaaatacaaggagtagaaaagaataaatgacaaatgttcccagccccccgcattctaacaacattctattctaaccaaccagcatgttcttagaaggggat

SEQ ID NO: 36196 - DNA, 120 bp, synthetic construct
  source 1..120: mol_type = other DNA
agcctgacatgtaacttggattacaggcaggatttttttttctttttttttttcaacggagtctcgctcttgttacccagactggagtgtaatggcacgatcttggctcactgcaacctc

SEQ ID NO: 36197 - DNA, 120 bp, synthetic construct; identical to SEQ ID NO: 10507
  source 1..120: mol_type = other DNA

SEQ ID NO: 36198 - DNA, 120 bp, synthetic construct
  source 1..120: mol_type = other DNA
catcaccaaaagtttcctcacaatctcaaagtgatatttctctaatcatagattcctaaaactgaatatttttccaacttaaagttgctctatgagaaattctagtgaaatgcaagtgca

SEQ ID NO: 36199 - DNA, 120 bp, synthetic construct
  source 1..120: mol_type = other DNA
tatcacattattaatagttataattaataattatgaatccatcacactataggttaaaaaatttagaagttcaaccacatctggcagattacaagcaaactctaaagcatcattgaaaaa

SEQ ID NO: 36200 - DNA, 120 bp, synthetic construct; identical to SEQ ID NO: 10508
  source 1..120: mol_type = other DNA

SEQ ID NO: 36201 - DNA, 120 bp, synthetic construct
  source 1..120: mol_type = other DNA
caaactcaaaaaacccatgtcatcatatcaagatgatcaatttaaatctgaggcagaagtaatctgagcccttattttcctaggaaaatagaaagaagagaaaatatagaaatctataga

SEQ ID NO: 36202 - DNA, 120 bp, synthetic construct
  source 1..120: mol_type = other DNA
accccgtatctactaaaaatacaaaaattagccgggtgtggtgatgcgtgcctgtagtcctagctactagagaggctggggcaggagaatggcgtgaacctgggaggcggtgcttgcagt

SEQ ID NO: 36203 - DNA, 120 bp, synthetic construct
  source 1..120: mol_type = other DNA
ggtgacatagaatgttataaaatgtttagtttcttcaaatagttttagtttttacaataataaatatactggtaatatgtgtttatatatttatgtatctatacacacaacacatataat

SEQ ID NO: 36204 - DNA, 120 bp, synthetic construct
  source 1..120: mol_type = other DNA
gaggtcaggatttcaagaccatcctggccacatggtgaaattccgtctctactaaagacacaaaaacttagccgggcgtggtggcgcgcgcctgtaatcccagctacttgggaggctgag

SEQ ID NO: 36205 - DNA, 120 bp, synthetic construct; identical to SEQ ID NO: 10509
  source 1..120: mol_type = other DNA

SEQ ID NO: 36206 - DNA, 120 bp, synthetic construct
  source 1..120: mol_type = other DNA
aggcacctgtagtcccagctactcgggaggctgaggcaggagaatggcgtgaacctgggaggcggagcttgcagtgagccgagaccacgccactgcactccagcctgggtgacaaacaag

SEQ ID NO: 36207 - DNA, 120 bp, synthetic construct
  source 1..120: mol_type = other DNA
tataggcaaaataacctattttataataaaatgttgaatatcttctgtaatttattgaatactataccgaaaaacaatggttcaataggtacttgaagtatggtatctactgcaaaaaat

SEQ ID NO: 36208 - DNA, 120 bp, synthetic construct
  source 1..120: mol_type = other DNA
tctcccaggttcaagtgatcctcctgcctcagcctcccatgtagctgggattacaggcgtggaacaccatgcctggttattttttgtattttagtagagacggggttttgtcatgttggc

SEQ ID NO: 36209 - DNA, 120 bp, synthetic construct; identical to SEQ ID NO: 10510
  source 1..120: mol_type = other DNA

SEQ ID NO: 36210 - DNA, 120 bp, synthetic construct
  source 1..120: mol_type = other DNA
aagaaaaactgtctgtctgttgaactccttccaactccatgcgtgcattgtgaaatgaaacctgagatgctattcaacattaatatggtaagggcaggattccagagtgaaagggattag

SEQ ID NO: 36211 - DNA, 120 bp, synthetic construct
  source 1..120: mol_type = other DNA
aagaaccaaaccttctggaatattctaaagctcctacagtcaaccaatgcaccacaggtgatgcagtgcgtccaaaactgatgtgttgcagctctccttacccttcctgataaatcctca

SEQ ID NO: 36212 - DNA, 120 bp, synthetic construct; identical to SEQ ID NO: 10511
  source 1..120: mol_type = other DNA

SEQ ID NO: 36213 - DNA, 120 bp, synthetic construct
  source 1..120: mol_type = other DNA
ggctcatgcctgtaattccagagccttgagaggccaaggtgggtggatcacctgaggtcaggagttcaagaccagcctgggcaacatggcgaaaccccgtctccactaaaaatacaaaaa

SEQ ID NO: 36214 - DNA, 120 bp, synthetic construct
  source 1..120: mol_type = other DNA
tcacggcactgcactgcagcctaggcaacaaagcaagactccatctcaaagctaaaaaaaaaaaaaatatatatatatatatatatatacacacagatagatagatatctttacaggacc

SEQ ID NO: 36215 - DNA, 120 bp, synthetic construct
  source 1..120: mol_type = other DNA
aactaaacagagccttaaagaagacctgctcaacagaaaaccacctgaaatataccacttactcaaaacatggtttgaattaagcaactgactcctttgtataaatcatctttcttagcc

SEQ ID NO: 36216 - DNA, 120 bp, synthetic construct
  source 1..120: mol_type = other DNA
aggagttcgagaccagcctggccaacatggtgaaaccccgtctctactaaaaatacaaaattagccgggtgtggtggcacgtgcctgtaatcccagctactcaggaggctgaggcaggag

SEQ ID NO: 36217 - DNA, 120 bp, synthetic construct; identical to SEQ ID NO: 10512
  source 1..120: mol_type = other DNA

SEQ ID NO: 36218 - DNA, 120 bp, synthetic construct
  source 1..120: mol_type = other DNA
gttttctttcttagtcaagctattgacattacaagcgcaaaaaaaattaaaagaatcttttgttttgttttgttttttgagacagggtctccctctattgcccaggctggagtacaatgg

SEQ ID NO: 36219 - DNA, 120 bp, synthetic construct
  source 1..120: mol_type = other DNA
ttttttgtagagatgggatcttgccgtgttatccaagctggtcttaaattcctgggctcaagcgattctcccacctcaaaattgttggccgggtggttcaaacacataatcccaacagtt

SEQ ID NO: 36220 - DNA, 120 bp, synthetic construct; identical to SEQ ID NO: 10513
  source 1..120: mol_type = other DNA

SEQ ID NO: 36221 - DNA, 120 bp, synthetic construct
  source 1..120: mol_type = other DNA
ctgagtagctgggattacaggtgcctgccaccacgaacagataatttttgtatttttagtagagatggggtttcaccatattgatcaggctggtctcaaactcctgacctcgtgatccgc

SEQ ID NO: 36222 - DNA, 120 bp, synthetic construct
  source 1..120: mol_type = other DNA
cactttgggaggccgaggcaggcggatcactagaggtcaggagttcgaggccagtctggccaacaagatgaaaccccatctctactaaaaatacaaaaaattagctgggcctggtggcat

SEQ ID NO: 36223 - DNA, 120 bp, synthetic construct
  source 1..120: mol_type = other DNA
ctccagctcaaaaaaaaaaaaaaccggccgggcttggtggctcacacctgtaatcccagcactttgggaggccgaggctggtggatcacgaggtcaggaattcgagaccagcctggccaa

SEQ ID NO: 36224 - DNA, 120 bp, synthetic construct; identical to SEQ ID NO: 10514
  source 1..120: mol_type = other DNA

SEQ ID NO: 36225 - DNA, 120 bp, synthetic construct
  source 1..120: mol_type = other DNA
gcataccacaggctgtcgttttccttgtccaagctgattggtgcaacttacacggatgcctgctgaaatgatacagtatgcatgtaagacctggaccattttggcatactcctgtttaaa

SEQ ID NO: 36226 - DNA, 120 bp, synthetic construct
  source 1..120: mol_type = other DNA
atgatctgtaaagaggtgtcttcctatattctacagaaaggaacgcagagcttttggctcctggtcacagtcctctcacttcccaatgtgccatgcatcctggtaaaacaactaaaaagt

SEQ ID NO: 36227 - DNA, 120 bp, synthetic construct
  source 1..120: mol_type = other DNA
aattagccgggcgtcatggcatgtgcctgtagtcacagctactgaggaggctgaggtgggaggatcgcttgagcctaggagttcaaggctgcagtgagccatgattgcaccactgcactc

SEQ ID NO: 36228 - DNA, 120 bp, synthetic construct; identical to SEQ ID NO: 10515
  source 1..120: mol_type = other DNA

SEQ ID NO: 36229 - DNA, 120 bp, synthetic construct
  source 1..120: mol_type = other DNA
agcactttgggaggctgaggcgggaggatcacttgagcccacgagttcgagacctgcctgggcaacacagaaggacccatctctacaaaaaaaacaaaaattagccgggcatggtagcac

SEQ ID NO: 36230 - DNA, 120 bp, synthetic construct
  source 1..120: mol_type = other DNA
ccctgtctcaattaaaaaaaaaaaaaaaaaaaaaatacaactttcaaccacatacaattctgtattacttgcatgttgtacattctatattacttgctttcattatattaacttatgaat

SEQ ID NO: 36231 - DNA, 120 bp, synthetic construct
  source 1..120: mol_type = other DNA
gctaaggcactaatttttttaccataagatacaaaaaaagagtaagttttctctactttagaaaatttaaatttgtgaaaaaatgtaataaagttaaaattagcagccaagtgcagtggc

SEQ ID NO: 36232 - DNA, 120 bp, synthetic construct
  source 1..120: mol_type = other DNA
gctgggcgtggtggcgcacacctataatcccagctactcgagaggctgaggcaggagaatcacttgaacccaggaggtggaggttgcagtgagccgagatcgcaccactgcactccagcc

SEQ ID NO: 36233 - DNA, 120 bp, synthetic construct; identical to SEQ ID NO: 10516
  source 1..120: mol_type = other DNA

SEQ ID NO: 36234 - DNA, 120 bp, synthetic construct
  source 1..120: mol_type = other DNA
tcataagggttctaatagctcatttctcagaaaaccaagagaaatattcttttttttttttttttgagatggggtctggctctgtgcccaggctggagtgcaatagcttgatctcggctc

SEQ ID NO: 36235 - DNA, 120 bp, synthetic construct
  source 1..120: mol_type = other DNA
ttcaccagtttggccaggatggctttgatctcttgacctcgtgatccacccgcctcagcctcccaaagtgctgggattacaggtgtgagccactgtgcctggccgagaaatattcttatt

SEQ ID NO: 36236 - DNA, 120 bp, synthetic construct
  source 1..120: mol_type = other DNA
caacatggtgaaaccccgtctctactaaaaatacaaaaattagccagctgtggtggtacacgcctgtaattgcagctactcagaaggctgaggcaggagaatcgcttgaactcaggaggt

SEQ ID NO: 36237 - DNA, 120 bp, synthetic construct; identical to SEQ ID NO: 10517
  source 1..120: mol_type = other DNA

SEQ ID NO: 36238 - DNA, 120 bp, synthetic construct
  source 1..120: mol_type = other DNA
catcctaaagttaagtctttaatgttaaatctttaatgagaaatgcaaataaagcatttctcaataatttatgggaagagaatcaactgaagaataaacatctttagtaaatcttttgct

SEQ ID NO: 36239 - DNA, 120 bp, synthetic construct
  source 1..120: mol_type = other DNA
gcacaggtagtgtggaaaataactgctgcacgctgactgtggtccctctggggcgggggtagggggttttctggataattttcccattgtgatcaaacatcagtcgagttccaaccttcg

SEQ ID NO: 36240 - DNA, 120 bp, synthetic construct
  source 1..120: mol_type = other DNA
aaaattttcttaaaaagctgacgatccctctgagataatcaagatctaaatggttgaggagtcatcataaaatctaaggtttggcatctaaaagacagtgagacagagagcactaaacat

SEQ ID NO: 36241 - DNA, 120 bp, synthetic construct; identical to SEQ ID NO: 10518
  source 1..120: mol_type = other DNA

SEQ ID NO: 36242 - DNA, 120 bp, synthetic construct
  source 1..120: mol_type = other DNA
aatcacttgaacctggaaggcagagattgcagtgagccgagactgtgccactgcactccagcctgggtgacaaagagagactctgtctaaaaaaaaaaaaagatatatatatatatatat

SEQ ID NO: 36243 - DNA, 120 bp, synthetic construct
  source 1..120: mol_type = other DNA
aaaattgagaattactgttttaataagggtaaccatctttttaacaatactatttgcttcatttcattcatttattgctcacatttcagaagtactatgacttagattggcagcgagaca

SEQ ID NO: 36244 - DNA, 120 bp, synthetic construct
  source 1..120: mol_type = other DNA
atcacctcagtgcacaaagtgagctcagagcttccccccgaaagccaaaagtttcaacctgagttaggtcggcaaactcttgaatcttagatgtgtgatgtttcagagctgaaagagagt

SEQ ID NO: 36245 - DNA, 120 bp, synthetic construct; identical to SEQ ID NO: 10519
  source 1..120: mol_type = other DNA

SEQ ID NO: 36246 - DNA, 120 bp, synthetic construct
  source 1..120: mol_type = other DNA
cctttagttaaacatactagtgtcattttgtatatttcattgttataaagtcctttctggctatttactagcccagactaaatagtttagctttttctttctttcctctttttttttccc

SEQ ID NO: 36247 - DNA, 120 bp, synthetic construct
  source 1..120: mol_type = other DNA
attttaacatacccaataaagagaacggggaccgggtgcagtggttcatgcctgtaattccagcactttgggaggccaaagcgagcagatcacctgaggtcaggagttcgagaccagcct

SEQ ID NO: 36248 - DNA, 120 bp, synthetic construct; identical to SEQ ID NO: 10520
  source 1..120: mol_type = other DNA

SEQ ID NO: 36249 - DNA, 120 bp, synthetic construct
  source 1..120: mol_type = other DNA
tttggttttttttattttattattcttttcttttcttttgagatggagttttgctcgtcacccaggctggagtgcagtggtacgatcttggctcactgcagcctccacctcccaggttca

SEQ ID NO: 36250 - DNA, 120 bp, synthetic construct
  source 1..120: mol_type = other DNA
gaactcctgacctcaaatgatcagcccccctcagcctcccaaagtgctggtattacagatgtgagccactactccagccctattttgttttatgtttttgagatggaatcttgctctgtc

SEQ ID NO: 36251 - DNA, 120 bp, synthetic construct
  source 1..120: mol_type = other DNA
cagctaatttttgtatttttagtagagacagagtttcaccactttggacaggctggtctcgaactcctgacctcaggtatccacccgccttggcctcccaaagtgctgggattacaggcg

SEQ ID NO: 36252 - DNA, 120 bp, synthetic construct; identical to SEQ ID NO: 10521
  source 1..120: mol_type = other DNA

SEQ ID NO: 36253 - DNA, 120 bp, synthetic construct
  source 1..120: mol_type = other DNA
aacattcacagatcatttcttgtggcttaaaactctcccaaacttaccaatattagtggcaccagcatccagactgttttctactaactcctttaccgcagtgcttagactcagtaccac

SEQ ID NO: 36254 - DNA, 120 bp, synthetic construct
  source 1..120: mol_type = other DNA
cctgattttaactgtgggaaatgactcaacactgtaaataatttatgggtctaatctattcatttattatattagcaaatacatttattatatccagaaatagaaacactgttttacaat

SEQ ID NO: 36255 - DNA, 120 bp, synthetic construct
  source 1..120: mol_type = other DNA
atctttggcaacaatggtgtcttctttcttgaaaagtgaaagcatggctggctgtggtggctcatgcctgtaatcccagcactttgggaagcagagatgggtggataacttgaggtcagg

SEQ ID NO: 36256 - DNA, 120 bp, synthetic construct; identical to SEQ ID NO: 10522
  source 1..120: mol_type = other DNA

SEQ ID NO: 36257 - DNA, 120 bp, synthetic construct
  source 1..120: mol_type = other DNA
tgccagctgctgtcttagcaaagaccctcaaagctcttgctgtactagctttaagagttttataaaggttttatctccccttattccctgctccaatacatcctccactctatcaccaga

SEQ ID NO: 36258 - DNA, 120 bp, synthetic construct
  source 1..120: mol_type = other DNA
tttcagaatctctctaatcctttcccttcatcaagtcccctacattattattattattattattattattgttattattgttattatttgagacagagtctcaccccgttgcctatgcta

SEQ ID NO: 36259 - DNA, 120 bp, synthetic construct
  source 1..120: mol_type = other DNA
agctgggattacaggcgcccaccatcacacccagctaatttttgtgtttttagaagagatagggtttcaccatgttggccaggctggtctcgaactcctgacctcaggtgatccgcctgc

SEQ ID NO: 36260 - DNA, 120 bp, synthetic construct; identical to SEQ ID NO: 10523
  source 1..120: mol_type = other DNA

SEQ ID NO: 36261 - DNA, 120 bp, synthetic construct
  source 1..120: mol_type = other DNA
ggtatttcctacagcatttaacacatcgtaggcctttaataaacccttctgaaataaacaaacctctttactcttcattccaccttgctaagaatctcacctaagtctgtctaccatgtg

SEQ ID NO: 36262 - DNA, 120 bp, synthetic construct
  source 1..120: mol_type = other DNA
agtcttgctgcgttgcccaggccggactgcagtggcacgatctcagctcactgcaacctccgcctcctgggttccagcgattctcctgcctcagcctccaaagtagctaggattacaggc

SEQ ID NO: 36263 - DNA, 120 bp, synthetic construct
  source 1..120: mol_type = other DNA
gggattataggcgtgagtcaccgctctcggcccacttcagatatttattttgaggagggagcgcatttagacacagaccccaaatttatttaaatgtctcaatacatttaaatgtagtta

SEQ ID NO: 36264 - DNA, 120 bp, synthetic construct; identical to SEQ ID NO: 10524
  source 1..120: mol_type = other DNA

SEQ ID NO: 36265 - DNA, 120 bp, synthetic construct
  source 1..120: mol_type = other DNA
aaaatactataaaaataaaaataaaaggggagagagaacaggtagaaaggaaatgcattcagtctatggggatttcacgctcccgcttcaagtccacggccctgtgatgggatgtgggca

SEQ ID NO: 36266 - DNA, 120 bp, synthetic construct
  source 1..120: mol_type = other DNA
gcctcggcctcaaggcgcacccaaggggcacgagatcgctgcaacactgaggtcgccactccggggcctccagggggctgcctcgccacgcgcctcggccatgttccccccatttccagg

SEQ ID NO: 36267 - DNA, 120 bp, synthetic construct
  source 1..120: mol_type = other DNA
ctcagctcgctccatggatgcaacacccgatccgcctcggggactgggaaagttccctccagggctcccacaggcgctccgcctcctgaactcccattggctgctttcgacgttgtgctc

SEQ ID NO: 36268 - DNA, 120 bp, synthetic construct
  source 1..120: mol_type = other DNA
tggtagatagtaggatctattttaatttttcaatctgaaaaaaaaaaacccaaaacaaaaaaaaaacaaactatcctcatatatatatatacagtgtcaacattttcagagcacttacat

SEQ ID NO: 36269 - DNA, 120 bp, synthetic construct; identical to SEQ ID NO: 10525
  source 1..120: mol_type = other DNA

SEQ ID NO: 36270 - DNA, 120 bp, synthetic construct
  source 1..120: mol_type = other DNA
caccaaaagatgtgtaaaaaaattgcatgaaagtaaaaataaataaagctgttgtaaagcagcctcgttgacacggtagcccagaacaaaacacttacgtgtaaaagtgtcattacaatt

SEQ ID NO: 36271 - DNA, 120 bp, synthetic construct
  source 1..120: mol_type = other DNA
ccccggctgcggcggtgacatattgctgtattcggacataaggcactgtgatctgaacataccgtgcactcaccttatgccacatcacctgttccataccagtgaattctttgaaatgaa

SEQ ID NO: 36272 - DNA, 120 bp, synthetic construct
  source 1..120: mol_type = other DNA
ttcttttttaagcttaatttcaacatcactggaagaaatacctattgttaaaccctgatatacattcttaaccacttgcagccagtgttcatgaggcaaaacgtgacccagagactttgt

SEQ ID NO: 36273 - DNA, 120 bp, synthetic construct; identical to SEQ ID NO: 10526
  source 1..120: mol_type = other DNA

SEQ ID NO: 36274 - DNA, 120 bp, synthetic construct
  source 1..120: mol_type = other DNA
aatatgtcagatttaacttggaaaacaaaaaaaaagaattccactcttaaaaaattttactaagaaatatgtaggtatgttttagtgaaggtgtgaagtatttcagttgtgcactcttac

SEQ ID NO: 36275 - DNA, 120 bp, synthetic construct
  source 1..120: mol_type = other DNA
acatggtgaaaccctgtctctactaaaaatacaaaaattagctgggcgtagtggcgggcgcctgtaatcccagctacttgggagactgaggcaggagaatcgcttgaatccgggaggtgg

SEQ ID NO: 36276 - DNA, 120 bp, synthetic construct
  source 1..120: mol_type = other DNA
ctgaaggataattgcacctaacaagtatctggctaggacattccacagtggattggcagggagagctactatttttctcatcacaggagcttctctcctaatttttcaccagacgctaga

SEQ ID NO: 36277 - DNA, 120 bp, synthetic construct; identical to SEQ ID NO: 10527
  source 1..120: mol_type = other DNA

SEQ ID NO: 36278 - DNA, 120 bp, synthetic construct
  source 1..120: mol_type = other DNA
ctttcagctcttttcatagcaacataggagggagacgggcctgtatcagccggctccttctctactgaagaaattggggctgaaggaggtgaagcgacttgcttacattcagacagcgct

SEQ ID NO: 36279 - DNA, 120 bp, synthetic construct
  source 1..120: mol_type = other DNA
gttccactccaaaagttcacttgtaatccagttattagtaacacggaatgttttcctcaacaaatcgtgttgtatacactgtatcataaggaattccaacccagctacccccatcttcac

SEQ ID NO: 36280 - DNA, 120 bp, synthetic construct
  source 1..120: mol_type = other DNA
tggaaatttgaactcatccagcacaaccgttcattcttatggtttgagatatcaagaaacagagaggatgaatcgcttgacttgtttactctttttgtaatgcccaaagagacagacaag

SEQ ID NO: 36281 - DNA, 120 bp, synthetic construct; identical to SEQ ID NO: 10528
  source 1..120: mol_type = other DNA

SEQ ID NO: 36282 - DNA, 120 bp, synthetic construct
  source 1..120: mol_type = other DNA
tggcattaacattcgtttagttcttaatgtttcatgattatagagactattgtgagattcaggtcttttaaacacttgaagtttgcaagtgactgcaccaggccccatttctagagtttc

SEQ ID NO: 36283 - DNA, 120 bp, synthetic construct
  source 1..120: mol_type = other DNA
tcattttctagtaaattccaggtggtggtgatgatgcctggcctgaggaccacctcggaaaaatcactgctgtactggaatttctcttggtgttctcatttagcgaataagacatgtttc

SEQ ID NO: 36284 - DNA, 120 bp, synthetic construct
  source 1..120: mol_type = other DNA
tctgaactaaagagaaatcaatactgtagcacacacaccgtttaatattggattctgagagttcaaagggcatgctgtttgctcccacatcgggtccatgtggccctgacaaaggctggg

SEQ ID NO: 36285 - DNA, 120 bp, synthetic construct
  source 1..120: mol_type = other DNA
ggaaggccagctcctcttgtctaaagccctctcccgttctctctgctcctcactgtctgagactctgaaggcttgctcaaagtgaatctgtcaaaaaatgagtttaaccacactctatct

SEQ ID NO: 36286 - DNA, 120 bp, synthetic construct; identical to SEQ ID NO: 10529
  source 1..120: mol_type = other DNA

SEQ ID NO: 36287 - DNA, 120 bp, synthetic construct
  source 1..120: mol_type = other DNA
cttcccaactgaagagaaaacgaaaatggtttcaaagtaatatactcaaagccttgatctgtaggtgggtggagaaatgatggtttaaatgctgcacttcctgttctacctcccaccctt

SEQ ID NO: 36288 - DNA, 120 bp, synthetic construct
  source 1..120: mol_type = other DNA
accagccgatggacctgcaaagagaaaagcaggacacgtgaaaattaacatttaaaaaaggtttaaaatggacatgagaaataatgtcctgtcatgtttttatatgatcaacacatccct

SEQ ID NO: 36289 - DNA, 120 bp, synthetic construct
  source 1..120: mol_type = other DNA
tggaggttgcagtgggccaagatcgcaccagtgcactctagcttgggtgacagagtgagatcctgtctcagaaaaagaaaaaagcaacacacacacacacatcccataaatgaataaatg

SEQ ID NO: 36290 - DNA, 120 bp, synthetic construct; identical to SEQ ID NO: 10530
  source 1..120: mol_type = other DNA

SEQ ID NO: 36291 - DNA, 120 bp, synthetic construct
  source 1..120: mol_type = other DNA
atatcagtttctaataactatcaggtacttgtcttattaatacatgggagagaagtccagatgatgacagaaacgaagaaacaaggtcgcagctcttacaagggttttattttctgcagt

SEQ ID NO: 36292 - DNA, 120 bp, synthetic construct
  source 1..120: mol_type = other DNA
tccatctctagttttctactctgaaatctctgatgagtgacggcagagcgttttgaggtgtttctgtaacaggcctttcacccgcaggaagggagcggcgttgctattctcttaaaagct

SEQ ID NO: 36293 - DNA, 120 bp, synthetic construct
  source 1..120: mol_type = other DNA
ctctactaaaaatacaaaaattagccagaagtgctggtgggcacctgtagtcccagctactcaggaggctgagacaggagaattgcttgaacctgggaggtggaggttgcagtgagctga

SEQ ID NO: 36294 - DNA, 120 bp, synthetic construct; identical to SEQ ID NO: 10531
  source 1..120: mol_type = other DNA

SEQ ID NO: 36295 - DNA, 120 bp, synthetic construct
  source 1..120: mol_type = other DNA
caaaaaaaaaaaaaaaaaaaaaaaaaaaaaggcttcagaacctgggccacggcagctctgtgccggctgcgccctgggagaccctctctgtattgaacagtgatacccctgatagaaaac

SEQ ID NO: 36296 - DNA, 120 bp, synthetic construct
  source 1..120: mol_type = other DNA
taatggcttggtcatctttcccgtggcagtcaacataaatttcttttaaatgtttctctaaaaaagctttcaggttcatcagtaatcctgtgatataacacagcacaattatttgctaac

SEQ ID NO: 36297 - DNA, 120 bp, synthetic construct
  source 1..120: mol_type = other DNA
ttgggaggccgaggcgggcagatcacgaggtcaggagatcgagaccatcctggctgacaaggtgaaaccccgtctctactaaaaatacaaaaaattaggcgggcgcctgtagtcccagct

SEQ ID NO: 36298 - DNA, 120 bp, synthetic construct; identical to SEQ ID NO: 10532
  source 1..120: mol_type = other DNA

SEQ ID NO: 36299 - DNA, 120 bp, synthetic construct
  source 1..120: mol_type = other DNA
caaatggaatcatcactgatactgtacacccttctcctagctacattaaagctaaaaactgttatttttttggtccttctgtgaggagtcatcttgtgaaggaattttctttttaggcgg

SEQ ID NO: 36300 - DNA, 120 bp, synthetic construct
  source 1..120: mol_type = other DNA
gtgcaggaaactgggagttactagattatttgctatttatctaattgaggaaagagagatactggtgggaagagagaaaaaagttttactgacttatcattcactttgttaaaatatata

SEQ ID NO: 36301 - DNA, 120 bp, synthetic construct
  source 1..120: mol_type = other DNA
gggtcttgctctgctgtcgagactggagtgcagtggcaccgccacagctcactgaaatatcaagctcttggattcaagggatcctccttcctcagcttccctattagctatgactacagg

SEQ ID NO: 36302 - DNA, 120 bp, synthetic construct; identical to SEQ ID NO: 10533
  source 1..120: mol_type = other DNA

SEQ ID NO: 36303 - DNA, 120 bp, synthetic construct
  source 1..120: mol_type = other DNA
tcttactattctgtccacgatggtctccagtatttccagcttattgcacttcacaacaccttcaaaatactgtgaacggtgctgaagggcctgggtcaccgtgatatctaggttattgta

SEQ ID NO: 36304 - DNA, 120 bp, synthetic construct
  source 1..120: mol_type = other DNA
atgcttatctgaatttagtacctgcatacatcagacgttctttctggcttacgacatgccattgctactgttattttgtcaacatatcaatcacaattaaagataaccatgttacaaggt

SEQ ID NO: 36305 - DNA, 120 bp, synthetic construct
  source 1..120: mol_type = other DNA
gctgacatctgtaaagggtggtgagtgccacagggctagaaatgctgcagcaacggaccttctcaacaagctccctggggaacaaggtttctgctgggaaggctttgggggacccatggg

SEQ ID NO: 36306 - DNA, 120 bp, synthetic construct; identical to SEQ ID NO: 10534
  source 1..120: mol_type = other DNA

SEQ ID NO: 36307 - DNA, 120 bp, synthetic construct
  source 1..120: mol_type = other DNA
ggcctcctacgtggaaacaagaacatttaaaatatatacacatgctgtggcagtgcataaaatatgcatgtattgtaaagatgaaaaattataaaatgctactaatatataattggttgc

SEQ ID NO: 36308 - DNA, 120 bp, synthetic construct
  source 1..120: mol_type = other DNA
acattacatgaatgtttaaaatgcattctaggtgacagattgaacaaaattaaaatacttacaattacatcaaatttggaataaatatctacaacttttcctaaaaatgaaaaatatatg

SEQ ID NO: 36309 - DNA, 120 bp, synthetic construct
  source 1..120: mol_type = other DNA
aaatcatattttaatggacatatgaaaataaaccaattaaactttttttacgatcctgcgtgccccttggtgctgaatttattcaccatacccaagttttcattttccccacgtatctcc

SEQ ID NO: 36310 - DNA, 120 bp, synthetic construct; identical to SEQ ID NO: 10535
  source 1..120: mol_type = other DNA

SEQ ID NO: 36311 - DNA, 120 bp, synthetic construct
  source 1..120: mol_type = other DNA
ctacctggatgcctgaattaacatgagaaaattacaaaggactgtatcttttgtttgaaccagtttgtaggtctatgcttctatttaactattcacaaactattgcagagcattgatact

SEQ ID NO: 36312 - DNA, 120 bp, synthetic construct
  source 1..120: mol_type = other DNA
gttcatgttaaattcctggtcctgctgtcaggattaagtaatatttattaagaacctatacatttccaaacccaaagcatttgacggcagctgtctgagccactgctaagctagtcctca

SEQ ID NO: 36313 - DNA, 120 bp, synthetic construct
  source 1..120: mol_type = other DNA
ttttaaaggaggagggatatggcaggagagaaaagtctaggatcatgtttgagtataacaaaataaggtctacggtttcaaaaatccaccttttataaagggtatagttgattccatcct

SEQ ID NO: 36314 - DNA, 120 bp, synthetic construct; identical to SEQ ID NO: 10536
  source 1..120: mol_type = other DNA

SEQ ID NO: 36315 - DNA, 120 bp, synthetic construct
  source 1..120: mol_type = other DNA
tatgaggcagtactgggcagaggcaacttcctctcctttttatagaagataaaaatctgaagcagctctgcaaaagaatgatctcacgcttttactccctcttgtgcaacagcacactag

SEQ ID NO: 36316 - DNA, 120 bp, synthetic construct
  source 1..120: mol_type = other DNA
gagtgaggaacgcttgaaagggatcctggctctaccgcttcccagccacgcaaccttggcaaagctacttaacctttcttagctgcatccctataaaataggattaataaaaatacctac

SEQ ID NO: 36317 - DNA, 120 bp, synthetic construct; identical to SEQ ID NO: 10537
  source 1..120: mol_type = other DNA

SEQ ID NO: 36318 - DNA, 120 bp, synthetic construct
  source 1..120: mol_type = other DNA
ccctaccttctttcttagcacagcatggttaaataaatgttatttatatatgtaaatgattaaaatacaagactgggttgattgacaaggtatttctctccatcactaagccctctgtgc

SEQ ID NO: 36319 - DNA, 120 bp, synthetic construct
  source 1..120: mol_type = other DNA
taggtccttaggtgaagccatggggaggaaaatgggaaagctaatttgaagtacatttttaatatctgttacagtcttggaaaaacaactcttcaaagtacctcttcagaacgattaaga

SEQ ID NO: 36320 - DNA, 120 bp, synthetic construct
  source 1..120: mol_type = other DNA
tccaaccaaacaggctcaaagttctggatgactacggagccaggtcatttcaagtagctgagaaaacctacaggttaatacaggccttatttggaccaacatggtattctcttgccaaaa

SEQ ID NO: 36321 - DNA, 120 bp, synthetic construct; identical to SEQ ID NO: 10538
  source 1..120: mol_type = other DNA

SEQ ID NO: 36322 - DNA, 120 bp, synthetic construct
  source 1..120: mol_type = other DNA
cctcaaaactaacaatttcttctactgagggtaacaggagccaatttacttgaagtacattatttaataagtaaatgcaattatgtctttagaaacgctaaaaactacttacaaaaagct

SEQ ID NO: 36323 - DNA, 120 bp, synthetic construct
  source 1..120: mol_type = other DNA
tgtgggagaagtcattaaagttgttaggaggctttcgagaaaaatcagaacactttggactacccctgccttaaagcacttccagtgtttttattattgcaataataacagtgttttgga

SEQ ID NO: 36324 - DNA, 120 bp, synthetic construct
  source 1..120: mol_type = other DNA
ttgagacagggtcttgctctgttgcctgccgtcatggctcactgcagccttgacctcccgggctcaggtgatcctcccacctcagcctatttgagtagctgggactacaggcatgcgcca

SEQ ID NO: 36325 - DNA, 120 bp, synthetic construct
  source 1..120: mol_type = other DNA
tgcgcccagccaggaagaggagtttttttaaagagtgtatttagtgattttatttgaaagacgatgaaacctaaatccttagaaaagcaaacagatacatcgtattggcaagagagcaaa

SEQ ID NO: 36326 - DNA, 120 bp, synthetic construct; identical to SEQ ID NO: 10539
  source 1..120: mol_type = other DNA

SEQ ID NO: 36327 - DNA, 120 bp, synthetic construct
  source 1..120: mol_type = other DNA
cacatctgaaccgacatctaacacacactgatgtttaaacgctagtgtggagcagaattgccaagggagttgtttaaatgtgtattcctgggccctatcctgatttagcaggtcaggggt

SEQ ID NO: 36328 - DNA, 120 bp, synthetic construct
  source 1..120: mol_type = other DNA
ttttgtagtgttcctagatttactgaatgcgtacagtgtagctggaattaaggaggcaggccctgtttggaatgaagaacatgtttatttgtgtctttctttctatcatggtgataaaac

SEQ ID NO: 36329 - DNA, 120 bp, synthetic construct
  source 1..120: mol_type = other DNA
aatgtttcttgtaaataaagctctgtatttatagaaagaaaatatgcagttagtaacacatttgctgtttgcagttataacacaaattcaaatacccttcagtttacggttaatagttag

SEQ ID NO: 36330 - DNA, 120 bp, synthetic construct; identical to SEQ ID NO: 10540
  source 1..120: mol_type = other DNA

SEQ ID NO: 36331 - DNA, 120 bp, synthetic construct
  source 1..120: mol_type = other DNA
tttaaatatttttaagtattattttaccaaattgatgctcaaaacctactgcattgtgggcatctttccagcacataaaaactgtttttttctgaagatatcaactgcaattaatttgct

SEQ ID NO: 36332 - DNA, 120 bp, synthetic construct
  source 1..120: mol_type = other DNA
cagcctcccaaatagctgggactaaaggtgcacgtcaccacaccctgctaattttttttgtatttttagtagagatggggtttcatgatgttggccaggctggtctcgcactcctgacct

SEQ ID NO: 36333 - DNA, 120 bp, synthetic construct; identical to SEQ ID NO: 10541
  source 1..120: mol_type = other DNA

SEQ ID NO: 36334 - DNA, 120 bp, synthetic construct
  source 1..120: mol_type = other DNA
cgcctggctctaattttgtatttttagtagagagagggtttcaccatgttggtcaggctggtcttgaactcctgatctcaagtgatccacctgctttggcctcccaaagtgctgggatta

SEQ ID NO: 36335 - DNA, 120 bp, synthetic construct
  source 1..120: mol_type = other DNA
ttaaaccttggtctatcagtacttgtacagtagaactggacaagaagctggtgttacacaatcactgcacaacagactgtacagatcccatgccaaatttgtttagcttggtttgacaaa

SEQ ID NO: 36336 - DNA, 120 bp, synthetic construct
  source 1..120: mol_type = other DNA
tgcttctcctatcaagcatattatgggaaacacagaaccaaactcttcaattttgaattcaaaattttccttcagttggtccctccatttctaccagtgtttccttgagcaccctccaaa

SEQ ID NO: 36337 - DNA, 120 bp, synthetic construct
  source 1..120: mol_type = other DNA
agtgagaccaccaccttacaatcatgaaatgcgaatttaagaaatggttctatggcagaaaagagtatcatgattttacagggtgaatgtcaatgtgacaatgaagagaatatggtcttc

SEQ ID NO: 36338 - DNA, 120 bp, synthetic construct; identical to SEQ ID NO: 10542
  source 1..120: mol_type = other DNA

SEQ ID NO: 36339 - DNA, 120 bp, synthetic construct
  source 1..120: mol_type = other DNA
catcttcacattcctggccctaggataaggccttgcctgctgaaggtgtcctatacatgtctataaacagaagggacaatacttatattgttcagctttagtacagtagcatactatcaa

SEQ ID NO: 36340 - DNA, 120 bp, synthetic construct
  source 1..120: mol_type = other DNA
tttcatactaaacatagctttcccgatactaaaagattttaaacatccaatagtgcttacccctccatgtttcaattttatgttcctctaattcataaatctgtacctgcaaataaaaaa

SEQ ID NO: 36341 - DNA, 120 bp, synthetic construct
  source 1..120: mol_type = other DNA
tgctcatgcctgtaatctcagcactttgggagatcaaggtgggcagatcacctgaggtcaggagtttgagaccagcctggccaacatggtgagacctcatctgtactaaaaatacaaaaa

SEQ ID NO: 36342 - DNA, 120 bp, synthetic construct; identical to SEQ ID NO: 10543
  source 1..120: mol_type = other DNA

SEQ ID NO: 36343 - DNA, 120 bp, synthetic construct
  source 1..120: mol_type = other DNA
tttttgtgggttttttttttttttttttttttttttttgtagagatggggtttcaccatgttgccccactggtctcaaactcctgggctcaagtgatccacccttctcagcttcccaaag

SEQ ID NO: 36344 - DNA, 120 bp, synthetic construct
  source 1..120: mol_type = other DNA
ctaagatttcttatatgggatttgctgcatttcacagaaatctatctattcaaaaatcacactcatgctgattttgctagttcaaaagcagagatatgaccactataaggaaagcccgtg

SEQ ID NO: 36345 - DNA, 120 bp, synthetic construct; identical to SEQ ID NO: 10544
  source 1..120: mol_type = other DNA

SEQ ID NO: 36346 - DNA, 120 bp, synthetic construct
  source 1..120: mol_type = other DNA
ttcttgtgcctcagcctcctgagtagctgggattacagatgcccgctgccacacccagctaatttttgtatttttagtagagacagggtttcactatgttggccaggctggtctccaact

SEQ ID NO: 36347 - DNA, 120 bp, synthetic construct
  source 1..120: mol_type = other DNA
attattggataatactgagcattacgcataaagcagtattaattgaattaacctacaccttttaagtaccccaaataggactagttaaataagagtatgcaatcctgtccttccccccac

SEQ ID NO: 36348 - DNA, 120 bp, synthetic construct
  source 1..120: mol_type = other DNA
tactagggaccagagagttctgctactaaaatcagccaggagctgtctcttcctaattagcaggaacatgtcaaaacggaatttatttcactttaatgactcatttttttctgctttaaa

SEQ ID NO: 36349 - DNA, 120 bp, synthetic construct
  source 1..120: mol_type = other DNA
agaattctgctaagccaaggaattccgaaagctgaataaagaatctatttccttttatttttcctgagaattccttctttgagtttcatacatataacttacagtaaagagagttttgta

SEQ ID NO: 36350 - DNA, 120 bp, synthetic construct; identical to SEQ ID NO: 10545
  source 1..120: mol_type = other DNA

SEQ ID NO: 36351 - DNA, 120 bp, synthetic construct
  source 1..120: mol_type = other DNA
tattatttaaaactattgatgtgttaattgtgtataccaaactggatatacaaatttagctgaaattaaacctgacagtaagtactacggaactaaccagagaatttggcaaatcaatga

SEQ ID NO: 36352 - DNA, 120 bp, synthetic construct
  source 1..120: mol_type = other DNA
ggattgtttcccaagaagcattctaaacacaatggttttaacagttgccatttattgagtgcttttgacgtgctagacaccaggatgatacggatgaaaaagacatgaacttcttccctg

SEQ ID NO: 36353 - DNA, 120 bp, synthetic construct; identical to SEQ ID NO: 10546
  source 1..120: mol_type = other DNA

SEQ ID NO: 36354 - DNA, 120 bp, synthetic construct
  source 1..120: mol_type = other DNA
caaaaagttgctaaattaaaagaaattcaacaacaacaacaacaaaagctccataaaagttacaacagtgtgtagagttctcaatgaggcggcaaaaaaaaaaaaaaaaagaaaaaaagg

SEQ ID NO: 36355 - DNA, 120 bp, synthetic construct
  source 1..120: mol_type = other DNA
cgatcatggccttgacctcctgggctcaagtgatcctcccacctcagcctcctgagtagctaatttttgcatgtttttgtagagatgaggtcttgctatgttgcccaggctggcctcgaa

SEQ ID NO: 36356 - DNA, 120 bp, synthetic construct
  source 1..120: mol_type = other DNA
attccaaaccggcatctattaaaatactttaggctttctgctttcaaggtttccattttcgattttcctcaggcccacactgcttacctacaaaactttgttttttactctcccacagtg

SEQ ID NO: 36357 - DNA, 120 bp, synthetic construct
  source 1..120: mol_type = other DNA
aaggtttcactctgttgcccaggctggagtgcagtggcaccatcttggctcacagcaacctctgcttcctgggctcaattgattctctcacctcagcctcccgagtagctgggatgacag

SEQ ID NO: 36358 - DNA, 120 bp, synthetic construct; identical to SEQ ID NO: 10547
  source 1..120: mol_type = other DNA

SEQ ID NO: 36359 - DNA, 120 bp, synthetic construct
  source 1..120: mol_type = other DNA
tctgaagactcttgtctacatacatactttatgtaattaaaaccatacaaaagaattaaacttcagggtctaatatctcctacatgtggttattaattcatctgaaaacactgaagttgt

SEQ ID NO: 36360 - DNA, 120 bp, synthetic construct
  source 1..120: mol_type = other DNA
tttataccttccagacacaaatgggtcaggcactaacatatcatatctcacttaacactcataacaaatatcttttgggataccataaggtatcatacttgaagatttattaataaccaa

SEQ ID NO: 36361 - DNA, 120 bp, synthetic construct; identical to SEQ ID NO: 10548
  source 1..120: mol_type = other DNA

SEQ ID NO: 36362 - DNA, 120 bp, synthetic construct
  source 1..120: mol_type = other DNA
ctcaaacaaaacttatcaaatactagcataccaatgagaaaaaaaatcaaataataattaacataattatgatgttttcataactatatcaagaaaggtctatgacaataaaaatgtaac

SEQ ID NO: 36363 - DNA, 120 bp, synthetic construct
  source 1..120: mol_type = other DNA
aaaaagtgttacattatggtatggttatgtttttttttttttaactaaaagtaaattattctcttctcactcactactcaaaaaaaaaccttgttggctgggcacagtggcccacgcctg

SEQ ID NO: 36364 - DNA, 120 bp, synthetic construct
  source 1..120: mol_type = other DNA
gcatggtggcgcacacctgtaatcccagctactcaggaggctgaggcacaagaatcgcttgaacctgggaagtggaggctgtagtgagccgagaacacgccactgtactccagcctgagt

SEQ ID NO: 36365 - DNA, 120 bp, synthetic construct
  source 1..120: mol_type = other DNA
taataacttagtacctatttcttcctttattgtgatatattttgccttatgtggaactgctcatgcatgtacctagttcacctacacaagaatatagggactactggtgcgttgagggag

SEQ ID NO: 36366 - DNA, 120 bp, synthetic construct; identical to SEQ ID NO: 10549
  source 1..120: mol_type = other DNA

SEQ ID NO: 36367 - DNA, 120 bp, synthetic construct
  source 1..120: mol_type = other DNA
agaagaatatagtggaaaagtcgcatgtaaatagattttaaaacacactgaatatctggtaagtttgcttttctaaactggttggaatagaatgggaatgggggcaccttttatgtttta

SEQ ID NO: 36368 - DNA, 120 bp, synthetic construct
  source 1..120: mol_type = other DNA
aagtgattctcccacctcagccttccaagtagctgggaccacaggcacatgccaccatgtccagataattttttttcttgtagaggcaggatcttgctatgttgcccagactggtctcaa

SEQ ID NO: 36369 - DNA, 120 bp, synthetic construct
  source 1..120: mol_type = other DNA
aaaatgacagatttagcagagaaaataaatgttaaaaacattcatgaggatcattcatgaaaccctaagtagccatagctattgaaaacctatgccagaaagttctgagtttggcataat

SEQ ID NO: 36370 - DNA, 120 bp, synthetic construct; identical to SEQ ID NO: 10550
  source 1..120: mol_type = other DNA

SEQ ID NO: 36371 - DNA, 120 bp, synthetic construct
  source 1..120: mol_type = other DNA
agcaggctgacggctgactttccagcagaaactatgaaagtcagaagacaagagaaagaaaactttaagatgctaaaataaaaaacctgccaatctaggttagagcatatatccagtgaa

SEQ ID NO: 36372 - DNA, 120 bp, synthetic construct
  source 1..120: mol_type = other DNA
ctgtaatcccagcactttgggaggccaaggtggggggatcacttgaggtcaggagttcaagaccagcctggccaacgtgatgaaaaaaccccatctctaccaaaaatacaaaaattagtc

SEQ ID NO: 36373 - DNA, 120 bp, synthetic construct; identical to SEQ ID NO: 10551
  source 1..120: mol_type = other DNA

SEQ ID NO: 36374 - DNA, 120 bp, synthetic construct
  source 1..120: mol_type = other DNA
aaaattattattaaaagatggaaagtagtaagtcaaagatgctatgtaatctgtaagacagcctctgaaagatcaacaaaagaatgtataactaagttcacatgttctcatccatttgtg

SEQ ID NO: 36375 - DNA, 120 bp, synthetic construct
  source 1..120: mol_type = other DNA
taaaaaaatgtagttagatagaatgaatacggtctagtatttgatggcacagcagggtgactacagtcaacaataatttattgtacatttaaaaataaccaataattgggatgtatgtaa

SEQ ID NO: 36376 - DNA, 120 bp, synthetic construct
  source 1..120: mol_type = other DNA
cccataaaaatgaaaaaagaatgtataactaaaaagctagcagaggagaaaaatgggttaaacatagtttgttaaatcgagtgaagaaggaataaaagaacaaatcaatagaaaaagtga

SEQ ID NO: 36377 - DNA, 120 bp, synthetic construct; identical to SEQ ID NO: 10552
  source 1..120: mol_type = other DNA

SEQ ID NO: 36378 - DNA, 120 bp, synthetic construct
  source 1..120: mol_type = other DNA
tagaagcttctggcagagactattgtatccagcttcaagacataaatgactgagcacagtggacatctacacacaaaaatctctggtcaaatagtgtaataatttaaaaaaacccaagaa

SEQ ID NO: 36379 - DNA, 120 bp, synthetic construct
  source 1..120: mol_type = other DNA
gagcctcatcacacctcaggcttaaaagaatgataccaacaaaagcaggggtttaagtttaacactcaaatatgatgattattacttcagactcagaaaaaaacatcctgcttccccata

SEQ ID NO: 36380 - DNA, 120 bp, synthetic construct
  source 1..120: mol_type = other DNA
aaggtggcaaatacatgtatgggaaagtatacggggtaataatacagacgttagaaactgatcacgcgtgctgaatcaagttaattctgagatgaaagacactgatgctgcgtggtcaat

SEQ ID NO: 36381 - DNA, 120 bp, synthetic construct
  source 1..120: mol_type = other DNA
cagtggcaggaacatggctcactgcagtctcaacctcctgggttcaagtgattctcccacctcagcctcctgagtagctgggaccacaggtgcacaccaccacagctagctttttatttt

SEQ ID NO: 36382 - DNA, 120 bp, synthetic construct; identical to SEQ ID NO: 10553
  source 1..120: mol_type = other DNA

SEQ ID NO: 36383 - DNA, 120 bp, synthetic construct
  source 1..120: mol_type = other DNA
actggacttcaacttctcgttttccacataaaatgtgtatctctacagaacagggacactgcttcatttctcaaactgaaatcataagcacagcagctcacttcgtttttctgatggcct

SEQ ID NO: 36384 - DNA, 120 bp, synthetic construct
  source 1..120: mol_type = other DNA
ctcacaggtgtagggtgtggattgaataggctagtatttgaagatgttcagtatggtgctcagcactaacagccaagaagaacaaatgcttaaaatttccagtctatactgaccaaacca

SEQ ID NO: 36385 - DNA, 120 bp, synthetic construct
  source 1..120: mol_type = other DNA
gatccttatgcctcagcctcctgagtagctgggatcacaggcatatgccaccatgctcagctaatttttaaatctttttgtagagatggggttttgccatgttgcccgggctggtctcaa

SEQ ID NO: 36386 - DNA, 120 bp, synthetic construct; identical to SEQ ID NO: 10554
  source 1..120: mol_type = other DNA

SEQ ID NO: 36387 - DNA, 120 bp, synthetic construct
  source 1..120: mol_type = other DNA
aaatcatacttggaaaattctccataattatagacggcacagggtgttccaattaaccaataaacaggatacaaagaggactaacacaatctagttctaatttgcaggaagaaaccgctc

SEQ ID NO: 36388 - DNA, 120 bp, synthetic construct
  source 1..120: mol_type = other DNA
tgataattagataagaaaagatgggaaataaaatgttcataggtaagtttttagaatagtgagcaggcccgagctgctctaagagactctggcagtctataccaaggagaacatctgtgt

SEQ ID NO: 36389 - DNA, 120 bp, synthetic construct; identical to SEQ ID NO: 10555
  source 1..120: mol_type = other DNA

SEQ ID NO: 36390 - DNA, 120 bp, synthetic construct
  source 1..120: mol_type = other DNA
cccagtactccttcgacttcagaagaacagttgcccaccattgccatggaaggactgttttctggaggaaatgcactgctccagaaataaaacagacataggaacatggggcctccaatg

SEQ ID NO: 36391 - DNA, 120 bp, synthetic construct
  source 1..120: mol_type = other DNA
actgttagcagtcactcttaattatgaatgaatgggcagccatctgacagggccttgaacgctgaagtcacacaagtcccagttttacacagatctcactagaagggttaggaaaaaaaa

SEQ ID NO: 36392 - DNA, 120 bp, synthetic construct
  source 1..120: mol_type = other DNA
caatgggaaaagaatattaaagatcaactcgggggtctcagagctgctcactgaagttccggagaaaagcaagcactgggaagaaaatgattgaggaaagaatgcaaggaaggctaggca

SEQ ID NO: 36393 - DNA, 120 bp, synthetic construct
  source 1..120: mol_type = other DNA
gtgcacgcctgtagtctcagctacttggaaggctgtggcaggaggatcgcttgagcccaggaactgggggctgcagtgggctgtgactgcactaccatactccagcctgggtaacacagt

SEQ ID NO: 36394 - DNA, 120 bp, synthetic construct; identical to SEQ ID NO: 10556
  source 1..120: mol_type = other DNA

SEQ ID NO: 36395 - DNA, 120 bp, synthetic construct
  source 1..120: mol_type = other DNA
gaacgtaagtgatatataaaatttcaagtaatacattcccacgcatcttttcttgggaggttttatggactcagtgtgtttggttcaacggctcaacaggttgtttctgtggaatatgac

SEQ ID NO: 36396 - DNA, 120 bp, synthetic construct
  source 1..120: mol_type = other DNA
aagagtaaggcacaggagcaagagactatgtctttattgtcagtttttttggtaccacttgacagaaattgttaatatgtgctttgaaaaactctcagccactagtctgctctgctccag

SEQ ID NO: 36397 - DNA, 120 bp, synthetic construct; identical to SEQ ID NO: 10557
  source 1..120: mol_type = other DNA

SEQ ID NO: 36398 - DNA, 120 bp, synthetic construct
  source 1..120: mol_type = other DNA
ggagcagaagtacaggaagggaggaaggagacgggtgggcgggtgagtcagcgcaggacgcgttcctgagctgccgccgcagagcccactgatgctgatgccagtgggatcttcctagga

SEQ ID NO: 36399 - DNA, 120 bp, synthetic construct
  source 1..120: mol_type = other DNA
ttgatgtgaatggatttggaaatggcccacgagaggcatccaacacaattagaaaccttgctccaggtgttgactgagatttaaatattaattgatctgcttggctgccaagctgcagct

SEQ ID NO: 36400 - DNA, 120 bp, synthetic construct
  source 1..120: mol_type = other DNA
ctcctgtaaattttttttttggtcaattcatgaccgattccattcattcataaatctcagctgggattgatactacattccccagcctctgctttttgagaaatctatctgctctttcct

SEQ ID NO: 36401 - DNA, 120 bp, synthetic construct; identical to SEQ ID NO: 3348
  source 1..120: mol_type = other DNA

SEQ ID NO: 36402 - DNA, 120 bp, synthetic construct
  source 1..120: mol_type = other DNA
tttgtgcctcttaattttaacactaaactaggattgtcctgggcagctccctcctattcaagctttccttttactttacttttgatcatgtgctctgcattctgtattctctactcattc

SEQ ID NO: 36403 - DNA, 120 bp, synthetic construct
  source 1..120: mol_type = other DNA
ctagcttctcgggaggctgaggtgggagaatcgcttcaagtgagccgagattgcgccactgaactccagcctgggcgacagagcgagactctgcctcaaaagaaaaaatagtgcttggca

SEQ ID NO: 36404 - DNA, 120 bp, synthetic construct
  source 1..120: mol_type = other DNA
ccataaatccatactgaaatagatgactgaataaacaaacagatggagaagggacaaatctcccttgcagaaaaatcccaactaactcacgtagctgctcagccctcacggaggtgaagc

SEQ ID NO: 36405 - DNA, 120 bp, synthetic construct; identical to SEQ ID NO: 10559
  source 1..120: mol_type = other DNA

SEQ ID NO: 36406 - DNA, 120 bp, synthetic construct
  source 1..120: mol_type = other DNA
gggagtacctgtctgagaagctgtcccacctaaggaggcatgatgacgagacgtgatggggtaacctagatgggatcctccaacagaaaacggcattatgcaaaaactaaggaaatctga

SEQ ID NO: 36407 - DNA, 120 bp, synthetic construct
  source 1..120: mol_type = other DNA
ggttcattaactgggacaaatatagaccacactaacgcaagatgtcaaaattcaactgggtgtggggtatatgtaaattctctgcactagctttgccatgtttctgtacatctaaaactc

SEQ ID NO: 36408 - DNA, 120 bp, synthetic construct
  source 1..120: mol_type = other DNA
gcctggatcattcctaatgcttccccccaccaatcctagggtgtgaggattccattatgaagttttatttatttttgggcctctcataattctcgaggtgtcatcttttggaatcactaa

SEQ ID NO: 36409 - DNA, 120 bp, synthetic construct; identical to SEQ ID NO: 10560
  source 1..120: mol_type = other DNA

SEQ ID NO: 36410 - DNA, 120 bp, synthetic construct
  source 1..120: mol_type = other DNA
tggccaggctggtctcaaaatccaggcctcaagtgatccacctgcctcggcctcccaaagtgctgggattacaggcgtgagacaccgcacccagcgatctgatggttttataaagaggag

SEQ ID NO: 36411 - DNA, 120 bp, synthetic construct
  source 1..120: mol_type = other DNA
ctcttttcctttataaattacccagtctcaggtatgtctttattggcagcatgaaaacaggctaatacactaactgatacctatctttctctgaattcctgggcttatctggaagggaag

SEQ ID NO: 36412 - DNA, 120 bp, synthetic construct
  source 1..120: mol_type = other DNA
ctggctctatttcaggttctgacaatacaggagtctagggagggactcaaagccagagcaggaagaagggcttgctcctcccgtcagcggctagcagggctcctgtctgcctgcagctcc

SEQ ID NO: 36413 - DNA, 120 bp, synthetic construct
  source 1..120: mol_type = other DNA
cacccagagacataagcaccagctagaaggcacgcgccaggaccccctctcctccacgacactgtggagtacaccagactcacacagcatcatggtgaaacatgggtcactgagcctcat

SEQ ID NO: 36414 - DNA, 120 bp, synthetic construct; identical to SEQ ID NO: 10561
  source 1..120: mol_type = other DNA

SEQ ID NO: 36415 - DNA, 120 bp, synthetic construct
  source 1..120: mol_type = other DNA
tctctactaaaaatacaaaaaattagccaggtgtggtagtgggtgcctgtaatcccagctactcaggtgggtgaggcacaagaattgcttgaacctgggaggcagaggttgcagtgagcc

SEQ ID NO: 36416 - DNA, 120 bp, synthetic construct
  source 1..120: mol_type = other DNA
ttggtttcccatccatgggtttaacacagtgttgagctctttgtcagtgggaaatcagattcctgtaatccagggcaggccatggcattgtgactaaaaaagccatcatctgtgcctgtg

SEQ ID NO: 36417 - DNA, 120 bp, synthetic construct; identical to SEQ ID NO: 10562
  source 1..120: mol_type = other DNA

SEQ ID NO: 36418 - DNA, 120 bp, synthetic construct
  source 1..120: mol_type = other DNA
tcagatgaagctgagattccagattcgggagttcctccgagcctcccatggcagtgggaacagctggctccccagtgtctgagaatcacctttctttactcgaaagcccagtgacaggct

SEQ ID NO: 36419 - DNA, 120 bp, synthetic construct
  source 1..120: mol_type = other DNA
actgtgagatcttgccatttcacagctgcagaaaccgaagaagtatgtatgggaataggtgctagtaacgttaggacaaagacgagaaatttaacactagtttggtgggactgattgcta

SEQ ID NO: 36420 - DNA, 120 bp, synthetic construct
  source 1..120: mol_type = other DNA
gctgagatgccaggcttctgtggcacagtgaactatacaggaggaatccacaggcttcgggagacaggggcattggcacggatttgtcatgtgccacctgcacattccatacccagagga

SEQ ID NO: 36421 - DNA, 120 bp, synthetic construct; identical to SEQ ID NO: 10563
  source 1..120: mol_type = other DNA

SEQ ID NO: 36422 - DNA, 120 bp, synthetic construct
  source 1..120: mol_type = other DNA
gctggactagacaggcaggaagtagcagagctctaggtgcctctgtgagatatgtgccgggcagagcatgagggacagaccccgcagaaccgggggtctcacaccccagaacggcctgaa

SEQ ID NO: 36423 - DNA, 120 bp, synthetic construct
  source 1..120: mol_type = other DNA
acaccggtactgagtgacactaaaagctgttttcagagaggcccagggcacgatcaggcatgtggcaagtccaggctgctcttctgtgtggccttaggacccagcaaggttgatattagg

SEQ ID NO: 36424 - DNA, 120 bp, synthetic construct
  source 1..120: mol_type = other DNA
aacagttcctggccgactgcaccaggcccttatagagaccaaacaagctagccacgagatgcggagaccatgcaacctgagctccccatcacgaacagggaactactaggccccccaagc

SEQ ID NO: 36425 - DNA, 120 bp, synthetic construct
  source 1..120: mol_type = other DNA
ccctacctcgatccacacccagactcgggggagctccttatgagccactgactgatggagaaaaagctgggcttggtttacaggtgcttctcctgctgggctggcccctgctggcactgc

SEQ ID NO: 36426 - DNA, 120 bp, synthetic construct; identical to SEQ ID NO: 10564
  source 1..120: mol_type = other DNA

SEQ ID NO: 36427 - DNA, 120 bp, synthetic construct
  source 1..120: mol_type = other DNA
acggctctgatgacgtcgtatcctcagagtaacgtggtcattttgagtactgttctgcagcttactttttcttttcctaatcaatgaatcaatgaatatactcttgacaaacattttctc

SEQ ID NO: 36428 - DNA, 120 bp, synthetic construct
  source 1..120: mol_type = other DNA
ttactgcagcctgtgtctagaaaatactcaaatcaccccttttcaaatacatctttttaccttgacttaaccaatgccaaacaactctctccccctatttccatggtaatgcatctcagc

SEQ ID NO: 36429 - DNA, 120 bp, synthetic construct; identical to SEQ ID NO: 10565
  source 1..120: mol_type = other DNA

SEQ ID NO: 36430 - DNA, 120 bp, synthetic construct
  source 1..120: mol_type = other DNA
ttgaagcgaccctcccgcctcagcctcccgagtagctgggactacaggtgacttctaccacactcggctaattttaatttttgtattcttaacagagacggggtttcaccatgttggcca

SEQ ID NO: 36431 - DNA, 120 bp, synthetic construct
  source 1..120: mol_type = other DNA
tgccggtggtcagaaaatctggtattttaaaaagtaaaccttctgggggatgggcgtgaggctgaaataggttgagccagtagttcctttattttgggaattcagaacttctcattattt

SEQ ID NO: 36432 - DNA, 120 bp, synthetic construct
  source 1..120: mol_type = other DNA
tcttagggttttaaaagtgactctgaaggttacctggtccaaagtgaactcagcaaagaacataaagccaatttgcaaaaatcaattgtatttccatacgttaacaagaaacaattggaa

SEQ ID NO: 36433 - DNA, 120 bp, synthetic construct
  source 1..120: mol_type = other DNA
gtggggcatgggaacagaagcaggccacacctgggggtccctggggaggtctaaagggcctggtggagcaggaagagcctggaaggatcatctaaggcagggctatgggagggggtggat

SEQ ID NO: 36434 - DNA, 120 bp, synthetic construct; identical to SEQ ID NO: 10566
  source 1..120: mol_type = other DNA

SEQ ID NO: 36435 - DNA, 120 bp, synthetic construct
  source 1..120: mol_type = other DNA
tgcaatacgcataattttaataccaaaatgttaagattcaaattttctgggaaaagagatcggtaaggttcttctttcaaaagattgcccatttttgtgattttcttcttttttaccaat

SEQ ID NO: 36436 - DNA, 120 bp, synthetic construct
  source 1..120: mol_type = other DNA
ataatgaacagcttaggttctaacacacattagacaggcctgtgttcaaaaccccatcttgtactagctctgtggattaggtccttaaattccacaacaacttgtggactaagctttctt

SEQ ID NO: 36437 - DNA, 120 bp, synthetic construct
  source 1..120: mol_type = other DNA
tgcctcctgggttcaagcgactctcctgtctcagggtcctgagtagctgggactacaggcatgcaccaccacacccggttaattttgtatttttagtacagatggtgtttcatcacgttg

SEQ ID NO: 36438 - DNA, 120 bp, synthetic construct; identical to SEQ ID NO: 10567
  source 1..120: mol_type = other DNA

SEQ ID NO: 36439 - DNA, 120 bp, synthetic construct
  source 1..120: mol_type = other DNA
atgaaaatggagtacacttacttgtaatgtagtatcaaagacaacaagctttgaactggttggaacgatgtcataacacttgtgtgacctcatgaatcgcatgtaaacaccactttctga

SEQ ID NO: 36440 - DNA, 120 bp, synthetic construct
  source 1..120: mol_type = other DNA
taaacctatcactaacagacttaatggtaaaatacgaaatgttttcccagtatgatcaagggccaggcaaggatgctcactctcactaattctatgaacactatattggaggtcccagat

SEQ ID NO: 36441 - DNA, 120 bp, synthetic construct; identical to SEQ ID NO: 10568
  source 1..120: mol_type = other DNA

SEQ ID NO: 36442 - DNA, 120 bp, synthetic construct
  source 1..120: mol_type = other DNA
tacaaaactaataaaataaaataaaaataaaaataaaggggaaaaaaaagaccaggaacaagacaagaatgcctgctgttgctactctgttcaaggtagtactggaagtccttgtcagag

SEQ ID NO: 36443 - DNA, 120 bp, synthetic construct
  source 1..120: mol_type = other DNA
ctgtcaaaactaataaattcagtaaagttacaagatataaactcaacataaaaaatcagtagcatttctatacactaatagacaactatccgaaatagaaataataaaagaatcccattt

SEQ ID NO: 36444 - DNA, 120 bp, synthetic construct
  source 1..120: mol_type = other DNA
cgcgcctgtaatcctagcactttgggaggctgaggcaggcagatcacctgaggtcaggagtttgagaccagcctggccaatatggagaaaccccgtctctactaaaaatacaaaaattag

SEQ ID NO: 36445 - DNA, 120 bp, synthetic construct
  source 1..120: mol_type = other DNA
tggttacaaagtgagactgtcaaaaaaataaataaaaataaaaaaaaagaggaagaattgaagaagatacaaataaaagggaagatatcttgtgttcatggattggaagaatattgttaa

SEQ ID NO: 36446 - DNA, 120 bp, synthetic construct; identical to SEQ ID NO: 10569
  source 1..120: mol_type = other DNA

SEQ ID NO: 36447 - DNA, 120 bp, synthetic construct
  source 1..120: mol_type = other DNA
gaaaacctagatatccacatgcagaaaaatgaagctggactcctatctctcatcagatacaaaaatcaatggaaaatagattagagactgaaaatctacgacccaaactacgaaactact

SEQ ID NO: 36448 - DNA, 120 bp, synthetic construct
  source 1..120: mol_type = other DNA
aagcttctatcctgcaaaggaaataatcaacagagtgaagagacaacctacagaatgagagaaaatatttgcaaactatacatctgataaagggttaatatccaaaacagattaggaact

SEQ ID NO: 36449 - DNA, 120 bp, synthetic construct
  source 1..120: mol_type = other DNA
ccaccatcgctagtcactggagaaatgcaaatcaaaaccacaatgagatatcacctcactccagttagaatggctattataaacaaaacaaaacaaaacaaaagatgagtgttgctgagg

SEQ ID NO: 36450 - DNA, 120 bp, synthetic construct; identical to SEQ ID NO: 10570
  source 1..120: mol_type = other DNA

SEQ ID NO: 36451 - DNA, 120 bp, synthetic construct
  source 1..120: mol_type = other DNA
atgaacctagaggacactgtgttacatgaaataagccaggcgtggaaagacaaataccatcccattcatctgtggaatctaaacaagctgatctcacaggagtagaaagtagagagtggt

SEQ ID NO: 36452 - DNA, 120 bp, synthetic construct
  source 1..120: mol_type = other DNA
acgtattgtatagttcaaaatagctagaagggaggattttgaatgttcctgccataaagaaatgatacgtgttttaggtgacagatatactaattatcctgattttatcagtacacaata

SEQ ID NO: 36453 - DNA, 120 bp, synthetic construct; identical to SEQ ID NO: 10571
  source 1..120: mol_type = other DNA

SEQ ID NO: 36454 - DNA, 120 bp, synthetic construct
  source 1..120: mol_type = other DNA
tcactgcaacctctgcctccaaggttcaagagattctcctgcctcagcctcccgagtagctgggattacaggtgcacaccatcacacctggctaatatttgtatttttagtagagacggg

SEQ ID NO: 36455 - DNA, 120 bp, synthetic construct
  source 1..120: mol_type = other DNA
tttaaacaaaaataatgacaatgtattgtggggttgatagcacactgataaggaaaaggcaacaccgtccaaccaatcatggaaatctaggagtcacccttgccaatgtcctcttgtcac

SEQ ID NO: 36456 - DNA, 120 bp, synthetic construct
  source 1..120: mol_type = other DNA
tgcatcttccacagctgtccacactgcatccaggaagattttgccagatgcaaatataatctaatccagatgctttagaataaaggcaaaacccttgaagtcacctagaacagcagtccc

SEQ ID NO: 36457 - DNA, 120 bp, synthetic construct; identical to SEQ ID NO: 10572
  source 1..120: mol_type = other DNA

SEQ ID NO: 36458 - DNA, 120 bp, synthetic construct
  source 1..120: mol_type = other DNA
attaaacactcctgctccgtattttctccaaccccctatttttttccagtcctccatcagtgctctgctgtctcttccatggggcctgacactactgcttcctctgcctgaaatactttc

SEQ ID NO: 36459 - DNA, 120 bp, synthetic construct
  source 1..120: mol_type = other DNA
tccgtctgtttgtggcccagtgaactccttcattagaccttggctcaaggatatgactggtgagtcatggaacctgaatttgaacttgaagcctctggattccaaagctgtgttctcagc

SEQ ID NO: 36460 - DNA, 120 bp, synthetic construct
  source 1..120: mol_type = other DNA
ctccattcagcccacaccgatctgtgcattttaggaagatctggactacttgggaaatatctgagaagaaaaacatgtagtgtataagctaattagcaaaacaagtgttaaacaagtgat

SEQ ID NO: 36461 - DNA, 120 bp, synthetic construct
  source 1..120: mol_type = other DNA
attttcattctgacctctctttgggatattacaatttataatgcagagttttgtcactgcaactgcctcctggatatttctctctcaaatgtctccctcctgatgtggaataaattccag

SEQ ID NO: 36462 - DNA, 120 bp, synthetic construct; identical to SEQ ID NO: 10573
  source 1..120: mol_type = other DNA

SEQ ID NO: 36463 - DNA, 120 bp, synthetic construct
  source 1..120: mol_type = other DNA
tcacttgccccaaatcagacggtgaagtagtgacccaagcgggatttgaagctctgtcccaggctccagtagctccttattaaactcacttccctcactcaacggtgcgctcatctgagc

SEQ ID NO: 36464 - DNA, 120 bp, synthetic construct
  source 1..120: mol_type = other DNA
tgagaacacacaggtgggtcaccaaccctgacctggaaagggtaaggaaatctaaaatgacttcttcccctgaacgccaacagcattttacttctgtctcatcagttattaccttctatc

SEQ ID NO: 36465 - DNA, 120 bp, synthetic construct; identical to SEQ ID NO: 10574
  source 1..120: mol_type = other DNA

SEQ ID NO: 36466 - DNA, 120 bp, synthetic construct
  source 1..120: mol_type = other DNA
ccaggtaattcctgggacatcacccccgtcatttctacccacaagcccagttgccaaagaatgtcctggggcagagatgttgaaatatgagaacttggatgagacaggattctggtgagg

SEQ ID NO: 36467 - DNA, 120 bp, synthetic construct
  source 1..120: mol_type = other DNA
ccagcactaccaaggacaagctcggggttcgtgaatgaatagcagcggctgtcagggagggaacggatggacagatgaagtttcagttggtgtgctcccatgtttctcaaaacactgata

SEQ ID NO: 36468 - DNA, 120 bp, synthetic construct
  source 1..120: mol_type = other DNA
cgcatgcgcagtctcctcatgcctactgagtgtggaattggcgcaaaacaaaagccaaagatcagggcagtcaagcatacattcagccagtatttaagttacaaattgcctgccaaatct

SEQ ID NO: 36469 - DNA, 120 bp, synthetic construct
  source 1..120: mol_type = other DNA
ttttcataaaagaggtacacatattatagacatattatacatgttagtattactatatgaatatgtgaaataattgaaaataatatagggcaggaatgttcaaacttacagaatttttga

SEQ ID NO: 36470 - DNA, 120 bp, synthetic construct; identical to SEQ ID NO: 10575
  source 1..120: mol_type = other DNA

SEQ ID NO: 36471 - DNA, 120 bp, synthetic construct
  source 1..120: mol_type = other DNA
tgatagtgcctgagttttcaggagatctgagagttttataaggcagttttctctgccctcgctctctctgttgcctgctaccacgaaagacgtgcctcttcccgttcagccatgattgta

SEQ ID NO: 36472 - DNA, 120 bp, synthetic construct
  source 1..120: mol_type = other DNA
ctcagtctttgggttacacagtttcattctcatcatcacacggaggcacccgctccatactcaccacacacggaggcacacgctccatactcaccgcacacggagggacacgctccgtcc

SEQ ID NO: 36473 - DNA, 120 bp, synthetic construct
  source 1..120: mol_type = other DNA
tcaccgcacacggagggacacgctccgtcctcaccgcacacggagggacacgctccgtcctcaccgcacacggaggcacccgctccgtcctcaccgcacacggagggacacgctccgtcc

SEQ ID NO: 36474 - DNA, 120 bp, synthetic construct
  source 1..120: mol_type = other DNA
tcaccgcacacggaggcacccgctccgtcctcaccgcacacggagggacacgctccgtcctcaccgcacacggagggacacgctccgtcctcaccgcacacggagggacccgctccgtcc

SEQ ID NO: 36475 - DNA, 120 bp, synthetic construct; identical to SEQ ID NO: 10576
  source 1..120: mol_type = other DNA

SEQ ID NO: 36476 - DNA, 120 bp, synthetic construct
  source 1..120: mol_type = other DNA
caggcacccacctgtggctgatggactggtgggtggcttgtggagccctctcctagttaagacagtttccaagcctgccatggcttagactttctggcaggtcctccagcactgccttca

SEQ ID NO: 36477 - DNA, 120 bp, synthetic construct
  source 1..120: mol_type = other DNA
catgcacacagcctccagggcagctggaaatgtgtttccccatcatcaacatcttgcattagcatggtgcagcggttatagttaagcagccaagaaaatcataatgaatgtgtctaggta

SEQ ID NO: 36478 - DNA, 120 bp, synthetic construct
  source 1..120: mol_type = other DNA
ctgggcaacatagtgagatcccgtttctacaaaacataaaaaaaattagccaggtgtggtggtgcacacctatggccccagcctactcaggaggctgaggtgggagggtctcttgagcca

SEQ ID NO: 36479 - DNA, 120 bp, synthetic construct; identical to SEQ ID NO: 10577
  source 1..120: mol_type = other DNA

SEQ ID NO: 36480 - DNA, 120 bp, synthetic construct
  source 1..120: mol_type = other DNA
ttggctggaagaggtctcatgcttttctcaagattagaacctctgtaactgggttccaggtttgggggaggatctacgacattttttaaaaatataaagcactcgaccaaacaaagtaac

SEQ ID NO: 36481 - DNA, 120 bp, synthetic construct
  source 1..120: mol_type = other DNA
cttgttcctcagcctcctgagtagcttggattataggtgtgggaaaacaagcctggctaatccttgtatttttagtagagacggggtttcaccatgttggccaggctggtctcaaactcc

SEQ ID NO: 36482 - DNA, 120 bp, synthetic construct; identical to SEQ ID NO: 10578
  source 1..120: mol_type = other DNA

SEQ ID NO: 36483 - DNA, 120 bp, synthetic construct
  source 1..120: mol_type = other DNA
caagaattgcttcaggccaggtgcagtggctcacacctgtaatcccagcactttgggaggccgaggtgggtggatcacaaggtcatgagatcgagaccatcctagccaacatggtgaaac

SEQ ID NO: 36484 - DNA, 120 bp, synthetic construct
  source 1..120: mol_type = other DNA
actgagattgtgccactgcactccagcctggcgacagagcgagactccgtctcaaaaaaaaaaaaaaaaaaaagaattgcttcaacccaggacatggaggttgcagtgagctgagattgt

SEQ ID NO: 36485 - DNA, 120 bp, synthetic construct
  source 1..120: mol_type = other DNA
ggctcaagtgatccacctgccttggcttcccaaacttctgggattacaggcgtgagccacctacaaattataataaaatttctgttgagtgggaataaggacagattattactgatgtaa

SEQ ID NO: 36486 - DNA, 120 bp, synthetic construct; identical to SEQ ID NO: 10579
  source 1..120: mol_type = other DNA

SEQ ID NO: 36487 - DNA, 120 bp, synthetic construct
  source 1..120: mol_type = other DNA
gaggtcaggaattcgagaccagcctgggcaacatggtgaatccccatctctatgaaaaatacaaaaatcagccgggcgtggtgacatgtgcctgtaatcccagctacctgggaggctgag

SEQ ID NO: 36488 - DNA, 120 bp, synthetic construct
  source 1..120: mol_type = other DNA
attatcaaaattcctgagagggcaagaagttccaactccatattcaaaagctaactgaggttaagatattaacacaatgctcccttcttgcttttgatattttcagtgttataggataga

SEQ ID NO: 36489 - DNA, 120 bp, synthetic construct
  source 1..120: mol_type = other DNA
atgcaagggagttgctaaagaagaatatgagtaagtagcaagtttatattaaagtgtttaattcataaaggttaataacaaacttttacaaatgcaacatctaagtttaaatgcaagcaa

SEQ ID NO: 36490 - DNA, 120 bp, synthetic construct
  source 1..120: mol_type = other DNA
caggatggactgcagtggtgcgatcatggctcactgcagccttgaactctcaggctcaagcaatcctagcagctgagactacagatgcctgccattacatctggctaacttttttattct

SEQ ID NO: 36491 - DNA, 120 bp, synthetic construct; identical to SEQ ID NO: 10580
  source 1..120: mol_type = other DNA

SEQ ID NO: 36492 - DNA, 120 bp, synthetic construct
  source 1..120: mol_type = other DNA
cagtgccttccctgttctcctatggtcacctgacatcctgcttgcctttctgcagtgggctgaacagtggcctccgcaaaaagacaggtccactggaaacatcagaatgagaccttattt

SEQ ID NO: 36493 - DNA, 120 bp, synthetic construct
  source 1..120: mol_type = other DNA
cgcggcacggaggggagggccacgtgaagacaggtggaggctggggcgacgcagcgacaagccaaggatgccaaggactgccggcaacagcaggagctgagggcagcgtggggcggattc

SEQ ID NO: 36494 - DNA, 120 bp, synthetic construct
  source 1..120: mol_type = other DNA
accaagttgtggcatcctgggaaactaataggccttcaaagttcagttcaaaggctacttcctcccataaaaccttccctttgagcccctcaggtcggaattaactgctccagttttgac

SEQ ID NO: 36495 - DNA, 120 bp, synthetic construct; identical to SEQ ID NO: 10581
  source 1..120: mol_type = other DNA

SEQ ID NO: 36496 - DNA, 120 bp, synthetic construct
  source 1..120: mol_type = other DNA
acctttataagattaaaggattacctttatattcctttataagattaaaggattagacatggatttttttttttgtaagagaaataatgcacctatgaaagtgcctcatgtgattttttt

SEQ ID NO: 36497 - DNA, 120 bp, synthetic construct
  source 1..120: mol_type = other DNA
ggcatacaccactgcaatttttgtttttttaagtgaaacagcattgatctaaataaagctttaacatgtttacaagtatattttatattgaagctattttctaattctattagacaaaaa

SEQ ID NO: 36498 - DNA, 120 bp, synthetic construct
  source 1..120: mol_type = other DNA
tacagtcatcaattactttttctgaaacccatttacacagaattttaatttagaaagaatttatataaaaaaaatgtgttgtaagacggtgtaattctttggtcttcttggccttaattc

SEQ ID NO: 36499 - DNA, 120 bp, synthetic construct; identical to SEQ ID NO: 10582
  source 1..120: mol_type = other DNA

SEQ ID NO: 36500 - DNA, 120 bp, synthetic construct
  source 1..120: mol_type = other DNA
ttgtttagtctagaaggaggattgtcccatcactcctgggaatggttactccaatttcagaaggggttggcctcaactagaaaaggaagcttctaacgtgagaagaaaagaagaccttct

SEQ ID NO: 36501 - DNA, 120 bp, synthetic construct
  source 1..120: mol_type = other DNA
tagtcctatcacctgtgtagctggctctaccccggaggctgccaacaccacctttatctcatgctccacattttaatatgtcaacatacacagggactgctgcttactttccagactata

SEQ ID NO: 36502 - DNA, 120 bp, synthetic construct
  source 1..120: mol_type = other DNA
gaccatcctggctaacacggtgaaaccccgtctctactaaaaatacaaaaccaaaattatccgggcatggtggcgggtgcctgtagtcccagctacttgggagactgagacgggagaatg

SEQ ID NO: 36503 - DNA, 120 bp, synthetic construct; identical to SEQ ID NO: 10583
  source 1..120: mol_type = other DNA

SEQ ID NO: 36504 - DNA, 120 bp, synthetic construct
  source 1..120: mol_type = other DNA
gaggcagaagttgcagtgaactgatatcgcgccactgcactccagcctgggggacagagcgagactccatctcaaaaacaaaaaacaaaaaacaaagccttagtgtgttagcatattata

SEQ ID NO: 36505 - DNA, 120 bp, synthetic construct
  source 1..120: mol_type = other DNA
tgggtttaagtgattctcctgccttagcttcctgagtagctgggatttcaggcgcccacccccatgcctaactaatttttgtactttttttggtagagatggggtttcaccatgttggcc

SEQ ID NO: 36506 - DNA, 120 bp, synthetic construct
  source 1..120: mol_type = other DNA
cacacccagccaatattttcaattcaaagttgagaaaatggccacagggagctctaaataagtcattttttatattctctgcttttaagtcaaaagaaggaacagagaagagatgcgtgc

SEQ ID NO: 36507 - DNA, 120 bp, synthetic construct; identical to SEQ ID NO: 10584
  source 1..120: mol_type = other DNA

SEQ ID NO: 36508 - DNA, 120 bp, synthetic construct; identical to SEQ ID NO: 3373
  source 1..120: mol_type = other DNA

SEQ ID NO: 36509 - DNA, 120 bp, synthetic construct
  source 1..120: mol_type = other DNA
aggaaccgcagggaaagctggaaacacaacagctttcttagaaaagacgttggcgcacttacgtggggtggtccagatctcacactcatcatctcagacaacattaagatggtaaaaaag

SEQ ID NO: 36510 - DNA, 120 bp, synthetic construct
  source 1..120: mol_type = other DNA
aggagttcgagaccagtcaggccaacatgaaacctcagctaagatacaaaaattagctggacgtggtggtgcacacctgtggtcccagctactcgagagactgaggcttgagaatgtctt

SEQ ID NO: 36511 - DNA, 120 bp, synthetic construct; identical to SEQ ID NO: 10585
  source 1..120: mol_type = other DNA

SEQ ID NO: 36512 - DNA, 120 bp, synthetic construct
  source 1..120: mol_type = other DNA
accacagtcccttcttgcagggtgttcctagtttaatccttatctgtacttgtgaaatggaaggtttatgccttgctagagagcttttaggtataaggcttgtcaactctaaaatcacac

SEQ ID NO: 36513 - DNA, 120 bp, synthetic construct
  source 1..120: mol_type = other DNA
tgcctaggcaagacactgccactgctgctcactgtgaagcaacctggggaaccccctgcttccacctgttctgtcccatcagcaggcgtaggggctgctgccatggtctggttctgcccc

SEQ ID NO: 36514 - DNA, 120 bp, synthetic construct; identical to SEQ ID NO: 10586
  source 1..120: mol_type = other DNA

SEQ ID NO: 36515 - DNA, 120 bp, synthetic construct
  source 1..120: mol_type = other DNA
ctgcctcctctgggggctcctcactggctaagctcaacaggaccccagaatacgggagcccagccgatgtgtcccacactcagcctccctggtgagaaagacaggtgaggcagggtgaaa

SEQ ID NO: 36516 - DNA, 120 bp, synthetic construct
  source 1..120: mol_type = other DNA
ttttcagaaattattatttgtaatagcaataaaaggcatgaacatgttttccaaaaataacaacagtgatatacacaggttgagcatcccaaatctgaaaacctgaaatctgaaatgctc

SEQ ID NO: 36517 - DNA, 120 bp, synthetic construct
  source 1..120: mol_type = other DNA
aaaatctgaaaaaatactaaatctgaaacattcccagtcccgagcattttggtttttattttatatatgtttgagatggagtctcgttctgtcacccaggctggagtgcagtggtaggat

SEQ ID NO: 36518 - DNA, 120 bp, synthetic construct
  source 1..120: mol_type = other DNA
gatggggtttcgccacgttggtcaggctggtcttgaactcctgacctcaggtgatctgcccagcttggcctcccaaagtgcttacaggtgtgagccactgtgcccggcagcagtcccaag

SEQ ID NO: 36519 - DNA, 120 bp, synthetic construct; identical to SEQ ID NO: 10587
  source 1..120: mol_type = other DNA

SEQ ID NO: 36520 - DNA, 120 bp, synthetic construct
  source 1..120: mol_type = other DNA
acggcctgtcaggggaggtgacgctgtctccagctgtgtcttgaaggcaggaaaagggattccaggcagaggcctgagcccctcagatctgagggtatcctcaggagctcgcaggggaca

SEQ ID NO: 36521 - DNA, 120 bp, synthetic construct
  source 1..120: mol_type = other DNA
ccagaagccacacaggggctcacacaggaggctgaaaaaatcagggctgcgtggacgctcagtcagaggagaaaagaggcagagcagtcagtggacgtctctgagaccctgctccctcca

SEQ ID NO: 36522 - DNA, 120 bp, synthetic construct; identical to SEQ ID NO: 10588
  source 1..120: mol_type = other DNA

SEQ ID NO: 36523 - DNA, 120 bp, synthetic construct
  source 1..120: mol_type = other DNA
caaaggggccatgtggatccagagggaacctcgagagaggagccgtgtggatctagagggaacctcgagagaggagccgtatggatccagagggaacctcgagagaggagccgtgtggat

SEQ ID NO: 36524 - DNA, 120 bp, synthetic construct
  source 1..120: mol_type = other DNA
aaggagctgttttttgttcctgcattagtttgctaaagacaatggcttccagctccacccatgttcctggaaagggcatgatctcattcttttttatgcctatatagtattccatggtgt

SEQ ID NO: 36525 - DNA, 120 bp, synthetic construct
  source 1..120: mol_type = other DNA
acaatttatattcctttgggtatccacccggtaatgggattgctaggtcaaatggcaggattaaagacttaaatgtaaaattgaaaattataataacctggaagatgacctaggaaatac

SEQ ID NO: 36526 - DNA, 120 bp, synthetic construct
  source 1..120: mol_type = other DNA
aactatcaacagagtgaagagacaacctacagaatgggagaaaatatttacaaaggatgcatccaacaaaggtccaatatccaggatcaataaggaacttaaacaaattgacaagaaaaa

SEQ ID NO: 36527 - DNA, 120 bp, synthetic construct; identical to SEQ ID NO: 10589
  source 1..120: mol_type = other DNA

SEQ ID NO: 36528 - DNA, 120 bp, synthetic construct
  source 1..120: mol_type = other DNA
ctggtcagagggttcattttaacagtgctgtgggtggtgggggcgtgaagcaaaggcggaatgcatgtgtgccttggagggtgcagtggcttctcctcagggtgggcttttggagctgct

SEQ ID NO: 36529 - DNA, 120 bp, synthetic construct
  source 1..120: mol_type = other DNA
acactcatacacctgataccaagttaaacccctctctcttttatcacgaccactgactattatattttaaaacacatattcaagggaaaatagtggataggaagcaggactggaatgcag

SEQ ID NO: 36530 - DNA, 120 bp, synthetic construct
  source 1..120: mol_type = other DNA
ttgcttctgcaggacccaggagacacaccaaacactgccccgtggcaggctggtccccgccctgcaggagtgtttggactgtgcagtgtgataagcactgtgggtgaagtactgcaaagt

SEQ ID NO: 36531 - DNA, 120 bp, synthetic construct; identical to SEQ ID NO: 10590
  source 1..120: mol_type = other DNA

SEQ ID NO: 36532 - DNA, 120 bp, synthetic construct
  source 1..120: mol_type = other DNA
aatcccagcactttgggaggccgaggttggcagatcgcctgaggtcaagagtacaagaccagcctgaccaacgtggagaaaccctgtctctactaaaagaatacaaaattagccgggctt

SEQ ID NO: 36533 - DNA, 120 bp, synthetic construct
  source 1..120: mol_type = other DNA
tgagccaagatcacgctgttgcactccagtctggcaacaagagcaagggaaggagcgagggaaggagggagggagggaaagagggagggggggagggagggagggagagagggagggcac

SEQ ID NO: 36534 - DNA, 120 bp, synthetic construct; identical to SEQ ID NO: 10591
  source 1..120: mol_type = other DNA

SEQ ID NO: 36535 - DNA, 120 bp, synthetic construct
  source 1..120: mol_type = other DNA
acatattcaaaacttgtcttaaagactaagtgtataagaatgaaatgcattttaaaacaaaatttacactgtcccaaacttcacttaaaaactccccaaaccgaaaaaaaccctgactcc

SEQ ID NO: 36536 - DNA, 120 bp, synthetic construct
  source 1..120: mol_type = other DNA
tatagtgttttctctttttagaaaactgttaaaaaatatctgagtaagaaataagcaaagaagaggaatgtgacagtcaaaagtatatggaagagaaaaaattaaactcataagttggct

SEQ ID NO: 36537 - DNA, 120 bp, synthetic construct
  source 1..120: mol_type = other DNA
aaaataaggtcgggcgtggtggctcatgcctgtaattccaacactttgggaggccgaggcaggcagatcacttgaggtcaggagttcgagatcagcctggccaacatggcgaaaccccat

SEQ ID NO: 36538 - DNA, 120 bp, synthetic construct; identical to SEQ ID NO: 10592
  source 1..120: mol_type = other DNA

SEQ ID NO: 36539 - DNA, 120 bp, synthetic construct
  source 1..120: mol_type = other DNA
aatcccagctacttgggaggctgaggcaggagaattgcttgaacctaggaggcggggtttgcagtgagctgagatcgcaccattgcactctagcctggacgacagagagagattccgtct

SEQ ID NO: 36540 - DNA, 120 bp, synthetic construct
  source 1..120: mol_type = other DNA
aaatgaagtctgttactttttttcccctttccatgctttttgcatttggttttgtgtgtgggggcaaatgtgtacacgggcgagaaaatgcacacactcttctaaataagggggcagtaa

SEQ ID NO: 36541 - DNA, 120 bp, synthetic construct
  source 1..120: mol_type = other DNA
attgtatgtggctcctgtcagaattttaaaatggttttgcatagaattctaggaactattaatacataattaaagcatctaccacagccaatgattcctttctcagggaagaaaacccag

SEQ ID NO: 36542 - DNA, 120 bp, synthetic construct; identical to SEQ ID NO: 10593
  source 1..120: mol_type = other DNA

SEQ ID NO: 36543 - DNA, 120 bp, synthetic construct
  source 1..120: mol_type = other DNA
aaaataacttcagactatgtatataaggtatatatgaaacatgaatttcgtgtttaaaattgagtcctcatccccaagatatctcattatgtatatgcaaatattccaaaatctgaaaaa

SEQ ID NO: 36544 - DNA, 120 bp, synthetic construct
  source 1..120: mol_type = other DNA
aaccccatctctactaaaaatacaaaaattagctgggcatggtggcgcatgcctgtaatcccagctactcgggaggctgaggcaggagaatcacttgaatccaggaggcagaggttgcag

SEQ ID NO: 36545 - DNA, 120 bp, synthetic construct
  source 1..120: mol_type = other DNA
agttccacgcatttgggagactcaacctgcaccaggaattatacagctgctgcccccgctggctgtcatgaggtatacttttagctacttaaagaagtttcctcatatccctggtttatt

SEQ ID NO: 36546 - DNA, 120 bp, synthetic construct; identical to SEQ ID NO: 10594
  source 1..120: mol_type = other DNA

SEQ ID NO: 36547 - DNA, 120 bp, synthetic construct
  source 1..120: mol_type = other DNA
aatggccaggctcaagcaatcctcctgtctcagcctcctgagtggctgggactacaggcatccgctaccatacctggctaattttttttattgtttgtagagatgggagtctcgctatgt

SEQ ID NO: 36548 - DNA, 120 bp, synthetic construct
  source 1..120: mol_type = other DNA
gccaccacatccagctccttaatagattaaaaaaatttttttttaattaaaaaaattaaagatggggttttgtcatgttgcccaggttggtctcgaactcctgggctcaagtgattcacc

SEQ ID NO: 36549 - DNA, 120 bp, synthetic construct
  source 1..120: mol_type = other DNA
taccttgcccagcctagatttcttaatcaacagaagaatacttgcatttctaagataaaccttacttgaccacaatatattcggcttttaatcctgcatagctagtgtttgtttaggagc

SEQ ID NO: 36550 - DNA, 120 bp, synthetic construct
  source 1..120: mol_type = other DNA
caagctagccttacggaaggagctgggaagtgctccatattttcctatgttctaaaataatttaaataaggcattaactgttcctgaaaagttttacagaattcatccataaacaggctg

SEQ ID NO: 36551 - DNA, 120 bp, synthetic construct; identical to SEQ ID NO: 10595
  source 1..120: mol_type = other DNA

SEQ ID NO: 36552 - DNA, 120 bp, synthetic construct
  source 1..120: mol_type = other DNA
tatctcagcctcccaagtagttgggaccacaggcgtgcaccaccacacccggatagtttttgtattttttttgttgagatggggtttcgccatggtgcccaggctggtcttgaactgctg

SEQ ID NO: 36553 - DNA, 120 bp, synthetic construct
  source 1..120: mol_type = other DNA
agaagcttctcttctttctaaagctttgcattttctcccattttttcctgaacagacttgacaaaggtttatccactttactgacttatccaagaactaagtttttgtttttattaagca

SEQ ID NO: 36554 - DNA, 120 bp, synthetic construct
  source 1..120: mol_type = other DNA
tgaattcattctgatgaattcaagatgggcacttcatccaagtccccgcaagtgtcctgaagtttgagactctgacaaaaggctatcctaactcacaatgaaacactggagtttcgcaga

SEQ ID NO: 36555 - DNA, 120 bp, synthetic construct; identical to SEQ ID NO: 10596
  source 1..120: mol_type = other DNA

SEQ ID NO: 36556 - DNA, 120 bp, synthetic construct
  source 1..120: mol_type = other DNA
ctgaatttcttcatttgtaaaatggtgacacaccatctttcctgagagcatttctcaggaacagggataagcacaaacatccaatcgcaaaagctgccaactatatgtggcatacatacc

SEQ ID NO: 36557 - DNA, 120 bp, synthetic construct
  source 1..120: mol_type = other DNA
gaatcgctggaatcactttaaatttttgctcggtttcttcttgtcttcctagtcatcatcgcagttactgctgatggagactgtactacatcccaggccctctaatgcagcggtccccat

SEQ ID NO: 36558 - DNA, 120 bp, synthetic construct; identical to SEQ ID NO: 10597
  source 1..120: mol_type = other DNA

SEQ ID NO: 36559 - DNA, 120 bp, synthetic construct
  source 1..120: mol_type = other DNA
aacctgggaggtggagcttgcagtgagccgagattgcgccactgcactccagcctgggcaacagagcaagactctgtctcaaaaaaaaaaaaaaaaaaaaaaaaaaaagctcataaagag

SEQ ID NO: 36560 - DNA, 120 bp, synthetic construct
  source 1..120: mol_type = other DNA
tgctcacctgccgtgtgggccgattcctaacagtagtggtctgtggctagggggttggggacccctgctctagtggatatcatgcccatgttatttaatccacatataatcctcctggct

SEQ ID NO: 36561 - DNA, 120 bp, synthetic construct
  source 1..120: mol_type = other DNA
ttaattgctatggctctaattacacatgcattaaaaaaaggggggttacatcgtatgtatgtataagcttcaaagctagagaagtcaacgtgaagactgagagccaaggaaagagggtaa

SEQ ID NO: 36562 - DNA, 120 bp, synthetic construct
  source 1..120: mol_type = other DNA
cttcctgtcagttacaaatgaccaaagtacaacctaaaataaaatgaatcagttagcatgatgttcagaaacctcattgatgttatataaattcagatacatgggaaacagctccaagtg

SEQ ID NO: 36563 - DNA, 120 bp, synthetic construct; identical to SEQ ID NO: 10598
  source 1..120: mol_type = other DNA

SEQ ID NO: 36564 - DNA, 120 bp, synthetic construct
  source 1..120: mol_type = other DNA
aaatttagccaaaaggttcccagactagttcccttcccccaaaatcgctcttcccttttcatatcagagatgaacctggctctgttccccctaaccttagcacaagtgtaatcacggcca

SEQ ID NO: 36565 - DNA, 120 bp, synthetic construct
  source 1..120: mol_type = other DNA
acccaccgtcgggtggagaagcctttcacacctccagggttcactcagtcatttcacttcctccgttgctccgccctcactgctctttgattagcgcaccatcaacatggcaaatgcaat

SEQ ID NO: 36566 - DNA, 120 bp, synthetic construct; identical to SEQ ID NO: 10599
  source 1..120: mol_type = other DNA

SEQ ID NO: 36567 - DNA, 120 bp, synthetic construct
  source 1..120: mol_type = other DNA
tccctgaggaagcgacatctaacctgagacttggagaaaacgagcaggtggccaaaggagaggaaggaatgattcaaggagcaggagctgtctgtgtaaagtctggcaggcctggaggag

SEQ ID NO: 36568 - DNA, 120 bp, synthetic construct
  source 1..120: mol_type = other DNA
tgcggactcctacaggcaaaggaaaagtaccggaggctttagaaatgaaagcgatgggattagaaatatgtttgaaggaaatatctccaacagcagcatggcaaattaattggagggggc

SEQ ID NO: 36569 - DNA, 120 bp, synthetic construct
  source 1..120: mol_type = other DNA
tggagtcaagcagctttcctgttaaaacagctgggaggatgcgggcatttatggaatcaggctggttaaaaagaaagaaaacaaaccgaagaaggaaggggaaggaaggagatgggcaca

SEQ ID NO: 36570 - DNA, 120 bp, synthetic construct
  source 1..120: mol_type = other DNA
agggaggggaatcgtatgggatgtgagttatatcacaggggtccgaagcatgggtaaggactcagcacagctggctgtggggttggagctgaacagctgtagggccaagaggccattctt

SEQ ID NO: 36571 - DNA, 120 bp, synthetic construct; identical to SEQ ID NO: 10600
  source 1..120: mol_type = other DNA

SEQ ID NO: 36572 - DNA, 120 bp, synthetic construct
  source 1..120: mol_type = other DNA
cagaggaacaactttaattacagggatttcatacaattgtaactactcataatccagaaacaataagtctcttatctacgaggagtgtgtgaactcagcagggaagggtagagtttggaa

SEQ ID NO: 36573 - DNA, 120 bp, synthetic construct
  source 1..120: mol_type = other DNA
caagaaacctgcaagttgacgcttggctgtgagagtcaagggacaagggaataattcaatagatgaccacaaatacacagggaggcaattctcccttaagcaagttccagcagcttctaa

SEQ ID NO: 36574 - DNA, 120 bp, synthetic construct; identical to SEQ ID NO: 10601
  source 1..120: mol_type = other DNA

SEQ ID NO: 36575 - DNA, 120 bp, synthetic construct
  source 1..120: mol_type = other DNA
acacatttttgttttgtttatttgtaaagagtgattattggttgctttggggtctgatttttaagcgagagagaaaaagcaaaagatcaccaagtgccggccccctggttttatagagaa

SEQ ID NO: 36576 - DNA, 120 bp, synthetic construct
  source 1..120: mol_type = other DNA
acaatgctttctttccctcctacgaaaagtggcccctacttttacctattttgatcactgtaggtgaggctgaccagttttgctagaaacaagcaagattggctgggtgcagtggctcac

SEQ ID NO: 36577 - DNA, 120 bp, synthetic construct
  source 1..120: mol_type = other DNA
ggcatgctggtgcatgcctgtaatcctagctactcaggaggctgaggcatgagaattacttgagcctgggaggcagaggttgccgtgaaccgagattgtaccactgcactccagcctggg

SEQ ID NO: 36578 - DNA, 120 bp, synthetic construct
  source 1..120: mol_type = other DNA
ctccaggctgaagtacagtggtgcaaccacatgcgctcgggtgatcctcccacctcagcctcccaagtagccggaaccacaggcgtgcaccaccatgcctagctaatttttaaaattttt

SEQ ID NO: 36579 - DNA, 120 bp, synthetic construct; identical to SEQ ID NO: 10602
  source 1..120: mol_type = other DNA

SEQ ID NO: 36580 - DNA, 120 bp, synthetic construct
  source 1..120: mol_type = other DNA
ggtaccagagtagagcaggtttattaatcacggataaaactgctgaataattacctacttcaaaaagcattcatgagttgtgtttaggtgcttacaaagtactttgtgcttggtcctggc

SEQ ID NO: 36581 - DNA, 120 bp, synthetic construct
  source 1..120: mol_type = other DNA
gttcatgcctgtaggtcccagtagttagggagactgcagccggcagatcacttgagcccaggagtttgagaccagcttggccatcatagtgaaaccccatctctactaaagtacaaaaat

SEQ ID NO: 36582 - DNA, 120 bp, synthetic construct; identical to SEQ ID NO: 10603
  source 1..120: mol_type = other DNA

SEQ ID NO: 36583 - DNA, 120 bp, synthetic construct
  source 1..120: mol_type = other DNA
agagaagtacagagggtattcagagaaggcctcggagaccagatgagacttgagctgagccttgaagtcttactaagatcggtgtggcatggaaagcatgcagccctcatcacgtgccac

SEQ ID NO: 36584 - DNA, 120 bp, synthetic construct
  source 1..120: mol_type = other DNA
gtaaagaagttttactggagccgagccccgccccttggattgtgttagctgctttctgctttcttgctacaagggcaaattgagtggttgtgacagaaactgagaccataacacccgcaa

SEQ ID NO: 36585 - DNA, 120 bp, synthetic construct
  source 1..120: mol_type = other DNA
cccagacctagagaactggaatctgcctttcaaaaagatctgtggctattcttatgcacagagagggaggggcactgagcctgcggagtaagagaagtctgcacctgtcggatatacgga

SEQ ID NO: 36586 - DNA, 120 bp, synthetic construct
  source 1..120: mol_type = other DNA
taacccaggccaaagacgacccaactaggcagggtagaactcaatctttcttcctaacctcaccagtgcttccaagatgtttctaacaaatatagtatcagttataacttattaggaaat

SEQ ID NO: 36587 - DNA, 120 bp, synthetic construct; identical to SEQ ID NO: 10604
  source 1..120: mol_type = other DNA

SEQ ID NO: 36588 - DNA, 120 bp, synthetic construct
  source 1..120: mol_type = other DNA
tcactgtttaacattctgcctccttaagaatctagaaaagtttgacagggttattcgtgggattcggtgtgctttaaaggaatgacagcaatatagataaaaatagatgggtgaagaggg

SEQ ID NO: 36589 - DNA, 120 bp, synthetic construct
  source 1..120: mol_type = other DNA
ctcaagtaagaagaagaaaagggacaggacaccaaatctgtgttgagaagaatctctgtgttgggtttcattaataaaaatcttaaaaagctcatgaattcagtacaatgcttaatggca

SEQ ID NO: 36590 - DNA, 120 bp, synthetic construct; identical to SEQ ID NO: 10605
  source 1..120: mol_type = other DNA

SEQ ID NO: 36591 - DNA, 120 bp, synthetic construct
  source 1..120: mol_type = other DNA
agcggccaagatttggcctgcaatataataaaactgaggaatagtgagatgggttcgaatgaagaccctggattatttttctgtaggatgaaatgcaaattaagtccggtaaaattctga

SEQ ID NO: 36592 - DNA, 120 bp, synthetic construct
  source 1..120: mol_type = other DNA
tgtttgtgaaatgctgcagtgaatctcaaagataacaggcacccggctaattctattgggttaacacgtccatgctggctgtgcaggcttatttaagtaattgcctgactgtgaatgaac

SEQ ID NO: 36593 - DNA, 120 bp, synthetic construct
  source 1..120: mol_type = other DNA
actcctggaaaaaagagaagttgctaaataaataatggaagcacacaagacagtgtgaacgccttttcaagtcctcgaattgtcaagcatcttatataaagttctttcccgactctgagc

SEQ ID NO: 36594 - DNA, 120 bp, synthetic construct
  source 1..120: mol_type = other DNA
tttgccaaagaacgagctcatgcctttcaaatgttaacagcctccaaataagatccaagttatttacctgtaagatacaagaagaagacaggagagggaaaaaaaacaaccaagtgagag

SEQ ID NO: 36595 - DNA, 120 bp, synthetic construct; identical to SEQ ID NO: 10606
  source 1..120: mol_type = other DNA

SEQ ID NO: 36596 - DNA, 120 bp, synthetic construct
  source 1..120: mol_type = other DNA
ccttgctgtaattcgagttcggcgagtaaggacaaaagggccgcccgtccgtgtggatgccgggctcagggctgcgctctgggagcctggctcgcgtcccctccgcggacgcccggtacc

SEQ ID NO: 36597 - DNA, 120 bp, synthetic construct
  source 1..120: mol_type = other DNA
ggtcccggtcctcgggcggccgggccgtgggagcgccgggccggcagcgggcggggcgcactcaccttcgtcctcgaactccagcttctccagcatgccggcttccgcgggtcccagggc

SEQ ID NO: 36598 - DNA, 120 bp, synthetic construct; identical to SEQ ID NO: 10607
  source 1..120: mol_type = other DNA

SEQ ID NO: 36599 - DNA, 120 bp, synthetic construct
  source 1..120: mol_type = other DNA
tccggccgtggcccgcgtcctccccgccgtgccgccattgggagaggcccgcggcccgcccccactccgccccccggcgccgctcaccttcccagcaccggcggccgcgctcggcaggct

SEQ ID NO: 36600 - DNA, 120 bp, synthetic construct
  source 1..120: mol_type = other DNA
tagatgtaactgcccatcctcggcccccttaacaaaaatcgttccgtgggctacacgtattgtagatgcactttgtcgctatccatttttttttttccagcatggaactcttaattcgcg

SEQ ID NO: 36601 - DNA, 120 bp, synthetic construct
  source 1..120: mol_type = other DNA
aggttggcaggctgcgcggccagcagccgctagcctcctggaagggcaggacaggccgagaggggactgaggtccctggccccacggcccatccctgcagagtgcacgggcgccgcgaat

SEQ ID NO: 36602 - DNA, 120 bp, synthetic construct; identical to SEQ ID NO: 10608
  source 1..120: mol_type = other DNA

SEQ ID NO: 36603 - DNA, 120 bp, synthetic construct
  source 1..120: mol_type = other DNA
cagattggaaaggaagaaaaacacctgtgtagataacatgttatctacatacaaaatatcaaagaatctacaaaagaaagaaaaaactcacctggaattagtgagtttggtaaggtcata

SEQ ID NO: 36604 - DNA, 120 bp, synthetic construct
  source 1..120: mol_type = other DNA
cataaactcaagaaaccatgtatagtagctgtatgctgaaaatcacaaactgtagatgaaagacgagctaataaatggagagacagtcctgagctggaagccccaacatagtaaaaatga

SEQ ID NO: 36605 - DNA, 120 bp, synthetic construct
  source 1..120: mol_type = other DNA
attctaaaatttatatggaaaggtgcaagctctagaattctatttatttatttattatttttttgagacggagtctcgctctgtcacccaggctggagtgcagtggcgcaacctcggctc

SEQ ID NO: 36606 - DNA, 120 bp, synthetic construct
  source 1..120: mol_type = other DNA
aatcttgaagtcgcttaatattaaagcaaactatatagatacagcaatcaagacaatggtattggcagaagaatggatataataatcaatagaaataaatagaaaacccagaaatagacc

SEQ ID NO: 36607 - DNA, 120 bp, synthetic construct; identical to SEQ ID NO: 10609
  source 1..120: mol_type = other DNA

SEQ ID NO: 36608 - DNA, 120 bp, synthetic construct
  source 1..120: mol_type = other DNA
agtaggagaaaatacttgcaaatcacatagccaacaaattactagcacactgcctatagggttagccctgctctccaaggaatagcaaaaataaaataaaataaaaatgtctggaataca

SEQ ID NO: 36609 - DNA, 120 bp, synthetic construct
  source 1..120: mol_type = other DNA
gttcaaagtcattagccattatataaatgcgaattaaaaccacaatgagatactactacacaactgttaaaatggctaaaatcacaatagtaacaacatcaaatgctggtaaggatgtag

SEQ ID NO: 36610 - DNA, 120 bp, synthetic construct
  source 1..120: mol_type = other DNA
cagtggacctatctcaactcactgcaacctctacctcccaggttcaggcaattttcctgtctcagcctcctgagtagctaggattacaggcacatgctaccacaggtcagctaatttttg

SEQ ID NO: 36611 - DNA, 120 bp, synthetic construct; identical to SEQ ID NO: 10610
  source 1..120: mol_type = other DNA

SEQ ID NO: 36612 - DNA, 120 bp, synthetic construct
  source 1..120: mol_type = other DNA
taccgtaaaatactactcagcaagaaaaaggaaggaactactgacacatacaacaacttggatagatctccagggaattatgctgagggggaaaaagccagtcctaaaacgtcatatact

SEQ ID NO: 36613 - DNA, 120 bp, synthetic construct
  source 1..120: mol_type = other DNA
taatgtaagagatccttgtggtgaccgaactgttctacatcttgactgtatcaatgtcaatatcctgcttgtgatatcaccctgtatttttccctatgagtcaggccaagctgatttaat

SEQ ID NO: 36614 - DNA, 120 bp, synthetic construct
  source 1..120: mol_type = other DNA
ttcacgccattctcctgccttagcctccggagtagctaggactacaggctaattttttgtattttttttagtagagactgggtttcaccgtgttagccaagatggtctcgatctcctgac

SEQ ID NO: 36615 - DNA, 120 bp, synthetic construct; identical to SEQ ID NO: 10611
  source 1..120: mol_type = other DNA

SEQ ID NO: 36616 - DNA, 120 bp, synthetic construct
  source 1..120: mol_type = other DNA
gtcagggcccattcacattgtaacacggatcagcacttcatttctgttgactgctgaacgatactctgttgtgtggacacacacaccttgtttatcctttcgtcagctgatgggcactca

SEQ ID NO: 36617 - DNA, 120 bp, synthetic construct
  source 1..120: mol_type = other DNA
tttcatatatacaggagtggaattgctgggccacagggtaaccctatgtttaatatatatatattttaaatttagttttgaaatggagtctcactctgtcacccaggctggagtgcagta

SEQ ID NO: 36618 - DNA, 120 bp, synthetic construct
  source 1..120: mol_type = other DNA
acaggtgcgcacaaccatgctcggctaattttcatatttttagtagagatggggtttcaccatgttggccaggttggtctcgaactcctgacctcaggtgatccacccgcctcagcctcc

SEQ ID NO: 36619 - DNA, 120 bp, synthetic construct; identical to SEQ ID NO: 10612
  source 1..120: mol_type = other DNA

SEQ ID NO: 36620 - DNA, 120 bp, synthetic construct
  source 1..120: mol_type = other DNA
tttaaaaaaattcttaccggtgtttatgataagcaccatcaatttcacctgtaatcgtgaggggttgttttttgggaggcagaaatgggcaacaaatggcagtatgtacgtcaggaggac

SEQ ID NO: 36621 - DNA, 120 bp, synthetic construct
  source 1..120: mol_type = other DNA
ggagtagcctaaaataaaaatgtttttatgtaatatgctagtgggattgaatttatttctacaggttttttacttagtaagaaatcttatgttttcttccttagaaaggaggctactcat

SEQ ID NO: 36622 - DNA, 120 bp, synthetic construct; identical to SEQ ID NO: 10613
  source 1..120: mol_type = other DNA

SEQ ID NO: 36623 - DNA, 120 bp, synthetic construct
  source 1..120: mol_type = other DNA
ttgtgacaccgactcctctctcagtccatcagcatcagggatgtttgatgtagcaaaaacagaccaaatccaccacccaaaccctcctgataatccagaccgatctccccagggagaaca

SEQ ID NO: 36624 - DNA, 120 bp, synthetic construct
  source 1..120: mol_type = other DNA
ggtgggagggaacagagggacccaagttggactttatggagagaatgcctgagaaacatggagccatcacaagtgtgacttcttggttggtaaaaaatgctaaattattatcccggcatg

SEQ ID NO: 36625 - DNA, 120 bp, synthetic construct
  source 1..120: mol_type = other DNA
ccaacatggtgaaaaccccgtctctactaaaaatacaaaaattagccgggcatggttgcgcacacctgtagtcccagctactcgggaggctgaggcaggagaatcgcttgaacccaggag

SEQ ID NO: 36626 - DNA, 120 bp, synthetic construct; identical to SEQ ID NO: 10614
  source 1..120: mol_type = other DNA

SEQ ID NO: 36627 - DNA, 120 bp, synthetic construct
  source 1..120: mol_type = other DNA
atttagcatacagaactcttagtttctgtgcatcctgctgtcttccttgagctccactctgctctgcaagggcgtcctccaaagagtaaagaacgacgtgaaaccccctggatgctggac

SEQ ID NO: 36628 - DNA, 120 bp, synthetic construct
  source 1..120: mol_type = other DNA
actgccatcatctccactggagttttctacaccaacgcagatgcacttcatctaaaactgtgccccagtcctctgggtcttgccgtcttggtttcttttgagacaacccacttgtctcca

SEQ ID NO: 36629 - DNA, 120 bp, synthetic construct
  source 1..120: mol_type = other DNA
ctatgatggttaaatttgaatccagtcatcttgactggattaaggaacacctagacaaccggtaaagcattatttctgggtgtgtccgtgcaggagtttccagagactggcatgtgggtc

SEQ ID NO: 36630 - DNA, 120 bp, synthetic construct
  source 1..120: mol_type = other DNA
acactttcctcttcctgctcttgggcatcagaactccaggctctcctgccttgacactgggacttaacagcagcagccctctggttttcaggcctttggccttggactgagaattacgcc

SEQ ID NO: 36631 - DNA, 120 bp, synthetic construct; identical to SEQ ID NO: 10615
  source 1..120: mol_type = other DNA

SEQ ID NO: 36632 - DNA, 120 bp, synthetic construct
  source 1..120: mol_type = other DNA
gtggatcacctgaggtcaggagttcaagaccagcctgggcaacatggtgaaacaatgtctctatgaaaaaaacaaaaattagccgggtatggggcatgcacctgtaattccagctacttg

SEQ ID NO: 36633 - DNA, 120 bp, synthetic construct
  source 1..120: mol_type = other DNA
caaaacagacttattattcactaacttagaaccattcagtggctctcggcaatctttaggattttcttggcaaactcctgagctggggggaagggcctgatcatttattcaccttctctt

SEQ ID NO: 36634 - DNA, 120 bp, synthetic construct; identical to SEQ ID NO: 10616
  source 1..120: mol_type = other DNA

SEQ ID NO: 36635 - DNA, 120 bp, synthetic construct
  source 1..120: mol_type = other DNA
acttctctgaacccacatgcttccatatggcatttaacacactggcttgggatttacttttctgtttcctctgagtcccacattgctctctgaagggaacgaatgactcatcatccttgt

SEQ ID NO: 36636 - DNA, 120 bp, synthetic construct
  source 1..120: mol_type = other DNA
ttggtagggaaacagttgattttagtagcataaatgggtttagaagttatttcactcaatttactcatgcttcccttggacctcattgctgtttggaaatcattatagtcactttccctt

SEQ ID NO: 36637 - DNA, 120 bp, synthetic construct
  source 1..120: mol_type = other DNA
ttctatctgaggaccaaagttcgctggcagtatgagatcctggcatggatactggctgagagctttgccagctcttgccaccaccctacaatttcagcttttttgttcccttcttttttc

SEQ ID NO: 36638 - DNA, 120 bp, synthetic construct
  source 1..120: mol_type = other DNA
cagcctcccaagtagctgggactacaggcgcacaccaccacacccagcaaattttttgtattttagtagagacaaggtttcaccatgttggccaggctggtctgaaactcttgacctcaa

SEQ ID NO: 36639 - DNA, 120 bp, synthetic construct; identical to SEQ ID NO: 10617
  source 1..120: mol_type = other DNA

SEQ ID NO: 36640 - DNA, 120 bp, synthetic construct
  source 1..120: mol_type = other DNA
cctggccaattttagtttctgttaagggaagacaattgatttttaaaagtagtgtagaaatttgaaaaaaatctcaaatatatattcaacactatgagtattaattcttggccacatgca

SEQ ID NO: 36641 - DNA, 120 bp, synthetic construct
  source 1..120: mol_type = other DNA
aaaaaaaaggggccaggcgtggtggctcacacctataatcccagcactttgggaggccgaggcgggtggatcacgaggtcaggagatcgagaccatcctggctaacacggtgaaacactg

SEQ ID NO: 36642 - DNA, 120 bp, synthetic construct
  source 1..120: mol_type = other DNA
agtgagccaagatcgcgccactgcactccagcctgggcgacagagcgagactccatctcaaacaaacaaacaacaaacaaacaaaacaaaaggtagctgggcatagtggctcatgcctgt

SEQ ID NO: 36643 - DNA, 120 bp, synthetic construct; identical to SEQ ID NO: 10618
  source 1..120: mol_type = other DNA

SEQ ID NO: 36644 - DNA, 120 bp, synthetic construct
  source 1..120: mol_type = other DNA
ttgttaaacaaaaggtgaagaaaattgattaacccaaaaagtcctttggattctctatgttaaattatcttcgaatttccaaaataggagacaatggtaagcttttgaagacagtcattc

SEQ ID NO: 36645 - DNA, 120 bp, synthetic construct
  source 1..120: mol_type = other DNA
aaggagctcaaggaacatggagaatcagcatgattgccttgctacccttcaaattcattcgttacagtctgaaatgcatacatctcttgcctttcacaaataaatccatttttttgccaa

SEQ ID NO: 36646 - DNA, 120 bp, synthetic construct; identical to SEQ ID NO: 10619
  source 1..120: mol_type = other DNA

SEQ ID NO: 36647 - DNA, 120 bp, synthetic construct
  source 1..120: mol_type = other DNA
cagactacttccacttcagttctgctctacataacgtgatcaaaaggaagtacaatattccagctgaaattaaagggacccactaatgcctccaccacatcttctacattctggagactt

SEQ ID NO: 36648 - DNA, 120 bp, synthetic construct
  source 1..120: mol_type = other DNA
ctttaaagaatgatttgtagtgtccctttttgttgtgtgtaatttaccaacaataaacgatttctattccaagtgtacaatttgatgagctaggatgaaatcatcagtacaattatacga

SEQ ID NO: 36649 - DNA, 120 bp, synthetic construct
  source 1..120: mol_type = other DNA
tctcactgatatgtgggagctaagctatgaggacgcaaaggcataagaatgatacaatagactgtggggacttggagggaagagcggaagcggggcaagggataaaagactacaaacatg

SEQ ID NO: 36650 - DNA, 120 bp, synthetic construct
  source 1..120: mol_type = other DNA
ataaaatttaaaaagtaaataaatgttaaagagaaaattaaaaaaataaaatatagagaaaatttttttatcactccaaaagtttgctcatgctcctttgtggttcaccccttcttcaag

SEQ ID NO: 36651 - DNA, 120 bp, synthetic construct; identical to SEQ ID NO: 10620
  source 1..120: mol_type = other DNA

SEQ ID NO: 36652 - DNA, 120 bp, synthetic construct
  source 1..120: mol_type = other DNA
ttggtaggtgtgtgtttaatatgagaaaccacccatttcacagactggctgtaccattttacatttctgcccaaagtggttgagagttccagttgcttcatgtcctcatcaatgcttggt

SEQ ID NO: 36653 - DNA, 120 bp, synthetic construct
  source 1..120: mol_type = other DNA
tgttttcttttgtgaagtgactgtacacatcttttgtctatttatttattagagtttttgttcttattgagttgtatgaatatggcaagcagactctgagatggcccccaatgcatgatc

SEQ ID NO: 36654 - DNA, 120 bp, synthetic construct
  source 1..120: mol_type = other DNA
gtattcagcacaggtgatgggacaccacttccattattaagcttctgtctatatacataagactgtggcttgtctttctagcagatcactatcttgctggctttggtgaagcaagctgcc

SEQ ID NO: 36655 - DNA, 120 bp, synthetic construct; identical to SEQ ID NO: 10621
  source 1..120: mol_type = other DNA

SEQ ID NO: 36656 - DNA, 120 bp, synthetic construct
  source 1..120: mol_type = other DNA
ttttctctccttctgtggcttgccttttcatattcctagtcatgtctttcaaagagcaagtttttaattttgataagatcctatttattatattatgactcatgctttttctgtcctagc

SEQ ID NO: 36657 - DNA, 120 bp, synthetic construct
  source 1..120: mol_type = other DNA
tatgatatgtggcaagggttgaggttcatattttccatactgaaatccaattgttccacattgcttgttgaaaagattttgctgcctcactggattcccttggtacctttatttaaaatc

SEQ ID NO: 36658 - DNA, 120 bp, synthetic construct
  source 1..120: mol_type = other DNA
aggtagtggacattctccaactttgttcttcatttaaaaaatggctgtgagtcctttaagttccttatgtttctatatacattccagaattaaaaataaaacctactggaatcttggctg

SEQ ID NO: 36659 - DNA, 120 bp, synthetic construct
  source 1..120: mol_type = other DNA
tttccatttgtttagccctttgatttctctcagcaatcttttgtagttttcaccatggaggtcttacatatcttttgttaaatttattcctaagtatttattttttgatgctctcataaa

SEQ ID NO: 36660 - DNA, 120 bp, synthetic construct; identical to SEQ ID NO: 10622
  source 1..120: mol_type = other DNA

SEQ ID NO: 36661 - DNA, 120 bp, synthetic construct
  source 1..120: mol_type = other DNA
cacatatatgtaatattacagattacctatgtcatattacacatggatagatggatatctgctgctttcagctcacgtgcacaacctcagtagtggtatccaccatttgacgtgtgcaca

SEQ ID NO: 36662 - DNA, 120 bp, synthetic construct
  source 1..120: mol_type = other DNA
aagctctctcgagctaccctgggctaccagggaggactcagggttggagagagccagaccgcacatgcatgtgtgcacagccccgtccatcccctgttcttgccacaagcaagcatgcag

SEQ ID NO: 36663 - DNA, 120 bp, synthetic construct; identical to SEQ ID NO: 10623
  source 1..120: mol_type = other DNA

SEQ ID NO: 36664 - DNA, 120 bp, synthetic construct
  source 1..120: mol_type = other DNA
actgtaaaaaattacaaagtaatttaaataataaaaagctatagcgactgcattgtgggcacaaatgctaaggaaacctttgagaggaaggcttcctacagagatgtgcagaggcagatt

SEQ ID NO: 36665 - DNA, 120 bp, synthetic construct
  source 1..120: mol_type = other DNA
tctttatctgagagtagaacattcttgtagagaagtgaaagaaagattggagaccactgggagtgaaaggaatggaattggatttcttaggattgcatgtaagaagtgaatgtagataat

SEQ ID NO: 36666 - DNA, 120 bp, synthetic construct
  source 1..120: mol_type = other DNA
attaagcgagcaggtcagaggtactgcagagataagaacagtttcgactttgtggattaggaagtaaataggaaagagattgggaatgtcagggaacagggattgaatgggcctgtgtga

SEQ ID NO: 36667 - DNA, 120 bp, synthetic construct; identical to SEQ ID NO: 10624
  source 1..120: mol_type = other DNA

SEQ ID NO: 36668 - DNA, 120 bp, synthetic construct
  source 1..120: mol_type = other DNA
ttccatgaaatcataggttttgctgtttcagatatatttttccatgatatacaaaaatgtcgctatgaaaacgttcatccttgtaccgcctgaaagcatcttgcatcccaccgtggtcct

SEQ ID NO: 36669 - DNA, 120 bp, synthetic construct
  source 1..120: mol_type = other DNA
gaaagggaagagacatcgatttaacaagcagccctagtagctgcaacacaaaggcatttgctataattggaagctgagaaaccaggctttagggaatgaaaatctaaaccagtgttttta

SEQ ID NO: 36670 - DNA, 120 bp, synthetic construct
  source 1..120: mol_type = other DNA
tagtcccagctacgtgggagggtgaggcaggaggatggctggaacccaggagttttaacccaaggcaacatagtgagacccccgtctctttaaaaaacagaaagaaaggggaaaaatcag

SEQ ID NO: 36671 - DNA, 120 bp, synthetic construct; identical to SEQ ID NO: 10625
  source 1..120: mol_type = other DNA

SEQ ID NO: 36672 - DNA, 120 bp, synthetic construct
  source 1..120: mol_type = other DNA
gcctcctgagtagctgggattgcaggcacctaccaccacacctggctaagttgtgtatgtttagcagagatggagtttcaccatgttgtccaggctggtcttgaactcctgatctcaagt

SEQ ID NO: 36673 - DNA, 120 bp, synthetic construct
  source 1..120: mol_type = other DNA
gtcatgttggttgtgcttgatatggtttggatctgtgtccccacccaaatctcatgcccaattgtaatctccagtgttggatgtggggctggtaggaggtgattggatcatgggggcggt

SEQ ID NO: 36674 - DNA, 120 bp, synthetic construct
  source 1..120: mol_type = other DNA
gccacgtgaggtatgtgcggccccttcaccttctgccatgattataattttactgaagcctccagagaagccgagcggataccagcatcatgcttcctgtacagcctgcagaactgtgag

SEQ ID NO: 36675 - DNA, 120 bp, synthetic construct; identical to SEQ ID NO: 10626
  source 1..120: mol_type = other DNA

SEQ ID NO: 36676 - DNA, 120 bp, synthetic construct
  source 1..120: mol_type = other DNA
gagagcctgtctcaacaaaaaagtttaagagaaaaatggtaatggttgactattttcctgctgagaagtgggcctgggtgatagcgaaacccagtctcaaaaaaaaaaaaaatttagaag

SEQ ID NO: 36677 - DNA, 120 bp, synthetic construct
  source 1..120: mol_type = other DNA
aaatcctaccaaactcagcagttcctgtcgctgtgttcctaaagatctgtggatgacagtaatgcttgacaacagtgacatatgctgacacgctatactagcagtttgaaaactggccag

SEQ ID NO: 36678 - DNA, 120 bp, synthetic construct
  source 1..120: mol_type = other DNA
cgtggcaaattctggtgccttaattcacatcaacaaggcagtggcaaactgtgacaacctcctactccaggggagaaggccagtgtcacttaagaaggtctttgataatgccatacattt

SEQ ID NO: 36679 - DNA, 120 bp, synthetic construct
  source 1..120: mol_type = other DNA
ttttccgttgcaaattatgatgatgttcttgaggaaaacatgtgcaattgagctgcttttaaaaccctgaaaaattgtagttatttggacctgggtatttggtagacagttttttttcaa

SEQ ID NO: 36680 - DNA, 120 bp, synthetic construct; identical to SEQ ID NO: 10627
  source 1..120: mol_type = other DNA

SEQ ID NO: 36681 - DNA, 120 bp, synthetic construct
  source 1..120: mol_type = other DNA
cgagaccatcctggccaacatagtgaaaccccgtctctactaaaaatacaaaaattagctgggcttggtggcgagtgcctgtaatcccagctgttcgagaggctgaggtaggagaatctc

SEQ ID NO: 36682 - DNA, 120 bp, synthetic construct
  source 1..120: mol_type = other DNA
cagattctaacataatagactctaggtaagtaggctccgaaaagttcaatgatatggtgtcagattacacactgcggctaaccttcaagaaactaccacttgtcctctgggttcatccat

SEQ ID NO: 36683 - DNA, 120 bp, synthetic construct; identical to SEQ ID NO: 10628
  source 1..120: mol_type = other DNA

SEQ ID NO: 36684 - DNA, 120 bp, synthetic construct
  source 1..120: mol_type = other DNA
agcatcacagtgtaccccataattatatacgatttttatttagcagttaaatatttaaaaaaccccaccacttgtcaagaaggctatccacaattatctgaagaggtaaaccaatacact

SEQ ID NO: 36685 - DNA, 120 bp, synthetic construct
  source 1..120: mol_type = other DNA
gaccgggtgctgaagcagatctgagaattccaccgaattcttctaacccagacatgaaaaagctttgcagcaatgtaaaaggagttctttttcacaaagatggatttatgctaatatgta

SEQ ID NO: 36686 - DNA, 120 bp, synthetic construct
  source 1..120: mol_type = other DNA
ttcttttcttgttttgctaatcttctctgtatcatcccagttttagtatatgtgctgtcaaagcaggcacacaatatggtaaatattagtagatggaacccaatatccaaaaaagcccat

SEQ ID NO: 36687 - DNA, 120 bp, synthetic construct
  source 1..120: mol_type = other DNA
cccccaggctcaagtggtccttctcatgagtggctgggactacagatgtgagccaccacacctggctaatttttctgtagtgatggggtttcaccacgttgtccaggctgggcttgaact

SEQ ID NO: 36688 - DNA, 120 bp, synthetic construct; identical to SEQ ID NO: 10629
  source 1..120: mol_type = other DNA

SEQ ID NO: 36689 - DNA, 120 bp, synthetic construct
  source 1..120: mol_type = other DNA
tagcagagcctagtacagctataatccaaatttctactaccttctataaaccaagaggtcctgttccctttatctcaaccacatcattagtagtgttttcagtgtgaaaaaattatcatt

SEQ ID NO: 36690 - DNA, 120 bp, synthetic construct
  source 1..120: mol_type = other DNA
atcgaaaacaggaaaaaatttgtccttatgagtactggataattaacaaaatgtacataatttagttattctcacccaccgatacgacaacctggataacctcaggctactagaatccaa

SEQ ID NO: 36691 - DNA, 120 bp, synthetic construct
  source 1..120: mol_type = other DNA
gtctgaggcgggccgatcacctgaggttaggggtttgagatcagcctggccagcatggtgaaaccaagtctctactagaaatacaaaaattagccaagcatggtgacggatgcctgtaat

SEQ ID NO: 36692 - DNA, 120 bp, synthetic construct; identical to SEQ ID NO: 10630
  source 1..120: mol_type = other DNA

SEQ ID NO: 36693 - DNA, 120 bp, synthetic construct
  source 1..120: mol_type = other DNA
tagatgctggggttttctttatctgtttttggacagacaaacccatccttttgaaatagtcatacagtgttcattggctgatcatagatatgccaaccaggaaagcctttcttccattta

SEQ ID NO: 36694 - DNA, 120 bp, synthetic construct
  source 1..120: mol_type = other DNA
aatcacagcattgctagcttcccctccttaactcatatggctcactgatgttagtcatttctattttttctctatgcctatcaagactacctctcacaaatgcaccttgcccccaaaccc

SEQ ID NO: 36695 - DNA, 120 bp, synthetic construct; identical to SEQ ID NO: 10631
  source 1..120: mol_type = other DNA

SEQ ID NO: 36696 - DNA, 120 bp, synthetic construct
  source 1..120: mol_type = other DNA
tgccccagcttcccaagtagctggggctacaggcatgtgccaccacgcctggctaatttttgtatttttagtagcaacggggttttgccatgttggccaggctggtctcgaaatcctggc

SEQ ID NO: 36697 - DNA, 120 bp, synthetic construct
  source 1..120: mol_type = other DNA
aacctgaggagagggactcaaatgacaagtattactcgggaaatatgtgaacaagtcattatatttttatttttttacttgttatttcttgggtattctttcagaaagaaacagcaatag

SEQ ID NO: 36698 - DNA, 120 bp, synthetic construct
  source 1..120: mol_type = other DNA
cattttcctcttcaaaatagcctattagatatgagctgatcgctcctaagaatcgtgagccctccttaatctctctgctgctggaccctaacacagcccatgcagaatcacctgtgtgtg

SEQ ID NO: 36699 - DNA, 120 bp, synthetic construct; identical to SEQ ID NO: 10632
  source 1..120: mol_type = other DNA

SEQ ID NO: 36700 - DNA, 120 bp, synthetic construct
  source 1..120: mol_type = other DNA
gtagcagcacctacctcatagagcggtaaggaatatgtgagttaattacacagacagcacttataagagtgccagcacttagtaagagctcagtaaattattatcacaccccacatagcc

SEQ ID NO: 36701 - DNA, 120 bp, synthetic construct
  source 1..120: mol_type = other DNA
agcaatacagctgtttgaaaccctggaatttttatcagtaaacaaaaactcagtctaatttttttaaacctgaaacctgagtagcactatattgtgctttattgtagttaagttttaaaa

SEQ ID NO: 36702 - DNA, 120 bp, synthetic construct
  source 1..120: mol_type = other DNA
tttcacgacaataagaaaacccagaatttggccgggcatggtggcttatgcctgtgatcccagcaatttgggaggttgaggttgggcgaatcacctgaggtcaggagttcaagatgagcc

SEQ ID NO: 36703 - DNA, 120 bp, synthetic construct; identical to SEQ ID NO: 10633
  source 1..120: mol_type = other DNA

SEQ ID NO: 36704 - DNA, 120 bp, synthetic construct
  source 1..120: mol_type = other DNA
ttttctcttttgatgttgttgtttcctgatttaagaatgaaaggtaacttgattgtattggatcagtagtttgattcaagtaacatcgtggaattcaaaagtgcaaaggtaaaacctcaa

SEQ ID NO: 36705 - DNA, 120 bp, synthetic construct
  source 1..120: mol_type = other DNA
ccatctctactaaaaatacaaaaattagctgggcatggtggcaggcgcctggaatcccagttactggggaggctgagacaggaggatggcttgaacctgggaggcggaggttgcaatgag

SEQ ID NO: 36706 - DNA, 120 bp, synthetic construct
  source 1..120: mol_type = other DNA
ttctcaaagtcaaattgtgtgaccatagtgtatataaaatgaagacagcaaacatcgcctatggaagaagacataggttgggctcaaagcttgcacctttcctctctcggtagttctggc

SEQ ID NO: 36707 - DNA, 120 bp, synthetic construct; identical to SEQ ID NO: 10634
  source 1..120: mol_type = other DNA

SEQ ID NO: 36708 - DNA, 120 bp, synthetic construct
  source 1..120: mol_type = other DNA
caacaagtgggtttgaatccaagcccctaccttcatagtctagacaccaggcagaagagactaactgctttgggctgtgaggatgagacaaaaaagcagctccatctactttgagaagtc

SEQ ID NO: 36709 - DNA, 120 bp, synthetic construct
  source 1..120: mol_type = other DNA
aaggcgggtggatcacttgaggtcaggagtttgagaccagcctggctaacacagtgaaaccccatctctactaaaaatacaaaaattagctgggcatggtggcgcacgcatgtagtccca

SEQ ID NO: 36710 - DNA, 120 bp, synthetic construct
  source 1..120: mol_type = other DNA
aataaataaataaataaataaataaataaataagaataatagggctgggtgcagtggctcatgcatgtaatcccagcactttgggaggctgaggcgggcggatcatgaggtcaggagttt

SEQ ID NO: 36711 - DNA, 120 bp, synthetic construct; identical to SEQ ID NO: 10635
  source 1..120: mol_type = other DNA

SEQ ID NO: 36712 - DNA, 120 bp, synthetic construct
  source 1..120: mol_type = other DNA
ttatttgccaccaaatgtgcctgatctaattcagtattggggtgcgaacacacgccgaaacagtacaaaaataggcttatcccaagcacattaatgaagaacatgttataagatgatttt

SEQ ID NO: 36713 - DNA, 120 bp, synthetic construct
  source 1..120: mol_type = other DNA
aacgaaaagccagtttctattatttgactggtgcccatttgtattaaaggactaagatggaaaagaggcaaagaatttcctaattactgatgacaatgatctgctgagtcaagtcagaat

SEQ ID NO: 36714 - DNA, 120 bp, synthetic construct
  source 1..120: mol_type = other DNA
gaagattttgctgactttcttgagaagtgaggggatctggtgcctgagcaatcaaccatgattcatagtaacttgctacagtgctgtttgaacagaaataaaatttgacctttttctatg

SEQ ID NO: 36715 - DNA, 120 bp, synthetic construct; identical to SEQ ID NO: 10636
  source 1..120: mol_type = other DNA

SEQ ID NO: 36716 - DNA, 120 bp, synthetic construct
  source 1..120: mol_type = other DNA
tgtgttgaccttgaggcttttcttctcacaccacgcagatatcttaacacaggggttcacacatggtgaccgggcagacagatgcgtgtgaaactaatgtgtagactaaatgcaatatac

SEQ ID NO: 36717 - DNA, 120 bp, synthetic construct
  source 1..120: mol_type = other DNA
gatcacacattcttaagctaagacaaaggctttagtttgaagataatgtctttgattatttcagcatggagggctatagatagcctcttggaggctccgctagaaaaaattcggaatgga

SEQ ID NO: 36718 - DNA, 120 bp, synthetic construct
  source 1..120: mol_type = other DNA
tgggaggactgcttgaggctgggagttcgaggttacagtgagctatgatcatgccactgtactccagcctgggtgacagagtgagaccctgtctccaaaaaaagttatttccacaattca

SEQ ID NO: 36719 - DNA, 120 bp, synthetic construct; identical to SEQ ID NO: 10637
  source 1..120: mol_type = other DNA

SEQ ID NO: 36720 - DNA, 120 bp, synthetic construct
  source 1..120: mol_type = other DNA
tagtgagccattctactgaaattgcacgatttgtatccaaatagcaatacaacctctatccaatggcttttggtatataataaatgctctccaggctatatgtaacattcgttgtttact

SEQ ID NO: 36721 - DNA, 120 bp, synthetic construct
  source 1..120: mol_type = other DNA
aataagacttgaaaagatgacattcctccaacaatgaaaccatgtaaattgaagacagggacctgattatactattaagtgaaaagctaagttgctgaacagtctctagcagggtctaca

SEQ ID NO: 36722 - DNA, 120 bp, synthetic construct
  source 1..120: mol_type = other DNA
tttgtctcaaagaggcgggattccaggaagttttaattttcttttttatgtttttccttttataatcagaggaatgtcatttttaaaaggtttgagttgtggtgtaatacacatagcata

SEQ ID NO: 36723 - DNA, 120 bp, synthetic construct; identical to SEQ ID NO: 10638
  source 1..120: mol_type = other DNA

SEQ ID NO: 36724 - DNA, 120 bp, synthetic construct
  source 1..120: mol_type = other DNA
ggtgcaatcttggctcactgcaacttccgcctcaagcaattctcctgcctcagcctcctgaatagctgggactacaggcacaagccaccgcacccggctaatttttatgtttttggtaga

SEQ ID NO: 36725 - DNA, 120 bp, synthetic construct
  source 1..120: mol_type = other DNA
agggcttttgattcagcacatgaagaggaaatcacgggcagagctgtagaaatcgtattagaatttcatctgtgtagttccttagaaagcttttcattgaaccacctgtttcaatttcca

SEQ ID NO: 36726 - DNA, 120 bp, synthetic construct
  source 1..120: mol_type = other DNA
ctacgatgagcagctgacattcttactcaggacttagaataataatgctttagagtcctgcacgaagcctccaaaagagtggaaaaaatacacaacccttcgaaacaggtttactcaagc

SEQ ID NO: 36727 - DNA, 120 bp, synthetic construct
  source 1..120: mol_type = other DNA
aacttttccaccatttcaatggctactttctcctgagtcattaagggaacactggtattaggttttgtgtcacagttgtaccaaggatacctcgccagctaaagttaatgcttttctaag

SEQ ID NO: 36728 - DNA, 120 bp, synthetic construct; identical to SEQ ID NO: 10639
  source 1..120: mol_type = other DNA

SEQ ID NO: 36729 - DNA, 120 bp, synthetic construct
  source 1..120: mol_type = other DNA
cccaaaggaatgaaagaaaatgtgccccagatggaactgaggtttcatcccagctctacttctccgtccagtgtttttctaatttaatgacactgtcatccttcctttcatgccagaaac

SEQ ID NO: 36730 - DNA, 120 bp, synthetic construct
  source 1..120: mol_type = other DNA
actgggctactgcagcactttactggttttctggtttagtcttttccgcataaattccagcctctagcctgttactagagtaatcattccataaaatgcaagtctgttgctgggcgtggt

SEQ ID NO: 36731 - DNA, 120 bp, synthetic construct
  source 1..120: mol_type = other DNA
atggtggtgtgtgctggtaatcccagctacttaggaggctactcaggatagcttgagcccaggagtttgaggctgcagtgagctatgatcacactccagcatgagtgacagagggagaat

SEQ ID NO: 36732 - DNA, 120 bp, synthetic construct; identical to SEQ ID NO: 10640
  source 1..120: mol_type = other DNA

SEQ ID NO: 36733 - DNA, 120 bp, synthetic construct
  source 1..120: mol_type = other DNA
cactttatgttactccaaatctcctcaatcagcccaaaagcagagtgtgtaattctataacgctctgaaggcaaggagtataatcttcaagtcctaactctgctggattatttaccactt

SEQ ID NO: 36734 - DNA, 120 bp, synthetic construct
  source 1..120: mol_type = other DNA
tcccaagtagctgggactacaggcgtgcaccaccagcccagctaattttttgtatttttaagagagatggggttttgccgtgttgaggctggtctcgaactcctgggctcaagtgatctg

SEQ ID NO: 36735 - DNA, 120 bp, synthetic construct
  source 1..120: mol_type = other DNA
ctgatcctccttaagggcaggacaaataactaattccactgccctctccagtggaatgcactccacgtctttagtgaggcaaagcactactgtttgtcccttgcctttctggggatgaga

SEQ ID NO: 36736 - DNA, 120 bp, synthetic construct; identical to SEQ ID NO: 10641
  source 1..120: mol_type = other DNA

SEQ ID NO: 36737 - DNA, 120 bp, synthetic construct
  source 1..120: mol_type = other DNA
tcacaaaaccaggtggtgggccagacttgacccatgagacaccatgtgccaaacccctaatcaggtatatgagctaagatgctgcgtcaaccttggatcagctgagaatctcggatctct

SEQ ID NO: 36738 - DNA, 120 bp, synthetic construct
  source 1..120: mol_type = other DNA
ttatctcatttgagcctcacagcaaccctgtgagataaatccgatattcccatttaacagaggcccgggtacagtgggatccaaggtgcaggaacttcccattagcacagggacatgccg

SEQ ID NO: 36739 - DNA, 120 bp, synthetic construct
  source 1..120: mol_type = other DNA
ccacccttactttgtcatctcacactcactttgcaaccctctgcaactggcttctgtccctggctttgaaattggtgacagttttatcatgatggtttcttagacaagaaatacacatat

SEQ ID NO: 36740 - DNA, 120 bp, synthetic construct
  source 1..120: mol_type = other DNA
attgccagcccaagttagggaaaaagataatcacggtgcactctgcctcccaatagaggtgctatatgtaggttacctgtgattcactctagtgaacatctcaactctacaacaccaata

SEQ ID NO: 36741 - DNA, 120 bp, synthetic construct; identical to SEQ ID NO: 10642
  source 1..120: mol_type = other DNA

SEQ ID NO: 36742 - DNA, 120 bp, synthetic construct
  source 1..120: mol_type = other DNA
tctcaaagagaggaatgatctcaactgtctctgagtgctcagtgcctaggacagtgccaagcagataggaaatgaccactgaacaagtgagtcccctcatgggtccctggggagacgaca

SEQ ID NO: 36743 - DNA, 120 bp, synthetic construct
  source 1..120: mol_type = other DNA
acgctcccagtcgtgtgtgtctctctctctgccttctttctgttcattgagtcatgattccaacagtgcaggaacataggaagaatgccaattataatatttttttgacagctgggagaa

SEQ ID NO: 36744 - DNA, 120 bp, synthetic construct
  source 1..120: mol_type = other DNA
tgaaatttttccaaactatttttaaagtatctaatctgttgtgagtcacagactatagagctgctagtttaccatttctgggcagacagctttaacatcaagacctgatgaggttgtaag

SEQ ID NO: 36745 - DNA, 120 bp, synthetic construct; identical to SEQ ID NO: 10643
  source 1..120: mol_type = other DNA

SEQ ID NO: 36746 - DNA, 120 bp, synthetic construct
  source 1..120: mol_type = other DNA
catttttaaaaacaacccaaagctcttgagtttattatccatggctcaattcactgagctatgctacctcccctcacaccggatgaaacaagtattagttatctactgatccataacaaa

SEQ ID NO: 36747 - DNA, 120 bp, synthetic construct
  source 1..120: mol_type = other DNA
tttgcagacagagcctttaaagaggtaattaagtgaggccatagggtaggccctagtccaataggacttgtgtccttaaaagaaggagaggagctgccaaggatgaaagcacagtgatgc

SEQ ID NO: 36748 - DNA, 120 bp, synthetic construct; identical to SEQ ID NO: 10644
  source 1..120: mol_type = other DNA

SEQ ID NO: 36749 - DNA, 120 bp, synthetic construct
  source 1..120: mol_type = other DNA
ttcctccctgcctgggcctaatgaaacttcttcattcagtcctaaccaaccatcctgcagccttccctttagtttagttatatattaaatatataataagaagaaataggacagccctta

SEQ ID NO: 36750 - DNA, 120 bp, synthetic construct
  source 1..120: mol_type = other DNA
cccagatcccctttcagaaatgaagggtattttcccagctgttgagaaccctgccaactgacaaccttcaactattagccgggattgcccttggctaaagagagctgccttgcccaaggt

SEQ ID NO: 36751 - DNA, 120 bp, synthetic construct
  source 1..120: mol_type = other DNA
tgggttagctgaggcctttgttgagactgcattgcatcacaacttcaccctctgcccaatcttcctgccttcccttctcccacaggtgtcaatcctcagagcacttcatgataaacatcc

SEQ ID NO: 36752 - DNA, 120 bp, synthetic construct; identical to SEQ ID NO: 10645
  source 1..120: mol_type = other DNA

SEQ ID NO: 36753 - DNA, 120 bp, synthetic construct
  source 1..120: mol_type = other DNA
cctgttctgagcctaggcctcaagggaccttgcatatacttctgtctctcttggaaccctgtcacaggcatttgaacgagctggggctagcctgctggaaaagagaccatgtggaattga

SEQ ID NO: 36754 - DNA, 120 bp, synthetic construct
  source 1..120: mol_type = other DNA
ttgctgacccacagaattgtgagttaagtaaatggtggttatgttaagttttggggaggttattgctatgcagcaatagaaaaactgatgtagtatcagctatggtttggatgtggtttg

SEQ ID NO: 36755 - DNA, 120 bp, synthetic construct
  source 1..120: mol_type = other DNA
tgcaggggtatctcacaggaatggattagttcccttgagagcaggttgttaaaaagtgcctgtcttcctcagtttctctctcttgccaggtgatctctttgcacatgtctgctccctttc

SEQ ID NO: 36756 - DNA, 120 bp, synthetic construct; identical to SEQ ID NO: 10646
  source 1..120: mol_type = other DNA

SEQ ID NO: 36757 - DNA, 120 bp, synthetic construct
  source 1..120: mol_type = other DNA
ttgtcctgggacatcctataactaaagcctgtcttgtgtgagggcacaaaatccagctgtcttgcctcaaggtagggcaaattctggggcaatttacagcaccaatctcctctgctgtca

SEQ ID NO: 36758 - DNA, 120 bp, synthetic construct
  source 1..120: mol_type = other DNA
gaaaccccagctcaggctctgcttccaataaatcaaaagtgaattcctaggagaaaaagatggggagcatgggagtgactgctgtggaaggaaattggaaaagcgctgatcatcctaaca

SEQ ID NO: 36759 - DNA, 120 bp, synthetic construct
  source 1..120: mol_type = other DNA
tcctttgtaagacgggaatgacactttcttttctctccaatctttaatttctccctgcactcactctttccccagtagggtttgagtctattcctctttgtaggaagatgccatcacctc

SEQ ID NO: 36760 - DNA, 120 bp, synthetic construct; identical to SEQ ID NO: 10647
  source 1..120: mol_type = other DNA

SEQ ID NO: 36761 - DNA, 120 bp, synthetic construct
  source 1..120: mol_type = other DNA
catacatttctatgaattatttcacctactattatagcaccaattgccacttatatctgaatgattttcaaattgaagttccagctccagactcaatatccacttgccctttgggcacct

SEQ ID NO: 36762 - DNA, 120 bp, synthetic construct
  source 1..120: mol_type = other DNA
ttgcacacacacacacctgtgcacctgcaggcacacacctgtgcacacacctgcatgcatacatacttgcacacacagttgcatgcacacacacctgcatgcacatacctgcatgcacac

SEQ ID NO: 36763 - DNA, 120 bp, synthetic construct
  source 1..120: mol_type = other DNA
acacctgtgcacatacccgcatgcacactcacctgcatgcacacatacctgcatgcacatacacctgcatgcacacacacttgcatgcacacacacctgtgcacacacctgcatgcatgc

SEQ ID NO: 36764 - DNA, 120 bp, synthetic construct
  source 1..120: mol_type = other DNA
cccctgatttgtctccttccccttcaattaatcaaccactaccttccaaattcctttcaattttaccttcaaaattgccctctacttttaaacacgattccatttctttctaccttcagc

SEQ ID NO: 36765 - DNA, 120 bp, synthetic construct; identical to SEQ ID NO: 10648
  source 1..120: mol_type = other DNA

SEQ ID NO: 36766 - DNA, 120 bp, synthetic construct
  source 1..120: mol_type = other DNA
taatgcacggagctgttaatcaaatggtaaataaaacaaacattggccttttcccattagcagggctcacatatttgtcatcctattacccatgctagcagttttaggcacataagttgc

SEQ ID NO: 36767 - DNA, 120 bp, synthetic construct
  source 1..120: mol_type = other DNA
aagagttcaagaccagcctggccaacatggcaaaaccccgtctctactaaaaatataaaaattagctgggtgtggtggtgcatgcctgtagccccagctacttgagaggccgaggcagga

SEQ ID NO: 36768 - DNA, 120 bp, synthetic construct
  source 1..120: mol_type = other DNA
gctgtcttctaaagactaattttctccattccattccctattttagaataaaattcatgggaacagattttataaaaatgatcttcatggtcgatgtttacagaaagtatctttttatta

SEQ ID NO: 36769 - DNA, 120 bp, synthetic construct; identical to SEQ ID NO: 10649
  source 1..120: mol_type = other DNA

SEQ ID NO: 36770 - DNA, 120 bp, synthetic construct
  source 1..120: mol_type = other DNA
tacctgtgactgcaaccttatttggaagcagagtctttgctgagtaatcaggttaacctgctgccaggatgctgaaagcagaaagggcttgagccaaaccttggccacagaggctgtgaa

SEQ ID NO: 36771 - DNA, 120 bp, synthetic construct
  source 1..120: mol_type = other DNA
tttcaaaatgtaagtggggagccttgggccatcagcctgattttcagaagctcaaatgacataaaaattggagtcttgaccagatcattcctctttttggtttatggtgataaatataca

SEQ ID NO: 36772 - DNA, 120 bp, synthetic construct
  source 1..120: mol_type = other DNA
aggagtctcgctctgtcgcccaggctggagtgcagtggcgccatctcggctcactgcaagctctgcctcctgcgttcaagcgattcccctgcctcagcctcccaagtagctgggattaca

SEQ ID NO: 36773 - DNA, 120 bp, synthetic construct; identical to SEQ ID NO: 10650
  source 1..120: mol_type = other DNA

SEQ ID NO: 36774 - DNA, 120 bp, synthetic construct
  source 1..120: mol_type = other DNA
caccattctacattccgtctctatttggatgactctagggactcctataagtggcattatgcagtatgcgtccttttgtgactggcttatttcactcagcacaaggtcctcagggcccct

SEQ ID NO: 36775 - DNA, 120 bp, synthetic construct
  source 1..120: mol_type = other DNA
tatccattcacgacatttggattgttgttgaaatcccactcgactgcacactcctgctgccagccgcgtgctgggcacagggcacgtgctctgggtcagctgctgagtatgggacacagc

SEQ ID NO: 36776 - DNA, 120 bp, synthetic construct
  source 1..120: mol_type = other DNA
cagttgggttataaggagataagaacaccactttcctgttacactcgcggggaggaagctgacagcaaacccagagcactccctgtattctcttttctttcaactgggaaggctctgggc

SEQ ID NO: 36777 - DNA, 120 bp, synthetic construct; identical to SEQ ID NO: 10651
  source 1..120: mol_type = other DNA

SEQ ID NO: 36778 - DNA, 120 bp, synthetic construct
  source 1..120: mol_type = other DNA
ctttactgagctgttttgccccagtactgttcagttcccaatcagattgtaagctctagaaggcaggaacaataacttgcagtttaacctttggcacctgaaataatactttgctacacc

SEQ ID NO: 36779 - DNA, 120 bp, synthetic construct
  source 1..120: mol_type = other DNA
tgttgaagttctaagtcccagtacctgtgaatgtgacttttggaaatagggtctttgtagatataatcaggttaagatgataggggtgggccctcatccaatgtagcttgtgttcttttt

SEQ ID NO: 36780 - DNA, 120 bp, synthetic construct; identical to SEQ ID NO: 10652
  source 1..120: mol_type = other DNA

SEQ ID NO: 36781 - DNA, 120 bp, synthetic construct
  source 1..120: mol_type = other DNA
attgggatgcaaagaaagacaaagggaagatggctatgtgagaacgggacagagactggagtaacactgtcacaagctgaagctggagaaggcaaggaagaactctccctagaggctttg

SEQ ID NO: 36782 - DNA, 120 bp, synthetic construct
  source 1..120: mol_type = other DNA
atgcgacactaatgtgacaactgaatggagtggttccagccatacaggtagacccagggatgtggctctcacagtgtcgctgggcacgggaataatactgggtacctgcggtaattaaac

SEQ ID NO: 36783 - DNA, 120 bp, synthetic construct
  source 1..120: mol_type = other DNA
gtctgtcgctccatcccactcctctatgaaatgctccccttccaaagagggcatcctaagtctgatgatgtcatcagactcaaaatcttaaacctctagaataacacttctgttttactt

SEQ ID NO: 36784 - DNA, 120 bp, synthetic construct; identical to SEQ ID NO: 10653
  source 1..120: mol_type = other DNA

SEQ ID NO: 36785 - DNA, 120 bp, synthetic construct
  source 1..120: mol_type = other DNA
ttggccaggctggtctcgaactcctggcctcaagtgatctgcctatcttggcctcccaaagtgctgggactacaggtgtgagccaccgcacccagctattttttgtgtatttccatttgc

SEQ ID NO: 36786 - DNA, 120 bp, synthetic construct
  source 1..120: mol_type = other DNA
gctctgccctccctctgccacccggcagccccacccacagaagggcccagacttacggctttggagggagcatagtgtgtcggtgatgccagtggaggcctggtcgggctctggaaggaa

SEQ ID NO: 36787 - DNA, 120 bp, synthetic construct
  source 1..120: mol_type = other DNA
gtgggtgttgacggagaggaggagaggccggaggctgcagaagaaacaccaaggacggtcagaggtccggcttccaggaagggacgtcgggggtggtcagaggtctggtctccaggaagg

SEQ ID NO: 36788 - DNA, 120 bp, synthetic construct; identical to SEQ ID NO: 10654
  source 1..120: mol_type = other DNA

SEQ ID NO: 36789 - DNA, 120 bp, synthetic construct
  source 1..120: mol_type = other DNA
caaatatcatttgatctcctctccttctttccccagcatggcgccaagagcaaacgcagtggtgccttatttattgaggtaaaacatggggaagttcggaaaatgtgcagcagagatgca

SEQ ID NO: 36790 - DNA, 120 bp, synthetic construct
  source 1..120: mol_type = other DNA
tcaccactgtaagttcccagtagcaagacttcactgcgaagataaatacccaaggagacttcagggaaagggtgggactggaatggggtctaaaaagtgaaacagatttagatggtcagg

SEQ ID NO: 36791 - DNA, 120 bp, synthetic construct
  source 1..120: mol_type = other DNA
gaaacaactctatttcttccatagacttatttatgtaatttttaagtggcgagtgtacacctaattcattaccatggtgcttttgaaagcagagctggagatgcagaggctcgtcaagaa

SEQ ID NO: 36792 - DNA, 120 bp, synthetic construct
  source 1..120: mol_type = other DNA
tttaagtggcgagtgtacacctaattcattaccatggtgcttttgaaagcagagctggagatgcagaggctcgtcaagaagaggttaaataaatcatggcacagtgcacaggtaggatgt

SEQ ID NO: 36793 - DNA, 120 bp, synthetic construct; identical to SEQ ID NO: 10655
  source 1..120: mol_type = other DNA

SEQ ID NO: 36794 - DNA, 120 bp, synthetic construct
  source 1..120: mol_type = other DNA
gtcggtggcactttgttataacagcctgaggagactgatgcaatgcatggattgtgttctaagagaagcagaatctggctttgggtctgatatctcaaatctctttttcttttttttttg

SEQ ID NO: 36795 - DNA, 120 bp, synthetic construct
  source 1..120: mol_type = other DNA
tcaagcgattctcctgccttagcatcctgagtagctgggattacaggcacctgccaccaggcctggctaatcttttaaaaatatttttagtagacatggggtttcaccatgttgggcaag

SEQ ID NO: 36796 - DNA, 120 bp, synthetic construct
  source 1..120: mol_type = other DNA
actcaccctctgatatcttacatcttacaggtagaaaaataaaattttaaaataaaatttgaattatgcaagtcaaaccaaagatgtcagtgaacatgccctgttaaattacatgtagcc

SEQ ID NO: 36797 - DNA, 120 bp, synthetic construct; identical to SEQ ID NO: 10656
  source 1..120: mol_type = other DNA

SEQ ID NO: 36798 - DNA, 120 bp, synthetic construct
  source 1..120: mol_type = other DNA
aactcctttaaacataattcggcagacgttttccttttatcaggtcctagagccaccagtcactgtttctggtctggacaaggctgcgtcacctacagagccacaggcctggttcactct

SEQ ID NO: 36799 - DNA, 120 bp, synthetic construct
  source 1..120: mol_type = other DNA
aggacctgtcctcctgtccctcgtgtcaccaaactcataaagccttttcactgtcctgtatgttaccacttaatgacaaactgtttaacgttcaaaccaaacataaaagtatgtaagtcc

SEQ ID NO: 36800 - DNA, 120 bp, synthetic construct
  source 1..120: mol_type = other DNA
ggcaaggaacagaaagaacagtgagaggaccggctcaaggtcagggtgaatctgttcctctctgtggagagtggggcgcatgttttgttttgtgtgtccgggggaggtttaggaagtcac

SEQ ID NO: 36801 - DNA, 120 bp, synthetic construct; identical to SEQ ID NO: 10657
  source 1..120: mol_type = other DNA

SEQ ID NO: 36802 - DNA, 120 bp, synthetic construct
  source 1..120: mol_type = other DNA
gactggccaacatggcaaaaccccatctctactaaaaatacaaatattagctaggcgtagtggcgcgcgcctgtagtcccagccactccagaggctgaggcaggagaatcgcttgaaccc

SEQ ID NO: 36803 - DNA, 120 bp, synthetic construct
  source 1..120: mol_type = other DNA
aaaggtcttgagaagaaaaccctgctttgaggtggggtggggaggaaggagagggaagaggaagagtgggaaggtcctgatgtggtttagcagctcttcagagatgggggtgtgtcagca

SEQ ID NO: 36804 - DNA, 120 bp, synthetic construct
  source 1..120: mol_type = other DNA
cagggggatctgcaggggcagagcaaagaagcctgtgtgctattttgtgtgtagtgtggggcactgcctggggccttagaccccagagtcatatccttcagtggttcctgcagcaacaaa

SEQ ID NO: 36805 - DNA, 120 bp, synthetic construct
  source 1..120: mol_type = other DNA
gggccccttcagtggcacttcccgggggctgtgcccctgcttcctgtaggcatgtgcagggacctgatggggcagagctgaataggatgtggtggggggcgttttaggttcaaaaacctg

SEQ ID NO: 36806 - DNA, 120 bp, synthetic construct; identical to SEQ ID NO: 10658
  source 1..120: mol_type = other DNA

SEQ ID NO: 36807 - DNA, 120 bp, synthetic construct
  source 1..120: mol_type = other DNA
attgcttgagcccaggagttcaaggctgcagtgagctaggactgcaccactgcactccagcctgggtgacacagcaagatcctatctcacaaaacacaacacaacaaaatgagcccaaac

SEQ ID NO: 36808 - DNA, 120 bp, synthetic construct
  source 1..120: mol_type = other DNA
cacaaacgcgcatgttcctggacccagtaattccatttctggggccatagacttatttgtgtaattgctaagtgtcgactgtactaagtgtcggcttattcattaccatggtgcttttaa

SEQ ID NO: 36809 - DNA, 120 bp, synthetic construct; identical to SEQ ID NO: 10659
  source 1..120: mol_type = other DNA

SEQ ID NO: 36810 - DNA, 120 bp, synthetic construct
  source 1..120: mol_type = other DNA
cccctttttgatttttcaaactttctatcatgagaatggattatccattcagaaaattacttcttttcagccactgctttgcttttgagccaagaggctggcgaaggccatatttaagca

SEQ ID NO: 36811 - DNA, 120 bp, synthetic construct
  source 1..120: mol_type = other DNA
gtgccttcctgagctgtcctctcccttgctctttctcttcgagaagtttttccacttccaacattcttcagggatgaagcttagtcactgttgtgcaagggatgttcacagcccatgaaa

SEQ ID NO: 36812 - DNA, 120 bp, synthetic construct
  source 1..120: mol_type = other DNA
cggtgtccgctcctcccatggccctgtccccttgcaggccacccccgtgtgagtactggaatgatcctaacccagtcccaaaggaggtgagagaggtggcgggatgcaggagtgaacctc

SEQ ID NO: 36813 - DNA, 120 bp, synthetic construct
  source 1..120: mol_type = other DNA
ttccacctggccttcctgttccttccagagctggtgactcctgtggggaaaacaggtggcactctggactacagagggggaagggaaacttttagaggaagggacaggtgaaatgctgag

SEQ ID NO: 36814 - DNA, 120 bp, synthetic construct; identical to SEQ ID NO: 10660
  source 1..120: mol_type = other DNA

SEQ ID NO: 36815 - DNA, 120 bp, synthetic construct
  source 1..120: mol_type = other DNA
gagaaagaacatgaagacttaaaattacattttagctgtatgaattactctcccagaagtggggcttcacggggccaacaggaaggagagcttggatgacactgggtgactgcagaggga

SEQ ID NO: 36816 - DNA, 120 bp, synthetic construct
  source 1..120: mol_type = other DNA
tcttccatgccagccaggaagggtagaccaacaaagaagtgacttctactcaggtttatgctattcaatcagtagagaaacaactgtcttatgagtcaggtaaggtgggtagtaagaatg

SEQ ID NO: 36817 - DNA, 120 bp, synthetic construct
  source 1..120: mol_type = other DNA
aggctggggtacaatggtatgatcacggctcactgcagcctcaaactcctgggctcaagtgatcctcccacctcagtctcctgagtagccggaactccaggcaaataccattacaccagc

SEQ ID NO: 36818 - DNA, 120 bp, synthetic construct; identical to SEQ ID NO: 10661
  source 1..120: mol_type = other DNA

SEQ ID NO: 36819 - DNA, 120 bp, synthetic construct
  source 1..120: mol_type = other DNA
taaagtcgagaaccaggaaagcaggggggagctcagggaagaggagagggcctgagggtgggggtgggacggtggctcagaaaccccaggaaagagctgggccccgatcctggaggagga

SEQ ID NO: 36820 - DNA, 120 bp, synthetic construct
  source 1..120: mol_type = other DNA
tgagaagacatctcctcctttttcctgctccttaaggactttgtttaggacgccgccagcctctgcagtgaacaatgcctttgattctcccagggcggcagccaggcccagtgaacagcc

SEQ ID NO: 36821 - DNA, 120 bp, synthetic construct
  source 1..120: mol_type = other DNA
gaggaggaggaggagaacagaggtgccaccaaagggaactgagccctgctggaacggaatagctgtgctgggtggaaacagaggcctggccctcagaagccccaagctctaggtctggtt

SEQ ID NO: 36822 - DNA, 120 bp, synthetic construct; identical to SEQ ID NO: 10662
  source 1..120: mol_type = other DNA

SEQ ID NO: 36823 - DNA, 120 bp, synthetic construct
  source 1..120: mol_type = other DNA
ggtgcccaacgaaagtgccacagccagagagggacaggagtacctgtgctgagtagctgtagcacacagagggatgcaaccagcaggcaggcggagaccctgggcggcgcgagaccctgt

SEQ ID NO: 36824 - DNA, 120 bp, synthetic construct
  source 1..120: mol_type = other DNA
tctggcctggctcctacaccctctccccgcacggcccctattgcccgcaggttttaccttccacccctcattccagagccctaccctccagggccgctggagctgagtgcccagccctct

SEQ ID NO: 36825 - DNA, 120 bp, synthetic construct
  source 1..120: mol_type = other DNA
gtcgctccaggcctgggcggtaatgactcctgaaaccctgcccacacccctgggaaaagccccttcagaaccccagctgaatgtccttgtttcctgcccccaacgatacagtttccagcc

SEQ ID NO: 36826 - DNA, 120 bp, synthetic construct; identical to SEQ ID NO: 10663
  source 1..120: mol_type = other DNA

SEQ ID NO: 36827 - DNA, 120 bp, synthetic construct
  source 1..120: mol_type = other DNA
gctgcagctcacccctggctgactccaccctgcggcccctccacacaggctcagtgtggaggtgagaaatcccagctgagccctctctgacaagttggggtctcctccaggcagtcctgg

SEQ ID NO: 36828 - DNA, 120 bp, synthetic construct
  source 1..120: mol_type = other DNA
agctggtcacccccaagacaagctccaggtgccacacgtcagttcattgaacagcgcctggaccagggtgactttaggtatcagtaccacttaggcccaggagtccacttcctctataac

SEQ ID NO: 36829 - DNA, 120 bp, synthetic construct; identical to SEQ ID NO: 10664
  source 1..120: mol_type = other DNA

SEQ ID NO: 36830 - DNA, 120 bp, synthetic construct
  source 1..120: mol_type = other DNA
catgctcagcttctctttgagaactgctgtggtagacaaatatttcagcttcagcacccctttacactcttgaaaaatagggtgtttaacatataatgagtttatggttgtcatttataa

SEQ ID NO: 36831 - DNA, 120 bp, synthetic construct
  source 1..120: mol_type = other DNA
ttcaagatcagcctgggcaacatagtgagacccccatttctacaaaaaataaaaaattagctgggcatggtggcctgtgcccttggccccagctactcaggaggctgaggagggaggatt

SEQ ID NO: 36832 - DNA, 120 bp, synthetic construct
  source 1..120: mol_type = other DNA
gattcatatgacccacagaaataaaagctccttgggatcctcatttttttaaaagtaacttctcagcaatctatattttttaaaacaaaacaaaaaataagtggcatttttactttttgc

SEQ ID NO: 36833 - DNA, 120 bp, synthetic construct
  source 1..120: mol_type = other DNA
ccactgagtctaacccgacatgctgagtagagcatctgagccacagagacagttaggatgcttctcaggcttcagttctcaaacctggctgggccaaaagtcacctgggagcattgagaa

SEQ ID NO: 36834 - DNA, 120 bp, synthetic construct; identical to SEQ ID NO: 10665
  source 1..120: mol_type = other DNA

SEQ ID NO: 36835 - DNA, 120 bp, synthetic construct
  source 1..120: mol_type = other DNA
accaggcgtttatgcagctgccggccaggccagctctcctgagctctgctgctcctttccagccagctgctttgagaccttgctctgaatgttcctaaaagacaagtttcacacccgcct

SEQ ID NO: 36836 - DNA, 120 bp, synthetic construct
  source 1..120: mol_type = other DNA
atagctgaatggccctggccctagctgagctcactctcaattcatatttcaatctggagtaaggtttcaggctgcagatttcggttctaggctctaagaatctgttttatgatcttttgt

SEQ ID NO: 36837 - DNA, 120 bp, synthetic construct
  source 1..120: mol_type = other DNA
caaggttattctcctaaaaggaatccggaaaatatccagtcttatagggctttgtatacccaataacattctgcacctagttatgaaatagttggctctagcatatgggtatttacatgg

SEQ ID NO: 36838 - DNA, 120 bp, synthetic construct; identical to SEQ ID NO: 10666
  source 1..120: mol_type = other DNA

SEQ ID NO: 36839 - DNA, 120 bp, synthetic construct
  source 1..120: mol_type = other DNA
aatgaaagggaaatgttagcagcctcagtccctctaattatcagtatttgtggaatcacaaaagcaacaggcattgtttggtgctgtggagatgaactctgccgaatgtgatagtctgga

SEQ ID NO: 36840 - DNA, 120 bp, synthetic construct
  source 1..120: mol_type = other DNA
atgggccagcatgagaatcataggtggtaagaatgggcatgaccttggacaaacatctcagaacctcattttcggtggaggaagtgcaggctctgagaggtgaagtgtgtggccgaggat

SEQ ID NO: 36841 - DNA, 120 bp, synthetic construct
  source 1..120: mol_type = other DNA
agaagaccgtttgtatgggcgacaggaaaaagcacacggtcgcaccaggcgaggtgggtgcctcaggtcagaggtgtatctgccttgggctgcctctccgtgtccaccctcctccccaac

SEQ ID NO: 36842 - DNA, 120 bp, synthetic construct; identical to SEQ ID NO: 10667
  source 1..120: mol_type = other DNA

SEQ ID NO: 36843 - DNA, 120 bp, synthetic construct
  source 1..120: mol_type = other DNA
ttaggtcaggactagagttcgagatttcagaaatgtcattctaaccttgatctcttcgagatgcctgtttataacacagcatcgttcatgccaattgtctggcaaagccggtatacacgg

SEQ ID NO: 36844 - DNA, 120 bp, synthetic construct
  source 1..120: mol_type = other DNA
gtccagtggctgcgaggccctggaagcatgcctctttcagggaggcctccatcatcagagcttccgtctgcaacgtccctgccctgtgctggccagggaactccgcggcgggctccccca

SEQ ID NO: 36845 - DNA, 120 bp, synthetic construct; identical to SEQ ID NO: 10668
  source 1..120: mol_type = other DNA

SEQ ID NO: 36846 - DNA, 120 bp, synthetic construct
  source 1..120: mol_type = other DNA
ttttgcaccctgaacctccaaactcagaagtctctgaggagccctgaataggagaaaatgtggctgaaaatgaagtggaaaatcagtgtgataaccaaatcaagatcacgcctcgctggg

SEQ ID NO: 36847 - DNA, 120 bp, synthetic construct
  source 1..120: mol_type = other DNA
aaatctgtaatagtacctggagttttttcctgtgctttctataattcagctctttgagtctgctctgaacccttggtggtagctcactgctcatgaacagatcccctcctggggggctcc

SEQ ID NO: 36848 - DNA, 120 bp, synthetic construct
  source 1..120: mol_type = other DNA
agggagggctttcagtcaccatcccctcctggaagtgtatcccaagccatttccaggtgtacagctctcaggggagacaagaatgcattgttctacctggcacgatggggtgtgggccac

SEQ ID NO: 36849 - DNA, 120 bp, synthetic construct
  source 1..120: mol_type = other DNA
ccggctttccccttcccgccaggtctcccaggaggccaggtggcggctgcagccggtggcagacactcccttcctggggtgctggctgcagccggctgccatgggactccaaccagggct

SEQ ID NO: 36850 - DNA, 120 bp, synthetic construct; identical to SEQ ID NO: 10669
  source 1..120: mol_type = other DNA

SEQ ID NO: 36851 - DNA, 120 bp, synthetic construct
  source 1..120: mol_type = other DNA
aacctagggtttacctctgcccctcgatggcaacaacaattctgggagttcagggccatgataaaaaatgacagcatcacacctgaattgctgctagtgtttttaatagacaggtaacca

SEQ ID NO: 36852 - DNA, 120 bp, synthetic construct
  source 1..120: mol_type = other DNA
ctcagccctctgtttgcatgatctgaggctctggaaagccccctgcccccttccagatacctcatctacttgacaaacttccaagatgccctgcctcccctttctacacattgctcttcc

SEQ ID NO: 36853 - DNA, 120 bp, synthetic construct; identical to SEQ ID NO: 10670
  source 1..120: mol_type = other DNA

SEQ ID NO: 36854 - DNA, 120 bp, synthetic construct
  source 1..120: mol_type = other DNA
tcactggtttctagagtgaatcattcctccttttcatgcacttagcacattccaatgttatcaaatgatagagtgctgggttgtttcctgatgcacctcgggtcttccactaagcgtgaa

SEQ ID NO: 36855 - DNA, 120 bp, synthetic construct
  source 1..120: mol_type = other DNA
tcttaagctctttaaaatacgccgttaagaaaatgaaacaagaaacatgacagagagaaaacacagctatccctctgtgtctgcagggaattgattccagaacccctctcaggcaccaaa

SEQ ID NO: 36856 - DNA, 120 bp, synthetic construct
  source 1..120: mol_type = other DNA
cctgaatatttttgatctgaattggttgaagctgaggaggtgaaacctgcagatatggagggctgaccgtattgcaaaacacatatatgataaaggacttgtagcagagtatataaagaa

SEQ ID NO: 36857 - DNA, 120 bp, synthetic construct; identical to SEQ ID NO: 10671
  source 1..120: mol_type = other DNA

SEQ ID NO: 36858 - DNA, 120 bp, synthetic construct
  source 1..120: mol_type = other DNA
gccactcttagaagatatgaaaccttgttcacacaaaatcctgaatgcaatgttttcagtggctctattcatagttgccccaaactggagacaattcaaacatccttcaactggtgaatt

SEQ ID NO: 36859 - DNA, 120 bp, synthetic construct
  source 1..120: mol_type = other DNA
tagtgggaccccatctctacaaaaaattaaaaaagttggctgggtgcagtggcacactcctgttgtcccggctgcttgggaggctgaggtgtgaggattacttaagtctgggagttcaag

SEQ ID NO: 36860 - DNA, 120 bp, synthetic construct
  source 1..120: mol_type = other DNA
tacaatagaacactactcagtaataaaaaggaaagaactcttaatatatgcaacacaatgaattaatctcaaatgcatttttctaagtgaaggaagccaggtccaaatatatacatacta

SEQ ID NO: 36861 - DNA, 120 bp, synthetic construct; identical to SEQ ID NO: 10672
  source 1..120: mol_type = other DNA

SEQ ID NO: 36862 - DNA, 120 bp, synthetic construct
  source 1..120: mol_type = other DNA
cggatggagacgcctcagcatgatggtggaaaccttgcctccgccttggggcccaagacctgctcacataaaaatagcagctgaattccctctccctctggcccaaaggtcatctcctga

SEQ ID NO: 36863 - DNA, 120 bp, synthetic construct
  source 1..120: mol_type = other DNA
agctgtgctcacacagcctgtaccctgccttcccctgctgttgggagaaggggagggggcaggagagagctgaaaggttaggctgggagcagaaagggagatcccactccttcacccgcc

SEQ ID NO: 36864 - DNA, 120 bp, synthetic construct
  source 1..120: mol_type = other DNA
acaggtccgaacatgcagaaagcctgatgatgtcctgctgcccagggcaggcctgagacccgcagcacaggaggcccaaggcggccataaggagacccaaggccctccgaggggcgcacg

SEQ ID NO: 36865 - DNA, 120 bp, synthetic construct; identical to SEQ ID NO: 10673
  source 1..120: mol_type = other DNA

SEQ ID NO: 36866 - DNA, 120 bp, synthetic construct
  source 1..120: mol_type = other DNA
aaatatttacaaatatccaagaaatatgttagtaaaactttctgaaggctgtggtctgaatgtgtgggtccctgccaagtccttatgttgaattctacccgcaaggtgatggtgttagga

SEQ ID NO: 36867 - DNA, 120 bp, synthetic construct
  source 1..120: mol_type = other DNA
agcagacacagaatctaccagcaccttggtcttggactctagcctccagaactgtgagaaagaaatttctgttctttttttgttttgagacggagtctcgcactgttgcctaggctggaa

SEQ ID NO: 36868 - DNA, 120 bp, synthetic construct
  source 1..120: mol_type = other DNA
ttctatttttagtagagacagggttttaccatgttggccaggctggtcttgaactcccgacctcgagtgatctgcccgcctcagcctcccaaagtattgggattacaggcgtgagccaca

SEQ ID NO: 36869 - DNA, 120 bp, synthetic construct; identical to SEQ ID NO: 10674
  source 1..120: mol_type = other DNA

SEQ ID NO: 36870 - DNA, 120 bp, synthetic construct
  source 1..120: mol_type = other DNA
taactcatttctccccacctgcaacccctggcaaccatcttctacttcctgtatctgggaatctggccactctagggacctcatatgagtaaaatctggcagtgtctgtcccttcatgac

SEQ ID NO: 36871 - DNA, 120 bp, synthetic construct
  source 1..120: mol_type = other DNA
tttctctcacaattccctcccggctttgccatcgctttgctattgctctgtgtctcccaagagatcgctgcccctcctaggtctgcagcttccctttcctgtggtgacagcaactatggt

SEQ ID NO: 36872 - DNA, 120 bp, synthetic construct
  source 1..120: mol_type = other DNA
gggtcagaatctgtcagcctgtgcccatgcctgtcccttccttctgggccacggtcacaggacttgggtcagcaggcccgggcagggagggagcccgggacaacgccagacattcctgcc

SEQ ID NO: 36873 - DNA, 120 bp, synthetic construct; identical to SEQ ID NO: 10675
  source 1..120: mol_type = other DNA

SEQ ID NO: 36874 - DNA, 120 bp, synthetic construct
  source 1..120: mol_type = other DNA
tccttctgaataaagctacttgataaacacccatccacttcctgcagggggagaaggccaaatgccctcaggtgcattcttttgagagagtccagagagcatgagcccagccagaagtag

SEQ ID NO: 36875 - DNA, 120 bp, synthetic construct
  source 1..120: mol_type = other DNA
atccctgccctctttcaactgattttgcaaggacttcaggaacacattctagcacaactaactagagctgctcacttatgagcagagcctcagttcagccatcagtgaaatggacaaatc

SEQ ID NO: 36876 - DNA, 120 bp, synthetic construct
  source 1..120: mol_type = other DNA
gccttgttcttagctgtccctggcctacagacctttgaactaatcactcttggtggtctgaattctctgtagacaggtggaaaccgtaggcactgtgtcctccagacctcagcacagcaa

SEQ ID NO: 36877 - DNA, 120 bp, synthetic construct; identical to SEQ ID NO: 10676
  source 1..120: mol_type = other DNA

SEQ ID NO: 36878 - DNA, 120 bp, synthetic construct
  source 1..120: mol_type = other DNA
cagccatcgtgcagccgcctgggcagctcccagctccaatggcaactggtagcatcaggagagtatggggttccccagtggggctccggggcagcgcaacgccacaggaccttgtggtgg

SEQ ID NO: 36879 - DNA, 120 bp, synthetic construct
  source 1..120: mol_type = other DNA
atctctcctttgactgagaacaaggacctctttccttgcctaaatagcctacggctaagaggaaatcacccccagttacgagaggtttcaggaagccccccgcaaccttccacccaccat

SEQ ID NO: 36880 - DNA, 120 bp, synthetic construct
  source 1..120: mol_type = other DNA
cacaccagggaggagaggcctgaaaaggggcagctgaagggaaaaagagctggagagtggggagcagcccggagtgtctcctctggctgggaggggccctgtggagctggcagcagcagc

SEQ ID NO: 36881 - DNA, 120 bp, synthetic construct
  source 1..120: mol_type = other DNA
gagcgcaggcccagggagaggcaggcaggtggccagtctgagtcagcgggatggaggcgcctggcatggggaaggggtgtgtagcctgggaggggccttgggcgggagcatccccgggga

SEQ ID NO: 36882 - DNA, 120 bp, synthetic construct; identical to SEQ ID NO: 10677
  source 1..120: mol_type = other DNA

SEQ ID NO: 36883 - DNA, 120 bp, synthetic construct
  source 1..120: mol_type = other DNA
cccgccgctggaagtgagggtcacaggaaaggggaagccccggagcccctggtccttggcttggagagctgggtacacaatgatgcccaaccctcataaggtccacacatgacagggtgc

SEQ ID NO: 36884 - DNA, 120 bp, synthetic construct
  source 1..120: mol_type = other DNA
gtggacgcagggaggaggcaggtgccgggagcagacatcagagcccagaaaatgccacagaaatcgagcctctctccaccctgccttccaacctcatccacccagtggctcaaggctgcc

SEQ ID NO: 36885 - DNA, 120 bp, synthetic construct; identical to SEQ ID NO: 10678
  source 1..120: mol_type = other DNA

SEQ ID NO: 36886 - DNA, 120 bp, synthetic construct
  source 1..120: mol_type = other DNA
cccacagggccacctgggctaatgcccctgggggcacattcagccagcacttcaccaggtcccttgtgaggcctcagctgtccccactgtccctctgagcctcctcctggtttttccctt

SEQ ID NO: 36887 - DNA, 120 bp, synthetic construct
  source 1..120: mol_type = other DNA
ggtgggagaagtctgggtcatgggggcgaatgtcgtggtgctgtcctcgtggtagtgaatgagttctcgctctatgagttcacacgaggcctggttgtttgaaggagacttgcacctcct

SEQ ID NO: 36888 - DNA, 120 bp, synthetic construct
  source 1..120: mol_type = other DNA
tacagaattgtgaactgaaatcaacctcctttcttcataatttgcccaaactcagatatttatagtgacacaaatggactaacacaatctcccaaaccaactccctgacccttgtcacca

SEQ ID NO: 36889 - DNA, 120 bp, synthetic construct
  source 1..120: mol_type = other DNA
ccctgagatgccacgtggaaccctaggaaaacccacctctgcaagaaggtcctgaaatcaggtaacttctcgctacagtgtaaatgactgataggctcaaacgggccgtgggagggtttc

SEQ ID NO: 36890 - DNA, 120 bp, synthetic construct; identical to SEQ ID NO: 10679
  source 1..120: mol_type = other DNA

SEQ ID NO: 36891 - DNA, 120 bp, synthetic construct
  source 1..120: mol_type = other DNA
ggcgctaaggtggccctggagccgtgaattcactgggattgagatcatctcggcgactttatcatgaaggccagcacaggaggcccctccttcctgttggagatgtttagttttatgatt

SEQ ID NO: 36892 - DNA, 120 bp, synthetic construct
  source 1..120: mol_type = other DNA
aagaaatggcaaagggcctttcagactacttttgctttgaaataaatcagtgaatcaatgagatgagaagtattcactgggcaccggctgtacagggaagaactggaagtgggatatgca

SEQ ID NO: 36893 - DNA, 120 bp, synthetic construct
  source 1..120: mol_type = other DNA
gcaggacgaggaggctgggacacagcaaggtgctcaggccctcagaggaggcagtggggaggttcttgatataggctggtctttaagaaggactgggactaagataaactggggtacata

SEQ ID NO: 36894 - DNA, 120 bp, synthetic construct; identical to SEQ ID NO: 10680
  source 1..120: mol_type = other DNA

SEQ ID NO: 36895 - DNA, 120 bp, synthetic construct
  source 1..120: mol_type = other DNA
gggtgctggggacagtgaacacgacagagaagagcccagccctcgtggagctcaggtttgtagactctggctccttggagtatggtctgaggaccagcagcctgtttgttagacacgcag

SEQ ID NO: 36896 - DNA, 120 bp, synthetic construct
  source 1..120: mol_type = other DNA
ggcaagaatcaggaccccctttttaacgcaggcttgtgaatctgtggatttctgagccccaccctcagagattcagatttgggaactgggatggaggtccagaaattggcttttctgatg

SEQ ID NO: 36897 - DNA, 120 bp, synthetic construct
  source 1..120: mol_type = other DNA
ctggagaagctgacggtagcttccaggcttccccttatgtggccaggccatagttcccttaacctcccacacccatcccctccacacggggggagcctggccttgtgccgaaccccaaat

SEQ ID NO: 36898 - DNA, 120 bp, synthetic construct; identical to SEQ ID NO: 10681
  source 1..120: mol_type = other DNA

SEQ ID NO: 36899 - DNA, 120 bp, synthetic construct
  source 1..120: mol_type = other DNA
actaaattagccaccttctccctccagtctctacctgtgctgtccaagaggcagccactggcctcacatagctatttctttataaaattcaagttcagctccttagttgctgttatgggt

SEQ ID NO: 36900 - DNA, 120 bp, synthetic construct
  source 1..120: mol_type = other DNA
tcctcatccagtggccggtgtctttataaggaggaggaaacgtggacacagatacacagggagatggaagctgagattggagcggtgcatctttttaagccaaagaataaggattgccgg

SEQ ID NO: 36901 - DNA, 120 bp, synthetic construct
  source 1..120: mol_type = other DNA
atacaaaaaattagccggcctggtggtgggcacctgtagtccccagctactcgggaggctgaggcaggagaatggcgtgaacccgtgaagcgggggttgcagtgagccgagattgcgcca

SEQ ID NO: 36902 - DNA, 120 bp, synthetic construct; identical to SEQ ID NO: 10682
  source 1..120: mol_type = other DNA

SEQ ID NO: 36903 - DNA, 120 bp, synthetic construct
  source 1..120: mol_type = other DNA
cgattggagggtggtgttctgcagaatgctttctaagaaagaagcaaaggttaaaagtttaattttcagaaaaagttgctggggtagcccagttgcatcttccacatcctttacatccct

SEQ ID NO: 36904 - DNA, 120 bp, synthetic construct
  source 1..120: mol_type = other DNA
ccatgctgacagcagacggatggggatgcaggtccacactgatcctgagagtcccacccacagagggagcccccacggcagtcttgccaggtccctgcccacccgcttgccttccttccc

SEQ ID NO: 36905 - DNA, 120 bp, synthetic construct; identical to SEQ ID NO: 10683
  source 1..120: mol_type = other DNA

SEQ ID NO: 36906 - DNA, 120 bp, synthetic construct
  source 1..120: mol_type = other DNA
ccagaagctgggggtgatacctctcgccttccagttccgagaactggagcaagtagagtgaatgtcaaactgccaagggcacgattttgcctctaagcatccgtccatgtactactcacc

SEQ ID NO: 36907 - DNA, 120 bp, synthetic construct
  source 1..120: mol_type = other DNA
tgctgctcaaatagctcatctttcttcaaggccatgatggcttctctgactcactcatcagcgcgcgcgaagcaaagaaggaaagaggaaaagcgcaccttctccgtcacagtgaatggc

SEQ ID NO: 36908 - DNA, 120 bp, synthetic construct
  source 1..120: mol_type = other DNA
accctgcaaaggactgcgggtgctctaagaaaggaaatctgttttcagagctcctgcagctgcttttcaatgtgtcttcagtttattttaccaatgagcaaataaactggtgtttcccct

SEQ ID NO: 36909 - DNA, 120 bp, synthetic construct
  source 1..120: mol_type = other DNA
tgtcttactgatgagaacaactcaaggaacttctcccacatcatctggccacttgggctttaaaaaatgttttatggagcataatatagaaaagtgcacacattgagagtgtacagcttg

SEQ ID NO: 36910 - DNA, 120 bp, synthetic construct; identical to SEQ ID NO: 10684
  source 1..120: mol_type = other DNA

SEQ ID NO: 36911 - DNA, 120 bp, synthetic construct
  source 1..120: mol_type = other DNA
aaacacacacacacacacacacacacacacacacacacacacacacacacacacacacacacacacaaattagctaggcatggtggcaggtgcctgtaatcccagctactcaggcggctg

SEQ ID NO: 36912 - DNA, 120 bp, synthetic construct
  source 1..120: mol_type = other DNA
agtaggtgtatatatttatggggtacctgagctgttttgaaagaggcatgcaatgtgaaataagctggtcacggggaatgggatatccatcctctcaagcatttatcctttgagttacaa

SEQ ID NO: 36913 - DNA, 120 bp, synthetic construct
  source 1..120: mol_type = other DNA
ctagcatcatatgttttgcctggctgtgtattttgtgacccagagctgcacattttgtattcttttgcttcaggcttctcttgctcagtgttggttgtgagatgcagccacactgctgca

SEQ ID NO: 36914 - DNA, 120 bp, synthetic construct; identical to SEQ ID NO: 10685
  source 1..120: mol_type = other DNA

SEQ ID NO: 36915 - DNA, 120 bp, synthetic construct
  source 1..120: mol_type = other DNA
gaaagagagtgagtattgccaagggaggcacagggagagcgaggctgctcagcggtgcggcaggttttgaacccaagtgtaaccactacaaagcctatgatttagtggacagaccacgtc

SEQ ID NO: 36916 - DNA, 120 bp, synthetic construct
  source 1..120: mol_type = other DNA
ctgaaattaccagccaaatgctgaacacatttttgacgattagcaagttaatgagaatttttcaaccttctgataaaacgtaaatgcaattgagttatacttccagctgctctgaacaga

SEQ ID NO: 36917 - DNA, 120 bp, synthetic construct; identical to SEQ ID NO: 10686
  source 1..120: mol_type = other DNA

SEQ ID NO: 36918 - DNA, 120 bp, synthetic construct
  source 1..120: mol_type = other DNA
tgtgacagacactccttagggagacagatagggggagggctacgtcttttcagagagaaagagacgtgagaggtaagcacagttttcccaaaggcccataaagaaagcaattctatttgt

SEQ ID NO: 36919 - DNA, 120 bp, synthetic construct
  source 1..120: mol_type = other DNA
caagagtgttgactcctccttacactgccctctgcaggttggtggcacttccttgtagaaatctcataagtggcccttcttagccgatctcatctcacccgctgcgttttatttgacatt

SEQ ID NO: 36920 - DNA, 120 bp, synthetic construct
  source 1..120: mol_type = other DNA
tcatcagggttaagatgaaacgacaggtatgtgaaaccatgttgtaccctgcaaagcatgttgaaaatgcttcccggagtaaaaggttaggtaacacaacttcagtgtgactcagcacag

SEQ ID NO: 36921 - DNA, 120 bp, synthetic construct; identical to SEQ ID NO: 10687
  source 1..120: mol_type = other DNA

SEQ ID NO: 36922 - DNA, 120 bp, synthetic construct
  source 1..120: mol_type = other DNA
tccaagacatccaactcatctcccagactgtgaaactagggtcccaaaagggtcaggactatctccccacctgggacagtgccttgctgtaaagattaagtcccaggaagacaccgagat

SEQ ID NO: 36923 - DNA, 120 bp, synthetic construct
  source 1..120: mol_type = other DNA
ctgaaatcttctgactttcttccaaggaatgtattcaaaggaaagatgcaaacccattttggctgtctcccagactaggcgttagctgtggcagtaacagcagcttcagcaaacgctcaa

SEQ ID NO: 36924 - DNA, 120 bp, synthetic construct
  source 1..120: mol_type = other DNA
tagatggagtagggcactcaaatacaccctccagaggcgtctaccatgagggaagagggtgcctctggcccaacccaacgtcagcctcaaatgttcggacctgcctgcagtcatgcagag

SEQ ID NO: 36925 - DNA, 120 bp, synthetic construct
  source 1..120: mol_type = other DNA
cagaggacaagtccaagcacctggatagcaactggaccatgtcatgaaacccagtcctcctccctccgacgctgcccaaacttgagctgccgttgtccaggctagacggcatcctggcag

SEQ ID NO: 36926 - DNA, 120 bp, synthetic construct; identical to SEQ ID NO: 10688
  source 1..120: mol_type = other DNA

SEQ ID NO: 36927 - DNA, 120 bp, synthetic construct
  source 1..120: mol_type = other DNA
tgatgtcaccacctcatctccagaaggagtcctgagggagaactgggtcctcaccactgctgcagtggcaaacaaaggacacaaaaataattgagtggctggtcaagaaccaagttaaac

SEQ ID NO: 36928 - DNA, 120 bp, synthetic construct
  source 1..120: mol_type = other DNA
ccggccccaaggcaggaaagcccaatagcgaacatggtggacatctacccagagaactctcggcccaacccagacggggcaggggaggacgcacagagaaaacatgctgactgtccacct

SEQ ID NO: 36929 - DNA, 120 bp, synthetic construct; identical to SEQ ID NO: 10689
  source 1..120: mol_type = other DNA

SEQ ID NO: 36930 - DNA, 120 bp, synthetic construct
  source 1..120: mol_type = other DNA
agccatcgaagagaatagaagcaacaaaaaataaaaatagtaaatgtaccagtatcttctatgcagcgtaaagatggttttcactctacagccttctctgtttagcaaaggaatgcattt

SEQ ID NO: 36931 - DNA, 120 bp, synthetic construct
  source 1..120: mol_type = other DNA
tcctgtcgtaccccgtgttagccatgtaatgtgggcagtgaccagaggggatgacaaaggtaaaatgtccagcaattcacagggaacttgagcacagcaaagtcactgggtaagtgcagt

SEQ ID NO: 36932 - DNA, 120 bp, synthetic construct
  source 1..120: mol_type = other DNA
cccatggacagagctgaaaggaagccaccagggcacgccactgctctcgtcagagcccagcagaccagctacctagttctgtgagaataccagaagcagaggggccggaaaccatgacac

SEQ ID NO: 36933 - DNA, 120 bp, synthetic construct
  source 1..120: mol_type = other DNA
tgatattgtgacaatgaacaatgtgtgaactgtatgacattgagtgacactgtgacaccgatgtatgaactgaatgacattgtgtgacacagtgttgtgacactgacattgtgtgaaatc

SEQ ID NO: 36934 - DNA, 120 bp, synthetic construct; identical to SEQ ID NO: 10690
  source 1..120: mol_type = other DNA

SEQ ID NO: 36935 - DNA, 120 bp, synthetic construct
  source 1..120: mol_type = other DNA
tgacattctgtaacattgagtgtgacagtgacatgtgatactgaatgacgagtgacactgacacatgtgactgtcagtgacatgatatatgtgacactgaatgacacatgtgacattgtg

SEQ ID NO: 36936 - DNA, 120 bp, synthetic construct
  source 1..120: mol_type = other DNA
taacattgacagtgatgtgtgatgctgtgagtgatgtgtgacattgagtgacagtgacgagtgacgtgagactgacattgagtgatgtgacagtgacagtgacatgtgatattgtgacac

SEQ ID NO: 36937 - DNA, 120 bp, synthetic construct; identical to SEQ ID NO: 10691
  source 1..120: mol_type = other DNA

SEQ ID NO: 36938 - DNA, 120 bp, synthetic construct
  source 1..120: mol_type = other DNA
agtccgggactttctgccacccgtgccccgcccagcctgtctctatctcagtgcgtggcacccctgtcccccagctgccgaggcttcgctctcgccccccgccctgaggcagcacaccaa

SEQ ID NO: 36939 - DNA, 120 bp, synthetic construct
  source 1..120: mol_type = other DNA
ctgcggtgaccccatcacacttagaggaagactcaaggggcagccccttcagggcccgtgcatgtgctgttctcccctccccgggagccctgccctctccctgctcttgcatctctccca

SEQ ID NO: 36940 - DNA, 120 bp, synthetic construct
  source 1..120: mol_type = other DNA
cgcccagatacacacatggagatgtcatgacatctaacacactctgcttgcccctacaagcaaataggctccacgaagccagggactttgttctctgtacctctgtgtcagcagagtcta

SEQ ID NO: 36941 - DNA, 120 bp, synthetic construct; identical to SEQ ID NO: 10692
  source 1..120: mol_type = other DNA

SEQ ID NO: 36942 - DNA, 120 bp, synthetic construct
  source 1..120: mol_type = other DNA
tagaggatcaacagtgctaggcttaaagtgctaagagtactaggctgagagtatgaagagtgctaggctgagagtactgagtgctaggctgagagtactgagtgctaggtttagagtact

SEQ ID NO: 36943 - DNA, 120 bp, synthetic construct
  source 1..120: mol_type = other DNA
gctaagcttagagcactaacagtgctaggcttagtagtaacagtaataggcatcacagtaccagtgatgactaagcactttagtgtatgcacttcagaaaatagtcaaagagttaatatt

SEQ ID NO: 36944 - DNA, 120 bp, synthetic construct
  source 1..120: mol_type = other DNA
aagcaacctgtagatatttatcaaatgtgttgaaggaacgaggaagagaacaggctctccatcacagaagtgtttaaactacttgttagggttactctcggatatgcaggttcctgagag

SEQ ID NO: 36945 - DNA, 120 bp, synthetic construct; identical to SEQ ID NO: 10693
  source 1..120: mol_type = other DNA

SEQ ID NO: 36946 - DNA, 120 bp, synthetic construct
  source 1..120: mol_type = other DNA
tggcccccaccctcacgtgccctcctggcacccagcctccgcccgaccctctgagagctctgaggagtgtgaacaatgggacgggctcaggctcactcacccgggaaggacgctctgctg

SEQ ID NO: 36947 - DNA, 120 bp, synthetic construct
  source 1..120: mol_type = other DNA
tctacactcaggacccacgagactgctaatggtaaccacagggacagccctgcaggggccttgctctggcccactgtgaaagggaaagtccccttcctccactgatgtaacaaaacaaat

SEQ ID NO: 36948 - DNA, 120 bp, synthetic construct
  source 1..120: mol_type = other DNA
cacaatcaggctcctgttgccaaaaaagggagtgcatgcagagtaagcaaaatgagtgtgccccataaccacattcagtcacccggggccacgctgtgctgagggagggtgtggaacaca

SEQ ID NO: 36949 - DNA, 120 bp, synthetic construct
  source 1..120: mol_type = other DNA
cgttttccatcactcattttgggtgcaggatattttcagcactttcccagcatgcaaagcaaagacaggattgtcatggagagccctgtgtgcttggaacgtgccaagagcagaggggcg

SEQ ID NO: 36950 - DNA, 120 bp, synthetic construct; identical to SEQ ID NO: 10694
  source 1..120: mol_type = other DNA

SEQ ID NO: 36951 - DNA, 120 bp, synthetic construct
  source 1..120: mol_type = other DNA
cccggcttgcaagccaggctgtgaatcagcggtttttgaaaaggatatggtaccacagctcacacatgtatgtaatgcagtattttctttttttacttttttagtatggaaaaatttaaa

SEQ ID NO: 36952 - DNA, 120 bp, synthetic construct
  source 1..120: mol_type = other DNA
gtgcgaacacagctcactacaacctcaggaggctcaagtgaccctcctgcctcagcttcctgagtagctgggattacaggtgcaggccaccacacccagttaatttttaaatgtttcata

SEQ ID NO: 36953 - DNA, 120 bp, synthetic construct; identical to SEQ ID NO: 10695
  source 1..120: mol_type = other DNA

SEQ ID NO: 36954 - DNA, 120 bp, synthetic construct
  source 1..120: mol_type = other DNA
tgatctccattggagtacgggctttacggggttgtcatggggaataaacaagatctcacaagaagagcacctagcacagagtcagcgctcattaaacatcctatgcagttactcaccggc

SEQ ID NO: 36955 - DNA, 120 bp, synthetic construct
  source 1..120: mol_type = other DNA
gtcctcccatcccagccctgccatcctcccacacgcacgctgccgtcctcccatccgcgccccgccgtgcctaggtggagaggcggcagggcttcccggagagccgtcctcccatccgcg

SEQ ID NO: 36956 - DNA, 120 bp, synthetic construct
  source 1..120: mol_type = other DNA
ctggtggccttgcccttcgtgtatctgttcagggccattggtgaacagagaaaaaaactactctagtaaaaagcaagtttcctttcattataaagaaaagtgaaataaattgttaaacat

SEQ ID NO: 36957 - DNA, 120 bp, synthetic construct
  source 1..120: mol_type = other DNA
acatggcgaaacctcatctctactaaaaatacaaaaatcagccaggtgtgatggcacacacctgtaatcccagctactcgggaggctgaggcaggagaatcgcttgaacccaggaggtgg

SEQ ID NO: 36958 - DNA, 120 bp, synthetic construct; identical to SEQ ID NO: 10696
  source 1..120: mol_type = other DNA

SEQ ID NO: 36959 - DNA, 120 bp, synthetic construct
  source 1..120: mol_type = other DNA
aacctcaggtgagccacccacttcagcctcccaaagtgctgggattaccggcatgagccactgcacctggcctaaaagcaaaaaaaaaaaaaaaaaaaaaaaaaattattattatttttt

SEQ ID NO: 36960 - DNA, 120 bp, synthetic construct
  source 1..120: mol_type = other DNA
ctcctgtctcagcaattctcctgtctcagcctcccaagttgctgggactacaggcacacactaccatgcccagctaatttttttgtatttttagtagagacggggtttcaccatattggt

SEQ ID NO: 36961 - DNA, 120 bp, synthetic construct; identical to SEQ ID NO: 10697
  source 1..120: mol_type = other DNA

SEQ ID NO: 36962 - DNA, 120 bp, synthetic construct
  source 1..120: mol_type = other DNA
cggggcaaggagccttggtgcgggactccactctcctcgctcacagggcggcggtcccatctcacggcatcttaggcttccaggaaggattttcgagaggcacttttatatatttataga

SEQ ID NO: 36963 - DNA, 120 bp, synthetic construct
  source 1..120: mol_type = other DNA
agggcttcagtacgctcttttctctttgataagtgctggagatttgcctaatacaagtttaagaagtttaaacatttacaactatacacaaatcaggaagttcacaggctgatgtcagcc

SEQ ID NO: 36964 - DNA, 120 bp, synthetic construct
  source 1..120: mol_type = other DNA
aatggatagagacctccatcgggtgaaaatgctttgtgttcaagccccctttgtgaccctgggcacctgttagagaagcaggggctgggcaggggtccgtatgtggactcccaacagagc

SEQ ID NO: 36965 - DNA, 120 bp, synthetic construct; identical to SEQ ID NO: 10698
  source 1..120: mol_type = other DNA

SEQ ID NO: 36966 - DNA, 120 bp, synthetic construct
  source 1..120: mol_type = other DNA
acgcagctgctccagcccccaagcccgcgtggagcagagatgggtacacaccccgcaccttcagcttccagagcgttttagggaaatgagtgttggcaggaaggggagcagtggcgactt

SEQ ID NO: 36967 - DNA, 120 bp, synthetic construct
  source 1..120: mol_type = other DNA
cgagaccagcctggccaacatggcaaaaccctgtctctactaaaagtataaaaattagtcgagttgggtgacgcatgcctgtaatcccagctactcggaaggttgaggcaggagaattgc

SEQ ID NO: 36968 - DNA, 120 bp, synthetic construct
  source 1..120: mol_type = other DNA
cttcataaagctgtaaaatcgcataaaaagagggtgcaatcagtcattgacgagagttacccaagagactgtaattacatggttaaagaatttggaaacacctagaactccactcaaggt

SEQ ID NO: 36969 - DNA, 120 bp, synthetic construct
  source 1..120: mol_type = other DNA
ttgaatttcatatgcaggaactttctggagaaacgccaggtgaagagaatggcagaagggtggtgtcccaaggaaagggcagaaaacaggtggctccagatgccttttaagagaagggct

SEQ ID NO: 36970 - DNA, 120 bp, synthetic construct; identical to SEQ ID NO: 10699
  source 1..120: mol_type = other DNA

SEQ ID NO: 36971 - DNA, 120 bp, synthetic construct
  source 1..120: mol_type = other DNA
aggtgcttgtcattctttctgcccacgcagcatctttttacacctcctctatgcctgaccttgggagtggggggaaggggctctgatgtgagggtcgtcctgggccagactcagcttctg

SEQ ID NO: 36972 - DNA, 120 bp, synthetic construct
  source 1..120: mol_type = other DNA
ttcttacggttctgggggctggaaagcccaaggtcacggtgccagccctgttggtttctggtgaggaccctcttcctggcttgcagacagccgccttcccatggtggtgggtggaggggg

SEQ ID NO: 36973 - DNA, 120 bp, synthetic construct
  source 1..120: mol_type = other DNA
gggtcagggcttcaacgtatgaattcgggggacacgatctggtccacagcacggcacgagtcctccagctgcatgcaggtcatggtggctgtgcccagtgccacgtgggcctccgtgtcc

SEQ ID NO: 36974 - DNA, 120 bp, synthetic construct; identical to SEQ ID NO: 10700
  source 1..120: mol_type = other DNA

SEQ ID NO: 36975 - DNA, 120 bp, synthetic construct
  source 1..120: mol_type = other DNA
ttcatctctcttcagcatcggcctctgagacctaaagggctgcctgtttccctgtgttcctgagggtgccagcctgcatcttgccaagtagtttcttagactcagatgattcctgttctc

SEQ ID NO: 36976 - DNA, 120 bp, synthetic construct
  source 1..120: mol_type = other DNA
cgttgctccgggagacgagatgtatcttgcaaccagctcagcggtggaagcagtggaagtgcagacagaaagccccatggcagaagggagagaggtcctgccccactcccggtctctgca

SEQ ID NO: 36977 - DNA, 120 bp, synthetic construct
  source 1..120: mol_type = other DNA
ggagctgggctataacttccgcttcccccttcacacagagaccatgctcccaacccaccccaaacccgccagcaccctcagcccctgccctgggctgctcccagccaatgcctaagcgcc

SEQ ID NO: 36978 - DNA, 120 bp, synthetic construct; identical to SEQ ID NO: 10701
  source 1..120: mol_type = other DNA

SEQ ID NO: 36979 - DNA, 120 bp, synthetic construct
  source 1..120: mol_type = other DNA
ccttccctggcccctgtgcctactgaggtagttctgttatttcactgaggccgccacattcaatctgcaccttcccatggaactctcccaattggctgtgcttgctctgcccaggtccag

SEQ ID NO: 36980 - DNA, 120 bp, synthetic construct
  source 1..120: mol_type = other DNA
gatggtccaatcagaatcagggaagggccctcattccacagtagggggaaatgccctttcttctttctctccctccagatcataaacctacaaactcctccagtggctgcagacagccgt

SEQ ID NO: 36981 - DNA, 120 bp, synthetic construct
  source 1..120: mol_type = other DNA
cagagagaaagaacacagacttgctggtctgggacaagcattgttgttcaagccagttcgcgtttgagtttctgttacttccagccccaaaagcaccctagataggagagtctacctaat

SEQ ID NO: 36982 - DNA, 120 bp, synthetic construct; identical to SEQ ID NO: 10702
  source 1..120: mol_type = other DNA

SEQ ID NO: 36983 - DNA, 120 bp, synthetic construct
  source 1..120: mol_type = other DNA
gaatggaggggatggagggggatgaagggggcagagggatggaaagggatggagggggacaggggattgaggggagagagggcaatggagggtttggaggggatagaggggacagaaggg

SEQ ID NO: 36984 - DNA, 120 bp, synthetic construct
  source 1..120: mol_type = other DNA
acagaaggagatggagcaggcagaggggatggagggaatggaggagaatgaagaacagaggggggtgaaaaaggacagaccagggtggaggggcatgaagggggcagaggggatggaggg

SEQ ID NO: 36985 - DNA, 120 bp, synthetic construct; identical to SEQ ID NO: 10703
  source 1..120: mol_type = other DNA

SEQ ID NO: 36986 - DNA, 120 bp, synthetic construct
  source 1..120: mol_type = other DNA
ggtgcctgagggcctggctccccagagcacgtcctccctccaaggcctctcatgcagaaccgagggtgaccagccacctcccacaggaggcgtgccacccctctgccccatggtcaccta

SEQ ID NO: 36987 - DNA, 120 bp, synthetic construct
  source 1..120: mol_type = other DNA
gtagagatttagtttgtctggagaagacagatgttttggcctcggatattcacagtgtcaggccaacgtcccatcaagcatgtaccagccaattatgtttgctttcatagacgttatctg

SEQ ID NO: 36988 - DNA, 120 bp, synthetic construct
  source 1..120: mol_type = other DNA
gattctttccccttatctgcctatcccaaccctgctactccctcgaggcccagttcaaggccacctcctccatgcagcccaccctgactactccttcccacacaatcaccttgcagaatt

SEQ ID NO: 36989 - DNA, 120 bp, synthetic construct; identical to SEQ ID NO: 10704
  source 1..120: mol_type = other DNA

SEQ ID NO: 36990 - DNA, 120 bp, synthetic construct
  source 1..120: mol_type = other DNA
taagtttacaaacattaggatgggtgaaagcagccatctttcagccaaggatgtcttgccattggcatcctttcctctcctactcttggcatcaaaacttccagcgaaaggactaccatc

SEQ ID NO: 36991 - DNA, 120 bp, synthetic construct
  source 1..120: mol_type = other DNA
cctgtctattctccagaaatgccatgagactcccgtggggacacacggacatgcagccccatgctctgcgaggttcgtgtgcaagggaagccgagagtgtgcaccgccgcctccccacca

SEQ ID NO: 36992 - DNA, 120 bp, synthetic construct
  source 1..120: mol_type = other DNA
aaaggacattcttccctgccccagaggccttttaatcctccagctgctccccatttctgagcaccccagccccacaaccacatccttggctcctcttttcttaggtctctgcctcccaaa

SEQ ID NO: 36993 - DNA, 120 bp, synthetic construct
  source 1..120: mol_type = other DNA
agccccggctctgagaggtggaccacagtgacgttgtgcatctcctgggctgaatgtcagtttagaatcagtgttctgtcacctccaataccctttccctaatgcccagttgccctggta

SEQ ID NO: 36994 - DNA, 120 bp, synthetic construct; identical to SEQ ID NO: 10705
  source 1..120: mol_type = other DNA

SEQ ID NO: 36995 - DNA, 120 bp, synthetic construct
  source 1..120: mol_type = other DNA
gggccgcacctgccttgcctttggtgattgtttccacttggcccctgccatgctgggacccagatactcccacttcatttaggatccctggtcagtggcagtaggtccccctgtgatttc

SEQ ID NO: 36996 - DNA, 120 bp, synthetic construct
  source 1..120: mol_type = other DNA
ggtctcaactggcaaatcctctccagtctccctgagccatgatgcctccctctgcagcagacgcaggcgtttctggtgtttcaactccgttcagcatgggccacctttgggtccatgttt

SEQ ID NO: 36997 - DNA, 120 bp, synthetic construct; identical to SEQ ID NO: 10706
  source 1..120: mol_type = other DNA

SEQ ID NO: 36998 - DNA, 120 bp, synthetic construct
  source 1..120: mol_type = other DNA
tctttggtttctgggctctttctgcatttgggggtcgctttgcatacagggccctttcacagacacagccagacagactgcagggctcttccagctcccagcccctttgtcatcctctca

SEQ ID NO: 36999 - DNA, 120 bp, synthetic construct
  source 1..120: mol_type = other DNA
aggttcccacaggccatgctgctcagagcccgaggatgggaacttctgcgcgggcccttggagggtagagctggtgctggctcacttgtctccaggtcccgtcgtcgccctcccaggcgc

SEQ ID NO: 37000 - DNA, 120 bp, synthetic construct
  source 1..120: mol_type = other DNA
tgcccgccccacaagtgcggctctccgcgccacgctccctcctgctagggctccaagtgccgacttgcagaggcctcgggagtgacagtggaacagagggtggcaccggcaccagaaagc

SEQ ID NO: 37001 - DNA, 120 bp, synthetic construct
  source 1..120: mol_type = other DNA
tgagtccaggagaggcctcccaaccctggcctgtggatgcatcgacccctttcaccgcgcctgacgtgagtactcctgccccttcacgggccaacaggagcgaggtcggccctgcctcaa

SEQ ID NO: 37002 - DNA, 120 bp, synthetic construct; identical to SEQ ID NO: 10707
  source 1..120: mol_type = other DNA

SEQ ID NO: 37003 - DNA, 120 bp, synthetic construct
  source 1..120: mol_type = other DNA
tccggagatggatggctggctgcacagccacgtgcgtgtacttaatgctactgagctgtacacctaaagatgggtacattggtaaattttatgttatgcatatttaccgcagtgaagaaa

SEQ ID NO: 37004 - DNA, 120 bp, synthetic construct
  source 1..120: mol_type = other DNA
taggcaaaaatacaattatttataatttgtattcaattatatacagacagttcataccagacaggagaagacagataagacttgaagtgtggggaagacctcagcacccggggcccccag

SEQ ID NO: 37005 - DNA, 120 bp, synthetic construct; identical to SEQ ID NO: 10708
  source 1..120: mol_type = other DNA

SEQ ID NO: 37006 - DNA, 120 bp, synthetic construct
  source 1..120: mol_type = other DNA
caggcagcatctaagtcctgctagtggggaagcagctcaggacatggggcgctggggactgcccatcagaggaaccgagggcttcagcagaaatgcatgctgagcctcaactaccaggtg

SEQ ID NO: 37007 - DNA, 120 bp, synthetic construct
  source 1..120: mol_type = other DNA
gaggcaggacacacacacacacacacacacacacacacgcacacacacacagagctgatgccacattatttactatggctgcgtgcgtaccctactaccagtaatcttagtacgagtcca

SEQ ID NO: 37008 - DNA, 120 bp, synthetic construct
  source 1..120: mol_type = other DNA
acaactggacggacgcaggagtcgttgtctgggcagacagcggagggttctgcagcaatgaaatggagttgatgaacttcaacgccgcacgcaggcacggctgcatctcacaaagtgcaa

SEQ ID NO: 37009 - DNA, 120 bp, synthetic construct; identical to SEQ ID NO: 10709
  source 1..120: mol_type = other DNA

SEQ ID NO: 37010 - DNA, 120 bp, synthetic construct
  source 1..120: mol_type = other DNA
cgcctctactaaaaatacaaaattagctgggcatggtggtatgcgcctgtaatcccacctactcaggaagctgaggtaggagaatctcttgaacccagcaggcggaggttacagtgagcc

SEQ ID NO: 37011 - DNA, 120 bp, synthetic construct
  source 1..120: mol_type = other DNA
agacctgcctgtgggggactgggacctccaggaggaggcagggccctacgcccctccaggctgtaatgagtgcaggggcagaggcatccagccatcgaggtggggaggaccccaggtgag

SEQ ID NO: 37012 - DNA, 120 bp, synthetic construct
  source 1..120: mol_type = other DNA
gcaggctggcgcacgggtgcctgcctggagacgcaggggtttgctccttttttctgtgctgccaactggacatccctcctcagggtcactggccacagctgctcagaggtcactccagac

SEQ ID NO: 37013 - DNA, 120 bp, synthetic construct; identical to SEQ ID NO: 10710
  source 1..120: mol_type = other DNA

SEQ ID NO: 37014 - DNA, 120 bp, synthetic construct
  source 1..120: mol_type = other DNA
tccagaggccactgcgctgctcagctccgggggcccgtcctccgtggatccctccaggcccagcagagtgtttgaccacgggcctgaccgggaggggagacgccacctcctggggacttg

SEQ ID NO: 37015 - DNA, 120 bp, synthetic construct
  source 1..120: mol_type = other DNA
ctgagagcacctggactttgcctatttttttcttctcaatcgctaaaagacaaattattaccgcagggcagaattcatcttgctctctgaatgtaccaagtgctcactctcatctggaaa

SEQ ID NO: 37016 - DNA, 120 bp, synthetic construct
  source 1..120: mol_type = other DNA
gccaggctgcggccccaaccccaggtcaccaagctgtggtggcttctctgtcaccgtccagagtcactattttaaaaatacacccccttttgaatctcctttctccctgcttcattattt

SEQ ID NO: 37017 - DNA, 120 bp, synthetic construct
  source 1..120: mol_type = other DNA
gctgctcccagagccacgccactgtcacgacagctcacctctcacagccctgatgagcgcccctgggagagcacgcacctcgctgacaccccaccagcgcccagccccgtccacaggcga

SEQ ID NO: 37018 - DNA, 120 bp, synthetic construct; identical to SEQ ID NO: 10711
  source 1..120: mol_type = other DNA

SEQ ID NO: 37019 - DNA, 120 bp, synthetic construct
  source 1..120: mol_type = other DNA
ggagtggagagttctcaaattgtgtgaacactgtcccatcatcccaaatgcttctactcactggctacagtgtccgaaaccccccaaagacccatcctcacaaacaaggatgccgcaccc

SEQ ID NO: 37020 - DNA, 120 bp, synthetic construct
  source 1..120: mol_type = other DNA
gggttgggggagggacagcctcagccccagctgtctggcacataataggctcttaatagtgggctcagccccagctctgtccgcactccacttgggcaggccagtccttagcccatcggt

SEQ ID NO: 37021 - DNA, 120 bp, synthetic construct
  source 1..120: mol_type = other DNA
gctgctgtgcccagcctcagcctcatctcctacctgccagagaccggctcctgtggctctgcctgctgccgtccagccccgcaggcctctcggagtccctagaacacaccgcaggctccc

SEQ ID NO: 37022 - DNA, 120 bp, synthetic construct; identical to SEQ ID NO: 10712
  source 1..120: mol_type = other DNA

SEQ ID NO: 37023 - DNA, 120 bp, synthetic construct
  source 1..120: mol_type = other DNA
caggtggtaatgcctacacaataatgggaatgcatacgtgaaatggtgaagatggtaaatttgtattatgtacatctgaccacaattaaaatcccctcattcatctacccactctcacca

SEQ ID NO: 37024 - DNA, 120 bp, synthetic construct
  source 1..120: mol_type = other DNA
tgaggatgcaggtgagaatgacagaacctgtcattgttaaccctggaagacagatgctgttatactgttctccctacttctgtattctttcgaaaatttctggccaggtgtggtggctca

SEQ ID NO: 37025 - DNA, 120 bp, synthetic construct; identical to SEQ ID NO: 10713
  source 1..120: mol_type = other DNA

SEQ ID NO: 37026 - DNA, 120 bp, synthetic construct
  source 1..120: mol_type = other DNA
actcagccaagggcaggagagccatggcacgcagtattggggtgacctgaatgttcatgggccaggaaggatgctggcgttctgggcaagaagccgttgcgtagtcatgcggtgtgggct

SEQ ID NO: 37027 - DNA, 120 bp, synthetic construct
  source 1..120: mol_type = other DNA
tggctccagtgctggcctcagaaatgagcccttaagacgctaaatggtttttatttaattactgccctgtaattgcagagggtgaaagcgctactacagtcattgctctttgatctgatt

SEQ ID NO: 37028 - DNA, 120 bp, synthetic construct
  source 1..120: mol_type = other DNA
tcacttgtctagcgcctggagcctgaaagctggagaggtggggagcttcccttctgtgccagacatggcctccctgcctggctctgcagccagagaggggtaagggctgagcactcctga

SEQ ID NO: 37029 - DNA, 120 bp, synthetic construct
  source 1..120: mol_type = other DNA
ggctgcagggccttgatttgatggctgtggggagagctctgtgtgtgtgtgtgcgcacaggtacatgacatgtgtgtgcgagtgtgtatctcttgacccggggaactgcagggaagcccc

SEQ ID NO: 37030 - DNA, 120 bp, synthetic construct; identical to SEQ ID NO: 10714
  source 1..120: mol_type = other DNA

SEQ ID NO: 37031 - DNA, 120 bp, synthetic construct
  source 1..120: mol_type = other DNA
agtagctgggactacaggtgcacacaaccacacccaactaactattttttgtagagaaggagttttgccatgttgcccaagttggtctcaaactcctgggctcaagcactcctctacctg

SEQ ID NO: 37032 - DNA, 120 bp, synthetic construct
  source 1..120: mol_type = other DNA
cacggctcattgcagccttgacctccccaggcttaagcaatcctcccaactcagccttccaattagctgggactaccgacatgcaccaccacgcctggctaattgttgtatttttcatag

SEQ ID NO: 37033 - DNA, 120 bp, synthetic construct; identical to SEQ ID NO: 10715
  source 1..120: mol_type = other DNA

SEQ ID NO: 37034 - DNA, 120 bp, synthetic construct
  source 1..120: mol_type = other DNA
gatgctgcaagacctagggttagagctacagaccgtgctcctgagatatcgcccctgttcacaagcagccagatcacagaaaaggcacccagagtggtttttctttgagacggagtctca

SEQ ID NO: 37035 - DNA, 120 bp, synthetic construct
  source 1..120: mol_type = other DNA
taacacccccggccaatttttgcatttttagtagagacaaggtttcatcatgttgaccaggctggtctcaaactcctgacctcaggtgatccacctgcctcagcctcctgaagtgctggg

SEQ ID NO: 37036 - DNA, 120 bp, synthetic construct
  source 1..120: mol_type = other DNA
gtcaacactcttggactgtttttcctcactcagtgtatccacgcccaacactgtctgtggggcacagggctcccgcctcccacccagcctagctcttggctcttctcactgacacactaa

SEQ ID NO: 37037 - DNA, 120 bp, synthetic construct
  source 1..120: mol_type = other DNA
ggacctccgattttcttgaccctgtggtcagagcttgcatctgcatccaggctcttacaaaacttggttgagatgtaaacattgtttttgatgtcagaagcgtaggagacaggatgacag

SEQ ID NO: 37038 - DNA, 120 bp, synthetic construct; identical to SEQ ID NO: 10716
  source 1..120: mol_type = other DNA

SEQ ID NO: 37039 - DNA, 120 bp, synthetic construct
  source 1..120: mol_type = other DNA
tcccacttcagctttctgagtagctgggaccatgggtgtgcaccaccatgcctggctaattttttatttttttgtagagaggggtctcatgatgttgcccaggctggtctcgaactccta

SEQ ID NO: 37040 - DNA, 120 bp, synthetic construct
  source 1..120: mol_type = other DNA
aactctactcgattagacgccgctctctagttctctttatggggctttcttcttcacaagattgaacactctctgggttcaaggactgctgtctccttcacctgctctcccccgaggact

SEQ ID NO: 37041 - DNA, 120 bp, synthetic construct; identical to SEQ ID NO: 10717
  source 1..120: mol_type = other DNA

SEQ ID NO: 37042 - DNA, 120 bp, synthetic construct
  source 1..120: mol_type = other DNA
cagctgataaataacagcactggggtaggggtcctgctgttccatcttgcagtgggctcttcaggaataacctatgccatgcaagcagtaacgctggcaatgcgctgactctgatttgtt

SEQ ID NO: 37043 - DNA, 120 bp, synthetic construct
  source 1..120: mol_type = other DNA
ggactacaggcatgtgccaccatgctcggctaacttttaaatttttttgtagagagaaggtctcattatgttgcccaggcttgtctcaaactcctgggttcaagtgatccttcctccttg

SEQ ID NO: 37044 - DNA, 120 bp, synthetic construct
  source 1..120: mol_type = other DNA
ggctcactgcaacctctgcctcctgggttcaagcgattctcctgtcttagcctcccgagtagctgggactatatgcgcacgccaccacgcccagctaattttttgtatttttagtagaga

SEQ ID NO: 37045 - DNA, 120 bp, synthetic construct; identical to SEQ ID NO: 10718
  source 1..120: mol_type = other DNA

SEQ ID NO: 37046 - DNA, 120 bp, synthetic construct
  source 1..120: mol_type = other DNA
atgcaagcttctcctcatggggcacaaattaggcaggtgtttcccctcccacattagcccacgatctgtcagattactccgctacggaacctgggaagaagacctctctcttcctgacct

SEQ ID NO: 37047 - DNA, 120 bp, synthetic construct
  source 1..120: mol_type = other DNA
ccaatagtttcctctaaactgcatgtttcatttttaacagctgaaaacaacagtgcccatccactcttacttttcccctgagccacagtttttgcataaatgaatgacaatccaatccat

SEQ ID NO: 37048 - DNA, 120 bp, synthetic construct
  source 1..120: mol_type = other DNA
accaccgcctgatgttatatcccagttggaagagagtggctggaaacagctactgcttaggagggtgtgcacacacgccgtggggttccctcccaaggacagaccaccaggggctcggga

SEQ ID NO: 37049 - DNA, 120 bp, synthetic construct
  source 1..120: mol_type = other DNA
ggccacaggagtggcgacaggtgaacatatcaggacccacagaaccggtgtcagccccaggtggccgggagccagaggagcatcagcccgacaggcacagggcgccccaaaagctcagag

SEQ ID NO: 37050 - DNA, 120 bp, synthetic construct; identical to SEQ ID NO: 10719
  source 1..120: mol_type = other DNA

SEQ ID NO: 37051 - DNA, 120 bp, synthetic construct
  source 1..120: mol_type = other DNA
tgtctctttaaacagactgtaaaaggaaaccaccctgggcagacaattcttggcaccaattggccagagcacattcccattgtgacatgacatcacacaactattttgattcatgggttc

SEQ ID NO: 37052 - DNA, 120 bp, synthetic construct
  source 1..120: mol_type = other DNA
gccgtcttcaaggaggggatacagctccccgactggaatttaacggaaggtcttcggcaaatgcgtaatttgagctctggacttgctgagaattgcagcatgacagagctggaagagatt

SEQ ID NO: 37053 - DNA, 120 bp, synthetic construct
  source 1..120: mol_type = other DNA
tgtcgccaatggtagaaccaggactggagttctaatctccttgactcctaagccaaaccgctgatcaagtaaaacctaaaacatttataatttgtatatgttttgcaaccaataaaacaa

SEQ ID NO: 37054 - DNA, 120 bp, synthetic construct; identical to SEQ ID NO: 10720
  source 1..120: mol_type = other DNA

SEQ ID NO: 37055 - DNA, 120 bp, synthetic construct
  source 1..120: mol_type = other DNA
tttagcctagttccaacagtctgaacctctcatggtaactgattcttcccaaatgactatgcacatgaggaggagactatgtcagaccagttaaataacccccgagctaaagattagtag

SEQ ID NO: 37056 - DNA, 120 bp, synthetic construct
  source 1..120: mol_type = other DNA
gggtggaagcgccccagcagcttgccactggagcccaggcctcctcaggaaccacaggtccagcctcccaacttgggttgggctgcttttcatgccttttctctcacctctttcatttac

SEQ ID NO: 37057 - DNA, 120 bp, synthetic construct
  source 1..120: mol_type = other DNA
agatgaaaccctggaagctcagctcccaccccagatctgccattcccatggggcctccatccacagaagccagagatgcccagatctgccactcccacggggcctccatccacagaagcc

SEQ ID NO: 37058 - DNA, 120 bp, synthetic construct; identical to SEQ ID NO: 10721
  source 1..120: mol_type = other DNA

SEQ ID NO: 37059 - DNA, 120 bp, synthetic construct
  source 1..120: mol_type = other DNA
ccactcacacggggcctccatccacagaagccagagatgcccagatctgccactgccatggggcctctgttgggagcaagccccccaaaatctggccataaactggccccaaaactggcc

SEQ ID NO: 37060 - DNA, 120 bp, synthetic construct
  source 1..120: mol_type = other DNA
gcttaaaggcattcttaagccacaaacaatagcatgagcgatctgtgctttaaggacatgctcctgctgcagttaactagcccaacctattcctttaattcggcccatccctttgtttcc

SEQ ID NO: 37061 - DNA, 120 bp, synthetic construct; identical to SEQ ID NO: 10722
  source 1..120: mol_type = other DNA

SEQ ID NO: 37062 - DNA, 120 bp, synthetic construct
  source 1..120: mol_type = other DNA
aaccgggttcgggtctccccagctgagctggtctcggtagcctccatctgcaggggacacacaccagctcccaagaagcctgctcggccccggcatggctccggtgtagctggagctggt

SEQ ID NO: 37063 - DNA, 120 bp, synthetic construct
  source 1..120: mol_type = other DNA
tgacctcatagtcataccattgcttagccgatcaagaaactatggtctcaacttttctcatgcaatttctaccaaattgactgagtaacaactgtctacttggtgctgtgctgaatgttg

SEQ ID NO: 37064 - DNA, 120 bp, synthetic construct
  source 1..120: mol_type = other DNA
caatggcacaatctcagctcactgcagcctccgcctcctgggctcaaatgatcctcccacctcagcctcacaagtggctgggactacaggtgcacaccaccacacccaggcaatttttgt

SEQ ID NO: 37065 - DNA, 120 bp, synthetic construct; identical to SEQ ID NO: 10723
  source 1..120: mol_type = other DNA

SEQ ID NO: 37066 - DNA, 120 bp, synthetic construct
  source 1..120: mol_type = other DNA
actgggaaccccaaaaagataggggcccaggcctcacccgttgtgaggatctcccaagcctacagcaaggcacctgctttgggaggcaccggacagtcaccctgaacgcctgcggtccct

SEQ ID NO: 37067 - DNA, 120 bp, synthetic construct
  source 1..120: mol_type = other DNA
agttgaggctttcatagctccctacatccctgcagggttgctctggccttgctgtgtcatctcccaagggaagaattcagctcctctcagagaaaccctccctcagacctctgtcttggg

SEQ ID NO: 37068 - DNA, 120 bp, synthetic construct
  source 1..120: mol_type = other DNA
gtgtctttattcaattctcctccagtgatccaaaaagttcagtgtgcctcctttctcctgctgggactgactgatagatacggggatcagatatttgtagcaaggatgcatgaatgaaca

SEQ ID NO: 37069 - DNA, 120 bp, synthetic construct; identical to SEQ ID NO: 10724
  source 1..120: mol_type = other DNA

SEQ ID NO: 37070 - DNA, 120 bp, synthetic construct
  source 1..120: mol_type = other DNA
aggggaccccagccttcccaaacaagccgcgaaatctaccgccagctaggtcccctgatatactgatggattatttctgctgttaaatatggtagcccaaacttaactgtgattaaattc

SEQ ID NO: 37071 - DNA, 120 bp, synthetic construct
  source 1..120: mol_type = other DNA
tctcgatttaaaaataaaataacacctggtgcggtggctcacacctgtaatcccagcactttgggaggctgaggcgggaggattgcttgagcccgggaggtccaggctctagtgagccat

SEQ ID NO: 37072 - DNA, 120 bp, synthetic construct
  source 1..120: mol_type = other DNA
tatcccaataagaaagaggcagatttgattaaaaggaaaatgaaaaggttttgtttcagccagtgtactattcttacactacataatacaacggacagaaagaacatttcaaggccgggc

SEQ ID NO: 37073 - DNA, 120 bp, synthetic construct
  source 1..120: mol_type = other DNA
cctgaccaacatggtgaaaacccatctctactaaaaataaaattagctgggcatggtggtgcatgcctgtaaccccagctattagggaggctgaggcaggagaatcgcttgaaccaggag

SEQ ID NO: 37074 - DNA, 120 bp, synthetic construct; identical to SEQ ID NO: 10725
  source 1..120: mol_type = other DNA

SEQ ID NO: 37075 - DNA, 120 bp, synthetic construct
  source 1..120: mol_type = other DNA
gtgctggtcaccttacagttattattttatttcatccttcccacacatgagcagggcaggtataattaacatttcattgaaattgaataactgagggtcagagaagtagtttgacctgga

SEQ ID NO: 37076 - DNA, 120 bp, synthetic construct
  source 1..120: mol_type = other DNA
ccattcaataccctagcctgaatcccataggactccagaggaccgctgtggactgaagggatttggaaaagaatttctctctacatcctgatttttcattttaggctgggaaatttaaag

SEQ ID NO: 37077 - DNA, 120 bp, synthetic construct
  source 1..120: mol_type = other DNA
gatcaaggtcaagagattgagaccatcctggccaacatggtgaaaccccgtctctaccaaaaatacaaaaattagctgggcgtgatggtgcgcacctgtagtccccgctactcgagaggc

SEQ ID NO: 37078 - DNA, 120 bp, synthetic construct; identical to SEQ ID NO: 10726
  source 1..120: mol_type = other DNA

SEQ ID NO: 37079 - DNA, 120 bp, synthetic construct
  source 1..120: mol_type = other DNA
acaaagctttggatcccacgattagagatgaacgctgatgcgttgggagagatggcgccttcccattgcagggcaggggctgaggacccttcttcagcatacgtgggcgggggaaagttg

SEQ ID NO: 37080 - DNA, 120 bp, synthetic construct
  source 1..120: mol_type = other DNA
ctaacagaatgcttttcacactcagaattcttttttaaagggaggggctgaaaaaggaaggaaagaatggctcccaaataggaaccgtattttctaatgtatttttaaagggccagggcc

SEQ ID NO: 37081 - DNA, 120 bp, synthetic construct
  source 1..120: mol_type = other DNA
ggccaaggcttccaggtcaccattctgacactaggtttataagatctgggagggagtgaaatcagagctcagctcattcaacgtgtgttctttacgtgtgtcttctggtggctgttcttt

SEQ ID NO: 37082 - DNA, 120 bp, synthetic construct; identical to SEQ ID NO: 10727
  source 1..120: mol_type = other DNA

SEQ ID NO: 37083 - DNA, 120 bp, synthetic construct
  source 1..120: mol_type = other DNA
ctggagccagggaggctgtgctgactgctcctctgccctcggcagggctccaggcttggccagccagggctgggctgcgggaggccatggcactaggtcccgttcactctaatacttgga

SEQ ID NO: 37084 - DNA, 120 bp, synthetic construct
  source 1..120: mol_type = other DNA
gcagatgggctcgaagatggagcacggtcacccctgcttcctgcacatgaggataagtggcgtgaaggcgaccacccttccacaagagacacaatggcgctcctgtggctctgatatgta

SEQ ID NO: 37085 - DNA, 120 bp, synthetic construct
  source 1..120: mol_type = other DNA
ggcacatgttgtcccactaacgtggtgctggtccaggctgcaggttggagccccaccccagccttatcgcctggtgaatgggactctgggtctccgttgtagacaccatggttggtgcct

SEQ ID NO: 37086 - DNA, 120 bp, synthetic construct; identical to SEQ ID NO: 10728
  source 1..120: mol_type = other DNA

SEQ ID NO: 37087 - DNA, 120 bp, synthetic construct
  source 1..120: mol_type = other DNA
aagctgtcactggggacccatatgagagaaaagtcactgagactccgtgtaaccaccctccctccatgcgcctccattcattcatgagactggcacttcccagggcagggctgctgaggc

SEQ ID NO: 37088 - DNA, 120 bp, synthetic construct
  source 1..120: mol_type = other DNA
gcagcagtttcctacattcttctcaaccatgctgtgtggtagggaggccagccatgactattcagttcaagaaataacatttttcaaaaacccagaagttcagaggtgctcagtgatttg

SEQ ID NO: 37089 - DNA, 120 bp, synthetic construct; identical to SEQ ID NO: 10729
  source 1..120: mol_type = other DNA

SEQ ID NO: 37090 - DNA, 120 bp, synthetic construct
  source 1..120: mol_type = other DNA
actgctgcacttgactctgagatcgccacgtcgcctcactggggcctccacgccctgccccaggaggtgtttatgagctggcacctctgcggagcaccctctgccctgactcaagccccc

SEQ ID NO: 37091 - DNA, 120 bp, synthetic construct
  source 1..120: mol_type = other DNA
cacctcagctcacacagctccactcacaccagcgatatctaaggccactgagaactggcagaggcaacaggggcatcttgattttaaaaacacagagaagtactaaaaaggtgaaaaacg

SEQ ID NO: 37092 - DNA, 120 bp, synthetic construct
  source 1..120: mol_type = other DNA
gggcatcgcattcccccatggagggctcggtggggcccttttcagtcccttctcgtggtgcctggcaaccctgcagtcgctcagtgtccaagagcacaccaggccaagagctctgagggc

SEQ ID NO: 37093 - DNA, 120 bp, synthetic construct; identical to SEQ ID NO: 10730
  source 1..120: mol_type = other DNA

SEQ ID NO: 37094 - DNA, 120 bp, synthetic construct
  source 1..120: mol_type = other DNA
agcaatccacctcctcctgcacgtcactccttaagaagcccctagcttagattatgagggctgagctgaagtttgcctcagatctctttcttcttatagtgaaatatatttcaaaacaag

SEQ ID NO: 37095 - DNA, 120 bp, synthetic construct
  source 1..120: mol_type = other DNA
gaccattttacagggtttcaaggtgattaaataagacagaatagcaaaaatatcctgtaagctgcagagcatttcacaaacagaggacatggccattctctgtccctgaaagcagcctct

SEQ ID NO: 37096 - DNA, 120 bp, synthetic construct
  source 1..120: mol_type = other DNA
ggcaccatgctgagaattcagaggctgtggccggagcctggggagagagcgctgggctccacgattctggcctggccaggcagcgcttggacttgcaataggagctccacaccttggcag

SEQ ID NO: 37097 - DNA, 120 bp, synthetic construct; identical to SEQ ID NO: 10731
  source 1..120: mol_type = other DNA

SEQ ID NO: 37098 - DNA, 120 bp, synthetic construct
  source 1..120: mol_type = other DNA
gttctcataactcagtggctgctgctggatgtgttgacgcatatagggtgatctagcaagaacctgactcatctataaagagtgaaattacagtacttggtatcttttgaataagaaaac

SEQ ID NO: 37099 - DNA, 120 bp, synthetic construct
  source 1..120: mol_type = other DNA
ctggccaacatggtgaaactccgtctctactaaaaatacaaaaattagccgggcgtggtggcgggcgcctgtaatcccagttactcaggaggctgaggcaggagaatcgcttgaacctgg

SEQ ID NO: 37100 - DNA, 120 bp, synthetic construct
  source 1..120: mol_type = other DNA
aatgcatctgacacttaaaaaagatgtatgctctggtactcgatggcttaagttccagatatctagaaagttagctcacgtggcttgttcattccttgagactggcaagatacaaaaaca

SEQ ID NO: 37101 - DNA, 120 bp, synthetic construct; identical to SEQ ID NO: 10732
  source 1..120: mol_type = other DNA

SEQ ID NO: 37102 - DNA, 120 bp, synthetic construct
  source 1..120: mol_type = other DNA
cctagtagctggtactacaggcacgtgccaccacgcctggctaatttttgtagtttttgtagagatggggtttcaccatgttgcccagactggtctcaaactcttggactcaagtgatcc

SEQ ID NO: 37103 - DNA, 120 bp, synthetic construct
  source 1..120: mol_type = other DNA
attaaaatttcatagaggttatcagaaaaaagtcagaaaggcattttagggggtaattttcaaaagattgatttttttaaaagagagcagagggaaaactgggaaggtgtggggtgggac

SEQ ID NO: 37104 - DNA, 120 bp, synthetic construct
  source 1..120: mol_type = other DNA
ggcatatgatttttaaaggcttcttttggggtttggttgaggagggtgggaactactgcttttcaatataaattgttttggaatgtttggtttttttaaccatgcgattgaactacttca

SEQ ID NO: 37105 - DNA, 120 bp, synthetic construct; identical to SEQ ID NO: 10733
  source 1..120: mol_type = other DNA

SEQ ID NO: 37106 - DNA, 120 bp, synthetic construct
  source 1..120: mol_type = other DNA
agtatttgctaatcattcgccaaaattttaaaacacagttttctgggctttaggcaacatggggctggcctgggtgttttggagcctccgagggtgaggaagaggctgacggttttcctc

SEQ ID NO: 37107 - DNA, 120 bp, synthetic construct
  source 1..120: mol_type = other DNA
aaactcagaaaaggaggctacggagaatttgccatcttttctctctcctcactagaagctttaaagggatagttagaccctgagtcagcctttcacattgtagcaagcagacacctggag

SEQ ID NO: 37108 - DNA, 120 bp, synthetic construct
  source 1..120: mol_type = other DNA
cgttcagtgtctacatgggccaggtacagagaagcagcatatgaaggtgacgttggtcatcaaaactctgctgttatgaaacatttttgtgcatcagaggacaataataagagagtgaaa

SEQ ID NO: 37109 - DNA, 120 bp, synthetic construct; identical to SEQ ID NO: 10734
  source 1..120: mol_type = other DNA

SEQ ID NO: 37110 - DNA, 120 bp, synthetic construct
  source 1..120: mol_type = other DNA
ccatctccactaaacatataaaaattagctgggcatggtggcacatgctcatagccccagctactcgggaggctgaggcaggagaattgcttgaacctgggaagcagaggttgtagtgag

SEQ ID NO: 37111 - DNA, 120 bp, synthetic construct
  source 1..120: mol_type = other DNA
attgctgatgggaatgtaaaacactgcactgtggaaaacattcctcaacaagttaaacacaaaatgaccatatgacccagaacctgcagtcctaggtatatacccaagagaactgcaaac

SEQ ID NO: 37112 - DNA, 120 bp, synthetic construct
  source 1..120: mol_type = other DNA
tgccacaaagtagatcgactttcaaaacaatctgctaagtgatagaagccacatgcagaagcccgcaggtcatggggttctgtttctgtgagatatgcagaataggcaagtccagaaagg

SEQ ID NO: 37113 - DNA, 120 bp, synthetic construct; identical to SEQ ID NO: 10735
  source 1..120: mol_type = other DNA

SEQ ID NO: 37114 - DNA, 120 bp, synthetic construct
  source 1..120: mol_type = other DNA
gcattttaccacaaaaaaagttaaacctacaaatactaaaggaaaatatggattaattctacaatctggatttctaatgatgactaagtatgctcatgctattgtctaatggctattttc

SEQ ID NO: 37115 - DNA, 120 bp, synthetic construct
  source 1..120: mol_type = other DNA
ctcagctcactgcaagctctgcctcccaggttcatgctattctcctgcctcagcctcccaagtagctgggactacaggtgcccgccaccatgccaggctaatttttatttatttatttat

SEQ ID NO: 37116 - DNA, 120 bp, synthetic construct
  source 1..120: mol_type = other DNA
accacgcccggcccaaagatgccatattttttttacagctacatggtactctgctatgtagctgtaacttctttatttcattgaactactctatttattatttatttatttatttatttt

SEQ ID NO: 37117 - DNA, 120 bp, synthetic construct; identical to SEQ ID NO: 10736
  source 1..120: mol_type = other DNA

SEQ ID NO: 37118 - DNA, 120 bp, synthetic construct
  source 1..120: mol_type = other DNA
accccaggagtgacatgcacacgtaaacactatttgccactaaaagtgacaagggctctttagagcaatggctaattccagggctggggtgaggaatgtacaagatcagccagaaagcca

SEQ ID NO: 37119 - DNA, 120 bp, synthetic construct
  source 1..120: mol_type = other DNA
cttgataatgaagacatggaatcaacctaaatgcccatcaatgacagaccagataaagaaaatgtagtacatatgtgctgcggaatattacacagccataaaaaagaaagagatcacgtc

SEQ ID NO: 37120 - DNA, 120 bp, synthetic construct
  source 1..120: mol_type = other DNA
acacaaagaaagaaacgacaaacactgggggctacttaagaggcagagggtgggaggagggagaggaacggaaaagataactattgggtactgagcctaatacatgatgaaatacgtggg

SEQ ID NO: 37121 - DNA, 120 bp, synthetic construct
  source 1..120: mol_type = other DNA
atggcactgaataggatacaaatccatgagtccatagatacatacacacacagggagagaagaaaaacctgttctttaaagtagcattccaaccagtcaatgtagaattcatgataaatt

SEQ ID NO: 37122 - DNA, 120 bp, synthetic construct; identical to SEQ ID NO: 10737
  source 1..120: mol_type = other DNA

SEQ ID NO: 37123 - DNA, 120 bp, synthetic construct
  source 1..120: mol_type = other DNA
ccagggcagcccacggatgggtgggtgcccacctgagggcggaggctggctctgatggtgaggaaatgtcgaagggcaggtgacacaagaactggccgttgtcctcctgaaaagtgctca

SEQ ID NO: 37124 - DNA, 120 bp, synthetic construct
  source 1..120: mol_type = other DNA
caaggcacaaaatgtgaatgaagcctgcagcttagctgatagcatgatatttgtgctgatttcctgattttgacaattatactgtggttaggagaatgaccctgtttttatgaaacatcc

SEQ ID NO: 37125 - DNA, 120 bp, synthetic construct; identical to SEQ ID NO: 10738
  source 1..120: mol_type = other DNA

SEQ ID NO: 37126 - DNA, 120 bp, synthetic construct
  source 1..120: mol_type = other DNA
ctgggctcaagtgatccactaccttggcctcccaaagtgctggaattacaagcgtgagccacctcgcccagccctaaagtgttattttaaaaaaggaattaagaaatacaggctgagcag

SEQ ID NO: 37127 - DNA, 120 bp, synthetic construct
  source 1..120: mol_type = other DNA
ggcaacatggcaaaaccccatctctacaaaatatttaaaaattagccgggcatgatggtgcacacctgtagtcgcagctactcaggaggttggggtaggagaatcgcttgagttgcagtg

SEQ ID NO: 37128 - DNA, 120 bp, synthetic construct
  source 1..120: mol_type = other DNA
ttactgtctccgaaggtgggagcatcaccaaagcaggccctgagagaactagaggactctaactcgctgagggcaaggagattcttccgggaatttttcgttggcttctcccaaataata

SEQ ID NO: 37129 - DNA, 120 bp, synthetic construct; identical to SEQ ID NO: 10739
  source 1..120: mol_type = other DNA

SEQ ID NO: 37130 - DNA, 120 bp, synthetic construct
  source 1..120: mol_type = other DNA
cgggtacagggtaaagctcacagtaattctggatcatggcaacatctggggacagacccagggccctttgtacaactcacagggcacagccctgagggaggctgggctttggcttcatat

SEQ ID NO: 37131 - DNA, 120 bp, synthetic construct
  source 1..120: mol_type = other DNA
acttctccaggccctaccttcgcggtcccctcagttcccctgcctcccttccttccgaaggccactgtggtattggaaagttggagcagcgacctgaaggaagggaccccacctgtgtct

SEQ ID NO: 37132 - DNA, 120 bp, synthetic construct
  source 1..120: mol_type = other DNA
aagccccgacagagagttctgaagcccggatgccccttcagagctgtcctgagcgggggtcgggggctggtcctttatgtacatcggccggttattgggcgtaggccggctctgggaggg

SEQ ID NO: 37133 - DNA, 120 bp, synthetic construct
  source 1..120: mol_type = other DNA
gcctcaagggtgttctggctccagggtgttttctagcagagggcctaggggacatgctcagcatctcagggtgtttcaggcagagggcctaggggacatgagcctgagcagaggaagaca

SEQ ID NO: 37134 - DNA, 120 bp, synthetic construct; identical to SEQ ID NO: 10740
  source 1..120: mol_type = other DNA

SEQ ID NO: 37135 - DNA, 120 bp, synthetic construct
  source 1..120: mol_type = other DNA
agagactcctctccttgctgggcagagtcatttccaaggcagcaaggggactctcacgggggccacggcccctcacgagccttcccagtttcaccccggtgcctaaagcaactcacttta

SEQ ID NO: 37136 - DNA, 120 bp, synthetic construct
  source 1..120: mol_type = other DNA
ctgtgcgcaaacacaaatacttccactgccctctcccgcctcctctcccatcccccattggtctcctcctcttctcaggcctctccccctggaccaccagtgatgccggcagccacaggt

SEQ ID NO: 37137 - DNA, 120 bp, synthetic construct; identical to SEQ ID NO: 10741
  source 1..120: mol_type = other DNA

SEQ ID NO: 37138 - DNA, 120 bp, synthetic construct
  source 1..120: mol_type = other DNA
gctctcatgctcaatcctcacccctactctgcctggatgcaggggctgacctctgacccctgctgccatgtgtccaggctcccgctgggcaggagacagggagacaccttgggcaacatc

SEQ ID NO: 37139 - DNA, 120 bp, synthetic construct
  source 1..120: mol_type = other DNA
aaaggattttccttactcatcggtgggtcgcttcccaaactctagtctggcgtctcagctctttcctcacctttataaccacgcagccacataatcagaactgtgacgtccgtgtattaa

SEQ ID NO: 37140 - DNA, 120 bp, synthetic construct
  source 1..120: mol_type = other DNA
taaccagcggtgagcttcaggcctaaatgctggagtcctaaaattactcgagtctgaccccccggtttttggtcttgctctatatttagggacaatggccctattgatgctcactcgctg

SEQ ID NO: 37141 - DNA, 120 bp, synthetic construct
  source 1..120: mol_type = other DNA
gctcattcctccacacaaagcacaaaacctttggcattttatgggaaaacagacttttatttgaaaaataaactcaagttgctgggatataaaggaagagctgtctgtgatccaacgctg

SEQ ID NO: 37142 - DNA, 120 bp, synthetic construct; identical to SEQ ID NO: 10742
  source 1..120: mol_type = other DNA

SEQ ID NO: 37143 - DNA, 120 bp, synthetic construct
  source 1..120: mol_type = other DNA
aattccttttggatgttcaaaatacacatgacctcggtcataattgtgagctagtcttggaaacggacagggggaaaatctaccattccacatctctggcagaaacccgggacttacttc

SEQ ID NO: 37144 - DNA, 120 bp, synthetic construct
  source 1..120: mol_type = other DNA
gcccccgccaccccatcatgaaatcaaccgtgtgggtcagataaagcagctgaaacaatagaatcgaaaataaagtacctagtcagggtcaatattgcttcgtaaaagggcttttgttga

SEQ ID NO: 37145 - DNA, 120 bp, synthetic construct
  source 1..120: mol_type = other DNA
agtcagggtcaatattgcttcgtaaaagggcttttgttgatgtgttgtatgtgctggattatgccatcagatggatttgttactgtgggctgcagtcaaaacgttttcaaaccactgctg

SEQ ID NO: 37146 - DNA, 120 bp, synthetic construct; identical to SEQ ID NO: 10743
  source 1..120: mol_type = other DNA

SEQ ID NO: 37147 - DNA, 120 bp, synthetic construct
  source 1..120: mol_type = other DNA
tttagggttctgggaagacagtcgcttccaaaaagagaatctgtggcatctggttttgatgctaggaattctttctttgttatgagataaatgtgtcaactacccctgaactatgtcacc

SEQ ID NO: 37148 - DNA, 120 bp, synthetic construct
  source 1..120: mol_type = other DNA
tttaagttctataatgtctattttaaatatttttgccagaactgtttccatctgagggaggagggaaaaggataaaggcatgttgagctctaggagctgggagcccacagaaaggaaaac

SEQ ID NO: 37149 - DNA, 120 bp, synthetic construct
  source 1..120: mol_type = other DNA
atgaactggaagagcttgggaaaataagaggcaagtgcatgaaaagctcaatatgtgatttttaaagagacaagaaggcaataggaagttatcacgagagaacacagactgcaaagagac

SEQ ID NO: 37150 - DNA, 120 bp, synthetic construct; identical to SEQ ID NO: 10744
  source 1..120: mol_type = other DNA

SEQ ID NO: 37151 - DNA, 120 bp, synthetic construct
  source 1..120: mol_type = other DNA
cacctgctccctccctacttggttctggccacattgaccagctccctgcaggctcagaggctgctcctgcctccggacatttgcatcgtgggcccctccgccaggcgtgccatggcctcc

SEQ ID NO: 37152 - DNA, 120 bp, synthetic construct
  source 1..120: mol_type = other DNA
cttggcacttgggacacatgacacttttccacctgtggtaccgattgtccctagaatggtatccccacgagggcagggatgggctcattcactgctgcgttcccaagggcccagcactta

SEQ ID NO: 37153 - DNA, 120 bp, synthetic construct
  source 1..120: mol_type = other DNA
atccttgtccgctcctaacaccagctttcttctgtctgggaggcgcatttgaaggtgaaccgcactggaaaaaacccaggcaggaacgatacctgctgctttcccccaggcaggaccaac

SEQ ID NO: 37154 - DNA, 120 bp, synthetic construct; identical to SEQ ID NO: 10745
  source 1..120: mol_type = other DNA

SEQ ID NO: 37155 - DNA, 120 bp, synthetic construct
  source 1..120: mol_type = other DNA
gattatgtgggaatttatcaaagattagccttttctttttttaaaaaaggaagctgagatgggaggcaggccagagagaacctaggagaagtgaatatacagcaggcagagcccagacct

SEQ ID NO: 37156 - DNA, 120 bp, synthetic construct
  source 1..120: mol_type = other DNA
tagagtgcaatggcaggatctcggctcactgcaacctctgctgcccaagttcaagtgattctcctgtctcagcctcctgagtagctgggattacaggcacccaccatgcccggctaattt

SEQ ID NO: 37157 - DNA, 120 bp, synthetic construct
  source 1..120: mol_type = other DNA
ccactgcacccagctgagagagttttttaaaagctggggactgccctacagcatgaggcttttgctaatgtgcacttagcatttcctctgccccagacctctgagtggctctctctctgg

SEQ ID NO: 37158 - DNA, 120 bp, synthetic construct
  source 1..120: mol_type = other DNA
cgctctgctttcctttccttgacaacgtgggggcagttaaagtctatctgtgctcccgtgccccatccctcctccagccctctgtctggaagattccaggctagctctgccagcttggcc

SEQ ID NO: 37159 - DNA, 120 bp, synthetic construct; identical to SEQ ID NO: 10746
  source 1..120: mol_type = other DNA

SEQ ID NO: 37160 - DNA, 120 bp, synthetic construct
  source 1..120: mol_type = other DNA
gtcattcctgggcacacacaggccaagctaattttgggagaaatttagtttatagtttaaactacatacagtttaaagcaaggatgatactagcccttccccaaactaaaacaccattgc

SEQ ID NO: 37161 - DNA, 120 bp, synthetic construct
  source 1..120: mol_type = other DNA
ttactcctgtagataacatcactattagagaacctaagattggccttttgagatgtctttccagacttctgcatttctggcaaccaatttgacctcacctggactcctgactcaccaccc

SEQ ID NO: 37162 - DNA, 120 bp, synthetic construct; identical to SEQ ID NO: 10747
  source 1..120: mol_type = other DNA

SEQ ID NO: 37163 - DNA, 120 bp, synthetic construct
  source 1..120: mol_type = other DNA
gtcctcatggccctagaaaccatgtccccagaccacagtcaaaggaagaaaaggaaatttatccccgtgtgtcttttttgttgttgttaggggacgcacgtttttcttaaatccctagcc

SEQ ID NO: 37164 - DNA, 120 bp, synthetic construct
  source 1..120: mol_type = other DNA
tgccctgagttaaaccaggttctgctatgaagaaacaagaggcagccactgtccgatgggttagcacagtctgctgcgcacctcagcgaggaacaaactgtgcacatggacaaatgtgat

SEQ ID NO: 37165 - DNA, 120 bp, synthetic construct
  source 1..120: mol_type = other DNA
cagtaggcaggcaactgttgcaagaatgagcccaatggaggaaggaggcttggctatctcacagtattgacacacgtactcacacacatatgttaattcttacatatacgacgtatacgt

SEQ ID NO: 37166 - DNA, 120 bp, synthetic construct
  source 1..120: mol_type = other DNA
gcatgggcaggtcagctattcatgggagcaaaatacaggggtttggtggaaaagaggcaaactatgccaagcatcctctgtgtttggggcagactagcccacgcacatcgaccagcacct

SEQ ID NO: 37167 - DNA, 120 bp, synthetic construct; identical to SEQ ID NO: 10748
  source 1..120: mol_type = other DNA

SEQ ID NO: 37168 - DNA, 120 bp, synthetic construct
  source 1..120: mol_type = other DNA
cagcctgagcaggacaaaagccagcactagagatgggcagggctcccgagtcgtgacagctctgtccctgctccctctaccggctcctcccctctcagcctgcacgtgcttctcccacct

SEQ ID NO: 37169 - DNA, 120 bp, synthetic construct
  source 1..120: mol_type = other DNA
gagcccctaaaaaggccacacacagtcagacgcagccaaggcaggtctcacgctaaggcgggtctcctgctgtcctgctccctcctcacctctgtgtctctgcctccagccatcccggca

SEQ ID NO: 37170 - DNA, 120 bp, synthetic construct; identical to SEQ ID NO: 10749
  source 1..120: mol_type = other DNA

SEQ ID NO: 37171 - DNA, 120 bp, synthetic construct
  source 1..120: mol_type = other DNA
ctctgtgacccatatgcctccttggcctctttcatggaccctgggcctctgccctccctcgtgtgccagccatacccagctgtctgtctccagatgccgtgcctggtctggctgatgccg

SEQ ID NO: 37172 - DNA, 120 bp, synthetic construct
  source 1..120: mol_type = other DNA
acagaacatgcagcctcactgctttcctccttgtgcgtctctacaggagttggtgtctaaaagggacaaaggcacactccaggtggagaggggcacaaatgaagttaaaaccaagttaga

SEQ ID NO: 37173 - DNA, 120 bp, synthetic construct
  source 1..120: mol_type = other DNA
aggttggccctgatctggcaagcagtttgagttttctgaagtctctagcaagggaatgacataataaaagtggtgatggaaacatctgtgcagcagccgctttgacagatctgcaatcac

SEQ ID NO: 37174 - DNA, 120 bp, synthetic construct; identical to SEQ ID NO: 10750
  source 1..120: mol_type = other DNA

SEQ ID NO: 37175 - DNA, 120 bp, synthetic construct
  source 1..120: mol_type = other DNA
cacgagtgctgtcaactccttagttcatgagtcctaccagaagcccggagacctcatgacctattcacactgtcctgcctcccacccaaccatgctcccaggagcaagtgggtcaggggc

SEQ ID NO: 37176 - DNA, 120 bp, synthetic construct
  source 1..120: mol_type = other DNA
ctgtgaagcatggggaggctgcagtggggactccaaggtaacacacctgccctctgcctcactgaaaacaacagaagatcatggctgagaggccgagcatcctgtctgctgtgtggccat

SEQ ID NO: 37177 - DNA, 120 bp, synthetic construct
  source 1..120: mol_type = other DNA
tgagcccgcagtccatctgtattagtccgttctcacactgctagaaggaactacctgaaactgggtaacttatgcagaaaaaaagtttaattgactcacagttctgtaggctctacagga

SEQ ID NO: 37178 - DNA, 120 bp, synthetic construct
  source 1..120: mol_type = other DNA
caaccagatctcgtgagaactcattcactatcgccagaatagcaatgggaagtctgcccctacgattcaatcacctcccaccaggcccctcctccaacatgtggggattacaattcaaca

SEQ ID NO: 37179 - DNA, 120 bp, synthetic construct; identical to SEQ ID NO: 10751
  source 1..120: mol_type = other DNA

SEQ ID NO: 37180 - DNA, 120 bp, synthetic construct
  source 1..120: mol_type = other DNA
ctctatctaattgcacctgaaataaattcttcatcttgtctaattccccaattagccctggcctgataacttgattttcattcctgtgtgacccctggcactcctgacccactaacctga

SEQ ID NO: 37181 - DNA, 120 bp, synthetic construct
  source 1..120: mol_type = other DNA
gctattgtgtgcagatcctactcaggtattatagtatctccaggaactgtaataaacagcaatttcagactcaattcatctcctttatctgtgacactgtgtgaatgggaacacaatgga

SEQ ID NO: 37182 - DNA, 120 bp, synthetic construct; identical to SEQ ID NO: 10752
  source 1..120: mol_type = other DNA

SEQ ID NO: 37183 - DNA, 120 bp, synthetic construct
  source 1..120: mol_type = other DNA
agtaacaacagacatgttcatctcactaaaaaggagaaaaccaaaggcgaggcgcccagatcgtggataagtcccaggagagagtaaaagcagagtgctgagaccagctatcaccctgat

SEQ ID NO: 37184 - DNA, 120 bp, synthetic construct
  source 1..120: mol_type = other DNA
tggggtctgctactgtgtgggaggctccctctcatttatccgtcaaggcccgctaaagtgtctccatttatcacaacacctctccgagccagtccggcctaccactaactcatctttctc

SEQ ID NO: 37185 - DNA, 120 bp, synthetic construct
  source 1..120: mol_type = other DNA
tcacatgttgaaatcctaactcacagcacctccaaacgtgacctcatgtggaagtagggtcattgaagatgtggttagctgagatgagggttatactggagtcagagggtcccgtagtcc

SEQ ID NO: 37186 - DNA, 120 bp, synthetic construct; identical to SEQ ID NO: 10753
  source 1..120: mol_type = other DNA

SEQ ID NO: 37187 - DNA, 120 bp, synthetic construct
  source 1..120: mol_type = other DNA
tgctgcaatctctgcctcccgggttcaagcgattctcctgcctcagcctcccgagtaactgggattacaggcatctgccaccatgtgcggctagtttttgtatttttagtagagatgggg

SEQ ID NO: 37188 - DNA, 120 bp, synthetic construct
  source 1..120: mol_type = other DNA
taatgcacgcagtttgtggtgctgttatagtggccctaccaaatgaatacacctgtcatgatttgtagtcatccacactcgcttagatatcagtgcatgtgagtgaggctcaaagagtac

SEQ ID NO: 37189 - DNA, 120 bp, synthetic construct
  source 1..120: mol_type = other DNA
tgtcttagacctgctcaaaggaagaactggccaaaagctctggttcctcttattctgattatggagccagagttaagtgctgctgcccagagattctcatttctccacagcctccttttt

SEQ ID NO: 37190 - DNA, 120 bp, synthetic construct
  source 1..120: mol_type = other DNA
gcaaataataacataataatcagaataaagagcaggggagcttagaaagcatgttcacttggctcatgggactcctccaggagggttctagaaaggaactatatgtggggggatccatag

SEQ ID NO: 37191 - DNA, 120 bp, synthetic construct; identical to SEQ ID NO: 10754
  source 1..120: mol_type = other DNA

SEQ ID NO: 37192 - DNA, 120 bp, synthetic construct
  source 1..120: mol_type = other DNA
agcacgatcctggctcactgcagcctctgtctcctgagttcaagcgatcctcctgcctcagcctcccttagtagctcggattacaggcacatgccatcatacctggctaatttttatatt

SEQ ID NO: 37193 - DNA, 120 bp, synthetic construct
  source 1..120: mol_type = other DNA
gccagtcttcaagatttttccaaacagaccaagaaggctgcagttggtgccaggactaagtcaatggacaaggacagcccgtgcctgaagaaacagcgactctgtagccttgctctttct

SEQ ID NO: 37194 - DNA, 120 bp, synthetic construct
  source 1..120: mol_type = other DNA
caaagctccatggagggtgtccccccagtgcagggagcaatgatgctatctggttttaccaaagggctgtgtcagctgtgctgggcaggcagctttctacagtgttttactgcatttaag

SEQ ID NO: 37195 - DNA, 120 bp, synthetic construct; identical to SEQ ID NO: 10755
  source 1..120: mol_type = other DNA

SEQ ID NO: 37196 - DNA, 120 bp, synthetic construct
  source 1..120: mol_type = other DNA
ttgaggtcgcagtggagtagggtgggctcttaatctcctttgactgctgtcactttaagaaaagaaaaagagacagacacacacagaggaaggccacaggatgatgaaggcagaggctga

SEQ ID NO: 37197 - DNA, 120 bp, synthetic construct
  source 1..120: mol_type = other DNA
ctgattccaacttccagcctccagaattgtgggaacaggaatccgggcagcttaggccatgcagcctgtggtgcctgtgtgacagcccctgaaactaacctgtgggccatgaaggcacgg

SEQ ID NO: 37198 - DNA, 120 bp, synthetic construct
  source 1..120: mol_type = other DNA
cacctaacctgctggccccagagtgcgtgtgtccactgctagggaccacggaggccaaattcagtaccttttgagaaataaagctaaaattctaagcccctaaccaactgaaagaacccc

SEQ ID NO: 37199 - DNA, 120 bp, synthetic construct; identical to SEQ ID NO: 10756
  source 1..120: mol_type = other DNA

SEQ ID NO: 37200 - DNA, 120 bp, synthetic construct
  source 1..120: mol_type = other DNA
ttaagtctccaccccagcgtgaacatggatgcatgctgcacacaattagccaattatgcatgtctatgcttcctctttgtgaatattcatagctcctcctataacctgttgaatatgtac

SEQ ID NO: 37201 - DNA, 120 bp, synthetic construct
  source 1..120: mol_type = other DNA
ttttaaagaagtgatcctttccaaatgtaggaaccttatcattcttcaactgacactttgctggtcactgagcaaggtgtgctgggaggagtgagggctctgaggtctcgcaggttttct

SEQ ID NO: 37202 - DNA, 120 bp, synthetic construct
  source 1..120: mol_type = other DNA
ctcttgggttttaggagttcgacctggagctgtaggggggtgagatagaaagtggcctccctcctggagaacccagtgaacaaaccaccatgccccacgccccatccccgactttagcat

SEQ ID NO: 37203 - DNA, 120 bp, synthetic construct; identical to SEQ ID NO: 10757
  source 1..120: mol_type = other DNA

SEQ ID NO: 37204 - DNA, 120 bp, synthetic construct
  source 1..120: mol_type = other DNA
gctttacatttttggcattttaaaataaaacattatatcacttctatcagcaccacgtttcttgtctttccaagtctgctgatgctttcaaaatccccacgtcccaaactcagcaccatt

SEQ ID NO: 37205 - DNA, 120 bp, synthetic construct
  source 1..120: mol_type = other DNA
aacaactgtgggaggaatcattttgtatgcatgcagtacacacaatgccatctttcctagaagtctcaggctctggggtatatatcaatatcacctgaggagcctgttaaaactttcgat

SEQ ID NO: 37206 - DNA, 120 bp, synthetic construct; identical to SEQ ID NO: 10758
  source 1..120: mol_type = other DNA

SEQ ID NO: 37207 - DNA, 120 bp, synthetic construct
  source 1..120: mol_type = other DNA
attgaaaaacaagttaagttgttggtgaattaatttcaaacaatttgctcagtgccttcaggcgccattctagaccctgagaaagctttgaataaaacagaattcctgtcctcagacagt

SEQ ID NO: 37208 - DNA, 120 bp, synthetic construct
  source 1..120: mol_type = other DNA
gaaggcctttctactaaggtgagtcctttcaggaaatctgaagaggtgtctggagaggctgcctgggagccagcggtgtgcttatattcccaacacacataatgcccctttcagggggtc

SEQ ID NO: 37209 - DNA, 120 bp, synthetic construct
  source 1..120: mol_type = other DNA
caaaatcttctccaaccaaaactcaccttctagaatcttcccttcactcacctggacccccgttatgcatttctctcttagacattcttcattctttctaacaggaatgcatccagctct

SEQ ID NO: 37210 - DNA, 120 bp, synthetic construct; identical to SEQ ID NO: 10759
  source 1..120: mol_type = other DNA

SEQ ID NO: 37211 - DNA, 120 bp, synthetic construct
  source 1..120: mol_type = other DNA
actgagacccaatttctacaaaaagttaaaaaattaaccaggcatggtggtgtgcatctgcagttccacctattgcgggcaaagggcaggaggatcgcttgagcctgggaagttgaggct

SEQ ID NO: 37212 - DNA, 120 bp, synthetic construct
  source 1..120: mol_type = other DNA
agagagagagggagggagggagggagggagggagggagggagggagggagggaagggaagggaagggaagggaaggaaggaaaggaaggaaagaagggaagaaaggaaggaaggaaggga

SEQ ID NO: 37213 - DNA, 120 bp, synthetic construct
  source 1..120: mol_type = other DNA
aatgaccaaggagccacttttatctattttttcgtaaatggctagctggctatcccattattggtttatagatccctaagatctattccattaaagcagagtctcagcacctggactaaa

SEQ ID NO: 37214 - DNA, 120 bp, synthetic construct; identical to SEQ ID NO: 10760
  source 1..120: mol_type = other DNA

SEQ ID NO: 37215 - DNA, 120 bp, synthetic construct
  source 1..120: mol_type = other DNA
actttaatcttattattggcagttcatgaacacacagacatgcactttcctttcctcatctccaaaggcaagatcaccctaaaccaacttgcaaaatcttttgaagctaaagattcactg

SEQ ID NO: 37216 - DNA, 120 bp, synthetic construct
  source 1..120: mol_type = other DNA
ttgaagtgtggaagcggcaggagaggaacacacagatgggcgtgactgtgtctccatgacagctttgtttacaaaaagaggtggcacgccagattttgtcccggggctgattttgtcatt

SEQ ID NO: 37217 - DNA, 120 bp, synthetic construct
  source 1..120: mol_type = other DNA
gaagtaggtttgatattccatggtggctaggagtatgatgagaacgccagccacactacgaatcctcacgctactgtacctctgaccagaggcaaatgttagtgaaagactacggcaact

SEQ ID NO: 37218 - DNA, 120 bp, synthetic construct; identical to SEQ ID NO: 10761
  source 1..120: mol_type = other DNA

SEQ ID NO: 37219 - DNA, 120 bp, synthetic construct
  source 1..120: mol_type = other DNA
tgagaccagcctggccaacatggcgaaaccctgtctctactaaaaatacaaaaattagccaggtgtggtggcgggcgcctgtaatcccagctacacaggaggctgaggcatgagaatcgc

SEQ ID NO: 37220 - DNA, 120 bp, synthetic construct
  source 1..120: mol_type = other DNA
tcaagctctggtgtatatcagtattacctgaggagcctgtcaacactttagattctatgtttgtcatgtaggccataaattataggacagaaagatgagatgcaaatagaacatgaggag

SEQ ID NO: 37221 - DNA, 120 bp, synthetic construct
  source 1..120: mol_type = other DNA
ttgtatgtaggctcgttgggccacgtgtgatgagggcatccttgcgtgcatgcacacatgctggccaaggagggtgggatgccacagtcccctttggattgccaactggacctcttatcc

SEQ ID NO: 37222 - DNA, 120 bp, synthetic construct
  source 1..120: mol_type = other DNA
attcagggatcctaactgggctaatcagatatcctgcgacaaggcatttaggacagtaaatggagagagacacagactaggacttctctggatctcttggaaagatccacgaattcttgc

SEQ ID NO: 37223 - DNA, 120 bp, synthetic construct; identical to SEQ ID NO: 3538
  source 1..120: mol_type = other DNA

SEQ ID NO: 37224 - DNA, 120 bp, synthetic construct
  source 1..120: mol_type = other DNA
ggaaatgcgctattacacgattaatgtctgctagagacaaaagcagtcccgttgatcagaagttcagctattcttggtaccaagaccagacagcaagttcctcccaggggccttgtgtaa

SEQ ID NO: 37225 - DNA, 120 bp, synthetic construct
  source 1..120: mol_type = other DNA
ttctagggcagtgggggagcaatctacagtctgggaaccctgatccaggaatagatttcaagtacggagaaaagcagacagattttgcctcctccaggccagcctcatgccaggcacaaa

SEQ ID NO: 37226 - DNA, 120 bp, synthetic construct
  source 1..120: mol_type = other DNA
gaaagccaaggagctggcctcactgattctcaagggcaccaacatgagcaattgccctggggaccaggcttgctctgttctgaactccccatcccagggggcttctctgaagaagccatg

SEQ ID NO: 37227 - DNA, 120 bp, synthetic construct; identical to SEQ ID NO: 10763
  source 1..120: mol_type = other DNA

SEQ ID NO: 37228 - DNA, 120 bp, synthetic construct
  source 1..120: mol_type = other DNA
cccaggtcccgctcccttcgcagctgtctgcacttctgccataggaaaaaagcaattcacaggctcactgagctcacagaccacactcaggcctggaggaaggcgcagatggcaggccca

SEQ ID NO: 37229 - DNA, 120 bp, synthetic construct
  source 1..120: mol_type = other DNA
tgagtggactgtgggcccctacccagcaatgaggccttcaggtacattgcagaggatgatcaggggcctcacagtctctgcttctgagccccagcctcatccccaggaccccttgggtgc

SEQ ID NO: 37230 - DNA, 120 bp, synthetic construct
  source 1..120: mol_type = other DNA
tctcggcccctggctttaaggaaagggtggaggggagtctgggagcttcctcctgtgcagaccacaggccccaatggaaggggccatggccaggttcagcatgggccccgaggtctagct

SEQ ID NO: 37231 - DNA, 120 bp, synthetic construct; identical to SEQ ID NO: 10764
  source 1..120: mol_type = other DNA

SEQ ID NO: 37232 - DNA, 120 bp, synthetic construct
  source 1..120: mol_type = other DNA
ggctttccttcgccttcctccatgagtggaagcagcctgaagcccttgcaaacaccttggcagagatcacgacagcaggagaaggtccagcctggcccactccatcctgcatccagcctc

SEQ ID NO: 37233 - DNA, 120 bp, synthetic construct
  source 1..120: mol_type = other DNA
ccttgctcagggactgaaaaccagctttgtgagatgaatgaaagaccacagattaggattatgggaggggcctgaaccgggctaacatgcaggtgtagtttctatgatctcgtactgctc

SEQ ID NO: 37234 - DNA, 120 bp, synthetic construct
  source 1..120: mol_type = other DNA
caaccaatggaccccacccagacccatgactcatgactcagctgaccctgtggccctcacctagaggccgactcagtgctggaggcccgtttccacaccactgtgatctcatccccaacc

SEQ ID NO: 37235 - DNA, 120 bp, synthetic construct; identical to SEQ ID NO: 10765
  source 1..120: mol_type = other DNA

SEQ ID NO: 37236 - DNA, 120 bp, synthetic construct
  source 1..120: mol_type = other DNA
cactcagccatctgtaggttctccccatgccttctccaagccctgctacatcccagcattccccagctagcccttaaggctgagcacggggccttggctgtccccaggcattcctggtgg

SEQ ID NO: 37237 - DNA, 120 bp, synthetic construct
  source 1..120: mol_type = other DNA
caataagtgaagctagtctcaaaaaattggaatatcagataaagcaacattttccttccacccatccactcctaattcttcacttagaagctaccactagcagtccaatgcatgtccttt

SEQ ID NO: 37238 - DNA, 120 bp, synthetic construct
  source 1..120: mol_type = other DNA
attatatgcatatgctttcttcccccataaatgctttccttacagtcccttctagctttgattatctgtctgtctgcaattctgtcagttactgaaagaaaacagttgaaagagattgaa

SEQ ID NO: 37239 - DNA, 120 bp, synthetic construct; identical to SEQ ID NO: 10766
  source 1..120: mol_type = other DNA

SEQ ID NO: 37240 - DNA, 120 bp, synthetic construct
  source 1..120: mol_type = other DNA
tccctctcaccctctcctcccacccccatggagggctctgtgcaggagaatgatgtagagggaggcggagggtgatggttcctgccagagcttcaagaccttcccatgggagccagctca

SEQ ID NO: 37241 - DNA, 120 bp, synthetic construct
  source 1..120: mol_type = other DNA
gtcctttcttctgaagcctgcttgcctctgactaggagcccttgaaggcaggaatcctgtcttttcatccaccaattccagcacattcaatctacacaacatcgcaagttccccaacaag

SEQ ID NO: 37242 - DNA, 120 bp, synthetic construct; identical to SEQ ID NO: 10767
  source 1..120: mol_type = other DNA

SEQ ID NO: 37243 - DNA, 120 bp, synthetic construct
  source 1..120: mol_type = other DNA
tcacacagaatacggccaccatcccctccacctccaaggtggtggatgaagtagtgaggctgacagagacctggcttctcgtcctacagccactgctgcctgatggaagagttcgaagtc

SEQ ID NO: 37244 - DNA, 120 bp, synthetic construct
  source 1..120: mol_type = other DNA
cccaggcctctgatggtcaaggacaaatttgttttccacatcactatcttccccaatacaaatgttctaagtcagtagaaagaactggaaagaatagacaaaggaaaggagaaagtaaac

SEQ ID NO: 37245 - DNA, 120 bp, synthetic construct
  source 1..120: mol_type = other DNA
catttcctccttccatttccccagcaaatccctcctagcttccattccctgctgcccagagccccaaacagaaaaagttaggatttgccagaaacaggtgtagtcaaaccctcaaatacc

SEQ ID NO: 37246 - DNA, 120 bp, synthetic construct; identical to SEQ ID NO: 10768
  source 1..120: mol_type = other DNA

SEQ ID NO: 37247 - DNA, 120 bp, synthetic construct
  source 1..120: mol_type = other DNA
atgtgtggctgcagaagagacccccagcaccccagcacccacctgaaacaatagcatcaaggtcttactttttctggagcgggagaaaaacctgatgcccccgggcgaggtagcagggtt

SEQ ID NO: 37248 - DNA, 120 bp, synthetic construct
  source 1..120: mol_type = other DNA
gctggtcttgggcctcacaggtgcagacatggggctggagggccggggctgggggcctctggagaagaaccctttggaggggctgcccgggccgaaggggctgtccacctgcagaaaaac

SEQ ID NO: 37249 - DNA, 120 bp, synthetic construct
  source 1..120: mol_type = other DNA
aagctcttccacagaggtagccactgaatggtctgcaggtagcacctgccccaaggatggcccctcacaggctggcagcaccacgtcctggaggtccactgaccatcctgtcccactcct

SEQ ID NO: 37250 - DNA, 120 bp, synthetic construct; identical to SEQ ID NO: 10769
  source 1..120: mol_type = other DNA

SEQ ID NO: 37251 - DNA, 120 bp, synthetic construct
  source 1..120: mol_type = other DNA
ggtggatcaactgaggtcaggagtttgaaaccagcctggccaacatggtgaaaccccatctctactaaaaataaaaaaataaaaaaaaaattagctgggcatggtggcgggcgcctgtaa

SEQ ID NO: 37252 - DNA, 120 bp, synthetic construct
  source 1..120: mol_type = other DNA
ttgcactccagcctgggcaacaaaacgagactccatttcaagagaaaggaaagaaaggaaggaaggaaggaaggaaggaaggaaggaaggaaggaaggagggagggagggagggagggag

SEQ ID NO: 37253 - DNA, 120 bp, synthetic construct
  source 1..120: mol_type = other DNA
caatgatttaaaattctagtcatggcttaaaaaattatcagaccccataactttaagccaaggcacagagctcatagcagactttgagaaatatctcacgtgcccgcagccgtgttcctg

SEQ ID NO: 37254 - DNA, 120 bp, synthetic construct; identical to SEQ ID NO: 10770
  source 1..120: mol_type = other DNA

SEQ ID NO: 37255 - DNA, 120 bp, synthetic construct
  source 1..120: mol_type = other DNA
acaccccacaggcagcctcggtgccacttcggggtctctctgtcccaccacggggtgcgctgtccggaccgcggcctggggacgttcttccgccactagagggcggcccaagccccgagc

SEQ ID NO: 37256 - DNA, 120 bp, synthetic construct
  source 1..120: mol_type = other DNA
cggacaccttcgtgagtgggcccggcaggaagaagagtgtggtgctataggaccttgtaactcaagctaagttttgagtttttctttttttgtgtagttctgttttttgtttttgagaca

SEQ ID NO: 37257 - DNA, 120 bp, synthetic construct
  source 1..120: mol_type = other DNA
tatgaaaagcatttagattctctgtttatagaatatcccagttagccactattccacctaactatgggaatcaggacaaatcctgagaataaatttacaaacaagagagtcttcaggcag

SEQ ID NO: 37258 - DNA, 120 bp, synthetic construct
  source 1..120: mol_type = other DNA
aacatggcaaaaccctgtctctacaaaaaatacagaaattagccaggtgtggtggcctgtagtcccagctactcaagcagctgaggtgggaggatcacttgagccccagagatggaggtg

SEQ ID NO: 37259 - DNA, 120 bp, synthetic construct; identical to SEQ ID NO: 10771
  source 1..120: mol_type = other DNA

SEQ ID NO: 37260 - DNA, 120 bp, synthetic construct
  source 1..120: mol_type = other DNA
gacagcagcctcgagggtgtgaaccggaagaggagccgaggccacatgggaggaccggagggaggggtgggattttggagctgctggaaaggtgagcccggacctggtgcatggacgtgc

SEQ ID NO: 37261 - DNA, 120 bp, synthetic construct
  source 1..120: mol_type = other DNA
gagtgcccacaaggccgaagcaccataagcaccatgcagatggataaatggcccggagctgaaacctgccccttaacagaggccctgacccagaggaggccctgacagctggctaggctt

SEQ ID NO: 37262 - DNA, 120 bp, synthetic construct; identical to SEQ ID NO: 10772
  source 1..120: mol_type = other DNA

SEQ ID NO: 37263 - DNA, 120 bp, synthetic construct
  source 1..120: mol_type = other DNA
cccctctcaccgggaaccttgggggccagatcacactcccagacggtgggaaagccaggcggagggacaggcctgctggggtgggctgcgtggcggtgcagataacaggcgccagctgaa

SEQ ID NO: 37264 - DNA, 120 bp, synthetic construct
  source 1..120: mol_type = other DNA
ccgcagagctaatggagagcaggcattcagccgtctgcggagcagagctctgcctatggggccatttgtcatgcagctgccagagaggaagctggggccagggcctggctgtggcccctg

SEQ ID NO: 37265 - DNA, 120 bp, synthetic construct
  source 1..120: mol_type = other DNA
gggttggtggccccttcctgccactccactctctgctggcccagaagctcaaggccattccctggcagtctttgctggatgggccacgagagctgctaataaggttgcttgttcagggca

SEQ ID NO: 37266 - DNA, 120 bp, synthetic construct
  source 1..120: mol_type = other DNA
tcatcccaggctagccggcacccagaacccatcccagaccctgtacgtagcccccagatcactagctctgtctgctgtcacctgccggaggggtctgtgggtggcagaatgccaggaagc

SEQ ID NO: 37267 - DNA, 120 bp, synthetic construct; identical to SEQ ID NO: 10773
  source 1..120: mol_type = other DNA

SEQ ID NO: 37268 - DNA, 120 bp, synthetic construct
  source 1..120: mol_type = other DNA
gcaaagtcctgccagtcgaactcagcccaaagaccacagatggtcggcagtgaccgataccttccaccgggcttagctcactgctcatcttcctccactgcctctgcccatgttaggggg

SEQ ID NO: 37269 - DNA, 120 bp, synthetic construct
  source 1..120: mol_type = other DNA
aggatgggctcggttacggccaggtgtgcaagcggacatgcgggtgggcgtgagggtgaacacacaggtggaagtgggctcaggctctgcctgcctccgtggcacctcaagtgagctgtg

SEQ ID NO: 37270 - DNA, 120 bp, synthetic construct
  source 1..120: mol_type = other DNA
ggtcagtgacagtggccctcgggcccaggggctgcatggaactctacgtgggtgtcacctcccccttcctgagaccttatccttcaaatccaccatgaagaagggatgtggacgtgtttg

SEQ ID NO: 37271 - DNA, 120 bp, synthetic construct; identical to SEQ ID NO: 10774
  source 1..120: mol_type = other DNA

SEQ ID NO: 37272 - DNA, 120 bp, synthetic construct
  source 1..120: mol_type = other DNA
tctaatgacatcgtggccaaaacagagtctaaaatagatttggggaaagtagctcaccacacacttactgtgtctgaaacagccctgccccttcttcctcttgaatcttgcctccacacc

SEQ ID NO: 37273 - DNA, 120 bp, synthetic construct
  source 1..120: mol_type = other DNA
cattttaagtgtgcggtttggtggcatgaagcacattgacactgctgtgtagccgtcaccactgtcatctctagaacctttccatcttctcaaaccaaaacgctgttcccatcaaacact

SEQ ID NO: 37274 - DNA, 120 bp, synthetic construct
  source 1..120: mol_type = other DNA
tagcataatgtcttcaaggctcctccaggtggtagtgtgtgccacagttcccttccttttgaaggctgaataatattccattgtatgagtagaccacattccgcttacgcattcatcagt

SEQ ID NO: 37275 - DNA, 120 bp, synthetic construct; identical to SEQ ID NO: 10775
  source 1..120: mol_type = other DNA

SEQ ID NO: 37276 - DNA, 120 bp, synthetic construct
  source 1..120: mol_type = other DNA
tctagcctccagaatcatgagaaaacatatttctgttgtttaagccaccccacttaatctgtagtgctttgctatggcagcctagcaaaccaatataataggtgtacgaatatctcttca

SEQ ID NO: 37277 - DNA, 120 bp, synthetic construct
  source 1..120: mol_type = other DNA
tactttcccacccacagtacacagggtttcaatttctccacatcctcatcaacacttgttatctttggtctttgttttctgtgacagccatcttaagtgggcgtgagctggtatctcatt

SEQ ID NO: 37278 - DNA, 120 bp, synthetic construct; identical to SEQ ID NO: 10776
  source 1..120: mol_type = other DNA

SEQ ID NO: 37279 - DNA, 120 bp, synthetic construct
  source 1..120: mol_type = other DNA
tgtgcttttggtgttgtattcaagaaatcactgccaaattcagtgtcatgaagcttttcccgtatgttttcttctaagagttttatattttatggttttagctcttatatttaggtcttt

SEQ ID NO: 37280 - DNA, 120 bp, synthetic construct
  source 1..120: mol_type = other DNA
gtcttggcatgactgtggaacgtcatttgactttatctctgagagtttatttctgggctctccattccattccattggtctatatgtctgtattttatggtagtattacactgttttgat

SEQ ID NO: 37281 - DNA, 120 bp, synthetic construct
  source 1..120: mol_type = other DNA
tagactaattgttctgtttttggaaaaaaatgccactgggattttgatagggattgcactgaatctatagaccactttgggtagtcctgacctcttaacaatatcgcctcccaatccata

SEQ ID NO: 37282 - DNA, 120 bp, synthetic construct; identical to SEQ ID NO: 10777
  source 1..120: mol_type = other DNA

SEQ ID NO: 37283 - DNA, 120 bp, synthetic construct
  source 1..120: mol_type = other DNA
atgtgcagattccagactcagcctttctggtggtgtttatctccaaagttctcagccctggctgcacactgacatcacctggggagcatgggtagagtgcactggcctgcggtacagcga

SEQ ID NO: 37284 - DNA, 120 bp, synthetic construct
  source 1..120: mol_type = other DNA
cccatagatgaactgacctccgcagccttatttctgatgttctctgttccggtctcctcctttcagcaacagcccaggcagagggtttgtcattttccaaacacagctatgcatccatgg

SEQ ID NO: 37285 - DNA, 120 bp, synthetic construct
  source 1..120: mol_type = other DNA
cattttgcttcagccactcagggacagctccagggtcccatccccagcccccagcatgaagcccggcccatagcaatgcaggaatcaccctggtgccattcaccaaacaccccaagccct

SEQ ID NO: 37286 - DNA, 120 bp, synthetic construct; identical to SEQ ID NO: 10778
  source 1..120: mol_type = other DNA

SEQ ID NO: 37287 - DNA, 120 bp, synthetic construct
  source 1..120: mol_type = other DNA
gtttatttctctaactagactttgaatccatccctggcaagaggaaagctacccacctctctattcttggcctcatactgtacccggcaggcagcaggttccagatgtgtttgaattaac

SEQ ID NO: 37288 - DNA, 120 bp, synthetic construct
  source 1..120: mol_type = other DNA
agggtgggtctcttatcgcccattttaatgagcacattcctctctggtttcaaattctcattaccctctaacatttgttcagcaccagcagtttccacatgcagaagctttttcacaaat

SEQ ID NO: 37289 - DNA, 120 bp, synthetic construct
  source 1..120: mol_type = other DNA
ctgctagctcaggctgcccgtggaccccaggcggctgcccggagtggtggaggcaggtcccacgcaggtgtctcgggctggagtgagtatgaaagcatcaagtcaagcccaacatcgtgg

SEQ ID NO: 37290 - DNA, 120 bp, synthetic construct; identical to SEQ ID NO: 10779
  source 1..120: mol_type = other DNA

SEQ ID NO: 37291 - DNA, 120 bp, synthetic construct
  source 1..120: mol_type = other DNA
tttctaaatttaaaactcctgccagagctttgggccttccccaccactggtctctactcccagtccagtccctcacttcctcttcccgtctgccggccactcaggccctcacaggactgg

SEQ ID NO: 37292 - DNA, 120 bp, synthetic construct
  source 1..120: mol_type = other DNA
gattttcatccgctgcacaaaatgtaagtcagaccttgaccacatgtgttggagataaaaaggtgaattttcaggatttggactgataaagtcacctgtcagaaaagcatcaggaccaaa

SEQ ID NO: 37293 - DNA, 120 bp, synthetic construct
  source 1..120: mol_type = other DNA
tgaagtattaacgacagagccaacattaatctgacattagtatgtccttctgaaatctcccaactgttgcctcatttggtccttacagcaacccacacaagtaggaaagacaagtggtat

SEQ ID NO: 37294 - DNA, 120 bp, synthetic construct; identical to SEQ ID NO: 10780
  source 1..120: mol_type = other DNA

SEQ ID NO: 37295 - DNA, 120 bp, synthetic construct
  source 1..120: mol_type = other DNA
tactaactttctcttcaagttcttcttaactaaaagtaactcaagctggtgttgcaaggaacaggaaagtctaaaaaatcccaccaccaaatgcaatcacttcacattcttgcactatcc

SEQ ID NO: 37296 - DNA, 120 bp, synthetic construct
  source 1..120: mol_type = other DNA
taatgtttgcaatcaactaatttgtgtattcttgaaggatgggggcagttttactcacatcttagccctgacagcaggtgctaagtgtatatcgatcagatgcagttccgaccttccagc

SEQ ID NO: 37297 - DNA, 120 bp, synthetic construct
  source 1..120: mol_type = other DNA
gatggcccccacctcagggcaaactcgaggtttacaatatcagggtcacgatacaacattcctgtttgattccaaccgaggaagcaacacatcgagaatgatttgcattctccgctcctg

SEQ ID NO: 37298 - DNA, 120 bp, synthetic construct
  source 1..120: mol_type = other DNA
cctgcagcagggagggagccgggggctgagccggagccccagctctgtgatctgcgatctggggaatcttggacatatccggacttcagtttttcatctgtcaaatgagagggttgaact

SEQ ID NO: 37299 - DNA, 120 bp, synthetic construct; identical to SEQ ID NO: 10781
  source 1..120: mol_type = other DNA

SEQ ID NO: 37300 - DNA, 120 bp, synthetic construct
  source 1..120: mol_type = other DNA
ctaggtgagacggccaggacccagcagcatttctgcctttccatcttaacctgtgtcttgatacgcttcttaggttctaacccttaaggtttctcaactgattgttcagctccctcaatc

SEQ ID NO: 37301 - DNA, 120 bp, synthetic construct
  source 1..120: mol_type = other DNA
ccccgtcctgcccaccttgcctgccctcagtcactgcccggggagtggctcataggttctgaccacggctgagtggtgactgtggcctggatctcgccccaagtggtgacggccttggca

SEQ ID NO: 37302 - DNA, 120 bp, synthetic construct; identical to SEQ ID NO: 10782
  source 1..120: mol_type = other DNA

SEQ ID NO: 37303 - DNA, 120 bp, synthetic construct
  source 1..120: mol_type = other DNA
gcctaagctccactctcagagaagttccagagccatttactttccacagaggacaccgtagtttctcactacagcctaagcaacttcctgatgtcaaaagaaacatccaactgtttttca

SEQ ID NO: 37304 - DNA, 120 bp, synthetic construct
  source 1..120: mol_type = other DNA
tcccctggctttgaggaagtcccctgctccaccgtattcccagttcctcgtctggcccgaggccacccggggcttccctagctccatatcagcaccagacatgaaactctttttgctcaa

SEQ ID NO: 37305 - DNA, 120 bp, synthetic construct
  source 1..120: mol_type = other DNA
agtgtgtaaaaggaggccatcatccttcttatcacgggctggtgggaaacgagaccagaggacgtcatcaaaggcccttcccgcggtgtgagcccccgtggcactgggcatggcgagggc

SEQ ID NO: 37306 - DNA, 120 bp, synthetic construct; identical to SEQ ID NO: 10783
  source 1..120: mol_type = other DNA

SEQ ID NO: 37307 - DNA, 120 bp, synthetic construct
  source 1..120: mol_type = other DNA
gagctccatggaagcttggagggaccccactggcctcctcacgttgtggtggaggatgctctgcaggggccaacagtgcctcttctgaccagctgggggtggccatcctgaccgtcctga

SEQ ID NO: 37308 - DNA, 120 bp, synthetic construct
  source 1..120: mol_type = other DNA
gcttgtcttcttccagcctgtctgagatcccccagaaggagggagagtggggggcaggggcagcacctagagggacaggttgggtggaggctacaggagtctgggtcagctcccagttca

SEQ ID NO: 37309 - DNA, 120 bp, synthetic construct
  source 1..120: mol_type = other DNA
agggtgtggcctgggctgcaggttgccgcctccatccggagtagctgcggtcttcacaggtggcactgcgggccccagccagggggcaggggaggggatgttatgggacagggagcgctg

SEQ ID NO: 37310 - DNA, 120 bp, synthetic construct; identical to SEQ ID NO: 10784
  source 1..120: mol_type = other DNA

SEQ ID NO: 37311 - DNA, 120 bp, synthetic construct
  source 1..120: mol_type = other DNA
ctcatatatatatatatatatatatatatatatatatatatatatatcacgataatatgtatatgtaatcatgttatatacattatatagagttaatatattatgtgattatatctcaat

SEQ ID NO: 37312 - DNA, 120 bp, synthetic construct
  source 1..120: mol_type = other DNA
gtcttggttctccttctctgcagacccctcctaacacagagccctaggccccctcacccgagctggtggggacagacatggggagagtccagggtaaaagcaggccgctgtttggaagct

SEQ ID NO: 37313 - DNA, 120 bp, synthetic construct
  source 1..120: mol_type = other DNA
ccacaggccccagctggacgagaggacaaagacggatgtgaagggccgttgtcctggcagtgcttagagaacaacaggaaatggccaaatgtcctcctttgactgtcagggaacattcac

SEQ ID NO: 37314 - DNA, 120 bp, synthetic construct
  source 1..120: mol_type = other DNA
gcaagtgtctgtcatggcatcttgtcaccctgtcctgtcactgagggcctgtctcctgccacacccagttggagctcggcaaggaccgcgtctttttcacccctgagtcaccggctcctc

SEQ ID NO: 37315 - DNA, 120 bp, synthetic construct; identical to SEQ ID NO: 10785
  source 1..120: mol_type = other DNA

SEQ ID NO: 37316 - DNA, 120 bp, synthetic construct
  source 1..120: mol_type = other DNA
ggccccacacccggcccggccagccagctgcagacacaccctccagtcatcggccacccagacttcagagaggaaaaaaccagccacgaggtgaaagtgagatggccccggcctgacctc

SEQ ID NO: 37317 - DNA, 120 bp, synthetic construct
  source 1..120: mol_type = other DNA
tttggttagtgcttgaagacaaactgcaggagggacaccatgaactacaataaaattgggcaccctggggacatttttgtaaggtcaccgagttgctggctggctctgagacacaccctc

SEQ ID NO: 37318 - DNA, 120 bp, synthetic construct; identical to SEQ ID NO: 10786
  source 1..120: mol_type = other DNA

SEQ ID NO: 37319 - DNA, 120 bp, synthetic construct
  source 1..120: mol_type = other DNA
caaaaggtacagggagttcagaggaaggaggaaataccatggacttaaaaagcaagccagggcttcccaagccaagcatagtgaatagaggagctttcatttgtctcctcacttccatcc

SEQ ID NO: 37320 - DNA, 120 bp, synthetic construct
  source 1..120: mol_type = other DNA
tcaatttagtggattgcacaaccaccaaaaactgaattacaataagaatgtatctcatggttgcatgaagcctgtgtctcaatgattcacacacacatagaataaaatgtactttgtttg

SEQ ID NO: 37321 - DNA, 120 bp, synthetic construct
  source 1..120: mol_type = other DNA
cctctgagtagctgagattacaggcgcccgccaccacgcctggctaatttttgtatatttagtagagatggggtttcaccatgttggccaggctggtctcaaactcctgacctcatgatc

SEQ ID NO: 37322 - DNA, 120 bp, synthetic construct
  source 1..120: mol_type = other DNA
gagtgtagtagcgcaatcttggctcacttcaacctccgcctcccgggttcaagcgattctcatgcctcagtctcccaagtagctgggattacaggtgtgagccaccacgcccggctaatt

SEQ ID NO: 37323 - DNA, 120 bp, synthetic construct; identical to SEQ ID NO: 10787
  source 1..120: mol_type = other DNA

SEQ ID NO: 37324 - DNA, 120 bp, synthetic construct
  source 1..120: mol_type = other DNA
cccctctccgtactttatgcccagaaatacacatggagttaagaacacagaacatcacatctctttattaccacaagggtgtggtgattccctccctcctcacctctcaccaccaccccc

SEQ ID NO: 37325 - DNA, 120 bp, synthetic construct
  source 1..120: mol_type = other DNA
agcggtgcctgtcagcttctgttcccaactggcccgggcctgctgcgggtgccctcacctctagcgcctaaacccagagaactgggcagtcacagggtgttaggatggaaatggcctcag

SEQ ID NO: 37326 - DNA, 120 bp, synthetic construct; identical to SEQ ID NO: 10788
  source 1..120: mol_type = other DNA

SEQ ID NO: 37327 - DNA, 120 bp, synthetic construct
  source 1..120: mol_type = other DNA
tttgcatcttgtctccagcgacagcacaaagcccgtgctccaactccctttctggtgtcatttattgtacatgaatctgtgacttccccagagcccttcagtctgtgatcccagccacgc

SEQ ID NO: 37328 - DNA, 120 bp, synthetic construct
  source 1..120: mol_type = other DNA
tagccagcagcgatgcataaagaccagccaggtcaggagaaggtgtctgctactccccattccaggccacaccgccagggccacgctgcaggcagctaccagataggacatgaaggtgcc

SEQ ID NO: 37329 - DNA, 120 bp, synthetic construct
  source 1..120: mol_type = other DNA
ataagtttaattcttgtttaaaaagataaattgaacctctaccccctcagtgaggcaggcctggatctagatttctgcctaaccagctgtgtcatttgaaagtcgcctcacgggccgggt

SEQ ID NO: 37330 - DNA, 120 bp, synthetic construct
  source 1..120: mol_type = other DNA
aaaaattagccaggtgtggtggcgggcacctgtagtccaagctactcgggaggctgaggcaggagaatggcgtgaacccgggaggcggagcttgcagtgagctgagatcacgccactgca

SEQ ID NO: 37331 - DNA, 120 bp, synthetic construct; identical to SEQ ID NO: 10789
  source 1..120: mol_type = other DNA

SEQ ID NO: 37332 - DNA, 120 bp, synthetic construct
  source 1..120: mol_type = other DNA
ggcaggtggtgcacaggggatttctagggcggtggaaccgctctgcatgagagtgtaatagtggacacacaacatcacacacacgacatcacacatttgtcaaaacccacagaatgtaca

SEQ ID NO: 37333 - DNA, 120 bp, synthetic construct
  source 1..120: mol_type = other DNA
catgggggctgcagggtcagggaggggcagatgggcaccctctgaactttccgcttcaggttctgtaaacctaaaactgctcacaagtaaaatccactaaatttttaaaaagcaatagca

SEQ ID NO: 37334 - DNA, 120 bp, synthetic construct; identical to SEQ ID NO: 10790
  source 1..120: mol_type = other DNA

SEQ ID NO: 37335 - DNA, 120 bp, synthetic construct
  source 1..120: mol_type = other DNA
tgggagaagggtctgagaacccaggtccccatctctcaggcccaggcccttggcccccaggctggggcaatgaggaccaagtacagagggctccagatggaggccagggaccagctgcag

SEQ ID NO: 37336 - DNA, 120 bp, synthetic construct
  source 1..120: mol_type = other DNA
aggctgcaaaccacggcgctaatgaacctaaacaagggaatttgctaggttttcttatttttggtgttttgttgccaacaaactcattctgttctagaggggcttgttatataaggagga

SEQ ID NO: 37337 - DNA, 120 bp, synthetic construct
  source 1..120: mol_type = other DNA
tttttcaaacaagaaaaagcaaaaagcctgcatcgcatgtcctaggaatggggttaaaagtcgtcgtctcttgggacagagtttggacgcctctgtgagcagggcctggtcactgaggtg

SEQ ID NO: 37338 - DNA, 120 bp, synthetic construct; identical to SEQ ID NO: 10791
  source 1..120: mol_type = other DNA

SEQ ID NO: 37339 - DNA, 120 bp, synthetic construct
  source 1..120: mol_type = other DNA
tgcttgtgcaacacgaggctgccacgtctcaggtcttcgtgcccaaagtgagtggactctgaccttccaggatggccgagggtgccaacgtttcccaaagatctgttttcagactaatct

SEQ ID NO: 37340 - DNA, 120 bp, synthetic construct
  source 1..120: mol_type = other DNA
gccctattttcatggcttaaagggcagaatcaaaagatcacagtaggtcagttctccccaggctatctgtgtgcccagcctagagaaaggaatgaacattgaacagggacctgctggctg

SEQ ID NO: 37341 - DNA, 120 bp, synthetic construct
  source 1..120: mol_type = other DNA
agccacctgacctacacgctgtcctgggacaccctctactcctctttaatccccccgtgccagcattcctcaaaaaagggggctcaggactcccacaaggttaaagttatcatagacata

SEQ ID NO: 37342 - DNA, 120 bp, synthetic construct
  source 1..120: mol_type = other DNA
acctcctgggttcaagtgattctcctgcctcagcctccagagtagctgggattacaggtatgtaccaccatgcccagctaatttttgtatttttagtagagatggggtttcaccatgttg

SEQ ID NO: 37343 - DNA, 120 bp, synthetic construct; identical to SEQ ID NO: 10792
  source 1..120: mol_type = other DNA

SEQ ID NO: 37344 - DNA, 120 bp, synthetic construct
  source 1..120: mol_type = other DNA
tctctcacccatttatatcctactcattcttcaaaaactagctgattcccacaaatttacaccaacttttctgagcagtccagttgaaaatgatatcctactccattgcattttaatgcc

SEQ ID NO: 37345 - DNA, 120 bp, synthetic construct
  source 1..120: mol_type = other DNA
taagaagtaaattcatccagcttggccaacatggtgaaatcccatctctactaaatatacaaaaattagctgggcatggtggtgggcgcctatagtcccagcaactcaggaggctgaggc

SEQ ID NO: 37346 - DNA, 120 bp, synthetic construct; identical to SEQ ID NO: 10793
  source 1..120: mol_type = other DNA

SEQ ID NO: 37347 - DNA, 120 bp, synthetic construct
  source 1..120: mol_type = other DNA
tatgcttttgtctggaatgctctagtttaaccagtcccctgtaggtgacgcaggctgctttcaatctttggcaattacagagaattaatacaataaaaacttggtccatacttcatattt

SEQ ID NO: 37348 - DNA, 120 bp, synthetic construct
  source 1..120: mol_type = other DNA
gggccccttataaaaccaacagatctcgtgagaactcactatcacagaacagcatgggggaaaccacccccatgattgaattacctccacctgctctctcccttgacatgtgggaattac

SEQ ID NO: 37349 - DNA, 120 bp, synthetic construct
  source 1..120: mol_type = other DNA
ggctattttgttcaacacctggacttttgctgggttggtaagacgtggcatctgtgtaacccaaattgacatttgttttctttattccgtggtgttccatcgcggcacagagtcggcact

SEQ ID NO: 37350 - DNA, 120 bp, synthetic construct
  source 1..120: mol_type = other DNA
gagttttctgggatgtctatatccaataggtcatgatgtgaagttcctcgccgtggctcactgtcaaagtctgaaagccgctgcggaagtggctcaacgcatggcaggcacaggggctcc

SEQ ID NO: 37351 - DNA, 120 bp, synthetic construct; identical to SEQ ID NO: 10794
  source 1..120: mol_type = other DNA

SEQ ID NO: 37352 - DNA, 120 bp, synthetic construct
  source 1..120: mol_type = other DNA
taggatgtgccaggctcagctgccacctgacttttcaaataggaggaacccccagtgagaactcagctgagccagatgactcctaaatccatgaaagatgatttcaaatcatatttttaa

SEQ ID NO: 37353 - DNA, 120 bp, synthetic construct
  source 1..120: mol_type = other DNA
tttaatctaaaaactgggaatcatgggagttcctactggaaaatgagttaacatatagaagtatagaaccacatatgagttaacaaagacatggctgtgatgcctgggactcatttggaa

SEQ ID NO: 37354 - DNA, 120 bp, synthetic construct; identical to SEQ ID NO: 10795
  source 1..120: mol_type = other DNA

SEQ ID NO: 37355 - DNA, 120 bp, synthetic construct
  source 1..120: mol_type = other DNA
ctgggcgtggtggtggccgcctgtagtcccagctactcaggaggctgaagcaggagaatcgcttgaacccgggaagcggaggttgcagtgagccaggatcccaccactgcaccccagctt

SEQ ID NO: 37356 - DNA, 120 bp, synthetic construct
  source 1..120: mol_type = other DNA
caagggctaacttcctcatttattattaaaagaaaaaagaaaaaggcagaggccagtggtgaaggctggcgatttctggtctagggtgagagataacagaaagtaacaatggaggctctc

SEQ ID NO: 37357 - DNA, 120 bp, synthetic construct
  source 1..120: mol_type = other DNA
ctgattatctcaggctgatcaggaaggctggtaccaggagtgagtgactaaatgaagaaattactaattaacaaatgcttgggtggacaatccttcaaaatttaggatcaatgggaggag

SEQ ID NO: 37358 - DNA, 120 bp, synthetic construct; identical to SEQ ID NO: 10796
  source 1..120: mol_type = other DNA

SEQ ID NO: 37359 - DNA, 120 bp, synthetic construct
  source 1..120: mol_type = other DNA
ttcagaattgcgctggacatgggatacacaaaggtaagacatggacccaccctcaagtctgaaggtggaggtggggaagggcagaggctgtaaagggtcagagggaccttgtggagtggt

SEQ ID NO: 37360 - DNA, 120 bp, synthetic construct
  source 1..120: mol_type = other DNA
gaccaaaaagtggccagtcagccaccagcagacccatgggataggggaagaaaaacaagcaatctacagaacgtgggaaaatgcctatattaagaatcctggaatactccatgtgctttt

SEQ ID NO: 37361 - DNA, 120 bp, synthetic construct
  source 1..120: mol_type = other DNA
cacctatcagatcgggcacactgccccttcttcccaacctacgagctgaaatggccagcactgcgccttccagaacccagcgtagatgcacagctgccacggaggtaggaagaatgattc

SEQ ID NO: 37362 - DNA, 120 bp, synthetic construct; identical to SEQ ID NO: 10797
  source 1..120: mol_type = other DNA

SEQ ID NO: 37363 - DNA, 120 bp, synthetic construct
  source 1..120: mol_type = other DNA
agtttcgtaacccctccctacaaactaccccctttccctctgcccaagtgagcacagggaccgccccgcagcaagacgacggcagatatttaaaatgtgaggaaccccggccacagcggg

SEQ ID NO: 37364 - DNA, 120 bp, synthetic construct
  source 1..120: mol_type = other DNA
gcatctggcaggactctagtttgtcgacagtattccagacaaggtgtagctggctgaaccgcagtgcctcggcatttgggaccattgaaaaatactctggattctttttttttcttttgc

SEQ ID NO: 37365 - DNA, 120 bp, synthetic construct
  source 1..120: mol_type = other DNA
ctgatttggggggaaactgctagactcaatgaccagttggactgtaggcaagaaggcccatgattttgttcctcagataaaagagcagcagggaaacaggaggcctctctcctgcaaagc

SEQ ID NO: 37366 - DNA, 120 bp, synthetic construct; identical to SEQ ID NO: 10798
  source 1..120: mol_type = other DNA

SEQ ID NO: 37367 - DNA, 120 bp, synthetic construct
  source 1..120: mol_type = other DNA
cccccgaagggtctgggccagcatccaaggctaaagccttggctatcctaacgccgcagtggggcacttaaagctcctcacgcccaagcccaggcctggtgggagcacggttctctcccg

SEQ ID NO: 37368 - DNA, 120 bp, synthetic construct
  source 1..120: mol_type = other DNA
gtgactcagagggaaggggtggtggcagatgcctgcagctggctcccagccaggtttggccatcctgcgtaaatgcctgccttgggtcttggcctaatactaagggcaaatcccaagagg

SEQ ID NO: 37369 - DNA, 120 bp, synthetic construct
  source 1..120: mol_type = other DNA
catccagagactctcgcagtccacggcaggtgtcggagtgggcctcattccagagttgtggtggccgctccacctggcgagcttcgaggggactccggcaggcgctcgctgtggggtcct

SEQ ID NO: 37370 - DNA, 120 bp, synthetic construct
  source 1..120: mol_type = other DNA
cctgccagctcacttgactcacatggcaatggtcaccgggctgcctgagcccaaatcaagcaccgtttattagggggaagctccgttatccagaaagctcatctttgaagagctacccat

SEQ ID NO: 37371 - DNA, 120 bp, synthetic construct; identical to SEQ ID NO: 10799
  source 1..120: mol_type = other DNA

SEQ ID NO: 37372 - DNA, 120 bp, synthetic construct
  source 1..120: mol_type = other DNA
gtgcattctccttacatcaagtgaagataatattttgtttccttcccactttttctctaacacaagccaccccagttctcccttctgacaacaggcaagtggaccctagtagaccttcca

SEQ ID NO: 37373 - DNA, 120 bp, synthetic construct
  source 1..120: mol_type = other DNA
tctaaggttgaaaacatcagttgtttgggttgtgagaaaagaaaagcccacaaggtttccgaggcttggtgctgtttctcactgtcctcagctcctgattctgcagctggttctctctcc

SEQ ID NO: 37374 - DNA, 120 bp, synthetic construct
  source 1..120: mol_type = other DNA
ccagagggcccaccctgggctgcctggaaccccctaaagttgccacccccgcaacacagtagtggggcagttcctggcagcgcctgcagcccatgggctggctctgtacccgcagccccg

SEQ ID NO: 37375 - DNA, 120 bp, synthetic construct; identical to SEQ ID NO: 10800
  source 1..120: mol_type = other DNA

SEQ ID NO: 37376 - DNA, 120 bp, synthetic construct
  source 1..120: mol_type = other DNA
accctgtccatgtgtgacaggtggggcagaaccaccagctaggacaggtgggattggaagaacaaaggaacgacagggaccctgcagaacccacagccctctcgcctcagtcgcctgatg

SEQ ID NO: 37377 - DNA, 120 bp, synthetic construct
  source 1..120: mol_type = other DNA
agggacctgctatttatgaagcatctattatgtgctggcagctgccccttactcctgcaaggcaggtactgtctccattcttagaagaaaaatcaggctcaggagaaggaaataatttgc

SEQ ID NO: 37378 - DNA, 120 bp, synthetic construct; identical to SEQ ID NO: 10801
  source 1..120: mol_type = other DNA

SEQ ID NO: 37379 - DNA, 120 bp, synthetic construct
  source 1..120: mol_type = other DNA
ggagggaaggtattgagccttgaacgagccacttacctgtaggtccaacctaggtttcctgctacgtcaccagcccccaacaagagctaaaggtaggttttcactaccggacattcacca

SEQ ID NO: 37380 - DNA, 120 bp, synthetic construct
  source 1..120: mol_type = other DNA
gtccgagggcccgagtttgagctctagtttgccatttactggttatgcaatctcagtaaattattcaaattcatggagcctcaatttccttgtgtaaaagggaaatctcccaggatcatc

SEQ ID NO: 37381 - DNA, 120 bp, synthetic construct
  source 1..120: mol_type = other DNA
caaaatatgcaatacagacagctaacagcagtgtaagaggtaacgtagagacagatccttctaagaaattaagacccctacctgactgcattaggagtcatcaattgaatctaccgacaa

SEQ ID NO: 37382 - DNA, 120 bp, synthetic construct; identical to SEQ ID NO: 10802
  source 1..120: mol_type = other DNA

SEQ ID NO: 37383 - DNA, 120 bp, synthetic construct
  source 1..120: mol_type = other DNA
gaggaggtcaagaccaagcatcttcctcttgttggaaaggccaatgcctgggacacaggactcaagagtttgttttgctaaagtgctgatgtttaatttcaccctgggacaggacctgaa

SEQ ID NO: 37384 - DNA, 120 bp, synthetic construct
  source 1..120: mol_type = other DNA
aggctggaccgcaggacacctggcttctctttccagctgaatccctttgtgactttaggcaaagaagattaaatattttagattttcaattatgttcactgaatttaaccactgaaccct

SEQ ID NO: 37385 - DNA, 120 bp, synthetic construct
  source 1..120: mol_type = other DNA
gaagcagctggaaggtgagaaacccccagacctaagaggcccacagtgaggcccctcgggtgagtcggagcctgcccagggtgtgtggagccccagggtgccggctcactctgactgcgt

SEQ ID NO: 37386 - DNA, 120 bp, synthetic construct
  source 1..120: mol_type = other DNA
atcttccaacacctacaatccgtaacgccatcaacgctggattccctgctagcccagccttcttcaattgtttactatcacctttgctctccacctgggttgaaaattcagatgcacaga

SEQ ID NO: 37387 - DNA, 120 bp, synthetic construct; identical to SEQ ID NO: 10803
  source 1..120: mol_type = other DNA

SEQ ID NO: 37388 - DNA, 120 bp, synthetic construct
  source 1..120: mol_type = other DNA
gatcttctcttccttcccttcctctctcccccactcccctcccatctgctgcttctttggattccccacaacttcagcaagcaagtaagcgttgggctccacgctccgcaggaggccaag

SEQ ID NO: 37389 - DNA, 120 bp, synthetic construct
  source 1..120: mol_type = other DNA
aagggcaaggccaggcaaagaatgacaacttcgctaagatttcagctccagtaagggaagttcaagccagggtgggaaggcagggaggagaccctgtacccaggacccagtgtgtgaggc

SEQ ID NO: 37390 - DNA, 120 bp, synthetic construct; identical to SEQ ID NO: 10804
  source 1..120: mol_type = other DNA

SEQ ID NO: 37391 - DNA, 120 bp, synthetic construct
  source 1..120: mol_type = other DNA
tcttccagatgctaataagcagtgcaggcttgtaagctgctggatggcaggatgcgagtgacggggacgggcggcactcccagctctgacaaatcctgctgcctcactcgaaaggtccat

SEQ ID NO: 37392 - DNA, 120 bp, synthetic construct
  source 1..120: mol_type = other DNA
cccaaggcagcgcaacaagcggctggcagacagcatgggctggcctaagacagcgcaggcaacggtcttggtggctggagctgctttgctgctcaaaatgcaggcagagctcgggcagat

SEQ ID NO: 37393 - DNA, 120 bp, synthetic construct
  source 1..120: mol_type = other DNA
aagacaggcagcaggatggagggaggcaggagcagaggccgatgatgcagcagtggacagctctgggctccaggtcctctggccagcacaacccctgcactgttcccatctaacttcagg

SEQ ID NO: 37394 - DNA, 120 bp, synthetic construct; identical to SEQ ID NO: 10805
  source 1..120: mol_type = other DNA

SEQ ID NO: 37395 - DNA, 120 bp, synthetic construct
  source 1..120: mol_type = other DNA
acccttcccctcctcacctcctcctgggggctctcacaccccaggccatcacccactacccaaatcaccccagggcaggtaccagacagctagggacagcccctgtacccacagtcccct

SEQ ID NO: 37396 - DNA, 120 bp, synthetic construct
  source 1..120: mol_type = other DNA
agggatctgtgagtatcatcagttccttccttcgtgacactcattcctgagtctgcatgtcttcctgtacctgattacaacaaatcccaggtgccctgaaaacaggctgtggggcagaaa

SEQ ID NO: 37397 - DNA, 120 bp, synthetic construct
  source 1..120: mol_type = other DNA
atattgagtgatctgttgctgcaggtattcaagaaaaggaggcttcttccacgagcctgtgactcaaaggctatgatttagtgggcaaatgtgttattcaggtaaggttgatggcaacac

SEQ ID NO: 37398 - DNA, 120 bp, synthetic construct
  source 1..120: mol_type = other DNA
ctttggggggcctctgtaggggttggaagtccgtggctttcttaaagtcactttcagcccaggagggtaccaggcaatccagctgtccactcagagacctgacaaatcacaggcctggcg

SEQ ID NO: 37399 - DNA, 120 bp, synthetic construct; identical to SEQ ID NO: 10806
  source 1..120: mol_type = other DNA

SEQ ID NO: 37400 - DNA, 120 bp, synthetic construct
  source 1..120: mol_type = other DNA
tgctgttgggatcatggatgaacacgcatcaggacagaaataagcatcatcctgggatgtgcgggattattctggaaccagagggcagtgctagcataaacctgaggtttagcagaaagc

SEQ ID NO: 37401 - DNA, 120 bp, synthetic construct
  source 1..120: mol_type = other DNA
tctggaactagccttgctgggtgagctgggcctgttttattttctgtgtgctttattccaaagcatacatacgagcctgaggaaaaaagcctaattggttttccttggaaaagctggaaa

SEQ ID NO: 37402 - DNA, 120 bp, synthetic construct
  source 1..120: mol_type = other DNA
gggtgtgatgatgctgtagttctcacggcagcaattccacgtctcagggacccaggatcactcattagagattaaggaacataaacaactccactcctgcttgcaagctgcccaccgcaa

SEQ ID NO: 37403 - DNA, 120 bp, synthetic construct; identical to SEQ ID NO: 10807
  source 1..120: mol_type = other DNA

SEQ ID NO: 37404 - DNA, 120 bp, synthetic construct
  source 1..120: mol_type = other DNA
aaacagaaccagaaaaccttcactagctccatgccatctacagaacaaaccccacttcttcagcatgggctgccaggcccacaggagcctggcccacggtcatccttccacacccccagg

SEQ ID NO: 37405 - DNA, 120 bp, synthetic construct
  source 1..120: mol_type = other DNA
taggttatcaccagggccctctcctggaactcatgttttgagtctattttaagtgctgagtattttacatatcctctctcaacctgcacaaaatactgtccattttatcgataaggaaat

SEQ ID NO: 37406 - DNA, 120 bp, synthetic construct; identical to SEQ ID NO: 10808
  source 1..120: mol_type = other DNA

SEQ ID NO: 37407 - DNA, 120 bp, synthetic construct
  source 1..120: mol_type = other DNA
tgtgcagaaatgggatattgtcaagtatgttctgatagagccagacattggggccttatgatattacataacaagtcaaaacagtgacttcaaagaatgacaaatggcaaatgtgacagg

SEQ ID NO: 37408 - DNA, 120 bp, synthetic construct
  source 1..120: mol_type = other DNA
acagacctgggttagatttctcagcatcccagaaatctagcacaaatctttgccaaatcccatgccgccctcagcccttcacctaaaagtcaaatgctgcatgccaagctcacgtccctg

SEQ ID NO: 37409 - DNA, 120 bp, synthetic construct
  source 1..120: mol_type = other DNA
gcaactgccctgggcagagacgctgaccaataaagcccatattctaccccccttttatgtgccaatgctgtccctgccctcactgtcctgcaagatctgtgcaggggaaagccagaggcc

SEQ ID NO: 37410 - DNA, 120 bp, synthetic construct; identical to SEQ ID NO: 10809
  source 1..120: mol_type = other DNA

SEQ ID NO: 37411 - DNA, 120 bp, synthetic construct
  source 1..120: mol_type = other DNA
tggcgaaatgagtggtgtgcagagtgagtcaggaggatggcacaggctgcagcccccttggataaagagacagagaatctggccggcccgcagcccacccagccccggtgacctggacgc

SEQ ID NO: 37412 - DNA, 120 bp, synthetic construct
  source 1..120: mol_type = other DNA
ctgagacttcctctgagctacaagaacaggttggacctgccgcctaaaatcgcctatagggatttggcaaaccctgctctaggatttccttttgttgtcataggccaccagtcccaaggc

SEQ ID NO: 37413 - DNA, 120 bp, synthetic construct
  source 1..120: mol_type = other DNA
ccccctgcccctccctgggtacctccatccaggtagaactaatagttctaaaactgcaggattgcaaagacatttggagtcattaagaccttgtgtcctgattttaatggagtctaaaca

SEQ ID NO: 37414 - DNA, 120 bp, synthetic construct
  source 1..120: mol_type = other DNA
cccctgagcctcaaatgtgggatggggccccagagccctctgtccaaagaagtgccgtgtgtactgagtgtgcatgcagctcctgcggtggctgacttgtgtttggagcatgtcacctgc

SEQ ID NO: 37415 - DNA, 120 bp, synthetic construct; identical to SEQ ID NO: 10810
  source 1..120: mol_type = other DNA

SEQ ID NO: 37416 - DNA, 120 bp, synthetic construct
  source 1..120: mol_type = other DNA
tctaaaaaatggtgcatgccaaaaggagctgatgggcttagcataaattcaagagggacaggcttaagcatctgtcagagcttcactccttccaagaacttctctgacctcgctcctacc

SEQ ID NO: 37417 - DNA, 120 bp, synthetic construct
  source 1..120: mol_type = other DNA
gtggcctggcccctgtggcttctgcagggcacactctactcggaacaccgctccgtggcctggcccctgtggcttctgcagggcacactctactcggaacaccgctccgtggcctggccc

SEQ ID NO: 37418 - DNA, 120 bp, synthetic construct; identical to SEQ ID NO: 10811
  source 1..120: mol_type = other DNA

SEQ ID NO: 37419 - DNA, 120 bp, synthetic construct
  source 1..120: mol_type = other DNA
tcccagtcaatggatattcttaggaccccccccagccaggtacctgcctcatgctgcattgctgggacccaagaaaagtagaagagagagcctccaaccccacggacctcagtcccggcc

SEQ ID NO: 37420 - DNA, 120 bp, synthetic construct
  source 1..120: mol_type = other DNA
agtcttaaaaaataacttcatgaaaggagtaagactgaagctaagataagcaagatcaggtaaaaatcagaggcactgaagggtccttgcattttgtaaggccccagagcatcctcctcc

SEQ ID NO: 37421 - DNA, 120 bp, synthetic construct
  source 1..120: mol_type = other DNA
taagctgggaaccaggattgggcccaggcttggcacacacagaaggccaacaggctgtagcacaagcctggctagtctcaggcaggtgctccggggctgaatgtctgtgacctaaaacag

SEQ ID NO: 37422 - DNA, 120 bp, synthetic construct
  source 1..120: mol_type = other DNA
aaaccattttttttctacaaattgccctctataacaatgcccctaagcaagtcctctctaagacacattggattcctcgtcctgagcacaccatgaaggagaaaaatgcctctactcacc

SEQ ID NO: 37423 - DNA, 120 bp, synthetic construct; identical to SEQ ID NO: 10812
  source 1..120: mol_type = other DNA

SEQ ID NO: 37424 - DNA, 120 bp, synthetic construct
  source 1..120: mol_type = other DNA
ctgccactggggacagatacagagactctgaaccttaaggcaaggtaggaaatggcagaaagtaaataatagaatgttccagaaacagacacctgcagcctcctctgggtgggatgatgt

SEQ ID NO: 37425 - DNA, 120 bp, synthetic construct
  source 1..120: mol_type = other DNA
cagcaggccagggtcaagggcggggggtgactttactgtccccaaggcctcctttaatcaactgaccacgatgtacccagcgctgcctgggtgaaggcgctgtgggagtaaaaaggagca

SEQ ID NO: 37426 - DNA, 120 bp, synthetic construct
  source 1..120: mol_type = other DNA
ccaagggccaggaggcgaggggaaggctgagaggaacggtgagccggccccgctgcccaggcttgggcacctggggcagctggcctgtgagatggtgctgcttccagtggtggcaggtgg

SEQ ID NO: 37427 - DNA, 120 bp, synthetic construct; identical to SEQ ID NO: 10813
  source 1..120: mol_type = other DNA

SEQ ID NO: 37428 - DNA, 120 bp, synthetic construct
  source 1..120: mol_type = other DNA
acagcggaaaacgcaagctcaactgcagaacctgctccctgacccctggcttgtcacagcagcaggggccaggccacagccggactctgccaggcgtggcccctctcagcacagccgcct

SEQ ID NO: 37429 - DNA, 120 bp, synthetic construct
  source 1..120: mol_type = other DNA
ctgaaacttcttaaatgttttaatgattttaaaagaaatatctcagaatgcattatactctgctgttatgggttaaagtgcttgcacccgcaaaaaagacattggagtcttcactcccag

SEQ ID NO: 37430 - DNA, 120 bp, synthetic construct
  source 1..120: mol_type = other DNA
caagagagtagatcccaaggagatggaacctcactcaccctctgcctaaccagtcctggcctactgggccatctgggggcctcatctctgattaaaatgtcaaactccacatcagaggct

SEQ ID NO: 37431 - DNA, 120 bp, synthetic construct; identical to SEQ ID NO: 10814
  source 1..120: mol_type = other DNA

SEQ ID NO: 37432 - DNA, 120 bp, synthetic construct
  source 1..120: mol_type = other DNA
gagttttcaaaaactagatcccaattaagaactactgaatcaaaattgctggggctgagaactgggtgattgaaatattctgctaagtaagaaccactgatagcacccacccacctcact

SEQ ID NO: 37433 - DNA, 120 bp, synthetic construct
  source 1..120: mol_type = other DNA
aatctgagctttccctttaagaaggaatcagcttttgatttaaagtaaactgagaggcaattccttggacttcagggactcaagggcatgccgtaaatcgcccttggttcagaatattca

SEQ ID NO: 37434 - DNA, 120 bp, synthetic construct; identical to SEQ ID NO: 10815
  source 1..120: mol_type = other DNA

SEQ ID NO: 37435 - DNA, 120 bp, synthetic construct
  source 1..120: mol_type = other DNA
tgtgccttgcatttcccagaagtgatgggtgccacttcccagtggaagcttttggagctgtctgacacctctctcctgctcctctcacagcaagcacccagacaggaactgctccttcag

SEQ ID NO: 37436 - DNA, 120 bp, synthetic construct
  source 1..120: mol_type = other DNA
actaccccagcggaactcagccgacactcgtgcgctttctcctgcccccttccctctctttcttctgagtctattccctaatcctaaataaactcagtgtaacttatagcgcttaagaag

SEQ ID NO: 37437 - DNA, 120 bp, synthetic construct
  source 1..120: mol_type = other DNA
gagttcgagaccagcctggccaacatggtgaaaccccgtctctactaaaaatacaaaaaaattagctgggtgtggtggcaggcgcgtgtaatctcagctactcaggaggctgaggcagga

SEQ ID NO: 37438 - DNA, 120 bp, synthetic construct; identical to SEQ ID NO: 10816
  source 1..120: mol_type = other DNA

SEQ ID NO: 37439 - DNA, 120 bp, synthetic construct; identical to SEQ ID NO: 3588
  source 1..120: mol_type = other DNA

SEQ ID NO: 37440 - DNA, 120 bp, synthetic construct
  source 1..120: mol_type = other DNA
cagatgaagcacaagtctccgccctccagggaactcccagcacagtgggaagaatacatttgaagcctgttttttcccctttcatgttaaaacagagaacttcctgccctgtttgtctct

SEQ ID NO: 37441 - DNA, 120 bp, synthetic construct
  source 1..120: mol_type = other DNA
ccagagcataaagctgtgtggctcagagctaggtcaagcttcccatcccagcctaaggcttcttcactccctttcctggccccaattgcctccaaacaaaaatcagcaagcaagccgcca

SEQ ID NO: 37442 - DNA, 120 bp, synthetic construct; identical to SEQ ID NO: 10817
  source 1..120: mol_type = other DNA

SEQ ID NO: 37443 - DNA, 120 bp, synthetic construct
  source 1..120: mol_type = other DNA
gattctcccacctcagcctcccgagtagctgggattacaggcaccgaccaccacgcctggctaatttttttgtatttttagtagagacagggtttcaccttgttggacaggctggtctcg

SEQ ID NO: 37444 - DNA, 120 bp, synthetic construct
  source 1..120: mol_type = other DNA
agttccattaatttcacccatttcctctttccatttccagctcttcataaggaggaaattccctctcaccttcccttcctctctctttcctttatgaggtgaaaatgtaccctaatcatt

SEQ ID NO: 37445 - DNA, 120 bp, synthetic construct
  source 1..120: mol_type = other DNA
attaaacaaatactagacgtgatacatcctcaaatacacggagccctcttccaacattctccatttatttttttccttccactgatcaaacttgtttttcacaaaataccacttttgagt

SEQ ID NO: 37446 - DNA, 120 bp, synthetic construct; identical to SEQ ID NO: 10818
  source 1..120: mol_type = other DNA

SEQ ID NO: 37447 - DNA, 120 bp, synthetic construct
  source 1..120: mol_type = other DNA
cagaccactggctctcaaccttggatggacacagaaatcatctctggagttcaaaacaacaaccacaaaaaccccaatgcctggtctcagagtttctcatttaatccatctggggtccag

SEQ ID NO: 37448 - DNA, 120 bp, synthetic construct
  source 1..120: mol_type = other DNA
tgcctcccaggttcaagtgattctcctacttcagcctctggagtagccaggattacaggtgcctgccaccacacccagctaatgtttgtatttttagtagagacagggtttcaccatgtt

SEQ ID NO: 37449 - DNA, 120 bp, synthetic construct
  source 1..120: mol_type = other DNA
tcaggtgattctaacatgcagccaaaataggtaggtagacctagagaaaggaacacagtgggttccaggacgctcattttacataaagagaaatatgctttttaccaggaaaaggtcctg

SEQ ID NO: 37450 - DNA, 120 bp, synthetic construct; identical to SEQ ID NO: 10819
  source 1..120: mol_type = other DNA

SEQ ID NO: 37451 - DNA, 120 bp, synthetic construct
  source 1..120: mol_type = other DNA
tggaacaaaggaggaatcccaagtggatccaggtgcactgggccacccattcacccagcaagcacacagcaaacgcctgctacccaggggagccccgaccccaggctggccctggaatga

SEQ ID NO: 37452 - DNA, 120 bp, synthetic construct
  source 1..120: mol_type = other DNA
gtaatggatatcaaatcctagcccaacaaggggtgacggcaggactctccccggattcaggtctatgttgtattcatctctgcacagttcctgatagacagtgcatgctcagtaaatatt

SEQ ID NO: 37453 - DNA, 120 bp, synthetic construct
  source 1..120: mol_type = other DNA
attttcatagtcttagaagcctacaaactgaccgtggctttgtctcatctcttcttccctccttttaagggcctttcactcaccacgatatcaatataaaactgccaatacttgggcctg

SEQ ID NO: 37454 - DNA, 120 bp, synthetic construct
  source 1..120: mol_type = other DNA
aaaaaaaactttaaaagtcagtggggcatggtggctactgaggaggctgaggtggaaggatcacttaagctcaggagtttgaggctgcagtgagctatgatcacaccaatgtactccagc

SEQ ID NO: 37455 - DNA, 120 bp, synthetic construct; identical to SEQ ID NO: 10820
  source 1..120: mol_type = other DNA

SEQ ID NO: 37456 - DNA, 120 bp, synthetic construct
  source 1..120: mol_type = other DNA
aatgatcaataagtatatgaacataagctcaacattagttatcagggaaatgaaaatcaaaaccacaatgagacaccacttcacacccactgggacagctagaacataagagagacaatt

SEQ ID NO: 37457 - DNA, 120 bp, synthetic construct
  source 1..120: mol_type = other DNA
gtaaagtcacaatatgacccagcaactccactcctaggtatattctcaagagaaataaaaacgtatttccatacagaaatttgtacacaaatgtttgtagcagcattattgataatagcc

SEQ ID NO: 37458 - DNA, 120 bp, synthetic construct
  source 1..120: mol_type = other DNA
tggatgaaacttaaaaacatttcgttacgtgaaagaagtcataaaagaccaaatatcatacaattccttccggggaccctgcagcgggggagggcataagaggacggggttgacgggggg

SEQ ID NO: 37459 - DNA, 120 bp, synthetic construct; identical to SEQ ID NO: 10821
  source 1..120: mol_type = other DNA

SEQ ID NO: 37460 - DNA, 120 bp, synthetic construct
  source 1..120: mol_type = other DNA
tttttttttttttaccatgctcacgaggggacacctggggtcgctgatagaagttcagcggtttgccattcgccattctcaggcttgaaactctgtgcctggcccaggccgagaggaacc

SEQ ID NO: 37461 - DNA, 120 bp, synthetic construct
  source 1..120: mol_type = other DNA
ctctttcctctccagggcgccctgagatgcagggagcaggcagagaagagagaggccgaggagagaaataagccaagcccggggtctgagcaggctgcacctggcatccgtcagcatctc

SEQ ID NO: 37462 - DNA, 120 bp, synthetic construct
  source 1..120: mol_type = other DNA
gtgcctccccggccctcccgcgatgggactcatgaggggcagcaaagagccccgggggcggggggaagaggaaccagagcctggcctgaggcctcctgcgggatggtggacagctgaggc

SEQ ID NO: 37463 - DNA, 120 bp, synthetic construct; identical to SEQ ID NO: 10822
  source 1..120: mol_type = other DNA

SEQ ID NO: 37464 - DNA, 120 bp, synthetic construct
  source 1..120: mol_type = other DNA
gttgacaaggatacaaataaattgcaatcctcatattgctgggaattgctggtgggaatgtaaaagggtgctgccagcttggaaaactgcctggcagtgcctcagaagttaaatataaag

SEQ ID NO: 37465 - DNA, 120 bp, synthetic construct
  source 1..120: mol_type = other DNA
tggaaacaacccaaatttcctttgatgaatgagcaaaacatggtatattcatacaatggaatattatccagcccataaaaaggaaggactgacgcatggtacaacatggacgaaccttaa

SEQ ID NO: 37466 - DNA, 120 bp, synthetic construct; identical to SEQ ID NO: 10823
  source 1..120: mol_type = other DNA

SEQ ID NO: 37467 - DNA, 120 bp, synthetic construct
  source 1..120: mol_type = other DNA
tgctgtgtccctggcctgcctgcaccgaggctggggcatcctggcaggatcagaggccgctagggaggtgacagagtggggagcagaggacacttccccagaaccgagacgggagagagg

SEQ ID NO: 37468 - DNA, 120 bp, synthetic construct
  source 1..120: mol_type = other DNA
aggaatctcaggagtctggactagaagggtacaggggccaccagatgcctggaacccagactcttctgaggcctgggggaaggggaggaaggtccctcccagaatgcttgaaattgaatt

SEQ ID NO: 37469 - DNA, 120 bp, synthetic construct
  source 1..120: mol_type = other DNA
ggaggagggagggaataaatctgagtctttgccccacagagtttgtggacaccagttcacaccaaggagacctgcttgttgggggcgaagcagaagctccgacttctgggcagtgttcac

SEQ ID NO: 37470 - DNA, 120 bp, synthetic construct
  source 1..120: mol_type = other DNA
cctcagaggaaggagcctaggggttctccccccttcccctggggctggtctgctgggcactgaggcatctctggggggggggtcccagcacagcccaccctgggtcccttccacagcgtg

SEQ ID NO: 37471 - DNA, 120 bp, synthetic construct; identical to SEQ ID NO: 10824
  source 1..120: mol_type = other DNA

SEQ ID NO: 37472 - DNA, 120 bp, synthetic construct
  source 1..120: mol_type = other DNA
gcactcactcgtttatggtgcaccagccctggaagattcaggaacagaaagacagacagcgtccatcacgaagctggctttccagtggagaggcgcatgtcaaaataaaaagctaatttc

SEQ ID NO: 37473 - DNA, 120 bp, synthetic construct
  source 1..120: mol_type = other DNA
aactgaccattggaagctgggacagagcaccccgggcaggagggtagccagtgcaaaggccctgaggcagggctcgggagtgtgcagcgggaagggttctcatccctgctcatccctgag

SEQ ID NO: 37474 - DNA, 120 bp, synthetic construct
  source 1..120: mol_type = other DNA
gggtgagagacagccctgtgggtgccgccctcacctgcgctctgctatagagaggagagccagagcggggcggcaggagtgtctgtctcggctcttaagccgatggacgctccagaaacc

SEQ ID NO: 37475 - DNA, 120 bp, synthetic construct; identical to SEQ ID NO: 10825
  source 1..120: mol_type = other DNA

SEQ ID NO: 37476 - DNA, 120 bp, synthetic construct
  source 1..120: mol_type = other DNA
tttccacctcaccgtccatctctccttcctctaggagaaggcccggcccatggcgggggccaggcagggataacagaatagtgaatctacttaaaaagttacctttgctaaatactcacc

SEQ ID NO: 37477 - DNA, 120 bp, synthetic construct
  source 1..120: mol_type = other DNA
ctgaccctgaaaacttaaggacaaattcaaacaaggtgtcaactcaagtcacagaatttggtgatcatgatttgtcttaaactgactcccacttctaagggaatgagaaagtacacccaa

SEQ ID NO: 37478 - DNA, 120 bp, synthetic construct; identical to SEQ ID NO: 10826
  source 1..120: mol_type = other DNA

SEQ ID NO: 37479 - DNA, 120 bp, synthetic construct
  source 1..120: mol_type = other DNA
tctggggtcggaagggaccctggaaagcatctgatgaggtgcagagaggtttaagcccccaccccaggaacggagtggagggagtgtggagggctacggcgcagtgccgcccctccccat

SEQ ID NO: 37480 - DNA, 120 bp, synthetic construct
  source 1..120: mol_type = other DNA
gagaatctgtccaggcctttctgccagctacgggtggctgccggccatctttggggtttcctggcttgtagaagcatcaccttgatctccaccttcatcctcaccagaggtctctccggg

SEQ ID NO: 37481 - DNA, 120 bp, synthetic construct
  source 1..120: mol_type = other DNA
ggtcacattcacaggtacagagggttaggatttggacacatcttttaggagacacacaattcaactcataacagggtgcccttagaaaggttttatgttcatttgtttttagggtcaggg

SEQ ID NO: 37482 - DNA, 120 bp, synthetic construct
  source 1..120: mol_type = other DNA
ttttaattttttgtagagacgggtctccctatgttgcccaggctggtctcgaactccttggctcaagtgatcctcccacctcggccccacaaagtgctgggattacaggcattaaccacc

SEQ ID NO: 37483 - DNA, 120 bp, synthetic construct; identical to SEQ ID NO: 10827
  source 1..120: mol_type = other DNA

SEQ ID NO: 37484 - DNA, 120 bp, synthetic construct
  source 1..120: mol_type = other DNA
caccgtgatgaaagtgcatctgtcccacaaagggcagcctttccgtattcaagagtggggtgcagctcagggaggcatcggagatggggactgtgacgaggccaatccacgggcattgat

SEQ ID NO: 37485 - DNA, 120 bp, synthetic construct
  source 1..120: mol_type = other DNA
ccagtgagatgtgattacaatgaatattcatgaccgcttcccatatcctgagttttgtcttcggccgtgtctttggagcattccttcccctatagcatgatttctcttttatgttttgtc

SEQ ID NO: 37486 - DNA, 120 bp, synthetic construct
  source 1..120: mol_type = other DNA
cctgggtccacaggctggattctcaagaggggcgagagaatggggtggtggctgccccaggccagctggtccaggcagcttccctgatcaccgcagtgacgctcctgctcaagctgggag

SEQ ID NO: 37487 - DNA, 120 bp, synthetic construct; identical to SEQ ID NO: 10828
  source 1..120: mol_type = other DNA

SEQ ID NO: 37488 - DNA, 120 bp, synthetic construct
  source 1..120: mol_type = other DNA
ccctctcctcctggcaggttctctggctttaggcattaatgtcctgtgacaaattcacttaggactaagaagccactgagaatattcagttcttggatcatccacaacagcggaagcaga

SEQ ID NO: 37489 - DNA, 120 bp, synthetic construct
  source 1..120: mol_type = other DNA
aaccccggttacctccagctcagccctgccctgggcgctgcgaggaaaacaaagccacaccacaccgtgcacagccgtcttcacatctctggaagacatcaccgtacaggagcggtgggg

SEQ ID NO: 37490 - DNA, 120 bp, synthetic construct
  source 1..120: mol_type = other DNA
gagacctggtatttttcattaaacagataaagtttattttcttcaaatagtatcagaaatattttgaaatgaccctcaattccacattggggtcaattatgggggagggaaagggggaaa

SEQ ID NO: 37491 - DNA, 120 bp, synthetic construct; identical to SEQ ID NO: 10829
  source 1..120: mol_type = other DNA

SEQ ID NO: 37492 - DNA, 120 bp, synthetic construct
  source 1..120: mol_type = other DNA
atgctaatgatctattaatcactgtttctggctgacttccctttacaccagtgccttcagaagctcccctaccgagtgggcctgtcttagggaggaattacttcctacagctaatccaga

SEQ ID NO: 37493 - DNA, 120 bp, synthetic construct
  source 1..120: mol_type = other DNA
gggccttggagacacgcacaggaccctggaggaggccacacctgggcctcgggaacgcgcacaggaccccggaggaggccacacctgggcctcgggaacaggcaccagcagaggcaggac

SEQ ID NO: 37494 - DNA, 120 bp, synthetic construct
  source 1..120: mol_type = other DNA
aggaggccagctcccactgctgcagcactcagctggggtcagcggggctgtggcgttgcaccactccatgaagggcctggtgtcccttgacttggacaccctcgaccctgccaggctcgg

SEQ ID NO: 37495 - DNA, 120 bp, synthetic construct; identical to SEQ ID NO: 10830
  source 1..120: mol_type = other DNA

SEQ ID NO: 37496 - DNA, 120 bp, synthetic construct
  source 1..120: mol_type = other DNA
gagataaagcaagaccctgtttcaaaaaaaaaaaaaaaaaagtaaagaaggccaggcacagtggctcacaccggtaatcccaacactttgggcggctgagacaggcagaccccttgagtt

SEQ ID NO: 37497 - DNA, 120 bp, synthetic construct
  source 1..120: mol_type = other DNA
agaatcgcttgaacccggaaggcagaggttgtagtgtgcagagactgagccattgcactccaggctgggcaacagagtgagactgtctcaaaaaaaaaaaaaaaaaaatagaaaaggggc

SEQ ID NO: 37498 - DNA, 120 bp, synthetic construct
  source 1..120: mol_type = other DNA
gggctcgctgcaccagaagcttcctagaaaaccacatcttttctgctaagaatcagaaaagtcgtgatattctcagacatcagccaactacagactggcctgcagaaggaaggaaagtag

SEQ ID NO: 37499 - DNA, 120 bp, synthetic construct; identical to SEQ ID NO: 10831
  source 1..120: mol_type = other DNA

SEQ ID NO: 37500 - DNA, 120 bp, synthetic construct
  source 1..120: mol_type = other DNA
ctcgggcctcggtaaccactagggaagaaacgccagggacacctggtcctgacttgggatctggtgctccaggctctagctctgtccatagcccaagggtgctgagccccaagtggtcac

SEQ ID NO: 37501 - DNA, 120 bp, synthetic construct
  source 1..120: mol_type = other DNA
cagggcggcagaggaagctgagcagggtggcagctccctgggaggccacacctgtaccccaggggttcttggacaattgggggcagggctcaagagggagatcagatatccccctaacaa

SEQ ID NO: 37502 - DNA, 120 bp, synthetic construct; identical to SEQ ID NO: 10832
  source 1..120: mol_type = other DNA

SEQ ID NO: 37503 - DNA, 120 bp, synthetic construct
  source 1..120: mol_type = other DNA
gaaagcagcagctggcccagcagcccagctgcaaagggccctcaccatgcaccagttagttactcattcattcatttagatgaggtctcgctctgtcatccaggctcaatcatagctggg

SEQ ID NO: 37504 - DNA, 120 bp, synthetic construct
  source 1..120: mol_type = other DNA
gcatctggcccccggacctgcactgtgtggatgtggcttctgtcagttcactgcctcaggagcaagagtaggaatgggaggtcctcccaagatggaagttcactgttctgtgaaacatga

SEQ ID NO: 37505 - DNA, 120 bp, synthetic construct
  source 1..120: mol_type = other DNA
aggctcctcattcatcaactgtggatgttgttagtttaagaatataaagtgctgccgggcacggtggcacctacagtcccagctacttgcgacgctggggcaggaagatcactggagccc

SEQ ID NO: 37506 - DNA, 120 bp, synthetic construct
  source 1..120: mol_type = other DNA
agtggtgcgatctcagctcactgcacccttggcctcctggattcaaacaattctctcaccctgcctcctgagtagctgggactacaggtgcctgccaccacaccaagctaatttttttat

SEQ ID NO: 37507 - DNA, 120 bp, synthetic construct; identical to SEQ ID NO: 10833
  source 1..120: mol_type = other DNA

SEQ ID NO: 37508 - DNA, 120 bp, synthetic construct
  source 1..120: mol_type = other DNA
atggtagggatggtagtgatagtaggtagggatggtagtgatggtaggtagtgatggtagtgatggtaggtagtgatgggtagtgatagtaggtagggatggtagtgatagtagtgatgg

SEQ ID NO: 37509 - DNA, 120 bp, synthetic construct
  source 1..120: mol_type = other DNA
gatggtaggtagtgatgatggtagtgatagtaggtagtaatagtagtgatggtaggttgtgatggtagtgatggtaggtagtgatgggtagtgatggtaggtagggatggtagtgatagt

SEQ ID NO: 37510 - DNA, 120 bp, synthetic construct
  source 1..120: mol_type = other DNA
gatggtagtgatggtaggtagggatggtagtgatggtagtgatggtaggtagggatggtagtgatggtaggtagtgatgatggtagtgatggtaggtagggatggtagtgatggtaggtg

SEQ ID NO: 37511 - DNA, 120 bp, synthetic construct; identical to SEQ ID NO: 10834
  source 1..120: mol_type = other DNA

SEQ ID NO: 37512 - DNA, 120 bp, synthetic construct
  source 1..120: mol_type = other DNA
cgatggtaggtagggatggtagggatggtagtgatggtaggtagtgatgatggtagtgatggtaggtagtgatggtagtgatggtaggtagtgatggtagtgatggtaggtagggatggt

SEQ ID NO: 37513 - DNA, 120 bp, synthetic construct
  source 1..120: mol_type = other DNA
tggttgtgatagtagtgatggtaggtagtgatgggtagtgatggtaggtagtgatagtaagtagcggtggtagcatggggatgctgccgtgaagcagaggaggcttcacaattctgattg

SEQ ID NO: 37514 - DNA, 120 bp, synthetic construct
  source 1..120: mol_type = other DNA
tgaaggcttcagaactctgatcttctcaattcaggtggaaacgtgtctttaggatagaaaacaagtaaactgcaggattcccttcaaggtctagttcttccctgtccctactttgggaca

SEQ ID NO: 37515 - DNA, 120 bp, synthetic construct; identical to SEQ ID NO: 10835
  source 1..120: mol_type = other DNA

SEQ ID NO: 37516 - DNA, 120 bp, synthetic construct
  source 1..120: mol_type = other DNA
atgtctcacgttgtcgtttcctgaagctgatgtacatgagacacttcattctagttctgtggtttctgcaaggaactggtgggccaaccattcctaaggaatatggtgttgacaagctga

SEQ ID NO: 37517 - DNA, 120 bp, synthetic construct
  source 1..120: mol_type = other DNA
agtaaagttgaagcaatatctagttggtgtgttttcaaagagaataaatggatttctgcttgcacttctattcccagagctgagtatttgagtgtttgttctaggatctggtatcacaca

SEQ ID NO: 37518 - DNA, 120 bp, synthetic construct; identical to SEQ ID NO: 10836
  source 1..120: mol_type = other DNA

SEQ ID NO: 37519 - DNA, 120 bp, synthetic construct
  source 1..120: mol_type = other DNA
tcctgactcctggccagggtttggagatgtagaaggaggtagaaggaggagatagaaggagatggagaagaaggcatgagtcagtttcctcccacactccaggcctttcccaggggttgg

SEQ ID NO: 37520 - DNA, 120 bp, synthetic construct
  source 1..120: mol_type = other DNA
tgctccctctgggcctcagtgtactcttctgtaaaatgggaagatcatactgggtgacctcatccctaacacctcgtctctagctctcaacttctaccactccgcgaagtcgtgtgggct

SEQ ID NO: 37521 - DNA, 120 bp, synthetic construct
  source 1..120: mol_type = other DNA
ccatcggagcagtggttctcaaatgagaagcccttccccatgagcgaatcacaaagttattttaggtaggtcatacgaaatagaaagagatacgaaacgtagaacagacaataactcagt

SEQ ID NO: 37522 - DNA, 120 bp, synthetic construct; identical to SEQ ID NO: 10837
  source 1..120: mol_type = other DNA

SEQ ID NO: 37523 - DNA, 120 bp, synthetic construct
  source 1..120: mol_type = other DNA
cgtcacagctcctcttctcggtgctgttgaaaagagtgtatgcggagctccagggatggcggcaggcagcctccgccccgcacaagggtgctgggagacatctgtccctccccacctgcc

SEQ ID NO: 37524 - DNA, 120 bp, synthetic construct
  source 1..120: mol_type = other DNA
tcctcgtctgtggcctgcttgagccaggatgggactcatttccttctcaggtgaagacgttgttagtggagaaaatgaatcttgggctaatgagctgatcagaaccttgagctgcaagag

SEQ ID NO: 37525 - DNA, 120 bp, synthetic construct
  source 1..120: mol_type = other DNA
aacttgctagaaaagcacattcatgaacccgcctcagacctactgaacggaaaactcggcggtggggcccagcctccaggtgaccccagagcttgctcaagtttgagaaccaccagccta

SEQ ID NO: 37526 - DNA, 120 bp, synthetic construct
  source 1..120: mol_type = other DNA
ggaggcgctgggaagggaaaggcggtggctgccgttttcagatgcctgcctcccttcccaacctcgtcatcctcacaaggggaggtggctgccaagtcacctaaatgctgagggcggcag

SEQ ID NO: 37527 - DNA, 120 bp, synthetic construct; identical to SEQ ID NO: 10838
  source 1..120: mol_type = other DNA

SEQ ID NO: 37528 - DNA, 120 bp, synthetic construct
  source 1..120: mol_type = other DNA
ctgatcagtgctcgcccctacttgcggtgtgtgagctgacacgatttaccctgatgggcagctgtttatttttacaatttatggtgaaccatgttagaagttttccatttcttctagtct

SEQ ID NO: 37529 - DNA, 120 bp, synthetic construct
  source 1..120: mol_type = other DNA
gatcacttgaggtcaggagttcgagaccagtctggccaacatagcgaaaccccgtctctactaaaaatacaaaacttagctgggtgtggtggcgcacgcctgtaatcccagctactcagg

SEQ ID NO: 37530 - DNA, 120 bp, synthetic construct; identical to SEQ ID NO: 10839
  source 1..120: mol_type = other DNA

SEQ ID NO: 37531 - DNA, 120 bp, synthetic construct
  source 1..120: mol_type = other DNA
gttatctttgtatctttgtaaaatgaatccccctcttataaccaccatagggcttcataaatgccatgtcctacagtattcttctgtagttggattctaggacgtttgcatgactgttct

SEQ ID NO: 37532 - DNA, 120 bp, synthetic construct
  source 1..120: mol_type = other DNA
tttgtgttttaatgacacaaatgtgagtcctcatctgcttcttaaactgtcagcaagatcaccaaggctgttactaatgtaagtgtgtatgggggtaagcggctgggtgagggactgcta

SEQ ID NO: 37533 - DNA, 120 bp, synthetic construct
  source 1..120: mol_type = other DNA
ttaggctggggtccctgatgtctagtgttattctgggtacacagcagtgtccacacagcagataccagcttaactgtgtggccgagatggtacagtgaagaatattcctcttggccaagc

SEQ ID NO: 37534 - DNA, 120 bp, synthetic construct; identical to SEQ ID NO: 10840
  source 1..120: mol_type = other DNA

SEQ ID NO: 37535 - DNA, 120 bp, synthetic construct
  source 1..120: mol_type = other DNA
acctggtatataaccacgcggcaaagcaccgacaagctccgctggggctgctccagcccttgctcccagcctgggcacctgagtctttcgaactggctctttcttccagacacaatgctt

SEQ ID NO: 37536 - DNA, 120 bp, synthetic construct
  source 1..120: mol_type = other DNA
ggtgtctttccccagctccattaactgaggccatgtggaaatcttccatggtgggaacatttacaccacagcagtcaggaaacactatgaatcagagctgcttttctaaagagtcagttg

SEQ ID NO: 37537 - DNA, 120 bp, synthetic construct
  source 1..120: mol_type = other DNA
cctttggataaatactgctatggtttgaatgtttgtgcctcctacaaaattcatgctgaaacttaatccctcatgcaacaatattaagaagtgggcttgggggtggttaggtcatgagga

SEQ ID NO: 37538 - DNA, 120 bp, synthetic construct; identical to SEQ ID NO: 10841
  source 1..120: mol_type = other DNA

SEQ ID NO: 37539 - DNA, 120 bp, synthetic construct
  source 1..120: mol_type = other DNA
aacctccacctcccatgttcaagcaattctcctgcctcagcctcctgagtagctgggattacaggcccccgccaccacccctggctaattttcatattcttagcagagacagggtttcac

SEQ ID NO: 37540 - DNA, 120 bp, synthetic construct
  source 1..120: mol_type = other DNA
tacctaaaaataagaaaatgataataaggataataaataactttaaaaattaaattggacttccgtcagcagacatcatctcatttgatcttcacagcccgcaggtgaggagagttgggg

SEQ ID NO: 37541 - DNA, 120 bp, synthetic construct
  source 1..120: mol_type = other DNA
gaagttctttgtgatcctggaatacaggggcgtggtggagacctcgagaattctaaccgtgttggggaaacgaagacgcagaggcagtgccccctgcctggcaggccgcaggccctgaga

SEQ ID NO: 37542 - DNA, 120 bp, synthetic construct; identical to SEQ ID NO: 10842
  source 1..120: mol_type = other DNA

SEQ ID NO: 37543 - DNA, 120 bp, synthetic construct
  source 1..120: mol_type = other DNA
cagagttctgcaggcctgaagtccaagatcaaggggtgggcagggccgcgccctctctgaagcctgtgggggacccttccgtgcctcttcctagttctgagggtcactggctctccctgg

SEQ ID NO: 37544 - DNA, 120 bp, synthetic construct
  source 1..120: mol_type = other DNA
accctgctctaggatgacctcatcttcgctaagtacatctgccagagacgccatatccacacaaggtcacatttacaggtgctgggggttaggacctctctatatattttgggggacata

SEQ ID NO: 37545 - DNA, 120 bp, synthetic construct
  source 1..120: mol_type = other DNA
tgctgggctgcagggggagcgagacacaccagggaggctgagaacccacaccgcctaaaccgaggggccgtgcacacaggtggctcagtgtctgcagaaagaagcgggaggggggtgcag

SEQ ID NO: 37546 - DNA, 120 bp, synthetic construct; identical to SEQ ID NO: 10843
  source 1..120: mol_type = other DNA

SEQ ID NO: 37547 - DNA, 120 bp, synthetic construct
  source 1..120: mol_type = other DNA
ggccatgctcatcaaagcagcccaagctcacactcagccaaggagccccgagcctggattggaacccagatggaccaattccaaaatcctcaagttctacactccttcccgcctgcccca

SEQ ID NO: 37548 - DNA, 120 bp, synthetic construct
  source 1..120: mol_type = other DNA
gcagttgtgcaaatcagttcagctcagtgagttttaattcagtgtctactttgatgctgaagatctagtccctccccccacagtcactgatggtgtcactgaaagccgagtctgacaaca

SEQ ID NO: 37549 - DNA, 120 bp, synthetic construct
  source 1..120: mol_type = other DNA
gcctggccctctttatctgggatcgagccactcacacccttgctgccatctaacttttcttaatggcctggtagggaaatatcacaaaacaaacacacacaactcaaagaaaaaagaaac

SEQ ID NO: 37550 - DNA, 120 bp, synthetic construct; identical to SEQ ID NO: 10844
  source 1..120: mol_type = other DNA

SEQ ID NO: 37551 - DNA, 120 bp, synthetic construct
  source 1..120: mol_type = other DNA
tcttgtgaagttggccacgcacgtctctccagagtcggctacagatggaaatttccatatgcccctgttcagccaaaatcacaggcttttggtttcattatcattgtcaaaccattaacc

SEQ ID NO: 37552 - DNA, 120 bp, synthetic construct
  source 1..120: mol_type = other DNA
gtccccctccacagctcacgtccaaaatgccttactctgtatcatcatcgtctatgaaatgtgcacgtcctcactcccatcactgctaaaacactgctcagactcaacttccccagggga

SEQ ID NO: 37553 - DNA, 120 bp, synthetic construct
  source 1..120: mol_type = other DNA
tcgcctgtcccgtgcctgctccgtcccatgtctggaagaatgccagcctcaaagcaaaccctcaacagtgctgcttactgagtgacaggacggacgcacaggaacccaggctcctacgca

SEQ ID NO: 37554 - DNA, 120 bp, synthetic construct
  source 1..120: mol_type = other DNA
taatcccagcactttgggaggtgggcagatcacctgaggtcaggagttcaagaccagcctggccaacatggcgaaaccccgtctttactgaaaatacaaaaattaaccgggcatggtagc

SEQ ID NO: 37555 - DNA, 120 bp, synthetic construct; identical to SEQ ID NO: 10845
  source 1..120: mol_type = other DNA

SEQ ID NO: 37556 - DNA, 120 bp, synthetic construct
  source 1..120: mol_type = other DNA
tgctcccatcctacagagagaccggagaggccaggggtgtgcacggagcttctgcccagagccctgcactccacgagaattagcttagatcttgacctcctcctccctccctggggcccc

SEQ ID NO: 37557 - DNA, 120 bp, synthetic construct
  source 1..120: mol_type = other DNA
ctgttgcagcttggactaaatttaatttcaccctccaaaggtaggggcggctgccttgaatggattccaaggattccaagggtaaacctagtgtctctggactcagccctaagtcacttt

SEQ ID NO: 37558 - DNA, 120 bp, synthetic construct; identical to SEQ ID NO: 10846
  source 1..120: mol_type = other DNA

SEQ ID NO: 37559 - DNA, 120 bp, synthetic construct
  source 1..120: mol_type = other DNA
aaatatggctcacgcctgtaatcccagcaatttgggaggccaaggtgggtggatcacgaggtcaggagattgagaccatcttggctaacacagtgaaatgccagctctactaaaaaatac

SEQ ID NO: 37560 - DNA, 120 bp, synthetic construct
  source 1..120: mol_type = other DNA
aaaaaaaaaaaaaaagtcaaatattggctattccacgcagtttaacctaatattatcacctgctcttcactgctgaggaacctgggcacaggctgagaaaggatgatttgggctcaaaat

SEQ ID NO: 37561 - DNA, 120 bp, synthetic construct
  source 1..120: mol_type = other DNA
catgctgcttcccaccgaaaaaccaaaaacaaatagaatccaggccccctttattctacagacaaggataaccttggtgttgaggtcaggcctgtccacccgctggggacagctgggtca

SEQ ID NO: 37562 - DNA, 120 bp, synthetic construct; identical to SEQ ID NO: 10847
  source 1..120: mol_type = other DNA

SEQ ID NO: 37563 - DNA, 120 bp, synthetic construct
  source 1..120: mol_type = other DNA
agctcctccacgccatcagggctgctgtctgagacctgcccccaagagcctctggccaggacgcagccttcccccacacatcacaggcacagggaggcatttggagcgcccgaggatagg

SEQ ID NO: 37564 - DNA, 120 bp, synthetic construct
  source 1..120: mol_type = other DNA
tttgcacaattgggctgagactggagctcagccttcctggctcccactccttgagctcagggcatgagtacggccacagaatcagggtgcctggtccttagggcgcgcctcctgtgattc

SEQ ID NO: 37565 - DNA, 120 bp, synthetic construct
  source 1..120: mol_type = other DNA
ctccatactccagggctggagctggggaaagcacacacaccactttacacacacaccaccctccaccactctccacataccaccctccacacacaccatgctccacacacaccatgctcc

SEQ ID NO: 37566 - DNA, 120 bp, synthetic construct; identical to SEQ ID NO: 10848
  source 1..120: mol_type = other DNA

SEQ ID NO: 37567 - DNA, 120 bp, synthetic construct
  source 1..120: mol_type = other DNA
cctccacacacaccgccctccacacacaccatccacacaccaccctccacatacaccatgctccacacacaccgccctccacacacaccatcctccacacacaccatgctccacacacca

SEQ ID NO: 37568 - DNA, 120 bp, synthetic construct
  source 1..120: mol_type = other DNA
caccctccacacacaccacactccacacaccaccttccacacataccactgcagacactgggatgtttttgccaagcagagaggctgcaggcagagaggcatgggctgtgccatagggga

SEQ ID NO: 37569 - DNA, 120 bp, synthetic construct
  source 1..120: mol_type = other DNA
gcttaggcgaaagctgagctccatgatgctatgtgcaccctgtctccatttccaaaaggatgcttgcaatgcagttacataaaataccttgaaaggaggaaaaacagtagccacaggaag

SEQ ID NO: 37570 - DNA, 120 bp, synthetic construct; identical to SEQ ID NO: 10849
  source 1..120: mol_type = other DNA

SEQ ID NO: 37571 - DNA, 120 bp, synthetic construct
  source 1..120: mol_type = other DNA
aaggcccgcgcagccgaggacgcaagcacaggtgccacgagcacgctggagtggccccgaggcgggcccctgcggaggcttgcagctccctggaaggtattttgccttcttcattgcccc

SEQ ID NO: 37572 - DNA, 120 bp, synthetic construct
  source 1..120: mol_type = other DNA
tgagcctccgtttctccaactgtaaaaaccgggtgaatactaggaacaggcagagttgctgatgagttaaatggcaaaatatgtgaaagacgttaagtctggcacccacaccgaatataa

SEQ ID NO: 37573 - DNA, 120 bp, synthetic construct
  source 1..120: mol_type = other DNA
atcgcaaggcaggtgtttcaagtctggtgaaacccagctctaaggaaacaagataaaggaggagaagatacaggacagcaggcagaagacaacaagaagggcggagagaaaacggagcag

SEQ ID NO: 37574 - DNA, 120 bp, synthetic construct; identical to SEQ ID NO: 10850
  source 1..120: mol_type = other DNA

SEQ ID NO: 37575 - DNA, 120 bp, synthetic construct
  source 1..120: mol_type = other DNA
gtgggagatgagagccagaaaaggtcagtgctttttgctgggtgacattcaggacctttctgctcctgccagctcccagctcccagatcactgagccctacagagttctgcacaaatgag

SEQ ID NO: 37576 - DNA, 120 bp, synthetic construct
  source 1..120: mol_type = other DNA
aaaaaaaaaaaaagacttcatataaatgcatctatagtcagcctataaaaatggttggaaagcaacagcccactcctctccacgcattttctcgggttgcatgctgccttccggcaccat

SEQ ID NO: 37577 - DNA, 120 bp, synthetic construct
  source 1..120: mol_type = other DNA
ccaacggcctctgctgtgcagattttcccatctgtagaatggggacaatagcagcaccagcacacagctgtgtggggatgaagtcagctgccacccacgcatgctgaggacctgctggct

SEQ ID NO: 37578 - DNA, 120 bp, synthetic construct; identical to SEQ ID NO: 10851
  source 1..120: mol_type = other DNA

SEQ ID NO: 37579 - DNA, 120 bp, synthetic construct
  source 1..120: mol_type = other DNA
ttcccaaggccccagcctcttccacagtcagctacatccaccaatgattgtccccagcccctgctgctacccagcaaggctcagaagggtgggctgaggccctagctgagactgtggggc

SEQ ID NO: 37580 - DNA, 120 bp, synthetic construct
  source 1..120: mol_type = other DNA
tgaagagcccaatctgtaccacttggtgggaaggtgactgaagctactggctccttggagctttaagcagtatggagattatttttatttttgtttatgcataccttgtgtcactttcgg

SEQ ID NO: 37581 - DNA, 120 bp, synthetic construct
  source 1..120: mol_type = other DNA
accccattattcccctccactattcacctgcccacacacacacaccacccctgtgctacaggaagagagagtcacagggaaagggaagtcctgcctcctcaatggtcctggaccatggcc

SEQ ID NO: 37582 - DNA, 120 bp, synthetic construct
  source 1..120: mol_type = other DNA
tccaaagatgctttgctggtagctaggaggtattcagcaagcacctgctatgcagaatgcacagtgtggagcacttggagggaccataaagatgaacggaacacgaattctgcccccagg

SEQ ID NO: 37583 - DNA, 120 bp, synthetic construct; identical to SEQ ID NO: 10852
  source 1..120: mol_type = other DNA

SEQ ID NO: 37584 - DNA, 120 bp, synthetic construct
  source 1..120: mol_type = other DNA
cggggaacggcgtcagacggggcggggcgaggtgaggcccgcaagccagtccctgctgcacacggtagcgaaggcggaaagctgcggcaacaccttcccaccatctctgtgaggtctgtg

SEQ ID NO: 37585 - DNA, 120 bp, synthetic construct
  source 1..120: mol_type = other DNA
cgtgttcactgagacacagctaagacacacacttaaagggccatgggattagcgaatagggaagacttcccaggggcgaggactgtgagagtggaggtgagtaatctggcggcagctgcc

SEQ ID NO: 37586 - DNA, 120 bp, synthetic construct; identical to SEQ ID NO: 10853
  source 1..120: mol_type = other DNA

SEQ ID NO: 37587 - DNA, 120 bp, synthetic construct
  source 1..120: mol_type = other DNA
tctgatgtagtccaagattccctctccgccacctgcaggtgggactgtgggctgggctgacggaggtggccgggcacctggagctgtagcaggtatcacagaagcctagaatgctggacc

SEQ ID NO: 37588 - DNA, 120 bp, synthetic construct
  source 1..120: mol_type = other DNA
ctccgtggagcccctcctgctggaggcagggcagaaagggggcaccaggacaggccctcggacaggcaagaccacaggctgggcatgctttgcgccatttgcagcagagagaaccagaac

SEQ ID NO: 37589 - DNA, 120 bp, synthetic construct
  source 1..120: mol_type = other DNA
acacgcactgatgggtgccatctgtggtgcccaaggcctcgcctgtggaagggggtgtgggtttcatctcccattgggaatgaaccaaccacaagacagagagagagagcacggccccca

SEQ ID NO: 37590 - DNA, 120 bp, synthetic construct; identical to SEQ ID NO: 10854
  source 1..120: mol_type = other DNA

SEQ ID NO: 37591 - DNA, 120 bp, synthetic construct
  source 1..120: mol_type = other DNA
aggtgcaggcagacgagactccaaggaccctaaagtcccagtattctgcttctaggtagagcttgccaggttagatttctgcccgccacctcaactctctgcagccccaccccaagactt

SEQ ID NO: 37592 - DNA, 120 bp, synthetic construct
  source 1..120: mol_type = other DNA
gaccttggcctgtctcagtgtgaataaggagacctattgaacaaatttgcaaattattcagccaaagcctaatgagggattaaaaaggaaatctcgttcaaattacaatcaaagaatcac

SEQ ID NO: 37593 - DNA, 120 bp, synthetic construct
  source 1..120: mol_type = other DNA
agttcaagaccagcctgaacatggcaaaacttcatctctactaaaaatacaaaacctggccggtcatggtggtgcatgcttgtaatcccagctactggggaggctgacacataagaattg

SEQ ID NO: 37594 - DNA, 120 bp, synthetic construct; identical to SEQ ID NO: 10855
  source 1..120: mol_type = other DNA

SEQ ID NO: 37595 - DNA, 120 bp, synthetic construct
  source 1..120: mol_type = other DNA
tgccagtgaactgcccaataggacacagggggcaatcattgacaccggggttgcgaccttggcctctggcacccaaactcatgctccctccctagcagccactcttccattggcaagata

SEQ ID NO: 37596 - DNA, 120 bp, synthetic construct
  source 1..120: mol_type = other DNA
tcccctcagtggacggatgctccctcctccaatggcaccaggaaatagagaggtccctgaaggggatgaggcccgaggcactggcatctggcccccgggctctgcattgcatgaaggtct

SEQ ID NO: 37597 - DNA, 120 bp, synthetic construct
  source 1..120: mol_type = other DNA
caatcagcctgagccaaagcccaagtaactttcccaagtgggaggtgaaggaaaaaaacaaataacacagtaatgtgcctaaaatctgccccttttttttctggccagtagattggatgg

SEQ ID NO: 37598 - DNA, 120 bp, synthetic construct
  source 1..120: mol_type = other DNA
gatttgtaaaaaacgggttcactcagatttttctaaattgggtcgtcgagttaactaagcatttccattctcaaagacggcccccattttctttctttccccctctgttagttaagcttc

SEQ ID NO: 37599 - DNA, 120 bp, synthetic construct; identical to SEQ ID NO: 10856
  source 1..120: mol_type = other DNA

SEQ ID NO: 37600 - DNA, 120 bp, synthetic construct
  source 1..120: mol_type = other DNA
ggtacagggagcactgttaggtccctgagtgcagggagcactggtagatccctgggttcagagggcactggtaggtctctgggtgcagggagcactggtagatccctgggttcagagggc

SEQ ID NO: 37601 - DNA, 120 bp, synthetic construct
  source 1..120: mol_type = other DNA
ggggtgcagggggcgctggtagatccctgggtgcagggggcgctggtaggtccccgggtgcagggaccactggtaggtccccgggtacagggggcactggtagaccccagggtacagggg

SEQ ID NO: 37602 - DNA, 120 bp, synthetic construct
  source 1..120: mol_type = other DNA
actggtactcagctgagtgcctggctgagacttgccctcacccgacgggatccgcctcacccaagttcacatccccttcccagggacagtgtgggagccctttgcctcaatctgggacaa

SEQ ID NO: 37603 - DNA, 120 bp, synthetic construct; identical to SEQ ID NO: 10857
  source 1..120: mol_type = other DNA

SEQ ID NO: 37604 - DNA, 120 bp, synthetic construct
  source 1..120: mol_type = other DNA
tggcaagatgatgaagccccttctctatgaaaaatcaaaaaattagccgggcttggtggcacctgcggtcccggctactgagcaggctgaggtaagaggatcgcttgagctcaggagttc

SEQ ID NO: 37605 - DNA, 120 bp, synthetic construct
  source 1..120: mol_type = other DNA
aagaaccaaatatgtccacctgcctttatgctgtattttatcacagtagtaaactctatgcctgcatgcctctcctacagaacatcgctttgagcctttcctgagaactgatattgccac

SEQ ID NO: 37606 - DNA, 120 bp, synthetic construct
  source 1..120: mol_type = other DNA
acaagcactgctgtgaactggcttcctgacctccagcctcaagagcaggcatctcaggcagaaagccacagggccggcagatggcaatgctggctcccagaagcccttccctgaccgtag

SEQ ID NO: 37607 - DNA, 120 bp, synthetic construct; identical to SEQ ID NO: 10858
  source 1..120: mol_type = other DNA

SEQ ID NO: 37608 - DNA, 120 bp, synthetic construct
  source 1..120: mol_type = other DNA
tcaaaatacacctaacatgcaaagcagagtggtgaggagacaagcgacctctctgttctcctggcgctggcagctccccaggggtgaaatatctcctcggacactcactcatcttcagtg

SEQ ID NO: 37609 - DNA, 120 bp, synthetic construct
  source 1..120: mol_type = other DNA
aagcagtttccatacagccgtggtgcttgagccaaacggagacttaggctccagccctctttttcaaagtgtatatatgtatattacatattacacatattacatataggatatacttta

SEQ ID NO: 37610 - DNA, 120 bp, synthetic construct
  source 1..120: mol_type = other DNA
cctgtgcacatgaccttgctttccatccacaggcagagtctgtccctccatcccttgagtctcagccgtgtgacttgccatggccaaggggcctgaggagcccctgagcttcaggctggc

SEQ ID NO: 37611 - DNA, 120 bp, synthetic construct; identical to SEQ ID NO: 10859
  source 1..120: mol_type = other DNA

SEQ ID NO: 37612 - DNA, 120 bp, synthetic construct
  source 1..120: mol_type = other DNA
cggtcaatactggatgactcagtgagaagaagcccctagacaggtgacagaggcgccaggcagggcttcctgattccgagtgtagtgttcattctaatctccattatttaagaagcaaaa

SEQ ID NO: 37613 - DNA, 120 bp, synthetic construct
  source 1..120: mol_type = other DNA
ggtcaggagattgagaccatcctggctaacacggtgaaaccccgtctctattaaaaaatacaaaaaattagctgggtgtggtggcgggcgcccgtagacccagctactcgggaggctgag

SEQ ID NO: 37614 - DNA, 120 bp, synthetic construct; identical to SEQ ID NO: 10860
  source 1..120: mol_type = other DNA

SEQ ID NO: 37615 - DNA, 120 bp, synthetic construct
  source 1..120: mol_type = other DNA
atagccaagcagagatatcaaaaacctgacaagacacaacagagacttttctcagcaggttgggctagaatggttgtgaaccttacactgtcttttctacattaaggataataagactaa

SEQ ID NO: 37616 - DNA, 120 bp, synthetic construct
  source 1..120: mol_type = other DNA
ccaccccagatggtatctgatacaatcaagaatattgatcggtcatcagcaccatgaatgcaactccccatcaagcgtatctaggttgcatggaggaagaaggctctctggggtgcttat

SEQ ID NO: 37617 - DNA, 120 bp, synthetic construct
  source 1..120: mol_type = other DNA
attagcccaataggcaaatggctgtgtggagcctgcctgcctgcccgtcttctggaagttgagcaggtgacagagctgtcctcccacccccacccctcgcacacacctctgcacccctgg

SEQ ID NO: 37618 - DNA, 120 bp, synthetic construct
  source 1..120: mol_type = other DNA
gttggttttctcacagcccctccacactagaacttccagcagtgggaggaggggacgcaaggaaagacccagaccttggaagggagtgtcaaagtgctgtgggcagtgggacgctgggac

SEQ ID NO: 37619 - DNA, 120 bp, synthetic construct; identical to SEQ ID NO: 10861
  source 1..120: mol_type = other DNA

SEQ ID NO: 37620 - DNA, 120 bp, synthetic construct
  source 1..120: mol_type = other DNA
ttgcctgtgcctctggatgcaacttccctcttcttagaaggactccaggcatagtggatgagggccggtcctaatggcctcatcctaatctatatgttaatcacatctgcaaaaacccca

SEQ ID NO: 37621 - DNA, 120 bp, synthetic construct
  source 1..120: mol_type = other DNA
ccctggaaagcacacagaaacgagttgactggtttctggtcccagcactaaccctgcgtaaacatagttcttagcaatggctctctatttctttattcacaagtggagaatttgcatcct

SEQ ID NO: 37622 - DNA, 120 bp, synthetic construct
  source 1..120: mol_type = other DNA
gcagggcacccccctccaggaccaggcctttggctcatggaaaagacgctgggagcctggggttacggagcaaactggtctttgtcgtgcattcatcagcagcttcactgccaggtcaga

SEQ ID NO: 37623 - DNA, 120 bp, synthetic construct; identical to SEQ ID NO: 10862
  source 1..120: mol_type = other DNA

SEQ ID NO: 37624 - DNA, 120 bp, synthetic construct
  source 1..120: mol_type = other DNA
gcccctctgctcatctcagagcgagtcacggttaaagaaccaagcaaagtcaccactctgtttcaacgtcacagctcagctgcccatcggcctttgtttgttgcgcattttaaacgacgt

SEQ ID NO: 37625 - DNA, 120 bp, synthetic construct
  source 1..120: mol_type = other DNA
ggaggagaacgggtgagccacattctcactcggctcctgtcagtgtctgtggctctactcggtaaccttagcagcccccataaatgtaaaaaggtgcctagaaacagaaagacactggcc

SEQ ID NO: 37626 - DNA, 120 bp, synthetic construct
  source 1..120: mol_type = other DNA
caaactgatttacaaattacgtaagcgaagtctgagtagatgaagaggcgttggcaaataaaaagtgcttccaaatgatttctttcgccagtctagtgttcagcacagtccaaattgcaa

SEQ ID NO: 37627 - DNA, 120 bp, synthetic construct; identical to SEQ ID NO: 10863
  source 1..120: mol_type = other DNA

SEQ ID NO: 37628 - DNA, 120 bp, synthetic construct
  source 1..120: mol_type = other DNA
tatttcacctccactgtaattaaccctgtcatctaccatgtaatgatgaacaggctttttctcagctgggcatttgtgaagtagggataagaggacgaggcagctccaaggtgactcccg

SEQ ID NO: 37629 - DNA, 120 bp, synthetic construct
  source 1..120: mol_type = other DNA
ggtgtccctgcgccctctgtgtggtagagtctttgaggaagtgatcacgcatcactgtctagctgcccgttccctccaggaccagcactgggccgtgctcaagcggcattgggccaatgt

SEQ ID NO: 37630 - DNA, 120 bp, synthetic construct
  source 1..120: mol_type = other DNA
aaaaaccctggagccacaggccagtctgaggaccccatcaccaagaagcttgactactgaaggttcccatagcatactctgggccctattggagcttacggcagggcatctaagatgcat

SEQ ID NO: 37631 - DNA, 120 bp, synthetic construct; identical to SEQ ID NO: 10864
  source 1..120: mol_type = other DNA

SEQ ID NO: 37632 - DNA, 120 bp, synthetic construct
  source 1..120: mol_type = other DNA
gaggaataactcatgggggcagaagaaatggaacagtattacaccagggaagctattaatagtacccagttgtttttaagccccagtaggtacaagaatcaccggagaacttaagaaaaa

SEQ ID NO: 37633 - DNA, 120 bp, synthetic construct
  source 1..120: mol_type = other DNA
acactgggagcttctacataagctagtccatgaaccacactttgttaaacattgccctaaaccctaatccagcaaatcttgctcaggatggtacaaactggccaaggtcaaagctgacac

SEQ ID NO: 37634 - DNA, 120 bp, synthetic construct
  source 1..120: mol_type = other DNA
gggctccccttcccaccctcatcctggagttcccaaactggctcattccagccggatagaggctatggggcaggagctgggtgcaaaggtcccaggccatcaccagctcggagggtgcgt

SEQ ID NO: 37635 - DNA, 120 bp, synthetic construct; identical to SEQ ID NO: 10865
  source 1..120: mol_type = other DNA

SEQ ID NO: 37636 - DNA, 120 bp, synthetic construct
  source 1..120: mol_type = other DNA
tctgtcattggcttgaaacagttccagagacacacgacatggcagccagccttgattaaagcatgtctatggggtctatgaactttagcactaatagggaagctgctttttcttagaccg

SEQ ID NO: 37637 - DNA, 120 bp, synthetic construct
  source 1..120: mol_type = other DNA
ctaaaaccattcccatcaccttcataatcagccatgccttacaagaggcatggaggctcagagcagggagccaaggcgggatgccaacaggccaggactctgacctctacggccctttgc

SEQ ID NO: 37638 - DNA, 120 bp, synthetic construct; identical to SEQ ID NO: 10866
  source 1..120: mol_type = other DNA

SEQ ID NO: 37639 - DNA, 120 bp, synthetic construct
  source 1..120: mol_type = other DNA
tcaaaatcatcagagcccgagagaggaggtttgcaacaattgcctccaacaccctaggccacggttctgtttatgatatgggctggaggctgaggtccccaaaacgactcaatccaattc

SEQ ID NO: 37640 - DNA, 120 bp, synthetic construct
  source 1..120: mol_type = other DNA
agtgtctttcaagagttattactcctcagaatccaagatgtccttggcagtggcagtccctgcacaccacagtcctctgaggctggggtgaggaagcaaatgtgattccccatggacgtg

SEQ ID NO: 37641 - DNA, 120 bp, synthetic construct
  source 1..120: mol_type = other DNA
aggctggccttctcacgtcccacgtctgcccttctgcattctctcatcacagctgcagttcaggccctcggacccttaccctgggggggggcttttgccaaagtacttgagttggtttcc

SEQ ID NO: 37642 - DNA, 120 bp, synthetic construct; identical to SEQ ID NO: 10867
  source 1..120: mol_type = other DNA

SEQ ID NO: 37643 - DNA, 120 bp, synthetic construct
  source 1..120: mol_type = other DNA
tgcccctcagggcataatcccagcacttccaggggttcctgcactaggctgagcaagctgccagggtctgagaggattccttcaggtggggagggagacacgagtaagaggcagtccacc

SEQ ID NO: 37644 - DNA, 120 bp, synthetic construct
  source 1..120: mol_type = other DNA
gcagcattgccagatcaaatacaggacgcccccattaatctgggatttcacatcaacaatggatactttttagtatttcccaaatattgtatggcgcatacctatgctaaaacatgattc

SEQ ID NO: 37645 - DNA, 120 bp, synthetic construct
  source 1..120: mol_type = other DNA
tcctgatccagtctcaaagcatttcctatgactctagctctcaaaccctttcgccaggaggcgtggctcttcacctggaagcagccatcccctcccgcccgattctgtggggtgctccca

SEQ ID NO: 37646 - DNA, 120 bp, synthetic construct; identical to SEQ ID NO: 10868
  source 1..120: mol_type = other DNA

SEQ ID NO: 37647 - DNA, 120 bp, synthetic construct
  source 1..120: mol_type = other DNA
cagccactgtggaataactgaatgaatactactttcgcggtgggctggctcatgccaagaacgttatgaaaagctgccaaagtcaccactggcagcaagaagggtggtccgaggacccca

SEQ ID NO: 37648 - DNA, 120 bp, synthetic construct
  source 1..120: mol_type = other DNA
ctgcatttggaaccagcctcagcatgtggctgccacacaaaatggcccaaccactggacaatggcatgttcttgtttctctctatatatttttttaaaaaactaggtgtctgatgtatat

SEQ ID NO: 37649 - DNA, 120 bp, synthetic construct
  source 1..120: mol_type = other DNA
tgtatatgatgtatatgtatatgatgtatatgtatatgtatatgatgtatatgtatatatgtatatgtatatgatgtatatgtatatgatgtatatgtatatgtatatgtatatgatgta

SEQ ID NO: 37650 - DNA, 120 bp, synthetic construct
  source 1..120: mol_type = other DNA
tgtatatgtatatgatgtatatgtatatgtatatgatgtatatgtatatgatgtatatgtatatgtatatgatgtatatgtatatgtatatgatgtatatgtatatgatgtatatgtata

SEQ ID NO: 37651 - DNA, 120 bp, synthetic construct; identical to SEQ ID NO: 10869
  source 1..120: mol_type = other DNA

SEQ ID NO: 37652 - DNA, 120 bp, synthetic construct
  source 1..120: mol_type = other DNA
aaaaaaataaataaattagatgggtgtggtggcacatgcctgtagtcccagttactcaggaggctgaggtgggaggatcacttgagcctggggaggttgaggctgcagtgagccatgatt

SEQ ID NO: 37653 - DNA, 120 bp, synthetic construct
  source 1..120: mol_type = other DNA
gggtattatttcctgcatttgacaaatgggagaaacagtagttacacggttagctcaagtgatcactgtttaagaggtttgtggcagcaacatctaacttttaactcacgaacatggttt

SEQ ID NO: 37654 - DNA, 120 bp, synthetic construct
  source 1..120: mol_type = other DNA
taaatgtcttacatgagagatgtaaacaagaatgtttcattttcaaatagaacacttattcctgcataatcgagtcaccaccgtgggggccacacagcagccaggggtccaagtttccag

SEQ ID NO: 37655 - DNA, 120 bp, synthetic construct
  source 1..120: mol_type = other DNA
ggccggagtttacacaggaggaccttagcggggcgtctaaaagaagggtggctcagcaaacacggggcagtgcgccctgggattcacagtgggaagtgagtggcctgcctcggccatgcc

SEQ ID NO: 37656 - DNA, 120 bp, synthetic construct; identical to SEQ ID NO: 10870
  source 1..120: mol_type = other DNA

SEQ ID NO: 37657 - DNA, 120 bp, synthetic construct
  source 1..120: mol_type = other DNA
agtcgccaatgtcctcccgggcggctggcgcggacggggctgaagttcaatgcagcctgcacggattagggagctccgagcccccaaataccacagagacccaaagtacactcccggggc

SEQ ID NO: 37658 - DNA, 120 bp, synthetic construct
  source 1..120: mol_type = other DNA
ccgctgctttccccacccaccgcccctcccctctcctccctcccctcccctctctccgtctccagcagccgagcgcgggctccacctccccggagcgcagtccacaccgtcccttttcag

SEQ ID NO: 37659 - DNA, 120 bp, synthetic construct
  source 1..120: mol_type = other DNA
aggcggagccccagccctggctgcacgcgggcagagagagagattgagccccggctccgccagcccagctcgggccctgtccctctaccctttccccaagccgcccgaagtgacaggagg

SEQ ID NO: 37660 - DNA, 120 bp, synthetic construct; identical to SEQ ID NO: 10871
  source 1..120: mol_type = other DNA

SEQ ID NO: 37661 - DNA, 120 bp, synthetic construct
  source 1..120: mol_type = other DNA
gtgagcagggaactcgcgcggccgccgccgccgccgaagcgccgaattcaagcgtcctttcctacggaaccctcgtaggcaaatcagtcaaagcccgtcccggttctggtgtctccccgg

SEQ ID NO: 37662 - DNA, 120 bp, synthetic construct
  source 1..120: mol_type = other DNA
gtgcaattaaaaccagcaatttggaaaacaagcctcctatgcctgtgcccaagtggggaatctggaaccagtaagcccgttcgtgcataaatgtaatcctcggccgcagaataaaccagc

SEQ ID NO: 37663 - DNA, 120 bp, synthetic construct
  source 1..120: mol_type = other DNA
gcggggtgcgtcccactcacagggatcctctttcagttcatttagataggtgccctttgggcccttgaaattcaacggctatgtgttcacgttcagcacgctcggctgagagctttcatt

SEQ ID NO: 37664 - DNA, 120 bp, synthetic construct; identical to SEQ ID NO: 3640
  source 1..120: mol_type = other DNA

SEQ ID NO: 37665 - DNA, 120 bp, synthetic construct
  source 1..120: mol_type = other DNA
cagcgtggtcacctggtccttttcacctgtgcacaggtaacctcagactcgagtcagtgacactgctcaacgcacccatctcagctttcatcatcagtcctccacccccgccccacaaca

SEQ ID NO: 37666 - DNA, 120 bp, synthetic construct
  source 1..120: mol_type = other DNA
ccgagcaagccccaggcagctacactgggcatgctcagtagagcctgcggcttggggactctgcgctcgcacccagagctaccgctctgccccctcctaccgccccctgccctgccctgc

SEQ ID NO: 37667 - DNA, 120 bp, synthetic construct; identical to SEQ ID NO: 10873
  source 1..120: mol_type = other DNA

SEQ ID NO: 37668 - DNA, 120 bp, synthetic construct
  source 1..120: mol_type = other DNA
gcggcggcggcagcggcggcgtttctcgcctcctcttcgtcttttctaaccgtgcagcctcttcctcggcttctcctgaaagggaaggtggaagccgtgggctcgggcgggagccggctg

SEQ ID NO: 37669 - DNA, 120 bp, synthetic construct
  source 1..120: mol_type = other DNA
gggctgggaacgccggagagttggtctctccccttctactgcctccaacacggcggcggcggcggctggcacatccagggacccgggccggttttaaacctcccgtgcgccgccgccgca

SEQ ID NO: 37670 - DNA, 120 bp, synthetic construct
  source 1..120: mol_type = other DNA
cagtcgctgcaaccatccagcagccgccgcagcagccattacccggctgcggtccagagccaagcggcggcagagcgaggggcatcagctaccgccaagtccagagccatttccatcctg

SEQ ID NO: 37671 - DNA, 120 bp, synthetic construct
  source 1..120: mol_type = other DNA
catcatcaaagagatcgttagcagaaacaaaaggagatatcaagaggatggattcgacttagacttgacctgtatccatttctgcggctgctcctctttacctttctgtcactctcttag

SEQ ID NO: 37672 - DNA, 120 bp, synthetic construct; identical to SEQ ID NO: 10874
  source 1..120: mol_type = other DNA

SEQ ID NO: 37673 - DNA, 120 bp, synthetic construct
  source 1..120: mol_type = other DNA
attaaatcttggcttaggccctagatcaagggtttagatcagaataaaatgaaaattagtgttgcacgtacgcatattgcatcagaatcttgcagtgattgttttagtttcctgagttgc

SEQ ID NO: 37674 - DNA, 120 bp, synthetic construct
  source 1..120: mol_type = other DNA
cctacaactttgaactgtatgtagaagttttgtagtttgaagtcaatagtgccataatataccttataaggcgttcttactagatctttgttatatttacctttttctctccctatgggg

SEQ ID NO: 37675 - DNA, 120 bp, synthetic construct
  source 1..120: mol_type = other DNA
gggtattgtgtgtagcaagtgaagattgcagaaataaaacttcagttcatgcttgaaatttaagtattgttgtgatgccagaattgctgctcaccgtttttaggtttcaggtcctctgac

SEQ ID NO: 37676 - DNA, 120 bp, synthetic construct
  source 1..120: mol_type = other DNA
ttttttcatacagtgtattaaatttactgagtcagcttgctgaataagacagaagcccaagaattttaacagtgtgtagctttagttgtctaaaagttaggccttcgggcttcaaaagtt

SEQ ID NO: 37677 - DNA, 120 bp, synthetic construct; identical to SEQ ID NO: 10875
  source 1..120: mol_type = other DNA

SEQ ID NO: 37678 - DNA, 120 bp, synthetic construct
  source 1..120: mol_type = other DNA
actacagtgtctatatgtcctgctaaaaattgtggggaatatttttttttaagacagcgtttatatcgggagaggttttattccgttggattatgttagctgcatataaatgtgcacagt

SEQ ID NO: 37679 - DNA, 120 bp, synthetic construct
  source 1..120: mol_type = other DNA
aagttgacattaattgagaatgttactaaggctaaactggacccgcttgcccagaagataattatggaaaaattcttttgtgacttccaaagcagtctactattagcatgaattactgac

SEQ ID NO: 37680 - DNA, 120 bp, synthetic construct; identical to SEQ ID NO: 10876
  source 1..120: mol_type = other DNA

SEQ ID NO: 37681 - DNA, 120 bp, synthetic construct
  source 1..120: mol_type = other DNA
gatatgaaaaaaagtcagtaaggaaagtcagtgaagtgcttgcttttttgataattgcactcccaataattttgatattccaacgtacttggtttgcttgttttcacgttaatgttttct

SEQ ID NO: 37682 - DNA, 120 bp, synthetic construct
  source 1..120: mol_type = other DNA
gagtatttttatctgataaagaaagattaataatgaagccatttctccgaggaaaattgaggacaataattcagttttaaaatattatcgcaaaattaaattattctaaaaatttgttag

SEQ ID NO: 37683 - DNA, 120 bp, synthetic construct
  source 1..120: mol_type = other DNA
gatttgcctcttttcaaataaatgttcacagggaatacttttaacttgtagagagtacagtgactattgaagttacctaaattacctcaaggtaagtgattactgaaattaatcatgagg

SEQ ID NO: 37684 - DNA, 120 bp, synthetic construct; identical to SEQ ID NO: 10877
  source 1..120: mol_type = other DNA

SEQ ID NO: 37685 - DNA, 120 bp, synthetic construct
  source 1..120: mol_type = other DNA
tcctttattacctttttagaattttatttttaataacatgggaaaggcaactggtgatattttaatttttgtatggaacagtgcatctgctttctcatagccacataaaatacataaact

SEQ ID NO: 37686 - DNA, 120 bp, synthetic construct
  source 1..120: mol_type = other DNA
cctccatttgctgtttgttcatttggtgatagcgcaacacttaaaaaaatattttaagccgcttctgaagtaatcacttcagtgacttttaatggaggagtatttgttatgggaaattca

SEQ ID NO: 37687 - DNA, 120 bp, synthetic construct
  source 1..120: mol_type = other DNA
acttcagagtttgtaaagagaattgtagaagtgttgcatgcatatgacaattttctgcttaattgaaatgtgaggcctctgccatactacaaggatttagcttccagaaaatgtaatatt

SEQ ID NO: 37688 - DNA, 120 bp, synthetic construct; identical to SEQ ID NO: 10878
  source 1..120: mol_type = other DNA

SEQ ID NO: 37689 - DNA, 120 bp, synthetic construct
  source 1..120: mol_type = other DNA
ctgccacatatacgttcttccataggtggttaaaagtatattggtctgtgtttggtgattctctttgtacatattgagtatatgcattcactaatgtaaaataatttgccaagaaaggtg

SEQ ID NO: 37690 - DNA, 120 bp, synthetic construct
  source 1..120: mol_type = other DNA
agtatcggcaaatataagaagagtaacataatttaagggtgaattaattttatttgggaagttttagttctgtatagttaaggcagattcttcatttgcaacagttgacattgggacatg

SEQ ID NO: 37691 - DNA, 120 bp, synthetic construct
  source 1..120: mol_type = other DNA
tgcagtggcaggatctcggctcactggaacctctgcctcccaggttcaggcgattctcctgcctgaacctcccaagcagctgggattataggtgcatgccaccacgcccagatagttttt

SEQ ID NO: 37692 - DNA, 120 bp, synthetic construct; identical to SEQ ID NO: 10879
  source 1..120: mol_type = other DNA

SEQ ID NO: 37693 - DNA, 120 bp, synthetic construct
  source 1..120: mol_type = other DNA
aattatacacataattattatcagtactcaccacttcaaatatgaacagtgaatctaaccagtgtttgatttctctgtgtgtgtatgtgtatacaaagttagcaaaccttttatcttaat

SEQ ID NO: 37694 - DNA, 120 bp, synthetic construct
  source 1..120: mol_type = other DNA
tttatctatacttttaagcatatatacattgtttcattttagattttagggaggcagtgtgggctctggagccagactgcttgttttgtaatcctggatcttccatttagtagctggatg

SEQ ID NO: 37695 - DNA, 120 bp, synthetic construct
  source 1..120: mol_type = other DNA
ttagcatagtacctgccacattgtaaatacttaaatggtagctactgctctgaaaaactgtaatttcaggttatgtatgtagggaaattatttgtattttcatttatggtgtatgattgt

SEQ ID NO: 37696 - DNA, 120 bp, synthetic construct; identical to SEQ ID NO: 10880
  source 1..120: mol_type = other DNA

SEQ ID NO: 37697 - DNA, 120 bp, synthetic construct
  source 1..120: mol_type = other DNA
tattcacataaagtaaactctgcctcaaatgtaataaacttaatatgagttatgtaaactttggtcaatagaggtatattttttagcatttccttttgaaaatttcagccttttgaggga

SEQ ID NO: 37698 - DNA, 120 bp, synthetic construct
  source 1..120: mol_type = other DNA
gggaacttttaaagtattcagtctctgtattattgagtcctatttccacatttggccaggattctcaatatgatttaggcccaagacgtgggaagaaagaagtaaagaactaaaggattt

SEQ ID NO: 37699 - DNA, 120 bp, synthetic construct
  source 1..120: mol_type = other DNA
ggattattatttttcccccccttgggctgtactgatttcccagatgtaccacagcactcttagtagtgaagcacttgacttctagtgagtggattttttgtgtgtgtgttttatattgca

SEQ ID NO: 37700 - DNA, 120 bp, synthetic construct; identical to SEQ ID NO: 10881
  source 1..120: mol_type = other DNA

SEQ ID NO: 37701 - DNA, 120 bp, synthetic construct
  source 1..120: mol_type = other DNA
ggctgaagtacaataaggttctctgttctttactagtaattgcaaagattgtattctgtgaattttatttgtttaatacttttgatcttttgaagaggatgtaattatttaaggtattat

SEQ ID NO: 37702 - DNA, 120 bp, synthetic construct
  source 1..120: mol_type = other DNA
aattctcttgccgcagcctcccaagtagctggaattacaggcatgcgccaccacgcccggctaattttatattttttttttcagtagagatggggggtttctccatgttggtcaggctgg

SEQ ID NO: 37703 - DNA, 120 bp, synthetic construct
  source 1..120: mol_type = other DNA
ggcctcagatactcttttaattagatgcgtttaaaaatttaacccaccattgctggcatgaatagatgtatttttagagtgattcataaatatcgtatacatgtttaaagttacaaactt

SEQ ID NO: 37704 - DNA, 120 bp, synthetic construct
  source 1..120: mol_type = other DNA
actgtacttttaaaatgaaattttggggatgtcattaagcttgattttttaggttttttttttagtgtgtattataaattattttacactgattgtcagcgataaaatggaatgcctggg

SEQ ID NO: 37705 - DNA, 120 bp, synthetic construct; identical to SEQ ID NO: 10882
  source 1..120: mol_type = other DNA

SEQ ID NO: 37706 - DNA, 120 bp, synthetic construct
  source 1..120: mol_type = other DNA
gtggaatcagtatcttgttaatggctagtgaaagactgagtctgaagaaggatgcaggacttttttggcacttggtgcagtatttttcccattatgttacatgagtggttcttaaacttc

SEQ ID NO: 37707 - DNA, 120 bp, synthetic construct
  source 1..120: mol_type = other DNA
agtgatgctgatgctggtgctctggggatcacactttgaggaccaccaatgaacattatctcccaccaagcaaacccttaacatgttatactcctttaggttattagaatttatacatgc

SEQ ID NO: 37708 - DNA, 120 bp, synthetic construct; identical to SEQ ID NO: 3650
  source 1..120: mol_type = other DNA

SEQ ID NO: 37709 - DNA, 120 bp, synthetic construct
  source 1..120: mol_type = other DNA
accagtctgggcaacataggcagaccctgtctctacaaaaaaaaatacaaaaattagtcgggtgttatagtgcgcattggtagtcccagctactgaggaggctgaggtgggatcacctga

SEQ ID NO: 37710 - DNA, 120 bp, synthetic construct
  source 1..120: mol_type = other DNA
agttacgtagatacactgcctaaccttagtgaaccctgtttcgacaactccaaaatgggagtaaaaatcctaaacttgtacagtggttttttagttttgttaaaagtacaggtgaggttt

SEQ ID NO: 37711 - DNA, 120 bp, synthetic construct
  source 1..120: mol_type = other DNA
gggcttgaagccagtgatgctgcttaacatcctatatggcacaagacccctccccatcaacaaagaattatctagcccaaaatgctgtgtaaaatgtctggtatataataagtataatat

SEQ ID NO: 37712 - DNA, 120 bp, synthetic construct; identical to SEQ ID NO: 10884
  source 1..120: mol_type = other DNA

SEQ ID NO: 37713 - DNA, 120 bp, synthetic construct
  source 1..120: mol_type = other DNA
tgctagtagtttttaaagtaatcctttttcctttaattatgtagttgttgaactgttgggagttacttttctcttactattttgttatttaatgtattctttgaccttatgcttttttat

SEQ ID NO: 37714 - DNA, 120 bp, synthetic construct
  source 1..120: mol_type = other DNA
taaggttctttgatccatgtgttgcattcttttctaggccctaaatttgctatgccagcctgttgaattaaagtgctttatttatctaaattagaaacttgtattaaagtgaagttttag

SEQ ID NO: 37715 - DNA, 120 bp, synthetic construct
  source 1..120: mol_type = other DNA
tgtaattacaaaagggttctaggaatagattgctgtgattttttttctgtttgcatgattttacagtttgctttgcctctcacttttgaatgcagaataaaatgtcaaggccttattttt

SEQ ID NO: 37716 - DNA, 120 bp, synthetic construct
  source 1..120: mol_type = other DNA
gacaaataggactcattgttacaattcagttgaataaggcttatgatgtttatttcagtatatgaatgaaaactatgtgcttattgtacttaagaaaatttcttttattaaaaacatgac

SEQ ID NO: 37717 - DNA, 120 bp, synthetic construct; identical to SEQ ID NO: 10885
  source 1..120: mol_type = other DNA

SEQ ID NO: 37718 - DNA, 120 bp, synthetic construct
  source 1..120: mol_type = other DNA
taatgttatacaaacctaactgaagtgttagagccttgaagatttttcccccgaattacatatagtaactctacttgtatttaatactgaaagcatattttacttatttaagtgagacaa

SEQ ID NO: 37719 - DNA, 120 bp, synthetic construct
  source 1..120: mol_type = other DNA
tatagtaaagtggtaataacactattgctttctgtttttttaatcagaaggagtatgggcttataatgatgttactgttccctgaagcatattttgaatgatacggtttatatttgcaca

SEQ ID NO: 37720 - DNA, 120 bp, synthetic construct
  source 1..120: mol_type = other DNA
tgtcagatactaaaacaaataaccttaactttattaaattataattttttatcatgaggtggtattcatttattcatatagttagaacaaaaaatatttaaaatattgaggtagaaacaa

SEQ ID NO: 37721 - DNA, 120 bp, synthetic construct; identical to SEQ ID NO: 10886
  source 1..120: mol_type = other DNA

SEQ ID NO: 37722 - DNA, 120 bp, synthetic construct
  source 1..120: mol_type = other DNA
ctatttggattttttttaatactgaaaaggtcacacagattgtgattattgtgtagtgtccaagaactaaggcctaccatctgttactcaaatgtatgaaaaagttaagataatttagtg

SEQ ID NO: 37723 - DNA, 120 bp, synthetic construct
  source 1..120: mol_type = other DNA
ttttctattacaatacagatactggctgagaactaaagattgtgtaataaacgcctggccttcagtcatttggttttttttttccctcgattgtttggatagttaactggacatcatgtt

SEQ ID NO: 37724 - DNA, 120 bp, synthetic construct
  source 1..120: mol_type = other DNA
ttcttaaaaatttgtttaaatatttttcaagttcttttcttcatcttctacaacttaattcttgtctgtatgcaaatgagcttccccatttaaaattttgctgttgcattttaggccact

SEQ ID NO: 37725 - DNA, 120 bp, synthetic construct
  source 1..120: mol_type = other DNA
cttaatattatagaatctgattgatttaatctaccttgtttcatttagtatgttgacattttcttgagaaatttgttatgccaaatgattaacataataatattttaagtttagatatga

SEQ ID NO: 37726 - DNA, 120 bp, synthetic construct; identical to SEQ ID NO: 10887
  source 1..120: mol_type = other DNA

SEQ ID NO: 37727 - DNA, 120 bp, synthetic construct
  source 1..120: mol_type = other DNA
gtgagaggtgttatgtgtttctgtcccttgtttttattcctatccctcccatctaactgttggtactcttatcttcccaggtattaaacttgtatgttttaaaagcttatttacttgttg

SEQ ID NO: 37728 - DNA, 120 bp, synthetic construct
  source 1..120: mol_type = other DNA
ccctattacaataactggtttcataataaaatggtatcccttcaataacaagcatttatagtagtttattaaaactaagggtgttatctattcaaaccaagcaatgcagacttactgttg

SEQ ID NO: 37729 - DNA, 120 bp, synthetic construct
  source 1..120: mol_type = other DNA
agtatgattataaagttgatataatagttaaccttcagtgggaataggaatcatttaatattgttagatatttgtattattagaacaatctcctatgattcttactaatatagtaatgaa

SEQ ID NO: 37730 - DNA, 120 bp, synthetic construct; identical to SEQ ID NO: 10888
  source 1..120: mol_type = other DNA

SEQ ID NO: 37731 - DNA, 120 bp, synthetic construct
  source 1..120: mol_type = other DNA
tgcctcccaggttcatgccattctcctgcctcagcctcccgagtagctgggactacaggcgcctaccacggtggcgcccggctaattttttgtatttttagtagagacggggtttcaccg

SEQ ID NO: 37732 - DNA, 120 bp, synthetic construct
  source 1..120: mol_type = other DNA
cttattggaaaaagaaaacctccttgccggagacggagacgcatttgtattagaactttgttttctgagtaccttacctatagtaggtttcaaatattggtgaattagttgatggttagg

SEQ ID NO: 37733 - DNA, 120 bp, synthetic construct
  source 1..120: mol_type = other DNA
aacatcttctgcactttacctgtttgaatatcttttttgctgtaaaaattagtggccttatgtctttctgcataattatagagtagccaaaacctgttttaggttaatcacctctggcaa

SEQ ID NO: 37734 - DNA, 120 bp, synthetic construct; identical to SEQ ID NO: 10889
  source 1..120: mol_type = other DNA

SEQ ID NO: 37735 - DNA, 120 bp, synthetic construct
  source 1..120: mol_type = other DNA
gagttctgaaacaggaaaccagtcttatcatattcatccagagacctaggaagaaggtaattgtttggtatactcgttaaaaccagttggttgggcaacttaaatttttagaggatcaca

SEQ ID NO: 37736 - DNA, 120 bp, synthetic construct
  source 1..120: mol_type = other DNA
ttactgcaacctctgcctcccaggttcaggcgtttctcctgtctcagcctcctgagtagctgggattacaggcgcatgctgccatgcccggctaattttttgtattttagtagagacggg

SEQ ID NO: 37737 - DNA, 120 bp, synthetic construct
  source 1..120: mol_type = other DNA
ataattaacacctgctatgaagaaaaattgattaaaatagttgagaagtctagtacactctcagctaatatactaaattatactatggattttagagtattgttaacattatcagtgact

SEQ ID NO: 37738 - DNA, 120 bp, synthetic construct
  source 1..120: mol_type = other DNA
attggggttcagatcaccttgattgttcccttaaagattaaattttgtaaaactgtgtgtaattttcctgtatctggtttggatagctttaaaaatggttcttaagtttaatgagttcaa

SEQ ID NO: 37739 - DNA, 120 bp, synthetic construct; identical to SEQ ID NO: 10890
  source 1..120: mol_type = other DNA

SEQ ID NO: 37740 - DNA, 120 bp, synthetic construct
  source 1..120: mol_type = other DNA
gttttttttttttttttacaagttgcagatttgttgccaaatgaacgagtttgtagtattgctaacaaggagaagaattactagcaagtcttgatgttacttttgaagagtgtgatgatt

SEQ ID NO: 37741 - DNA, 120 bp, synthetic construct
  source 1..120: mol_type = other DNA
ataaaaacatgaaagttgtgaggtcaggttgtttggagaagtagaaaacttcagtagagtttatagataggcagtcttcctttctggtttggcactgacagcagattaactagaaagtgt

SEQ ID NO: 37742 - DNA, 120 bp, synthetic construct
  source 1..120: mol_type = other DNA
aaaaacaccatattgagttgccttgtaatgagacatttaaactaaatttaaataacagaattcatgcaccatctaataacaaccccttatttacaattatagagtcctttgcaattttat

SEQ ID NO: 37743 - DNA, 120 bp, synthetic construct; identical to SEQ ID NO: 10891
  source 1..120: mol_type = other DNA

SEQ ID NO: 37744 - DNA, 120 bp, synthetic construct
  source 1..120: mol_type = other DNA
taaaacgccattttttgagcactcttaatatttatagttcaaactttgtacctatgtacctttttctctttagaaaataagatttcaggctgcattaatttgatctgtacaggaatgatt

SEQ ID NO: 37745 - DNA, 120 bp, synthetic construct
  source 1..120: mol_type = other DNA
ccattaactcatcacttacattaggtatatctcctaatgctatccctcccccctccccataccccatgacaggccctggtgtgtgatgttccccaccctgtgtccaagtgttctcattgt

SEQ ID NO: 37746 - DNA, 120 bp, synthetic construct
  source 1..120: mol_type = other DNA
tttttatggctgcatagtattccatggtgtctatgtgtcacattttcttaatccagtctatcattgatggacatttgggttggttccaagtctttgctattgtgaatagtgctgcagtaa

SEQ ID NO: 37747 - DNA, 120 bp, synthetic construct; identical to SEQ ID NO: 10892
  source 1..120: mol_type = other DNA

SEQ ID NO: 37748 - DNA, 120 bp, synthetic construct
  source 1..120: mol_type = other DNA
gcccactttttgatggggttgtttgattttttcttggaagtttgtttaagttctttgtagattctggatattagccctttgtcagatgggtagattgtaaaagttttctcccattctcta

SEQ ID NO: 37749 - DNA, 120 bp, synthetic construct
  source 1..120: mol_type = other DNA
tctgctttctgctcaatatgaatcttcaatttagaaatgagagtccatcattaacaattcaacatagcttattaataggaaaaaaaaacctagtaacaaatgtaaaatctttgattaaat

SEQ ID NO: 37750 - DNA, 120 bp, synthetic construct
  source 1..120: mol_type = other DNA
aagaaatgtaaatgtgatgtaacttatgaatcagtggttgagtttcttttttgctcacaagaaccctaactgtgtgttacttgaaagcactgatggaaatcagggaaaaagctccagaag

SEQ ID NO: 37751 - DNA, 120 bp, synthetic construct; identical to SEQ ID NO: 3660
  source 1..120: mol_type = other DNA

SEQ ID NO: 37752 - DNA, 120 bp, synthetic construct
  source 1..120: mol_type = other DNA
aagtagttattgcattttactttataagttgtttaaggataagcatacctatatattaagcactacaaagaaacttttacaatggctttatttttagcaaaccatcatagttaaaataag

SEQ ID NO: 37753 - DNA, 120 bp, synthetic construct
  source 1..120: mol_type = other DNA
tgcaagtacagatttgagataaggtagatacattatttggatgtcaactcggaagttgttcaagaaaagatattttgttatttagatgtaacttggaacatatttctagtgtttcaagtc

SEQ ID NO: 37754 - DNA, 120 bp, synthetic construct
  source 1..120: mol_type = other DNA
cttaattgctattaattacattttttctttgggacggtatttgttctttggtgagaaaggattcttgtaacacctaaatcaagactgtccaaacatggcatatgcagtttaccagtcaaa

SEQ ID NO: 37755 - DNA, 120 bp, synthetic construct; identical to SEQ ID NO: 10894
  source 1..120: mol_type = other DNA

SEQ ID NO: 37756 - DNA, 120 bp, synthetic construct
  source 1..120: mol_type = other DNA
ttatgtgccttatatactttggactcatttaatcctcaacacaacaaccctatgtagttcatactagaattattcccatttaaagatggggaaagtgatgtttagagaggctaagtgact

SEQ ID NO: 37757 - DNA, 120 bp, synthetic construct
  source 1..120: mol_type = other DNA
gacataaacatagaggtgtttgttgcaatgttagtcataatacctaaaaattgtgaactagttaaatgtccaatagtagtaaaatggttcattaaccatggtacacccatcaatataatg

SEQ ID NO: 37758 - DNA, 120 bp, synthetic construct
  source 1..120: mol_type = other DNA
tttatttccatcaaaaattagttataaagaaatagaaatctaagaagtttaatagatattaccattgaacactagatttgtattagtatcttttatatttatctctctcatttcctatat

SEQ ID NO: 37759 - DNA, 120 bp, synthetic construct; identical to SEQ ID NO: 10895
  source 1..120: mol_type = other DNA

SEQ ID NO: 37760 - DNA, 120 bp, synthetic construct
  source 1..120: mol_type = other DNA
caaagagtaaaactttttgttaagctttgatgttctttagaaagtttagattattccacaagtcactgtcgttgaaagaaaagtagttacagtggggtcttatgggataaggcattacca

SEQ ID NO: 37761 - DNA, 120 bp, synthetic construct
  source 1..120: mol_type = other DNA
atatgataggtacctttattagccccattctgcttaggaagcaacagaaagagtatgtattttgcctaaggttgcacaataagttaagctggggttccaattctagcaagttggttctag

SEQ ID NO: 37762 - DNA, 120 bp, synthetic construct
  source 1..120: mol_type = other DNA
cctggttgttataaatctttatgcttaatacttatgtcattatatgtaaatttcgtattaaacactcaacttattcagaagaatatcaggtaagtgtaggttaaggctgttttctatcag

SEQ ID NO: 37763 - DNA, 120 bp, synthetic construct
  source 1..120: mol_type = other DNA
aatttgtggcataagaaatatttgcctcaagatttggtgcttgtttaggtagttgctggcattacttttggaaatgtcagtaaattttcatactgtcttggaattttttcaatttttaca

SEQ ID NO: 37764 - DNA, 120 bp, synthetic construct; identical to SEQ ID NO: 10896
  source 1..120: mol_type = other DNA

SEQ ID NO: 37765 - DNA, 120 bp, synthetic construct
  source 1..120: mol_type = other DNA
agttgtctacatctttctaacttaggatggatgccgatgtcttgggtaacatctcaaactttatcagtaaggaaggtgagaatctgaagaaaatgaaaccttaaaaagattgaattcctg

SEQ ID NO: 37766 - DNA, 120 bp, synthetic construct
  source 1..120: mol_type = other DNA
atccttaaagctggaccttactttgtcagtcctgccttctccatgttgctttgtgtgtaagcttcactggactgtttgctttttgctgattattttatgtatttccatatgtctacttta

SEQ ID NO: 37767 - DNA, 120 bp, synthetic construct; identical to SEQ ID NO: 10897
  source 1..120: mol_type = other DNA

SEQ ID NO: 37768 - DNA, 120 bp, synthetic construct
  source 1..120: mol_type = other DNA
atgaaggagggggccagctgaatttactttaatgattatgtaacacccatttatgtatagttatagacttgtctgaaatgagttaaatcctttgcaacgtttgctgctatgctttgaatg

SEQ ID NO: 37769 - DNA, 120 bp, synthetic construct
  source 1..120: mol_type = other DNA
atggtatctctatccttatgaatggattaatgctgtttgaatggtagtggatgagttatcttgggagtttggcctcctccgtctcacatgcttccttaccttctgccatgtggtaactca

SEQ ID NO: 37770 - DNA, 120 bp, synthetic construct
  source 1..120: mol_type = other DNA
aacataaaatttactaagaaaactggtaccaagagtgtgattgttgccataacaaatacctgaaaatgttcaaatggcttgggttctggctagagaaggatggaagagtttggatgaaca

SEQ ID NO: 37771 - DNA, 120 bp, synthetic construct
  source 1..120: mol_type = other DNA
aaaatctggaacttcttagagagttgtcatcagttggtagaactataagtggtaaaggtctttctgatgatatctcagaaatgaagaacaagatactggacactggagtaaaggccatcc

SEQ ID NO: 37772 - DNA, 120 bp, synthetic construct; identical to SEQ ID NO: 10898
  source 1..120: mol_type = other DNA

SEQ ID NO: 37773 - DNA, 120 bp, synthetic construct
  source 1..120: mol_type = other DNA
agcaaaccaagggtgtggtccaggaaccatttgctgaagagattaatattcctagaggagacccaagggctatttatcaagacagtggaaaaagaccccagaggcattttggagatcttt

SEQ ID NO: 37774 - DNA, 120 bp, synthetic construct
  source 1..120: mol_type = other DNA
gggccttggctgtcctaggtctggttcagaggggcccaggtgtggcttaggctactgctgagtactcaaatggtaaaccttggcagcgtctatatggtgctaattctgcaggctcacagg

SEQ ID NO: 37775 - DNA, 120 bp, synthetic construct
  source 1..120: mol_type = other DNA
cactacagagagtccctactagggcattgcataatggagccatggcagcaggcccaccaccaaagcttcagaactgtagagctacaagtatacagtgccagcctgggagaacttcaggct

SEQ ID NO: 37776 - DNA, 120 bp, synthetic construct; identical to SEQ ID NO: 10899
  source 1..120: mol_type = other DNA

SEQ ID NO: 37777 - DNA, 120 bp, synthetic construct
  source 1..120: mol_type = other DNA
catgttatgatgcatccagaagactctcaccacatgcagccccttgatcttagacttctcagcttctagaactgtgagtgaaataaacttcttttctttataaattaccccgtctgtggt

SEQ ID NO: 37778 - DNA, 120 bp, synthetic construct
  source 1..120: mol_type = other DNA
tagtgcaaggataaattcaagtttagccctggttagaatgaccacatttcaagggaggggctttgtacttctgtgcatatctgtaaggataaaaatcttaatactattctcactgaaatt

SEQ ID NO: 37779 - DNA, 120 bp, synthetic construct; identical to SEQ ID NO: 10900
  source 1..120: mol_type = other DNA

SEQ ID NO: 37780 - DNA, 120 bp, synthetic construct
  source 1..120: mol_type = other DNA
tacatttttaagtgaggctactttcttctaattttttaaatttatttttctcagtttttaaaaaaaatgtcagattggctaagagttggggcagctttcttatgtgagagtagtagatga

SEQ ID NO: 37781 - DNA, 120 bp, synthetic construct
  source 1..120: mol_type = other DNA
ttggggcatagtaatttaaatcttagatgcttttattagtataattttttggtagaaatttggcattaaaaaatgcatacagagctttttctacatacagggcaagacagcattttgtca

SEQ ID NO: 37782 - DNA, 120 bp, synthetic construct
  source 1..120: mol_type = other DNA
aagcaatttgttacagaaacgatacaggtacattgtggcaaaaatagaagatacaaaacaagcaaatatgagaaaaaatatacatgccaccacctatatatgacttttagtactttataa

SEQ ID NO: 37783 - DNA, 120 bp, synthetic construct; identical to SEQ ID NO: 10901
  source 1..120: mol_type = other DNA

SEQ ID NO: 37784 - DNA, 120 bp, synthetic construct
  source 1..120: mol_type = other DNA
agagaatgggtcatgtcctacaaactgtctgaatttgtccagtttgctgtctcatagtgtcatttagcttgttttatcctatgtatttcctgcaaattaaaatttgtatctgaatccttg

SEQ ID NO: 37785 - DNA, 120 bp, synthetic construct
  source 1..120: mol_type = other DNA
agtgacagtcttttctgcccattgttcaattatattcgtctctttacattagaaagtattttgggtagtagtattttggtgctgtaagaaagttcattttctcatcaaccactcacctat

SEQ ID NO: 37786 - DNA, 120 bp, synthetic construct
  source 1..120: mol_type = other DNA
tgtgaaatgggactatttgtttgtctttaaatacagtctctataggaaagacaaaataaatacttaaatctcactctttaccatttttcaaagtgaagaactattccgttaaccacctca

SEQ ID NO: 37787 - DNA, 120 bp, synthetic construct; identical to SEQ ID NO: 10902
  source 1..120: mol_type = other DNA

SEQ ID NO: 37788 - DNA, 120 bp, synthetic construct
  source 1..120: mol_type = other DNA
ctcaaggacttttatttaattcagggtgttagtaccatttaaatgttttctttgatgctcagattatcacagctagtcatttggacctttataccacctcctatgtccatttgatatagg

SEQ ID NO: 37789 - DNA, 120 bp, synthetic construct
  source 1..120: mol_type = other DNA
agtttattatgatattagagatgaaaatctgtgttctaggaatgtttattactgctagagtgatgttgcttttaggccatttcagagaaaagacctagaaaacagatttttacaaacatg

SEQ ID NO: 37790 - DNA, 120 bp, synthetic construct
  source 1..120: mol_type = other DNA
aacataaagaaaatagtcctggtgcggtggctcacactgtaatcccagcactttgggagattgaggcaggtggattgcttgagctcaggagttcaagaccaacctgggcaacatgatgaa

SEQ ID NO: 37791 - DNA, 120 bp, synthetic construct; identical to SEQ ID NO: 10903
  source 1..120: mol_type = other DNA

SEQ ID NO: 37792 - DNA, 120 bp, synthetic construct
  source 1..120: mol_type = other DNA
aatgatattactagaatcagtaaaactaccaaaagaagtttaaagtttcttcctagtgtttttttgttcttagaatacttcctaccaagaagtgcagtaaaagtgcagtgtccaaatagc

SEQ ID NO: 37793 - DNA, 120 bp, synthetic construct
  source 1..120: mol_type = other DNA
tcaaaaatatataaagatatacacaggagtcctgctgctacctgttcttgctatgcttttccccttttcttccctttctctgtgaagcagccatttttattagtttcttgtttatcactc

SEQ ID NO: 37794 - DNA, 120 bp, synthetic construct
  source 1..120: mol_type = other DNA
aatatatgggttaacattctttttgtcatccctatacgaaagatatacccagtatactctattgggtgggtttttttccttaaaatattcagtagatctctccagttagcacatagttat

SEQ ID NO: 37795 - DNA, 120 bp, synthetic construct; identical to SEQ ID NO: 10904
  source 1..120: mol_type = other DNA

SEQ ID NO: 37796 - DNA, 120 bp, synthetic construct
  source 1..120: mol_type = other DNA
agcgtagagtgttgatgatttttatagtttataaatggttcttgtgtgtagagttttgtttttatgctagctatagtctgtaacataattcactataatgggcatgctaaatatccatga

SEQ ID NO: 37797 - DNA, 120 bp, synthetic construct
  source 1..120: mol_type = other DNA
ctgatgacataatgttcgttaatacatattttatatatgtgtcagatagcatatttgtataataaagtaagctgcaggaaaaatattaaaatcataaagaagagaaaatatacttactat

SEQ ID NO: 37798 - DNA, 120 bp, synthetic construct
  source 1..120: mol_type = other DNA
gaagaaggtccacatacaagtggtccgacacagctcaaaccggttttgttcattggccaactgtagtttgattgaaagtaataataaatgaagtttctgcctcagttcagtattatcaag

SEQ ID NO: 37799 - DNA, 120 bp, synthetic construct; identical to SEQ ID NO: 10905
  source 1..120: mol_type = other DNA

SEQ ID NO: 37800 - DNA, 120 bp, synthetic construct
  source 1..120: mol_type = other DNA
agttaccttttatctttaccagtattaacacataaatggttatacataaatacattgaccaccttttattactccagctatagtggggaaaactttcttttcataactagctaatgtttt

SEQ ID NO: 37801 - DNA, 120 bp, synthetic construct
  source 1..120: mol_type = other DNA
gtatacaggaacaatattgatgatgtagtaaggtaagaatgctttgattttctatttcaaatattgatgtttatattcatgttgtgttttcatttagaaaagatttctaagccacagaaa

SEQ ID NO: 37802 - DNA, 120 bp, synthetic construct
  source 1..120: mol_type = other DNA
taatcaggtacttatgtgatatcatttcctggactccataaaatgctggtcaccaggtttaatacctggattccattacagtgtgatttttgtcttatttcatagttggggattaggctt

SEQ ID NO: 37803 - DNA, 120 bp, synthetic construct; identical to SEQ ID NO: 10906
  source 1..120: mol_type = other DNA

SEQ ID NO: 37804 - DNA, 120 bp, synthetic construct
  source 1..120: mol_type = other DNA
taatttcagagcaaaaatatatatgtatgaataaattaactgtaaattgtcagtaggaaccttaagaattcgtggcgtattttatgaaaggaattcatgtctgatgtgcaaatagtctta

SEQ ID NO: 37805 - DNA, 120 bp, synthetic construct
  source 1..120: mol_type = other DNA
ctgtagtcccagctacttgggaggctgaggtgggaggatcacttggcttgaacccccaggtagagggtagaggccagtctgggtaacacagcgagaacccatctcttaaaaaaaaagttt

SEQ ID NO: 37806 - DNA, 120 bp, synthetic construct
  source 1..120: mol_type = other DNA
tataaagcattatgcagatgtagactccttttataatagttgtgtaagtatataagacaacctacattcttcatgagctagccataagttttagcaacttgctttgaaccacggtagatt

SEQ ID NO: 37807 - DNA, 120 bp, synthetic construct
  source 1..120: mol_type = other DNA
aaaattatagctggtacatagggatgccagaaggactgtttaagaagctgaaaatagagaaatgaatttatcttctcatagttaggcagggcacagtagaaggatgcttaacattgcaag

SEQ ID NO: 37808 - DNA, 120 bp, synthetic construct; identical to SEQ ID NO: 10907
  source 1..120: mol_type = other DNA

SEQ ID NO: 37809 - DNA, 120 bp, synthetic construct
  source 1..120: mol_type = other DNA
gtgtgctagtttttacgttggtctcttctcagtgtcgttagtcactgaggctgattgatcatcttttaggttactgataaagttcctgtacagctgattttcagaccttagattgcaata

SEQ ID NO: 37810 - DNA, 120 bp, synthetic construct
  source 1..120: mol_type = other DNA
ggaaaagatttatacattcagcttgtaattagtaatcaagactgaggtttagtctatctagcttcacaatctatctagtttgttttgtctagccatatgatttcttcaaatatgccattt

SEQ ID NO: 37811 - DNA, 120 bp, synthetic construct; identical to SEQ ID NO: 10908
  source 1..120: mol_type = other DNA

SEQ ID NO: 37812 - DNA, 120 bp, synthetic construct
  source 1..120: mol_type = other DNA
cctagtacctaagtgattaatttccttgattggttcacattatattgaggatattagtaatcagtagtgattccttttttggttcaaagatgatagtgtcacagtgaaaaatgtttttaa

SEQ ID NO: 37813 - DNA, 120 bp, synthetic construct
  source 1..120: mol_type = other DNA
ttttcctgtgatttttccccaaacggaaaatactctgcagagattagactttgttattgttgtactacatcattgctttgactaaaataaactcagattgcaaataccttcaagcttaca

SEQ ID NO: 37814 - DNA, 120 bp, synthetic construct
  source 1..120: mol_type = other DNA
tctcctgcctcagcctgcggagcagctgggattatagatgcccgcccccacgcccagctgatttttgtatttgtagtagagatggggttttaccttgttggccagtctggtctcaaactc

SEQ ID NO: 37815 - DNA, 120 bp, synthetic construct
  source 1..120: mol_type = other DNA
ttttatacttgaggtactcagagtccttttgagacaaatatttaacttctccttttgaggttaccgcctacgattgggaattaatgtaaaaaataagccaaaagaaagtgagggaaaagt

SEQ ID NO: 37816 - DNA, 120 bp, synthetic construct; identical to SEQ ID NO: 10909
  source 1..120: mol_type = other DNA

SEQ ID NO: 37817 - DNA, 120 bp, synthetic construct
  source 1..120: mol_type = other DNA
tgcacaacttacagattcgttacatatgtatacatgtgccgtgttggtttgctgcacccattaactcgtcatttacattaggtatttctcctaatgttatccctctcccaaccccccacc

SEQ ID NO: 37818 - DNA, 120 bp, synthetic construct
  source 1..120: mol_type = other DNA
cagaatgatggtttccagcttcatctatgtccctacaaaggacgtgaagctcatccttttttatggctgcatactactccgtggtgtatatgtgccacattttcttaatccagtcagtca

SEQ ID NO: 37819 - DNA, 120 bp, synthetic construct
  source 1..120: mol_type = other DNA
atggaattgctgggtcaaatggtatttctagttctagatccctgaggaattgccacactgtcttccacaatggttgaactagtttacagtcccaccaacagtgtaaaaatgttcctgttc

SEQ ID NO: 37820 - DNA, 120 bp, synthetic construct; identical to SEQ ID NO: 10910
  source 1..120: mol_type = other DNA

SEQ ID NO: 37821 - DNA, 120 bp, synthetic construct
  source 1..120: mol_type = other DNA
gaagctctttagtttaattagatcccatttgactattttggcttttgttgccattgcttttggtgttttagtcatgaagtccttgcccatgcctatgtcctgaatggtattgcctaggtt

SEQ ID NO: 37822 - DNA, 120 bp, synthetic construct
  source 1..120: mol_type = other DNA
catatgactagccagttttcccagcaccatttattaactagggaaccctttccccatttcctgtttttgtcaggtttgtcaaagatcagatggttgtagatgtgtcatgttatttctgag

SEQ ID NO: 37823 - DNA, 120 bp, synthetic construct; identical to SEQ ID NO: 10911
  source 1..120: mol_type = other DNA

SEQ ID NO: 37824 - DNA, 120 bp, synthetic construct
  source 1..120: mol_type = other DNA
ttcttgaacaggtccttcacatcccttgtaagttggattcctaggtattttattctctttgtagcagttgtgagtgggagttcactcatgatttggctctctgtctgtctgttattggtg

SEQ ID NO: 37825 - DNA, 120 bp, synthetic construct
  source 1..120: mol_type = other DNA
tcatctgcaaacagggacaatttgacttcctcttttcctaattgaataccctttatttctttctcttgcctgattgccctggccagaacttccaacactgtgttgaataggagtggtgag

SEQ ID NO: 37826 - DNA, 120 bp, synthetic construct; identical to SEQ ID NO: 10912
  source 1..120: mol_type = other DNA

SEQ ID NO: 37827 - DNA, 120 bp, synthetic construct
  source 1..120: mol_type = other DNA
gaggatttttgcattgatgttcatcaggggtgttggtctaaaattctctttttttgttgtgtctctgccaggctttggtatcgggatggtgctggcctcctaaaatgagttagggaggat

SEQ ID NO: 37828 - DNA, 120 bp, synthetic construct
  source 1..120: mol_type = other DNA
attaattattgcctcaatttcagagcctgttactggtctattcagggattcaacttcttcctggtttagtcttgggagggtgtatatgtccaggaatttatccatttcttctagattttc

SEQ ID NO: 37829 - DNA, 120 bp, synthetic construct; identical to SEQ ID NO: 10913
  source 1..120: mol_type = other DNA

SEQ ID NO: 37830 - DNA, 120 bp, synthetic construct
  source 1..120: mol_type = other DNA
tttagtgctataaatttccctgtatacactgctttaaatgtgtcccagagattctggtacgttgtgtctttgttctcattggtttcaaagaacatctttatttctgccttcattttgtta

SEQ ID NO: 37831 - DNA, 120 bp, synthetic construct; identical to SEQ ID NO: 10914
  source 1..120: mol_type = other DNA

SEQ ID NO: 37832 - DNA, 120 bp, synthetic construct
  source 1..120: mol_type = other DNA
tcccgatattaactgtgtgggagtctaagtctctttgtaggtcactcaggacttgctttatgaatctaggtgctcctgtattgggtgtatatatatttaggatagttagctcttcttgtt

SEQ ID NO: 37833 - DNA, 120 bp, synthetic construct; identical to SEQ ID NO: 10915
  source 1..120: mol_type = other DNA

SEQ ID NO: 37834 - DNA, 120 bp, synthetic construct
  source 1..120: mol_type = other DNA
ctagcatcaatggtctttacaatttggcatgtttttgcagtggctgataccagttgttcctttccatgtttagtgcttccttcaggagctcttgtaaggcaggcctggtagtgacaaaat

SEQ ID NO: 37835 - DNA, 120 bp, synthetic construct
  source 1..120: mol_type = other DNA
cccactctcttctggcttgtagagtttcagcggagagatctgctgttagtctgatgggcttccctttgtgggtaacccgacctttctctctggctgccctttacattttttcctgcattt

SEQ ID NO: 37836 - DNA, 120 bp, synthetic construct
  source 1..120: mol_type = other DNA
tctcctggataatatcctgaagagtgttttccagcttggttccattctccccgtcactgtcaagtacaccaatcaaacgtagatttggtcttttcacatagtcccatatttcttggaggc

SEQ ID NO: 37837 - DNA, 120 bp, synthetic construct; identical to SEQ ID NO: 10916
  source 1..120: mol_type = other DNA

SEQ ID NO: 37838 - DNA, 120 bp, synthetic construct
  source 1..120: mol_type = other DNA
gtgaggagctgtgatcctttggaggagaagaggcactctgggttttagaattttcagcttttctgctctgttttctccccatctttgtggttttatctacctttggtctttgattatggt

SEQ ID NO: 37839 - DNA, 120 bp, synthetic construct
  source 1..120: mol_type = other DNA
taacagtcaggtccctcagctgtaggtctgttggagtttgctggaggtccactccagacactgtctggatatcaccagtggaggctgcagaacagcaaatattgcagaacagcaaatatt

SEQ ID NO: 37840 - DNA, 120 bp, synthetic construct
  source 1..120: mol_type = other DNA
aggaggcagtctgtccgttctcagagctcaaacactgtgctggtagaactactgctctcttcagagctgtcagagagggatgtttaagtctgaggaagtttctgctgccttttgttcagc

SEQ ID NO: 37841 - DNA, 120 bp, synthetic construct; identical to SEQ ID NO: 10917
  source 1..120: mol_type = other DNA

SEQ ID NO: 37842 - DNA, 120 bp, synthetic construct
  source 1..120: mol_type = other DNA
cttcctgggtgaggcaatgccccgccctgcttcagctcaccctccgtgggctgcacccactttccaaccagtcccagtgagaagaaccaggtacctcagttggaaatgcagaaatcacct

SEQ ID NO: 37843 - DNA, 120 bp, synthetic construct
  source 1..120: mol_type = other DNA
ggctggggtgcagaggcatgatcacggctcactgcaacctctgccttctgggctcaagtgatcctcccacctcagcctcccaagttgctgggaccacagccacgcatcaccaggcctggc

SEQ ID NO: 37844 - DNA, 120 bp, synthetic construct; identical to SEQ ID NO: 10918
  source 1..120: mol_type = other DNA

SEQ ID NO: 37845 - DNA, 120 bp, synthetic construct
  source 1..120: mol_type = other DNA
tcaggagaatggaggtttaatagaggtgaactgtctttctcactgcagaacctttaatatgccactatgcattgtaaatctcccaagagtgagattctagtatgatgcttttcttttcct

SEQ ID NO: 37846 - DNA, 120 bp, synthetic construct
  source 1..120: mol_type = other DNA
tttagagtacagtcttctgatatatagtgatttttgaaaaagatttatttattgtcttgttcactgtgagctttttcccccatgtataagcagctgtgtaatagattcaagagcaccccc

SEQ ID NO: 37847 - DNA, 120 bp, synthetic construct; identical to SEQ ID NO: 10919
  source 1..120: mol_type = other DNA

SEQ ID NO: 37848 - DNA, 120 bp, synthetic construct
  source 1..120: mol_type = other DNA
gattttcaataaaaaggaagtatttgttgccctaacatcagtattggctattcagtttaaaaaaggagttaaagagatgttatttataggcaggcttcaaaagaggaaagaatgatcagt

SEQ ID NO: 37849 - DNA, 120 bp, synthetic construct
  source 1..120: mol_type = other DNA
aaattcacataacagctaaccattttaaccacggaaagtgtacattccgtggcatttattaccttcacagtgttacctctacctttatcaagtttcaaaacattttatcaccccaaaaga

SEQ ID NO: 37850 - DNA, 120 bp, synthetic construct
  source 1..120: mol_type = other DNA
acctctgcctcccgagttcaagcaattctcctgcctcagcctcccgtagctgggactacaggcacgcgccacatgcctggctaatttttgtatttttagtagaaacgtggtttcaccatg

SEQ ID NO: 37851 - DNA, 120 bp, synthetic construct
  source 1..120: mol_type = other DNA
taattccttagtggatttgacagtgtttatattatctacaccaatgcatttttttgtatgttaataataggagatatttattgggcatttatttacatacttatttgcatgtgtaactgt

SEQ ID NO: 37852 - DNA, 120 bp, synthetic construct; identical to SEQ ID NO: 10920
  source 1..120: mol_type = other DNA

SEQ ID NO: 37853 - DNA, 120 bp, synthetic construct
  source 1..120: mol_type = other DNA
ctgcgtgacaaaaatcagctggagctgtgtaatgtccgacctgtctctgtcaatgaacagattattcattgtcatttctcatctgtttttgagattgtaactttgattctgtataactca

SEQ ID NO: 37854 - DNA, 120 bp, synthetic construct
  source 1..120: mol_type = other DNA
cattgtagagatcttgtctctaattaacaggattcataaagagaaaacaaaggagagaaacatccagattgaaaagacctacatagtgccaagcacaataaaagaaaccctatactaggc

SEQ ID NO: 37855 - DNA, 120 bp, synthetic construct
  source 1..120: mol_type = other DNA
aaggtagaaggtggtaaaacatcaccttgaaagttctgcattcagcctagaattctgtatccagttaaaccatcaatcaagtgtgaaagtagggggaaaaactcaaggactaaaaaaatg

SEQ ID NO: 37856 - DNA, 120 bp, synthetic construct; identical to SEQ ID NO: 10921
  source 1..120: mol_type = other DNA

SEQ ID NO: 37857 - DNA, 120 bp, synthetic construct
  source 1..120: mol_type = other DNA
gttaacccaaaattgtgatgttgctattttaggggaattaagataagtgaaacacgtatggaatactgctagttttgtaagtctcctttaccatggcaggacatctgtagttaataaatc

SEQ ID NO: 37858 - DNA, 120 bp, synthetic construct
  source 1..120: mol_type = other DNA
attaaataggaggaaaaagaatccgagtagttgagggtgattgcatctggggagaagcaggaataaaggtttgaagataaatagggccagagatgagtaattttgttactgtgataatat

SEQ ID NO: 37859 - DNA, 120 bp, synthetic construct; identical to SEQ ID NO: 10922
  source 1..120: mol_type = other DNA

SEQ ID NO: 37860 - DNA, 120 bp, synthetic construct
  source 1..120: mol_type = other DNA
tcactaactatcttcgaggttcatccatgttgtagcagttgttagcatttccttccttttaaaaggccgaataatattccattgttatgtatataccatattttgtttatccatttattc

SEQ ID NO: 37861 - DNA, 120 bp, synthetic construct
  source 1..120: mol_type = other DNA
gaatggtaattctatatttaaatttttgagaaaccaccatactgtttgatatactggctgcccaattttacattaccaccagcaatacactagggttccgaatttgccacatcctcacca

SEQ ID NO: 37862 - DNA, 120 bp, synthetic construct
  source 1..120: mol_type = other DNA
atttggtcatttgtatatcagctttggagcaatgatgtctcttgaagccttttgcccatttatgaattgagtagtttgggatttttaaattgtgttttagaagttctttgtatactctgg

SEQ ID NO: 37863 - DNA, 120 bp, synthetic construct
  source 1..120: mol_type = other DNA
tggtgtggtcgggcgtgatggtgcacacctgtagtcccagctgttggggaggctgaggcaggagacttgcttgaacccggaaggtgggggggttgcagtgagctgagattgtgccactgc

SEQ ID NO: 37864 - DNA, 120 bp, synthetic construct; identical to SEQ ID NO: 10923
  source 1..120: mol_type = other DNA

SEQ ID NO: 37865 - DNA, 120 bp, synthetic construct
  source 1..120: mol_type = other DNA
ttatgtaagagtccagcttcacacttttggatgtgaatatctagttttcccagcattatttgttgaaaagagtgtctttttccccattgaatagtcttggcactcttgttgaaaattatt

SEQ ID NO: 37866 - DNA, 120 bp, synthetic construct
  source 1..120: mol_type = other DNA
aaccaggaagtatatgtcttgtgtatttatttacttattttttgaaatagcatctggctctgttgcccaggctggagtgcagtggcacaatcttagctcactgcaacctccacatctgag

SEQ ID NO: 37867 - DNA, 120 bp, synthetic construct; identical to SEQ ID NO: 10924
  source 1..120: mol_type = other DNA

SEQ ID NO: 37868 - DNA, 120 bp, synthetic construct
  source 1..120: mol_type = other DNA
cctgagctcgcctcctcccacctggatttttttttttatttctaccagaaacattgttgggattttggtagggattgtattagtctgtagattgcattgaatagtactgacatcttaaca

SEQ ID NO: 37869 - DNA, 120 bp, synthetic construct
  source 1..120: mol_type = other DNA
ttaattcctaagtattttattcattctgatgatcttataaatctgttttcttaatttcctttcctaattgttcattcttagggtatagaaacacaactgattcttcgcacattaaatttg

SEQ ID NO: 37870 - DNA, 120 bp, synthetic construct
  source 1..120: mol_type = other DNA
agatgatttttattcattttcttaatgctctctcatacattcaatactatgttgaatggaagtggtgaaagcaggcatcctgtcttgtttctgaccttataggaaaagctttcaattctt

SEQ ID NO: 37871 - DNA, 120 bp, synthetic construct
  source 1..120: mol_type = other DNA
ccaggttcaagtgattctcctgcttcagcctcccaagtagctgggattacaggtgtccaccactatgcccagctaattttcgtatttttagtagaaacatggtttcaccatgttggccaa

SEQ ID NO: 37872 - DNA, 120 bp, synthetic construct; identical to SEQ ID NO: 10925
  source 1..120: mol_type = other DNA

SEQ ID NO: 37873 - DNA, 120 bp, synthetic construct
  source 1..120: mol_type = other DNA
tgttgaggactttatatcaatgttcctaagggctactggtctatagttttcttttgtagtttctttgactttgctatcagggcaatgctggcctcattgaatgtgttaggaagtgtttcc

SEQ ID NO: 37874 - DNA, 120 bp, synthetic construct
  source 1..120: mol_type = other DNA
ttcagtcttgttactagttataggtctattcagattttctttttgtgtgtgtgattcagtattagtacattttgtacttctcgttatttctccatttaatctatattatctaatttgttg

SEQ ID NO: 37875 - DNA, 120 bp, synthetic construct; identical to SEQ ID NO: 10926
  source 1..120: mol_type = other DNA

SEQ ID NO: 37876 - DNA, 120 bp, synthetic construct
  source 1..120: mol_type = other DNA
ttgctgttctgtaatttttggcatgttgtgtttttttgttttaatttatttctaagtattttctaagttcccttgtgatttcttctgcgtttaaccgtgtattttttaatttccacagtt

SEQ ID NO: 37877 - DNA, 120 bp, synthetic construct
  source 1..120: mol_type = other DNA
cacccaggctggagtgcagtggtgcgatcttggctcactgcaacatccacctcctgggttcgagcaattctcctggtctcagcctccccagtaggtaggattacaggcacatgccaccat

SEQ ID NO: 37878 - DNA, 120 bp, synthetic construct
  source 1..120: mol_type = other DNA
ggcgttagccaccttgtctggcccagatcctctattttcttgcctatattctgactgggtgtttttgtccattattgagagtagggtatcgaagtgtccagctgttatttcagaactgtc

SEQ ID NO: 37879 - DNA, 120 bp, synthetic construct
  source 1..120: mol_type = other DNA
tcttttttgtctcaaccttgttttgatttagtttgtctaatattaatgtagctacctgcactctcatttggttattacttgtatagaatgtctttttacatcccttatttgtgtctttgg

SEQ ID NO: 37880 - DNA, 120 bp, synthetic construct; identical to SEQ ID NO: 10927
  source 1..120: mol_type = other DNA

SEQ ID NO: 37881 - DNA, 120 bp, synthetic construct
  source 1..120: mol_type = other DNA
tttataccaatttactttcaatagcatacaaaaattcagctcataagattcagtccctgctcccttccagttattgatgtcataaaattacatttttatgtattgtgtgtctaaaagcgt

SEQ ID NO: 37882 - DNA, 120 bp, synthetic construct
  source 1..120: mol_type = other DNA
cagatctttatttcttaatacagcttcaagttactgtctagtctccttttatttcagcctgaaagactcacttcagcgtttcttgcaggacaggtctggtgataatgaactctctcagat

SEQ ID NO: 37883 - DNA, 120 bp, synthetic construct
  source 1..120: mol_type = other DNA
atcatcccactgccttctgtccttcaagagttctgatgagaaatctgctgatattgaggatccctttgtatgttacaagttgcttctctcattccatgttcaggattctcttttttcata

SEQ ID NO: 37884 - DNA, 120 bp, synthetic construct; identical to SEQ ID NO: 10928
  source 1..120: mol_type = other DNA

SEQ ID NO: 37885 - DNA, 120 bp, synthetic construct
  source 1..120: mol_type = other DNA
ttcaattttccttcagttttttttttctgttcctcagacacgtggtattttcagctgttctgccttccaagtttactgattcttctgcctgcccaaattggcttttgaattcctctagta

SEQ ID NO: 37886 - DNA, 120 bp, synthetic construct
  source 1..120: mol_type = other DNA
agtaagtgtctgccatctgatcttctcaggcacagtttctgttaatttatttttttccttttggcctatacttaatgttttgcttggggtagtttttttttttggtatgctttgtgattt

SEQ ID NO: 37887 - DNA, 120 bp, synthetic construct; identical to SEQ ID NO: 10929
  source 1..120: mol_type = other DNA

SEQ ID NO: 37888 - DNA, 120 bp, synthetic construct
  source 1..120: mol_type = other DNA
ctggatctttaaatccctggagcaattttttcagccaatggcagttaaataatgatagtctgcctctgtgtcacattttgatcagaagcagcaattagcaatcagaacacagattcctga

SEQ ID NO: 37889 - DNA, 120 bp, synthetic construct
  source 1..120: mol_type = other DNA
caaagagctgaaattgactcaaactaactgatttaccattcaagtctttccttagaaactgaaaacctgaatagactccagagttccagaatcacagattctgcttacagtcgtctaggt

SEQ ID NO: 37890 - DNA, 120 bp, synthetic construct
  source 1..120: mol_type = other DNA
tgcaccaccatgcctggctaattttttgtatttttagtagagacagggtttcaccatgttggccaggctagtctcgaactcctgacctcaggtgatcaacccgcctcagcctcccaaagt

SEQ ID NO: 37891 - DNA, 120 bp, synthetic construct; identical to SEQ ID NO: 10930
  source 1..120: mol_type = other DNA

SEQ ID NO: 37892 - DNA, 120 bp, synthetic construct
  source 1..120: mol_type = other DNA
gggcaggtacctagtgtccccacctacctgggtcgtagtcaggccctgggcaagcctgctatgcttttccttccctaatccctcaggggtgggatagagagcacagtggcctcccaggga

SEQ ID NO: 37893 - DNA, 120 bp, synthetic construct
  source 1..120: mol_type = other DNA
gtagccccacattcttgtgcttgtttcttttttctgctctctttccttgcccaggtaagaggtctgcccataagggatattttgcagcatgtgaagctttttaaaaagttaggcttattg

SEQ ID NO: 37894 - DNA, 120 bp, synthetic construct
  source 1..120: mol_type = other DNA
aaagatttgtagtctagattatccaagttttgggagtattacctctctgcttttgtttatctacttttttagtctctactttccaagtatctataggcaaattttcccatttccctttgg

SEQ ID NO: 37895 - DNA, 120 bp, synthetic construct; identical to SEQ ID NO: 10931
  source 1..120: mol_type = other DNA

SEQ ID NO: 37896 - DNA, 120 bp, synthetic construct
  source 1..120: mol_type = other DNA
cttttaaatagattgtttattctcctgcaagtctcacagttgttcacagtggtaggtaagaaatcataaagttcaaatattaaagggagctcacaaaagagcatggtttcaccagccctc

SEQ ID NO: 37897 - DNA, 120 bp, synthetic construct
  source 1..120: mol_type = other DNA
acctaatcagaaaggaatttttaaaaaagtattaggtaggtcatagtttgacaacaagacttggaagataggtggaagctaagggaagcaagacatggccccaaggtttcaacaggagca

SEQ ID NO: 37898 - DNA, 120 bp, synthetic construct
  source 1..120: mol_type = other DNA
ctctcctgtaccttgtcctcactaggattcggtatccacggcaaaaagatctattaatagttggtatcaggcctgtacatgtgttaagagaaagatgaggaaagaagtatctgcttctaa

SEQ ID NO: 37899 - DNA, 120 bp, synthetic construct
  source 1..120: mol_type = other DNA
agtttcacatattcttttgaaaattgttttcattgtttacccactttttaagaaaagcaaatgggaacatactaccactgtttggcccctttcaaaaattttatatctgaggaatcttcc

SEQ ID NO: 37900 - DNA, 120 bp, synthetic construct; identical to SEQ ID NO: 10932
  source 1..120: mol_type = other DNA

SEQ ID NO: 37901 - DNA, 120 bp, synthetic construct
  source 1..120: mol_type = other DNA
tcaaactttaactttttatagcttgttggcaaaaaatggtatcttgttatttgatcgtgtttttttaattgtgaggtttagcgactttttgatgtattggtcttatgtactttctggtgt

SEQ ID NO: 37902 - DNA, 120 bp, synthetic construct
  source 1..120: mol_type = other DNA
accaattttattctttcttcagacagttgtctaatgttctgcttctcttgccatttgaattttgtgactacaaaattcagatgaaacaataatagcataaagaacttggtgggttatctt

SEQ ID NO: 37903 - DNA, 120 bp, synthetic construct; identical to SEQ ID NO: 10933
  source 1..120: mol_type = other DNA

SEQ ID NO: 37904 - DNA, 120 bp, synthetic construct
  source 1..120: mol_type = other DNA
tcccaggttcaagcaattctcctgccttagcctcctgagtagctgggactacaggcatgtgccaccatgcccggctaatttttgtatttttagtagatatgggacttcaccatgttggcc

SEQ ID NO: 37905 - DNA, 120 bp, synthetic construct
  source 1..120: mol_type = other DNA
acattctcccctcctccaagccttttgtttttactattttcatgttcctttatatgtgctgctgttttgtttcatctgtaattatctctcatccccttttttggctattataatatatat

SEQ ID NO: 37906 - DNA, 120 bp, synthetic construct
  source 1..120: mol_type = other DNA
cctttgtcttttttaaactggagtcatttgtagttgtttatacagaattttagtttttaaaaccacaagtctttcattataggttgagttatgaattcatagcctgttatttaaatgaag

SEQ ID NO: 37907 - DNA, 120 bp, synthetic construct
  source 1..120: mol_type = other DNA
ttatgtgaacactttctccctgtttcctggcatttccactcaaacttgttcctcattcttagttagaaatatatccagaattgtagtttctttctaatctaatgacagaagcaaattaat

SEQ ID NO: 37908 - DNA, 120 bp, synthetic construct; identical to SEQ ID NO: 10934
  source 1..120: mol_type = other DNA

SEQ ID NO: 37909 - DNA, 120 bp, synthetic construct
  source 1..120: mol_type = other DNA
aaagttctgttagacagtgctgttctatacagtgtcattctgcctctcattctaaaaagttctaattcctgaagttgatgtactctttctgttgctgtcctctagcttaatcaaaataaa

SEQ ID NO: 37910 - DNA, 120 bp, synthetic construct; identical to SEQ ID NO: 10935
  source 1..120: mol_type = other DNA

SEQ ID NO: 37911 - DNA, 120 bp, synthetic construct
  source 1..120: mol_type = other DNA
tgttgttactagtatcaataatttgttcttttttattgctgactaatattacattgtatggatatgacatttctttattagtgtggtgggcatttgagttgttttcagtttgggtctgtt

SEQ ID NO: 37912 - DNA, 120 bp, synthetic construct
  source 1..120: mol_type = other DNA
agtagaattgttgggtcacatgatgtagatcagttgaacagagtagattccagaaaagttcacatacacatttcttgacaaaggtgctgagattattcatgggaaaaggataatctttta

SEQ ID NO: 37913 - DNA, 120 bp, synthetic construct
  source 1..120: mol_type = other DNA
ataaaacttctagatgaaaacataggagaaaatctctgtgacttttggtttaaagatttcttagacagtacatataaaattaactatataaggaaaaaatggacaaatttgactttatca

SEQ ID NO: 37914 - DNA, 120 bp, synthetic construct; identical to SEQ ID NO: 10936
  source 1..120: mol_type = other DNA

SEQ ID NO: 37915 - DNA, 120 bp, synthetic construct
  source 1..120: mol_type = other DNA
gtgggaggatagcttgagcctgggaggcggaggctgcagtgagctgtgatcgcaccgctgcacgcttgcctgagcaacacagtgagatcctgtctcaaaacaaacaaacaaaaaaaaaaa

SEQ ID NO: 37916 - DNA, 120 bp, synthetic construct
  source 1..120: mol_type = other DNA
atttactggaatggctcaaaaagggcttacaggaattggcaaagacatagattaactggaactcttatgcatgttggttagagcacaaaatgatatgatttcttgggagaaatatttggc

SEQ ID NO: 37917 - DNA, 120 bp, synthetic construct
  source 1..120: mol_type = other DNA
tttctttctttctttccttccttcccttccttcccttccttgcctgtcttgcctgccttccttgccttgcctgccttgccttcctttcttcctttcttccctttcttttctttcttttct

SEQ ID NO: 37918 - DNA, 120 bp, synthetic construct
  source 1..120: mol_type = other DNA
cccgggttcaagcaattctccctgcctcagcttccccaatagctgggattacaggcgcgttccaccatacttggctaatttttttaattttggcagaggcagggtttcactgtgttggcc

SEQ ID NO: 37919 - DNA, 120 bp, synthetic construct; identical to SEQ ID NO: 10937
  source 1..120: mol_type = other DNA

SEQ ID NO: 37920 - DNA, 120 bp, synthetic construct
  source 1..120: mol_type = other DNA
attctaataaccatcctgaagatggtcaggaggcattagttaagaattgaaatgtttggagcttgcctgtgttgatgggattaaggcagggatgatttatgtgtaaatttatgcgttagt

SEQ ID NO: 37921 - DNA, 120 bp, synthetic construct
  source 1..120: mol_type = other DNA
tttggctctgtgtccccacccaaatctcatgtggagttgtgatcctcagtgttggaggaggggcttggtaggaggtgattggatcatgggagtggtttgtaatggttttagcactatcac

SEQ ID NO: 37922 - DNA, 120 bp, synthetic construct; identical to SEQ ID NO: 10938
  source 1..120: mol_type = other DNA

SEQ ID NO: 37923 - DNA, 120 bp, synthetic construct; identical to SEQ ID NO: 3700
  source 1..120: mol_type = other DNA

SEQ ID NO: 37924 - DNA, 120 bp, synthetic construct
  source 1..120: mol_type = other DNA
cacctttcttctacagtttacaatcttctgttgagatcatccgatagattttttttcttagatattgtacttttgaggcctcaaattgctgtcttttgtattttctatgtctgcagagac

SEQ ID NO: 37925 - DNA, 120 bp, synthetic construct
  source 1..120: mol_type = other DNA
attgcctgctcttttttctttgtaataggtcatgtttttctgctttgcctgtctagtaaattttaatcgtatgttgaaatgtagggagtttggattgttacttcctttaagggtgctgag

SEQ ID NO: 37926 - DNA, 120 bp, synthetic construct
  source 1..120: mol_type = other DNA
aggttgccctttccaatgtctcagctaagtatctggggtgttccatgaggtctcttccactttgcctaggccagaactccagcttctcccagtattatatttcgttacctctggcgtcat

SEQ ID NO: 37927 - DNA, 120 bp, synthetic construct; identical to SEQ ID NO: 10939
  source 1..120: mol_type = other DNA

SEQ ID NO: 37928 - DNA, 120 bp, synthetic construct
  source 1..120: mol_type = other DNA
ctttttttccacatcaccacacacatattttcagacttcctcctcatccttcttcttgccagtagttgtattataattcctgccagtagttacattataattttggttatatcaatattg

SEQ ID NO: 37929 - DNA, 120 bp, synthetic construct
  source 1..120: mol_type = other DNA
ctcacccctaattgtataaatctctcaacatgtttaagcacatttggcattatatcaattttatcttttccaggtgccttctaatctgtcccagtctggactaattgttcttcctggctt

SEQ ID NO: 37930 - DNA, 120 bp, synthetic construct; identical to SEQ ID NO: 10940
  source 1..120: mol_type = other DNA

SEQ ID NO: 37931 - DNA, 120 bp, synthetic construct
  source 1..120: mol_type = other DNA
aacctgtttcttctctggcagcttttaggatcttctgtttctttggtattcagaaatttcatgagatatgtgtgcttctattttggtcttattttcatctgttttgccaggtactcatgc

SEQ ID NO: 37932 - DNA, 120 bp, synthetic construct
  source 1..120: mol_type = other DNA
ctcttagtttttgtttagtcttctgattttcatttgtctttttattctgtatattctgttaattcctcggcttcatggtcttctagcccttcttttgcctatcttatggggttgaggatt

SEQ ID NO: 37933 - DNA, 120 bp, synthetic construct
  source 1..120: mol_type = other DNA
ttcataactgtcttgagggaaaggtctttggtcttgattctttgacttcttggctgtacatgaccttggacgagttatgtaatctctttgagacctacctccctcttctgtatagtgtta

SEQ ID NO: 37934 - DNA, 120 bp, synthetic construct; identical to SEQ ID NO: 10941
  source 1..120: mol_type = other DNA

SEQ ID NO: 37935 - DNA, 120 bp, synthetic construct
  source 1..120: mol_type = other DNA
tttaagaatgacatgattactactctaaacccatagaaggggtatttgttggattatttattttcacttaaatggtatttgagattaggaaaaagaaaatctgtcttttggtttttcttg

SEQ ID NO: 37936 - DNA, 120 bp, synthetic construct
  source 1..120: mol_type = other DNA
gtaagtatgttttcttatttgtatgcttgcaaatatcttctaaaacaactattaagtgaaagttatctgcttgttagagtgaggtagagttaaagatacattttaacagaattgtattcc

SEQ ID NO: 37937 - DNA, 120 bp, synthetic construct
  source 1..120: mol_type = other DNA
cagattcatgttacttgatctgctttaaatgacttggcatctagcccatatttgagcccataaccgtgtggtaatttgaagtgtaattcacagtagagcttctgttaaagcactaatagc

SEQ ID NO: 37938 - DNA, 120 bp, synthetic construct; identical to SEQ ID NO: 10942
  source 1..120: mol_type = other DNA

SEQ ID NO: 37939 - DNA, 120 bp, synthetic construct
  source 1..120: mol_type = other DNA
aactctttttgcccatgaagactgtttttccttctcaaaatattgactattttctgatttgtaaaaatcggcacataaaacgtgttattttttacttgacttttatctttcccatgtgat

SEQ ID NO: 37940 - DNA, 120 bp, synthetic construct
  source 1..120: mol_type = other DNA
actgatttttctcagagtcatgaaggaacaaacgtttgttaagtccttatcacttattagataacacaaaacatgttgggggggtgtgtacagaggtgagtaagatgtagctcccattct

SEQ ID NO: 37941 - DNA, 120 bp, synthetic construct
  source 1..120: mol_type = other DNA
agaacattggaaacactaattttaccttataaagaaggtttcataaaggaaggcaagtttgagctggggtgaaaaggaccagtaagggttgactttcaagccaaggagaggaggggaagt

SEQ ID NO: 37942 - DNA, 120 bp, synthetic construct
  source 1..120: mol_type = other DNA
ttgtggtggcaataggcaacaagataaaagaaagtaaaaggtgttatggaaacttaatgggtccagcttacaaatgatctatgcatttaggggtctttctcttttcctgataaacctctc

SEQ ID NO: 37943 - DNA, 120 bp, synthetic construct; identical to SEQ ID NO: 10943
  source 1..120: mol_type = other DNA

SEQ ID NO: 37944 - DNA, 120 bp, synthetic construct
  source 1..120: mol_type = other DNA
ttaacattattatggttaaagttggcattggagagagcctaggaacctaactgcctgtttgtttttatatttccaaccattggattcccaagttaatgaagtctgtttattagttgaggg

SEQ ID NO: 37945 - DNA, 120 bp, synthetic construct
  source 1..120: mol_type = other DNA
tgaggcctagagaagttaagtgagttgaacaaggtcacacaggtacatatggtagccgaccatccactgtttatgccaatattccctttacgttttgcttttttgcttgttcgttttaac

SEQ ID NO: 37946 - DNA, 120 bp, synthetic construct; identical to SEQ ID NO: 10944
  source 1..120: mol_type = other DNA

SEQ ID NO: 37947 - DNA, 120 bp, synthetic construct
  source 1..120: mol_type = other DNA
gcactaggcatacccacatttaatagtatgttaaatcttttatagcaattatgatatacatgggtgaagaagagttcctaatatggcctttctgattaactgtatctgtttatatctgtg

SEQ ID NO: 37948 - DNA, 120 bp, synthetic construct
  source 1..120: mol_type = other DNA
tatattttatttttgttccttgttgtataatctggtaggaatggggaaggggagatagtgaataaagagatgtatacttcttgcctttgaggaatttaagttttcactgtataccaattt

SEQ ID NO: 37949 - DNA, 120 bp, synthetic construct
  source 1..120: mol_type = other DNA
cttcatcaaagagagtaaagaagagacctgcctacctagctgattctatggcaaatctcacttctctggaagcttttcctgttaatcttattccttcagtttctgcctcttgtttcataa

SEQ ID NO: 37950 - DNA, 120 bp, synthetic construct
  source 1..120: mol_type = other DNA
cccatttgccatttgtgtatctttaattttagtttgttgagagacttatcactaccaaaccacaaagaatttaaaagaaactgtcagtaggtataggtggaaggagggcatttatcagag

SEQ ID NO: 37951 - DNA, 120 bp, synthetic construct; identical to SEQ ID NO: 10945
  source 1..120: mol_type = other DNA

SEQ ID NO: 37952 - DNA, 120 bp, synthetic construct
  source 1..120: mol_type = other DNA
aaagtttgacttttgtaatcagagatactgagcttgagttctggctctttcatttgtatactgttatttggggcaagttttttaatgctcttaagtcttagctttctcatatataaaatg

SEQ ID NO: 37953 - DNA, 120 bp, synthetic construct
  source 1..120: mol_type = other DNA
gtcctcttaacagtaatatttgagaggcatttttattaaagcagtcttaaggagtgttcgtcaaaccacatgttctgggatcctgagaaagtaggggaagtttagagaactgaagctgca

SEQ ID NO: 37954 - DNA, 120 bp, synthetic construct; identical to SEQ ID NO: 10946
  source 1..120: mol_type = other DNA

SEQ ID NO: 37955 - DNA, 120 bp, synthetic construct
  source 1..120: mol_type = other DNA
ctgaccagttagaaaccaatggattgtagtttatttataattagttaaaccttcatgtgaatttggttttgaattacctttaaggtagagaagaaactatatagatgtttttcagggttt

SEQ ID NO: 37956 - DNA, 120 bp, synthetic construct
  source 1..120: mol_type = other DNA
accccagtggggtgtgggtcagtacctgaaatgaaatgttttactcttcgctctaagtgtattaaatattatgtacaatcttattacttcagatcaggatttgctgtagttgagtttgcc

SEQ ID NO: 37957 - DNA, 120 bp, synthetic construct
  source 1..120: mol_type = other DNA
aaaaatttgttttgcatagtagttggagttaccagggtactgctaaccacactgatatgtaagatctctttctgagccttttattgtttgtaaacatggcctgttaatcattagaaagcc

SEQ ID NO: 37958 - DNA, 120 bp, synthetic construct; identical to SEQ ID NO: 10947
  source 1..120: mol_type = other DNA

SEQ ID NO: 37959 - DNA, 120 bp, synthetic construct
  source 1..120: mol_type = other DNA
actatgagatacagatactattgaaactagtcagttgtttataggtacttgtaaaattaaaaatatattccaatagcatgcagatttttcatagaggaaatttgaaagcatggaagcacc

SEQ ID NO: 37960 - DNA, 120 bp, synthetic construct
  source 1..120: mol_type = other DNA
ttaagctttggttttattattataatatgggggtgataacagtatctacttaatagaattcttgttattacatgaaataattaatgttaaacacagcataatatgtgtcacattataaag

SEQ ID NO: 37961 - DNA, 120 bp, synthetic construct
  source 1..120: mol_type = other DNA
tcttttagttgtgctgaaagacattatgacaccgccaaatttaattgcagaggtaggtatgaatgtactgtactatgttgtataacttaaacccgatagactgtatcttactgtcataac

SEQ ID NO: 37962 - DNA, 120 bp, synthetic construct
  source 1..120: mol_type = other DNA
ttgtcaggaagactaaagtgcagcatagactaagaattaggaaaattcctagactaaaaatagtataaggagagggtttacctactatttgaggcagttggtctaatagtaagcaatcac

SEQ ID NO: 37963 - DNA, 120 bp, synthetic construct; identical to SEQ ID NO: 10948
  source 1..120: mol_type = other DNA

SEQ ID NO: 37964 - DNA, 120 bp, synthetic construct
  source 1..120: mol_type = other DNA
gtgggtgccatgagctactattgatgtatttgccattgatccctcctgaaaatctagaatggactttcagacaaatggtttgaaaattctaaatcactaatgattgagatttagtatagg

SEQ ID NO: 37965 - DNA, 120 bp, synthetic construct
  source 1..120: mol_type = other DNA
tggaggtttttgtgtaccactgggaaaatgaagttaggcagatgactaagtgaaagctgtcctgctgactccttataatgatagtcattgtctaccagaagatctctcctgtcacaccaa

SEQ ID NO: 37966 - DNA, 120 bp, synthetic construct
  source 1..120: mol_type = other DNA
gatcttaatagagtggaactaaggtagaaactattaagagcaattaatagtgatatatctatagtcctgtttctaaacaagtttttttaaaaacctcaactctgactatagtgaacagag

SEQ ID NO: 37967 - DNA, 120 bp, synthetic construct; identical to SEQ ID NO: 10949
  source 1..120: mol_type = other DNA

SEQ ID NO: 37968 - DNA, 120 bp, synthetic construct
  source 1..120: mol_type = other DNA
taaatagtattattccttttgcattgagagtcctgacgaaatgtccatgtgacagttcattttgggtttagctctacctctaatatgtgacctatgctaccagtccgtatagcgtaaatt

SEQ ID NO: 37969 - DNA, 120 bp, synthetic construct
  source 1..120: mol_type = other DNA
ttatttttctctggaatccagtgtttcttttaaatacctgttaagtttgtatgcaacatttctaaagttacctacttgttaattaaaaattcaagagtttttttttcttattctgaggtt

SEQ ID NO: 37970 - DNA, 120 bp, synthetic construct; identical to SEQ ID NO: 10950
  source 1..120: mol_type = other DNA

SEQ ID NO: 37971 - DNA, 120 bp, synthetic construct
  source 1..120: mol_type = other DNA
tgacaagtaaaaattatatataaatacaatgtataatatgatgttttgatgtatgtgtatatacattgtgaaatgattactacagtcaaactacttaacatattcatcacctcacataat

SEQ ID NO: 37972 - DNA, 120 bp, synthetic construct
  source 1..120: mol_type = other DNA
ttgtgttcctccctccccaccctcagtccctggaaaacaggttttaaagatagttgctaatccttatttcttctaaatttttaaatcagttgctgcctcaatttctatatgagaaatgac

SEQ ID NO: 37973 - DNA, 120 bp, synthetic construct
  source 1..120: mol_type = other DNA
catattaatcaaaaataagctttatatttctgaagcttgtttgagcatagaatgcctttggataaaataccattacctagtaaagtgtgaacttttataatccataaaaattattctttt

SEQ ID NO: 37974 - DNA, 120 bp, synthetic construct
  source 1..120: mol_type = other DNA
aaaagaaaactcttgggagaacttttacagtgatttaattttgctgttgatatatttctttgggtggtaagtatggcaaaacatgttaaaatttaatgcaaagagattttgtacattttt

SEQ ID NO: 37975 - DNA, 120 bp, synthetic construct; identical to SEQ ID NO: 10951
  source 1..120: mol_type = other DNA

SEQ ID NO: 37976 - DNA, 120 bp, synthetic construct
  source 1..120: mol_type = other DNA
gcactggcatgaattatagagctgaggatctaaagatttttactttgatttatcccattatcatctgcagggaaacaattgcttttactgattaaaaatgcaggctgggcacagcggctc

SEQ ID NO: 37977 - DNA, 120 bp, synthetic construct
  source 1..120: mol_type = other DNA
gctgggtgtggtggcgcgtgcctgtaatcccagctactcaggatgctgaggcaggagaatcgcttgaacccgggaggtggaggttgcagtgagccgagactgtgccactgcactccagcc

SEQ ID NO: 37978 - DNA, 120 bp, synthetic construct; identical to SEQ ID NO: 10952
  source 1..120: mol_type = other DNA

SEQ ID NO: 37979 - DNA, 120 bp, synthetic construct
  source 1..120: mol_type = other DNA
aaaaaccagtggctactacatgagagcaatgaataaatctaagtggtacaaattaaccaaaattaagctttagttctgttcaatactaaattttaatgaaaagactgctatttaactttt

SEQ ID NO: 37980 - DNA, 120 bp, synthetic construct
  source 1..120: mol_type = other DNA
gaagagtaaatggaatctgtagattctattgcctgatgaaagtagacgtgtcaagaaataagaattctccaaggctcttcagataaattcatgtttcatcattttctttgccttcaagtt

SEQ ID NO: 37981 - DNA, 120 bp, synthetic construct
  source 1..120: mol_type = other DNA
tcctgtaaacagcagtatcaggctgtagaatttgtcttctgaaagcagggaacttatatatagcaaagaacttcatagtgctcccatttcttgacaaaacctctcgagaagctcttgatt

SEQ ID NO: 37982 - DNA, 120 bp, synthetic construct; identical to SEQ ID NO: 10953
  source 1..120: mol_type = other DNA

SEQ ID NO: 37983 - DNA, 120 bp, synthetic construct
  source 1..120: mol_type = other DNA
ctttaccattttgaaagtgttaatgttttctgaagcttccaaaaagattccaaaatgggaatgtttccttgattgtgtcaccatgcttgcatttgatgaaaacttgtagccggctatact

SEQ ID NO: 37984 - DNA, 120 bp, synthetic construct
  source 1..120: mol_type = other DNA
acagtcttattcttcttcatgctacaagtatatttgactctttctaagatacttgccttcactgttcaactgtgtgactttttgtttgtttagcattacaatcaatatcctagtaggatg

SEQ ID NO: 37985 - DNA, 120 bp, synthetic construct
  source 1..120: mol_type = other DNA
tcacccacacacatatgcatacataccctgtctgatgtatctgcttcttcagaatagttggctgtgctctgctgatgatgagaacttgccatttaagaaggacttgggatagtccatgtc

SEQ ID NO: 37986 - DNA, 120 bp, synthetic construct; identical to SEQ ID NO: 10954
  source 1..120: mol_type = other DNA

SEQ ID NO: 37987 - DNA, 120 bp, synthetic construct
  source 1..120: mol_type = other DNA
ctgtatattctccatccttgcataggttggaatatcccccaagtgaaaagagattgatgggctaatagttaatagaaaatggagatctgtacatacagtgttaagaatgtagatattaaa

SEQ ID NO: 37988 - DNA, 120 bp, synthetic construct
  source 1..120: mol_type = other DNA
tgcttaattaatatacttagaccatatttcggatgaattattcacagaatctaaaggagtatcctcgtgttcttaccttctttatccctgtgtttatttaaaaaggcaaaaaaaatggag

SEQ ID NO: 37989 - DNA, 120 bp, synthetic construct
  source 1..120: mol_type = other DNA
ggaatgtttcttatagatgatcaaacaggcacaggaaggggaagtgttgtgatcaatattatccagttaatattagcattcagaggaaaatttgagtcctctgatacactgttaaatttc

SEQ ID NO: 37990 - DNA, 120 bp, synthetic construct; identical to SEQ ID NO: 10955
  source 1..120: mol_type = other DNA

SEQ ID NO: 37991 - DNA, 120 bp, synthetic construct
  source 1..120: mol_type = other DNA
cctgttggttagaatactggtgaaataatttttaatcttttatgaataactaatttcatcataagaaaacttagctaagcatggtaaagctgttgttatacaactgtggaattcttcctg

SEQ ID NO: 37992 - DNA, 120 bp, synthetic construct
  source 1..120: mol_type = other DNA
tcttcttgtcagtatttccttgtagattgagcctgtggatttgcatttttgtaattgtgaatcaccattataggagatacatgcattttatctacttttcagtttgtatggggttaactt

SEQ ID NO: 37993 - DNA, 120 bp, synthetic construct
  source 1..120: mol_type = other DNA
cccctttcttttttgaagggagatgaggcagtcatattttggtaaagaatttgtagactttgcagaggtctcttcaaaataatctggctcagagtcttgacatatcctcagcagacatgg

SEQ ID NO: 37994 - DNA, 120 bp, synthetic construct
  source 1..120: mol_type = other DNA
gggttttcagtgttgcagagaagtcagacaactgatagttattataaagaaaaatgttctgagagtgaggtaaccgcttaagggaaggaagcctccttctgtcttattcactaatttaca

SEQ ID NO: 37995 - DNA, 120 bp, synthetic construct; identical to SEQ ID NO: 10956
  source 1..120: mol_type = other DNA

SEQ ID NO: 37996 - DNA, 120 bp, synthetic construct
  source 1..120: mol_type = other DNA
ttacatgacaaagttacttagaaacactactgctgtttccctctcccttgccttctccctgtcccatgcatacccccagctgtgttccagaatgatggcacataaagtaaacattcatat

SEQ ID NO: 37997 - DNA, 120 bp, synthetic construct
  source 1..120: mol_type = other DNA
cacgcctggctaatttttgtatttttagtagagatggggtttcgccatgttggccagactggtcttgaactcttgacctcaagtgatccgcccacctcggcctcccaaagtgctgagatt

SEQ ID NO: 37998 - DNA, 120 bp, synthetic construct; identical to SEQ ID NO: 10957
  source 1..120: mol_type = other DNA

SEQ ID NO: 37999 - DNA, 120 bp, synthetic construct
  source 1..120: mol_type = other DNA
ctgtctttttaaaaatcttccaatgtggcgttcttatttttcttaacatttgaattttcctgggccaaaccatgttactatgatacacattatttaaggctgttatataatacagtaaaa

SEQ ID NO: 38000 - DNA, 120 bp, synthetic construct
  source 1..120: mol_type = other DNA
ctttgggagactcaagcgggaagattgcttgagcccaggagttcaagaccagcttgggcaacatagtgagaggctgtctctacaaaaaaatatttaaaaaatagccgggcatggtgtcac

SEQ ID NO: 38001 - DNA, 120 bp, synthetic construct
  source 1..120: mol_type = other DNA
gcaggctctacacttcagataggcaacagatcgagaccttgtttcacaaaacgaacagatctgcaaagatcaacctgtcctaagtcatataatctctttgtgtaataataaaaaccccat

SEQ ID NO: 38002 - DNA, 120 bp, synthetic construct
  source 1..120: mol_type = other DNA
cctttatgacatatgaggactttttcagttttaaataagaaaaacccaactcaaagtagcttaaataaaaggagacattttttgacttacataacctaaaagctctggcctggatctagg

SEQ ID NO: 38003 - DNA, 120 bp, synthetic construct; identical to SEQ ID NO: 10958
  source 1..120: mol_type = other DNA

SEQ ID NO: 38004 - DNA, 120 bp, synthetic construct
  source 1..120: mol_type = other DNA
ggaggggaaagaatgttggaaagagaaaaaaatatcagttgtctgcttcacatttgttctcaataattagtttcatagaagtgaaatactgtgtaacaccctaaactttagagattcttc

SEQ ID NO: 38005 - DNA, 120 bp, synthetic construct
  source 1..120: mol_type = other DNA
ccaggacagctgagtacaagttttacccttatattcacattgaggtccagatcctggttttgaatgagataattacgtgcagtcggactgttttctgatcctaaaaatagagacaataat

SEQ ID NO: 38006 - DNA, 120 bp, synthetic construct; identical to SEQ ID NO: 10959
  source 1..120: mol_type = other DNA

SEQ ID NO: 38007 - DNA, 120 bp, synthetic construct
  source 1..120: mol_type = other DNA
aacattacatatcttgtgctgtgatattaaagtagtattctgttctggtagtagtatggcagtattttaggtctgaaagatgtacataatctgtactttgaagtctgttttttaagagat

SEQ ID NO: 38008 - DNA, 120 bp, synthetic construct
  source 1..120: mol_type = other DNA
caaaagcagatgacagaatctcagtatcagggtagcatttaaagcaaaaagcattaaactggatcaaaaatgtcattttacatcaacacagggtacactccaggtaaagacttaacagtt

SEQ ID NO: 38009 - DNA, 120 bp, synthetic construct
  source 1..120: mol_type = other DNA
gtacagtcatgtaccacataatgatgtttgagtcaacacctgacctggtatacgacaatggtcctataaaattataatggagctaaaaagcttctatcacctagtgatgttgaagccgtt

SEQ ID NO: 38010 - DNA, 120 bp, synthetic construct; identical to SEQ ID NO: 10960
  source 1..120: mol_type = other DNA

SEQ ID NO: 38011 - DNA, 120 bp, synthetic construct
  source 1..120: mol_type = other DNA
gccaaggctaaagtatgtatttattagtttttaacaagagtttaaaaagtaaaaaaaaaaaataaatttaaaaatagaaaaaatcttaataaggatacaaagaaaaaatgtttttgtgta

SEQ ID NO: 38012 - DNA, 120 bp, synthetic construct
  source 1..120: mol_type = other DNA
aatttttaaacagatttagagtagcatgtttataaaatctacagtagtttacagtaatatcctaggccttcacattaactcaccactcacccactgactcacccagagcagcttccaatc

SEQ ID NO: 38013 - DNA, 120 bp, synthetic construct
  source 1..120: mol_type = other DNA
ctatgatattgaatacagtaacttactgtacaagtttgtagcataggagctgtatcatatagcctgggtgtgtagtgaactataccatctaggcttgtgtaagtatattttatgacacag

SEQ ID NO: 38014 - DNA, 120 bp, synthetic construct
  source 1..120: mol_type = other DNA
aattaccagtcttactaattagatcaactgcaaaacaaaatctcactcaaaaataaaaatatgtaagtcccattccttgattacaattcattagaactggagatttttaaaaatgtttaa

SEQ ID NO: 38015 - DNA, 120 bp, synthetic construct; identical to SEQ ID NO: 10961
  source 1..120: mol_type = other DNA

SEQ ID NO: 38016 - DNA, 120 bp, synthetic construct
  source 1..120: mol_type = other DNA
attgtaaatgctttgaggagagacaaaatctgaatagaccctgcaataatgaaaatgtctaggagccctcaagaaatacctggtttaaattgcatttcaggtggctggttatcacacctt

SEQ ID NO: 38017 - DNA, 120 bp, synthetic construct
  source 1..120: mol_type = other DNA
aaaagagagaaaaccagaaggtacaatttagggaaaattaaatacttctatttggccaaagtaagagtacattcaagggaattgtgagaggtaagagtggaaacagaggttggagctgta

SEQ ID NO: 38018 - DNA, 120 bp, synthetic construct
  source 1..120: mol_type = other DNA
tgagagtggtataaaggatagattacagaatggataaagggtgataaatcagttggctatggcaaaattgcaggaagaaactgaaataggccacagaaaactgaaactgacattttgagt

SEQ ID NO: 38019 - DNA, 120 bp, synthetic construct; identical to SEQ ID NO: 10962
  source 1..120: mol_type = other DNA

SEQ ID NO: 38020 - DNA, 120 bp, synthetic construct
  source 1..120: mol_type = other DNA
agcagaaagaagatgggaggatcatatagtagttgactagaagctgtggagtttgagtgctgggattatatctagttccattacttatgaagattatatctagttccattacttcacctc

SEQ ID NO: 38021 - DNA, 120 bp, synthetic construct
  source 1..120: mol_type = other DNA
tggtgttagttattagaaggccatcgagtgctggagaaaataattgaatatcattgatggaaataaaggaagttttccacgttaaaaagcttcggtttttggaaatgtgtgttttcagta

SEQ ID NO: 38022 - DNA, 120 bp, synthetic construct; identical to SEQ ID NO: 10963
  source 1..120: mol_type = other DNA

SEQ ID NO: 38023 - DNA, 120 bp, synthetic construct
  source 1..120: mol_type = other DNA
cgcttcaacatctgtttaggagaaagtggagacagactgacctgagtaactaaggtcttggaacagcttacaggtcagaaccaggtgttttccaaagctagatatactgttagcgccttt

SEQ ID NO: 38024 - DNA, 120 bp, synthetic construct
  source 1..120: mol_type = other DNA
gatactggaaactttggttttgggacccaggaacacattgatctgggtatcagatatgacccaagcattgatgtctacagcctggacttctatgtggtgctggaaaagccaggtttcatc

SEQ ID NO: 38025 - DNA, 120 bp, synthetic construct
  source 1..120: mol_type = other DNA
catttctacccaaaagggtaataaaaagttttcagtgaaatgtttaaaaaaaaaataaaaaaaagatcagccagcagccaggatgggattgtgaaaacagcaggaaattagttgttgaca

SEQ ID NO: 38026 - DNA, 120 bp, synthetic construct
  source 1..120: mol_type = other DNA
caacatggcaaaaccctcgttcctccttaataaataaataaatgaataaataaacaagcaagcaagcagggcttggtgttaggcgcctgtactcctagctactcgggaggctgagggggt

SEQ ID NO: 38027 - DNA, 120 bp, synthetic construct; identical to SEQ ID NO: 10964
  source 1..120: mol_type = other DNA

SEQ ID NO: 38028 - DNA, 120 bp, synthetic construct
  source 1..120: mol_type = other DNA
gttgaacaggaagagacgtcaagtataaggagattttaagatgggagaagggaattttgagtgtttgtattggatgacctcagggttcccagtaaagcaggagctgaattcatcgaaggt

SEQ ID NO: 38029 - DNA, 120 bp, synthetic construct
  source 1..120: mol_type = other DNA
aagctgtaggaaagggggctggaaggaatattaggaggaacactaaatatacttctgaggtctacctcctggtctgtgaacataaaggagctgaaagagtaatggctgaagttctttagt

SEQ ID NO: 38030 - DNA, 120 bp, synthetic construct
  source 1..120: mol_type = other DNA
tcgataatgtagcccactgttgaccagaagccctacccacaacataaacaggcaataacacatattttgtatgtgtattatatagtatattcttaacaataaagtaaactagagaaaaga

SEQ ID NO: 38031 - DNA, 120 bp, synthetic construct; identical to SEQ ID NO: 10965
  source 1..120: mol_type = other DNA

SEQ ID NO: 38032 - DNA, 120 bp, synthetic construct
  source 1..120: mol_type = other DNA
tcaggagattgagaccatcctggctaacacagtgaaaccctgtctctattaaaaataaaaaaattagccaggcatggtggcacgtgcctgtaatcccagctaatcgggaggctgaggcag

SEQ ID NO: 38033 - DNA, 120 bp, synthetic construct
  source 1..120: mol_type = other DNA
ttgcaatacacaatttactggagagatgagctgatcatacagagatgattagtgtcacacagtgttttaaacagattcttgcaaccctggagttcactgcagtagcaacagaagttagct

SEQ ID NO: 38034 - DNA, 120 bp, synthetic construct; identical to SEQ ID NO: 10966
  source 1..120: mol_type = other DNA

SEQ ID NO: 38035 - DNA, 120 bp, synthetic construct
  source 1..120: mol_type = other DNA
cccacacatttcaaacctgtgttcaagggtcagctgtgtaaataattttcctcaaaattaaagtggaaaaggagagttactactagtagaaagtagaactgtacccttgggcaggggtgt

SEQ ID NO: 38036 - DNA, 120 bp, synthetic construct
  source 1..120: mol_type = other DNA
gcctgtaatcccttaactttgggagaccaaggggagtggatcacttgaggtcaggagttcaagacagcctggccaacatgctgactcacccttccctactgaaaatacaaaagttagcca

SEQ ID NO: 38037 - DNA, 120 bp, synthetic construct
  source 1..120: mol_type = other DNA
acagagcgagactccatctcaaaaaaaaaaaaaaaaaaaaaagatttgaaaacagagtattttttaatctgcaagagctttacagccttttattcatatgtataagcttttaaagatgac

SEQ ID NO: 38038 - DNA, 120 bp, synthetic construct; identical to SEQ ID NO: 10967
  source 1..120: mol_type = other DNA

SEQ ID NO: 38039 - DNA, 120 bp, synthetic construct
  source 1..120: mol_type = other DNA
gttgacaactagtagatttatatattttttatgttgcctatccttttttgggtaaggattaacagaatgtataatcacctacattataggtacactactaatcacttgctacttgaaaaa

SEQ ID NO: 38040 - DNA, 120 bp, synthetic construct
  source 1..120: mol_type = other DNA
gactcgcattgacttaatttttttaaatcttattgcatattttgactagataataaatgcatatggttaaaaaattcacatggttcaaaaaagtacacctcccactcatcttccatgtga

SEQ ID NO: 38041 - DNA, 120 bp, synthetic construct
  source 1..120: mol_type = other DNA
aataatttttaatgttttaatgaagagtatgaagagtagtagtactgctcttcaaagtactactactttaccttaccttttactgttttgttaagaaaattaggccgggcgcagtggctc

SEQ ID NO: 38042 - DNA, 120 bp, synthetic construct
  source 1..120: mol_type = other DNA
ggcatggtggtgcgcgcctgtagtcccagctacacgggaggctgaggcaggagaatggcgtgaacccgggaggcagagcttgcagtgagccgagatcgcaccactgcactccagcctggg

SEQ ID NO: 38043 - DNA, 120 bp, synthetic construct; identical to SEQ ID NO: 10968
  source 1..120: mol_type = other DNA

SEQ ID NO: 38044 - DNA, 120 bp, synthetic construct
  source 1..120: mol_type = other DNA
cgattttttttgacatttatacacacatacacatatttttaaattgtctataataaaatcatgctcatctttgaaaaaatattaggagtactacagtggatacctacatacttgctattc

SEQ ID NO: 38045 - DNA, 120 bp, synthetic construct
  source 1..120: mol_type = other DNA
cctcagcctcccaagtagctgggactgcaggtacacatcaccacgcccagctaattttttgtatttttggtagagacggggtttcaccatgttggccaggctggtctccaactcctgacc

SEQ ID NO: 38046 - DNA, 120 bp, synthetic construct; identical to SEQ ID NO: 10969
  source 1..120: mol_type = other DNA

SEQ ID NO: 38047 - DNA, 120 bp, synthetic construct
  source 1..120: mol_type = other DNA
gtcttcgttagtgaatgcattgttgtacatattagatttttctctttagataactcagcttcccctattaagtgccacatgtattacaaaattttatttatgttttattgtttaataaac

SEQ ID NO: 38048 - DNA, 120 bp, synthetic construct
  source 1..120: mol_type = other DNA
agaagattgtttcacacatttacatcaactgcatagtcctgtttttgttgggccctaatgccagcatcactttttgctactgctgtttctgccttaaaggcaatatgcctctgtctagtt

SEQ ID NO: 38049 - DNA, 120 bp, synthetic construct
  source 1..120: mol_type = other DNA
cagaggcctttgacacttattctggatatgcagtggcctttgcctatggggttcatgggtcagagcgctgttgtgacctttgaataaatgggttgttatgataattgttttaagggagga

SEQ ID NO: 38050 - DNA, 120 bp, synthetic construct; identical to SEQ ID NO: 10970
  source 1..120: mol_type = other DNA

SEQ ID NO: 38051 - DNA, 120 bp, synthetic construct
  source 1..120: mol_type = other DNA
ggcactgttgtttcacaagatgatgtttgaaactattccaatgttcagtggcggaacttgcagtaagtgcttgaaattctcatccttccatgtattggaacagttttcttaaccatatct

SEQ ID NO: 38052 - DNA, 120 bp, synthetic construct
  source 1..120: mol_type = other DNA
aagccaaaagcaatgggttttaatgtagtcgaagccaaattatatttatgaaagaaatattctgtgttataaccaccaaatacagcccaattctgactagatgatggaagaacctgtccc

SEQ ID NO: 38053 - DNA, 120 bp, synthetic construct
  source 1..120: mol_type = other DNA
gacaaagcaatgaaaaggaaaggaagaagtgataagacgtggcagcaagctgaagtatgatgagtaaagaataggaatcaaagtatgtggagtgttagagaaaacctggatttagatcca

SEQ ID NO: 38054 - DNA, 120 bp, synthetic construct
  source 1..120: mol_type = other DNA
gtactaaatacagattatgtcactgatgtctgcctctatttatttctcccttttaccctaatctctataagtctacctcagtcatcctgatcctattctacttctctgatgttgttgtca

SEQ ID NO: 38055 - DNA, 120 bp, synthetic construct; identical to SEQ ID NO: 10971
  source 1..120: mol_type = other DNA

SEQ ID NO: 38056 - DNA, 120 bp, synthetic construct
  source 1..120: mol_type = other DNA
cactttagtaatctttcctcattttctagtttcctcttatgtactatgatttaatactgtagtaaagttttaataaaatatgagctatatgtaattaagtgggaggttgtggggctaggc

SEQ ID NO: 38057 - DNA, 120 bp, synthetic construct
  source 1..120: mol_type = other DNA
aaaattagctgggcatagtggcacacacctgtagtcccagcttcttgggaggctgaggcaggagaatcgcttgaatccaggaggcagaggttgcagttagccgagatcatgccactgcac

SEQ ID NO: 38058 - DNA, 120 bp, synthetic construct; identical to SEQ ID NO: 10972
  source 1..120: mol_type = other DNA

SEQ ID NO: 38059 - DNA, 120 bp, synthetic construct
  source 1..120: mol_type = other DNA
agccaggcatggtgatgcgtgcctgtagtcccagctacttgggaggctgaggcaggagaattgcttgaagccgaaggtggaggttgcagtgagccgagattgcgtcattgcactccagcc

SEQ ID NO: 38060 - DNA, 120 bp, synthetic construct
  source 1..120: mol_type = other DNA
gctggacaagaatgtagtgtcagagaataggtatggaacgtgtgagtgactgttagaggatcttgaatggggataacagacttgatttcataaatactgagatgtcatgataatacttga

SEQ ID NO: 38061 - DNA, 120 bp, synthetic construct
  source 1..120: mol_type = other DNA
gggatttcattaattttttatttgccatttatagccaaagattttgtaaaagttttgagcccagtcaggtgaaatagtctcagaaagaaagaaaagtgaatctgagacttggagacatta

SEQ ID NO: 38062 - DNA, 120 bp, synthetic construct; identical to SEQ ID NO: 10973
  source 1..120: mol_type = other DNA

SEQ ID NO: 38063 - DNA, 120 bp, synthetic construct
  source 1..120: mol_type = other DNA
taagagatggaaaaagctactatattctagacatttaacagggttaaaaatgttactaaaagatgatcaatgtggttttcattcaagactataacaatatgtatatatccaaggaaattt

SEQ ID NO: 38064 - DNA, 120 bp, synthetic construct
  source 1..120: mol_type = other DNA
atatacattgtacccattaagtaatttctcatcttctactcaccgtttcaagtctccactatttatcattccattctttacattctgattttcatttactaggtgtattagtctgttttt

SEQ ID NO: 38065 - DNA, 120 bp, synthetic construct
  source 1..120: mol_type = other DNA
gcttctggggaggcctcaggaagcctccaatcatggctgaaggcaaaaggggagcatggtgagaatgggagcaagaaagagaaggagtggtggggagaaggtgccacccacttttaaatg

SEQ ID NO: 38066 - DNA, 120 bp, synthetic construct; identical to SEQ ID NO: 10974
  source 1..120: mol_type = other DNA

SEQ ID NO: 38067 - DNA, 120 bp, synthetic construct
  source 1..120: mol_type = other DNA
ataatatttgaagatgcacattttagatgtagtttaattgaaacctggaaatactattaatttgctttttaaagtcctaaaatcaggattatcagattctgaattaatggagtttaaatc

SEQ ID NO: 38068 - DNA, 120 bp, synthetic construct
  source 1..120: mol_type = other DNA
tcttgaagttagatttcccagtgaaatttcagtatcacataaagtcttatgaaatggctcattgcactttgaactttgagtcaaggaagtgaaatttattgatagattgttggtgtaata

SEQ ID NO: 38069 - DNA, 120 bp, synthetic construct
  source 1..120: mol_type = other DNA
acatagaaatagtagtaggtgtttactaaactggaaatttcatttaacttggtttagctttgccttgttctcagtcacattgataaaaatgtaagacttttgtttatcttttagaataat

SEQ ID NO: 38070 - DNA, 120 bp, synthetic construct; identical to SEQ ID NO: 10975
  source 1..120: mol_type = other DNA

SEQ ID NO: 38071 - DNA, 120 bp, synthetic construct
  source 1..120: mol_type = other DNA
cattaaggtcattagctataaatgaatttatgagtagatttaaaaaataaaacatacaatccttcccttaacacactttcccaccatttggttcaactgctagtgtaaaagcatgatgaa

SEQ ID NO: 38072 - DNA, 120 bp, synthetic construct
  source 1..120: mol_type = other DNA
gttaatgaaaatgaggtgttttggaggaaaggaaggttgtgctgcagtttttacttgaaatctgttacatttctttacagaaatttcaaatctcttgtttcctgttatgatggtggcatt

SEQ ID NO: 38073 - DNA, 120 bp, synthetic construct
  source 1..120: mol_type = other DNA
gtgaacatgtagtgatttgtattttgtgatctttgccgcatgctagagacttaagaatactatagcaaatatctgtcttctttacatttaaaaatttttcgtgactactccctgttgata

SEQ ID NO: 38074 - DNA, 120 bp, synthetic construct; identical to SEQ ID NO: 10976
  source 1..120: mol_type = other DNA

SEQ ID NO: 38075 - DNA, 120 bp, synthetic construct
  source 1..120: mol_type = other DNA
tgacagttaaaggcatttcctgtgaaataatactggtatgtatttaaccatgcagatcctcagtttgtggtctgccagctaaaggtgaagatatattcctccaattcaggacccacacga

SEQ ID NO: 38076 - DNA, 120 bp, synthetic construct
  source 1..120: mol_type = other DNA
ttgggagaaatatccaaaataaggacagattaaaagctatattttattttatgacatgtaaggaactataatttgttttctattagatctgcaggtgttttgcttactctggcattggtg

SEQ ID NO: 38077 - DNA, 120 bp, synthetic construct
  source 1..120: mol_type = other DNA
ggatggttaactgagaagaaattagcatgggaccaatattttaaaaattttggtctataggtagaaatgagatctgttctgtggtcttatgtagtgacacaaaccactttttctccattt

SEQ ID NO: 38078 - DNA, 120 bp, synthetic construct; identical to SEQ ID NO: 10977
  source 1..120: mol_type = other DNA

SEQ ID NO: 38079 - DNA, 120 bp, synthetic construct
  source 1..120: mol_type = other DNA
aagaatgaaaacatggtatttaaatgtgcaggtttagaaagttaatgaagtttgaatttgattgatctgtatttagagaaggcaacgtcttattattttaaaaccaactatccgccctgt

SEQ ID NO: 38080 - DNA, 120 bp, synthetic construct
  source 1..120: mol_type = other DNA
cctggccaacatggttaaaccccatctctactaaaaatacaaaaaaattagccgggtgtggtggcaggcgcctgttttcccagctactcaggaggcttgaggcaggataattgctgaacc

SEQ ID NO: 38081 - DNA, 120 bp, synthetic construct
  source 1..120: mol_type = other DNA
attaaatgtgaatatttaaagtgagactaaggtgcaacatttttagatagtaatgaagaaaaggactaactttgtagtgttgctgccttgttaaacatactagatagcatattgccaatc

SEQ ID NO: 38082 - DNA, 120 bp, synthetic construct
  source 1..120: mol_type = other DNA
tagagatataattttcctttatccagaatccaagtagctggaaaaaaaaatcaaaatatgctgaacttttttttttttagccagaaacccatttcctatcgtctgtacaaataaaagtta

SEQ ID NO: 38083 - DNA, 120 bp, synthetic construct; identical to SEQ ID NO: 10978
  source 1..120: mol_type = other DNA

SEQ ID NO: 38084 - DNA, 120 bp, synthetic construct
  source 1..120: mol_type = other DNA
ttggcttattttcttctaagtaaaatacaattactggctaaaataattgaaataagcaaaaaaaaaattttaaagaccttgtatacaagattactttgccaggtactgttaaaagatgca

SEQ ID NO: 38085 - DNA, 120 bp, synthetic construct
  source 1..120: mol_type = other DNA
cacaaggctgtatatcattaattgccaaatgatttatacaggccagatttctttgttggtcaatagaggtttaaagtgatgaacttctgttgtgtttttttattaagaaggtattatctt

SEQ ID NO: 38086 - DNA, 120 bp, synthetic construct; identical to SEQ ID NO: 10979
  source 1..120: mol_type = other DNA

SEQ ID NO: 38087 - DNA, 120 bp, synthetic construct
  source 1..120: mol_type = other DNA
taaaattttaaggcaaaagtagtttatcttagatcttgtgagattgtatttttggtttaaaatttgagaatttgagtgaagaaaaatcatgtgaatgaaaatgcaacagataactcagat

SEQ ID NO: 38088 - DNA, 120 bp, synthetic construct
  source 1..120: mol_type = other DNA
tcattaattaaatatgtcatttcatttctttttcttttctttttttttttttttaggacaaaatgtttcacttttgggtaaatacattcttcataccaggaccagaggaaacctcagaaa

SEQ ID NO: 38089 - DNA, 120 bp, synthetic construct
  source 1..120: mol_type = other DNA
ataaagacaaagccaaccgatacttttctccaaattttaaggtcagttaaattaaacattttgtgggggttgttgacttgtatgtatgtgatgtgtgtttaattctaggagtacagctga

SEQ ID NO: 38090 - DNA, 120 bp, synthetic construct; identical to SEQ ID NO: 10980
  source 1..120: mol_type = other DNA

SEQ ID NO: 38091 - DNA, 120 bp, synthetic construct
  source 1..120: mol_type = other DNA
atcttaaaaatagacttgattgtgtcacttctgtttacactttataaggaccttgtgtttttttttttaccatgacctacaaggcccagcataatttagcacagggctacctcctacatc

SEQ ID NO: 38092 - DNA, 120 bp, synthetic construct
  source 1..120: mol_type = other DNA
accttttcatctcagccttttcccctgaccttccatagctatcttcatatttccagccttagcttcaatctcatattctctgaagtcctttgattgtcctcccgttattctttttttaaa

SEQ ID NO: 38093 - DNA, 120 bp, synthetic construct
  source 1..120: mol_type = other DNA
taaaaaaatctgatttgtaaacattcccaagtggttgtttaccatttttttcttcccccttcctatttcttattctacctgattttcccctgttcattcaccacactcgtttctttctct

SEQ ID NO: 38094 - DNA, 120 bp, synthetic construct; identical to SEQ ID NO: 10981
  source 1..120: mol_type = other DNA

SEQ ID NO: 38095 - DNA, 120 bp, synthetic construct
  source 1..120: mol_type = other DNA
cttaaaaaaaaaaaaaaaaaaaaaatatatacacacacacacacacacacacacacacacacacactattactaccaatatacatacatatatgtatgtatgtatgtatgtatattggta

SEQ ID NO: 38096 - DNA, 120 bp, synthetic construct
  source 1..120: mol_type = other DNA
tataataattgtacatatttatgggatacagagtgatattttcatgtatgcagtgtgtgatgatcaaatcaggataattagcatatggatcacctcaaacatttgtcatttctttgtgtt

SEQ ID NO: 38097 - DNA, 120 bp, synthetic construct
  source 1..120: mol_type = other DNA
aaccaacatctccctatcctcccctcccactccctttcccggcctctaataaccacactcttatgagctcaacttttttagcttccatatatgagtgagaacatacggtatttatctttc

SEQ ID NO: 38098 - DNA, 120 bp, synthetic construct
  source 1..120: mol_type = other DNA
tctttttccctttagttttattgttttctattttaatattgcaagatgttttatatttgtgattacaaataaaaactccattattagtaaacaaatacaatgtcatatagtagtaagtgc

SEQ ID NO: 38099 - DNA, 120 bp, synthetic construct; identical to SEQ ID NO: 10982
  source 1..120: mol_type = other DNA

SEQ ID NO: 38100 - DNA, 120 bp, synthetic construct
  source 1..120: mol_type = other DNA
ttccctgtgttcatgctttcaaaatacagatgagtgaggaaagtagggagaaggggtaataaaggaagctgagagatcagttaagaggtacttgaatagtttagtaaagatgagagaaga

SEQ ID NO: 38101 - DNA, 120 bp, synthetic construct
  source 1..120: mol_type = other DNA
tttactgatgcagtggatgttggttgtaagagaagaattgataatgactcttggataataggggagggaggggctgtcaatataatataatgaagaagggatttgaagtcatttctgatt

SEQ ID NO: 38102 - DNA, 120 bp, synthetic construct
  source 1..120: mol_type = other DNA
tgacagttattttcactaggcatgtaaaggcacttgactctctgttatagaccactgtattatgttaatgtccctctccttcctccctttaggtaaagtttttagggctaataaatccca

SEQ ID NO: 38103 - DNA, 120 bp, synthetic construct
  source 1..120: mol_type = other DNA
ctcccaccttgaactaaggagtttgagaccagcctgggcaacatggtgaaatcccatctctacaaaaaatataaaagctagctgggtgtggtggcatgcacctgtagtcctagctacttg

SEQ ID NO: 38104 - DNA, 120 bp, synthetic construct; identical to SEQ ID NO: 10983
  source 1..120: mol_type = other DNA

SEQ ID NO: 38105 - DNA, 120 bp, synthetic construct
  source 1..120: mol_type = other DNA
tgaggcaggcagattgcctgagctcaggagtttgagatcagcctgggcaacatcatgaaccccatttctactaaaatacaaaaaattatctgggcatggtggtgtacacctgtagcccta

SEQ ID NO: 38106 - DNA, 120 bp, synthetic construct
  source 1..120: mol_type = other DNA
taaaaataaataaattgtattaacatcctgatagtttatctgtttagtacctagcaagaaagaaaatgttgaacatcttaagaagagggtcatttaaaaggcctcttaaagatcatgttt

SEQ ID NO: 38107 - DNA, 120 bp, synthetic construct; identical to SEQ ID NO: 10984
  source 1..120: mol_type = other DNA

SEQ ID NO: 38108 - DNA, 120 bp, synthetic construct
  source 1..120: mol_type = other DNA
aataaactgaaaatggacctttttttttttaatggcaataggacattgtgtcagattaccagttataggaacaattctcttttcctgaccaatcttgttttaccctatacatccacaggg

SEQ ID NO: 38109 - DNA, 120 bp, synthetic construct
  source 1..120: mol_type = other DNA
aaattcaattaggattaataaagatggcactttcccgttttattccagttttataaaaagtggagacagactgatgtgtatacgtaggaattttttccttttgtgttctgtcaccaactg

SEQ ID NO: 38110 - DNA, 120 bp, synthetic construct
  source 1..120: mol_type = other DNA
atgtattcgggttaggggaatggagggaatgctcagaaaggaaataattttatgctggactctggaccatataccatctccagctatttacacacacctttctttagcatgctacagtta

SEQ ID NO: 38111 - DNA, 120 bp, synthetic construct
  source 1..120: mol_type = other DNA
aaaggcagctaaaggaagtgaatctgtattggggtacaggaatgaaccttctgcaacatcttaagatccacaaatgaagggatataaaaataatgtcataggtaagaaacacagcaacaa

SEQ ID NO: 38112 - DNA, 120 bp, synthetic construct; identical to SEQ ID NO: 10985
  source 1..120: mol_type = other DNA

SEQ ID NO: 38113 - DNA, 120 bp, synthetic construct
  source 1..120: mol_type = other DNA
tgcacagaaattttcaatttgagattctacagtaagcgttttttttctttgaagatttatgatgcacttattcaatagctgtcagccgttccacccttttgaccttacacattctattac

SEQ ID NO: 38114 - DNA, 120 bp, synthetic construct
  source 1..120: mol_type = other DNA
gtttatattaaaaaggacatttgtgttaaaaaggaaattagagttgcagtaaactttcaatgctgcacacaaaaaaaagacatttgatttttcagtagaaattgtcctacatgtgcttta

SEQ ID NO: 38115 - DNA, 120 bp, synthetic construct; identical to SEQ ID NO: 10986
  source 1..120: mol_type = other DNA

SEQ ID NO: 38116 - DNA, 120 bp, synthetic construct
  source 1..120: mol_type = other DNA
ttttcaataacttattggtgctgaaattgttcactagctgtggtctgacctagttaatttacaaatacagattgaataggacctactagagcagcatttatagagtttgatggcaaatag

SEQ ID NO: 38117 - DNA, 120 bp, synthetic construct
  source 1..120: mol_type = other DNA
atatttaaacattgatatatagagtattgattgattgctcataagttaaattggtaaagttagagacaactattctaacacctcaccattgaaatttatatgccaccttgtctttcataa

SEQ ID NO: 38118 - DNA, 120 bp, synthetic construct
  source 1..120: mol_type = other DNA
tgtaacatggagggccaggtcataaataatgacattataatgggcttttgcactgttattatttttcctttggaatgtgaaggtctgaatgagggttttgattttgaatgtttcaatgtt

SEQ ID NO: 38119 - DNA, 120 bp, synthetic construct
  source 1..120: mol_type = other DNA
ccccatagaatttgacaagaattgctatgactgaaaggttttcgagtcctaattaaaactttatttatggcagtattcataattagcctgaaatgcattctgtaggtaatctctgagttt

SEQ ID NO: 38120 - DNA, 120 bp, synthetic construct; identical to SEQ ID NO: 10987
  source 1..120: mol_type = other DNA

SEQ ID NO: 38121 - DNA, 120 bp, synthetic construct
  source 1..120: mol_type = other DNA
ttctagaaattttgtgcaatatgttcataacgatggctgtggttgccacaaagtgcctcgtttacctttaaatactgttaatgtgtcatgcatgcagatggaaggggtggaactgtgcac

SEQ ID NO: 38122 - DNA, 120 bp, synthetic construct
  source 1..120: mol_type = other DNA
gaatatatatactaaaaaatttcagtctgttaaacagccttactctgattcagcctcttcagatactcttgtgctgtgcagcagtggctctgtgtgtaaatgctatgcactgaggataca

SEQ ID NO: 38123 - DNA, 120 bp, synthetic construct
  source 1..120: mol_type = other DNA
aaagtctcattcttgtcattgtgtgggtgttttattaaatgagagtttataattcaaattgcttaagtccattgaagttttaattaatgggcagccaaatgtgaatacaaagttttcagt

SEQ ID NO: 38124 - DNA, 120 bp, synthetic construct; identical to SEQ ID NO: 10988
  source 1..120: mol_type = other DNA

SEQ ID NO: 38125 - DNA, 120 bp, synthetic construct
  source 1..120: mol_type = other DNA
ggcttttgtctattattctgtactctgccatcagcatatggaaagcttcatttactcatcatgacttgtgccatataaaaattgatatttcggaatagtctaaaggactttttgtacttg

SEQ ID NO: 38126 - DNA, 120 bp, synthetic construct
  source 1..120: mol_type = other DNA
gacaatgttacagtgggacttattatttcaagtttacattttctccatgtaattttttaaaaagtaaatgaaaaaatgtgcaataatgtaaaatatgaagtgtatgtgtacacacatttt

SEQ ID NO: 38127 - DNA, 120 bp, synthetic construct; identical to SEQ ID NO: 10989
  source 1..120: mol_type = other DNA

SEQ ID NO: 38128 - DNA, 120 bp, synthetic construct
  source 1..120: mol_type = other DNA
agctattgattagtgctgttgctagttcagaaagaaatgtttgtgaatggaaacaagaatattcagtccaaactgttgtaaggacagtacctgaaaaccaggaaacaggataatggaaaa

SEQ ID NO: 38129 - DNA, 120 bp, synthetic construct
  source 1..120: mol_type = other DNA
cttgctgtttttccatcttccaaaagatcttccttctaatatgtatatcagaatgtgggtagccagtcagacaaattcatattggttggtagctttaaaaagtttgtaatgtgaagacag

SEQ ID NO: 38130 - DNA, 120 bp, synthetic construct
  source 1..120: mol_type = other DNA
gaaaggacaaaatagtttgctttggtggtagtactctggttgttaagctaggtattttgagactacttccccatcacaacaacaataaaataatcactcataatcctatcacctggagac

SEQ ID NO: 38131 - DNA, 120 bp, synthetic construct; identical to SEQ ID NO: 10990
  source 1..120: mol_type = other DNA

SEQ ID NO: 38132 - DNA, 120 bp, synthetic construct
  source 1..120: mol_type = other DNA
tttgcatttggaattgtgttaaatagaatgtgtgaaacactgtattagtaaacttcatcacctttctacttccttatagtttgaacttttcagtttttgtagttcccaaacagttgctca

SEQ ID NO: 38133 - DNA, 120 bp, synthetic construct
  source 1..120: mol_type = other DNA
acctttagctctgaaaattaccgcgtttagtaattatagtgggcttataaaaacatgcaactctttttgatagttatttgagaattttggtgaaaaatatttagctgagggcagtataga

SEQ ID NO: 38134 - DNA, 120 bp, synthetic construct
  source 1..120: mol_type = other DNA
atttcctctgttgcatgaggattctcatctgtgcttataatggttagagattttatttgtgtggaatgaagtgaggcttgtagtcatggttctagtgtttcagtttgccaagtctgttta

SEQ ID NO: 38135 - DNA, 120 bp, synthetic construct; identical to SEQ ID NO: 10991
  source 1..120: mol_type = other DNA

SEQ ID NO: 38136 - DNA, 120 bp, synthetic construct
  source 1..120: mol_type = other DNA
tcaagagtgctagacttccaatttgagagattaaataatttaattcaggcaaacatttttcattggaatttcacagttcattgtaatgaaaatgttaatcctggatgacctttgacatac

SEQ ID NO: 38137 - DNA, 120 bp, synthetic construct
  source 1..120: mol_type = other DNA
ttaaaccaaagttggcatactggaagtgtttatatcaagttccatttggctactgatggacaaaaaatagaaatgccttcctatggagagtatttttcctttaaaaaattaaaaaggtta

SEQ ID NO: 38138 - DNA, 120 bp, synthetic construct; identical to SEQ ID NO: 10992
  source 1..120: mol_type = other DNA

SEQ ID NO: 38139 - DNA, 120 bp, synthetic construct
  source 1..120: mol_type = other DNA
gccgccgccccctcctgaggaggacccagagcaggacagcggcccggaggacctgcctctcgtcaggtgagcgagcagagccgccgtcgcctcacgcgggaagggcgccccgggtgtgcg

SEQ ID NO: 38140 - DNA, 120 bp, synthetic construct
  source 1..120: mol_type = other DNA
ccccccgccacggcggagcgtctgcagaatggtgacaggattctgggttcttgggcgaggggtctcggcttcaacttgacaggtgtcgggcgggtggggctagggtcctgagcgaagtga

SEQ ID NO: 38141 - DNA, 120 bp, synthetic construct
  source 1..120: mol_type = other DNA
aatacaaaaatggtgtctgtgggagagtttttcaccggagaattggagtactccggtggtcgtctgactttctgttttggttcacgcgatgcaacagttgggaagtattttcttccgggc

SEQ ID NO: 38142 - DNA, 120 bp, synthetic construct; identical to SEQ ID NO: 10993
  source 1..120: mol_type = other DNA

SEQ ID NO: 38143 - DNA, 120 bp, synthetic construct
  source 1..120: mol_type = other DNA
tatttcttccattttgccttttgactttgaaccagcaaggatcttggtgtcccctctttttgcctttgtttttggcacaaaattagtggttctgtgcgcaaatggaaattttcgttttcc

SEQ ID NO: 38144 - DNA, 120 bp, synthetic construct
  source 1..120: mol_type = other DNA
ctatgattgaaagagtgtaattgtcattattgtcagcactggttctactttgagacaagttcattgcagagggaatgggacttgtttctgtttttcactattttctctcccattcttgtc

SEQ ID NO: 38145 - DNA, 120 bp, synthetic construct; identical to SEQ ID NO: 10994
  source 1..120: mol_type = other DNA

SEQ ID NO: 38146 - DNA, 120 bp, synthetic construct
  source 1..120: mol_type = other DNA
tagtttctgattaaattctgatgtatccaattcttgcaaatttcccttgggaaaatgcagtaatggctactctaaagaattccatgttatgcacacagctttggaagcatactctaatgt

SEQ ID NO: 38147 - DNA, 120 bp, synthetic construct
  source 1..120: mol_type = other DNA
tcaaaaccatacaagatacagtctgttcttgattatccatacccacaaagggtttcattaacatagacagttgaactctataaattaaccagcaagggtagaaccgctgccgtgcagtct

SEQ ID NO: 38148 - DNA, 120 bp, synthetic construct
  source 1..120: mol_type = other DNA
agagtttagatcttatttctgttgccttatctctggcctaagtaatgtagctggaagggaaactgtcactaggaacagcataccacattcattgttgaaataatcaaaggttaatcatgt

SEQ ID NO: 38149 - DNA, 120 bp, synthetic construct
  source 1..120: mol_type = other DNA
ttaaaaaaacaaaaaagctgaccaggcatgttggctcacgcctgtaatgccagcactttgggaggccaagatgggaagattgcttgaggccaggagtttgagaggagcctgggcaacaaa

SEQ ID NO: 38150 - DNA, 120 bp, synthetic construct; identical to SEQ ID NO: 10995
  source 1..120: mol_type = other DNA

SEQ ID NO: 38151 - DNA, 120 bp, synthetic construct
  source 1..120: mol_type = other DNA
gtaagttctttaacttctccaatttgacagacatctgtaaatgtctacttttacagatgagaatacttatctaaaagggctgatgtcgggattcagtgaaaccatatgtttaaggtactt

SEQ ID NO: 38152 - DNA, 120 bp, synthetic construct
  source 1..120: mol_type = other DNA
tgcttgtctttgttaaggggaaaggacaaaaataagcagtcgcatcatgtaagatgtgctagtaggtagagagatatatgaaacattgataagagaagactacagtttaacaaagtcact

SEQ ID NO: 38153 - DNA, 120 bp, synthetic construct
  source 1..120: mol_type = other DNA
ttgaagtatatttgacttaccatgcaagcaaatatttttcactgtgtggtatccttattttggaatgaccatgaaaaagataatcatatgtttaaatttgaagtgtaatgtttttctaag

SEQ ID NO: 38154 - DNA, 120 bp, synthetic construct; identical to SEQ ID NO: 10996
  source 1..120: mol_type = other DNA

SEQ ID NO: 38155 - DNA, 120 bp, synthetic construct
  source 1..120: mol_type = other DNA
aaatcactatacaaaaattgaaagatagaaaaatataaagacaataaaagctaataataattccattacccagaggaaatttacctctgctaacattaaaaatgtttgaggccgggcacg

SEQ ID NO: 38156 - DNA, 120 bp, synthetic construct
  source 1..120: mol_type = other DNA
aaaaaaaaaaaaattagcagggtgtggcgtgcgcctgtagtcccagctatttgggaagctgaggcaggagaattgcttgaacccaggaggtggaggttacagtgagccgagatcgtgcca

SEQ ID NO: 38157 - DNA, 120 bp, synthetic construct
  source 1..120: mol_type = other DNA
ttcactatgatacaaggacttttaaaaaaacaccgccataccttataaaataatttttataccttctaatatgcaatcagtgttcagatttcctgactgactcagaattagttttgttag

SEQ ID NO: 38158 - DNA, 120 bp, synthetic construct; identical to SEQ ID NO: 10997
  source 1..120: mol_type = other DNA

SEQ ID NO: 38159 - DNA, 120 bp, synthetic construct
  source 1..120: mol_type = other DNA
caggtgatcacttgaggtcaggagttctagaccagcctggccaacatggtgaaaccccatctctactaaaaatacaaaaattagccaggcatggtagcagatgcctgtaatctcagctac

SEQ ID NO: 38160 - DNA, 120 bp, synthetic construct
  source 1..120: mol_type = other DNA
aaaaaaaccccagaactttacaaatctacgaataactcatttaaaaatcattgagatatgaaatataaaatctttttttatgtgtaaaatgtgaaatgttcatttaacagatgaagacac

SEQ ID NO: 38161 - DNA, 120 bp, synthetic construct; identical to SEQ ID NO: 10998
  source 1..120: mol_type = other DNA

SEQ ID NO: 38162 - DNA, 120 bp, synthetic construct
  source 1..120: mol_type = other DNA
tctctgattattttattagaataaattcttataagttgaattactaaatcaaaagctatgaacatttttatgactcttgatgattattgctagattacacttcagacagatacttttaat

SEQ ID NO: 38163 - DNA, 120 bp, synthetic construct
  source 1..120: mol_type = other DNA
atctctggcagtaaaaaggagaaaacaagtgtcatgatttccaaagaattgaacatagtctcacatttcttatgtaaaaagagaggaatactgaagtatcttgaatgtatgacttgggta

SEQ ID NO: 38164 - DNA, 120 bp, synthetic construct
  source 1..120: mol_type = other DNA
taaatgggatcagagctccttcacttttctcttcctaaaatactagatttttagtgttcagaaattttggaagggatagctgattataaagagcattagtgaatatacatactgtagttt

SEQ ID NO: 38165 - DNA, 120 bp, synthetic construct; identical to SEQ ID NO: 10999
  source 1..120: mol_type = other DNA

SEQ ID NO: 38166 - DNA, 120 bp, synthetic construct
  source 1..120: mol_type = other DNA
gaagggtatgatggaagatgatgtcctgttgtcctgttgtaaatcaacagacttttccttgaaatatgattttaagttagagttacgtttttgaggtttggcctgagaatttaaccttca

SEQ ID NO: 38167 - DNA, 120 bp, synthetic construct
  source 1..120: mol_type = other DNA
agtgcagctattctagtggcagttgtctctcttctttgaaacaagaggaggaatattgtcaaaaaggaaaccctttttaacaatagaaagtaggtgatgtttattgggatagaggatggg

SEQ ID NO: 38168 - DNA, 120 bp, synthetic construct
  source 1..120: mol_type = other DNA
tctggatcttggagttatgtgcagattaaataaattaatgcatataaagctcttattagagtcaatgagtatgtatattaggtcttgcaaacagaataattttacttaagaaatacccca

SEQ ID NO: 38169 - DNA, 120 bp, synthetic construct
  source 1..120: mol_type = other DNA
ttaagtactttagcatcagaaaagttgtttatgcatacatgaaagcatatattaatccctttaaaggaaaagtttgtggtattttgtctagaaaagtgttttctttttttaaaataaata

SEQ ID NO: 38170 - DNA, 120 bp, synthetic construct; identical to SEQ ID NO: 11000
  source 1..120: mol_type = other DNA

SEQ ID NO: 38171 - DNA, 120 bp, synthetic construct
  source 1..120: mol_type = other DNA
tatatgaaatgtatgatatacatatctcaaagagctttgggatatattgctcttgatagaaccacttacttatttttgtgatatggtggttatattttaaataaatacagtcatgtgttg

SEQ ID NO: 38172 - DNA, 120 bp, synthetic construct
  source 1..120: mol_type = other DNA
aaacctggatggtatagcctatgacacacctatgctgtgtggtatatagcatgttgctcctagtctgcaaatgtgtacagcatgttactgtactgaacattgtaggcaattgtaacacaa

SEQ ID NO: 38173 - DNA, 120 bp, synthetic construct
  source 1..120: mol_type = other DNA
attagaatggtccttttaaattctgttttttattaatgtattttttattttattttattttgagatggagtcttgctctgtcacccaggctggagtgcgtggcacgatctcggctcactg

SEQ ID NO: 38174 - DNA, 120 bp, synthetic construct; identical to SEQ ID NO: 11001
  source 1..120: mol_type = other DNA

SEQ ID NO: 38175 - DNA, 120 bp, synthetic construct
  source 1..120: mol_type = other DNA
tcgattccacttttcttgtgatcactctttacaatgtgtatcgtttaccttcattttgattttaacctatttcttttttatatttaaatggatttttgttgttttgtaatcagcattcat

SEQ ID NO: 38176 - DNA, 120 bp, synthetic construct
  source 1..120: mol_type = other DNA
taggggaaattaaataatctgaaatataaggaaaggatatgttgatttcaagaaaggttgtttttgttccttatctggcttgttcttgttgtgagggtgggagcaatactctttgcagct

SEQ ID NO: 38177 - DNA, 120 bp, synthetic construct
  source 1..120: mol_type = other DNA
cataggactaattaaaactataccagactccttctattttaaacctatccgttcagtctcaagttatctttttgcattgcctctcacgtctgtcccttcatttcttttaccagcagtgct

SEQ ID NO: 38178 - DNA, 120 bp, synthetic construct; identical to SEQ ID NO: 11002
  source 1..120: mol_type = other DNA

SEQ ID NO: 38179 - DNA, 120 bp, synthetic construct
  source 1..120: mol_type = other DNA
ttccattgttggcccccaatgcctgtgttctcttcccttccatatgaatcttccatatgaatatcttccatatgaatatgatagtattcatattcatgcgatctcccctttttttggaat

SEQ ID NO: 38180 - DNA, 120 bp, synthetic construct
  source 1..120: mol_type = other DNA
cttttcactttcttgatgatgtcatttgcagcgtaggattttaattttgatgaagtccagttttctattttttttttggtggtggttttttttttggttgcttgggcttttgatgttgta

SEQ ID NO: 38181 - DNA, 120 bp, synthetic construct
  source 1..120: mol_type = other DNA
aatttttgtgtatgatgtgaggaagaggtctaactccagtcttttgaatgtggatatccagttgtctctgcaccacttatggaaaagactattctttcttcattgaattgttttggtgcc

SEQ ID NO: 38182 - DNA, 120 bp, synthetic construct
  source 1..120: mol_type = other DNA
tgtcgcccaggctggagtgcggtggcacaatctcggcttcctgcaagctccgcctcccgggttcatgccattctcctgcctcagcctcccaaagagctgggactacaggtgcctgccacc

SEQ ID NO: 38183 - DNA, 120 bp, synthetic construct; identical to SEQ ID NO: 11003
  source 1..120: mol_type = other DNA

SEQ ID NO: 38184 - DNA, 120 bp, synthetic construct
  source 1..120: mol_type = other DNA
atgttggatctagatcaatttgcggaatattgcattcttaacaacatgaagtcttcagatgcatgcatatggaatgtcttttcgtttaagtctttctttcaccagtgttttcagttttca

SEQ ID NO: 38185 - DNA, 120 bp, synthetic construct
  source 1..120: mol_type = other DNA
ttgtaggtggatagaaataaaatctattttttttggataagagcagctaaaatcagttgggcacggaggctcacgcctgtaatcttagcactttgggaggccgaggtgggtggatcactt

SEQ ID NO: 38186 - DNA, 120 bp, synthetic construct
  source 1..120: mol_type = other DNA
ggcaggagaatcgcttgaacccgggaggcggaggttgcagtgagccgaagtcgtgccactgcactccagcctgggcaaaaaaaaaaagaaaaagcagctaaaatctatgtatttaacaaa

SEQ ID NO: 38187 - DNA, 120 bp, synthetic construct; identical to SEQ ID NO: 11004
  source 1..120: mol_type = other DNA

SEQ ID NO: 38188 - DNA, 120 bp, synthetic construct
  source 1..120: mol_type = other DNA
tccatttgttcgtgtcatctctgatttatttgagctgtgttttgtaattcttgtagagagctttcacctccctagttagctgtattcctagatattttattctttattgtggctattgtg

SEQ ID NO: 38189 - DNA, 120 bp, synthetic construct
  source 1..120: mol_type = other DNA
cagagactatgggattttctaggtgtaaaatcatcatctgcaaacaggaatagtttgacttccttttttcttattccgatgctctttatttccttctcttgtctgattgctgtggctagg

SEQ ID NO: 38190 - DNA, 120 bp, synthetic construct; identical to SEQ ID NO: 11005
  source 1..120: mol_type = other DNA

SEQ ID NO: 38191 - DNA, 120 bp, synthetic construct
  source 1..120: mol_type = other DNA
tctttgagaaatcctcacactgttttccatagaggttgtgctaatttacatttccaccaacagtgtataagcattcccttttcactgcatcctcgccaacatctattgtttttttacttt

SEQ ID NO: 38192 - DNA, 120 bp, synthetic construct
  source 1..120: mol_type = other DNA
gatttcacatgcaacagggagctctcacgtgcttgctggccattgtgctttaaatcgttttttccagcggacagctgtgactgcagttttcaaatgtgctctggcctccaaggaccaggg

SEQ ID NO: 38193 - DNA, 120 bp, synthetic construct
  source 1..120: mol_type = other DNA
cactgcagccaccgacggacattctcaccagcaatcaaccaaaaaacatcagagtctctgtgaacttggctgcgatgataagaaccaaatgttttctaatctaagacttgtatgcagaac

SEQ ID NO: 38194 - DNA, 120 bp, synthetic construct; identical to SEQ ID NO: 11006
  source 1..120: mol_type = other DNA

SEQ ID NO: 38195 - DNA, 120 bp, synthetic construct
  source 1..120: mol_type = other DNA
caaaccgggacgcaaacccacaactcgagggcttagaccttcactgctgagctgccgccactgtcctccgtgcgcggagtgtcgctgaagtcactggcgtcactaaccaaggcgtgcccg

SEQ ID NO: 38196 - DNA, 120 bp, synthetic construct
  source 1..120: mol_type = other DNA
ttgctgcttggccagggcccgccgtccttcttcgccagcaagtgtgggcttccaaagacagggctgggcccggcctgggcctccctgaaggcagagaaggacgggccctgtggaggcagc

SEQ ID NO: 38197 - DNA, 120 bp, synthetic construct
  source 1..120: mol_type = other DNA
ggcggggccctcggaccccttgtctttcccgctcccgacgccccgcctccactccgcatctctactttccgagcgcagcgcgcacgggttccggtgggtgaagtcgctcgagggcagggt

SEQ ID NO: 38198 - DNA, 120 bp, synthetic construct; identical to SEQ ID NO: 11007
  source 1..120: mol_type = other DNA

SEQ ID NO: 38199 - DNA, 120 bp, synthetic construct
  source 1..120: mol_type = other DNA
ttctgccggctgtgggacccccctggcccactgactccgcgtgcacacgccaggcggtggggcccgctccttcctgcacagcaactctggcctgaatgagccccatttcccgagagcagc

SEQ ID NO: 38200 - DNA, 120 bp, synthetic construct
  source 1..120: mol_type = other DNA
agccggggctgggagctgggccctggcattccctggggaaatggattcccttcagaggcggaggcagaggcgcatcccctcactcggaaggccggggccgtgtcctggctcctgacgccc

SEQ ID NO: 38201 - DNA, 120 bp, synthetic construct
  source 1..120: mol_type = other DNA
ttccagtctctcgggagcccgcccagctgctccaggaagtgcatctgggcagtgctgaacctgaccttcctgcacgcagccctgggttccctgcacctcttcttgagctttcgcttggac

SEQ ID NO: 38202 - DNA, 120 bp, synthetic construct
  source 1..120: mol_type = other DNA
atgcgagtgtcgccgggccccttggctgcgccctcccctcccgggacctcgctggctttgccctggacgggcaggtcccgcccctcatggccgggcacggctcacgcctggctgtggtcg

SEQ ID NO: 38203 - DNA, 120 bp, synthetic construct; identical to SEQ ID NO: 11008
  source 1..120: mol_type = other DNA

SEQ ID NO: 38204 - DNA, 120 bp, synthetic construct
  source 1..120: mol_type = other DNA
tgccttacatgggggccggcagggtagtcttggaaatgcccaagattgcttccgcgcgcgtcagttcagcggacgtgtctgcctggcacgaggaccgttctacaaactcgttcctggaag

SEQ ID NO: 38205 - DNA, 120 bp, synthetic construct
  source 1..120: mol_type = other DNA
gttttcctgtgggtctcgcgcaaggcacttttttgtggcgctgcttgtgctgtgtgcggggtcaggcgtcctctctcctcccggcgctgggccctctggggcaggtccccgttggcctcc

SEQ ID NO: 38206 - DNA, 120 bp, synthetic construct
  source 1..120: mol_type = other DNA
ccagcgctcctcttgaccccgcttttattctgtggtgcttctgaagggctgcagggggctgctggcttcgggctgcccttgttctcctgcttggtcgtgaccctggacttgaggcttctg

SEQ ID NO: 38207 - DNA, 120 bp, synthetic construct; identical to SEQ ID NO: 11009
  source 1..120: mol_type = other DNA

SEQ ID NO: 38208 - DNA, 120 bp, synthetic construct
  source 1..120: mol_type = other DNA
tcggggcactgccgtgagatagttctggcttacatctactgccactgcctgcagccctggaaggctgggctgcgcctggctggcccctgccagccccgggctgtgcggctccactctttg

SEQ ID NO: 38209 - DNA, 120 bp, synthetic construct
  source 1..120: mol_type = other DNA
aagaccacaggcaggcaatgcgggctgctccttgtgcacggtgggcttggcagctggcttggcgtctgccctgtggcccctctgtgcagcgcgctcatcggtggtgccccgagcaacccc

SEQ ID NO: 38210 - DNA, 120 bp, synthetic construct; identical to SEQ ID NO: 11010
  source 1..120: mol_type = other DNA

SEQ ID NO: 38211 - DNA, 120 bp, synthetic construct
  source 1..120: mol_type = other DNA
agtttgagacccgcctggccaacatactgaaaccccgtctctactaataatacaaaaattagccgggcgtggtggtgtgagcctgtagtcccagctactcgtgaggcagaggccagggaa

SEQ ID NO: 38212 - DNA, 120 bp, synthetic construct
  source 1..120: mol_type = other DNA
gtgcccatgagataaagtctgcaaatgcttctttgcagtttaaaaaggacgacgactataaacccaggatcaggacgacgttacgcatagatttattcttgacctgaccaacgagctctt

SEQ ID NO: 38213 - DNA, 120 bp, synthetic construct
  source 1..120: mol_type = other DNA
tcggccaggccccctgccacccaccgcgctgaccctgcctgcgcttgcgtcccgcgtcccgcatccggggggaggcggcgggcccgggtctctggggctggcccatttacttagttttgt

SEQ ID NO: 38214 - DNA, 120 bp, synthetic construct; identical to SEQ ID NO: 11011
  source 1..120: mol_type = other DNA

SEQ ID NO: 38215 - DNA, 120 bp, synthetic construct
  source 1..120: mol_type = other DNA
ggtggctcacgtctgtaatcctagcactttcggaagccaaggcgggtggatcacctgaggtcaggagttcgagaccagcctggctaacatggtgaaactccgtgtctactaaaaatacaa

SEQ ID NO: 38216 - DNA, 120 bp, synthetic construct
  source 1..120: mol_type = other DNA
ccagcctggacgacaggagtgaaactgcattgcaaaaacagcaacaaaaaaaatccattcatctagtttgtccactttttaacaggattatttgttttcttcttgctgattttcttgagt

SEQ ID NO: 38217 - DNA, 120 bp, synthetic construct
  source 1..120: mol_type = other DNA
agtcccatttacttagttttgtttttgttgcatttgtttttggtgacaccccctattttttagattccacatataaatgagatcatgcaataattttctttctgtgtctgcttatttcac

SEQ ID NO: 38218 - DNA, 120 bp, synthetic construct
  source 1..120: mol_type = other DNA
ttgacagacacataggttgtttccatattacttagctgtatatagaaatacaggtggtttttgtatgttgattttgtactctgaaaacttggtgaactaatttattagcttcaatagttt

SEQ ID NO: 38219 - DNA, 120 bp, synthetic construct; identical to SEQ ID NO: 11012
  source 1..120: mol_type = other DNA

SEQ ID NO: 38220 - DNA, 120 bp, synthetic construct
  source 1..120: mol_type = other DNA
gttcttgttctttattgaaatggtgtagtatattagttgattttcaggtgttaaaccaacattgcatctctggaataagtcccacttggtcacaatgtataatccttttgatatgttgct

SEQ ID NO: 38221 - DNA, 120 bp, synthetic construct
  source 1..120: mol_type = other DNA
gcctttcacagaatggactgggaagtgttccctcctcttctgttttgatggggcagtttgtgaagaatagatattaattcttctttaaatatttggtagaattcatcagtgatgccatct

SEQ ID NO: 38222 - DNA, 120 bp, synthetic construct; identical to SEQ ID NO: 11013
  source 1..120: mol_type = other DNA

SEQ ID NO: 38223 - DNA, 120 bp, synthetic construct
  source 1..120: mol_type = other DNA
ttttttttctggtttcattgatttttctttatttctctattctctaaaaaattttgatcaaacgatttttccctgttttttcactacccaatgtttatacttaatgtgtgtattggataa

SEQ ID NO: 38224 - DNA, 120 bp, synthetic construct
  source 1..120: mol_type = other DNA
agaattgcttgttctttaaggctttgacttcataaaagttttcactcttggccaatattatttactacagcgtgttttcttcttcatgaggaaccatggaagaaatctttggtccaagac

SEQ ID NO: 38225 - DNA, 120 bp, synthetic construct
  source 1..120: mol_type = other DNA
ctgttttaactgccagctttcatgatagcatgcattttgggggatactaacatttttcttgtcatttttttcacctttctatattttactttcacaattataagtaaataaagacttgtt

SEQ ID NO: 38226 - DNA, 120 bp, synthetic construct
  source 1..120: mol_type = other DNA
acatgtgatgttttgatacaagcatataatgtgtaatgaccaaatcatggtagttggagtatccatcatcttaagcttttatcatttatttgtgttaggagcattccaattctaatcttt

SEQ ID NO: 38227 - DNA, 120 bp, synthetic construct; identical to SEQ ID NO: 11014
  source 1..120: mol_type = other DNA

SEQ ID NO: 38228 - DNA, 120 bp, synthetic construct
  source 1..120: mol_type = other DNA
accacattttctttatccatgcatccattaatgggcattcaggttaattccatgtcttggctgttgggaaaaatgcagcattcaacatgggaatgcagatatctctttgatatactgttt

SEQ ID NO: 38229 - DNA, 120 bp, synthetic construct
  source 1..120: mol_type = other DNA
cacaagcagttgtgcttttgttttttttttgtttgtttgtttttgtttttgtttttttttactgttttaacataattatttggagcttcattcatgatggcatatgcatcaacaatttat

SEQ ID NO: 38230 - DNA, 120 bp, synthetic construct; identical to SEQ ID NO: 11015
  source 1..120: mol_type = other DNA

SEQ ID NO: 38231 - DNA, 120 bp, synthetic construct
  source 1..120: mol_type = other DNA
tgctctttttctattcctagttatatccatagaaatgaccattgatagtttttgcttactctgtccctccagtttttccttcctccagcatatacacaaggattttaattttacccaatt

SEQ ID NO: 38232 - DNA, 120 bp, synthetic construct
  source 1..120: mol_type = other DNA
ttcctttccctaagccacccacttctcttcagaggcaactaataaaagtttctagttttgcattattctacaccttgcttttttcatttagcaatatatcttgaagagcacatctccctc

SEQ ID NO: 38233 - DNA, 120 bp, synthetic construct
  source 1..120: mol_type = other DNA
ccgttgcggtgaattatccttatatatacattttcatgcacaaatgagagtacttttatagtgtagattcctagaagtagaactgctaggtcagaaggtattcacatttaaaaattttaa

SEQ ID NO: 38234 - DNA, 120 bp, synthetic construct; identical to SEQ ID NO: 11016
  source 1..120: mol_type = other DNA

SEQ ID NO: 38235 - DNA, 120 bp, synthetic construct
  source 1..120: mol_type = other DNA
atacataagcaaacagtatccaaaattatcctccgtaaaaatgcctaatttcttttttttcctctgtatctcaatgaataaaaaaaaatactgtctttctttacccacttattttggatt

SEQ ID NO: 38236 - DNA, 120 bp, synthetic construct
  source 1..120: mol_type = other DNA
catttgggtcaagaaaagaatatcagaagaggtatgttattttaacaaacaggaaaatggacaaaaatggatagtttgcctacattaaagtgagttaaattcaagtatcttgatataatt

SEQ ID NO: 38237 - DNA, 120 bp, synthetic construct
  source 1..120: mol_type = other DNA
caaagagttaggaatatacacaggttgcttctctgagttattaccgactaaaagagctcagcgagcagttaccaccaataaaacggtctgaagctgcctccaaatacaatattgtagtag

SEQ ID NO: 38238 - DNA, 120 bp, synthetic construct
  source 1..120: mol_type = other DNA
acaccctacaatacacaaattcacaaagtatgtgtggtgagattccaaaaaatgtttgaagatgcattttctttccttctatttcagtatctaaaatgtgctttttgagaggccattggt

SEQ ID NO: 38239 - DNA, 120 bp, synthetic construct; identical to SEQ ID NO: 11017
  source 1..120: mol_type = other DNA

SEQ ID NO: 38240 - DNA, 120 bp, synthetic construct
  source 1..120: mol_type = other DNA
taaacaaaaaacaagagaagcacattcaaaatactgatttactttggtagcaaatggtttttctttgaagattaatgaagatagacaagacccattaaggtgaagtgggctatttcaaat

SEQ ID NO: 38241 - DNA, 120 bp, synthetic construct
  source 1..120: mol_type = other DNA
ctgtattttaattttatctaaatgtactttcagtcaatagttcagtaacattttcctcccaatacaatactccctctctctataaggctattcctgggagccagacaagtttaggtaata

SEQ ID NO: 38242 - DNA, 120 bp, synthetic construct
  source 1..120: mol_type = other DNA
gtctaaaaaaataggcaattcttaaaaaggtaccatttctgatttctttattatctgtaaactttggaaactaatcacacaaaactaccaaattagcaaatgtcttgaaatctgtataca

SEQ ID NO: 38243 - DNA, 120 bp, synthetic construct; identical to SEQ ID NO: 11018
  source 1..120: mol_type = other DNA

SEQ ID NO: 38244 - DNA, 120 bp, synthetic construct
  source 1..120: mol_type = other DNA
cttcatcttcattaaaagctgctgctactgaaagagtttttggagcaagagttggaacagtttctttaggcttacttgatccaagtttgatggatatgggtgatgctttctttgtcgtct

SEQ ID NO: 38245 - DNA, 120 bp, synthetic construct
  source 1..120: mol_type = other DNA
gcagctccagctcattgcgacttttccggcttctcctctcccgccttcccatcagccatttcccccgccgcattgtttttttaagatttcagaaatctttctaatacaagttgggatata

SEQ ID NO: 38246 - DNA, 120 bp, synthetic construct; identical to SEQ ID NO: 11019
  source 1..120: mol_type = other DNA

SEQ ID NO: 38247 - DNA, 120 bp, synthetic construct
  source 1..120: mol_type = other DNA
atgtcagtgaagtatttttttccttatttatatacattataactttccttatttatgtacattataattttaaaggcctgatagtcataattattgatgttcagattggtagttatttct

SEQ ID NO: 38248 - DNA, 120 bp, synthetic construct
  source 1..120: mol_type = other DNA
ttcctgttttaatttacctcatttatatgcatcttgatattgcattttcatattctaaaaactatttttaaagacaggttgattcagaattacagtgtacttgaaaatcatcaggtacct

SEQ ID NO: 38249 - DNA, 120 bp, synthetic construct
  source 1..120: mol_type = other DNA
tcatcagcatcaggtaaattgtgttactatactgcgttgaattttagcaaaggtaaagtatttgctattttagttattgtagctttattgaaagcaaacatataggttttttaaagtatt

SEQ ID NO: 38250 - DNA, 120 bp, synthetic construct; identical to SEQ ID NO: 11020
  source 1..120: mol_type = other DNA

SEQ ID NO: 38251 - DNA, 120 bp, synthetic construct
  source 1..120: mol_type = other DNA
tctccaggatcaatcatatgtcaggccataaaacaagtattaatatatttaagaagattgagataatatcaagcatcttttctcaccataatggcataaaactagcaagcaaaaataaca

SEQ ID NO: 38252 - DNA, 120 bp, synthetic construct
  source 1..120: mol_type = other DNA
cagcacatcaagatttgtggaatgcagcaaaacagttccaataggagatttcatagtgataaacaccaacatgaaggaaacagtaggaccccagataagtaacctaactttacatctctc

SEQ ID NO: 38253 - DNA, 120 bp, synthetic construct
  source 1..120: mol_type = other DNA
aagactcaaaaaacaatagaaaagagcaacaaaatgaagagtttttttgaaaagataaacaaaattgataaacttttagctagaataagaaaaaaagaagattcaaataaataaaatcag

SEQ ID NO: 38254 - DNA, 120 bp, synthetic construct
  source 1..120: mol_type = other DNA
caaattggatgacctgaaagagacagattgtttgccacatactacctgctaagactgaatagcagaagaaatagaaaatctgaatgaccaataacaaataagggactgaatcagtaatca

SEQ ID NO: 38255 - DNA, 120 bp, synthetic construct; identical to SEQ ID NO: 11021
  source 1..120: mol_type = other DNA

SEQ ID NO: 38256 - DNA, 120 bp, synthetic construct
  source 1..120: mol_type = other DNA
ggacaaattatgtgatcatcttaatagatccagaaaaagtgtttgacaaaacttaacattctttcatgatgaaaactctcaacaagttaggtataaaaggaatgtacctcaacacaacaa

SEQ ID NO: 38257 - DNA, 120 bp, synthetic construct
  source 1..120: mol_type = other DNA
aaatctagccagagatattaggcaagaaaaagaaataaaagacatttgctacagtttgaatgttttccccctctaaaactcatgttgaaacttaattcccaatatggtagtattaaagat

SEQ ID NO: 38258 - DNA, 120 bp, synthetic construct; identical to SEQ ID NO: 11022
  source 1..120: mol_type = other DNA

SEQ ID NO: 38259 - DNA, 120 bp, synthetic construct
  source 1..120: mol_type = other DNA
tagatatccacaggaaatgaagtcagtatgttgaagagatacatacactcccatgttcattgcagcattattcacagtcgcaaagatatggaaacaacctaagtgtctgtcattagatgt

SEQ ID NO: 38260 - DNA, 120 bp, synthetic construct
  source 1..120: mol_type = other DNA
aaaatcgcaaattgaaccattgtaagtcaaggactatctgttatatatattggaattttattcagccttaaaaaaggtaggaaatcctgccatttgcaagaacacggatgaacccgaagg

SEQ ID NO: 38261 - DNA, 120 bp, synthetic construct
  source 1..120: mol_type = other DNA
gcctggggagaatgtggagatgtttgtcaaagggtacaaactttcagttataaaatgaataagggttagatgtggcagctcacgcctataatcccagcacgtttggagaccaagatagga

SEQ ID NO: 38262 - DNA, 120 bp, synthetic construct
  source 1..120: mol_type = other DNA
gactctgaggtaggaggagtgcttgtgcacccaggaggttgaggctgcagtgagctattattgtgccacagcaatccagtctgggtgacagagtgagaccctgtcatgagacctgtctca

SEQ ID NO: 38263 - DNA, 120 bp, synthetic construct; identical to SEQ ID NO: 11023
  source 1..120: mol_type = other DNA

SEQ ID NO: 38264 - DNA, 120 bp, synthetic construct
  source 1..120: mol_type = other DNA
aagaaaatagaacaattatgacaagatgctgtaataaaaagtatgtgaatgtagtctgtttctctcaaaataggtactccgctcacctgttttcaaaccatggttgaccatgggaaactg

SEQ ID NO: 38265 - DNA, 120 bp, synthetic construct
  source 1..120: mol_type = other DNA
acctccataaagctggaaaaaaatgtgacctcatttgtttgttggtgatttccttttttgaaacagcacatgtcatatttggtaaaaggagttgatattgttaatccatataattggatc

SEQ ID NO: 38266 - DNA, 120 bp, synthetic construct
  source 1..120: mol_type = other DNA
ttttcagaaaagctaattagtagccctttgagtatggtggcagttttctttcctatatggttatacctttttggatggatcatttttgggctttgagctcaataatctaagcagagagct

SEQ ID NO: 38267 - DNA, 120 bp, synthetic construct; identical to SEQ ID NO: 11024
  source 1..120: mol_type = other DNA

SEQ ID NO: 38268 - DNA, 120 bp, synthetic construct
  source 1..120: mol_type = other DNA
gctggacactacaaggctcttggggtaaagtagtgaattagatacaatatttctgccttcaggatgcttacatattcatagttgagatagggacaaatgagcaagcaagcaagtcacagt

SEQ ID NO: 38269 - DNA, 120 bp, synthetic construct
  source 1..120: mol_type = other DNA
gctcaacttttgggcagatggccaggtaaatctgaatttgccaggtacatgtttttctggaaatagaatcaactttcttacccacaaaggcattgtgtaactgggtgactgattcacatg

SEQ ID NO: 38270 - DNA, 120 bp, synthetic construct; identical to SEQ ID NO: 11025
  source 1..120: mol_type = other DNA

SEQ ID NO: 38271 - DNA, 120 bp, synthetic construct
  source 1..120: mol_type = other DNA
gtctcatgaactatgcgtaaggatatatcttttgaccctgaggtagagcacaaaagcacatgtttcttatgacttattttcatctttcatatttcacaaagtgcaagctagatagaacat

SEQ ID NO: 38272 - DNA, 120 bp, synthetic construct
  source 1..120: mol_type = other DNA
ggatgatttatgtcaccacttggtggagctcttttataagtaagtgcattgtttaaaaaagcgagtataagttgtcactaattaggggttatcattagattggttcaaatgaactcaact

SEQ ID NO: 38273 - DNA, 120 bp, synthetic construct
  source 1..120: mol_type = other DNA
cctgctttatgtaaatgtagcacttattgacttttctcctattttacaattgtagataatttaaaaaatgtatgcaggattaataaggaaaatgaaaactgttcgtaatcctaccatgta

SEQ ID NO: 38274 - DNA, 120 bp, synthetic construct
  source 1..120: mol_type = other DNA
ttgggtatttttacatatccctttaatattccttgaaactgttttgggtttttatattattctatgatatagctctatcacaatatgtttaaccattctgttttaagatttttaggctct

SEQ ID NO: 38275 - DNA, 120 bp, synthetic construct; identical to SEQ ID NO: 11026
  source 1..120: mol_type = other DNA

SEQ ID NO: 38276 - DNA, 120 bp, synthetic construct
  source 1..120: mol_type = other DNA
atgtttgttgaaagtacctttttttttttgcaaagtgcttgttctttgcccattttccccccattttttgttctttttttggtgtgtgtgggggaattgttttggctaggtaagaattac

SEQ ID NO: 38277 - DNA, 120 bp, synthetic construct
  source 1..120: mol_type = other DNA
tttaggttgcaaattgttgttggaaaaggagacctggaccttaaaagaggaatcaggctggaaagcagaatgagatatgagaatcatctgtatatgagatgatgagggctgtaggagtgg

SEQ ID NO: 38278 - DNA, 120 bp, synthetic construct; identical to SEQ ID NO: 11027
  source 1..120: mol_type = other DNA

SEQ ID NO: 38279 - DNA, 120 bp, synthetic construct
  source 1..120: mol_type = other DNA
ctttttctattgattggaatagtttcagaaggaatggtaccagctcctctttgtacctctggtagaattcggctgtgaattcatctgctcctggacttcttttggttggtaggatattaa

SEQ ID NO: 38280 - DNA, 120 bp, synthetic construct
  source 1..120: mol_type = other DNA
tatttgcgtagaggtgtttatagtattctctgatggtagtttgtatttctgtgggatctgtggtgatatcccctttatcattttttattgcatctatttgattcttctctcttttcttct

SEQ ID NO: 38281 - DNA, 120 bp, synthetic construct
  source 1..120: mol_type = other DNA
tagttatttcttgccttctgctagcttttgaatgtgtttgctcttctctagttcttttaattgtgatgttagggtgtcaattttggatgtttcctgctttctcttgtgggcatttagtgc

SEQ ID NO: 38282 - DNA, 120 bp, synthetic construct
  source 1..120: mol_type = other DNA
gtagtcattcaggagcaggttgttcagtttccatgtagttatgcggttttgagtgagtttcttaatcctgagttctagtttgattgcactgtgatctgagagacagtttgttataatttc

SEQ ID NO: 38283 - DNA, 120 bp, synthetic construct; identical to SEQ ID NO: 11028
  source 1..120: mol_type = other DNA

SEQ ID NO: 38284 - DNA, 120 bp, synthetic construct
  source 1..120: mol_type = other DNA
cattatgtaatggccttctttgtctcttttgatctttgttggtttaacgtctgttttatcagagactaggattgcaacccctgcctttttttgttttccatttgcttggtagatcttcct

SEQ ID NO: 38285 - DNA, 120 bp, synthetic construct
  source 1..120: mol_type = other DNA
atttagcccatttacatttaaggttaatattgttatgtgtgaatttgatcctgtcattatgatgttagctggtgattttgctcgttagttgatgcagtttcttcctagcctcgatggtct

SEQ ID NO: 38286 - DNA, 120 bp, synthetic construct; identical to SEQ ID NO: 11029
  source 1..120: mol_type = other DNA

SEQ ID NO: 38287 - DNA, 120 bp, synthetic construct
  source 1..120: mol_type = other DNA
acaattatgtgtcctggagttgctcttctcgaggagtatctttgtggcattctctgtatttcctgaatttgaatgttggcctgccttgctaggttggggaagttctcctgtataatatcc

SEQ ID NO: 38288 - DNA, 120 bp, synthetic construct; identical to SEQ ID NO: 11030
  source 1..120: mol_type = other DNA

SEQ ID NO: 38289 - DNA, 120 bp, synthetic construct
  source 1..120: mol_type = other DNA
acttccttctttagctcggagaagtttgatcatctgaagccttcttctttcaaatcgtcaaagtcattctccatccagctttgttccgttgctagcgaggagctgcgttcctttggaggg

SEQ ID NO: 38290 - DNA, 120 bp, synthetic construct
  source 1..120: mol_type = other DNA
gtcgtttctgtttgttagttttccttctaacaggaccctcagctgcaggtctgttggagtttgctggaggttgactccagaccctgtttgcctgggtatcagcagtggaggctgcagaac

SEQ ID NO: 38291 - DNA, 120 bp, synthetic construct
  source 1..120: mol_type = other DNA
aggctactcaggggtcagggacccacttgaggaggcagtctgtccattctcagatctcaaacttcatgctgggagaaccactacgctcttcaaagctgtcagacagggacatttaagtct

SEQ ID NO: 38292 - DNA, 120 bp, synthetic construct; identical to SEQ ID NO: 11031
  source 1..120: mol_type = other DNA

SEQ ID NO: 38293 - DNA, 120 bp, synthetic construct
  source 1..120: mol_type = other DNA
ggctaggaaagggaattccgtgaccccctgtgcttcccaggtgaggtgatgcctcgccctgctttggctcacacttggttggctgcactcactttcctgcacccactgtctgacaagccc

SEQ ID NO: 38294 - DNA, 120 bp, synthetic construct
  source 1..120: mol_type = other DNA
ttcatctgtatgatgagaagtgaatccaatgacttttttagattgaaaaattttgaatcaaactcaactaaaatgaacaaaatatatgaaactacaataatgaagacgttatgatattgg

SEQ ID NO: 38295 - DNA, 120 bp, synthetic construct; identical to SEQ ID NO: 11032
  source 1..120: mol_type = other DNA

SEQ ID NO: 38296 - DNA, 120 bp, synthetic construct
  source 1..120: mol_type = other DNA
aacttctattccttgaaatatacttcttatggaagtcaaaacacaagctgcatctgaaataaaggttacattttgctcataggaaagttcttcaggtccttaaaaatcagaacctacttg

SEQ ID NO: 38297 - DNA, 120 bp, synthetic construct
  source 1..120: mol_type = other DNA
ttagcaactttcgcttcattttttaatctttaaaagagagagagagaaaaaaaaaggctggaattgatgaaaggacatatattgagagcagttattgcctgagtgcaaagaaacaaacca

SEQ ID NO: 38298 - DNA, 120 bp, synthetic construct
  source 1..120: mol_type = other DNA
acaaatacagaagttgatttttgttcattttattaaaatatatatttttaattagtcttgaaaacagtgaagcagtgtatactttgtatcttcaatttcagaaacagtaagtatgtaaca

SEQ ID NO: 38299 - DNA, 120 bp, synthetic construct; identical to SEQ ID NO: 11033
  source 1..120: mol_type = other DNA

SEQ ID NO: 38300 - DNA, 120 bp, synthetic construct
  source 1..120: mol_type = other DNA
ttgattttcaaataacattccattgtagggatataccccaatttatttttccatgcacttcttttttttttatatttgggttgtttgtagtttttggccattatgactgaagctgctatg

SEQ ID NO: 38301 - DNA, 120 bp, synthetic construct
  source 1..120: mol_type = other DNA
gattgtgccattttacattttcaccagtgatgtttaagtgttccattgcactacatcctcactgacccttgatattgtcagtcttttacattttagctattctagtgggtgtataattgt

SEQ ID NO: 38302 - DNA, 120 bp, synthetic construct
  source 1..120: mol_type = other DNA
ttacctgtaaaatttggtaatctggaacaactcacttatcctaaagcttttatataattgatatttcaaaataatgtaagatggtattacatgctttttagctctattgtaatctccagt

SEQ ID NO: 38303 - DNA, 120 bp, synthetic construct
  source 1..120: mol_type = other DNA
tggggaaaaatgtgttctaaagataatgaaaaagtactctagtgataatgatagccatcaatcattaagaactgactgtatactatatactacgccaaaggctttataaatataatttca

SEQ ID NO: 38304 - DNA, 120 bp, synthetic construct; identical to SEQ ID NO: 11034
  source 1..120: mol_type = other DNA

SEQ ID NO: 38305 - DNA, 120 bp, synthetic construct
  source 1..120: mol_type = other DNA
ttgccttataatataaaatttgaatgtttgttattagtgtgaaatgaaatcctttcaaatatatgccatcagaaggatgtgttacaaatatacagtattacaaacatttattttgtatgc

SEQ ID NO: 38306 - DNA, 120 bp, synthetic construct
  source 1..120: mol_type = other DNA
aactgtggggaatctgtatctttattgcagcagttgacctagatgagatgtcgttcacttttactgagctacagaaaaacatagaaatcaggtaaagtttcttgtataaatataagcctc

SEQ ID NO: 38307 - DNA, 120 bp, synthetic construct; identical to SEQ ID NO: 11035
  source 1..120: mol_type = other DNA

SEQ ID NO: 38308 - DNA, 120 bp, synthetic construct
  source 1..120: mol_type = other DNA
attgttttaactagaggatattataactaaatgctttttttcagattatatattgatttgaacatgctacaatacttgaaccagttaattacttaataggtgtttgttgttgagtttata

SEQ ID NO: 38309 - DNA, 120 bp, synthetic construct
  source 1..120: mol_type = other DNA
atttttaccaaataggtaattatgtttctccttgaacaaagacatctagaattaaacataattgatattttatttaaacgagatagattaaattgttgcatttttgaaatactttttttg

SEQ ID NO: 38310 - DNA, 120 bp, synthetic construct
  source 1..120: mol_type = other DNA
ctctcccttccttgttttcttcccttaagtttcccctagaaaaaaggctttgttgtaacaattcagttttcatggtaatctcaggacaggtattgccatatacctcaaaaaaactggaac

SEQ ID NO: 38311 - DNA, 120 bp, synthetic construct
  source 1..120: mol_type = other DNA
catttctactctttctttatttgctttttcacatagcttgtcatggctcccccattcctttctgtatcataggaactttaataaccttttggttcccctgctgattagctgaagctttta

SEQ ID NO: 38312 - DNA, 120 bp, synthetic construct; identical to SEQ ID NO: 11036
  source 1..120: mol_type = other DNA

SEQ ID NO: 38313 - DNA, 120 bp, synthetic construct
  source 1..120: mol_type = other DNA
aactgcttaaattatttaaatcaactttccttttccaaaaataattcaattctaaaatcattggtggggcaaataaagtatgcattttggtgtgtatctctgacaggagggtgccacagg

SEQ ID NO: 38314 - DNA, 120 bp, synthetic construct
  source 1..120: mol_type = other DNA
tgcacaagtgaggtgaggagggcagcctgctgtggggagtcagaacccttccacagtgaggaagtgtctatgctaaggggtggggtaagtccagaactgggagtcagttctgagaagaac

SEQ ID NO: 38315 - DNA, 120 bp, synthetic construct; identical to SEQ ID NO: 11037
  source 1..120: mol_type = other DNA

SEQ ID NO: 38316 - DNA, 120 bp, synthetic construct
  source 1..120: mol_type = other DNA
ctcaatgatgaatagatataagcataggtatatagataatagaggtgtaagttgaaggctaattatttttgcaaaaagtaattccttccaaaggatatagtagtgatttgatgtagagct

SEQ ID NO: 38317 - DNA, 120 bp, synthetic construct
  source 1..120: mol_type = other DNA
attctttcctttgtagtgtccataaattctttaacttactaaaagaaattgataccagtaccaaagttgataatgctatgtcaagactgttgaagaagtatgatgtattgtttgcactct

SEQ ID NO: 38318 - DNA, 120 bp, synthetic construct
  source 1..120: mol_type = other DNA
aattcttagacttgtcccttttaatgttagctcattaattcttagctttcttatttatccagtaatatgcattctgaatgcttcctggaaaattaaccgttttattatcctttcatgtct

SEQ ID NO: 38319 - DNA, 120 bp, synthetic construct
  source 1..120: mol_type = other DNA
tttggaacgagaaaacacttgcaatggatggtgtatgtgacctatactataaagtaatgatttgtactcccaatggtggcttagaggactttttccattacagttcgagtaggagcataa

SEQ ID NO: 38320 - DNA, 120 bp, synthetic construct; identical to SEQ ID NO: 11038
  source 1..120: mol_type = other DNA

SEQ ID NO: 38321 - DNA, 120 bp, synthetic construct
  source 1..120: mol_type = other DNA
cacaactgtggtggaggatgagaaaaattagagaaaaaactcaaaggcctagggcttttgaaggactgtcttttcttgcccctggttttaattgtaatatggtagcattggccatctttt

SEQ ID NO: 38322 - DNA, 120 bp, synthetic construct
  source 1..120: mol_type = other DNA
taattatagaatacttggaaaacacagaaaggcataaataaaatatgaatcgaccaaaatgtcaacagtggagagaatcacttttcatattttagaatgtttctttcctttgggtattgt

SEQ ID NO: 38323 - DNA, 120 bp, synthetic construct
  source 1..120: mol_type = other DNA
taaacttgtttacaacctttttaattcatatctggtagcttattttaatatgatcctaaatacaatgttgctttagagtttttttggtacaatattatttaggcccctgaaaaactggaa

SEQ ID NO: 38324 - DNA, 120 bp, synthetic construct; identical to SEQ ID NO: 11039
  source 1..120: mol_type = other DNA

SEQ ID NO: 38325 - DNA, 120 bp, synthetic construct
  source 1..120: mol_type = other DNA
ataatcatcagggtttttttttttctagatatagaatttggggactcattggtaggagtgatttggggtacagttctgattttttttcctgctatagtaatttcgactggatgcttccaa

SEQ ID NO: 38326 - DNA, 120 bp, synthetic construct
  source 1..120: mol_type = other DNA
tatagtggtgattttggtcagagaaaaaaccatagaaggcaatgtccgaatagggtttacaggaaaaatagaaattcaccaagcaaaatgagtgggaactgggagcgagcatcttagaga

SEQ ID NO: 38327 - DNA, 120 bp, synthetic construct; identical to SEQ ID NO: 11040
  source 1..120: mol_type = other DNA

SEQ ID NO: 38328 - DNA, 120 bp, synthetic construct
  source 1..120: mol_type = other DNA
tctatcttatttataccttttttttgaagactaattgagaggattaactgtaattatatattaaagtgatgtgagatgtcataaattgggaaaatctacttgaactttgttttataatgc

SEQ ID NO: 38329 - DNA, 120 bp, synthetic construct
  source 1..120: mol_type = other DNA
ggacatgtgaacttatatatttgacacaacccagcagttcgtaagtagttcacagaatgttatttttcacttaaaaaaaaagatttttatggaataatctcaaacatcttgatagttagg

SEQ ID NO: 38330 - DNA, 120 bp, synthetic construct
  source 1..120: mol_type = other DNA
gaagaactaataaggtggaattgattcaggacagcatatcaccaactctgagaaaaatgcaacaaatgcaaattcattgactaaatctttattgagggtctgttacaggcactttattaa

SEQ ID NO: 38331 - DNA, 120 bp, synthetic construct; identical to SEQ ID NO: 11041
  source 1..120: mol_type = other DNA

SEQ ID NO: 38332 - DNA, 120 bp, synthetic construct
  source 1..120: mol_type = other DNA
attccaacaagtgaatgtctctggaaagattatcaaggcaaagtgttaaattggcaaactaaagtcatccaaaccttcatttttctgctcacagtgttgataattaatcagaaaaaagag

SEQ ID NO: 38333 - DNA, 120 bp, synthetic construct
  source 1..120: mol_type = other DNA
atacttttttttcttaatttttttttttgcagcttctcatggtcaagaatgtatactattctgtgggctaaatatcatatcttagaattataagacatagaaacattaaatgaatagaga

SEQ ID NO: 38334 - DNA, 120 bp, synthetic construct
  source 1..120: mol_type = other DNA
acaaaaagaaacacccaaaagatatatctggaaaactttctttcagtgatacatttttcctgttttttttctgctttctatttgtttaataggatatctactgaaataaattctgcattg

SEQ ID NO: 38335 - DNA, 120 bp, synthetic construct; identical to SEQ ID NO: 11042
  source 1..120: mol_type = other DNA

SEQ ID NO: 38336 - DNA, 120 bp, synthetic construct
  source 1..120: mol_type = other DNA
aaataattcaaataaaataattttggtcacaaaagcacaaagaaaaattatctaaaatccacccagggataatcggcattaaaattacataattgggatgcagttaaggtatagaatttt

SEQ ID NO: 38337 - DNA, 120 bp, synthetic construct
  source 1..120: mol_type = other DNA
tgaaaaataaaaagcaagaaactaaagcatatcatcagagaaaactactttcactaaaggaagacagaaaggaaagaaagaaggaagagaagaccacaaaacaaccagaaaacaaataac

SEQ ID NO: 38338 - DNA, 120 bp, synthetic construct
  source 1..120: mol_type = other DNA
ttcctacaagaaacacactttgcctataaagacacataccgactgaaaataaagggatggaaaaatatattccatgcccacagaaaccaaaataagagcaggggtcactatacttatatc

SEQ ID NO: 38339 - DNA, 120 bp, synthetic construct
  source 1..120: mol_type = other DNA
gcacccagatatataaagcaaatattattagagctaaagagagacataggccccaatacaatagaaatagctggagacttcaacaccccactttcagcattggacagatcttccagacag

SEQ ID NO: 38340 - DNA, 120 bp, synthetic construct; identical to SEQ ID NO: 11043
  source 1..120: mol_type = other DNA

SEQ ID NO: 38341 - DNA, 120 bp, synthetic construct
  source 1..120: mol_type = other DNA
gggatacagtaaaagcagtacagagggaagtttatagctgtaagtgcctacatcccaaaagaggaaaacatctttttttaaaaaaacttttaggttcaggggtacatgtgatggtttgtt

SEQ ID NO: 38342 - DNA, 120 bp, synthetic construct
  source 1..120: mol_type = other DNA
aagtagaccccagtgcctgttgtttccatctttgtgttcttcagttttcatcatttagctcccacttataagtgaggccatgcagtatttagttttttattcctgcattagtttgctaag

SEQ ID NO: 38343 - DNA, 120 bp, synthetic construct; identical to SEQ ID NO: 11044
  source 1..120: mol_type = other DNA

SEQ ID NO: 38344 - DNA, 120 bp, synthetic construct
  source 1..120: mol_type = other DNA
tttgcaacctcaccagtatctgttattttttgactttatagtaacagctattctgactggtgtgagatgatatctcattgtggttttgatttgcatttctctaatgatcagtgatatgga

SEQ ID NO: 38345 - DNA, 120 bp, synthetic construct
  source 1..120: mol_type = other DNA
ccttataaatgctggatattaaacctttgtcagatgcatagtttgcaaaatttttccccattctgtaggttgttcatttactctgttgattgtttcttttgctgtgcagaagctcttgag

SEQ ID NO: 38346 - DNA, 120 bp, synthetic construct
  source 1..120: mol_type = other DNA
cactctgtcacccaggctggagtgcagtggcacaatctcggctcactgcaacctctgcctcccgggtttaagtgattatcttgcctcagcctcctgagtaactgggactacaggtgtgca

SEQ ID NO: 38347 - DNA, 120 bp, synthetic construct
  source 1..120: mol_type = other DNA
gattacaggaatgagccaccacacctggcctggccatcttcaatccatcttgagttgatttttgtatatggtgtaaggaatgggtccagcttcaatcttctgcatatggctagccactta

SEQ ID NO: 38348 - DNA, 120 bp, synthetic construct; identical to SEQ ID NO: 11045
  source 1..120: mol_type = other DNA

SEQ ID NO: 38349 - DNA, 120 bp, synthetic construct
  source 1..120: mol_type = other DNA
ttgaatctgtaatttttttggggcagtatggccattttaatgatatttattcttcctatccatgagcatgggatgtttttccatgtgtttgtgtcatctctgattgctttgagcagtgtt

SEQ ID NO: 38350 - DNA, 120 bp, synthetic construct
  source 1..120: mol_type = other DNA
ggtgtgtagaactactagtgatttttatacattgattttgtatcctgaaactttgctgaagttgttgatcagctgaaggagctttttggctctaagactacagggttttctagatatagc

SEQ ID NO: 38351 - DNA, 120 bp, synthetic construct; identical to SEQ ID NO: 11046
  source 1..120: mol_type = other DNA

SEQ ID NO: 38352 - DNA, 120 bp, synthetic construct
  source 1..120: mol_type = other DNA
aagatcaatgaaacaaagtgtttttttaaaaagttaaacaaaattgacaagcctttagctagattaactaaggaaaaaagagagaagatacaaataagatcagaaatgaaaaaggagaca

SEQ ID NO: 38353 - DNA, 120 bp, synthetic construct
  source 1..120: mol_type = other DNA
gattgaaccaggaagaaatccaaaacctgaacagaccaataacaagtaatgagattgaagccataataaagtctcctagtaaagaaaagcctgggacctgatggcttcactgctgaattg

SEQ ID NO: 38354 - DNA, 120 bp, synthetic construct
  source 1..120: mol_type = other DNA
gataaagacccattaaaaaaagaaaactataggccagtatttctgaggaatattgatacagaaatcttcaacaaaacactagcaaactgaattcaataatacattagatagatcattcat

SEQ ID NO: 38355 - DNA, 120 bp, synthetic construct; identical to SEQ ID NO: 11047
  source 1..120: mol_type = other DNA

SEQ ID NO: 38356 - DNA, 120 bp, synthetic construct
  source 1..120: mol_type = other DNA
gatataaagggaatccagattggaaagaaagaagtcaagttatccttgtttgcagctgatacaatcttatatttggaagaacctaaagactccacaagaaaactattagaactaataaac

SEQ ID NO: 38357 - DNA, 120 bp, synthetic construct
  source 1..120: mol_type = other DNA
cataaaataaaatgcctaggaattaaccacagaagtgaaagatctctatgatgaaaaccatagaatactgatgaaagaaattgaagagcacaccaaaaaaatggaaaaaaattttatgtt

SEQ ID NO: 38358 - DNA, 120 bp, synthetic construct
  source 1..120: mol_type = other DNA
tcctcaaatttatatggaactacaaaagacccagaatagcgaaaactatcctaagcagaaagacgacgttgcttgacttcaaattatactacagagctatagtaaccaaaacagcatggt

SEQ ID NO: 38359 - DNA, 120 bp, synthetic construct
  source 1..120: mol_type = other DNA
agtctcttcaataaatggtgctgggaaaactggatatccatatgcagaagaatgaaactagacccctatctgtcaccatatacaaaaatcaaatcaaaatgattaaggacttaaatctaa

SEQ ID NO: 38360 - DNA, 120 bp, synthetic construct; identical to SEQ ID NO: 11048
  source 1..120: mol_type = other DNA

SEQ ID NO: 38361 - DNA, 120 bp, synthetic construct
  source 1..120: mol_type = other DNA
gcatatgaaaaggtgctcaacatcagtgatcatcagagaaatgcaaatcaaaactacaatgaggtatttatctcactgcagttaaaatggctgatattcaaaagacaggcaataacaaat

SEQ ID NO: 38362 - DNA, 120 bp, synthetic construct
  source 1..120: mol_type = other DNA
tattatccaacaatcccactgccaggtatatacccaacgaaaggaagtcagtatatcaaagaggtatctgcactcctatgtttgttgcagcactgtttacaatagctaagatttgaaagc

SEQ ID NO: 38363 - DNA, 120 bp, synthetic construct; identical to SEQ ID NO: 11049
  source 1..120: mol_type = other DNA

SEQ ID NO: 38364 - DNA, 120 bp, synthetic construct
  source 1..120: mol_type = other DNA
ataccttaattgtacattttaaaataacttaaagagtgtaattggattgtttgtaactcaaaggataaatgcttgaggagatggataccccattctgcataatgtgcttatttcacagtg

SEQ ID NO: 38365 - DNA, 120 bp, synthetic construct
  source 1..120: mol_type = other DNA
taaaaagatgggtagttgagtgcattcacgaatataattttctaaaactaggttcatattacagtgctacctttaaaatataaaaattaatttcactgaaattttatagaagagagaaat

SEQ ID NO: 38366 - DNA, 120 bp, synthetic construct
  source 1..120: mol_type = other DNA
agtttgtgtttttatttaaagcaatatactttaatctggtttgaagaaggttactatcttcactcttcctggtgcctccccctctccattttcagattagtccattttattgttatgaca

SEQ ID NO: 38367 - DNA, 120 bp, synthetic construct; identical to SEQ ID NO: 11050
  source 1..120: mol_type = other DNA

SEQ ID NO: 38368 - DNA, 120 bp, synthetic construct
  source 1..120: mol_type = other DNA
gcgtaattccgctcctcatttacttcctgaagaattttttttttaatttgaggtttaataccttaaacaggataacatttcttgattttgttattctgtattagctttttttttttgaac

SEQ ID NO: 38369 - DNA, 120 bp, synthetic construct
  source 1..120: mol_type = other DNA
cttatgttggattgcttttattctccctatttattgtcttctctcatattattctgaatttttaaatctttttcttacatattggctgtttttatctcaagcattttttccattttgagc

SEQ ID NO: 38370 - DNA, 120 bp, synthetic construct
  source 1..120: mol_type = other DNA
atttataatagacgaattattcaataatatgtatttggatcactaaacaaatatattgagaatagcaaatggattttaaccctcctgctaacccagatcaattgctagtggcttcccggc

SEQ ID NO: 38371 - DNA, 120 bp, synthetic construct; identical to SEQ ID NO: 11051
  source 1..120: mol_type = other DNA

SEQ ID NO: 38372 - DNA, 120 bp, synthetic construct
  source 1..120: mol_type = other DNA
atgttccctgctcagctagaacttacagtcaagtaagggagatagacattaaatgaacaatcacagaaatacttaactacatttgcgataaggaatgtaaagggaaagtgtaatccccca

SEQ ID NO: 38373 - DNA, 120 bp, synthetic construct
  source 1..120: mol_type = other DNA
aatcagcctcagctggttaagttcttagtgcaagcactcatagggcattttcttcttttagattatctttcagattgggttctctgtctgatttttttccccttcttatgttgtgattct

SEQ ID NO: 38374 - DNA, 120 bp, synthetic construct
  source 1..120: mol_type = other DNA
gatgttctgttttctctgatttaatgtgagtgaatatcccttcactctgcacttaatctgtgacttgtttatgttccccaaagagctatggtatgggagcaggcatttttattatatctg

SEQ ID NO: 38375 - DNA, 120 bp, synthetic construct
  source 1..120: mol_type = other DNA
gaactttataacagaacacttctagtggcagttttatcttttttctatagcaggattgttttgggattcaaattgtccccagttcaacacagtatgcagagtctctgtgttgtcagaaaa

SEQ ID NO: 38376 - DNA, 120 bp, synthetic construct; identical to SEQ ID NO: 11052
  source 1..120: mol_type = other DNA

SEQ ID NO: 38377 - DNA, 120 bp, synthetic construct
  source 1..120: mol_type = other DNA
aacctataaagatgcaacgttatctgttttctcacaaagtttctgcacatccagtgtttgctgagattattactggtttagcagtcagatactcagaaaatagaaagtgaatcaaattga

SEQ ID NO: 38378 - DNA, 120 bp, synthetic construct
  source 1..120: mol_type = other DNA
atgcatttattttctcacagccatctagttgtatatatattctaataactttaaagattttatggtgaacaattattttatagatgactttaaatttatatactaattttgttatctctt

SEQ ID NO: 38379 - DNA, 120 bp, synthetic construct; identical to SEQ ID NO: 11053
  source 1..120: mol_type = other DNA

SEQ ID NO: 38380 - DNA, 120 bp, synthetic construct
  source 1..120: mol_type = other DNA
tttaaaaagcaaaatttatagtgattttagacataaagaattaattataacagaaatacttaaatgtaaaattctcagagtagacttaacacttgatttataattccataactttacata

SEQ ID NO: 38381 - DNA, 120 bp, synthetic construct
  source 1..120: mol_type = other DNA
ctaccctgcgattttctctcatacaaagatctgaatctctaactttctttaaaaatgtacatttttttttcaggggaagtattacaaatggaagatgatctggtgatttcatttcagtta

SEQ ID NO: 38382 - DNA, 120 bp, synthetic construct
  source 1..120: mol_type = other DNA
gtctagtgggtaccaaacatggttctaaggctgacaggatgataaaaaataaatcagacatggactttgcccataagtagtgtaagttatagaaggaaagataagacatggaaacaaatg

SEQ ID NO: 38383 - DNA, 120 bp, synthetic construct; identical to SEQ ID NO: 11054
  source 1..120: mol_type = other DNA

SEQ ID NO: 38384 - DNA, 120 bp, synthetic construct
  source 1..120: mol_type = other DNA
gtgatgagatgggaagtatatttaaataaaaataacttgctaatataattagatagcattaaggaagtatgagtaaggtatattccttttagcctagaattgcttcctttcatggcttca

SEQ ID NO: 38385 - DNA, 120 bp, synthetic construct
  source 1..120: mol_type = other DNA
taacatggaagtttcaaagtgttgttgaaatggatggaaggatgaaggctcattaaactttgtgaacaagaatttagtggaaaaattaagtatggagcagaattttgaagatgtgttgaa

SEQ ID NO: 38386 - DNA, 120 bp, synthetic construct
  source 1..120: mol_type = other DNA
tttcctttatataccctttccccacttttttcaatgttataactttaataagttgatgttgcaagttactttaggttgacaatctttgttcttttggataattcaaatgtacatgtgaat

SEQ ID NO: 38387 - DNA, 120 bp, synthetic construct; identical to SEQ ID NO: 11055
  source 1..120: mol_type = other DNA

SEQ ID NO: 38388 - DNA, 120 bp, synthetic construct
  source 1..120: mol_type = other DNA
acaaatcaataaatagtgactccttaatattactgaatatctagaaagtgctcagattttcttgtaaaaataattaaaaaatttttttacagtttgaatgagaatctaaataagatttat

SEQ ID NO: 38389 - DNA, 120 bp, synthetic construct
  source 1..120: mol_type = other DNA
tttttaaataatcagattgtcttgagttttccacagtgtggtttttgctgatcatattctgtggtatagtttaacatgttcttctgtcctctcaatttcttgtaagttgttgattggatc

SEQ ID NO: 38390 - DNA, 120 bp, synthetic construct
  source 1..120: mol_type = other DNA
tgcaaactctgcctcccgggttcaagcaattctcctgcttcagcctcccgagtagctgggactatgggcatgcaccaccacacctggctaatttttgtatttttagtagagacggggttt

SEQ ID NO: 38391 - DNA, 120 bp, synthetic construct
  source 1..120: mol_type = other DNA
agctgaacctgtatttagtttggattgggaatgctgaaaataatccaggagattttttttttaaatcacagtttattatcatattattatatttactataatatattttatacctatctt

SEQ ID NO: 38392 - DNA, 120 bp, synthetic construct; identical to SEQ ID NO: 11056
  source 1..120: mol_type = other DNA

SEQ ID NO: 38393 - DNA, 120 bp, synthetic construct
  source 1..120: mol_type = other DNA
atagttagaatacttcattattttatatgatggatgtacaattgttcttatctaatttaccacttttacagaaacagctgttatacccattaatggttcacctcgaacacccaggcgagg

SEQ ID NO: 38394 - DNA, 120 bp, synthetic construct
  source 1..120: mol_type = other DNA
gtaatatagatgaggtaatttaacttcatgatttctttaaaacagttaaagtagatttagatgtaagttctccctaacaatatttacttcttttgttatgagcatgttttttttgtaatt

SEQ ID NO: 38395 - DNA, 120 bp, synthetic construct
  source 1..120: mol_type = other DNA
agctccctcactctggaatcactgaaaagtatataatcaagacaatagttttcaaatgtagtttttttttttttttattcctctgaggttactgatacccctaatgttttaaaataccct

SEQ ID NO: 38396 - DNA, 120 bp, synthetic construct; identical to SEQ ID NO: 11057
  source 1..120: mol_type = other DNA

SEQ ID NO: 38397 - DNA, 120 bp, synthetic construct
  source 1..120: mol_type = other DNA
ccctgcttagaaaactctagtgctctagtgttttagtttagtgataagtgataccaacattaaatttctgtttggccttctataattactctctttctaaatattacagcacataatgac

SEQ ID NO: 38398 - DNA, 120 bp, synthetic construct
  source 1..120: mol_type = other DNA
cagggactgatagcttattatttacagcgtctacattagactttgggatatctggtactattgcttctttcctttttaccatacagtttttctcatagtttgttttattgtccacaatca

SEQ ID NO: 38399 - DNA, 120 bp, synthetic construct
  source 1..120: mol_type = other DNA
atatcatagtttttgcactatggcttactaatttcaacaaatatacagttgactcttgaacaacaggtttgaattgcatgggtccgtttatacacagatatatttaattacatatattag

SEQ ID NO: 38400 - DNA, 120 bp, synthetic construct
  source 1..120: mol_type = other DNA
gtctattttatcatttactataccataaaatacatacaaaactgtagctgcagatgcctgctgtttcaggcggacgatttttgttaacagatgacataaacttactgtaaatgtattttg

SEQ ID NO: 38401 - DNA, 120 bp, synthetic construct; identical to SEQ ID NO: 11058
  source 1..120: mol_type = other DNA

SEQ ID NO: 38402 - DNA, 120 bp, synthetic construct
  source 1..120: mol_type = other DNA
ttactgcatgggggattgacacctctaacttaccctgcattgttcaagagtcaagagattagattttgttttaaattttaatgatcatgttgtaacttcatctttttcaggtgaaaaatg

SEQ ID NO: 38403 - DNA, 120 bp, synthetic construct
  source 1..120: mol_type = other DNA
aggataattgtctaactttcttagatcaatttactgtgtatcacattttttttttgcccaagaagaatctagccaagtagaattgtggtgaaactaacttttgtatagtaacaaaaagct

SEQ ID NO: 38404 - DNA, 120 bp, synthetic construct
  source 1..120: mol_type = other DNA
ctaaattttaatagctaaatataaaccattaaatttgctttggtaagcctcattaagcgtaggaaccatgattaatgccatcaacattattggcattactacattgtggaacatctcttt

SEQ ID NO: 38405 - DNA, 120 bp, synthetic construct; identical to SEQ ID NO: 11059
  source 1..120: mol_type = other DNA

SEQ ID NO: 38406 - DNA, 120 bp, synthetic construct
  source 1..120: mol_type = other DNA
aatgcttaatatatgtcaggcacgtgctagatactatggatacagagatttcactctcagtcactatccttaaagtgctagtgggagaggctgacaaagaaatagagcattacaggagtc

SEQ ID NO: 38407 - DNA, 120 bp, synthetic construct
  source 1..120: mol_type = other DNA
ctgagtaagcattacagatatagcatttccaagggttggacattgtagattcaaaggtgcagtgatgtatgatagtatggtctgatcagtgaactctaagtaattcattaaggttgggat

SEQ ID NO: 38408 - DNA, 120 bp, synthetic construct
  source 1..120: mol_type = other DNA
ttggtaccaaaaactaggctgttcataactttaaaatctgttgtagcaatctttttttctcctttaaaaggattatagttttaatataaatcttaagagtaattttactttttctccaat

SEQ ID NO: 38409 - DNA, 120 bp, synthetic construct; identical to SEQ ID NO: 11060
  source 1..120: mol_type = other DNA

SEQ ID NO: 38410 - DNA, 120 bp, synthetic construct
  source 1..120: mol_type = other DNA
tgtgttaattgaactgataaattgagctaattgtcttgcccaagatacttaactgaagggtactggagtgaaccaaagggtttagaaaacattggtagaatatgtaatcaagaggatttg

SEQ ID NO: 38411 - DNA, 120 bp, synthetic construct
  source 1..120: mol_type = other DNA
aggtcaggagttcaagaccagcttggccaacatggcgaaaccccgtctctactaaaaatacaaaaattagccgggcatggtagcaggtacctataatcccagctactcgggaggctgagg

SEQ ID NO: 38412 - DNA, 120 bp, synthetic construct
  source 1..120: mol_type = other DNA
aaagtaaagcatatatgggatgtttggaaaatcttggcagttaaacagttattataatacctatttttatcttaggtactgttttgtagcattggctatctttgtctacataaaattcta

SEQ ID NO: 38413 - DNA, 120 bp, synthetic construct; identical to SEQ ID NO: 11061
  source 1..120: mol_type = other DNA

SEQ ID NO: 38414 - DNA, 120 bp, synthetic construct
  source 1..120: mol_type = other DNA
cagactgattctatagacaggtattgcacatggtatatttgattgatttgctttagatataggttgatactgatataggtagattatatagtctttagcttagtgacctttagatatcat

SEQ ID NO: 38415 - DNA, 120 bp, synthetic construct
  source 1..120: mol_type = other DNA
ttgcagttaactgaatataattttttaaaatgtgcaccaaaagataatggctaaagtaattagtttcttcaaatagtggtctctaccttatttctatcctttcatatactattgcctgcc

SEQ ID NO: 38416 - DNA, 120 bp, synthetic construct
  source 1..120: mol_type = other DNA
tttgtgtctttagcatgaactcttttaatatgaaactgaaaatatgcgtaatttagaagttaaacacagtaaaatgttttaaattttatttaagtggaaataaagtttttagaaggaata

SEQ ID NO: 38417 - DNA, 120 bp, synthetic construct; identical to SEQ ID NO: 11062
  source 1..120: mol_type = other DNA

SEQ ID NO: 38418 - DNA, 120 bp, synthetic construct
  source 1..120: mol_type = other DNA
caccacgaaaaagtaaccttgatgaagaggtgaatgtaattcctccacacactccagttaggtatgaattttcctacttttaattatattataattttgttattcatggctttatagtgt

SEQ ID NO: 38419 - DNA, 120 bp, synthetic construct
  source 1..120: mol_type = other DNA
tcacctgaggttaggagtttgagaccggcctggccaacatggtgaaaccccgtctctactagaaatacaaaaattagctgggggtggtggtgtgtgcctgtaatcccagctgctcgggag

SEQ ID NO: 38420 - DNA, 120 bp, synthetic construct
  source 1..120: mol_type = other DNA
atataatctttgtgtgctgggcattttactggttgctgaagatatggttattggacctagttttgtctgttcttaaagaacataacctaaaataggaatgtgttccatttcagtaaataa

SEQ ID NO: 38421 - DNA, 120 bp, synthetic construct
  source 1..120: mol_type = other DNA
actcatttcccacatcaaaatctgttatcaaggcttgttgaataatctacctccaaaatatttcctgagtgcatctacttttctccatttctgctctcacaactcttgtccaagacattg

SEQ ID NO: 38422 - DNA, 120 bp, synthetic construct; identical to SEQ ID NO: 11063
  source 1..120: mol_type = other DNA

SEQ ID NO: 38423 - DNA, 120 bp, synthetic construct
  source 1..120: mol_type = other DNA
tgtgttagccacactttggccttctctgtttcttgggctttccaagttttttgaaaaccctcgtacttgatattccctcttcttgaaatttcctccttttctttccatggattaccaact

SEQ ID NO: 38424 - DNA, 120 bp, synthetic construct
  source 1..120: mol_type = other DNA
agattcatttgtgtttgcttgcttttactaatacccaaaatagccttaaaattccatatcacagagaccataacctttttgttcactgtctaataattagggcctgttataaaacttggt

SEQ ID NO: 38425 - DNA, 120 bp, synthetic construct; identical to SEQ ID NO: 11064
  source 1..120: mol_type = other DNA

SEQ ID NO: 38426 - DNA, 120 bp, synthetic construct
  source 1..120: mol_type = other DNA
acaagcaatcagttctgcagcagtcaccagctgggtgtcctctaatttacttctgacactgcttacctggagatagtgtcagatcccacaggttgagggctcagtccccaaaactggccc

SEQ ID NO: 38427 - DNA, 120 bp, synthetic construct
  source 1..120: mol_type = other DNA
aaggaaacacttctgtttactggtttattatagatgatattacaaaggatgcagatgtaaagatgcataggatgaggtatgggggatgggatgggaagcttctatgccctccctggccag

SEQ ID NO: 38428 - DNA, 120 bp, synthetic construct
  source 1..120: mol_type = other DNA
tatcaacctaaccttcagcttccctccccttcctagaggttgggggctggggctgaaggttccaaccctctaactctgcctcgggctttctagtgaccagcccccatccagatgcttcct

SEQ ID NO: 38429 - DNA, 120 bp, synthetic construct; identical to SEQ ID NO: 11065
  source 1..120: mol_type = other DNA

SEQ ID NO: 38430 - DNA, 120 bp, synthetic construct
  source 1..120: mol_type = other DNA
agacataatttttgcaagttcacatggtaatagtcagtggggggatagactgaggagaataagaaaaagtgagaaatagacctgtcagtctgtctcagtggttcttaaccatgtgtgcaa

SEQ ID NO: 38431 - DNA, 120 bp, synthetic construct
  source 1..120: mol_type = other DNA
gccttactaccacagacatagtgtataaaaatctctgggcttgtctgttgtagcagtttacttgagagtttttaaagatctgaaccaacgatagtggtgggaatgaaggaacaataacag

SEQ ID NO: 38432 - DNA, 120 bp, synthetic construct
  source 1..120: mol_type = other DNA
acccataaaaaaaaatgagattgcttgaagggagggtgcataatggcaagagtgggtggctaagggctgaagcctaaaggatgctagcattaaggactagacagaaattgttaggttcta

SEQ ID NO: 38433 - DNA, 120 bp, synthetic construct
  source 1..120: mol_type = other DNA
tgtcagatcagcagtggaattagattctcataggtgcatgaaccttattgtgaactgcgcatgtgagggatctagattgtatgctccttatgagaatttaatggctgatgatttgaggta

SEQ ID NO: 38434 - DNA, 120 bp, synthetic construct; identical to SEQ ID NO: 11066
  source 1..120: mol_type = other DNA

SEQ ID NO: 38435 - DNA, 120 bp, synthetic construct
  source 1..120: mol_type = other DNA
aaaagtcttttgtttttatcagttggtcatttgtggctttaatcactgtagcttaaatatgattagtggacacagaagcatatagaagctgtgttgcaatatatttgaaagacgaggctg

SEQ ID NO: 38436 - DNA, 120 bp, synthetic construct
  source 1..120: mol_type = other DNA
aaaaattagcccagctgggcacctgtaatcccagataatcaggaggctgaggcaggagaatcacttgaacccgggaagtggaggttgcagtgagccaagattgcgccactgcactccagc

SEQ ID NO: 38437 - DNA, 120 bp, synthetic construct; identical to SEQ ID NO: 11067
  source 1..120: mol_type = other DNA

SEQ ID NO: 38438 - DNA, 120 bp, synthetic construct
  source 1..120: mol_type = other DNA
tctctgtaaagaaaaatcatctgattctttacttgagttgctaagtatcttattgtctttaatttgaaaatgtttaatatttggttgtaataatgttttcttaaaacaataccattttgt

SEQ ID NO: 38439 - DNA, 120 bp, synthetic construct
  source 1..120: mol_type = other DNA
cttaaagatttaagtaaaatgtaatttcttataaaccacagtcttatttgagggaatgtagagacaagtgggaggcagtgtatttgaagatacatttaacttgggagatggaaaacattt

SEQ ID NO: 38440 - DNA, 120 bp, synthetic construct
  source 1..120: mol_type = other DNA
cttcagaaaatctgatttcctattttaacgtaagccatatatgaaacattatttattgtaatatcttggcaaagaaacttgaaattaaaagttaaagtactgagttctttttaaaatact

SEQ ID NO: 38441 - DNA, 120 bp, synthetic construct; identical to SEQ ID NO: 11068
  source 1..120: mol_type = other DNA

SEQ ID NO: 38442 - DNA, 120 bp, synthetic construct
  source 1..120: mol_type = other DNA
attccaggttgacatttactttttagactcttataagtttgaagataatacattacctggatcccatttttgctaattaagaagtcttatgccactcaatctaactgttgttcctttgta

SEQ ID NO: 38443 - DNA, 120 bp, synthetic construct
  source 1..120: mol_type = other DNA
tatttacaattcttacctggccctgttagcattatagtttgcaactcctgatagacaataagtttaatatctgaaggcatctgataccctctctcccctaaagacaaggagaaagaaaga

SEQ ID NO: 38444 - DNA, 120 bp, synthetic construct
  source 1..120: mol_type = other DNA
cttattaaaatttggcttatttcagcaactgtgctttttgtacttgttaacaattcattcattgccataacctgcctgtgattttgtcataatctgttgtcatctcttgctatgttcccc

SEQ ID NO: 38445 - DNA, 120 bp, synthetic construct
  source 1..120: mol_type = other DNA
atatgccaaaacatatgtaccccaattacctaaaccttttagcaagggctaatgaaagaatttaaaagaatgataagccctttcttctcatatcattttgaatacttcctccaatatttg

SEQ ID NO: 38446 - DNA, 120 bp, synthetic construct; identical to SEQ ID NO: 11069
  source 1..120: mol_type = other DNA

SEQ ID NO: 38447 - DNA, 120 bp, synthetic construct
  source 1..120: mol_type = other DNA
ccaatccaccactgaagggcacctaggttgattccatgtctttgctattgtgaatagcataccagtgaacatatgagtgcatgtgaaagacattttctagagctcaatttaaagcttaac

SEQ ID NO: 38448 - DNA, 120 bp, synthetic construct
  source 1..120: mol_type = other DNA
catttttaaaattaatgccaccttccctccatgtaaaatcttagaagctatgaacattttaatggacattttggcaacaattcttttatgacaggaaatgcttgtttgttatatgtttct

SEQ ID NO: 38449 - DNA, 120 bp, synthetic construct; identical to SEQ ID NO: 11070
  source 1..120: mol_type = other DNA

SEQ ID NO: 38450 - DNA, 120 bp, synthetic construct
  source 1..120: mol_type = other DNA
tcacttcagttttccaaagtgccgggattacagtcatgagccactgtgcctggccataatcttaattttagaaactttatttttgaatgtatatattgaatgtgttttatgtataaagga

SEQ ID NO: 38451 - DNA, 120 bp, synthetic construct
  source 1..120: mol_type = other DNA
gttttaattattaaagttgaatagccccactccaaatgatacatgtattggaacttcttttgcaacaatttccctatcttgtatttctgaaaatgtaatcaaatgatttagctaattcat

SEQ ID NO: 38452 - DNA, 120 bp, synthetic construct
  source 1..120: mol_type = other DNA
caggctggtcaacatggcaaaaccccatctctactaaagagacaaaaattagtgaggcgtggtgcgcttgcctataatcccagctacttgggatgctgaggcaggagaatcacttgaact

SEQ ID NO: 38453 - DNA, 120 bp, synthetic construct; identical to SEQ ID NO: 11071
  source 1..120: mol_type = other DNA

SEQ ID NO: 38454 - DNA, 120 bp, synthetic construct
  source 1..120: mol_type = other DNA
ttgctcttctctagcctagtggcagaaaatttagataatagggttttttagttgtactgtagtattttttgctcattaacatccagtgaaatgatattgtctgcttatgttcagtagttg

SEQ ID NO: 38455 - DNA, 120 bp, synthetic construct
  source 1..120: mol_type = other DNA
tttacctcctaaagaactgcacagtgaatccaaaagaaagtatactgaaaagagtgaaggatataggatacatctttaaagagaaatttgctaaagctgtgggacagggttgtgtcgaaa

SEQ ID NO: 38456 - DNA, 120 bp, synthetic construct
  source 1..120: mol_type = other DNA
actgtcagatactatatccctgctgcctgtgtatgctgctatttatgggtaactttatggaaaactacctcccaccccattataaaaactatgtaataaaggaacacatagccattgtag

SEQ ID NO: 38457 - DNA, 120 bp, synthetic construct; identical to SEQ ID NO: 11072
  source 1..120: mol_type = other DNA

SEQ ID NO: 38458 - DNA, 120 bp, synthetic construct
  source 1..120: mol_type = other DNA
tgtacacatttatttcagtgtagtgaggttatattttgatgccatcagtgttttaaacattgatatttaatggttctttttgattctacagccatgcaccacttaacagggatatgttct

SEQ ID NO: 38459 - DNA, 120 bp, synthetic construct
  source 1..120: mol_type = other DNA
tacaggcctctacagcatgtgtactgaatactgtaggtaatggtaacataatgtgttaccatttgtgtatctaaatatatccaaacatagaaaaggtaaagatatagtacaaaagataaa

SEQ ID NO: 38460 - DNA, 120 bp, synthetic construct
  source 1..120: mol_type = other DNA
catgactgtacactatcgtagactttataaatactacacttaggctaaactaatttcataaacattttttctttcttcagtagtaaattaaccatagctcactgtaacttttttacttta

SEQ ID NO: 38461 - DNA, 120 bp, synthetic construct; identical to SEQ ID NO: 11073
  source 1..120: mol_type = other DNA

SEQ ID NO: 38462 - DNA, 120 bp, synthetic construct
  source 1..120: mol_type = other DNA
tttttttttttacaagtagaaggaggatgctctaaactaataaaaagtatagtataataaatacataaaccagtaacatgttcattattaagtattatgtactgtacataattgtatgta

SEQ ID NO: 38463 - DNA, 120 bp, synthetic construct
  source 1..120: mol_type = other DNA
ttataatcttatgggactactgttagatatgcagtcagttattgaccaaaaacgttgttatgcggtgcatgattatatatgagatttttgctcttagtttggaaggaaataatatggtgt

SEQ ID NO: 38464 - DNA, 120 bp, synthetic construct
  source 1..120: mol_type = other DNA
ttatggacaaagactgtcctcttaatcctggacagctatcttgaaaatacatgtcctaggtcatgagaaatgttatataaggtacataaagtgcttaaaatagtactgggcacataacct

SEQ ID NO: 38465 - DNA, 120 bp, synthetic construct; identical to SEQ ID NO: 11074
  source 1..120: mol_type = other DNA

SEQ ID NO: 38466 - DNA, 120 bp, synthetic construct
  source 1..120: mol_type = other DNA
gtgattttctaaaatagcaggctcttatttttctttttgtttgtttgtagcgatacaaacttggagttcgcttgtattaccgagtaatggaatccatgcttaaatcagtaagttaaaaac

SEQ ID NO: 38467 - DNA, 120 bp, synthetic construct
  source 1..120: mol_type = other DNA
accctgtctctactaaaagtacaaaaattagctgggcgtggtggtgtagacctgtagtcccagctacttggcaggctgaggcaggagaatcccttgaaccagggaggtggaggttgcagt

SEQ ID NO: 38468 - DNA, 120 bp, synthetic construct
  source 1..120: mol_type = other DNA
attatccattcaaaattttaggtaaattttttacttttagtaaaaaatttttttctttttatagaagtaagtattttataatctttttttttttcctttagcaaacttctgaatgacaac

SEQ ID NO: 38469 - DNA, 120 bp, synthetic construct; identical to SEQ ID NO: 11075
  source 1..120: mol_type = other DNA

SEQ ID NO: 38470 - DNA, 120 bp, synthetic construct
  source 1..120: mol_type = other DNA
aaggagtattcaagagtggcctctactgatatggaagcactgctgtaacctccatggttatgaaactaaagattgaagctagaatccactggataaacagaacaaaggccaattacaatg

SEQ ID NO: 38471 - DNA, 120 bp, synthetic construct
  source 1..120: mol_type = other DNA
cttttagtttccttattagtaaacagataaggaaaactgtgaatcctcatttataaccaagaaatgcatattttaatgagataccattttgtaactaatgaaattagcagaatcttgaag

SEQ ID NO: 38472 - DNA, 120 bp, synthetic construct
  source 1..120: mol_type = other DNA
atcagctataagtcctttctctaggaaaaacacagatttgcttacactcaaaattggaaggctatttcctatgagtccgtagactccaaaataaaaaattctgctctaaataaaaatggt

SEQ ID NO: 38473 - DNA, 120 bp, synthetic construct
  source 1..120: mol_type = other DNA
cttgattctggaacagatttgtctttcccatggattctgaatgtgcttaatttaaaagcctttgatttttacaaagtgatcgaaagttttatcaaagcagaaggcaacttgacaagagaa

SEQ ID NO: 38474 - DNA, 120 bp, synthetic construct; identical to SEQ ID NO: 11076
  source 1..120: mol_type = other DNA

SEQ ID NO: 38475 - DNA, 120 bp, synthetic construct
  source 1..120: mol_type = other DNA
gtgcaggtttgttacatatgtatacatgtgccatattggtgtgctgcacccattaacttgtcatttacattagatatatctcctaatgctatccctccctcctctccctaccccatgaca

SEQ ID NO: 38476 - DNA, 120 bp, synthetic construct
  source 1..120: mol_type = other DNA
tggtttccagcttcatccatgtccctacaaaggacatgaactcatccttttttatggctgcatagtatatatgtgccacatattccatggtatatatgtgccacattttcttactccagt

SEQ ID NO: 38477 - DNA, 120 bp, synthetic construct; identical to SEQ ID NO: 11077
  source 1..120: mol_type = other DNA

SEQ ID NO: 38478 - DNA, 120 bp, synthetic construct
  source 1..120: mol_type = other DNA
tttcatgtgtcttttggctgcataaatgtcttcttttgagaagtgtctgttcatatctttcacccactttttgatggggttgattttttcttgtaaatttgtttgagttctttgtagatt

SEQ ID NO: 38479 - DNA, 120 bp, synthetic construct
  source 1..120: mol_type = other DNA
tcccatttgtcaattttggcttttgttgctattgcttttggtgttttagtcatgaagtccttgcccatgccgatgtcctgaatggtattgcctaggttttcttctagggtttttatggtt

SEQ ID NO: 38480 - DNA, 120 bp, synthetic construct
  source 1..120: mol_type = other DNA
aatagggaatcctttctccatttcttgtttttgtcaggtttgtcaaagatcagatggttgtagatgtgtggtattatttctgagggccctgttctaaaccaaaacagaattctttaaagt

SEQ ID NO: 38481 - DNA, 120 bp, synthetic construct
  source 1..120: mol_type = other DNA
agtaggattcattttttcccattattaaagtataaaaatgtatactattgttcaattataggtattggttcaatcaatataggggcacaaattatattgtctaggattctctttatagca

SEQ ID NO: 38482 - DNA, 120 bp, synthetic construct; identical to SEQ ID NO: 11078
  source 1..120: mol_type = other DNA

SEQ ID NO: 38483 - DNA, 120 bp, synthetic construct
  source 1..120: mol_type = other DNA
agagtgaatagaggagagaaacatgggaaattgatagaagaatgttacactcctattattgaatttcataactacttatggaatgaatttacacttgataaggagtacttagaagaaaac

SEQ ID NO: 38484 - DNA, 120 bp, synthetic construct
  source 1..120: mol_type = other DNA
gcttatgtgtcctctcctcccagaaattgatattgagatattcctgtatcatctgaaagtgactattgttatttcttttagagaattaattttatttctatcaacacatatttattgaac

SEQ ID NO: 38485 - DNA, 120 bp, synthetic construct
  source 1..120: mol_type = other DNA
gtttagctcagttatttagggcttctaaacaatattcctttatttttgagaatttttggagaaaaagtgacaagccccaaatctggaaaagagtatgattgatttacaataggagacgtg

SEQ ID NO: 38486 - DNA, 120 bp, synthetic construct; identical to SEQ ID NO: 11079
  source 1..120: mol_type = other DNA

SEQ ID NO: 38487 - DNA, 120 bp, synthetic construct
  source 1..120: mol_type = other DNA
cacccagataaaggcccagagcaagctttcatagtcttttgattctgtgtcataataaaaaattctcgttaaaactgtagattgataggaacatattcacacagagttgttgactgaggg

SEQ ID NO: 38488 - DNA, 120 bp, synthetic construct
  source 1..120: mol_type = other DNA
tgtgtggggaactgggttcagcatttttgcttgacagccttgagataaaataaatccataaggaaaaagcccacttctgtttcttttcatcccagagagattaatgggcaatatatgagt

SEQ ID NO: 38489 - DNA, 120 bp, synthetic construct
  source 1..120: mol_type = other DNA
atgcatcatacctaagggttagatgaaatgacttccaagagtttggccctattaaatctgttaagaggtttataatgccagcaggtgatgaaatgaaatttggatgccttagtttcagta

SEQ ID NO: 38490 - DNA, 120 bp, synthetic construct; identical to SEQ ID NO: 11080
  source 1..120: mol_type = other DNA

SEQ ID NO: 38491 - DNA, 120 bp, synthetic construct
  source 1..120: mol_type = other DNA
accactatactacctgtttggaatacaaaaagtaactgactgaaattactggacaggaagaacagatgctagttgagaaagagaagaggggagctgggagcctgaggagaaggcttttag

SEQ ID NO: 38492 - DNA, 120 bp, synthetic construct
  source 1..120: mol_type = other DNA
cactgaagagagtggaagaatcctgcaagggaaagagccaagaaagggtacccagattctgtctgaaatctgaataattcctgtgtgtcacagactcagagcagccaaatgaagggcaaa

SEQ ID NO: 38493 - DNA, 120 bp, synthetic construct
  source 1..120: mol_type = other DNA
tcacaatgtaacatttatgatgttcaggatacagttctaaaattatccagcatagaaagaaggtcaaagaaaccaaatgctggtttatagaataggagctttaggccaggtgtgtggtgc

SEQ ID NO: 38494 - DNA, 120 bp, synthetic construct; identical to SEQ ID NO: 11081
  source 1..120: mol_type = other DNA

SEQ ID NO: 38495 - DNA, 120 bp, synthetic construct
  source 1..120: mol_type = other DNA
tgaacatcatagagtgtgcttacacaaacctaggtggtatagcctgctacacatcagggtaggaatagcctgttgcttctagactacagacctgtatggtattttttttttaatctccac

SEQ ID NO: 38496 - DNA, 120 bp, synthetic construct
  source 1..120: mol_type = other DNA
gaacccgtcactcttttcgtgaaacacatgtgttacttgtaagactgataagcaattgtgtttatttatgcttgggtatgtggtagattcttgaaagtgaacaaagtgagcctgtcattt

SEQ ID NO: 38497 - DNA, 120 bp, synthetic construct; identical to SEQ ID NO: 11082
  source 1..120: mol_type = other DNA

SEQ ID NO: 38498 - DNA, 120 bp, synthetic construct
  source 1..120: mol_type = other DNA
cattcacgggtaagatattcattaaaagttcaagataaaccaatggattttaaagtcttaaaatacgaaaaatttatttcggttcattgagattgtttccagttccgccctgcaactaac

SEQ ID NO: 38499 - DNA, 120 bp, synthetic construct
  source 1..120: mol_type = other DNA
tactcctcctctttccatatgaggccagatttttctttgtatacttcaacctaaacagcatattgcaacaaagtaaatgtagaagcggataggaaaattcagctctttgctgttatgcca

SEQ ID NO: 38500 - DNA, 120 bp, synthetic construct
  source 1..120: mol_type = other DNA
aaatatttttaaattttctcaagttcttttgagccctcaacatcctttaatgtaaaaaagctattagctactttatgcttcctaatggaagaatatataaccaccttgaaaacatgatgt

SEQ ID NO: 38501 - DNA, 120 bp, synthetic construct
  source 1..120: mol_type = other DNA
gactaggtgttttgaggatgatggctagagagtatggtttttctttttgagataatgaaaatgttgtaaaattgactcattattgtagtcaattttataacacttttatcatctctgtga

SEQ ID NO: 38502 - DNA, 120 bp, synthetic construct; identical to SEQ ID NO: 11083
  source 1..120: mol_type = other DNA

SEQ ID NO: 38503 - DNA, 120 bp, synthetic construct
  source 1..120: mol_type = other DNA
ctgtccctgagtcttgaaatgctttcctctgcctttttcttgaccagattttaaggtccattttgcctttcctgatcatcctagtctatagtcattcttccctcatttagtcttaaattg

SEQ ID NO: 38504 - DNA, 120 bp, synthetic construct
  source 1..120: mol_type = other DNA
cagttaattacataagggtaaagaacagagaggagtcaacttatgatgacatgcaggtttctggcttgtataacttaagtggatagtagtgtcattcattaaaataagatacctaggatt

SEQ ID NO: 38505 - DNA, 120 bp, synthetic construct
  source 1..120: mol_type = other DNA
agcagttggatatgtgtgtctggaacttaggaaagaaatctaggctaagattatggaccataaaaaatgccacccttttttgacagtttatcttgtgccaggcactttggtgagcacttc

SEQ ID NO: 38506 - DNA, 120 bp, synthetic construct; identical to SEQ ID NO: 11084
  source 1..120: mol_type = other DNA

SEQ ID NO: 38507 - DNA, 120 bp, synthetic construct
  source 1..120: mol_type = other DNA
cagaaaagagaagcctgtgcctacaaaagagattgaaatagaacagccaggaagataagaagaaaatcaggagaagtggtatcatagagagaccgaccaggtgcaatggctcccgcctgt

SEQ ID NO: 38508 - DNA, 120 bp, synthetic construct
  source 1..120: mol_type = other DNA
gtggtgaatgcctgtaattctagctactcgggaggctgaggcatgagaatcgcttgagcccgggaggcggaggttgagtgagccaagattgtgccactgcactccagcctcagtgacaga

SEQ ID NO: 38509 - DNA, 120 bp, synthetic construct; identical to SEQ ID NO: 11085
  source 1..120: mol_type = other DNA

SEQ ID NO: 38510 - DNA, 120 bp, synthetic construct
  source 1..120: mol_type = other DNA
ggtagggtttaaatattgatggaaaagagccattagaagtgttctctattgctggataacaaattagtggctttaaacaaatattttattttgcttatgattttttgggtcaggaatttg

SEQ ID NO: 38511 - DNA, 120 bp, synthetic construct
  source 1..120: mol_type = other DNA
acactcagctctcttcctcccatcctccctccctagagtggttagaatgttaagctttggagttttcacctgcagagagaagataggagattcatagtgaaagtagaggttttaagaaac

SEQ ID NO: 38512 - DNA, 120 bp, synthetic construct
  source 1..120: mol_type = other DNA
ctctacagataatttttaaaattagccaggtgtggtggcacacacctgtggttcttgggaggctgaactgggagaattgcctgagcctgggatgttaaggctgcagtgagctgtgattgc

SEQ ID NO: 38513 - DNA, 120 bp, synthetic construct; identical to SEQ ID NO: 11086
  source 1..120: mol_type = other DNA

SEQ ID NO: 38514 - DNA, 120 bp, synthetic construct
  source 1..120: mol_type = other DNA
tgaggggagtaaccaggagacaagtgggactaaatggggcagagggctagagaggtcctgaaagcaaaactcctggctcacttaaaaaaaaactaatctctctctcaatacctaatctaa

SEQ ID NO: 38515 - DNA, 120 bp, synthetic construct
  source 1..120: mol_type = other DNA
aaatgaccctctctttatccctcgtaatattgtttgctctgaaaactacttgtgcctgatactagtgaagccattccagctttcttcccattaatatcaacatggcatattttccccatt

SEQ ID NO: 38516 - DNA, 120 bp, synthetic construct
  source 1..120: mol_type = other DNA
tagatttaaatttaatgtgactattgatatggttgggtttaaattctccatcttattattcattttctatttgtctcatctcccttttcctccctttcctctttttctgccttcttttgg

SEQ ID NO: 38517 - DNA, 120 bp, synthetic construct
  source 1..120: mol_type = other DNA
tagtattacactacttcacatacagtataagaatcttagaatagtatatttccattttcccttttccaacctttgggctgttgttgtcatacattttgcttcgacagaagttataagctc

SEQ ID NO: 38518 - DNA, 120 bp, synthetic construct; identical to SEQ ID NO: 11087
  source 1..120: mol_type = other DNA

SEQ ID NO: 38519 - DNA, 120 bp, synthetic construct
  source 1..120: mol_type = other DNA
gctggagtgcagtggcgcgatcttggctcactgcaacctccacctcctgggttcaagcgattctcctgcctcagcctcctgagtagctgggattacaggcacacgccaccatgcctagct

SEQ ID NO: 38520 - DNA, 120 bp, synthetic construct
  source 1..120: mol_type = other DNA
gccaccgcacccagccaacaaaaaacatttcttgtgtgcatgtctactagtgatgaattcttccagcttttatgtctggaaaaaaacattttacctttatttttaaaaggtcttttgctg

SEQ ID NO: 38521 - DNA, 120 bp, synthetic construct
  source 1..120: mol_type = other DNA
tcttttgcccaggctggagtgcagtggcatgatcccagctcactgcaacctctgcctcccaggttcaagcgattcttctgcctcagcctcctgagtgactgggactaaaggcacatgcca

SEQ ID NO: 38522 - DNA, 120 bp, synthetic construct; identical to SEQ ID NO: 11088
  source 1..120: mol_type = other DNA

SEQ ID NO: 38523 - DNA, 120 bp, synthetic construct
  source 1..120: mol_type = other DNA
ttattatgtttatgcttttctttaccttcttgaacatatgggatataggtattataactttttaaatgtccctgttactaagtctagtacctatgtctttttaggtctgtttctcttgac

SEQ ID NO: 38524 - DNA, 120 bp, synthetic construct
  source 1..120: mol_type = other DNA
atgtttctgcttttttgactgcttggtgatttttttgttaggtgccagatatcatgaattttgctttagtgggtcctggatatttttgtattcctttcactattttgacctgtgttttgg

SEQ ID NO: 38525 - DNA, 120 bp, synthetic construct; identical to SEQ ID NO: 11089
  source 1..120: mol_type = other DNA

SEQ ID NO: 38526 - DNA, 120 bp, synthetic construct
  source 1..120: mol_type = other DNA
ttaaccctctgcagacctctggagttctctttttgtagctttcttctctctagtattctgtcctgctaattttagtttgccttggcatctcccatttcttaactctgtttcttcaactgg

SEQ ID NO: 38527 - DNA, 120 bp, synthetic construct
  source 1..120: mol_type = other DNA
tgttctgtactgcctgttgtttattgtgtaaaaagaattcttttatttatgttgttcaattttgtggttgtttaaacgaatctggtccctgtttcttcatcagagctggcagggttacta

SEQ ID NO: 38528 - DNA, 120 bp, synthetic construct
  source 1..120: mol_type = other DNA
tctggtccctgtttcttcatcagagctggcagggttactaaacgtaaggcttagtgattgatgaagtatttacaaatatgaaatatgtacacttacagaatatttagggtatcatttccg

SEQ ID NO: 38529 - DNA, 120 bp, synthetic construct; identical to SEQ ID NO: 11090
  source 1..120: mol_type = other DNA

SEQ ID NO: 38530 - DNA, 120 bp, synthetic construct
  source 1..120: mol_type = other DNA
tgatttctccatttccaactgaggtacctggctcatctcattgggactggttagacagtggatgcagcccacggagggcaagctgaagcaggatggggcatcacctcacccgggaagcac

SEQ ID NO: 38531 - DNA, 120 bp, synthetic construct
  source 1..120: mol_type = other DNA
ggagattccctcgggtgcctacaccaccagggccctgggtttcaagcacaaaactgggcagctgtttgggcagataccgagctagctgtaggagttttctttcgtactccagtggtgcct

SEQ ID NO: 38532 - DNA, 120 bp, synthetic construct; identical to SEQ ID NO: 11091
  source 1..120: mol_type = other DNA

SEQ ID NO: 38533 - DNA, 120 bp, synthetic construct
  source 1..120: mol_type = other DNA
agtcaggggcctatagataaaactcccatctacctgggacagagcacgtgggggaaggcgcagctgtggacacatcttcagcagacttaaacattcctgcctgctggctctgaagagagc

SEQ ID NO: 38534 - DNA, 120 bp, synthetic construct
  source 1..120: mol_type = other DNA
tcatacaggagagttccagctgccatctggtgggtacccctctgggacgaagcttccagaggaaggaacaggcagcaatctttgctcttctgcaacctccactggtgataccaggcaaac

SEQ ID NO: 38535 - DNA, 120 bp, synthetic construct; identical to SEQ ID NO: 11092
  source 1..120: mol_type = other DNA

SEQ ID NO: 38536 - DNA, 120 bp, synthetic construct
  source 1..120: mol_type = other DNA
ggaagctaagaactttgaaaaaaggttagaggaattgctaactagaataaccagtttagagaagaacataaatgacctgacggaactgaaaaaacacaacacgaggactttgtgaagcat

SEQ ID NO: 38537 - DNA, 120 bp, synthetic construct
  source 1..120: mol_type = other DNA
caaagcctccaagaaataggggactatgtgaaaagaccaaacctatgtttgattggtgtacctgaaagtgacagggagagtggaaccaagttagaaaacactctacaggatattatccaa

SEQ ID NO: 38538 - DNA, 120 bp, synthetic construct; identical to SEQ ID NO: 11093
  source 1..120: mol_type = other DNA

SEQ ID NO: 38539 - DNA, 120 bp, synthetic construct
  source 1..120: mol_type = other DNA
gccgagacaatcttaagcaaaaagaacaaagctggaggcatcacgctacttgacttcaaactatactacaaggccacaataatcaaaacagcatggtactggtaccaaaaaagataaata

SEQ ID NO: 38540 - DNA, 120 bp, synthetic construct
  source 1..120: mol_type = other DNA
tgggaaaactgactagccatatgcagaaaactgaaactggaccccttccttacaccttatacaaaaattaactcaaaatggattaaagacttaaacataacacctaaaaccataaaaacc

SEQ ID NO: 38541 - DNA, 120 bp, synthetic construct
  source 1..120: mol_type = other DNA
aagagcttctgcacagcaaaagaaactatcttcagagtgaacaggcaacctacagaatgggagaaaatttttgcaatgtatccatctgacaaagggctaaagtccagaatctacaaggaa

SEQ ID NO: 38542 - DNA, 120 bp, synthetic construct
  source 1..120: mol_type = other DNA
ccactggtcattagagaaatgcaaatcaaaaccacagtgagataccatctcatgccagttagaatggtgatcattaaaaagtcaggaaacaacagatgctggagaggctgtggagtaata

SEQ ID NO: 38543 - DNA, 120 bp, synthetic construct; identical to SEQ ID NO: 11094
  source 1..120: mol_type = other DNA

SEQ ID NO: 38544 - DNA, 120 bp, synthetic construct
  source 1..120: mol_type = other DNA
gggacatggatgaagctggaaaccatcattctcagcaaactaaccaggaagagaaaaccaaacaacacatgttttcacttataagttaaaactgaacagtgagaacacatggacacatgg

SEQ ID NO: 38545 - DNA, 120 bp, synthetic construct
  source 1..120: mol_type = other DNA
tatacctatgtaacaaacctgcacattctgcacatgtatcctagaacttaaagtataataaaaaaacagaaaatatttaaaatatatctttcaaattatcttttcaaatttaaatcgagg

SEQ ID NO: 38546 - DNA, 120 bp, synthetic construct; identical to SEQ ID NO: 11095
  source 1..120: mol_type = other DNA

SEQ ID NO: 38547 - DNA, 120 bp, synthetic construct
  source 1..120: mol_type = other DNA
gataacgattaagccacatttaacactttttaaaagcatgggccaggacaatgaagcagtatgatgccatatatacttttacacaacagccatgctaatataatgataaagcaattatgc

SEQ ID NO: 38548 - DNA, 120 bp, synthetic construct
  source 1..120: mol_type = other DNA
gctttaacctttctcactctgacccaatatattcctaatatagctttgcccttgacttccacagctaaatactagtttctcaagtgatttaggagacttgacttcattattcaaaactga

SEQ ID NO: 38549 - DNA, 120 bp, synthetic construct
  source 1..120: mol_type = other DNA
atgtctatttttccattacttttcaaatcatctgggcttaaatactgagcactttctccttttctttctcaatagtttgatagagtcctgtaatttttttttaaagctgtctctcatatt

SEQ ID NO: 38550 - DNA, 120 bp, synthetic construct
  source 1..120: mol_type = other DNA
aattccatactggtttctagtaaaggtctctgtcactgtactacattatttctgtgaaatcattcatgctgtttttactacctctataatatatagtcaggcatatgggacagtataaag

SEQ ID NO: 38551 - DNA, 120 bp, synthetic construct; identical to SEQ ID NO: 11096
  source 1..120: mol_type = other DNA

SEQ ID NO: 38552 - DNA, 120 bp, synthetic construct
  source 1..120: mol_type = other DNA
caagggaaggggtgacaatgaggtgaaatagacatctagattgttttcgtagactgaaacattggacctgaggtttttgttgttgttttactctttctctgtttttagtaaaagattcca

SEQ ID NO: 38553 - DNA, 120 bp, synthetic construct
  source 1..120: mol_type = other DNA
actaataatctacaaaaattttaagatagataagcagaaagaatacaaacaaaaaaagatagtaatttaactcatatgaataatcatccactgaaatgtagcaaggatatgctacatatg

SEQ ID NO: 38554 - DNA, 120 bp, synthetic construct
  source 1..120: mol_type = other DNA
atgttaaaaaggacaacaataagaaaatctaaagaaactgagataacttataaatcaatgcaggtattctgtgttaaatgcttatgtaagcctgagttcttcatccagatctgtttatga

SEQ ID NO: 38555 - DNA, 120 bp, synthetic construct; identical to SEQ ID NO: 11097
  source 1..120: mol_type = other DNA

SEQ ID NO: 38556 - DNA, 120 bp, synthetic construct
  source 1..120: mol_type = other DNA
agtagtgctcatcacttgcttacttctttggaagtttgtctgataattatacagaccagcatcaaaataactctcatttatgtgtgtgacatttcagtgtagaagtaataataggtaatg

SEQ ID NO: 38557 - DNA, 120 bp, synthetic construct
  source 1..120: mol_type = other DNA
tgtgtccacaaaactggttggtgacagagccagaattttaactcaggctatctggttccagagactatacttttagcctctatgttgccttttagtgtatattagtttactgtttggtat

SEQ ID NO: 38558 - DNA, 120 bp, synthetic construct; identical to SEQ ID NO: 11098
  source 1..120: mol_type = other DNA

SEQ ID NO: 38559 - DNA, 120 bp, synthetic construct
  source 1..120: mol_type = other DNA
ttttcctctgctatacagtgatttcataagaacagagaaccgaggattcagttacacagtattaacctgtttatcttggcttactataagtacagagaatttttctcttctcttgaggca

SEQ ID NO: 38560 - DNA, 120 bp, synthetic construct
  source 1..120: mol_type = other DNA
tgttgctttagttatgaatcatgtcagtaattaccctgagggtggtgttagttcactattcaagtacaaacaagaagggaagtagcaatggtagaagaatagctaggacatactctctgt

SEQ ID NO: 38561 - DNA, 120 bp, synthetic construct
  source 1..120: mol_type = other DNA
atcttaactggaattgtgaggaagggctctagaattctggatatgcaagaaacaaagaagagaaataggagaaatcgatcctaattagtgtggcttctgaatttctgcagcaaaataaaa

SEQ ID NO: 38562 - DNA, 120 bp, synthetic construct; identical to SEQ ID NO: 11099
  source 1..120: mol_type = other DNA

SEQ ID NO: 38563 - DNA, 120 bp, synthetic construct
  source 1..120: mol_type = other DNA
gaaacgtagaataggaaacagctggatttgtttcttagccttttcaaaaaagccttttcttactttgctaagtttcagtggttcttatctccactaaatataacaacaaatttatcttta

SEQ ID NO: 38564 - DNA, 120 bp, synthetic construct
  source 1..120: mol_type = other DNA
taaaagtttttaaatttacatattaagtaatgatagtttttatattaggttttatcatttagtttttttcttttaaacattaagatgaaaaaggtggagaagtgaaattacttgtctttt

SEQ ID NO: 38565 - DNA, 120 bp, synthetic construct
  source 1..120: mol_type = other DNA
atagtgtacacttttagattggcatctgatttagttgaacccacatattttaacggggtcttctgaaaataaacgtttgcacatttcagttccaatgaagaacaaatggcctggggaagg

SEQ ID NO: 38566 - DNA, 120 bp, synthetic construct; identical to SEQ ID NO: 11100
  source 1..120: mol_type = other DNA

SEQ ID NO: 38567 - DNA, 120 bp, synthetic construct
  source 1..120: mol_type = other DNA
tttatttttctttaaatgcaggtccattttttcccctcgttttaggtagctaagattatattgaatcatgtgtgtttcagtctttgtcatctcaggaagtcttatgagaccacaacataa

SEQ ID NO: 38568 - DNA, 120 bp, synthetic construct
  source 1..120: mol_type = other DNA
aaattgcttctgttcgtaaagtactatatataaaacctttttaccttttttatatataaaacctatgattcataggttttatgtcctattaaaatatgagctaacaataattggtaaaat

SEQ ID NO: 38569 - DNA, 120 bp, synthetic construct
  source 1..120: mol_type = other DNA
agtagtatgactttttgtgtaacttggattgtgcaattgcttttaaaaatgaaactatttctcatttataatgagataatggaactcagtgtatcggaagagcagactgaacacacactt

SEQ ID NO: 38570 - DNA, 120 bp, synthetic construct
  source 1..120: mol_type = other DNA
ttgattcatttttttagtataaaaaataaatgatgagtgtattgtggatacaataaagtagagaaaaccacagcacacaacacccccaggaaaggggactggtggaagtgggagtcttag

SEQ ID NO: 38571 - DNA, 120 bp, synthetic construct; identical to SEQ ID NO: 11101
  source 1..120: mol_type = other DNA

SEQ ID NO: 38572 - DNA, 120 bp, synthetic construct
  source 1..120: mol_type = other DNA
ggagggaggattgcttgagcctgggaagttgaggctgcagggagccgtgactgcactactgcattccagtctgggtgacagaatgagacactgtctcaaagaaaaacgaaaaaaaagcac

SEQ ID NO: 38573 - DNA, 120 bp, synthetic construct
  source 1..120: mol_type = other DNA
aagcccgcgcccaccttcaaattttgtgtacacttacagacacggggctagggtttcctgatggtgccaaagagagaagcagaacagaaattgaagtaaaccgagacttctgtaacagac

SEQ ID NO: 38574 - DNA, 120 bp, synthetic construct
  source 1..120: mol_type = other DNA
ttcattaccataagaaagaccagaggaaatggaggagagaaaataataaaaaagaacagaaaaaaaaaattccaaaactaatgaaaaccagggggcttcagatggaaagggcccatagtg

SEQ ID NO: 38575 - DNA, 120 bp, synthetic construct; identical to SEQ ID NO: 11102
  source 1..120: mol_type = other DNA

SEQ ID NO: 38576 - DNA, 120 bp, synthetic construct
  source 1..120: mol_type = other DNA
agcttccagagagaaaaagtaagctattttaggggaatgagatccagatcagcacagaagttctcattaggaatactggatattttataacctaaaatttgtcaaatatgacagcaaaat

SEQ ID NO: 38577 - DNA, 120 bp, synthetic construct
  source 1..120: mol_type = other DNA
cctaataaaaaaactgtcacaccagagcagagagaaaaatgcaaaaaatcctacgatgcaacaagcccagaaaatgtttgttccacatgagaaatcagatagtttcataaagaatgcctt

SEQ ID NO: 38578 - DNA, 120 bp, synthetic construct
  source 1..120: mol_type = other DNA
caaaagaaaatttgccttttttcctcgggcttttgaagaattttaagattcattctaattattgagaccaattatgtgccagacactaaaataaatgaagttctagggtgtttttctccc

SEQ ID NO: 38579 - DNA, 120 bp, synthetic construct; identical to SEQ ID NO: 11103
  source 1..120: mol_type = other DNA

SEQ ID NO: 38580 - DNA, 120 bp, synthetic construct
  source 1..120: mol_type = other DNA
aaccccacccttgttttttggtttatctttcctgtgtttctttttataaaaataagcaggtatgcacgttttattttgcctttttcttatacaaaaggtggcatactatgtgtgctcttt

SEQ ID NO: 38581 - DNA, 120 bp, synthetic construct
  source 1..120: mol_type = other DNA
ctagttttctatgattggacatctaggtggtttccagtattttgcaatttcaactattaccacaataaataactctgtgtgtgtgtgtgtatgtatgtatgtatgtgtgtgttatgtaat

SEQ ID NO: 38582 - DNA, 120 bp, synthetic construct
  source 1..120: mol_type = other DNA
tcattcccaccagaaatgtatgaaggtagcaatttctccatgacggccactgtccaaattttgccaagtaatgacattaaaatattcttctcatctattatcaccatcatttaaaaaaga

SEQ ID NO: 38583 - DNA, 120 bp, synthetic construct; identical to SEQ ID NO: 11104
  source 1..120: mol_type = other DNA

SEQ ID NO: 38584 - DNA, 120 bp, synthetic construct
  source 1..120: mol_type = other DNA
gttttaattctttcagtatccaaattctctcccacagggcctttgcctgtggtgcttgccttgccaccattaagtaactagacaagtaaaaacaaagaatctgggttcagccaggtgcag

SEQ ID NO: 38585 - DNA, 120 bp, synthetic construct
  source 1..120: mol_type = other DNA
aacaaacaaacagggttcttaccctggcgctacattaatttgttatgtgacattgtgtctgttgtttagtcttacagttcctcagtttccccagcctaaggtgtagttacatcagatgac

SEQ ID NO: 38586 - DNA, 120 bp, synthetic construct
  source 1..120: mol_type = other DNA
catcaggccctttctgttctaagttgtgaatgttccagaagccattttgataggacgataatggaacctagcacatttaccccatggctattaactgtaacgctgctgtaagtatacaac

SEQ ID NO: 38587 - DNA, 120 bp, synthetic construct; identical to SEQ ID NO: 11105
  source 1..120: mol_type = other DNA

SEQ ID NO: 38588 - DNA, 120 bp, synthetic construct
  source 1..120: mol_type = other DNA
tctgacatcaagtaaaaatgataaagagaaaatagaaatttgagaattagagattttaggagttatgtacatgctgatctctggaaaatattgctaaataagtaatgctgttgatcatta

SEQ ID NO: 38589 - DNA, 120 bp, synthetic construct
  source 1..120: mol_type = other DNA
tttcttagaagccatgttataaatgggtaattcagttttcaggaaagccccaaaaagctttttaaaaagtttgtttttggagtctttaagatttcatccctgcctaagcactgtttataa

SEQ ID NO: 38590 - DNA, 120 bp, synthetic construct
  source 1..120: mol_type = other DNA
aagtttaggtgctggaaggtagtgatgcttcttcttggaaatagtaatttaatatattgacaaaggacaaaatacttggttcatcaggtgtccaaaattgtaggaccaaaaagcaattgc

SEQ ID NO: 38591 - DNA, 120 bp, synthetic construct
  source 1..120: mol_type = other DNA
aatatctataattaagatttctatttccaatttacttttcagcattttgaatgtagaatattaaggttcattgatagctccttaagtagtgtcttcagtttaattttctgtgaatataat

SEQ ID NO: 38592 - DNA, 120 bp, synthetic construct; identical to SEQ ID NO: 11106
  source 1..120: mol_type = other DNA

SEQ ID NO: 38593 - DNA, 120 bp, synthetic construct
  source 1..120: mol_type = other DNA
gggggaagggaagagaaaaccctcagaatatatgacttaccacaaagtacaacactagcaaaggaaaataaattttgttctggtacactttttttccatagttctagatgagaaaaccat

SEQ ID NO: 38594 - DNA, 120 bp, synthetic construct
  source 1..120: mol_type = other DNA
aatgactgttttatttgcattttaaagttatattcatgttttatgatcttgccttaagttgagatctttaagctgaggagagttctgagaaatctcaaagttatacaattctccacccct

SEQ ID NO: 38595 - DNA, 120 bp, synthetic construct
  source 1..120: mol_type = other DNA
aatatcaaataaaggaatttcaggtcaatggaagaaaacacatttatattatgtatatatttctcttgggatataaaggaccatggttagtatcttcactagttttttgggttttttttc

SEQ ID NO: 38596 - DNA, 120 bp, synthetic construct; identical to SEQ ID NO: 11107
  source 1..120: mol_type = other DNA

SEQ ID NO: 38597 - DNA, 120 bp, synthetic construct
  source 1..120: mol_type = other DNA
agattaagacagtagaaatcagataggttggatgctgaatttaattacatgtccttttccttaaatagaaggcattcttttttagttaactttggagaactgcttgattttttttttttt

SEQ ID NO: 38598 - DNA, 120 bp, synthetic construct
  source 1..120: mol_type = other DNA
ccgagtagctgggactacaggcatgtgccaccacacccagctaatttttgtatttttagtagagacggggtttcaccatgttggccaggagggtcttgatctcttgaccttatgatccac

SEQ ID NO: 38599 - DNA, 120 bp, synthetic construct
  source 1..120: mol_type = other DNA
tctaaagtatacctcagagccagacctattttatgtttagtgaaatgaaaatatagttttgtttagttatttggccttgtagttttgttactttataatgtaaggaactgtgtccttaat

SEQ ID NO: 38600 - DNA, 120 bp, synthetic construct
  source 1..120: mol_type = other DNA
cgtaatagcattttggtcaatgaccgcataaacgatggtggtctcataagattatcatactatatttttactgtaccttttctgtgttgagatgtatttagatacacaagtaccattatt

SEQ ID NO: 38601 - DNA, 120 bp, synthetic construct; identical to SEQ ID NO: 11108
  source 1..120: mol_type = other DNA

SEQ ID NO: 38602 - DNA, 120 bp, synthetic construct
  source 1..120: mol_type = other DNA
ttctccctctcaatttttgtggcatatatcattttgaaattgggtgcattatatacagaaaatcaaaatagtaacttcaaagcataccatatagatagcatctgctttctacaaattgcc

SEQ ID NO: 38603 - DNA, 120 bp, synthetic construct
  source 1..120: mol_type = other DNA
acagaagactacgtttttagttatacatatattttaaaatactcccaaaacatttatttcaaattactcttctttctcatttgttaatcatagtttaagaaatatgattagtagttttaa

SEQ ID NO: 38604 - DNA, 120 bp, synthetic construct
  source 1..120: mol_type = other DNA
acataatttaagtcagtcacttttagacactaaataactttaagagattttttttaatgaaggaacaaatcaaaatggctcagaaaaatcagatggagtggatacacaaataaaatacat

SEQ ID NO: 38605 - DNA, 120 bp, synthetic construct; identical to SEQ ID NO: 11109
  source 1..120: mol_type = other DNA

SEQ ID NO: 38606 - DNA, 120 bp, synthetic construct
  source 1..120: mol_type = other DNA
taaagtagtaaactatagggtcaaaacaacagttggaaacagcaatacagagagtgattgggtacattgtccttactgctgccactactgagcaattaacaaatgtttgtgttctcacaa

SEQ ID NO: 38607 - DNA, 120 bp, synthetic construct
  source 1..120: mol_type = other DNA
gtttggttaaagtttttagcaccatactagaacaagttacatttaaaattagaggaataaaaaatcccactatttcgatgaaaattacaatccttgagagatatgttttccatgtggctt

SEQ ID NO: 38608 - DNA, 120 bp, synthetic construct; identical to SEQ ID NO: 11110
  source 1..120: mol_type = other DNA

SEQ ID NO: 38609 - DNA, 120 bp, synthetic construct
  source 1..120: mol_type = other DNA
acaaaaagcaagtctgacattgccaagttaatcatgtaagttgtagtttcatttcggactttgaggacgcagatgaaaatgtatatggcaacacaattggatattaacccaagcacaaac

SEQ ID NO: 38610 - DNA, 120 bp, synthetic construct
  source 1..120: mol_type = other DNA
cgtaaaggcacgtccaattttcagtttggaagcactttcatcagctgcagtctcctttgggattcagattataacctctataacctccaatttatttgcaaattatctggatctttggat

SEQ ID NO: 38611 - DNA, 120 bp, synthetic construct
  source 1..120: mol_type = other DNA
tccatgaattccaaggctcagttaactgacgagcaacctttaaaaaatacagtcaacgagtccaacccataggattataaatttaaagaaaagctgtgatctgtgaccagaatgaaacca

SEQ ID NO: 38612 - DNA, 120 bp, synthetic construct
  source 1..120: mol_type = other DNA
agagacttaaacattcccaatttgtcccattttacttcttgcttcttttaaatgaagttttccttttttgttttcctgcagtggatcccagattgtgggtaagcagaagagtcttttaaa

SEQ ID NO: 38613 - DNA, 120 bp, synthetic construct; identical to SEQ ID NO: 11111
  source 1..120: mol_type = other DNA

SEQ ID NO: 38614 - DNA, 120 bp, synthetic construct
  source 1..120: mol_type = other DNA
agaaaaaaatcactattcagcctgttctcttattcgattgttttcgtgtttgggatatgacaatttagaaaagaaaatgtgtatgggtgtgtatttataaattgaaattgttagtgatat

SEQ ID NO: 38615 - DNA, 120 bp, synthetic construct
  source 1..120: mol_type = other DNA
ttatgagtagctcttatcctgggtctcattagtttttgataagcaattttctaacattctttcctctttcctatgcagttgtattaatattttagagctgtttaaatttttaaattactc

SEQ ID NO: 38616 - DNA, 120 bp, synthetic construct; identical to SEQ ID NO: 11112
  source 1..120: mol_type = other DNA

SEQ ID NO: 38617 - DNA, 120 bp, synthetic construct
  source 1..120: mol_type = other DNA
ttggaaggccgaggcaggtggatcacctgagatcaggagtttgagagcagcctggccaaaatggcgaaaccccatctctaccaaaaatacaaaactagcctagggcaatagtgcgtgcct

SEQ ID NO: 38618 - DNA, 120 bp, synthetic construct
  source 1..120: mol_type = other DNA
aaaaaaaaaaaaaaaagtatacttatattttaaagactccaaaatcagaagaagaaagtgtgtgtaaggtgagggtacttaaatgtaggtgttatttcctcaaagattgaggatatcaca

SEQ ID NO: 38619 - DNA, 120 bp, synthetic construct
  source 1..120: mol_type = other DNA
tcttgggtattaagtaatttaagaacaatttatttttttctcataaattacttagctagcttaaaaataacttattacagtaaaatgttttgtgttgttttgcaccattctttcacactc

SEQ ID NO: 38620 - DNA, 120 bp, synthetic construct; identical to SEQ ID NO: 11113
  source 1..120: mol_type = other DNA

SEQ ID NO: 38621 - DNA, 120 bp, synthetic construct
  source 1..120: mol_type = other DNA
ctcctctttagtcatctttaattaatgaaatatatgcagttgtatatgctgatctcatcctacttttactttcattttgaatatggcggcattttctcattcaaataattaaaatttatt

SEQ ID NO: 38622 - DNA, 120 bp, synthetic construct
  source 1..120: mol_type = other DNA
ttttctcactctgccgcccaggctggagtgcagtggtgcgatcttgtcttactgcaacctctgcctcccaggttccagcaattttcccacctcagcctcccgagtagctgggattatggg

SEQ ID NO: 38623 - DNA, 120 bp, synthetic construct
  source 1..120: mol_type = other DNA
gctgggattccatgtgtgagccaccgtgcccggcctgttcatttatagttttttaatgtttgagttactggggcttaaaaatggatagatcactatttgttgaattaggcttttcattat

SEQ ID NO: 38624 - DNA, 120 bp, synthetic construct; identical to SEQ ID NO: 11114
  source 1..120: mol_type = other DNA

SEQ ID NO: 38625 - DNA, 120 bp, synthetic construct
  source 1..120: mol_type = other DNA
aactgttattttaatgtgagatctctacacttctggaacttaactctgagaatcaacttatttcttatatggattttttggggggagcgaaaattaaacagagccagatagatgttaaaa

SEQ ID NO: 38626 - DNA, 120 bp, synthetic construct
  source 1..120: mol_type = other DNA
ggtgcagcccatggaaggcgagccaaagcagggtggggcatcgccttacacgggaagtgcaaggggccagggaacttcctcccctagctaagggaagccatgagggaatgtgccacgagg

SEQ ID NO: 38627 - DNA, 120 bp, synthetic construct
  source 1..120: mol_type = other DNA
gccgtttgggcagacaccgagctagctgcaggattttttctttttcgtactccagtggcacctgaaacaccagtgagacagaactgttaactcccctggaacaggggctgaagccaggga

SEQ ID NO: 38628 - DNA, 120 bp, synthetic construct; identical to SEQ ID NO: 11115
  source 1..120: mol_type = other DNA

SEQ ID NO: 38629 - DNA, 120 bp, synthetic construct
  source 1..120: mol_type = other DNA
ggctattggtgcagcttcagcagacttaaacgttcctgcctgctggctctgaagagagcagcagatctcccaggacattgctcgagctctgctaagggacagactgcctcctcaagtggg

SEQ ID NO: 38630 - DNA, 120 bp, synthetic construct
  source 1..120: mol_type = other DNA
gaaggaacaggcagcaatctttgttgttctgcaacctctgctggtgatatccagacaaacagggtctggagtggacctccagcaaattccagcagacctgcagcagaggggcctgactgt

SEQ ID NO: 38631 - DNA, 120 bp, synthetic construct; identical to SEQ ID NO: 11116
  source 1..120: mol_type = other DNA

SEQ ID NO: 38632 - DNA, 120 bp, synthetic construct
  source 1..120: mol_type = other DNA
gctgaaaaacacagcacaagaacttcgtgaagcatacacaagtatcaacagccaaagcagaagaaaggatatcagagattgaagatcacctttatgaaataaagtgtgaagacaagatta

SEQ ID NO: 38633 - DNA, 120 bp, synthetic construct
  source 1..120: mol_type = other DNA
tggaaaacactcttcaggatattatccaggagaatttccccaacctagcacgacaggccaacattccaattcaggaaatacagagaacaccacaaagatactcctcaagaagagcaaccc

SEQ ID NO: 38634 - DNA, 120 bp, synthetic construct
  source 1..120: mol_type = other DNA
ctgcagaaaccctacaggccagaaaagagtgggggccaatattcaacattcttaaagaaaggaattttcaacccagaattttgtatccagccaaactaagcttcataagtgaatgagaaa

SEQ ID NO: 38635 - DNA, 120 bp, synthetic construct; identical to SEQ ID NO: 11117
  source 1..120: mol_type = other DNA

SEQ ID NO: 38636 - DNA, 120 bp, synthetic construct
  source 1..120: mol_type = other DNA
ctctaaataagggaatggaggaagatttaccaagcaaatggaaagcaaaaaaaaaaaaaagcaggggttgcaatcctagtctctgataaaacagactttaaaccaacgaagatcaaaaaa

SEQ ID NO: 38637 - DNA, 120 bp, synthetic construct
  source 1..120: mol_type = other DNA
tacaaagagacttagactcccacacaataatagtgggagactttaacaccccactgtcaatatttgacagatcaatgagacagaaaattaacaaggatattcaggacttgaactcagctc

SEQ ID NO: 38638 - DNA, 120 bp, synthetic construct; identical to SEQ ID NO: 11118
  source 1..120: mol_type = other DNA

SEQ ID NO: 38639 - DNA, 120 bp, synthetic construct
  source 1..120: mol_type = other DNA
gcaatgtttagagggaagtttatagcactaaatgcccacaggagaaagcagaaaagatgtaaaattgacaccctaacatcacaattaaaagaactagagaagcaagagcaaactaattca

SEQ ID NO: 38640 - DNA, 120 bp, synthetic construct
  source 1..120: mol_type = other DNA
atagatagaccactagccaggctaataaagaagaaaagagagaagaatcaaatagacacaataaaaaaatgctaaaggggatatcaccactgatcccacagaaatacaaactaccatcag

SEQ ID NO: 38641 - DNA, 120 bp, synthetic construct
  source 1..120: mol_type = other DNA
aataacaagttctgaaattgaggcagtaattaatagcgtaccaaccaaaaaaatcccaggagcagatggattcacagctgaattctgccagaggtacaaggaggagctggtactattcct

SEQ ID NO: 38642 - DNA, 120 bp, synthetic construct; identical to SEQ ID NO: 11119
  source 1..120: mol_type = other DNA

SEQ ID NO: 38643 - DNA, 120 bp, synthetic construct
  source 1..120: mol_type = other DNA
tgctaaaaactctcaataaacttcatattgatggaatgtatctcaaaataataagagctatttatggcagacccacagccaatatcatactgaatcagcaaaagctggaagcattccctt

SEQ ID NO: 38644 - DNA, 120 bp, synthetic construct
  source 1..120: mol_type = other DNA
aggaaattaaattgtctctgtttgcagagacaatgattgtctatttagaaaaccccattatctcagcccaaaatctccttaagctgataagcaacttcagcaaagtctcaggatacaaaa

SEQ ID NO: 38645 - DNA, 120 bp, synthetic construct; identical to SEQ ID NO: 11120
  source 1..120: mol_type = other DNA

SEQ ID NO: 38646 - DNA, 120 bp, synthetic construct
  source 1..120: mol_type = other DNA
ccatatagccaagacaatcctaagcaaaaagaagaaagctggaggcatcatgctacctgacttcaaactatactacaaggctacaataaccaaaacagcatggtattggtaccaaaacag

SEQ ID NO: 38647 - DNA, 120 bp, synthetic construct
  source 1..120: mol_type = other DNA
ggctagccatgtgcagaaaactgaaactggacccctttcttacaccttatacaaaaattaactcaagatggattaaagagttaaatgtaagacctaaagccatgaaaaccctagaagaaa

SEQ ID NO: 38648 - DNA, 120 bp, synthetic construct
  source 1..120: mol_type = other DNA
gcacagcaaaagaaactatcatcagagtgaacaggcaacctacagaatgggagaaaatttttgcgatctatccatctgacaaagggctaaagtccagaatctacaaggaacttaaacaaa

SEQ ID NO: 38649 - DNA, 120 bp, synthetic construct; identical to SEQ ID NO: 11121
  source 1..120: mol_type = other DNA

SEQ ID NO: 38650 - DNA, 120 bp, synthetic construct
  source 1..120: mol_type = other DNA
cccaaaggattataaataattctaatataaagacacatgcacacatatgcttattgcagcagtatttacaatagcaaagacttggaacccacccaaatgcgcatcaatgatagacaggat

SEQ ID NO: 38651 - DNA, 120 bp, synthetic construct
  source 1..120: mol_type = other DNA
ggaacagaaaaccaaacaccgcatgttctcactcataagtgggaactgaacaatgagaacacatggacacagggaggggaacatcacacatcggggcctgtcggggttgggggttagagg

SEQ ID NO: 38652 - DNA, 120 bp, synthetic construct
  source 1..120: mol_type = other DNA
taaagtataatacttttaaaaaatggtgaagacaagcctttttttaggactgttgccataatgaccttgtagactgatttgaaatatagtgtatcagctttggcaacatagggaaaccct

SEQ ID NO: 38653 - DNA, 120 bp, synthetic construct; identical to SEQ ID NO: 11122
  source 1..120: mol_type = other DNA

SEQ ID NO: 38654 - DNA, 120 bp, synthetic construct
  source 1..120: mol_type = other DNA
gctgagatgagaggatcacttgagaccaggatttcaagaccagcctaggcaacatagtgacaccctgtttccaaaaattagccaagtgtggtggtgggcacctgtagtcctggttactag

SEQ ID NO: 38655 - DNA, 120 bp, synthetic construct
  source 1..120: mol_type = other DNA
ataaataaaaagaatgaaatatagtgaatttcattatgtaatgcatcggtttttaaaatttaatgacatctgattctgattctttgaatactttcactgcttaagctgctgggttgggtt

SEQ ID NO: 38656 - DNA, 120 bp, synthetic construct; identical to SEQ ID NO: 11123
  source 1..120: mol_type = other DNA

SEQ ID NO: 38657 - DNA, 120 bp, synthetic construct
  source 1..120: mol_type = other DNA
acaataagacaccgtgttcttttactataaaattgatcaaagaggaatcgattaaaactttaaagaattctctcattaaaagtttcgaaggccataattgaaattgtacataacattgag

SEQ ID NO: 38658 - DNA, 120 bp, synthetic construct
  source 1..120: mol_type = other DNA
aagttcaaaagaaagtgtgagccaggcatagtggtacactcctgtagtcgaagctactctagaggctgagacaagaggatcacttaaggccataggagtttggggcttcattgctctttg

SEQ ID NO: 38659 - DNA, 120 bp, synthetic construct; identical to SEQ ID NO: 3870
  source 1..120: mol_type = other DNA

SEQ ID NO: 38660 - DNA, 120 bp, synthetic construct
  source 1..120: mol_type = other DNA
ctaaggagaaaaaatcttaaattctagactagtattaccataagtctatcggtatcatttcgaagtgatttaccttcctttcattattgtaaacacttaatactttatgttactttttac

SEQ ID NO: 38661 - DNA, 120 bp, synthetic construct; identical to SEQ ID NO: 11124
  source 1..120: mol_type = other DNA

SEQ ID NO: 38662 - DNA, 120 bp, synthetic construct
  source 1..120: mol_type = other DNA
tttctatggagtctccttaatctcatcagttccttttctgtacttccacagtacttagtttgccttttaagacatatacgtgcaattcaattaagaatgaaaaacaaggccatgtgtggt

SEQ ID NO: 38663 - DNA, 120 bp, synthetic construct
  source 1..120: mol_type = other DNA
gttatccaggtgtggtggctcacacctgtaatcccagctactcagaaggctaaggcaggagaatcacttgaacctgggaagcagaggttgcagtgacggagatcatgccactgcactcca

SEQ ID NO: 38664 - DNA, 120 bp, synthetic construct; identical to SEQ ID NO: 11125
  source 1..120: mol_type = other DNA

SEQ ID NO: 38665 - DNA, 120 bp, synthetic construct
  source 1..120: mol_type = other DNA
gatgttaattcttcacatacaatatatgccttgtggcataaaggctgaatttggtcataaaaccttagttgggtaaggctaggtgggttgtagctttcaaaaatttttcacctagtttag

SEQ ID NO: 38666 - DNA, 120 bp, synthetic construct
  source 1..120: mol_type = other DNA
aggaggatctcttgagcccaggaattccagtttagcctgggcaatatagagagtcctcaactcttaaaggaaaaaaaaaatgacatgaccttgagcaaataatttagcttctctattgta

SEQ ID NO: 38667 - DNA, 120 bp, synthetic construct
  source 1..120: mol_type = other DNA
aattttacagaccaagaaactaaaattcagagaagttgtgacttgcttaggattacaaagtgattattggtggagaatgacgaagtcaaaactaaaaactgggtcctcacaagaagtacc

SEQ ID NO: 38668 - DNA, 120 bp, synthetic construct; identical to SEQ ID NO: 11126
  source 1..120: mol_type = other DNA

SEQ ID NO: 38669 - DNA, 120 bp, synthetic construct
  source 1..120: mol_type = other DNA
caataagatttgttttgttttcttgaccagataggatgcctgtgctctgtcagataaagaagtgatcatgtgatgcatttggtatgccttttttagcactgctaatgtacagccaattta

SEQ ID NO: 38670 - DNA, 120 bp, synthetic construct
  source 1..120: mol_type = other DNA
tggatcctagaaattcagaataaaagtccaccttacccctgttacaactagccattcatcttctttggtatatagtttagctctccttccagtcactcaagtacaacttaggaaactaaa

SEQ ID NO: 38671 - DNA, 120 bp, synthetic construct
  source 1..120: mol_type = other DNA
accatagctgattattgctggagcaggaactcgaatcctagtttcttgacttctagtcaaatgttctcgtagtaacaggtagctttcaccctttttttcttactgatgttgtgctagttc

SEQ ID NO: 38672 - DNA, 120 bp, synthetic construct; identical to SEQ ID NO: 11127
  source 1..120: mol_type = other DNA

SEQ ID NO: 38673 - DNA, 120 bp, synthetic construct
  source 1..120: mol_type = other DNA
attggggagcacacttcaacacgagtcatctaccaaacctcacctccagcattggggagcacacttcaacacgagtcatcttctaccaaacctcacctccagcattggggagcacacttc

SEQ ID NO: 38674 - DNA, 120 bp, synthetic construct
  source 1..120: mol_type = other DNA
tctaccaaacctcacctccagcattggggagcacacttcaacacgagtcatcttctaccaaacctcacctccagcattggggagcacacttcaacacgagtcatcttctaccaaacctca

SEQ ID NO: 38675 - DNA, 120 bp, synthetic construct
  source 1..120: mol_type = other DNA
gagcacacttcaacacgagtcatcttctaccaaacctcacctccagcattggggagcacacttcaacacgagtcatcttctaccaaacctcacctccagcattggggagcacacttcaac

SEQ ID NO: 38676 - DNA, 120 bp, synthetic construct; identical to SEQ ID NO: 11128
  source 1..120: mol_type = other DNA

SEQ ID NO: 38677 - DNA, 120 bp, synthetic construct
  source 1..120: mol_type = other DNA
gagtcatcttctaccaaacctcacctccagcattggggagcacatttcaacacgagtcatcttctaccaaacctcacctccagcattggggagcacatttcaacacgagtcatcttctac

SEQ ID NO: 38678 - DNA, 120 bp, synthetic construct
  source 1..120: mol_type = other DNA
acatttcaacacgagtcatcttctaccaaacctcacctccagcattggggagcacatttcaacacgagtcatcttctaccaaacctcacctccagcattggggagcacatttcaacacga

SEQ ID NO: 38679 - DNA, 120 bp, synthetic construct
  source 1..120: mol_type = other DNA
aaacattgaaaccatatcagacataaaataggaaacttggtccatagcttaggtaaatattaagcaaagaactttgtctttaaatgagtaagctctgcagactttttaaaacactaaatt

SEQ ID NO: 38680 - DNA, 120 bp, synthetic construct
  source 1..120: mol_type = other DNA
tgcatttgtacatagtaatgtgccaagttttatacaaaagcaggaaatatctctgctgctttcaaataattagaacaagggttttctgtgaatagtaaatttaacaccttccagcataga

SEQ ID NO: 38681 - DNA, 120 bp, synthetic construct; identical to SEQ ID NO: 11129
  source 1..120: mol_type = other DNA

SEQ ID NO: 38682 - DNA, 120 bp, synthetic construct
  source 1..120: mol_type = other DNA
aaagggttgttttagtcaaaccaagttcggtgctttgaaatgactcagaggcaagttgcagaaaatattgtagacttagatgtagaaaagatatgagggggcaacgtaagaaactagaaa

SEQ ID NO: 38683 - DNA, 120 bp, synthetic construct
  source 1..120: mol_type = other DNA
aaagtagaaggattgtgtctctaggcctcagactcctttgcatttttctgtcctcaccctgcacatagtgaaaatcataaacccacattattggtgtggtttatagaagaaaaacaactt

SEQ ID NO: 38684 - DNA, 120 bp, synthetic construct
  source 1..120: mol_type = other DNA
ttcctgcttagctttttaaattaactggtgccaatctctcaaataagacaatttatgtaccagcagtaatcaactggaaaatgtaatgaaaaatattcaatttacagcaataacaaatag

SEQ ID NO: 38685 - DNA, 120 bp, synthetic construct; identical to SEQ ID NO: 11130
  source 1..120: mol_type = other DNA

SEQ ID NO: 38686 - DNA, 120 bp, synthetic construct
  source 1..120: mol_type = other DNA
ttataaggagtccagaaataatcccatacccaggggaatttaatgtatgataatttatccacttcaaatcagtggagaaaattcaggataattcagtaaatgctcatgagttatcaggat

SEQ ID NO: 38687 - DNA, 120 bp, synthetic construct
  source 1..120: mol_type = other DNA
gaaaaaaatgagcacgttagaaaaataacagtagaggccaggcactgtggctcatgcctataatcccagcactttgggaggcgagacaggtgggtcatctgaggtcaggagtttgacacc

SEQ ID NO: 38688 - DNA, 120 bp, synthetic construct
  source 1..120: mol_type = other DNA
cagggggcggaggttgcagtgagccgagattgtgccactgcactctagcctgggtgacagagtgagtctccatctcaaaaacaaaaaaacaaacaaacaaacaaaaaaaaaaaacagtag

SEQ ID NO: 38689 - DNA, 120 bp, synthetic construct; identical to SEQ ID NO: 11131
  source 1..120: mol_type = other DNA

SEQ ID NO: 38690 - DNA, 120 bp, synthetic construct
  source 1..120: mol_type = other DNA
tgacaaattatggaaacaagtctgttagaacaaactaacaaaaaataacaacccattcaaaaaggtgggagatgcatctaaacaagcatatcattttgtccttaacttaaaagtggttct

SEQ ID NO: 38691 - DNA, 120 bp, synthetic construct
  source 1..120: mol_type = other DNA
taaggactagtgctatgaacattaaagcaagtatgcttaaaaccaaaaacatattttgactttaggcatttatgcagataaatgtttcgctcttaacccacttggaattcaaagagacta

SEQ ID NO: 38692 - DNA, 120 bp, synthetic construct; identical to SEQ ID NO: 11132
  source 1..120: mol_type = other DNA

SEQ ID NO: 38693 - DNA, 120 bp, synthetic construct
  source 1..120: mol_type = other DNA
aaagattgctggatttttgccctggccatataaataggaaattaagacaggcatattaaaattttttcctgcttatgttgtcttcatctctgggtcaactgatacttatttttttttcca

SEQ ID NO: 38694 - DNA, 120 bp, synthetic construct
  source 1..120: mol_type = other DNA
ataaacaattatacaactggtcatatggtgataagttctctgaagaaaaataatttaggaggaaaaagggggtgggcttttactgttctacatagggaggtcaaagaaggccttgctaat

SEQ ID NO: 38695 - DNA, 120 bp, synthetic construct
  source 1..120: mol_type = other DNA
tcaacatctttaaaaggccttctccaatctgtatttccagctcacctcccagaaattcactcaccatgttcatgtccccaagatctttggggcaaatagaaatttctaaacagtatttca

SEQ ID NO: 38696 - DNA, 120 bp, synthetic construct; identical to SEQ ID NO: 11133
  source 1..120: mol_type = other DNA

SEQ ID NO: 38697 - DNA, 120 bp, synthetic construct
  source 1..120: mol_type = other DNA
gcagggacatctgacagcctatgtcaactgtcttccttgacttctgtcaattatttgtcctaactatgcttgagtaagcgtacaggaatataaaattttatttccttggaataaaatttt

SEQ ID NO: 38698 - DNA, 120 bp, synthetic construct
  source 1..120: mol_type = other DNA
tatatagttgaaatcagagaataatatctttaagatttggaatgggatactgctctttctttttatgtgctcttagataagaactctttctactgtgtcttataaactctgtcataccat

SEQ ID NO: 38699 - DNA, 120 bp, synthetic construct
  source 1..120: mol_type = other DNA
gacttattagaaatagattcttttagacgttaatttttttttcaaaaagatacatatgtacttttctatttatgagtatacctgggtaaatatagaacataggaaaatgtactttgatgt

SEQ ID NO: 38700 - DNA, 120 bp, synthetic construct; identical to SEQ ID NO: 11134
  source 1..120: mol_type = other DNA

SEQ ID NO: 38701 - DNA, 120 bp, synthetic construct
  source 1..120: mol_type = other DNA
tactgttaacaaaaatgcatttttttttttttacctttagtaggtatgcattgtattacaaaacaatgatatcttttggaaaactttcagttaaactagacaaataaggactttggctta

SEQ ID NO: 38702 - DNA, 120 bp, synthetic construct
  source 1..120: mol_type = other DNA
ttttcagatagggtcttgctatgttgcccaggctggtcttgaactcctggactcaagttattctcctgccttagcctcccaaagtgctgggattataggcatgagccactgtgcctggcc

SEQ ID NO: 38703 - DNA, 120 bp, synthetic construct
  source 1..120: mol_type = other DNA
ttttaaaattcttcttcaatgagccaggcctggtggctcatgcctgtaatccttacactttgggaggctgaggcaggaggatcagttgaggccagtagtttgagaacggcctggacaaca

SEQ ID NO: 38704 - DNA, 120 bp, synthetic construct; identical to SEQ ID NO: 11135
  source 1..120: mol_type = other DNA

SEQ ID NO: 38705 - DNA, 120 bp, synthetic construct
  source 1..120: mol_type = other DNA
ttctcagcccaggaacaccaggcctgtagagagacactattcaggggtttccactatacaccattccaccaggcagcttgacctggtgaaaatgtgtaggtccatgtatccaccaccaca

SEQ ID NO: 38706 - DNA, 120 bp, synthetic construct
  source 1..120: mol_type = other DNA
acaggattagttttttttctcattcagtataattttctggagatccattcacgatattgcatgtatcaatagttcatacctttttattgctgactagtattttgtagcatgaatgtacta

SEQ ID NO: 38707 - DNA, 120 bp, synthetic construct
  source 1..120: mol_type = other DNA
ggataaatgcctaatgagtaaaattgaagagttgtatggttattttgcattttctttgataaaagactgcaaaagtattttccagagtggttgaatcattttaaatttccgccagcaata

SEQ ID NO: 38708 - DNA, 120 bp, synthetic construct; identical to SEQ ID NO: 11136
  source 1..120: mol_type = other DNA

SEQ ID NO: 38709 - DNA, 120 bp, synthetic construct
  source 1..120: mol_type = other DNA
gtttctcatccaaaagtttttaattttcataaagtccagtttatcactttttccttttatggattatgcttttggtgtcaaatctaagaactccagatcctgaagattttcccttatact

SEQ ID NO: 38710 - DNA, 120 bp, synthetic construct
  source 1..120: mol_type = other DNA
agttgtttcagcaccatttattttaaaggctatcctttttctattgatttgcttttgtatctttgtcaaaaagggaacaaagaaaagatgagacaaatagatgtagaatttaaactaatt

SEQ ID NO: 38711 - DNA, 120 bp, synthetic construct
  source 1..120: mol_type = other DNA
ataaagacacgaatatgttaaaaggatgaatgaaaagattaggtcctggatggaactgaggttaactgaggataattttaagatttgtactatgggtgattaggtggttgataacacaat

SEQ ID NO: 38712 - DNA, 120 bp, synthetic construct; identical to SEQ ID NO: 11137
  source 1..120: mol_type = other DNA

SEQ ID NO: 38713 - DNA, 120 bp, synthetic construct
  source 1..120: mol_type = other DNA
atggtggcacatgcctgtaatcccagctactcgggaggctgaggcaggagaatcgcttgaacccgggagacggaggttgcagtgagccaagattgcaccactgcactccagcctgggtga

SEQ ID NO: 38714 - DNA, 120 bp, synthetic construct
  source 1..120: mol_type = other DNA
atcttcagaaaggccaaggtctgccaaaattcttctattttctattctagtttcctcttgcgaggcaaaacagtcttagaatttagcttagggtggcacaaaaacatttcctgtaatgta

SEQ ID NO: 38715 - DNA, 120 bp, synthetic construct
  source 1..120: mol_type = other DNA
tagcactactgacttgtacttactttgataatcagaatctcttttaggagcaccttgacttaatagccttggagtcctttactttctagacaagttcatgcttgccttagaaatgtatgt

SEQ ID NO: 38716 - DNA, 120 bp, synthetic construct
  source 1..120: mol_type = other DNA
taagtagcaaaacagagtgaagcgttgttcagagagcaattaggctgacagttaatttgagtagataagtaataacatgagttgagtacaagagaaaactactgcccaagtcctggatag

SEQ ID NO: 38717 - DNA, 120 bp, synthetic construct; identical to SEQ ID NO: 11138
  source 1..120: mol_type = other DNA

SEQ ID NO: 38718 - DNA, 120 bp, synthetic construct
  source 1..120: mol_type = other DNA
ccgtagggctactccatagcagctccctgcctcaaccccagtggaagagatcctagagagggagagaacctaagatggaaactgcagatttttataaattcatctcagaagtgacatgcc

SEQ ID NO: 38719 - DNA, 120 bp, synthetic construct
  source 1..120: mol_type = other DNA
cagtgtcagagattattggggtgatcttggaggctggctgccatagttatgacttagtgtcaattagaaaacaaatcctattatcagttttcttgtttgtgctttgctgtagttaatttg

SEQ ID NO: 38720 - DNA, 120 bp, synthetic construct; identical to SEQ ID NO: 11139
  source 1..120: mol_type = other DNA

SEQ ID NO: 38721 - DNA, 120 bp, synthetic construct
  source 1..120: mol_type = other DNA
ttctcttgcttctgagcacactattcttctgctttttacttaaaataatttgttctttctttaggattcaactcaagcataatctcttccaagaagttttctctaatgctcctaatctga

SEQ ID NO: 38722 - DNA, 120 bp, synthetic construct
  source 1..120: mol_type = other DNA
tagcataaaagttcaaaacaaaggctctgaaatcaaacagtttggaactgtgtcctggatccaccacttattcatgtgactggacaatttactccttgtctacctttcttcacttataaa

SEQ ID NO: 38723 - DNA, 120 bp, synthetic construct
  source 1..120: mol_type = other DNA
ccaaactttttatataggttattttattttcacaacaactctatgtagtgggtactactatgaatgtgctatttctcttagcatctctagatgaatggatcagtgaatgaatgatagatg

SEQ ID NO: 38724 - DNA, 120 bp, synthetic construct; identical to SEQ ID NO: 11140
  source 1..120: mol_type = other DNA

SEQ ID NO: 38725 - DNA, 120 bp, synthetic construct
  source 1..120: mol_type = other DNA
agataatcatgaagacagaattttggtagtgaggtagtgagagaaataaaatagaatcatgaagtataaggtaatgactttgaatcattaatcatagttatcgaaatcaggcatgataga

SEQ ID NO: 38726 - DNA, 120 bp, synthetic construct
  source 1..120: mol_type = other DNA
tgttcagaatattctgccttcttaccgtatcatcactttagcccaaatgctgggaaaaagagaaacaaaagtcttctgtcagctattgaatgtgttatgatttagagaatttctgagatt

SEQ ID NO: 38727 - DNA, 120 bp, synthetic construct
  source 1..120: mol_type = other DNA
agaaattgaactgttatcacaatattgctatttaagaaagaatattaagtcacttttcagaaatttatatcagaattagaaaaatgcagaaatatagtttatacttcttaaggaggtggt

SEQ ID NO: 38728 - DNA, 120 bp, synthetic construct
  source 1..120: mol_type = other DNA
atctgcttaggagcttttcttacatgtagatattctctctttttgggtatatcaaaatcttgggagtaaaagggaaacctggcatgcatgtttaataaagcttccttggggactctgata

SEQ ID NO: 38729 - DNA, 120 bp, synthetic construct; identical to SEQ ID NO: 11141
  source 1..120: mol_type = other DNA

SEQ ID NO: 38730 - DNA, 120 bp, synthetic construct
  source 1..120: mol_type = other DNA
tttggcttcatatatataaagattggggtaaggcgatctgccttgcctttcttctactgtgtcaaagaatttatgatcaagggctagagtcagtattaattatatgattttgttttaacc

SEQ ID NO: 38731 - DNA, 120 bp, synthetic construct
  source 1..120: mol_type = other DNA
gtattcataataaatagaaaatgaaaggagcttaaaaagcaaattgaacacatagttatcagagaaaacaattttaaaattatgattttaaactctcatctgtattgctaagaatgccct

SEQ ID NO: 38732 - DNA, 120 bp, synthetic construct
  source 1..120: mol_type = other DNA
tttctgaactcttattacactggatctgttcagtctgctttaacaaaataccatagatttggtggcttataaacaacagaaatgtatttctcacagttctgaaagctgggaagtccaaga

SEQ ID NO: 38733 - DNA, 120 bp, synthetic construct; identical to SEQ ID NO: 11142
  source 1..120: mol_type = other DNA

SEQ ID NO: 38734 - DNA, 120 bp, synthetic construct
  source 1..120: mol_type = other DNA
aacccaatactagctaataagcctactcctactgtcttagatctagttctgtttcagaattggaagctttaaggattatgaaattctgggaacttggagtaggtccacctagaagtagaa

SEQ ID NO: 38735 - DNA, 120 bp, synthetic construct
  source 1..120: mol_type = other DNA
tagcactaggaataggttaaacttgacacaatttgctatcatagaattatatatatgggtaaagggtaccagttagattcccattggcaaaaacctggtgattttcattctgtggtatag

SEQ ID NO: 38736 - DNA, 120 bp, synthetic construct; identical to SEQ ID NO: 11143
  source 1..120: mol_type = other DNA

SEQ ID NO: 38737 - DNA, 120 bp, synthetic construct
  source 1..120: mol_type = other DNA
ttcttcctacagtatgaattttattttttttttttgaaatggagtcttgctctgttgcccaggctggagtgcagtggcaccatctccactcactgcaagctctgcctcctgggttcacgc

SEQ ID NO: 38738 - DNA, 120 bp, synthetic construct
  source 1..120: mol_type = other DNA
tatgagtttttattcattttgcaaatattcatcatagatatttttgtcttatttcagttagaacaggatttttttctttggattcagaaggtaactttcctactgtacttaggataaatt

SEQ ID NO: 38739 - DNA, 120 bp, synthetic construct
  source 1..120: mol_type = other DNA
aagtgactattttagtttaattacatgaattttgtcatctcccttggagctgcctcccagagctggtatatcagacatcctcaagtaaacctggacccaattttagaaatcttggctaat

SEQ ID NO: 38740 - DNA, 120 bp, synthetic construct
  source 1..120: mol_type = other DNA
acaaagtaacttagtttaaaataaaataaaaatttttgaaatcagacctaatcaaattgatatatctctcattttctttgaaaattttgaccaagatatcaattaataaatccactttga

SEQ ID NO: 38741 - DNA, 120 bp, synthetic construct; identical to SEQ ID NO: 11144
  source 1..120: mol_type = other DNA

SEQ ID NO: 38742 - DNA, 120 bp, synthetic construct
  source 1..120: mol_type = other DNA
aaagagttttagttttaatatctataaacttcaaatgttattccacactcaaaaaatatttctaatgtattaagtcacagtttactaaaatagctaagttttctgattcataaaatgaat

SEQ ID NO: 38743 - DNA, 120 bp, synthetic construct
  source 1..120: mol_type = other DNA
atcattctattttgccagtgtatcttaaattaactagcttttattgtcagtttagtgttcagggcaccaagggtacatttcatactaagattgtgcaagtgagagtaaatgcctccttaa

SEQ ID NO: 38744 - DNA, 120 bp, synthetic construct
  source 1..120: mol_type = other DNA
aaaaaagataagctgaaaaacatttttgttgatgacatgctattgctgaaataaaaacccagaacatagtgatgtgtaggaaaaaactctctcaaaccatgtttttcttctgctctcata

SEQ ID NO: 38745 - DNA, 120 bp, synthetic construct; identical to SEQ ID NO: 11145
  source 1..120: mol_type = other DNA

SEQ ID NO: 38746 - DNA, 120 bp, synthetic construct
  source 1..120: mol_type = other DNA
cccagcactttgggaggtcgaggtgggcagatcacttgaggccaggagttcaagaacagcctggccaacatggcaaaaccccgtctctactaaaaatacaaaaattatctgggtgtggtg

SEQ ID NO: 38747 - DNA, 120 bp, synthetic construct
  source 1..120: mol_type = other DNA
aagactgtctgaaaaaacaaaaagaaaaaatcaaaggaaacacacttaccggtttattacaaaggatattgcaaaggatacagatgaggagatgcgtagggtgaggtatgggagcagggg

SEQ ID NO: 38748 - DNA, 120 bp, synthetic construct
  source 1..120: mol_type = other DNA
cattcctcccctacactatagggcaaaaaccatctctggggagggtcttaaagacacacaatttacaatgatgggggaaaaattagagtcctgccttggaacaggttaaaggagggcaag

SEQ ID NO: 38749 - DNA, 120 bp, synthetic construct
  source 1..120: mol_type = other DNA
agtagtttttttttttttaatttcacagatcaatagagttaactcctgagttatatgcatacaaccccaaagttgtttgctgtctggagctgtgcctacacccgcctggcatattcttga

SEQ ID NO: 38750 - DNA, 120 bp, synthetic construct; identical to SEQ ID NO: 11146
  source 1..120: mol_type = other DNA

SEQ ID NO: 38751 - DNA, 120 bp, synthetic construct
  source 1..120: mol_type = other DNA
caacctcttctttagcaacctctccactatcccacccgggtactttagttctggtggcctctttcattttctgaaagaacatcagtttcttagcatatgatctttcatcttttggaagat

SEQ ID NO: 38752 - DNA, 120 bp, synthetic construct
  source 1..120: mol_type = other DNA
attcttcatgagagaaccctgttctttcataggatttttctgaatttgtcatcacatacttatttccttgtttgtgtgcctcttctcaccagaccctgagcaccgtgtaagtaggaacaa

SEQ ID NO: 38753 - DNA, 120 bp, synthetic construct; identical to SEQ ID NO: 11147
  source 1..120: mol_type = other DNA

SEQ ID NO: 38754 - DNA, 120 bp, synthetic construct
  source 1..120: mol_type = other DNA
gatggggtttcaccatgttggccaggctggtcttgaactcctgatctcaggtgatccacctgcctcagccttccaaggtgctgggattacaggcctgagccaccatgcctggccccattt

SEQ ID NO: 38755 - DNA, 120 bp, synthetic construct
  source 1..120: mol_type = other DNA
tgtgccaggtagttttaaacattggggatactattgaataagatagacaaagcccaagccttcctgcatcttgcttgctagtagcgagataataaataagaaaataaatgaatttataac

SEQ ID NO: 38756 - DNA, 120 bp, synthetic construct
  source 1..120: mol_type = other DNA
tatttgaggagatatgtgaataatggagtggggtgagtcataggaagcatggtcaaagagtattttgggcagaggaaacagcaagtacaaaaacccagagaaaggaagaattatgccaca

SEQ ID NO: 38757 - DNA, 120 bp, synthetic construct; identical to SEQ ID NO: 11148
  source 1..120: mol_type = other DNA

SEQ ID NO: 38758 - DNA, 120 bp, synthetic construct
  source 1..120: mol_type = other DNA
tatgacttgcctggtgtcttggataagtatgagagaaagaataataatgatgactccttgtcttttttgctttgggcaactggatacaaggagtgatttaatgatatggtaaagactagg

SEQ ID NO: 38759 - DNA, 120 bp, synthetic construct
  source 1..120: mol_type = other DNA
ggctatttagtatctgacaaatggagcattgttacatttatggctctacttcctagcatagacatacaacatatactgggtggatggatggataactaggcatacagtcatacgtttgag

SEQ ID NO: 38760 - DNA, 120 bp, synthetic construct
  source 1..120: mol_type = other DNA
tcacttctcatatactatgatttaagttactactattatcattagtatctctgctctacagttgagaagcttattgagggtcatgtagctacaggtggccaggatttgaacccatgtact

SEQ ID NO: 38761 - DNA, 120 bp, synthetic construct
  source 1..120: mol_type = other DNA
tctatatatctgtgtgaccatttggtttggggtgatggagtgataaaagtgatatttgaatgaaatatgaagactattggtgaaaaatgccaccttaatccttggaagagaaatttactt

SEQ ID NO: 38762 - DNA, 120 bp, synthetic construct; identical to SEQ ID NO: 11149
  source 1..120: mol_type = other DNA

SEQ ID NO: 38763 - DNA, 120 bp, synthetic construct
  source 1..120: mol_type = other DNA
ctcagatgaaagccattatttacactgcagtgcccctaatgaatataggaaaagatgacttgtcaacaaaaattatatgattggagttgtagagtctgcttctttttccaaagcatacat

SEQ ID NO: 38764 - DNA, 120 bp, synthetic construct
  source 1..120: mol_type = other DNA
actcatgctcaccatctccacctttaagaattatttctgtagtgagtcactattacagataataacccatctcctgttggtctgctgaaactgaaaaagggctgaaaattgttaaacttt

SEQ ID NO: 38765 - DNA, 120 bp, synthetic construct; identical to SEQ ID NO: 11150
  source 1..120: mol_type = other DNA

SEQ ID NO: 38766 - DNA, 120 bp, synthetic construct
  source 1..120: mol_type = other DNA
tgaggttcagagagcaaaacgtttcattgctagtaaacttcaaactagtaaacaagaatttgagcttatatatctctaattccaggacctgtgcttttattgctaatggcttttttaaaa

SEQ ID NO: 38767 - DNA, 120 bp, synthetic construct
  source 1..120: mol_type = other DNA
aggcatgagtaacttcctatttgaaagaactgttgcgtaatcgccgtttttttttctttctttttaaatttcttctccctgcatagtttctgcatctcccagatcgcctttttgttattt

SEQ ID NO: 38768 - DNA, 120 bp, synthetic construct
  source 1..120: mol_type = other DNA
attgtatagttatttggtagagcaatttcttaagaaacccccattgcgtatctttaggttttttatcctgttactcagtacctcactgcccaaagtacctggtatcgccactgccacatc

SEQ ID NO: 38769 - DNA, 120 bp, synthetic construct; identical to SEQ ID NO: 11151
  source 1..120: mol_type = other DNA

SEQ ID NO: 38770 - DNA, 120 bp, synthetic construct
  source 1..120: mol_type = other DNA
cgttttagtggggttttatgagagagagttaatgtctgcattcatttggcatctttaaccaatgttgtttatcttctgcagattccatttaatttagtttgttgtagttttagtcatcca

SEQ ID NO: 38771 - DNA, 120 bp, synthetic construct
  source 1..120: mol_type = other DNA
tcagatggatagattgcaaaaattttctcccattctgtaggttgtctgtgcactctgatgatatatatatatttttttttttttgctgtgcagaagctgttgaatttaattagatcccac

SEQ ID NO: 38772 - DNA, 120 bp, synthetic construct; identical to SEQ ID NO: 11152
  source 1..120: mol_type = other DNA

SEQ ID NO: 38773 - DNA, 120 bp, synthetic construct
  source 1..120: mol_type = other DNA
ctgttccattcgtctgtgtgtctgcttttgtactaataccatgctgttttggttactgtagccttgtagtatagtttgaagtcaggtagtgtgatgtctccagctttgttctttttgctt

SEQ ID NO: 38774 - DNA, 120 bp, synthetic construct
  source 1..120: mol_type = other DNA
agcattgaatctataaataactttgggctgtatggtcagtcttacaatattgattctttctatccataagcatggaatgtttttccatttgtttgtgtcctctttgatttctttgagcag

SEQ ID NO: 38775 - DNA, 120 bp, synthetic construct; identical to SEQ ID NO: 11153
  source 1..120: mol_type = other DNA

SEQ ID NO: 38776 - DNA, 120 bp, synthetic construct
  source 1..120: mol_type = other DNA
gaatgcttccagcttttccccattcagtattatgttggctgtggatttgtcatagatggctctttgagatacattccttgaatacctagtttgttcagagtttttaacattatgttgaat

SEQ ID NO: 38777 - DNA, 120 bp, synthetic construct
  source 1..120: mol_type = other DNA
tgaagccagcttgatcatggtagataagctttttggtgtgtgctggatttggtttgccagtattttattgtggatttttgcattgctgttcatcagagatattggcctgaagttttcttt

SEQ ID NO: 38778 - DNA, 120 bp, synthetic construct; identical to SEQ ID NO: 11154
  source 1..120: mol_type = other DNA

SEQ ID NO: 38779 - DNA, 120 bp, synthetic construct
  source 1..120: mol_type = other DNA
ggggtaagggtggtatctcccttgtcatttctgattgcgtttattccattcttctttctttccttctatattagtctagctagtggtctattttattaattttttcaaaaaataagctcc

SEQ ID NO: 38780 - DNA, 120 bp, synthetic construct
  source 1..120: mol_type = other DNA
gtatcaatattgtactagcttcataaaatgagatgaggaatgtttctagtttttccattccaggaagaaaatctgagtaaaagtggaattatctgtcccttgaatgtttggtagaattta

SEQ ID NO: 38781 - DNA, 120 bp, synthetic construct
  source 1..120: mol_type = other DNA
taatttgtatttttgtagtaattttccacttggtctacgttttccaatttattgatataaaattattcataataattccctattatctttttaatctttgtgattttgtcccatttttca

SEQ ID NO: 38782 - DNA, 120 bp, synthetic construct; identical to SEQ ID NO: 11155
  source 1..120: mol_type = other DNA

SEQ ID NO: 38783 - DNA, 120 bp, synthetic construct
  source 1..120: mol_type = other DNA
attgggaatttcgaagtagagaaaaatatttcattctgacttttaaattgccactgtcaattgtgcctaaaattcatagtacttaccatgtcaaacaatatgattttgatatgtacctgg

SEQ ID NO: 38784 - DNA, 120 bp, synthetic construct
  source 1..120: mol_type = other DNA
caaaggaccgagaaggaccaactgatcaccttgaatctgcttgtcctcttaatcttcctctccagaataatcacactgcagcagatatgtaagcaaaatatatgttatgttgaccattca

SEQ ID NO: 38785 - DNA, 120 bp, synthetic construct
  source 1..120: mol_type = other DNA
cccaaataaagtcatataaaagagtacagagtgctactgaatcacctaggatttgcataatgagagcagttttcatggcagagttggcagtttaggtggaataggatttcaatgtggaaa

SEQ ID NO: 38786 - DNA, 120 bp, synthetic construct; identical to SEQ ID NO: 11156
  source 1..120: mol_type = other DNA

SEQ ID NO: 38787 - DNA, 120 bp, synthetic construct
  source 1..120: mol_type = other DNA
gaaagaaaaagggtatggtaatccacatgttgcaagagaaaaagagcaggtagaggaatcgtcaattatctatccatctcatgctgagtgaatcgacattttacataagataaggtgaac

SEQ ID NO: 38788 - DNA, 120 bp, synthetic construct
  source 1..120: mol_type = other DNA
gcaatcactaactgtgtgctgggcaatggcctaagtacttaagatttattttttcatttaatcttcataacagcccataaggtaacagatactgctgtcagcctgttaactataaaatag

SEQ ID NO: 38789 - DNA, 120 bp, synthetic construct
  source 1..120: mol_type = other DNA
tattttgtttctgtttaattctgtgtaggaactgacattacagtattctgtattagtgcaggggccattttccagagatgtcattttcatgctaacttgtacccaaagtgtttctggcat

SEQ ID NO: 38790 - DNA, 120 bp, synthetic construct; identical to SEQ ID NO: 11157
  source 1..120: mol_type = other DNA

SEQ ID NO: 38791 - DNA, 120 bp, synthetic construct
  source 1..120: mol_type = other DNA
ggcaagctgatgctagctaggcaaaaacctgcatgatgtgcattccaggcagaacaaacagcaagtgcagtggctgtagggcagatcaaacttagctggatttaggaacagaaagaaaga

SEQ ID NO: 38792 - DNA, 120 bp, synthetic construct
  source 1..120: mol_type = other DNA
gtttggaggaaagggacagggcaaggcaaaaagcgaggaaaccaatttggagactatttctgtagttcagatgagggatgtaggtgacttggtctaaggtatggtattagaaatagaaat

SEQ ID NO: 38793 - DNA, 120 bp, synthetic construct
  source 1..120: mol_type = other DNA
ctagatgtaatgtggagctattctttgagatgggaaaataaatccagagctctgctttgttcttattaagtctgagattcgagtagttatatccggtaggtaattggagatttacaccta

SEQ ID NO: 38794 - DNA, 120 bp, synthetic construct; identical to SEQ ID NO: 11158
  source 1..120: mol_type = other DNA

SEQ ID NO: 38795 - DNA, 120 bp, synthetic construct
  source 1..120: mol_type = other DNA
tttgccagctaccaaaagaaaatcagaaagtagatctagattattctgttaaataggggcagcacagaacgataatatttgtaatatctctgccttgagttatgcctgacatatttagta

SEQ ID NO: 38796 - DNA, 120 bp, synthetic construct
  source 1..120: mol_type = other DNA
atcgctaaaaaaatttttagaaggagaatcacaaaaacaagataacagtatttaatatcaataaattgttttttaagctggaatcaccttatggtctcaataccactataattattaaaa

SEQ ID NO: 38797 - DNA, 120 bp, synthetic construct
  source 1..120: mol_type = other DNA
tcccagcttgcatttaaatagtctgctataataccaattaaatagacaagatgtatctgggtgtacaaccttgaagtgtatgtataatctgtgattcttagccaacttgaaatgaagact

SEQ ID NO: 38798 - DNA, 120 bp, synthetic construct; identical to SEQ ID NO: 11159
  source 1..120: mol_type = other DNA

SEQ ID NO: 38799 - DNA, 120 bp, synthetic construct
  source 1..120: mol_type = other DNA
tgcgagatctttcttgactattcagagtcgtttttctggccggaaacctctgtgaccggtggcgcccttgatcaatttttgctcaggcccaccgggctcatttcagccccttggtctgac

SEQ ID NO: 38800 - DNA, 120 bp, synthetic construct
  source 1..120: mol_type = other DNA
gctggctgctgcagcggggcgggcagctccaggtgctggcacaggtgccaactctctgtgaggctgcacctggaccagacacaccacaagcggtttccacagctggcactggggaacaat

SEQ ID NO: 38801 - DNA, 120 bp, synthetic construct
  source 1..120: mol_type = other DNA
tctttacccacaacatggcgagcaaggggcatgtttcagccctgtttgtgttacagccctttcagcctcgccatttggtgggtcctgagttcttgtcctgcagccaggaagaatgaggta

SEQ ID NO: 38802 - DNA, 120 bp, synthetic construct; identical to SEQ ID NO: 11160
  source 1..120: mol_type = other DNA

SEQ ID NO: 38803 - DNA, 120 bp, synthetic construct
  source 1..120: mol_type = other DNA
ggccactagtgggcccagaaaaggtaccacaagtcctcactcctgtccgtgggactggcagcgcccacccccagccttcaggcgctccctggcctgaaggtggggcctcaacagggactc

SEQ ID NO: 38804 - DNA, 120 bp, synthetic construct
  source 1..120: mol_type = other DNA
cgcccaaagtctggagagggctgaggcggcagggggctggcgtgtcagcgctgccttgagcgtgcgcacatctggctgggctgcagcagcacccaggctcagccctgactttgctccgag

SEQ ID NO: 38805 - DNA, 120 bp, synthetic construct
  source 1..120: mol_type = other DNA
gggtccacagccacggtttgggtagctgcagctgcactggggagggtgggactcctacctgctccccagcccagagagcacagggatgcctgggtccgcagcggtggcttgggcggctgc

SEQ ID NO: 38806 - DNA, 120 bp, synthetic construct; identical to SEQ ID NO: 11161
  source 1..120: mol_type = other DNA

SEQ ID NO: 38807 - DNA, 120 bp, synthetic construct
  source 1..120: mol_type = other DNA
ttttattcaagtaagaattatgctgagctttacaggcatattgtcagatattatccttaggttagagcagtggttttcaaagtgtcgttcccaaccagcagaatccacatcacctggaaa

SEQ ID NO: 38808 - DNA, 120 bp, synthetic construct
  source 1..120: mol_type = other DNA
ttgtagaaatgagaattctggggctccagcctagacctgctcaatcagaaactcttaagatagggccctcaaaaccttgttttaacaaccctccagctaagtctgatgtatgctaaagtt

SEQ ID NO: 38809 - DNA, 120 bp, synthetic construct
  source 1..120: mol_type = other DNA
ttatggattcctttttgccaaatttgcattttcagtagtattttttataaactaaataaattacatattgcagtcattttacatataggtaatctacaagtttaccatttttcaacagag

SEQ ID NO: 38810 - DNA, 120 bp, synthetic construct; identical to SEQ ID NO: 3905
  source 1..120: mol_type = other DNA

SEQ ID NO: 38811 - DNA, 120 bp, synthetic construct
  source 1..120: mol_type = other DNA
ctaaagaacttattcatgtaaccaaacaccacctgttcccccaaacacctattttttaaaaaaactcatgcctacataatgaagcctccataaaaactcaaaaggacctggttctgggag

SEQ ID NO: 38812 - DNA, 120 bp, synthetic construct
  source 1..120: mol_type = other DNA
aatatgcctcataataaaccagtaaacatgtttctctgggggaaagaaaagagtggtagaaaagaggtttctgttaaaatgctacttaacagcattataattagagcgatttcatgattt

SEQ ID NO: 38813 - DNA, 120 bp, synthetic construct
  source 1..120: mol_type = other DNA
cacccagaattagaacatatcatctggacccttttccagcacaccctgcagaatgagtatgaactcatgagagacaggcatttggaccaagtaagaaaatcaagcacttcaccttctctc

SEQ ID NO: 38814 - DNA, 120 bp, synthetic construct; identical to SEQ ID NO: 11163
  source 1..120: mol_type = other DNA

SEQ ID NO: 38815 - DNA, 120 bp, synthetic construct
  source 1..120: mol_type = other DNA
gtctcaaactcctgacctcaggtgatccgtctacctaaggcctcccaaagtgttgggattacaggcatgagccaccgcacccagccttgttaagtgatttctaaagaaaatattagattc

SEQ ID NO: 38816 - DNA, 120 bp, synthetic construct
  source 1..120: mol_type = other DNA
ctgcttatttaatgacacaaaagatcttacctgtaaaaaaaatagctgaagaaccttcttatcactggctttttctatgtagtagtgagctagatatcattttagtgtgaaaaaagcatg

SEQ ID NO: 38817 - DNA, 120 bp, synthetic construct
  source 1..120: mol_type = other DNA
ttttcatctcctcctttttctctataaaataggttaataagaacaatatacttttggctgggtgcagtggctcacgcctgtaatcctagcactttgggaggctgaggtgggcagatcgct

SEQ ID NO: 38818 - DNA, 120 bp, synthetic construct
  source 1..120: mol_type = other DNA
actgggaggatttcttgagcccaggaggtggaggttgcaagtgagctgagatcacaccactgtgctccaacctgggtaacagagcaagaccttgtctcaaaaaaattttgttaattaaaa

SEQ ID NO: 38819 - DNA, 120 bp, synthetic construct; identical to SEQ ID NO: 11164
  source 1..120: mol_type = other DNA

SEQ ID NO: 38820 - DNA, 120 bp, synthetic construct
  source 1..120: mol_type = other DNA
cattccttttcattgccagacaatattccattgtatggatatacaccacattatgcttatcattcataaagtgataaacatttgggttgtttccactttttggctattatgaataatgtt

SEQ ID NO: 38821 - DNA, 120 bp, synthetic construct
  source 1..120: mol_type = other DNA
tggctataccattttacatgcctaccaataatgtatgaggttctaatttctctatatcctcaccaacttttttatcttttttttttaataatagccatcctagtgggtataaaatggcat

SEQ ID NO: 38822 - DNA, 120 bp, synthetic construct; identical to SEQ ID NO: 11165
  source 1..120: mol_type = other DNA

SEQ ID NO: 38823 - DNA, 120 bp, synthetic construct
  source 1..120: mol_type = other DNA
cttgtgttccacccgccttggcctcccaaagtgctgggattacaggcatgagccaccatgcccagcccattttgttttgagacatggtcttactctgtcacccaggctggagtgcagtga

SEQ ID NO: 38824 - DNA, 120 bp, synthetic construct
  source 1..120: mol_type = other DNA
ttgtacagatagggttttgccgtgttgctcaggctggtcttgaatggttgagctcaagtaagccacccaccttggcctcccaaagtgctaggattacaggcatgagccaccatgcccaga

SEQ ID NO: 38825 - DNA, 120 bp, synthetic construct
  source 1..120: mol_type = other DNA
tgagttgtttcactttcttgttagtgtcctttgaaacacaagttttttattttgatgatgtccaatttatgtagttgttttcttgttattgatgctttagtgtcatatctaagaaaccag

SEQ ID NO: 38826 - DNA, 120 bp, synthetic construct; identical to SEQ ID NO: 11166
  source 1..120: mol_type = other DNA

SEQ ID NO: 38827 - DNA, 120 bp, synthetic construct
  source 1..120: mol_type = other DNA
caatagtaggtaagagcaagaatgttgcagaagcaatgagtacttaaattaggctataaagttcatacaaataaagaaaatctgacattttaaagtcacagggaatcattttcagatctt

SEQ ID NO: 38828 - DNA, 120 bp, synthetic construct
  source 1..120: mol_type = other DNA
agatcaagaaacaaaacattgtcagcaacacataagactctcttacatgctcttccagtcaccatagcctccttaccaccaccaccaagtgtgttcaatattattttatctaatagtttg

SEQ ID NO: 38829 - DNA, 120 bp, synthetic construct
  source 1..120: mol_type = other DNA
ggtgatcagtcctgaataattgagccttggtgatttgcattttgttctttaaacacactttgggttaaacacttcatgtagactttcaaactgagctcagtatggaaagaaataactctg

SEQ ID NO: 38830 - DNA, 120 bp, synthetic construct; identical to SEQ ID NO: 11167
  source 1..120: mol_type = other DNA

SEQ ID NO: 38831 - DNA, 120 bp, synthetic construct
  source 1..120: mol_type = other DNA
atttatttgtaacttaaatagaattggaaagataagggtaattatgaaattacccatattcatagttttttataaagttaataaataatattttatccctgtaataagcaggtatttgta

SEQ ID NO: 38832 - DNA, 120 bp, synthetic construct
  source 1..120: mol_type = other DNA
acattttgtgtttccggtttaccttccctttagagaaatagtagtagtaaaatatacttggtatgacacatttcatattgttctgtggaaagtgagttgaggggtatttttcccatttat

SEQ ID NO: 38833 - DNA, 120 bp, synthetic construct
  source 1..120: mol_type = other DNA
tttccctaaaatttgagtgaaatctaactatcactaaaatatagtgcttttactaaatgtctacttcttgcaattgcgtaatgtatactgaaacccttatagattgggggggataccggg

SEQ ID NO: 38834 - DNA, 120 bp, synthetic construct; identical to SEQ ID NO: 11168
  source 1..120: mol_type = other DNA

SEQ ID NO: 38835 - DNA, 120 bp, synthetic construct
  source 1..120: mol_type = other DNA
ctgttcttcctcagacattcaaacgtgttttgatcaaagaagaggagtatgattctattatagtattctataactcggtcttcatgcagagactgaaaacaaatattttgcagtatgctt

SEQ ID NO: 38836 - DNA, 120 bp, synthetic construct
  source 1..120: mol_type = other DNA
tacctcacattcctcgaagcccttacaagtttcctagttcacccttacggattcctggagggaacatctatatttcacccctgaagagtccatataaaatttcagaaggtctgccaacac

SEQ ID NO: 38837 - DNA, 120 bp, synthetic construct; identical to SEQ ID NO: 11169
  source 1..120: mol_type = other DNA

SEQ ID NO: 38838 - DNA, 120 bp, synthetic construct
  source 1..120: mol_type = other DNA
ggagtgccagacagtgggcgcaggccagtgtgtgtgcgcaccgtgtgcgagccgaagcagggcgaggcattgcctcacctgggaagcgcaaggggtcagggagttccctttccgagtcaa

SEQ ID NO: 38839 - DNA, 120 bp, synthetic construct
  source 1..120: mol_type = other DNA
cctacgcccacggaatctcgctgattgctagcacagcagtctgtgatcaaactgcaaggcggcagcgaggctgggggaggggcgcctgccattgcccaggcttgcttaggtaaacaaagc

SEQ ID NO: 38840 - DNA, 120 bp, synthetic construct; identical to SEQ ID NO: 11170
  source 1..120: mol_type = other DNA

SEQ ID NO: 38841 - DNA, 120 bp, synthetic construct
  source 1..120: mol_type = other DNA
catctacaccgaaaacccatctgtacatcaccatcatcaaagaccaaaagtagataaaaccacaaagatggggaaaaaacagaacagaaaaactggaaactctaaaacgcagagcgcctc

SEQ ID NO: 38842 - DNA, 120 bp, synthetic construct
  source 1..120: mol_type = other DNA
cattcaaaccaaaggcaaagaagttgaaaactttgaaaaaaatttagaagaatatataactagaataaccaatacagagaagtgcttaaaggagctgatggagctgaaaaccaaggctcg

SEQ ID NO: 38843 - DNA, 120 bp, synthetic construct
  source 1..120: mol_type = other DNA
aataaaaagaaatgagcaaagcctccaagaaatatgggactatgtgaaaagaccaaatctacgtctgattggtgtacctgaaagtgatgtggagaatggaaccaagttggaaaacactct

SEQ ID NO: 38844 - DNA, 120 bp, synthetic construct; identical to SEQ ID NO: 11171
  source 1..120: mol_type = other DNA

SEQ ID NO: 38845 - DNA, 120 bp, synthetic construct
  source 1..120: mol_type = other DNA
agacaagcaaatgctgagagattttgtcaccaccaggcctgccctaaaagagctcctgaaggaagcgctaaacatggaaaggaacaaccggtaccagccgctgcaaaatcatgccaaaat

SEQ ID NO: 38846 - DNA, 120 bp, synthetic construct
  source 1..120: mol_type = other DNA
aaattctgcaattaaaagacacagactggcaagttggataaagagtcaagacccatcagtgtgctgtattcaggaaacccatctcacgtgcagagacacacataggctcaaaataaaagg

SEQ ID NO: 38847 - DNA, 120 bp, synthetic construct
  source 1..120: mol_type = other DNA
aatggtaaagggatcaattcaacaagaggagctaactatcctaaatgtttatgcacccaatacaggagcacccagattcataaagcaagtcctgagtgacctacaaagagacttagactc

SEQ ID NO: 38848 - DNA, 120 bp, synthetic construct; identical to SEQ ID NO: 11172
  source 1..120: mol_type = other DNA

SEQ ID NO: 38849 - DNA, 120 bp, synthetic construct
  source 1..120: mol_type = other DNA
tgactactgggtacataacgaaatgaaggcagaaataaagatgttctttgaaaccaacgagaacaaagacaccacataccagaatctctgggacacattcaaagcagtgtgtagagggaa

SEQ ID NO: 38850 - DNA, 120 bp, synthetic construct
  source 1..120: mol_type = other DNA
agaaataactaaaatcagagcagaactgaaggaaatagagacacaaaaaacccttcaaaaaaatcaatgaatccaggagctggttttttgaaaggatcaacaaaattgatagaccgctag

SEQ ID NO: 38851 - DNA, 120 bp, synthetic construct
  source 1..120: mol_type = other DNA
tctacgcaaataaactagaaaatctagaggaaatggatacattcctcgacacatacactctcccaagactaaaccaggaagaagttgaatctctgaatagaccaataacaggctctgaaa

SEQ ID NO: 38852 - DNA, 120 bp, synthetic construct
  source 1..120: mol_type = other DNA
caatagaaaaagagggaatcctccctaactcattttatgaggccagcatcattctgataccaaagccgggcagagacacagccaaaaaagagaattttagaccaatatccttgatgaaca

SEQ ID NO: 38853 - DNA, 120 bp, synthetic construct; identical to SEQ ID NO: 11173
  source 1..120: mol_type = other DNA

SEQ ID NO: 38854 - DNA, 120 bp, synthetic construct
  source 1..120: mol_type = other DNA
gacagggatgccctctctcaccgctcctattcaacatagtgttggaagttctggccagggcaatcaggcaggagaaggaaataaagggtattcaattaggaaaagaggaagtcaaattgt

SEQ ID NO: 38855 - DNA, 120 bp, synthetic construct
  source 1..120: mol_type = other DNA
cacaagcattcttatacaccaacaacagacaaacagagagccaaatcatgagtgaactcccattcacaattgcttcaaagagaataaaatacctaggaatccaacttacaagagatgtga

SEQ ID NO: 38856 - DNA, 120 bp, synthetic construct
  source 1..120: mol_type = other DNA
tgcccaaggtaatttacagattcgatgccatccccatcaagctaccaatgactttcttcacagaattggaaaaaactactttaaagttcatatggaaccaaaaaagagcccgcatcgcca

SEQ ID NO: 38857 - DNA, 120 bp, synthetic construct
  source 1..120: mol_type = other DNA
aatggaacagaacagagccctcagaaataatgccgcatatctacaactatctgatctttgacaaacctgagaaaaacaagcaatggggaaaggattccctatttaataaatggtgctggg

SEQ ID NO: 38858 - DNA, 120 bp, synthetic construct; identical to SEQ ID NO: 11174
  source 1..120: mol_type = other DNA

SEQ ID NO: 38859 - DNA, 120 bp, synthetic construct
  source 1..120: mol_type = other DNA
aacaaatttacaagaaaaaaacaaccctatcaaaaagtgggcgaaggacatgaacagacacttctcaaaagaagacatttatgcagccaaaaaacacatgaagaaatgctcatcatcact

SEQ ID NO: 38860 - DNA, 120 bp, synthetic construct
  source 1..120: mol_type = other DNA
acttttacactgttggtgggactgtaaactagttcaaccattgtggaagtcagtgtagcgattcctcagggatctagaactagaaataccatttgacccagccatcccattactgggtat

SEQ ID NO: 38861 - DNA, 120 bp, synthetic construct
  source 1..120: mol_type = other DNA
gattaagaaaatgtggcacatatacaccatggaatactatgcagccataaaaaatgatgagttcatgtcctttgtagggacatggatgaaattggaaaccatcattctcagtaaactatc

SEQ ID NO: 38862 - DNA, 120 bp, synthetic construct
  source 1..120: mol_type = other DNA
gggggagggatagcattgggagatatacctaatgctagatgacacgttagtgggtgcagcacaccagcatggcacatgtatacatatgtaactaacctgcacaatgtgcacatgtaccct

SEQ ID NO: 38863 - DNA, 120 bp, synthetic construct; identical to SEQ ID NO: 11175
  source 1..120: mol_type = other DNA

SEQ ID NO: 38864 - DNA, 120 bp, synthetic construct
  source 1..120: mol_type = other DNA
ctcaccttgggcaggtctctatctgtacttcacaagggtgctgtggatcagggaaatgatgagtatgaagctgttttaaattctcagatgaaaggttgtatgcaactacaaatcattata

SEQ ID NO: 38865 - DNA, 120 bp, synthetic construct
  source 1..120: mol_type = other DNA
tgaaactgactttatttgtgtgaagtaggaggcagattagctagtatagttaatgtagtctcatctcagaaattatcagcccatatggttgtacctaatgggcaagaaaagggggcatat

SEQ ID NO: 38866 - DNA, 120 bp, synthetic construct
  source 1..120: mol_type = other DNA
aaatgctctcatgtgtctctgtatcatcctttatttatttggtgttcttgtagttggatatctgtgtactgatatctactacttgttctaagctgctaagatgccacgtcatgtctattt

SEQ ID NO: 38867 - DNA, 120 bp, synthetic construct; identical to SEQ ID NO: 11176
  source 1..120: mol_type = other DNA

SEQ ID NO: 38868 - DNA, 120 bp, synthetic construct
  source 1..120: mol_type = other DNA
ttccatgttcatgttttcaaatctttgtcgagtcatgtcaggctaatgatgttcttcagctttattataaagaacataaattatatggttcaaataaagacagactaataaagatttctg

SEQ ID NO: 38869 - DNA, 120 bp, synthetic construct
  source 1..120: mol_type = other DNA
atgaaagaaatttgataacttacccattgatttatgaagaactaagtaggggtaaccttgaaacttgcctttgccctccctaaatatgggcaatggcagaatatgttcttgcagacctat

SEQ ID NO: 38870 - DNA, 120 bp, synthetic construct; identical to SEQ ID NO: 11177
  source 1..120: mol_type = other DNA

SEQ ID NO: 38871 - DNA, 120 bp, synthetic construct
  source 1..120: mol_type = other DNA
tgcattgtaagtataaaagaaattaaagctttctataatttgaatttccaaatgcagttattcaaacacctcatccaggcatattgcatagaattttatgagatatatatatctcagatt

SEQ ID NO: 38872 - DNA, 120 bp, synthetic construct
  source 1..120: mol_type = other DNA
tacgtgagctgtttttgctcacaacatttctatcaccaaatgtgtgagatttttttctcacccaaatctattcttcaactctctggtgttctacaattcaattcaattctgacactaatt

SEQ ID NO: 38873 - DNA, 120 bp, synthetic construct
  source 1..120: mol_type = other DNA
aatacgaagttggggggttccgatagtgcctcttccttacagtttgatccactgccagaactactcacaaaactctggaaaatattctacttactattatcagttcatcataaaagatac

SEQ ID NO: 38874 - DNA, 120 bp, synthetic construct
  source 1..120: mol_type = other DNA
agttggggtgcaccaccttcctagcacttagacatgtttaccaactccaaagatctcccaaccttattgttgaggggtttttatgggggtttcattatataggcataattgattaactca

SEQ ID NO: 38875 - DNA, 120 bp, synthetic construct; identical to SEQ ID NO: 11178
  source 1..120: mol_type = other DNA

SEQ ID NO: 38876 - DNA, 120 bp, synthetic construct
  source 1..120: mol_type = other DNA
atactccaaaatgtaagcccgatatccaaatgtcaccagcctgtccctgcctactggtctccttccatacatatgcactttttgcttgtccttcctctcagacttctaggatattctttt

SEQ ID NO: 38877 - DNA, 120 bp, synthetic construct
  source 1..120: mol_type = other DNA
ccacaaccctagttggccttccattaaagtcactaattcagcagtcccatattcaatatgcattactgttaatatgttgcaccatctccattcccctgagagcttatatttttaattttt

SEQ ID NO: 38878 - DNA, 120 bp, synthetic construct; identical to SEQ ID NO: 11179
  source 1..120: mol_type = other DNA

SEQ ID NO: 38879 - DNA, 120 bp, synthetic construct
  source 1..120: mol_type = other DNA
cgcttattatctccatttctgtgggtcaataatctaggcatgacttagctgggccagagtttctccaaagtctgtgatcaaggtgtcagttgggctgggcctgcagtcatctcaaggctc

SEQ ID NO: 38880 - DNA, 120 bp, synthetic construct
  source 1..120: mol_type = other DNA
caacatggcagcttgctttgcccagagcagggactctgagggaggcagggaaataaagagcaagagagaggtcacagtcttattgtaatctaattctggaaatgacagcccattactttt

SEQ ID NO: 38881 - DNA, 120 bp, synthetic construct
  source 1..120: mol_type = other DNA
gcccaccacactgcctcaagtaactagggagaggtaaaagtttatatgccagatgaccaaatattaaaatgtgtgttacaaatagttcacgatgggctcagctgtcagactttacaaagg

SEQ ID NO: 38882 - DNA, 120 bp, synthetic construct; identical to SEQ ID NO: 11180
  source 1..120: mol_type = other DNA

SEQ ID NO: 38883 - DNA, 120 bp, synthetic construct
  source 1..120: mol_type = other DNA
gagaattcgctagtttaatttttggaaaataaagtataattggcaaagctaatcctcactgttgaatctatccgtcaaatcagatataatttctatcagaaagtctatatgacttgtcaa

SEQ ID NO: 38884 - DNA, 120 bp, synthetic construct
  source 1..120: mol_type = other DNA
ggttgtataatagcctaaaaaacaaaaaaaggacaaaagcaagtttccagaaagctgttctgacttgcctacttctgaaaagtagtcctgtatggtgggttctgaaaatgaggaaccagg

SEQ ID NO: 38885 - DNA, 120 bp, synthetic construct
  source 1..120: mol_type = other DNA
acttgcagagtaggcagttgctggaggaagaatgtgagctgcatgggaaaagacaggaggatttacaaagagtgggtgtttaattggggatggaattaggtagttattctgatttttaga

SEQ ID NO: 38886 - DNA, 120 bp, synthetic construct
  source 1..120: mol_type = other DNA
tttaatgatttaaagtaaagaattctgtaatttgtagacttctgagaagttccagaaaataaatcagatggtatgtaacagcgaccgtgtgctcaaaagaagtgctgaaggaagcaaccc

SEQ ID NO: 38887 - DNA, 120 bp, synthetic construct; identical to SEQ ID NO: 11181
  source 1..120: mol_type = other DNA

SEQ ID NO: 38888 - DNA, 120 bp, synthetic construct
  source 1..120: mol_type = other DNA
attaaatttaaaaatgtttactcttgaaaaatattaaccactgtattttgtgagaaccactgaaaaaatacatagcatcataaatttgtgacatttatgttttagatggttagtttttaa

SEQ ID NO: 38889 - DNA, 120 bp, synthetic construct
  source 1..120: mol_type = other DNA
ttaatctgcagtaaacatctcccaggagagtccaaatttcagcagaaactggcagaaatgagtaagtacttttttcaccttgtgtaaatgaaataaacaattgtttacactgcaagaagt

SEQ ID NO: 38890 - DNA, 120 bp, synthetic construct; identical to SEQ ID NO: 11182
  source 1..120: mol_type = other DNA

SEQ ID NO: 38891 - DNA, 120 bp, synthetic construct
  source 1..120: mol_type = other DNA
atttgcaaatcttaaaacaatttcaaacaaaagtttccattactggaaatcagaattttaataaagaacacttatgtcattttccaagttatacagagtgatatcatgttagggtaagtg

SEQ ID NO: 38892 - DNA, 120 bp, synthetic construct
  source 1..120: mol_type = other DNA
tatggtagtgagtgtaacatttcccagtatctgctgccagatccattgataggaaaaggaactgggattttgaaagaagacaaatattcaggagataggtgttaaaacaatcattcctag

SEQ ID NO: 38893 - DNA, 120 bp, synthetic construct
  source 1..120: mol_type = other DNA
ttttttaaagtgtaattaaaactaaataactaaaacaaaattttctagttataaatgaatctctttttggattttatgtcaacttacatattcctattttaactcttaaatagttgcatc

SEQ ID NO: 38894 - DNA, 120 bp, synthetic construct; identical to SEQ ID NO: 11183
  source 1..120: mol_type = other DNA

SEQ ID NO: 38895 - DNA, 120 bp, synthetic construct
  source 1..120: mol_type = other DNA
tgcccagaatggaagggcattccatttttccaaatgtgcttctttataaagaactcatgcctacctctaaaatcaagttaagaatttttaagaaatttaataagtatcccggctttgtct

SEQ ID NO: 38896 - DNA, 120 bp, synthetic construct
  source 1..120: mol_type = other DNA
caagaccagcctgggcaacatagcaagaccccatctttacaaaaaaatccaaaaattagccaggcctggtggcatgtgcctgtagtcttggctactggagaggctgaggtgagagaattg

SEQ ID NO: 38897 - DNA, 120 bp, synthetic construct
  source 1..120: mol_type = other DNA
tctcaaaaaaaaaaaatccatgcccagtttaaatgagctatgatttgatgtatttgcagtacctgcaaggcatctgcaaacataagggaacctatagctttgtaaagaataccaccactc

SEQ ID NO: 38898 - DNA, 120 bp, synthetic construct; identical to SEQ ID NO: 11184
  source 1..120: mol_type = other DNA

SEQ ID NO: 38899 - DNA, 120 bp, synthetic construct
  source 1..120: mol_type = other DNA
gaccactgtttttttggggggtggggagggaattttttttttaattgatatatcatagttatacatattttaggggtacatgtgatgttttgatacgtgtacacaatgtgtaatgatcaa

SEQ ID NO: 38900 - DNA, 120 bp, synthetic construct
  source 1..120: mol_type = other DNA
actagaatgaagaccactgcttttgcaaggtcctgagcgccatcagtttgacatgagcataatatatatggcagccacttgccaacttacccagtaccatcaatgctgttaacagttctt

SEQ ID NO: 38901 - DNA, 120 bp, synthetic construct
  source 1..120: mol_type = other DNA
cctctggattcattgtctctcacagatgtgactgtataactttcccaggttctgtttatggccacatttaatatcttcagctctttttgtggatataaaatgtgcagatgcaattgtttg

SEQ ID NO: 38902 - DNA, 120 bp, synthetic construct; identical to SEQ ID NO: 11185
  source 1..120: mol_type = other DNA

SEQ ID NO: 38903 - DNA, 120 bp, synthetic construct
  source 1..120: mol_type = other DNA
tggatattattagaaattagaaaaaaattactaattttacacattagattttattttactattggaatctgatatactgtgtgcttgttttataaaattttgcttttaattaaataaaag

SEQ ID NO: 38904 - DNA, 120 bp, synthetic construct
  source 1..120: mol_type = other DNA
attgatagtactcttggtttttataccattcagatcactgaatttataaagtacccatctagtacttgaaaaagtaaagtgttctgccagatcttaggtatagaggaccctaacacagta

SEQ ID NO: 38905 - DNA, 120 bp, synthetic construct
  source 1..120: mol_type = other DNA
aattataggagccttaatttttttttcatagagatttgtctaattgcatctcaaaattattctgccctccttaatttgggaaggtttgtgttttctctggaatggtacatgtcttccatg

SEQ ID NO: 38906 - DNA, 120 bp, synthetic construct; identical to SEQ ID NO: 11186
  source 1..120: mol_type = other DNA

SEQ ID NO: 38907 - DNA, 120 bp, synthetic construct
  source 1..120: mol_type = other DNA
ggtcttgttagaaaacaaaattttattttgtgctcatttaagtttcaaacttactattttgacagttattttgataacaatgacactagaaaacttgactccatttcatcattgtttctg

SEQ ID NO: 38908 - DNA, 120 bp, synthetic construct
  source 1..120: mol_type = other DNA
aattagtgccagaattttaggaacttcagagatcgtgtattgagatttcttaaataatgcttcagatattattgctttattgcttttttgtattggttaaaactgtacatttaaaattgc

SEQ ID NO: 38909 - DNA, 120 bp, synthetic construct
  source 1..120: mol_type = other DNA
taggagaagatagatagaagataactctcctagtatctcatccattcctagcctttaaggggctctatatgctagagatttccaaatttatttcttcagccctgatcttttcacagaggt

SEQ ID NO: 38910 - DNA, 120 bp, synthetic construct
  source 1..120: mol_type = other DNA
tattaaacatttatcaagtcaaaaacttaggagctatctattaattcttgtctggaccactgctaaagacttctaaccagtctccctgttccctttctttctttactgtcaaactccaca

SEQ ID NO: 38911 - DNA, 120 bp, synthetic construct; identical to SEQ ID NO: 11187
  source 1..120: mol_type = other DNA

SEQ ID NO: 38912 - DNA, 120 bp, synthetic construct
  source 1..120: mol_type = other DNA
tatcattctccttcaaaagtgtaacagcatccatctatgactatttcccaccatctgaaattgcctttcttgttacctgtctccccatccctagccactccccaccccagattgtaacca

SEQ ID NO: 38913 - DNA, 120 bp, synthetic construct
  source 1..120: mol_type = other DNA
tcttcctcttttaaaatgccatgtactagtatctaccatattccaggcacagttctaaatgctagagctataacaatgaataaataaaaccaaaatccccatccttgcagaactgacttt

SEQ ID NO: 38914 - DNA, 120 bp, synthetic construct; identical to SEQ ID NO: 11188
  source 1..120: mol_type = other DNA

SEQ ID NO: 38915 - DNA, 120 bp, synthetic construct
  source 1..120: mol_type = other DNA
tataatcctttatctgtagttccaaaattgagaaagctttaaaatccagtgattctgtgtgttttgtgccaaaagtcatatggcatcaaaaccatatgtaaactggcacagagctattta

SEQ ID NO: 38916 - DNA, 120 bp, synthetic construct
  source 1..120: mol_type = other DNA
cttaggtgttaggtattatttggcatacgtaccatattatcattctaatcattctaaactcccccaaaattatgaaacccatctggcaccaagggtttcagacaagggattatcttaaat

SEQ ID NO: 38917 - DNA, 120 bp, synthetic construct
  source 1..120: mol_type = other DNA
gtaggctgtatttatattgggcggggatcttaaatgaaatgcagtctcttaggtcacgtcaaaatcaagcagcctaaatgacactaaaaaattttgtctgcatggcagagaattgttcac

SEQ ID NO: 38918 - DNA, 120 bp, synthetic construct
  source 1..120: mol_type = other DNA
gctggaatgcaatggcacgatcttggctcactgcaacctctacctcccgggctcaggcgattctcctgcctcagcctccccagtagctgggattgcaggagcacaccaccacgccggcta

SEQ ID NO: 38919 - DNA, 120 bp, synthetic construct; identical to SEQ ID NO: 11189
  source 1..120: mol_type = other DNA

SEQ ID NO: 38920 - DNA, 120 bp, synthetic construct
  source 1..120: mol_type = other DNA
ctaaatagatattttacaggacgactcaaaccttacctccagaaatattaaatttccaccataggtgtagcttcttaaatagaaatatggtagcactgtataatatctacgtgagattca

SEQ ID NO: 38921 - DNA, 120 bp, synthetic construct
  source 1..120: mol_type = other DNA
tgacaatacgaaaggttaaatttactacacagaccaacctcagttacttcctaaatgcaaaatgttatttttaactgaatttactgagaaaattggtaagctttgtatttctatgtgttt

SEQ ID NO: 38922 - DNA, 120 bp, synthetic construct; identical to SEQ ID NO: 11190
  source 1..120: mol_type = other DNA

SEQ ID NO: 38923 - DNA, 120 bp, synthetic construct
  source 1..120: mol_type = other DNA
gacaattattttagaagcactaaaacattgacttccttgtgtgagcaagagaggaaacaaaacttttgggaaaatctaagataaacttgtgcaaaaaaaaggatccattaatttctaatg

SEQ ID NO: 38924 - DNA, 120 bp, synthetic construct
  source 1..120: mol_type = other DNA
agcctatcctcaaagaccagaaagaaagcatgttttttcagatagatgtacccacacccaggactcatctgtcatctctcagatctaaaactagctcttctttattgtttggcgtcagaa

SEQ ID NO: 38925 - DNA, 120 bp, synthetic construct
  source 1..120: mol_type = other DNA
tgagatgccagggtgggtggatcacctgaggtcaggagtttgagaccagcctgaccagtatgatgaaaccctgtcactactaaagatacaaaaattatctgggcatggtggtgtgcacct

SEQ ID NO: 38926 - DNA, 120 bp, synthetic construct; identical to SEQ ID NO: 11191
  source 1..120: mol_type = other DNA

SEQ ID NO: 38927 - DNA, 120 bp, synthetic construct
  source 1..120: mol_type = other DNA
agagcttgcagtgagccgagatcgcaccactgcactccagcctgggcgacagagcgagactccgtctcaaaaaaaaaaaaaaaaaaaaaaaaaaatccatagattattctgttgtgtgca

SEQ ID NO: 38928 - DNA, 120 bp, synthetic construct
  source 1..120: mol_type = other DNA
agtagtccatttttcatcccccagtaaacttatctgttcccctttgagtgttccaatttttatatgaagtgagttcacaaaagaaaaaggcactgaggagcttcagaagaccctgtcaga

SEQ ID NO: 38929 - DNA, 120 bp, synthetic construct
  source 1..120: mol_type = other DNA
gaccaaagaaacaaagactgtggttgtctaatggccagaacagatgctataggtgcttgccatgtttgaatgtttttttgttggataaaatagcaaacttatcaaaaaatgaaaacaaat

SEQ ID NO: 38930 - DNA, 120 bp, synthetic construct; identical to SEQ ID NO: 11192
  source 1..120: mol_type = other DNA

SEQ ID NO: 38931 - DNA, 120 bp, synthetic construct
  source 1..120: mol_type = other DNA
gaaatccctttgattttttagacagagtctcactctgtcaccaggctagagtgcagtggtgccaatctcagctcactgcaacctccgcctgccaggttcaagtgattctcttgcctcagc

SEQ ID NO: 38932 - DNA, 120 bp, synthetic construct
  source 1..120: mol_type = other DNA
tcgcccgccttggcttcccaaagtgctgcgattgcaggtgtgagccaccacacccggcctgaaaccccttttataacaactcagtcttgggaactaattcagtcccaagagaaccagaac

SEQ ID NO: 38933 - DNA, 120 bp, synthetic construct
  source 1..120: mol_type = other DNA
gttttggcaaaggacaaaccacatccaaatcatagcagaaataatggattcaaaatgtgacccaacgaagagaatgaaaagacaagccacaaactgggagaaaatatttgcaaaagacat

SEQ ID NO: 38934 - DNA, 120 bp, synthetic construct; identical to SEQ ID NO: 11193
  source 1..120: mol_type = other DNA

SEQ ID NO: 38935 - DNA, 120 bp, synthetic construct
  source 1..120: mol_type = other DNA
catataatccagtaatcatgctccttggtatttacccaaaggagttgaaaacttatgtccacacaaaaacctgtacacagatgtttatagtagctttatttgtaattgccaaaacttgga

SEQ ID NO: 38936 - DNA, 120 bp, synthetic construct
  source 1..120: mol_type = other DNA
aattgcatattattaagtgaaaaaccaatccaaaaaggctatatactgtatgattccaacgataggacattctggaaaaggcaaaactatggatacagtaaaaagatccatggctgccag

SEQ ID NO: 38937 - DNA, 120 bp, synthetic construct
  source 1..120: mol_type = other DNA
tcacagaatgtgcaccaccaacaatggaccctaatgtaaactatggaccgtgggtgataatgatgtgtccaagcaggttcatcaggtataacaaatgcaccactctggtggggggtgttg

SEQ ID NO: 38938 - DNA, 120 bp, synthetic construct; identical to SEQ ID NO: 11194
  source 1..120: mol_type = other DNA

SEQ ID NO: 38939 - DNA, 120 bp, synthetic construct
  source 1..120: mol_type = other DNA
actttattaccaaatagttcagcatcagaacaagaattctaattccaaaagggtttcctttacattacatgacattgtgagatacacattagaagaatctgagactatgttccatttcag

SEQ ID NO: 38940 - DNA, 120 bp, synthetic construct
  source 1..120: mol_type = other DNA
tactggtgccaggttaagagacctattttatagtgagtgacatgaaagtcaactacaagaaaagcacattgtcattttcatttacagaggcaagtccctcttaacacaaagaaaagcaaa

SEQ ID NO: 38941 - DNA, 120 bp, synthetic construct
  source 1..120: mol_type = other DNA
attagcccttgggccttgacaatttaattgccagggccttttgtcaattctaaacaatgttctaaattagccacaatttctcagaatgatataccagaagaatatgaacctcaataatta

SEQ ID NO: 38942 - DNA, 120 bp, synthetic construct
  source 1..120: mol_type = other DNA
aagatttataataaattgagtgcctattatacacaaggcactgtgctgagtgctgaaaatgtggtaaggacagacagcactccttgtcaagctatctatgtggtatcagccagctgaata

SEQ ID NO: 38943 - DNA, 120 bp, synthetic construct; identical to SEQ ID NO: 11195
  source 1..120: mol_type = other DNA

SEQ ID NO: 38944 - DNA, 120 bp, synthetic construct
  source 1..120: mol_type = other DNA
gctgataaagttcttcaggagatcatggtccatttctgcaaaacctgatgtttgtgttactacagtcagatggtttatgcaaaacctgaagcagaattcttctaaatcctaggaacaaca

SEQ ID NO: 38945 - DNA, 120 bp, synthetic construct
  source 1..120: mol_type = other DNA
taatacctaaagaatagtcataaaaagtataacaagtatgaatcatctatgcttgtaaaaatttaagtagcacagagtaacattcaagttcctccgcactaacctaggtaaagaatctaa

SEQ ID NO: 38946 - DNA, 120 bp, synthetic construct
  source 1..120: mol_type = other DNA
ttatatttatatcagcgtctttaagtatgtctgcctataaagagttgatggaagaaaaaggtaagccataaaaagcagtaatgccaagaaattgctgctctgaagtcattaacaggccac

SEQ ID NO: 38947 - DNA, 120 bp, synthetic construct; identical to SEQ ID NO: 11196
  source 1..120: mol_type = other DNA

SEQ ID NO: 38948 - DNA, 120 bp, synthetic construct
  source 1..120: mol_type = other DNA
tgagacctccaatatgcctcaaaccctaggctacttggcctaggacaagatgctgctaggtggtggtcaatttttaaaagtttcctctccaagctactgtaggtaatttataaaaaataa

SEQ ID NO: 38949 - DNA, 120 bp, synthetic construct
  source 1..120: mol_type = other DNA
atagccttgccaatgtacatataaacctacggtacattttcttttaagaaaagaaagaaactatactaggaaaatgtttatttcatgcctgaagataactgggcaggctgttggtaccac

SEQ ID NO: 38950 - DNA, 120 bp, synthetic construct
  source 1..120: mol_type = other DNA
gaatatctcagagtccatttaaaattatgtgctgttgcttaaatttttagaaatgacatttttgcctacagcacacaaaagtgaaaccagatagagatgcatcatctctttggctgaagt

SEQ ID NO: 38951 - DNA, 120 bp, synthetic construct; identical to SEQ ID NO: 11197
  source 1..120: mol_type = other DNA

SEQ ID NO: 38952 - DNA, 120 bp, synthetic construct
  source 1..120: mol_type = other DNA
cattatttttcagttaaagaattgtagtctattttgaatgctaccactctgtatggcttcatgttcaaaatggggccctctgttctgtcctgcagtcctaccacattctcctagtttgct

SEQ ID NO: 38953 - DNA, 120 bp, synthetic construct
  source 1..120: mol_type = other DNA
ccacaagctctccccaccacgtctccttgcctattacagagaggcctgtggatgcaatcttctctggatcaaaggtccaagaccctatagaaagcagagcccttgctctgtcactagatc

SEQ ID NO: 38954 - DNA, 120 bp, synthetic construct; identical to SEQ ID NO: 11198
  source 1..120: mol_type = other DNA

SEQ ID NO: 38955 - DNA, 120 bp, synthetic construct
  source 1..120: mol_type = other DNA
ggacttcttccttcctgtttcgctttctttcccagcctgcaggaaacggtctgctggtttctctcttccgttactgctcactcctcttcagtctcctttgctggtgtctccttatctcct

SEQ ID NO: 38956 - DNA, 120 bp, synthetic construct
  source 1..120: mol_type = other DNA
atttctctctgacttccaggcttgcttatccaatttgcttattagacatttccatttggatgtctaatagacatcacatacttctcatattcaaaaccaaatttctgatatttcccccaa

SEQ ID NO: 38957 - DNA, 120 bp, synthetic construct
  source 1..120: mol_type = other DNA
tggctctactttcaaaatgtattcaaaatcttaaccactttttaccatccccacaggtgataacttggaccaatccaccatcatcacttactggattatacagcctcctaagtaccctcc

SEQ ID NO: 38958 - DNA, 120 bp, synthetic construct
  source 1..120: mol_type = other DNA
ccctccctcctcaacacagcagccaggaggcaggaggattacttcaaatgcccatcatatctgctcctctccaaaccctctgatggccactcaccttggaactctgattcctgaaacttg

SEQ ID NO: 38959 - DNA, 120 bp, synthetic construct; identical to SEQ ID NO: 11199
  source 1..120: mol_type = other DNA

SEQ ID NO: 38960 - DNA, 120 bp, synthetic construct; identical to SEQ ID NO: 3940
  source 1..120: mol_type = other DNA

SEQ ID NO: 38961 - DNA, 120 bp, synthetic construct
  source 1..120: mol_type = other DNA
actgaggacaatggagaattgtagttaaacatgcggttttaaaatgtgcccaatcttggactgtatcccagttttgcagtttactagtttactcagattacttaatctttccaagcttca

SEQ ID NO: 38962 - DNA, 120 bp, synthetic construct
  source 1..120: mol_type = other DNA
actgtgcttagaataatccctggctcatattaattatgtactaagtgacagtccagcatgagggataataatttgctgaaagagcccatttcttgcttatttgagccaggcaaatcaaat

SEQ ID NO: 38963 - DNA, 120 bp, synthetic construct; identical to SEQ ID NO: 11200
  source 1..120: mol_type = other DNA

SEQ ID NO: 38964 - DNA, 120 bp, synthetic construct
  source 1..120: mol_type = other DNA
atataaaaaagtattaaaaatgaagcctgattcagatgcaaacaccacgtgccaccatcttgacatctgagatggccctccatcaccgtggctcatcactgtgatgctcaagaatggact

SEQ ID NO: 38965 - DNA, 120 bp, synthetic construct
  source 1..120: mol_type = other DNA
ctttttttttaatgttaagtgaaaaaaaatctaggtttcaagtatttacaaatatataatgtgacataaaacaaaaactcagaagctgttatatgaaagtgctaatgttctctggttgat

SEQ ID NO: 38966 - DNA, 120 bp, synthetic construct; identical to SEQ ID NO: 11201
  source 1..120: mol_type = other DNA

SEQ ID NO: 38967 - DNA, 120 bp, synthetic construct
  source 1..120: mol_type = other DNA
aatgaattttagttttttattcagctatttatactttttcaaaaaataaaaataggataagtttttcacttagtgatatatcttgaatagctgcataatttcttgatattaacattttat

SEQ ID NO: 38968 - DNA, 120 bp, synthetic construct
  source 1..120: mol_type = other DNA
tacttgtgagtgaattccttgaagaattatgtctttaatttaaggtgcttaatacatattataccaaattgttctccataccaatttgtactctcatcagcagtttaggagaacaccatt

SEQ ID NO: 38969 - DNA, 120 bp, synthetic construct
  source 1..120: mol_type = other DNA
ctttcaaccaaactgttcctattgtctttttgtttttcactctggtaaacagacttcattatatgttgcaagtatttttcccagtgtctcattactttgtaagtttctctatggtatttt

SEQ ID NO: 38970 - DNA, 120 bp, synthetic construct
  source 1..120: mol_type = other DNA
ttacttcattttttaaaaaatattaaatatttcctctacccagactttcttttagtttaaggtacgaggcagacacctgggttccatttctccaggaggccggcagctggaagcaagctt

SEQ ID NO: 38971 - DNA, 120 bp, synthetic construct; identical to SEQ ID NO: 11202
  source 1..120: mol_type = other DNA

SEQ ID NO: 38972 - DNA, 120 bp, synthetic construct
  source 1..120: mol_type = other DNA
aaacaggagcacagggaaaatagctttaatatttttttcctaggaaaaaagcatgtgcgccttgaatgaccccttcccctgcaatctcaatgtcagcttctcctgggccactcccaggag

SEQ ID NO: 38973 - DNA, 120 bp, synthetic construct
  source 1..120: mol_type = other DNA
aagagaagaggggaggggagaggaggggaggggagaggaggggaggggagaggaggagaggggagaggaggggaggggagaccctttcatggacacgtgtcttcctcctgttaccctatc

SEQ ID NO: 38974 - DNA, 120 bp, synthetic construct
  source 1..120: mol_type = other DNA
tgcagtcacacccttggtggtcacacctgtggcagtcacagtggctttgagggtgcaatattctctggtttcctcttactcgacatttacacagaatttgatatggttgataatgctctc

SEQ ID NO: 38975 - DNA, 120 bp, synthetic construct; identical to SEQ ID NO: 11203
  source 1..120: mol_type = other DNA

SEQ ID NO: 38976 - DNA, 120 bp, synthetic construct
  source 1..120: mol_type = other DNA
caggatttgtaattagcataaagaatgtcagaattagtttgtcattgctgaaatgagtggtagccaggatcaaaaggctagctgaatccggctactagaacactgtcatgtccacctcaa

SEQ ID NO: 38977 - DNA, 120 bp, synthetic construct
  source 1..120: mol_type = other DNA
agactttggttggaaacttgcttttttaataacaaatattatcaaagttatagaggaaagacagatagcccactggaggacactgaaatcttgagttgtgaatggcttcattgtttttgg

SEQ ID NO: 38978 - DNA, 120 bp, synthetic construct
  source 1..120: mol_type = other DNA
ccacttctagaccacactttgggtacctgggaacctgggactgcctgcataattggccttgaggccacatgtgtgggtatttcctcccttagaccccaccaccaatgtgcagaccccctg

SEQ ID NO: 38979 - DNA, 120 bp, synthetic construct; identical to SEQ ID NO: 11204
  source 1..120: mol_type = other DNA

SEQ ID NO: 38980 - DNA, 120 bp, synthetic construct
  source 1..120: mol_type = other DNA
aggattggacatatttttatctgaagttcactagcttgacatataactttaagtttttagacatatggaacataggtctccatttggagtcttggctacagccccacaaatgttagtggt

SEQ ID NO: 38981 - DNA, 120 bp, synthetic construct
  source 1..120: mol_type = other DNA
gcggatcacctgaggtcgggagttcaagaccagcctgaccaacacggagaaacctcgtttctactaaaaatacaaaattagccaggcgtggtggtgcatgcctgtaatcccagctactcg

SEQ ID NO: 38982 - DNA, 120 bp, synthetic construct
  source 1..120: mol_type = other DNA
ttatcacttgggtatctaatgggaagctcaaactcctttgactttcaaagtccagagcaagcctgttgttctctatcttcctcacctcagtgccattaaggcagctacccaggccaagta

SEQ ID NO: 38983 - DNA, 120 bp, synthetic construct; identical to SEQ ID NO: 11205
  source 1..120: mol_type = other DNA

SEQ ID NO: 38984 - DNA, 120 bp, synthetic construct
  source 1..120: mol_type = other DNA
atccattcttcctttctactgaaaccacagaatttttagccaagctacggccctctggaaatgcccattttcccagcctcctaagccactgggcacagacttgactgactcaggcccaca

SEQ ID NO: 38985 - DNA, 120 bp, synthetic construct
  source 1..120: mol_type = other DNA
ttgattcttctctctcttatctgtccagtcaacctttgtaataaagtagtaacaagggaaacgtgtttggattcaacacacacaaaaagaaatacttctgtaattaccctcacagtgact

SEQ ID NO: 38986 - DNA, 120 bp, synthetic construct
  source 1..120: mol_type = other DNA
gtattccaggaaggcccggtaaacaggatatgaaaattcactcatttctacaatatcatcctcgttatcttccaatgacgaacgaaaatgctcacatctgaaggaaaaaagcagtatgtc

SEQ ID NO: 38987 - DNA, 120 bp, synthetic construct
  source 1..120: mol_type = other DNA
aacaatcatctattcagcaaggctgtatatacaaacctgctgccaggggtggcctgggaagcagccccaatggccgtgctaatggggacagagctgggctccctggcatctctctcacac

SEQ ID NO: 38988 - DNA, 120 bp, synthetic construct; identical to SEQ ID NO: 11206
  source 1..120: mol_type = other DNA

SEQ ID NO: 38989 - DNA, 120 bp, synthetic construct
  source 1..120: mol_type = other DNA
cccatctctactaaaaatacaaaaattagccaggcatggtggtgtgcgcctgtaatcccagctactcaggaggctgaggcaggagaatcacttgaacctgggaggaggaggttgcagtga

SEQ ID NO: 38990 - DNA, 120 bp, synthetic construct
  source 1..120: mol_type = other DNA
actggagttaagcagccacatgccaaggaaggccaaagactgtctgcaaatccccagcagctaggaaagaggcaggaacagattctcactcacagcctcacaagaaacccatccaggtga

SEQ ID NO: 38991 - DNA, 120 bp, synthetic construct; identical to SEQ ID NO: 11207
  source 1..120: mol_type = other DNA

SEQ ID NO: 38992 - DNA, 120 bp, synthetic construct
  source 1..120: mol_type = other DNA
tctagaaaatgctaactcagctacagtgacagaaggagctgcggtcacccagggctaggacatgaggggtctttgaagggtgatgggaatgttctctgtctggatgtggggcagtggttt

SEQ ID NO: 38993 - DNA, 120 bp, synthetic construct
  source 1..120: mol_type = other DNA
cctttttggtctggaaaggccttgatcttctctttcttaaaccatctaaaagtacgccacaagtgattataagaaggtgattattaagagctgagcttgattcccaggcagaaacggtaa

SEQ ID NO: 38994 - DNA, 120 bp, synthetic construct
  source 1..120: mol_type = other DNA
gtactggttcccggaaccacacaacctgtgttatttcttgtttcatgtatatttctccccgctccactgtatgcttgtaagagcaaaaacagccttacaatttttcttgattactgaggt

SEQ ID NO: 38995 - DNA, 120 bp, synthetic construct
  source 1..120: mol_type = other DNA
aattacttttctcaattctcaaataaatgattccttaccgaatcttgagaaggactttatgtgcataaatgtactttccatcaactagaaacttcaggtctgcagtgtccgggttgtcaa

SEQ ID NO: 38996 - DNA, 120 bp, synthetic construct; identical to SEQ ID NO: 11208
  source 1..120: mol_type = other DNA

SEQ ID NO: 38997 - DNA, 120 bp, synthetic construct
  source 1..120: mol_type = other DNA
agccacatcactaattttgcatgaaattttaaacatttgagtaaatacgctagttaaaagtaaaaaacagtttctcagtaaaattaaaaagcactcaaataaggatagggcacaatggct

SEQ ID NO: 38998 - DNA, 120 bp, synthetic construct
  source 1..120: mol_type = other DNA
ttagccaggcatggtaatgggtatgtatagtcccagctactcaataggctaaggcaaaaggatcgcttgaacccaggggctgaagggtacagcgagttatgattgcaccaccgcactcca

SEQ ID NO: 38999 - DNA, 120 bp, synthetic construct; identical to SEQ ID NO: 11209
  source 1..120: mol_type = other DNA

SEQ ID NO: 39000 - DNA, 120 bp, synthetic construct
  source 1..120: mol_type = other DNA
tctcgataatcctaaattcacaaacacacaccacataagcacagtgaccggggcagaaacaagttgggtcctcctcccgccaggtttaactgatgtgggacatcataaaattacaaaaag

SEQ ID NO: 39001 - DNA, 120 bp, synthetic construct
  source 1..120: mol_type = other DNA
aactcatgaagatctgtttgtaccacttctagccagtaggcctataaaaatatgcaccatcctgttttgaaattcaagtataacccaagagagtagtggtcccccctaccaaaaaagggt

SEQ ID NO: 39002 - DNA, 120 bp, synthetic construct; identical to SEQ ID NO: 11210
  source 1..120: mol_type = other DNA

SEQ ID NO: 39003 - DNA, 120 bp, synthetic construct
  source 1..120: mol_type = other DNA
ctgcaacctctgcttcccaggctcaagcgatcctcctacctcagcctctgtagtagctgggactacaggtgcaagccaccacacctgactaacttttgtattttttgtagagacaaggtt

SEQ ID NO: 39004 - DNA, 120 bp, synthetic construct
  source 1..120: mol_type = other DNA
atggaaaacattgtcttgttgatctggaagtaatttcttttccatcagaataagccaccatacagattgaaggaaaatggtaaactcttttaacccaggggaagtccccatcttgatttt

SEQ ID NO: 39005 - DNA, 120 bp, synthetic construct
  source 1..120: mol_type = other DNA
gctcagaacttcagggtcatctttgacttctccctcctcatttaccactttctttagaatatccagttaaataacaaagatgctttctttgtaatgtctcccctcagccaccactggggg

SEQ ID NO: 39006 - DNA, 120 bp, synthetic construct
  source 1..120: mol_type = other DNA
tctcatcagaactttcacacgggcagtggcttctctcagataaaatcctgacacaagacataactccatccatgatttggcgtcacctctgtacagacatctcacaagtcaattttgtcc

SEQ ID NO: 39007 - DNA, 120 bp, synthetic construct; identical to SEQ ID NO: 11211
  source 1..120: mol_type = other DNA

SEQ ID NO: 39008 - DNA, 120 bp, synthetic construct
  source 1..120: mol_type = other DNA
agtttctggcaggcctaatcactggcttaattctctctaagcacataacgtggtgtcttactgaatataatctatgggtcactttactgactgaggaagactcaacaacacagagcaaag

SEQ ID NO: 39009 - DNA, 120 bp, synthetic construct
  source 1..120: mol_type = other DNA
gtaccggctcgcctcagaggctgagacatgctgttctcatgtgcggtaatctcactgacttattatgaggatcgttcttagcccttgaaaaccacccaaaaatactagaggaaaaaaagg

SEQ ID NO: 39010 - DNA, 120 bp, synthetic construct
  source 1..120: mol_type = other DNA
tgaatcctcgctctaccactaggctgcgtgactagcactaggctgcgtgactaggggaatgtcacttagcacctaggagccttggtttcatcacattgcaagggtggtgtgagaatcaag

SEQ ID NO: 39011 - DNA, 120 bp, synthetic construct; identical to SEQ ID NO: 11212
  source 1..120: mol_type = other DNA

SEQ ID NO: 39012 - DNA, 120 bp, synthetic construct
  source 1..120: mol_type = other DNA
gagaaggaaatagaataaacttattcaaagagaagtacgtccactgttagtatcgattttactggcaagcctcctaagttacaagcaaatgtgaggatagcgacatggtctgtcttcgtg

SEQ ID NO: 39013 - DNA, 120 bp, synthetic construct
  source 1..120: mol_type = other DNA
ctttaccatcttttcaaagaaaaaaaaagatgagggggaacaggatacaggcagcaatcctctcacggtttgtggttttgtgtacgtgaaataagttccttggcagagctgagaaccgaa

SEQ ID NO: 39014 - DNA, 120 bp, synthetic construct; identical to SEQ ID NO: 11213
  source 1..120: mol_type = other DNA

SEQ ID NO: 39015 - DNA, 120 bp, synthetic construct
  source 1..120: mol_type = other DNA
ggacggaggccaacgccgggatcggagggcaatgaggcttgccaggaacagtggcgtcggcttcaatccagagccgaagagttctgatttgatctgatgtgataggcaaatgggaaactg

SEQ ID NO: 39016 - DNA, 120 bp, synthetic construct
  source 1..120: mol_type = other DNA
gcaagggagagaaagaatagtctggaaggctggctggggaggccaacccaagctaggttgccaaggagtaatgagggtggcctggatgttaatgcagagggagggagaggagcggaaggt

SEQ ID NO: 39017 - DNA, 120 bp, synthetic construct
  source 1..120: mol_type = other DNA
aaaaagggccttctgtgtttgaaccacctcaattgtaaagccatctggcattctctgggagcaggggaggttagggcagcccaatgaacaatgtgaagataagcatttatgaactgctct

SEQ ID NO: 39018 - DNA, 120 bp, synthetic construct; identical to SEQ ID NO: 11214
  source 1..120: mol_type = other DNA

SEQ ID NO: 39019 - DNA, 120 bp, synthetic construct
  source 1..120: mol_type = other DNA
gtgacatatacctggcacacccggctccacatgggaagtcaggggtggggcgcggatttggttggctgcagtagctgctacaggaatgagaatgcagaaagtttagagggtactttcagg

SEQ ID NO: 39020 - DNA, 120 bp, synthetic construct
  source 1..120: mol_type = other DNA
ccaagcagcaaacaccgacgttccaattttccagccagacatgcgacagacaatgactatcaactgagctaacctttactgtcaggatgtctggcgtatttcacacttttattttgtagc

SEQ ID NO: 39021 - DNA, 120 bp, synthetic construct
  source 1..120: mol_type = other DNA
ctgctgagcttattggctatgaagtactagaaatgaaaaagcagagagtgagaaagaatagaaactggaaaaccttgaggggggtgaaaggtcatctgtgagggagaagaatattggaga

SEQ ID NO: 39022 - DNA, 120 bp, synthetic construct
  source 1..120: mol_type = other DNA
gcttcacatcagtttagtttaaaatatgccgttagggaacgttaagaacaaagatacaaatgttggtcaatctgtccccaaggtactgaaacttcagaaagattggatgactggattagg

SEQ ID NO: 39023 - DNA, 120 bp, synthetic construct; identical to SEQ ID NO: 11215
  source 1..120: mol_type = other DNA

SEQ ID NO: 39024 - DNA, 120 bp, synthetic construct
  source 1..120: mol_type = other DNA
gtcccagcacagacctataaacccctccctcggaatacgcccgtgattgagtgcctggttgaaactgtgcaagttcagaaaccaccacttgaaattcaagtacggaaaacagaaaatcag

SEQ ID NO: 39025 - DNA, 120 bp, synthetic construct
  source 1..120: mol_type = other DNA
agggattctcgtgcctcagcctcccaagtaactgggattacaggcatgtgccactgtgcccagctaatttttatatttttagtagagacagggtttcaccatgttggccaggctggtctc

SEQ ID NO: 39026 - DNA, 120 bp, synthetic construct; identical to SEQ ID NO: 11216
  source 1..120: mol_type = other DNA

SEQ ID NO: 39027 - DNA, 120 bp, synthetic construct
  source 1..120: mol_type = other DNA
tgcagcaagtcactggtgggcaatgacggcagattctgtgagaccagggatggatgtgctaaagttctgggtaagtgtaggagcaccataaaaagtaatgggccaggccaggcgcagtgg

SEQ ID NO: 39028 - DNA, 120 bp, synthetic construct
  source 1..120: mol_type = other DNA
aggtatggtggcatgctcctgtagtcccagctactccagaggctaaggtgggaggatcgcctgagcttgggaagtcaagactacagtgagccgtgattgcaccactgcaccccaacctgg

SEQ ID NO: 39029 - DNA, 120 bp, synthetic construct
  source 1..120: mol_type = other DNA
gttaagtgtccctaccaactgaggcacttttgtggttattcaaagcctcaggactgtcccttctcttctgaggagctctaagctacaagatgtgtgaatgaacagctgcaggcatctacc

SEQ ID NO: 39030 - DNA, 120 bp, synthetic construct
  source 1..120: mol_type = other DNA
aattggttaaataaaacttttaaaacataggttaaagaaagtcagccaagttcacaatacccaaatgaaaactgaggcagttgaaaaatgacaatttggttcttcattttcattgttaag

SEQ ID NO: 39031 - DNA, 120 bp, synthetic construct; identical to SEQ ID NO: 11217
  source 1..120: mol_type = other DNA

SEQ ID NO: 39032 - DNA, 120 bp, synthetic construct
  source 1..120: mol_type = other DNA
caaaagtaaatcttaatttcctaaccattttactcttcctcgtagtgacagcttgggagttaaagtaatgaaataaccctatccttctcaactggcaaatttccatgtagctgagtgacc

SEQ ID NO: 39033 - DNA, 120 bp, synthetic construct
  source 1..120: mol_type = other DNA
gtaaaacaggaaaaggaggagggcaaaagggtgatttgtaaggcagaagagtaacagaatagctgttgcaagtttagtcactgcagtttgcttagaatagctgttggaggtatagatgaa

SEQ ID NO: 39034 - DNA, 120 bp, synthetic construct; identical to SEQ ID NO: 11218
  source 1..120: mol_type = other DNA

SEQ ID NO: 39035 - DNA, 120 bp, synthetic construct
  source 1..120: mol_type = other DNA
ctaatgtgtgtgcgtagccacaggcgacctggaaggaaaaaaatccactcaggactgcaaatataagtaattatttcactgcttccacaaagtaggttaagaatcaaaaatgaaaaaaaa

SEQ ID NO: 39036 - DNA, 120 bp, synthetic construct
  source 1..120: mol_type = other DNA
gtaagattgccatgagtaccctggcgtgagcacctgccccagttcactagagctttaatactcacagaaatcaaggggtatgaggggaatgtaagaaacagacacttgtattttttaaat

SEQ ID NO: 39037 - DNA, 120 bp, synthetic construct
  source 1..120: mol_type = other DNA
agagatatgtacctatagcatttttttactgaccatgttgtataagcagttctgtatcttgcttcattttaccattacacatagcagttttccatgtcattaaaaattctttgtatacaa

SEQ ID NO: 39038 - DNA, 120 bp, synthetic construct
  source 1..120: mol_type = other DNA
gtatcttcttaactaattctgtaagacagttacaggaattgttggttcctcagggaaattccctaggagtagaactacaggtcaaagggtataaaagcttttaagcttcctcaggaaagc

SEQ ID NO: 39039 - DNA, 120 bp, synthetic construct; identical to SEQ ID NO: 11219
  source 1..120: mol_type = other DNA

SEQ ID NO: 39040 - DNA, 120 bp, synthetic construct
  source 1..120: mol_type = other DNA
tctcaagagacaaatggccagcaagctgtctgttatgtgggacataccatactggcatgagactgatgtggcaaacacggtttttaaacaagatgtaaaataacttccttacctcccccg

SEQ ID NO: 39041 - DNA, 120 bp, synthetic construct
  source 1..120: mol_type = other DNA
gcccagagttattataaccccaggcaaatacctgtttaaaggaaagatcagtaaatgaaacagattaatttataaactgtctcaactggacactgacatgtacttgtggcaccgagtctt

SEQ ID NO: 39042 - DNA, 120 bp, synthetic construct
  source 1..120: mol_type = other DNA
ggaaagatcagtaaatgaaacagattaatttataaactgtctcaactggacactgacatgtacttgtggcaccgagtctttcctctcaaagtgcttcacattcataaatcctcacaacac

SEQ ID NO: 39043 - DNA, 120 bp, synthetic construct; identical to SEQ ID NO: 11220
  source 1..120: mol_type = other DNA

SEQ ID NO: 39044 - DNA, 120 bp, synthetic construct
  source 1..120: mol_type = other DNA
ctactatagaagtctacataatcttattgaaaaaaatcaatgagctttatgctgactgttctcacctctccatcagatgttagcaccaaagaatggtaagacccacaggcaacttcaatg

SEQ ID NO: 39045 - DNA, 120 bp, synthetic construct
  source 1..120: mol_type = other DNA
agcattatgaccccaggtaaagacttctccttctgaaaataaaaagaaagacaatcagttttttacaacatctacttcattatacgaaaatatatgtagcacagcttccacaaatgaaat

SEQ ID NO: 39046 - DNA, 120 bp, synthetic construct
  source 1..120: mol_type = other DNA
atgcatgcagttataataactggaaaataagtttttaataaagagcagagaaaaggctgctgggagtaatagcaaaaacattagaatgaagtcaaatattagaaggccacttaactcccc

SEQ ID NO: 39047 - DNA, 120 bp, synthetic construct; identical to SEQ ID NO: 11221
  source 1..120: mol_type = other DNA

SEQ ID NO: 39048 - DNA, 120 bp, synthetic construct
  source 1..120: mol_type = other DNA
ttctgaatagtgacttctcatttatcttctggtttactaattttactaatttgctgtgttcaaactgctacaaaatttgtccactgaattttcatattgataatcatattgttcatttgg

SEQ ID NO: 39049 - DNA, 120 bp, synthetic construct; identical to SEQ ID NO: 3960
  source 1..120: mol_type = other DNA

SEQ ID NO: 39050 - DNA, 120 bp, synthetic construct
  source 1..120: mol_type = other DNA
aactaataatcaaagagaacaattacaaaatgtactgttcacaatgtcacagatagaagatttgttcttaccataaatcttaacaacctcagcatggaaactctccatttttcatttaaa

SEQ ID NO: 39051 - DNA, 120 bp, synthetic construct
  source 1..120: mol_type = other DNA
gagtcaatctaataactgagacagctactaagtaactaacgggtgggagtgtctatggcagagatgctggacaaagggatggttcatgtcccagctgggatggagcaagatggtgaaata

SEQ ID NO: 39052 - DNA, 120 bp, synthetic construct; identical to SEQ ID NO: 11222
  source 1..120: mol_type = other DNA

SEQ ID NO: 39053 - DNA, 120 bp, synthetic construct
  source 1..120: mol_type = other DNA
ggaccgttcagtcttgatgtgaattaaactacaaatccatggttacaaccttttggggagaagttttatttattttcttccttttttcctccttgcttcactcagagcaaggaatttttc

SEQ ID NO: 39054 - DNA, 120 bp, synthetic construct
  source 1..120: mol_type = other DNA
tttagtctttcaattcatagatcaagaatccaaagttcagacagacttgccaaagtccacaatcagttcgtcagtgtttactgggcttacagcgttgtcattcatacatctaaaatgcca

SEQ ID NO: 39055 - DNA, 120 bp, synthetic construct; identical to SEQ ID NO: 11223
  source 1..120: mol_type = other DNA

SEQ ID NO: 39056 - DNA, 120 bp, synthetic construct
  source 1..120: mol_type = other DNA
ggacgtcacctaaccccaaacagccacagcagtttgtgccaagcacaaaaatctatgggaaaaaccactgttagttcaagcagttctatttctaacaaatctataaattacatccaaaca

SEQ ID NO: 39057 - DNA, 120 bp, synthetic construct
  source 1..120: mol_type = other DNA
ttctaaaaatgtgagtagctgatttattttcttcaaaattacctcatcatttactgtagtgtataaaacttcattgccagcactgccaaagacacaagcctgacgaattaactgtagttc

SEQ ID NO: 39058 - DNA, 120 bp, synthetic construct
  source 1..120: mol_type = other DNA
gaaaaggaaaaaatatatgttgaaatgacaaattaaaaagtgaattttctctgccccttcagttctgtagaagagggcgaacactggttttgggaggaacacactgcatccatttttgag

SEQ ID NO: 39059 - DNA, 120 bp, synthetic construct; identical to SEQ ID NO: 11224
  source 1..120: mol_type = other DNA

SEQ ID NO: 39060 - DNA, 120 bp, synthetic construct
  source 1..120: mol_type = other DNA
tttacttggccttcagtttaaggaattggtgggtttcctcatccctcaaggaagtttgggggttgacaggaattaacacccagaaaacacgtgtacttgtttgttaaggcagccgtaaca

SEQ ID NO: 39061 - DNA, 120 bp, synthetic construct
  source 1..120: mol_type = other DNA
atctcttccaggctgtgcttctcagcttgtggatggctgtcttctccctatgtctgttcacatcatctccccccatgccctgcatatctctgcatctaaatttcccctttttataaggac

SEQ ID NO: 39062 - DNA, 120 bp, synthetic construct
  source 1..120: mol_type = other DNA
gttgcagggtcacaattaaccccctaacagcatacattaagatcacgagcacccacactcctataagaggaagttataaatttgtttgaaagagttttacctatttgctacttaggaggc

SEQ ID NO: 39063 - DNA, 120 bp, synthetic construct; identical to SEQ ID NO: 11225
  source 1..120: mol_type = other DNA

SEQ ID NO: 39064 - DNA, 120 bp, synthetic construct
  source 1..120: mol_type = other DNA
ggggccaccttcacagactcctgagtacacttcaggaggacagagaccgagtctttcaccaccatgtcatccatcccttgaaaggagctaacaatgcaatacctacctttgtgttggtta

SEQ ID NO: 39065 - DNA, 120 bp, synthetic construct
  source 1..120: mol_type = other DNA
ctcggctccaagctctccatttctacttcacctgagccatatcatcaaacacaactttgttactaagtcctcaaacttttaagtttccttctgatcacggccaacagtattaacttgtat

SEQ ID NO: 39066 - DNA, 120 bp, synthetic construct
  source 1..120: mol_type = other DNA
tttgttttcaggtttctatcttttctgaataatcttcatggcactattgaatgctgtagctaaaaagagctcaaaagatagttttctgagaaacccgaagaaaccccagagaggagctgc

SEQ ID NO: 39067 - DNA, 120 bp, synthetic construct
  source 1..120: mol_type = other DNA
gtggaccctacgtccaatgactagtctccttaaaagaagacgagagggcacacagtgatgcacagggaagaaggccagatgacaacagacacagggactgcagtaatgcatctggaagtc

SEQ ID NO: 39068 - DNA, 120 bp, synthetic construct; identical to SEQ ID NO: 11226
  source 1..120: mol_type = other DNA

SEQ ID NO: 39069 - DNA, 120 bp, synthetic construct
  source 1..120: mol_type = other DNA
tcatgttccctcacgtgccacttggatcataagaccttgccctaaaaaggacaccttctgttatcttttgggcaacaccaacagttggttctcccattcacttttgaaacagtgcttact

SEQ ID NO: 39070 - DNA, 120 bp, synthetic construct
  source 1..120: mol_type = other DNA
ttagaggtaggaaaatccacaggcatttcctacaggacaaccttaatttggaatttggaattcaaaaaaaaatctcacatatgtaagaagttccagttatatgcaagtgtaaaactatgt

SEQ ID NO: 39071 - DNA, 120 bp, synthetic construct; identical to SEQ ID NO: 11227
  source 1..120: mol_type = other DNA

SEQ ID NO: 39072 - DNA, 120 bp, synthetic construct
  source 1..120: mol_type = other DNA
gtctatatcttatatcttatttctgatcttcacaacaattgtaggacatagatattattatcctcatgttacctatgaggaaactggggcacagggagactaagtaatctttcaagatca

SEQ ID NO: 39073 - DNA, 120 bp, synthetic construct
  source 1..120: mol_type = other DNA
tctgcagggctttggctattctcagactccttaaggaacaggcaataatacctactgtgggttgtcttccacaaacagcacacatggaaagatacaatgactgacggctatttcattttt

SEQ ID NO: 39074 - DNA, 120 bp, synthetic construct
  source 1..120: mol_type = other DNA
agttctaggctttcttcctggcccacctgtataaaaacctatggtacccagcccgtaactctactggctactgggattccaatgcgtgtgttttctttaatgaaacctccagtctgtaag

SEQ ID NO: 39075 - DNA, 120 bp, synthetic construct
  source 1..120: mol_type = other DNA
aattacaatataacctaagtacaacagagatgtgaatacattgcttttaatttctggcagaaggctggctgttggaagttagtcatcaaagactcaatttttaagtttgttagggcaact

SEQ ID NO: 39076 - DNA, 120 bp, synthetic construct; identical to SEQ ID NO: 11228
  source 1..120: mol_type = other DNA

SEQ ID NO: 39077 - DNA, 120 bp, synthetic construct
  source 1..120: mol_type = other DNA
caaggaattacagcatctttgttcacagaagcaatatacattcttctgtccagcacactcatgaaacaatgtaggattcacacaatagtcccccataggagcctcaatctatctgcagcc

SEQ ID NO: 39078 - DNA, 120 bp, synthetic construct
  source 1..120: mol_type = other DNA
aaaagcactactaaggaatgagagcatggcaatatggtgtccctagaattcagtcctggtttggcacaggtaaccttccttactgcaaataacactactgcaggtgataattaacccaga

SEQ ID NO: 39079 - DNA, 120 bp, synthetic construct; identical to SEQ ID NO: 11229
  source 1..120: mol_type = other DNA

SEQ ID NO: 39080 - DNA, 120 bp, synthetic construct
  source 1..120: mol_type = other DNA
cacctcaacttttgagtacttcctagcattataacacttcatatatattcattatattcattatatcttataaatatattcactatgtagtattcattatatcatattcattcattataa

SEQ ID NO: 39081 - DNA, 120 bp, synthetic construct
  source 1..120: mol_type = other DNA
atttttctgttaacatttttgtaggactctcgagttctatacattacttttgtaaactacttttggactttcctacaagggctcacaaatgaacacttaagtctgcacacggtaatgcta

SEQ ID NO: 39082 - DNA, 120 bp, synthetic construct
  source 1..120: mol_type = other DNA
taatagcaataagcagatattatgtaaatttaacaaaataacacaagatggaaatcaatatgcgtgcaggaagatgtgaggcttttaacaacaactggacactgagtagacataagttgg

SEQ ID NO: 39083 - DNA, 120 bp, synthetic construct
  source 1..120: mol_type = other DNA
gacagtttataattttaaaaatctctgggaatgggataaacattgatcaactcatagcctcttgcaggccagcactgtctgaatgcaggggatggcctttgcgcctcatctgtcactgtc

SEQ ID NO: 39084 - DNA, 120 bp, synthetic construct; identical to SEQ ID NO: 11230
  source 1..120: mol_type = other DNA

SEQ ID NO: 39085 - DNA, 120 bp, synthetic construct
  source 1..120: mol_type = other DNA
actcagtcctgggcagtccctgaggaaaaagtatgtggtaaaatcaggatcccttatgttcgatggaaccaggcaggttaaaattactttacttctaattagcagggaaaataagctaag

SEQ ID NO: 39086 - DNA, 120 bp, synthetic construct
  source 1..120: mol_type = other DNA
ggcatgggaatgaacagctataaaactccaaaaatgttttaactgttctggaactactggatggcctcttacgggaatcttcctgctgaggtctgaaaaagtagtctcaaaattcacatg

SEQ ID NO: 39087 - DNA, 120 bp, synthetic construct
  source 1..120: mol_type = other DNA
agacctttgtcaacttttctctgggattggaaagttccaaatcacggggaagagcggacatcaattctcagctccacagaagaatatatgatttgctaagctggaaaaaaaaaaggagaa

SEQ ID NO: 39088 - DNA, 120 bp, synthetic construct; identical to SEQ ID NO: 11231
  source 1..120: mol_type = other DNA

SEQ ID NO: 39089 - DNA, 120 bp, synthetic construct
  source 1..120: mol_type = other DNA
ctattatttcaggtactaacatcagaacattttatctggtattttctacagtagagtgagagcctcataatagacagataaaaacaataatcaaaatacagccaagtctaaacagtgttc

SEQ ID NO: 39090 - DNA, 120 bp, synthetic construct
  source 1..120: mol_type = other DNA
aaattaatagcaaagtattactttctaacatttggaaacaagtaaaaaagatatgcttgctttttagaagattacttagaagtttctcacttaaaaatttataaaccgatctgattgaca

SEQ ID NO: 39091 - DNA, 120 bp, synthetic construct
  source 1..120: mol_type = other DNA
catcaatgtggatcctgattacccaaatgggctgggacctcttctctgtatttccacagcactttttgttttgtttttaactacattgaaggcatttttcaaattctgcctcatatgaca

SEQ ID NO: 39092 - DNA, 120 bp, synthetic construct
  source 1..120: mol_type = other DNA
aagcatccttagaacccagctttttgtatactggaactggcctgtaaccaaagttccctctccttctgcctcaccctatcaggaaacactttttccatatttgccccaagtttactggaa

SEQ ID NO: 39093 - DNA, 120 bp, synthetic construct; identical to SEQ ID NO: 11232
  source 1..120: mol_type = other DNA

SEQ ID NO: 39094 - DNA, 120 bp, synthetic construct
  source 1..120: mol_type = other DNA
agacataattgtatgtatgtcatggaaattaccacattcaaagaaatgacatgcaggattcaaattgaatgaaatgtaagattaacataatttcatatttgtcaatcagaaagtccttca

SEQ ID NO: 39095 - DNA, 120 bp, synthetic construct
  source 1..120: mol_type = other DNA
tacataataaagaaaactatcatccccaatttgcatgtatagtttgtgcactacacgtggagattaccttaccctgttatccatgtgatttcaccaggctattaacaatatgttgatata

SEQ ID NO: 39096 - DNA, 120 bp, synthetic construct
  source 1..120: mol_type = other DNA
actaagtgcctcaccttatttaatctttataatatccaaatgaaacaggttaatcattgcctccattttattcacacatttcagtaacgtgaccaatagtcaccaaccaatcagtgtcag

SEQ ID NO: 39097 - DNA, 120 bp, synthetic construct; identical to SEQ ID NO: 11233
  source 1..120: mol_type = other DNA

SEQ ID NO: 39098 - DNA, 120 bp, synthetic construct
  source 1..120: mol_type = other DNA
cttaaaaattgtatctgtgctatctactattaaaaagtcagcagcagagatgctctattataaaaatactaaagttataaaatgtaactttagaatatcatactttataagcttcaggag

SEQ ID NO: 39099 - DNA, 120 bp, synthetic construct
  source 1..120: mol_type = other DNA
aaactttcaaacttttagaagtatagaaatatatttatgacctcagagcagttaaagatttcatacataagacaggaaagcataaaacacaaagaaaagagcagtaaacttgaacaaaag

SEQ ID NO: 39100 - DNA, 120 bp, synthetic construct
  source 1..120: mol_type = other DNA
cacaattcaaaagtgagcaaaggattcatgatatatatatatatatatatatatatatatatatatatatatatattcagttatatatgtatatataactgaaatttcacaaaataattc

SEQ ID NO: 39101 - DNA, 120 bp, synthetic construct; identical to SEQ ID NO: 11234
  source 1..120: mol_type = other DNA

SEQ ID NO: 39102 - DNA, 120 bp, synthetic construct
  source 1..120: mol_type = other DNA
tgatacatatggtatcatttgataacatttgatatttgataacattttaaaacatgcagaagacagtactattttaatgtgttatggataccaacatatgcatggctagactttgatggg

SEQ ID NO: 39103 - DNA, 120 bp, synthetic construct
  source 1..120: mol_type = other DNA
aagcttaaattaatcatctcaggatggagagattaaggttacccaatgttaaagaaaataaactcttaaaatgagaatgctatcattctaattttgcctttaccaaggacatggaaattc

SEQ ID NO: 39104 - DNA, 120 bp, synthetic construct
  source 1..120: mol_type = other DNA
ttgaggatcgcttgaggcccccaaaagtttgagactagcctgggcaacataggaagacaccgtctctacagaaaacttaaaaattagctacacgtggtagtacacgcctgtagtcccagc

SEQ ID NO: 39105 - DNA, 120 bp, synthetic construct; identical to SEQ ID NO: 11235
  source 1..120: mol_type = other DNA

SEQ ID NO: 39106 - DNA, 120 bp, synthetic construct
  source 1..120: mol_type = other DNA
tgtgtacctgtagtcccagctacttgggaggctgaggcaagagaatcacttgaacttgggaggcagaggttacagtgatccaagatcacaccactgcactccagcctgggtgacagagtg

SEQ ID NO: 39107 - DNA, 120 bp, synthetic construct
  source 1..120: mol_type = other DNA
aaaaaatgtttaatatcagtgtattaaaatggcaaaaatgtgctttctacttatggtctaaatctgcttacaaatgtccccccttttctgcataggagggcaatgtttcttgtagagcca

SEQ ID NO: 39108 - DNA, 120 bp, synthetic construct
  source 1..120: mol_type = other DNA
gtgttactttattagtttttcccttatatgtttgttttgggatatatgacttggctcatatatatatatatatgatatatatatatatgatatatatttatatatgatatatatatatga

SEQ ID NO: 39109 - DNA, 120 bp, synthetic construct; identical to SEQ ID NO: 11236
  source 1..120: mol_type = other DNA

SEQ ID NO: 39110 - DNA, 120 bp, synthetic construct
  source 1..120: mol_type = other DNA
tttggggcagataactccttatttctatatattctatgttgagagttttctctacacttttaaaaactacacagttgaagactactgaacaaggggacactcttttgataatgtgataaa

SEQ ID NO: 39111 - DNA, 120 bp, synthetic construct
  source 1..120: mol_type = other DNA
tatttgtggcaaagtaatcagtattaatcagtgtatctgctacacaatgtgttatattactcggtaatacctctgacctaaaaaatgagttaagctgattatgggacataggttcatttg

SEQ ID NO: 39112 - DNA, 120 bp, synthetic construct
  source 1..120: mol_type = other DNA
aacgtagagcaaaacaatatccagctctcttagggacttctgtccacattaccccaacccaatggtaggttttaaatgctgacattttgcagttaatcaggggcttctaaatgctaataa

SEQ ID NO: 39113 - DNA, 120 bp, synthetic construct
  source 1..120: mol_type = other DNA
taaaattcaacttaatgagatcaactctaaagctatgcttgagaaacacactgatatttttagaattctctcaatatagaactctatgcttaaaattatcccatctgggtgggtaacaca

SEQ ID NO: 39114 - DNA, 120 bp, synthetic construct; identical to SEQ ID NO: 11237
  source 1..120: mol_type = other DNA

SEQ ID NO: 39115 - DNA, 120 bp, synthetic construct
  source 1..120: mol_type = other DNA
acaagtaacagtaaaatacctacatggctaattaaaatggaacaattataaacaggacggacaaaactaaaacactaaaagcataactaaaactagcacacaacctcaaaggaaatggta

SEQ ID NO: 39116 - DNA, 120 bp, synthetic construct
  source 1..120: mol_type = other DNA
aaaaagttttccaaatttcaacaagagtgatgagtcagatcttcagtacaaagcaaagcggtatttaattgaaaagattactgagcttgacaacttcagtcttttcagccacacacggca

SEQ ID NO: 39117 - DNA, 120 bp, synthetic construct
  source 1..120: mol_type = other DNA
cggtccttatagatttaatccaatttttcaaaaaaaaatcttaacacgcctgctacagagatcctaattgttaaagatctttgacccacagcatatatattccttcaacatggcaggccc

SEQ ID NO: 39118 - DNA, 120 bp, synthetic construct; identical to SEQ ID NO: 11238
  source 1..120: mol_type = other DNA

SEQ ID NO: 39119 - DNA, 120 bp, synthetic construct
  source 1..120: mol_type = other DNA
cagccttccattgatggacattatcaatatcccttaccaggaggcaagccatccactcctttgaagtaaaatctccaagtagaactctcttttagtctttaacaagagtccttaatgtca

SEQ ID NO: 39120 - DNA, 120 bp, synthetic construct
  source 1..120: mol_type = other DNA
gcaatggtgtgatcatgactcactgcagcctcaaccttcccggctccagtgatcctcacactacagcctcccaagtatctgaaactacaggtgtgtgccaccatgcctggctcatttttt

SEQ ID NO: 39121 - DNA, 120 bp, synthetic construct; identical to SEQ ID NO: 11239
  source 1..120: mol_type = other DNA

SEQ ID NO: 39122 - DNA, 120 bp, synthetic construct
  source 1..120: mol_type = other DNA
acactttactttctaaaattattcctctccatcaccctctttctctaagccttctttaattatggattgaaatttagttaggtctatctggttcattcagatacctgtaagagaggtcat

SEQ ID NO: 39123 - DNA, 120 bp, synthetic construct
  source 1..120: mol_type = other DNA
gaaaagatcttcactagtcatccacagtcagagggacatttagaagcaattgcaaaaactgtggagacaacgtacagtttttctcagcacaatttacatagatgtctggctagctcttcc

SEQ ID NO: 39124 - DNA, 120 bp, synthetic construct
  source 1..120: mol_type = other DNA
tttatcacaagggtcatgccgtgggctcccataaaagacattgtagagcacgataaagaacgttttctcccagaagaacatttatttctaaaacccagttccccatgttaaacatcacct

SEQ ID NO: 39125 - DNA, 120 bp, synthetic construct
  source 1..120: mol_type = other DNA
acctaatatacaaatatgttttttatcattctttgctagaatgtaagctccagagggaagggatctttgtctcttttgttcattgatgcatcccaagcatcaaggacaggacgtgataga

SEQ ID NO: 39126 - DNA, 120 bp, synthetic construct; identical to SEQ ID NO: 11240
  source 1..120: mol_type = other DNA

SEQ ID NO: 39127 - DNA, 120 bp, synthetic construct
  source 1..120: mol_type = other DNA
gtacaagagtttggagagccagacattttaggtgaggtagtcacctctctgaaatgatggcaattgtttcaagacttaaataaagttctgtgccatgcagatttgcgaagagtgggaaag

SEQ ID NO: 39128 - DNA, 120 bp, synthetic construct
  source 1..120: mol_type = other DNA
ttcttgttgcttttacctgctgcttaataacacgcatgtactgtctagcaggaaataaagagattacgtttcacctagaatactcattctctgagcctaagtggctcttctattccagcc

SEQ ID NO: 39129 - DNA, 120 bp, synthetic construct
  source 1..120: mol_type = other DNA
agtaaggtgtaaaacccagcaggaacgcaatactaggaaggtgcaaagccaggaggctcaataaacgttaaacagtgtctgggggaaagagcaacgatccagagcactgtttgtgaactc

SEQ ID NO: 39130 - DNA, 120 bp, synthetic construct; identical to SEQ ID NO: 11241
  source 1..120: mol_type = other DNA

SEQ ID NO: 39131 - DNA, 120 bp, synthetic construct
  source 1..120: mol_type = other DNA
cgaaagcatatactgccactgagttagtgagccgggccggtgcccgggacctggggtactagatttatgggacgggagcctaggggtcgaggccacagaaatgaaaacatcggcaacata

SEQ ID NO: 39132 - DNA, 120 bp, synthetic construct
  source 1..120: mol_type = other DNA
atgatcaccctggaacgacgccaaacgcgacccctaccagaggactcgcgcatgcgcagcgcagcctgggccggcggcctgggcaggatgtagtcgcgagcagcgcaccgggcccacgcc

SEQ ID NO: 39133 - DNA, 120 bp, synthetic construct
  source 1..120: mol_type = other DNA
ggcacggtcgcggctctagtcccctgggcccctcagctgtctctggcggggaggtcgggccgcaggggcggggaggggtggcctgccccagtggtacctgacagcatcccacgtcacggc

SEQ ID NO: 39134 - DNA, 120 bp, synthetic construct; identical to SEQ ID NO: 11242
  source 1..120: mol_type = other DNA

SEQ ID NO: 39135 - DNA, 120 bp, synthetic construct
  source 1..120: mol_type = other DNA
ctccgtgggtcacccccaccttctccagggttatgttctcgcaaattttgggaatttgtggatacccgacctagaaggataaggcgtgtatgatgctgagagcaaccttttccacagccc

SEQ ID NO: 39136 - DNA, 120 bp, synthetic construct
  source 1..120: mol_type = other DNA
aaatgctgaaataatgaggatgtgtgctggggggttcagggggatgacctcagttaccttggggccaagggcttcgaaaacagccaccttctccccttatgattatattttgcagtaatt

SEQ ID NO: 39137 - DNA, 120 bp, synthetic construct
  source 1..120: mol_type = other DNA
gttaaatgctcaacaattaaatgttattagctattcctgtgaagtaagctacttgcttttatactggctgtttcatgaggacactggttcctctacagtgtagagccaaaagtagtaaag

SEQ ID NO: 39138 - DNA, 120 bp, synthetic construct; identical to SEQ ID NO: 11243
  source 1..120: mol_type = other DNA

SEQ ID NO: 39139 - DNA, 120 bp, synthetic construct
  source 1..120: mol_type = other DNA
agaaatttatgagttaaacaggtttgctctcagaaaaagctcacttcagtgatgatagctggcattttttttttaagcacctattgtgtgccaagaggtttatcttatttggagctcaca

SEQ ID NO: 39140 - DNA, 120 bp, synthetic construct
  source 1..120: mol_type = other DNA
ttacgcattatggacagctgaagttcatgcaggccttacggtgtgcttcagctgaagcctgacaattagctaacaataaaaacatgtcttagtgttttgaaaactgtgatattatctcag

SEQ ID NO: 39141 - DNA, 120 bp, synthetic construct
  source 1..120: mol_type = other DNA
ccagggcggtcaaaattaaaagtaagaagtaaaaatgtctccatcacatataagtttccttcaacacttttggataatttggtctactaaacttcactgtattgctgaattcagtagact

SEQ ID NO: 39142 - DNA, 120 bp, synthetic construct; identical to SEQ ID NO: 11244
  source 1..120: mol_type = other DNA

SEQ ID NO: 39143 - DNA, 120 bp, synthetic construct
  source 1..120: mol_type = other DNA
ttgattatatgtcccctatcagctaccaatgtgttctctggtctcttccaaaatgtcttaaaagagtcacttatactaactgtatcctcatcccctcctcctattcatcctctttttttt

SEQ ID NO: 39144 - DNA, 120 bp, synthetic construct
  source 1..120: mol_type = other DNA
tagttggaacggcaggtgtgtgccaccatgcccagctaatttttgaatttttaatagagatggggtttcgccatgttggccagaatggtctagagctcctgacctcaggtgatctatcca

SEQ ID NO: 39145 - DNA, 120 bp, synthetic construct; identical to SEQ ID NO: 11245
  source 1..120: mol_type = other DNA

SEQ ID NO: 39146 - DNA, 120 bp, synthetic construct
  source 1..120: mol_type = other DNA
ctatcttctcgttcccttagtaattttatttcaagacatggttttagtcctgccacttcttatgtcctaacaagttcatgacactactcttgtgaaactaggagcccttgtccttttcca

SEQ ID NO: 39147 - DNA, 120 bp, synthetic construct
  source 1..120: mol_type = other DNA
ttcatcttgcttttttcttttcaggtatccaggcaccaaggccctaatcacaagaaaaggtggatggggccgtcttttgactttttcttggaaattcagaaagtctaattacgcttcagg

SEQ ID NO: 39148 - DNA, 120 bp, synthetic construct
  source 1..120: mol_type = other DNA
cctgcactttggtgccctaagtgccattgattaggtgaatgaccttgggtagcaccttagttttctagaacttaaattccttcagactccattaaattggtgcactgcccagctctgtgt

SEQ ID NO: 39149 - DNA, 120 bp, synthetic construct; identical to SEQ ID NO: 11246
  source 1..120: mol_type = other DNA

SEQ ID NO: 39150 - DNA, 120 bp, synthetic construct
  source 1..120: mol_type = other DNA
cagccacttgggaggctgagtcagtgtgagttagctaagagaacaaaggttagggatggaagtgttagggaagggaagtagtctaagtagaataagaaatatgatgtgtttgagaattat

SEQ ID NO: 39151 - DNA, 120 bp, synthetic construct
  source 1..120: mol_type = other DNA
aaattgctcagtaaggctgaaacaaaggctatatggagggaatagggcaatggtaggaaattaaagtaaccattcattcatgaatggacactaaggatgattctttatctcaacaattgt

SEQ ID NO: 39152 - DNA, 120 bp, synthetic construct
  source 1..120: mol_type = other DNA
acctctgtactggttttcgtaatgcctgtactaatttacattcccatcaacaaaggttcctttttctccacatcattgccaacacttgttatttttcatcttttttataatagccatctt

SEQ ID NO: 39153 - DNA, 120 bp, synthetic construct; identical to SEQ ID NO: 11247
  source 1..120: mol_type = other DNA

SEQ ID NO: 39154 - DNA, 120 bp, synthetic construct
  source 1..120: mol_type = other DNA
aaaaaatcattgcccagaccaatgtcatggagttttcccctacgttatagtagttttatagtttcaggtcttaagttttaagtctttaatccatttttagttgatttttgtatttggtgt

SEQ ID NO: 39155 - DNA, 120 bp, synthetic construct
  source 1..120: mol_type = other DNA
aaaaaaaaaaaagacaattctgtcatttgtgacaacatggatgaacatggaggtcattaagtaaaatatcacatgatctcattcatatgtggaaccttaaaaagttgaactcctagaagt

SEQ ID NO: 39156 - DNA, 120 bp, synthetic construct
  source 1..120: mol_type = other DNA
gggtgattgtagttaataacaatgttttgtatatttacaaattgccaagaaagcagatgttaaatgtgctcagcaggcacacacaatgataagtatatgaggtaatgcatatattactta

SEQ ID NO: 39157 - DNA, 120 bp, synthetic construct; identical to SEQ ID NO: 11248
  source 1..120: mol_type = other DNA

SEQ ID NO: 39158 - DNA, 120 bp, synthetic construct
  source 1..120: mol_type = other DNA
atagtctcatcagacgggttttacttagtgctatataacgtggtctactttccaatctgactctggcataatatcacatgatagataagtaagcaaatcaaaatattttaagcccaaatt

SEQ ID NO: 39159 - DNA, 120 bp, synthetic construct
  source 1..120: mol_type = other DNA
taagaaacttttataatctattctctctgatgcctgctacctggagacttcctctgcataatgagaaccttggtctccacaaccccttatcttaacccagacatccccttctgttggttc

SEQ ID NO: 39160 - DNA, 120 bp, synthetic construct
  source 1..120: mol_type = other DNA
aactttgaatctacctataacctggaagccgctccttccagttgtcccatctttctagactaaaccaatataccccttatatgtattgattgatgttttatgtctccctaaaatgtataa

SEQ ID NO: 39161 - DNA, 120 bp, synthetic construct; identical to SEQ ID NO: 11249
  source 1..120: mol_type = other DNA

SEQ ID NO: 39162 - DNA, 120 bp, synthetic construct
  source 1..120: mol_type = other DNA
taaaggtaaatgggccaaataatagaaggccttggcaatgtaacagcaagatgtatcataggatctaacaaaatattttaagcaggaggacaacatgatggctcaccatcatgccagtgg

SEQ ID NO: 39163 - DNA, 120 bp, synthetic construct
  source 1..120: mol_type = other DNA
aattcagtgttaacagtggcatgggcttaaagagagaggagaacatggatttgagaaaattttagaagttgaaattagcaagactggatataaagagtagaaaatggccaggtgtggtgg

SEQ ID NO: 39164 - DNA, 120 bp, synthetic construct
  source 1..120: mol_type = other DNA
acacacacacacacacacacacacacacacacacaagaacttagtgggatgtggtggctcatttctgcagtctcagctactagagaggctgaggtgggaggatcacttgagccccaggag

SEQ ID NO: 39165 - DNA, 120 bp, synthetic construct
  source 1..120: mol_type = other DNA
aataaaaaaaaataaaataatgtgaacttagtaagtcacttaatattctaggggcctcaaaaatctttacctttaaaaatggaggattagacttagtgtttccttaatattttaagattt

SEQ ID NO: 39166 - DNA, 120 bp, synthetic construct; identical to SEQ ID NO: 11250
  source 1..120: mol_type = other DNA

SEQ ID NO: 39167 - DNA, 120 bp, synthetic construct
  source 1..120: mol_type = other DNA
aaattctaagcccctcaaccatctgaacggacccctcctcttggccacgtgcactccaagttaacctgaaaacctagttcaggccatgatgggaaggaggggtcagacgtgcctcattat

SEQ ID NO: 39168 - DNA, 120 bp, synthetic construct
  source 1..120: mol_type = other DNA
catattttaagtttggcctaaaggtttttctgtacatcataaattataacaagtagaggtgtacatggaacactatgcagccataaaaaaggatgagttcatgtcctttacagggacatg

SEQ ID NO: 39169 - DNA, 120 bp, synthetic construct
  source 1..120: mol_type = other DNA
catcacacactggggcctgtttgggggtgggggtctgggagagggatagcattaggagaactacctaatgtaaatgacgagtttatgggtgcagaaaaccaatgtggcacatgtatacct

SEQ ID NO: 39170 - DNA, 120 bp, synthetic construct; identical to SEQ ID NO: 11251
  source 1..120: mol_type = other DNA

SEQ ID NO: 39171 - DNA, 120 bp, synthetic construct
  source 1..120: mol_type = other DNA
ggaaatggtgatatcctaaccctatcatttcatcttcatttattagctgacatgcttttataaagggaaactttcttcctcaatgatttgatttcccaatgacataggaaaagcatgata

SEQ ID NO: 39172 - DNA, 120 bp, synthetic construct
  source 1..120: mol_type = other DNA
atgaatttaagcttattttattgcccacaggactctggtttttgtgatgatcacagaggagcaagcctggcttgtccgagacagtcatatcaattcattctcacttgatagtgtctgggg

SEQ ID NO: 39173 - DNA, 120 bp, synthetic construct
  source 1..120: mol_type = other DNA
ggcccaaagttagaacttacaccgctgtttccctgctcgaatcttgccttttccaaagcacccatggccccaccctgccccccatcctgtgcctataaaaacatcagcctcagctggcag

SEQ ID NO: 39174 - DNA, 120 bp, synthetic construct; identical to SEQ ID NO: 11252
  source 1..120: mol_type = other DNA

SEQ ID NO: 39175 - DNA, 120 bp, synthetic construct
  source 1..120: mol_type = other DNA
ggcctgctgagctgttagcactcaagttgtctgtgtacagcaggcaaagctaaaagggcactgtagcactccctctggggtttcaggggttgcaggcacacccccctgcaaatgctgccg

SEQ ID NO: 39176 - DNA, 120 bp, synthetic construct
  source 1..120: mol_type = other DNA
agttcactcctgctggcactgaagcagctggctagttccagcacccgtgcactccagttcctgcctcatttgctcacgggctccctccctcaaggaattgagagctgcgggctcagtaaa

SEQ ID NO: 39177 - DNA, 120 bp, synthetic construct
  source 1..120: mol_type = other DNA
ccctccttcccttcctgctttttttaggttgtcacatgaggacttgtttggagaggtgctgctgaagcttggaacatctcaatggatacatgtgacacaaatgcacaattgtgaacacta

SEQ ID NO: 39178 - DNA, 120 bp, synthetic construct; identical to SEQ ID NO: 11253
  source 1..120: mol_type = other DNA

SEQ ID NO: 39179 - DNA, 120 bp, synthetic construct
  source 1..120: mol_type = other DNA
ttttttaaaagtatgattcctatttatctcatgttacttataatggggttttttttctaaatatataagatctcataactggcattacatgattttctccatggcatgatcatcaacagg

SEQ ID NO: 39180 - DNA, 120 bp, synthetic construct
  source 1..120: mol_type = other DNA
tgctttccagcccagtggagcacagtcatcttgtcagagaaaaaacactttcagaaaaacatgagttttatagacattttctactcactagaaaaatgaaattagtacatttttcactta

SEQ ID NO: 39181 - DNA, 120 bp, synthetic construct; identical to SEQ ID NO: 3990
  source 1..120: mol_type = other DNA

SEQ ID NO: 39182 - DNA, 120 bp, synthetic construct; identical to SEQ ID NO: 11254
  source 1..120: mol_type = other DNA

SEQ ID NO: 39183 - DNA, 120 bp, synthetic construct
  source 1..120: mol_type = other DNA
acttacattgtatagtctctttggtcatttctcgcttgttttctcttagcatcattggagtcttcagaagggttaaactgaaaacaagatttttctgtccatccttgggtcagagctcta

SEQ ID NO: 39184 - DNA, 120 bp, synthetic construct
  source 1..120: mol_type = other DNA
atcacctccccatacatacagataaagatgtgatcctgaccccagttcaaaaacagtaggccatcaatcccagggccatattggagccttgatatccaatctctgttctccttttagggt

SEQ ID NO: 39185 - DNA, 120 bp, synthetic construct
  source 1..120: mol_type = other DNA
gaacagactgctctgaaatctagttagaggtcagatgaggccttcctaagttttctctggaacagcaggaactcaaacctgatcctgccattccagtctgagccaacttgggtctggaga

SEQ ID NO: 39186 - DNA, 120 bp, synthetic construct; identical to SEQ ID NO: 11255
  source 1..120: mol_type = other DNA

SEQ ID NO: 39187 - DNA, 120 bp, synthetic construct
  source 1..120: mol_type = other DNA
ctgatggtctcatatacatgacagtggaataagaaacaacatgaacattttaattttttctgtactttgagataattacccttgtgatgggtttgaggtaaactcagcttcagggtttcc

SEQ ID NO: 39188 - DNA, 120 bp, synthetic construct
  source 1..120: mol_type = other DNA
gttgattctgttcccaggggacttctcaagtaatttatagaaggagaaatgaagcttaagacaggcaaatttggaggcgattatcagtcaatggtttacaacagggctgccaagtaggca

SEQ ID NO: 39189 - DNA, 120 bp, synthetic construct
  source 1..120: mol_type = other DNA
tacttttcacctcagttcacttctatttctgatctctttccacaagattgacagggctttcttttggacttctctttgattaggatttagcttttccttggctcactcggggtttcaaca

SEQ ID NO: 39190 - DNA, 120 bp, synthetic construct
  source 1..120: mol_type = other DNA
taaccagtcttcctagttccctgttccctttcctaccccataggaccacttgaaccagctcatggatcagatacgtcttccacatcttccaaaaagctcagaggattttctaccccaaag

SEQ ID NO: 39191 - DNA, 120 bp, synthetic construct; identical to SEQ ID NO: 11256
  source 1..120: mol_type = other DNA

SEQ ID NO: 39192 - DNA, 120 bp, synthetic construct
  source 1..120: mol_type = other DNA
taaattagtggtaagacatgtatatggcaaatgatttgaaatgcagaaccatggcaacaagagcttctgttagagagaaaaggaactaacacttattgagtgctgtgtactaggtaccat

SEQ ID NO: 39193 - DNA, 120 bp, synthetic construct
  source 1..120: mol_type = other DNA
gtgtcactgtcctcattttagaaaagagaggcttaaagaggctgagtaacttgtttaagatgaactgagtaccaagcccaggtctgtctgaatccagcatcttcttacagcatattttaa

SEQ ID NO: 39194 - DNA, 120 bp, synthetic construct; identical to SEQ ID NO: 11257
  source 1..120: mol_type = other DNA

SEQ ID NO: 39195 - DNA, 120 bp, synthetic construct
  source 1..120: mol_type = other DNA
ttaatatataactagtcttaatcatatacagaaaatttctatttaaatctagtaggtaaaatatgtatacaacctcttatttaaaaaattaaggccagcctgggcatggtgctcatgctt

SEQ ID NO: 39196 - DNA, 120 bp, synthetic construct
  source 1..120: mol_type = other DNA
agtagtgtgcacctgtaatctcagctactctgtaggctgaggcaggagaatcacttgaacctggaaggtggaggttgcagtgagccgagattatgccactgcactgcagcctgggtgaca

SEQ ID NO: 39197 - DNA, 120 bp, synthetic construct
  source 1..120: mol_type = other DNA
aacatagtgagacccccatctctagcaccttggagtgttcttataatttctggaatgggcctggtcataactgggtgtggtggcgcacatctgtagtcctagctactggggaggtagagg

SEQ ID NO: 39198 - DNA, 120 bp, synthetic construct; identical to SEQ ID NO: 11258
  source 1..120: mol_type = other DNA

SEQ ID NO: 39199 - DNA, 120 bp, synthetic construct
  source 1..120: mol_type = other DNA
ttgcaccattcagcagtgtcaggtcatgaagcacagattctctccaacagtgcttcataaatacagcaagtgaatttgggaatgtggtctgtttaatttaaaattagcttctttctccag

SEQ ID NO: 39200 - DNA, 120 bp, synthetic construct
  source 1..120: mol_type = other DNA
ctgttcacttaaactcctgaaatgaaatcacattctacattgatggaattggtctaaaaaacacacatatgttctctatattgagtaaatgcacattactatctccattttaaaacattc

SEQ ID NO: 39201 - DNA, 120 bp, synthetic construct
  source 1..120: mol_type = other DNA
gattaattgcgggctaccctgccttgcaaagccatcatataaactattcagagggaagaggttaaatagttctataatataaagtcttgctgagggtgtgggaaacaggcattgctggtg

SEQ ID NO: 39202 - DNA, 120 bp, synthetic construct; identical to SEQ ID NO: 11259
  source 1..120: mol_type = other DNA

SEQ ID NO: 39203 - DNA, 120 bp, synthetic construct
  source 1..120: mol_type = other DNA
ttgttattattgttgttgttgcctgcccagcacatttggtcccagtacgccatttgccttggggaacattttcctaactccatatggtctggatggggttgtgctatggtctgaatctgt

SEQ ID NO: 39204 - DNA, 120 bp, synthetic construct
  source 1..120: mol_type = other DNA
catataggctctgccctcatgaatggattcatgccattataaaagggtttgatggaaggagtttgagcccttttgtccttctatcttctgccataggaggacacagcaagaaggccttca

SEQ ID NO: 39205 - DNA, 120 bp, synthetic construct
  source 1..120: mol_type = other DNA
actgacagggtgtcaattactttttggccatgggatggtcatgtgatccagactgggtcactcatggttcattatatgcttgataaactgattggtttaagaatggccacgtgattccac

SEQ ID NO: 39206 - DNA, 120 bp, synthetic construct
  source 1..120: mol_type = other DNA
gtgaatctggggctaccagtgggtgccttccctggttgcatggaggaagcctgtcttcagtggaaaggaaaagagtgaggccaatagaaagaggaaaacagagcagccatggaaagaaag

SEQ ID NO: 39207 - DNA, 120 bp, synthetic construct; identical to SEQ ID NO: 11260
  source 1..120: mol_type = other DNA

SEQ ID NO: 39208 - DNA, 120 bp, synthetic construct
  source 1..120: mol_type = other DNA
atttctcatctctccttgccccatcctactataggtggttttccttctgatccttccacctcacagcctccagcctctttggttccttctatatgtaaaacaatgtagctaccatctttt

SEQ ID NO: 39209 - DNA, 120 bp, synthetic construct
  source 1..120: mol_type = other DNA
acatgacttttgggtaaagtagaaggaagcatgtgattcacatcccatgcatgcccaaagcaagccactagcaaactgctgccctgagaacaaccagacaattataaatcaagaaaaaga

SEQ ID NO: 39210 - DNA, 120 bp, synthetic construct; identical to SEQ ID NO: 11261
  source 1..120: mol_type = other DNA

SEQ ID NO: 39211 - DNA, 120 bp, synthetic construct
  source 1..120: mol_type = other DNA
tgacaggagcagggaacaggtgggggcttctgagttggaggagtagagccctgccctcctgggcacagctgcagccaccctgccgaggctgaggacccaggcatccctgtgctcttgggg

SEQ ID NO: 39212 - DNA, 120 bp, synthetic construct
  source 1..120: mol_type = other DNA
tgcaacatggccaggtgtgcacatgcctggagcagcactgacatgccagccccctgccacctcagctccctccagactttgggctccaacatgagctccagagggaggatgagggggtgc

SEQ ID NO: 39213 - DNA, 120 bp, synthetic construct
  source 1..120: mol_type = other DNA
acagatccccagtgaagccctaccttcaagccagggatggcatgaagccggggggccaggctgccagttctgcaaatggggtgagaatttatggtgctttttcctggcccatccatggcc

SEQ ID NO: 39214 - DNA, 120 bp, synthetic construct
  source 1..120: mol_type = other DNA
gggtctcctctccactgagggctggacactcattggtcaacctgcctgcagaaaggagctacccacttagggtctcctgagaactgttctgctgctcagcctctctgccttgctcaccat

SEQ ID NO: 39215 - DNA, 120 bp, synthetic construct; identical to SEQ ID NO: 11262
  source 1..120: mol_type = other DNA

SEQ ID NO: 39216 - DNA, 120 bp, synthetic construct
  source 1..120: mol_type = other DNA
tggagctgcctgccccaccagtgtgactggctgtgtgcagtgtctggaccctgtgctcactcacccacacacctctaattgctctgtgactggctggcacttggcaggtgtgggatctgg

SEQ ID NO: 39217 - DNA, 120 bp, synthetic construct
  source 1..120: mol_type = other DNA
taccccaaggattctgtgacaacatgacccagtcaatattctggaatcaaattagtattctcccttttggagaaggagaaaagaaagggagaaggatggtgtgtcagaaactattgatta

SEQ ID NO: 39218 - DNA, 120 bp, synthetic construct; identical to SEQ ID NO: 11263
  source 1..120: mol_type = other DNA

SEQ ID NO: 39219 - DNA, 120 bp, synthetic construct
  source 1..120: mol_type = other DNA
tgagaaagagcctgggtctctgatgactgtagagttgccataccatacttttgtcttctataagtcaccgttcgtgtgttctctgcacactgtaagtgaacctatcttttttgttttttt

SEQ ID NO: 39220 - DNA, 120 bp, synthetic construct
  source 1..120: mol_type = other DNA
aggttcatgccattctctggcctcagcctcctgagtagctgggactacaggcacctgccaccatgcccggctaattttttgtatttttaatagagacggggtttcactgtggtcttgatc

SEQ ID NO: 39221 - DNA, 120 bp, synthetic construct
  source 1..120: mol_type = other DNA
acctatcttaactgatgccagtggggatactatctactttatgtggcaataatcaagaaagctttggactctgtgctacaaaatttagatatttttggtgtatatggtgcatgggagcaa

SEQ ID NO: 39222 - DNA, 120 bp, synthetic construct; identical to SEQ ID NO: 11264
  source 1..120: mol_type = other DNA

SEQ ID NO: 39223 - DNA, 120 bp, synthetic construct
  source 1..120: mol_type = other DNA
tatattaatatatttttatgccttaaactatccttacattcctgtgataaactggttagtcataataattttttaaattattatttttaattgactcataattttacatatttatggggt

SEQ ID NO: 39224 - DNA, 120 bp, synthetic construct
  source 1..120: mol_type = other DNA
ctagctgtttgaaaatatacaataaattattgttgactatagtcatcctatagtgctatagaatgctagaacttatttctcctatttaactgtacttttgattccttaaccaacctctgg

SEQ ID NO: 39225 - DNA, 120 bp, synthetic construct
  source 1..120: mol_type = other DNA
ggatttgcatctatatttatacataagcttacattcaatttttccttcttatattttcttgcctggttctaagtggggaaatgagtcttcttttccattagaaatatttatttctttttt

SEQ ID NO: 39226 - DNA, 120 bp, synthetic construct
  source 1..120: mol_type = other DNA
ctgggactacaggtgtgcaccaccatacccagctaatttttgtatttttagtagagatgagatttcaccatgttggcgaggctggtctcaaactcctgacctcaggtgatctgcctgttt

SEQ ID NO: 39227 - DNA, 120 bp, synthetic construct; identical to SEQ ID NO: 11265
  source 1..120: mol_type = other DNA

SEQ ID NO: 39228 - DNA, 120 bp, synthetic construct
  source 1..120: mol_type = other DNA
tcttcttgagtcaatttacataacttacattaaaccaaaaatgccctttttatcatgaagttgttcatagtatttagttaagttttaatgatctttatgttaaactcttatttttcatat

SEQ ID NO: 39229 - DNA, 120 bp, synthetic construct
  source 1..120: mol_type = other DNA
taactcatctattttctatcttaaaaatgtagacatttaaaactataatttttcctcttagtatcactatctgtaattaataagttttaaaatgcaatactcatagaatgtcattcaggt

SEQ ID NO: 39230 - DNA, 120 bp, synthetic construct; identical to SEQ ID NO: 11266
  source 1..120: mol_type = other DNA

SEQ ID NO: 39231 - DNA, 120 bp, synthetic construct
  source 1..120: mol_type = other DNA
ttgttcattgcatatgggttcaagattatttgttactgatcaattgtttttttctgtcactaagtcttaatcctttttatcactaaaaccaaagtttttcttaaagtatctattatctga

SEQ ID NO: 39232 - DNA, 120 bp, synthetic construct
  source 1..120: mol_type = other DNA
gctaatttttaaatagtttataaaaagttttcttttaaaaagctaatttaacccatttatatttattgtaagttctgacatgtttggtttcatgtctgctatctttttttgtgttttgca

SEQ ID NO: 39233 - DNA, 120 bp, synthetic construct
  source 1..120: mol_type = other DNA
tttttagcatgcataactgatatgacaaactctaaagttaattgtaatattctgttacactgaactgtgtctctcagtattcaggcccttgtgtagtctgctcctcttgaatctgggctt

SEQ ID NO: 39234 - DNA, 120 bp, synthetic construct; identical to SEQ ID NO: 11267
  source 1..120: mol_type = other DNA

SEQ ID NO: 39235 - DNA, 120 bp, synthetic construct
  source 1..120: mol_type = other DNA
acaatgagaattgaggtcccagcctatggtcccagttgtgtgttccagccagcatccagttgtttgaactgcctctatactagtaaacaagtaattaattaatacaagtaaatgaaaaca

SEQ ID NO: 39236 - DNA, 120 bp, synthetic construct
  source 1..120: mol_type = other DNA
atgacagataactgaaatgttaatgaaatcttgtccctcatactaaattacataccattcttatgctttaattccagtttctcccatgcttgccaatattccatgctgtagtctttttat

SEQ ID NO: 39237 - DNA, 120 bp, synthetic construct
  source 1..120: mol_type = other DNA
tccacatactcattttgtgtcctgtttcttgttttcttaattatattcctttgttgattactcagcaacaactgagtgataaaaaatggtaagctcagtttttattagctgaaaagtctt

SEQ ID NO: 39238 - DNA, 120 bp, synthetic construct
  source 1..120: mol_type = other DNA
tgagtcatgtgctgtttgagtctaaatttcatttcttcttaatatatgtgttttcctcaggttgctttaacgttttttctcattactcttcttattatgcagattcaccatgaaatagct

SEQ ID NO: 39239 - DNA, 120 bp, synthetic construct; identical to SEQ ID NO: 11268
  source 1..120: mol_type = other DNA

SEQ ID NO: 39240 - DNA, 120 bp, synthetic construct
  source 1..120: mol_type = other DNA
tgaggaaagaagacttgtttaggttggaaaaacaccgtctaggttttgagtcattcacttttatatttctttgaaattaaacaggtggagattatttcagtaatcattaatgtttatttt

SEQ ID NO: 39241 - DNA, 120 bp, synthetic construct
  source 1..120: mol_type = other DNA
tagaactgacagactaagaagcagcaaggattgagaggatctaaacaacacagtcaaacaacaagttctaactgacatgtatggaatacccccaccaaatgagaatagaagacacagttt

SEQ ID NO: 39242 - DNA, 120 bp, synthetic construct
  source 1..120: mol_type = other DNA
agacattaataacagaaaaatgatagaaaaatctctaaacatgtggaaattaaataacatacttttaactaaccaatggtcagtggggaactctcaaaggaaagaaaatacatagaactg

SEQ ID NO: 39243 - DNA, 120 bp, synthetic construct; identical to SEQ ID NO: 11269
  source 1..120: mol_type = other DNA

SEQ ID NO: 39244 - DNA, 120 bp, synthetic construct
  source 1..120: mol_type = other DNA
atcactacagatcttatagctattaaaaagttaataaaagaatgctacaaacaactttatgcttatatatttgataacttaaagaagtggatcaattttttaaaaaccaaaaattaccca

SEQ ID NO: 39245 - DNA, 120 bp, synthetic construct
  source 1..120: mol_type = other DNA
atccaaacatctaaaaaaattagcactagttttacataaactcttccagaaaatagaaacagcagaaatacttcgcaactcattttatgagcccagtattaccttgacactaaaatatga

SEQ ID NO: 39246 - DNA, 120 bp, synthetic construct
  source 1..120: mol_type = other DNA
aaagaattctacgccatgaccaatttggacttattctaggaatgtaagattggttcaacattcaaaattaaacattggtatatcggcctaaggaaaagataatatgatagtgtcaattca

SEQ ID NO: 39247 - DNA, 120 bp, synthetic construct; identical to SEQ ID NO: 11270
  source 1..120: mol_type = other DNA

SEQ ID NO: 39248 - DNA, 120 bp, synthetic construct
  source 1..120: mol_type = other DNA
aaaccctgtctctactaaaaatacaaaaaaattaggtgggcatggtggcgcacgcctgtagtcccagctcctctgaaggctgaggcagaagaattgcttgaatccaggagccagaggttg

SEQ ID NO: 39249 - DNA, 120 bp, synthetic construct
  source 1..120: mol_type = other DNA
caagatctagggctaggcaaaaagtttttagactatatcagctgggtttcctcaaagttaaaaactttgctctgcaaaagtctatgggaggaggatgaaaagatcaactacagactagga

SEQ ID NO: 39250 - DNA, 120 bp, synthetic construct; identical to SEQ ID NO: 11271
  source 1..120: mol_type = other DNA

SEQ ID NO: 39251 - DNA, 120 bp, synthetic construct
  source 1..120: mol_type = other DNA
cagcaattgtactcttgatcaaatgaaataaaaagctgtataagaatgttcatagcatctttctgtaagagttgaaaactggagtcagcccagatgtctttcaagacatgaatgattaaa

SEQ ID NO: 39252 - DNA, 120 bp, synthetic construct
  source 1..120: mol_type = other DNA
tgattcttcagggaattacggtgaatgaaaaaaggccaatcttggaaggttacatcctttatgatcctatttatgtaacagtttaaaggtgatagacttttagaaatggagattagtggt

SEQ ID NO: 39253 - DNA, 120 bp, synthetic construct
  source 1..120: mol_type = other DNA
tgccaggggttaaggatgggggaggggagaggtgggtgttgttataaacgggcagcaggaggaccctcgtggtgatgaaatattctgtatgttaactgtggtgatggattcatgaaccta

SEQ ID NO: 39254 - DNA, 120 bp, synthetic construct
  source 1..120: mol_type = other DNA
agttttgcaaaatgagggaaactggtagaaagtattctctggattatttcttacaactgcatgtgaatctacaattatctcaataaaaaatttctataaaaatgctctattaaataatct

SEQ ID NO: 39255 - DNA, 120 bp, synthetic construct; identical to SEQ ID NO: 11272
  source 1..120: mol_type = other DNA

SEQ ID NO: 39256 - DNA, 120 bp, synthetic construct
  source 1..120: mol_type = other DNA
agtcccagctactcgggaggctgagataggaggatcgcttgagcccaggaggtagaggctgcggtgagccatgattgtgccacagcagacagagtgagacccgaacgaaaaaaaaaaatt

SEQ ID NO: 39257 - DNA, 120 bp, synthetic construct
  source 1..120: mol_type = other DNA
tggcatcatgtgactgaagggacatttctcttgaagtctatctgtactatctttctacagctgcaaaattgttctctccactgcacttgtagtaatgatgattactattattaatactaa

SEQ ID NO: 39258 - DNA, 120 bp, synthetic construct; identical to SEQ ID NO: 11273
  source 1..120: mol_type = other DNA

SEQ ID NO: 39259 - DNA, 120 bp, synthetic construct
  source 1..120: mol_type = other DNA
aaacaccttgattttttgagagattagtactaagaaaccagacttactcattccattaagactttgaaaatccaacccaaaatgctcagtcattttttgtgactctatttgcagtaatat

SEQ ID NO: 39260 - DNA, 120 bp, synthetic construct
  source 1..120: mol_type = other DNA
acactcttaatcaggggaataaagtacacaaaaaaattcagcagcaattgcaccatttactgctctgatgtttttgaaaaaggaagtaagtgactgagatacacaaaacaacccatgcaa

SEQ ID NO: 39261 - DNA, 120 bp, synthetic construct
  source 1..120: mol_type = other DNA
tactggacctgtcaaaacagtgaacccaatgacagtgtttagaaaatgttcactgaaatggactcacagaccaaaagtatacagaaacctgctgttgaaagctattctttcaggatgacg

SEQ ID NO: 39262 - DNA, 120 bp, synthetic construct; identical to SEQ ID NO: 11274
  source 1..120: mol_type = other DNA

SEQ ID NO: 39263 - DNA, 120 bp, synthetic construct
  source 1..120: mol_type = other DNA
agactcaaacttggtacaatttcctcagaccaactaaataatacgcctaagcttggacaaagtctatgggaacaccaaaaaattttttaatgatttcttacctgaagggagaaggaacct

SEQ ID NO: 39264 - DNA, 120 bp, synthetic construct
  source 1..120: mol_type = other DNA
attaacttagatgttaggcaatgccatttcccatctctgtctagaatgataggcctcttcaaccacaatggtctctttgccttgaattcttcctatcagatttctttttcaatgatatct

SEQ ID NO: 39265 - DNA, 120 bp, synthetic construct
  source 1..120: mol_type = other DNA
aggccgggcacggtggcttacacctgtaatcccagcactttgggaggccgaggcgggtggatcacctgaggtcaggagttcaagaccagcctggctaacatggcaaaaccctgtctctac

SEQ ID NO: 39266 - DNA, 120 bp, synthetic construct
  source 1..120: mol_type = other DNA
ccactgcactccagcctgggcaacagagcaagactctgtctcaaaaaaaaaaaaaaaaaaaaatcacaaaatgatgaacttgattttctttcttcttcactgaacttaaatgtacccaat

SEQ ID NO: 39267 - DNA, 120 bp, synthetic construct; identical to SEQ ID NO: 11275
  source 1..120: mol_type = other DNA

SEQ ID NO: 39268 - DNA, 120 bp, synthetic construct
  source 1..120: mol_type = other DNA
atcaccctgactcccagcttcctcatctgtaatataaaaggactggtctaggtaaaccccaaagtctctccctgctctaaaaattcccagttctacagaggaccaagagaaagtaatttc

SEQ ID NO: 39269 - DNA, 120 bp, synthetic construct
  source 1..120: mol_type = other DNA
aactataagggaccatggccgtaggaaccttagcattaattaggccatgtgagacttccttaaattaaaaaataaaaaaacttttctgtttcatcaactatcaagtcatctgagcttgct

SEQ ID NO: 39270 - DNA, 120 bp, synthetic construct; identical to SEQ ID NO: 11276
  source 1..120: mol_type = other DNA

SEQ ID NO: 39271 - DNA, 120 bp, synthetic construct
  source 1..120: mol_type = other DNA
ataataaggggccatggcaaataaagaaggatgtttacaccagtttaaaaagatcatctttccctgtttcctttcctcttttgactgctgacctgctgtattataacagtgataagagac

SEQ ID NO: 39272 - DNA, 120 bp, synthetic construct
  source 1..120: mol_type = other DNA
ttgagtattgtgaggggaaaaaggggcctaaaaaagtcacagatatatttgactagaggaagtaggaatacagtttaagaccaagactatgatagctcaaactgttatgaccactcaata

SEQ ID NO: 39273 - DNA, 120 bp, synthetic construct
  source 1..120: mol_type = other DNA
gtacagatttcaggtgattgtaacccaagatggttagccaatttgaacaatattatttgtgtatatcagtgtatctattcatggatgagtttgtctctcaggagacatttggcaattcct

SEQ ID NO: 39274 - DNA, 120 bp, synthetic construct; identical to SEQ ID NO: 11277
  source 1..120: mol_type = other DNA

SEQ ID NO: 39275 - DNA, 120 bp, synthetic construct
  source 1..120: mol_type = other DNA
ggtaattcttggattatttcaccgatcttaggtagagtgtaagaaactcctgtagtcactaattcaaccagaaggaagaattcaggctttttctcatatctgcacacagaaaaaagtggc

SEQ ID NO: 39276 - DNA, 120 bp, synthetic construct
  source 1..120: mol_type = other DNA
tctcctcaagttagccaaggtacagaccagaaaacaagtagtagttgcaatgatgaaacagtctgcacacaagcaactcgatcagccagagcagggagtgggaaacataggtatgtgtga

SEQ ID NO: 39277 - DNA, 120 bp, synthetic construct
  source 1..120: mol_type = other DNA
tttctgtaggcttcaggtaacattccatctattaggctatatttcacaggtatgcttgcaactgggaacgtgagaaatgtattcttgaaatttcatgtggctcatctgactttgccacat

SEQ ID NO: 39278 - DNA, 120 bp, synthetic construct; identical to SEQ ID NO: 11278
  source 1..120: mol_type = other DNA

SEQ ID NO: 39279 - DNA, 120 bp, synthetic construct
  source 1..120: mol_type = other DNA
aaacttcatacaccaccacttatagtttttagttctgtaatatacacgtacatatatgagtacagtgtatattctttgcttttaggaaatccagtataggaaaatctaaagttggaaaac

SEQ ID NO: 39280 - DNA, 120 bp, synthetic construct
  source 1..120: mol_type = other DNA
aacaataaaaaactaaatcaaatccataaatataaactaagtacctaatcttatgagcaagaaagaggagaatgaatatacaaagaagaccaagattaatttggggtatttaagacttta

SEQ ID NO: 39281 - DNA, 120 bp, synthetic construct
  source 1..120: mol_type = other DNA
taaaaatgcaaaaaattagccaggtgtggtggcggcacatgcctgtaatcccaactactcaggaggccgaggcaggagaatcgcttgaacccggcaggcagaggttgccgtgagccgaga

SEQ ID NO: 39282 - DNA, 120 bp, synthetic construct; identical to SEQ ID NO: 11279
  source 1..120: mol_type = other DNA

SEQ ID NO: 39283 - DNA, 120 bp, synthetic construct
  source 1..120: mol_type = other DNA
tatcagatgtgtccattgctactgagatattactgcttcttggcccctttagtagagatagttagaatacatatttatttaaattgtgactgaatcttactgaatcccctgttcccaatt

SEQ ID NO: 39284 - DNA, 120 bp, synthetic construct
  source 1..120: mol_type = other DNA
ttcttgactcatgttcaagtttgtaatcatttatttcttattttgctcctaaagtgacccagtaagggaaagctgatgtgaagcctgattagcttttaccgtgatcccttttcctaagga

SEQ ID NO: 39285 - DNA, 120 bp, synthetic construct
  source 1..120: mol_type = other DNA
aacaaaaacaccactttccaaaatcctgtgtatttcacatatgtctaaggttttgaggacaacccaacctatacagctttctccaaggattgtagaggagagggaacagagcagagaggg

SEQ ID NO: 39286 - DNA, 120 bp, synthetic construct
  source 1..120: mol_type = other DNA
agataattaagatacagcatcttaattatccttctatcatcatgcagatcaatggtgtgccatgtaaaatttttctgaacttagcattttcactgcttccaaagggctgcactatttcat

SEQ ID NO: 39287 - DNA, 120 bp, synthetic construct; identical to SEQ ID NO: 11280
  source 1..120: mol_type = other DNA

SEQ ID NO: 39288 - DNA, 120 bp, synthetic construct
  source 1..120: mol_type = other DNA
atctgggtttggggccagtttttccgctttagtgccaagtgtccttgggcaaagcattggttccctttgaggctgtttccttccctgtaaaacaaaaataaaagtcatgttcttgcttac

SEQ ID NO: 39289 - DNA, 120 bp, synthetic construct
  source 1..120: mol_type = other DNA
gtgttattagaagctgttgaaagtaaataatggggcagcttaattcaagtaatttcaaatgcctcagggtacaaagagctgtgtgagagtcttagatatttgcactgccctgtggtaata

SEQ ID NO: 39290 - DNA, 120 bp, synthetic construct; identical to SEQ ID NO: 11281
  source 1..120: mol_type = other DNA

SEQ ID NO: 39291 - DNA, 120 bp, synthetic construct
  source 1..120: mol_type = other DNA
cctactatgtgccaggcactagaaagaaggctctgttttcaaacaaaatcttacaagaaccccaatatgtaaaacagaaaaatttgacgctgctctgttgaagcaaggcctgggggactc

SEQ ID NO: 39292 - DNA, 120 bp, synthetic construct
  source 1..120: mol_type = other DNA
acatgataagcgttcaatatttcctgcatgaatgagtgcatgtacgcatgaatgaatgcacaaaatagagtgggtggtctgtaggaaagaattcagataaatgggtgcagtggattccat

SEQ ID NO: 39293 - DNA, 120 bp, synthetic construct; identical to SEQ ID NO: 11282
  source 1..120: mol_type = other DNA

SEQ ID NO: 39294 - DNA, 120 bp, synthetic construct
  source 1..120: mol_type = other DNA
ggtagaacaatggccccctagagacctctataccccaatccctgtagtctataaatattctatgttacgaggcaatggagaaactaagattgctaaccagctgactgtgaggtgggaaga

SEQ ID NO: 39295 - DNA, 120 bp, synthetic construct
  source 1..120: mol_type = other DNA
gtgatgtgatttgagaacttgactggtcactgcagtttttgagatggaagagggccacaggccaaagcaatgcaggcagcctccaggagctagaaaagcaaggaaatagattctccccta

SEQ ID NO: 39296 - DNA, 120 bp, synthetic construct
  source 1..120: mol_type = other DNA
attttttttacagcagccattggaaatgaatacagatgttctcactccaccttcatgtgacagccctaacagttgggtacttactgttggtatcttgcagatgagtagaatgaggcatag

SEQ ID NO: 39297 - DNA, 120 bp, synthetic construct; identical to SEQ ID NO: 11283
  source 1..120: mol_type = other DNA

SEQ ID NO: 39298 - DNA, 120 bp, synthetic construct
  source 1..120: mol_type = other DNA
taggaccctgtgtttgtaaacagctcacaagtgaggtctggcctctgggtctggagcggctgtagaagcagcttctgttctctgcttcggggctctgagaatgtagggtcactagaagag

SEQ ID NO: 39299 - DNA, 120 bp, synthetic construct
  source 1..120: mol_type = other DNA
gacggccatgcgacagtcctgtgtggaatgaaatttagggaaaggtcagggctaaccagaaggatataactctttgtgctgcccaagagaaagatgtcactcataagtgatgattatttt

SEQ ID NO: 39300 - DNA, 120 bp, synthetic construct
  source 1..120: mol_type = other DNA
atctctattaaaaatttaaaaaattagctaggcatgcgcgtgcatgcctataatcccacctactctagacgctgaggcaggaggatcatctgagcctggggagatgagggctgcagtgag

SEQ ID NO: 39301 - DNA, 120 bp, synthetic construct; identical to SEQ ID NO: 11284
  source 1..120: mol_type = other DNA

SEQ ID NO: 39302 - DNA, 120 bp, synthetic construct
  source 1..120: mol_type = other DNA
ctgaggccccacaccgcccactccacagacagcaaacagccccaggagggttgctactctgtaactgcggtcatggacccctgagtcttcattttaaaagaatccatgcacccctctgtt

SEQ ID NO: 39303 - DNA, 120 bp, synthetic construct
  source 1..120: mol_type = other DNA
ctcccaggcatgcaggcaagaagtatcaactttcctctcagatatgtgaactcagagaggaagccaaagtttggctgactggtttctaggagtacagagtgaaaacgttgcttgtattta

SEQ ID NO: 39304 - DNA, 120 bp, synthetic construct
  source 1..120: mol_type = other DNA
aaatactctttttcattatttcattaggtcaatatggaaaatgctcaataggccttttgaacactttaaaggactccaaagatgttggagaaaatggaacattcattcgtacttttttag

SEQ ID NO: 39305 - DNA, 120 bp, synthetic construct; identical to SEQ ID NO: 11285
  source 1..120: mol_type = other DNA

SEQ ID NO: 39306 - DNA, 120 bp, synthetic construct
  source 1..120: mol_type = other DNA
ctggtcttgaactcctgacctcaggtgatctgcccaccttggcctcccaaagtgctgggattacaggcatcagccaccacgtctggcctatatttcttttttggtttttttttttaatat

SEQ ID NO: 39307 - DNA, 120 bp, synthetic construct
  source 1..120: mol_type = other DNA
tttgccaggcatggtggcatgtgcctgtagtctcagccactcaggaggctgaggtgggaagatcacttgagcctgggaggtcaagggtgcagtgagctgtgattgtggcacttcactcca

SEQ ID NO: 39308 - DNA, 120 bp, synthetic construct
  source 1..120: mol_type = other DNA
atatagggatgaattctgagatttagtgcaccccatacttggcacaattgaccttccatgctccttaatgtagagtttgcaaaatggagctttaaggtacttctaaaataagttttctac

SEQ ID NO: 39309 - DNA, 120 bp, synthetic construct; identical to SEQ ID NO: 11286
  source 1..120: mol_type = other DNA

SEQ ID NO: 39310 - DNA, 120 bp, synthetic construct
  source 1..120: mol_type = other DNA
gtagcgaaaaaacaagcttgagggttacacgacccttgttatctgtgtcgtctcgttcaggcccaacacttcctgctattcttttccactatggtcttgtgtcatcatctgcaaaatatg

SEQ ID NO: 39311 - DNA, 120 bp, synthetic construct
  source 1..120: mol_type = other DNA
tttcttcctccaagagcccgaagcaaacaggggattttcaagaataatttctgtttggctatgggatatgttatgttacctttctgccttaaactgatccaccagttgatttatatttta

SEQ ID NO: 39312 - DNA, 120 bp, synthetic construct
  source 1..120: mol_type = other DNA
tgtggtagtctgttgtggttacaattcacagaatgcatacatacatgcacataaaggagaaatggctgtgtttagaaaaaatggtcatacataaataagttgattactttggtgatggga

SEQ ID NO: 39313 - DNA, 120 bp, synthetic construct
  source 1..120: mol_type = other DNA
actcacactacatcctttgccagcaggcagggaaagcactcccagggtgatactgatatgaatgttctttccttgcccccaactcaccctgctcaagtcacatagctaaggtcagctttg

SEQ ID NO: 39314 - DNA, 120 bp, synthetic construct; identical to SEQ ID NO: 11287
  source 1..120: mol_type = other DNA

SEQ ID NO: 39315 - DNA, 120 bp, synthetic construct
  source 1..120: mol_type = other DNA
attcatttagtttgggtttagtgggatgtgtatatgtgtgttgtagcctcttccaggtagagttaagctgttgctgggaatactcctattgctcactgtgttgactcagtgggagctgtg

SEQ ID NO: 39316 - DNA, 120 bp, synthetic construct
  source 1..120: mol_type = other DNA
atgtttgaagctggaagatagtctatggagcattcttgcaattgtcagtaagtagaaaattcagttgtcaaagaagactagtgaaaatacaagttctttcctgtcaggaatatactggaa

SEQ ID NO: 39317 - DNA, 120 bp, synthetic construct; identical to SEQ ID NO: 11288
  source 1..120: mol_type = other DNA

SEQ ID NO: 39318 - DNA, 120 bp, synthetic construct
  source 1..120: mol_type = other DNA
gcgtgggagactcatttagtttgggtttagtgggatgtgtatatgtgtgttgtagcctcttccaggtagagttaagctattgctgggaatactcctattgctcgctgtgctgacggacat

SEQ ID NO: 39319 - DNA, 120 bp, synthetic construct
  source 1..120: mol_type = other DNA
gagtgcagtggggtgatcttggctcactgcaacctctgtctcccgggttcaagctattctcctgcctcagcctcctgagtagctgggactacaggcacgtgccaccatgcctggctaatt

SEQ ID NO: 39320 - DNA, 120 bp, synthetic construct; identical to SEQ ID NO: 11289
  source 1..120: mol_type = other DNA

SEQ ID NO: 39321 - DNA, 120 bp, synthetic construct
  source 1..120: mol_type = other DNA
aaagcatagaggaggaggttgaaagggttagaaaggtcaagtttcttggaagctttgtgtgggaattccatcacttttatcttcagaacccaaggcaatgatagcaatgatgatgaagat

SEQ ID NO: 39322 - DNA, 120 bp, synthetic construct
  source 1..120: mol_type = other DNA
cattatcttcaatttacaggccaggaatttaacaaggaagaaattaagccctttacccaaggtaatttcagagtgaatatcacaaatgaagagttcctgcctcttctctgtccacatgtc

SEQ ID NO: 39323 - DNA, 120 bp, synthetic construct; identical to SEQ ID NO: 11290
  source 1..120: mol_type = other DNA

SEQ ID NO: 39324 - DNA, 120 bp, synthetic construct
  source 1..120: mol_type = other DNA
atttgaatttctggagaactattatgagaggccctgagcatccttgtactcgagctcggaatgttcttgctggtttttccaagaatgcaagggcttgactgcttttcacttgggcccttt

SEQ ID NO: 39325 - DNA, 120 bp, synthetic construct
  source 1..120: mol_type = other DNA
tgtaatacaacctgttgcatggcagcatttatctgagccctatgttgccctctgggacttggaagcaaggaaaacagctgaaacataatgcttatgctgcttggtgactgtaaataataa

SEQ ID NO: 39326 - DNA, 120 bp, synthetic construct
  source 1..120: mol_type = other DNA
ctgaataacgttaggtgcacctgatctgtgacacttgtacccctcctgttatgacactgagcaccctttattgtaattgcttatttaattcctttattccccaccaggctggaagctatg

SEQ ID NO: 39327 - DNA, 120 bp, synthetic construct; identical to SEQ ID NO: 11291
  source 1..120: mol_type = other DNA

SEQ ID NO: 39328 - DNA, 120 bp, synthetic construct
  source 1..120: mol_type = other DNA
cagcatctctgcctcaccatgatgtgatggagtttccctgccccaacctgcttgtttgagtgtatggttctggtgtggatgttcgctcaatttccacatctcatgggcattggtggaaag

SEQ ID NO: 39329 - DNA, 120 bp, synthetic construct
  source 1..120: mol_type = other DNA
caaattttcagggtttgtggagcaattaattgcttcatacacatgctgggccacgttcttcagaatgaggcaggtcacatctccgaattcttaacccttttggaatccaggcgctcacca

SEQ ID NO: 39330 - DNA, 120 bp, synthetic construct
  source 1..120: mol_type = other DNA
tgggaaagagaggtggacgcaggtcaaagatatcacatcctctcctctcacctttccttctcccttcccttcctccttctgagacacaaacggaaatagtatattagctatgaccatgaa

SEQ ID NO: 39331 - DNA, 120 bp, synthetic construct; identical to SEQ ID NO: 11292
  source 1..120: mol_type = other DNA

SEQ ID NO: 39332 - DNA, 120 bp, synthetic construct
  source 1..120: mol_type = other DNA
aagtagctgggattacaggtacatgccaccatgcctggctaatttttaaatttttcatagagacaaggtctccctatattgcccaggctggtcttgaacttccgggctcaagtgatcctc

SEQ ID NO: 39333 - DNA, 120 bp, synthetic construct
  source 1..120: mol_type = other DNA
ttctcactggcttaaagaagtaatattgattcatgattggctataccttgttgagctatagggtaagagctatggtatctagcatatggcattgttaggttaatgtatggccacttggtg

SEQ ID NO: 39334 - DNA, 120 bp, synthetic construct; identical to SEQ ID NO: 4025
  source 1..120: mol_type = other DNA

SEQ ID NO: 39335 - DNA, 120 bp, synthetic construct
  source 1..120: mol_type = other DNA
tattgagcctgtccggggccagtctgggccagtccagagagtgagaatagcagtcagtaggttaagaacacaggtttctagttcaacagaccttgactcagtcccatcctatcttattag

SEQ ID NO: 39336 - DNA, 120 bp, synthetic construct
  source 1..120: mol_type = other DNA
acttgttcctgatgctgggatccctttacaggaagcataaccctttattttagttcaaattaaacaaatactcaaatgccctggtggaagcagttaacacccacaagttaaaacttgcct

SEQ ID NO: 39337 - DNA, 120 bp, synthetic construct
  source 1..120: mol_type = other DNA
cattacttcatgctttttctttcgacctgatctcccttccctttcttatttttgagagaaagtttcaattcctgttacagctgaattcaccgggaagtatgggtaatttgtctccatact

SEQ ID NO: 39338 - DNA, 120 bp, synthetic construct
  source 1..120: mol_type = other DNA
aaagagcaccataaccaggtgtagctggagtcaggccattttgtgtcagccagtgccaaagtccttccaggtggtggctgctctttctaaggactatttgaacttacagcaatctgatca

SEQ ID NO: 39339 - DNA, 120 bp, synthetic construct; identical to SEQ ID NO: 11294
  source 1..120: mol_type = other DNA

SEQ ID NO: 39340 - DNA, 120 bp, synthetic construct
  source 1..120: mol_type = other DNA
ctaaaagagtatagttggatggtttgtaacacaaaggataaatgcttgaggggatggataccctactttccatgatgtgattattatgcattgcatgcctgtacccaaatatctcatgta

SEQ ID NO: 39341 - DNA, 120 bp, synthetic construct
  source 1..120: mol_type = other DNA
aaaatcctttctttacagtcgaataatattttagcaatgctgccctctgcagagcaaaactaggatcgcaactctaggtggttaaacgaacttcccaacactggttaatttgaagagaac

SEQ ID NO: 39342 - DNA, 120 bp, synthetic construct; identical to SEQ ID NO: 11295
  source 1..120: mol_type = other DNA

SEQ ID NO: 39343 - DNA, 120 bp, synthetic construct
  source 1..120: mol_type = other DNA
aggtttaatggactcacagttccatgtggctggagacgcctcataatcatggtggaagatgaaggaagagcaatgggacgtcttacatggcagcaggcaagagagaaagagagccaaacg

SEQ ID NO: 39344 - DNA, 120 bp, synthetic construct
  source 1..120: mol_type = other DNA
catgagaacagtatgtgggaaactgcccccatgactcaatgatttcccactggcaccctcccacaacacgtgggaattatggaagctgcaattcaagatgagatttgggtggagacacag

SEQ ID NO: 39345 - DNA, 120 bp, synthetic construct
  source 1..120: mol_type = other DNA
cattgctcctttaggggtgccttctgagaaagcaaaaggagttttactttcatgggactctcctgtcttagctctaaattttcttattgtcccattgtttggtgcaagttcttttttttt

SEQ ID NO: 39346 - DNA, 120 bp, synthetic construct
  source 1..120: mol_type = other DNA
gggattacgggtatgtgccaccatgcctggctaattttgtgtttttagtagagactgggtttctccgtgttggtcaggctggtctcgaactcccgacctcaggtgatctgcccaccttgg

SEQ ID NO: 39347 - DNA, 120 bp, synthetic construct; identical to SEQ ID NO: 11296
  source 1..120: mol_type = other DNA

SEQ ID NO: 39348 - DNA, 120 bp, synthetic construct
  source 1..120: mol_type = other DNA
ggtctttaacagctttccttcaggggcacgtagagggcatggctgtgatatgcctgtgtcatgctttttaaagagtagtcctcctggaaaataactcatccttctctaggtctggaagat

SEQ ID NO: 39349 - DNA, 120 bp, synthetic construct
  source 1..120: mol_type = other DNA
tggacgaagatagttacaccatagggcctgagtgagcgggagacactaagatgattcactgtctgctgaggagcaccttgaaagtcagaccaggatatttcaggtcctacaccacctgac

SEQ ID NO: 39350 - DNA, 120 bp, synthetic construct; identical to SEQ ID NO: 11297
  source 1..120: mol_type = other DNA

SEQ ID NO: 39351 - DNA, 120 bp, synthetic construct
  source 1..120: mol_type = other DNA
ctggattcaagctattctcctgcctcagcctcccaagtaacttgcattacaggctcatgccaccacctcggctgatttttttgtatttttagtagagatggggtttcaccatgttggcta

SEQ ID NO: 39352 - DNA, 120 bp, synthetic construct
  source 1..120: mol_type = other DNA
gtgttttgccttgtgttataattctttaactacatgtctcaaggccctttgaagagagagagtcaattccatctctatacttcccagctgtctagctcaatatctggtacagggcaggta

SEQ ID NO: 39353 - DNA, 120 bp, synthetic construct
  source 1..120: mol_type = other DNA
catccgtgagcgtgagggaattgtgattgtgatcagggaatttgtcatggattgatgaccaagtgtggaaaaactcaaactgtttgtcctctgctctcatacccgaaaaattagcacaga

SEQ ID NO: 39354 - DNA, 120 bp, synthetic construct; identical to SEQ ID NO: 11298
  source 1..120: mol_type = other DNA

SEQ ID NO: 39355 - DNA, 120 bp, synthetic construct
  source 1..120: mol_type = other DNA
tcccaggagccttcaggaacctccatgagtttagctatctggaagctctcataacactgtccttttgagtttttatagaggctttatcatgtgggcatgattgataaaaccactggctat

SEQ ID NO: 39356 - DNA, 120 bp, synthetic construct
  source 1..120: mol_type = other DNA
tctaggggctgctggccaccagtccagtgggtggcacacagaaggacacatatcactgaagattccaagaatttttggagttgtatttcaggaaatgggtaggaagatcaaacatacatt

SEQ ID NO: 39357 - DNA, 120 bp, synthetic construct
  source 1..120: mol_type = other DNA
gaagcccaaccttgttcatggattttttttccctttcataggagagactgtgctcaagatccagattcatttgttgattctcatagctttaaaaacatgccaagtgcccacaggtctttg

SEQ ID NO: 39358 - DNA, 120 bp, synthetic construct
  source 1..120: mol_type = other DNA
aaaataaacagaaattaaactttatcctaacctccaaagtatacaactcccaactaaatgtgtagctttgatttaaatgatgggttatgtaccgtcacttaatggggacaggataagtga

SEQ ID NO: 39359 - DNA, 120 bp, synthetic construct; identical to SEQ ID NO: 11299
  source 1..120: mol_type = other DNA

SEQ ID NO: 39360 - DNA, 120 bp, synthetic construct
  source 1..120: mol_type = other DNA
tcattctgtactataaagatgaaagtcttggctatcacgtgggaaggcaagttcttgaatggaaatatgtgctaaggtagatggcccaacatgatggtttcttgcctgggagcttcttgt

SEQ ID NO: 39361 - DNA, 120 bp, synthetic construct
  source 1..120: mol_type = other DNA
ttcactgcagcctctacctccttggcacaagcaactctcccaactcagtgtcctgagaagttgggactataggcgcttgcctccacacaggataattgttttttttttttttgtgaccaa

SEQ ID NO: 39362 - DNA, 120 bp, synthetic construct
  source 1..120: mol_type = other DNA
tgtgccaccacgcccagctaatttttgtaattttgagtagagacagaatttcaccatgatggccaagctggtctcaaactcctagcctcaagtgacccacccacgttggcctcccaaagt

SEQ ID NO: 39363 - DNA, 120 bp, synthetic construct; identical to SEQ ID NO: 11300
  source 1..120: mol_type = other DNA

SEQ ID NO: 39364 - DNA, 120 bp, synthetic construct
  source 1..120: mol_type = other DNA
ccagccttttatagagccaagaagctggctctttaccgcatgtttttttcaacatcctctataaaaaaccctttgtggtgtttattggatgacctctcactgacctttctcttgtgttct

SEQ ID NO: 39365 - DNA, 120 bp, synthetic construct
  source 1..120: mol_type = other DNA
atataaataatgaataatctttaatatataagacttggaacatacttggatttaaaaattattaattatttatctgaaattgaaatatgactgggtgtcctgtgtttcacctggcaactc

SEQ ID NO: 39366 - DNA, 120 bp, synthetic construct
  source 1..120: mol_type = other DNA
actgctacacaaccttgaactacttcacacatcgaaaaagaacacgtactctttctctaccaaaagtgaatttatcagttacacatacaaggtacacttttccttaatgactgaggtttg

SEQ ID NO: 39367 - DNA, 120 bp, synthetic construct; identical to SEQ ID NO: 11301
  source 1..120: mol_type = other DNA

SEQ ID NO: 39368 - DNA, 120 bp, synthetic construct
  source 1..120: mol_type = other DNA
cttattttacttttgaaaattaacatagttatctgggggcgtgaaggggagcacagcagcaacaacggaagccttcagtgttcacttctggagcctcacgtcttgactgctgccacaacc

SEQ ID NO: 39369 - DNA, 120 bp, synthetic construct
  source 1..120: mol_type = other DNA
atctggtctaacaggagctgatgctatgctcagggaagcaacagggaatgaatgataaagaggaaacagagctgccaggatgagtgattgtcaaaggtggatgctttcctgattagctgc

SEQ ID NO: 39370 - DNA, 120 bp, synthetic construct; identical to SEQ ID NO: 11302
  source 1..120: mol_type = other DNA

SEQ ID NO: 39371 - DNA, 120 bp, synthetic construct
  source 1..120: mol_type = other DNA
tccaaacgttcaagaccagcctggacaacatagtgagacccccatccctaaaaaactaaaaagtgaaaaattagccaggcatggtggtatgtgcctgtagtcccagctacttgggaggct

SEQ ID NO: 39372 - DNA, 120 bp, synthetic construct
  source 1..120: mol_type = other DNA
gtgtggtgggattacacctgtaatcccagcacttcaggaggccaaggcaggtggatctcctgaggtcaggagttcaagactagcctggccaacatggtgagaccctgtctctactaaaaa

SEQ ID NO: 39373 - DNA, 120 bp, synthetic construct
  source 1..120: mol_type = other DNA
tgcactccagcctaggcaacaagagcaaaactccatctcaaaaataaaataaaataaaataaaactaagaaaaagaacaggatatctgttacacaaattaccccagattgctgaaaccac

SEQ ID NO: 39374 - DNA, 120 bp, synthetic construct
  source 1..120: mol_type = other DNA
acttttggataaatttagtttctggtttaaccttaaggcaaggattataataggccttcccaaaactaaactacttttgtaaaactaatgaaaggtcacaaggttaggaaggttaggatt

SEQ ID NO: 39375 - DNA, 120 bp, synthetic construct; identical to SEQ ID NO: 11303
  source 1..120: mol_type = other DNA

SEQ ID NO: 39376 - DNA, 120 bp, synthetic construct
  source 1..120: mol_type = other DNA
aataaaactctggtcttccatttagctaactcctctttctctattgcaattcccctgtcttgataaatcagctgtatctgggcagtgggcaagatgagcccattgggtggttacattgct

SEQ ID NO: 39377 - DNA, 120 bp, synthetic construct
  source 1..120: mol_type = other DNA
cttgctgaggggtagtgtcagtcaggagaggcaggggcatagaatctgactttttgctggtgcctcttctgtgacaccagccaccttctgtagaacacacccagccaggcagcctggctt

SEQ ID NO: 39378 - DNA, 120 bp, synthetic construct; identical to SEQ ID NO: 11304
  source 1..120: mol_type = other DNA

SEQ ID NO: 39379 - DNA, 120 bp, synthetic construct
  source 1..120: mol_type = other DNA
ccagcactttgggaggcctaggtgggcagatcatgaggtcaggagatcaagaccatcctggccaacatggtgaaaccccacctactaaaaatacaaaaattagctaggcatggtggtgca

SEQ ID NO: 39380 - DNA, 120 bp, synthetic construct
  source 1..120: mol_type = other DNA
ccatctcaaaacaaaacaaaaaaaagtatgtccctgaggaatttggggttagagtttttaagggttttggagggggtcaaagggtggagagtgttgattggttgaagagtgcagggtgta

SEQ ID NO: 39381 - DNA, 120 bp, synthetic construct
  source 1..120: mol_type = other DNA
aaaagtctaatgattctaatgtcagggatcctatttatagtaacaatgtggatgcaaatccatttttaaatagtcttttgacctaacatcagaaatcctatctctatgaacaatggggat

SEQ ID NO: 39382 - DNA, 120 bp, synthetic construct; identical to SEQ ID NO: 11305
  source 1..120: mol_type = other DNA

SEQ ID NO: 39383 - DNA, 120 bp, synthetic construct
  source 1..120: mol_type = other DNA
ttcttgagggtggagagctaatgatgggatttgtccccttataagaagagacaggagagagcttgcttcctctctctgccaggtgaagacacaagaaagcagaaagaatgccctcaccaa

SEQ ID NO: 39384 - DNA, 120 bp, synthetic construct
  source 1..120: mol_type = other DNA
cgcccacaccccaccctacttgtattagtctgttcttagacgctataaatatactactcaagactgggtaatttataaaggaaagaggtttaattgactcacagttctgcatggctaggg

SEQ ID NO: 39385 - DNA, 120 bp, synthetic construct
  source 1..120: mol_type = other DNA
taaaaccatcagatctcgtgagaactcactatcatgagaacagcatgggaaaaactgcccccatgatccaatcacctcccactgggccctcccttgacacgtggggattatggggattac

SEQ ID NO: 39386 - DNA, 120 bp, synthetic construct
  source 1..120: mol_type = other DNA
gtgggggatgaggggctgctgaggaatgagtaaagaaagaagaagcaaaatcagactttagtggcagcttgacttgaccctggaattcagagtaccattcattcctcagtgggatgttgc

SEQ ID NO: 39387 - DNA, 120 bp, synthetic construct; identical to SEQ ID NO: 11306
  source 1..120: mol_type = other DNA

SEQ ID NO: 39388 - DNA, 120 bp, synthetic construct
  source 1..120: mol_type = other DNA
gtgtcaatgaaaaggccaaactccataaaatatttaaagaggtttactctgagccaaaaaatgagcaaccatagcctgaggcacagtctcaaaggttttgaaaacatgtgcccaacgtgg

SEQ ID NO: 39389 - DNA, 120 bp, synthetic construct
  source 1..120: mol_type = other DNA
ccccgaatgcacaatttctgtcccttttaagggctcacaacactgaagatttcacatgaaagggtcatgattgatttgagcaagcaggctgtacgtgacaggggctgcatgcactggtgg

SEQ ID NO: 39390 - DNA, 120 bp, synthetic construct
  source 1..120: mol_type = other DNA
ggcaggcctaggcctggtttcgggcctggcaccgggctgcctgcctttggttttacttccttgttgttttttcttaaaacaggtacgagtataaaacaatataaaacaatgtgagagggt

SEQ ID NO: 39391 - DNA, 120 bp, synthetic construct; identical to SEQ ID NO: 11307
  source 1..120: mol_type = other DNA

SEQ ID NO: 39392 - DNA, 120 bp, synthetic construct
  source 1..120: mol_type = other DNA
ggaggccctggaaggggaaagactctatgttaacagagattctttacagatgcaaatttacccccataaaagatggctatgcaggaccatttcaaaatatggcaaagaaacatattttgg

SEQ ID NO: 39393 - DNA, 120 bp, synthetic construct
  source 1..120: mol_type = other DNA
gtcaattgtgcctgaattccagaaaggaattccagaaaggagaaagtataaggagacacatctgacaccctgtcttcccctcatagcctaaactagtttttctggttttctttcggtccc

SEQ ID NO: 39394 - DNA, 120 bp, synthetic construct; identical to SEQ ID NO: 11308
  source 1..120: mol_type = other DNA

SEQ ID NO: 39395 - DNA, 120 bp, synthetic construct
  source 1..120: mol_type = other DNA
tttttttggtggtaaaagcaatccatgctctttgtttaacagaaatagtacagttgacccttgaacaacacagaggttaggggcactaaccgccacccccccctcaccatgcagttgaaa

SEQ ID NO: 39396 - DNA, 120 bp, synthetic construct
  source 1..120: mol_type = other DNA
aaactgtaagctagagaagagaaaatggtgttaagaaaatcatgaggaagagaaagtatattcactcttcattaagtgaagctggatcttcatctttttcttcacgttgaacaggctgag

SEQ ID NO: 39397 - DNA, 120 bp, synthetic construct
  source 1..120: mol_type = other DNA
aaaaacctgcataaaagtgcaattcaaaccatgttattcaagggccagccgtacaaacctccagaagaatataaagtgaagaatgcctgcacctccttctccatcctattcccctaaggt

SEQ ID NO: 39398 - DNA, 120 bp, synthetic construct
  source 1..120: mol_type = other DNA
ttgcatatgttaatgtcctggtgaattctatcttttatcgaatttctgcatcaggtctgcctgttcttccctcgatggtttcctcacagcctcccacagtgtgtcgtaaggaacccaaag

SEQ ID NO: 39399 - DNA, 120 bp, synthetic construct; identical to SEQ ID NO: 11309
  source 1..120: mol_type = other DNA

SEQ ID NO: 39400 - DNA, 120 bp, synthetic construct
  source 1..120: mol_type = other DNA
aggtgcagcagggtttagctttctgctttccctgaaggatttgtcagggtagcttagtgttttgattaattaacttaaagctgggattctatataaatgcaaattgtcaccttcccccac

SEQ ID NO: 39401 - DNA, 120 bp, synthetic construct
  source 1..120: mol_type = other DNA
caaatgcaatactcacagtacagcatttgcaaaatggaccagctggagcagaggcttagcctttgccacccaggtcagcagcacaacactaacaggacaggaacacagggatgccactaa

SEQ ID NO: 39402 - DNA, 120 bp, synthetic construct
  source 1..120: mol_type = other DNA
gatgagggtggagtcctcacagatgggattagcacccttataaaagagactccagagagctccctccccgcttcctccatgtgagggcacagtgagaaaacagtcgtctacgaaccggga

SEQ ID NO: 39403 - DNA, 120 bp, synthetic construct; identical to SEQ ID NO: 11310
  source 1..120: mol_type = other DNA

SEQ ID NO: 39404 - DNA, 120 bp, synthetic construct
  source 1..120: mol_type = other DNA
acattccaccgcaaaagaaatgaaaatggccggtccttgccttaactgatgacattaccttgtgaaattccttctcctggctcatcctggctcaaaaagctccctcactgagcaccttgt

SEQ ID NO: 39405 - DNA, 120 bp, synthetic construct; identical to SEQ ID NO: 11311
  source 1..120: mol_type = other DNA

SEQ ID NO: 39406 - DNA, 120 bp, synthetic construct
  source 1..120: mol_type = other DNA
cctctggggccactggatatctgtggacgtgagagtcacctcacaggaaagctgtggacatttgacaagatgtttttgcaagttgcacctgacaactccctaacaaataccagctgatgt

SEQ ID NO: 39407 - DNA, 120 bp, synthetic construct
  source 1..120: mol_type = other DNA
tcagggccaatttccccattaggtggagcaggcactgtgcctagagcccatgagacttttagggacccatgaaagtgttttaattactttcaaaatcagaagaaaaaatagaatattaat

SEQ ID NO: 39408 - DNA, 120 bp, synthetic construct
  source 1..120: mol_type = other DNA
ttttaatgaagagggagccacggaggcaaaagtgctgtcagcccaagaatgtgataatgccaccctgtaggttctggaactcacctcagagagtgagttggcagcatgggttgctgcttg

SEQ ID NO: 39409 - DNA, 120 bp, synthetic construct; identical to SEQ ID NO: 11312
  source 1..120: mol_type = other DNA

SEQ ID NO: 39410 - DNA, 120 bp, synthetic construct
  source 1..120: mol_type = other DNA
acacttgtgtgtgtgttagaagcattcgaaccagagtaactccatcttgaataggagtgggtaaaataaggctgagatctattgggctgaattcccaggaggttaggcattctaagtcac

SEQ ID NO: 39411 - DNA, 120 bp, synthetic construct
  source 1..120: mol_type = other DNA
ggtcgtcctcactgctaacctcccaccagtgccatgacagttactaatgccatggcaacatcaggcagttaccctatatagtctaaaaagaggaggcatgaataatccaccccttgttta

SEQ ID NO: 39412 - DNA, 120 bp, synthetic construct
  source 1..120: mol_type = other DNA
tgtggacttgccccaaattctttcttgctcaggatccaagaaccctctattggggtctggatctggatgcctttccgttaacatgtatatatatatttgccatatatatgtcaaatagta

SEQ ID NO: 39413 - DNA, 120 bp, synthetic construct
  source 1..120: mol_type = other DNA
tgattattttgagaaactgcagcagaggagaatctctgaaaacaacagtagaagttacccttttgtaaggaaagtttatgtctataaaggagatctccatacataagggtgtcttcctgt

SEQ ID NO: 39414 - DNA, 120 bp, synthetic construct; identical to SEQ ID NO: 11313
  source 1..120: mol_type = other DNA

SEQ ID NO: 39415 - DNA, 120 bp, synthetic construct
  source 1..120: mol_type = other DNA
acaaaaaactcagaaaaggtagagaaaaaattattttctcctcccctacacacaaataatggtggtttcttgcttcacatttctgtctttctgtctccttattcctgttccttgaaggca

SEQ ID NO: 39416 - DNA, 120 bp, synthetic construct
  source 1..120: mol_type = other DNA
atttcccaacttgtcagttccagacagtagctattgttgttctattatggcagatgaagatttagctgtcttaacattctccaccttatttctcctccctcccccagctactaatatagt

SEQ ID NO: 39417 - DNA, 120 bp, synthetic construct; identical to SEQ ID NO: 11314
  source 1..120: mol_type = other DNA

SEQ ID NO: 39418 - DNA, 120 bp, synthetic construct
  source 1..120: mol_type = other DNA
ttcagtcctacgtgggaacaggtattcctgttttcacacccaaaagttgccttttggcccaccacacccacctatcctgtacccttataaaccctaaccccaggctccacaagcagacaa

SEQ ID NO: 39419 - DNA, 120 bp, synthetic construct
  source 1..120: mol_type = other DNA
cccattccatcccccttccagctccccatccatcccactgagagccacctccaccactcagtaaaactcccacgtttgccatcctttaagtccaggcgtgaccttatttttcctggacac

SEQ ID NO: 39420 - DNA, 120 bp, synthetic construct
  source 1..120: mol_type = other DNA
gcactgtaacacatgcccacttgggcttcgggagtcacaggcacccacccctagatgcaaccatggggccggaggccaaaagtgcttgccccagctcctacacctgcctgtctgcatgtt

SEQ ID NO: 39421 - DNA, 120 bp, synthetic construct
  source 1..120: mol_type = other DNA
tttccacaactccctctgaatgtttgtgttgggaatcagaacatgagaacctcaagtatagcactttggtatgctgaatactttgcactgagggagattggaagggcctcagaagcaaga

SEQ ID NO: 39422 - DNA, 120 bp, synthetic construct; identical to SEQ ID NO: 11315
  source 1..120: mol_type = other DNA

SEQ ID NO: 39423 - DNA, 120 bp, synthetic construct; identical to SEQ ID NO: 11316
  source 1..120: mol_type = other DNA

SEQ ID NO: 39424 - DNA, 120 bp, synthetic construct
  source 1..120: mol_type = other DNA
tgcagcagccgccgccgccgccccagccaccgcccccgccccaagccggcctaccccagatcatccaaaagtaagaagggagaagggaacagggaccacgggtgcgcctggggacacgcc

SEQ ID NO: 39425 - DNA, 120 bp, synthetic construct
  source 1..120: mol_type = other DNA
ggctggaaagaggggagccaagttctttagggaaaattattttgtttttccttatctcctttctcttctcttcaggaatggtactagatattttgaactaaaatagctcagattgggggg

SEQ ID NO: 39426 - DNA, 120 bp, synthetic construct
  source 1..120: mol_type = other DNA
cccttcatggtgcccctgaaaccaaccagtggaaagggaggtgacagtttgtaaacaacatgttttactttgccctgaaagtgtagacacttttcaagaaggccttttcgaagagtttag

SEQ ID NO: 39427 - DNA, 120 bp, synthetic construct; identical to SEQ ID NO: 11317
  source 1..120: mol_type = other DNA

SEQ ID NO: 39428 - DNA, 120 bp, synthetic construct
  source 1..120: mol_type = other DNA
cacgcaagtacagcaaaatttacccttatggaacacagcagaggttttctgctgctccgctgatgctttgagtcctgtaaatttaataaaacttagtaacagaaagaaccagtgatgggt

SEQ ID NO: 39429 - DNA, 120 bp, synthetic construct
  source 1..120: mol_type = other DNA
aatggttccctatgttgactggtggaatactgagtctccacttgtgacaactttttgctttaattggatattttatataactttcaactacaaacagtttccaactattccaaaatgaaa

SEQ ID NO: 39430 - DNA, 120 bp, synthetic construct; identical to SEQ ID NO: 11318
  source 1..120: mol_type = other DNA

SEQ ID NO: 39431 - DNA, 120 bp, synthetic construct
  source 1..120: mol_type = other DNA
gaagggcgtctgattatgaaatactgccaggttgaaaataaatatcattttatggaaatggatcatttaaagtatattttatttgcctcacataataaataatttaccctctaaattcat

SEQ ID NO: 39432 - DNA, 120 bp, synthetic construct
  source 1..120: mol_type = other DNA
tttgcttgctttacattggtgacggatcagtgttcagggaccaggtcccagggctgtgaatgtgcccataggatttgatgtttgcgcactgacgtttcagtctttctttacaaggatgat

SEQ ID NO: 39433 - DNA, 120 bp, synthetic construct
  source 1..120: mol_type = other DNA
catttgcataagtccatctgagcaaacatttttatggagttatgaggtgtggtttgcatcagccatctttgagaaaatatagtggagctactgtgctcggctgcaaaacaagttgtctgc

SEQ ID NO: 39434 - DNA, 120 bp, synthetic construct; identical to SEQ ID NO: 11319
  source 1..120: mol_type = other DNA

SEQ ID NO: 39435 - DNA, 120 bp, synthetic construct
  source 1..120: mol_type = other DNA
cagttcctgttcacgttatatttggtgtttagagaactgccgtatactacatttacaaagataaacacatgaagcgtgatgactaataatgagactgattttgtttgttttatggaccca

SEQ ID NO: 39436 - DNA, 120 bp, synthetic construct
  source 1..120: mol_type = other DNA
ttactgtaaagattatcagccatgtatagacacagataattaatattttataagatttttattttaaatatgcattctccaaattggctaatatagaggcattattgtatataaaacacg

SEQ ID NO: 39437 - DNA, 120 bp, synthetic construct
  source 1..120: mol_type = other DNA
aataagaaaacattgacattctggtgaatgttttataaggatttatctcctccaacatttacaatgttttatttttaaaattattttgttttaatcgtgagctttaaagtcaaacctaat

SEQ ID NO: 39438 - DNA, 120 bp, synthetic construct; identical to SEQ ID NO: 11320
  source 1..120: mol_type = other DNA

SEQ ID NO: 39439 - DNA, 120 bp, synthetic construct
  source 1..120: mol_type = other DNA
aaaagttttggtttagcatttgatggctagtgttacctgcgtgtaaatgcttgtagttaatgaaaacatgaatccagctttgatctctttgatctatagtcttccgtatagcattagaac

SEQ ID NO: 39440 - DNA, 120 bp, synthetic construct
  source 1..120: mol_type = other DNA
taactgttagggagtcattcgcaggcaagttgtgtatgatgttcacccactttgatgggtatgctgacaattacatccagagtcagagagaagaaataagaatttgctaaaaagggacat

SEQ ID NO: 39441 - DNA, 120 bp, synthetic construct
  source 1..120: mol_type = other DNA
ttgaaaattttaaataccatcttaaactgcacataagacaagcattcagcagggaaaacatctgagaggattaagcctttaccccaacagggaagaaaaggggggggtgctattttctta

SEQ ID NO: 39442 - DNA, 120 bp, synthetic construct
  source 1..120: mol_type = other DNA
tgtgaatttttctcaaattgccaaagagatcagtattatgaaatgtagtacattattcccattagtcacagtaaaggactatgcatatggtgcacacagagctgttctaatgccagtgct

SEQ ID NO: 39443 - DNA, 120 bp, synthetic construct; identical to SEQ ID NO: 11321
  source 1..120: mol_type = other DNA

SEQ ID NO: 39444 - DNA, 120 bp, synthetic construct
  source 1..120: mol_type = other DNA
aaactaatattcttccccgcccacaacagccggtcctcaagtgaacaaattgatatagctcaattcacaggtttgataaacaagaatacacaaaatgttgggaactggggtttaatcaag

SEQ ID NO: 39445 - DNA, 120 bp, synthetic construct
  source 1..120: mol_type = other DNA
tcctggtctccctgccagacaaaagcttgaatggtctcctacaccacaaaatcctacttaatctgatttttatttcctgccacagtgattatttaattggggatggtctaaatgatatta

SEQ ID NO: 39446 - DNA, 120 bp, synthetic construct
  source 1..120: mol_type = other DNA
aagttttgcattaagtaaaatgatccatattacagaatcatggcaaagatggtaattagtggtttgcagaaaggagcacacggcagttccctttctgtttaaagaacctggctggatctt

SEQ ID NO: 39447 - DNA, 120 bp, synthetic construct; identical to SEQ ID NO: 11322
  source 1..120: mol_type = other DNA

SEQ ID NO: 39448 - DNA, 120 bp, synthetic construct
  source 1..120: mol_type = other DNA
tatgataaactctttaccgcggtggaagttacagtcaagttgattgatcttcctcttccccacagctcctgatggattttataagataagtaagtcccctgatggtttctaaggcaactt

SEQ ID NO: 39449 - DNA, 120 bp, synthetic construct
  source 1..120: mol_type = other DNA
cagttggacaaatcaatctttccatgtgttcagaaacaaaaggcaggggggtcatgcatgtgtttgggagtggttatcaccccatgaagatagtttccacgccaattttgccttctttaa

SEQ ID NO: 39450 - DNA, 120 bp, synthetic construct; identical to SEQ ID NO: 11323
  source 1..120: mol_type = other DNA

SEQ ID NO: 39451 - DNA, 120 bp, synthetic construct
  source 1..120: mol_type = other DNA
ctgatattttcaggtgtaaaatgagcatctttgctctaagttaattactgggcttctgtcgaggagtgccacagaggaaaaaactctggactgggagtcagtgacctggacaagccaatt

SEQ ID NO: 39452 - DNA, 120 bp, synthetic construct
  source 1..120: mol_type = other DNA
aatgcctccctccatctacttcctccatcacctgatacggaatatgtcccacatcaattaaatttagccatggacacaggtacatatttgtgacactgatcacccatgaatacaacaata

SEQ ID NO: 39453 - DNA, 120 bp, synthetic construct
  source 1..120: mol_type = other DNA
ctgttcttcaatctctaaaaatgtttttggtataagaataattttttggaatgttaaagtaagtactttaacatttactttaacaaactgaaagtagcactttcagcttgggagacagag

SEQ ID NO: 39454 - DNA, 120 bp, synthetic construct
  source 1..120: mol_type = other DNA
gagtcagagaatgtaaacataggacccacaaacgttttacaggagcacggctgtggctactgcagggactcctgaaccgtgacgcacagtcagttggccgcagagaccagcctggagctc

SEQ ID NO: 39455 - DNA, 120 bp, synthetic construct; identical to SEQ ID NO: 11324
  source 1..120: mol_type = other DNA

SEQ ID NO: 39456 - DNA, 120 bp, synthetic construct
  source 1..120: mol_type = other DNA
aagtgaaaattagaaaccacttaaatgtttctcagttggaaacataaaccatgtgtaggtataaggtcatgtactactcagccattagaatgatgctgctattttgcattgattgatatg

SEQ ID NO: 39457 - DNA, 120 bp, synthetic construct
  source 1..120: mol_type = other DNA
gtgtatgagtgtgtgctggtgcctgccagccttaaaaaacatctgaagaacaaatgtaaagaacattaacagtagttctaactctgggtggggcaattagactggtttgtctttttttct

SEQ ID NO: 39458 - DNA, 120 bp, synthetic construct
  source 1..120: mol_type = other DNA
cgagtatttcatttttaaaaacagcaacagaaggagtagacatttcacattggtattgcactgtcttgaagactgagctgccctttagcatcttacattttagtcctggaaggtagctga

SEQ ID NO: 39459 - DNA, 120 bp, synthetic construct; identical to SEQ ID NO: 11325
  source 1..120: mol_type = other DNA

SEQ ID NO: 39460 - DNA, 120 bp, synthetic construct
  source 1..120: mol_type = other DNA
tgctctgttccttcctgccaaacagaagccaaccatcacattttcttctctgctcttctttgttcaaggttactctttttccccagatccttaatagaggaaaaacccagtacctacctt

SEQ ID NO: 39461 - DNA, 120 bp, synthetic construct
  source 1..120: mol_type = other DNA
taatatttaaaggaaacaaaacacattttacttcttactcccaagccagttataggaatgcccattattatttctgccaccccaattcccactctgcttcaaatttgtttcaaccaagga

SEQ ID NO: 39462 - DNA, 120 bp, synthetic construct
  source 1..120: mol_type = other DNA
ctctctcttgctttttcttttcctgaactatttgaaagtaatttgcataactataattttgttatcatagctcaggaaattagtcttatttaatttttttctaataaacactaggttttt

SEQ ID NO: 39463 - DNA, 120 bp, synthetic construct; identical to SEQ ID NO: 11326
  source 1..120: mol_type = other DNA

SEQ ID NO: 39464 - DNA, 120 bp, synthetic construct
  source 1..120: mol_type = other DNA
tttcttctttttaatctaccaagtatacccacctctttctactttccaatactgaagattacaggctagttgtcttggagaatgaaccatgatatggctgtgactgttgtttcttcatga

SEQ ID NO: 39465 - DNA, 120 bp, synthetic construct
  source 1..120: mol_type = other DNA
cattgtagacagacatttttctgtttgtgataagtagtaagttgtctgcagaggtgctaccatgagaccctctgaatatctatgttccaacagactttcatctggtggctttgtctttta

SEQ ID NO: 39466 - DNA, 120 bp, synthetic construct
  source 1..120: mol_type = other DNA
catagatattatctagagcctctggatttttctagtcctgacttcataggacttgatccatgggtcagctacttcccatttaactctataagagacattccatctcttgagttgcagtgc

SEQ ID NO: 39467 - DNA, 120 bp, synthetic construct; identical to SEQ ID NO: 11327
  source 1..120: mol_type = other DNA

SEQ ID NO: 39468 - DNA, 120 bp, synthetic construct
  source 1..120: mol_type = other DNA
tctatgttctggattcagctttgccactactaaccctgagcatcagtgttcttatctgttaaaggaagcagtaataataaagtgaataacaactaactcgtacagagtgctttctgtgtg

SEQ ID NO: 39469 - DNA, 120 bp, synthetic construct
  source 1..120: mol_type = other DNA
taggacccaggaaagctaagaaaaatagtatttatgaaaacatggtggaatggggcttggaataaagaatgttatactaattcaagcaatcctgtcttctctgtgtaaatatctgtttcc

SEQ ID NO: 39470 - DNA, 120 bp, synthetic construct
  source 1..120: mol_type = other DNA
tgtttccgtcccccacccccgcccttttttttccccttaaaactttaagtacagctttggtttaaagtgaaatctatatcccaatttaaattccatgaacaaatctgactctggcatttg

SEQ ID NO: 39471 - DNA, 120 bp, synthetic construct; identical to SEQ ID NO: 11328
  source 1..120: mol_type = other DNA

SEQ ID NO: 39472 - DNA, 120 bp, synthetic construct
  source 1..120: mol_type = other DNA
aagtgttcttttgctttaagaaaccatggtctgtaacaaccagactgaacagaatccataaactggggaaggattgtgccttttgatctgcgacagggtttacagtaaaaatcctttaaa

SEQ ID NO: 39473 - DNA, 120 bp, synthetic construct
  source 1..120: mol_type = other DNA
aagtgtggtaagctgcacatgtttaaagcatccatcaggatccattaaaccattaaacaattgagataataataaacattgttggctgggtgtggtggctcacgcctataatcccagcac

SEQ ID NO: 39474 - DNA, 120 bp, synthetic construct
  source 1..120: mol_type = other DNA
cctgaaatcccagctactctggaggctgaggcaggagaatcgtttgaactcgggaggcagaggttacaacagtgagctgtggagatagcgccattgcactccagcctgggcaacaagagc

SEQ ID NO: 39475 - DNA, 120 bp, synthetic construct
  source 1..120: mol_type = other DNA
ttgtttgcgtttcctagaattttatacaaatgaaatccaagtatgtactcatgtgtgtgtgtgtgtgtgtgtcttctttcactattttaaagtgcataatttagtgacatcaagtacgtt

SEQ ID NO: 39476 - DNA, 120 bp, synthetic construct; identical to SEQ ID NO: 11329
  source 1..120: mol_type = other DNA

SEQ ID NO: 39477 - DNA, 120 bp, synthetic construct
  source 1..120: mol_type = other DNA
ccacctttttactattgtgaatagtgctactgtgaacatttttgtacaagtttttgtttgaacatctgtttttggttcttttgggtatatatcttggagtggaattggtgggtcatatgg

SEQ ID NO: 39478 - DNA, 120 bp, synthetic construct
  source 1..120: mol_type = other DNA
cctcccaagtagctgggactacaggcccatgccaccacgcctggctaatttttgtatttttagtagagatgggatttcaccatgttagccaggatcatctcgatctcctgacctcgtgat

SEQ ID NO: 39479 - DNA, 120 bp, synthetic construct
  source 1..120: mol_type = other DNA
tttgatttgtatttcagtaatgactaatgatattgagcttcttttcatgttggcttgttggccatttgtatatcttcttttgaggaatgtctactcaaatctatcatccattttaaaact

SEQ ID NO: 39480 - DNA, 120 bp, synthetic construct; identical to SEQ ID NO: 11330
  source 1..120: mol_type = other DNA

SEQ ID NO: 39481 - DNA, 120 bp, synthetic construct
  source 1..120: mol_type = other DNA
aaccttttaggatcacaaatattgtacataagaatcattgtttgggtgaaacgtcttcaaatttttattagtatgtcattgaatggagcatgttaatgtaaccctttaaggtgtttaaag

SEQ ID NO: 39482 - DNA, 120 bp, synthetic construct
  source 1..120: mol_type = other DNA
ggacacaagatgaaaaagacaacaaaactgcagaacttcaaactgaaagaaaccctaaaaatcacctgagtcagctcttttattttacagaaaaggtgatgaggtccagaaaggagactg

SEQ ID NO: 39483 - DNA, 120 bp, synthetic construct; identical to SEQ ID NO: 11331
  source 1..120: mol_type = other DNA

SEQ ID NO: 39484 - DNA, 120 bp, synthetic construct
  source 1..120: mol_type = other DNA
cgtccccttagttcaggcctcccagctctacccccggcctcctgctggattgggctccactccttctttctctgcagcagcacagtcttgaccttgtcctctgcttgctggaagccctgc

SEQ ID NO: 39485 - DNA, 120 bp, synthetic construct
  source 1..120: mol_type = other DNA
ctcctcaactagaacattctgaattctgcttagacctcacctcttccagggagctttccccaaccctaagcaggaaggagggctgagtgaccctcttcctgtaattgtctgtggctccca

SEQ ID NO: 39486 - DNA, 120 bp, synthetic construct
  source 1..120: mol_type = other DNA
acatagtgtgttgaatatctgggaatgaggaacttaactgcaactgaactttcaatctaactgacttggtgatgagaaatactagtcaggatgctctcatgggtgagacctgatgtgacg

SEQ ID NO: 39487 - DNA, 120 bp, synthetic construct
  source 1..120: mol_type = other DNA
ggccatataagaagaatataaatgcggaaagtcataaacttcagctctgctctgggctccactctcaagccactgtgtgaccagaggtagcacttagcttcttagagtccacatgggtta

SEQ ID NO: 39488 - DNA, 120 bp, synthetic construct; identical to SEQ ID NO: 11332
  source 1..120: mol_type = other DNA

SEQ ID NO: 39489 - DNA, 120 bp, synthetic construct
  source 1..120: mol_type = other DNA
tttcctcttcctcttcttcttcctcttcctcttcttcctcttcctcctcctcttcctcccgttccccttccccttcctcttcttcctcttcctcttccacttcttcttcttcttcctctt

SEQ ID NO: 39490 - DNA, 120 bp, synthetic construct
  source 1..120: mol_type = other DNA
gctaattttttttgtatttttttgtagagtccggttttcaccatgttgctcagtctggtctcaaacttctgggctcaagcgatcattctgcctcagcctcctaatgtgctgggattatag

SEQ ID NO: 39491 - DNA, 120 bp, synthetic construct; identical to SEQ ID NO: 11333
  source 1..120: mol_type = other DNA

SEQ ID NO: 39492 - DNA, 120 bp, synthetic construct
  source 1..120: mol_type = other DNA
taggaacgaggccacacagcaggaggtgagcggtgggcgagcaagcgaagcttcatctgtatttacagctgctctccatcactcgcattactgcctgagctccgcctcctgtcagatcag

SEQ ID NO: 39493 - DNA, 120 bp, synthetic construct
  source 1..120: mol_type = other DNA
ccccgagataggaccatctagttgcaggaaaataagctcagggctcccactgattctatattatggtgagttgtataattatttccttatatattacaataaataataaagtacacaata

SEQ ID NO: 39494 - DNA, 120 bp, synthetic construct
  source 1..120: mol_type = other DNA
tatataatttactcatttattatgttcttactgtctattatggctcctttcaccctgcccccaccacataagctctccaatggcaggagagttgtactcagtgatttaccccccagggcc

SEQ ID NO: 39495 - DNA, 120 bp, synthetic construct; identical to SEQ ID NO: 11334
  source 1..120: mol_type = other DNA

SEQ ID NO: 39496 - DNA, 120 bp, synthetic construct
  source 1..120: mol_type = other DNA
gctgggatctgacttgtgtatttggtgggatcttgatggtggagggagagcagcaggcctgggctcagtccctagacatagaggccaaaaaagattggaacaaccgtgtgtccagcaata

SEQ ID NO: 39497 - DNA, 120 bp, synthetic construct
  source 1..120: mol_type = other DNA
atatacagttggctgccttctctgtaagaaagcagggtgagaggaaggtgaatatgtattcatatttgcttcagtgaccagagggtgagatttgagagatgttgaaagtaggggccaggc

SEQ ID NO: 39498 - DNA, 120 bp, synthetic construct
  source 1..120: mol_type = other DNA
aaaaaattagccaggcatggtggtgggcacctgtaatccaagctacttgggaggctgaggcaggagaatcgcttgaacccaggaggcggaagctgcagtgagctgagatcatgccattgc

SEQ ID NO: 39499 - DNA, 120 bp, synthetic construct
  source 1..120: mol_type = other DNA
gatcttcagtggtgttggtgtggataggagccagcacttgaatggtaccattaaattccaaatagatctgtgctttgttagaagggctgtgaagggatgaggaaagaaaaaagcactgag

SEQ ID NO: 39500 - DNA, 120 bp, synthetic construct; identical to SEQ ID NO: 11335
  source 1..120: mol_type = other DNA

SEQ ID NO: 39501 - DNA, 120 bp, synthetic construct
  source 1..120: mol_type = other DNA
aatgatacaacctttatggagaagttggcaatatctagcaaaagtacatgtgggttaccttttgaccaatcaatcctattataggatctatcccaagatacacacacaaaaattttttaa

SEQ ID NO: 39502 - DNA, 120 bp, synthetic construct
  source 1..120: mol_type = other DNA
ctgatgtgtagaacacagtgtctgagattaggcagcctgtaggctctgatcttcctgttcatccctacattggacatccctcaaatctggcccctctggtcactgaagcaaatacaaata

SEQ ID NO: 39503 - DNA, 120 bp, synthetic construct
  source 1..120: mol_type = other DNA
ccaggttcaagcaattctcctgcctcagcctcccaagtaactgggattactgatgcacactgccacacccagctaatttttttgtattttagtagagtcggggcgttgcccagactggtc

SEQ ID NO: 39504 - DNA, 120 bp, synthetic construct; identical to SEQ ID NO: 11336
  source 1..120: mol_type = other DNA

SEQ ID NO: 39505 - DNA, 120 bp, synthetic construct
  source 1..120: mol_type = other DNA
taggaaatggaagagtgggtcagaggtagaagctagacttctccaaatgtgttttgttttgtagatttgactttggaagcttatagatgtttgtcttaattataaaaaaattaaattcac

SEQ ID NO: 39506 - DNA, 120 bp, synthetic construct
  source 1..120: mol_type = other DNA
tccctagtgtatatcttaccgtcaacgtgaatgccaaattaatcttgagctgttttcagtaatattgtaagtaaaaatgttgatagaactgtactgacactaatatatatccacacacac

SEQ ID NO: 39507 - DNA, 120 bp, synthetic construct
  source 1..120: mol_type = other DNA
taattctaaatttgaattggaaatattagtaagaactcctgatgtattttcttttaaacaaataaaaaaatttttctaaccttgtctactgaacagcctagaaataatgacaaacctagt

SEQ ID NO: 39508 - DNA, 120 bp, synthetic construct; identical to SEQ ID NO: 11337
  source 1..120: mol_type = other DNA

SEQ ID NO: 39509 - DNA, 120 bp, synthetic construct
  source 1..120: mol_type = other DNA
cagcactttgggaggctgagagggaggaatcacctgaggtcaggagtttgagaccagcctgaccaacgtggtgaaaacccgtctctactaaaaatacaaaaattagctgggtgtggtggc

SEQ ID NO: 39510 - DNA, 120 bp, synthetic construct
  source 1..120: mol_type = other DNA
gactctgtctcaaaaaaattttttaaaaaagaaaataaataaaaataaaaaaataaaaattcagtagtttccactatagggtgctggggaaccaactttcatcccctttgtcttcctcct

SEQ ID NO: 39511 - DNA, 120 bp, synthetic construct
  source 1..120: mol_type = other DNA
agccatcctcccacctcagcctcctgagtatctgggactacaggcacatgtcaccatgcctggctacttttttttttcttttgtagagataggctcttcctatattgcccaagcttgtct

SEQ ID NO: 39512 - DNA, 120 bp, synthetic construct; identical to SEQ ID NO: 11338
  source 1..120: mol_type = other DNA

SEQ ID NO: 39513 - DNA, 120 bp, synthetic construct
  source 1..120: mol_type = other DNA
tcaggtaatcagaaaatgggacatgctgcaggcctggtttccttaacaaataaattttaagaatcaaaatagcaggaggggttatctgtagattaaaaaggacttaaaatacttatcagc

SEQ ID NO: 39514 - DNA, 120 bp, synthetic construct
  source 1..120: mol_type = other DNA
tatatttgaatagtgaggttaaagaattatttattcatgtattatttatttgattatgtgaacattaaaaagaatattatttattagttacttatttatagctgtggtaatggtattttg

SEQ ID NO: 39515 - DNA, 120 bp, synthetic construct; identical to SEQ ID NO: 11339
  source 1..120: mol_type = other DNA

SEQ ID NO: 39516 - DNA, 120 bp, synthetic construct
  source 1..120: mol_type = other DNA
ggtggtgagtacatggaaatcattatattattctctctacctttgtataatttgaaagtttccgtaataaaaagttaaacagaacaagacatcagctcagccacttggccagttctgttt

SEQ ID NO: 39517 - DNA, 120 bp, synthetic construct
  source 1..120: mol_type = other DNA
gacgattgcctgaggccaatagtttgagactagcctgggcaatatagccagaccccatgtctacagaaagtttttaaaaaattagctggctgtggtggtacatgcctgtagccccagcta

SEQ ID NO: 39518 - DNA, 120 bp, synthetic construct
  source 1..120: mol_type = other DNA
aaaaaacaaaaatcacctggccagcaagtaggaggctgagatcctaactcacatctgtctggctccaaagctcacagtctttccatcttaccttacagaatttatgtctctcttggggct

SEQ ID NO: 39519 - DNA, 120 bp, synthetic construct; identical to SEQ ID NO: 11340
  source 1..120: mol_type = other DNA

SEQ ID NO: 39520 - DNA, 120 bp, synthetic construct
  source 1..120: mol_type = other DNA
ttcaaccaacctcatttggctgttgtgaggatgacatgagattgtccatatgatgcttaccacagtgcctggcaagaggtgaggtctctgatgttcatttagaaaagaagactgcagtgc

SEQ ID NO: 39521 - DNA, 120 bp, synthetic construct
  source 1..120: mol_type = other DNA
ggccaccttgcctaagtttgggatgatcatttagcctgaatgaggaggctcagtgctctaaggatggcattttttctacctggctccattttattttgtcatgtggcttgatgggcatgg

SEQ ID NO: 39522 - DNA, 120 bp, synthetic construct
  source 1..120: mol_type = other DNA
aagtagctagatgactagaagccagcttgaactttgccagctttgagattggaaggaaaaggtgaaattgcctgctcttcctgaagcaagcaccacattttctctcctttctaccttgtt

SEQ ID NO: 39523 - DNA, 120 bp, synthetic construct
  source 1..120: mol_type = other DNA
ttttcattagccctttaagaatgactggcaaatgcacttgtttgagtcatttgatcacctgggaagtgtctgggagccatgccttggagtgcctcactgatcacaaagccatccagtgtg

SEQ ID NO: 39524 - DNA, 120 bp, synthetic construct; identical to SEQ ID NO: 11341
  source 1..120: mol_type = other DNA

SEQ ID NO: 39525 - DNA, 120 bp, synthetic construct
  source 1..120: mol_type = other DNA
gtgaagtcaggcccttcttgcatctatttttaactaagtttagcatatgaatgtgaacgtgaagtctttctttagatccccctaactcaattactgacgtatgccaagcatcccgcctgg

SEQ ID NO: 39526 - DNA, 120 bp, synthetic construct
  source 1..120: mol_type = other DNA
tttggaaggttaaggtgcagccagtcataatactgaaaagcataaaacaagggaaaaactaaccaaaccaaccaacctatggccattttgtgatgcgtaaagtctcccctaattggcaca

SEQ ID NO: 39527 - DNA, 120 bp, synthetic construct; identical to SEQ ID NO: 11342
  source 1..120: mol_type = other DNA

SEQ ID NO: 39528 - DNA, 120 bp, synthetic construct
  source 1..120: mol_type = other DNA
cagagactgacgaagttcttttttgaacttcttaggacagttccctgtggttacttttttagtataacaattaaaaaaaaaaaaaccaaaaaacctactgatcattttaagtcctggccc

SEQ ID NO: 39529 - DNA, 120 bp, synthetic construct
  source 1..120: mol_type = other DNA
agttgtcttgaacctcataaaggtgttgtggtttttaagcagaggaaaatcttccttcgttttttctggaatagcagcaaagccatgatggagaataagcagaagattaatttaaaatac

SEQ ID NO: 39530 - DNA, 120 bp, synthetic construct
  source 1..120: mol_type = other DNA
ggcggggtaggggggacagggttgtcttttggggaataggaatgatatttaaacgaccagctcctccatgtattatttggattttctgttaaaagcaataaacttgaagtaagacgtgtt

SEQ ID NO: 39531 - DNA, 120 bp, synthetic construct
  source 1..120: mol_type = other DNA
gcctttcaacaaaactttggattcaattacaacacttgtaggctcagaagattgctttcaaatctgaaaactttgcaccttcacttggttacagtactttttaaaaaatggagatacggt

SEQ ID NO: 39532 - DNA, 120 bp, synthetic construct; identical to SEQ ID NO: 11343
  source 1..120: mol_type = other DNA

SEQ ID NO: 39533 - DNA, 120 bp, synthetic construct
  source 1..120: mol_type = other DNA
tttagttgttccagaaatgtttgctttggttttaaccatgacccaactttatttagtaagtctaataattcatctctttgaaaccttttagtttccaccttattttttttttgaagagtg

SEQ ID NO: 39534 - DNA, 120 bp, synthetic construct
  source 1..120: mol_type = other DNA
tttgtcttgatttttccttgcttcaacttgatttcctagggagtctaaaagtttcacaccttggagttttagagtagattcaagaaatgatctagctcactcttgtctctttcccaggga

SEQ ID NO: 39535 - DNA, 120 bp, synthetic construct; identical to SEQ ID NO: 11344
  source 1..120: mol_type = other DNA

SEQ ID NO: 39536 - DNA, 120 bp, synthetic construct
  source 1..120: mol_type = other DNA
gatgctcttgacgcaggaaatatggcttattctcataaatactttgagatgtacttcagtttctccaaactttatgcataacaacacgactgtaacaacaaaaagggaaattcttgaaag

SEQ ID NO: 39537 - DNA, 120 bp, synthetic construct
  source 1..120: mol_type = other DNA
tcctgttaacattatgatgtaaaaagacttttcttgcagttgcatcctcttcataatttaatttttcatgatggcattggcgctgccaaagaaagtcactttcccatgccaggagaaaag

SEQ ID NO: 39538 - DNA, 120 bp, synthetic construct
  source 1..120: mol_type = other DNA
tcttcagggatcgctggagaaccacgtgggcatgtacacatacctcctcactgagctgacttacccaaagttattattcacctactgatggacaatgatggttctagtttttctgtctta

SEQ ID NO: 39539 - DNA, 120 bp, synthetic construct; identical to SEQ ID NO: 11345
  source 1..120: mol_type = other DNA

SEQ ID NO: 39540 - DNA, 120 bp, synthetic construct
  source 1..120: mol_type = other DNA
attgctcagaacagtgtctaccaaagtattatgcattgtgcgctcgtgaaacaaacacctctccagctcaagattttttttaaaaaactaatttaatagaagtaaaatgacactgtttaa

SEQ ID NO: 39541 - DNA, 120 bp, synthetic construct
  source 1..120: mol_type = other DNA
cattctggtgtgattattgatattatgtaggaattctttttcagcttttacagagttgctatccctttagggtggagtctcatcaccaaaatatcacctgggacccgaggtgctgaggct

SEQ ID NO: 39542 - DNA, 120 bp, synthetic construct
  source 1..120: mol_type = other DNA
ggactcttcttcctatcttgtccgatgacggctctcggaggctcctggttttgatgtctggcattgcttttacccggtgggcttcagggagccgtccctgccgcgctttgcgtttctccg

SEQ ID NO: 39543 - DNA, 120 bp, synthetic construct; identical to SEQ ID NO: 11346
  source 1..120: mol_type = other DNA

SEQ ID NO: 39544 - DNA, 120 bp, synthetic construct
  source 1..120: mol_type = other DNA
gccgcaggcggtcttcccgggtgttcgcggaagctgcgcgctcgcgcccccacggttctccagcgacccctgaagatgcttccgtccgcggataggggacgtttcagacctggggtgggc

SEQ ID NO: 39545 - DNA, 120 bp, synthetic construct
  source 1..120: mol_type = other DNA
aagcttgacacatacttagtatagagcagtagaaagcagggaggaaaaactcgtcatgggtccactatctaaaatcaactgatatttggaatagttcctttgcttttttgtctatacata

SEQ ID NO: 39546 - DNA, 120 bp, synthetic construct
  source 1..120: mol_type = other DNA
catatacagccactctacttttgaatatttaggtgtttttttattttcattaaaaaattctgcagtaaacatctttctggctaaaacttgtttccgtattaggttatagtctcattatca

SEQ ID NO: 39547 - DNA, 120 bp, synthetic construct
  source 1..120: mol_type = other DNA
ggctggagtaccatggtgcaatctcagctcacagcaacctctgcttcttgggttcgagcaattctcctgcctcagcttcccaagtagctgggattacaggcacacaccaccatgcctggc

SEQ ID NO: 39548 - DNA, 120 bp, synthetic construct; identical to SEQ ID NO: 11347
  source 1..120: mol_type = other DNA

SEQ ID NO: 39549 - DNA, 120 bp, synthetic construct
  source 1..120: mol_type = other DNA
attctgaggacagtggcctatattgaaactggaggaatgaggtttacttgtgtttcagggattgaagtggtactagaggttgtgttggattgctaagttcagagagccatcagaaattgt

SEQ ID NO: 39550 - DNA, 120 bp, synthetic construct
  source 1..120: mol_type = other DNA
cagtctgagggtgtatcttcctgaggcaaggccagacttgaggatattctaatcctccttcctgcatttttatattgcaatttcttgccaaacttgctgcctgaagagagacgatatctc

SEQ ID NO: 39551 - DNA, 120 bp, synthetic construct
  source 1..120: mol_type = other DNA
aggatggaagtcatttttgagttatagtcaattcttatgttctgtaaaatccattagaaaacctgtacccgtatcagttcacatattctgcacctggctctcctgttcatggggaattgc

SEQ ID NO: 39552 - DNA, 120 bp, synthetic construct; identical to SEQ ID NO: 11348
  source 1..120: mol_type = other DNA

SEQ ID NO: 39553 - DNA, 120 bp, synthetic construct
  source 1..120: mol_type = other DNA
aatttgaattgcatcaggaaacctgcatattaacaagctggtaataagtgcaggcgttaagattgatcactgcttaagtcttcaagatcacatacaaggtctggtgtttttgaggctgtc

SEQ ID NO: 39554 - DNA, 120 bp, synthetic construct
  source 1..120: mol_type = other DNA
tgtgtctgtgtgtgtgcacacactagctctgtattattgcctatggaggacatagaaatatatcatatactgtcctcaaggagcttgcaaccaagttgtggggataaggcaaacaaagtc

SEQ ID NO: 39555 - DNA, 120 bp, synthetic construct
  source 1..120: mol_type = other DNA
aacaatggatcatctgtgtttgggggagacttcatggaggtgggatttgggggagccttgaagaagtgagcaagttttggataggtggaagtgaacttactggctatacccggaaaagag

SEQ ID NO: 39556 - DNA, 120 bp, synthetic construct; identical to SEQ ID NO: 11349
  source 1..120: mol_type = other DNA

SEQ ID NO: 39557 - DNA, 120 bp, synthetic construct
  source 1..120: mol_type = other DNA
ttcagatgaactgaatcaggcagcttgctttcagagtctgttcttcaccactgtataatactgtctcttggtgcttgttgaaagcccctgttgagattaacatagtccccctcaagttct

SEQ ID NO: 39558 - DNA, 120 bp, synthetic construct
  source 1..120: mol_type = other DNA
agaatatttacctcaggttgttgggagcattaaatgtgataatatatataatcatttagcagaatgcctagcagagagtaagcaggcaggaaatgatagctgctatggcttatatttcac

SEQ ID NO: 39559 - DNA, 120 bp, synthetic construct
  source 1..120: mol_type = other DNA
ctggatttcttcttctggagcatcccaggaatggactatgaattccagatgtggttctgctttgctccaagaactgactgcatttccttttgtcttctaaaacccagagggtgaaaccag

SEQ ID NO: 39560 - DNA, 120 bp, synthetic construct; identical to SEQ ID NO: 4078
  source 1..120: mol_type = other DNA

SEQ ID NO: 39561 - DNA, 120 bp, synthetic construct
  source 1..120: mol_type = other DNA
cgctctcagaatttatggggcaacatcacttagtacttcttacacttgcgttcctgcacatttcaaactgttcatatggtagtttttcttctgtatgacattctgcaattgtagagtttt

SEQ ID NO: 39562 - DNA, 120 bp, synthetic construct
  source 1..120: mol_type = other DNA
gatttgcagtctccttggttgtgacaaacctatttgttcttgtccctgtatcgttgatataatccaacttggcttctttggaagcaacaaatgctattttttttgcttcaaatccaatat

SEQ ID NO: 39563 - DNA, 120 bp, synthetic construct
  source 1..120: mol_type = other DNA
ggctgcaatcagatagatacttgtagactgtcttaggctgttttctgttgcttttaacagaattcctaaaacaggataatttttaaagaaaccaaaatttatttattatagttatggggg

SEQ ID NO: 39564 - DNA, 120 bp, synthetic construct; identical to SEQ ID NO: 11351
  source 1..120: mol_type = other DNA

SEQ ID NO: 39565 - DNA, 120 bp, synthetic construct
  source 1..120: mol_type = other DNA
tcacgccattctcctgccgcagcctcccgagtagctgggactacgggtgcccaccaccacgcccagctaattttttgtatttttagtagagatggggtttcaccgtgttagccaggatgg

SEQ ID NO: 39566 - DNA, 120 bp, synthetic construct
  source 1..120: mol_type = other DNA
agcacagaactatttggtgctaaatggtattttgggaaaactggagtgttacatattgtttaatttttccaaatttctgataaaacggaagatcttagatagttggtgtgttcgatgggc

SEQ ID NO: 39567 - DNA, 120 bp, synthetic construct; identical to SEQ ID NO: 11352
  source 1..120: mol_type = other DNA

SEQ ID NO: 39568 - DNA, 120 bp, synthetic construct
  source 1..120: mol_type = other DNA
ggatttctttcaaccttatctttcttatagacaatgtggggaaatagagctatgggagtactcaaaagtttatccacacaaaacaaatccctataaaaacctaaccaaagagcaaagatt

SEQ ID NO: 39569 - DNA, 120 bp, synthetic construct
  source 1..120: mol_type = other DNA
agcatgttgagaccatgatcttctcataatttggttcactttgattaaagcagcatcatgcccactgcagcatcatcagagaaaggatctcctgagttaaggacacccatggaaagcatc

SEQ ID NO: 39570 - DNA, 120 bp, synthetic construct
  source 1..120: mol_type = other DNA
tcccttgatcaatgaacttggcttctctgagacttggagatttggtttccacatctggaatataaaggtgttgagcctgatgaccttgaaagatttttctaggtctaaattttattacag

SEQ ID NO: 39571 - DNA, 120 bp, synthetic construct
  source 1..120: mol_type = other DNA
ctcagcaatacagagacttttggaatgacttggtttatgttcattcaggcctggagcacagatgggttcatgctttgctgcaacccacacttggagataaagaggctctgcagtggttta

SEQ ID NO: 39572 - DNA, 120 bp, synthetic construct; identical to SEQ ID NO: 11353
  source 1..120: mol_type = other DNA

SEQ ID NO: 39573 - DNA, 120 bp, synthetic construct
  source 1..120: mol_type = other DNA
tcactgcggccttgaacgcctcggctcaagtgatcctcttgcctcagcctcacgagtagctgggactataggcacgagccaccatgcccagctaatttttattttttgtagagacagggt

SEQ ID NO: 39574 - DNA, 120 bp, synthetic construct
  source 1..120: mol_type = other DNA
ttatcatagttcctgttattgcagttcttaagctgggcacatcatgtaagcccctatgttttggtttcctgcttatggtgtctgcctcatggggttgttttgaaaatcaggtgtgacttt

SEQ ID NO: 39575 - DNA, 120 bp, synthetic construct
  source 1..120: mol_type = other DNA
gggaggcaggtccgccttcctctagccctgatggactggggcacatgcagacgcacttcccagccaggcagacagacccagcacacagatggccacagcggcattcacttggtgattgtc

SEQ ID NO: 39576 - DNA, 120 bp, synthetic construct; identical to SEQ ID NO: 11354
  source 1..120: mol_type = other DNA

SEQ ID NO: 39577 - DNA, 120 bp, synthetic construct
  source 1..120: mol_type = other DNA
cttcggagcagatggagtcgaaagaattttcagagtggggaggggtggcactggccagggaaggcccacagggctgttttccctgtctgaatggtccattcataaaattgcctcctcttt

SEQ ID NO: 39578 - DNA, 120 bp, synthetic construct
  source 1..120: mol_type = other DNA
tctcatctgttctcctgggctggcatgatggatggcctcgggctgctgggttgtgtgttcagtggcgagccaggatttgccaagggtgtttggctagctcggggactgacacatacggct

SEQ ID NO: 39579 - DNA, 120 bp, synthetic construct
  source 1..120: mol_type = other DNA
tcaccccagctttgatgcacctataccaggtttgatcagtaaggttggaggaagacaggtgcttctcgagggtccgtttgctcagctgcttcttgctggggacagctgcacctccatatt

SEQ ID NO: 39580 - DNA, 120 bp, synthetic construct; identical to SEQ ID NO: 11355
  source 1..120: mol_type = other DNA

SEQ ID NO: 39581 - DNA, 120 bp, synthetic construct
  source 1..120: mol_type = other DNA
ctgtctccccctgctgttagaccacgtctcctcgcaatagggtctgcaccaaacctcctcctgccaacacttccaagaaaatcttcacatccacctatctttaagggttagtttaagctt

SEQ ID NO: 39582 - DNA, 120 bp, synthetic construct
  source 1..120: mol_type = other DNA
tgctctctgctaatcttttctgccttcaggtcactggcttgaagtgtcagtgaccttggaattatttttgcagttgcttttaagccctgtaaagacaccattggaaggttgaggctggcc

SEQ ID NO: 39583 - DNA, 120 bp, synthetic construct; identical to SEQ ID NO: 11356
  source 1..120: mol_type = other DNA

SEQ ID NO: 39584 - DNA, 120 bp, synthetic construct
  source 1..120: mol_type = other DNA
ttgcagtgcaatggcatgatcttggctcactgcaacctctgcctcccgggttcagatgattctcctgcctcagcctcctgagtagctgggattacagttgcccatcaccatgcccggcta

SEQ ID NO: 39585 - DNA, 120 bp, synthetic construct
  source 1..120: mol_type = other DNA
gccatcacatctggccttcactaatgtgtttttctatttcaggatgcaatccaggatcccacctggcattcgttgtcatgtctccattagcatcctccagaatatgacagtacctcagtc

SEQ ID NO: 39586 - DNA, 120 bp, synthetic construct
  source 1..120: mol_type = other DNA
tctatctagggccagatagtaaagagttttcgctttgcaggccacatgttctctgttgcaactacccacctttactgttgtggcacagatcagcctcagacaatatgtaaataaatgaac

SEQ ID NO: 39587 - DNA, 120 bp, synthetic construct; identical to SEQ ID NO: 11357
  source 1..120: mol_type = other DNA

SEQ ID NO: 39588 - DNA, 120 bp, synthetic construct
  source 1..120: mol_type = other DNA
tttcacctgctaattttggcattcatctgtggagcttgcctataatagttatcattgtcatattctaacagtgattttccatttcagtcattccttctccatttattatttggaattctt

SEQ ID NO: 39589 - DNA, 120 bp, synthetic construct
  source 1..120: mol_type = other DNA
gtcattgatcacaatttttgattgtgtctaattcttgtgatcaagaattagatgagagcaaaaaatccaaaagtggttgctaagtgttgggctttttttgttctcatcgaattcttgacc

SEQ ID NO: 39590 - DNA, 120 bp, synthetic construct
  source 1..120: mol_type = other DNA
tttcatgaacttgttaatggcagaaggcagttttattttttggctcaaagcactggtcagatttacaatttcaatctacaacacagctggtgctggttgagttgcagtaagagtgtccgc

SEQ ID NO: 39591 - DNA, 120 bp, synthetic construct; identical to SEQ ID NO: 11358
  source 1..120: mol_type = other DNA

SEQ ID NO: 39592 - DNA, 120 bp, synthetic construct
  source 1..120: mol_type = other DNA
acaaaatgaatatgttgagtcagttttttaaaataggagaaacttctatttctatctacagttgaaattattcttaaggtaactgtatggaagattagtgaaatgattgatgaatgtggc

SEQ ID NO: 39593 - DNA, 120 bp, synthetic construct
  source 1..120: mol_type = other DNA
cactctgaaatatttttaattaactatattttggggcggcgggagatgagtaaattcattcagctcttaaagaaagtcatggaaataatttttctacagtgtcaaggaaaacattgacag

SEQ ID NO: 39594 - DNA, 120 bp, synthetic construct
  source 1..120: mol_type = other DNA
gaaaccctttctctactaaaaatacaaaaattagccgggtgtggtggagcacacctgtagtcccactactcaggaggctgaggcaggagaatcgtttgaacccgggaggcagaggttgca

SEQ ID NO: 39595 - DNA, 120 bp, synthetic construct
  source 1..120: mol_type = other DNA
catttgcccaagatattgttagaacaaaaccaaaccaaaacaacacaaaaaacaacaaccaaaaaataatatggggagtttctgatttgtcttggtacagaattaaaagcctcataaact

SEQ ID NO: 39596 - DNA, 120 bp, synthetic construct; identical to SEQ ID NO: 11359
  source 1..120: mol_type = other DNA

SEQ ID NO: 39597 - DNA, 120 bp, synthetic construct
  source 1..120: mol_type = other DNA
tgctggtgaaacagctggatgattgcggtggatcctaacatcttgagaagtgaatctgtttgcaaaagctttagcacaaggagagcgatctgcctgaattgcggtagagagtgttgtttg

SEQ ID NO: 39598 - DNA, 120 bp, synthetic construct
  source 1..120: mol_type = other DNA
tgtcatcttgtccttggcgggcctgtcaaaaagaagttattttgaaagcgtatcgctgattgcacattttattccataagtgctcagcgcgtttcatgtaactcctggaggcctctgaga

SEQ ID NO: 39599 - DNA, 120 bp, synthetic construct; identical to SEQ ID NO: 11360
  source 1..120: mol_type = other DNA

SEQ ID NO: 39600 - DNA, 120 bp, synthetic construct
  source 1..120: mol_type = other DNA
gtatatggtataggtatttttaatgcctagaaagggaatggctggaaggaacatgaaaaataaaggttggaattgaggtagccttgggcgggagggtcgggaggtgggttcgggctaacg

SEQ ID NO: 39601 - DNA, 120 bp, synthetic construct
  source 1..120: mol_type = other DNA
aaagcacagtgacgcaggctgacatgataggagaacttttaagagaccctttaaatcctcacaggtatttaacgtaagcctgagcgtatagctcggatggggatcagtttaaatgctata

SEQ ID NO: 39602 - DNA, 120 bp, synthetic construct
  source 1..120: mol_type = other DNA
ggctcttgtgagggcccaaggtacagcgctacatgacaatgtcgtcatgactctttaaatatcctatgaaacctgtgatagaaacttgggctctcactcccagatcttactttccttact

SEQ ID NO: 39603 - DNA, 120 bp, synthetic construct; identical to SEQ ID NO: 11361
  source 1..120: mol_type = other DNA

SEQ ID NO: 39604 - DNA, 120 bp, synthetic construct
  source 1..120: mol_type = other DNA
tgctgtctctaaaaaaaaataataaaatataaatggaaattacaattttatctaagagatatttttacagatgtctggaatttggaaatttctgcttataggcatttctatccatcattt

SEQ ID NO: 39605 - DNA, 120 bp, synthetic construct
  source 1..120: mol_type = other DNA
cggtgaaaccccgcctctactaaaaatataaaaattagccgggtgtggtggtgcatgcctgtagtcccagctactcgagaggctgaggcaggagaattgcttgaacccaggaggcggagg

SEQ ID NO: 39606 - DNA, 120 bp, synthetic construct
  source 1..120: mol_type = other DNA
ctagtactgtcccagttcagctgcctatggcaagattgtaaactatgaaaagtaagaatgtaaattaaacacagtgaaaagctgagtcatatggtaatgtctagaaaagtagtaagatac

SEQ ID NO: 39607 - DNA, 120 bp, synthetic construct
  source 1..120: mol_type = other DNA
tccatgatatattcatagctgaatgattaagttggatgatgtgacaaaacacttaacttgtatttatggtcattgatgattttacgcattattagagagaagcatagttacacccaatta

SEQ ID NO: 39608 - DNA, 120 bp, synthetic construct; identical to SEQ ID NO: 11362
  source 1..120: mol_type = other DNA

SEQ ID NO: 39609 - DNA, 120 bp, synthetic construct
  source 1..120: mol_type = other DNA
aaggtacacaaattttaagtgcatagctcattgaatgtttactcttctaaccagctcctagattaagaaataaaacatcaacatcctagaagtcctccttgtccttcctctgggtcatga

SEQ ID NO: 39610 - DNA, 120 bp, synthetic construct
  source 1..120: mol_type = other DNA
aatttggtggtctaacaaattaaaaatcaaatattattcatttggaatcctaataatccagtccacaattccttatctgcagttttgaaatacaaatagctctgaaaacagagaggtttt

SEQ ID NO: 39611 - DNA, 120 bp, synthetic construct; identical to SEQ ID NO: 11363
  source 1..120: mol_type = other DNA

SEQ ID NO: 39612 - DNA, 120 bp, synthetic construct
  source 1..120: mol_type = other DNA
actgcttggtgcattatcaaacatccttcttccaatcctgcatttaaaaaaaaagcactgttactttgcaataattttagatttactaaaaaagctacaaatcaagcacatagagtttcc

SEQ ID NO: 39613 - DNA, 120 bp, synthetic construct
  source 1..120: mol_type = other DNA
ttcccaccaatgtcctttttctgtttcatgatcctacccaggatccaacatggcatttagttatcatttcttcttagtcttccccagcctataatagcttctctgtctttcctgtttttt

SEQ ID NO: 39614 - DNA, 120 bp, synthetic construct
  source 1..120: mol_type = other DNA
taattctacattcacctgctgttgtatgaaataatatagaaggaccctgtgtaccctttattccgtttcccccaatggcaacatcttgaaaaccatcacctgatatcataaccaggatat

SEQ ID NO: 39615 - DNA, 120 bp, synthetic construct; identical to SEQ ID NO: 11364
  source 1..120: mol_type = other DNA

SEQ ID NO: 39616 - DNA, 120 bp, synthetic construct
  source 1..120: mol_type = other DNA
ggcaggtgcctgcttttgatgggagaaaatatcagtaacagtttaattggtgttttacagttccatcatgtataactattttatatctttgttggaaatccacacggttgttctgtgctg

SEQ ID NO: 39617 - DNA, 120 bp, synthetic construct
  source 1..120: mol_type = other DNA
ccacagtgtagagtccctcctgttggtgatggcattttgtacatttagtgacaattggcatagagtataaagccttttacaagtctaaagtagcagtgtttctatttcttggtattcttc

SEQ ID NO: 39618 - DNA, 120 bp, synthetic construct
  source 1..120: mol_type = other DNA
tcatctgattgtcaatttgtgtcactcataaaagagatatcttaattttaagtgcttccagaaaatgggaatgaaacaatgcttaaatagggccttcagatcaatttatggaatgatatc

SEQ ID NO: 39619 - DNA, 120 bp, synthetic construct
  source 1..120: mol_type = other DNA
tggcacacacctgtaatcccagcactttgggaagctgaggctggaggattgcttgacgctgggagttttagaccagcctgggcaacacagtgagccctcctgtctactaaaaaaatttaa

SEQ ID NO: 39620 - DNA, 120 bp, synthetic construct; identical to SEQ ID NO: 11365
  source 1..120: mol_type = other DNA

SEQ ID NO: 39621 - DNA, 120 bp, synthetic construct
  source 1..120: mol_type = other DNA
atctcatataagtaaaaccatacaatatttgtcctttttgtctggcttatttcatttagcatcgtgttttcaaggatcattcatactgtagcatgtatcaaaattgtattcctttttatg

SEQ ID NO: 39622 - DNA, 120 bp, synthetic construct
  source 1..120: mol_type = other DNA
atgaatgttggtgtacaaatatttgagtccttgctggacttgaaagacctgagtcaatacttttgggcatatacctaggaacagaattgctggatcttatgtgttatggactgaatgttt

SEQ ID NO: 39623 - DNA, 120 bp, synthetic construct
  source 1..120: mol_type = other DNA
cacgaaagagcttgctcttgctcttgctctctacccataccatgtgaggatagtaggagaatacagtcccaagttagaaggagtgctttcaccagacaccagatctgccagtgccctgat

SEQ ID NO: 39624 - DNA, 120 bp, synthetic construct; identical to SEQ ID NO: 11366
  source 1..120: mol_type = other DNA

SEQ ID NO: 39625 - DNA, 120 bp, synthetic construct
  source 1..120: mol_type = other DNA
tctttagagaaatatctgttcaagtcctttacctgtttttgaattgaattttttgttgttgttgaactgtagaatttctttatgtattcagaatataaccctttatcaagcatatgattt

SEQ ID NO: 39626 - DNA, 120 bp, synthetic construct
  source 1..120: mol_type = other DNA
gccttttgtgtcatacccaagaagtcattgccaaatccaatgttacgaagcattccccatatgttttcttctaagaattttatcgtgtaaactgtagtttataatctcaagttctggtct

SEQ ID NO: 39627 - DNA, 120 bp, synthetic construct; identical to SEQ ID NO: 11367
  source 1..120: mol_type = other DNA

SEQ ID NO: 39628 - DNA, 120 bp, synthetic construct
  source 1..120: mol_type = other DNA
tttctgaaaataatgttattgggattttgataggaattacattcaatttgtaggtcacttacaatattaagtctaccaatccatgaacatggaatgtctttccacttattttatcttctt

SEQ ID NO: 39629 - DNA, 120 bp, synthetic construct; identical to SEQ ID NO: 4094
  source 1..120: mol_type = other DNA

SEQ ID NO: 39630 - DNA, 120 bp, synthetic construct
  source 1..120: mol_type = other DNA
atgttgaatagaagtggagaaagcaagcattcttatcttgcttctggtattaggagaaaacttgcagttttttgttttgttttgttttgttttaccattgagtatgatgttagctgtagg

SEQ ID NO: 39631 - DNA, 120 bp, synthetic construct
  source 1..120: mol_type = other DNA
tgctcatgaggttttcctttttattttgttaatgtggtatattacattgactaatttttttatattgaactatctttgcattctgtgaatgaatcccacttggtcatagtgtataattct

SEQ ID NO: 39632 - DNA, 120 bp, synthetic construct; identical to SEQ ID NO: 11368
  source 1..120: mol_type = other DNA

SEQ ID NO: 39633 - DNA, 120 bp, synthetic construct
  source 1..120: mol_type = other DNA
tatctttctaggcattcgtccatttcaaacgtgaccattctaaactaaactgttggcaaatttgttactactgtctgttttattgaattactttcttgtcttagagtgaaactctcattt

SEQ ID NO: 39634 - DNA, 120 bp, synthetic construct
  source 1..120: mol_type = other DNA
atgtcttttgactcattaaaagtgggaaatctcatttgtgtataagattatcaggctatataaaaatgattccaacataccagagacatagtttagattacagggcctctgtggagtttt

SEQ ID NO: 39635 - DNA, 120 bp, synthetic construct
  source 1..120: mol_type = other DNA
atttaaatttctccattttcttatcagacactgggtcagagagagctaagagaagcaaccagcatcagtggggcacaagagctttgtgactttcctgtgtgcttctacctggtcttcagg

SEQ ID NO: 39636 - DNA, 120 bp, synthetic construct; identical to SEQ ID NO: 11369
  source 1..120: mol_type = other DNA

SEQ ID NO: 39637 - DNA, 120 bp, synthetic construct
  source 1..120: mol_type = other DNA
gatgcagtcagtaaatttgtgcatggccttggaaaccttccagaattgtaagtgaaagctgatattctctccacagaagaaaatatagcaaaatgggaatctaaccatttcattggaaca

SEQ ID NO: 39638 - DNA, 120 bp, synthetic construct
  source 1..120: mol_type = other DNA
tccaaaccacagccctcttgctaacagcaaactggattataccataagaaggcaactagttcagttagaacataccttagtattacattttaatcagacaccacaaggagctgactgacg

SEQ ID NO: 39639 - DNA, 120 bp, synthetic construct; identical to SEQ ID NO: 11370
  source 1..120: mol_type = other DNA

SEQ ID NO: 39640 - DNA, 120 bp, synthetic construct
  source 1..120: mol_type = other DNA
ctgaaatccttaagttttctggcccctgctgagtggatgacccaaagacccctgcagtttaactgaggtgtttattcatctgcagactggaagccaaggattggaaatttaacatgaaat

SEQ ID NO: 39641 - DNA, 120 bp, synthetic construct
  source 1..120: mol_type = other DNA
gccatttagatttaatgcccaggcactcacttgtaactgaatatgtcggaaggtggctcctgcctgggatgggaacgggtgctatttcagagcagtgtgtttgtctgtctgctggaaagc

SEQ ID NO: 39642 - DNA, 120 bp, synthetic construct
  source 1..120: mol_type = other DNA
agagtacgaaatctacaaccaactcctcttctggttaaacaaaggaggtgatgtattgaagagaggcccaagagaaatgattcatttcatcagaaatgtttggagaaacagatgagttcg

SEQ ID NO: 39643 - DNA, 120 bp, synthetic construct; identical to SEQ ID NO: 11371
  source 1..120: mol_type = other DNA

SEQ ID NO: 39644 - DNA, 120 bp, synthetic construct
  source 1..120: mol_type = other DNA
atctacttaggaatgcaaattctcaggccctgttccagagccaatcagtctccttagtgggcccaggaatctgtttttaacaaagcctctggtgattctgatgcctgcggaagcgtgagc

SEQ ID NO: 39645 - DNA, 120 bp, synthetic construct
  source 1..120: mol_type = other DNA
tagatgtacatgtccccaaccctactcccccaggacttcttacccaggactcagctagtcccctggcttttttttctctccagatctcatgtttccagattctgtgctcagtcacttctt

SEQ ID NO: 39646 - DNA, 120 bp, synthetic construct
  source 1..120: mol_type = other DNA
gagcagtgcacagtcctcatccccaggacctcagaaactccaagggtggcagaccttggaagtgatgaaggtggggatgaagtggcactcactgggctggatctaggagcacccagatgg

SEQ ID NO: 39647 - DNA, 120 bp, synthetic construct; identical to SEQ ID NO: 11372
  source 1..120: mol_type = other DNA

SEQ ID NO: 39648 - DNA, 120 bp, synthetic construct
  source 1..120: mol_type = other DNA
aacccccattcttacctctgtcatcatagattagttttgttggggacttttttagactatccacttcttaaggaaaaaaacttatcctgtagagccaaagatggctcaggcttgatatga

SEQ ID NO: 39649 - DNA, 120 bp, synthetic construct
  source 1..120: mol_type = other DNA
ctttgagttatgtgttttgtttggtctatgcagaattttttttttaagctcattgctcagatttaaaagttgggggatttcacacaacaaaagcccaacaacactgggctcgtgaacctc

SEQ ID NO: 39650 - DNA, 120 bp, synthetic construct
  source 1..120: mol_type = other DNA
cctggcccacttgggcttggcccatgagttttcaatccctgcctttaaatatggttttgtttcttagtttggggcctcctgcatgactgagggtgcttagtaatttccttggttcactct

SEQ ID NO: 39651 - DNA, 120 bp, synthetic construct
  source 1..120: mol_type = other DNA
gaggtattgtttgttgtttgccatgcaggcagccagaaatgtggcacagtcctacctgcatgagttcacttctcaccacctccttggatgccacccatgctggttgtttcctggcccctg

SEQ ID NO: 39652 - DNA, 120 bp, synthetic construct; identical to SEQ ID NO: 11373
  source 1..120: mol_type = other DNA

SEQ ID NO: 39653 - DNA, 120 bp, synthetic construct
  source 1..120: mol_type = other DNA
tcctgcctcagcctcccgagtagctgggactacaggcgcccaccaacacgcccggctaatttttttgtatttttagtagagacggggttttactgtgttagccaggatagtctcgatctc

SEQ ID NO: 39654 - DNA, 120 bp, synthetic construct
  source 1..120: mol_type = other DNA
ttatattagttatcacaggccctatgggcaaagacttcccctatacttcccagcattgctccagcatgccctgcacagttctgagcttatggcagatacccaggacacacaggaggtggg

SEQ ID NO: 39655 - DNA, 120 bp, synthetic construct
  source 1..120: mol_type = other DNA
ttgagggcccatcttccttgcaagagtgttgacaccctgtgaggagggtgcagaaactccagccacagggccacagacgttctggacagtgtcatgtgaggtggcattggagcttctcct

SEQ ID NO: 39656 - DNA, 120 bp, synthetic construct; identical to SEQ ID NO: 11374
  source 1..120: mol_type = other DNA

SEQ ID NO: 39657 - DNA, 120 bp, synthetic construct
  source 1..120: mol_type = other DNA
ggctgtctcatttgctagggttctgttatatgtcacttggtgtgcaagcttccaagaactacttggcttcctgacagggaacatgatagaatgtcaggacctaagctaatgtaaaatatg

SEQ ID NO: 39658 - DNA, 120 bp, synthetic construct
  source 1..120: mol_type = other DNA
ccactgatggacttaacctttccagacccacgtgatgatggagatccggcaggcagtggcttcttactcaaggcatgctgattttgaaaagtatgagggcatctttaaaaaaaaaaagtg

SEQ ID NO: 39659 - DNA, 120 bp, synthetic construct
  source 1..120: mol_type = other DNA
attctcatgcctgagtctcccaaatagctgagattacaggcgctgaccaccacgcctggctaatttttgtatttttagtagagatggggtttcaccatgttggtcaagctagttttgaac

SEQ ID NO: 39660 - DNA, 120 bp, synthetic construct; identical to SEQ ID NO: 11375
  source 1..120: mol_type = other DNA

SEQ ID NO: 39661 - DNA, 120 bp, synthetic construct
  source 1..120: mol_type = other DNA
gatgtcttgatcacacgcactgccgtatcatcaccgtttatcctatcattgaggtggctactaaatgacttgcgggtgggaagtatagacagcatgtatatgctggacaaaaaggtgatt

SEQ ID NO: 39662 - DNA, 120 bp, synthetic construct
  source 1..120: mol_type = other DNA
acgcttgactgtgggtaactgaaagtttggaaagcgaaactgtgggtaaggggggactactgtattcccctcttcctgtttttcacctctcccatgcctccccctagtccctcccatttc

SEQ ID NO: 39663 - DNA, 120 bp, synthetic construct; identical to SEQ ID NO: 11376
  source 1..120: mol_type = other DNA

SEQ ID NO: 39664 - DNA, 120 bp, synthetic construct
  source 1..120: mol_type = other DNA
tctttccatcccctaccttgccacgttccatgatgtttttgttcttatgcctatggcctcctcttcacaggacagtgacagaggccccaggattacctacttacatgccagcaaccaaag

SEQ ID NO: 39665 - DNA, 120 bp, synthetic construct
  source 1..120: mol_type = other DNA
gaccagtctggccaacatggtgaaagcctgtctctactaaaataaaaaaattagccagccatgatagcgggtgcctgtaatcccagctacttgggaggctgagacgggagaatcgcttga

SEQ ID NO: 39666 - DNA, 120 bp, synthetic construct
  source 1..120: mol_type = other DNA
tttgcttctgccttatctgggaggggaaattttcagactcattgcaaaggaaatgtcatttaaatgtgaaaactgatgcacagagctgagtcattttgggatacctgtgtgagccggggg

SEQ ID NO: 39667 - DNA, 120 bp, synthetic construct
  source 1..120: mol_type = other DNA
cttacttctcacctggtcagccaaagcttaactgaaaatctccaagagttcctgtctttagaaacccataaagtccggtcctactccctggtactgattctcctttttttctgaatggta

SEQ ID NO: 39668 - DNA, 120 bp, synthetic construct; identical to SEQ ID NO: 11377
  source 1..120: mol_type = other DNA

SEQ ID NO: 39669 - DNA, 120 bp, synthetic construct
  source 1..120: mol_type = other DNA
aagggagtcagggatttcatggtagctgtcattttgatgaatgtccctgtgtccacccacagaggccgtgacattcctgcctttcccacttgataatctgaaaatctcccaagcctgatt

SEQ ID NO: 39670 - DNA, 120 bp, synthetic construct
  source 1..120: mol_type = other DNA
acgggggattatcagagagggagagtgccagacaaggtgcattcctctggggatagagcagcaggactttgggagctgggacaattgtgtgaagcaggacgtgattgcgtggtcttgttt

SEQ ID NO: 39671 - DNA, 120 bp, synthetic construct; identical to SEQ ID NO: 11378
  source 1..120: mol_type = other DNA

SEQ ID NO: 39672 - DNA, 120 bp, synthetic construct
  source 1..120: mol_type = other DNA
aaacaaacaaatttgctgagtgagatggtacacacctgtagtcccagctagtctggaggctgaggcaggaagattacttgagcccaggagtttggggctgtaatgggctcggatggcgac

SEQ ID NO: 39673 - DNA, 120 bp, synthetic construct
  source 1..120: mol_type = other DNA
cctgggtgttgggaaccttctgaaagaactgctgtcggaattcagggtcttctgtgcctgtccacccactagccctcatgggcgtaatgcagagatctcagaagggagagctctggatcc

SEQ ID NO: 39674 - DNA, 120 bp, synthetic construct
  source 1..120: mol_type = other DNA
acatatgattgttagaaggagtcaatgagttaacctttaagtacttaaaatggtatctggcaattagtgagcaccatgtaagtgtttgcttaataaatattaagagtttggggtttgggg

SEQ ID NO: 39675 - DNA, 120 bp, synthetic construct
  source 1..120: mol_type = other DNA
caggtatggtggctcatgcctgcaataaagcctcactttgggaggccaaggcgggtggatcacctgaggtcaggagttcgagaccagcctggtcaacatggtgaaacaccatctctacta

SEQ ID NO: 39676 - DNA, 120 bp, synthetic construct; identical to SEQ ID NO: 11379
  source 1..120: mol_type = other DNA

SEQ ID NO: 39677 - DNA, 120 bp, synthetic construct
  source 1..120: mol_type = other DNA
aaaagatttcccattttacttctactcctttgtatgtgtgtatatatttagccctatacaattttatcacacatgtaggttcatgtttccagcactacagtcgagatactaaatagttcc

SEQ ID NO: 39678 - DNA, 120 bp, synthetic construct
  source 1..120: mol_type = other DNA
tataaatgaaatcaggccaggcatggtggctcatgcctataatcccagcattttgggaggccacggtgggtggatcacttgaggccaggagttcgagaccagcctggccaatatggcgaa

SEQ ID NO: 39679 - DNA, 120 bp, synthetic construct; identical to SEQ ID NO: 11380
  source 1..120: mol_type = other DNA

SEQ ID NO: 39680 - DNA, 120 bp, synthetic construct
  source 1..120: mol_type = other DNA
tgaaggatatctggcatctttccagtttttggctattacaaagaaagctgctatgaacatttgtgtacaggtttttgtgtgaacataagttttcatttctctgggaaaaatgcctaaaat

SEQ ID NO: 39681 - DNA, 120 bp, synthetic construct
  source 1..120: mol_type = other DNA
ctttttgacttgcagctaacattgtattagtatttgttaaataaattaaaacagaccactggcttttacaatgtatccaggactgtgtaagaggaaagggagaggaggggattcagatgg

SEQ ID NO: 39682 - DNA, 120 bp, synthetic construct
  source 1..120: mol_type = other DNA
ggacagccatgtgggaggtgggagatgaggacagagtggaggtttggagaagccttgtcaatgttggtgccaccgatggctgagtttggaaattttatggtcttttgtatttgacaaaaa

SEQ ID NO: 39683 - DNA, 120 bp, synthetic construct; identical to SEQ ID NO: 11381
  source 1..120: mol_type = other DNA

SEQ ID NO: 39684 - DNA, 120 bp, synthetic construct
  source 1..120: mol_type = other DNA
taatttttcacattactgtcctctatatgacaacattattttcaataaaaaccatgcagtcagcaataattttcttgatttttttcttcagtttgtaaacaatgaatgattgaagaagaa

SEQ ID NO: 39685 - DNA, 120 bp, synthetic construct
  source 1..120: mol_type = other DNA
ccagtgaatcgataatactgcagggattggagatacaaactgtgttggaaatggaattgaaaatgaattgattctaaactagtatgaatttattttctaaatctgtgtgtgtaggtgagt

SEQ ID NO: 39686 - DNA, 120 bp, synthetic construct
  source 1..120: mol_type = other DNA
tctcaacagtggttgcaataattgtttggaacctaaaccaacaaaacaattgtttttgtgaaggagtagcttctcattgacattgtttagactactgacgcttggccggatgcagtggct

SEQ ID NO: 39687 - DNA, 120 bp, synthetic construct
  source 1..120: mol_type = other DNA
catggtgaaacccccatctctactaaaaatacaaaaattggccgggtgtgatggcagagtcttgtaatcccagctacttgggaggctgaggtgggagaatcgcttgacctgggaggtggc

SEQ ID NO: 39688 - DNA, 120 bp, synthetic construct; identical to SEQ ID NO: 11382
  source 1..120: mol_type = other DNA

SEQ ID NO: 39689 - DNA, 120 bp, synthetic construct
  source 1..120: mol_type = other DNA
ccttatctgcaaaatggtaaagctttctgtgggttaataatatgatccacacaaagtgtctggagtggcattggcatacaataggttcttaagaaatgtgagttgtcttcacttctccac

SEQ ID NO: 39690 - DNA, 120 bp, synthetic construct
  source 1..120: mol_type = other DNA
gcaacggttctgtttaagcagcattcattgagtgactacattgaactccaaaggaagcttgaataaattctagagtttctttgctgtgtccatgcaagcttggatgggagagctattctg

SEQ ID NO: 39691 - DNA, 120 bp, synthetic construct; identical to SEQ ID NO: 11383
  source 1..120: mol_type = other DNA

SEQ ID NO: 39692 - DNA, 120 bp, synthetic construct
  source 1..120: mol_type = other DNA
aaaacgcttaaatgacccagggaggctctaggatggctactttacatagcaattgtgtgctgtaaaatgaacctgttgcattttaaaggggctaaagagaattcttaattttgtacagtt

SEQ ID NO: 39693 - DNA, 120 bp, synthetic construct
  source 1..120: mol_type = other DNA
agaaaatctatcctagaaaaacatctcatgttgtaaataagctcagatgtagattgttggatataaaatggagcttaagattttatttttgctaacctgatattccagagtgtatattgt

SEQ ID NO: 39694 - DNA, 120 bp, synthetic construct
  source 1..120: mol_type = other DNA
tgcctgccattctgctgatttatttcctagagaaagttaaacatttttaaaacacagaatgaatggttttaaaaggcaaagagcatagatctgaagccttaaaaatattactcagctata

SEQ ID NO: 39695 - DNA, 120 bp, synthetic construct; identical to SEQ ID NO: 11384
  source 1..120: mol_type = other DNA

SEQ ID NO: 39696 - DNA, 120 bp, synthetic construct
  source 1..120: mol_type = other DNA
tatgtacctataacaataaaaaattaaagaaaacatatgaagtaaacactcggttataaaaaggttggatgaatgagcattggcagggctagcttcactggcaggtgatctgtgctgtca

SEQ ID NO: 39697 - DNA, 120 bp, synthetic construct
  source 1..120: mol_type = other DNA
gcaaattatgagctggtcctatatatcagctacccaataattcagctcaaactagctttggacttttgaattttaatcctaatcttaactaacgtttatcagattgtttttttctgtatg

SEQ ID NO: 39698 - DNA, 120 bp, synthetic construct
  source 1..120: mol_type = other DNA
taaagctaaatcccacttatttactagtttctggtaaaatacgtaggttctatatatttttgctagataaaaacaggtgaaataaaaccttatttctcaaattattaataaagtattaat

SEQ ID NO: 39699 - DNA, 120 bp, synthetic construct; identical to SEQ ID NO: 11385
  source 1..120: mol_type = other DNA

SEQ ID NO: 39700 - DNA, 120 bp, synthetic construct
  source 1..120: mol_type = other DNA
tgcaattttattttattttgagtccttggctatcaattgtagtgtgtctttgtttctcatttctttttctttttaaatgttctcctcacctcatccctcaatagcaggtcagacgtgttg

SEQ ID NO: 39701 - DNA, 120 bp, synthetic construct
  source 1..120: mol_type = other DNA
tgtacaatgtggcatggctaatgccctcctgctgcttgtgaaatggccaggatttaaatgctgggatcgggagtcaaagacccaggggatgaccctggcattttgatgctggacgcttgc

SEQ ID NO: 39702 - DNA, 120 bp, synthetic construct
  source 1..120: mol_type = other DNA
ccctgggaggagggaccatctcttacttttctgtctgtaggcagaaatgttttcactaaaggccctggcacatcttaaacatgattttaaagatcagtgataatttcttttttttttttt

SEQ ID NO: 39703 - DNA, 120 bp, synthetic construct
  source 1..120: mol_type = other DNA
tcctgagctcaggtgatcctcccttctcagccttctgagtagctgagactacaggcgtgtgccaccatgcctggctattttgtttttttaattttgtagagatggggggtctcattttgt

SEQ ID NO: 39704 - DNA, 120 bp, synthetic construct; identical to SEQ ID NO: 11386
  source 1..120: mol_type = other DNA

SEQ ID NO: 39705 - DNA, 120 bp, synthetic construct
  source 1..120: mol_type = other DNA
accactgaattcgatcaacttttttttatcatgctatttgatccttagtgtccaaggtccctttagtgctgacgagtgaaaacagataccaatagttggactatgatcatattgggcagt

SEQ ID NO: 39706 - DNA, 120 bp, synthetic construct
  source 1..120: mol_type = other DNA
gtagccaagactgcaaattatgatgacaataatcagacacttctgtagcatatactgtgtgctcgcacttgcctgagcacttcccatgtgattgctatttaatcctctcaacagccagga

SEQ ID NO: 39707 - DNA, 120 bp, synthetic construct; identical to SEQ ID NO: 11387
  source 1..120: mol_type = other DNA

SEQ ID NO: 39708 - DNA, 120 bp, synthetic construct
  source 1..120: mol_type = other DNA
gcacaggagaaggagaagtgaggtcaggaacccttatcccaaagacaggcttcatgtgagtcccaggctctggacttgtggagccgggcaggtgacgtgaaggccacagttggctgggac

SEQ ID NO: 39709 - DNA, 120 bp, synthetic construct
  source 1..120: mol_type = other DNA
gttactgtcccccagcccaagaccatggaggacttgtggggtgcgtgtgtgattagactccagccgggcgattgtggccacccctatccagtggtgcaggaaagaggccaggaaaaccag

SEQ ID NO: 39710 - DNA, 120 bp, synthetic construct
  source 1..120: mol_type = other DNA
ggaggcggaggctgcagtgagctgagactgtgccacttcactccagcctgggagacagagtgagactccatctcaaaaaaaaaaaaaaaaaaaaaaaaaaaagagtccaggagaggggag

SEQ ID NO: 39711 - DNA, 120 bp, synthetic construct; identical to SEQ ID NO: 11388
  source 1..120: mol_type = other DNA

SEQ ID NO: 39712 - DNA, 120 bp, synthetic construct
  source 1..120: mol_type = other DNA
cagcctcctttatctatcagtctgatccagaagaattattgatttattcatgcatttatcccacaatgcttagtatcatctgcgtacaatgctaggtactaggaaaacaggacttcaggg

SEQ ID NO: 39713 - DNA, 120 bp, synthetic construct
  source 1..120: mol_type = other DNA
ctcacctctgtttattgttgttactcatttaatattgtaaggtaatgtgttgttgatctacagtgggaaagtgctagcattgtttcagattcaggaagcttattcacattagtaatggta

SEQ ID NO: 39714 - DNA, 120 bp, synthetic construct
  source 1..120: mol_type = other DNA
tattttgtgtcattcttcagtaggaaatgatgcatcagaccaaacaaggtgctcagttacagttagttaattgtgagttcatgtatggttttcaggtaagtcatatgccagctctggccc

SEQ ID NO: 39715 - DNA, 120 bp, synthetic construct; identical to SEQ ID NO: 4114
  source 1..120: mol_type = other DNA

SEQ ID NO: 39716 - DNA, 120 bp, synthetic construct
  source 1..120: mol_type = other DNA
aattagcagggcgtggcagtgcctgcctttaatcccagctactcgggaggctgaggcaggagaatcgcttgaacctgggaagcagagattgcagtgagctgagatcgcaccactgcactc

SEQ ID NO: 39717 - DNA, 120 bp, synthetic construct
  source 1..120: mol_type = other DNA
aatctgtttggcataaactgtttttgctcttttctgtgattccccaacacatctattacaccctctgtagagtatcttaaaatggttgccgtcatcctgggtcacccctaactttggcgt

SEQ ID NO: 39718 - DNA, 120 bp, synthetic construct
  source 1..120: mol_type = other DNA
tttagggcttttagtgtgagaatcacagaagataagtcattgacatacatacaggcttgactaacggggcagatgcagagaagtggatttttatggaaaatatatggaaagaaacctggc

SEQ ID NO: 39719 - DNA, 120 bp, synthetic construct; identical to SEQ ID NO: 11390
  source 1..120: mol_type = other DNA

SEQ ID NO: 39720 - DNA, 120 bp, synthetic construct
  source 1..120: mol_type = other DNA
cctgtgtcccttatgacactttgcacgctacaggggcagagtagtcatttaataattcagtactgcaactgggtttttagggcattgctgaggaattttttattatctaaatatatgcat

SEQ ID NO: 39721 - DNA, 120 bp, synthetic construct
  source 1..120: mol_type = other DNA
ttaatgtcagcctcgcaaccattccctaaagtaggtagagcacatctgacctcaatttatggataaagaaatggaagcttagagaggggattatttttttcaggtttcccagctagtaag

SEQ ID NO: 39722 - DNA, 120 bp, synthetic construct
  source 1..120: mol_type = other DNA
tgataatattcagatgtattaatccctagaagatacatggcccaaaggatcatcacccaggaatgttattagaatgaagcttacccatctcctgtgaggacctggctaagcagatctgtg

SEQ ID NO: 39723 - DNA, 120 bp, synthetic construct; identical to SEQ ID NO: 11391
  source 1..120: mol_type = other DNA

SEQ ID NO: 39724 - DNA, 120 bp, synthetic construct
  source 1..120: mol_type = other DNA
tactgagctgaccacctgaccatctaggctcctaggaactgctagaagggccagacaatgaggacccaagagcttccaacccaaggtactcctagaagatcccattacttgacagcagca

SEQ ID NO: 39725 - DNA, 120 bp, synthetic construct
  source 1..120: mol_type = other DNA
cccaacaggagtcaccagtaggagcagcagatagagtaccaggtgaggcagtccttcctggttgtcctcagccccttagaattgttgagaaggggcaacatggtccatcttccaagaaga

SEQ ID NO: 39726 - DNA, 120 bp, synthetic construct
  source 1..120: mol_type = other DNA
cttcaagtcacttgttggaggggtggcccagggaaaaaggattgccttcccaaatgatgttgatgaaaataatatctgtaatccaaaaggtttttaaaatgtaatttattgcctgggagc

SEQ ID NO: 39727 - DNA, 120 bp, synthetic construct
  source 1..120: mol_type = other DNA
tggtcaacatggtgaaaccccaactctactaaaaatacaaaaattagctgggcatgatggcagactcctgtaatcccagctacttgggaggctgaattgggagaatcgcttgaaccaggg

SEQ ID NO: 39728 - DNA, 120 bp, synthetic construct; identical to SEQ ID NO: 11392
  source 1..120: mol_type = other DNA

SEQ ID NO: 39729 - DNA, 120 bp, synthetic construct
  source 1..120: mol_type = other DNA
ggccatcaaatgtcagttttcctttgctgcattgtacttatgtacatatcttagccctccactagactaaagtcttttttgttaagtcctgataggttaggtttatgctgtagccacaaa

SEQ ID NO: 39730 - DNA, 120 bp, synthetic construct
  source 1..120: mol_type = other DNA
ggggttccaccatcttatagctgagctaactggaacatgtggccttgatcactgagatggggaagagagagtactgaagggtctcacccctgcaattacattgcaattacaattacagta

SEQ ID NO: 39731 - DNA, 120 bp, synthetic construct; identical to SEQ ID NO: 11393
  source 1..120: mol_type = other DNA

SEQ ID NO: 39732 - DNA, 120 bp, synthetic construct
  source 1..120: mol_type = other DNA
ataatttaggcatcctctgtgtgaaggtcttggtcttttctctttcctagtaatgaggaggtagaatggtaggtgcgtaattaggggcagaagcagtccccttagaaggccccagatgtc

SEQ ID NO: 39733 - DNA, 120 bp, synthetic construct
  source 1..120: mol_type = other DNA
ggcccattgaccaggtctcaattatgtaacatctggcctaattaaacgtgtactgtttacctttattcatgcaattgccattgaaagagtaggatttgggattggggtgatctgggtgat

SEQ ID NO: 39734 - DNA, 120 bp, synthetic construct
  source 1..120: mol_type = other DNA
ctaatattgcaagttattatgtcctaacttggagtcagtgtacaagaaacaatgatcagagttcagaagacagtgggtatttcagtatgcatattcatggggaataaatgactggagtat

SEQ ID NO: 39735 - DNA, 120 bp, synthetic construct
  source 1..120: mol_type = other DNA
accctgtctctactaaaaatacaaaaaaaaaattagccaggtgtggtggtgggcgcctgtagtcccagctacttgagaggctgaggcagaagaatggcgggaacctgggaggtggagctt

SEQ ID NO: 39736 - DNA, 120 bp, synthetic construct; identical to SEQ ID NO: 11394
  source 1..120: mol_type = other DNA

SEQ ID NO: 39737 - DNA, 120 bp, synthetic construct
  source 1..120: mol_type = other DNA
atgaggctggtgaaggtggtctgcagtgacagccttcatatttaattcactacaccctcattctttcctattctttagaagtactgttgggaccttcaaatctcataaatattctactgc

SEQ ID NO: 39738 - DNA, 120 bp, synthetic construct
  source 1..120: mol_type = other DNA
tgggtgacaggcccccaagaacccccttcagttctgcagagcttactgtagagatgacatcaatgtcccctggccatctggaatgaactgagtgtgaggtggagagagtgtgggctttga

SEQ ID NO: 39739 - DNA, 120 bp, synthetic construct
  source 1..120: mol_type = other DNA
tgcctgccacagtttcccatccctcttcctctggttttgattccttgaggggaattcctcatccacctcacatggtcctactgtggctatcagtcatggaatcacaaagggatcttcctc

SEQ ID NO: 39740 - DNA, 120 bp, synthetic construct; identical to SEQ ID NO: 11395
  source 1..120: mol_type = other DNA

SEQ ID NO: 39741 - DNA, 120 bp, synthetic construct
  source 1..120: mol_type = other DNA
acccctgacttcccaaggacagaagccagcacttcccctttttgtttcagcaactttgggttgggtttctgtcacatgcacttaaaagagtttgaatacaaatacctttatcatcctcta

SEQ ID NO: 39742 - DNA, 120 bp, synthetic construct
  source 1..120: mol_type = other DNA
tctgcccaactggactctcccttgcaaaacatgtgtcaccactgacagctgtttggggtataaacttctagccctttttctggtatttctatctgtatgtttgtatacatgcatagatag

SEQ ID NO: 39743 - DNA, 120 bp, synthetic construct
  source 1..120: mol_type = other DNA
ttttttcttttttttttttttagtctcactctgttgcccaggctggaatgtagtggtgtgatctctactcactacaacatccgcctccgaggttcaagctattcttctgcctcagcttcc

SEQ ID NO: 39744 - DNA, 120 bp, synthetic construct; identical to SEQ ID NO: 11396
  source 1..120: mol_type = other DNA

SEQ ID NO: 39745 - DNA, 120 bp, synthetic construct
  source 1..120: mol_type = other DNA
agaatggctgagttgcagagcatgtatgtgacacattttggtagattctgccaaatggtgttccaaaaaggcttttcggattcagactcccacctgcagagcaggaaatatttgttttcc

SEQ ID NO: 39746 - DNA, 120 bp, synthetic construct
  source 1..120: mol_type = other DNA
cagaggtcttggtctcttgcatttccccttccattaattgatactcattgatttcactttctaaacatgtgattgtgtgtccttcttattgacttgacaaattcctaattcctaacaggt

SEQ ID NO: 39747 - DNA, 120 bp, synthetic construct
  source 1..120: mol_type = other DNA
gtttttctttaatcaggccaacattttcaatttttatgactttgaacctgttcatctttttctttatggcttctgagttttgtgtctttcttgggaagacctttcccatcccagattaca

SEQ ID NO: 39748 - DNA, 120 bp, synthetic construct; identical to SEQ ID NO: 11397
  source 1..120: mol_type = other DNA

SEQ ID NO: 39749 - DNA, 120 bp, synthetic construct
  source 1..120: mol_type = other DNA
gataccatcacaatgcaggtgagatgccaacatatgggttttgggagaactccaatgttcagtccaccctcccacctttccagtcactgcactgacaagcttgcttcattcctagtggag

SEQ ID NO: 39750 - DNA, 120 bp, synthetic construct; identical to SEQ ID NO: 11398
  source 1..120: mol_type = other DNA

SEQ ID NO: 39751 - DNA, 120 bp, synthetic construct
  source 1..120: mol_type = other DNA
acttggatccctgcagtgcctgtcccaccctgcccctgcagcctgatctcctaaccctcatccttgcagtgtccatcccaccctgcccctgcagcctgctctcctaaccctcatccctgt

SEQ ID NO: 39752 - DNA, 120 bp, synthetic construct
  source 1..120: mol_type = other DNA
atcagaataaaagccagaggtcccactatggcctggcaggccctccatggccttcaccttcgtttcctctcacttcatttcccgtgctctccctgacatttctctcactggctaccttgc

SEQ ID NO: 39753 - DNA, 120 bp, synthetic construct
  source 1..120: mol_type = other DNA
tccctggccctatctcaagcaccccgtaatcccttttcactctctgtccccctttccttcctcagtcttcctcagcactaagcattgcctgacacattatacatttacttgtcctctact

SEQ ID NO: 39754 - DNA, 120 bp, synthetic construct; identical to SEQ ID NO: 11399
  source 1..120: mol_type = other DNA

SEQ ID NO: 39755 - DNA, 120 bp, synthetic construct
  source 1..120: mol_type = other DNA
catcgtcctcccagcagtaaatcatcactgcactgaccgtgccttttcacatgaccacagggcaaatcagcacgctcttctgcagcctccctaattggtgtcatcttcaaaaacaacctg

SEQ ID NO: 39756 - DNA, 120 bp, synthetic construct
  source 1..120: mol_type = other DNA
ctctctgcaccttctcatttcaccaagctataaaatgaaggcctataaataggtgtgataagcagatcaaggccatttattgcagaaccttcctcctcacctcacctacagcccggagca

SEQ ID NO: 39757 - DNA, 120 bp, synthetic construct
  source 1..120: mol_type = other DNA
ctccctccttaggcacctgctccttctccttgtctctgcccctgccttttctctgcctttgattaattttttggaggggatgatgtagtttagagcaattaagttaattgtcttagaaat

SEQ ID NO: 39758 - DNA, 120 bp, synthetic construct
  source 1..120: mol_type = other DNA
cctgactcttggttgctgtcagtgtttaattatggttgtcaggcaagatgatttgaaatgattaatgggaagatgtatttcaagaacaacagcaggcatttttaaattaatttttaaata

SEQ ID NO: 39759 - DNA, 120 bp, synthetic construct; identical to SEQ ID NO: 11400
  source 1..120: mol_type = other DNA

SEQ ID NO: 39760 - DNA, 120 bp, synthetic construct
  source 1..120: mol_type = other DNA
acacataaagctaaagtctcttttttccaccactctcaaactcagatcttgccccagaattagtcactgttatcagcttgtttgtatgcttctatttgtgccccaggtaaccttggagga

SEQ ID NO: 39761 - DNA, 120 bp, synthetic construct
  source 1..120: mol_type = other DNA
aatcccagcactttgagaggctgaggcaggcagatcacttggggtcaggagtttgagattagcctggccaaaaaggcaaaactctgtctctactaaaaatatataaattagccgggcgtt

SEQ ID NO: 39762 - DNA, 120 bp, synthetic construct
  source 1..120: mol_type = other DNA
agcgagactccatctaaaaaaaaaaaaaaaaaaatcatcccagcaaccctataaggtaggaggtgggtactgttttgttaataacagctttgatgagatgtaagtcacatatcatgaaat

SEQ ID NO: 39763 - DNA, 120 bp, synthetic construct; identical to SEQ ID NO: 11401
  source 1..120: mol_type = other DNA

SEQ ID NO: 39764 - DNA, 120 bp, synthetic construct
  source 1..120: mol_type = other DNA
ttcttgcagcacttattatcatctttttgatttcagccattctagtggatatgaaggggaaactcattgtggttttgatttgcatttccttagtgactaacaatgttgaacatcttctca

SEQ ID NO: 39765 - DNA, 120 bp, synthetic construct
  source 1..120: mol_type = other DNA
gcacggcccttcctctgtggcagtgcacagggaaggcagaattattgtgattttcagttcatatgaaattccttaagtgttgggcttgagttttacttcaattataggcttatcttttct

SEQ ID NO: 39766 - DNA, 120 bp, synthetic construct
  source 1..120: mol_type = other DNA
caaaagttaccgggtaagagaccaagccagggtccaagtcaggtctattgacttcagggcttgtattctgaagtcaatacttagccatcaaaagagacaaacaaatcccgtctgccagtg

SEQ ID NO: 39767 - DNA, 120 bp, synthetic construct; identical to SEQ ID NO: 11402
  source 1..120: mol_type = other DNA

SEQ ID NO: 39768 - DNA, 120 bp, synthetic construct
  source 1..120: mol_type = other DNA
tatttcctgagagtgcttcgtcaagattttctcagttctgtttctggagacagagcaggaaccattgacttgaatcacgttagcactgtgagtggggagaagcattgactccctggcttc

SEQ ID NO: 39769 - DNA, 120 bp, synthetic construct
  source 1..120: mol_type = other DNA
tgaagccaaagcagatgttttcacttcatctggggatgaatcatctggggaatgagaacagtaggcaaggaaggcaggatcaccattatcacaggagatgctttatccggcacctactgt

SEQ ID NO: 39770 - DNA, 120 bp, synthetic construct
  source 1..120: mol_type = other DNA
ggaggagtcccagtcctcaaggagtttaaagttttgggtagagaaacgtgtggattgccaagttactgcaaagtggactgtgataaacactgtcactgagctctattaagcaagtgacac

SEQ ID NO: 39771 - DNA, 120 bp, synthetic construct; identical to SEQ ID NO: 11403
  source 1..120: mol_type = other DNA

SEQ ID NO: 39772 - DNA, 120 bp, synthetic construct
  source 1..120: mol_type = other DNA
atccatggacccttgtgggggacctgtaggtcaataacgcctgtttcggtgcttgttccctgaaggatgttttaaaagtcccagataaattcacattactattattaggaatcctatgtt

SEQ ID NO: 39773 - DNA, 120 bp, synthetic construct
  source 1..120: mol_type = other DNA
attggccagatttgtcttctgttttgtgtacatgtataacataaaatggaaaacaattgcagaggtgcaggctttaaaaaaatacagaaacagagcacatcaacctggattttaggtgtg

SEQ ID NO: 39774 - DNA, 120 bp, synthetic construct; identical to SEQ ID NO: 11404
  source 1..120: mol_type = other DNA

SEQ ID NO: 39775 - DNA, 120 bp, synthetic construct
  source 1..120: mol_type = other DNA
tctctctgggcacctgcctccttgctcccctgacgcagcccctctgccggcctctccctctcagtggaatgttctgtcccaggaggcattgcatcactgctgaccagcctcctgctcctg

SEQ ID NO: 39776 - DNA, 120 bp, synthetic construct
  source 1..120: mol_type = other DNA
gcatctctacagcatcatattttctccgtactagagcactttctaaggtctcccctatcctctcatggcatgggttactgttccaagcatcagcaatgagtgaggccctctattcacttg

SEQ ID NO: 39777 - DNA, 120 bp, synthetic construct
  source 1..120: mol_type = other DNA
caagtgatggccctctaagctactcagtgtctttgtctgtgaggtgggactaacacccgcttctttggtttttgaggattaaatgacattgtagaaaaactacaaagtttggggtcctca

SEQ ID NO: 39778 - DNA, 120 bp, synthetic construct; identical to SEQ ID NO: 11405
  source 1..120: mol_type = other DNA

SEQ ID NO: 39779 - DNA, 120 bp, synthetic construct
  source 1..120: mol_type = other DNA
agctggtatcacaggtgcccaccacactgcccggctgattttttgtgtttttagcagagacagggtttcgtcatgttggccaggctggtctcaaactcctgacctcaagtgatctgcctt

SEQ ID NO: 39780 - DNA, 120 bp, synthetic construct
  source 1..120: mol_type = other DNA
gtatgtgtttctgggatacagcatggtatttcaatatgtgtacataattcattttttcagtttttgggtttctgattcacgcacggtttattctggtgtttggtgtcaggtgtgggctgc

SEQ ID NO: 39781 - DNA, 120 bp, synthetic construct
  source 1..120: mol_type = other DNA
tgggttgacttttaaactttctattctgttttagttgtctggttgtttactcatatgcaatgttttgatataaagaagaccaaatcacttccctcttggctcttatttataagaggctta

SEQ ID NO: 39782 - DNA, 120 bp, synthetic construct; identical to SEQ ID NO: 11406
  source 1..120: mol_type = other DNA

SEQ ID NO: 39783 - DNA, 120 bp, synthetic construct
  source 1..120: mol_type = other DNA
tgaactcattcttttttatggctgcatagtatttcacggtatatatgtgcaacattttattgatccagtctatcattgatgggcatttgggttggttccaagtctttgctattgtaaata

SEQ ID NO: 39784 - DNA, 120 bp, synthetic construct
  source 1..120: mol_type = other DNA
tggggctcactcatgtagctgacagctgtgtggctggcctaggtctccagcctctctggagattgagttgatgctgcatggcccagggcccctgccataaatcacgttattagactatct

SEQ ID NO: 39785 - DNA, 120 bp, synthetic construct
  source 1..120: mol_type = other DNA
tagacaggtagactttggtagactttggtaaattgctgttagtgctcatttttatgcctcagggtcaaggtgagggggagtgacttcaattttctctctttctcctttctctgtaattat

SEQ ID NO: 39786 - DNA, 120 bp, synthetic construct; identical to SEQ ID NO: 11407
  source 1..120: mol_type = other DNA

SEQ ID NO: 39787 - DNA, 120 bp, synthetic construct
  source 1..120: mol_type = other DNA
ctcccctgcccatagggttgttgtcagaatcatgtgaactgaagcatgtaaagtataggcttttaatactgttcgccgagacagaatattggttactgttgctgcaaccatgacagcaat

SEQ ID NO: 39788 - DNA, 120 bp, synthetic construct
  source 1..120: mol_type = other DNA
taacctcaataatccttttcacgtaactaccaggtaattatttaaatagtcaataaaataatatgtgttgttcccaaagctctctcctgcgaggggttgtctcttccttcaggtcctggt

SEQ ID NO: 39789 - DNA, 120 bp, synthetic construct
  source 1..120: mol_type = other DNA
ttcctttgatgcattgatcaacccacagtttcacaattatttgacagtttgattaatatctatctcttcttctaggctatgagccgcaggagggcagaagctgagatcgtatctcccaga

SEQ ID NO: 39790 - DNA, 120 bp, synthetic construct; identical to SEQ ID NO: 11408
  source 1..120: mol_type = other DNA

SEQ ID NO: 39791 - DNA, 120 bp, synthetic construct
  source 1..120: mol_type = other DNA
ctcctgagtagctgggattacaggcatgcgccaccatgcccggctaatttttttgtatttttaatagagatggggtttctccatgttggttaggctggtctcaaactcccaacctcaggt

SEQ ID NO: 39792 - DNA, 120 bp, synthetic construct
  source 1..120: mol_type = other DNA
catgcttcctgggagaagcagacccctggataaatgacagcagctaattggttgcttagaacacattcaagatggtttcctcggacttctgttctcctgactgtgcattaacatagcaat

SEQ ID NO: 39793 - DNA, 120 bp, synthetic construct
  source 1..120: mol_type = other DNA
tcggacttctgttctcctgactgtgcattaacatagcaatgccaaggcaaagtttctatggcaaaggtttaagaacatgcaaattgaatgcgcctgattttaacctcattaatcctggct

SEQ ID NO: 39794 - DNA, 120 bp, synthetic construct; identical to SEQ ID NO: 11409
  source 1..120: mol_type = other DNA

SEQ ID NO: 39795 - DNA, 120 bp, synthetic construct
  source 1..120: mol_type = other DNA
aagaagctctgagacctcatgcccagcccctccttcctttgtgtttcccaattaaataactgcaagagcaaagtcatgtgggagaggccggcaggcagggaatcaggaagaaggaggagg

SEQ ID NO: 39796 - DNA, 120 bp, synthetic construct
  source 1..120: mol_type = other DNA
accagtgggctagagctctttaaccattgtgtaacttatatgctttgtctagaactccttctgataagtatttccagtggttcattcactggccatagtgagtttgaggtatgaaactgt

SEQ ID NO: 39797 - DNA, 120 bp, synthetic construct
  source 1..120: mol_type = other DNA
tcctttcttatttcctctcacctcctccatgtctgcccacaaattcaaacaaaaaacaaggaagcgaagaagctgctaatttccctgctttattcctttccttgagagaatgaaacaagg

SEQ ID NO: 39798 - DNA, 120 bp, synthetic construct; identical to SEQ ID NO: 11410
  source 1..120: mol_type = other DNA

SEQ ID NO: 39799 - DNA, 120 bp, synthetic construct
  source 1..120: mol_type = other DNA
gtgctaatgaaaatagacattcttatgttagaatggctcctaaaggcaaaagctgcatttttttgtccacttcagagtttaggcttcttcaggcattttccttagttgtatgctgagagt

SEQ ID NO: 39800 - DNA, 120 bp, synthetic construct
  source 1..120: mol_type = other DNA
taagtttactgttgtagtaagattcgaggtataaagctggtcttttaaaatccttacccttgcatttggcattagatgcctctgaatctcacattcatggaccttcaggtccatcttctc

SEQ ID NO: 39801 - DNA, 120 bp, synthetic construct
  source 1..120: mol_type = other DNA
tgatagtgacatttttccctcccctgctttttgccttttctcgagagtatttcttatacatagcatccttcaatattcccatgttgcagttctcgttggtttatctgtttcatggtcatc

SEQ ID NO: 39802 - DNA, 120 bp, synthetic construct
  source 1..120: mol_type = other DNA
gctgtcagtcatggttatttctcagttcctccatgctctttcctatgagaattattttttatgaaaatgggcatcccttctccagcttcctctcagattccttttaaggatttaggggaa

SEQ ID NO: 39803 - DNA, 120 bp, synthetic construct; identical to SEQ ID NO: 11411
  source 1..120: mol_type = other DNA

SEQ ID NO: 39804 - DNA, 120 bp, synthetic construct
  source 1..120: mol_type = other DNA
aaactcttcagggagcctggctctttctcctgccctgagaagactgaaatcatgtcaagggtgagaacttggtctcctgagtctagaagttttgaagacctcactggaaatcattgactg

SEQ ID NO: 39805 - DNA, 120 bp, synthetic construct
  source 1..120: mol_type = other DNA
tatcatcagggctactcaccaggctcggaaaatctccttttgttcttctattttccatatggaatcaattcttataagtaccaggatccctgctggacatcctaattctgtcaagattct

SEQ ID NO: 39806 - DNA, 120 bp, synthetic construct; identical to SEQ ID NO: 11412
  source 1..120: mol_type = other DNA

SEQ ID NO: 39807 - DNA, 120 bp, synthetic construct
  source 1..120: mol_type = other DNA
gtggcttccaaatacctacccaaacgggtgtcttttggaggacgacactgcctctggataaatgatctctgggtacacagaggaggcatgcagtgatttgtggttactatgaatagaatt

SEQ ID NO: 39808 - DNA, 120 bp, synthetic construct
  source 1..120: mol_type = other DNA
tgaggtcatggttaatcaggggtgcattctctttcataatccctggggatcttgcctggcatttttgtttagctggagaaatattggcttcgctctggccacaaatttcccacactggcg

SEQ ID NO: 39809 - DNA, 120 bp, synthetic construct
  source 1..120: mol_type = other DNA
ctttcactctcgctctaaagataatcgcctctaaagcaaggtaatggacatgttttatccccagcaattcggtttgcccttctggggtgcttctcaaaagaacagcctcagagatgctga

SEQ ID NO: 39810 - DNA, 120 bp, synthetic construct
  source 1..120: mol_type = other DNA
cttttttttgtaaaaatcaaatcaacccctcccttccattggatgaggagataattatcatcattcactgaaggtcgacattctgtcttgaattatttgtctttgggcaagagcttgaaa

SEQ ID NO: 39811 - DNA, 120 bp, synthetic construct; identical to SEQ ID NO: 11413
  source 1..120: mol_type = other DNA

SEQ ID NO: 39812 - DNA, 120 bp, synthetic construct
  source 1..120: mol_type = other DNA
ggtgtcactggaaatgattccctctgctcaatatggatttgcatctatgttgatttcatgttgttacctaccttattaaatcctgtgggtgaactcattttattctataagccaagatgc

SEQ ID NO: 39813 - DNA, 120 bp, synthetic construct
  source 1..120: mol_type = other DNA
aagaggagatattttctcatttgtaaaatagggctcctgactcagtttcttgggtctcttcccagagatattctttatttatatacagtgctccccactcatgccccctgaatctgcaac

SEQ ID NO: 39814 - DNA, 120 bp, synthetic construct; identical to SEQ ID NO: 11414
  source 1..120: mol_type = other DNA

SEQ ID NO: 39815 - DNA, 120 bp, synthetic construct
  source 1..120: mol_type = other DNA
tgctggtgattcagatatgcccaagagaagccataaagtgcttcctttaagtgaaaaggtaaatgtttattccaggtatatataggaaaaaataaatagtatatatagaatttggtacta

SEQ ID NO: 39816 - DNA, 120 bp, synthetic construct
  source 1..120: mol_type = other DNA
tctgcatgtattttttttatgtggaaaggaacatatcatgcatactgtctagccaccatacttaacttcgttttgacaatgtgtctctgaagagattgtagcctgtctgcacacaagcct

SEQ ID NO: 39817 - DNA, 120 bp, synthetic construct
  source 1..120: mol_type = other DNA
cagtgaggatccttgcacacccatcttggcatgtatgtatgagtccatcggaaggatacatttctgtaaataggattgctgggtgaaaggtatatttgcttttgttttgatgaaaacagt

SEQ ID NO: 39818 - DNA, 120 bp, synthetic construct
  source 1..120: mol_type = other DNA
aagttactaattaacatgtatcttagtaggagtttggggtatttgttcaggattgctgatctcatggctagattagtgaacattcaccccaagagtgaaaggctctggaatttaaccaca

SEQ ID NO: 39819 - DNA, 120 bp, synthetic construct; identical to SEQ ID NO: 11415
  source 1..120: mol_type = other DNA

SEQ ID NO: 39820 - DNA, 120 bp, synthetic construct
  source 1..120: mol_type = other DNA
aatatacccagtttgcactgaattccattccttgcttctttttcccttcttagtcacacactatctgtgcgtgtcaagacactgttgtataaaactgctgtatagaactaggtattttat

SEQ ID NO: 39821 - DNA, 120 bp, synthetic construct
  source 1..120: mol_type = other DNA
aaaaagaaagaaagaaaccaatccagatgacagaaactgagagggacatggtggttgcaggtgtccgtgtgtgctgggaatgcagaaacatgcctggagcagtggaggctgtgctctggc

SEQ ID NO: 39822 - DNA, 120 bp, synthetic construct; identical to SEQ ID NO: 11416
  source 1..120: mol_type = other DNA

SEQ ID NO: 39823 - DNA, 120 bp, synthetic construct
  source 1..120: mol_type = other DNA
aatacaaaaaaattagccgggcatggtgttgcgcgcctgtaatcccagctactcgggaggctgagacaggagaatcacttgtacctgggaggcagaggttgcagtgagctgagatagtgc

SEQ ID NO: 39824 - DNA, 120 bp, synthetic construct
  source 1..120: mol_type = other DNA
caccaggcaccaaatctgctggtgccttgattgtggacttcccagcctccagaactttgagcaataaatttctattgtttttaagttacctggtctaaggtttagcaatctgaaatgact

SEQ ID NO: 39825 - DNA, 120 bp, synthetic construct
  source 1..120: mol_type = other DNA
ggaacaagtggctaccttttgagtcactcttcagcctctgacgatctttaacaatgttgacctctctgaagatagattagtttgcctttttttttttgagtttaacgtaattggaatgat

SEQ ID NO: 39826 - DNA, 120 bp, synthetic construct
  source 1..120: mol_type = other DNA
atggtgtatactcttttgtgcctaagtttcttttactcagttttatgttcgtaacattcatccatgttgtagcaaataattatacctggttagtgttcgcggctgtgtagtattccatta

SEQ ID NO: 39827 - DNA, 120 bp, synthetic construct; identical to SEQ ID NO: 11417
  source 1..120: mol_type = other DNA

SEQ ID NO: 39828 - DNA, 120 bp, synthetic construct
  source 1..120: mol_type = other DNA
ttaagcaaacaccaaggtaaggtggtgtgattgccatggaggtaagtgctgaagaggaaagaggcaggatcccaggacagcttactgttaggttttttaaagggaaggtgagggttaaag

SEQ ID NO: 39829 - DNA, 120 bp, synthetic construct
  source 1..120: mol_type = other DNA
aattataggcctgagcaggaggggtctggggggagcatggcctgctgcctgggaaaatgttgataacatgttcccacgatgaggtggtttggcccttgttctggtggaatgtgatgttcc

SEQ ID NO: 39830 - DNA, 120 bp, synthetic construct; identical to SEQ ID NO: 11418
  source 1..120: mol_type = other DNA

SEQ ID NO: 39831 - DNA, 120 bp, synthetic construct
  source 1..120: mol_type = other DNA
aggtgccagagcatggaggcgggaatggggatagaggaggtggcgaggctgacattggggttggggctgcagcctttgtgcctgtgatgggagcccagacctatagctgtgaggtgtgtt

SEQ ID NO: 39832 - DNA, 120 bp, synthetic construct
  source 1..120: mol_type = other DNA
attagtaggaagcatttgaaatggtccacagctgctcacaatccttaagggagtttatctgtaactgagagagtatggggaggtgtctggacagtcaggaagtacctgtcgcaggtggca

SEQ ID NO: 39833 - DNA, 120 bp, synthetic construct
  source 1..120: mol_type = other DNA
agggctcttgaagtcatgctgtgtttttaggaagatatttgagcaggagatcatgaaaattttgcaagaatctgcaatctggaagagtgttgattcaatatacattcattaggtgcccac

SEQ ID NO: 39834 - DNA, 120 bp, synthetic construct; identical to SEQ ID NO: 11419
  source 1..120: mol_type = other DNA

SEQ ID NO: 39835 - DNA, 120 bp, synthetic construct
  source 1..120: mol_type = other DNA
gacttggggcaactttgatcttctaaatgggtattaatagttcccacctgcaggactgaactgtggaaatgcactgagatccagcagttcaaatccctggcctgagtattgggtgattgt

SEQ ID NO: 39836 - DNA, 120 bp, synthetic construct
  source 1..120: mol_type = other DNA
cccagccccactatactgtctccctctccctccttctccaagtgcccagacctgctccagctgcccctgatactcagcaatgcagacttgtctggaaacacggacaacaaggcagcttgg

SEQ ID NO: 39837 - DNA, 120 bp, synthetic construct
  source 1..120: mol_type = other DNA
aattttgtaaccatctgttggcttgggtatgtgtttgatggctgtggctgtgggttgaggtggagtaatgttgaccttggaaggttaggatgcttttgtttctgatgagaccatctagtg

SEQ ID NO: 39838 - DNA, 120 bp, synthetic construct
  source 1..120: mol_type = other DNA
ctgagtgtttcatgggcaagggtgggggctgggaagagaagcttgcccaaggccctgctgcagagggaggggcaggagagctagtgggagccaggtgtgtggagctgcctttcacagaac

SEQ ID NO: 39839 - DNA, 120 bp, synthetic construct; identical to SEQ ID NO: 11420
  source 1..120: mol_type = other DNA

SEQ ID NO: 39840 - DNA, 120 bp, synthetic construct
  source 1..120: mol_type = other DNA
cttggagatgtgtggtgttggatgcttctgtccagggtaacatggctctcattacctgggcttcagagccttctctaccttaccatctgcatttgttttttctttttgattgggtggcat

SEQ ID NO: 39841 - DNA, 120 bp, synthetic construct
  source 1..120: mol_type = other DNA
ctcccattcccaccagcacatcctttgaccttatcttccatacccttctgcacctaggacctcttccactccttcccagtcaagaagcacctatgaataagcacaggtattcaatatttg

SEQ ID NO: 39842 - DNA, 120 bp, synthetic construct; identical to SEQ ID NO: 11421
  source 1..120: mol_type = other DNA

SEQ ID NO: 39843 - DNA, 120 bp, synthetic construct
  source 1..120: mol_type = other DNA
ctttcagtcctaaattttccccgaatctctatcttctctccaagactgccccaccaagccttctgccatttgtcaactcacaactctgtggcagcctgaaattgttttcaattcccagta

SEQ ID NO: 39844 - DNA, 120 bp, synthetic construct
  source 1..120: mol_type = other DNA
cccctccctccccaggagagccctgcagtacctcttccaggatcctgctcctctagaatgcccacttcccacccagtgtgaggatgatcagtttacgtgcctgcctccccatggacgtac

SEQ ID NO: 39845 - DNA, 120 bp, synthetic construct
  source 1..120: mol_type = other DNA
ccacccttttttgtagattaaatgaacccagaagttagttcatgatgtagttcctgtaaaaaataataaataaacctaggaggagcctcaaagtcccttcctgacctgatgttctgcgat

SEQ ID NO: 39846 - DNA, 120 bp, synthetic construct; identical to SEQ ID NO: 11422
  source 1..120: mol_type = other DNA

SEQ ID NO: 39847 - DNA, 120 bp, synthetic construct
  source 1..120: mol_type = other DNA
ttttctggagctactaaaggaaagaaacccagttgaacccaggatttttttctttacccccgaacttctttgtacagaagtttcactttctcataacatgatttctttcttttacaaaag

SEQ ID NO: 39848 - DNA, 120 bp, synthetic construct
  source 1..120: mol_type = other DNA
ggctcggttagtatttcaaacccccaaaagctgcacaaagcagaggctcgggttcttgagtagagggctgatgctagaaacataaagagattcatctgcatcttcttcaacagtgtgcct

SEQ ID NO: 39849 - DNA, 120 bp, synthetic construct
  source 1..120: mol_type = other DNA
cttctcactgtggcacgagccatcactctcagagcacctcaagcctggcagggttccgaaaacctcagggtttaatcactcccctgtttaaggaactcagacacaatgtattttacaaat

SEQ ID NO: 39850 - DNA, 120 bp, synthetic construct
  source 1..120: mol_type = other DNA
ctgtatattttaccaacaatggaaaaaaaaggcttatgagcttagaggctttcacattcattatttcacttaattctctaaacctccaatggggtaaatcaatttctgttttgcagacca

SEQ ID NO: 39851 - DNA, 120 bp, synthetic construct; identical to SEQ ID NO: 11423
  source 1..120: mol_type = other DNA

SEQ ID NO: 39852 - DNA, 120 bp, synthetic construct
  source 1..120: mol_type = other DNA
gcccaggctggagtgcagtggcacaaactcagctcactgcaacctctgcctcccagttcaagcgattctcatgcctcagtctcctgagtagctgggaccacagatgcgcaccatcacacc

SEQ ID NO: 39853 - DNA, 120 bp, synthetic construct
  source 1..120: mol_type = other DNA
gtgagccacggtgcccagctgtccttttatttttatttggtgttccttgttggaagagatcagcttctcttcactagagaaatttttcagtgatcctggtgggggctccagtcccctttt

SEQ ID NO: 39854 - DNA, 120 bp, synthetic construct
  source 1..120: mol_type = other DNA
cctctcagtgcctcagatacctctctatacagaggaaatgcaagcggaagtataaggaagatcacacgaaatagcgcctgtcaatcactgtcaagcacagtgcctggcacacagtaggtt

SEQ ID NO: 39855 - DNA, 120 bp, synthetic construct; identical to SEQ ID NO: 11424
  source 1..120: mol_type = other DNA

SEQ ID NO: 39856 - DNA, 120 bp, synthetic construct
  source 1..120: mol_type = other DNA
aacaagccctccaggtgtgtctgaggcctgctgaagtttgcaaaccatactttagaatgtgaaagagccagtccctatttcatttcaaatgagtttagatgtatatttagctactgaaat

SEQ ID NO: 39857 - DNA, 120 bp, synthetic construct
  source 1..120: mol_type = other DNA
ggaaagaaatctgctgatatgaagactcagttatatttcgaacaaaggcaatgaatccatcttggtcctttgcttggctcatggtgaaacatagcggccaccatgtgggtcaagaggctt

SEQ ID NO: 39858 - DNA, 120 bp, synthetic construct
  source 1..120: mol_type = other DNA
tggcatctttcttatgcactgtcactctcctcgtggttactgttgtttgggtcaatgttgtaagcagttgcttgaatacaaaccctctgctttttcatccctgtttctcctgggcaaacc

SEQ ID NO: 39859 - DNA, 120 bp, synthetic construct
  source 1..120: mol_type = other DNA
taaagactttctagcctgaataccaccatggcaagtcataagccttgttcttcccctcctgtgctccacatcccagggatttgatccctgcaggctgcatttccaggcgcctgctgggtt

SEQ ID NO: 39860 - DNA, 120 bp, synthetic construct; identical to SEQ ID NO: 11425
  source 1..120: mol_type = other DNA

SEQ ID NO: 39861 - DNA, 120 bp, synthetic construct
  source 1..120: mol_type = other DNA
gcctactccaggagctgtcactttcaacatgcttggtgtttgatgaatgaatgcgtgataacatgtgaggagggctgaaaatgcaaaggaaaatcaaagtatgccgtatattcaaaatgc

SEQ ID NO: 39862 - DNA, 120 bp, synthetic construct
  source 1..120: mol_type = other DNA
ttgagaatgttcaaatctgttccattataagccaccccagaacttaatgatttagaaccctttattatttctcatgattctgtgggttatgacttgagttgccttcagctgttcttgcct

SEQ ID NO: 39863 - DNA, 120 bp, synthetic construct
  source 1..120: mol_type = other DNA
tgttcacaaagtggcagtcttccaagagggtgaggggcaaactctgaggccaattgaggtagaggcttggaagttacacagcatctcttcctgtgcattctgcttcaaagcaagtcaaga

SEQ ID NO: 39864 - DNA, 120 bp, synthetic construct; identical to SEQ ID NO: 11426
  source 1..120: mol_type = other DNA

SEQ ID NO: 39865 - DNA, 120 bp, synthetic construct
  source 1..120: mol_type = other DNA
ttgcaatgggcattggatgcctctttctccctgactcttctagaactgttgtgggaaatttcttcacctccccaaatgggggactggagtaagatgctgcaaatatcatcccatcacaat

SEQ ID NO: 39866 - DNA, 120 bp, synthetic construct
  source 1..120: mol_type = other DNA
cttctttttcttttttctaccctctgcaccattatagttgtttgtataacagtgtctgcaaaaactgataacatttgattaaggcctgcagtctagtccattgtattgtgccagtgtcaa

SEQ ID NO: 39867 - DNA, 120 bp, synthetic construct; identical to SEQ ID NO: 11427
  source 1..120: mol_type = other DNA

SEQ ID NO: 39868 - DNA, 120 bp, synthetic construct
  source 1..120: mol_type = other DNA
ccacctcctttcttccctttctggactcagagatcctctgtcccaagtttctcccttatagtcagggctctgccctttactactcactttcttgtttgttgtcttaatcgtgggttacaa

SEQ ID NO: 39869 - DNA, 120 bp, synthetic construct
  source 1..120: mol_type = other DNA
tttgtgaataagaaaactaacacccagggtttgaggtacttggctgggaccaaaagtaagtgatgcatccaaggctagaaggtagattaaatgactttttaatctgggttttccttgcta

SEQ ID NO: 39870 - DNA, 120 bp, synthetic construct
  source 1..120: mol_type = other DNA
agaaagccttttagaaagttttctttctgaaagagaaaactttttagaaagttttctttctgaaagagaaaactttttcaagtgaagtaaaacttctttgaaatattacgtgtttaaact

SEQ ID NO: 39871 - DNA, 120 bp, synthetic construct; identical to SEQ ID NO: 11428
  source 1..120: mol_type = other DNA

SEQ ID NO: 39872 - DNA, 120 bp, synthetic construct
  source 1..120: mol_type = other DNA
tttggtatgcttttcagtttccacaacagtagtcaagccagtgagccctgtggggagggctcatgggccctggactcaaagagctcagagtatgtctacctggggaactaaaccagtgtg

SEQ ID NO: 39873 - DNA, 120 bp, synthetic construct
  source 1..120: mol_type = other DNA
aatgtactggacttgggctcaatgtagagatgtagggggtagctctcttttgactcctaaaattacagtgaaaaactgggttctcgtaatcacacttacgagttgttgtgtccctggact

SEQ ID NO: 39874 - DNA, 120 bp, synthetic construct
  source 1..120: mol_type = other DNA
taagtgcatttacaatgctgggcaatcatcatgactatttagttccaggaccttttcattacccacaaaggagaccatgtgcccattaagcagtcactctctccttggcaaccacttaat

SEQ ID NO: 39875 - DNA, 120 bp, synthetic construct; identical to SEQ ID NO: 11429
  source 1..120: mol_type = other DNA

SEQ ID NO: 39876 - DNA, 120 bp, synthetic construct
  source 1..120: mol_type = other DNA
caacgagttgcttacctcttttattatatgtaatacttttggaaattcagtgtccatgtacagaaagcaatagcatttctgccgaactacagtaacctataggaaatgttatagaaaaaa

SEQ ID NO: 39877 - DNA, 120 bp, synthetic construct
  source 1..120: mol_type = other DNA
tatgttcgtagataggatagctcatttgtgtaaaagtgtctcattgaagacaattccaataaatatcccaacaggatttatcttgcaattacagaaaccaattctaaaattgatttgaag

SEQ ID NO: 39878 - DNA, 120 bp, synthetic construct
  source 1..120: mol_type = other DNA
atgatgaatgagtgggaaaggctgagcacatcattgacttatcttgagacaactagctttctataaaaaaagatactagatctgcatctcacaacacataccaagataaatctcagctaa

SEQ ID NO: 39879 - DNA, 120 bp, synthetic construct
  source 1..120: mol_type = other DNA
tgaaaaaaatgataaatttgactaggttaaagtattatgatttataggtgtataatataagattatggcctagaagtatacacataggtgttgcctctggacacagagtgaggggagaga

SEQ ID NO: 39880 - DNA, 120 bp, synthetic construct; identical to SEQ ID NO: 4152
  source 1..120: mol_type = other DNA

SEQ ID NO: 39881 - DNA, 120 bp, synthetic construct
  source 1..120: mol_type = other DNA
ctctgtggggcaggttacaactgctagaggagcagagaaggaagaacgcgtggggaagagcatcgtcacaagcattaagttctatccaagcatggggaaattgttttcattgcattcaat

SEQ ID NO: 39882 - DNA, 120 bp, synthetic construct
  source 1..120: mol_type = other DNA
tttcttttaagctctagaccttgctgttttccttgacagggtgaaactgggtgttctgtaatgaaatgtgtgctccctgacaagtggcagagattctgaattttctgggactgactagga

SEQ ID NO: 39883 - DNA, 120 bp, synthetic construct
  source 1..120: mol_type = other DNA
gcgatgggtctctaaggaggtaccagtgttttaagcaaggtggtcatttgtgggctggtaatttgaaaatgggagttgtggaattctgctttacctgcagacctgctgaccacttctgcc

SEQ ID NO: 39884 - DNA, 120 bp, synthetic construct; identical to SEQ ID NO: 11431
  source 1..120: mol_type = other DNA

SEQ ID NO: 39885 - DNA, 120 bp, synthetic construct
  source 1..120: mol_type = other DNA
gccatgtttattcatctccacagcatcatttcacaaagcccctaattctgtgatgacataccactctccaaaaagatactttaaagaccaaagaagataaaaaacatgccccccatgtct

SEQ ID NO: 39886 - DNA, 120 bp, synthetic construct
  source 1..120: mol_type = other DNA
tcttgcacctaaaccgtcatggcaagcacactttggataaatcatttaacttcattagacttcaattgcatcatccataaatgagttataatagtaatttacttgcctttagacagggac

SEQ ID NO: 39887 - DNA, 120 bp, synthetic construct
  source 1..120: mol_type = other DNA
attgtaaaatagaaattaaaaaaaactctattgatgttgggttttgggaaggaacttgggggagatagagcagatcctctgctcaggcacactttttttttctttctgaaagactgtttt

SEQ ID NO: 39888 - DNA, 120 bp, synthetic construct; identical to SEQ ID NO: 11432
  source 1..120: mol_type = other DNA

SEQ ID NO: 39889 - DNA, 120 bp, synthetic construct
  source 1..120: mol_type = other DNA
ctgccttttccagaatgtcacatagttaaaatcatacagtatatggccttttcagactggcctctttcacctagtaatgtgtatttaagtttactccatgtgttttcatgacttgatagt

SEQ ID NO: 39890 - DNA, 120 bp, synthetic construct
  source 1..120: mol_type = other DNA
gctataaacatctgtgtgcaggtttttgtgtgaacacatgtatggatttttgatctgctaaacactgaactaagaagatttctggatatagatgtagttgaaagggataaatatgtactt

SEQ ID NO: 39891 - DNA, 120 bp, synthetic construct; identical to SEQ ID NO: 11433
  source 1..120: mol_type = other DNA

SEQ ID NO: 39892 - DNA, 120 bp, synthetic construct
  source 1..120: mol_type = other DNA
ttgcccaggctggagtgcagcagtgagatctcggctcactgcaacctctgcctcccgggttcaagcaattctcctgcctcagccccctgagtagctgggattgcaggcgtgcgccaccat

SEQ ID NO: 39893 - DNA, 120 bp, synthetic construct
  source 1..120: mol_type = other DNA
agccaccgtgcctggcgaaattataatatttatactgacagtctaaagtttatcaaagctttcatttcccatagagtaactcaaggtccttggaacactctaaaaatgtttaaccactcc

SEQ ID NO: 39894 - DNA, 120 bp, synthetic construct
  source 1..120: mol_type = other DNA
tctttgctcttcattcctttttgtgtttccagtcttccatctgggatcactttctttctgcctgaaatgtaatctttagaatttcccttgctggtgaggaactctttgcgtgcctgaaaa

SEQ ID NO: 39895 - DNA, 120 bp, synthetic construct
  source 1..120: mol_type = other DNA
aaacctggtgactcaaaacgacacaaattcattctcctttgattctggaaggcagaagcccatcatcagtttccctgggctaaagtcaaagtgtctgcagagctgcgctccatctgcagg

SEQ ID NO: 39896 - DNA, 120 bp, synthetic construct; identical to SEQ ID NO: 11434
  source 1..120: mol_type = other DNA

SEQ ID NO: 39897 - DNA, 120 bp, synthetic construct
  source 1..120: mol_type = other DNA
ggtaacactcacagcttccagggactatgacctgaatatctttgggggtcattcatctttcctcatcagaattatagatttgtcattattttctttcagcgtattaaagatattattcca

SEQ ID NO: 39898 - DNA, 120 bp, synthetic construct
  source 1..120: mol_type = other DNA
tttctctaagcttttctcttggttttaatcactgtgatcactggtaactacgatgggtctaggtgtacattccttaacatttactttgcttgggattctctggtcttttgaccacttagt

SEQ ID NO: 39899 - DNA, 120 bp, synthetic construct; identical to SEQ ID NO: 11435
  source 1..120: mol_type = other DNA

SEQ ID NO: 39900 - DNA, 120 bp, synthetic construct
  source 1..120: mol_type = other DNA
tactaagtcagtttttacagtttttggtgctctgcagatatttgcaagcttgtttactttttcatgtggttagcaaatataaacttactgagtttgcatctgaagtgtgtccaggtcggt

SEQ ID NO: 39901 - DNA, 120 bp, synthetic construct
  source 1..120: mol_type = other DNA
gcctgacaatttcactagttattgcccgtaaagaaattatgtgtggagatcccctgaggcttagaatgagtgtgctctccttcctctggttgccttttggagtcactacaaatgaaattc

SEQ ID NO: 39902 - DNA, 120 bp, synthetic construct
  source 1..120: mol_type = other DNA
ctctgggcctatgggtttgggggggacaggaagtgacatattactcctggttcatcctaatcctgagggtgtggccctttgggacccagcttactgtaggtatatgtctcctgtaagagt

SEQ ID NO: 39903 - DNA, 120 bp, synthetic construct
  source 1..120: mol_type = other DNA
ctaaatcagcctggtagggatgtgctatcattcagctcttcagtgtttttatggttacttactcagagttgtttttagctgagggctcatccaataattcaatcacctaaccttccctcg

SEQ ID NO: 39904 - DNA, 120 bp, synthetic construct; identical to SEQ ID NO: 11436
  source 1..120: mol_type = other DNA

SEQ ID NO: 39905 - DNA, 120 bp, synthetic construct
  source 1..120: mol_type = other DNA
taacactggggaatggaaaagcccatcttgtttgatgccatctgttgtttcctcaaggggtaactttaattggttggccaataagtttcatccttgccttaaaaaaaatgaccaccaagg

SEQ ID NO: 39906 - DNA, 120 bp, synthetic construct
  source 1..120: mol_type = other DNA
cgttagtcagcagcctcttctctcatgcatgccctgatctttaacgctccaacgtgcatctgtgacaatgacagcggattcctgactgtggccatggctcaggatacttcagtggataaa

SEQ ID NO: 39907 - DNA, 120 bp, synthetic construct; identical to SEQ ID NO: 11437
  source 1..120: mol_type = other DNA

SEQ ID NO: 39908 - DNA, 120 bp, synthetic construct
  source 1..120: mol_type = other DNA
cctaagagagaagctgagatttagaggagccactgaggatggctgtgaaagtgatctggctaggatgtttgtcatcccattgctcacgaggtttgatgtggctgatccgcctagctggca

SEQ ID NO: 39909 - DNA, 120 bp, synthetic construct
  source 1..120: mol_type = other DNA
tctctgtttaagacttagcaaaagacaaaatgcagaaagcctgaaggtgggagctaatctttctggctgtcaccaggtcttatacaaccttgtggttgtcacgatatatgcatcagagca

SEQ ID NO: 39910 - DNA, 120 bp, synthetic construct
  source 1..120: mol_type = other DNA
tcctacacaagtgaggttggtgcatttattaattaatgtcactaagagatcagttaaagcctcagcaaacaattgccatgtgctctttcagggaaaaacaacttacaatcagatttgttc

SEQ ID NO: 39911 - DNA, 120 bp, synthetic construct
  source 1..120: mol_type = other DNA
tcctagtgtggttcagagcacagattccacctgcttttattttgctttctaattgcttattattctcccaagcacacactgtttttctttgctctattcctctatgttgctgaatatttt

SEQ ID NO: 39912 - DNA, 120 bp, synthetic construct; identical to SEQ ID NO: 11438
  source 1..120: mol_type = other DNA

SEQ ID NO: 39913 - DNA, 120 bp, synthetic construct
  source 1..120: mol_type = other DNA
aatgctatattagaggatattttggtcttttgcaaaaacagagaatgaagacagtgcaaagtgctaggcacagcactgggcattgactgttggggaataaaaggcaactggtgttcctag

SEQ ID NO: 39914 - DNA, 120 bp, synthetic construct
  source 1..120: mol_type = other DNA
gctgcatctcttttgggtggcttttgtcctctaactccagagtcatgggatagaccctactgtgagttgtttattcaaaatattgagctctgcttgtggcagatactgtcataggcatag

SEQ ID NO: 39915 - DNA, 120 bp, synthetic construct
  source 1..120: mol_type = other DNA
gcaatctccagctcccaggctcaagcaatcctcctgtctcagcctcccaagtagctgggactagaggtgtgcaccaccacacctggctaatttttgtattttttgtagagatgggttata

SEQ ID NO: 39916 - DNA, 120 bp, synthetic construct; identical to SEQ ID NO: 11439
  source 1..120: mol_type = other DNA

SEQ ID NO: 39917 - DNA, 120 bp, synthetic construct
  source 1..120: mol_type = other DNA
tatatccaaagtttaaggcaggacatatggttcactctctgtgaggtggcctctttgagaagatgacagtagcactgggacgtgagtttgagactcagtcacatgaagatatgaagcgac

SEQ ID NO: 39918 - DNA, 120 bp, synthetic construct
  source 1..120: mol_type = other DNA
ttaaatttaatattaataatttaaatttaaatagaaaaatgtggcaaatagctatcctattgaacagtgcagatgaggggaaggacgtttcaggtagggagggcagcttgtgagaaggta

SEQ ID NO: 39919 - DNA, 120 bp, synthetic construct; identical to SEQ ID NO: 11440
  source 1..120: mol_type = other DNA

SEQ ID NO: 39920 - DNA, 120 bp, synthetic construct
  source 1..120: mol_type = other DNA
taacaagaggctggaacccctaccatggctccttcaaggtgtctctttgtattccacatacaactcctccatcatcctagggggctcagacctcatcttttctggcatagcttttctatt

SEQ ID NO: 39921 - DNA, 120 bp, synthetic construct
  source 1..120: mol_type = other DNA
gaaataagagaaaaagaaaaggccccaggaatgtttccagtggttttcttacatgccatatatgcattgggatctctcaggccacggaagcctctctacctcctgggcaagaattgggct

SEQ ID NO: 39922 - DNA, 120 bp, synthetic construct
  source 1..120: mol_type = other DNA
gagatgaggttgccaatgctggctcagtgtgctgaggattagaggaggctcagctgcagagtctgtaatcctggactagcctggatttgtcattggtttaatgatgaatctactactctc

SEQ ID NO: 39923 - DNA, 120 bp, synthetic construct; identical to SEQ ID NO: 11441
  source 1..120: mol_type = other DNA

SEQ ID NO: 39924 - DNA, 120 bp, synthetic construct
  source 1..120: mol_type = other DNA
ctatcttgatgttgatgaccttggtccctctgatggacaagtttgagatcataaaatgagtacctgtgatgactgaacaatgtgctggcgtgttccatccccttttgcaaagaaccttcc

SEQ ID NO: 39925 - DNA, 120 bp, synthetic construct
  source 1..120: mol_type = other DNA
ttctccaggagaggaaatcccttctcccttcttgggaaaggggctgtgttagacactttcatctgaggggttcattggaagacactataagctacatgggtcaatattagcccagctgaa

SEQ ID NO: 39926 - DNA, 120 bp, synthetic construct
  source 1..120: mol_type = other DNA
gttcaagcaattctcctgcctcagcctctcaagtagctgggattacaggcactaaccaccacgcacggctaatttttgtatttttagtagagacgcagggtttcaacatgttggtcagac

SEQ ID NO: 39927 - DNA, 120 bp, synthetic construct
  source 1..120: mol_type = other DNA
tttaaaataggtatgtttattaaagaaaaattagttggccaggtgcagtggctcaggcctgtaatcccagcactttgggaggccaaggcaggcagatcatgaggtcaggagtttgagacc

SEQ ID NO: 39928 - DNA, 120 bp, synthetic construct; identical to SEQ ID NO: 11442
  source 1..120: mol_type = other DNA

SEQ ID NO: 39929 - DNA, 120 bp, synthetic construct
  source 1..120: mol_type = other DNA
gtacttgcatgggagaagctttagaaaacttacaaaaggaaagaagggaaaaaaattacctatgattctaccatctaaacacaatgattcctgttaacggtttggtatgttctccaatag

SEQ ID NO: 39930 - DNA, 120 bp, synthetic construct
  source 1..120: mol_type = other DNA
ttaacattaaatagtaaatgaatagtaaatatcactttttaatggcagcatagtatgtccttaagttcctgtgtacttggcacttgggcgacttaagccacaaggactcagtaacggttg

SEQ ID NO: 39931 - DNA, 120 bp, synthetic construct
  source 1..120: mol_type = other DNA
tggatctcagtctttccctgactttgtccccacacgtggggtgtataccactgccagttgcctcctccttacattattgtgttttaacaccctcttctacttccagtgagggccactata

SEQ ID NO: 39932 - DNA, 120 bp, synthetic construct; identical to SEQ ID NO: 11443
  source 1..120: mol_type = other DNA

SEQ ID NO: 39933 - DNA, 120 bp, synthetic construct
  source 1..120: mol_type = other DNA
ttgtgtactgggaggtgctttagtggaaatacaaagtctttggaatccaacaaacattgtttcaaataaccacatactaggctttgacactttaggtgaggtactcagtcatttggagct

SEQ ID NO: 39934 - DNA, 120 bp, synthetic construct
  source 1..120: mol_type = other DNA
accacatgttccccactccttccttgcctggcacagtgctggtatacagtaggtactcaatacatgcctacgacattgaactgaattttcatttgggatgttcagcttgtgcgtcttcat

SEQ ID NO: 39935 - DNA, 120 bp, synthetic construct
  source 1..120: mol_type = other DNA
atgagggttccttttatttcaataatcaagctcacattcagtgtatcatgttacggagctcacaatagcagatacacagctccggctgtaccaggtgacacgtggctcctaccagaatcc

SEQ ID NO: 39936 - DNA, 120 bp, synthetic construct; identical to SEQ ID NO: 11444
  source 1..120: mol_type = other DNA

SEQ ID NO: 39937 - DNA, 120 bp, synthetic construct
  source 1..120: mol_type = other DNA
cggagcctgggacagcctgtgggctgtgactaaattaggaagaaaaagcctttgggctctcctgggaggtcactggggcaggtggcccatggaagagcctctggtgggcagctagaaaca

SEQ ID NO: 39938 - DNA, 120 bp, synthetic construct
  source 1..120: mol_type = other DNA
cccaagccccatctcctccaaggggctaagttaaaataggagaatctagtaagcctcaatcactaagtcatttataagctcactggggagttttgaccttttaaaaggaatataccctat

SEQ ID NO: 39939 - DNA, 120 bp, synthetic construct; identical to SEQ ID NO: 11445
  source 1..120: mol_type = other DNA

SEQ ID NO: 39940 - DNA, 120 bp, synthetic construct
  source 1..120: mol_type = other DNA
ggtattgtactttctgcaagactggttgaaggcgttagcctgagagcacagtttctcaactgcaacactattgatatcttgggccaaataattatcttttgtggtggttgtcttgagcat

SEQ ID NO: 39941 - DNA, 120 bp, synthetic construct
  source 1..120: mol_type = other DNA
agccactgcttagagcaaaggagaactcacttttcctcctgaaaggtattgcagttaccactgggtaggtgaaatgatgggtcatctccgttcatctcctgttccacaaaaataaagaag

SEQ ID NO: 39942 - DNA, 120 bp, synthetic construct
  source 1..120: mol_type = other DNA
agggtatcttcaggaccaaattttcacccgtgaaaacccagagtaaaaagcaagcaagcaaacaaacaaacaaacagaccaccaccaccaccacccacagcagcaacaacaaaaaatagg

SEQ ID NO: 39943 - DNA, 120 bp, synthetic construct; identical to SEQ ID NO: 11446
  source 1..120: mol_type = other DNA

SEQ ID NO: 39944 - DNA, 120 bp, synthetic construct
  source 1..120: mol_type = other DNA
cagactcgagagagtttgagtgaaggcttgtcatgattggcatgcagaaagctggtagaatgtcattggaattttctagggaggcacatgcgcaacacccaaaatgactccaggcttcga

SEQ ID NO: 39945 - DNA, 120 bp, synthetic construct
  source 1..120: mol_type = other DNA
ttaattctccagttcaggcagcacctctaaacatgttctcggcgctgagcatttgtgcatgagtatgcgatttgtctgtgtccccaccccctccgttttaaaaaaaaattaacaaatgat

SEQ ID NO: 39946 - DNA, 120 bp, synthetic construct
  source 1..120: mol_type = other DNA
agaaaagtcgcaaggctactggaaaacagattgagttatcaccagatctgggagaatggaaggggatgcattcagaatcccaaaactttataaatgatgggcatctcttaagggtgaggt

SEQ ID NO: 39947 - DNA, 120 bp, synthetic construct; identical to SEQ ID NO: 11447
  source 1..120: mol_type = other DNA

SEQ ID NO: 39948 - DNA, 120 bp, synthetic construct
  source 1..120: mol_type = other DNA
ggacatggacatgatggtctgttagcagactcaagcacaaccaaacatgactcacctcatttctctatctgatgcaattacaagtagcttcaacacatgtggtagaggaatactagtttt

SEQ ID NO: 39949 - DNA, 120 bp, synthetic construct
  source 1..120: mol_type = other DNA
ttctgccttatatacattggaatcttttctttcttgcaattctgagatgtcagaaaactgaaggggagagggttaatatgttcacacacttgcccttcccccacatgcatatgctaacag

SEQ ID NO: 39950 - DNA, 120 bp, synthetic construct
  source 1..120: mol_type = other DNA
aaatgacttccttattttccatagtaatataataatcaattttaccacagagaactgtgtacatgtcaagccttggctgcctctaattagcaatggatggggtagctggggaaagtgctg

SEQ ID NO: 39951 - DNA, 120 bp, synthetic construct; identical to SEQ ID NO: 11448
  source 1..120: mol_type = other DNA

SEQ ID NO: 39952 - DNA, 120 bp, synthetic construct
  source 1..120: mol_type = other DNA
cagcagataaacaagtgaacaaaggtctctggttttcctaggcagaggaccctgcggccttccgcagtgtttgtgtccctgggtacttgagattagggagtggtgatgactcttaacgag

SEQ ID NO: 39953 - DNA, 120 bp, synthetic construct
  source 1..120: mol_type = other DNA
caacaggatcacaaggcagaagaatttttcttagtacagaacaaaatgaaaagtctcccatgtctacctctttctacacagacacggcaaccatccgatttctcaatcttttccccgcct

SEQ ID NO: 39954 - DNA, 120 bp, synthetic construct; identical to SEQ ID NO: 11449
  source 1..120: mol_type = other DNA

SEQ ID NO: 39955 - DNA, 120 bp, synthetic construct
  source 1..120: mol_type = other DNA
ggatggggtggctggccgggcggggggctgaccccccccacctccctcccagacggggcggctggccgggcgggggggctgacccccccacctccctcccggacggggtggctggccggg

SEQ ID NO: 39956 - DNA, 120 bp, synthetic construct
  source 1..120: mol_type = other DNA
ggcctggcgggggctgacccccacctccctcccggacggggtggctgccgggcagagacgctcctcacttcccagacggggtggctgccgggcggaggggctcctcacttctcagacggg

SEQ ID NO: 39957 - DNA, 120 bp, synthetic construct
  source 1..120: mol_type = other DNA
gcggacgggcagagacgctcctcacctcccagacggggtcacggccgggtagaggcgctcctcacatcccagacggggtggcggggcaaaggcgctccccacatctcagacgatgggcgg

SEQ ID NO: 39958 - DNA, 120 bp, synthetic construct; identical to SEQ ID NO: 11450
  source 1..120: mol_type = other DNA

SEQ ID NO: 39959 - DNA, 120 bp, synthetic construct
  source 1..120: mol_type = other DNA
ggcgcgcgcctgcaatcgcaggcactcggcaggctgaggcaggagaatcaggcagggaggttgcagtgagccgagatggcagcagtacagtccagcttcagctcggcatcagaggtagac

SEQ ID NO: 39960 - DNA, 120 bp, synthetic construct
  source 1..120: mol_type = other DNA
ttctctgccttgggcgacatctgtgttgtgttggctgtagtcagaaagatatgtgtcttaaggcaccagaaacttccacccattttgggaaagggatatttttctcaataaatagttata

SEQ ID NO: 39961 - DNA, 120 bp, synthetic construct; identical to SEQ ID NO: 11451
  source 1..120: mol_type = other DNA

SEQ ID NO: 39962 - DNA, 120 bp, synthetic construct
  source 1..120: mol_type = other DNA
ctgggggaaatcttgttgcaaaaaatatttatcgatttgcatgaaaaggtgccaatagagctaagaaatatttttagctgtattgtgtttgaccctttgtggacttgtgaccctttgtgg

SEQ ID NO: 39963 - DNA, 120 bp, synthetic construct
  source 1..120: mol_type = other DNA
tttatagattggtaattcttagactttgctgcacaattgttctcctggggagctattaatattacaaattccagtgcctgggttgagtcaatctctggaggtgggactcaagccccagtt

SEQ ID NO: 39964 - DNA, 120 bp, synthetic construct; identical to SEQ ID NO: 11452
  source 1..120: mol_type = other DNA

SEQ ID NO: 39965 - DNA, 120 bp, synthetic construct
  source 1..120: mol_type = other DNA
tctgaaaatcttgattatgtctcttaagggaaggtagttttataattaattacatgtgtcccttgaaattatttttacattgtctgaaacccccatggaagaggaagcccattcttggtg

SEQ ID NO: 39966 - DNA, 120 bp, synthetic construct
  source 1..120: mol_type = other DNA
tgttggtatcatagctcactgtaacctcaaaacccagggctcaagtgatcgtcccacctgagcctcccaagtagctgagattacagttgtgcgccaccatgcctggccaatctaaaaaat

SEQ ID NO: 39967 - DNA, 120 bp, synthetic construct
  source 1..120: mol_type = other DNA
agccacctcactatacattcttagggttggaaagtattttcaaaatactctagtacagcggttctcaaggtgcagcatcagcctcacctggacttgttagaaatgtacatgttcacgctc

SEQ ID NO: 39968 - DNA, 120 bp, synthetic construct
  source 1..120: mol_type = other DNA
tgctgttatttcaccttgtcagaaactgaggtaccccagtcctcagatctgtctctgcaccatggccagatcatcctaacttttctgtgtcatgaataactgccttaagaaaacacccac

SEQ ID NO: 39969 - DNA, 120 bp, synthetic construct; identical to SEQ ID NO: 11453
  source 1..120: mol_type = other DNA

SEQ ID NO: 39970 - DNA, 120 bp, synthetic construct
  source 1..120: mol_type = other DNA
aatagaaaaaaatatcggtgatgtaaactgctgaaaagaaaattcacagaacatggggaccagtcctggaacataggtttcatcccaacatcgtgtagattaggcacttaacagcgcctc

SEQ ID NO: 39971 - DNA, 120 bp, synthetic construct
  source 1..120: mol_type = other DNA
attttgtccgtgttcaaagactgaatctaatccacattctctgtagagcttcatctttcaaagcattgtagcaatacacagggaacattaagccaagaaaacgaagggagaacacacagc

SEQ ID NO: 39972 - DNA, 120 bp, synthetic construct
  source 1..120: mol_type = other DNA
gtgtgatctcagcgattctcctgcctcagcctcccgagtaggtgggactacaggcgcgcaccactatgcctggctaatttttgtattttttttagtagagaccaggtttcgccatgttgg

SEQ ID NO: 39973 - DNA, 120 bp, synthetic construct; identical to SEQ ID NO: 11454
  source 1..120: mol_type = other DNA

SEQ ID NO: 39974 - DNA, 120 bp, synthetic construct
  source 1..120: mol_type = other DNA
gggaaagtcagacaagtgcttcagtagacaattatgagagcaggtggtggagttagaagagagtacagttgaggctgatggagcagaagggcattctgaagatcatgaaagggacatcag

SEQ ID NO: 39975 - DNA, 120 bp, synthetic construct
  source 1..120: mol_type = other DNA
gaggggccagtatatgccaaggcatcaatgcttgtgtgtacattttctatcactgggccaggattgatctataaatccctatgtatttctttgtgtgtataaacattagcaatttggttt

SEQ ID NO: 39976 - DNA, 120 bp, synthetic construct
  source 1..120: mol_type = other DNA
atcttatgttaccgagaaaatggaaagatttcccctaaccccagaagtcaaaccagcttcctcaatttgagactgcacaaaaccaattaatttttgcccattgtggattttcttaataat

SEQ ID NO: 39977 - DNA, 120 bp, synthetic construct; identical to SEQ ID NO: 11455
  source 1..120: mol_type = other DNA

SEQ ID NO: 39978 - DNA, 120 bp, synthetic construct
  source 1..120: mol_type = other DNA
tctaggtttaaacatatttagatatgcacaaatactcaccattgtgttccagttgcctccagcattcagtacaggaacatgctgtgcaagtttgtagcctaggagcaatagggtatatca

SEQ ID NO: 39979 - DNA, 120 bp, synthetic construct
  source 1..120: mol_type = other DNA
tctttaaaagcactcccaggagtggccaggtgcagaaatagctgaatttgtgagcaatgataatgatagttaatataattatcatattttccagagcacctgcacatcacgtttgatctt

SEQ ID NO: 39980 - DNA, 120 bp, synthetic construct
  source 1..120: mol_type = other DNA
tacaaaaaaaagaactccctgagatccagggaaactaactgacctaggatcccacagggagtgaataagggctgttgggccaggcccaggtcttctgatttctagcttcctgattttgca

SEQ ID NO: 39981 - DNA, 120 bp, synthetic construct; identical to SEQ ID NO: 11456
  source 1..120: mol_type = other DNA

SEQ ID NO: 39982 - DNA, 120 bp, synthetic construct
  source 1..120: mol_type = other DNA
agcatttattcattttggataatgggcactgaattcataagtgtttgttttcctcttcatatttctgtattttaaaattttcaaaaaaaaccaaatatggatattaaaaataaattctca

SEQ ID NO: 39983 - DNA, 120 bp, synthetic construct
  source 1..120: mol_type = other DNA
ctctgctttaagtctttcctgtgatgacactagcagaatgtgtatcattttctctgcatttgctgcaggatcagttctctttggcaggttttgagccgttctaataagtccagcatgaaa

SEQ ID NO: 39984 - DNA, 120 bp, synthetic construct
  source 1..120: mol_type = other DNA
ccggggatctgataccaaacatgttagttaaactcatgtttaactaacccaaactcatgtttaactggcccaaaggaagtaggcccagaaatgtggtttttggagctccctttaatgaac

SEQ ID NO: 39985 - DNA, 120 bp, synthetic construct; identical to SEQ ID NO: 11457
  source 1..120: mol_type = other DNA

SEQ ID NO: 39986 - DNA, 120 bp, synthetic construct
  source 1..120: mol_type = other DNA
ccaagaggtgtcatggtgatatgaatcatcatatggtaatgtcatggctaaggcccaaacacagaatagcagcattgacccagtagtctcgaaattagtcacagaggccaagctagtgaa

SEQ ID NO: 39987 - DNA, 120 bp, synthetic construct
  source 1..120: mol_type = other DNA
ctacctccatcagccctgaggacagaggcagcctgcattccagtcccagctcttctctgtctcggtgtgtgacttaggcggtttcacagaggacgccaacttcattggcttttgcggttt

SEQ ID NO: 39988 - DNA, 120 bp, synthetic construct; identical to SEQ ID NO: 11458
  source 1..120: mol_type = other DNA

SEQ ID NO: 39989 - DNA, 120 bp, synthetic construct
  source 1..120: mol_type = other DNA
tgtagttcttgttagttaagttgacattaatcctctctttgctttaagtctctcctgtgttgacactagcagaatgtgtcataaagacatggaaagatcataaattctcaactctgctct

SEQ ID NO: 39990 - DNA, 120 bp, synthetic construct
  source 1..120: mol_type = other DNA
gtcatcagccctctcacctcgattactttctatattttagcacaaaagaagaaatggcgcattcaccactcagccagttgcactggaagtgaatttaaattcctgaactggttatcttgg

SEQ ID NO: 39991 - DNA, 120 bp, synthetic construct
  source 1..120: mol_type = other DNA
atacatctacgcacattcactctactgcacttcagctgtgtccttgttattccacagccctttaagtcctggttcaccaaccagatgttaagactctcttggatccctcaaatcccatcc

SEQ ID NO: 39992 - DNA, 120 bp, synthetic construct
  source 1..120: mol_type = other DNA
ctcctgcagaggaaactggagggtgaccaggaaccttcaagtcaatgtgggccacagacaggaaccgtctttaaaagatggttaaatgcccgtggtttacgtaggttggctttctttaag

SEQ ID NO: 39993 - DNA, 120 bp, synthetic construct; identical to SEQ ID NO: 4178
  source 1..120: mol_type = other DNA

SEQ ID NO: 39994 - DNA, 120 bp, synthetic construct
  source 1..120: mol_type = other DNA
ccctatttgtgcagaattggcccctgactacattcccagagggtctttggatgtttggtcagatggtctgtactctggggggatcaattcataccagcaaggtccagtcagcccctacac

SEQ ID NO: 39995 - DNA, 120 bp, synthetic construct
  source 1..120: mol_type = other DNA
caaattgccacaaatttaatggcttataataacatacatgtattatcttacagttctggaggccataagtccaaaaccagcctcactggactacggtcaaggtgttagttccttctggag

SEQ ID NO: 39996 - DNA, 120 bp, synthetic construct
  source 1..120: mol_type = other DNA
ctgacttctgtttccatccttatatcttctcgctgactctgatcctcctgcttccgtcttagaaggactcttgtgattacattgggcataccaaattaaattcagaaattcagataatca

SEQ ID NO: 39997 - DNA, 120 bp, synthetic construct; identical to SEQ ID NO: 11460
  source 1..120: mol_type = other DNA

SEQ ID NO: 39998 - DNA, 120 bp, synthetic construct
  source 1..120: mol_type = other DNA
agccataccccttatcttccttcttcattttgttcacggcaattactttgtgcccataaagtgggaggcagtgtgctgaggaaatacaagattctccaagacacactcctttctcttgtg

SEQ ID NO: 39999 - DNA, 120 bp, synthetic construct
  source 1..120: mol_type = other DNA
gttccagcttccaggggtgtcagatcatgcaccccaatttttggttcagaaatatgatcactactatatgcacctcaatttcaggttattaactattgcaggctaagaattttagggctt

SEQ ID NO: 40000 - DNA, 120 bp, synthetic construct
  source 1..120: mol_type = other DNA
tgaaaatttcctagtcaaagcaaaaattaagaagaaaacctggttagttttcttattttttgaggaatctgaatgggttaacgtctgtaacctgggccatactctgaaaaggacaggttt

SEQ ID NO: 40001 - DNA, 120 bp, synthetic construct; identical to SEQ ID NO: 11461
  source 1..120: mol_type = other DNA

SEQ ID NO: 40002 - DNA, 120 bp, synthetic construct
  source 1..120: mol_type = other DNA
acttaatactacacaagtcaaaatctatcatcagactcttgaccatccattctcctcttccttccgtattcttgcctacatagacattggtcgctccccattctgctgctgttgaatttg

SEQ ID NO: 40003 - DNA, 120 bp, synthetic construct
  source 1..120: mol_type = other DNA
ccagcctgttctgcccttggagcatagcagggctgctggctggggaaggtggtgtctttttaacaacttataggcaatttttgatttttcatgcaaatgggaaagaataacaaaggcatt

SEQ ID NO: 40004 - DNA, 120 bp, synthetic construct
  source 1..120: mol_type = other DNA
acagtgtggcaacccatgtcacttgctatgtctcccttttcctcctcagctgagctagctcccagcctctctcgtttttgttccattatcattggatttttactgtacagaacctgtgac

SEQ ID NO: 40005 - DNA, 120 bp, synthetic construct; identical to SEQ ID NO: 11462
  source 1..120: mol_type = other DNA

SEQ ID NO: 40006 - DNA, 120 bp, synthetic construct
  source 1..120: mol_type = other DNA
gaaaccactataaccaaccaatataggtcacatgaaagacacatgtcagacggacaccctttctgcagtaagattcggtgagagtctgctattgtcccctacctcaaattcagatttttt

SEQ ID NO: 40007 - DNA, 120 bp, synthetic construct
  source 1..120: mol_type = other DNA
ggtcttcctcaggtttcctagcataaaactccaaaagtctttggaatcggataaatatctttttgtatgctaataagctgacaaatgtctggcagccccttaggtatctttaggatgggg

SEQ ID NO: 40008 - DNA, 120 bp, synthetic construct
  source 1..120: mol_type = other DNA
tcaaacatgcctgtgcaatgaaacctccgtaaaaacccagaaaggactgggacatgtggaggttcctggagaggggggtgcccgagaggatgtgggagctctgtaccccttcccaaacac

SEQ ID NO: 40009 - DNA, 120 bp, synthetic construct; identical to SEQ ID NO: 11463
  source 1..120: mol_type = other DNA

SEQ ID NO: 40010 - DNA, 120 bp, synthetic construct
  source 1..120: mol_type = other DNA
tcgtgttgtgagagtataggagacgctgaatttgtttgtgcctatattcagacaggaagacaattcatgttacttttggatgtgaaatgaggacaaggatgaaaatgtgtttggcacaaa

SEQ ID NO: 40011 - DNA, 120 bp, synthetic construct
  source 1..120: mol_type = other DNA
tttggcaaattcaagataatgtttaccattggcaatcacggggaagggtgaggtggggggagcacgtaaccaagggagatttatcgtattggaatgctctctgtcttaagcttggtgctg

SEQ ID NO: 40012 - DNA, 120 bp, synthetic construct
  source 1..120: mol_type = other DNA
tattatgttggtgtatcataatttcctcagttcaaatcccatctcgctattgttggatatttgtaattttcaactttggactcttaaatagtatagtattaagcatctttgggtatcaaa

SEQ ID NO: 40013 - DNA, 120 bp, synthetic construct; identical to SEQ ID NO: 11464
  source 1..120: mol_type = other DNA

SEQ ID NO: 40014 - DNA, 120 bp, synthetic construct
  source 1..120: mol_type = other DNA
tggagtttttttttttttttttaatgtgtatgtgtgagcacaggtttttgcagattcacttgtatgtgggaccagtgtgggaaggtcttgtttatgtgggaggggggaccacagataaca

SEQ ID NO: 40015 - DNA, 120 bp, synthetic construct
  source 1..120: mol_type = other DNA
cttccttcacctgccagtctccagctggctcaactgcaggcccagctcaccctccaccggctgaagctggcacagacagctgtcaccaacaacactgcagccgccacagtcctgaaccaa

SEQ ID NO: 40016 - DNA, 120 bp, synthetic construct
  source 1..120: mol_type = other DNA
cggtttccctctaatgcaattgccttttcaccccccagccagacacgaggccccggaccctccatgaaccttcccaaccagccacccagtgccatggtgatgcatcctttcactggggta

SEQ ID NO: 40017 - DNA, 120 bp, synthetic construct; identical to SEQ ID NO: 11465
  source 1..120: mol_type = other DNA

SEQ ID NO: 40018 - DNA, 120 bp, synthetic construct
  source 1..120: mol_type = other DNA
catggattctcgggccaaagcaagcctgatctcacagcaggtcccatgtggcctccaccccacaaccagccctatgagctgtacgaccccgaggaaccaacctcagacaggacacctcct

SEQ ID NO: 40019 - DNA, 120 bp, synthetic construct
  source 1..120: mol_type = other DNA
atctgtgcggcccctgcaggctcatgagctgaacgactttcacggtgtggcccccctccacttgccgcatatctgtagcatctgtgacaagaaggtgtttgatttgaaggtgagttgtcc

SEQ ID NO: 40020 - DNA, 120 bp, synthetic construct; identical to SEQ ID NO: 11466
  source 1..120: mol_type = other DNA

SEQ ID NO: 40021 - DNA, 120 bp, synthetic construct
  source 1..120: mol_type = other DNA
catattgtagtgagttagaaaagaaaaaaagcagaattttggatcaggggaaacagattaattcccccttgggacctagacaaattattatagagagcctcagcttccccatcagcaaaa

SEQ ID NO: 40022 - DNA, 120 bp, synthetic construct
  source 1..120: mol_type = other DNA
atgtccccccaaaaaatgtattgcagatgcagtgaaatattttgaagcaataacaattataacaaataccatatattaaaccctttctgtgtgccagcagtaactcttatgaggtagata

SEQ ID NO: 40023 - DNA, 120 bp, synthetic construct
  source 1..120: mol_type = other DNA
tggccctgaccctttcagagcctgcaccatttaaacactgggctgtcctgcctcccatctctcatcctgtccaaaagcataataatgtccttgcagagtgtgagtcacactgcagcatgt

SEQ ID NO: 40024 - DNA, 120 bp, synthetic construct; identical to SEQ ID NO: 11467
  source 1..120: mol_type = other DNA

SEQ ID NO: 40025 - DNA, 120 bp, synthetic construct
  source 1..120: mol_type = other DNA
ctggatggggaggcaggaacagtgggaggagcctgggagggagagaggaagggtggagggatgtgtctgcaggggtggtccagcctctgggcgctctgtgctccctgcctgaccagtgtc

SEQ ID NO: 40026 - DNA, 120 bp, synthetic construct
  source 1..120: mol_type = other DNA
cttctctgaaaagtaagtgctgttcaggaggacaggctcatgcgtaggctcaacacatattcactgagcatttactgtgtgtcacacgctgttttgagtcctggggcaatagcagagacc

SEQ ID NO: 40027 - DNA, 120 bp, synthetic construct
  source 1..120: mol_type = other DNA
aggcagaggccggaagtgcgtgtgtgcgtgggcgtgtgcctcccttttctggctttcatttttttcattgtagtcaagttcacatagggcttactattttaaatactttgaaaatacttt

SEQ ID NO: 40028 - DNA, 120 bp, synthetic construct
  source 1..120: mol_type = other DNA
ccctattccccctaagccagcccctggcaaccaccaatctgccttctgtctctacggatttgcctgttctgtacttttctgtaaatggaatcatatgatatgtggcctttggtgactggc

SEQ ID NO: 40029 - DNA, 120 bp, synthetic construct; identical to SEQ ID NO: 11468
  source 1..120: mol_type = other DNA

SEQ ID NO: 40030 - DNA, 120 bp, synthetic construct
  source 1..120: mol_type = other DNA
gaacattgtgtgcttctcccaacagcacagctgtttataaccctgctgggaatgaaggtgagcaaggccctacaggtcagcagcttgaagcagaagtgggctacccacaggcacattatg

SEQ ID NO: 40031 - DNA, 120 bp, synthetic construct
  source 1..120: mol_type = other DNA
gatacttgagacgtaaagctttgctgattatcagcatgtccagaggtacaatcatgccaatcactaataatatgtgaaggggaaaggttcagttttctatgcctgcttatgtcctaataa

SEQ ID NO: 40032 - DNA, 120 bp, synthetic construct; identical to SEQ ID NO: 11469
  source 1..120: mol_type = other DNA

SEQ ID NO: 40033 - DNA, 120 bp, synthetic construct
  source 1..120: mol_type = other DNA
taactcctggtcccaagtgatcttcctgcctcggtcaaccaaagtgctggaattacaggtggccaaagtgctaggattacaggtgtgagccaccatgccctgcctcaaatacctctctgt

SEQ ID NO: 40034 - DNA, 120 bp, synthetic construct
  source 1..120: mol_type = other DNA
ctgggaggatgttaacactttttttagtggagagttggctggcttttgaggtctagacccatttatacctggtacccttcaattttccactctgggaattacacttctctagtttccaag

SEQ ID NO: 40035 - DNA, 120 bp, synthetic construct
  source 1..120: mol_type = other DNA
tgaggcaagagaatcacttgaacccgggaggcaaaggttgcagtgagccgagatcgcaccactgcactccagcgcaggtgacagaccgggactctgtctcaaaacaaacaaacaaaaaaa

SEQ ID NO: 40036 - DNA, 120 bp, synthetic construct
  source 1..120: mol_type = other DNA
gagctgtttaatccagttcatctagtattgaaacacatgacttaagaagcagacataaatccttaaaattcaaggcattcctggactttctagcattcagcgctggcttagaaaaaaaaa

SEQ ID NO: 40037 - DNA, 120 bp, synthetic construct; identical to SEQ ID NO: 11470
  source 1..120: mol_type = other DNA

SEQ ID NO: 40038 - DNA, 120 bp, synthetic construct
  source 1..120: mol_type = other DNA
aggaaaactgactgtaaaacaaatgcatttgtctgaaccctgctggagggcacctgtttgtgtgccttagcctgtgcctgtgcttttgtggtgtgagttgctgcagcctctttctctctt

SEQ ID NO: 40039 - DNA, 120 bp, synthetic construct
  source 1..120: mol_type = other DNA
tgagtaagcggaaaagcgaggtggttcatgatgagacgtgaggcctgcctgagcccaggcttctgtttatttgtgtgtgttgatctgtgatgttgaataggagaagcgcttcgagagagc

SEQ ID NO: 40040 - DNA, 120 bp, synthetic construct; identical to SEQ ID NO: 11471
  source 1..120: mol_type = other DNA

SEQ ID NO: 40041 - DNA, 120 bp, synthetic construct
  source 1..120: mol_type = other DNA
agatggcattaactgagcccctccataaaggggggtggatggggagaggagagacacaggcaggacattctgcagtctgtcccaggcctcttccccaccctccagcgctgcccattgagc

SEQ ID NO: 40042 - DNA, 120 bp, synthetic construct
  source 1..120: mol_type = other DNA
tgggaacaataatgcctttggaagataaagtaaacaactggatttccatccagcttgtgtaatttattgttttgattattcctcgaatctcagaacatcccatgcagctctgcagcccag

SEQ ID NO: 40043 - DNA, 120 bp, synthetic construct
  source 1..120: mol_type = other DNA
cagatgagataatatcagggacaatgatttgggaaccgtcaagtacatatgaagtaaccatggctgttcttgagtaacgagcgcttttaacccattttggctgtgaagagtcggggggaa

SEQ ID NO: 40044 - DNA, 120 bp, synthetic construct
  source 1..120: mol_type = other DNA
tagagatgttttgaggttcccatggatgtacttttaaattacgtaccagtgggcaagcacaagctatctgatgatttgtgtgttgattctaattaattcctcgaagctctgagtgccact

SEQ ID NO: 40045 - DNA, 120 bp, synthetic construct; identical to SEQ ID NO: 11472
  source 1..120: mol_type = other DNA

SEQ ID NO: 40046 - DNA, 120 bp, synthetic construct
  source 1..120: mol_type = other DNA
aggccacatagctggtaaatggaggtggtgggatttgaacctaggcagcctagctctggaagcctcatttgtaaccactaagccctgcagcctctctgcgaggatctgaggggtctcttc

SEQ ID NO: 40047 - DNA, 120 bp, synthetic construct
  source 1..120: mol_type = other DNA
cacattcttctgcaccctgacagcatctgccaagatgaactcagatgtttggaggccttttctacagacccagtggaaggggagagtcagcatttgtctggttttatcattataacctct

SEQ ID NO: 40048 - DNA, 120 bp, synthetic construct
  source 1..120: mol_type = other DNA
cgctggtcccccggtttgccattgccagcatatggaattgaatgcaggtgtatctgtcttgaggaaaacctgaaatgcgagaacattgacatttgaagacaagctgagaaatggagaaat

SEQ ID NO: 40049 - DNA, 120 bp, synthetic construct; identical to SEQ ID NO: 11473
  source 1..120: mol_type = other DNA

SEQ ID NO: 40050 - DNA, 120 bp, synthetic construct
  source 1..120: mol_type = other DNA
attttcctccacaagtgaggtctggtcctgcgccagcactttgtatgtctgattccatttacatgcatcttttcagaaacacttttttttgagtaaaaccaggaacagccaggatcctgc

SEQ ID NO: 40051 - DNA, 120 bp, synthetic construct
  source 1..120: mol_type = other DNA
cagttactgcctctaaagctccctgtttttaagcaagagaagaccaaagtgacacggagctctggaaatgagccttcagattatatccgaactgccacaaaatctaaaaggaccgcaaag

SEQ ID NO: 40052 - DNA, 120 bp, synthetic construct; identical to SEQ ID NO: 11474
  source 1..120: mol_type = other DNA

SEQ ID NO: 40053 - DNA, 120 bp, synthetic construct
  source 1..120: mol_type = other DNA
caggctcgcgtgtttatatttgacagagacgggacactgcactgacagttgtatgctgtgtttgctgttggtagggtgatttgtgtctgtcctcagcccctcccatcccactctagggtc

SEQ ID NO: 40054 - DNA, 120 bp, synthetic construct
  source 1..120: mol_type = other DNA
ttctcagcctgttagtagtttttgtgtacctgcccgaggtgcactttctctgtgtctgtccctgtaaagccaccttgcagttttcacaaccatcttggagtttatttagtgccagtgtca

SEQ ID NO: 40055 - DNA, 120 bp, synthetic construct
  source 1..120: mol_type = other DNA
ttgtataaataaggaaatggaggctcaggaaaatagaaatgtctgtggaaggccagaggtgtaagtcacaggctgcaactctgattactggctgtttctggaacaccatctgtctgccct

SEQ ID NO: 40056 - DNA, 120 bp, synthetic construct; identical to SEQ ID NO: 11475
  source 1..120: mol_type = other DNA

SEQ ID NO: 40057 - DNA, 120 bp, synthetic construct
  source 1..120: mol_type = other DNA
tagctagtgtatgtgtacatgtttcattagtaaaagtaattttttgggcacaaaccagataacgtcatacaatctgttacacaatttgtttttttcacttaacataagctttcaatatat

SEQ ID NO: 40058 - DNA, 120 bp, synthetic construct
  source 1..120: mol_type = other DNA
cagtgacacctgagttttaatcacaaatctgccactgtttaattggccacagattaagatccttaacttctctgaggcttcagtgtcctcatatacagcgtggaccagatgacctcccaa

SEQ ID NO: 40059 - DNA, 120 bp, synthetic construct
  source 1..120: mol_type = other DNA
gagctaatatgctctataaaatatttgaaagcatcaataaaggcaactgtgtctaccctccaagttaagccaagatccatagctacggaatttgcaaccatttgctatctgcatgatagg

SEQ ID NO: 40060 - DNA, 120 bp, synthetic construct
  source 1..120: mol_type = other DNA
ctgtgccagataacattagatcacatctgagacagatcaggctggagcacagaaatcgtttactgaagatggaatctacactttgcagctctaggaggcagtttgagagacctctctcac

SEQ ID NO: 40061 - DNA, 120 bp, synthetic construct; identical to SEQ ID NO: 11476
  source 1..120: mol_type = other DNA

SEQ ID NO: 40062 - DNA, 120 bp, synthetic construct
  source 1..120: mol_type = other DNA
aagcctccctgaggctgaaaaaggatgattgtccctttagcttggtaattcaggctttagtcacacccctgcaacttagctctcttagagatgtgacctctgctggaaagttttcagtgc

SEQ ID NO: 40063 - DNA, 120 bp, synthetic construct
  source 1..120: mol_type = other DNA
aaacttacagaaaagttaccaaaaaggtataaggaactcccatataacttttgtccagattaatttcactactcctttatattttgccccatttgctttgtcattttctctatcttcctc

SEQ ID NO: 40064 - DNA, 120 bp, synthetic construct
  source 1..120: mol_type = other DNA
attgtacctcttcacttctttttcagcatgaatttcctaagaatacagactttctcttacataatcacaacaatattttttcccaatgcagaatcattgtaacacatcctttaactgttg

SEQ ID NO: 40065 - DNA, 120 bp, synthetic construct; identical to SEQ ID NO: 11477
  source 1..120: mol_type = other DNA

SEQ ID NO: 40066 - DNA, 120 bp, synthetic construct
  source 1..120: mol_type = other DNA
agcagaattattcatggagctgcaggattcataaacaaggtgctcactgcttggagcttatctttagtcctataaagatgagactaccaccaacacagacaaacatgtctgaaagatgaa

SEQ ID NO: 40067 - DNA, 120 bp, synthetic construct
  source 1..120: mol_type = other DNA
tggagaaagctatcattatcctggttcttggggtttagcttgtcaaggcatctgggaggagtggaattttagaacttagagccacataagcatatatattttttacatccggaaaggact

SEQ ID NO: 40068 - DNA, 120 bp, synthetic construct
  source 1..120: mol_type = other DNA
ctctgtcttctaggaggatgctctttccactggaaagtcccaagctttttatagctcaagtcgcctttcattatttacttccaccccaagcagccactgtcccgcatcttcatatttgga

SEQ ID NO: 40069 - DNA, 120 bp, synthetic construct; identical to SEQ ID NO: 11478
  source 1..120: mol_type = other DNA

SEQ ID NO: 40070 - DNA, 120 bp, synthetic construct
  source 1..120: mol_type = other DNA
ctgagactcagctatttgttagaaaagtacactacttcaggctttcacctaggtgatgtgctaagttaaaatgcagttccttacataagaactcaaagtatggaggcatcctcaggccaa

SEQ ID NO: 40071 - DNA, 120 bp, synthetic construct
  source 1..120: mol_type = other DNA
caaagtacgatctcaactcgcatttttcaatgtaaagaataatgtttagccccctgcttcctgtggtattattacctttgaagacctttaagggcttataagagagcccgggttgggaat

SEQ ID NO: 40072 - DNA, 120 bp, synthetic construct; identical to SEQ ID NO: 11479
  source 1..120: mol_type = other DNA

SEQ ID NO: 40073 - DNA, 120 bp, synthetic construct
  source 1..120: mol_type = other DNA
ggcaaaagaatagaacacataaaaattaatttatctttctaactggataggatttaccacatgccctgaagccagacaccacacaaaagcaaactattaacctagagattctcaagattt

SEQ ID NO: 40074 - DNA, 120 bp, synthetic construct
  source 1..120: mol_type = other DNA
cttggccttcagcctgagggatcaatatcttggcactcctataaccatttgcagttgatgtagctcataattggaaagctccaaattactattatctggaagaatactaaaaatctcatt

SEQ ID NO: 40075 - DNA, 120 bp, synthetic construct
  source 1..120: mol_type = other DNA
cagaagatgtctttttaaaatttgactggaaattttaattgagacccattcacttagtgcctttggtaacgacatcttcagcatgaatgcttctcttctttggtgactggcagctgcgag

SEQ ID NO: 40076 - DNA, 120 bp, synthetic construct
  source 1..120: mol_type = other DNA
actaggcaactggataggccaggagcaggataggcctggaactgccttgggtgtctgctccattgtccaagcacacattagcacaggccaaccacagcaaagtcacatggggcagaaacg

SEQ ID NO: 40077 - DNA, 120 bp, synthetic construct; identical to SEQ ID NO: 11480
  source 1..120: mol_type = other DNA

SEQ ID NO: 40078 - DNA, 120 bp, synthetic construct
  source 1..120: mol_type = other DNA
ttcaacaattcagggctgaaccataaaaggaaattcttattgactgtaattgttttcagctcaaatgagacaaatgagggcttttcatggtagaattacccaagtattagcccttgttag

SEQ ID NO: 40079 - DNA, 120 bp, synthetic construct
  source 1..120: mol_type = other DNA
gctattagaatgtgtttcaggttcggaaaattatatccttctcttccacattgggttggcttatggttactaattcttgaccctcccagagattccaggctgattaaggtttgcacaaaa

SEQ ID NO: 40080 - DNA, 120 bp, synthetic construct
  source 1..120: mol_type = other DNA
cccaaggtttgaccagaatagctcctcttttatttgttgaatacattgggataaaccagttttgtttgaagaaaggactccaagctaaaaatatttcgaaaaccactgccctaaaccaca

SEQ ID NO: 40081 - DNA, 120 bp, synthetic construct; identical to SEQ ID NO: 11481
  source 1..120: mol_type = other DNA

SEQ ID NO: 40082 - DNA, 120 bp, synthetic construct
  source 1..120: mol_type = other DNA
taatccttgtatacccatcacccaattccaataattatcaaaattttacaacacttgcttcatctgtcttttttcatatatttttgttttccaaaaatggcattatagtacacataccac

SEQ ID NO: 40083 - DNA, 120 bp, synthetic construct
  source 1..120: mol_type = other DNA
tatacaaaaaataaaaattaaaaaatcagctgggtgtgatggctcaagccatcaatagtcccagctattcgggaggctgagtcgggaggatggcttgagcccaggagttcaaggctgcag

SEQ ID NO: 40084 - DNA, 120 bp, synthetic construct
  source 1..120: mol_type = other DNA
aattttatgattgagccatcctttactcaaacatttccctattgttggacattcaggctgttcccccaattttttgccacctaataaattactgtaataaatgttcttgcacatgagcca

SEQ ID NO: 40085 - DNA, 120 bp, synthetic construct; identical to SEQ ID NO: 11482
  source 1..120: mol_type = other DNA

SEQ ID NO: 40086 - DNA, 120 bp, synthetic construct
  source 1..120: mol_type = other DNA
ttctgcattaattttgtaaattatagttttacaatcattgtttaggggaaagatagccattaagaacgtctggaagagaggggaaaagggaaccgtcttctgaataccactaatgatctt

SEQ ID NO: 40087 - DNA, 120 bp, synthetic construct
  source 1..120: mol_type = other DNA
actaattacatcctcatgaagtcgactaatcaggtaggtctgggtactttcactccagtgtatatgccacagaccacacattagtgaaagggaacgatataatttttgaaagaagccatt

SEQ ID NO: 40088 - DNA, 120 bp, synthetic construct; identical to SEQ ID NO: 4200
  source 1..120: mol_type = other DNA

SEQ ID NO: 40089 - DNA, 120 bp, synthetic construct
  source 1..120: mol_type = other DNA
tggatggatgcttactaagtctaaggaactaagaatccttaacctgtaggagttgactgagccctttgggatggagtacctttgtcttcatttctaaagtcaggtggggagtttatactc

SEQ ID NO: 40090 - DNA, 120 bp, synthetic construct
  source 1..120: mol_type = other DNA
cacatcaggtcattaagctatctctctccatcaacctggagtgagactactcacttgtctctgttcctacttctcagaaattctattttgggtaaatgcacagaattcagcttgtaacat

SEQ ID NO: 40091 - DNA, 120 bp, synthetic construct; identical to SEQ ID NO: 11484
  source 1..120: mol_type = other DNA

SEQ ID NO: 40092 - DNA, 120 bp, synthetic construct
  source 1..120: mol_type = other DNA
gtacaaaccaaacaaatccaaaaaacaatagcagcaacaaattcaccacaccaactactggggtaaactgatgcacagtcaaaacggtctctttggaactctcagtagacacaggtttag

SEQ ID NO: 40093 - DNA, 120 bp, synthetic construct
  source 1..120: mol_type = other DNA
agcctaggggtttgtgagttcctgaatttttttataaggaaagtagaactcaaataaccaaagcttgtgtctcttgctgtcaccatcaccaccagagagcaagttttatagggatcagct

SEQ ID NO: 40094 - DNA, 120 bp, synthetic construct
  source 1..120: mol_type = other DNA
ggtaaccctggggatcaggaaagggccatcttataatgagctcttttggtgatgtttataaaaaggtctctttgaacagatgggatcaaagagatctcttccttgtgctgactttttttc

SEQ ID NO: 40095 - DNA, 120 bp, synthetic construct
  source 1..120: mol_type = other DNA
tagagcatttccagaatgtcaggtttccttatgcttcttctccatcagttccccatccccacctgagagagaagctcaatgctaactcctgtcaccgttgattagttttgcctgttcttg

SEQ ID NO: 40096 - DNA, 120 bp, synthetic construct; identical to SEQ ID NO: 11485
  source 1..120: mol_type = other DNA

SEQ ID NO: 40097 - DNA, 120 bp, synthetic construct
  source 1..120: mol_type = other DNA
ctcgaggcaaaccattgcagcatggcaagaaaagtgctcttgaggtaaatacaaagtgcaaagagacgcctgagactacctgggagccaaggaaagttttccagaagaagatgttcacag

SEQ ID NO: 40098 - DNA, 120 bp, synthetic construct
  source 1..120: mol_type = other DNA
ccttgatctcttgttctcttctctctccttcatatttacgtcttaagcctcatagaagtccttctaagcagcccttggctgaattggccactgtcagaactcagggatgcattcaaatag

SEQ ID NO: 40099 - DNA, 120 bp, synthetic construct; identical to SEQ ID NO: 11486
  source 1..120: mol_type = other DNA

SEQ ID NO: 40100 - DNA, 120 bp, synthetic construct
  source 1..120: mol_type = other DNA
tataaatggaattatgctgtgttcttacagatcttgcttctttcattcaacatgatgccatccatgttgttgggcatgtctatttattttcattgttatatacatttccattgtatggct

SEQ ID NO: 40101 - DNA, 120 bp, synthetic construct
  source 1..120: mol_type = other DNA
catcctggtatatatgcacttgagcatataactagaggtacatacataactaagattgagatagctgcatcataaggcatgcttacctcaactttcctagatgatagcaagctctttcca

SEQ ID NO: 40102 - DNA, 120 bp, synthetic construct
  source 1..120: mol_type = other DNA
caggggttcaagagcagcctggccaacatggtgaaaccccgtctctactaaaaatacaaaaattagccaggcgtggtggcaggcgcctgtaatctcagctactcgggaggctgaggcagg

SEQ ID NO: 40103 - DNA, 120 bp, synthetic construct
  source 1..120: mol_type = other DNA
cacattcttgctaacacattgtcttgtccaacttttaaatttttgcctgtcgtgggagagtatcatggtttatcacagttttgttttgttttgtttttgagacggagtcttgctctgtca

SEQ ID NO: 40104 - DNA, 120 bp, synthetic construct; identical to SEQ ID NO: 11487
  source 1..120: mol_type = other DNA

SEQ ID NO: 40105 - DNA, 120 bp, synthetic construct; identical to SEQ ID NO: 4204
  source 1..120: mol_type = other DNA

SEQ ID NO: 40106 - DNA, 120 bp, synthetic construct
  source 1..120: mol_type = other DNA
aagacccacaggccttaatccaccttcaaggttgaagttagaagacaaaggcttagtggatgtttctggctaggactggcattctgacaagtctccatatgtagatgggcactgtgtcaa

SEQ ID NO: 40107 - DNA, 120 bp, synthetic construct
  source 1..120: mol_type = other DNA
attgcttctttcagacaagtaagcatcccaccccattctatatccaaccaaagttcctggtctcctggattcttccctgggggctggaattgaatttctacactaagttcccagtagagc

SEQ ID NO: 40108 - DNA, 120 bp, synthetic construct; identical to SEQ ID NO: 11488
  source 1..120: mol_type = other DNA

SEQ ID NO: 40109 - DNA, 120 bp, synthetic construct
  source 1..120: mol_type = other DNA
aagaaccactgacaaccatgtgacctatcctagattggaagatggtgatgtcagcctgggctctaccgcttcctgctttagtgagcttagaaaagttgcttaacctctgtgaacctcagt

SEQ ID NO: 40110 - DNA, 120 bp, synthetic construct
  source 1..120: mol_type = other DNA
atcactgtaccctgtgaagtgtgtagggtgtataatagcagtaattataagagtacaacaataacaataatgtatacctttaattgagtcccggtactctggggcaaagaagtttacata

SEQ ID NO: 40111 - DNA, 120 bp, synthetic construct
  source 1..120: mol_type = other DNA
aaattcaggaacttgcccaggattgtacttagctactggaagagctatgattaaaacttagtgctgttttggttttgcactaaagctgcattgttatagtgtgttatcatgatctctgtt

SEQ ID NO: 40112 - DNA, 120 bp, synthetic construct; identical to SEQ ID NO: 11489
  source 1..120: mol_type = other DNA

SEQ ID NO: 40113 - DNA, 120 bp, synthetic construct; identical to SEQ ID NO: 4206
  source 1..120: mol_type = other DNA

SEQ ID NO: 40114 - DNA, 120 bp, synthetic construct
  source 1..120: mol_type = other DNA
tctctccacgctgccttctgctcttttggctttgtttactgggggctccctgggatgggccgtagcagcccaggctctctcctctaggtggcatgatggctacagtgacctcagcagctc

SEQ ID NO: 40115 - DNA, 120 bp, synthetic construct
  source 1..120: mol_type = other DNA
cacattcctgaattgatctctggccagggctaggccatgctgtgattggctggacctgtgtcatctgctacatcctcagagctgggacagagacccacctagagctctggagcaagatga

SEQ ID NO: 40116 - DNA, 120 bp, synthetic construct; identical to SEQ ID NO: 11490
  source 1..120: mol_type = other DNA

SEQ ID NO: 40117 - DNA, 120 bp, synthetic construct
  source 1..120: mol_type = other DNA
aagagaaaatctgaaggaacaacaaaaagtgagtagccttcttcctgcagacctggacaagatgattggaatatattctgggttgttctatggaaacttcgtcaataagtatggaatcat

SEQ ID NO: 40118 - DNA, 120 bp, synthetic construct
  source 1..120: mol_type = other DNA
ttttttgtggggggagtcctcttgcccagagattctcttcaataggcttcgggtgggaatgagactcccaggtgcttttgagggcagagggtctggtttcagagccattggtcttgccag

SEQ ID NO: 40119 - DNA, 120 bp, synthetic construct; identical to SEQ ID NO: 11491
  source 1..120: mol_type = other DNA

SEQ ID NO: 40120 - DNA, 120 bp, synthetic construct
  source 1..120: mol_type = other DNA
atgatgtcgagcctagaaagcctggtaatgttgaaacagtcagggctgccttgacaggatctggctcagatgagttctgggctcatctagaaggtttcagtgtcttcccaggactcttga

SEQ ID NO: 40121 - DNA, 120 bp, synthetic construct
  source 1..120: mol_type = other DNA
tggatgccagatgggcctcattaacccaccttcactggtggagaaagtgagtttcccatcggcaataagccttgacccagggtgacctagccaggtgcgggcagggctggggctgctctt

SEQ ID NO: 40122 - DNA, 120 bp, synthetic construct
  source 1..120: mol_type = other DNA
cactgtagttggtcccttgtggggctgttgagcggaatcattgtcatcacagaatggatgtaaagataacaatgtctgacgtttgcttcaaaataatatagggggtggggaaggagggtg

SEQ ID NO: 40123 - DNA, 120 bp, synthetic construct
  source 1..120: mol_type = other DNA
tgaggtcaggggttcaagagcagcctgaccaacatggtgaaacctaaactaaaaatacaaaaattagccaggtgtggtggcgggcacctgtaatcccagatgcttgggaagctgaggcag

SEQ ID NO: 40124 - DNA, 120 bp, synthetic construct; identical to SEQ ID NO: 11492
  source 1..120: mol_type = other DNA

SEQ ID NO: 40125 - DNA, 120 bp, synthetic construct
  source 1..120: mol_type = other DNA
cattaaaaaccacccacatgatccagtcacctcccaccaggccccaccttcaacatctgggattacaattgaacatgagatttgggtggggacacagaaccaaaccatatcaaaatgcaa

SEQ ID NO: 40126 - DNA, 120 bp, synthetic construct
  source 1..120: mol_type = other DNA
tatcatagacctactcttttctctcccatttcaatttttctggggtgattacagctttgtttcacctgccttctttatgcctttacccacagaatacagaagctggccaaagaggaaggt

SEQ ID NO: 40127 - DNA, 120 bp, synthetic construct; identical to SEQ ID NO: 11493
  source 1..120: mol_type = other DNA

SEQ ID NO: 40128 - DNA, 120 bp, synthetic construct
  source 1..120: mol_type = other DNA
ctgggatccggatagaagtaactccaggaggtatgggctgaaagtgaccccaggaggaggttctgtggttaagaaaataaggggcagaggaatgtttaagccaaggagaggctcttctaa

SEQ ID NO: 40129 - DNA, 120 bp, synthetic construct
  source 1..120: mol_type = other DNA
gggcctgggggtgccatctgtgataaccaacgtgcagaagggaccaagagctcgtggaatgcctctggccctgacattggcctgacctgctcctgcccccatgcacctgagccctaccct

SEQ ID NO: 40130 - DNA, 120 bp, synthetic construct
  source 1..120: mol_type = other DNA
ttccagaagagcagaagaaaactggaaccttggggactctttttacaacagaaagctccccatccaactcccatggggaattttatgttctgaagaattgccatatacatttatgccagt

SEQ ID NO: 40131 - DNA, 120 bp, synthetic construct
  source 1..120: mol_type = other DNA
ttcccggcgatggcagatctcatgtcatggtcttggtcctgatggttcccaccagctttcccaagctctgctgctcccctggtgcctgtgtgaaggcagtgctgtgacaggtcctttcag

SEQ ID NO: 40132 - DNA, 120 bp, synthetic construct; identical to SEQ ID NO: 11494
  source 1..120: mol_type = other DNA

SEQ ID NO: 40133 - DNA, 120 bp, synthetic construct
  source 1..120: mol_type = other DNA
ccagtgcaagtcttgggtgatctggtaatttgtaggtggcactttcatgggctttacagagggttgatctctacagctccagtttgacataagggaccatttgccaaagttgtggtgcct

SEQ ID NO: 40134 - DNA, 120 bp, synthetic construct
  source 1..120: mol_type = other DNA
acttattcacaagcacagttgaaggagtcactgccttctctttgactttctttcattttgcatctccatatgacaagaggtgaggtccctccctcacttgaacattttatatctcttttc

SEQ ID NO: 40135 - DNA, 120 bp, synthetic construct; identical to SEQ ID NO: 11495
  source 1..120: mol_type = other DNA

SEQ ID NO: 40136 - DNA, 120 bp, synthetic construct
  source 1..120: mol_type = other DNA
accagccctggcaacatagcgagaccttgtcttttataaaacctaaaaaaattagcctggtgtggtggtgagcccctgtagtcccaactactttggaggctgaagtgggagaatcacttg

SEQ ID NO: 40137 - DNA, 120 bp, synthetic construct
  source 1..120: mol_type = other DNA
atagaaaaaatcaaggaaaaaaagtcgattaaatttaataaaactcattatcaaaagtttacatagactgagggtttttagtcttggtctttaaaaaaatcagctttattttttgagata

SEQ ID NO: 40138 - DNA, 120 bp, synthetic construct
  source 1..120: mol_type = other DNA
tcatttattatttatttattttggttatcatgtgtccattctgggtttaggaaagggctttggtcgggaatggggggctggggttggtcctgtcctggcatagccaccgtctaatgacct

SEQ ID NO: 40139 - DNA, 120 bp, synthetic construct; identical to SEQ ID NO: 11496
  source 1..120: mol_type = other DNA

SEQ ID NO: 40140 - DNA, 120 bp, synthetic construct
  source 1..120: mol_type = other DNA
accctggagctgtgcagagcagagaccctgcctcaacctctctggctctaagtttccatagatataaaaagcggaggctgcagtcaatgatcttcaagtctttccaagtttacaatgcat

SEQ ID NO: 40141 - DNA, 120 bp, synthetic construct
  source 1..120: mol_type = other DNA
atgtgaacaccaggctccttccttccccagctcaatggaccactcagtgttctctgggccacacagccccacccagttcagcattatactcacactcatccgttggattacaccttttgt

SEQ ID NO: 40142 - DNA, 120 bp, synthetic construct
  source 1..120: mol_type = other DNA
ttgctagaaacccgggaaggccgtggctgccatcatccaggacatccattcccagagggagagggacatgttccgggaagcagacaggtgaggccccaagccccaagtctccaggcaggt

SEQ ID NO: 40143 - DNA, 120 bp, synthetic construct; identical to SEQ ID NO: 11497
  source 1..120: mol_type = other DNA

SEQ ID NO: 40144 - DNA, 120 bp, synthetic construct
  source 1..120: mol_type = other DNA
tgtgtgtacgtgtggcttcgtttagaaccagctcttggttttcataagttgaatgtagatgtaggaagtaaaatgtagatggttaaaaaaaatcagttatttgaacagtcactttctcga

SEQ ID NO: 40145 - DNA, 120 bp, synthetic construct
  source 1..120: mol_type = other DNA
aacattgaatatattcagttttccaacccatttcttccaaccgaagtttgtgatcaggccaagctggggctataagttgaccactgtcactcccctacaaagacagttcctgaagagaac

SEQ ID NO: 40146 - DNA, 120 bp, synthetic construct
  source 1..120: mol_type = other DNA
tgatggtcaaggcagcctggtcctagcaagatgcaccttggtgtcccctggtcagtgagggctacgtggttttcctgtgtttgggaacttaatgaaaaaatgcccatccttttagaatat

SEQ ID NO: 40147 - DNA, 120 bp, synthetic construct; identical to SEQ ID NO: 11498
  source 1..120: mol_type = other DNA

SEQ ID NO: 40148 - DNA, 120 bp, synthetic construct
  source 1..120: mol_type = other DNA
aaccctaaaatgccttcctaattcttttttttaacctctgagcgtgccctccccaatagttagcatcccttttccatgcataaattgagctgagaaataaatgagaaaactggaggctaa

SEQ ID NO: 40149 - DNA, 120 bp, synthetic construct
  source 1..120: mol_type = other DNA
tcttgccccccagcgcccaccccgcacacccccaggaggagagtcagaggtccgctccctgagcatagctcccttccaagagaaggcaagctggaaccgagccaaatcagcccagttctt

SEQ ID NO: 40150 - DNA, 120 bp, synthetic construct
  source 1..120: mol_type = other DNA
tgtggttctgtagagttgggagttaagagtgtacacagttacatgcacagtatatctaagacagagactgtgtgtctgtgtgtgggtggggtgggatgggaggtgtgaagattctaaatc

SEQ ID NO: 40151 - DNA, 120 bp, synthetic construct
  source 1..120: mol_type = other DNA
gccctccgggcccctcccgggctgactggggcaatggccgggactcctgggagcactctccctatgccaggagggaggaagagcgagacccggctccctggagggacaacggagatgaca

SEQ ID NO: 40152 - DNA, 120 bp, synthetic construct; identical to SEQ ID NO: 11499
  source 1..120: mol_type = other DNA

SEQ ID NO: 40153 - DNA, 120 bp, synthetic construct
  source 1..120: mol_type = other DNA
ccaagcagaatgagaaaaataaaaccaagagaactgatagagaccaagaaggagctgatgatagaaaagaaaacacaatggcagagaatgaggtaatgatcaatttcttccccaggtaag

SEQ ID NO: 40154 - DNA, 120 bp, synthetic construct
  source 1..120: mol_type = other DNA
gcagagaatgaggtaatgatcaatttcttccccaggtaaggcgaggcaggccctgaaggagaataatcataataatataatgaggatgaacgtttattgaatgaatgaacatttactggc

SEQ ID NO: 40155 - DNA, 120 bp, synthetic construct; identical to SEQ ID NO: 11500
  source 1..120: mol_type = other DNA

SEQ ID NO: 40156 - DNA, 120 bp, synthetic construct
  source 1..120: mol_type = other DNA
tcccaagggagattagatctttggttcattctgtcctccctcctgccagaagcatttaccagtcctggaactctgaggagaagtggtgaaggagaagccgtcaccacctgctaaattaaa

SEQ ID NO: 40157 - DNA, 120 bp, synthetic construct
  source 1..120: mol_type = other DNA
cctgaggtcaggagttcgagaccagcctggccaatatggtgaaaccctgtctctactaaaaatacaaaaattagccaggcaaggtggtgcacccctgtagtcccagctactcaggaggct

SEQ ID NO: 40158 - DNA, 120 bp, synthetic construct
  source 1..120: mol_type = other DNA
aaatgcatggcaatggctggcaccttcatggcatctgaaaggtctgagggcttgcagcagtacttcagttcacacaggggcgtcacaaggagggttgtggttaccaggtttatattctaa

SEQ ID NO: 40159 - DNA, 120 bp, synthetic construct
  source 1..120: mol_type = other DNA
cattctgacctgggagttggtgacaatactaagtgcaaataaggaaaccaaatctctactccatgaacactgaagagtcaccttttggatgctacttcagcattcattccaacatgtata

SEQ ID NO: 40160 - DNA, 120 bp, synthetic construct; identical to SEQ ID NO: 11501
  source 1..120: mol_type = other DNA

SEQ ID NO: 40161 - DNA, 120 bp, synthetic construct
  source 1..120: mol_type = other DNA
acctctgcctcctaggttcaagcaattctcctgcctcagcctccttagtatttgggattacaggagtgcgccaccacgcccggctaatttttatatttttagtagagacagggtttcacc

SEQ ID NO: 40162 - DNA, 120 bp, synthetic construct
  source 1..120: mol_type = other DNA
gccagggcaaaagtgaaaaagaaagactgttttgaagaacctggagataatcggcatggctgcatctttagggcatattagggataatgtttttaaagagtaaaatcatgactctgatgc

SEQ ID NO: 40163 - DNA, 120 bp, synthetic construct
  source 1..120: mol_type = other DNA
attaattaatgacggcatcatgagatgcaaaaaccaactcaaaagagaatccaaagagcaggcaacatatacaggcaatcaggaatgctaaaatgaatttgctaataggtgtaaaagtgg

SEQ ID NO: 40164 - DNA, 120 bp, synthetic construct; identical to SEQ ID NO: 11502
  source 1..120: mol_type = other DNA

SEQ ID NO: 40165 - DNA, 120 bp, synthetic construct
  source 1..120: mol_type = other DNA
tcatggaagacactgtgtgcctcaccaaggacttgaactggatcccaaggacctggtgaaccagtggatattttaaaaagtgtatgtgcttggaggtgtccaagttgctggtgatggatg

SEQ ID NO: 40166 - DNA, 120 bp, synthetic construct
  source 1..120: mol_type = other DNA
actcacactcctgagactctgccctgggaacctcatttcttctactgttttaccaccctgctctcatcggtttgtataacattgctcatttaaggtgacactatgtgtcagccaaagagc

SEQ ID NO: 40167 - DNA, 120 bp, synthetic construct; identical to SEQ ID NO: 11503
  source 1..120: mol_type = other DNA

SEQ ID NO: 40168 - DNA, 120 bp, synthetic construct
  source 1..120: mol_type = other DNA
gtgttgctgctgccgaggagccacaagtcttcctggcttgctcctcacctccttcgtctttactcatggccacattctctactgtccctggccactgcacatgatttcaacaccccaacc

SEQ ID NO: 40169 - DNA, 120 bp, synthetic construct
  source 1..120: mol_type = other DNA
gcataccatctcaacaccccaacccactcttctccctccccgccactgcagaccatctcaacaccccaacctgctcccctccctctcgtcactgcagaccatctcaataccccaacccat

SEQ ID NO: 40170 - DNA, 120 bp, synthetic construct
  source 1..120: mol_type = other DNA
atttaccaccttcaaacctatcacttaatgtctttattttacttagtgtctattgtcacccccagctccaggtgtaaacttcacaaggcaggaagttttgtctgttgtgttcactgctgt

SEQ ID NO: 40171 - DNA, 120 bp, synthetic construct; identical to SEQ ID NO: 11504
  source 1..120: mol_type = other DNA

SEQ ID NO: 40172 - DNA, 120 bp, synthetic construct
  source 1..120: mol_type = other DNA
ggaaaacatggggaagaaacactgctacatcctactgggagggagggttcgagagtggcaggcccaggtgactagggaagggaagccaggctaatgacaagtggagccaggccagcatga

SEQ ID NO: 40173 - DNA, 120 bp, synthetic construct
  source 1..120: mol_type = other DNA
gcaagacaagtgtctagtataaaccaaaacatacctgtgggccagatgccatctagaagccccagagtgtaacccctggtataaccaatccataagaggtgaagatttttaaaaccctta

SEQ ID NO: 40174 - DNA, 120 bp, synthetic construct
  source 1..120: mol_type = other DNA
ttgggactatagttagtgacactgaaatgacccctgggctcgtggagctcatagtctagtgagagaaatgctaatccagtgatttcttaaatgaacagaagagcttgagtattaagtgct

SEQ ID NO: 40175 - DNA, 120 bp, synthetic construct; identical to SEQ ID NO: 11505
  source 1..120: mol_type = other DNA

SEQ ID NO: 40176 - DNA, 120 bp, synthetic construct
  source 1..120: mol_type = other DNA
attagagtaacaggaggtgaggctgacttgtcaacagggcctacactatgcagggccttgtaggcaggttgaagatttttgcctttatcttaactaccaggggaagcaaatgaagtattt

SEQ ID NO: 40177 - DNA, 120 bp, synthetic construct
  source 1..120: mol_type = other DNA
atggtgaaaccctgtctctactaaaaatacaaaaaaaaaaaaaaaattagccaggtgtggtggcaggcacctgtaatcccagttacttgggaggctgaggcagcagaattgcttgaaccc

SEQ ID NO: 40178 - DNA, 120 bp, synthetic construct
  source 1..120: mol_type = other DNA
aaaaaaaaaaaaccaaaacgacaatatggtgaggatgtgatcatttttgcattttggaatgatcattcttgattgccttgggaagaatagattttgggggaaggtacagagcagaagtgg

SEQ ID NO: 40179 - DNA, 120 bp, synthetic construct
  source 1..120: mol_type = other DNA
acccatctgttccacttaagctgctgctctctcctggaagtgatcccacagcaaagggaagctctgaaaggttgtttcctttgcctgcagggtggaagagcaggggtctgcttggtggag

SEQ ID NO: 40180 - DNA, 120 bp, synthetic construct; identical to SEQ ID NO: 11506
  source 1..120: mol_type = other DNA

SEQ ID NO: 40181 - DNA, 120 bp, synthetic construct
  source 1..120: mol_type = other DNA
gcagtagacttcagcaaagctttcagtggaatcttccacagcaaacactggaaacaaaggactttaggatttgaaccatgtatccctgtccagtaataactggtgaaaccagtcagccct

SEQ ID NO: 40182 - DNA, 120 bp, synthetic construct
  source 1..120: mol_type = other DNA
tggccctcagaaagcccaggagtagtcattgatttggtggccaaagtttaagtcatgggagaatatcccccagaaacttctaatgtgggggttggcaaagttttctaggactagatagta

SEQ ID NO: 40183 - DNA, 120 bp, synthetic construct; identical to SEQ ID NO: 11507
  source 1..120: mol_type = other DNA

SEQ ID NO: 40184 - DNA, 120 bp, synthetic construct
  source 1..120: mol_type = other DNA
tttttttcatagccaagatgactctgttggggaaatgtcaccgtgatggttaaccctggggtcttggccggcccaagtcagttcaagttttgttgcttctactctgcaaaaaatacccag

SEQ ID NO: 40185 - DNA, 120 bp, synthetic construct
  source 1..120: mol_type = other DNA
tctataaaacgaagatgctgatagcagctgcctccaagggattctgggaggataaaggaaatgctgtatgtgaaacctatctgagagctgggacctgcattcaatatcattctttttttc

SEQ ID NO: 40186 - DNA, 120 bp, synthetic construct
  source 1..120: mol_type = other DNA
atggaagaaagccctcaatcagtgggcagacaggagaaagaagcagagttctctgatccggaaaacacaaggacaaagaaggtaaagtttgtttcagattctgcacttctgccatgaggg

SEQ ID NO: 40187 - DNA, 120 bp, synthetic construct
  source 1..120: mol_type = other DNA
tgtgcctggaatcttcggacagtttttattgaagcgatctttacccacatgtctgggctctgctcactctccagcaatttggctgtgttcctacgagaaaacatgtgcccaaaaaaagac

SEQ ID NO: 40188 - DNA, 120 bp, synthetic construct; identical to SEQ ID NO: 11508
  source 1..120: mol_type = other DNA

SEQ ID NO: 40189 - DNA, 120 bp, synthetic construct
  source 1..120: mol_type = other DNA
tctagaaggggcctagtagaagctttggctgtgggagtgtatgtacccctgctgggagagggtgcttggggggaattttgtgaggggctttgctgcagttacatttagtgatgacccaga

SEQ ID NO: 40190 - DNA, 120 bp, synthetic construct
  source 1..120: mol_type = other DNA
attatctactggggcttgaaattctttgcgtcactttaaatatggtggattaagcattaagggcctattccaaactttgagcatcaccctaaagatgagttggtgccgtgggacttgagt

SEQ ID NO: 40191 - DNA, 120 bp, synthetic construct; identical to SEQ ID NO: 11509
  source 1..120: mol_type = other DNA

SEQ ID NO: 40192 - DNA, 120 bp, synthetic construct
  source 1..120: mol_type = other DNA
ggatttccccaaggaaggagtcaaggccgtagggaatggggctgcagaaatcagcctcaagtcacccagagaactgccctctgcttccacaagctgtcccagtgacatggacgtggaaat

SEQ ID NO: 40193 - DNA, 120 bp, synthetic construct
  source 1..120: mol_type = other DNA
agcccctacagtccagcaaatgtcttcccctaagccagcagaggagagggcccggcagccaagcccatttgtggatgattgcaagaccagggggacccccgaagatggggcttgtgaagg

SEQ ID NO: 40194 - DNA, 120 bp, synthetic construct
  source 1..120: mol_type = other DNA
ggactcctgctcacctgataaagtatgagcatgtgcaggctggaatgaacataagtaaggtttcaactagcattaaagtgggtgcagaaagtgatttagcaacaaaggcaagcctctaaa

SEQ ID NO: 40195 - DNA, 120 bp, synthetic construct; identical to SEQ ID NO: 11510
  source 1..120: mol_type = other DNA

SEQ ID NO: 40196 - DNA, 120 bp, synthetic construct
  source 1..120: mol_type = other DNA
taaagggtacagctgttccccttcttactacctcagacccattttttgctagggtctgacagtgatacaagacttgtttcaggatattctctcactccattggaggtgacgttttgtgcc

SEQ ID NO: 40197 - DNA, 120 bp, synthetic construct
  source 1..120: mol_type = other DNA
ttaagattctcactgtgaaaataattagggatttgctttacagaaagcctgtagcacaccagaggttgaagtgagagtcaggggcagaaaatacagaggaaaggcttaaaaatgaacatt

SEQ ID NO: 40198 - DNA, 120 bp, synthetic construct
  source 1..120: mol_type = other DNA
cccgccgtgaaatgccttcttgttgctagagaaaccgtgaggcccaggctctgtctagagaaggcaagaataaaggaggagtgaaatcttcacctcactccaatcaagccccttttattt

SEQ ID NO: 40199 - DNA, 120 bp, synthetic construct
  source 1..120: mol_type = other DNA
ttgacaagcttggggagagaatggcattgcctgttttgctagcctcggtggacgtcagcacaatttttgcccgtcagtaattcctctgcctgcagagatggaatgatactgagatgggag

SEQ ID NO: 40200 - DNA, 120 bp, synthetic construct; identical to SEQ ID NO: 11511
  source 1..120: mol_type = other DNA

SEQ ID NO: 40201 - DNA, 120 bp, synthetic construct
  source 1..120: mol_type = other DNA
gaagtggaactgaaacagcccctttctttgccctcttgggaaccagaggatgtgttcagtgaacttagcattcctctaggtaagcaaaacacacagtctttcctgaaattcaggtctagg

SEQ ID NO: 40202 - DNA, 120 bp, synthetic construct
  source 1..120: mol_type = other DNA
ggcatgatctcagctcactgcagcctcaaattcctgggctcaagtgatcctcccacctcagcctcctgagaaacttggacaacaggtacacaccaccaggcccggctaatttttttaatt

SEQ ID NO: 40203 - DNA, 120 bp, synthetic construct; identical to SEQ ID NO: 11512
  source 1..120: mol_type = other DNA

SEQ ID NO: 40204 - DNA, 120 bp, synthetic construct
  source 1..120: mol_type = other DNA
gcagatgcccagcagcctccataaagtcaacaaaaatgaacttcgtctgctattgttcattgctccagtccttcccagaacaatgctacatatttttttctctttaaaggaccaactttt

SEQ ID NO: 40205 - DNA, 120 bp, synthetic construct
  source 1..120: mol_type = other DNA
caggtaagtcataccccttcttgagccttagtttcctctctgtaatttagacagcgattttttcaatggtggaagtgttgggaatgaagtggggagggagtttactgatggaatcaccta

SEQ ID NO: 40206 - DNA, 120 bp, synthetic construct
  source 1..120: mol_type = other DNA
catcatctttgagtcccctcgcattagctctgaaaggtcggaattagataaagtagtagtagcagctgctcagaaggagagctcaggaaagtgtcacctgggaaagtgtcacaaggaagc

SEQ ID NO: 40207 - DNA, 120 bp, synthetic construct
  source 1..120: mol_type = other DNA
aaaaaatctcttactatttctttcctccaggtgtaccatttttatagtcagatctggagagcaaacttccttttttttttaagggataaatttgctgcacagcatctcccaagacaaaaa

SEQ ID NO: 40208 - DNA, 120 bp, synthetic construct; identical to SEQ ID NO: 11513
  source 1..120: mol_type = other DNA

SEQ ID NO: 40209 - DNA, 120 bp, synthetic construct
  source 1..120: mol_type = other DNA
attgtaacaaattcaaaaaataagaaccatatcaagtcaatattaaaggtctgattgatctcttccctccagtctctccccagtctccagaggtagcctaccactgtcatgcccagtttt

SEQ ID NO: 40210 - DNA, 120 bp, synthetic construct
  source 1..120: mol_type = other DNA
gtcagtacatagagaacacattctttttaaccactgcaaatattccatcgtaaaagctatgctataaatgactgatctttcctctgctggtgaacagttaggctgtctgctctttttccc

SEQ ID NO: 40211 - DNA, 120 bp, synthetic construct
  source 1..120: mol_type = other DNA
cttatttaacagataaaaaatctgaaatgcagagtcacacagctaataactggcaaaaaccagagtcaggttcaaatcccagtcatctgactctagagccatgttcttagcttctgttct

SEQ ID NO: 40212 - DNA, 120 bp, synthetic construct; identical to SEQ ID NO: 11514
  source 1..120: mol_type = other DNA

SEQ ID NO: 40213 - DNA, 120 bp, synthetic construct
  source 1..120: mol_type = other DNA
ccacaatcaagactgggaacaatgttcatcatatcccaaatttcctgtctcctatgtaacccctccctccccacagtgcaacccccaggtaaaggatctcctttctgtcactaaatatta

SEQ ID NO: 40214 - DNA, 120 bp, synthetic construct
  source 1..120: mol_type = other DNA
attcatctgtactgttgggtggatcagtagtctgtttcattcttcttcttttttttttttttttgagacaaagtttttctctcgttacccaggcgggagtacagtggcatgatcttggct

SEQ ID NO: 40215 - DNA, 120 bp, synthetic construct
  source 1..120: mol_type = other DNA
ccacgcctggctagtttttggtctttttttagtagagataaggttccaccatgttggccttgaactgttggggtcttgaactcctgacctcaggtgatccacctgcctcagcctcccaaa

SEQ ID NO: 40216 - DNA, 120 bp, synthetic construct; identical to SEQ ID NO: 11515
  source 1..120: mol_type = other DNA

SEQ ID NO: 40217 - DNA, 120 bp, synthetic construct
  source 1..120: mol_type = other DNA
cagcctgggcaacatagggagaccctgtctctgcaaaaaaataaaataaaataaaactagccaggagttgtggtgtaaatctgcagtcccagctacttgggaggctgagggaggaggatt

SEQ ID NO: 40218 - DNA, 120 bp, synthetic construct
  source 1..120: mol_type = other DNA
aaactcaggatttccgatctcagatcactctgttctccaggttcttccagttcaggcagcaacacagtgtaggaaaggctacatttgtgcagaaactatgaacacagtctgtggaatctg

SEQ ID NO: 40219 - DNA, 120 bp, synthetic construct; identical to SEQ ID NO: 11516
  source 1..120: mol_type = other DNA

SEQ ID NO: 40220 - DNA, 120 bp, synthetic construct
  source 1..120: mol_type = other DNA
tgagagacaattttttggctttgtcccatggaaagcatagagctgaaataagggatgtcaaggactgggctcccagatgggaggaaagggaggccagtcgcgttgctcggggactggggg

SEQ ID NO: 40221 - DNA, 120 bp, synthetic construct
  source 1..120: mol_type = other DNA
caaagtgcaagctccctcctctatccatcccagctttactaggatgacagagttataattacccgtgccatgagctgttattagaagccaaatgcagctttagtgatcctagtagaggct

SEQ ID NO: 40222 - DNA, 120 bp, synthetic construct
  source 1..120: mol_type = other DNA
cacattccagaagtgtcctgagttgtgccatgggatatgtggtgtctgcagcaacccccatttattctgggacaagttaccagctcttggggtttctcctcccccaggcttctctccccc

SEQ ID NO: 40223 - DNA, 120 bp, synthetic construct
  source 1..120: mol_type = other DNA
caagtgagaaagccaacatttaggcagttattaacagcttctgtgatgaaatatttaacacgtgtctccaaaccagtatttttgagcaacaggcaaaatgataggtgattcccctaaaca

SEQ ID NO: 40224 - DNA, 120 bp, synthetic construct; identical to SEQ ID NO: 11517
  source 1..120: mol_type = other DNA

SEQ ID NO: 40225 - DNA, 120 bp, synthetic construct
  source 1..120: mol_type = other DNA
tgacagtagaagtctttgttcaagtgaaatcggttccagaactgacagaagatagctctagctacactgctgggggctttggctaccagctcaatccctgcttcagggtctgtggtagct

SEQ ID NO: 40226 - DNA, 120 bp, synthetic construct
  source 1..120: mol_type = other DNA
aggctgggacgggactgagagtgtggctctgatcaaagctctccttttttcccagctgcccctctcctatactgcgggggtctcggctccctgcagagcagcagcagagggaaaactatt

SEQ ID NO: 40227 - DNA, 120 bp, synthetic construct
  source 1..120: mol_type = other DNA
ggccacttttccatcctttgcagagaggaagggaaggacactcaacctccctccgggcacctgggcctgagtgaggccctctcacttctggggaccactgctgagggcatggcgtgtagc

SEQ ID NO: 40228 - DNA, 120 bp, synthetic construct; identical to SEQ ID NO: 11518
  source 1..120: mol_type = other DNA

SEQ ID NO: 40229 - DNA, 120 bp, synthetic construct
  source 1..120: mol_type = other DNA
ctgttcccctgcctgtgccattcccaggccccttccttccttctacccaggatggccagacctgaaaccattgcccagccccagcagaagagaggcttgccccgcagcctgcaagtggga

SEQ ID NO: 40230 - DNA, 120 bp, synthetic construct
  source 1..120: mol_type = other DNA
tgttcctacctccattctcaggtgaggaaactgagccccaggagcagttcggctgactctccccgggtcacatgggttcttagcatctggcctggaccctctcagagctgggctctttcc

SEQ ID NO: 40231 - DNA, 120 bp, synthetic construct; identical to SEQ ID NO: 11519
  source 1..120: mol_type = other DNA

SEQ ID NO: 40232 - DNA, 120 bp, synthetic construct
  source 1..120: mol_type = other DNA
aaaaaagaggacagagaattgtaattagggtatgactaaaatggcccccccaaaagaggcctacatataggttaattatgtggaagaaaatatttggattggagtgactctgggtgattt

SEQ ID NO: 40233 - DNA, 120 bp, synthetic construct
  source 1..120: mol_type = other DNA
aagaaatgaaatccaacaagtgaaatatcagaaatgtcagaaatcaccttcattgttcttggaaggaggctgatagtaggagaacaggccagcggcaggccatggaatggctaagtgctt

SEQ ID NO: 40234 - DNA, 120 bp, synthetic construct
  source 1..120: mol_type = other DNA
caaggtcaacagcaagtgaggggtggagctcgtggctcccatttctacctgatggctgccaggacacaggggcctgcctcccatgccatcctaaccctgcgtgtctatcccccatccttt

SEQ ID NO: 40235 - DNA, 120 bp, synthetic construct
  source 1..120: mol_type = other DNA
cttacaggtaaaaatccactctccttgcccagcatgccaggggctccccagtctccataaccgagccaggtgtctggcgtccttggccttgcttgcctctgagtctagctcctacctgca

SEQ ID NO: 40236 - DNA, 120 bp, synthetic construct; identical to SEQ ID NO: 11520
  source 1..120: mol_type = other DNA

SEQ ID NO: 40237 - DNA, 120 bp, synthetic construct; identical to SEQ ID NO: 4234
  source 1..120: mol_type = other DNA

SEQ ID NO: 40238 - DNA, 120 bp, synthetic construct
  source 1..120: mol_type = other DNA
atataaaaaatactctatacaccgtatttcacccagtctaaggtgccatcatttgtaaggcaccactattttttggtaccaactagaaaaaaaatgttgcaaatcaagtgatgagactcc

SEQ ID NO: 40239 - DNA, 120 bp, synthetic construct; identical to SEQ ID NO: 11521
  source 1..120: mol_type = other DNA

SEQ ID NO: 40240 - DNA, 120 bp, synthetic construct
  source 1..120: mol_type = other DNA
gccgttcttaaccagggacatgaatcagactcatctggacagtatttctaaaattcaggtactaagttatatatttagtagaatttggaggtggaaggcagattgcaggaatatgtaatt

SEQ ID NO: 40241 - DNA, 120 bp, synthetic construct
  source 1..120: mol_type = other DNA
ttcatccaagtccacacagatggtgagttattgggcctaggatcaaatcgcctgattctgaatcactttcctctttttactctactatacttgtcttggaaactgagacccataatgtca

SEQ ID NO: 40242 - DNA, 120 bp, synthetic construct
  source 1..120: mol_type = other DNA
tctactatacttgtcttggaaactgagacccataatgtcatggcctgggtcaccatgtgcagagaagtatcataggctatgcccaaactcaagtcacttaagcctctgatttccctccgg

SEQ ID NO: 40243 - DNA, 120 bp, synthetic construct; identical to SEQ ID NO: 11522
  source 1..120: mol_type = other DNA

SEQ ID NO: 40244 - DNA, 120 bp, synthetic construct
  source 1..120: mol_type = other DNA
gtcaggaattcgagaccagcctgaccaacagtgtgaaatcccgtctctactaaaaatacaaaaactagccaggcgtggtggcgcgcacctataatccaagctactcaggaggctgaggta

SEQ ID NO: 40245 - DNA, 120 bp, synthetic construct
  source 1..120: mol_type = other DNA
cttcctggctctcaccctactcttgttttctcattttctgtagggctgggcctgagagtctgtattgtaaaccatccttatatcaggctctgatagtcgatgtgagaaccttttctctca

SEQ ID NO: 40246 - DNA, 120 bp, synthetic construct
  source 1..120: mol_type = other DNA
cagggcagtggactgcactgtgttctgagcctctgggccacgcccccaggcagactcccctccccgcagcaggccagagccattcttgtagttctcaagtgcattggggtagacattggt

SEQ ID NO: 40247 - DNA, 120 bp, synthetic construct; identical to SEQ ID NO: 11523
  source 1..120: mol_type = other DNA

SEQ ID NO: 40248 - DNA, 120 bp, synthetic construct
  source 1..120: mol_type = other DNA
gctcgataggaaaactagatacctgcttggctccaggccctggagcggaatgtgtccacgtactgggcgctcattcgcttgccttcctcagcacacggtttaccctccctgagccaaggc

SEQ ID NO: 40249 - DNA, 120 bp, synthetic construct
  source 1..120: mol_type = other DNA
aggcagacctggtcatctcacacacaccctctcatctgacccacacaccaccccagaagggagggtgaggacaacagtgttcctcccatttaacagattaggcctctgaggctgggagaa

SEQ ID NO: 40250 - DNA, 120 bp, synthetic construct
  source 1..120: mol_type = other DNA
cacagcaaccttatgttgttgttactgttattcccctcccttcacagatgtcagagatatttgataactcgcctgctgagggataggattgaacccaggtcatatgacttcaaagtgcac

SEQ ID NO: 40251 - DNA, 120 bp, synthetic construct; identical to SEQ ID NO: 11524
  source 1..120: mol_type = other DNA

SEQ ID NO: 40252 - DNA, 120 bp, synthetic construct
  source 1..120: mol_type = other DNA
cctccctctgccttttaagcatagatatgttgcctagagcttgggctgtttctggaaaacagagttgttttgggagttaaatgagcttatttaagtcaagcagttagaacagcacttgac

SEQ ID NO: 40253 - DNA, 120 bp, synthetic construct
  source 1..120: mol_type = other DNA
cccaggctggattgcaacggtgcgatctcggttcacagcaacctccgcctcccgggttcaagtgattctcctgcctcagcctcccgagtagctgggattacaggcatgtgccaccacacc

SEQ ID NO: 40254 - DNA, 120 bp, synthetic construct
  source 1..120: mol_type = other DNA
tgagacaccacgctcggcctgtactttctacattttctacaggagacatgtattacttgcaagctaacataatgaggtacttagcataagttctgtagccccagtggggatctctgaacc

SEQ ID NO: 40255 - DNA, 120 bp, synthetic construct
  source 1..120: mol_type = other DNA
ttctttccacagaaatatttgtcccagctggccgaggagggcctcaaggagaccgagggggcagatagcccgaggccagaggacagcggaatcgtgccacgcttcgaaaggaaaaagctc

SEQ ID NO: 40256 - DNA, 120 bp, synthetic construct; identical to SEQ ID NO: 11525
  source 1..120: mol_type = other DNA

SEQ ID NO: 40257 - DNA, 120 bp, synthetic construct
  source 1..120: mol_type = other DNA
gatcgtttccttttcacaaaacccaacttctcagggattttcacagtgtttaaattcttggtaggatataacaggtcaggcctagctgagtcaggcaaggaaaaggtttaatggaaactc

SEQ ID NO: 40258 - DNA, 120 bp, synthetic construct
  source 1..120: mol_type = other DNA
tctgttggcagagctgggagggtcttcattaacctcttcctccaactgggccacccttttgaaaagcccctgtttttaataactgtttcatcctctcagttattctagaaatctgccaga

SEQ ID NO: 40259 - DNA, 120 bp, synthetic construct; identical to SEQ ID NO: 11526
  source 1..120: mol_type = other DNA

SEQ ID NO: 40260 - DNA, 120 bp, synthetic construct
  source 1..120: mol_type = other DNA
tatttaagtcaaggaaacatcatctgtccttgattcagccttggtgcctgcactctggggtacaaccacctcacagtaggatggtttttaaatggccccccagttgggggagaagctaag

SEQ ID NO: 40261 - DNA, 120 bp, synthetic construct
  source 1..120: mol_type = other DNA
tgataccaaaatgttatgaaaagtcgtgattcccgctgctctttctggtactggagggtgggtaccttcaggctgtggggtctctagcctgatattccattgaaagggtgtgggataaag

SEQ ID NO: 40262 - DNA, 120 bp, synthetic construct
  source 1..120: mol_type = other DNA
cccaggaaaaataaaacaaggaagacaggtcactctcccctaggcagttcctgttgtttctgttcctgaccttgggcaggcagactgagaagggactgtgtagggttttgttttgttttt

SEQ ID NO: 40263 - DNA, 120 bp, synthetic construct
  source 1..120: mol_type = other DNA
agttcaaggctaacattttatatcaggtaactgaggcacacaaagggaacaaatgaagaacataaaatgatcagtgtaaacctgaaagcacgcagtcattggcaagggacaggctcatgg

SEQ ID NO: 40264 - DNA, 120 bp, synthetic construct; identical to SEQ ID NO: 11527
  source 1..120: mol_type = other DNA

SEQ ID NO: 40265 - DNA, 120 bp, synthetic construct
  source 1..120: mol_type = other DNA
agcatgatgaagtgtccttggttttaacctttataaggaaagcagctttgagatgaccagtctggtttttgttctttgtgtctgctttcctcagcccttttctgtctataaagccaacct

SEQ ID NO: 40266 - DNA, 120 bp, synthetic construct
  source 1..120: mol_type = other DNA
ttgagaagaccatatgggggctgctgaaaagttggtatctcaaataaagtctgaagatcacggctcagcccagattgttcccctggccaactccacaggtttgaacctggcattctggac

SEQ ID NO: 40267 - DNA, 120 bp, synthetic construct; identical to SEQ ID NO: 11528
  source 1..120: mol_type = other DNA

SEQ ID NO: 40268 - DNA, 120 bp, synthetic construct
  source 1..120: mol_type = other DNA
tggagagctagggagagcccctgggagggagagagataaggcgctatctgccttcaatcagaaccttcggtttaaaatcatctaagagtctatacttgtgtgtacatacgtatttatttt

SEQ ID NO: 40269 - DNA, 120 bp, synthetic construct
  source 1..120: mol_type = other DNA
attttttaaagcttttcttcagtgttttgtcaaccatttcaaagtgtctcccaaaaaaggatgctgaagagcaattgctcccttaagcaacagattcatatttaccctgggttaatacaa

SEQ ID NO: 40270 - DNA, 120 bp, synthetic construct
  source 1..120: mol_type = other DNA
tcccattcttggacagtccgaggctgtgacctgttagataattagattatacttgaactggaccagagtttgttttttgaatttatgagaaaaaccaaaacactaagttaagtttgaact

SEQ ID NO: 40271 - DNA, 120 bp, synthetic construct; identical to SEQ ID NO: 11529
  source 1..120: mol_type = other DNA

SEQ ID NO: 40272 - DNA, 120 bp, synthetic construct
  source 1..120: mol_type = other DNA
ctgctgctgctgccgctgctaggcaaaggtgagttctgccggccgccggctcccgcaggggccagggcgaagttggcgccgagcagcggagcgggcgcgttcagaagcgcctttctgttt

SEQ ID NO: 40273 - DNA, 120 bp, synthetic construct
  source 1..120: mol_type = other DNA
ggcgggtctcgggcgggagcggagcgcgggccgggccgcgggggtcggtgctcagaaccctagccatagccgcaggtctcaatctggccgcgccctgcgccaaagccgcgtcctggagca

SEQ ID NO: 40274 - DNA, 120 bp, synthetic construct; identical to SEQ ID NO: 11530
  source 1..120: mol_type = other DNA

SEQ ID NO: 40275 - DNA, 120 bp, synthetic construct
  source 1..120: mol_type = other DNA
gcccagggcttggggtggggcaggggtttgcgccgccagccagcgttggtgctgggcctggtgaaacctcaggtgccttaggatcccagcattaggtgtggccttgcaaagatggtcatc

SEQ ID NO: 40276 - DNA, 120 bp, synthetic construct
  source 1..120: mol_type = other DNA
aaccaagtttccctctaagagggaaggagccctggccatcctccctcactccttacaaagggctttctctccccacagcctttgggaacagaagaagccatggtcagtcaccctgtctct

SEQ ID NO: 40277 - DNA, 120 bp, synthetic construct
  source 1..120: mol_type = other DNA
caggggagaagcccttgcctttctatcttttctgagtgttaggactttggggtcccagtgctgcagggggaagacacggggcagaagcaaacaaggcgctctgacgctgtcttgggattc

SEQ ID NO: 40278 - DNA, 120 bp, synthetic construct
  source 1..120: mol_type = other DNA
ccacacccttccacagccttgcgttcagttggggtggccagtgaggctgtgggggccaggctctgggggccggcttgtggcactcagcaggcatgcaggtagctttccgtgcccagaccc

SEQ ID NO: 40279 - DNA, 120 bp, synthetic construct; identical to SEQ ID NO: 11531
  source 1..120: mol_type = other DNA

SEQ ID NO: 40280 - DNA, 120 bp, synthetic construct
  source 1..120: mol_type = other DNA
tgggtctctagaggatgagggttcttccacagctcacacatgcacactcacactggatcaccaagacacactcctgccccttctcacagcacttgctgccaaggctgtggacatgcacag

SEQ ID NO: 40281 - DNA, 120 bp, synthetic construct
  source 1..120: mol_type = other DNA
ggcatagcctgtcagccccaggtatgctggaaccagagtgagagaacctccatctaaaagttacattcatttaaaagttgctcttaaaggtttctggcatttcattgctcaacacagata

SEQ ID NO: 40282 - DNA, 120 bp, synthetic construct; identical to SEQ ID NO: 11532
  source 1..120: mol_type = other DNA

SEQ ID NO: 40283 - DNA, 120 bp, synthetic construct
  source 1..120: mol_type = other DNA
ccttttccttctcccctttctctggccagaggcttcaccaggttcacctgggcctggcttgcttcctcctccactccagctcactaaccctgtctggcctccagaagctgcctgcagccc

SEQ ID NO: 40284 - DNA, 120 bp, synthetic construct
  source 1..120: mol_type = other DNA
tcactgtttccttggtggtgtgaagaaaatgggatgcgatcacctagcggggagctaatagccttttagccagtggaggagaaaaccaattaaaaattatgatatctgttaaaatggaac

SEQ ID NO: 40285 - DNA, 120 bp, synthetic construct
  source 1..120: mol_type = other DNA
agcagtagcaccccatgggggctcacagtgcactgcccctgtgctgtgcctactcacttcatcttttccaacaagtctgcaagggtcatggtcttggcccatttcacaggtgaggaaaca

SEQ ID NO: 40286 - DNA, 120 bp, synthetic construct
  source 1..120: mol_type = other DNA
ggagggcttccagggaggttgccctgagcctgcccacccactggtgagtccccccacctcgggctccaggtgccctcaggacatcccagcccagatcccagagtaatgtgtggcaccatg

SEQ ID NO: 40287 - DNA, 120 bp, synthetic construct; identical to SEQ ID NO: 11533
  source 1..120: mol_type = other DNA

SEQ ID NO: 40288 - DNA, 120 bp, synthetic construct
  source 1..120: mol_type = other DNA
cttcctcctcatttttcccatcctccaggacagcctgggagaagaaagccagggaataggggcaaagcagggtgcagccccccatgctccctgctgccctcctcccctcctgcagaggca

SEQ ID NO: 40289 - DNA, 120 bp, synthetic construct
  source 1..120: mol_type = other DNA
ctatctccccactcctctgcaattatttttcagcagagtgacttaatagtaacaataacagtaacaataatagtaacaacagcaggctgggagcactcctgagggagcctcggctcctgc

SEQ ID NO: 40290 - DNA, 120 bp, synthetic construct; identical to SEQ ID NO: 11534
  source 1..120: mol_type = other DNA

SEQ ID NO: 40291 - DNA, 120 bp, synthetic construct
  source 1..120: mol_type = other DNA
gagaaggccccaggcccaccagagcccctctggctcccccactagaacagcagccagggccggctcagggattgaggcgaagccttggtgcttgattctttgtcccctgaggcaggctgt

SEQ ID NO: 40292 - DNA, 120 bp, synthetic construct
  source 1..120: mol_type = other DNA
gccaggcctgggcacttggattggcgctgagacaatgaggcctgaacctccatggagctctggtcccgcagctgtgtgatcatgggggcctcagggaccccgctcccctccattccccaa

SEQ ID NO: 40293 - DNA, 120 bp, synthetic construct
  source 1..120: mol_type = other DNA
ctcttggcccctgaaaagcctggggcagggagatggtgccagcaggaccttaaggacagcagttcaggtcgcacctggccctggagggagcaggtggccagctccaagcaaacacctctg

SEQ ID NO: 40294 - DNA, 120 bp, synthetic construct
  source 1..120: mol_type = other DNA
tcctccctgatatcagggatacctggagggcctggtgctggggctctgtgctcaggggagaacctgtggccctacagccccaggttctagaccccctcccagattcgggtgctgcagctg

SEQ ID NO: 40295 - DNA, 120 bp, synthetic construct; identical to SEQ ID NO: 4247
  source 1..120: mol_type = other DNA

SEQ ID NO: 40296 - DNA, 120 bp, synthetic construct
  source 1..120: mol_type = other DNA
gcttcctcttgctctgttccccttcctgctccaccaccattgcctgtagggcgtctgccagccccaggaagcctaacacttagcccaagtggggctctgggcctggccctcctcacccag

SEQ ID NO: 40297 - DNA, 120 bp, synthetic construct
  source 1..120: mol_type = other DNA
actcctctggcaggtcacatacaggatgccccacagcaccttgaaaactcgtgacccgggaaagcctcaaattgtctttgctcccctagcctccccaccacctgtatatgcaggggcatg

SEQ ID NO: 40298 - DNA, 120 bp, synthetic construct; identical to SEQ ID NO: 11536
  source 1..120: mol_type = other DNA

SEQ ID NO: 40299 - DNA, 120 bp, synthetic construct
  source 1..120: mol_type = other DNA
agcaggggctcctggcgggcccagcagctgagggggacagagggggaaacagggtagcaaataattatggtttactcttttttaattgtgaaatttgtgtaacataagtttaaccattta

SEQ ID NO: 40300 - DNA, 120 bp, synthetic construct
  source 1..120: mol_type = other DNA
ccaaaaggaaaccccatacccattaaacagctgcttcctgtccccgggcaacccccagcctgcgttctgtctctgcggcttggcctgtcctggaacatttcatctgcatggactgttgtc

SEQ ID NO: 40301 - DNA, 120 bp, synthetic construct
  source 1..120: mol_type = other DNA
gtgccgtcacccattcatctggggatggacacgtgggtgctttccaccttttggcagttatgaaaaatgctgccagggacattcctgttataaatacctgagttcgtgctttcagttctt

SEQ ID NO: 40302 - DNA, 120 bp, synthetic construct; identical to SEQ ID NO: 11537
  source 1..120: mol_type = other DNA

SEQ ID NO: 40303 - DNA, 120 bp, synthetic construct
  source 1..120: mol_type = other DNA
tctctttggagaagcatctcttcgagccctctgcctgttgtctaactagatggctgtcttgccatacagctgactttgctgttgcatctgcatcaagagctgcagagaagcagctttatc

SEQ ID NO: 40304 - DNA, 120 bp, synthetic construct
  source 1..120: mol_type = other DNA
tgaatcaccactgccctcgaggaccttgaggacattctcggaagacctggactctgaggccacgttgagcaccaacatctggaaaccatggtgtcactgcttgtgcataagaaggggcct

SEQ ID NO: 40305 - DNA, 120 bp, synthetic construct
  source 1..120: mol_type = other DNA
tcctgaaccctgactctaaaaataaccaggctgataatcggatccgctgtaagttgattatcatcattgccgtggtgtgatgtcatgctgccaggccctggggcagttttctcaggacag

SEQ ID NO: 40306 - DNA, 120 bp, synthetic construct; identical to SEQ ID NO: 11538
  source 1..120: mol_type = other DNA

SEQ ID NO: 40307 - DNA, 120 bp, synthetic construct
  source 1..120: mol_type = other DNA
ggaggacacttgcagtcttaatcctgttttggccccatgtccctcaccccccaggggccacctaggccagagcctgtcctgatttccatctcggccaccgtctgcccctcggcccctggt

SEQ ID NO: 40308 - DNA, 120 bp, synthetic construct
  source 1..120: mol_type = other DNA
cgaggccctgagggaggcgtgagttgtcacacatgggggtagtgtcagatgaagacttggcaccacttccctgggcatccccttccctgcatggcatccccagccttgggtttggattct

SEQ ID NO: 40309 - DNA, 120 bp, synthetic construct
  source 1..120: mol_type = other DNA
tctggccccaggtctgtgctgggctgaaacctactgtctcagaggctcctggctctctccctctgctctccactgctcttaagagcagaccctcaagccttttttgtgtcctctctccag

SEQ ID NO: 40310 - DNA, 120 bp, synthetic construct
  source 1..120: mol_type = other DNA
tagcctctgtgtggcctccagcagggtacctaagctagtgctgcctcattttcctcctgtgtgagatgggaatcctcatggtccctacctctgacagttgttttgatgcagtgggtgatg

SEQ ID NO: 40311 - DNA, 120 bp, synthetic construct; identical to SEQ ID NO: 11539
  source 1..120: mol_type = other DNA

SEQ ID NO: 40312 - DNA, 120 bp, synthetic construct
  source 1..120: mol_type = other DNA
acttgggtggccagtcctgttcagccaggccttgccctaggaaagaaattaattataacctaattggcagtttcctttgcatagaagccggaagcaactgccagtgaggctggtgattaa

SEQ ID NO: 40313 - DNA, 120 bp, synthetic construct
  source 1..120: mol_type = other DNA
ccctcagagcagaaggctgggtctgtgtgcagaaggtagccttgggctgccaggtcccccagtgcccagttgcggacctccttctcccaaacctcagccatgcctggaccccttccccac

SEQ ID NO: 40314 - DNA, 120 bp, synthetic construct; identical to SEQ ID NO: 11540
  source 1..120: mol_type = other DNA

SEQ ID NO: 40315 - DNA, 120 bp, synthetic construct
  source 1..120: mol_type = other DNA
gatcctgcactccacaccgggtctcctgcccagcattttggaagaaccaattcttaagtctggtactgaggccgcactgccatgatgataactggtgtcaccaggacaccagggaaggag

SEQ ID NO: 40316 - DNA, 120 bp, synthetic construct
  source 1..120: mol_type = other DNA
acaggctgtcagatttttctcaaaggaggtattgacttgttagcgggtacaattaggccgaggaaccaggggctgatgcagtgtgctcccgaagaggggcttctatggactccagttacc

SEQ ID NO: 40317 - DNA, 120 bp, synthetic construct
  source 1..120: mol_type = other DNA
tttccttccatggttagtgtaggttaaacctggcaaaaagctgctttcatttggaagtctcaggatgccagcaaagtgatgagagtggtagggatagaggtgagatgggggtggtgctgg

SEQ ID NO: 40318 - DNA, 120 bp, synthetic construct; identical to SEQ ID NO: 11541
  source 1..120: mol_type = other DNA

SEQ ID NO: 40319 - DNA, 120 bp, synthetic construct
  source 1..120: mol_type = other DNA
gtattagtgaaggtgatggtgaaggtggtggtggaggtcatgatggtgaaggtggggatggtggtggtagaggcagtggttgtgatggtggtgatggaggcggtggtgttagtggaggtg

SEQ ID NO: 40320 - DNA, 120 bp, synthetic construct
  source 1..120: mol_type = other DNA
aggtaatggtagtggtagaggtgacggtgatgttgatggtcgtgatgcagccatcttctgtgagcatttgcttggtgccagccactgatctgtgaacttcatgtgcattaattccttcta

SEQ ID NO: 40321 - DNA, 120 bp, synthetic construct
  source 1..120: mol_type = other DNA
tgggtacagaggagaaactgagatacaaatatatgtcccttgctccaggctcattaccactgcaacacacactttctctccatcacccagatggagtccacagccttgcctggaatccac

SEQ ID NO: 40322 - DNA, 120 bp, synthetic construct
  source 1..120: mol_type = other DNA
ctctacctcctgctgcttttcccctcctttcactctggctctgcccccagccctcccgtcctgccgggcactggctcctgcttgtggctgcagcccagagcagtcccttccctttagcct

SEQ ID NO: 40323 - DNA, 120 bp, synthetic construct; identical to SEQ ID NO: 11542
  source 1..120: mol_type = other DNA

SEQ ID NO: 40324 - DNA, 120 bp, synthetic construct
  source 1..120: mol_type = other DNA
catgagcccagggctatgggtgaccagcaagccattagcatatgcgtgtccatctgtcctgcctggctggtgggctgccaggatagccgttccttttgctgcccaaggaagtactcagga

SEQ ID NO: 40325 - DNA, 120 bp, synthetic construct
  source 1..120: mol_type = other DNA
gaccccaggggacattgtcaagaggcagaaccagggtgctcctgctgtgtaccagggccgacagcattgtgtcggggagcccgcccccacatgcaaggacacaccacacacagggaggcg

SEQ ID NO: 40326 - DNA, 120 bp, synthetic construct; identical to SEQ ID NO: 11543
  source 1..120: mol_type = other DNA

SEQ ID NO: 40327 - DNA, 120 bp, synthetic construct
  source 1..120: mol_type = other DNA
tgcaggcagctgcacataccaggctctgtgtatgaaagggaaactggacatgtgtgagtaggcccaggcctggcaaatggctcagagagacacctgtgaacagctgtgtttggtggctgc

SEQ ID NO: 40328 - DNA, 120 bp, synthetic construct
  source 1..120: mol_type = other DNA
gcacttaatcgtcacttggaaaccagtgtccagtagtggctgcccgggagcctcttgggttggcactgggctcgtgtgaggaggaggcgtggcaaagggaagggctctgtgacagaaggc

SEQ ID NO: 40329 - DNA, 120 bp, synthetic construct
  source 1..120: mol_type = other DNA
ccaggtgactctcaagccagggccacatgcgtgcaccatgggcccctcccacatccaaaagcaaaattatattctgcaactgtgttggtataagacaaacacaatccaggccactttatt

SEQ ID NO: 40330 - DNA, 120 bp, synthetic construct
  source 1..120: mol_type = other DNA
cctctgcaggctcctggccccctgggaccctggcaccgagggctggccctagcggcccagcccttgtgagccctcacacctgcctagagatggcgcgctccctagccagtcagggcgctc

SEQ ID NO: 40331 - DNA, 120 bp, synthetic construct; identical to SEQ ID NO: 11544
  source 1..120: mol_type = other DNA

SEQ ID NO: 40332 - DNA, 120 bp, synthetic construct
  source 1..120: mol_type = other DNA
cccatggaatgggagaaaaacttgtaattcatagatctgatcagtgttaatccagaatctgtagagaactcctcacactcaacaacagcaacaaaaaaacctgattccaaaatgagcaca

SEQ ID NO: 40333 - DNA, 120 bp, synthetic construct
  source 1..120: mol_type = other DNA
actaaaaatacaaaaaaattagccaggcgtggtggcaggtggctgtaatcccagctacttgggaggctgaggcaggagaatcgcttgaactcaggagacagaggttgcagttagccgaga

SEQ ID NO: 40334 - DNA, 120 bp, synthetic construct; identical to SEQ ID NO: 11545
  source 1..120: mol_type = other DNA

SEQ ID NO: 40335 - DNA, 120 bp, synthetic construct
  source 1..120: mol_type = other DNA
ggttaaacctagagctgacttcggctccagcacctccactctggatacatacaggaaaggaagcaggaagcagtcaggatatatttgtatgtccccattttcagcagcattattcatagt

SEQ ID NO: 40336 - DNA, 120 bp, synthetic construct
  source 1..120: mol_type = other DNA
gtcgtcaaattcgtggagacagtagaatggaggattccaggaactgggagaggagaggagggggagtaattgtctcatgggtacagaatttcagttttacaggataaaaagagtgctgtg

SEQ ID NO: 40337 - DNA, 120 bp, synthetic construct; identical to SEQ ID NO: 4257
  source 1..120: mol_type = other DNA

SEQ ID NO: 40338 - DNA, 120 bp, synthetic construct
  source 1..120: mol_type = other DNA
aaaaggagtggttttgtcctcagcctcaggcttgtttgctcagcacagtggctggccccacaaggttgctggtgcactagtgggcactgcacgtgtgcacagggcgcatccacacagctc

SEQ ID NO: 40339 - DNA, 120 bp, synthetic construct
  source 1..120: mol_type = other DNA
ccctttcacactcctgtttatgaaaccattgtactggctcgttgattcattgattcattcattggttcataaatttattcattcagctcacagaaagtgagttggcagatgtggcaggaa

SEQ ID NO: 40340 - DNA, 120 bp, synthetic construct
  source 1..120: mol_type = other DNA
gttgattcattgattcattcattggttcataaatttattcattcagctcacagaaagtgagttggcagatgtggcaggaaggtaggcaccctgtaagagtgaggaggaagtgagttggag

SEQ ID NO: 40341 - DNA, 120 bp, synthetic construct
  source 1..120: mol_type = other DNA
agattgcctgtcctgcccagcatgtggtccagggttggacaggggtggcagaggggacttgggaggtggggtgaggggtgaaagagaaagggatctggggactgaggtgtgtgacctgag

SEQ ID NO: 40342 - DNA, 120 bp, synthetic construct; identical to SEQ ID NO: 11547
  source 1..120: mol_type = other DNA

SEQ ID NO: 40343 - DNA, 120 bp, synthetic construct
  source 1..120: mol_type = other DNA
cagcagcagcagtgaggctgaaagacgggagccagaccttatgtagagtggaggaaaatagctgtccacatggaattctccacccagcaaaaatgggccttccatgaatgacgtcaaaaa

SEQ ID NO: 40344 - DNA, 120 bp, synthetic construct
  source 1..120: mol_type = other DNA
ccagggtgtttgttcagcataaatgttctgtgaaatgtattcgttgtacatgtcaaatatttgactatagtaagagaaaacgtgagtgggaagtgggagggaagcggtgggggggtgggg

SEQ ID NO: 40345 - DNA, 120 bp, synthetic construct
  source 1..120: mol_type = other DNA
ggaggagccctggggcctgtttcccattcccaggaagatgattgcattaggaaatcgtctcttaaggagattctgctgggccataataaagctgtcatctgcatcgtctgccacccatca

SEQ ID NO: 40346 - DNA, 120 bp, synthetic construct; identical to SEQ ID NO: 11548
  source 1..120: mol_type = other DNA

SEQ ID NO: 40347 - DNA, 120 bp, synthetic construct
  source 1..120: mol_type = other DNA
tggtgagcccctgcctccacagacagggccaggccacgcttagtatgtgtgcaccgagggtgcaggaaaatgtgtgtgcttgtgtgtgaaagcgggtatataccagtatgagcaaataca

SEQ ID NO: 40348 - DNA, 120 bp, synthetic construct
  source 1..120: mol_type = other DNA
agcatatgggagaacaagtgtataacagtgtgtgcccccgtggtgtgtaatggtatgcgtctgagagaatgagtgtgtgtgagagaaggaatgcatgtgtgcaatgtgtccgcctgagtc

SEQ ID NO: 40349 - DNA, 120 bp, synthetic construct
  source 1..120: mol_type = other DNA
aggtgggcaccagggaaggaaccccttcccagctggggtcagagcctgagggaggagctggatgctaggctggggctgctgtgcaggctcaggtctggcaggaactatccttagggcacg

SEQ ID NO: 40350 - DNA, 120 bp, synthetic construct
  source 1..120: mol_type = other DNA
cgtggactgcccgggcagcaggacctagaaaaggcaggtgtaacaaccggagacaggagcaacccctggcctgtcccagcatctctccaaagccctccaccgatgaagcttggccttgtg

SEQ ID NO: 40351 - DNA, 120 bp, synthetic construct; identical to SEQ ID NO: 11549
  source 1..120: mol_type = other DNA

SEQ ID NO: 40352 - DNA, 120 bp, synthetic construct
  source 1..120: mol_type = other DNA
atatacacacactcatgacacacactacataggccttgaaggtttctgaggtctctctgaatgtgagcagcaacttgggtctttggcaagtgtgctgtgagcaagcaggaccttccccca

SEQ ID NO: 40353 - DNA, 120 bp, synthetic construct
  source 1..120: mol_type = other DNA
gcaccgtcggtgggtgtggtgtgtgccaggccaccgctgtgctgcagaagtacagggtgggcccagccctggcaaccaaagctgtccaggcagacacctgtgtgctaggtttgagggagg

SEQ ID NO: 40354 - DNA, 120 bp, synthetic construct
  source 1..120: mol_type = other DNA
cgacccacgggcctggccttggtccacaggccaggcggcccttctaggcagaaaggcggcagcaggatgggaagccaaccagcagggcactgggcctcctggcaggctcagcacctgctg

SEQ ID NO: 40355 - DNA, 120 bp, synthetic construct; identical to SEQ ID NO: 11550
  source 1..120: mol_type = other DNA

SEQ ID NO: 40356 - DNA, 120 bp, synthetic construct
  source 1..120: mol_type = other DNA
ctcccctgtggctgacccaccacgattggctgcatcatttgtgggccccttgatctagaattatgaagaatttcaagactgtagcaaagagcattaaaccaagcgtgagacctctgagca

SEQ ID NO: 40357 - DNA, 120 bp, synthetic construct
  source 1..120: mol_type = other DNA
cttaagacagctgtgcccagctgcagagaccacctgggaggcattttaagtgcatttaagtctgtttctgctcgcaatcattgcctgacccacaaatcccttttggcagcagggagacca

SEQ ID NO: 40358 - DNA, 120 bp, synthetic construct
  source 1..120: mol_type = other DNA
cctacctctagtccctggaccactaaaggtgcttgcacatcatggaggccccagaggagcacctgtgggattcccagactggatctgctcctgcgacagatggggtgccagggccctacc

SEQ ID NO: 40359 - DNA, 120 bp, synthetic construct; identical to SEQ ID NO: 11551
  source 1..120: mol_type = other DNA

SEQ ID NO: 40360 - DNA, 120 bp, synthetic construct
  source 1..120: mol_type = other DNA
tgggagcagtgttcctgatgtacagtgagcacttcaagagaagctttctcctgttctattttcccactgtgggactccagacgtctcacctgttctcttccaggctccccttggcacttg

SEQ ID NO: 40361 - DNA, 120 bp, synthetic construct
  source 1..120: mol_type = other DNA
agcaaactgatcaaaaagagagatcgattacatacaagtgcagtattcctaatgtgtcctttggatgttggtattgtttgggcattctagagtctatttgcaggttcttaatggatttta

SEQ ID NO: 40362 - DNA, 120 bp, synthetic construct
  source 1..120: mol_type = other DNA
agtacattcacattgttgtacagccatcaccacctccgtccctgaacttttcatcttcccaaacttaaactctgtccctatcaaacactaactccccatcctgtctcccccaagccctag

SEQ ID NO: 40363 - DNA, 120 bp, synthetic construct; identical to SEQ ID NO: 11552
  source 1..120: mol_type = other DNA

SEQ ID NO: 40364 - DNA, 120 bp, synthetic construct
  source 1..120: mol_type = other DNA
gttggctaggctgatcttaaactcccgaccttaagtgatctgcccacctaggcctccgaaagtattaggattacaggcgtgagccactgcgcccggccagatttccctcctttctaagac

SEQ ID NO: 40365 - DNA, 120 bp, synthetic construct
  source 1..120: mol_type = other DNA
aatatctatttgagacttggctttcaattcttttgcgtatgtacccagaagtgggattggtagatcatatggtaattcaatttttaagtttttgggaactaccttcttgtttttcatgat

SEQ ID NO: 40366 - DNA, 120 bp, synthetic construct; identical to SEQ ID NO: 11553
  source 1..120: mol_type = other DNA

SEQ ID NO: 40367 - DNA, 120 bp, synthetic construct
  source 1..120: mol_type = other DNA
tactaagaaaatacaaaattagctgggcatggtggtgcatgcctgtaatcccagctactggggaggctgaggcaggagaatcgcttgaacccgggaggtggaagttgtggtgagccaaga

SEQ ID NO: 40368 - DNA, 120 bp, synthetic construct
  source 1..120: mol_type = other DNA
accttagctgcacaatactgacaaacgaatatgcccacgtgatctgcacccttctcaggatatgggaccttcacattccccagaaagtgccctgtggcccttcccaatctgtccacctcc

SEQ ID NO: 40369 - DNA, 120 bp, synthetic construct
  source 1..120: mol_type = other DNA
tctgcctggcttcctcaccttggcatggtttgtgtgtgtgacccatccaggtgtttgcgtgtatccatagttcatccttttccattgctgggcaggattctgtggcatggctggaccacg

SEQ ID NO: 40370 - DNA, 120 bp, synthetic construct; identical to SEQ ID NO: 11554
  source 1..120: mol_type = other DNA

SEQ ID NO: 40371 - DNA, 120 bp, synthetic construct
  source 1..120: mol_type = other DNA
aataggcttgtcactgaggatactgcttcccctgtttccttttctttttctgttttaaagcagttcttttctagcccgtgtgtaactatacaaataattgagtgttcatgttctcaggaa

SEQ ID NO: 40372 - DNA, 120 bp, synthetic construct
  source 1..120: mol_type = other DNA
cagagatgaaaaactcctgctaagatcggaattttaaattaatgattttttttttttttgtccttgaagaagccttattctcaccatccctcactcacttccctacttcccacagtggca

SEQ ID NO: 40373 - DNA, 120 bp, synthetic construct
  source 1..120: mol_type = other DNA
cgcctgggccagcatctctacggcacgtaccgcacacggctgcatgagaacaactggatctgcatccaggaggacaccggcctcctctaccttaaccggagcctggaccatagctcctgg

SEQ ID NO: 40374 - DNA, 120 bp, synthetic construct
  source 1..120: mol_type = other DNA
tatcacagccgctgacactgaagcttggcatggcttcccccccaccgctggtgtggaaggcgtcaggggttaagtgaggctggcctgcctctgtgtccagcctggagagaagccaggaca

SEQ ID NO: 40375 - DNA, 120 bp, synthetic construct; identical to SEQ ID NO: 11555
  source 1..120: mol_type = other DNA

SEQ ID NO: 40376 - DNA, 120 bp, synthetic construct
  source 1..120: mol_type = other DNA
cccctgtgacaggaaacggtgatgctgcacctggtagctcccatccctagcacccctccagggccacagcttgcacagccctcacaaccaccctgagccctgtctgctggtgagaggcaa

SEQ ID NO: 40377 - DNA, 120 bp, synthetic construct
  source 1..120: mol_type = other DNA
gcagttcctggaggaggcagcatctgaggttggtcgtggttctacgcacttagttgctgccctcttcatcctgagcctccagggtggagcttgaggaatgggagtccctgggtgggggcc

SEQ ID NO: 40378 - DNA, 120 bp, synthetic construct
  source 1..120: mol_type = other DNA
gagtttgtgtaaagaattaattacaacaggggattggagcaatgagggacaggctagcaaaaagcaaagagaatgccagagaatatgggaagagcagctctgaggagcagccgcccacct

SEQ ID NO: 40379 - DNA, 120 bp, synthetic construct; identical to SEQ ID NO: 11556
  source 1..120: mol_type = other DNA

SEQ ID NO: 40380 - DNA, 120 bp, synthetic construct
  source 1..120: mol_type = other DNA
ttgtggaccttggtggggaccagggtttacaccagccctggagctcctgcctcctccccattcccgactgcctggcagatgtggccgatgcccccacagacctgacttctctctgcagac

SEQ ID NO: 40381 - DNA, 120 bp, synthetic construct
  source 1..120: mol_type = other DNA
tttccagcctgcagctccctcaagccccgggagctctgcttcccagagacaaggccctccttccgcattcgggagaaccgacccccaggcaccttccaccagttccgcctgctgcctgtg

SEQ ID NO: 40382 - DNA, 120 bp, synthetic construct
  source 1..120: mol_type = other DNA
gccatctggtttattcttcaccttcatgccatcagttcattcaatattccagaagtacctcttgcatgcctgccaggggccaggtactgttctaggagctaaggatataacaatgaacac

SEQ ID NO: 40383 - DNA, 120 bp, synthetic construct
  source 1..120: mol_type = other DNA
agggaaacgctgaagaggaggggaacagacgaggagacctccattcctctatcgtaaattgggtggtcagggtgggggctagcagagcaaaggtgggagggtgccgggtaggcaggccta

SEQ ID NO: 40384 - DNA, 120 bp, synthetic construct; identical to SEQ ID NO: 11557
  source 1..120: mol_type = other DNA

SEQ ID NO: 40385 - DNA, 120 bp, synthetic construct
  source 1..120: mol_type = other DNA
agcaggcagctgcagccagtcagagggtgggatgagctggatcccagtggagaggggagaaggcagctgactaggtgcagggaggccccatttgaccatcagaaagtcaggaagtggggc

SEQ ID NO: 40386 - DNA, 120 bp, synthetic construct
  source 1..120: mol_type = other DNA
cttccccagattcctttcattctctggggcagggttgatggagcacttggttttttgcatgctgccctttttcactaaaaattatgtgattaaatttagtttagtggggggttttttgta

SEQ ID NO: 40387 - DNA, 120 bp, synthetic construct
  source 1..120: mol_type = other DNA
gtggggtcttcagcggtgaccttccgccttcagcatgcccccttttctggattatttctggaggacaaatccgaggtcaggctcgttgaagactgtgttgtggttcctggccctgcttca

SEQ ID NO: 40388 - DNA, 120 bp, synthetic construct; identical to SEQ ID NO: 11558
  source 1..120: mol_type = other DNA

SEQ ID NO: 40389 - DNA, 120 bp, synthetic construct
  source 1..120: mol_type = other DNA
gcgggcgcctgtagtcccagctactcgggaggctgaggcaggagaatcgcctgaacccgggagttggaggttgcagtgagccaagatcgcgccactgcactccagcctgggcaacacagc

SEQ ID NO: 40390 - DNA, 120 bp, synthetic construct
  source 1..120: mol_type = other DNA
gccaggtgggcggaggggtgtcccagtccctactggttgatcagggtgcctggtcctggctcttcccaaccagcacgagtgaggacgcagctgcagcaggacgtaagcacagtcatcgct

SEQ ID NO: 40391 - DNA, 120 bp, synthetic construct
  source 1..120: mol_type = other DNA
tctgaccgcagagcccccttcccgaggaaagcggctggcccggtcccggctggtgatcacgcggggcccctgtctgcttggtgcgcaggtgagggtctgcccttccgctgcgccccggac

SEQ ID NO: 40392 - DNA, 120 bp, synthetic construct; identical to SEQ ID NO: 11559
  source 1..120: mol_type = other DNA

SEQ ID NO: 40393 - DNA, 120 bp, synthetic construct
  source 1..120: mol_type = other DNA
ctagggggaggggaagggggagtcctgccagcacccagctgggccttgcctcgggaggcaaggaccaggacgaggcccgagggctcgcgtctggggcatacttgtgccgctgcaggcggg

SEQ ID NO: 40394 - DNA, 120 bp, synthetic construct
  source 1..120: mol_type = other DNA
gggaaggcggatcacctccggcgccgcccgccccgcccttctccggctcgcgctggtggagcgcgaccgccacctgctgggcctcggccttcctgcagccggcccacccagcaggggccg

SEQ ID NO: 40395 - DNA, 120 bp, synthetic construct
  source 1..120: mol_type = other DNA
aaggctatgtgggcctccctggggtgacagcagaggcctggtgggcagagccatccaggtgcccagcggctttcctcacaaccccctccagcctggggtaggaggatgcttggaacagag

SEQ ID NO: 40396 - DNA, 120 bp, synthetic construct; identical to SEQ ID NO: 11560
  source 1..120: mol_type = other DNA

SEQ ID NO: 40397 - DNA, 120 bp, synthetic construct
  source 1..120: mol_type = other DNA
aaggtctctggttttggggggtctgaggggcccatctcgcctgcactgaccaacgccctctgcatcctgcaggacaccgtggtggccacgctgcgtgtcttcgatgcagacgtggtacct

SEQ ID NO: 40398 - DNA, 120 bp, synthetic construct
  source 1..120: mol_type = other DNA
ttcgtgcgggcgaccgtacatgactatagtaagaggggctggtggcacggcctggctaggcccccaggaaatgaggtgctcgctcttcatgggcaagcagcaccctacacacatgcacac

SEQ ID NO: 40399 - DNA, 120 bp, synthetic construct
  source 1..120: mol_type = other DNA
ctgagctgatccatggccgaccctggcagggccccaccacacccccctgctgacctcaccagggctcaccaccgactgcaaacacacatgtcacctgaggctttcctccagcccctggca

SEQ ID NO: 40400 - DNA, 120 bp, synthetic construct; identical to SEQ ID NO: 11561
  source 1..120: mol_type = other DNA

SEQ ID NO: 40401 - DNA, 120 bp, synthetic construct
  source 1..120: mol_type = other DNA
gcctatggaggccccacttgtcagaggggagacagcctccttgccctggcactgaacaccctgtgtgccagagtgcccctcccatcattgtttccaccacatgagatccacagtggcagc

SEQ ID NO: 40402 - DNA, 120 bp, synthetic construct
  source 1..120: mol_type = other DNA
ctctagtgtgtccttcccagggccttggtaatgtagacctttaaccccccatgcctcacacacacacacacacacacacacacacacacacacacacaccctgttacccaaaaaacgaaa

SEQ ID NO: 40403 - DNA, 120 bp, synthetic construct; identical to SEQ ID NO: 11562
  source 1..120: mol_type = other DNA

SEQ ID NO: 40404 - DNA, 120 bp, synthetic construct
  source 1..120: mol_type = other DNA
aaaggaatgttaaggaggcctgctatgtgtcgcctgatgctatacagggtcaggagggaaagtaaaccacgttatacctgggtaacttaaaaaaaaaaggtttttaacaagattttatgg

SEQ ID NO: 40405 - DNA, 120 bp, synthetic construct
  source 1..120: mol_type = other DNA
aaaaaaaaaaaaatacaaaaaattagccaggcgtggtggcacatgcctggattccaggaacctgggaggctgaggtgggaggatggctggagcctgggaggtcaaggctgcaatgagatg

SEQ ID NO: 40406 - DNA, 120 bp, synthetic construct
  source 1..120: mol_type = other DNA
agagtccgatctgtcagtcttatgatctctgttttaatgttaatgccggtcagttgtgtccaaactccagcaggaagagggcctaataaggcaagtccaccctgccttcctgtcatggcc

SEQ ID NO: 40407 - DNA, 120 bp, synthetic construct; identical to SEQ ID NO: 11563
  source 1..120: mol_type = other DNA

SEQ ID NO: 40408 - DNA, 120 bp, synthetic construct
  source 1..120: mol_type = other DNA
gcactgtatgtgtgaaagtgcgtgtttgcaccagtgtgagtgcagggctgtgtctgggaagaggtgtgctacacatgaggaagcagccagagcagcttggtggtcattgttgtgccccta

SEQ ID NO: 40409 - DNA, 120 bp, synthetic construct
  source 1..120: mol_type = other DNA
ttcaacgtgtcggtgctgccggtcagcctgcacctgcccagtacctactccctctccgtgagcaggagggctcgccgatttgcccaggtgagcccatacctattgcctgtctggggaaga

SEQ ID NO: 40410 - DNA, 120 bp, synthetic construct
  source 1..120: mol_type = other DNA
cagaagaggcctgggagagctcacagtgggcagggctgggggctccttgggcctctctttttttcccctttccattcttggtatctttaaaatgtattttcaaaaatgcaagagcaatac

SEQ ID NO: 40411 - DNA, 120 bp, synthetic construct
  source 1..120: mol_type = other DNA
atctgcaagtgtgcagagatcacagtgctgtccacagtggtgccctcagggggaggcaggaaacgcttccactttttactttttgtaactaggtttgctagaaagcgtatatttatattt

SEQ ID NO: 40412 - DNA, 120 bp, synthetic construct; identical to SEQ ID NO: 11564
  source 1..120: mol_type = other DNA

SEQ ID NO: 40413 - DNA, 120 bp, synthetic construct
  source 1..120: mol_type = other DNA
tcagctcctggcagccacccgtgtccagcccacgagggagcccacccttggacatatctaagctccccgaccacctccttggcctttaatgggagtgggatcagagacagaggggcgaca

SEQ ID NO: 40414 - DNA, 120 bp, synthetic construct
  source 1..120: mol_type = other DNA
actgtggtctcacctttctccccagtttgtaaagctgtgaattagggacaggaaccctgaacaattttgagagtcacatgagcatttggaagtgggctttgtaggggaaagtgaggaggc

SEQ ID NO: 40415 - DNA, 120 bp, synthetic construct; identical to SEQ ID NO: 11565
  source 1..120: mol_type = other DNA

SEQ ID NO: 40416 - DNA, 120 bp, synthetic construct
  source 1..120: mol_type = other DNA
gtggctggggttcagtgctctgaccaggggacaccagggcagggtggacctctaaaccctgtgcactgagggaggagtgaggggtccccagagcactgctggggcagctgggagcagcca

SEQ ID NO: 40417 - DNA, 120 bp, synthetic construct
  source 1..120: mol_type = other DNA
cctgggttgccttgacctccagctcccaggaacaggggcagctggtaacatgtggcctgagtggaacggggcagggcagggctggggcaggtgggtgggtatgaaggctctgaggggtgg

SEQ ID NO: 40418 - DNA, 120 bp, synthetic construct
  source 1..120: mol_type = other DNA
ggtgttcccctgtgcccccctagatcgggaaagtctgtgtggaaaactgccaggcattcagtggcatcaacgtccagtacaagctgcattcctctggtgccaactgcagcacgctagggg

SEQ ID NO: 40419 - DNA, 120 bp, synthetic construct
  source 1..120: mol_type = other DNA
ggcaggcccaggcccagctgcttgtaacagtggaggggtcatgtgagtgcctgctccagggagggagggtcggggtcctgggggcttctggagcctgggcctcctgccctttgagaaaag

SEQ ID NO: 40420 - DNA, 120 bp, synthetic construct; identical to SEQ ID NO: 11566
  source 1..120: mol_type = other DNA

SEQ ID NO: 40421 - DNA, 120 bp, synthetic construct
  source 1..120: mol_type = other DNA
gtgaccatgatgtcctgtaccctgccctgcgccctgtgctcctggcactgtctttgctgccctgggtctgtcactccggtccccttgggctccatccgtgggcagctcagctggtgctgt

SEQ ID NO: 40422 - DNA, 120 bp, synthetic construct
  source 1..120: mol_type = other DNA
agagacggctggagtgtgaggagtgtggcggcctgggctccccaacaggcaggtgtgagtggaggcaaggagatggcaaaggtaagccctggaaacgcccaagggaggcctgcaggggcg

SEQ ID NO: 40423 - DNA, 120 bp, synthetic construct; identical to SEQ ID NO: 11567
  source 1..120: mol_type = other DNA

SEQ ID NO: 40424 - DNA, 120 bp, synthetic construct
  source 1..120: mol_type = other DNA
tcccggcctctttgctgtaagggccacctgtgtgaggaaccccccatacctcctctcccataagccatggctccccaggatgcttccgctggcaaggctctgtatatggtgtttccctac

SEQ ID NO: 40425 - DNA, 120 bp, synthetic construct
  source 1..120: mol_type = other DNA
aacttctccacctgctctcccagcaccaagacctgccccgacggccactgcgatgttgtggagacccaagacatcaacatttgccctcaggactgcctccgtaagcagggtttaatcagg

SEQ ID NO: 40426 - DNA, 120 bp, synthetic construct
  source 1..120: mol_type = other DNA
ctagccatggggagggagcaggcagggtcagggacagggggaaggcagggacccacagactgtccaggcccctgctgaggtcccagaagtcggcacacacagatttcagaagcagagaat

SEQ ID NO: 40427 - DNA, 120 bp, synthetic construct; identical to SEQ ID NO: 11568
  source 1..120: mol_type = other DNA

SEQ ID NO: 40428 - DNA, 120 bp, synthetic construct
  source 1..120: mol_type = other DNA
tggggagccccgggggattaaagctggctatggcacctgcaactgcttccctgaggaggagaagtgcttctgcgagcccgaagacatccagggtgagtgggtggcggccgggaccaccac

SEQ ID NO: 40429 - DNA, 120 bp, synthetic construct
  source 1..120: mol_type = other DNA
cacccaggagaggggccagggcccctgtaaagtgtcttctggccataagttctatgatggacaggccagaaaagcagttcttccaccaaacaacttgtcagcctgacaagtcactgtccc

SEQ ID NO: 40430 - DNA, 120 bp, synthetic construct
  source 1..120: mol_type = other DNA
tctgtcattgagttttctggtattatatagccctacgtccctagccacttagcattttcataaagaaaatgccaaagacatttggaacagaggaaaattttgacctcccctgccagccct

SEQ ID NO: 40431 - DNA, 120 bp, synthetic construct
  source 1..120: mol_type = other DNA
aatggcagtacccatgctcgatggggtgttctcaggccttcccacacctccatggccacttcccagctggcgcggacacggcaggctggagagccatgaggcagagcatacgcagcctgt

SEQ ID NO: 40432 - DNA, 120 bp, synthetic construct; identical to SEQ ID NO: 11569
  source 1..120: mol_type = other DNA

SEQ ID NO: 40433 - DNA, 120 bp, synthetic construct
  source 1..120: mol_type = other DNA
ccttccagggagggaggccagctggggagacagaggccatcctgtgaggggctgccaacgctgggcagacgaggcctgtgttctgcccccatttccatagggcgctgtgtggggacagtc

SEQ ID NO: 40434 - DNA, 120 bp, synthetic construct
  source 1..120: mol_type = other DNA
gcctttctggggagcctggcctgcaggtctgcatgtgctactcagagcctccaggctgtgccgagtatcctggagcctccttgtcccggccaggcaggcctctgccctctcctggtggtg

SEQ ID NO: 40435 - DNA, 120 bp, synthetic construct
  source 1..120: mol_type = other DNA
gtggcgtgaatagctcctcggcaggagcctccagggaggaagctgagcacccagtggccacagggccctggcagttcccatctcaggctgggaggtggcctgggattcctgggaggggcc

SEQ ID NO: 40436 - DNA, 120 bp, synthetic construct; identical to SEQ ID NO: 11570
  source 1..120: mol_type = other DNA

SEQ ID NO: 40437 - DNA, 120 bp, synthetic construct
  source 1..120: mol_type = other DNA
tgagaggatcaggttgatgtcgccctcatgtgcttattgcagtctctagagtgtggtaaacaggtttccagtgccagctgtggaggtgacagcggcagggaagccatggcagtgtcgaca

SEQ ID NO: 40438 - DNA, 120 bp, synthetic construct
  source 1..120: mol_type = other DNA
caggctttggcctccctggtcagagttcaagtactgggggccagggtgggggtctgggaaggcatccggagcagtcccaagtgggcccaatgtgtggatagaactttggtgggagggcag

SEQ ID NO: 40439 - DNA, 120 bp, synthetic construct
  source 1..120: mol_type = other DNA
tgtagagaagttgtcctggacacttccactgtagtcagaggtcctgggctgggcctggtgctcatttagtcctggggcaggggtcaggggagacagtagaccaggaaccagagagggtcg

SEQ ID NO: 40440 - DNA, 120 bp, synthetic construct; identical to SEQ ID NO: 11571
  source 1..120: mol_type = other DNA

SEQ ID NO: 40441 - DNA, 120 bp, synthetic construct
  source 1..120: mol_type = other DNA
accacggtggccgtgaagatgctgaaaggtacctgccaggcacaggcacagtgcccctgggggagtctccggggcggggggcgggtgaggcccctcctgcccagcatgggaccctgaaga

SEQ ID NO: 40442 - DNA, 120 bp, synthetic construct
  source 1..120: mol_type = other DNA
cagtgccactgaagatctaagctttaaacatttaaaaagccctttgattttgagctgacagctgtcttcactccagtctgccccattcattcctctcagcccagtgtctcctggggtctt

SEQ ID NO: 40443 - DNA, 120 bp, synthetic construct; identical to SEQ ID NO: 11572
  source 1..120: mol_type = other DNA

SEQ ID NO: 40444 - DNA, 120 bp, synthetic construct
  source 1..120: mol_type = other DNA
ttgcagccatgcacagccccaggctgcccacacctggtccaaggggtcctggggccccaactcccaactgtcctctcccttccagacaacctttcaggacagaggaggtggcacggcaca

SEQ ID NO: 40445 - DNA, 120 bp, synthetic construct
  source 1..120: mol_type = other DNA
cgcatgtgctgggcaggtgatccctgtggtgcctcgtcctgtttccatcatgcctctacagttagactctctggggaatcatgctattcattaagaataagccagaatgtcaggtgtgca

SEQ ID NO: 40446 - DNA, 120 bp, synthetic construct
  source 1..120: mol_type = other DNA
ccaggctggccatctcagacaggagcgggaaatggggagcctggtcgcggtgtgtggacctcctttatggctctccaccttctccagggcctctcccgacaagtgggtgtgtgggtaccc

SEQ ID NO: 40447 - DNA, 120 bp, synthetic construct
  source 1..120: mol_type = other DNA
aagatccggcatgtgtggttgctggctcctcagggtgcttcttcctcagggtggatgaggcccctgtccactgatcccaaaggctgggagaagcctcaagcagcatcgtctttgcaggcc

SEQ ID NO: 40448 - DNA, 120 bp, synthetic construct; identical to SEQ ID NO: 11573
  source 1..120: mol_type = other DNA

SEQ ID NO: 40449 - DNA, 120 bp, synthetic construct
  source 1..120: mol_type = other DNA
cccagcctggagcttgtgtctagctgagtccacgggctgagtggtcactttccatcagaggggccccgcgctagcggcactccctgggcccacagggctactcagaggtctctggtgtga

SEQ ID NO: 40450 - DNA, 120 bp, synthetic construct
  source 1..120: mol_type = other DNA
gacctcaggtgaccccagccccgccctgcatggcaggaacattgtcaccatttctcagataaagacccaggagaccagcctggtttgttggttttccaaaccaccatgctgctcaggggc

SEQ ID NO: 40451 - DNA, 120 bp, synthetic construct
  source 1..120: mol_type = other DNA
tgggaacagggagcaggctgtgtgcagagcccagcgccaggcaggaacccttgcatctgcgcaggcctctgcctccatcagcatccccagcctgcactggggcaggacccaggaggcaaa

SEQ ID NO: 40452 - DNA, 120 bp, synthetic construct; identical to SEQ ID NO: 11574
  source 1..120: mol_type = other DNA

SEQ ID NO: 40453 - DNA, 120 bp, synthetic construct
  source 1..120: mol_type = other DNA
ctccgcgagagccgcaaagtggggcctggctacctgggcagtggaggcagccgcaactccagctccctggaccacccggatgagcgggccctcaccatgggcgacctcatctcatttgcc

SEQ ID NO: 40454 - DNA, 120 bp, synthetic construct
  source 1..120: mol_type = other DNA
ctggcctgccactcccccaccatgccacactctagcccaccatgcccctgccatggcatgccatgctatggctcaccacgcccctgccatgtcacaccctgactccaccacgcccctgcc

SEQ ID NO: 40455 - DNA, 120 bp, synthetic construct; identical to SEQ ID NO: 11575
  source 1..120: mol_type = other DNA

SEQ ID NO: 40456 - DNA, 120 bp, synthetic construct
  source 1..120: mol_type = other DNA
cagtgcccttgggaagcctaggaaagataccgaagattagtggagctctaagctttttatagccctcaccccaaatctttctgaccctgggtccccaaggacccaattagaactccgctc

SEQ ID NO: 40457 - DNA, 120 bp, synthetic construct
  source 1..120: mol_type = other DNA
cttctgcagaataaaggtcaccgttctgatatgaccttagctcttttctcaaagaagggtgggatgaaattagcaggatcgtcattctttgcaaaaaggaatgaactgctttacaagtga

SEQ ID NO: 40458 - DNA, 120 bp, synthetic construct
  source 1..120: mol_type = other DNA
cgcagcccagctttgtccaagtctatgaaacaggcagtgggcacccttggggacacctggttccctaccatggtcctagtcccgggacaactgccttggccctcttagtttttctgccca

SEQ ID NO: 40459 - DNA, 120 bp, synthetic construct
  source 1..120: mol_type = other DNA
aaaaaaaaaaaccacaaaaggcgacttcctatgattcagctttgctctgaggggtctggagaagccatttgtgttgccaggggttgtgagctgttccgtttcttctggggtttcccttgt

SEQ ID NO: 40460 - DNA, 120 bp, synthetic construct
  source 1..120: mol_type = other DNA
attcttatacaagacgtgcaggctacactgtcacacactgctgccaagacagccacactgcactaaggacataaatccctcatgtgtttaagtaaaagaagtgacagtaagattgtgttc

SEQ ID NO: 40461 - DNA, 120 bp, synthetic construct; identical to SEQ ID NO: 11576
  source 1..120: mol_type = other DNA

SEQ ID NO: 40462 - DNA, 120 bp, synthetic construct
  source 1..120: mol_type = other DNA
ccctgcaatacaataagagagaaaaaacagcctcccccaaggcacacagacaaatcccttccctcaaggctccttcagtgtggtagctgctggcaaagtgcccaacatggaaatgctaga

SEQ ID NO: 40463 - DNA, 120 bp, synthetic construct
  source 1..120: mol_type = other DNA
agctggccctgtgtgcctgtgggtgggcagctgactcccgccagcatctcagcaatccacaggaggttcaggctggagctccagccccttcaaagatgtgtgtggccagttctgtgccca

SEQ ID NO: 40464 - DNA, 120 bp, synthetic construct
  source 1..120: mol_type = other DNA
agggtcggattccagttaaatggatggcaattgaatccctttttgatcatatctacaccacgcaaagtgatgtgtaagtgtgggtgttgctctcttggggtggaggttacagaaacaccc

SEQ ID NO: 40465 - DNA, 120 bp, synthetic construct; identical to SEQ ID NO: 11577
  source 1..120: mol_type = other DNA

SEQ ID NO: 40466 - DNA, 120 bp, synthetic construct
  source 1..120: mol_type = other DNA
agcttggggactccacctgaagatggccttgtgtgagtttatagattggtgtgccccaaactgctcaaaggtggaagccaaaatctcattcttccaggtccaatgacaagagctgatcac

SEQ ID NO: 40467 - DNA, 120 bp, synthetic construct
  source 1..120: mol_type = other DNA
gtggcgcaatcctggctcactgcaacctccacctcctgggttcaagcgattcctgtgcctcagcctcctgagtagctgggattacaggcacgtgctacttcgcctggctcatttttttgt

SEQ ID NO: 40468 - DNA, 120 bp, synthetic construct
  source 1..120: mol_type = other DNA
ctggccaacatgtgcatcttaaatactgtgggctgtgaataagcaattggacaacagctttccgattatataagctgactgtaggctagttggaaaaggcagagaaaagcataaagaaga

SEQ ID NO: 40469 - DNA, 120 bp, synthetic construct
  source 1..120: mol_type = other DNA
tttattgccctaaatgggctcatgcgatgctgttttgtgatatgattttgttcccattgcaaagcgagttttccttcacagttaaaatgtttttctatagctttttttccttctaagatt

SEQ ID NO: 40470 - DNA, 120 bp, synthetic construct; identical to SEQ ID NO: 11578
  source 1..120: mol_type = other DNA

SEQ ID NO: 40471 - DNA, 120 bp, synthetic construct
  source 1..120: mol_type = other DNA
ttggtggtgggggtggatatctgggccccccggagggctctgtgagggccaggtggagccactcactggtcctttcactctctgcagatggtcttttggtgtcctgctgtgggagatcgt

SEQ ID NO: 40472 - DNA, 120 bp, synthetic construct
  source 1..120: mol_type = other DNA
ggccagacaactgcagcgaggagatgtgagcggggactggctttggcccagcctcacttgggaagggaggggacatctgtgtgcattccctccccatccagagcagccccaggagaaacc

SEQ ID NO: 40473 - DNA, 120 bp, synthetic construct; identical to SEQ ID NO: 11579
  source 1..120: mol_type = other DNA

SEQ ID NO: 40474 - DNA, 120 bp, synthetic construct
  source 1..120: mol_type = other DNA
ctgcccagaggcagagatgcatggtacatgcattccacagagtgtgcacactgctggggcgtggagggggcatgctgggccgagaagccaggtaccacctccctgggcccccagctggtg

SEQ ID NO: 40475 - DNA, 120 bp, synthetic construct
  source 1..120: mol_type = other DNA
tcattcttcttgagagttttaaggactggcacttctcacttagctgccagagcaagcatagtatccagtgagctgtttaccagtgtctttgcaagggaagtaaaaatgaatctcccttgg

SEQ ID NO: 40476 - DNA, 120 bp, synthetic construct
  source 1..120: mol_type = other DNA
gatgcagaaatagctttggagttggagacagagcacactgggcccagggtacagggcagggtgcgatggctgtggtgggctgtccttctgagacctggccctgcttggatcatattggcc

SEQ ID NO: 40477 - DNA, 120 bp, synthetic construct
  source 1..120: mol_type = other DNA
tgagtgcctgggtccaattcccacaagctgaaagtggcttggggagactccagcctcaccccagggcagtagttttagccctcagagttcccagtgtggggccacagtgggattgtgcag

SEQ ID NO: 40478 - DNA, 120 bp, synthetic construct; identical to SEQ ID NO: 11580
  source 1..120: mol_type = other DNA

SEQ ID NO: 40479 - DNA, 120 bp, synthetic construct
  source 1..120: mol_type = other DNA
tgggtcttctgaattttatgaggtttatgttgtctcccagtttttattgttaacaattcatttaaatttcccagagccgaacgcaggccaaacaaagcatatcggggggtggccagagtc

SEQ ID NO: 40480 - DNA, 120 bp, synthetic construct
  source 1..120: mol_type = other DNA
tttttattgttaacaattcatttaaatttcccagagccgaacgcaggccaaacaaagcatatcggggggtggccagagtcagcctgtgtgcctggaagtacagtttgtgaggtctacaca

SEQ ID NO: 40481 - DNA, 120 bp, synthetic construct
  source 1..120: mol_type = other DNA
ttaacattggcacatttactgagttgtcacttcttccgacttggatagcgggatgcaggacctaggaccccataggaaaacttcacatcactgtctcgcttggatgaaaacttcaagtcc

SEQ ID NO: 40482 - DNA, 120 bp, synthetic construct; identical to SEQ ID NO: 11581
  source 1..120: mol_type = other DNA

SEQ ID NO: 40483 - DNA, 120 bp, synthetic construct
  source 1..120: mol_type = other DNA
tccgggttgggccaggggcagctagatgaggcgtcccccaaggctgccctccaggccctggagataagacgctgagggagcacatttctttccccagggaggtgactttccaggggaaga

SEQ ID NO: 40484 - DNA, 120 bp, synthetic construct
  source 1..120: mol_type = other DNA
gcgaggtggagacacagccagagcctctgccctgaggatggcttgttgtatactgagttgtatctagttgtggcacatggcttggagtgaccggccatctctgtcttccaggactacttg

SEQ ID NO: 40485 - DNA, 120 bp, synthetic construct
  source 1..120: mol_type = other DNA
attgaaaacaaactctatggtagaatttcccatgcatttactagattctagcaccgctgtcccctttgcactatccttcctctctgtgatgctttttaaaaatgtttctggtctgaacaa

SEQ ID NO: 40486 - DNA, 120 bp, synthetic construct; identical to SEQ ID NO: 11582
  source 1..120: mol_type = other DNA

SEQ ID NO: 40487 - DNA, 120 bp, synthetic construct
  source 1..120: mol_type = other DNA
gggagcacagccaggttcccccagacccctcctgggcaggcaggtgcctctcagaggccacccggcactggcgagcagccactggccaagcctcagccccagtcccagccacatgtcctc

SEQ ID NO: 40488 - DNA, 120 bp, synthetic construct
  source 1..120: mol_type = other DNA
aaagctggagcagttgctttttgaaagaacatggtctgtggtgctgtggtcttacaatggacagtaaatatggttcttgccaaaactccttcttttgtctttgattaaatactagaaatt

SEQ ID NO: 40489 - DNA, 120 bp, synthetic construct
  source 1..120: mol_type = other DNA
ttttctgtttcctaacttcatcattgattgtttgaaatcttggagtttcaagcatttttttcaagctgagacggttccttttgcatgcctcctgactcactgactcctcactggctttgt

SEQ ID NO: 40490 - DNA, 120 bp, synthetic construct; identical to SEQ ID NO: 11583
  source 1..120: mol_type = other DNA

SEQ ID NO: 40491 - DNA, 120 bp, synthetic construct
  source 1..120: mol_type = other DNA
aactataacagtgtttttggaaacctggaacacaaaaccattaatataattggcacagaaaccacgagtttggtttgaacatcaaagggagttttgccaaggccttactgtctgcacttg

SEQ ID NO: 40492 - DNA, 120 bp, synthetic construct
  source 1..120: mol_type = other DNA
ttccaagatatccaaatgatagtgtatatgctaactggatgctttcaccctcagcggcaaaattaatggacacgtttgatagttaacatttctttgtgaaaggtaatggactcacaaggg

SEQ ID NO: 40493 - DNA, 120 bp, synthetic construct
  source 1..120: mol_type = other DNA
ggtggcagactcgtttttggtagtttgttttaacttccaaggtggttttacttctgatagccggtgattttccctcctagcagacatgccacaccgggtaagagctctgagtcttagtgg

SEQ ID NO: 40494 - DNA, 120 bp, synthetic construct; identical to SEQ ID NO: 11584
  source 1..120: mol_type = other DNA

SEQ ID NO: 40495 - DNA, 120 bp, synthetic construct
  source 1..120: mol_type = other DNA
tttttaaatcatgcaacctttccttaggaagacatttggttttcatcatgattaagatgattcctagatttagcacaatggagagattccatgccatctttactatgtggatggtggtat

SEQ ID NO: 40496 - DNA, 120 bp, synthetic construct
  source 1..120: mol_type = other DNA
gtcccagaattgctgacagcagaggctttgctgctgtgaatcccacctgccaccagcctgcagcacaccccacagccaagtagaggcgaaagcagtggctcatcctacctgttaggagca

SEQ ID NO: 40497 - DNA, 120 bp, synthetic construct
  source 1..120: mol_type = other DNA
attctgatgtgaaaaagatggtgtttggctcttatagagcctgtgtgaaaggcccatggatcagctcttcctgtgtttgtaatttaatgctgctacaagatgtttctgtttcttagattc

SEQ ID NO: 40498 - DNA, 120 bp, synthetic construct
  source 1..120: mol_type = other DNA
gttgtcagcactgtaacttcgcagaaaagagtcggattaccaaaacactgcctgctcttcagacttaaagcactgataggacttaaaatagtctcattcaaatactgtattttatatagg

SEQ ID NO: 40499 - DNA, 120 bp, synthetic construct; identical to SEQ ID NO: 11585
  source 1..120: mol_type = other DNA

SEQ ID NO: 40500 - DNA, 120 bp, synthetic construct
  source 1..120: mol_type = other DNA
tctcaggagggtaagaactccaggtctaaacagctgacccagtgatggggaatttatccttgaccaatttatccttgaccaataacctaattgtctattcctgagttataaaagtcccca

SEQ ID NO: 40501 - DNA, 120 bp, synthetic construct
  source 1..120: mol_type = other DNA
taatctgtcagttattaaaatttgtaaaatctatttatgaaaggtcattaaaccagatcatgttcctttttttgtaatcaaggtgactaagaaaatcagttgtgtaaataaaatcatgta

SEQ ID NO: 40502 - DNA, 120 bp, synthetic construct; identical to SEQ ID NO: 11586
  source 1..120: mol_type = other DNA

SEQ ID NO: 40503 - DNA, 120 bp, synthetic construct
  source 1..120: mol_type = other DNA
atagtcactactatatgtacttgcttttatgttacataagcttttaatatataacttaatctctgagatgttatttggttgagaggcctcagttgattaaacacagattttcttattata

SEQ ID NO: 40504 - DNA, 120 bp, synthetic construct
  source 1..120: mol_type = other DNA
ccctggtttgagaaaaagtttggtttgacatttagtaattaagccttattgcatgatacttccttgactcagcaaagccacatataatataaatcaagtgtagaggactttggtttttaa

SEQ ID NO: 40505 - DNA, 120 bp, synthetic construct
  source 1..120: mol_type = other DNA
tcagttatggcctgtctcacagaggaagtatgattatctaaatacgtacttttttttttaaataaaggaattgcttgctcaactcagtgctttctgtaaaacattgcaaaattgtgcgca

SEQ ID NO: 40506 - DNA, 120 bp, synthetic construct; identical to SEQ ID NO: 11587
  source 1..120: mol_type = other DNA

SEQ ID NO: 40507 - DNA, 120 bp, synthetic construct
  source 1..120: mol_type = other DNA
ggcttttgtcctgctcctgggctcaccaccacactcagaactacacctgtttatcagaagtaaattaggcaatattgagtttttaaaagcccaagctatagattgaatgtcattgaaata

SEQ ID NO: 40508 - DNA, 120 bp, synthetic construct
  source 1..120: mol_type = other DNA
tatgtaccctacctacactgtaagctctaagaagggagagtcttgtctgtcttgctcactgctatatctcaatattctatgacaatgactacagcgtagtaggtactcattaaatactca

SEQ ID NO: 40509 - DNA, 120 bp, synthetic construct
  source 1..120: mol_type = other DNA
atatcatatgtatggtttctaagatcgatctggaagctgacttccttcgaacaaaatgagaacaaatcttttacagcttcgactggatatataaaatcatttagtgtgaaatggctccac

SEQ ID NO: 40510 - DNA, 120 bp, synthetic construct; identical to SEQ ID NO: 11588
  source 1..120: mol_type = other DNA

SEQ ID NO: 40511 - DNA, 120 bp, synthetic construct
  source 1..120: mol_type = other DNA
ctccctcatctagagcagacattgatgctccatcgtgacaccaaatggtgctttgacatttttttctactggtaatcaacaagacctgatcaaaagatgaaaattcttttcaaatagttt

SEQ ID NO: 40512 - DNA, 120 bp, synthetic construct
  source 1..120: mol_type = other DNA
gacacaacaattgctttcattaccatcatcttcttccaaggcatctgggtgagaaacaaagatgggttctgatgggtatgaatcaggctcttgccaaacccaagtttctttagttttgac

SEQ ID NO: 40513 - DNA, 120 bp, synthetic construct; identical to SEQ ID NO: 11589
  source 1..120: mol_type = other DNA

SEQ ID NO: 40514 - DNA, 120 bp, synthetic construct
  source 1..120: mol_type = other DNA
aattgcagtggcagttgtattggggagcgtgactaaattcttgcctgtgtcagcctaggagagaagataacagaaacctcagtgagcaggaaagaattcaaacagccagaaatgcagagt

SEQ ID NO: 40515 - DNA, 120 bp, synthetic construct
  source 1..120: mol_type = other DNA
tgtcagtcactggctatgtatcactgggaaagtcacataacctcttaggccatcaattttctcttcagtaaaatgagaccatccttgaagaaaatttagggctccaaagaaaggcctctg

SEQ ID NO: 40516 - DNA, 120 bp, synthetic construct
  source 1..120: mol_type = other DNA
tcacacgtagaatatgttttgattttgcttgaaaaaaaaaatccttacagttatgttgacaaaaagaaaaaaaaaaaacgctggaccatatgtttcctaagatctcttgtcacacacaca

SEQ ID NO: 40517 - DNA, 120 bp, synthetic construct
  source 1..120: mol_type = other DNA
gcattcaggatgttttggagagtgaagtccctgtcctcatgaagcctacattctagttcaaggagatatacaataaatataattaataaattttataatataccacaaatgtgggggaaa

SEQ ID NO: 40518 - DNA, 120 bp, synthetic construct; identical to SEQ ID NO: 11590
  source 1..120: mol_type = other DNA

SEQ ID NO: 40519 - DNA, 120 bp, synthetic construct
  source 1..120: mol_type = other DNA
cacaggagtgagatgctatgatttatttttagggtagccttgttagtagggaggatccaagagtggaatcagggaaaccagtttgtcttgtagtagtctagttgaaagaaaacaatggtt

SEQ ID NO: 40520 - DNA, 120 bp, synthetic construct
  source 1..120: mol_type = other DNA
caagcataacaccaaggtgtttgacctgtacaatgttgatgtcacaacaaagataggaactacaggtggagtaaatttttggtgggggaagatgagaagttcaagtcttgtcttattaga

SEQ ID NO: 40521 - DNA, 120 bp, synthetic construct; identical to SEQ ID NO: 11591
  source 1..120: mol_type = other DNA

SEQ ID NO: 40522 - DNA, 120 bp, synthetic construct
  source 1..120: mol_type = other DNA
cagtatatgagtacagatgctggtgggtgggtagatgtgctggcaagtctatggttcctttctgatttctttcatttgtttcagagaaaaagaaaacatagccatcagctgcatctgagt

SEQ ID NO: 40523 - DNA, 120 bp, synthetic construct
  source 1..120: mol_type = other DNA
atctaaaatggaaccaattaacatgattgtgtgttgtctgcacttagttcagcctcagaggtataagcatggagggggtggagagctgaatttaactagggttgtgattttgacaaatga

SEQ ID NO: 40524 - DNA, 120 bp, synthetic construct
  source 1..120: mol_type = other DNA
gagagtgagaaagtactgtgttcaatggattggaagttcctggtggaaattgcagtagggcaagtgatgttgaaagataaaaggtcagagtgggtcatgcatgaaacagattatggaagg

SEQ ID NO: 40525 - DNA, 120 bp, synthetic construct; identical to SEQ ID NO: 11592
  source 1..120: mol_type = other DNA

SEQ ID NO: 40526 - DNA, 120 bp, synthetic construct
  source 1..120: mol_type = other DNA
agaagacaggagattttttctggtggtggactaagaattaaaagtaaatagtggaagattttcagaatagggaaaggatgggaggtgggagccaatagaggagaagattctgcaagattt

SEQ ID NO: 40527 - DNA, 120 bp, synthetic construct
  source 1..120: mol_type = other DNA
tatattatttatgtggtttcaagttgaattttttactttgttctattttgcttattttcattgttaaattagatttcctgtttgtttgtttgtttgtttgtttcttgagatggagtcttg

SEQ ID NO: 40528 - DNA, 120 bp, synthetic construct
  source 1..120: mol_type = other DNA
gtcttccaagtaactgggacctaagccctttctatttttctcttcattgccaaacttttaagagtgtgcacgcagtaactgctttccagatactcaactgcttaccttaagagccctgaa

SEQ ID NO: 40529 - DNA, 120 bp, synthetic construct; identical to SEQ ID NO: 4302
  source 1..120: mol_type = other DNA

SEQ ID NO: 40530 - DNA, 120 bp, synthetic construct
  source 1..120: mol_type = other DNA
taaaatatgatttccccccctgcctgcagtcttatctctctattcttacatatttcattatcatttcaataccattaattatgggcttttcttttgtgtaaaaaccttcactgtctttcc

SEQ ID NO: 40531 - DNA, 120 bp, synthetic construct
  source 1..120: mol_type = other DNA
tttcaaccaattataatagccaattctctctgcgtatctccctctccacctatctgtctttcctcaaactgttctttctgtcttcagttgttctgcctcaatcccatctccacctgccat

SEQ ID NO: 40532 - DNA, 120 bp, synthetic construct
  source 1..120: mol_type = other DNA
catgcatggctattcctgattcggcttctttctctctgatacactaggtaacgggctccatgagaactagaagtgtattttatgtacccactgcaacaaatagtatgatgcctgttttag

SEQ ID NO: 40533 - DNA, 120 bp, synthetic construct
  source 1..120: mol_type = other DNA
cgtgataaccatacagttagaaaaatccttcttttttctttattttgcaatgtgaatatttaagttaagtgatcctcttttatttccttaaagatgattgtgatttttaccattattagc

SEQ ID NO: 40534 - DNA, 120 bp, synthetic construct; identical to SEQ ID NO: 11594
  source 1..120: mol_type = other DNA

SEQ ID NO: 40535 - DNA, 120 bp, synthetic construct
  source 1..120: mol_type = other DNA
gatctcggctcactgcaacctctgcctcctgggttcaagcgattctcttgcttcagcctcctgagtagctgggattacaggcatgcaccaccatgcccagctaattttgtgtttttagta

SEQ ID NO: 40536 - DNA, 120 bp, synthetic construct
  source 1..120: mol_type = other DNA
tcctcttacttctatgttttcagttcagtgaattataccatcattcactcaactgctcaggatggaaatcttgaagtcatcctgaactccttcctctcccttacccctcacatgtaatta

SEQ ID NO: 40537 - DNA, 120 bp, synthetic construct; identical to SEQ ID NO: 11595
  source 1..120: mol_type = other DNA

SEQ ID NO: 40538 - DNA, 120 bp, synthetic construct
  source 1..120: mol_type = other DNA
tgcccaaaacccatctcccctacacccctaaataaaccaaactcagcaactacttcatatttatagatgaaatcttgcatttttaactcctccttgcctttatagacgcccctttgcctg

SEQ ID NO: 40539 - DNA, 120 bp, synthetic construct
  source 1..120: mol_type = other DNA
accatatctaagcctttggtacaaagttttacattccatgtagctgttttaataaccccttttgtgcaaccagggagcaaatagatataaaagaaagcatatattcacatacctatatgt

SEQ ID NO: 40540 - DNA, 120 bp, synthetic construct
  source 1..120: mol_type = other DNA
gatgactgtctattgttagtaatgatttttaacctctagtgatatttttcagaagatttatagaaaaccaaaataatgaactggtttccctacaagagtactttttgatgcttcatctct

SEQ ID NO: 40541 - DNA, 120 bp, synthetic construct
  source 1..120: mol_type = other DNA
acaagaacggcagatttagaatttaaaaacctggttcttatcctggctctgctgcagttgcttttgctaagtcacagtactcttctgagctttagtttcatttgtaaaatgaaggaagtt

SEQ ID NO: 40542 - DNA, 120 bp, synthetic construct; identical to SEQ ID NO: 11596
  source 1..120: mol_type = other DNA

SEQ ID NO: 40543 - DNA, 120 bp, synthetic construct
  source 1..120: mol_type = other DNA
tttattccacaacccagaaactgctattgagccaggtgtatcagagccatttcctcccgcccacacaggatgaaaataaagcaacctgcttaatggatttgtttaagtaacagcagcctt

SEQ ID NO: 40544 - DNA, 120 bp, synthetic construct
  source 1..120: mol_type = other DNA
tggggctcaagtttccccagggattttgtcaactttaagttcacctctcaggtcacagaatcttttgttttcaggtggggttcatggacccgattagttttcaatcattaatcatagttt

SEQ ID NO: 40545 - DNA, 120 bp, synthetic construct; identical to SEQ ID NO: 11597
  source 1..120: mol_type = other DNA

SEQ ID NO: 40546 - DNA, 120 bp, synthetic construct
  source 1..120: mol_type = other DNA
acattattaaacacatcttcttcagaatcacaaacttgacaaatatatctaagacttacccccatggtttcattggactcaaaacaatccatgtagttggctccccaaagactccatgaa

SEQ ID NO: 40547 - DNA, 120 bp, synthetic construct
  source 1..120: mol_type = other DNA
atagttgggagtcagaccaaaactgttcagaaacacaaatgggcttgtgaatgaaagggctgattctcaagccacagacaaatttgtatatatgtggtatgctcagttacaagaatcaac

SEQ ID NO: 40548 - DNA, 120 bp, synthetic construct
  source 1..120: mol_type = other DNA
tgaagattcatagcaggccttcaagttacctatgaacgtaagatggcttgaatcggtcactgcaggggaattgtacaacgatctctgacttgcttattggatcttccttgtctgaaataa

SEQ ID NO: 40549 - DNA, 120 bp, synthetic construct; identical to SEQ ID NO: 11598
  source 1..120: mol_type = other DNA

SEQ ID NO: 40550 - DNA, 120 bp, synthetic construct
  source 1..120: mol_type = other DNA
tcttaagatgcccaaaggatatagtttagatgggtttgtgtcaatagccctgtacagtaattcttatgcacattaaaatttactcactagtaagtgaatggtcctcaaactttagtgtgc

SEQ ID NO: 40551 - DNA, 120 bp, synthetic construct
  source 1..120: mol_type = other DNA
cctaggtgatggtcttggtccaaggactacactttgagaactgtactaaataatactaaacaaaaatctgtatacattcaaataattccatcatcaaggtggtgaacaatgaacctggca

SEQ ID NO: 40552 - DNA, 120 bp, synthetic construct
  source 1..120: mol_type = other DNA
ggaattaagcgcaacatatttagtacactctcatatatgtatgtatgctattatgcacacatacatgcttatttaatttaattttgcctagcacatgaataagtgctcaataaatgtttg

SEQ ID NO: 40553 - DNA, 120 bp, synthetic construct
  source 1..120: mol_type = other DNA
tatgatgcccttgggcattaggccccttatagggtagggatgagggcagtacttctgaagtctgagagtaatttaactatgcacaaaatgctattctgacattcttatctttctcacaat

SEQ ID NO: 40554 - DNA, 120 bp, synthetic construct; identical to SEQ ID NO: 11599
  source 1..120: mol_type = other DNA

SEQ ID NO: 40555 - DNA, 120 bp, synthetic construct
  source 1..120: mol_type = other DNA
ctctttcaccttgagttcccaccttcatgcagaacataatgccccctcatgtgtctgaatctggagttacctgtgacatctctttatttgatgtataccatacagtgctctggttagtta

SEQ ID NO: 40556 - DNA, 120 bp, synthetic construct
  source 1..120: mol_type = other DNA
gatttccaaaaatgtcaatttcgtatggtactatgtaaataccaactatatgtcttgcacatggtactgtatgagtttggaactgaaagggacttcaagcttcatctagtatagaaagtc

SEQ ID NO: 40557 - DNA, 120 bp, synthetic construct; identical to SEQ ID NO: 4309
  source 1..120: mol_type = other DNA

SEQ ID NO: 40558 - DNA, 120 bp, synthetic construct
  source 1..120: mol_type = other DNA
gtcaatcatttatcaaatactctgagctttcactatgtgccaggcactgtatcagggctcaggagagagaagatctttgctttcaagaacttcattctagacccgtgctgttctattaat

SEQ ID NO: 40559 - DNA, 120 bp, synthetic construct
  source 1..120: mol_type = other DNA
agttctattggacagccctgcattagaccaataagccggtgtaaagcactgtgagtgtgcaatggcatcgtagagaagcgccatctagcccagactgagggatgaggcagttttcctgag

SEQ ID NO: 40560 - DNA, 120 bp, synthetic construct
  source 1..120: mol_type = other DNA
gaatcctaatgtaaatgcatagacttgtgaaataatgtgtgctgtttggccattactagtcatttaacctggctgccatgaagggcatgcgtagaggaggcgaaataagagtgggccagc

SEQ ID NO: 40561 - DNA, 120 bp, synthetic construct
  source 1..120: mol_type = other DNA
tatttaagggaatcaggctggaggcaaaggcactggttaataacagtaaacaatcaaaaatttcacatttttaaaattacattttacagtgctagtaacagtggaacctgactcctaata

SEQ ID NO: 40562 - DNA, 120 bp, synthetic construct; identical to SEQ ID NO: 11601
  source 1..120: mol_type = other DNA

SEQ ID NO: 40563 - DNA, 120 bp, synthetic construct
  source 1..120: mol_type = other DNA
ccttcccgtacagcccacacatggctccccaaataaacatctgaaaatatagccctactcatactacttctttgagcaaaaactttcagtagcttcccattagctaaacaacatattcca

SEQ ID NO: 40564 - DNA, 120 bp, synthetic construct
  source 1..120: mol_type = other DNA
aagatacggaaatgtcaggagcgttttgggtttgtataatgattgaaaacatgactggtgtttagtggatgaggccagggatgccaaacctctcccatgtgtgggacgtctccatgatga

SEQ ID NO: 40565 - DNA, 120 bp, synthetic construct; identical to SEQ ID NO: 11602
  source 1..120: mol_type = other DNA

SEQ ID NO: 40566 - DNA, 120 bp, synthetic construct
  source 1..120: mol_type = other DNA
cacctagacattaagtcacctgaagacaagaacaatgccttgtaaataggtgtatcttagtaaatattggttcaaaatgtgtatctaaggactgctgcattgagattccctaagttctcc

SEQ ID NO: 40567 - DNA, 120 bp, synthetic construct
  source 1..120: mol_type = other DNA
gattttcagtatcagtagctataattttttgagcacccagtatttaccaggttcatgctagcttataaaagctatgaaaggcagggaccatgttaccctactcattgatctatcccttgc

SEQ ID NO: 40568 - DNA, 120 bp, synthetic construct
  source 1..120: mol_type = other DNA
tagagatgaagaaacaatgtttgtcctatgtcaaatagctagtcattgttgacaatgctaggatttgaaacttaatgtggctctcatgttcttttcaccaaattacaccaattgcaggaa

SEQ ID NO: 40569 - DNA, 120 bp, synthetic construct; identical to SEQ ID NO: 11603
  source 1..120: mol_type = other DNA

SEQ ID NO: 40570 - DNA, 120 bp, synthetic construct
  source 1..120: mol_type = other DNA
agccatgagagaaaaagggctaatataaaatgtcttgagtaacattcagtttgggttcagtaacctggaaaatatattcttgcagggatctgggaaagcacaggtgccaaattctgttat

SEQ ID NO: 40571 - DNA, 120 bp, synthetic construct
  source 1..120: mol_type = other DNA
tggagcttagaatggccattctatgtgtcctcatcaagtcacaatcataaatgcacaacatgaagaataaagggttttattagctcactttcttggggtgaccaagcagggcagacacaa

SEQ ID NO: 40572 - DNA, 120 bp, synthetic construct
  source 1..120: mol_type = other DNA
aatcctagttggccagagcaggacaacatgaactttctatatcacaccatgcagccctgggggaagttcacataggacccccacccccatcacctataacctatcaacctaaacttactg

SEQ ID NO: 40573 - DNA, 120 bp, synthetic construct; identical to SEQ ID NO: 11604
  source 1..120: mol_type = other DNA

SEQ ID NO: 40574 - DNA, 120 bp, synthetic construct
  source 1..120: mol_type = other DNA
gcctcccaggtagctgggactacaggcgtgtaccaccacgcccggctaatttttctgtatttttagtagagacggggtttcaccatgctagccaggctggtctcaaactcctgacctcaa

SEQ ID NO: 40575 - DNA, 120 bp, synthetic construct
  source 1..120: mol_type = other DNA
atctgaactccacagtaagctcttatggctacatttctgcttgacatcatccgtttctcttctattatcatgcaagttgtcctgcttcaagtcccctttcactttttctttacaggtctt

SEQ ID NO: 40576 - DNA, 120 bp, synthetic construct
  source 1..120: mol_type = other DNA
ataatctcttgttttcagaaaacttctctttctggtagcactatgacatgtttcatccttcactactttgtggcagcccccgacccctttcccagtggcctttccaattttataaaaaga

SEQ ID NO: 40577 - DNA, 120 bp, synthetic construct; identical to SEQ ID NO: 4314
  source 1..120: mol_type = other DNA

SEQ ID NO: 40578 - DNA, 120 bp, synthetic construct
  source 1..120: mol_type = other DNA
ggtgaaaactcacatgggaggaggagccaagctaggccctactttgaggaggaggagtggcatggagtgctgctttaccttctgtggtatgtgacatgtccttctttaaagtcaaacttg

SEQ ID NO: 40579 - DNA, 120 bp, synthetic construct
  source 1..120: mol_type = other DNA
gggagacagaacattgcttcttatccctgccttgggctaggcttgtccttggtaaggcagagtatatcagcagcctgattgggcagcttcttcctcatagagctggcagtgattttcatt

SEQ ID NO: 40580 - DNA, 120 bp, synthetic construct
  source 1..120: mol_type = other DNA
gttggaaggagtgagggagaagcatcttgagaggattgggactctccacctaatagatttccccaaacaccaatccatttgccttttgccatctcatttttaagaagattttcaaatttc

SEQ ID NO: 40581 - DNA, 120 bp, synthetic construct; identical to SEQ ID NO: 11606
  source 1..120: mol_type = other DNA

SEQ ID NO: 40582 - DNA, 120 bp, synthetic construct
  source 1..120: mol_type = other DNA
ccaggtagggccgggcgcggtggctcgcgcttgtaatcccagcactttgggaggcctaggcgggcggatcacgaggtcaggagatcgagaccacggcgaaaccccgtctctactaaaaat

SEQ ID NO: 40583 - DNA, 120 bp, synthetic construct
  source 1..120: mol_type = other DNA
atcatcccactgcactccagcctgggcgactgagcgagactctgtctcaaaaaacaaaacaaacaaacaaacaaaaaaacaaacaaaaaaaaccccaggtaggtttatcctttgagaagg

SEQ ID NO: 40584 - DNA, 120 bp, synthetic construct
  source 1..120: mol_type = other DNA
cactttgtgttggatagtgggtgaatcattctatttacattactccacttaattttcacaacatcctcatgacgtaaattttgggtttttgtaggtaagggaattgaggctcagaacgtt

SEQ ID NO: 40585 - DNA, 120 bp, synthetic construct; identical to SEQ ID NO: 11607
  source 1..120: mol_type = other DNA

SEQ ID NO: 40586 - DNA, 120 bp, synthetic construct
  source 1..120: mol_type = other DNA
tttttctgcattagagaaataaagtaaaggcgaatgaaagaaaatgggttcttgctataaaaagcccaaaccacctgatccctctccctgtgacccacagggggagtctgcactgagaga

SEQ ID NO: 40587 - DNA, 120 bp, synthetic construct
  source 1..120: mol_type = other DNA
acagtttcaaacagtttcttgtaaccaccagcaggatgctcaaccctgaaatggtggaagaataaggaagaagcccatgttgatgctcaaagtccgcagagatagaggcagagctgcagg

SEQ ID NO: 40588 - DNA, 120 bp, synthetic construct
  source 1..120: mol_type = other DNA
agactactcaggtatggaagggggtcccagatcactgctctgatgtcaagagacatgacctctcttttaatgtcaatggttacagtgaacttaatcctgtcctctgcagtttttccttac

SEQ ID NO: 40589 - DNA, 120 bp, synthetic construct; identical to SEQ ID NO: 11608
  source 1..120: mol_type = other DNA

SEQ ID NO: 40590 - DNA, 120 bp, synthetic construct
  source 1..120: mol_type = other DNA
atcctctgttcagtttcatgttgtaacttcaaagagtggaatctctgaccagactcaattataataattaccttttactaaacaattactatgtcctacataccataaaaagaactttgc

SEQ ID NO: 40591 - DNA, 120 bp, synthetic construct
  source 1..120: mol_type = other DNA
agtcacacactaggaaatgactgggcaaggagtggagcccaagtctgtctgaaatccccatactcaagactgcttccaaaccccgggctaagtcacacaaaccccccataatttggacct

SEQ ID NO: 40592 - DNA, 120 bp, synthetic construct
  source 1..120: mol_type = other DNA
gaaatagcacatttatcatgaatccatgaaggtgttttaaaaaagtctcccagagatacttactggatagacattttcttccagttcaggatccagagttctggcaccaactgcagaatg

SEQ ID NO: 40593 - DNA, 120 bp, synthetic construct
  source 1..120: mol_type = other DNA
gcagttccatctacctcgcgggtgcctctggtgtctccagaggtctccgaccccagcccgcccccagccctcccgcccagcccgcagccccctccctctgttccccgacctcagaccctg

SEQ ID NO: 40594 - DNA, 120 bp, synthetic construct
  source 1..120: mol_type = other DNA
ctctctgtctctgaatgtccctgtccggcttgctggtggtctctgagactcgaggtctcttcctatgtcactttgagtgactgtcactctgtcttttagtctccttcacctttctcacta

SEQ ID NO: 40595 - DNA, 120 bp, synthetic construct; identical to SEQ ID NO: 11609
  source 1..120: mol_type = other DNA

SEQ ID NO: 40596 - DNA, 120 bp, synthetic construct
  source 1..120: mol_type = other DNA
aggagggctgctcccaatggctgctaatggtcttgcagggtctctgggtggtgtctctccccatctgtctctttgggtgtctccatgtctctgtctcttcctccatctcagtctccctgt

SEQ ID NO: 40597 - DNA, 120 bp, synthetic construct
  source 1..120: mol_type = other DNA
atagccggcttttctggggcctgggcaggggatggggaggggatgagagggaggaggggctgccatctccttgtccttcccatcttcccctcccagtggctccgcagggtgtggggtcgt

SEQ ID NO: 40598 - DNA, 120 bp, synthetic construct
  source 1..120: mol_type = other DNA
aataggaccctggcgagccgggtccggtttcctgggagagaggaacaaacagctggggctggtagtgaaggatggggacagctgggaaggggcctagcttcagccgagactctctcccca

SEQ ID NO: 40599 - DNA, 120 bp, synthetic construct; identical to SEQ ID NO: 11610
  source 1..120: mol_type = other DNA

SEQ ID NO: 40600 - DNA, 120 bp, synthetic construct
  source 1..120: mol_type = other DNA
tgccaaagtagtcagcgttagggttctggaggcttggccctggaatctctccaccccagactgggtcagtttttctgattgttactgaggtcgtggtggatttctcaaaactttctggag

SEQ ID NO: 40601 - DNA, 120 bp, synthetic construct
  source 1..120: mol_type = other DNA
agaccagcctggccaacatggtgaaaccccgtctctactaaaaatacaaaaaaatattagccaggcgtggtggtgcatgcctgtaatcttagctactcgggaggctgaagtgggaggatt

SEQ ID NO: 40602 - DNA, 120 bp, synthetic construct; identical to SEQ ID NO: 11611
  source 1..120: mol_type = other DNA

SEQ ID NO: 40603 - DNA, 120 bp, synthetic construct
  source 1..120: mol_type = other DNA
tgatcgcagctcactgcaacctctgcctcctgggttcaagcgattcttctgcctcagcctcctgagtagctgggattacaggcgcgtgccaccaagccgagctaattttttgtattttta

SEQ ID NO: 40604 - DNA, 120 bp, synthetic construct
  source 1..120: mol_type = other DNA
ttttttttctttttgagacagagtctcaatctgttgcccaggctggagtacagcagtttggtggttggttcaacgcaacctccacttcccaggctccagtgatcctcccacctcagcctc

SEQ ID NO: 40605 - DNA, 120 bp, synthetic construct
  source 1..120: mol_type = other DNA
ctccggccttggcctcccaaagttttgggattacaggcataagccaccatgcccggcctttcttctttcactcagcataatatttttgacattcatccatgtagcatgtattgagtttgt

SEQ ID NO: 40606 - DNA, 120 bp, synthetic construct; identical to SEQ ID NO: 11612
  source 1..120: mol_type = other DNA

SEQ ID NO: 40607 - DNA, 120 bp, synthetic construct
  source 1..120: mol_type = other DNA
ctggtaaacagtacgtattccctgctgaccccaaatcaggctcttgatggtggtaggggactgggccagcagggaagctatatttttaaccagaaccctccgcttccttcattttttttt

SEQ ID NO: 40608 - DNA, 120 bp, synthetic construct
  source 1..120: mol_type = other DNA
ctcccgagtagctgggattacaggcatgcaccactacgcccggctaatttttgtacttttaatagagatggggtttcaccatgttggccaggctggtctcgaactcctgacctcaagtga

SEQ ID NO: 40609 - DNA, 120 bp, synthetic construct
  source 1..120: mol_type = other DNA
aaaagtttgagaatcaatgtggtaatgattgggctctctgtcgctgctttgcactctggctttgccatttgcctgcttcctaatttggggcaagtgatttttatttttctctctgagcct

SEQ ID NO: 40610 - DNA, 120 bp, synthetic construct; identical to SEQ ID NO: 11613
  source 1..120: mol_type = other DNA

SEQ ID NO: 40611 - DNA, 120 bp, synthetic construct
  source 1..120: mol_type = other DNA
ggtggcatgagcctgcagtcatagcttctcaggaggctgaatggagaggatcactcagcctaggagtccaaggctgcagtgagctatgatcgtaccactgcactccaccccaggagacag

SEQ ID NO: 40612 - DNA, 120 bp, synthetic construct
  source 1..120: mol_type = other DNA
catctcctgtgctgtccctcaacaccccagcacccagactccctcctcttaccccagagatgagcaggcctgattccttcttgttatttggacaaggctcaactcaaatgtcacctcctt

SEQ ID NO: 40613 - DNA, 120 bp, synthetic construct
  source 1..120: mol_type = other DNA
ttctataacacctatcactgacattaacattacatattaattcacctgtttattccctgtctccaccatgaggatttaagctccctgagggccgtgattttttttttttccttttgagac

SEQ ID NO: 40614 - DNA, 120 bp, synthetic construct; identical to SEQ ID NO: 11614
  source 1..120: mol_type = other DNA

SEQ ID NO: 40615 - DNA, 120 bp, synthetic construct
  source 1..120: mol_type = other DNA
accacacccggctaattttttgtatttttagtagagacggggtttcaccatgttagccaggatggtctcgatcctctgaccttgtgaccctcccaccttgtcctccgaaagtgctgggat

SEQ ID NO: 40616 - DNA, 120 bp, synthetic construct
  source 1..120: mol_type = other DNA
caaggcagggatcttgatcttcattgactttattcactgctctatatttagtgcctagaacagcacctggcccatggcagatgctcaaccaaagtctgttaaatgagtgtaaggcccaga

SEQ ID NO: 40617 - DNA, 120 bp, synthetic construct
  source 1..120: mol_type = other DNA
ccagactggagtgcaatctggtggtagcaacctccacctcccaggctcaagccattctcctgcctcagcctcccaagtagctgggataacaggcatacgccaccatgcccgggtaatttt

SEQ ID NO: 40618 - DNA, 120 bp, synthetic construct; identical to SEQ ID NO: 11615
  source 1..120: mol_type = other DNA

SEQ ID NO: 40619 - DNA, 120 bp, synthetic construct
  source 1..120: mol_type = other DNA
agagatggggtttcaccatgttggccaggctggtctcgaactcctgacctcaagtgatccacctcctcggcctcccagagtgctgggattataggtgggaactactgcgcccggactcaa

SEQ ID NO: 40620 - DNA, 120 bp, synthetic construct
  source 1..120: mol_type = other DNA
aagagagaatttagagaaagatgagcttaaaaagcaatttaacttgagcaagtttccaccttccagtggatcactttgcagaccccacttgggaggcctctggagccagttggactgagg

SEQ ID NO: 40621 - DNA, 120 bp, synthetic construct
  source 1..120: mol_type = other DNA
agtcccagctactcaggaggctgaggcaacaggattgcttgagtccaggaggtcaaggttgcagtgagctataatttacaccacttcactccagcctgggtgacacagcaagaccctgtc

SEQ ID NO: 40622 - DNA, 120 bp, synthetic construct
  source 1..120: mol_type = other DNA
cgcttgtaatttcagctatttgggaggctgaggcaggagaatcgcttgaacccaggaggtggaggctgcagtgggctgagattgcaccactgtgctccagcctgggcaacagagactatt

SEQ ID NO: 40623 - DNA, 120 bp, synthetic construct; identical to SEQ ID NO: 11616
  source 1..120: mol_type = other DNA

SEQ ID NO: 40624 - DNA, 120 bp, synthetic construct
  source 1..120: mol_type = other DNA
gggacaggggcgtctgaaggggcagagaatcttgggtccaaagaagagggttctgggagtctgaaaggaggtgctgacaggagagaaagtgaggaggggggctaaggctaagaggggcta

SEQ ID NO: 40625 - DNA, 120 bp, synthetic construct
  source 1..120: mol_type = other DNA
aagtgtggtaggccagggcgggggctgctgatccagaacgttccttggcaggtggctgagtgggcagaaagcctcgggtttaaggggaggtagcctgagagtccagaagaagggctggtt

SEQ ID NO: 40626 - DNA, 120 bp, synthetic construct; identical to SEQ ID NO: 11617
  source 1..120: mol_type = other DNA

SEQ ID NO: 40627 - DNA, 120 bp, synthetic construct
  source 1..120: mol_type = other DNA
gccgagggccttggatccaaggcaaaggggcctggagggtcaggggacacccgcaggggcctgacttgggagactgggggctgagaggtggaaggagcctggggtctgaaaggaggagac

SEQ ID NO: 40628 - DNA, 120 bp, synthetic construct
  source 1..120: mol_type = other DNA
gagactgaggagggagtataaggttgagcgccctcctgtgtctgtgaagcagaggtcagaggtgtttgaaggaaaaggcaggagcgaggactgtgtgatggtggaggcaggaggtggggc

SEQ ID NO: 40629 - DNA, 120 bp, synthetic construct
  source 1..120: mol_type = other DNA
tgagattaggtggaacacgggttagtggggagggttagggttagggaagtttctatggagtctgggtgggtctgaggtgtttgagggaggaggcacagaagaggtgttttcgtgatgttg

SEQ ID NO: 40630 - DNA, 120 bp, synthetic construct
  source 1..120: mol_type = other DNA
atgttgctggggtgggggggtcttctgacccctcacttacatccccctcccaccccagaatgtgccccccgatctggccatctgttgcttcgtcctggagcagtccctgtctgtgcgagc

SEQ ID NO: 40631 - DNA, 120 bp, synthetic construct; identical to SEQ ID NO: 11618
  source 1..120: mol_type = other DNA

SEQ ID NO: 40632 - DNA, 120 bp, synthetic construct
  source 1..120: mol_type = other DNA
caggaaggaaggaaggggatgggggcttctgagcccctgtccccgacgcctgctcctttctcctctttccagtcctttcccccaaccctgatcccagctcctctccgcatgggacctctc

SEQ ID NO: 40633 - DNA, 120 bp, synthetic construct
  source 1..120: mol_type = other DNA
tgatgggaggcatggtgacatcgagcagtcagatgtctgccccaaggtccgggttggggaccttgtgctggggaggggcggctgtcttagactgcgggtgacattcacctatggaacaac

SEQ ID NO: 40634 - DNA, 120 bp, synthetic construct; identical to SEQ ID NO: 11619
  source 1..120: mol_type = other DNA

SEQ ID NO: 40635 - DNA, 120 bp, synthetic construct
  source 1..120: mol_type = other DNA
tggtattttacagggagcatcttgtcacctgtgactaggccagacctcttggggatctggagagtccggggatctgtgcttattctgttccctccctccccctgcagtcatcccagggcg

SEQ ID NO: 40636 - DNA, 120 bp, synthetic construct
  source 1..120: mol_type = other DNA
gaggctgacctccctctacaaccctagtatctgagctgcctcaccacctcccgctccatgactgacaagctggccttcgatgtgggactgcaggaggacgcaacaggtgcagcagctgga

SEQ ID NO: 40637 - DNA, 120 bp, synthetic construct
  source 1..120: mol_type = other DNA
tgcggtacagtccagacagggagacagacacacgttggggaccactaggcagagagtctgaagtcaggaacggggaactgttaggcagagagttggtggcagtgataggagagttgtggg

SEQ ID NO: 40638 - DNA, 120 bp, synthetic construct
  source 1..120: mol_type = other DNA
ttccatccccacccataggagaggcttgctggtggaccatgcacccagcctccaagcagaggtctgaaggagaaaaggtccgcgttggggatgacatcatccttgtcagtgtctcctccg

SEQ ID NO: 40639 - DNA, 120 bp, synthetic construct; identical to SEQ ID NO: 11620
  source 1..120: mol_type = other DNA

SEQ ID NO: 40640 - DNA, 120 bp, synthetic construct
  source 1..120: mol_type = other DNA
caggttgacgcttccttcatgcagacactatggaacatgaaccccatctgctcccgctgcgaagagggtgagggccccagacctccccctaaatggagatccccccaaaacagaccctta

SEQ ID NO: 40641 - DNA, 120 bp, synthetic construct
  source 1..120: mol_type = other DNA
tcagaacccccccaaaccccgaactaaatatcaggctcccaaacttagaccccaaagtattagcccccaaggctcctaaactcagattcaaatcttaaaacatcaagtttaaagcttgtt

SEQ ID NO: 40642 - DNA, 120 bp, synthetic construct
  source 1..120: mol_type = other DNA
tattaaaaatgcaaaattatctgagtgtggtggcatgtgcctgtaatcccacctactcaggagggtgaggcaggagaattgcttgaacctgggtggcagaggagcctgggtgacagagcc

SEQ ID NO: 40643 - DNA, 120 bp, synthetic construct; identical to SEQ ID NO: 11621
  source 1..120: mol_type = other DNA

SEQ ID NO: 40644 - DNA, 120 bp, synthetic construct
  source 1..120: mol_type = other DNA
cagatggtttttgaccctcaaactcagaccctgaaactcagactcatcaacttctaactacaaagctcagatcgttcctacgtcataccccaaagctcagacttccaaaccctagattgt

SEQ ID NO: 40645 - DNA, 120 bp, synthetic construct
  source 1..120: mol_type = other DNA
ttgagatcaggagttcgagaccagcctgggccaacatggcaaaaccccatctctactaaaaatacaaaaattggctgggcatgatggcgggcggctgtagccccagctacttgggaggct

SEQ ID NO: 40646 - DNA, 120 bp, synthetic construct; identical to SEQ ID NO: 11622
  source 1..120: mol_type = other DNA

SEQ ID NO: 40647 - DNA, 120 bp, synthetic construct
  source 1..120: mol_type = other DNA
ccaaattaggtgcccagcttcagaccccaagtctcatatccccacttcaggcctcaaccttggcctgaaaataccctgaaactcagacctccaactgcaaaaccccaaactcagccctca

SEQ ID NO: 40648 - DNA, 120 bp, synthetic construct
  source 1..120: mol_type = other DNA
cgtcctccgcctctttcatggacatatggatgagtgtctgaccatttcccctgctgacagtgatgaccagcgcaggtctgggctgtggacgagagggcctggggtctaggggtggacgtg

SEQ ID NO: 40649 - DNA, 120 bp, synthetic construct
  source 1..120: mol_type = other DNA
gcccgctccctctggaggctggagccactgagaatcaggtagggcggggaagatggggagagaccagggagaggctggggtcacctggcaggctgggaggacagaaaaggtcttgaggga

SEQ ID NO: 40650 - DNA, 120 bp, synthetic construct; identical to SEQ ID NO: 11623
  source 1..120: mol_type = other DNA

SEQ ID NO: 40651 - DNA, 120 bp, synthetic construct
  source 1..120: mol_type = other DNA
caagatcctgtctcaaacaaacaaacaaacaaaacaaaaacaaaaagaggccaagcgtggtggctcacgcctgtaatgccagcactttgggaggccgaggcaggtggatcacttgaggtc

SEQ ID NO: 40652 - DNA, 120 bp, synthetic construct
  source 1..120: mol_type = other DNA
gaatcccttgaacccaggaggtggcggttgcagtgagctgagattgcaccattgcattccagcctgggcgacagagcgagactccatctcaaaaaaatacaaaaacaaaggccgggggcg

SEQ ID NO: 40653 - DNA, 120 bp, synthetic construct
  source 1..120: mol_type = other DNA
attagccaggcggtagtggcacgcacctgtaatcccagcttctcgggaggctgaggcaggagaatcacttgagcctgggaggcagaggttgcagtgaggtgagattgtgccactgcactc

SEQ ID NO: 40654 - DNA, 120 bp, synthetic construct
  source 1..120: mol_type = other DNA
gggagagattgggggccctgagtaaaatgatgggggaatttaggggtctggaaaaacgagggcactggagacatttgggaagccctgaggaagctgtgaaggcctgagagaggattgggg

SEQ ID NO: 40655 - DNA, 120 bp, synthetic construct; identical to SEQ ID NO: 11624
  source 1..120: mol_type = other DNA

SEQ ID NO: 40656 - DNA, 120 bp, synthetic construct
  source 1..120: mol_type = other DNA
ccgggcagtacctagcgctcaccgaggaccagggcctggtggtggttgacgccagcaaggctcacaccaaggctacctccttctgcttccgcatctccaaggtcagtggggtttgtggcg

SEQ ID NO: 40657 - DNA, 120 bp, synthetic construct
  source 1..120: mol_type = other DNA
gaagctggatgtggcccccaagcgggatgtggagggcatgggcccccctgagatcaagtacggggagtcactgtgcttcgtgcagcatgtggcctcaggactgtggctcacctatgctgc

SEQ ID NO: 40658 - DNA, 120 bp, synthetic construct
  source 1..120: mol_type = other DNA
tggtgatcatgccactgtactccagcctgggtgacagagtgagatggggtgcaggagggtactgaggggtggtgcttgagaccttgggagtttgaggatgagactgagagaaagatagag

SEQ ID NO: 40659 - DNA, 120 bp, synthetic construct; identical to SEQ ID NO: 11625
  source 1..120: mol_type = other DNA

SEQ ID NO: 40660 - DNA, 120 bp, synthetic construct
  source 1..120: mol_type = other DNA
aattgcttgaacctgggaagtggaggttgggagtgagccaatatcgtgccattgcactccagcctggctgacaagagtgaaactccgtctcagaaaaacaaaaacaaaacaaaacaaaaa

SEQ ID NO: 40661 - DNA, 120 bp, synthetic construct
  source 1..120: mol_type = other DNA
gacctgttccctgccctcccagtgctcagaaattgtgaacaaactgcctttagtgaagtacatagttttacaattaaggagtgggaaaactatttttggcagcaggaacagcatgtgcaa

SEQ ID NO: 40662 - DNA, 120 bp, synthetic construct; identical to SEQ ID NO: 11626
  source 1..120: mol_type = other DNA

SEQ ID NO: 40663 - DNA, 120 bp, synthetic construct
  source 1..120: mol_type = other DNA
aagtgacctgacgcaggatcacagaattcttaggctgtctctgggaacagactacggtcaggggacagagccagagcagggagaccagagaagagactgccatgatgttacaaatgggag

SEQ ID NO: 40664 - DNA, 120 bp, synthetic construct
  source 1..120: mol_type = other DNA
ggaggggttgaggatgatgccatgattttttgccccaagcaactggaaggatggaagtgctgaaacagcctcattgtctggagtatcacccaaggtttgtggtctcacagccacagagaa

SEQ ID NO: 40665 - DNA, 120 bp, synthetic construct
  source 1..120: mol_type = other DNA
ggtatctgatttacctagggtgcaaaagactggttggaccagttgtgccatttgcatagggcacaaatttctggctgcctccaccctaagcttttattgtacaagcgggtcctctgcctg

SEQ ID NO: 40666 - DNA, 120 bp, synthetic construct; identical to SEQ ID NO: 11627
  source 1..120: mol_type = other DNA

SEQ ID NO: 40667 - DNA, 120 bp, synthetic construct
  source 1..120: mol_type = other DNA
ctagaacagagccacttactacagccttgctgaatggacaagtaggaatccttggggaggcactcgtttgcaaaaacaggcctgtagttgaatacatgagccaagggcgtagagacgggg

SEQ ID NO: 40668 - DNA, 120 bp, synthetic construct
  source 1..120: mol_type = other DNA
tctcacctcgtggaaaggtggtctggcattctatctgggacaggttcaatttgggggttagagctttctggtcggggggaatgttaagtcagcagtaggtacaggtggaaagggtctggc

SEQ ID NO: 40669 - DNA, 120 bp, synthetic construct
  source 1..120: mol_type = other DNA
agagaggagagagagaatcaaagacacagaggagacagatgacgggggacagaaaaatgaggaggaatttgcagtgagattctgcagagcagggaggagggggcaagtgcagaactcaag

SEQ ID NO: 40670 - DNA, 120 bp, synthetic construct
  source 1..120: mol_type = other DNA
ccgctgccagcaggaggagtcccaggccgcccgcatgatccacagcaccaatggcctatacaaccagttcatcaagtgagcaacctgccctccctgctggggtgactcctgtgctgtccc

SEQ ID NO: 40671 - DNA, 120 bp, synthetic construct; identical to SEQ ID NO: 11628
  source 1..120: mol_type = other DNA

SEQ ID NO: 40672 - DNA, 120 bp, synthetic construct
  source 1..120: mol_type = other DNA
attggccaggtgtggtggcacgtgcctgtagtcccagctgcatgggaagctgaggaaggaggattgcttgagccgagggggcagaggctgcagtgagccactatactccagcttcactga

SEQ ID NO: 40673 - DNA, 120 bp, synthetic construct
  source 1..120: mol_type = other DNA
tgatcatcacccaactttcacacccctgacacccagagcctggaccctggacctctccatccctgagttccgggacccccctgtacctacacaggagcgagtcccagtcccagctctgcc

SEQ ID NO: 40674 - DNA, 120 bp, synthetic construct; identical to SEQ ID NO: 11629
  source 1..120: mol_type = other DNA

SEQ ID NO: 40675 - DNA, 120 bp, synthetic construct
  source 1..120: mol_type = other DNA
ggaggtgaggacgtggcgagggcggagcggggcctgtgggcccagggggcgggaccactgaggggcggggccacggcgctgggcggggcagggcctgagggacctggggaagtagggtct

SEQ ID NO: 40676 - DNA, 120 bp, synthetic construct
  source 1..120: mol_type = other DNA
gcagggcgtatggccgaccagggggcggggcctggagagaaggatggaataaaagagctgaggggcggggcctatgtgaagctcaggtatagggtgaggcctggggaggtgaggccagga

SEQ ID NO: 40677 - DNA, 120 bp, synthetic construct
  source 1..120: mol_type = other DNA
atctttgggcattagggaggggaggccagctgtgaacaaaacagaaaaaaatctctgtccttatggagttgacatggcggggagagacaggagatcaataaaataaataagtaaattgta

SEQ ID NO: 40678 - DNA, 120 bp, synthetic construct
  source 1..120: mol_type = other DNA
agacagagctgtcagacagggtgacctggaggaagagaggaagccatgtgcaaaggccatgaggtgggcgggtgtttggcatgttccagaaacagtcaggtggtgattggagcagggagg

SEQ ID NO: 40679 - DNA, 120 bp, synthetic construct; identical to SEQ ID NO: 4338
  source 1..120: mol_type = other DNA

SEQ ID NO: 40680 - DNA, 120 bp, synthetic construct
  source 1..120: mol_type = other DNA
ctgaaactacaggtgtgagccaccacgcctggctaatttttgtatttttagtagagatggggtttcgccatgttggccaggctcgtctcaaactcctgacctcaggtgatccacccgcct

SEQ ID NO: 40681 - DNA, 120 bp, synthetic construct
  source 1..120: mol_type = other DNA
ttcctaagtgcaagaaagctatgatgtgccttactgagaaaatatgtgttagataagcttaattaaggcatgagttatagtactgttggctgtgaatttaatgttaatgactcaacaata

SEQ ID NO: 40682 - DNA, 120 bp, synthetic construct
  source 1..120: mol_type = other DNA
cagtatttgataattcagtcttcataatcactttatagaacataactatgaataatgagaattgattgtatatgttttatgtacttttctgtatgtatattatgattcacaatgaaataa

SEQ ID NO: 40683 - DNA, 120 bp, synthetic construct; identical to SEQ ID NO: 11631
  source 1..120: mol_type = other DNA

SEQ ID NO: 40684 - DNA, 120 bp, synthetic construct
  source 1..120: mol_type = other DNA
ccgtcactagttgttgaaggaatatgaattcgtgaatccaagaaagacaaggaagggagggcctgggtctcctattgtgatgcctcttattttcctcatcctaggggatgctctccatgg

SEQ ID NO: 40685 - DNA, 120 bp, synthetic construct
  source 1..120: mol_type = other DNA
gtaggggtcccagtcctgactcccctgagaacaccccagatccccagtcctattggatctgacacctcttcccccctcagcttctctaatccgtggcaatcgtagcaactgtgccctctt

SEQ ID NO: 40686 - DNA, 120 bp, synthetic construct
  source 1..120: mol_type = other DNA
ctcattctgggcaccctggcaggcatcctggaggtcctgtactgtgtcctcattgagagtccagaggttctgaacatcatccaggagaatcacatcaagtccatcatctccctcctggac

SEQ ID NO: 40687 - DNA, 120 bp, synthetic construct; identical to SEQ ID NO: 11632
  source 1..120: mol_type = other DNA

SEQ ID NO: 40688 - DNA, 120 bp, synthetic construct
  source 1..120: mol_type = other DNA
cctcccaagtagctgggactacaggcacacaccaccacgcccagctaatttttgtattttttttttagtagagacagggtttcacaatgttggccaggatggtctcgatctcttggcttc

SEQ ID NO: 40689 - DNA, 120 bp, synthetic construct
  source 1..120: mol_type = other DNA
gagtgcagtggcatgatctcagctcactgcaacctctgcttcccgggttcaagcaattctcctgcctcagcctcctgagtagctgggattacaggtgcccgccaccacgcccagctaatt

SEQ ID NO: 40690 - DNA, 120 bp, synthetic construct
  source 1..120: mol_type = other DNA
cgtgccccaccggtggcgctgaaatgtttttaaaattttcaaatattacagcctctaggtggactgtatatatatacacacactctgtagtttgccatagccctacaagttcctgttgca

SEQ ID NO: 40691 - DNA, 120 bp, synthetic construct; identical to SEQ ID NO: 11633
  source 1..120: mol_type = other DNA

SEQ ID NO: 40692 - DNA, 120 bp, synthetic construct
  source 1..120: mol_type = other DNA
cctggctaatgcggtgaaaccctgtctctactaaaaatacaaaaaattagccaggcatggtggcaggcgcctgtagtcccagctactcgggaggctgaggcaggagaatgatgtgaaccc

SEQ ID NO: 40693 - DNA, 120 bp, synthetic construct
  source 1..120: mol_type = other DNA
ttacttttgctccagcctaatacattttccacttggcccctaaagacacaagtttgcaacccctgctgatttaaaatttcatcttgattcctgtgtctctcactggtcgtttcagtctgc

SEQ ID NO: 40694 - DNA, 120 bp, synthetic construct
  source 1..120: mol_type = other DNA
tcagcctcttgccagatcttcctctttgacccctaacctttctctgatccctgaccttccactttcaccacctcctctcagtcaaaattgccacatcttatcccgatgcgctgtcctttc

SEQ ID NO: 40695 - DNA, 120 bp, synthetic construct
  source 1..120: mol_type = other DNA
atggtgtggctgtacgctccaaccaagatcttattactgagaacttgctgcctggccgtgagcttctgctgcagacaaacctcatcaactatgtcaccaggtctggctctcaacatctga

SEQ ID NO: 40696 - DNA, 120 bp, synthetic construct; identical to SEQ ID NO: 11634
  source 1..120: mol_type = other DNA

SEQ ID NO: 40697 - DNA, 120 bp, synthetic construct
  source 1..120: mol_type = other DNA
ctctccgtcatccccctctcctgtcccatctctcctgcagcatccgccccaacatctttgtgggccgagcggaaggcaccacgcagtacagcaaatggtactttgaggtgatggtggacg

SEQ ID NO: 40698 - DNA, 120 bp, synthetic construct
  source 1..120: mol_type = other DNA
acctctattcctacggctttgatggactgcatctctggacaggtacctgaccccttccaggggaccctcacccctgaccattgaccccagcatttctaagtctctgaccatacaccttgg

SEQ ID NO: 40699 - DNA, 120 bp, synthetic construct
  source 1..120: mol_type = other DNA
agaactctgatcccagagtaggtgtgacctctgaccctagatatcccagaagaccacgcagattactgtgatctctgatctttgacttctaaccccaggagaatttatttatttatttat

SEQ ID NO: 40700 - DNA, 120 bp, synthetic construct
  source 1..120: mol_type = other DNA
tctcctgcctcagcctcctgagtagctgggattacaggcatgcaccaccacgcccggctcatttttgtatttttagtagagacagggtttcaccacattggccaggctggtctcctgacc

SEQ ID NO: 40701 - DNA, 120 bp, synthetic construct; identical to SEQ ID NO: 11635
  source 1..120: mol_type = other DNA

SEQ ID NO: 40702 - DNA, 120 bp, synthetic construct
  source 1..120: mol_type = other DNA
tgctgcctggacctcagcgtgccgtccatctccttccgcatcaacggctgccccgtgcagggtgtctttgagtccttcaacctggacgggctcttcttccctgttgtcagcttctcggct

SEQ ID NO: 40703 - DNA, 120 bp, synthetic construct
  source 1..120: mol_type = other DNA
caagactgactggtgtccagaacccttacttgaagatcccagggacctccacgtgactccagactctttccaatgacctcagattctccctaaccccacgtccttccagtaacctctgag

SEQ ID NO: 40704 - DNA, 120 bp, synthetic construct
  source 1..120: mol_type = other DNA
tccttgactccccagtggcctcagactctcccaatgactccagaatctgataatgatctaatgactccagaccctccttaaccccctaatgacttcagactcttccaatgacaccatact

SEQ ID NO: 40705 - DNA, 120 bp, synthetic construct; identical to SEQ ID NO: 11636
  source 1..120: mol_type = other DNA

SEQ ID NO: 40706 - DNA, 120 bp, synthetic construct
  source 1..120: mol_type = other DNA
tcttaattcccttatgatattcctttgactctagactttcttttatgacttctaaatgacctccaggacactatgactgcccggtgacctttggtctccccagaactttccattgatccc

SEQ ID NO: 40707 - DNA, 120 bp, synthetic construct
  source 1..120: mol_type = other DNA
ccagggtgcggttcctccttggtggccgccatggtgaattcaagttcctgcccccacctggctatgctccatgccatgaggctgtgctccctcgagagcgactccatcttgaacccatca

SEQ ID NO: 40708 - DNA, 120 bp, synthetic construct; identical to SEQ ID NO: 11637
  source 1..120: mol_type = other DNA

SEQ ID NO: 40709 - DNA, 120 bp, synthetic construct
  source 1..120: mol_type = other DNA
ggcgggcgcctataatcccagctactcgggagactgaggcaggagaatcgcttgaacccgggaggtggaggttgcagtgagctgaggtcacgccattgtactccagcctaagcaacaaga

SEQ ID NO: 40710 - DNA, 120 bp, synthetic construct
  source 1..120: mol_type = other DNA
ttgcaatgagccaagatcgtgccactacactccagcctgggcaacagagtgagacttcatctcaaaacaaacaaacaaacaaaaacaaccaacattttgggaagccgaagtgggggcctc

SEQ ID NO: 40711 - DNA, 120 bp, synthetic construct
  source 1..120: mol_type = other DNA
acaaatttagacaattttttaaaaggagtgagagaggtggggagctgccctagaagctgggaacctcgttgtttaacagatggagaaactgagcacagagaggcaaaggattctgtcaga

SEQ ID NO: 40712 - DNA, 120 bp, synthetic construct; identical to SEQ ID NO: 11638
  source 1..120: mol_type = other DNA

SEQ ID NO: 40713 - DNA, 120 bp, synthetic construct
  source 1..120: mol_type = other DNA
ttgggaggctgaggcgggcagatcacctaaagtcaggaattcaagaccagcctggccaacatggtgaaaccccatctctactgaaaatacaaaaatgagccaggcatggtggcaggcacc

SEQ ID NO: 40714 - DNA, 120 bp, synthetic construct
  source 1..120: mol_type = other DNA
tctcaaaagaagaaagaaagaaaggactgtttttgccttccctccaagcatgtccctataggagggaatataggttaggtttaaaagcctgacagcaaaggtttggttttcagtcacgtg

SEQ ID NO: 40715 - DNA, 120 bp, synthetic construct
  source 1..120: mol_type = other DNA
aggcaagatgcttagtccagtcctgattaaacagtaagcactcaagacagtcactcattattagtagcagtgatatcatctgcgggggtgacttcatccccctgtccccagaccagtgcc

SEQ ID NO: 40716 - DNA, 120 bp, synthetic construct; identical to SEQ ID NO: 11639
  source 1..120: mol_type = other DNA

SEQ ID NO: 40717 - DNA, 120 bp, synthetic construct
  source 1..120: mol_type = other DNA
gggctggatagggctggggacttggtggagaccagggcagccccaggccctgccctcatggagctcccagtccacgggggagacagacccgtcccagataattccttaatactctctctt

SEQ ID NO: 40718 - DNA, 120 bp, synthetic construct
  source 1..120: mol_type = other DNA
actgcaacctctgcctccagagttcaagcaattctcctgccttagcctcccaagtaactgggactacaggtgcgcaccaccacatctggctaattttttgtatttttagaagagaaggtg

SEQ ID NO: 40719 - DNA, 120 bp, synthetic construct
  source 1..120: mol_type = other DNA
gataattccttaattctgagaatgctaagccctcacccatctgagtgtcaaccctggagtcaaggcgagggatggggagcagggctgctggatggtgggaaagggggtgctggaggagcc

SEQ ID NO: 40720 - DNA, 120 bp, synthetic construct
  source 1..120: mol_type = other DNA
ctctgcctctagattgtcctgccgccccatctggagcgcattcgggagaagctggcggagaacatccacgagctctgggcgctaacccgcatcgagcagggctggacctacggcccggtg

SEQ ID NO: 40721 - DNA, 120 bp, synthetic construct; identical to SEQ ID NO: 11640
  source 1..120: mol_type = other DNA

SEQ ID NO: 40722 - DNA, 120 bp, synthetic construct
  source 1..120: mol_type = other DNA
gtgcggtgggggagggaggcatggagagacagggcaggaggtagagactgagagagagaaggatggaggggacagggattgtgagacataaacaaatggggagtggccgggcacggtggc

SEQ ID NO: 40723 - DNA, 120 bp, synthetic construct
  source 1..120: mol_type = other DNA
gccgggcgtggtggtgcacctctgtaatcccagctcctcaggaggctgaggcaggagaatcatttgaacctgggaggcagaggttgcagcgagccgagatcacactactgcactccagcc

SEQ ID NO: 40724 - DNA, 120 bp, synthetic construct; identical to SEQ ID NO: 11641
  source 1..120: mol_type = other DNA

SEQ ID NO: 40725 - DNA, 120 bp, synthetic construct
  source 1..120: mol_type = other DNA
cctgtcgcctccactcccccacccccaggactctgctggctctgggctgccacgtgggcatggcggatgagaaggcggaggacaacctgaagaagacaaaactccccaagacgtgagtgt

SEQ ID NO: 40726 - DNA, 120 bp, synthetic construct
  source 1..120: mol_type = other DNA
gggaggctgaggttagggaggaaggagacttgggttagggtgaaggtcatagggtcagggctctggggtcagaggtgaatgtccaggattgaggagttaggagtttcagagagagagaga

SEQ ID NO: 40727 - DNA, 120 bp, synthetic construct
  source 1..120: mol_type = other DNA
gtcgttggagtcgtctaagtaagggatcctgaaattataggtgagcagttacacgtcctgagttcagaggtcaaggactccagacccaggagtttggggtggatgaggactgggatcaga

SEQ ID NO: 40728 - DNA, 120 bp, synthetic construct; identical to SEQ ID NO: 11642
  source 1..120: mol_type = other DNA

SEQ ID NO: 40729 - DNA, 120 bp, synthetic construct
  source 1..120: mol_type = other DNA
gaggcgggcggatcacctgaggtcgggaattcgagaccagcctgaccaacacggtgaaacccaccctctaccaaaaatacaaaattagccgggtgtggtggcacatgcctgtaatccctg

SEQ ID NO: 40730 - DNA, 120 bp, synthetic construct
  source 1..120: mol_type = other DNA
aaaacaaagagagagaaaaacctcaaagttagtggtgagaggtctgagagagttccggggttagagataggggtcccaaagtcaagacaaagggggctagaggtcattgatgtcaaagcc

SEQ ID NO: 40731 - DNA, 120 bp, synthetic construct
  source 1..120: mol_type = other DNA
gcagtcagggatcccatatagtgcagagcccggaagtggaggtgagggccttgtcccatggagccctaccatgcccgcaggtatatgatgagcaatgggtacaagccggctccgctggac

SEQ ID NO: 40732 - DNA, 120 bp, synthetic construct; identical to SEQ ID NO: 11643
  source 1..120: mol_type = other DNA

SEQ ID NO: 40733 - DNA, 120 bp, synthetic construct
  source 1..120: mol_type = other DNA
tgggctatatctttttttttttttttttttttgagacggagtctcgctgtccccaggctggagtgcaatggcgcgatctctgctcactgcaagctccacctcctgggttcacaccattct

SEQ ID NO: 40734 - DNA, 120 bp, synthetic construct
  source 1..120: mol_type = other DNA
gacctcgtgatccgcctgcctcggactcccaaagtgctgggattacaggcgtgagccactgcacctggcccaaatgggctatatctatcacatcgagcagactgaccaggaggtcagaaa

SEQ ID NO: 40735 - DNA, 120 bp, synthetic construct
  source 1..120: mol_type = other DNA
agcctaggaacccaatgagtgccaaccccacctttgactctgattcctgacctctagctttgatccctaatcactaatctctgaactgtagctaccacatgaaggcacccaaccaagggc

SEQ ID NO: 40736 - DNA, 120 bp, synthetic construct
  source 1..120: mol_type = other DNA
cccaacctgaatttccatcccttccataatcctggctctgaccctccaatcctggtctcagcccttcattctaatcaaccctgatcttgacccttaaccccagaccataactctgaccag

SEQ ID NO: 40737 - DNA, 120 bp, synthetic construct; identical to SEQ ID NO: 11644
  source 1..120: mol_type = other DNA

SEQ ID NO: 40738 - DNA, 120 bp, synthetic construct
  source 1..120: mol_type = other DNA
ttccgggcagagaaatcctatacagtgcagagcggccgctggtacttcgagtttgaagcagtcaccacaggcgagatgcgcgtgggctgggcgaggcccgagctgaggcctgatgtagag

SEQ ID NO: 40739 - DNA, 120 bp, synthetic construct
  source 1..120: mol_type = other DNA
ctgtgcctcactctgtccccacttcatgcatctactgtaccactcatccacccatctatccatccattcaaccaatgattcatccatccatccatccatcgatctatcagacatccatct

SEQ ID NO: 40740 - DNA, 120 bp, synthetic construct; identical to SEQ ID NO: 11645
  source 1..120: mol_type = other DNA

SEQ ID NO: 40741 - DNA, 120 bp, synthetic construct
  source 1..120: mol_type = other DNA
tccaataaccatctgcccatccaacaaccatttatacaaccatccttcccttcttccctctatctgtcatccatttatttatgcttgcccctacttacactttgttctttctctgtatca

SEQ ID NO: 40742 - DNA, 120 bp, synthetic construct
  source 1..120: mol_type = other DNA
agccatgtacccaatttctcatccatctatctgtctcattagccactcatctattttgtgcatgtatataagcatatatggatctgtatggggacactgataggttcatttttcctttcc

SEQ ID NO: 40743 - DNA, 120 bp, synthetic construct
  source 1..120: mol_type = other DNA
gaaaaattcctgtgatcatggatgcaaatgtgaggaaagatggagacactgtggggtgacccctcttccataccacctgccctgaacctgacacttcgaatgtctgtcttcatatatctc

SEQ ID NO: 40744 - DNA, 120 bp, synthetic construct; identical to SEQ ID NO: 11646
  source 1..120: mol_type = other DNA

SEQ ID NO: 40745 - DNA, 120 bp, synthetic construct
  source 1..120: mol_type = other DNA
ccctctgccctgcccacctgccctcacccctgcccatccatcccctcccaccaggcttcctgcccgtctgcagcttgggacctggccaggtgggtcatctgaacctgggccaggacgtga

SEQ ID NO: 40746 - DNA, 120 bp, synthetic construct
  source 1..120: mol_type = other DNA
cccttgaacaccctcactatgaggtaaggactgagcccctcaatgccttctcatctgcctccaaagctccttccttccacagtgctcttctttgagtttctcttttccctccatgttagg

SEQ ID NO: 40747 - DNA, 120 bp, synthetic construct
  source 1..120: mol_type = other DNA
aaccctgcctgggcaacaagcaaaactccatctctaaaaataaaaaaaaattaagtctaggcatggtagctcatgcctgttatcccagcacttagggaggctgaggcaggaggatccctt

SEQ ID NO: 40748 - DNA, 120 bp, synthetic construct
  source 1..120: mol_type = other DNA
gagactggaggattgcttgattccaagaggtcaagactgcagtgaattagccagatgtggtggcacatgcctgtaattccagctacttagggggctgaggcaggagactcgcttgaacac

SEQ ID NO: 40749 - DNA, 120 bp, synthetic construct; identical to SEQ ID NO: 11647
  source 1..120: mol_type = other DNA

SEQ ID NO: 40750 - DNA, 120 bp, synthetic construct
  source 1..120: mol_type = other DNA
aaaaaagagctgggcatggtggctcatgcctgtaatcccagcactttgggaggccaaggcgggcagatcacttgagcccagaagttcaagatgagcctggccaatatggcaaaaacccat

SEQ ID NO: 40751 - DNA, 120 bp, synthetic construct
  source 1..120: mol_type = other DNA
tgaggttgcaccactgcactccagcctgggtgacagagcaagaccctatctttacaaacaaaacaaaacaaaacagaaggactctgcaaaaggagttttaagtatgggaacgtccagttg

SEQ ID NO: 40752 - DNA, 120 bp, synthetic construct
  source 1..120: mol_type = other DNA
acacctgccactaccagatgtccccaacccaaggcacagcatgctacacggaagtgagaatgaatacctggaaatacacacagccatgtggacgaatctcagacataatgtcgagtagaa

SEQ ID NO: 40753 - DNA, 120 bp, synthetic construct; identical to SEQ ID NO: 11648
  source 1..120: mol_type = other DNA

SEQ ID NO: 40754 - DNA, 120 bp, synthetic construct
  source 1..120: mol_type = other DNA
ccagcctgggcaacatagcaaaaccctgtctctacacagaataaacaaaattatctgggcatggtggtatgtgcctgtggtcccagccacttgggaggctgaagtgggaggattgtttga

SEQ ID NO: 40755 - DNA, 120 bp, synthetic construct
  source 1..120: mol_type = other DNA
gaggggagaaagaggagagaaaaaagacccctaaagagtctgagaacaggctgggctcggtggctcatgcctgtaatcccagcagtttgggaggccgatgtgggtggctcacctgaggtc

SEQ ID NO: 40756 - DNA, 120 bp, synthetic construct
  source 1..120: mol_type = other DNA
agaattgcttgaacccaggaggcaaaagttgcagtcagccaagattgcaccattgcactccagcctgggtgacagcgagactctgtctcaaaaaaaaaaaaaaaaaaaaagattctgaga

SEQ ID NO: 40757 - DNA, 120 bp, synthetic construct; identical to SEQ ID NO: 11649
  source 1..120: mol_type = other DNA

SEQ ID NO: 40758 - DNA, 120 bp, synthetic construct
  source 1..120: mol_type = other DNA
accacgcctggctaatttttttgtatttttagtacagatgaggtttcaccatgctggccaggctggtctcaaactcctgacctcaggtgatcagcccgcctcagcctcccaaagtgctgg

SEQ ID NO: 40759 - DNA, 120 bp, synthetic construct
  source 1..120: mol_type = other DNA
tgactttattcatcaaaactagtcatggagaagtgaccggattcccatccgaagcaaccacttcaaatctaggggggaaagcaagggtttaaaaaggggaaacttggctgggggtggtgg

SEQ ID NO: 40760 - DNA, 120 bp, synthetic construct
  source 1..120: mol_type = other DNA
agccaggcgtgttggctcatgcttgaatccaggaggcagaggttgcagtgagccaagatcacaccattgcactccagcctgggtgacagagcaagactcttgtctaaaaaaaaaaaaaaa

SEQ ID NO: 40761 - DNA, 120 bp, synthetic construct; identical to SEQ ID NO: 11650
  source 1..120: mol_type = other DNA

SEQ ID NO: 40762 - DNA, 120 bp, synthetic construct
  source 1..120: mol_type = other DNA
tacccggccgggagcttcatccccctgcaggagtggggggcccttgactaattcccatgcaggtgcactatggcctaatggtggctccgtgtgtgaccaggtgtaggaccaacggcctgg

SEQ ID NO: 40763 - DNA, 120 bp, synthetic construct
  source 1..120: mol_type = other DNA
cctgcctgcgcctgacccaccgcacctggggctcccagaacagcctggtggagatgcttttcctgcggctgagcctcccagtccagttccaccagcacttccgctgcactgcaggggcca

SEQ ID NO: 40764 - DNA, 120 bp, synthetic construct
  source 1..120: mol_type = other DNA
gcaaagaagggactgcgaaggagggcgcccccgggggcaccccgcaggcggggggagaggcgcagcccgccagggcggagaatgagaaggatgccaccaccgagaagaacaagaagagag

SEQ ID NO: 40765 - DNA, 120 bp, synthetic construct; identical to SEQ ID NO: 11651
  source 1..120: mol_type = other DNA

SEQ ID NO: 40766 - DNA, 120 bp, synthetic construct
  source 1..120: mol_type = other DNA
tgaatacccagtggtcttctaaatggggatcctttctgtgtcacaaatgtaccccccgaaatctaacttaaagggagattctgagaaggtactaaatctgctttttccctacaatggcag

SEQ ID NO: 40767 - DNA, 120 bp, synthetic construct
  source 1..120: mol_type = other DNA
ttctgcctcagcctcctgagtagctgggattacaggcacgcgccaccatgcccagctaatttttgtatttttagtagagacggggttttgccatgttggccaggctggtctcaaactcct

SEQ ID NO: 40768 - DNA, 120 bp, synthetic construct
  source 1..120: mol_type = other DNA
ttttttttttttttttttttttgagatggagtcttgctctgttgcccagtctggagtgcaatggcacgatcttggctctctgcaatctccgcctcctgggttcaagcaattctcctgcct

SEQ ID NO: 40769 - DNA, 120 bp, synthetic construct; identical to SEQ ID NO: 11652
  source 1..120: mol_type = other DNA

SEQ ID NO: 40770 - DNA, 120 bp, synthetic construct
  source 1..120: mol_type = other DNA
acttagggggacccccatataacccagtggggacctccatattcccagaaggcgcctttaatttgggtaactcagcatccacaagcgcagagcatagcacttctagaatggattagtctg

SEQ ID NO: 40771 - DNA, 120 bp, synthetic construct
  source 1..120: mol_type = other DNA
tcatggcgcctctcctcccactaccagcttcttattcaaggccaagaaggtcgccatgatgacccagccaccggccacccccacgctgccccgactccctcacgacgtggtgcctgcaga

SEQ ID NO: 40772 - DNA, 120 bp, synthetic construct; identical to SEQ ID NO: 11653
  source 1..120: mol_type = other DNA

SEQ ID NO: 40773 - DNA, 120 bp, synthetic construct
  source 1..120: mol_type = other DNA
aataccctcaatgtaatacctactctaatatattactgggaacaaaaattcataattgtcttaatatagttttgggatttccccaaatccaaaatatttcatagacagacagcctagtgc

SEQ ID NO: 40774 - DNA, 120 bp, synthetic construct
  source 1..120: mol_type = other DNA
tagattccttttttttttctttttatttttgagatggagtcttgctctgttgcccagtctggagtgcagtggtgtgatcttggctcactgaaacctctgcctcctgggttcaaacgattc

SEQ ID NO: 40775 - DNA, 120 bp, synthetic construct
  source 1..120: mol_type = other DNA
tgcagtggcgcgatctcggctcactgcaacctctgcctcccgggttcaagtgattcttctgcctcagcctcccaagtagctgggactatgggcacacgccaccatgcccggctaattttt

SEQ ID NO: 40776 - DNA, 120 bp, synthetic construct; identical to SEQ ID NO: 11654
  source 1..120: mol_type = other DNA

SEQ ID NO: 40777 - DNA, 120 bp, synthetic construct
  source 1..120: mol_type = other DNA
ggccgactgggtgccacttgggcaaaagtcatttcaccactctatgccttctctcctatggaggtgctatggttttccatcagtagaatgggggtaaaaattatacctacctgatatgga

SEQ ID NO: 40778 - DNA, 120 bp, synthetic construct
  source 1..120: mol_type = other DNA
ctgcaggctacgatggtgcctctgcactccagcctggatgacagagggagactgcaactcaaaaaaaataaaaataaaaaaataaggaaagaaaaaaaagaagaagaagaaggaaagaaa

SEQ ID NO: 40779 - DNA, 120 bp, synthetic construct
  source 1..120: mol_type = other DNA
cggctcactgcaacctctgcctcccaggttcaagcgattctcctgcctcagcctcccgagtacctgggactacaggcgcccaccaccatgcccggctaatttttgtacttttagtagaga

SEQ ID NO: 40780 - DNA, 120 bp, synthetic construct; identical to SEQ ID NO: 11655
  source 1..120: mol_type = other DNA

SEQ ID NO: 40781 - DNA, 120 bp, synthetic construct
  source 1..120: mol_type = other DNA
cccctccttgtgtcaccagtactattactccgtgagggtctttgctggacaggagcccagctgcgtgtgggcgggctgggtcacccctgactaccatcagcacgacatgagcttcgacct

SEQ ID NO: 40782 - DNA, 120 bp, synthetic construct
  source 1..120: mol_type = other DNA
tgggaggtgcagggtggggagggcaggaggcagtcagagctcccgacaccagctctgtggctgcctggttgtgggacctaggaactttctggagcgggaggattctctggggcactgggc

SEQ ID NO: 40783 - DNA, 120 bp, synthetic construct
  source 1..120: mol_type = other DNA
ttatgcatttctcctattccattttctccttttccttctcatcctgtttcatctcacccttctccttctctgtcatctcattctctctcctcctgcttcccttgctttccctcctttcag

SEQ ID NO: 40784 - DNA, 120 bp, synthetic construct
  source 1..120: mol_type = other DNA
atgggactctgaggttgtgtgtttccgggagcttggggaagggggtgtccagggtccagagctactcacatgaggagtgcagtgaccgcttctgtctcctgcagcctcaagtgtagcaac

SEQ ID NO: 40785 - DNA, 120 bp, synthetic construct; identical to SEQ ID NO: 11656
  source 1..120: mol_type = other DNA

SEQ ID NO: 40786 - DNA, 120 bp, synthetic construct
  source 1..120: mol_type = other DNA
agactggagtgcaatgggacgatcttggctcactgcaaccttcgcctcctgggttagagggattctcctgcctcagcctcctgagtagctgggattacaggcgagcaccacaacagccgg

SEQ ID NO: 40787 - DNA, 120 bp, synthetic construct
  source 1..120: mol_type = other DNA
agccaccacacccagccagagtccagccttgaccttggaaagaggtttctgttccctcttgagctgggtgacaccagtcaccaacttctctccaaccagggaacacgctaggatgggcca

SEQ ID NO: 40788 - DNA, 120 bp, synthetic construct
  source 1..120: mol_type = other DNA
tgttgtagatattggctttatcacatattcacctacctgtccattaatctaaggtgggtttgtacaactttattttaattttttggcatccattgttggttatgaaattttattgcattt

SEQ ID NO: 40789 - DNA, 120 bp, synthetic construct; identical to SEQ ID NO: 11657
  source 1..120: mol_type = other DNA

SEQ ID NO: 40790 - DNA, 120 bp, synthetic construct
  source 1..120: mol_type = other DNA
catggtgagatcacagctcactgcagccacaaccttcctggactcaagcgatcctcccacttcagcctcttgaatagttgagaacacaggcacgtgccaccatgcccagctaattttttt

SEQ ID NO: 40791 - DNA, 120 bp, synthetic construct
  source 1..120: mol_type = other DNA
ctcctggctaaagctttatgttaaatggagaattaaaaacgtatacaagaatggaatagtataatgaactgccatgcccctgtcacacagcttcaactgtcacccactcacagccaatct

SEQ ID NO: 40792 - DNA, 120 bp, synthetic construct
  source 1..120: mol_type = other DNA
tcccacctcagcctcctgagtagctgggactacaggtatgcaccaccatgcctggctaattttttttagttttagtggagacaggatcttgctatgttgcccaggctggtctcaaactct

SEQ ID NO: 40793 - DNA, 120 bp, synthetic construct; identical to SEQ ID NO: 11658
  source 1..120: mol_type = other DNA

SEQ ID NO: 40794 - DNA, 120 bp, synthetic construct
  source 1..120: mol_type = other DNA
tttatttattatttatttttattttattttttgagacaatgtctcactctgtcacccagtctggagtgcagtggcatggtcttggctcactgcaaccttcgcctcccgggctcaagcctc

SEQ ID NO: 40795 - DNA, 120 bp, synthetic construct
  source 1..120: mol_type = other DNA
tcctgccttggcctcccaaagtgctgggattacagtgtgaggcagcatgctcaaccttatttatttaattatttattttaatttattaagacagagtcttgctctgtcacccaggctggt

SEQ ID NO: 40796 - DNA, 120 bp, synthetic construct
  source 1..120: mol_type = other DNA
caacctcctgggatcaaacgatcctcccacctcagcctcccaagtggctgggaccacagacacgcactaccacacctggctaatttttgtattttttgtagagacggtgttttgccatgt

SEQ ID NO: 40797 - DNA, 120 bp, synthetic construct; identical to SEQ ID NO: 11659
  source 1..120: mol_type = other DNA

SEQ ID NO: 40798 - DNA, 120 bp, synthetic construct
  source 1..120: mol_type = other DNA
caggaggatcacctgagtctgggaggcagaggttgtagtgagctatgatagcgccactgcactccagcctgggtggcagagcgagacactgcttctttttaaaaaagttaaaatgggccg

SEQ ID NO: 40799 - DNA, 120 bp, synthetic construct
  source 1..120: mol_type = other DNA
tacaaaaattagcctggcgtggtgacgggcgcctgtaatcccagctacttgggaggctgagacaggagaatcgcttgaacgtgggaggtggagtttgcagtgagccgagatgatgccact

SEQ ID NO: 40800 - DNA, 120 bp, synthetic construct
  source 1..120: mol_type = other DNA
acaggatcccaggggcttcctgtgtatattaaatctggagagggctggcctggtttcccatagcctggatctggctggtgcattcctgtggtggctttttaacattttcctttgtccccc

SEQ ID NO: 40801 - DNA, 120 bp, synthetic construct; identical to SEQ ID NO: 11660
  source 1..120: mol_type = other DNA

SEQ ID NO: 40802 - DNA, 120 bp, synthetic construct
  source 1..120: mol_type = other DNA
cgttgcccaggctgctcttgaactcttaggctcaggtgaccctcccacttcagcctcccaaagttctaggattacaggtgtgagccatcacactctctgggttttgaatgagtatgcttg

SEQ ID NO: 40803 - DNA, 120 bp, synthetic construct
  source 1..120: mol_type = other DNA
gggtgacctctgagccattttggagcctctaacgcccagatgaggacctacaaattggccccagagtttgaggtccagagtcaaccctccctccagcccacccgtttgctcacctcgtcc

SEQ ID NO: 40804 - DNA, 120 bp, synthetic construct; identical to SEQ ID NO: 11661
  source 1..120: mol_type = other DNA

SEQ ID NO: 40805 - DNA, 120 bp, synthetic construct
  source 1..120: mol_type = other DNA
cagatgctgatgccagtgtcctggagccgcatgcccaaccacttcctgcaggtggagacgaggcgtgccggcgagcggctgggctgggccgtgcagtgccaggagccgctgaccatgatg

SEQ ID NO: 40806 - DNA, 120 bp, synthetic construct
  source 1..120: mol_type = other DNA
gattccagactacaccccaggaatctccagacctacctcaggggactcgggctcagctcagacatccccagattatgtcccagggggattcagactcaacgcaggaggctctacaccatc

SEQ ID NO: 40807 - DNA, 120 bp, synthetic construct
  source 1..120: mol_type = other DNA
ccaagtacaccccaggatccctggacatgattcagggaggcttggatgcaccctagagtctcttgggcatatgcagggaggctttaagaagaatcccgtggatatttcaaacccacccca

SEQ ID NO: 40808 - DNA, 120 bp, synthetic construct
  source 1..120: mol_type = other DNA
ctgaggcaggcaggtcacctgaggtcaggagtctctactaaaaatacaaaaattagccagttgtggtggtgtgcacccatcgtcccagctactcgggaggctgaggcatgagaattgctt

SEQ ID NO: 40809 - DNA, 120 bp, synthetic construct; identical to SEQ ID NO: 11662
  source 1..120: mol_type = other DNA

SEQ ID NO: 40810 - DNA, 120 bp, synthetic construct
  source 1..120: mol_type = other DNA
cattcaacaaatagctttgggtccctcctatgtgctaggtagtattccaggctggagacaccaagcccctgtgaagtgacattctagtaatgcttgtacataactcaggatgctcggaca

SEQ ID NO: 40811 - DNA, 120 bp, synthetic construct
  source 1..120: mol_type = other DNA
ctgaggaggagggagggttgcttgaggccaggggtttgaaaccaccaggaagcacagtgagaacccgtctccacattttttttttctttttaattagcttggcttggtggcacacacatg

SEQ ID NO: 40812 - DNA, 120 bp, synthetic construct; identical to SEQ ID NO: 11663
  source 1..120: mol_type = other DNA

SEQ ID NO: 40813 - DNA, 120 bp, synthetic construct
  source 1..120: mol_type = other DNA
tacgaagtcccagaccatcccagggaccccagaggtatcccaggggcccccagatcccttagggacttccagaaccattgaaagactcctagacccagctccactgccctcacagaaccc

SEQ ID NO: 40814 - DNA, 120 bp, synthetic construct
  source 1..120: mol_type = other DNA
tggaatggtaggggtttgaaggaaagacgaatgaataaatgggtggatagtgatgaaggaaatggaggaagagatggtggcttgactgatgcaggaggctcattcatctgtccctgtctg

SEQ ID NO: 40815 - DNA, 120 bp, synthetic construct
  source 1..120: mol_type = other DNA
gcgtggcgcacgctctgtgcagccacgtagaccaagctcagctgctgcacgccctggaggacgcgcacctgccaggcccactgcgcgcaggctactatgacctcctcatcagcatccacc

SEQ ID NO: 40816 - DNA, 120 bp, synthetic construct
  source 1..120: mol_type = other DNA
ggcatggcctgccgggagttggagtcaccacttcgctgaggcccccgcatcatttctcgcccccctgtttcgtggccgctctgccagctgctggggcagcagaggccccggcccgcctca

SEQ ID NO: 40817 - DNA, 120 bp, synthetic construct; identical to SEQ ID NO: 11664
  source 1..120: mol_type = other DNA

SEQ ID NO: 40818 - DNA, 120 bp, synthetic construct
  source 1..120: mol_type = other DNA
tcagctcactgcaacctccgcctcccaggttcaagcaattctcctgcctcagccccccgagtagcggggactacaggcatgtgccaccacgccccgctaatatttgtattttcagtagag

SEQ ID NO: 40819 - DNA, 120 bp, synthetic construct
  source 1..120: mol_type = other DNA
tttctatgtatcctcccaccatctccctatctttcattcacctttccctccatctgctcacctgtcatctctttatgtttattcatctcttctttcttcctattcatctatccaaccaac

SEQ ID NO: 40820 - DNA, 120 bp, synthetic construct
  source 1..120: mol_type = other DNA
cctttccatccacccattcatcctatccattcatgtgtatagatcatctttccatcaacaagatctttccatcaacatctttccatctgcctttctatccttttgttctccacccactcc

SEQ ID NO: 40821 - DNA, 120 bp, synthetic construct; identical to SEQ ID NO: 11665
  source 1..120: mol_type = other DNA

SEQ ID NO: 40822 - DNA, 120 bp, synthetic construct
  source 1..120: mol_type = other DNA
cctacccacaaatccatttagccatccacacccatccatctacccgttccctatccttctctccatcccttgtatcatgtacccttttattcgtagacccatctaactattcatttatat

SEQ ID NO: 40823 - DNA, 120 bp, synthetic construct
  source 1..120: mol_type = other DNA
tcaagagattcttctgcctcagcctcccaagtagatgggattacaggtgcccgccaccatgcccggctaatttttgtatttttaatagagatggggtttcaccatgttgaccaggctggt

SEQ ID NO: 40824 - DNA, 120 bp, synthetic construct
  source 1..120: mol_type = other DNA
tggcacaataatggctcactgtagcctcaacctcctgggcttcagcaatccttctgcctcagcctcctgaatagctgggactacaggtgtgcactaccatgcccaggtaagttttaaatt

SEQ ID NO: 40825 - DNA, 120 bp, synthetic construct; identical to SEQ ID NO: 11666
  source 1..120: mol_type = other DNA

SEQ ID NO: 40826 - DNA, 120 bp, synthetic construct
  source 1..120: mol_type = other DNA
acaaacctatccagccatgtggccaaccatccccccaccctcatggctattcactaatttatctatttatccacatattcatttacttcctcatgcatctatcaacccatccatcaccta

SEQ ID NO: 40827 - DNA, 120 bp, synthetic construct
  source 1..120: mol_type = other DNA
atcatcatccacttattcatctttccttcaaacctctaccattccgactcgggattcatccagccagccatccaatcctccctccattcatccatctctctctctcccctgcactcttct

SEQ ID NO: 40828 - DNA, 120 bp, synthetic construct
  source 1..120: mol_type = other DNA
agctccctgcaacctctgcctcccagattcaagtgattctcttgcctcagcctcctgagtagctgggaatacaggcgtgcaccaccacacccagctaatttttttttgtatttttgtaga

SEQ ID NO: 40829 - DNA, 120 bp, synthetic construct; identical to SEQ ID NO: 11667
  source 1..120: mol_type = other DNA

SEQ ID NO: 40830 - DNA, 120 bp, synthetic construct
  source 1..120: mol_type = other DNA
ggaatcggatcagccaatgcaggaatgattggcatgtgcatgaggggcaggtctggagaatgaggccagggcctgatgatggaggccttgcaggccacagtgaagaaccgagactttgtc

SEQ ID NO: 40831 - DNA, 120 bp, synthetic construct
  source 1..120: mol_type = other DNA
gatgaggaggagaaggaggaggatgaggaggaaacagcacaggaaaaggaagatgaggaaaaagaggaagaggaggcagcagaaggggagaaagaagaaggcttggaggaagggctgctc

SEQ ID NO: 40832 - DNA, 120 bp, synthetic construct; identical to SEQ ID NO: 11668
  source 1..120: mol_type = other DNA

SEQ ID NO: 40833 - DNA, 120 bp, synthetic construct
  source 1..120: mol_type = other DNA
ggcatgtgccaccacgcccagctaattttttgtatttttagtagagatggggtttcgccatgttggccaggctggtcttgaactcctgacttcaggtgatccacccacctcggcctccca

SEQ ID NO: 40834 - DNA, 120 bp, synthetic construct
  source 1..120: mol_type = other DNA
aagtttcaaggaagtcctgatggtctcacctccatctctcctcccacacggctgtccttccacagatgtgccacctgctggagtatttctgtgaccaagagctgcagcaccgtgtggagt

SEQ ID NO: 40835 - DNA, 120 bp, synthetic construct
  source 1..120: mol_type = other DNA
agttccgctccccaccccaggaacaggtcatctgacccctgacgctggccacttttactgtctaaaccccaacctcaacatctcctgactctgatcactgaggaccctcaacctctaaac

SEQ ID NO: 40836 - DNA, 120 bp, synthetic construct; identical to SEQ ID NO: 11669
  source 1..120: mol_type = other DNA

SEQ ID NO: 40837 - DNA, 120 bp, synthetic construct
  source 1..120: mol_type = other DNA
tggtaaggagtggggatcagagagtcctccccatgctaactttctctcgagacctctccagaagtttccctaagatttcctgacaaccctctacagtatcggtgctatgtaactattggt

SEQ ID NO: 40838 - DNA, 120 bp, synthetic construct
  source 1..120: mol_type = other DNA
ggctataagccagataaatgaatgggtatgtgaattgatggatagaagaagtgggtaaaaaatggctggctggatagatggaaggatgaagagaaggatggatggatggttgagaactgg

SEQ ID NO: 40839 - DNA, 120 bp, synthetic construct
  source 1..120: mol_type = other DNA
gacttttaagattttctctttgtctttgcctttcaacaatttagtatgacgtgtctaggtgtagagctctttgaatttatcctgttgaaagtttgttgagtttcttggatatatacttac

SEQ ID NO: 40840 - DNA, 120 bp, synthetic construct; identical to SEQ ID NO: 11670
  source 1..120: mol_type = other DNA

SEQ ID NO: 40841 - DNA, 120 bp, synthetic construct
  source 1..120: mol_type = other DNA
aactcctgggctcaagcaatttgcatgcctgggcctcccaaagtgctggattacaggtgtgagccactgcacctggcccatttttcttcattcttttacttttctgttcttcaggctaga

SEQ ID NO: 40842 - DNA, 120 bp, synthetic construct
  source 1..120: mol_type = other DNA
atattttaacagtctgcctttttattagtattcactactggataagtcactattatgatatttccttttaattcttcagacatggtttcctttagttctttgaacatatttgcaaaattg

SEQ ID NO: 40843 - DNA, 120 bp, synthetic construct
  source 1..120: mol_type = other DNA
gtgggtggattgcttgagctcaggagttcaaaaccagcctgggcaacatggcaagacccccatctctacagaaaaagatacaaaattaacagggcatggtggcatacacctgtagtccca

SEQ ID NO: 40844 - DNA, 120 bp, synthetic construct; identical to SEQ ID NO: 11671
  source 1..120: mol_type = other DNA

SEQ ID NO: 40845 - DNA, 120 bp, synthetic construct
  source 1..120: mol_type = other DNA
gcggtcagcagaggagagcaaaccccgtgaggactggggtcactggggagagggcaggggtggggtgggtagccccatgcctgcggagcctctgggtcccaaagagggcatgaggacaga

SEQ ID NO: 40846 - DNA, 120 bp, synthetic construct
  source 1..120: mol_type = other DNA
ttgaggtcaggatttggagaccagcccggccaacatggtgaaacccccttctccactaaaaatacaaaaattagctgggtgtggcggtgcatgcctgtaatcccagctacttggagactg

SEQ ID NO: 40847 - DNA, 120 bp, synthetic construct
  source 1..120: mol_type = other DNA
tgcatgctggaggtttgcctccagagatgggggctgtagaacgtgtgtgttggaccagggtgacacagcctaccagcttagtggcaaacctctaactaagggatggcggtaaccctgaac

SEQ ID NO: 40848 - DNA, 120 bp, synthetic construct; identical to SEQ ID NO: 11672
  source 1..120: mol_type = other DNA

SEQ ID NO: 40849 - DNA, 120 bp, synthetic construct
  source 1..120: mol_type = other DNA
gtgcagtggcgcgatcttggctcactgcaacctccgcctcctgggttcaagcgattctcctgcttcagcctccagagtagctgggactacaggcgcgcagcaccatgcctggctaatttt

SEQ ID NO: 40850 - DNA, 120 bp, synthetic construct
  source 1..120: mol_type = other DNA
cacccagccaaatccacagtatttttatagaacaagtgggattgtgacatgtgccttcaaaggtgcatggcgaagtgcttctggtcggctctggtatcttgcagttgtacagtttattat

SEQ ID NO: 40851 - DNA, 120 bp, synthetic construct
  source 1..120: mol_type = other DNA
aaagtttgccaggctgggcacagtggctcacacctataaccctagccctttgggaggccacagtaggaggatcacttgagcccgggagttcgaggctgaagtgagctgtgatagccccac

SEQ ID NO: 40852 - DNA, 120 bp, synthetic construct; identical to SEQ ID NO: 11673
  source 1..120: mol_type = other DNA

SEQ ID NO: 40853 - DNA, 120 bp, synthetic construct
  source 1..120: mol_type = other DNA
gccgcgggcgtacaccatctcaccgtcctccgtggaagacaccatgagcctgctcgagtgcctcggccagatccgctcgctgctcatcgtgcagatgggcccccaggaggagaacctcat

SEQ ID NO: 40854 - DNA, 120 bp, synthetic construct
  source 1..120: mol_type = other DNA
gatctcagtctctcgatggctagctcacctcctgggtaatgtctccttcccttacctctccgccctcagtggtagcagctccgcttctgtgtgactctcagcaggacattccccaccccc

SEQ ID NO: 40855 - DNA, 120 bp, synthetic construct
  source 1..120: mol_type = other DNA
gcctcccaagtagctgggattacaggcacgcaccaccataccaggctaattttttatatttagtagagacagggtttcaccatgttgatcagactagtctcgaactcctaacctcaggtg

SEQ ID NO: 40856 - DNA, 120 bp, synthetic construct; identical to SEQ ID NO: 11674
  source 1..120: mol_type = other DNA

SEQ ID NO: 40857 - DNA, 120 bp, synthetic construct
  source 1..120: mol_type = other DNA
tcacagctcactgcagcctcaacttcctgggctcaagcgatcctcctgcctcagtctcctgagtagctgggactacagacacacaccaccatacccagctaatttgtaaatttttttgta

SEQ ID NO: 40858 - DNA, 120 bp, synthetic construct
  source 1..120: mol_type = other DNA
atttgacaaagggcaacatggcaaagatctctgccctagaggagcctgccttgggtgcacgcctcagtctccttatgagggaaacagggacccttcctcccacagtggctgtaggaattt

SEQ ID NO: 40859 - DNA, 120 bp, synthetic construct
  source 1..120: mol_type = other DNA
tagctgggattacgggtatgcgccaccacgcctggctaatttttgtatttttagtagaaatggggtttcaccatgttggccaggctgatctcgatctcctgacctcaagtgatcctctag

SEQ ID NO: 40860 - DNA, 120 bp, synthetic construct; identical to SEQ ID NO: 11675
  source 1..120: mol_type = other DNA

SEQ ID NO: 40861 - DNA, 120 bp, synthetic construct
  source 1..120: mol_type = other DNA
ccacagagggcaggccctgaccaccctgcctgtcccaggagatccgcttccccaagatggtgacaagctgctgccgcttcctctgctatttctgccgaatcagccggcagaaccagcgct

SEQ ID NO: 40862 - DNA, 120 bp, synthetic construct
  source 1..120: mol_type = other DNA
ctttccaccagctcactcattcaacaaacactccctctcaactgtggttctggccctgtaatgagtaatgctggggacacaatagtgaccccaatagtgacagcccagagtggtcagagc

SEQ ID NO: 40863 - DNA, 120 bp, synthetic construct
  source 1..120: mol_type = other DNA
ggcgagacaagcaggagtgagatgttctccccacctctcgcccctgcaggcatgcagggctccacgcccctggacgtggctgctgcctccgtcattgacaacaatgagctggccttggca

SEQ ID NO: 40864 - DNA, 120 bp, synthetic construct; identical to SEQ ID NO: 11676
  source 1..120: mol_type = other DNA

SEQ ID NO: 40865 - DNA, 120 bp, synthetic construct
  source 1..120: mol_type = other DNA
ccgcagtctacacttccgggctgggggcggatccgcacgctacgcttccgggttgggggccgatccacagtctaggcttccagccaggtggccttggcacatttcttcgctctccgagct

SEQ ID NO: 40866 - DNA, 120 bp, synthetic construct
  source 1..120: mol_type = other DNA
tgtggccttggataagtgacttagactctccagacccctgttgtctcatctgtacaatgaatgtagtcatagaaacgacttcatggagtcattctgaggattaaatgaattaatccagta

SEQ ID NO: 40867 - DNA, 120 bp, synthetic construct
  source 1..120: mol_type = other DNA
tggccaggcaaagtggcttacatctataatcccagcactttgggaggccgaggcaggaggatcacttaagctcaggagtttaagaccagcctggacaatatagggacaccttgtctctac

SEQ ID NO: 40868 - DNA, 120 bp, synthetic construct; identical to SEQ ID NO: 11677
  source 1..120: mol_type = other DNA

SEQ ID NO: 40869 - DNA, 120 bp, synthetic construct
  source 1..120: mol_type = other DNA
agtgagggtgagggcaggaggtgacaggtgggtcatgtggcatctcatcggtcacaacaagggctctggcttttaccctgagtgagaggaggccaggattctgagcagaggagggacgtg

SEQ ID NO: 40870 - DNA, 120 bp, synthetic construct
  source 1..120: mol_type = other DNA
tggacagaaccgctacaggaaaggggtctggatccaggcccaaagagaaggttcttggatctcatgtaagaaagaattcagggcaactccatagagtaaagtgaaagcaagtttattagg

SEQ ID NO: 40871 - DNA, 120 bp, synthetic construct
  source 1..120: mol_type = other DNA
tcatgcctcccctttctaaaccatgtagggtaactttctgatattgccatgacatttgtaaactgtcgtggcgctggtgggagtgcagcagtgaggatgaccagaggtcactctcgttgc

SEQ ID NO: 40872 - DNA, 120 bp, synthetic construct; identical to SEQ ID NO: 11678
  source 1..120: mol_type = other DNA

SEQ ID NO: 40873 - DNA, 120 bp, synthetic construct
  source 1..120: mol_type = other DNA
tggcctccagagctgccccatgcttgtggccaaagggtacccagacattggctggaacccctgtggtggagagcgctacctggacttcctgcgctttgctgtcttcgtcaacggtgagga

SEQ ID NO: 40874 - DNA, 120 bp, synthetic construct
  source 1..120: mol_type = other DNA
gggctggcaggggcctgtgttacccctggaggtgttgggtcctgtggctggcagtgttggatcctggggctggcgggagcctggtgttacccctagaggtgttgggtcctggggctggca

SEQ ID NO: 40875 - DNA, 120 bp, synthetic construct
  source 1..120: mol_type = other DNA
ccctttccccatgcgggtggccaggcgagagcgtggaggagaacgccaatgtggtggtgcggctgctcatccggaagcctgagtgcttcggacccgccctgcggggtgagggtggctcag

SEQ ID NO: 40876 - DNA, 120 bp, synthetic construct
  source 1..120: mol_type = other DNA
gcaacccgccctccctggcccctggctgcctccccaacccacccaccttccctgcagctttggtgaggaaccgcctgaagaaaaccgggtgcacctgggacacgccatcatgtccttcta

SEQ ID NO: 40877 - DNA, 120 bp, synthetic construct; identical to SEQ ID NO: 11679
  source 1..120: mol_type = other DNA

SEQ ID NO: 40878 - DNA, 120 bp, synthetic construct
  source 1..120: mol_type = other DNA
gggtcaggatggggatggggtcacagggataggggtcggggccaggatgaggggtcgcagggagaggggtcaggatgaggttggggggaacaaggagagaggtcgggactggggtggggg

SEQ ID NO: 40879 - DNA, 120 bp, synthetic construct
  source 1..120: mol_type = other DNA
tgatgagtgcccctctccctccctctactccccagctaatccaagccggcaagggtgaggccctgcggatccgcgccatcctccgctcccttgtgcccttggaggaccttgtgggcatca

SEQ ID NO: 40880 - DNA, 120 bp, synthetic construct
  source 1..120: mol_type = other DNA
ctgcctgcagatggggctctggtgcagccaaagatgtcagcatccttcgtgccggaccacaaggcgtccatggtgctcttcctggaccgtgtgtatggcatcgagaaccaggacttcttg

SEQ ID NO: 40881 - DNA, 120 bp, synthetic construct; identical to SEQ ID NO: 11680
  source 1..120: mol_type = other DNA

SEQ ID NO: 40882 - DNA, 120 bp, synthetic construct
  source 1..120: mol_type = other DNA
agttcgagaccagcctgaccaacatggtgaaaccgcatctctactaaaagtacaaaaattagccagacgtggtggcgcacacttgtaatcccagctactcaggaggctgaggcaggagaa

SEQ ID NO: 40883 - DNA, 120 bp, synthetic construct
  source 1..120: mol_type = other DNA
catctcaaaaaaaatattttgttcgcagtattggtttggtactgtgggcacacagaactctgtacaggaacagcaataacagaagggtgacagggcaaggaagatgagcactgagaagtg

SEQ ID NO: 40884 - DNA, 120 bp, synthetic construct
  source 1..120: mol_type = other DNA
gtaataactttgggaggccgaggcgggtgggttgcttgaagccaggattttgagaccagcctgggcaacatggagagatcctgtctctacaaaaaaaatttaaatattagctgggcatgg

SEQ ID NO: 40885 - DNA, 120 bp, synthetic construct; identical to SEQ ID NO: 11681
  source 1..120: mol_type = other DNA

SEQ ID NO: 40886 - DNA, 120 bp, synthetic construct
  source 1..120: mol_type = other DNA
tgtattacaggaagaaagatgagggttagagaggagataagcgtgcagaccattgatatttacagaagagccaaatctgtaatggggttcattaatctcatcgaccagttgtgtgtgttt

SEQ ID NO: 40887 - DNA, 120 bp, synthetic construct
  source 1..120: mol_type = other DNA
gtggtagagattgggaggagcaggttttgggggagtcatcagaagcttggatcctttggccacagtcgctcaagacaggtgccagagcagccccaggggtgtgcagcgggcctgatgtcc

SEQ ID NO: 40888 - DNA, 120 bp, synthetic construct
  source 1..120: mol_type = other DNA
acaccgcgccatcatggtggactctatgctgcataccgtgtaccgcctgtctcggggtcgttcgctcaccaaggcgcagcgtgacgtcatcgaggactgcctcatgtcgctctgcaggtg

SEQ ID NO: 40889 - DNA, 120 bp, synthetic construct; identical to SEQ ID NO: 11682
  source 1..120: mol_type = other DNA

SEQ ID NO: 40890 - DNA, 120 bp, synthetic construct
  source 1..120: mol_type = other DNA
gggcagcgtccccgtagaaatctcttagcatccttatttgcatactaggattcccagaacattcactttgcttcattgatgcctctagcgttccctaattagcatttaatttgcttaaca

SEQ ID NO: 40891 - DNA, 120 bp, synthetic construct
  source 1..120: mol_type = other DNA
tttgaataaacattatcacagctattctgaatatttgcacactgtctctcttattttttcatttgcatgctaatttgcataaagagatacccccaactcagatattttgactattttgca

SEQ ID NO: 40892 - DNA, 120 bp, synthetic construct
  source 1..120: mol_type = other DNA
gagaccagcctggccaacatggcgaaaccccatctctactaaaactacaaaaataagccaggcatagtggagcacgcctgtaatcccagctactctggaggctgaggctggagaatttct

SEQ ID NO: 40893 - DNA, 120 bp, synthetic construct; identical to SEQ ID NO: 11683
  source 1..120: mol_type = other DNA

SEQ ID NO: 40894 - DNA, 120 bp, synthetic construct
  source 1..120: mol_type = other DNA
ctcctcaataaacataccatttcttcccttattagcatatcatttgcataacccacacctccttcataatttaaaagcactggcatgcctgtgtctctctgggccttcgtctgcctgcca

SEQ ID NO: 40895 - DNA, 120 bp, synthetic construct
  source 1..120: mol_type = other DNA
cacctcagaggaggagctgcacctcacacggaaactcttctggggcatctttgactctctggcccataaggtctgggcagcagggagccccaaaatggcctatgtggagggtttggggcc

SEQ ID NO: 40896 - DNA, 120 bp, synthetic construct; identical to SEQ ID NO: 11684
  source 1..120: mol_type = other DNA

SEQ ID NO: 40897 - DNA, 120 bp, synthetic construct
  source 1..120: mol_type = other DNA
catggccatgccttgtctgtgcgccattgccggggctctgccccccgactatgtggatgcctcatactcatctaaggcagagaaaaaggccacagtggatgctgaaggcaactttgatcc

SEQ ID NO: 40898 - DNA, 120 bp, synthetic construct
  source 1..120: mol_type = other DNA
tcccggagaagctggactccttcattaacaagtttgcggagtacacacacgagaagtgggccttcgacaaggttggcctcagggtcctcctatccaagaaaccctcaagaccccagcttt

SEQ ID NO: 40899 - DNA, 120 bp, synthetic construct
  source 1..120: mol_type = other DNA
cgccccgtgtgtccccaactgctgcctccccctcaccctgcctcccctccatctctagatccagaacaactggtcctatggagagaacatagacgaggagctgaagacccaccccatgct

SEQ ID NO: 40900 - DNA, 120 bp, synthetic construct; identical to SEQ ID NO: 11685
  source 1..120: mol_type = other DNA

SEQ ID NO: 40901 - DNA, 120 bp, synthetic construct
  source 1..120: mol_type = other DNA
tttctcctttggggtccttcctccacccctctctcatcccattccaccaactccccaccctcctgtccaccccaggacaaagagatttaccgctggcccatcaaggagtccctgaaggcc

SEQ ID NO: 40902 - DNA, 120 bp, synthetic construct
  source 1..120: mol_type = other DNA
gcaggggcacgatggggggagggtctagaacaaggggcatggccagacagggaagggatggagaggagaggggcccagggaggtaggtggggcaagaggggtgcagaaacctgagatctg

SEQ ID NO: 40903 - DNA, 120 bp, synthetic construct
  source 1..120: mol_type = other DNA
ggtagaatggactagtggggcctggggaggggctggcctgggcttcctgctagcccatcagcccacctcccatcttccccttgtcctctcagacctatgatcctcgagaaggctacaacc

SEQ ID NO: 40904 - DNA, 120 bp, synthetic construct
  source 1..120: mol_type = other DNA
gtgtctttgggggggctggcatcctctgaatctagcccttgactctgcatccactcccaggccatggcagaacaactggcagaaaattaccacaacacgtggggacggaagaagaagcag

SEQ ID NO: 40905 - DNA, 120 bp, synthetic construct; identical to SEQ ID NO: 11686
  source 1..120: mol_type = other DNA

SEQ ID NO: 40906 - DNA, 120 bp, synthetic construct
  source 1..120: mol_type = other DNA
ggtcccctacgacacgctcacggccaaggagaaggcacgagatcgagagaaggcccaggagctactgaaattcctgcagatgaatggctacgcggttacaaggcacgcgggttggggctc

SEQ ID NO: 40907 - DNA, 120 bp, synthetic construct
  source 1..120: mol_type = other DNA
aagggagtggggcctggacacagaggcggggccagatggggaggagttcgaaatgggcggggcttaagcacaggcgggaccagagaggagaggaggaagagaagggcggggcccagggag

SEQ ID NO: 40908 - DNA, 120 bp, synthetic construct
  source 1..120: mol_type = other DNA
gaggaagaggctgagaggggcgggggctggggagcacaggcggggccagagaggggtggggaggtacagaggggcggggactggtgagtggaggcgggaccaaagaggagagaagggctg

SEQ ID NO: 40909 - DNA, 120 bp, synthetic construct; identical to SEQ ID NO: 11687
  source 1..120: mol_type = other DNA

SEQ ID NO: 40910 - DNA, 120 bp, synthetic construct
  source 1..120: mol_type = other DNA
gttcattgcccacctgggtacggagaaataccccccgcttatgcccgccccacctgcagacaccagttctgcagaccagactcacctaggacacctgttcatgcactcaatccgtcctcc

SEQ ID NO: 40911 - DNA, 120 bp, synthetic construct
  source 1..120: mol_type = other DNA
tgacccctgctctcctgcaactactcctatgttggattcaggcaattagcatcataaataactaaatcgtttagtgttagaaggtgatcagtgttatgggaagaagaaaacaatagagcc

SEQ ID NO: 40912 - DNA, 120 bp, synthetic construct
  source 1..120: mol_type = other DNA
ccaggctggagtgcagtggcacggtctcggctcactgcaacctctgctttctggtttcaagcgattctcctgcctcagcctcctgagtagctgggaccacaggcacgggcgccgccacac

SEQ ID NO: 40913 - DNA, 120 bp, synthetic construct; identical to SEQ ID NO: 11688
  source 1..120: mol_type = other DNA

SEQ ID NO: 40914 - DNA, 120 bp, synthetic construct
  source 1..120: mol_type = other DNA
tgccctgtagctgaagcagagtcatcgagggggacggtgagataaacgaggtcacagaggtgactggggcagatcatgcagggctttgcaagctgtgatgaggactttgaccttacctgg

SEQ ID NO: 40915 - DNA, 120 bp, synthetic construct
  source 1..120: mol_type = other DNA
tgggcagatttctggatctattttgaaggctgaggctgctggggtgccccccagtgcctcttacaggccactaagaattacagctaggccctacaatcccctccagtttcccttagagac

SEQ ID NO: 40916 - DNA, 120 bp, synthetic construct
  source 1..120: mol_type = other DNA
tgcacatccccctgacaattcccttccctctctagacctcagtttcctcacctgtgatatgggcatatgttcaccataactagccatggttctgttacttactgggtgacctggggttag

SEQ ID NO: 40917 - DNA, 120 bp, synthetic construct; identical to SEQ ID NO: 11689
  source 1..120: mol_type = other DNA

SEQ ID NO: 40918 - DNA, 120 bp, synthetic construct
  source 1..120: mol_type = other DNA
ccggttaattttttgtgtttgtatttttagtagagatggggtttcaccatgttggccaggatggtctcgatctcctgacctcgtgatccacccgcctcggcttcccaaagtgctgggatt

SEQ ID NO: 40919 - DNA, 120 bp, synthetic construct
  source 1..120: mol_type = other DNA
attgacttcttgtttcatttggttcattcattcatttattgcagattaactcagtgccatgtattcaagtttagaatgaaaagcacttatggtgggtgaggaagggcatgttccatgacc

SEQ ID NO: 40920 - DNA, 120 bp, synthetic construct
  source 1..120: mol_type = other DNA
cgggtggatcacctgaggtcagaagtttgagaccagcctggacaacatggtgaaaccttggctgtactaaaaatacaaaaattagcttggtgtgtgggagcatgtctgtaatcccagcta

SEQ ID NO: 40921 - DNA, 120 bp, synthetic construct; identical to SEQ ID NO: 11690
  source 1..120: mol_type = other DNA

SEQ ID NO: 40922 - DNA, 120 bp, synthetic construct
  source 1..120: mol_type = other DNA
ttccccagccttgaacccactgtgaaccctatttgccctccctacagaggctgtggtcagcagtgggcgagtggaaaagtccccacatgaacaggagattaaattctttgccaaggtgag

SEQ ID NO: 40923 - DNA, 120 bp, synthetic construct
  source 1..120: mol_type = other DNA
cgtctccagatcctgctccctttgatcaaccagtacttcaccaaccactgcctctatttcttgtccactccggctaaagtgctgggcagcggtggccacgcctctaacaaggagaaggaa

SEQ ID NO: 40924 - DNA, 120 bp, synthetic construct
  source 1..120: mol_type = other DNA
gcaaaggcgattgaagggtgaccagccatcctagtgtacccgggactgaagggtttcccaggatgtgggactctcaggcaacttgggacaaatcgatcaccctgtccaggaaggccaact

SEQ ID NO: 40925 - DNA, 120 bp, synthetic construct; identical to SEQ ID NO: 11691
  source 1..120: mol_type = other DNA

SEQ ID NO: 40926 - DNA, 120 bp, synthetic construct
  source 1..120: mol_type = other DNA
gtgacattccagcttgcccatctctctgccccttcccatccctcctgtctccatcatttggaccccctcctggttcctctctccttgtcttctctgtccctgtctcctctaattgggtca

SEQ ID NO: 40927 - DNA, 120 bp, synthetic construct
  source 1..120: mol_type = other DNA
gtaagtggctccacaccttcggtcttcctccctaatctttctcttccccaccctgaagaaatagctcccaggttctgccttaatttgaacaacctttgttgttttcttcccctggacctg

SEQ ID NO: 40928 - DNA, 120 bp, synthetic construct
  source 1..120: mol_type = other DNA
ggggtcagggctgggcaggaggaaggccaggagagtggttgggctggggaggagggacatttggaggcgctgtaggagtctgggggggtgggggtgcagtagcattccaacttagcccgc

SEQ ID NO: 40929 - DNA, 120 bp, synthetic construct; identical to SEQ ID NO: 11692
  source 1..120: mol_type = other DNA

SEQ ID NO: 40930 - DNA, 120 bp, synthetic construct
  source 1..120: mol_type = other DNA
tggagaacctgcggctgggcaaggtgtcgcaggcgcgcacccaggtgaaaggcgtgggccagaacctcacctacaccactgtggcactgctgccggtcctcaccaccctcttccagcaca

SEQ ID NO: 40931 - DNA, 120 bp, synthetic construct
  source 1..120: mol_type = other DNA
ttgaatgtgtggatttcttgctgtaagcaaagcatgcagtcagtaccttggcaggtggcaaatgagttaatgaggacgcgagctcagcagctctaacaaaagaccctaagtggactggcg

SEQ ID NO: 40932 - DNA, 120 bp, synthetic construct; identical to SEQ ID NO: 11693
  source 1..120: mol_type = other DNA

SEQ ID NO: 40933 - DNA, 120 bp, synthetic construct
  source 1..120: mol_type = other DNA
cacttggccgagcgcagtggctcacgcctgtaatcccagcactttgggaggccaaggcggacagatcacctgagctcaggagttcaagaccagcctggccaacatgatgaaaccttgtct

SEQ ID NO: 40934 - DNA, 120 bp, synthetic construct
  source 1..120: mol_type = other DNA
cgtgccattgcacgccagcctgggcaacagagcgagactccatctcaaaaagaaaagaaaagtagcagttggtggccagccacagtgactcatatctgtaattccagcactttgggaggc

SEQ ID NO: 40935 - DNA, 120 bp, synthetic construct
  source 1..120: mol_type = other DNA
caactttgtattttgaaattttcaaaacatacaggaaggtagaaagaagaaaattgttggcggggcatggtggctcacgcctgtagtcccagctacttgggaggctgaggcacaagaact

SEQ ID NO: 40936 - DNA, 120 bp, synthetic construct; identical to SEQ ID NO: 11694
  source 1..120: mol_type = other DNA

SEQ ID NO: 40937 - DNA, 120 bp, synthetic construct
  source 1..120: mol_type = other DNA
caaaatgtctttgatttttttaaaagaaattcagaatccagtcaagtttctcctgctgcatttggtggttgtgtctctgtagtgtctttaaagtctagaatagccccgccctctttttgc

SEQ ID NO: 40938 - DNA, 120 bp, synthetic construct
  source 1..120: mol_type = other DNA
cttgagaccaggagtttgagatcagcctgggcaacatactgagaccccatctctaaaaaaatttttttttaattttttttttttttttgagacagagtctcggtctgtcacccaggctgg

SEQ ID NO: 40939 - DNA, 120 bp, synthetic construct
  source 1..120: mol_type = other DNA
gctgggattacaggcattcaccaacacactcagataatttttgtatttttagtagagatggggtttcaccatgttgcccaggctggtctcgaactcctgacctcaggtgatccgtccacc

SEQ ID NO: 40940 - DNA, 120 bp, synthetic construct; identical to SEQ ID NO: 11695
  source 1..120: mol_type = other DNA

SEQ ID NO: 40941 - DNA, 120 bp, synthetic construct
  source 1..120: mol_type = other DNA
gaaggtactataactatccccatgttacaggtagggaagctgaggctgagagagagttggtaacttgctcaagtcacaagactcgtacatggaaggctggctgtacatctgcttgctctt

SEQ ID NO: 40942 - DNA, 120 bp, synthetic construct
  source 1..120: mol_type = other DNA
ccctgtctccctcagtggacgacgtccaggtctcttgctaccgaacgctgtgcagtatctactccctgggaaccaccaagaacacttatgtggaaaagtaaggagagggagccatcgttt

SEQ ID NO: 40943 - DNA, 120 bp, synthetic construct
  source 1..120: mol_type = other DNA
gccgcgtgagggcgctcagggacaggtcagccacggaggtagagccgccaggtctggggctgtgaagcaggcaggcctcgctggggaagaaagggaggcgcagaccacgggggctgcaca

SEQ ID NO: 40944 - DNA, 120 bp, synthetic construct
  source 1..120: mol_type = other DNA
aagttattcagatttcaagtgacaccagcggtgcgcggtggctcacacctgtgagcactttgggaggctgaggcgggaagatcacttgagctcaggagtttgagaccagcctgggcaaca

SEQ ID NO: 40945 - DNA, 120 bp, synthetic construct; identical to SEQ ID NO: 11696
  source 1..120: mol_type = other DNA

SEQ ID NO: 40946 - DNA, 120 bp, synthetic construct
  source 1..120: mol_type = other DNA
accctgtcttaaaaaacaaaacaagtggcacacatggatgaatggcagctctgtcccaaagggttctgggaggagccgtttctatggagatggggctgggacccaggaccccaaagaggg

SEQ ID NO: 40947 - DNA, 120 bp, synthetic construct
  source 1..120: mol_type = other DNA
caacgcctgctccgtgtacaccaccaagtctccgcgggagcgggccagtaagctgtgtggggcgggagcagtgctgggagtccaaatctccccagcacagggccttggggagaccctaat

SEQ ID NO: 40948 - DNA, 120 bp, synthetic construct
  source 1..120: mol_type = other DNA
gagtttatggttcgggggcatttcaaggccgttacatggggagaatttagagattaatttgatttttgaaaacagaatctattgataaaagttaagaaaagtagcacttggtggccaggc

SEQ ID NO: 40949 - DNA, 120 bp, synthetic construct; identical to SEQ ID NO: 11697
  source 1..120: mol_type = other DNA

SEQ ID NO: 40950 - DNA, 120 bp, synthetic construct
  source 1..120: mol_type = other DNA
caaatatgtatcgagcagttactatgtatgaggcgctgtcctagtcacctgaggttcagcagtgaacagataaaacagacaaaaatcccctgagtcctgggtccagaggctagaatgagg

SEQ ID NO: 40951 - DNA, 120 bp, synthetic construct
  source 1..120: mol_type = other DNA
aagggactgaaccgggtgtgggattcagagagacaaggcggggagacagggtggggttggaaaaggtctcttttggagtatgctgtacagcaggggtgaggggaatgggcttgggatgtg

SEQ ID NO: 40952 - DNA, 120 bp, synthetic construct; identical to SEQ ID NO: 11698
  source 1..120: mol_type = other DNA

SEQ ID NO: 40953 - DNA, 120 bp, synthetic construct
  source 1..120: mol_type = other DNA
ggtgcccgctacacagagatgccgcatgtcatcgagatcacgctgcccatgctatgcagctacctgccccgatggtgggagcgcgggcccgaggcacccccttccgccctgcccgccggc

SEQ ID NO: 40954 - DNA, 120 bp, synthetic construct
  source 1..120: mol_type = other DNA
ggtgggtcggggggcactgggcctctgaggggtgggtcagcagcctgggctcccttggcagatggtctgaaagggagacccatggtcccctcggagttgggaggagtcagagtgtaggtt

SEQ ID NO: 40955 - DNA, 120 bp, synthetic construct
  source 1..120: mol_type = other DNA
ccccatctctttaaaaaacaaaacaaaacttttttttaattagccaggtgtggtggcacatgcttatagtcccagctacttgggaggctgaggcaggaggatctcttgagcccaggagtt

SEQ ID NO: 40956 - DNA, 120 bp, synthetic construct
  source 1..120: mol_type = other DNA
agggagggaataaaagggaaggaaagaaggaaggaaggcaggaaggaaggaaggaagaaatggatcctcaaagcgttaggtttcctgattcagaagtttcatgtcagggccaggcacaat

SEQ ID NO: 40957 - DNA, 120 bp, synthetic construct; identical to SEQ ID NO: 11699
  source 1..120: mol_type = other DNA

SEQ ID NO: 40958 - DNA, 120 bp, synthetic construct
  source 1..120: mol_type = other DNA
aggtgcagtggctcacgcctgtaatcccagcactatgggaggccgaggcgggtggatctcctgaggtcaggagttcgagaccagcctggccaacatggtgaaaccccatctctaccaaaa

SEQ ID NO: 40959 - DNA, 120 bp, synthetic construct
  source 1..120: mol_type = other DNA
cactccagtctgggtgacaagagtgaaactctgtctcaaaaaaaaaaaaaaagttaggtaacaggtgaggcgtctgttgttgggggtcagaggtcagggatttgtgccaggctggggtca

SEQ ID NO: 40960 - DNA, 120 bp, synthetic construct; identical to SEQ ID NO: 11700
  source 1..120: mol_type = other DNA

SEQ ID NO: 40961 - DNA, 120 bp, synthetic construct
  source 1..120: mol_type = other DNA
gctggtgcgggacgagttctctgtgctctgccgggacctctacgccctgtatccgctgctcatccgctacgtggacaacaacaggtcagcggggccccgctgtccccatgccctccgccc

SEQ ID NO: 40962 - DNA, 120 bp, synthetic construct
  source 1..120: mol_type = other DNA
cacattggtccaacgacagccagcccacttgtttgtttctttttgtttttggtttttgggtttttttttgtttgtttttgtttttggagacagagcctcgctttattgcccaggctggaa

SEQ ID NO: 40963 - DNA, 120 bp, synthetic construct
  source 1..120: mol_type = other DNA
gtatttttagtagagacagattttcaccatgttggccaggctggtcttgaactcttgacctcatgatttgcctgcctcggcctcccaaagtgctgggattacagctgtgagccaatgcag

SEQ ID NO: 40964 - DNA, 120 bp, synthetic construct
  source 1..120: mol_type = other DNA
attgagacagggtctctctctgttgcccaggctggagtgctgtggcatgatcatggcttgctgcagcctcggttcctgggttcaagcgatcctctgcttctgcccctgagtagctgggat

SEQ ID NO: 40965 - DNA, 120 bp, synthetic construct; identical to SEQ ID NO: 11701
  source 1..120: mol_type = other DNA

SEQ ID NO: 40966 - DNA, 120 bp, synthetic construct
  source 1..120: mol_type = other DNA
tgaaatcccagctactccagaggctgaagcaggagaatcgcctgagcctgggaggcagaggttgcactgagctgagatcgtgtcactgcactccagcctaggaacagagcgaggctccac

SEQ ID NO: 40967 - DNA, 120 bp, synthetic construct
  source 1..120: mol_type = other DNA
aattgtggtttattcatacaacagaagactccacggcagtgggagtgaacaagttgtttctatgcacaatgtgattggctttcacaaatgttaggtggaatgaaagaagccagaaaacca

SEQ ID NO: 40968 - DNA, 120 bp, synthetic construct; identical to SEQ ID NO: 11702
  source 1..120: mol_type = other DNA

SEQ ID NO: 40969 - DNA, 120 bp, synthetic construct
  source 1..120: mol_type = other DNA
ctcaataaggtttgtttttttttaatacaagtaaatgaataaaataaaatatgtgaacctacttagattctgaccctgtctcaaaaaaaaaagaaattttatgctgggtgcagtggctcg

SEQ ID NO: 40970 - DNA, 120 bp, synthetic construct
  source 1..120: mol_type = other DNA
caaaaattagccgggcgtggtggcgcatacctgtagtcccagctaagtactcctgagtgggaggctgaggcaggagaatcacttggaacctgggaggcagaagttgcagtgagctgagat

SEQ ID NO: 40971 - DNA, 120 bp, synthetic construct
  source 1..120: mol_type = other DNA
atctctgctcactgcaagctccacctcccgggttcacgccattctcctgcctcagcctcctgagtagctgggaccacaggtgcctgccaccacacccggctaatttttttgtatttttta

SEQ ID NO: 40972 - DNA, 120 bp, synthetic construct; identical to SEQ ID NO: 11703
  source 1..120: mol_type = other DNA

SEQ ID NO: 40973 - DNA, 120 bp, synthetic construct
  source 1..120: mol_type = other DNA
catgcatgtattatatttatgtatttcgatgaaaaggttagacaaagttttttaaaaaaggaatagtcaggccagggaaggtggctcacacctgtaatcccagcactttgagaggtcagg

SEQ ID NO: 40974 - DNA, 120 bp, synthetic construct
  source 1..120: mol_type = other DNA
agtcccagctactcagggaggctgaagtgggaggatcacttaagcctgggaggttgaggttgcagtgagtggagatcgcatcactgtactccagcctgacagattgagaccctgtctcag

SEQ ID NO: 40975 - DNA, 120 bp, synthetic construct
  source 1..120: mol_type = other DNA
cgtaaggtcaagagttcaagaccagcgtgcccaacatggtgaaaccccgtctctactaaaaatacaaaaattagcccggtgtggtgtcgggcccctgtagtcccagctactcgggaggct

SEQ ID NO: 40976 - DNA, 120 bp, synthetic construct
  source 1..120: mol_type = other DNA
cagcccccttccctgggatccccaccccctccctcacctcccctccgctgaccccagggcgcagtggctgacggagccgaatcccagcgcggaggagctgttcaggatggtgggcgagat

SEQ ID NO: 40977 - DNA, 120 bp, synthetic construct; identical to SEQ ID NO: 11704
  source 1..120: mol_type = other DNA

SEQ ID NO: 40978 - DNA, 120 bp, synthetic construct
  source 1..120: mol_type = other DNA
ctccctctcccttcctccccagctccttcctcctcctgtatcttctccctcctcccatctccctcctcctctccatctccctcttctctcatctctgtctccttcctcctcctgtatctt

SEQ ID NO: 40979 - DNA, 120 bp, synthetic construct
  source 1..120: mol_type = other DNA
attaccccatttcctgctttcctccctatccttctcagcactgcccttctcaggtctcagagaacgaccccccaccccgagccaaggcctggaaatgcccagctagagaatacatggcgg

SEQ ID NO: 40980 - DNA, 120 bp, synthetic construct
  source 1..120: mol_type = other DNA
tcagccccacatctgggaccttccgcatgtctcttggctaatgccctcttcccccagcctctgcacgcccccgcctcgagaaaacccctgcttctgttccccacccccgtcctcccctcc

SEQ ID NO: 40981 - DNA, 120 bp, synthetic construct; identical to SEQ ID NO: 11705
  source 1..120: mol_type = other DNA

SEQ ID NO: 40982 - DNA, 120 bp, synthetic construct
  source 1..120: mol_type = other DNA
ttgagcctctgagggcatccagccagcagcccccaccccagggctctgcgaggactcagggagaagctgcatgtgtggcctgcagcagtgcctggcacaggggtcatgctcaaagttgcc

SEQ ID NO: 40983 - DNA, 120 bp, synthetic construct
  source 1..120: mol_type = other DNA
tgccctgtgtctctgcttccagatctttctggatgtctcttgcatctttggtcttcctgtctccttgtctttttcagtctctcagtgtctttttcttgcaacttctcttgtcgcttgaac

SEQ ID NO: 40984 - DNA, 120 bp, synthetic construct
  source 1..120: mol_type = other DNA
gggggtattgtactggggttcctaggggattctggaagaggactgctagaagttgagacaggcccagaacgggggaaaatctggatgggcctgggttagaaattggagccaggcaagcat

SEQ ID NO: 40985 - DNA, 120 bp, synthetic construct; identical to SEQ ID NO: 11706
  source 1..120: mol_type = other DNA

SEQ ID NO: 40986 - DNA, 120 bp, synthetic construct
  source 1..120: mol_type = other DNA
gtccggtggctcggaccaggaacgcaccaagaagaagcgccggggggaccggtactctgtgcagacgtcactgatcgtggccacactgaagaagatgctgcccatcggcctgaatatgtg

SEQ ID NO: 40987 - DNA, 120 bp, synthetic construct
  source 1..120: mol_type = other DNA
ttagggaacaaccacaatgccactgagccccccaggtccctgggagccttcccttcagaccccactgagttcttttccgggatgctgaggactcactgtgcccctgggatgccctgagga

SEQ ID NO: 40988 - DNA, 120 bp, synthetic construct
  source 1..120: mol_type = other DNA
ccatgccaaacctgctgagaccctgagagtccccccaacaagatgagcccctgagatcctctgaaccctccaccaaggccccttcaagccccttgggacctactgagaccctcatgaccc

SEQ ID NO: 40989 - DNA, 120 bp, synthetic construct; identical to SEQ ID NO: 11707
  source 1..120: mol_type = other DNA

SEQ ID NO: 40990 - DNA, 120 bp, synthetic construct
  source 1..120: mol_type = other DNA
actctaaggaaccctcccaggattctgccccaagacccctatagccctccccccaggaccacaccaacaccctgacaacctactaaccccctggacccctaaagaccaccgacttctccc

SEQ ID NO: 40991 - DNA, 120 bp, synthetic construct
  source 1..120: mol_type = other DNA
ggctccccgtcctagaaccccagtgaacccccaccctgctgatgccccctttggcccctgtgtaaccagtgactccgttgacctacgtgatcccccatgacctctgctgaccccttctga

SEQ ID NO: 40992 - DNA, 120 bp, synthetic construct
  source 1..120: mol_type = other DNA
aatccttactgtatcttcaaggtgactctgtgaccctccggcccctctaggaccccttctgaccccgtcaacctctgcatccttttgtttctctcagacccccacccccaccccagaaaa

SEQ ID NO: 40993 - DNA, 120 bp, synthetic construct; identical to SEQ ID NO: 11708
  source 1..120: mol_type = other DNA

SEQ ID NO: 40994 - DNA, 120 bp, synthetic construct
  source 1..120: mol_type = other DNA
ctgtaatcccaacactttggaaggccaaggcgggcagatcacctgaggttaggagttcgagaccagcctggccaacgtggtgaaaccccgtctctactaaaagtacaaaattagctgggt

SEQ ID NO: 40995 - DNA, 120 bp, synthetic construct
  source 1..120: mol_type = other DNA
tggggcgaggctccgtctcaaaacaaaaagatgaagaagaagaaaggcctcaacatgcactcacccattgagtcctcccaaaaacggaaaggggacatccggcggacactgtgggaaggg

SEQ ID NO: 40996 - DNA, 120 bp, synthetic construct
  source 1..120: mol_type = other DNA
aaaatcgtgcgcagagtccaggaagtgtcagccgtgctctactacctggaccaggtgggtggggccggaggggtctttctactgggtctctgggcggagcctggcggggggaggggcttc

SEQ ID NO: 40997 - DNA, 120 bp, synthetic construct; identical to SEQ ID NO: 11709
  source 1..120: mol_type = other DNA

SEQ ID NO: 40998 - DNA, 120 bp, synthetic construct
  source 1..120: mol_type = other DNA
taggtctggaggcggagtcaggaccctgactctgttggtggagacaaggttttccttctgccgtgtgagtcttaacctgaatatggacttcgacacagctgggcagtttcatccagggct

SEQ ID NO: 40999 - DNA, 120 bp, synthetic construct
  source 1..120: mol_type = other DNA
ggcagtcgtggcctgtttccgtatgacgcccctgtacaacctgcccacgtaaggcccccagggacaagggaagcgtgaagggctgcggagaaagggtggctggagagtctggagaatgga

SEQ ID NO: 41000 - DNA, 120 bp, synthetic construct
  source 1..120: mol_type = other DNA
ccagtgacgtcacacctctcccctgcaggcaccgggcatgtaacatgttcctggagagctacaaggctgcatggatcctgactgaagaccacagttttgaggaccgcatgatagatgacc

SEQ ID NO: 41001 - DNA, 120 bp, synthetic construct; identical to SEQ ID NO: 11710
  source 1..120: mol_type = other DNA

SEQ ID NO: 41002 - DNA, 120 bp, synthetic construct
  source 1..120: mol_type = other DNA
aaaagaggtgaagactcttgccagggccccagaaatgcccccaaggtcctggggccacccccagcccagcagcttccctgtgcctcaggagaggccctccaggtcctgggggagcccaag

SEQ ID NO: 41003 - DNA, 120 bp, synthetic construct
  source 1..120: mol_type = other DNA
gccaatatggcaaaaccccgtttctacaaaaatacaataaatagccaggcttggtggtgggcacttgtaatcccatctactcaggaggctgaggcggaagaatcgcttgaacctgggagg

SEQ ID NO: 41004 - DNA, 120 bp, synthetic construct; identical to SEQ ID NO: 11711
  source 1..120: mol_type = other DNA

SEQ ID NO: 41005 - DNA, 120 bp, synthetic construct
  source 1..120: mol_type = other DNA
aagcttcatgtaggctaatgacaggcttagtaataaataattgtgatgcagatggcgcagctgctgccgctgctgctgacagtagcaggcagccattcatcaaatgcttattatgtgtca

SEQ ID NO: 41006 - DNA, 120 bp, synthetic construct
  source 1..120: mol_type = other DNA
tgtttatttatttatttatttatttttgagatggagtctcgctctgtcacccaggctggagtgcagtggcacaatctcagctcactgcaacctccgcctcccaggttcaagcaagtggga

SEQ ID NO: 41007 - DNA, 120 bp, synthetic construct
  source 1..120: mol_type = other DNA
ctcaaagtgctgggactacaggcgtgagccactgcacctggcctacttttttattttttgagaagatcttgctcttcttgcccaggctggaatgcagtgtcatatcatagctcattgcag

SEQ ID NO: 41008 - DNA, 120 bp, synthetic construct
  source 1..120: mol_type = other DNA
tagagatgggggtctcactatgttgcccaggccggtctcaaactcctgaactcaagcaatcctccccactcagcctcccaaagtgttgggattacaggcatgagccaccgcgcctgtcag

SEQ ID NO: 41009 - DNA, 120 bp, synthetic construct; identical to SEQ ID NO: 11712
  source 1..120: mol_type = other DNA

SEQ ID NO: 41010 - DNA, 120 bp, synthetic construct
  source 1..120: mol_type = other DNA
tagctgggattacaggtgcatgccaccatgcccagctatttttcttttttctttctcttttttttttttttttttgtatttttagtagagacagggtttcgccatgttgtccaggctggt

SEQ ID NO: 41011 - DNA, 120 bp, synthetic construct
  source 1..120: mol_type = other DNA
gccttctttggtctctttatctctctggtgagcttccacacagatctcattggccagaaattctgacataaggccatctcgggctgcaaggtgatgaagaatttgagcatcccattttgc

SEQ ID NO: 41012 - DNA, 120 bp, synthetic construct; identical to SEQ ID NO: 11713
  source 1..120: mol_type = other DNA

SEQ ID NO: 41013 - DNA, 120 bp, synthetic construct
  source 1..120: mol_type = other DNA
tttgttaatatatacaaggcacctagaacaggcactgacatggtgttagtgtaaacactcagcaggtgttggccattgtagaggagacccaagcagaaagggattggccatacttgttat

SEQ ID NO: 41014 - DNA, 120 bp, synthetic construct
  source 1..120: mol_type = other DNA
ggccaggagtttgagaccagcctgggcaacatagcaagaccctgtctctacaaaaaaatggaaaaattagccaggtgtgttggtatgtgcctgtagtcccaactactcaggaggctgatg

SEQ ID NO: 41015 - DNA, 120 bp, synthetic construct
  source 1..120: mol_type = other DNA
ctcccagaatggattttactggacagcatggacaacatgaccatttcttacctgtcatcatggccacacagataaaagtcctcatcggccatgcatttgtcacaagccaccctggcaatg

SEQ ID NO: 41016 - DNA, 120 bp, synthetic construct
  source 1..120: mol_type = other DNA
gagtacggtggcgcaatgtcagctcactgcaacctctgcctcccgggttcaagcaattctcctgcctcagcctcccgagtagctgggattacaggcaagcaccatcacacccggctaatt

SEQ ID NO: 41017 - DNA, 120 bp, synthetic construct; identical to SEQ ID NO: 11714
  source 1..120: mol_type = other DNA

SEQ ID NO: 41018 - DNA, 120 bp, synthetic construct
  source 1..120: mol_type = other DNA
aactgatgccccctccccagagctgccacctggaggagggaggggagaacggtgaagctgaagaggaggttgaggtctcctttgaggtaggtgggctcaggaggtcctggagggaaggga

SEQ ID NO: 41019 - DNA, 120 bp, synthetic construct
  source 1..120: mol_type = other DNA
acaccacggagtgtacaccatggtcatgggggaagctcaggcagaggggtcagggctggaattggggaggctcaggcagaggggtcagggctgggattgaggaggctcaggcagaggggt

SEQ ID NO: 41020 - DNA, 120 bp, synthetic construct; identical to SEQ ID NO: 11715
  source 1..120: mol_type = other DNA

SEQ ID NO: 41021 - DNA, 120 bp, synthetic construct
  source 1..120: mol_type = other DNA
tttctgtgccagagtcccttctggcatctggtgaagactttctcaggatcatgtttttaaatgtataaaatgaattcatagcagaggaaacaagtattgaatagctatcaaaatatttta

SEQ ID NO: 41022 - DNA, 120 bp, synthetic construct
  source 1..120: mol_type = other DNA
cacctgaggccaggagttcaagaccagcctggccaacatggtgaaaccccatctctactaaaaatacaaaaatgagctgggcatggtggcaggcacctgtaatcccagctactcaggagg

SEQ ID NO: 41023 - DNA, 120 bp, synthetic construct
  source 1..120: mol_type = other DNA
agatccaacagctactataattgagaagtagtgatgaacataactgatatttaaagacatctttgagccattgtgagtgagtctctcttcctggaccaaaagagcagaatttgaatagga

SEQ ID NO: 41024 - DNA, 120 bp, synthetic construct
  source 1..120: mol_type = other DNA
taactgatatttaaagacatctttgagccattgtgagtgagtctctcttcctggaccaaaagagcagaatttgaataggaaatggttctaattctgcaacaataatgtgatatggaatat

SEQ ID NO: 41025 - DNA, 120 bp, synthetic construct
  source 1..120: mol_type = other DNA
aacctccacctcccgggttcaagcaattctcctgcctcagcctcccaagtagctaggactacaggctcatgccaccacgcctggctaattttttgtatttttagtagaggcggggtttca

SEQ ID NO: 41026 - DNA, 120 bp, synthetic construct; identical to SEQ ID NO: 11716
  source 1..120: mol_type = other DNA

SEQ ID NO: 41027 - DNA, 120 bp, synthetic construct
  source 1..120: mol_type = other DNA
tgtgagccccaggggatggagggagctcatggttgaaggagtgagttgtggatgtggctggaacagggagggcagaagtgagaatgtgagggggaaaggctgggctggaaagcctggact

SEQ ID NO: 41028 - DNA, 120 bp, synthetic construct
  source 1..120: mol_type = other DNA
cctgcaaaggtgcccctcacatgtgcactggactcttccgagtgcactcatcctaacctcactcctcctggctcgcccattccctgtggacccatttgccgcccctcaatgcctgtggtt

SEQ ID NO: 41029 - DNA, 120 bp, synthetic construct
  source 1..120: mol_type = other DNA
ccctgcatgcacaccttggcacactcttaaatccccttctctcacatcccttgggatggctgttttctggtgggtggaacacactgccttccaactgggtggaccatcttttttctccca

SEQ ID NO: 41030 - DNA, 120 bp, synthetic construct; identical to SEQ ID NO: 11717
  source 1..120: mol_type = other DNA

SEQ ID NO: 41031 - DNA, 120 bp, synthetic construct
  source 1..120: mol_type = other DNA
cctggtaccatttccagttctgattctgctctttcagtccagggaaagagactcactcagaatcgctcaaataacagggaatttattataagaattaatgtagaacaataagggaggcaa

SEQ ID NO: 41032 - DNA, 120 bp, synthetic construct
  source 1..120: mol_type = other DNA
aatgtcatagacttgaagaatgagttgcattatgaattccagacagtggaaccaaaaacttgagaatttaaggggaacttggcagtgggagatttaggagctctctgatgatcccaatta

SEQ ID NO: 41033 - DNA, 120 bp, synthetic construct
  source 1..120: mol_type = other DNA
gggtggtttctggttcctcattatttcagcttgcgcatggttcatcctggcccaaccatatgtcctagcttctgccaactcttcatttctgcttcctcttgatttcagcgcatagatggt

SEQ ID NO: 41034 - DNA, 120 bp, synthetic construct; identical to SEQ ID NO: 11718
  source 1..120: mol_type = other DNA

SEQ ID NO: 41035 - DNA, 120 bp, synthetic construct
  source 1..120: mol_type = other DNA
tctccctccccatgtccaccacccacctccgcccccccccgccaccagaagtcattctgtcttgtgttctcacccatcactacatggaccccaccctccacgtgccccaaatgtcacgcc

SEQ ID NO: 41036 - DNA, 120 bp, synthetic construct
  source 1..120: mol_type = other DNA
cttcatctctctctctccctctccatcctcttctttcattccctctgcttttaccctcatttcctaccctcttccctgctaatccatttccttctgtctccttatcactctgcctttctc

SEQ ID NO: 41037 - DNA, 120 bp, synthetic construct
  source 1..120: mol_type = other DNA
atcctgttggctgccccagtcatcaatcgccagaacggtaattcccccagcccacccccgtgctgtgctgctgtcacccacccctcctaaccccgtccacccctccacctaggggctgag

SEQ ID NO: 41038 - DNA, 120 bp, synthetic construct; identical to SEQ ID NO: 11719
  source 1..120: mol_type = other DNA

SEQ ID NO: 41039 - DNA, 120 bp, synthetic construct
  source 1..120: mol_type = other DNA
cactctgattggtgtgcgcctgcctcctctgcgcctgcctcctctgtgcctgctctggttggcccatttgcggtctagcctcctcccctaccgcccaccatgatttgcttctttcagatg

SEQ ID NO: 41040 - DNA, 120 bp, synthetic construct
  source 1..120: mol_type = other DNA
atcttcccctgcccagagcctttgtgtgaaggtgacccaaacccccataatccattaacctccacggtctgaaggggggctgagggcattaccagctgcctgaatgtctgctaggtcagc

SEQ ID NO: 41041 - DNA, 120 bp, synthetic construct
  source 1..120: mol_type = other DNA
ctgaggtcaagaccgcctggcgtcatggatgcccatggccctcacagtgtctttggagtggcagctgctcctcccagcacccccatgctttgtgcatgcgtgtgcagtgtgcatgggcct

SEQ ID NO: 41042 - DNA, 120 bp, synthetic construct; identical to SEQ ID NO: 11720
  source 1..120: mol_type = other DNA

SEQ ID NO: 41043 - DNA, 120 bp, synthetic construct
  source 1..120: mol_type = other DNA
gtggatctcctgaggtcaggagttcgagaccagcctggccaacatggtgaaaccccgtctctactaaaaatataaaaaaaatagcagggcgtggtggcacatgcttgtagtcccagctac

SEQ ID NO: 41044 - DNA, 120 bp, synthetic construct
  source 1..120: mol_type = other DNA
tcgctggaatttctggaatctagccactttgtttccccctcatctcctctggccagtccaattccccaaaagcaacctgccaaaaaccaatttggccaaaaatcaatttgcccaaatgga

SEQ ID NO: 41045 - DNA, 120 bp, synthetic construct
  source 1..120: mol_type = other DNA
caaaaaccaatttggccaaaaatcaatttgcccaaatggacaatttgtcacatgctattttcccacaggcgctctgcagtggctgccaaagttctatacacgtggtggatttctgtactt

SEQ ID NO: 41046 - DNA, 120 bp, synthetic construct
  source 1..120: mol_type = other DNA
ataaaatctttgcagaggaaagatctgtacaaaggcctacagattctttcctatcttaagcaagagttttgttttgttgtggttcagccaatttaacaagattgaggatgacagcaaatt

SEQ ID NO: 41047 - DNA, 120 bp, synthetic construct; identical to SEQ ID NO: 11721
  source 1..120: mol_type = other DNA

SEQ ID NO: 41048 - DNA, 120 bp, synthetic construct
  source 1..120: mol_type = other DNA
aggataaagtatgatctctttgtcttgaattttcaaaagctcttgtgtccacaacgagtttttcaaggtttattaaatacctttgtgccatgggactaagattttttctttttttttttt

SEQ ID NO: 41049 - DNA, 120 bp, synthetic construct
  source 1..120: mol_type = other DNA
caggactacaggcatgcatcaccatgtctggctaagttttttattttttgtagagatgagatctcactgtgttgcccaggggatctcaaactcctggattcaagcaatcctcctgccttg

SEQ ID NO: 41050 - DNA, 120 bp, synthetic construct
  source 1..120: mol_type = other DNA
agatggaatcagtctttgggtttaaaataaattttattcctcaggaatatgaagttttgaaaatgagaatgttgttatgaaagggattgctgtctcccaacatatttgcaacccagtcct

SEQ ID NO: 41051 - DNA, 120 bp, synthetic construct
  source 1..120: mol_type = other DNA
gtgctattcaaagcagacaaaaggtttgtctctcacttatttgcacatgtctataacaggtgttgtcagttgccagaattttttttacaggagctgtgtatcttttatttttgcatatag

SEQ ID NO: 41052 - DNA, 120 bp, synthetic construct
  source 1..120: mol_type = other DNA
tgctttgtctatgtcatgaaactaggcaaaatgggccttctgttgagccaacctgatagagcaattgtgaactgactgtaaaaaagttaaggggaaagaaaaacggggggcaaaaatact

SEQ ID NO: 41053 - DNA, 120 bp, synthetic construct; identical to SEQ ID NO: 11722
  source 1..120: mol_type = other DNA

SEQ ID NO: 41054 - DNA, 120 bp, synthetic construct
  source 1..120: mol_type = other DNA
ataaggagaccctgtctctaccaaaaaaaaaaaaaatcatatactacagtataataaacctccaatcatatactacagtataataaacctccaatcatatactacagtataataaacctc

SEQ ID NO: 41055 - DNA, 120 bp, synthetic construct
  source 1..120: mol_type = other DNA
catatactacagtgtaataaacctccaatcatatactacagtgtaataaatctccaatcatatactacagtgtaataaacctccaatcatatactacagtgtaataaacctccaatcata

SEQ ID NO: 41056 - DNA, 120 bp, synthetic construct
  source 1..120: mol_type = other DNA
acagtgtaataaacctccaatcatatactaaagtgtaataaacctccaatcatatactacagtgtaataaacctccaatcatatactacagtgtaataaacctccaatcatatactacag

SEQ ID NO: 41057 - DNA, 120 bp, synthetic construct; identical to SEQ ID NO: 11723
  source 1..120: mol_type = other DNA

SEQ ID NO: 41058 - DNA, 120 bp, synthetic construct
  source 1..120: mol_type = other DNA
caaggttgagaggatgagaagcacacacttcttcttttgtagttaactagagcagtacaggacagaaaagaacagaatgcatggcacagagtaaggcaatgtgaaacttctctttcggga

SEQ ID NO: 41059 - DNA, 120 bp, synthetic construct
  source 1..120: mol_type = other DNA
atggcacagagtaaggcaatgtgaaacttctctttcgggaataggtgaatataatttcagattgaacacatgtatcaggtctcaatgtaaaaaggatttcctcggctgggtgtggtggct

SEQ ID NO: 41060 - DNA, 120 bp, synthetic construct
  source 1..120: mol_type = other DNA
gaggctgaggcaggagaattgcttgaacctgggaggcagagtttgcagtgaactgagatcatgccactgcactccagcctgggtgacagagcaagactgtatctcaaaaaaaaaaggatt

SEQ ID NO: 41061 - DNA, 120 bp, synthetic construct; identical to SEQ ID NO: 11724
  source 1..120: mol_type = other DNA

SEQ ID NO: 41062 - DNA, 120 bp, synthetic construct
  source 1..120: mol_type = other DNA
aggccggggactgttttttttttttttactactgtatccccagagcctagaatactgcatgacacatagtaagaacgcaacaaatttgttgtagcaaagaggatgtgacaatcttaatct

SEQ ID NO: 41063 - DNA, 120 bp, synthetic construct
  source 1..120: mol_type = other DNA
tccccagcacataggaggaatttgataaaattgtttggaaactaacgaggaactgaatctctatttctccctgctacatagttggtggtcaatatacaaatttgttggaaaaaactgaat

SEQ ID NO: 41064 - DNA, 120 bp, synthetic construct
  source 1..120: mol_type = other DNA
tgcagtggcatgatctaggctcactgcaacctctgccttccgggttcaagcaattctcctgcctcagcctcccaggtagctgggattacaggcacatgccaccacacctggctaattttg

SEQ ID NO: 41065 - DNA, 120 bp, synthetic construct; identical to SEQ ID NO: 11725
  source 1..120: mol_type = other DNA

SEQ ID NO: 41066 - DNA, 120 bp, synthetic construct
  source 1..120: mol_type = other DNA
aggctggtctcaaactcctgacctcaggtgatctgcctgcctgggcctcccaaagtgctggaattacaggcgtgagccacccggccagtatttttagacaaatgaataaatgatcatcca

SEQ ID NO: 41067 - DNA, 120 bp, synthetic construct
  source 1..120: mol_type = other DNA
gttcatctcccctagcacatgggaggtgctggataaatgacttttcatctccccagatttccagaactacctacggacacagacagggaacacgaccactattaacatcatcatttgcac

SEQ ID NO: 41068 - DNA, 120 bp, synthetic construct
  source 1..120: mol_type = other DNA
ggaatccatcagcgacttctactggtactactcgggcaaggatgtcattgaagagcagggcaagaggaacttctccaaagccatgtcggtggctaagcaggtgttcaacagcctcactga

SEQ ID NO: 41069 - DNA, 120 bp, synthetic construct
  source 1..120: mol_type = other DNA
ggtccctgcaccgggaaccagcagagcctggcgcacagtcgcctatgggacgcagtggtgggattcctgcacgtgttcgcccacatgatgatgaagctcgctcaggttcgagcccctctg

SEQ ID NO: 41070 - DNA, 120 bp, synthetic construct; identical to SEQ ID NO: 11726
  source 1..120: mol_type = other DNA

SEQ ID NO: 41071 - DNA, 120 bp, synthetic construct
  source 1..120: mol_type = other DNA
ggaaatgttttgcttctttatcttacttgcggcagatgacacccatatcaggcattcatgatgtaaggtccctgttgagcaccaccttccatttccataatccttgttcctctttccctc

SEQ ID NO: 41072 - DNA, 120 bp, synthetic construct
  source 1..120: mol_type = other DNA
gccatatactgttccgcaggtcgtgcactgcacaaaggcacgatctctgagagcattcacatcctacacataatggtgtatttattacaatagtttagttttccagcagatggcagtaaa

SEQ ID NO: 41073 - DNA, 120 bp, synthetic construct; identical to SEQ ID NO: 11727
  source 1..120: mol_type = other DNA

SEQ ID NO: 41074 - DNA, 120 bp, synthetic construct
  source 1..120: mol_type = other DNA
agaaatccagtgcaaagtggtggcttaagaaaaataaagaatttatcagttcatattacagatccagggcttagagtgatgtcagcagaactgcctcctctttgactgcatttgcaagca

SEQ ID NO: 41075 - DNA, 120 bp, synthetic construct
  source 1..120: mol_type = other DNA
gattctctctgactagcctattgggtcacatgtccctccctgaaccaatcatcataggcttaggaaagaaagctttgactgaccaggcccggtcatatacccacctatagaaccaggagg

SEQ ID NO: 41076 - DNA, 120 bp, synthetic construct
  source 1..120: mol_type = other DNA
actgtaagatcttgagattaggagtgtcgggaccttaggcgcagaatgcagagctttggaactgtggaaatacattaggattggaatcaacaactgatagaactagcatgggagcaaaag

SEQ ID NO: 41077 - DNA, 120 bp, synthetic construct
  source 1..120: mol_type = other DNA
gggagccctaggcgggcagatcacctgaggtcaggagttcgagaccagcctcaccaacatggagaaaccccatctctgttaaaagtaaaaaattagctgggtatggtggcgcatgcctgt

SEQ ID NO: 41078 - DNA, 120 bp, synthetic construct; identical to SEQ ID NO: 11728
  source 1..120: mol_type = other DNA

SEQ ID NO: 41079 - DNA, 120 bp, synthetic construct
  source 1..120: mol_type = other DNA
cccagagtcccactcttgccatcacacattatattcaacatacatctgtcaatcccaccgtaggccaggcacagtgctgggctcacatcccttcctagacctgggtctctgtccccagtg

SEQ ID NO: 41080 - DNA, 120 bp, synthetic construct
  source 1..120: mol_type = other DNA
caaccccacccccacaatcttgtctctctgccccttcccctgcttccgaggaacatgtctggactcgggtcccctcggaggtaagaggggagaaaacgggtttaggccctgctgggtagg

SEQ ID NO: 41081 - DNA, 120 bp, synthetic construct; identical to SEQ ID NO: 11729
  source 1..120: mol_type = other DNA

SEQ ID NO: 41082 - DNA, 120 bp, synthetic construct
  source 1..120: mol_type = other DNA
cctgtaatcccagcactttgggaggccgaggtgggaagatcacctgaagtcaggagtttgagaccagcctgggcaacatggtgagaccctgtctctactaaaaatacaaaaattagccta

SEQ ID NO: 41083 - DNA, 120 bp, synthetic construct
  source 1..120: mol_type = other DNA
gacagagcaagaccctgtctcaaaaaaacaaaccccaaaaacaaaccaaatgtccaaatgtggcaaaagataaacaattgatgaatgtggatatattaggatcccttttttttttttttc

SEQ ID NO: 41084 - DNA, 120 bp, synthetic construct
  source 1..120: mol_type = other DNA
tgggactacaggcgcccgccaccacacctggctaatttttttttttttttttttgtatttttagtagagacggggtttcaccatgttggtcaggatggtctggatctcctgacttcgtga

SEQ ID NO: 41085 - DNA, 120 bp, synthetic construct
  source 1..120: mol_type = other DNA
acaaaaataaactggagccaagcttcagctgctgcctttagagggagtgtgggatcgcagtttgccaatctctacctctccttgctgcttaccactggctagcctcagtcttctgtggac

SEQ ID NO: 41086 - DNA, 120 bp, synthetic construct; identical to SEQ ID NO: 11730
  source 1..120: mol_type = other DNA

SEQ ID NO: 41087 - DNA, 120 bp, synthetic construct
  source 1..120: mol_type = other DNA
tcaagcaattctcgtgcctcagcctcccaagtagctggaaatacaagcacatgccaccacgcccagctgattttgtatttttaatagagacggggtttcaccatgttggccaggctggtc

SEQ ID NO: 41088 - DNA, 120 bp, synthetic construct
  source 1..120: mol_type = other DNA
aggatcagccaggttggcacaggaggctgacgcaggtcaggaagggacctgtggaggggaggctgtggctggccagggacactccagcagcgtggtggctcctgggctggaaagagaggc

SEQ ID NO: 41089 - DNA, 120 bp, synthetic construct
  source 1..120: mol_type = other DNA
atccaatgtggagatgatcctcaagttcttcgacatgttcctgaaactcaaggacattgtgggctctgaagccttccaggactacgtaacggatccccgtggcctcatctccaagaagga

SEQ ID NO: 41090 - DNA, 120 bp, synthetic construct; identical to SEQ ID NO: 11731
  source 1..120: mol_type = other DNA

SEQ ID NO: 41091 - DNA, 120 bp, synthetic construct
  source 1..120: mol_type = other DNA
tcatgcctggctaatttttaagtttattttttgtagagatgtggtctcactacattacccaggctcctcttgaactcttgggctccaacaattctcctaccttggcctcccaaagtgctg

SEQ ID NO: 41092 - DNA, 120 bp, synthetic construct
  source 1..120: mol_type = other DNA
attgtgaataggcatcagttattccatcaataaacattggctggctttcttctctgtgtagggcctgtagtgacactattgacgcatcaatgaccaagatagacacagcccgtgctttca

SEQ ID NO: 41093 - DNA, 120 bp, synthetic construct; identical to SEQ ID NO: 11732
  source 1..120: mol_type = other DNA

SEQ ID NO: 41094 - DNA, 120 bp, synthetic construct
  source 1..120: mol_type = other DNA
ttaactattgtgaggatgggcagtgcgggcagtacctggaatatggtgagtcctcaagagatgttagctgctattactactccctgatctttaatgttaccattttgttaactttttatt

SEQ ID NO: 41095 - DNA, 120 bp, synthetic construct
  source 1..120: mol_type = other DNA
ttgaaataacttcaggtttatagagacgttgcaagaacagcacatagaatttctgaatacctttcacccacattgcccaaatgttttctatttactatttactccatcatgatttccctt

SEQ ID NO: 41096 - DNA, 120 bp, synthetic construct
  source 1..120: mol_type = other DNA
ttctcctgcctcagcctcctgagtagctgggattacaggcacgcaccaccatgcccagctaaatttgtgtgtgtgtgtgtgtgtgtgtgtgtgtgtgtgtgtgtgtgtgtgtgtgttgta

SEQ ID NO: 41097 - DNA, 120 bp, synthetic construct
  source 1..120: mol_type = other DNA
tagccaatttccctttactttgaaacacttcagcgtgtatctcctgagaacaaattcattctcctacctaagcacaggacaattatgctaatcaggaaattaacattggcacaatgctgc

SEQ ID NO: 41098 - DNA, 120 bp, synthetic construct; identical to SEQ ID NO: 11733
  source 1..120: mol_type = other DNA

SEQ ID NO: 41099 - DNA, 120 bp, synthetic construct
  source 1..120: mol_type = other DNA
atcccattactgtttattttcttatttatttgtttttagagtcagagtcttgctctattgccccggctggagtgcagtcaaacaatcctagctcactgcatccttgaccccctgggctca

SEQ ID NO: 41100 - DNA, 120 bp, synthetic construct
  source 1..120: mol_type = other DNA
tactgttgttaacttggatggcttggttaactcggtgttcaccaggggctccacaatgaagttactgttattccctttggaatcaataagtgtctcatgaggatatactttgaggctatg

SEQ ID NO: 41101 - DNA, 120 bp, synthetic construct; identical to SEQ ID NO: 11734
  source 1..120: mol_type = other DNA

SEQ ID NO: 41102 - DNA, 120 bp, synthetic construct
  source 1..120: mol_type = other DNA
tccgcctcctgggttcagtgattcttctgcctcagcctcccaagtcgctgggattacaggtatgcaccaccatgcctggctaattttgtatttttagtagagacgggggtttcaccatgt

SEQ ID NO: 41103 - DNA, 120 bp, synthetic construct
  source 1..120: mol_type = other DNA
ctgcacctggcccatggcttcttagtctatgggttgcagctgtgactggccatctgcacttaggtaagctcagggttccctgagttaaaatcaaagtgccccatgccttccagttgtccc

SEQ ID NO: 41104 - DNA, 120 bp, synthetic construct
  source 1..120: mol_type = other DNA
tgtcaggctcctgaaactcctctgaccaagatcatcagtgacctctttacctctgactgtcccctctgacttgtcatcttggcagcctttgtcacagctggccttttcgtttccctcccc

SEQ ID NO: 41105 - DNA, 120 bp, synthetic construct; identical to SEQ ID NO: 11735
  source 1..120: mol_type = other DNA

SEQ ID NO: 41106 - DNA, 120 bp, synthetic construct
  source 1..120: mol_type = other DNA
gatcacaactcactgtagcctccacctcccaggctcaggtgatcctcctaccttagcctcccaagtaactgggactccaggtgtgtgccaccacacccggctacttttatttatttattt

SEQ ID NO: 41107 - DNA, 120 bp, synthetic construct
  source 1..120: mol_type = other DNA
caaagtgctgggattaccagcataagctaccatgcccagcaggactgcttttttttttttgagatggaggagtctcactctgtcaccaggctggagtgcagtgatgtgatctcggctcac

SEQ ID NO: 41108 - DNA, 120 bp, synthetic construct
  source 1..120: mol_type = other DNA
acccagctaatttttgtatttttagtagagacgggcttcaccatgttggccaaggtggtctcgatctcctgacctcatgatccacctgcctcggcctcccaaagtgctgggattacaggc

SEQ ID NO: 41109 - DNA, 120 bp, synthetic construct
  source 1..120: mol_type = other DNA
gacatgcttaaggtcacccatcttaataagtgacaaggttagggttagacctcaggcggtctggcctcagagtacactgccttcagattcatctgttaatctggtctaatcgatagtcag

SEQ ID NO: 41110 - DNA, 120 bp, synthetic construct; identical to SEQ ID NO: 11736
  source 1..120: mol_type = other DNA

SEQ ID NO: 41111 - DNA, 120 bp, synthetic construct
  source 1..120: mol_type = other DNA
tcctgactggggctgcacagatcacagggtttaatgtcacctacctgacattttacagctcaacatctgttacacaaagttataatctgcaactgggaaaagtgtattcattttattttt

SEQ ID NO: 41112 - DNA, 120 bp, synthetic construct
  source 1..120: mol_type = other DNA
ctaaaaatacagaaattagccaagcatggtggcaggtgcctgtaatcccggctactcaggaggctaaggcaggagaatcccttgagcctgggaggcagagattgcagtgagctgagatca

SEQ ID NO: 41113 - DNA, 120 bp, synthetic construct
  source 1..120: mol_type = other DNA
aaggcaggaggattgcttgaggccaggagttcaagaccagcctggacaatatagcaagaccccattgctaaaaaaaaaaaaatcaaaaaattagctggatgtggaggtgtgcacctgtag

SEQ ID NO: 41114 - DNA, 120 bp, synthetic construct; identical to SEQ ID NO: 4438
  source 1..120: mol_type = other DNA

SEQ ID NO: 41115 - DNA, 120 bp, synthetic construct
  source 1..120: mol_type = other DNA
aggaagtgtcgtcattcttttttacaggtgtccaatattccacgctgtgtgtatattatggtttatttgctattccttgttgatggacactggctttattcccaatgttttgctatacaa

SEQ ID NO: 41116 - DNA, 120 bp, synthetic construct
  source 1..120: mol_type = other DNA
ttacatttgtacatgttttactgcagagttccagcagatggagggaaatgtgctgaggaaggctgtagtatttgggcctaaagcaatgctggctataacaattactcttgctacactttg

SEQ ID NO: 41117 - DNA, 120 bp, synthetic construct
  source 1..120: mol_type = other DNA
aaaatacgaaaaaatagcgggcatggtggcatgcacctgtaatcccagctgcttgggaggctgaggcagagaattgcttgaacccgggagttagaggttgcagtgagctgagattgcgcc

SEQ ID NO: 41118 - DNA, 120 bp, synthetic construct; identical to SEQ ID NO: 11738
  source 1..120: mol_type = other DNA

SEQ ID NO: 41119 - DNA, 120 bp, synthetic construct
  source 1..120: mol_type = other DNA
cagaaaccacattttaggttactgatttattcctggtcagtaaacagtcttgaggttatcttcattgttttcctatctgcaaattttatttgtctcttaattaaaacacttcctttttaa

SEQ ID NO: 41120 - DNA, 120 bp, synthetic construct
  source 1..120: mol_type = other DNA
cattttaatcatcctttgaaaacgaaccccatacccattagcagtcatttcccacttcccccaccccagcccccggtaaccactgatctttctgcctctatagatttgcctattctgaac

SEQ ID NO: 41121 - DNA, 120 bp, synthetic construct
  source 1..120: mol_type = other DNA
gaagagcctgggcaacatggcgaaaccctgtctccactaaaaatacaaaaaattagccgagtgtggtggcacatgcctgtagtcctagctacttgcgaggctgaggtgggaggaccgaga

SEQ ID NO: 41122 - DNA, 120 bp, synthetic construct; identical to SEQ ID NO: 11739
  source 1..120: mol_type = other DNA

SEQ ID NO: 41123 - DNA, 120 bp, synthetic construct
  source 1..120: mol_type = other DNA
taaaatcatctttcatctcttgcttcccctctattatcttttctttttccttgcaatttatctcctggagatccagtcctgcagatctttactgtccaacagaaatacaatatgagcaat

SEQ ID NO: 41124 - DNA, 120 bp, synthetic construct
  source 1..120: mol_type = other DNA
ctcctgcctcagcctcctgagtagctgggattacaggcatgcgccaccacacctggctaatttttgtatttttagtagagacaaggtttcgccatgttggccagggtagtctcaaactcc

SEQ ID NO: 41125 - DNA, 120 bp, synthetic construct
  source 1..120: mol_type = other DNA
ggtggctcgtgcctgtaatcccagcactttgggaggccaaggcgggaggatcacttgaggccaggagtttgagccagcctgcgtaacacagcaaaaccctatctctataaaaactttaaa

SEQ ID NO: 41126 - DNA, 120 bp, synthetic construct
  source 1..120: mol_type = other DNA
caacctgggcaactgagcaagactctgttaaaaaaaaaaaaaagtaaaatgaaacactacacataatctagtacactcaggatattatttcaacatggaatcaatcctgtttatttattt

SEQ ID NO: 41127 - DNA, 120 bp, synthetic construct; identical to SEQ ID NO: 11740
  source 1..120: mol_type = other DNA

SEQ ID NO: 41128 - DNA, 120 bp, synthetic construct
  source 1..120: mol_type = other DNA
gtggggctactgtatacctccaccaggaggcacctcctttccagatgccagcagctgtttctgctcaacactcagacatattcattcattagagattgcaaaatggcgatagtctcattt

SEQ ID NO: 41129 - DNA, 120 bp, synthetic construct
  source 1..120: mol_type = other DNA
gcaacctccgcctcccaggttcaagcgattctcctgcctcagcctcccaaagtgctgggattataggcatgagccacggcgcccagcctcttagttttcatgatgcttccttcacttgac

SEQ ID NO: 41130 - DNA, 120 bp, synthetic construct; identical to SEQ ID NO: 11741
  source 1..120: mol_type = other DNA

SEQ ID NO: 41131 - DNA, 120 bp, synthetic construct
  source 1..120: mol_type = other DNA
agcgaagctgagagttgaaagataccatatgactcagcgaggctgtggtgtcccaggcaaaggggacagtaaatggaaaggctgaaaaatgggaacaagagggacagagagcagcctggg

SEQ ID NO: 41132 - DNA, 120 bp, synthetic construct
  source 1..120: mol_type = other DNA
gagggggaggttgctgtgagccaagatcgcgtcattgcactccagcctgggtgacaagagcgaaattctgtctcaaaaaaaagaaataaaaatacaaaaattagctaggcatggtggtgc

SEQ ID NO: 41133 - DNA, 120 bp, synthetic construct
  source 1..120: mol_type = other DNA
ctctctcaaaaataaaataaaataatacaataaaatataaaataaaataaaatactagccaggcacgatgactcatgcctgtaatctcgatactttgggaggctgaggtgggaggatcgc

SEQ ID NO: 41134 - DNA, 120 bp, synthetic construct
  source 1..120: mol_type = other DNA
taagacgggaggatcacttgagcccaggaggtcgaggctatggcaagccatgatcactccattacactccagcctaggtagtagagacagactttgtctcaaaaaattaataataaagta

SEQ ID NO: 41135 - DNA, 120 bp, synthetic construct; identical to SEQ ID NO: 11742
  source 1..120: mol_type = other DNA

SEQ ID NO: 41136 - DNA, 120 bp, synthetic construct
  source 1..120: mol_type = other DNA
atcgcttgaaccctggaggcagaggtttcagtgagccaagatcacgccactgcactccagcctgggtgacagagcaagactctgtctcaaaaaataaaaataattttttaaaaaaatagt

SEQ ID NO: 41137 - DNA, 120 bp, synthetic construct
  source 1..120: mol_type = other DNA
ggccagcctggccaacatggcgaaaccctgtctctactaaaaatacagaattagccagtgtggtggcacacgcctgtagtcccagctactcaggaggctgagacaggagaatcacttgaa

SEQ ID NO: 41138 - DNA, 120 bp, synthetic construct; identical to SEQ ID NO: 11743
  source 1..120: mol_type = other DNA

SEQ ID NO: 41139 - DNA, 120 bp, synthetic construct
  source 1..120: mol_type = other DNA
ttacaggcacgcaccatcatgcctaactaatttttgtatttttagtagagacggggtttcaccatgttgtccaggctggtctcgaactcctgacctcaggtgatccacccgcctcggcct

SEQ ID NO: 41140 - DNA, 120 bp, synthetic construct
  source 1..120: mol_type = other DNA
aggtgaggggttccggtgtgattatgtctccatgctctgtggtttctagagcccttcatgatttgcaaagcatgttactcatttagaaagcattttgcaaagttctggggtttttacaaa

SEQ ID NO: 41141 - DNA, 120 bp, synthetic construct
  source 1..120: mol_type = other DNA
ccagagcaacatttctcacactgcatgttgctacccgtctggaggtaatgaaattaatttagcaatgcgtaactcgtgaccagcatctttagaaataaaatagaacactgcagagtgtgc

SEQ ID NO: 41142 - DNA, 120 bp, synthetic construct; identical to SEQ ID NO: 11744
  source 1..120: mol_type = other DNA

SEQ ID NO: 41143 - DNA, 120 bp, synthetic construct
  source 1..120: mol_type = other DNA
aaattcaccaggcacagtggcatgcacctgtagtcctagctactcaggaggctgaagcacgagactcatttgaccctgggaggtggaggctgcaatgagctgagatcgtgccactgcacc

SEQ ID NO: 41144 - DNA, 120 bp, synthetic construct
  source 1..120: mol_type = other DNA
gggcgcggtggcacacacctgtcacccctgcactttgggaggccgaggcgggtggatcacctgaggacaggagttcgagaccagcctggccaacatgatgaaaccctatctcactaaaaa

SEQ ID NO: 41145 - DNA, 120 bp, synthetic construct
  source 1..120: mol_type = other DNA
tgcactccagcctgggcgacaagagcgaaactccgtctcaaaaaaaaaaaaaaaaaaaaagagaaagaaaaagaaaaaaaagcaagtttcagctgaggtgggaggatcccttgagcccag

SEQ ID NO: 41146 - DNA, 120 bp, synthetic construct; identical to SEQ ID NO: 11745
  source 1..120: mol_type = other DNA

SEQ ID NO: 41147 - DNA, 120 bp, synthetic construct
  source 1..120: mol_type = other DNA
ccgaagcggatgagaacgaaatgatcaactgcgaagagttcgccaaccgcttccaggagccagcacgcgacatcggcttcaacgtggcggtgctgctgaccaacctgtcggagcatgtgc

SEQ ID NO: 41148 - DNA, 120 bp, synthetic construct
  source 1..120: mol_type = other DNA
tcgagatctcagagaccaaccgcgcccagtgggagatgccccaggtcagggaacccgcgcgcgtgcaagctcgcctcctggggcttcgggcatgcgggtgctcacttcctgcaccctcag

SEQ ID NO: 41149 - DNA, 120 bp, synthetic construct
  source 1..120: mol_type = other DNA
ttcttgcggacctggcccacacaaggatgcacaccccttgggcatgaagcagggtcagtgtgtcctgactgtggctgctcacacgccatgctttccccttacacccacaccctgggagct

SEQ ID NO: 41150 - DNA, 120 bp, synthetic construct
  source 1..120: mol_type = other DNA
ggcccgctcatgctcactcttgtacacgctcgccttgggggctctggggtgccctggcatgctgacccacccttcaccagtcatcacgtttgcccccagatgccttctgaagtcctagca

SEQ ID NO: 41151 - DNA, 120 bp, synthetic construct; identical to SEQ ID NO: 11746
  source 1..120: mol_type = other DNA

SEQ ID NO: 41152 - DNA, 120 bp, synthetic construct
  source 1..120: mol_type = other DNA
cccctccccattccctcacactccccacacgcccctgacacaccctcacctcattctcttgcacacacacttgcttgttgttcctcagatgccgccaggtacttgcacaccccttcttgt

SEQ ID NO: 41153 - DNA, 120 bp, synthetic construct
  source 1..120: mol_type = other DNA
gtcctcatgttctgggagccagtacacaaacccttggctccccttcccacattcatgcctgcctcacgcacactgcataactgcaggcccctctcacactcatactcctcctgtcccccc

SEQ ID NO: 41154 - DNA, 120 bp, synthetic construct
  source 1..120: mol_type = other DNA
tccctccctggcccccggtgtctcctcacatactccgcaggaacccttgagatcttgcacactcatctgtgcccctcggggccccactgcatacacacccccatctggcacacaagtggt

SEQ ID NO: 41155 - DNA, 120 bp, synthetic construct; identical to SEQ ID NO: 11747
  source 1..120: mol_type = other DNA

SEQ ID NO: 41156 - DNA, 120 bp, synthetic construct
  source 1..120: mol_type = other DNA
tctcagctcactcaacctccacctcctgggttcaagcggttttcctgtctcagcctcctgagtagctgagattacagccatgtgcaaccatgcccacctaatttttatattttcagtaga

SEQ ID NO: 41157 - DNA, 120 bp, synthetic construct
  source 1..120: mol_type = other DNA
acagcatttatcaggcaccgggcgctgttctaatcatgcagcatctattaactcatttaaccctcacaccaaccctataatgtaggtcctattatgcccattttacagaggggaaaacgg

SEQ ID NO: 41158 - DNA, 120 bp, synthetic construct
  source 1..120: mol_type = other DNA
gcctttgcctttaagcactatgctcctcctctcaaggaagctaaacacatccattctggagccagctctctgggggttcgaatcctatatgtgccaccttgtctgtgtcacctgggcatg

SEQ ID NO: 41159 - DNA, 120 bp, synthetic construct; identical to SEQ ID NO: 4448
  source 1..120: mol_type = other DNA

SEQ ID NO: 41160 - DNA, 120 bp, synthetic construct
  source 1..120: mol_type = other DNA
tctgcaaaaaaattttttttagaaattagcaggccagtcatggtggcttatgcctgtaatcccagcactttgggagggtgaggcgggcagatcacttgaggccaggagttccagatcagc

SEQ ID NO: 41161 - DNA, 120 bp, synthetic construct
  source 1..120: mol_type = other DNA
ggggacgaaggttacagtgagacagcgtcacttcattccagcctaggagacagagctagatcttgtctttttttttttttttcttgagacagactttcactctgttgcccaggctggagt

SEQ ID NO: 41162 - DNA, 120 bp, synthetic construct
  source 1..120: mol_type = other DNA
ttttagtagagacgggggtttcaccatgttggccaggctggtctcgaactcctgaccccaagtgatctgccagcctcagtttcccaaagtgctatgattacaggcggagccaccgcgccc

SEQ ID NO: 41163 - DNA, 120 bp, synthetic construct; identical to SEQ ID NO: 11749
  source 1..120: mol_type = other DNA

SEQ ID NO: 41164 - DNA, 120 bp, synthetic construct
  source 1..120: mol_type = other DNA
ggcggggctcgagggcacggcggccacggcggcggcgggggcgacggcgcgggttgtggcggccgcaggccgggccctgcgaggcctcagctaccgcagcctgcggcggcgcgtgcggcg

SEQ ID NO: 41165 - DNA, 120 bp, synthetic construct
  source 1..120: mol_type = other DNA
gggctcgctgttcggcggcggcctggtggagggcgccaagaaggtgacggtgaccgagctcctggcaggcatgcccgaccccaccagcgacgaggtgcacggcgagcagccggccgggcc

SEQ ID NO: 41166 - DNA, 120 bp, synthetic construct
  source 1..120: mol_type = other DNA
tgcacgaggccgggccgggcggtgccgacggggcggtggccgtgaccgatgggggccccttccggcccgaaggggctggcggtctcggggacatgggggacacgacgcctgcggaaccgc

SEQ ID NO: 41167 - DNA, 120 bp, synthetic construct; identical to SEQ ID NO: 11750
  source 1..120: mol_type = other DNA

SEQ ID NO: 41168 - DNA, 120 bp, synthetic construct
  source 1..120: mol_type = other DNA
gagtgcagggccggacagagtgcagggcccggagaggtagagaaaatgatacctgcagagccagagagagtaagaaacccagagaccaaattagagggcaggaaagaccaaaactaagcc

SEQ ID NO: 41169 - DNA, 120 bp, synthetic construct
  source 1..120: mol_type = other DNA
ccatcctggccaccgtggtggaaccccgtctctactaaaaatataaaaattagccgggcatggtggtgtgcgcctgtaatcccagctactcgggaggctgaggcaggagaatcgcttgaa

SEQ ID NO: 41170 - DNA, 120 bp, synthetic construct
  source 1..120: mol_type = other DNA
caagactaaaaaaagtcccgagacagggtcagggccactaggaaaagaccctcggagatactcgttgtgggaatgaagtacaccgtggaggaagggaccccaaacatcctcaggcccttg

SEQ ID NO: 41171 - DNA, 120 bp, synthetic construct; identical to SEQ ID NO: 11751
  source 1..120: mol_type = other DNA

SEQ ID NO: 41172 - DNA, 120 bp, synthetic construct
  source 1..120: mol_type = other DNA
gagccggagaaagccgagtgagtggccttggggctgaggggcctagcccctatcactgcctccctcctagagtaggagcctccagaggtcaggccccaaggctgtcctggccaccctgtg

SEQ ID NO: 41173 - DNA, 120 bp, synthetic construct
  source 1..120: mol_type = other DNA
gggcaacataaaaaaaaaattaaaattagccaagcatggtggtgtgtggggaggctgaggtgggaggatcacttgacccctggaggtggaggctgcagtgagccctgatcgcagcattgc

SEQ ID NO: 41174 - DNA, 120 bp, synthetic construct
  source 1..120: mol_type = other DNA
atctaactgccaggccttcgcatgtgctttcccgctgcctggaacacaggcccccatgcctactctgagtctttctcatcctttccaattctccaggacacctgaccccctcctaagttg

SEQ ID NO: 41175 - DNA, 120 bp, synthetic construct; identical to SEQ ID NO: 11752
  source 1..120: mol_type = other DNA

SEQ ID NO: 41176 - DNA, 120 bp, synthetic construct
  source 1..120: mol_type = other DNA
tccaaagaaggaggaagctggaggcgaattctggggagaactggaggtgcagagggtgaagttcctggtaaggatccagccaggtcacctgaaccttcttctccccgggagccccacctc

SEQ ID NO: 41177 - DNA, 120 bp, synthetic construct
  source 1..120: mol_type = other DNA
ttcagatggccctcacttggttccttgtcccttccctgctcactatccttattccaacctccatacctctgttcatcggggccacccacccacacttccacctccatcctctgtccagag

SEQ ID NO: 41178 - DNA, 120 bp, synthetic construct
  source 1..120: mol_type = other DNA
attcctggggaagcgttcatctcatccaggccaggaagaagggtgggtgttgggaggcaggtcccagggttccctccatcctgtctcccctccaggcctggcccgataggagggggtgag

SEQ ID NO: 41179 - DNA, 120 bp, synthetic construct; identical to SEQ ID NO: 11753
  source 1..120: mol_type = other DNA

SEQ ID NO: 41180 - DNA, 120 bp, synthetic construct
  source 1..120: mol_type = other DNA
ttccgtcagaatttgtgggaagaatgagggatggagggaaaggtggagagaaagagggagagatggaagatgttcctggccgtgcgagggggctcatgcctgtaagtccagtactttgga

SEQ ID NO: 41181 - DNA, 120 bp, synthetic construct
  source 1..120: mol_type = other DNA
cccaggttggagtgcagtggcacaatctcggctcactgcaagctctgactcctgggttcacgccattctcctgcctcagcctcccgagtagctaggactacaggcgcccgccgccacgcc

SEQ ID NO: 41182 - DNA, 120 bp, synthetic construct
  source 1..120: mol_type = other DNA
gccactgcacctggccgaatatttttaatctttttttttttttaattactgctccttgcagagcagggctaccctctaggcagtgcacccagagtagccaaaaatgtttttttaattagc

SEQ ID NO: 41183 - DNA, 120 bp, synthetic construct
  source 1..120: mol_type = other DNA
ggtgagagtaagaccttgactcaaaaaaaaaaaaaattccctttcatcttctgtaaagcaggcagggcgacaggtggggtgacctcactcaggaagcagcatggccaagtggcttggagc

SEQ ID NO: 41184 - DNA, 120 bp, synthetic construct; identical to SEQ ID NO: 11754
  source 1..120: mol_type = other DNA

SEQ ID NO: 41185 - DNA, 120 bp, synthetic construct
  source 1..120: mol_type = other DNA
aaaactaactgagtgtggtggtgcatacctgtaatcccagctacttaggaggctgagtcatgagaatttgaacccggtaggcagaggttgcagtgagccgagatggcgccactgcattcg

SEQ ID NO: 41186 - DNA, 120 bp, synthetic construct
  source 1..120: mol_type = other DNA
agatcagcctggccaatatggtgaaaccctgtctctactaaaaatacacaaattagctgggcgtggtggcacacgcctgtagtcccagctactcgggaggcggcagcagaggaattgctt

SEQ ID NO: 41187 - DNA, 120 bp, synthetic construct; identical to SEQ ID NO: 11755
  source 1..120: mol_type = other DNA

SEQ ID NO: 41188 - DNA, 120 bp, synthetic construct
  source 1..120: mol_type = other DNA
tgtgagcgctttctctctttttctcttctctctcagaactacctgtcccggaacttttacaccctgcggttccttgccctcttcttggcatttgccatcaacttcatcttgctgttttat

SEQ ID NO: 41189 - DNA, 120 bp, synthetic construct
  source 1..120: mol_type = other DNA
tcagggttcctccactgaagggataaggtattgggctttgggtcgttaggagggttcaggctggacacctggatcctgggacccccctccatgggggtgagtaggggatatctggatcca

SEQ ID NO: 41190 - DNA, 120 bp, synthetic construct; identical to SEQ ID NO: 11756
  source 1..120: mol_type = other DNA

SEQ ID NO: 41191 - DNA, 120 bp, synthetic construct
  source 1..120: mol_type = other DNA
cgcatgacgataggcaaggtgcttaccatccctgtgcctcaactccctcatctgtaaaatggaatacctcttagagctgtggggattgaaagaggataaggcaccaggcacagtggctca

SEQ ID NO: 41192 - DNA, 120 bp, synthetic construct
  source 1..120: mol_type = other DNA
gccaggcctggtggcgggcacctgtaatccaagctatgcaggaggctgaggcagtagaatcccttgaacccaggaggcaaaggttgcagtgagccgagattgcaccactacactccagcc

SEQ ID NO: 41193 - DNA, 120 bp, synthetic construct; identical to SEQ ID NO: 11757
  source 1..120: mol_type = other DNA

SEQ ID NO: 41194 - DNA, 120 bp, synthetic construct
  source 1..120: mol_type = other DNA
ggctctgcatgtggcagacccacagatgaatctctgtccccatttcaggtctcagactctccaccaggggaggacgacatggaaggctcagctgctggggatgtgtcaggtgcaggctct

SEQ ID NO: 41195 - DNA, 120 bp, synthetic construct
  source 1..120: mol_type = other DNA
ctgagcctcctgcatacactggtggcctttctctgcatcattggctataattgtctcaaggtgggcccatggccatggttctggggcaagggcttattggctgggtgggggtgggggcag

SEQ ID NO: 41196 - DNA, 120 bp, synthetic construct
  source 1..120: mol_type = other DNA
gtctccagtaaggacgacattcagattgggaacggacacggcttatagctgaggaaccaggttctggaccactgtcttgatactttgctattgaactagagttctttgggcttaaaactt

SEQ ID NO: 41197 - DNA, 120 bp, synthetic construct; identical to SEQ ID NO: 11758
  source 1..120: mol_type = other DNA

SEQ ID NO: 41198 - DNA, 120 bp, synthetic construct
  source 1..120: mol_type = other DNA
ccattccagccctgacccctatatgcccctacatcccagccctgacacccctgcctgtgcctctccactgccagccccgactgctctgcctgtgccccccaattccagccctgactcttc

SEQ ID NO: 41199 - DNA, 120 bp, synthetic construct
  source 1..120: mol_type = other DNA
ccagccctaagccctctgcctgggcctcatttctacccttatcactgggaaagcacttctgatgtggggtcacacacagaccccagcaagatgtcatggcttctgctgagactatggtcc

SEQ ID NO: 41200 - DNA, 120 bp, synthetic construct
  source 1..120: mol_type = other DNA
tggcccggaagctggagtttgatggcctgtacatcacggagcagcctgaggacgatgacgtgaaggggcagtgggaccgactggtgctcaacacgccgtaaggacccagcccccacctca

SEQ ID NO: 41201 - DNA, 120 bp, synthetic construct
  source 1..120: mol_type = other DNA
gcgggcggatcacgaggtcaggagtttgagaccagcctggacaacatggtgaaatcccgtctctactaaaagtacaaaaattagctgggcgtggtggcgggcgcctgtaatcccagctac

SEQ ID NO: 41202 - DNA, 120 bp, synthetic construct; identical to SEQ ID NO: 4458
  source 1..120: mol_type = other DNA

SEQ ID NO: 41203 - DNA, 120 bp, synthetic construct
  source 1..120: mol_type = other DNA
gtgcaatgagtgcaaaataaaaaaacatggccaggcacgatggctcatgcctgtaatcccaacacttgggaggccaaggtggcagatcacttgaggtcaggagttcgagaccagcctagc

SEQ ID NO: 41204 - DNA, 120 bp, synthetic construct
  source 1..120: mol_type = other DNA
aatcacttaaacctgcgaggtggaggttgcagtgagccgagattgtgcctctgcactccagcctgggcaacagagcgagactccatctgaaaaaaaaaaaaaaaaggaaaagaaaaagaa

SEQ ID NO: 41205 - DNA, 120 bp, synthetic construct; identical to SEQ ID NO: 11760
  source 1..120: mol_type = other DNA

SEQ ID NO: 41206 - DNA, 120 bp, synthetic construct
  source 1..120: mol_type = other DNA
gacagagcaagaccctatgtctgggggccaaaaaaaaaacaagtaggaattggaagtgcaatgaatcaaagcacttcaaataattgcaaatccgtgaattcataatcaatcatcgctcca

SEQ ID NO: 41207 - DNA, 120 bp, synthetic construct
  source 1..120: mol_type = other DNA
aacatggtgaaaccctgtctctactaaaaatacaaaaaaattagctgggcgtggcagtgggtgcctgtagtcacagctactcgggaggctgaggcagaagaatggcgtgaaccgaggagg

SEQ ID NO: 41208 - DNA, 120 bp, synthetic construct
  source 1..120: mol_type = other DNA
aatttgtcacttggaaaactggtgaataaagggccagaatcatgaaattaaatgaaatcaaccagtatgaggaagcaggcagttgcactggagttggtgctgagttaggctgctgttttg

SEQ ID NO: 41209 - DNA, 120 bp, synthetic construct; identical to SEQ ID NO: 11761
  source 1..120: mol_type = other DNA

SEQ ID NO: 41210 - DNA, 120 bp, synthetic construct
  source 1..120: mol_type = other DNA
ggtgggggcatcacctgaggtcagaagttcaagaacagcctggccaacatggcaaaacctcgtctctactaaaaatacgaaaattagccgggcgtggtggtgggcgcctgtaatcccagc

SEQ ID NO: 41211 - DNA, 120 bp, synthetic construct
  source 1..120: mol_type = other DNA
aggaaaaagaaaaacagtggagtttcagccaaccctgtcgtggctgacagctctgatccctctggccctaacatcttatactcacgctttctctctctctctctgcaggtctttccctag

SEQ ID NO: 41212 - DNA, 120 bp, synthetic construct
  source 1..120: mol_type = other DNA
gaccttgggcaagaggtttttttgcctttctgagtagcacctcagtttccccatggggagatgggcatagtaagcttgcttccctttcttgaatgggcacatggaaagagcagagcatca

SEQ ID NO: 41213 - DNA, 120 bp, synthetic construct; identical to SEQ ID NO: 11762
  source 1..120: mol_type = other DNA

SEQ ID NO: 41214 - DNA, 120 bp, synthetic construct
  source 1..120: mol_type = other DNA
gccaggagcagtggcacacgcctgtaatcccagcactttgggaggccgaggtgggcagatcacttgaggtcaggagtttgagaccagcctggacaacatggcaaaactgcatctctacta

SEQ ID NO: 41215 - DNA, 120 bp, synthetic construct
  source 1..120: mol_type = other DNA
gcctgggtgacagagcgagactccgtctcaaaaaaagagagaaatactagttgaaagagaggaagttagcaatatgtcttaagcacacacactctggaaccagattgcctgcttttcttt

SEQ ID NO: 41216 - DNA, 120 bp, synthetic construct
  source 1..120: mol_type = other DNA
gagtagctgggattacaggcacccaccaccacgtctggctaatttttgtatttttagtagagacggggtttcgccatgtgggccaggctgatctcgaactcctgacctcaggtgatccac

SEQ ID NO: 41217 - DNA, 120 bp, synthetic construct
  source 1..120: mol_type = other DNA
ttattgacctttctgtacctcatactcaaagtggggtaataatacggccaaccctacagggttgttgtattatgtactacatgagcagtatctggcatataggagaacactagatatgtt

SEQ ID NO: 41218 - DNA, 120 bp, synthetic construct; identical to SEQ ID NO: 11763
  source 1..120: mol_type = other DNA

SEQ ID NO: 41219 - DNA, 120 bp, synthetic construct
  source 1..120: mol_type = other DNA
acacagagaaaccccgtccctactaaaaatacaaaattagccgggcatggtggtgcatgcctgtaatcccagctactcaggtggctgaggcaggagaatcgcttgaacccgggaggcaca

SEQ ID NO: 41220 - DNA, 120 bp, synthetic construct
  source 1..120: mol_type = other DNA
ccttgcaggccacgacacacacccacactccagctgtgtctacacagcctgatgctctcttgtgcaggtcctggacaaacatggggacatctacgggcgggagcggattgctgagctact

SEQ ID NO: 41221 - DNA, 120 bp, synthetic construct
  source 1..120: mol_type = other DNA
gaggtgactggagtctgacactcaagcatctctccccacccccgcccccacaggctcatgtccatcgatgtcaagtaccagatctggaagttcggggtcatcttcacagacaacgtgagc

SEQ ID NO: 41222 - DNA, 120 bp, synthetic construct; identical to SEQ ID NO: 11764
  source 1..120: mol_type = other DNA

SEQ ID NO: 41223 - DNA, 120 bp, synthetic construct
  source 1..120: mol_type = other DNA
gcctgtagtcccagcactttgggaggccgaggcaggcagatcacttgaggtcaggagttcaagacaaacctggcactgggcatggcagcaggtgcctgtaatcccagctactcaggaggc

SEQ ID NO: 41224 - DNA, 120 bp, synthetic construct
  source 1..120: mol_type = other DNA
cacaaaaaattagccaggcagacaggcacagtggctcaggcctataatcccagcactttgggaggcggaggcagaggtttgcttgagctcaaacgtttaagaccagcttgggcaactttt

SEQ ID NO: 41225 - DNA, 120 bp, synthetic construct; identical to SEQ ID NO: 11765
  source 1..120: mol_type = other DNA

SEQ ID NO: 41226 - DNA, 120 bp, synthetic construct
  source 1..120: mol_type = other DNA
gacccacgcctgtggtcccagctactttggaggctaaggcaggagaatcgcttgaacccgggaggcggaggttgcagtgagctgagattgcaacactgcactccagcctgggcaacagac

SEQ ID NO: 41227 - DNA, 120 bp, synthetic construct
  source 1..120: mol_type = other DNA
agtgagctgagattgcgccatagcattccagcctgggtgacaagtgtgaaactccatctcaaaaaaaaaaaaaaaaaaagacagaggaagagatgatggagtctcgctatgttgcccaga

SEQ ID NO: 41228 - DNA, 120 bp, synthetic construct
  source 1..120: mol_type = other DNA
tagattgccagattatttccttctggagggggctctcatctccccgcaggatgccttctcacccggaatgccctgatcctccatgtactccccaaacagagctggcacccgacccccagg

SEQ ID NO: 41229 - DNA, 120 bp, synthetic construct; identical to SEQ ID NO: 11766
  source 1..120: mol_type = other DNA

SEQ ID NO: 41230 - DNA, 120 bp, synthetic construct
  source 1..120: mol_type = other DNA
ggtgtgtggggcagcaaggtagagccacagggactgaaccggggccaggacccagcatgggcagggtggggggagggcaagcccagggcggagctgacctggccccatcctgcccccagc

SEQ ID NO: 41231 - DNA, 120 bp, synthetic construct
  source 1..120: mol_type = other DNA
atgacatgatgacggtgagcccctcccctagcactctgggacccttccttctcgcatctgttgaaggagttaataatggtacctccaggccgggcgtggtgcctccagcctgcaatccca

SEQ ID NO: 41232 - DNA, 120 bp, synthetic construct
  source 1..120: mol_type = other DNA
ttgtgtgcctggaggctaaggcaagaggatcacttggtcccagcagtttgaggctttagtgagctacgaatgggccactacactccatcctggcagacagacagagaccctatctctaaa

SEQ ID NO: 41233 - DNA, 120 bp, synthetic construct; identical to SEQ ID NO: 11767
  source 1..120: mol_type = other DNA

SEQ ID NO: 41234 - DNA, 120 bp, synthetic construct
  source 1..120: mol_type = other DNA
gggacaacaggcgcccgccaccacgcctggcaaattttttgtatttttagtagagccggggtttcaccatgttagccaggatggtctcgatctcctgacctggtgatccgcccgcctggg

SEQ ID NO: 41235 - DNA, 120 bp, synthetic construct
  source 1..120: mol_type = other DNA
gtgatctgcccacctcggcctcccaaagtgctgggattacaggtgtgagccgccgcacctggccatgtcagatactttgaacagtgccaggcatatgagtgctccacacctcttcgccat

SEQ ID NO: 41236 - DNA, 120 bp, synthetic construct
  source 1..120: mol_type = other DNA
caggttcaagtgattctcctgcgttagcctcctgagtagctgggattacaggcgcacactaccacacccagctgatttttgtatttttagtagagatggaggtgggggggtctcacaatg

SEQ ID NO: 41237 - DNA, 120 bp, synthetic construct; identical to SEQ ID NO: 11768
  source 1..120: mol_type = other DNA

SEQ ID NO: 41238 - DNA, 120 bp, synthetic construct
  source 1..120: mol_type = other DNA
gcagattacctgaggttgggagtttgagaccggcctgaccaacatggagaaaccccatatctactaaaaatacaaaattagctgggcatggtggcgcatgcctgtaatcccagctactcg

SEQ ID NO: 41239 - DNA, 120 bp, synthetic construct
  source 1..120: mol_type = other DNA
aaaaaaaagacttagactagtgcctggcacatcctcaggattatatagatgttagcttctatcatcattatccacaattaaaagtttcacccaggccgggcgcagtgactcacgcctgta

SEQ ID NO: 41240 - DNA, 120 bp, synthetic construct
  source 1..120: mol_type = other DNA
aagtttaaaaaaaagtttcacccaaggtatacccagcgttcaatgcacatttatattttctcttctattctaataatggtgatcataacccaaattgatgcgaacttactagagacacag

SEQ ID NO: 41241 - DNA, 120 bp, synthetic construct; identical to SEQ ID NO: 11769
  source 1..120: mol_type = other DNA

SEQ ID NO: 41242 - DNA, 120 bp, synthetic construct
  source 1..120: mol_type = other DNA
cactaaaaatacaaaaattagtgggatgtggtggtgggcgcctataatcccagctacctgggaggctgaggcaggagaatctcttgaaccccggaggcggaggttgcagtgagccgagat

SEQ ID NO: 41243 - DNA, 120 bp, synthetic construct
  source 1..120: mol_type = other DNA
caggaggctgaggcaggagaatctcttgaactcggtggtggaggtcgcagtgagccaatattgcaccacagcactccagcctgggcaacagagcaagactctgtctcaaaaaaaaaaaaa

SEQ ID NO: 41244 - DNA, 120 bp, synthetic construct
  source 1..120: mol_type = other DNA
tacaaagcctgggaagggctggccctgcctgggtctaaccgcaaaccctcttgctttttgctttctagccgcctggtcctctttcagttcccctaggactgtgtgttttctcccaattca

SEQ ID NO: 41245 - DNA, 120 bp, synthetic construct
  source 1..120: mol_type = other DNA
ccgcgggctgggccagggcccacagagccacatgcccaggccctgcctcatctctccctgctctcctgcacaggagctctattttccagcctcacccaaccattttcagttcctcacagc

SEQ ID NO: 41246 - DNA, 120 bp, synthetic construct; identical to SEQ ID NO: 11770
  source 1..120: mol_type = other DNA

SEQ ID NO: 41247 - DNA, 120 bp, synthetic construct
  source 1..120: mol_type = other DNA
ctgtgcccccccccacccatcccggccctcatccctccgtctgtgccccccatccatcccggccctgacccctctgcctgtgccccactatcctggccctaacctctcagcctgtaccct

SEQ ID NO: 41248 - DNA, 120 bp, synthetic construct
  source 1..120: mol_type = other DNA
ccctctccctgtgcccccctatcctggccctgacccctctgcctgtgccccccttatcctggccctgattcccctgccagtgccccccatcccagccctgacccctctgcctgtgccccc

SEQ ID NO: 41249 - DNA, 120 bp, synthetic construct
  source 1..120: mol_type = other DNA
accatttctggctgttggtccctgtctgatgccgtatctgtgagccctttgagggcagggcccagggctgtctcagtcgttaccatgtcttcagccctgcctatcccggggccttggctg

SEQ ID NO: 41250 - DNA, 120 bp, synthetic construct; identical to SEQ ID NO: 11771
  source 1..120: mol_type = other DNA

SEQ ID NO: 41251 - DNA, 120 bp, synthetic construct
  source 1..120: mol_type = other DNA
tttctccatctgcaaaacgagggtgtcaatggtactaacctcataggttgtgatcaggattaagtcagttcataggcgctcggtgtctggctcatatgagtgctcaataaaggcctgaga

SEQ ID NO: 41252 - DNA, 120 bp, synthetic construct
  source 1..120: mol_type = other DNA
tgagagggagtctcgctctgttgcccgggccagagttcagtggtgcaatcttggctcactgcaacctctacctcccaggttcaagcgattcttctgcctcagcctcctgattagctggga

SEQ ID NO: 41253 - DNA, 120 bp, synthetic construct; identical to SEQ ID NO: 11772
  source 1..120: mol_type = other DNA

SEQ ID NO: 41254 - DNA, 120 bp, synthetic construct
  source 1..120: mol_type = other DNA
accaacaagagcaagtgaaggaggatatggaggtaggtcatgtctgggggtgacccagagggattacgggattcagggggtcaagtgggcctccactctgatgtctcttgccactcacag

SEQ ID NO: 41255 - DNA, 120 bp, synthetic construct
  source 1..120: mol_type = other DNA
agtcaggagggtggggggcatggctgccaatagccagcagtggggtacttagctttggccagttaggaaagggggtgtagtgtccatgtgggcagattccctgccagccaatcagaaggt

SEQ ID NO: 41256 - DNA, 120 bp, synthetic construct
  source 1..120: mol_type = other DNA
tctctactataaatgaaaaataaaataaggtaagggtggttctgacttgtctcctgtggtcctctcaccctcaggtttttcctgatgtatttgataaacaaggatgagacagaacacacg

SEQ ID NO: 41257 - DNA, 120 bp, synthetic construct; identical to SEQ ID NO: 11773
  source 1..120: mol_type = other DNA

SEQ ID NO: 41258 - DNA, 120 bp, synthetic construct
  source 1..120: mol_type = other DNA
aaatgcaaagattagcagggcgtggttgtgcatgcctgtaatcccagctacttggaaagctgaggtgggagaatcgcttgaacccaggaggcagaagttgcagtgagccaagatcatgcc

SEQ ID NO: 41259 - DNA, 120 bp, synthetic construct
  source 1..120: mol_type = other DNA
ttgagaccagaagttcaagacagcctaggaacacagcgagaccctttctctattaaaaaattagccaggggtggtggtgtgcacctgtagtcccagctactctggagactgaggtggaga

SEQ ID NO: 41260 - DNA, 120 bp, synthetic construct
  source 1..120: mol_type = other DNA
gtgaccaatgaactctttctatccccaatcctaggagtcttatgtctggaagatgtaccaagagagatgttgggatttcttcccagctggtgattgtttccgtaagcagtatgaggacca

SEQ ID NO: 41261 - DNA, 120 bp, synthetic construct
  source 1..120: mol_type = other DNA
actggaaaataaatctgtgctacgccccccagcatcactgtgttggcctgctgaaattttggaggagtggacatccaggaattgtttcccccaagaaaaacaagatgacagcagaggcta

SEQ ID NO: 41262 - DNA, 120 bp, synthetic construct; identical to SEQ ID NO: 11774
  source 1..120: mol_type = other DNA

SEQ ID NO: 41263 - DNA, 120 bp, synthetic construct
  source 1..120: mol_type = other DNA
tacaggcctgtggaaggaagagataagtcagttcatttattcattcatatgttcattgattcattaattcacaaagtagttaatagagactgtgccagccccatgctgaactatagcagt

SEQ ID NO: 41264 - DNA, 120 bp, synthetic construct
  source 1..120: mol_type = other DNA
caggaggtcagcccagactccccagagaatggatggtgcagcctgaaggggggttaggagggaacttggtgaaagggcaaggaagagtgttctggctggggagaacagcctgtgcaaagg

SEQ ID NO: 41265 - DNA, 120 bp, synthetic construct
  source 1..120: mol_type = other DNA
gatcagatttggatttaaagtgacccttctggcatgtcaaaaggacacaggggctacttaaagtggttcccactggctaaatttaagaccatttgtgcctcaaaataaataatgacaagg

SEQ ID NO: 41266 - DNA, 120 bp, synthetic construct
  source 1..120: mol_type = other DNA
gaccagcctggccaatatggtgaatcccatctctactaaaactacaaaaattatccaggtccatcctggctaacacggtgaaaccccatctctactaaaaatacaaaaaaaaattagcca

SEQ ID NO: 41267 - DNA, 120 bp, synthetic construct; identical to SEQ ID NO: 11775
  source 1..120: mol_type = other DNA

SEQ ID NO: 41268 - DNA, 120 bp, synthetic construct
  source 1..120: mol_type = other DNA
aatccatgagaccatgctggtataaagaaagaagaatggagaagacacagctcttctttagagtagaatgccaactaacacacgcagaaggaaacatagaatcagaaaatcaccatttat

SEQ ID NO: 41269 - DNA, 120 bp, synthetic construct
  source 1..120: mol_type = other DNA
gagaattgcttgaacctgggaggaggaggttgcagtgaggcgagatcgtgccactgcactccagcctgggggacagagtgagactctgactcaaaacaacaacaaaagacaaacaaaaaa

SEQ ID NO: 41270 - DNA, 120 bp, synthetic construct
  source 1..120: mol_type = other DNA
tgttgcccaggctggagtgcaatggcgcgatctcggctcactgcaacctccgcctcccgggttcaagcgcttctcctgcctcagcctcccgagtagctgggattacaggcatgcaacacc

SEQ ID NO: 41271 - DNA, 120 bp, synthetic construct; identical to SEQ ID NO: 11776
  source 1..120: mol_type = other DNA

SEQ ID NO: 41272 - DNA, 120 bp, synthetic construct
  source 1..120: mol_type = other DNA
gaggtgggaggactgattgaacccaggaggtcgaggctgcagtgagccatgatcgcgtcactgcactccagccagggtgacagagagagaatctatctttaaaaaaaaagaaaaagggag

SEQ ID NO: 41273 - DNA, 120 bp, synthetic construct
  source 1..120: mol_type = other DNA
acaaactagcattgtgtacttcctgaaatgatgcactgagaaagacatctttctgcagtattcctgcccaaaattcagaacgtggaaacctcaaacacagttaagggacattttagaaaa

SEQ ID NO: 41274 - DNA, 120 bp, synthetic construct
  source 1..120: mol_type = other DNA
cagaaaaaaaaaaaaaaaaaaaaaatatatatatatatatatatatatatatatatatatatatataatcacgggcgtcactaggacaacgggtgaaattttttgttgttgttgttgttg

SEQ ID NO: 41275 - DNA, 120 bp, synthetic construct; identical to SEQ ID NO: 11777
  source 1..120: mol_type = other DNA

SEQ ID NO: 41276 - DNA, 120 bp, synthetic construct
  source 1..120: mol_type = other DNA
tgctgtggtttgtaacattatgtccttgctttgattcaggaaacatacactgaagtattttaggggtaaatgggcatcacgtctgcaattcattcccaaatattcattaaaaaatcacac

SEQ ID NO: 41277 - DNA, 120 bp, synthetic construct
  source 1..120: mol_type = other DNA
gaggcaggaggagtgcttgaacccaggagtgggaggttgtggtgagctgagattatgccattgcactccagcctgggcaacaagagcgaaactctgtctcaagaaaagaaaaaaaaaaga

SEQ ID NO: 41278 - DNA, 120 bp, synthetic construct
  source 1..120: mol_type = other DNA
ccagcctaaccaccatgatgaaagcccacatctactaaaaaaacaaaaaaattagctgggcgtggtggtgtgcaactgtagtcccagctactcaggaggttgagacaggagacttgcctg

SEQ ID NO: 41279 - DNA, 120 bp, synthetic construct
  source 1..120: mol_type = other DNA
atttttgcaacttctctgggagtgtgagttttaaattatgtcaaaatagttaaaatagttatttttaatagttaaaaatttttaataagataaaaatctaaaataaaaatgcagccaggg

SEQ ID NO: 41280 - DNA, 120 bp, synthetic construct; identical to SEQ ID NO: 11778
  source 1..120: mol_type = other DNA

SEQ ID NO: 41281 - DNA, 120 bp, synthetic construct
  source 1..120: mol_type = other DNA
gcaagaccccgtctctacaaaaaaattttaaaaattagccagttgtggtggtgtatgcctgtggacctagctacttgggaggctgaggtgggaggatcagttgagctcagaaggtcaaga

SEQ ID NO: 41282 - DNA, 120 bp, synthetic construct
  source 1..120: mol_type = other DNA
ttgggaggccaaggcagctggatcacctgaggtcagtagtttgagaccagcctggctaacaaggcgaaaccccgtctctactaaaaatacaaaaaatagccaaatgtggtggtacacacc

SEQ ID NO: 41283 - DNA, 120 bp, synthetic construct; identical to SEQ ID NO: 11779
  source 1..120: mol_type = other DNA

SEQ ID NO: 41284 - DNA, 120 bp, synthetic construct
  source 1..120: mol_type = other DNA
ggaggctgaggcaagagaatcgcttgaacctgggaggcagaggttgcagtgaaccaagatcacaccattgcactccagcctgggcaacaaaagcaaaactccatctcaataaataaataa

SEQ ID NO: 41285 - DNA, 120 bp, synthetic construct; identical to SEQ ID NO: 11780
  source 1..120: mol_type = other DNA

SEQ ID NO: 41286 - DNA, 120 bp, synthetic construct
  source 1..120: mol_type = other DNA
ccaagcagacggaaagtgagggtagggtctctcagctcctgtagcagctagggaaaaaaagtgtgtgtctcagtgcctggaagatacctccactgtcactacgaacatggctcccttaaa

SEQ ID NO: 41287 - DNA, 120 bp, synthetic construct
  source 1..120: mol_type = other DNA
cgtctctactaaaaatacaaaaattagctaggcatggtggtgcgcgcctatagtcccagctactcaggatctgaggcagaagaatcacttgaacccgggaggcagaaattgcattgagct

SEQ ID NO: 41288 - DNA, 120 bp, synthetic construct
  source 1..120: mol_type = other DNA
cttgtgagggtgaggcacgagaatcgcttgaacctgggtggcagaggttgcaatgagccaagattgtgccactaacactccagtctggggaacagagcgagactccatttcaaaaagagg

SEQ ID NO: 41289 - DNA, 120 bp, synthetic construct; identical to SEQ ID NO: 11781
  source 1..120: mol_type = other DNA

SEQ ID NO: 41290 - DNA, 120 bp, synthetic construct
  source 1..120: mol_type = other DNA
gagggaggattgcttgagcccagaaagtcaaggctacagctagctatggttgcaccactgcacttcagcctggacaagagagagagaccctatctccaaaacaaacaggccgggtgaagt

SEQ ID NO: 41291 - DNA, 120 bp, synthetic construct
  source 1..120: mol_type = other DNA
ccaacatgacaaaaccccgtctctactaaaaatacaaaaattacctgggcatgatggagtgtacctgtaatcccagctactcgggaggctgaggcaggagaatcacttggacccaggagg

SEQ ID NO: 41292 - DNA, 120 bp, synthetic construct
  source 1..120: mol_type = other DNA
cactttgtgaggccaaggaaggcagattggctgagctcaggagtttgagactagcctgggcaacatggtgaaaccctgtctctactaaaaatacaaaaaaattagctaagcatggcggca

SEQ ID NO: 41293 - DNA, 120 bp, synthetic construct; identical to SEQ ID NO: 11782
  source 1..120: mol_type = other DNA

SEQ ID NO: 41294 - DNA, 120 bp, synthetic construct
  source 1..120: mol_type = other DNA
atacaaaaattagccagctgtggtggcgcatgcctgtaatcccagctacttgggaggccgaggcaggagaatcgcgtgaacccgggaggtggaggttgcagtgagccgggatcgcaccac

SEQ ID NO: 41295 - DNA, 120 bp, synthetic construct; identical to SEQ ID NO: 11783
  source 1..120: mol_type = other DNA

SEQ ID NO: 41296 - DNA, 120 bp, synthetic construct
  source 1..120: mol_type = other DNA
gctcccggcagcagaagcagaaggcagcgccaggggccgccgccgccgccgagctccgcggggctcgggagccggccccggcgaggaggcgcggaaccatggccgatgggggcgagggcg

SEQ ID NO: 41297 - DNA, 120 bp, synthetic construct
  source 1..120: mol_type = other DNA
tcgcgggcggggcgagggggtgccccctgaggatgcgggaggagcgggcatcaccaagtgtgtgcaggtgtgcgtgttggggcgagggaaggcaagggcgcgtgtctgtgcgcgcgtgtg

SEQ ID NO: 41298 - DNA, 120 bp, synthetic construct
  source 1..120: mol_type = other DNA
ctgcctggtggcacggctgggacctcccgggcggccgggggcagggtgcagagcagggtggcccgtgggggcgcggggagcggcgggaactcgggctgtttctgggaataccgccgccgg

SEQ ID NO: 41299 - DNA, 120 bp, synthetic construct; identical to SEQ ID NO: 11784
  source 1..120: mol_type = other DNA

SEQ ID NO: 41300 - DNA, 120 bp, synthetic construct
  source 1..120: mol_type = other DNA
gttctctaaatgctggcttattgcatgccaagtgaagcaaagtgtgtgtgtgtaagtgtaagggcagggtggctgcccgggaaaggttggctccacactaatacaattctttctccttaa

SEQ ID NO: 41301 - DNA, 120 bp, synthetic construct; identical to SEQ ID NO: 11785
  source 1..120: mol_type = other DNA

SEQ ID NO: 41302 - DNA, 120 bp, synthetic construct
  source 1..120: mol_type = other DNA
cggtggaattttggaatattaacttttaggtgtgaaaatagtcttgatgtatttgggtactaaacatatgaaaacagcgaatttgcaaaggaacgttgtaaacgactgtctctttctctt

SEQ ID NO: 41303 - DNA, 120 bp, synthetic construct
  source 1..120: mol_type = other DNA
tttttgaagtactgttggcccaagaccgggcttggaagagcctcttcactaataccttggtcacggtgtataaacctgctagtaatacagttgtctttttcatagaaaatagactataag

SEQ ID NO: 41304 - DNA, 120 bp, synthetic construct
  source 1..120: mol_type = other DNA
tgtggggttaaaactagctgggacattttggtaggcttcatgcactcaagggcttcctgcgggcttaactgttaagccgagctcatggaggtggtgttatcagaatgcttaatggggacc

SEQ ID NO: 41305 - DNA, 120 bp, synthetic construct
  source 1..120: mol_type = other DNA
ggcagtcccaggctgggatttttcttttaataaaacatccgtaggttgctgtgctgacgacaaatgaccttgaaggaggtgacacagtggagcagggggatttttttttttttggtatag

SEQ ID NO: 41306 - DNA, 120 bp, synthetic construct; identical to SEQ ID NO: 11786
  source 1..120: mol_type = other DNA

SEQ ID NO: 41307 - DNA, 120 bp, synthetic construct
  source 1..120: mol_type = other DNA
ccaaggagtattaggaatctgtacatcttgataaaacagttgtagatggaagaattcttgatagtgatggatgaagctgttttgcatagaaaaacaaaaacagtcattaagacaccgtaa

SEQ ID NO: 41308 - DNA, 120 bp, synthetic construct
  source 1..120: mol_type = other DNA
ccactgtccacagaaagcttttttgcttttctttttttagaagaggtgtgagatcactgttaagggaagtagaggtgaaatctttaatgggctgtatctgtgagttatgtatgctgctgt

SEQ ID NO: 41309 - DNA, 120 bp, synthetic construct; identical to SEQ ID NO: 11787
  source 1..120: mol_type = other DNA

SEQ ID NO: 41310 - DNA, 120 bp, synthetic construct
  source 1..120: mol_type = other DNA
attaacttaccaatgtagcatcaaactgtcatttggcatttaaaaacacgcatctttttcgttatggtcctctttttttttttttttccaacaatcatacagaatgttatagaagatatt

SEQ ID NO: 41311 - DNA, 120 bp, synthetic construct
  source 1..120: mol_type = other DNA
tgtggtgtactgtgtcatgtagttttgtatttacccatagattgagacttaaagcttagtcctggctgtaagaatgatcctgataggaatgcttacggtcttcctcctgtcttcttttgc

SEQ ID NO: 41312 - DNA, 120 bp, synthetic construct
  source 1..120: mol_type = other DNA
ggtgtacaacactgcatagtagtttggatgggaatacttagccctagtttgtagaggtccaggaaggttaatggtatgaagtcagtactcagcagtgcagaacgaggactaaaattcaaa

SEQ ID NO: 41313 - DNA, 120 bp, synthetic construct; identical to SEQ ID NO: 11788
  source 1..120: mol_type = other DNA

SEQ ID NO: 41314 - DNA, 120 bp, synthetic construct
  source 1..120: mol_type = other DNA
ttgtatttgtactttggcttcagataagtgtttttatcacggctgaattacccaagaaaggactccagcagcactgggtgactgtgcttctttagatagctttcgggagagagggagagg

SEQ ID NO: 41315 - DNA, 120 bp, synthetic construct
  source 1..120: mol_type = other DNA
gaagtggtttgcagctgtaattgcaaagaatagatatagaggatggcatggagcaatcagaaggaaaaatgcataaacaaactccaaaacattagggtaggaagaggcctttagaaaaca

SEQ ID NO: 41316 - DNA, 120 bp, synthetic construct
  source 1..120: mol_type = other DNA
tgaaaatctgtgaagaatttccagaaaggaggtttaccagcacatcattctttatagagtagatttaaacccacttttccattttatccttaacttgaccttcatagagttctgtctcca

SEQ ID NO: 41317 - DNA, 120 bp, synthetic construct
  source 1..120: mol_type = other DNA
ctagcctttttttttttttttttgcctccctatccacttactccttctggtttatcttgaagcctgttaatttctcccatcttaaaatgtctgtctttgacccggataccttatttggtt

SEQ ID NO: 41318 - DNA, 120 bp, synthetic construct; identical to SEQ ID NO: 11789
  source 1..120: mol_type = other DNA

SEQ ID NO: 41319 - DNA, 120 bp, synthetic construct
  source 1..120: mol_type = other DNA
tctatgtcacaaaatctgggatctcttgaataacagagtctgaaaagacttaacaatgacttcatccagctctgagagccagagagatgaaaggaatgttcccaaagcgactcttttttg

SEQ ID NO: 41320 - DNA, 120 bp, synthetic construct
  source 1..120: mol_type = other DNA
ccccagaaacaccagcttgacatcattgcctgttcggttccctaagcgactttccttcctagtgtctctgctgatcagtggcactgccgtttgtggctgtggctccagtgtgatcctaac

SEQ ID NO: 41321 - DNA, 120 bp, synthetic construct; identical to SEQ ID NO: 11790
  source 1..120: mol_type = other DNA

SEQ ID NO: 41322 - DNA, 120 bp, synthetic construct
  source 1..120: mol_type = other DNA
ttctctacttggccttttatgatctgccccttgataccttgcttatgcttttcatcctacacagagttttcttggatcactctaaccaattccgattttacctttctccgaccatttatc

SEQ ID NO: 41323 - DNA, 120 bp, synthetic construct
  source 1..120: mol_type = other DNA
tctaaccaattccgattttacctttctccgaccatttatcactaataattaataaaatgtatggaactgattgggaaactcaagcaatggtcagagaatgctctgaccctgatgctctgt

SEQ ID NO: 41324 - DNA, 120 bp, synthetic construct
  source 1..120: mol_type = other DNA
ctcctgcccacaagtttaatgtgaacatcacttgaatgcgtccaaatgcagaaagaaggaacctgctatgaaggaagtaggcaaagatagtgggggtggaagaatagaggtaagatctct

SEQ ID NO: 41325 - DNA, 120 bp, synthetic construct; identical to SEQ ID NO: 11791
  source 1..120: mol_type = other DNA

SEQ ID NO: 41326 - DNA, 120 bp, synthetic construct
  source 1..120: mol_type = other DNA
ccttactttcctctttattaatcacgggaagaacattgggatgaggaccctgccaacaaatggttgtgtgaccttggggctggtggggtcagatagagatttgtttgagagaggtaaaat

SEQ ID NO: 41327 - DNA, 120 bp, synthetic construct
  source 1..120: mol_type = other DNA
ttgtcatgttcgtagtcttagggtcaaccagactcaaaccattctgcaggatgagcataacaaaatctcaccctgggactggaaagaaaagctttgaatgatcctggggtccctggaaat

SEQ ID NO: 41328 - DNA, 120 bp, synthetic construct
  source 1..120: mol_type = other DNA
caggcatttagaaggagctaggagaagaattctctcatgtcagtagccctcttagggactacttaggttcggatccatttagtaactgaactcctagtgagcttgtttgcaaatcctctc

SEQ ID NO: 41329 - DNA, 120 bp, synthetic construct; identical to SEQ ID NO: 11792
  source 1..120: mol_type = other DNA

SEQ ID NO: 41330 - DNA, 120 bp, synthetic construct
  source 1..120: mol_type = other DNA
tatctgccaatttactggaagaaaacctgaaatctagctgtggagccaagatagatgcagaagaaagcgagtggaacaggagaaagtgtataggaactcagaggctggcagggccttcct

SEQ ID NO: 41331 - DNA, 120 bp, synthetic construct
  source 1..120: mol_type = other DNA
catcaccatgaaggaaggaacaattcaatgtggccaatttgtttttctactatggcaagcactttttttcctttaacatttttggtattttaagagtttttgcacatttattctgcttct

SEQ ID NO: 41332 - DNA, 120 bp, synthetic construct
  source 1..120: mol_type = other DNA
cattttgagaagatcaagaaaagaaaaagaaagcttacaggaaaaatgatatccttagtcttgagtcaattgggatattgttaaaatgaagccgaacagcacactgaggtgatagccact

SEQ ID NO: 41333 - DNA, 120 bp, synthetic construct; identical to SEQ ID NO: 11793
  source 1..120: mol_type = other DNA

SEQ ID NO: 41334 - DNA, 120 bp, synthetic construct
  source 1..120: mol_type = other DNA
ctccttttcccttccctccctttccctttctctccccccccttcctcccctttccctccccttcccctccccttcccgttccctaccctctcctccccttctctctctctctctctctct

SEQ ID NO: 41335 - DNA, 120 bp, synthetic construct
  source 1..120: mol_type = other DNA
agttacttttgagagatgctattttgatagtggcaggaccagcaacaaacctgtaccatctcagcattcaggaacaatggtgtccacatgtctttttgaggttgtacagggcattcttaa

SEQ ID NO: 41336 - DNA, 120 bp, synthetic construct
  source 1..120: mol_type = other DNA
actgctgttggcaactttatttcttgtaggtgcattgatatgtaattgtctggcaggtctgttctaagcattgcatgtgtattttctcatgaaatccctagaaaatccctcagaggtagc

SEQ ID NO: 41337 - DNA, 120 bp, synthetic construct; identical to SEQ ID NO: 11794
  source 1..120: mol_type = other DNA

SEQ ID NO: 41338 - DNA, 120 bp, synthetic construct
  source 1..120: mol_type = other DNA
aatacagagtagggtaattatatgcagtttactagggtaccttaatgcagtgtgtgtgaacgggatacctcttttatctgtagcattataccaggtacctaagagataccatgaaggtgg

SEQ ID NO: 41339 - DNA, 120 bp, synthetic construct
  source 1..120: mol_type = other DNA
aaaggtgaagagatgatggatgtggtcatgatattgggctccaaaactcacggagtaaatggccaatggtgaagtaaatggtggtaaaagcagagattctatttcattataaaatatgaa

SEQ ID NO: 41340 - DNA, 120 bp, synthetic construct
  source 1..120: mol_type = other DNA
ctctaaaagtgctccaaaatctcttttgtagcgtttcaggaaattttgattcattttatttttgaaacagttgacatttgggggagtgggctaagggatgaaaatatgttttaaagtgct

SEQ ID NO: 41341 - DNA, 120 bp, synthetic construct; identical to SEQ ID NO: 11795
  source 1..120: mol_type = other DNA

SEQ ID NO: 41342 - DNA, 120 bp, synthetic construct
  source 1..120: mol_type = other DNA
cttcaagtgattctcctgcctcagcctcctgagtagctgggattacaggtgcccgccaccatgccaagctaatttttgtatttttagtagagatggggtttcaccatgttggccaggatg

SEQ ID NO: 41343 - DNA, 120 bp, synthetic construct
  source 1..120: mol_type = other DNA
ctttggtcttggacatgtctgtcatgacatgtttccaaggccaatgcccacagctgggagtcatgatcagcttacacgtcctggcttgtaggttcgacgaaacgtcaggagaacatttct

SEQ ID NO: 41344 - DNA, 120 bp, synthetic construct
  source 1..120: mol_type = other DNA
agatgggggtgtcattattaagtctaaatgtcctgctcccgtcatgaagaattgcatcacacagaagcctgcaaagtcagcccgacttgagtcagtcctactcacaccaaagaggatacg

SEQ ID NO: 41345 - DNA, 120 bp, synthetic construct
  source 1..120: mol_type = other DNA
gacttatatccacgcttgtcctgcctttaaagagcttattctgtctctatgggtgggatagggaataaggaaaacgcaaatattctactacacagtggacataacaatcagaaaaccgtc

SEQ ID NO: 41346 - DNA, 120 bp, synthetic construct; identical to SEQ ID NO: 11796
  source 1..120: mol_type = other DNA

SEQ ID NO: 41347 - DNA, 120 bp, synthetic construct
  source 1..120: mol_type = other DNA
caaagcccttctttctccttcctccctccctccttccctccctcccttcttcccttctttcctcccttccttcctttttcttccctccttctctccctccctttatccatcacttcctcc

SEQ ID NO: 41348 - DNA, 120 bp, synthetic construct
  source 1..120: mol_type = other DNA
tccatctgtcaggaaaaatggtaaaagactgtaaattggattataaggaatgatttatggctgtcctatcacatttgtccatttaggttatctgtgcttttcacttgtctgggagctatc

SEQ ID NO: 41349 - DNA, 120 bp, synthetic construct
  source 1..120: mol_type = other DNA
ttctcaagcaaattcatctcagccttcctgatgggctgatatctctgtatgtcctttggagtctcctttgaacctgctgtgataccacactggttctttagtgaagaaattaaataaaat

SEQ ID NO: 41350 - DNA, 120 bp, synthetic construct
  source 1..120: mol_type = other DNA
gggagggcaggaagacaggacagatgaaagaggaaggtgagtgggggccatgtgttgtttcttctgtctccccatccccagggccactttccagtcttctctgccctgttctatgttcag

SEQ ID NO: 41351 - DNA, 120 bp, synthetic construct; identical to SEQ ID NO: 11797
  source 1..120: mol_type = other DNA

SEQ ID NO: 41352 - DNA, 120 bp, synthetic construct
  source 1..120: mol_type = other DNA
gttattcttttttctccttctcaagggagaaaaatgggtcagagctgtccattagaaagattaatggggcagcaatttataagataaattgggatgtagagagatcagagcgggaccgga

SEQ ID NO: 41353 - DNA, 120 bp, synthetic construct
  source 1..120: mol_type = other DNA
ggtttatggggttggtaactgattagatacaagaagaggaaaaagacaaagctgagcttcagatggtgttggtcatatggaaatcaggaggaaggggaggtttcaggggaaggcagtggg

SEQ ID NO: 41354 - DNA, 120 bp, synthetic construct; identical to SEQ ID NO: 11798
  source 1..120: mol_type = other DNA

SEQ ID NO: 41355 - DNA, 120 bp, synthetic construct
  source 1..120: mol_type = other DNA
tggagcactgcacctgtgaggactaaagactgtacctgtgaggactggagcactgcacctgtgaggactggagcattgcatctgtgaggactgaagcacacttgcaaggactggagcatc

SEQ ID NO: 41356 - DNA, 120 bp, synthetic construct
  source 1..120: mol_type = other DNA
gtgaggactagagactatacctgtgaggactggaacactgcacctgtgaggactggagcactgcacctatgaggactggagccctgcacctgtgaggactggagcactgcacctgtgagg

SEQ ID NO: 41357 - DNA, 120 bp, synthetic construct
  source 1..120: mol_type = other DNA
gcactgcacctgtgaggactggagcactgcgtctgtgaggattggagcactgcacctgtgaggactggaacactgcacctgtgaggactgcagcactgcacctgtgaggactggagcact

SEQ ID NO: 41358 - DNA, 120 bp, synthetic construct
  source 1..120: mol_type = other DNA
tgaggactggagcactgcacctgtgaggactagagactgcatctgtgaagactggagcactgcacctgtgaggactggagcattgcatctgtgagccaaggagcactagggctgagagag

SEQ ID NO: 41359 - DNA, 120 bp, synthetic construct; identical to SEQ ID NO: 11799
  source 1..120: mol_type = other DNA

SEQ ID NO: 41360 - DNA, 120 bp, synthetic construct
  source 1..120: mol_type = other DNA
gaggaaacttcttttttttttggacggaatcttgctatgtcgcccaggctggagtgcagtggtgtgatatcggctcactgcaagctccacctcccgggttcaagcgattcttctgcctca

SEQ ID NO: 41361 - DNA, 120 bp, synthetic construct
  source 1..120: mol_type = other DNA
gccacgttagccaggatggtctcgatctcctgaccttgtgatccacccacctcagcctcccaaagtgctgggattataggcgtgagccaccgcgcctggccctgaggagacttttgatgt

SEQ ID NO: 41362 - DNA, 120 bp, synthetic construct; identical to SEQ ID NO: 11800
  source 1..120: mol_type = other DNA

SEQ ID NO: 41363 - DNA, 120 bp, synthetic construct
  source 1..120: mol_type = other DNA
gcctaagctgatgcatcgcctctctttgcagatacctaattactgcttttcttaattcgagagcacatacgattttcatttgcctttggtttagctttgcatcatttcattttctgctag

SEQ ID NO: 41364 - DNA, 120 bp, synthetic construct
  source 1..120: mol_type = other DNA
tggtttggtgatgaaataatccagctaggcttgaagcaagcatgtctcattaagacaaatgggagaagctgatattgctggcgggttttttctcatagctgttaactcaaaaagaaggta

SEQ ID NO: 41365 - DNA, 120 bp, synthetic construct
  source 1..120: mol_type = other DNA
attctgctggtagtgactgccctcagctctcctactatgataggatctggctaagaaaattccagtaatttttcagaaaattagcaatttatattttgagagttttttcctccacatttt

SEQ ID NO: 41366 - DNA, 120 bp, synthetic construct; identical to SEQ ID NO: 11801
  source 1..120: mol_type = other DNA

SEQ ID NO: 41367 - DNA, 120 bp, synthetic construct
  source 1..120: mol_type = other DNA
ttcaccatcttctcacctggttaaggtgcttagagatgctggtctggagaaggggcggggggccggggggcggggtgttcagtaacaatcaggtagcaattagaaggtgggagatagcgc

SEQ ID NO: 41368 - DNA, 120 bp, synthetic construct
  source 1..120: mol_type = other DNA
gactagtacattttctgcagaaatttttttttgaatttcacatgtctagcagaacgagaaatctggcatacattacaaccaaccaaaacattgctctggacaggcctaaaacaaggacct

SEQ ID NO: 41369 - DNA, 120 bp, synthetic construct
  source 1..120: mol_type = other DNA
cacagttttgttaagagggtgctgtgtataactcagatgccttactgggatacagaaatggactttaaaatctcggggttaataatgatgatgccattgccatctaacgtgaataatggg

SEQ ID NO: 41370 - DNA, 120 bp, synthetic construct; identical to SEQ ID NO: 11802
  source 1..120: mol_type = other DNA

SEQ ID NO: 41371 - DNA, 120 bp, synthetic construct
  source 1..120: mol_type = other DNA
gaggaaaggaagaaaaactactgtaagttatgggagactaaggccatgtatttatttggggattgcattaataagttttcaagcattcacttttatttagctacatgatcggctttgtgg

SEQ ID NO: 41372 - DNA, 120 bp, synthetic construct
  source 1..120: mol_type = other DNA
gtattggatggaaccatgattccaatatatgtgtattctttcattcagcaaagatatatatactcactacctcctgtgtgtcaggtgtctgtagggtgctgtagacttatacttaaagcg

SEQ ID NO: 41373 - DNA, 120 bp, synthetic construct
  source 1..120: mol_type = other DNA
attaataagactcctaaatgggaaggtgctgaggctagaatctgatggccaaccaggtaagatttccttcaaagtctgtgtcaaatcagttctacatttctctacatccagtctacattt

SEQ ID NO: 41374 - DNA, 120 bp, synthetic construct
  source 1..120: mol_type = other DNA
attatgttcttagcctttccgaattcctgttatacgcaaagcattctacttaactccatgggtataatgggatatataatccttgcccacaagaaactattaccaacactaatttattag

SEQ ID NO: 41375 - DNA, 120 bp, synthetic construct; identical to SEQ ID NO: 11803
  source 1..120: mol_type = other DNA

SEQ ID NO: 41376 - DNA, 120 bp, synthetic construct
  source 1..120: mol_type = other DNA
catttatatcagagatgcatccatgttgtagctcctggtggcttagtgctgtatgctacaattcatctatccattctgttgatagacaatgggttgtttctggtttcactaataaaaaca

SEQ ID NO: 41377 - DNA, 120 bp, synthetic construct
  source 1..120: mol_type = other DNA
tatatatgctcagccttctaaacacttttccaaagtagttgactcagttaacatttccactagcagtacttagtaaatgttggtttcaaaaaagtaggaatcattatggtggatgtatag

SEQ ID NO: 41378 - DNA, 120 bp, synthetic construct; identical to SEQ ID NO: 11804
  source 1..120: mol_type = other DNA

SEQ ID NO: 41379 - DNA, 120 bp, synthetic construct
  source 1..120: mol_type = other DNA
gtctcattctgttgcccaggctggagtgcagtggcacagtcatagcttgctgcagccttaaactactgggctcaagggctctttctgcctcagcctcccaagtagctaagactacaagtg

SEQ ID NO: 41380 - DNA, 120 bp, synthetic construct
  source 1..120: mol_type = other DNA
ccatggtgcctgaccagaattgtcttttttaaacattaacttttggggagtattttatatgatgtgaataggaatcttttgttagatacgtctattgcaaatatcttttccaacactctt

SEQ ID NO: 41381 - DNA, 120 bp, synthetic construct
  source 1..120: mol_type = other DNA
gcctacccaaaggctgttctcccatgttatcttctacagcctttactattttaaggctgatatttaggtctgtgctcttagaattgatattttgtttatagtttgaggtagagatcagtc

SEQ ID NO: 41382 - DNA, 120 bp, synthetic construct; identical to SEQ ID NO: 11805
  source 1..120: mol_type = other DNA

SEQ ID NO: 41383 - DNA, 120 bp, synthetic construct
  source 1..120: mol_type = other DNA
ttcatttcagtttaaattttagaattagcttataaatctccacaagatgagctgctggaatttttaatgaaatagcatcaaatctgtagacccgtttgagaagaattaacatcttttcga

SEQ ID NO: 41384 - DNA, 120 bp, synthetic construct
  source 1..120: mol_type = other DNA
acttagttttccatgaaagactttgcacattttgggggtcagatttatttctaggtatttgatgtttattgatgtcaatgcaaatgtatctttaaaaaattgtttcttagactgtaaaaa

SEQ ID NO: 41385 - DNA, 120 bp, synthetic construct
  source 1..120: mol_type = other DNA
tgaccattttattttttgcttctcagttttcatttcttgttattgcctcattgtacttcccaggatctttgtaaatgctgactagaagacatgatagcagatctttgatcctttccctca

SEQ ID NO: 41386 - DNA, 120 bp, synthetic construct
  source 1..120: mol_type = other DNA
tcttacactgtgcatatgcagcttaaaaatatcagtttagaattatgattttactgtttttttttttctgttagtgcaatggactgtttgtgcctacccccaaaattcttatgttgaaat

SEQ ID NO: 41387 - DNA, 120 bp, synthetic construct; identical to SEQ ID NO: 11806
  source 1..120: mol_type = other DNA

SEQ ID NO: 41388 - DNA, 120 bp, synthetic construct
  source 1..120: mol_type = other DNA
gcttctattagcttgtgagttattcattcttttattactccttcagtgtttacactagagattataatatcgttaatttattagtatctaccttaaatgaatacttttatatttttctgg

SEQ ID NO: 41389 - DNA, 120 bp, synthetic construct
  source 1..120: mol_type = other DNA
actccttaagacattattattattctttaacagtcagaattcatgtagatttacttatatgttgcactgtctagtgcctttccgttgtcctgcttgccatgctgtcatctgggatcattt

SEQ ID NO: 41390 - DNA, 120 bp, synthetic construct; identical to SEQ ID NO: 11807
  source 1..120: mol_type = other DNA

SEQ ID NO: 41391 - DNA, 120 bp, synthetic construct
  source 1..120: mol_type = other DNA
ttttgggattccgatgatagatattttgctcctttttctcatgtctcttttacattcttttctgtattttcattccttttattttttctttgtacttaattcggagtatttcccactgac

SEQ ID NO: 41392 - DNA, 120 bp, synthetic construct
  source 1..120: mol_type = other DNA
ttccagattcaaattctgttgtaacattcttcctcttcatctattttcaaatatatttattattgtaataaataagcataatacatgtatcacatttacgtttgtttctctttccttttc

SEQ ID NO: 41393 - DNA, 120 bp, synthetic construct
  source 1..120: mol_type = other DNA
acattaattttattctggtaggtaggtagcatccaggcacatcattgtcatctcattgaggcttatttgtctccatattgcccttcctagtaggtataactcttctgaggtctcatgtga

SEQ ID NO: 41394 - DNA, 120 bp, synthetic construct
  source 1..120: mol_type = other DNA
tgcatgcaagcccatcacatcctatgatttggttgctcttcagcgacttcaaataatcttctacttaaactagtttttatagttattctcagcgaaagtttagttcagtaccagcgtctc

SEQ ID NO: 41395 - DNA, 120 bp, synthetic construct; identical to SEQ ID NO: 11808
  source 1..120: mol_type = other DNA

SEQ ID NO: 41396 - DNA, 120 bp, synthetic construct
  source 1..120: mol_type = other DNA
aagttagcattgctataaagcgtgtatatagttttatgctattttatcacccatagattcatgtaatgaccactgcaatcaagatacagaactgttccatcctcaaagagctcttgtgtg

SEQ ID NO: 41397 - DNA, 120 bp, synthetic construct
  source 1..120: mol_type = other DNA
attctcctgcctcagcctcctgagtagctgggattagaggcacccaccaccacgcctggctaattttttttggtattttttttagtagagacagggtttcactatgttggccaggctggt

SEQ ID NO: 41398 - DNA, 120 bp, synthetic construct; identical to SEQ ID NO: 11809
  source 1..120: mol_type = other DNA

SEQ ID NO: 41399 - DNA, 120 bp, synthetic construct
  source 1..120: mol_type = other DNA
cacgtcttacatggctggagcaggaggaagtgtggggaaggtgctgcacacttttaaacaaccagatttcaagagcacttgctcactatcaccagagtagcaccgagggggaaatcccca

SEQ ID NO: 41400 - DNA, 120 bp, synthetic construct
  source 1..120: mol_type = other DNA
taggtgacctttgagattggcatttttcattcagcgaaatgctcttttcatgctatggacataccacattttgtttggccatttacaaaatgtcttgcaaaatgccttttctcatgtctg

SEQ ID NO: 41401 - DNA, 120 bp, synthetic construct
  source 1..120: mol_type = other DNA
atgcccaggaatatgttttgttggttgtaagttatgtttggttggttgtaagctatgtttagtttttaaagaattgcagtattttccagggtggctgcagttttagattcccatcagcaa

SEQ ID NO: 41402 - DNA, 120 bp, synthetic construct; identical to SEQ ID NO: 11810
  source 1..120: mol_type = other DNA

SEQ ID NO: 41403 - DNA, 120 bp, synthetic construct
  source 1..120: mol_type = other DNA
ccattctcctgcctcagcctcctgaatagctgggactgcaggcgcccaccaccacacccggctaattttttgtatttttagtagagacggggtttcaccgtgttaggatggtctcgatct

SEQ ID NO: 41404 - DNA, 120 bp, synthetic construct
  source 1..120: mol_type = other DNA
cttttaaaagtcgaatgtcttttcatgtcgtttgcctatcttctaaatggactttataaaaaatgctgaatttcgaaaattctttatcaattttagatatgggtcttttgtcagatatat

SEQ ID NO: 41405 - DNA, 120 bp, synthetic construct
  source 1..120: mol_type = other DNA
gattgtgcttttttttgccccatgcctaagaactctttgccaagctcttggtcttgaatattttctcttatgttttcttctaaatgttttatagttttatgtttctcatcgatgatctga

SEQ ID NO: 41406 - DNA, 120 bp, synthetic construct; identical to SEQ ID NO: 11811
  source 1..120: mol_type = other DNA

SEQ ID NO: 41407 - DNA, 120 bp, synthetic construct
  source 1..120: mol_type = other DNA
gggtttcgataagaattgtagcaaaacttgtgtatcaatttgggttgaattggcatctttattattttgtcttccaatgcgtgaacactgtagcaggtgtttttgatttggcttactgta

SEQ ID NO: 41408 - DNA, 120 bp, synthetic construct
  source 1..120: mol_type = other DNA
tttctctttgatggtagtgaacctccattgcattgtactatacacagtttgtggtataattaatcatgccctacacttaaatcactagcagattcaacattgcataccttgatttatcca

SEQ ID NO: 41409 - DNA, 120 bp, synthetic construct
  source 1..120: mol_type = other DNA
tttcctcaaagaaacaaaacgtttcgttgttttttaaaaaaacacttcttgaaaacaagtatatacagtatggtgattacaataaagtcacactgacatgcagagacgaggacattggtg

SEQ ID NO: 41410 - DNA, 120 bp, synthetic construct; identical to SEQ ID NO: 11812
  source 1..120: mol_type = other DNA

SEQ ID NO: 41411 - DNA, 120 bp, synthetic construct
  source 1..120: mol_type = other DNA
atgtgttaatttagtctcatctaccctgtattattcttctcattacatttgccctgacttttgcaaaaatgggttggttatgagaatttcctcaaaaaagtctttactgtgttatgattg

SEQ ID NO: 41412 - DNA, 120 bp, synthetic construct
  source 1..120: mol_type = other DNA
ctggcttttggtgtataaaatgaacttccctttactgtttttagatctccccgtactgtggcctttaactgacatttttcttccaacctgctcctaggtgagccagttgagaaaaaaata

SEQ ID NO: 41413 - DNA, 120 bp, synthetic construct
  source 1..120: mol_type = other DNA
gttcaatgatgggtggaggaaaatagctcattaggacattatgatctcttgaactgtgaattgtttaaaaatgatattaaattctgctcttcattggttgttctggaagagtgctggtga

SEQ ID NO: 41414 - DNA, 120 bp, synthetic construct; identical to SEQ ID NO: 11813
  source 1..120: mol_type = other DNA

SEQ ID NO: 41415 - DNA, 120 bp, synthetic construct
  source 1..120: mol_type = other DNA
gttggacatttatagcttatacagtgagtacagagaggacttttgtattggacttaattattaatgcctgtcatccagatgactgaaagtagttcatgaaaatcaggaatgtttatataa

SEQ ID NO: 41416 - DNA, 120 bp, synthetic construct
  source 1..120: mol_type = other DNA
ggaatttccttcaatattctggaaaagtccatttttaaaaaatggtgtcaggcaagagtttaggcttcttaaattatgctttattttcaaagctactccagcttatttttattaggctat

SEQ ID NO: 41417 - DNA, 120 bp, synthetic construct
  source 1..120: mol_type = other DNA
gtatggcatgatgtgactaaatattttcctttattctcttaaatttttaattgttttccattgctcattataaactggtccagttaagctactggaggctggtttgacatacctgttggt

SEQ ID NO: 41418 - DNA, 120 bp, synthetic construct; identical to SEQ ID NO: 11814
  source 1..120: mol_type = other DNA

SEQ ID NO: 41419 - DNA, 120 bp, synthetic construct
  source 1..120: mol_type = other DNA
agtatatcaaaccatcctccaacagcttaattggaccagttttatgataggatgaataacagaaaacaattaaacatttaggagaataaaggtcttatactcctggtttcaagcatttct

SEQ ID NO: 41420 - DNA, 120 bp, synthetic construct
  source 1..120: mol_type = other DNA
ttcgcccacatggcccggcaggctgtgcttggtttgcactactgtcccagatcccacacctgccaagggcaagccaggtgcaggaggccagggttgtgtgagcaagtgagtgtggggtcc

SEQ ID NO: 41421 - DNA, 120 bp, synthetic construct
  source 1..120: mol_type = other DNA
tgtgggcaccagtatctggacaaggagaatgcaatggtgccaaaagctcagagatgccaggaactgcagagccccaaggagggtgttacagcatgtcacagccctggctcagggagcccc

SEQ ID NO: 41422 - DNA, 120 bp, synthetic construct; identical to SEQ ID NO: 11815
  source 1..120: mol_type = other DNA

SEQ ID NO: 41423 - DNA, 120 bp, synthetic construct
  source 1..120: mol_type = other DNA
acctctgcctcctggattcaagcgattctcctgcctcagcctcctgagtagctgggattacaggcacctgtcgccatgcccggctaatttttctatttttagtagagacaaggtttcact

SEQ ID NO: 41424 - DNA, 120 bp, synthetic construct
  source 1..120: mol_type = other DNA
ctcagaggggaggaagtgcgtgctgatgggtccacggtcggccatggcaggcctggaaaaaacactataaactcttactctgtgttggggattccactgggaactggccccctggccccc

SEQ ID NO: 41425 - DNA, 120 bp, synthetic construct
  source 1..120: mol_type = other DNA
acaccgaggggtgcctgccgagctgctctcagccccacccggctccagcctttctccctgagcttgaaactcccccagagtttcagagggggatgaggcggcgggggtgctggtgtgtta

SEQ ID NO: 41426 - DNA, 120 bp, synthetic construct
  source 1..120: mol_type = other DNA
ttctgaccctgctgggggaagagggtgtcctgggcccccaagagcacatggatgcccaggtctggagccatatccaggtggctgcagctgtgcctgcagcatggggctcccgttctgaca

SEQ ID NO: 41427 - DNA, 120 bp, synthetic construct; identical to SEQ ID NO: 11816
  source 1..120: mol_type = other DNA

SEQ ID NO: 41428 - DNA, 120 bp, synthetic construct
  source 1..120: mol_type = other DNA
gtgcaccaaccagcaagggggaagtgaatgccaaaaggagctgtgggaggttttctagaatgtcagttataaagctacttgttgcacacataaaatggatttggaaactcgtatttaatc

SEQ ID NO: 41429 - DNA, 120 bp, synthetic construct
  source 1..120: mol_type = other DNA
cgagaccagcttgggcaatattgcgaaaccccgactctactaaaagtacaaaaaattacccaggcgtggtggcagtcacctgtaatcccagctacttgggaggctgaggcaggagaatcg

SEQ ID NO: 41430 - DNA, 120 bp, synthetic construct
  source 1..120: mol_type = other DNA
ataactaatgctccaggaagctgccacatatttacctcaggacctatttctatcttcgccccaccgcacgctgaactagacacttaaggacctagtgtagaggactatgaagaggattgt

SEQ ID NO: 41431 - DNA, 120 bp, synthetic construct; identical to SEQ ID NO: 11817
  source 1..120: mol_type = other DNA

SEQ ID NO: 41432 - DNA, 120 bp, synthetic construct
  source 1..120: mol_type = other DNA
ggccagaggcgaacctcataagacaaaggggaccacgtaggaagtcactgtcctgctctgcatttgaaataagcactgttcagagccccgctgtccagtatggcagccactggccatgtg

SEQ ID NO: 41433 - DNA, 120 bp, synthetic construct
  source 1..120: mol_type = other DNA
gcttcagggtgggcactgtggcttatgcctgtaatcccacactttgggaggctgaagtgggcggacacctgaggtcaggagttcgagaccagcttggccaacatggcaaaaccccgtctt

SEQ ID NO: 41434 - DNA, 120 bp, synthetic construct
  source 1..120: mol_type = other DNA
tcataccactgtactccagcctgggcgacagagactccatcttaaaaaaaaaaaaaaaaaagcttcagtagtgattgattacatgttgagataatattttggacatattagattatacaa

SEQ ID NO: 41435 - DNA, 120 bp, synthetic construct; identical to SEQ ID NO: 11818
  source 1..120: mol_type = other DNA

SEQ ID NO: 41436 - DNA, 120 bp, synthetic construct
  source 1..120: mol_type = other DNA
aagatcaaggctaggtttcaaaaaatagattaaataaaattgtatatgtggataggctattgggcagcactgccataacctacgtactaactgtgagatggggaagaaaaggatgactcc

SEQ ID NO: 41437 - DNA, 120 bp, synthetic construct
  source 1..120: mol_type = other DNA
tcttattgcataacttgtttcaaatgttctgccacaacctcccccagcccagacatattcatgatgttcttttatgattagtcagtcaccacgggtagaatgtgtgttccagtgccacat

SEQ ID NO: 41438 - DNA, 120 bp, synthetic construct
  source 1..120: mol_type = other DNA
tcaggcgatgttacgttggtgtgactggaactattgttatattattaaacggtagaggggccatcctgggcaagagttgatttgcaggttaggttgatgagtcaccgattttgaagctgg

SEQ ID NO: 41439 - DNA, 120 bp, synthetic construct; identical to SEQ ID NO: 11819
  source 1..120: mol_type = other DNA

SEQ ID NO: 41440 - DNA, 120 bp, synthetic construct
  source 1..120: mol_type = other DNA
cgggaggagccaagatggccgaataggaacagctccggtctacagctcccagcgtgagcgacgcagaagacgggtgatttctgcatttccatctgaggtacccggttcatctcactaggg

SEQ ID NO: 41441 - DNA, 120 bp, synthetic construct
  source 1..120: mol_type = other DNA
aaaggggtgacggacgcacctggaaaatcgggtcactcccacccgaatattgcgcttttcagaccggcttaagaaacggcgcaccacgagactatatcccacacctggctcagagggtcc

SEQ ID NO: 41442 - DNA, 120 bp, synthetic construct
  source 1..120: mol_type = other DNA
ccgggaagctcgaactgggtggagcccaccacagctcaaggaggcctgcctgcctctgtaggctccacctctgggggcagggcacagacaaacaaaaagacagcagttacctctgcagac

SEQ ID NO: 41443 - DNA, 120 bp, synthetic construct
  source 1..120: mol_type = other DNA
cctaactgggaggcaccccccagcaggggcacactgacacctcacacggcagggtattccaacagacctgcagctgagggtcctgtctgttagaaggaaaactaacaaccagaaaggaca

SEQ ID NO: 41444 - DNA, 120 bp, synthetic construct; identical to SEQ ID NO: 11820
  source 1..120: mol_type = other DNA

SEQ ID NO: 41445 - DNA, 120 bp, synthetic construct
  source 1..120: mol_type = other DNA
actacgtgaagaatgcagaagcctcaggagccgatgcgatcaactggaagaaagggtatcagcaatggaagatgaaatgaatgaaatgaagcgagaagggaagtttagagaaaaaagaat

SEQ ID NO: 41446 - DNA, 120 bp, synthetic construct
  source 1..120: mol_type = other DNA
ggatattatccaggagaacttccccaatctagcaaggcaggccaacgttcagattcaggaaatacagagaacgccacaaagatactcctcgagaagagcaactccaagacacataattgt

SEQ ID NO: 41447 - DNA, 120 bp, synthetic construct
  source 1..120: mol_type = other DNA
ccatcagactaacagcggatctctcggcagaaaccctacaagccagaagagagtgggggccaatattcaacattcttaaagaaaagaattttcaacccagaatttcatatccagccaaac

SEQ ID NO: 41448 - DNA, 120 bp, synthetic construct; identical to SEQ ID NO: 11821
  source 1..120: mol_type = other DNA

SEQ ID NO: 41449 - DNA, 120 bp, synthetic construct
  source 1..120: mol_type = other DNA
tcacatgcagagacacacataggctcaaaataaaaggatggaggaagatctactaagccaatggaaaacaaaaaaaggcaggggttgcaatcctagtctctgataaaacagactttaaac

SEQ ID NO: 41450 - DNA, 120 bp, synthetic construct
  source 1..120: mol_type = other DNA
agcaagtcctgagtgacctacaaagagacttagactcccacacattaataatgggagactttaacaccccactgtcaacattagacagatcaacgagacagaaagtcaacaaggataccc

SEQ ID NO: 41451 - DNA, 120 bp, synthetic construct; identical to SEQ ID NO: 11822
  source 1..120: mol_type = other DNA

SEQ ID NO: 41452 - DNA, 120 bp, synthetic construct
  source 1..120: mol_type = other DNA
atctctgggacgcattcaaagcagtgtgtagagggaaatttatagcactaaatgcctacaagagaaagcaggaaagatccaaaattgacaccctaacatcacaattaaaagaactagaaa

SEQ ID NO: 41453 - DNA, 120 bp, synthetic construct
  source 1..120: mol_type = other DNA
tttttgaaaggatcaacaaaattgatagaccgctagcaagactaataaagaaaaaaagagagaagaatcaaatagacacaataaaaaatgataaaggggatatcaccaccgatcccacag

SEQ ID NO: 41454 - DNA, 120 bp, synthetic construct; identical to SEQ ID NO: 11823
  source 1..120: mol_type = other DNA

SEQ ID NO: 41455 - DNA, 120 bp, synthetic construct
  source 1..120: mol_type = other DNA
aaaaagagaattttagaccaatatccttgatgaacattgatgcaaaaatcctcaataaaatactggcaaaccgaatccagcagcacatcaaaaagcttatccaccatgatcaagtgggct

SEQ ID NO: 41456 - DNA, 120 bp, synthetic construct
  source 1..120: mol_type = other DNA
acaaaattcaacaacccttcatgctaaaaactctcaataaattaggtattgatgggacgtatttcaaaataataagagctatctatgacaaacccacagccaatatcatactgaatgggc

SEQ ID NO: 41457 - DNA, 120 bp, synthetic construct; identical to SEQ ID NO: 11824
  source 1..120: mol_type = other DNA

SEQ ID NO: 41458 - DNA, 120 bp, synthetic construct
  source 1..120: mol_type = other DNA
taaaatacctaggaatccaacttacaagggatgtgaaggacctcttcaaggagaactacaaaccactgctcaaggaaataaaagaggacacaaacaaatggaagaacattccatgctcat

SEQ ID NO: 41459 - DNA, 120 bp, synthetic construct
  source 1..120: mol_type = other DNA
agttcacatggaaccaaaaaagagcccgcattgccaagtcaatcctaagccaaaagaacaaagctggaggcatcacactacctgacttcaaactatactacaaggctacagtaaccaaaa

SEQ ID NO: 41460 - DNA, 120 bp, synthetic construct
  source 1..120: mol_type = other DNA
ggggaaaggattccctatttaataaatggtgctgggaaaactggctagtcatatgtagaaagctgaaactggatcccttccttacaccttatacaaaaatcaattcaagatggattaaag

SEQ ID NO: 41461 - DNA, 120 bp, synthetic construct; identical to SEQ ID NO: 11825
  source 1..120: mol_type = other DNA

SEQ ID NO: 41462 - DNA, 120 bp, synthetic construct
  source 1..120: mol_type = other DNA
atgcagccaaaaaacacgtgaagaaatgctcatcatcactggccatcagagaaatgcaaatcaaaaccactatgagatatcatctcacaccagttagaacggcagtcattaaaaagtcag

SEQ ID NO: 41463 - DNA, 120 bp, synthetic construct
  source 1..120: mol_type = other DNA
tagaaataccatttgacccagccatcccattactgggtatatacccaaatgagtataagtcatgctgctataaagacacatgcacacgtatgtttattgcggcactattcacaatagcaa

SEQ ID NO: 41464 - DNA, 120 bp, synthetic construct
  source 1..120: mol_type = other DNA
catggatgaaattggaaaccatcattctcagtaaactatcgcaagaacaaaaaaccaaacaccgcatattctcactcataggtgggaattgaacaatgagatcacatggacacaggaagg

SEQ ID NO: 41465 - DNA, 120 bp, synthetic construct
  source 1..120: mol_type = other DNA
tacatatgtaactaacctgcacaatgtgcacatgtaccctaaaacttagagtataataaaaaaaaaaaaaaaaaaaaaaagaaagtcaacaaaggtctgagctacggactcgatgtacct

SEQ ID NO: 41466 - DNA, 120 bp, synthetic construct; identical to SEQ ID NO: 11826
  source 1..120: mol_type = other DNA

SEQ ID NO: 41467 - DNA, 120 bp, synthetic construct
  source 1..120: mol_type = other DNA
gcttttatcaggaacctcgcccttcccaggagacttacctcatttatatggataggaggcagccattccagcctaaagaaacaaaacctttactcatgaaaagtcttcagtttctcctgc

SEQ ID NO: 41468 - DNA, 120 bp, synthetic construct
  source 1..120: mol_type = other DNA
ggaaaggctaattactccaagataactgtgatttcttaatggggagaagaacttggtgggcaaagacctctttagagatgaaggtttctgtcctagtgacaccctgtgtcagcgaggtcc

SEQ ID NO: 41469 - DNA, 120 bp, synthetic construct; identical to SEQ ID NO: 11827
  source 1..120: mol_type = other DNA

SEQ ID NO: 41470 - DNA, 120 bp, synthetic construct
  source 1..120: mol_type = other DNA
agccaatgatgatgagcaaagatggcggacatttttaatggtctggaaatgaagtattaaaattgctattgtcgatgcacctttgtattaatttgttggtgctgctttcatgcacctgat

SEQ ID NO: 41471 - DNA, 120 bp, synthetic construct
  source 1..120: mol_type = other DNA
tatatatatatataaaatcggatataaaatcagagagtaaactgcctcttatagccgcccctcctgcagtcttctgtttccaagttctcagtaccataaggttaacccacgaagccttgg

SEQ ID NO: 41472 - DNA, 120 bp, synthetic construct
  source 1..120: mol_type = other DNA
gctagtgttaagattctttatttgagcaatttaatagggaaagttaggtgtgaatacacgttttcagtctcacctgcagtgtcaggtgatgttaattctttgatctccttgctattatat

SEQ ID NO: 41473 - DNA, 120 bp, synthetic construct
  source 1..120: mol_type = other DNA
aatttttaacaatttccccgacgatttactttctgtaagcccttgcacactttcttctttataaatgtttatagtgacttgttgcccgttcagaattatagcctggccctgcttctggga

SEQ ID NO: 41474 - DNA, 120 bp, synthetic construct; identical to SEQ ID NO: 11828
  source 1..120: mol_type = other DNA

SEQ ID NO: 41475 - DNA, 120 bp, synthetic construct
  source 1..120: mol_type = other DNA
ccctccctcagcacttctagcctttcactcggggatctcatgcagaatttaaaacaaaaaacatgggagggctaagctccttttttgataaattgcagaatgcctctttattccacagtc

SEQ ID NO: 41476 - DNA, 120 bp, synthetic construct
  source 1..120: mol_type = other DNA
aagtatgtctgtgtctttctggggagagaaggagatagtgggctatttacaaacatctgcaggtcttcctttcagagacaacaaagcaaagtgccctttaactgtgctcctctatttctc

SEQ ID NO: 41477 - DNA, 120 bp, synthetic construct; identical to SEQ ID NO: 11829
  source 1..120: mol_type = other DNA

SEQ ID NO: 41478 - DNA, 120 bp, synthetic construct
  source 1..120: mol_type = other DNA
gttctccctgggcctctcttggttctctcactgtccaagtgtgaatgcctccagagtttggtcctcggtcctccatcatctgcccccacattccattctcctctttgaagatctaattca

SEQ ID NO: 41479 - DNA, 120 bp, synthetic construct
  source 1..120: mol_type = other DNA
gctggcttctccactttcatccatgcatctttcattttcctgacttctaatgctcccgctaatgttataaagcagttaacaaggcaatcaggctacataagcagaaatctgtgaatacta

SEQ ID NO: 41480 - DNA, 120 bp, synthetic construct
  source 1..120: mol_type = other DNA
ttataggcagcaaggtgactaggcatgtctagttattcatgaacattaaggttgttattgctttaattcacaagcagagcaagcgttttgggtaacagatggaaaggcgggggaggggta

SEQ ID NO: 41481 - DNA, 120 bp, synthetic construct; identical to SEQ ID NO: 11830
  source 1..120: mol_type = other DNA

SEQ ID NO: 41482 - DNA, 120 bp, synthetic construct
  source 1..120: mol_type = other DNA
ggtctcagagagcctggaataaccttgccgacagagctgtattcccccaaatgctgaataatgataggaaagcaccaaattcacatcggctttttattttcattatttcttattttaaaa

SEQ ID NO: 41483 - DNA, 120 bp, synthetic construct
  source 1..120: mol_type = other DNA
gtcgtgaaatttgaagtgcaacagatattttagtttctctataggcttacgtagtagagtgcatccaattaatatcaatttaaaattgatctccagggatattagggtagtgtttacagt

SEQ ID NO: 41484 - DNA, 120 bp, synthetic construct
  source 1..120: mol_type = other DNA
gttattggttctactattggaaaagttactcttgtcttttggagtcccttccctgttgcataaaataaaatctaccccatcagataaaattcttaacttgctccgcatgtgttaatttcc

SEQ ID NO: 41485 - DNA, 120 bp, synthetic construct; identical to SEQ ID NO: 11831
  source 1..120: mol_type = other DNA

SEQ ID NO: 41486 - DNA, 120 bp, synthetic construct
  source 1..120: mol_type = other DNA
gctcactgcaacctccgcctcccaggctcaagtgatcctcccacttcagcctcccaagaagctgggaccacaggcgtgtgccgctacgcctggctaattttttgtatttttggtggagat

SEQ ID NO: 41487 - DNA, 120 bp, synthetic construct
  source 1..120: mol_type = other DNA
cattttagcctaaggcatgctctgttaatgcctgcattagtttgcctgagctgtcataacaaagtaccacagactcattggcttaaacaacagacatttatttcctcataattctggaag

SEQ ID NO: 41488 - DNA, 120 bp, synthetic construct
  source 1..120: mol_type = other DNA
cctaatctcttcttcttctaagctcactagtcatattggatgagggctcaccctcatttcctcattttaactcagtcacctctttaaaggacctatctccaaatacagtcacattagagc

SEQ ID NO: 41489 - DNA, 120 bp, synthetic construct
  source 1..120: mol_type = other DNA
tgttacctttatcttactatggtgttatgatggggaggaaaggaagggtgctgacctcaacagggagccagcatattgcttaactaatccaagccagggcttgcatggaggatttttatt

SEQ ID NO: 41490 - DNA, 120 bp, synthetic construct; identical to SEQ ID NO: 11832
  source 1..120: mol_type = other DNA

SEQ ID NO: 41491 - DNA, 120 bp, synthetic construct
  source 1..120: mol_type = other DNA
ttgttgtgccagagagttcttctcttttcaggctgcatagaatattttcatggccactgaccttgagaaagcaattctcagcacgcgcaagtgaaaggcaggaggacccctttcacagta

SEQ ID NO: 41492 - DNA, 120 bp, synthetic construct
  source 1..120: mol_type = other DNA
ggagaatagcatcctagccagtcttcactcactgggcttggttttcgtgtgtgtttgtagcaactctgttacatttttttctgtttccaggttcaattccaggtttaggacatactgctc

SEQ ID NO: 41493 - DNA, 120 bp, synthetic construct
  source 1..120: mol_type = other DNA
attcactcttcaagtactatttgaggaggtagatttatttctaatgccagatgcaccaagacatgtttcttttctttgcagcccacagagatgtcaataagcagaaaatggcattcgtat

SEQ ID NO: 41494 - DNA, 120 bp, synthetic construct; identical to SEQ ID NO: 11833
  source 1..120: mol_type = other DNA

SEQ ID NO: 41495 - DNA, 120 bp, synthetic construct
  source 1..120: mol_type = other DNA
agatggtattcaacacaattagttctctgtgcatgctgggttaagtcattggtatttgtgccacccatttggcatttgctggcaccagctgagaactatgtcctgtacctttgaatttag

SEQ ID NO: 41496 - DNA, 120 bp, synthetic construct
  source 1..120: mol_type = other DNA
tggaaattaatgtacatggaagacatgatactccttgactgtacttttttttttccaatcccaagtggcttggggctagccagctgtaaaggcgtgtaaagcatgcatgtctggcatgtt

SEQ ID NO: 41497 - DNA, 120 bp, synthetic construct; identical to SEQ ID NO: 11834
  source 1..120: mol_type = other DNA

SEQ ID NO: 41498 - DNA, 120 bp, synthetic construct
  source 1..120: mol_type = other DNA
caaaagccaggggcattggtgttgtacgtttctttttctaagtttgctaatctatgatttatcattcttccatgtttttgagttcattacttggcttaggattaaaccagggattcagaa

SEQ ID NO: 41499 - DNA, 120 bp, synthetic construct
  source 1..120: mol_type = other DNA
cagccttgtttttgtggtaggtaatcctttctcatagtacttagacagtttaggttaagttgtcatgtgaaggatacaagatatggctcataatatcttaccttcaaaagaggcaaggac

SEQ ID NO: 41500 - DNA, 120 bp, synthetic construct
  source 1..120: mol_type = other DNA
ttccactgtaacaggagaagccttttctattcccgaataacaaaccaaacccacatgggtcccatagatctggacctctcattcttagattaaaaatagctccaaattcatggaaaggca

SEQ ID NO: 41501 - DNA, 120 bp, synthetic construct; identical to SEQ ID NO: 11835
  source 1..120: mol_type = other DNA

SEQ ID NO: 41502 - DNA, 120 bp, synthetic construct
  source 1..120: mol_type = other DNA
tgttcagtctagtactagttcagatatgtccctaagaaatagtgagtcagtaagaggtaaccatctagccacatgattttaaagaaatcagacactgagagtgaaattaaactaaaatgt

SEQ ID NO: 41503 - DNA, 120 bp, synthetic construct
  source 1..120: mol_type = other DNA
ggtaaatagtctaaactggtttagaaaaataagtcatgttccttttagctaatcccagtgtatcccacgtgatgctgaaatgcaaaatgcaagtggaaaacttcagttggtgggagtata

SEQ ID NO: 41504 - DNA, 120 bp, synthetic construct
  source 1..120: mol_type = other DNA
ctgctatgaagaaatacccgagactgaataatttataagaaaagagatttaattgactcacagttccacatggctggggaagcctcaggaaacttacaatcatggcagaaggcacctctt

SEQ ID NO: 41505 - DNA, 120 bp, synthetic construct
  source 1..120: mol_type = other DNA
catgattcaattacctcccactggatccctcccatgctatgtggggattatgggaactacaattcaaggtgagatttgggtggggacacagccaaaccatatcagggccctccatggatg

SEQ ID NO: 41506 - DNA, 120 bp, synthetic construct; identical to SEQ ID NO: 11836
  source 1..120: mol_type = other DNA

SEQ ID NO: 41507 - DNA, 120 bp, synthetic construct
  source 1..120: mol_type = other DNA
cagcaacaggaaactaataaaggaaactaatataggaatataggaaactggcatatactttgggtgtccttggttataaatgactgaatgactgactgtcctccctgaccttcaggtgaa

SEQ ID NO: 41508 - DNA, 120 bp, synthetic construct
  source 1..120: mol_type = other DNA
gtttcaagaggaaggctctgttttgagaagaaggttggcatgaaagttaaaggttcagtagctactatgtcacatgtacagttgacttgagaatattatcccatgtgcattacaaaatat

SEQ ID NO: 41509 - DNA, 120 bp, synthetic construct
  source 1..120: mol_type = other DNA
tgaaggagtgttactattctggaggaagataacaatataggttgaattagatggttaactttgaaaatgtggcttgggacatggactgaatagaaaaaagcctgggatcaaacacccctg

SEQ ID NO: 41510 - DNA, 120 bp, synthetic construct; identical to SEQ ID NO: 11837
  source 1..120: mol_type = other DNA

SEQ ID NO: 41511 - DNA, 120 bp, synthetic construct
  source 1..120: mol_type = other DNA
cctcccgagtagctgggattacaggtgtgcggtgccacacctggctaatttttgtatttttagtagagacggggtttcgccatgttgcccaggctggtctcgaacttctgggctcaagtg

SEQ ID NO: 41512 - DNA, 120 bp, synthetic construct
  source 1..120: mol_type = other DNA
tgttctttaaatcctaaacctgaactctgatttctccttcctctgagtcctatccttgccctttaaattccaggcctgtgctgcctaatgtggcagccaccagccagagcattcctagac

SEQ ID NO: 41513 - DNA, 120 bp, synthetic construct
  source 1..120: mol_type = other DNA
agggttcttggctgagaagatgggaatatgcagagaagagcagagagtcaacaggggatgggttaaaaatggagagatgttttgatagccatatgttcattatttcttttattttgtcct

SEQ ID NO: 41514 - DNA, 120 bp, synthetic construct; identical to SEQ ID NO: 11838
  source 1..120: mol_type = other DNA

SEQ ID NO: 41515 - DNA, 120 bp, synthetic construct
  source 1..120: mol_type = other DNA
tttgtttccttgaaggagaccctctgctatcttctcaggcttggtgtttgctcttatgtgactgtctgtgctattctgccatgtgaaatgtcccatttgaaaccatgttattttaaaata

SEQ ID NO: 41516 - DNA, 120 bp, synthetic construct
  source 1..120: mol_type = other DNA
ccgtggtgtgatttcggctcactgcaacctccgcctcctgggttcaagtgattctcctgcctcagcctcccgagtaactgggattacaggcatgtgccaccatgcccagctattttttgt

SEQ ID NO: 41517 - DNA, 120 bp, synthetic construct; identical to SEQ ID NO: 11839
  source 1..120: mol_type = other DNA

SEQ ID NO: 41518 - DNA, 120 bp, synthetic construct
  source 1..120: mol_type = other DNA
ccacatgtggttattaaattcttaaagtgtgacgcgtttcaccaaggaactggattttacattttatctaattttaattaacccaaatttaaatacccacaggaggcttgcagccacctt

SEQ ID NO: 41519 - DNA, 120 bp, synthetic construct
  source 1..120: mol_type = other DNA
cccatagtgatggtgggctaggggaggagctgagaagaaactgagactttcaggaaaacttgagaatagaaatagagggcagatgatttattcatgacatggagctgcccgggcagtcac

SEQ ID NO: 41520 - DNA, 120 bp, synthetic construct
  source 1..120: mol_type = other DNA
actggaagagagcagtttcatccctgaggacttagacctttgtttctctaggaccacaggctctggatgaagtgatcagccctggatggaggtggaaggagaaataagcattgagcggag

SEQ ID NO: 41521 - DNA, 120 bp, synthetic construct; identical to SEQ ID NO: 11840
  source 1..120: mol_type = other DNA

SEQ ID NO: 41522 - DNA, 120 bp, synthetic construct
  source 1..120: mol_type = other DNA
ggcagtggcgacaggaagagagaaggcaggcagctgggagagcaggcccggagcctctgtttggaagggccagtggggcaggcgagctggcctgactcccttcttcgagtcctccatttc

SEQ ID NO: 41523 - DNA, 120 bp, synthetic construct
  source 1..120: mol_type = other DNA
tatatgtaggaagcctgtggttattgctaataattgccaccaatttattggttctatgggggctcagttgtaccgtagttacactttaacttcctctttctgtaggatctgtaaatgctc

SEQ ID NO: 41524 - DNA, 120 bp, synthetic construct
  source 1..120: mol_type = other DNA
tttttttgggacgggcagggaggatactgtttctccatgcaatctttgaatgcgaacatgcttaataaatattgatggacagaagtgacttaatttttatcaaactcttcacagttttat

SEQ ID NO: 41525 - DNA, 120 bp, synthetic construct
  source 1..120: mol_type = other DNA
tcactgcaagctccacctcctgggttcacgccattctcctgccttagccttccgagtagctgggactacaggcgcccaccaccatgcccagccaattttttgtattttcggtagagacgg

SEQ ID NO: 41526 - DNA, 120 bp, synthetic construct; identical to SEQ ID NO: 11841
  source 1..120: mol_type = other DNA

SEQ ID NO: 41527 - DNA, 120 bp, synthetic construct
  source 1..120: mol_type = other DNA
attttttcctaaaagtgttagagacaacaaagggcagagggcatgtcaaaggtatctaagacaaactttctttattgaatcaactttgtcttggcttcaactgtgaaacttggatgatgt

SEQ ID NO: 41528 - DNA, 120 bp, synthetic construct
  source 1..120: mol_type = other DNA
acaatctggaagttacagaacaaccaccctcccacgtatttacaaaaagtgtaacatttcactgggatcgtgtctgaaagcactctgtagctgaaaagtgctatacaaagccaaagggtt

SEQ ID NO: 41529 - DNA, 120 bp, synthetic construct; identical to SEQ ID NO: 11842
  source 1..120: mol_type = other DNA

SEQ ID NO: 41530 - DNA, 120 bp, synthetic construct
  source 1..120: mol_type = other DNA
cagaaagcaaggtggcatgtagtgggcatgtgataagctactcactgcatggctcaacatggctcaggcaacaactcaggcaagaggattctgcagaaagagagatggatgtcatcagaa

SEQ ID NO: 41531 - DNA, 120 bp, synthetic construct
  source 1..120: mol_type = other DNA
tctcatgcagaggtctggtcttcaaataaatgattctgaaaaattggacttagagactatcacgggaaaatgatgaaggtcatagcctctgggatcctgaaaattgtttgggacttttat

SEQ ID NO: 41532 - DNA, 120 bp, synthetic construct
  source 1..120: mol_type = other DNA
gaaagagtgctgtccaattgccagtctgggaaatctcttcctgggcttgttttgttttgggattaaatcacatggaactcttttcttcagctcatgttgtcatacttgagacactgctat

SEQ ID NO: 41533 - DNA, 120 bp, synthetic construct
  source 1..120: mol_type = other DNA
agactggaaactttgagtacacaggaccacactggtttcagttctaattttcctaagtggctttgctgagggaggcaatatacattggtatatattggtatatatttggcaagggaatat

SEQ ID NO: 41534 - DNA, 120 bp, synthetic construct; identical to SEQ ID NO: 11843
  source 1..120: mol_type = other DNA

SEQ ID NO: 41535 - DNA, 120 bp, synthetic construct
  source 1..120: mol_type = other DNA
ttggagtagagtcccaagagaaagctgtgcagtcgcccatgtgattttagtctattttagtcttgcctgttttttcaaaaccttactgaaattggggttgactaatggcctccttaaaat

SEQ ID NO: 41536 - DNA, 120 bp, synthetic construct
  source 1..120: mol_type = other DNA
aatattccaatgcagtacaggatccaaactatgtccctttggtagagaaataaatagagagtggaattctttagagctgccagattgaccttttccatcaaccactaaactgtctgaaaa

SEQ ID NO: 41537 - DNA, 120 bp, synthetic construct; identical to SEQ ID NO: 11844
  source 1..120: mol_type = other DNA

SEQ ID NO: 41538 - DNA, 120 bp, synthetic construct
  source 1..120: mol_type = other DNA
atcttgtgtaatgcaatcaaagcaactttaattttttggtttctggcaaggaggatatgggcttaagtaaaatactccattgcaccgtttctggggatttatgtttttaaaccaagtata

SEQ ID NO: 41539 - DNA, 120 bp, synthetic construct
  source 1..120: mol_type = other DNA
tcttgacaagtgagtgcccccaatcctgttggcatttgtgctgcaggagtttggttgatcagatttgtattttagataaatatattaggtcacagtttgaatttcaaattgcatgtcctt

SEQ ID NO: 41540 - DNA, 120 bp, synthetic construct
  source 1..120: mol_type = other DNA
tcatctatgaaaatggtgtttaagaccttgaaaatgaagagaatttggaaagccacttgtgccataaaatttctgaacacagaaacgggccagtgattcagtcgatattgattgattggt

SEQ ID NO: 41541 - DNA, 120 bp, synthetic construct; identical to SEQ ID NO: 11845
  source 1..120: mol_type = other DNA

SEQ ID NO: 41542 - DNA, 120 bp, synthetic construct
  source 1..120: mol_type = other DNA
ataatattcagccttaaaaagaaggaaatctgtcatttgtgacaatgtgggtaaacatggtggacatgatgctaagtggaatgagtcacacacagaaagacaaatactgcatgatctcac

SEQ ID NO: 41543 - DNA, 120 bp, synthetic construct
  source 1..120: mol_type = other DNA
gatgaataaattctggagatgattcaatcctgactgaaagagaagtccatgtgatttagagcagactgtgcaaaatattcagcgaggagctgagacggtctcttcccctggcatgtctca

SEQ ID NO: 41544 - DNA, 120 bp, synthetic construct
  source 1..120: mol_type = other DNA
ttttaaagatcatctttcagcagtgagaaggtagtgtgaacggaaaaaaaaaaacccaggaaattcaatatcagcatacatataacatttaagttaattcagcccagctggtcagcagag

SEQ ID NO: 41545 - DNA, 120 bp, synthetic construct
  source 1..120: mol_type = other DNA
catggctcactgcagtctcaacctcccgggctcaagcaatcctcttacctcagcctcccaagtagctgggaccataagtgcacaccaccatgcctggctaatttttaaatttttcgtaga

SEQ ID NO: 41546 - DNA, 120 bp, synthetic construct; identical to SEQ ID NO: 11846
  source 1..120: mol_type = other DNA

SEQ ID NO: 41547 - DNA, 120 bp, synthetic construct
  source 1..120: mol_type = other DNA
gggcagtggaaaaagaaggaagaggtgagtattgagtgctaggcactaatcaagtacttactcatttaatctttccccaaatattatgaggtaggcactattttttttcaccaatttaca

SEQ ID NO: 41548 - DNA, 120 bp, synthetic construct
  source 1..120: mol_type = other DNA
agtatcctcggtgctgcctcagctcctggggctaaggtaaaggctccctcctgccttccaggaccctcctgcctgcccttgttaacttaggttagaaatgggttagcttctatttttctt

SEQ ID NO: 41549 - DNA, 120 bp, synthetic construct; identical to SEQ ID NO: 11847
  source 1..120: mol_type = other DNA

SEQ ID NO: 41550 - DNA, 120 bp, synthetic construct
  source 1..120: mol_type = other DNA
gcaacctccacttcccagattcaagtgattctcctgtctcagcttcctgagcagctaggattacaggcgcccaccaccacacccggctatttctgtatttttagcagagatggggtttca

SEQ ID NO: 41551 - DNA, 120 bp, synthetic construct
  source 1..120: mol_type = other DNA
gggcagttgctgagcaaatagaagccagggcaagaaaggatttatgtgcttgggattcttgaggggttttccagagtcagtccccaattctgatgtttttatacgcaacactaggggtcc

SEQ ID NO: 41552 - DNA, 120 bp, synthetic construct
  source 1..120: mol_type = other DNA
cttggtttgtcaccatgtgatgttgggatggcttgtctttgccgcctcacttcctaagctgacagacgtgtctgctagggaccaccagctcccaagccgcatgacggtgctttccttcaa

SEQ ID NO: 41553 - DNA, 120 bp, synthetic construct; identical to SEQ ID NO: 11848
  source 1..120: mol_type = other DNA

SEQ ID NO: 41554 - DNA, 120 bp, synthetic construct
  source 1..120: mol_type = other DNA
cttttttgtgcaggcacaatatgtagtctctccactattaaggggagcaatctccttagcgcagtggtagatttttttttaacattcttcatctgtatttatttctatttttcattctat

SEQ ID NO: 41555 - DNA, 120 bp, synthetic construct
  source 1..120: mol_type = other DNA
ctcaatcttgtttaaagtacacacgcacataagaagctaattaatagtacaaggcagaatcagttaaatgccacatgggtggcagacagttttataaacaccacccaaacctttatttgt

SEQ ID NO: 41556 - DNA, 120 bp, synthetic construct
  source 1..120: mol_type = other DNA
taccaagtgtacttttcatctctatttctgtttttcactttttcagtcaatcagccacttactatttattaagtatttcttccatctaagcaaggtgggggagggagagaaagagattat

SEQ ID NO: 41557 - DNA, 120 bp, synthetic construct; identical to SEQ ID NO: 11849
  source 1..120: mol_type = other DNA

SEQ ID NO: 41558 - DNA, 120 bp, synthetic construct
  source 1..120: mol_type = other DNA
ggagcaagggatagagagggagtagatcagtctgcctggagttgaggctttgtttacaggcgaggtgctggtgagggtggtggagaggcatccaggaaggttgaaaatatatttctgtag

SEQ ID NO: 41559 - DNA, 120 bp, synthetic construct
  source 1..120: mol_type = other DNA
agtagtaaagtcacagtgggagcccgggaatcaggaaataaacactcagatgttttccttctagttttgatcagctgccctgagagaatgagattttaaaataatttgacaggccggcat

SEQ ID NO: 41560 - DNA, 120 bp, synthetic construct
  source 1..120: mol_type = other DNA
aaattagctgggcatggtggtgtgcacttgtaatcccgctactcgggaggctgaggcaggagaatcgcttgaacctgggaggtggaggttgcagtgagccaagatggcacccctgcactc

SEQ ID NO: 41561 - DNA, 120 bp, synthetic construct
  source 1..120: mol_type = other DNA
ttcagtcgtgttaagtatatgcacaccgttgtgcaacaaatctccgaacagtttcatcttatgaaacagaaactccacgaaaaacaaccaagaacagttttatttgaacccaagggtact

SEQ ID NO: 41562 - DNA, 120 bp, synthetic construct; identical to SEQ ID NO: 11850
  source 1..120: mol_type = other DNA

SEQ ID NO: 41563 - DNA, 120 bp, synthetic construct
  source 1..120: mol_type = other DNA
accaatcctcctgtagcctggtactttgaacctgaagtaagcaacgtgaagaacaggggacaggttagggctacctcaggtgttggtgctgaattatcgtaactgcttctgtgtgtgtct

SEQ ID NO: 41564 - DNA, 120 bp, synthetic construct
  source 1..120: mol_type = other DNA
aatgccatgatctcggctcactgcaacatccacctgccagattcaagtgattctcctgcctcagcctcccgagtagctgggattacaggtgtgtgccaccacatctggctaattttagta

SEQ ID NO: 41565 - DNA, 120 bp, synthetic construct; identical to SEQ ID NO: 11851
  source 1..120: mol_type = other DNA

SEQ ID NO: 41566 - DNA, 120 bp, synthetic construct
  source 1..120: mol_type = other DNA
atgcatcggttcctcatcatttctcctctggaccagcaaggggctttcctctcgcccatccatctcccaccttttcgttttgtaggtagaacctggagggagcggcagtaattcatcatc

SEQ ID NO: 41567 - DNA, 120 bp, synthetic construct
  source 1..120: mol_type = other DNA
aagcatccctcagtagggacaaggctccagctgtccctttcattagggccctgccaaggacgtttcctttgttcagcacctcctcctgcctgcccttaggaccatcttccaaaaaactct

SEQ ID NO: 41568 - DNA, 120 bp, synthetic construct
  source 1..120: mol_type = other DNA
ccaacaccatcgcttaaatgtgctgtgccttttacaattatgtggctttgcaggtgctgttcccttgcctttttttctttgcccggcaaattctactggtttgtcagtcacttctccttt

SEQ ID NO: 41569 - DNA, 120 bp, synthetic construct
  source 1..120: mol_type = other DNA
tttacccagggcactgtacttacttgtatatgtacttctctccccgcctagacccccatctccctacggataggaaaggagtctcctcctcatctttgtaccgagtttgcaagcacagtg

SEQ ID NO: 41570 - DNA, 120 bp, synthetic construct; identical to SEQ ID NO: 11852
  source 1..120: mol_type = other DNA

SEQ ID NO: 41571 - DNA, 120 bp, synthetic construct
  source 1..120: mol_type = other DNA
agcaccgactgtattccacacactcttctaggtgcccgaaatatgctgttaaacaaatactcagccctcatggggctgagagtctggtggggaagacctgttgaaaaacaatcatattaa

SEQ ID NO: 41572 - DNA, 120 bp, synthetic construct
  source 1..120: mol_type = other DNA
gaatgagtggtgattttaaatgtagttatcaggctgggcacaatggcttacacctgtaatcccagcattttggaaggccaagacgggcaggtcacttgaagtcaggagtttgagaccagc

SEQ ID NO: 41573 - DNA, 120 bp, synthetic construct; identical to SEQ ID NO: 11853
  source 1..120: mol_type = other DNA

SEQ ID NO: 41574 - DNA, 120 bp, synthetic construct
  source 1..120: mol_type = other DNA
acaaaaaacatagttatcagagtgggtctctttgagatagtagcagttgagcagcttgaagatagcaggggagttagttcatgggcttccaggcagagggagcagccagtgccagcacca

SEQ ID NO: 41575 - DNA, 120 bp, synthetic construct
  source 1..120: mol_type = other DNA
tgttgagaggactgggctcttgctattacttttagccatatgggagtcattgcaatcctttgagctgaggggtagctcgttctgattttcattctgaaaagacccgtctggccactgtgt

SEQ ID NO: 41576 - DNA, 120 bp, synthetic construct
  source 1..120: mol_type = other DNA
tggcaccgagcagcaggaccctggatatttttttggacatagagccaggaggatttcctcatggttctgatgagggttgagagagagaaggggagtccggatcatcccaaggtttctggc

SEQ ID NO: 41577 - DNA, 120 bp, synthetic construct; identical to SEQ ID NO: 11854
  source 1..120: mol_type = other DNA

SEQ ID NO: 41578 - DNA, 120 bp, synthetic construct
  source 1..120: mol_type = other DNA
ttcctggttcataggcggctgtcttcttgctgtgttgtcacgtgtagaagggacaaaggagctctctgaagtccctttgtaaagggcagtaatcacctcccaaggccccgcctcctaatg

SEQ ID NO: 41579 - DNA, 120 bp, synthetic construct
  source 1..120: mol_type = other DNA
gaaataaaaggctggagggctaaagaaggatgaaccaataaaagtcttataagcattattatgtttactaaaataaaatagaccaacacattaaacaatgacatcaaaacatcaatggac

SEQ ID NO: 41580 - DNA, 120 bp, synthetic construct
  source 1..120: mol_type = other DNA
gaggtcaggagatcgagaccatcctggctaacacggtgaaaccccgtctctactaaaaatacaaaaaattagctggacgtggtggcgggcgcctgtagtcccagctactcaggaggctga

SEQ ID NO: 41581 - DNA, 120 bp, synthetic construct; identical to SEQ ID NO: 11855
  source 1..120: mol_type = other DNA

SEQ ID NO: 41582 - DNA, 120 bp, synthetic construct
  source 1..120: mol_type = other DNA
tcctgcagccttagttctttccagaagcacgtcacacgtgtggcatccacctcccctgcacaggctgggctcctccctccttccctggggttcccctgggcttcacatgccctcatcttc

SEQ ID NO: 41583 - DNA, 120 bp, synthetic construct
  source 1..120: mol_type = other DNA
ttagagctaaccttcctggtggtgctggaaacctctgtggaagctggttcatgtatgcctcaactttgcataacagggaacatgatcctagaatattctttagggtagcatttcccaaat

SEQ ID NO: 41584 - DNA, 120 bp, synthetic construct
  source 1..120: mol_type = other DNA
tggagggatcggaggggcccagtatatgatactcccctttcctgcccagcttctgaatgaattgagacaaaaacaatgactaggacaaatgagaggtcaaaatgtcctcatagaggcttg

SEQ ID NO: 41585 - DNA, 120 bp, synthetic construct
  source 1..120: mol_type = other DNA
cttgcagcctgcagaagctcacaaccaaaacagagaacagggctgagctgcgctgagcagagctctgggattctcttaaatctatcagtcgaaattatttctcctgaggcacataggaag

SEQ ID NO: 41586 - DNA, 120 bp, synthetic construct; identical to SEQ ID NO: 11856
  source 1..120: mol_type = other DNA

SEQ ID NO: 41587 - DNA, 120 bp, synthetic construct
  source 1..120: mol_type = other DNA
caaatgggtttaattttgaagtcagggcttgggattcttgcctttgtgtctatgtatatgtgtgttcaacagaataaccagtgtgaaacctaacctagccgaacataaccggaataacca

SEQ ID NO: 41588 - DNA, 120 bp, synthetic construct
  source 1..120: mol_type = other DNA
tttattttgaaataattacagtcataggttgcaaagaaaaatgtacagggaagtcccatgaatgcttccagtttatattttttgaaattgagaaatataatcttagaagatggtaaagct

SEQ ID NO: 41589 - DNA, 120 bp, synthetic construct; identical to SEQ ID NO: 11857
  source 1..120: mol_type = other DNA

SEQ ID NO: 41590 - DNA, 120 bp, synthetic construct
  source 1..120: mol_type = other DNA
gtcctgcagcagcagtgcaatgtgattgatttcagaaatttaaaaaatatttgctgacactgcactccagcctgggcgacagagcgagactccgtctcaaaaaaaaaaataataataata

SEQ ID NO: 41591 - DNA, 120 bp, synthetic construct
  source 1..120: mol_type = other DNA
ctgtgagggcctttttgctttaaatgtcaccttcatggtgttcagcaatgttcactgagcgtatgacctggctttgtgcaccgagaaaactgcccaaaataacaggtgccacagcttggt

SEQ ID NO: 41592 - DNA, 120 bp, synthetic construct
  source 1..120: mol_type = other DNA
ggtatgaattttctttgtggaatgataggcccatagagttaagttttctctactgctgacttttactcacttaatttttactcaagttcttaaacttgagtgtgcatctgaatcccctgg

SEQ ID NO: 41593 - DNA, 120 bp, synthetic construct
  source 1..120: mol_type = other DNA
gtgcacaatgtgcaggttagttacatatgtatacatgtgtcatgctggtgtgctgcacccattaactcgtcatttagcattaggtatatctcctaatgctatccctcccccctcccccca

SEQ ID NO: 41594 - DNA, 120 bp, synthetic construct; identical to SEQ ID NO: 11858
  source 1..120: mol_type = other DNA

SEQ ID NO: 41595 - DNA, 120 bp, synthetic construct
  source 1..120: mol_type = other DNA
acattctctttggttaattcaaactgaaatattctatttggcatcaactaacatttgcatatttctgggggaccagccactttgctgcaaggtgcttgtatttgttatttaatctctacc

SEQ ID NO: 41596 - DNA, 120 bp, synthetic construct
  source 1..120: mol_type = other DNA
gtcttccttctctctagcttcaacatccttctgaagagcaattgggtcctttgtgaggatgcttcgaggttggaccaagtaaatgaatatctgtttggtaacattgttgacactgctgta

SEQ ID NO: 41597 - DNA, 120 bp, synthetic construct; identical to SEQ ID NO: 11859
  source 1..120: mol_type = other DNA

SEQ ID NO: 41598 - DNA, 120 bp, synthetic construct
  source 1..120: mol_type = other DNA
tgttgtcccagctactcaggagactgtgggaggagaatcgcttgaacctgggaggcggaggttgcagtgagctgaggtcgtgccgctgcactctagcctgggtgacagaatgagactccg

SEQ ID NO: 41599 - DNA, 120 bp, synthetic construct
  source 1..120: mol_type = other DNA
tgggattctctttagtttttgctcatttttgcctatcctgcaagggtaacagaaagctctgagatttggaggtcagacaaacctgtctggctcctgccctgattctgctccttgagggtt

SEQ ID NO: 41600 - DNA, 120 bp, synthetic construct
  source 1..120: mol_type = other DNA
gtttggcaccccagtggcagcccatgcccagcagctgtcattggttgggggtgggtggtgggtgagtgcaccctagtgggtagttggaggattaaatgagatagtatgcaaatagaggag

SEQ ID NO: 41601 - DNA, 120 bp, synthetic construct
  source 1..120: mol_type = other DNA
acacactgtgacctccgcttcccgggttcaagcgattctcctgcctcagcctcctgagtagctgggattacaagcgtccaccaccacgcctggctaattttttgtattttagtagagatg

SEQ ID NO: 41602 - DNA, 120 bp, synthetic construct; identical to SEQ ID NO: 11860
  source 1..120: mol_type = other DNA

SEQ ID NO: 41603 - DNA, 120 bp, synthetic construct
  source 1..120: mol_type = other DNA
gcccacctttccagcccacatatagtaataattatggttttatgtttttagggctccacttttgtttgatttatctccccatgaggatgtaagcctcttaggaatggggatcatgattct

SEQ ID NO: 41604 - DNA, 120 bp, synthetic construct
  source 1..120: mol_type = other DNA
tcagctgatttatccttaatcctgtatctcggttgtttgcttttttatccctaagtgccctaccttgcagagccctggcgtcatataactatttattaaataagcttcacggaacctcaa

SEQ ID NO: 41605 - DNA, 120 bp, synthetic construct; identical to SEQ ID NO: 11861
  source 1..120: mol_type = other DNA

SEQ ID NO: 41606 - DNA, 120 bp, synthetic construct
  source 1..120: mol_type = other DNA
ttctcctgcctcagccccctgagtagctgggattacaggtgtgcgccaccatgcttggctaatttttttgtatttttagtagagatgagttttcaccatgttgaccaggctggtctcgaa

SEQ ID NO: 41607 - DNA, 120 bp, synthetic construct
  source 1..120: mol_type = other DNA
tctcttttagaagactctgtcccattgtcctttaagggcatgtcacttccctggaggtcaaaatcatgtcatactagtttttgcaatccacagctccttgcacaattcctggcccaggga

SEQ ID NO: 41608 - DNA, 120 bp, synthetic construct
  source 1..120: mol_type = other DNA
tacaaggtggaattcagcaggctcacacctattgggtgttagagagatgaacttagatcacatttatttaaacatctctgagtgcagtatttttaaagatcacacaagaataaaactgta

SEQ ID NO: 41609 - DNA, 120 bp, synthetic construct
  source 1..120: mol_type = other DNA
gccttttattctctcagctctttgtgccactagtacatggtcacctgggcatttctttagaaagggtgcagagactttcatttcgtgaaaatatagatgtcccagggaaaaataataatc

SEQ ID NO: 41610 - DNA, 120 bp, synthetic construct; identical to SEQ ID NO: 11862
  source 1..120: mol_type = other DNA

SEQ ID NO: 41611 - DNA, 120 bp, synthetic construct
  source 1..120: mol_type = other DNA
tcttcaccttagcaagtaacactgaattaaagaagtttgtatttcagagtggaagagtacagtataaaatatttgaattcagacactttagagcttggaccctgtcagaagcttggaaat

SEQ ID NO: 41612 - DNA, 120 bp, synthetic construct
  source 1..120: mol_type = other DNA
acttcgattttaaagctgctactcttccatttacctcactccaggaaatccttttagaaatcatactcttgagggaagaagacctaggggatagagcatgactccactgagaaatttaat

SEQ ID NO: 41613 - DNA, 120 bp, synthetic construct; identical to SEQ ID NO: 11863
  source 1..120: mol_type = other DNA

SEQ ID NO: 41614 - DNA, 120 bp, synthetic construct
  source 1..120: mol_type = other DNA
cgtttgttgtaaagattatccaggaaattgggaggagcaaggtagtcatcaccaagtataggacttgagggaggtttccagacctttgaggtccaaattgcaaggaggaggggaaggaag

SEQ ID NO: 41615 - DNA, 120 bp, synthetic construct
  source 1..120: mol_type = other DNA
caccctccaagaggccacacccttctagaggccacgccttcgtggaaaccacacccccccccttgctctgggccagttggcagcccctgctcttggggctggaccactccttcccagaga

SEQ ID NO: 41616 - DNA, 120 bp, synthetic construct
  source 1..120: mol_type = other DNA
ccttaagaaccccagatcagcttgattccaacacaaaggagtaatcaaggcggttgcaaaggaaacaatggcaagtgttttgtgaagcatttttttaagagagtgtgatggaaaattttc

SEQ ID NO: 41617 - DNA, 120 bp, synthetic construct; identical to SEQ ID NO: 11864
  source 1..120: mol_type = other DNA

SEQ ID NO: 41618 - DNA, 120 bp, synthetic construct
  source 1..120: mol_type = other DNA
tgatgttaacaaattgccctatttggtcttagtggattgtttaattccttactctgaacaatacatttcttgtgttttcttatcaaatggctgaaatatgaaagaatgtgtggacccata

SEQ ID NO: 41619 - DNA, 120 bp, synthetic construct
  source 1..120: mol_type = other DNA
attagaatctgaatatcttttatttaagaattgtaattctttctgagtggctttgcgagccttctttgtggatccttgtgaatccctgcagggaggggagagcaggtgccatcttgtcct

SEQ ID NO: 41620 - DNA, 120 bp, synthetic construct
  source 1..120: mol_type = other DNA
tcttcatttaaggatttactctgtgccagaaactgtggtcaggcattggagagtcacagctggctaagacaccttgcctgccttccaggatgttctcgtctcatgcaggaggcagacata

SEQ ID NO: 41621 - DNA, 120 bp, synthetic construct; identical to SEQ ID NO: 11865
  source 1..120: mol_type = other DNA

SEQ ID NO: 41622 - DNA, 120 bp, synthetic construct
  source 1..120: mol_type = other DNA
ttttgttctattcaggccctgaatggattggctgatgcccacccacattaggtagggcagtctcctttactgagttcaccaattcacatgctaatctaatctggaaacacccatacagac

SEQ ID NO: 41623 - DNA, 120 bp, synthetic construct
  source 1..120: mol_type = other DNA
caataaccttggtgtgtgtgggttgagaaaggcctgtgtcatggaaggctgtgtctttgagggcaagtagaagcttcttaaataaaaaagatgatggagaaggaagacaggatagcaaat

SEQ ID NO: 41624 - DNA, 120 bp, synthetic construct
  source 1..120: mol_type = other DNA
gaaagaccttctccattacgctaagggattctgacccatttctctaggtggggaggtcagtggaggtttataaacagaggaaaatgtcatgttgtataccatataaatatggtcgtaatt

SEQ ID NO: 41625 - DNA, 120 bp, synthetic construct; identical to SEQ ID NO: 11866
  source 1..120: mol_type = other DNA

SEQ ID NO: 41626 - DNA, 120 bp, synthetic construct
  source 1..120: mol_type = other DNA
tctcttctcttctcttctcttctcttctcttctcttctcttctcttctcttctctgttctgagacagagtctccctctgttgcccaggctggagtgcaatggcacaatctcggctcactg

SEQ ID NO: 41627 - DNA, 120 bp, synthetic construct
  source 1..120: mol_type = other DNA
ccatgttggccaggctggcctcgaattcctgacctcaggtgatccattctcctcagcctcccaaagtgttgggattacaggcgtgagccactgagcccagctgattgtttcaatcaattt

SEQ ID NO: 41628 - DNA, 120 bp, synthetic construct
  source 1..120: mol_type = other DNA
gattgaaatttattacgtctttgagaatttttttttggagaattggagtttttcaggtacatctgaaacttgaggtacaccataaaaaatgatagttcttcccactcaccttacagaaag

SEQ ID NO: 41629 - DNA, 120 bp, synthetic construct; identical to SEQ ID NO: 11867
  source 1..120: mol_type = other DNA

SEQ ID NO: 41630 - DNA, 120 bp, synthetic construct
  source 1..120: mol_type = other DNA
gcatgatttggctcactgcaacctccgcctcccggattcaagcgattctcctgcctcagcctcccgagtagctgggactacaggcatggaccaccacgcctgtagtgataccatgtttag

SEQ ID NO: 41631 - DNA, 120 bp, synthetic construct
  source 1..120: mol_type = other DNA
gacctaattcacgtgaaaaaggaaaaaccccttgtgcaaaaaaaatgaattttagaatgaaaccattctgactgggtgaagaagtctatttctaatgtggggggtatgggctgaatgatg

SEQ ID NO: 41632 - DNA, 120 bp, synthetic construct
  source 1..120: mol_type = other DNA
gaggtaatgaagttaaagtgaggtcattaggttgggtcttaatccaatagactggtgtccttagaagatgaggaagagacaccgggagggtgtgtgcacagaggcaaggctgtatgagga

SEQ ID NO: 41633 - DNA, 120 bp, synthetic construct
  source 1..120: mol_type = other DNA
tcagtcagtctgtggtacttggttaagatggtcagagcaaactgctacagtaattgggaaaactgcatgtgtgtgtgtgcatgtgtgtgcgtgtgtgtgcgtatgctctcatcttggtgc

SEQ ID NO: 41634 - DNA, 120 bp, synthetic construct; identical to SEQ ID NO: 11868
  source 1..120: mol_type = other DNA

SEQ ID NO: 41635 - DNA, 120 bp, synthetic construct
  source 1..120: mol_type = other DNA
atgggaaggtcttggtattgataccacatctctgccttgaccttcaatcactgcatctcatctctgatcacttttcttcagctttggtctttagttacaacattcatgcaattaagtgat

SEQ ID NO: 41636 - DNA, 120 bp, synthetic construct
  source 1..120: mol_type = other DNA
taccatgtgatgtttattttatgatctctggagtcagaccactgggttttaactcctgtctcctcagtttgctttatatcacttagcaaatttgtcagcttcctgaccctcagtttcatt

SEQ ID NO: 41637 - DNA, 120 bp, synthetic construct; identical to SEQ ID NO: 11869
  source 1..120: mol_type = other DNA

SEQ ID NO: 41638 - DNA, 120 bp, synthetic construct
  source 1..120: mol_type = other DNA
caaagctgttctgagtctgaaaagagacaatgcctgggaagtatttaataggggcccagaattttctaagtgatcaataaatggtgacgataaaatgtgcagagtcaagatgggtatgat

SEQ ID NO: 41639 - DNA, 120 bp, synthetic construct
  source 1..120: mol_type = other DNA
aggtttgtggtgaggctgaaatgtgctttgtggggctttgtatcgctttgtattatggtggtggcggttttcccctgacatagctctctaggatatgtaatggtaaaggatgaataaggg

SEQ ID NO: 41640 - DNA, 120 bp, synthetic construct
  source 1..120: mol_type = other DNA
cctcctgaggctgtgggttgcatccaagagaatgaccttcctcgacagaggagggcagctctccaggaaaagaaatgggaggaacttccttcttctgctggaacccccaactacaggttt

SEQ ID NO: 41641 - DNA, 120 bp, synthetic construct; identical to SEQ ID NO: 11870
  source 1..120: mol_type = other DNA

SEQ ID NO: 41642 - DNA, 120 bp, synthetic construct
  source 1..120: mol_type = other DNA
ctggcactttccaaaaaattcttccattcagataaaaagagagagcactcaactccttttacctcctgttttcttgatcgaggagaaagctgtttacagtaaaaatgtatttgcaagaga

SEQ ID NO: 41643 - DNA, 120 bp, synthetic construct
  source 1..120: mol_type = other DNA
ctaggattttccccaaattattagaagacattgctggaccattgtcattagccattgaggagctgtagagaaagagggagatgtaatagaggcagagatccgaattctagtagctgtaga

SEQ ID NO: 41644 - DNA, 120 bp, synthetic construct
  source 1..120: mol_type = other DNA
tgggttccttggggcaggcatggcgggtgacctcgtgggtttgtaaatagcatcactatgctagaagcattagtggaatgttgtagatatgggatataaaaatttagatgtggtgtattt

SEQ ID NO: 41645 - DNA, 120 bp, synthetic construct
  source 1..120: mol_type = other DNA
tggttggtgatttgagagtagaggtcacccttgaggaacacctgccttacctgttttgggctcaacattttttatcagtgtcctgaataaggaccatagataataggcttataaaatttg

SEQ ID NO: 41646 - DNA, 120 bp, synthetic construct; identical to SEQ ID NO: 11871
  source 1..120: mol_type = other DNA

SEQ ID NO: 41647 - DNA, 120 bp, synthetic construct
  source 1..120: mol_type = other DNA
ttgaggccaggagtttgagaccagcctggccaacatggtgaaaccccgtttctactaaaaatagaacaatcagccaggcgtggtggcctacgcctgtaatcccagctacttgggaggctg

SEQ ID NO: 41648 - DNA, 120 bp, synthetic construct
  source 1..120: mol_type = other DNA
acaaacaaacaaaacttaaactctatgatcctaagtaaaagataagagaagcagttaactaacttccttttagttaggtactccagggtactactttttgtgatggcagacacacttaag

SEQ ID NO: 41649 - DNA, 120 bp, synthetic construct
  source 1..120: mol_type = other DNA
tggactctgagatgaaaagacatgtatatcttcttgaagttatatagttagcaaatgtaaaggctataggggtggattgtgtattatgcaactgctaaacactgtcttgcaatttgtgtg

SEQ ID NO: 41650 - DNA, 120 bp, synthetic construct; identical to SEQ ID NO: 11872
  source 1..120: mol_type = other DNA

SEQ ID NO: 41651 - DNA, 120 bp, synthetic construct
  source 1..120: mol_type = other DNA
tgagaccagctcaggcaacatagcaagacctagtctctacaaaaaaataggaaaattagctagatgtggtggtgcgtgtctgtagtcccagctactaggaggctggggtgcgaggatcac

SEQ ID NO: 41652 - DNA, 120 bp, synthetic construct
  source 1..120: mol_type = other DNA
tttctcctttgatcctatcagtcactattttttttttttttttttttttttttttgagacggagtctcgctctgtcgcccaggccggactgcggactgcagtggtgcaatctcggctcac

SEQ ID NO: 41653 - DNA, 120 bp, synthetic construct
  source 1..120: mol_type = other DNA
tcaccttgttagccaggatggtctcgatctcctgacctcatgatccacccgcctcggcctcccaacagtcactatttttaaagcaatgctctggcagagactgaatacacgtttaatgct

SEQ ID NO: 41654 - DNA, 120 bp, synthetic construct; identical to SEQ ID NO: 11873
  source 1..120: mol_type = other DNA

SEQ ID NO: 41655 - DNA, 120 bp, synthetic construct
  source 1..120: mol_type = other DNA
cccttctgtagtagtttcacagttgaccattcggtatctgcttgattaccttcagaaacagagagcccactgtgttagttttttattgttgctataatacattaacacatatttcatggc

SEQ ID NO: 41656 - DNA, 120 bp, synthetic construct
  source 1..120: mol_type = other DNA
gttggcagaactacatttctttctgaaggttctaggagagaatccgttttcatgcctttttcagttcctagaggttgttagcattccggggccagctatggaggtcatgccattccatct

SEQ ID NO: 41657 - DNA, 120 bp, synthetic construct
  source 1..120: mol_type = other DNA
atcacgctgacccacaagtcttctgcttcttctatctgcaaccttaaccctcccttgacagggaaggtaacattcacagggtctagaaattatgatgtgggcccttttttttggtggggg

SEQ ID NO: 41658 - DNA, 120 bp, synthetic construct; identical to SEQ ID NO: 11874
  source 1..120: mol_type = other DNA

SEQ ID NO: 41659 - DNA, 120 bp, synthetic construct
  source 1..120: mol_type = other DNA
gcttggtggttgccagaaagagggtaacaatgagttttgaataaagagccgagaagtatctgtaagatacgaaactggtggatatcttagttgcactgtgcttacttggtcactgtggag

SEQ ID NO: 41660 - DNA, 120 bp, synthetic construct
  source 1..120: mol_type = other DNA
tttggtgtgctgcctgtgactctcatccacagaggggaaagaactaagcaaagggatgacttaacaaaagctgttttgctaaaaaaaaaaaaaaagcagacttatagatccttactgctt

SEQ ID NO: 41661 - DNA, 120 bp, synthetic construct
  source 1..120: mol_type = other DNA
aaggaattacataaaaatattaacgtcattgtttttgtgctaagttcctcaaatgcgttctaaatattaaactgaatgaaaaaatcagtgtagacagtttttcaaattaaagttctttgt

SEQ ID NO: 41662 - DNA, 120 bp, synthetic construct; identical to SEQ ID NO: 11875
  source 1..120: mol_type = other DNA

SEQ ID NO: 41663 - DNA, 120 bp, synthetic construct
  source 1..120: mol_type = other DNA
ctgtctctactaaaaatacaagaattagccaggcatggtggcgggcgcctgtaatcccagctactcgggaggctgacgcaggagaatcgcttgaaccagggaggcagaggttgcagtgag

SEQ ID NO: 41664 - DNA, 120 bp, synthetic construct
  source 1..120: mol_type = other DNA
ctgtccttccagggaacttgctatgagagtaattggtgacagtcttcagctatggaggtcatgccaaacctaccgtctactggggctgcccccagctgatgactgggcatggtgagggga

SEQ ID NO: 41665 - DNA, 120 bp, synthetic construct; identical to SEQ ID NO: 11876
  source 1..120: mol_type = other DNA

SEQ ID NO: 41666 - DNA, 120 bp, synthetic construct
  source 1..120: mol_type = other DNA
tttttttaaatttattttttattgataattcttgggtgtttctcacagagggggatttggcagggtcataggacaatagtggagggaaggtcagcagataaacaagtgaacaaaggtctc

SEQ ID NO: 41667 - DNA, 120 bp, synthetic construct
  source 1..120: mol_type = other DNA
agcacatcttgcaccgcccttaatccatttaaccctgagtggacacagcacatgtttcagagagcacagggttgggggtaaggtcacagatcaacaggatcccaaggcagaagaattttt

SEQ ID NO: 41668 - DNA, 120 bp, synthetic construct
  source 1..120: mol_type = other DNA
tttccccacctttcccgcctttctattccacaaagccgccattgtcatcctggcccgttctcaatgagctgttgggtacacctcccagacagggtggtggccgggcagaggggctcctca

SEQ ID NO: 41669 - DNA, 120 bp, synthetic construct
  source 1..120: mol_type = other DNA
ctgacccccccacctccttcccggacggggcggctggccgggcggggggctgatgcccccacctccctcccggacggggcggctggcctggcggggggctgaccccccccacctccctcc

SEQ ID NO: 41670 - DNA, 120 bp, synthetic construct; identical to SEQ ID NO: 11877
  source 1..120: mol_type = other DNA

SEQ ID NO: 41671 - DNA, 120 bp, synthetic construct
  source 1..120: mol_type = other DNA
gcggccaggcagagatgctcctcacttcccagatggggtggcggccgggcagaggctgcaatctcggcactttgggaggccaaggcaggcggctgggaggtggaggttgtagcgagccga

SEQ ID NO: 41672 - DNA, 120 bp, synthetic construct
  source 1..120: mol_type = other DNA
accggcctggccaacacagcgaaaccctgtctccaccaaaaccagtcaggcgtggcggcacgagcctgcgatcgcaggcactcggcaggctgagtcaggagaatcaggcagggaggttgc

SEQ ID NO: 41673 - DNA, 120 bp, synthetic construct
  source 1..120: mol_type = other DNA
gaatttttaaatcccttcagaaagttgttcaatttccctctgccagtgatagcaaagaaggtggtatagctagagtagggtgaataagggagtgagtggtaagagatcagagagaggtgg

SEQ ID NO: 41674 - DNA, 120 bp, synthetic construct
  source 1..120: mol_type = other DNA
ttgagcagaagagtgacatgatctcagttacattttagtaaggccaccgtggctgccagaatagactgaatggcagggattgggaggtcgggatgggaaggaccaaaatacaatcacaga

SEQ ID NO: 41675 - DNA, 120 bp, synthetic construct; identical to SEQ ID NO: 11878
  source 1..120: mol_type = other DNA

SEQ ID NO: 41676 - DNA, 120 bp, synthetic construct
  source 1..120: mol_type = other DNA
ttttgacttgttaagtttgaaatacattttagacattcaagggcaaatggagaacaggtagttggacatctgactactttctgccacccccactacaaccttcccagcccaaggcactgc

SEQ ID NO: 41677 - DNA, 120 bp, synthetic construct
  source 1..120: mol_type = other DNA
acgcaacagctagagttagttccttgaaaatataagtcagacttctgcttcatgtattgatggactaggcattttggacacatattcctgttgaaggcaaccaagaagcccagataaagt

SEQ ID NO: 41678 - DNA, 120 bp, synthetic construct; identical to SEQ ID NO: 11879
  source 1..120: mol_type = other DNA

SEQ ID NO: 41679 - DNA, 120 bp, synthetic construct
  source 1..120: mol_type = other DNA
ctattcagccataaaaaagaatgaaattctgtcattcttggcaacatgaatgaactatgaggacattatgctaagagaaataagccaagcatctgaagaaaagtgccacacatcatctca

SEQ ID NO: 41680 - DNA, 120 bp, synthetic construct
  source 1..120: mol_type = other DNA
aagtttcagttagatagtatgaataagttgtgaataagttctggagatctattgtacagcatggtgactatagttaatgtatgcttgagaattgctaagagagtagatcttaaacattct

SEQ ID NO: 41681 - DNA, 120 bp, synthetic construct
  source 1..120: mol_type = other DNA
ttgtgaattatacctttataaaactgggggaagagtaaaaaagagagtatggaggaaaatgtgaaattcaaagctagctaaggggttatcctctgtgtttgggattggttccctagagaa

SEQ ID NO: 41682 - DNA, 120 bp, synthetic construct; identical to SEQ ID NO: 11880
  source 1..120: mol_type = other DNA

SEQ ID NO: 41683 - DNA, 120 bp, synthetic construct
  source 1..120: mol_type = other DNA
aaaaaaaaagtcatctcactaactgacagtagactaaggtgatcctggattatgatcaggcatctagcagaagtaaatgttaattttctctagagaaagataacatcgccatatgcctca

SEQ ID NO: 41684 - DNA, 120 bp, synthetic construct
  source 1..120: mol_type = other DNA
aaaggaattctgagaaagtctcatctctgagacagtcacacagggctgtctaagactgaggctagggtaagagaagtgagaaactctcctgtctccactctgagctttacaccaagtaaa

SEQ ID NO: 41685 - DNA, 120 bp, synthetic construct
  source 1..120: mol_type = other DNA
ggcctcacactaagcccaagataatgacagttccccctgggaggaatttgaagtctgtggaacactgaaggcaacttcctgtagttacaaaactcaaacccagtttaactgtatactaga

SEQ ID NO: 41686 - DNA, 120 bp, synthetic construct; identical to SEQ ID NO: 11881
  source 1..120: mol_type = other DNA

SEQ ID NO: 41687 - DNA, 120 bp, synthetic construct
  source 1..120: mol_type = other DNA
tcaggagaggtatgaaaactgtaaaagtgaatcaactagaaatgctagaattggaaaacataatatcaaagatgaagaattgttttgacaggatggtagctagcctctaagatggcctgt

SEQ ID NO: 41688 - DNA, 120 bp, synthetic construct
  source 1..120: mol_type = other DNA
gatcctcccacctcagcctccagagtagctggcactactggcatgcactaccatgtttggctgatttttaaaaaaatgtgtatgtaggtggggacgccctacgttgcccaggctggtctc

SEQ ID NO: 41689 - DNA, 120 bp, synthetic construct
  source 1..120: mol_type = other DNA
tagggttggtctgtgtaaccaaaagaatattgcaaaaatgactgtgtaatttctgaagcaacattgtaaaatatattgtggcctttgccttgctctctgtttggtgacacgttctgaagg

SEQ ID NO: 41690 - DNA, 120 bp, synthetic construct
  source 1..120: mol_type = other DNA
aactaggactacatgagtgagtcatcttggaggaagatcctccagctctagcaagtcctttaggtggttgcagtcctggatgactccatattggtagtaatgtcatggcagatcatgagc

SEQ ID NO: 41691 - DNA, 120 bp, synthetic construct; identical to SEQ ID NO: 11882
  source 1..120: mol_type = other DNA

SEQ ID NO: 41692 - DNA, 120 bp, synthetic construct
  source 1..120: mol_type = other DNA
ggcaacaaatcacatatccaagaagcttagagaacctcaggcagggtaagtacattgagagtaaggattgggaaaatgtcgaagtgttaaggagagaagaaacctgaaattgcatgggat

SEQ ID NO: 41693 - DNA, 120 bp, synthetic construct
  source 1..120: mol_type = other DNA
agagagggtaggcactgaggaagcatgcaagggagatctgtgatgatggctgattgacatgctctgggtaatgaaagaagtgaggacttcagaggagacagcgtgggttgggagacagtg

SEQ ID NO: 41694 - DNA, 120 bp, synthetic construct; identical to SEQ ID NO: 11883
  source 1..120: mol_type = other DNA

SEQ ID NO: 41695 - DNA, 120 bp, synthetic construct
  source 1..120: mol_type = other DNA
aggagggagggttgagttatttgttggaagttgagaggtctagtagtcccactcatttggaatgtctttattgtaatttatgcacaagaagaaaacatatagatactgtatggtcaagat

SEQ ID NO: 41696 - DNA, 120 bp, synthetic construct
  source 1..120: mol_type = other DNA
gatcatgaggtcagaagttcaagaccagcctgaccaacatggtgaaaccccgtctctactaaaaatacaaaattagctgggcatggtggcacattcctgtaatcccagctactcaggagg

SEQ ID NO: 41697 - DNA, 120 bp, synthetic construct
  source 1..120: mol_type = other DNA
agtgggagtcatcccttagttaggaaaggtatgaaaacttgcacccttttggttgtccacgtttccgttggtggttattggaggtgttcccttgggtctgaagtaccaagctcactagga

SEQ ID NO: 41698 - DNA, 120 bp, synthetic construct; identical to SEQ ID NO: 11884
  source 1..120: mol_type = other DNA

SEQ ID NO: 41699 - DNA, 120 bp, synthetic construct
  source 1..120: mol_type = other DNA
gggatgtcttatatggcagcaggcaagagagagcttgtgcagggaaactcccccttataaaatcatcagatctcatgaaacttattcactatcacaagaacagcatgggaaagacctgcc

SEQ ID NO: 41700 - DNA, 120 bp, synthetic construct
  source 1..120: mol_type = other DNA
atagaatttaatacttcctttcaaagcaagtggtcaaaggtcaaaatatttgattctatcataatcaagtgccagggattgttgtaagcaatctattaacttccttaattcccaaaacac

SEQ ID NO: 41701 - DNA, 120 bp, synthetic construct
  source 1..120: mol_type = other DNA
ctgtatgatcctgtgcctcatggtgggaggaaaaatggacatggaatagaaccatgctgataactcgaaaatgcagccagaatctagaaaacataaaacttgggtcagtttcatttaaca

SEQ ID NO: 41702 - DNA, 120 bp, synthetic construct; identical to SEQ ID NO: 11885
  source 1..120: mol_type = other DNA

SEQ ID NO: 41703 - DNA, 120 bp, synthetic construct
  source 1..120: mol_type = other DNA
cagtggcacgatctcggctcactgcaagctccgcctcccaggttcacgccattctcctgcctcagcctcctgagtagctgggactgcaggcacccgccaccacacctaattttttttttt

SEQ ID NO: 41704 - DNA, 120 bp, synthetic construct
  source 1..120: mol_type = other DNA
ccgcgcccggcccccctcgttggttttaactgtgtgtattttacaatgagttttcacttgtagcttattgaaggtctgtcattgtgatagatttgtcttttgtacagcttttgctttcac

SEQ ID NO: 41705 - DNA, 120 bp, synthetic construct
  source 1..120: mol_type = other DNA
attgtgatagatttgtcttttgtacagcttttgctttcacacatggcatctatgtggatacctctagagaatctttcctatgctgaatgcagccttttgagtggacgatgtgaagccaag

SEQ ID NO: 41706 - DNA, 120 bp, synthetic construct
  source 1..120: mol_type = other DNA
cccactcatttcccactgctgttgtgcaggaaagccactttgcttcccttcttcttcagatcctcttcactggctgttgagaaggagagatgcatataattaccaacataacttgagtgt

SEQ ID NO: 41707 - DNA, 120 bp, synthetic construct
  source 1..120: mol_type = other DNA
cattgccatgtaaagggcaagtgatgtggactgagaccaccataatgcaggtcttcttggaaaagtatctaatgcaaggcagagttgcataaggggctgaataaccctgggttattctta

SEQ ID NO: 41708 - DNA, 120 bp, synthetic construct; identical to SEQ ID NO: 11886
  source 1..120: mol_type = other DNA

SEQ ID NO: 41709 - DNA, 120 bp, synthetic construct
  source 1..120: mol_type = other DNA
gatctttctagaccaggctgtgtatgggaaggggaatattggcaagagggagaaggttttcctgttcaagcatactacaatgggaaagcaaagttatgtttcttagtacatcaacagtta

SEQ ID NO: 41710 - DNA, 120 bp, synthetic construct
  source 1..120: mol_type = other DNA
tggccaacatggtgaaaccccatctctactaaaaatacaaaaaattagctgggcatggcggcgagtacctgtaatcccagctactcaggaggctgaggcaggagaattgcttgaaccaag

SEQ ID NO: 41711 - DNA, 120 bp, synthetic construct
  source 1..120: mol_type = other DNA
tcccgtagccagtggctctaccatactgttcatgggctatactatggactttgcaaaagtttactttacttcatgaatcatccagtaacatgatttgtgtgtatgtgtgtggtcctcatt

SEQ ID NO: 41712 - DNA, 120 bp, synthetic construct; identical to SEQ ID NO: 11887
  source 1..120: mol_type = other DNA

SEQ ID NO: 41713 - DNA, 120 bp, synthetic construct
  source 1..120: mol_type = other DNA
aggcgtgaacctgagggttgtgcttcgtttagacttgacaagaatgtcaaagagtttatgatcttgcaataaatgtaattttccgtaaattggtagcaaatgatgtttctcgaaggggag

SEQ ID NO: 41714 - DNA, 120 bp, synthetic construct
  source 1..120: mol_type = other DNA
tgaataagtaggaaggatcaaaggaagataattctactctttatttgtcatctttagattgattttaagtaatttttttgtaaggcaaagatctctcatttaatactgataagttgcgtg

SEQ ID NO: 41715 - DNA, 120 bp, synthetic construct; identical to SEQ ID NO: 11888
  source 1..120: mol_type = other DNA

SEQ ID NO: 41716 - DNA, 120 bp, synthetic construct
  source 1..120: mol_type = other DNA
gcctcaggctcctgagtagctggaattgcaggcgtgtgccaccgtgcccggctaatttttgtattttttggtagaaacgaggttttgccatgttgcccaggctggtcttgaactcctgag

SEQ ID NO: 41717 - DNA, 120 bp, synthetic construct
  source 1..120: mol_type = other DNA
ttgttcttgttcatttagttctgctagaaagaaccatggcctaggagacaagagactgtgattatttttattctccagctcaatctagttttgtcatttaaagtctcggggcttattttc

SEQ ID NO: 41718 - DNA, 120 bp, synthetic construct
  source 1..120: mol_type = other DNA
aagttcagatgtatacagtttactcattataaagtcaacaaatgagaacacattgacatgctggcagtattcagcatgtaaacatttggaatctggagtcccctagcttaaaagtaattc

SEQ ID NO: 41719 - DNA, 120 bp, synthetic construct; identical to SEQ ID NO: 11889
  source 1..120: mol_type = other DNA

SEQ ID NO: 41720 - DNA, 120 bp, synthetic construct
  source 1..120: mol_type = other DNA
cacaaaaacttgctcatgaatgttcctagcagcattattcagccaaaaagtgaaaacaactcaaatgtccatcagttaatgagtggatgagcatgatatgctgtatccatacaatggaat

SEQ ID NO: 41721 - DNA, 120 bp, synthetic construct
  source 1..120: mol_type = other DNA
ctgatatgaaatatccagaataggcaaatctataaaggcagaaagtagatgagtggctgtcaggggctaaaggcagtgggaggattgggtggctaagggatgcagagttccttttttggg

SEQ ID NO: 41722 - DNA, 120 bp, synthetic construct
  source 1..120: mol_type = other DNA
gatcatagtcttacatgatattaagtagggagtgagtggtagagaggaaagatcctgttcctgagaagaagataccatgacaatatctctgtgagaggtacttggtgtctatctcatggg

SEQ ID NO: 41723 - DNA, 120 bp, synthetic construct; identical to SEQ ID NO: 11890
  source 1..120: mol_type = other DNA

SEQ ID NO: 41724 - DNA, 120 bp, synthetic construct
  source 1..120: mol_type = other DNA
ctaacacatttgaatgtgtatgtttctgtaagaagagttttgataagttcgaaatctaaaaaaagaaatcagaatgaagtgttcatggaaccctgaagcaccgttgcagaacagtttgta

SEQ ID NO: 41725 - DNA, 120 bp, synthetic construct
  source 1..120: mol_type = other DNA
atatctgtttatcagctttcatccaaaagacttgatggattgatttctgatatgtgccatcttggtagggtaattattgtgcttgattatttagacagtagagcttaaaattaactttag

SEQ ID NO: 41726 - DNA, 120 bp, synthetic construct
  source 1..120: mol_type = other DNA
cacaacactgatgccccaattgggggtgtctgaaataccccagcacaaaatccatttactcacagaacttatttatgttctccttataaaattggagacaataaaggcttaattagggat

SEQ ID NO: 41727 - DNA, 120 bp, synthetic construct
  source 1..120: mol_type = other DNA
ttgttcctggggaagtggattaattattataagcttactctgaaccattacaggtgtctttgacttaccttggaccataggatttctctggagtatctgcataaagtccatctataatac

SEQ ID NO: 41728 - DNA, 120 bp, synthetic construct; identical to SEQ ID NO: 11891
  source 1..120: mol_type = other DNA

SEQ ID NO: 41729 - DNA, 120 bp, synthetic construct
  source 1..120: mol_type = other DNA
taggaatggaattgctcagaaatagagcatgcacatattttgtttctttttcttgtctggctgtagctgctagaatttctagtaccatggtttatagaaacaatgttggtaggtgtccat

SEQ ID NO: 41730 - DNA, 120 bp, synthetic construct
  source 1..120: mol_type = other DNA
gagaatttttatcgtaaatgatggttgaattttttcaaattccttttcagacaacttgttttgatccagtcctctgagatcttcctaatgaggcgtcccccaaattgcctatcatctcat

SEQ ID NO: 41731 - DNA, 120 bp, synthetic construct; identical to SEQ ID NO: 11892
  source 1..120: mol_type = other DNA

SEQ ID NO: 41732 - DNA, 120 bp, synthetic construct
  source 1..120: mol_type = other DNA
gcctacagtgtgtgtgcaatggaactctttttgctatgttcccggatcctctccaggatgtttgggttctcagaaacaccttcttcttggctgggcactatggccttggttcaccacttg

SEQ ID NO: 41733 - DNA, 120 bp, synthetic construct
  source 1..120: mol_type = other DNA
cacttgtgggatttgcaaacaacagatcccttcttacagccagccaatcagatatattcttacctaagtggctcctcactggagatgccttatgaccaggtggggcccccattgccctga

SEQ ID NO: 41734 - DNA, 120 bp, synthetic construct
  source 1..120: mol_type = other DNA
gccccgctctgtcctatttctcatgttcttatgctgaagagtttgccaggagcttgtatgaaactgaagtgctagagtctgttattcatggacaaaaaggggaatgctgtatttttggta

SEQ ID NO: 41735 - DNA, 120 bp, synthetic construct
  source 1..120: mol_type = other DNA
catttatctaaggtaaatttgaagaacacttctggggcttgggtccctgggaaggaagcaatatggtaggataaaggagaatacccagtaatctggggtgtaccacagggcatggaggaa

SEQ ID NO: 41736 - DNA, 120 bp, synthetic construct
  source 1..120: mol_type = other DNA
ttcccatgtcatagactttgatctcgtccgcactgtgagctccaggtcagacacacagagggaccgctaagccctagagtgcaacacttcactgcccattaacagtttattttatttttg

SEQ ID NO: 41737 - DNA, 120 bp, synthetic construct; identical to SEQ ID NO: 11893
  source 1..120: mol_type = other DNA

SEQ ID NO: 41738 - DNA, 120 bp, synthetic construct
  source 1..120: mol_type = other DNA
tcgttcgaacaccttcttccttgaaaaaagaaggttcagtagttcctcggtgttcttaaacttaacattcacagtttgtcttcagtgagtaacccttaaggtccctaaccagaaattcat

SEQ ID NO: 41739 - DNA, 120 bp, synthetic construct; identical to SEQ ID NO: 11894
  source 1..120: mol_type = other DNA

SEQ ID NO: 41740 - DNA, 120 bp, synthetic construct
  source 1..120: mol_type = other DNA
cctacagcagccagtggctggaattaatgtccctggctgtccccagcctcccataactgtccagtatggaagcatgaaagcccagttcacgctttcacggggcagaacttaccgtgtaga

SEQ ID NO: 41741 - DNA, 120 bp, synthetic construct
  source 1..120: mol_type = other DNA
cttccttttagggcccgtgccttgggaatccaacctaaaatacatcacccaactcaaataccccctgtctgaccagtgttggggaaaaagaacaaaaaccaaaatctcccaacccagtaa

SEQ ID NO: 41742 - DNA, 120 bp, synthetic construct
  source 1..120: mol_type = other DNA
catagtgaaaccccatttctactaaaaatacaaaaattagctgcgcatggtgacatgcgcctgtagtcccagctactcaggaggctgaggcaggagaattgcttgaacccgggaagtgga

SEQ ID NO: 41743 - DNA, 120 bp, synthetic construct; identical to SEQ ID NO: 11895
  source 1..120: mol_type = other DNA

SEQ ID NO: 41744 - DNA, 120 bp, synthetic construct
  source 1..120: mol_type = other DNA
actgccgtcttccagtagagactgcgagatagggacactatcttctttggatgtttacattccaaagagatgtttctcaggtcctggagaaagacatttctgggtcacagagctgacaga

SEQ ID NO: 41745 - DNA, 120 bp, synthetic construct
  source 1..120: mol_type = other DNA
gtgagaattaaacctcttatttttaatttttatttgtcttcatactataggtctagctgccctggagactctatcatattccttgtgctattttcctcagagctttctgaatgtttgata

SEQ ID NO: 41746 - DNA, 120 bp, synthetic construct
  source 1..120: mol_type = other DNA
gacgtcccctaacctgaattttgtgtttataatttccttgcttgtaccactatacatgattccctggccaatagttctaaatgaaccctgtagtttagctctggagttgaacaatgagaa

SEQ ID NO: 41747 - DNA, 120 bp, synthetic construct
  source 1..120: mol_type = other DNA
aaccaccatggcacgtatatacctatgtaacaaacctgcacgttttgcacatgtaccccagaacttaaagtataataataaaaaaaaaaagaaaaaaagaaaaaggtgcactgtgggtag

SEQ ID NO: 41748 - DNA, 120 bp, synthetic construct; identical to SEQ ID NO: 11896
  source 1..120: mol_type = other DNA

SEQ ID NO: 41749 - DNA, 120 bp, synthetic construct
  source 1..120: mol_type = other DNA
gcaggcctttgtctcagtcttggtacatgttggatatagacctactatacccataaacatgaatgacccagttctagatgaccagttttttgaaacagaccctccagaaatcaataacta

SEQ ID NO: 41750 - DNA, 120 bp, synthetic construct
  source 1..120: mol_type = other DNA
gagggggtttctgactgtcaaggtctattattagttaaagttaaaagggttttctcttccagctgccgctgtatttgggtaaacaaaaatcctgtgtaagacttcagaatctcagtaagc

SEQ ID NO: 41751 - DNA, 120 bp, synthetic construct
  source 1..120: mol_type = other DNA
ggtgttgtgtttggtatcatgaaaacataagtaattgttgaatttctcttaaaaagccagctctttagaaggggtggggaggttttatcagatggtagggtttggaaatttagggagatg

SEQ ID NO: 41752 - DNA, 120 bp, synthetic construct; identical to SEQ ID NO: 11897
  source 1..120: mol_type = other DNA

SEQ ID NO: 41753 - DNA, 120 bp, synthetic construct
  source 1..120: mol_type = other DNA
ccacttcaaatatgtagataacataacagtcggcatgcttggagtaaacaattcccactgctttgcaggatgcgctccttcttatagcactttgttgtactgccagctgtttttcttgac

SEQ ID NO: 41754 - DNA, 120 bp, synthetic construct
  source 1..120: mol_type = other DNA
gctccactgagagttgggcttttttgaattgtcatgttgccagttttctttcacttggaggatgtgttcatctatttccagaatgcattttaagtattaccctcatctattctagtagtt

SEQ ID NO: 41755 - DNA, 120 bp, synthetic construct; identical to SEQ ID NO: 11898
  source 1..120: mol_type = other DNA

SEQ ID NO: 41756 - DNA, 120 bp, synthetic construct
  source 1..120: mol_type = other DNA
agtgccagaaaagattaaggctactatgctgaattgcatatttacatgagagattgagaaatctttctttttaattgacaaattaaatgatttttagagcatttttagtttgggttaata

SEQ ID NO: 41757 - DNA, 120 bp, synthetic construct
  source 1..120: mol_type = other DNA
aaaaatattatgagggtatgggggtaggggtggaaatacacacaaattatctgttgctttgtgtattcttttttcaatcttttcctctaaacttgagcccctcacaattcacgttccttc

SEQ ID NO: 41758 - DNA, 120 bp, synthetic construct
  source 1..120: mol_type = other DNA
tgccaacctcatggtgaatacatcatgtaaaatcagctcctggattagaagagccatttcttaacatttgtacattctcctcatggtatacctggcacattatccttgtgccttgaatgt

SEQ ID NO: 41759 - DNA, 120 bp, synthetic construct; identical to SEQ ID NO: 11899
  source 1..120: mol_type = other DNA

SEQ ID NO: 41760 - DNA, 120 bp, synthetic construct
  source 1..120: mol_type = other DNA
atgacatgggcctgcagatggacttcggctgaagtgttcagggtctcatcaagtcagatggtaggataaacaagatagttaataaaacagcttttaacctctctttttaaaaggagattg

SEQ ID NO: 41761 - DNA, 120 bp, synthetic construct
  source 1..120: mol_type = other DNA
gggtctcatcaagtcagatggtaggataaacaagatagttaataaaacagcttttaacctctctttttaaaaggagattggttttcactgaaatacgtgcacgtgcaggaacagaaaacc

SEQ ID NO: 41762 - DNA, 120 bp, synthetic construct
  source 1..120: mol_type = other DNA
aggacaaatacctaatgcatgtggggcttcaaacctagatgacgggttgataggtacagcaaaccaccatggcacatgtatacctacgtaacaaacctgtgcattctgcacatgtatccc

SEQ ID NO: 41763 - DNA, 120 bp, synthetic construct
  source 1..120: mol_type = other DNA
acaagtttattgaaaaaggcagcatgggagaatagaaagattttgggttttgaagccagctagacttgcatttcaatcctgtttctggctgtgtgggttttggacaagccaatctgagct

SEQ ID NO: 41764 - DNA, 120 bp, synthetic construct; identical to SEQ ID NO: 11900
  source 1..120: mol_type = other DNA

SEQ ID NO: 41765 - DNA, 120 bp, synthetic construct
  source 1..120: mol_type = other DNA
taattatactttgaaaacttaggcaataattgataccaaccatgatagaggaaatatttttagagctgcataatttgtttgaaaggtgtcgcttattttctatgcctatctatatccttg

SEQ ID NO: 41766 - DNA, 120 bp, synthetic construct
  source 1..120: mol_type = other DNA
aaaaacccccgaaaacaaagcaagaaaattttaaaggaggtagaatacaagctttgagaagtacatggtatggctggtcagtttacaagggtgtgttgatgagatttagcagttaggcct

SEQ ID NO: 41767 - DNA, 120 bp, synthetic construct
  source 1..120: mol_type = other DNA
aactctgaggggaagaatacaagacagtagcagaaaaattgtcaaattccattaagagtggaatgaaggcttttttcttctgtgaagtgtgatgaagtttccctcccacacacctgttat

SEQ ID NO: 41768 - DNA, 120 bp, synthetic construct
  source 1..120: mol_type = other DNA
aaatgaagtccgagctacttcaatgctatcttgaaatgctgcctttctgggaatttttaggtgaagaagatagatgtgagtattttcaaatacatgagccgttgccatgattagttacat

SEQ ID NO: 41769 - DNA, 120 bp, synthetic construct; identical to SEQ ID NO: 11901
  source 1..120: mol_type = other DNA

SEQ ID NO: 41770 - DNA, 120 bp, synthetic construct
  source 1..120: mol_type = other DNA
tgcttctgtaacagctgcttcttgagatgtaggaattaagaggcatgtaaggaaagctagcatctggtttcatgttggatttggcttggccctcaatctatcaatatcattgatgggatg

SEQ ID NO: 41771 - DNA, 120 bp, synthetic construct
  source 1..120: mol_type = other DNA
atagggctgggatggaatcttttctgtttttgtatccccggtgcttaacctaatacctggcatgtggaaagcccctgaagacagatatggcaggcacttttcttggattggcagttgaaa

SEQ ID NO: 41772 - DNA, 120 bp, synthetic construct; identical to SEQ ID NO: 11902
  source 1..120: mol_type = other DNA

SEQ ID NO: 41773 - DNA, 120 bp, synthetic construct
  source 1..120: mol_type = other DNA
gttaacatgagggccaagtgtttaagttggtggttttagttttacttggagaacctttcttcttttagatctcagggtttcgattttgaaagtgagtttaaacaaatacacaggagtcac

SEQ ID NO: 41774 - DNA, 120 bp, synthetic construct
  source 1..120: mol_type = other DNA
aggagtatactgtgcctgagctttcattttaagcttgatattaagaaattcatattcagatgcagttctacatttgctagaactgtccagagacaaaattatgcttctcccgaagggcat

SEQ ID NO: 41775 - DNA, 120 bp, synthetic construct
  source 1..120: mol_type = other DNA
tgactcttagcgatgcataagacacccctcaacatgttctttgaatggttgctgatgttatttagcaataattcaaattaagtgatgtttcttgctgtaaagaaaaactgagctgtaagc

SEQ ID NO: 41776 - DNA, 120 bp, synthetic construct; identical to SEQ ID NO: 11903
  source 1..120: mol_type = other DNA

SEQ ID NO: 41777 - DNA, 120 bp, synthetic construct
  source 1..120: mol_type = other DNA
aagttccaggatacatgtgcagaatgtgcaggtttgttacgtagataaacatgtgccatgggtggtttgctgcacccatcaactcgtcacctaggtattaagacccacatgcattagcta

SEQ ID NO: 41778 - DNA, 120 bp, synthetic construct
  source 1..120: mol_type = other DNA
gtttggttttctgttcctgtgttcgtttgctgaggatgatggtttccagcttcatccatgtctctgcaaaagacatgatttcattcctttttatggctgcatagtattccatggtgtata

SEQ ID NO: 41779 - DNA, 120 bp, synthetic construct
  source 1..120: mol_type = other DNA
atttatattcctttggtatatacccagtaatgggatggctgggtcaaatgggatttctggttctagatccttgaggaattggcacactatcttccacaatggttgaactagtttacattc

SEQ ID NO: 41780 - DNA, 120 bp, synthetic construct
  source 1..120: mol_type = other DNA
ttgcatttctctaatcatcagtgatgttgagctttttttcacgtttgttggctgcatgaaacaaaaattaactcaagatggattaaagacttaaatgtaaaacccaaaaccataaaaacc

SEQ ID NO: 41781 - DNA, 120 bp, synthetic construct; identical to SEQ ID NO: 11904
  source 1..120: mol_type = other DNA

SEQ ID NO: 41782 - DNA, 120 bp, synthetic construct
  source 1..120: mol_type = other DNA
atttgtgttttaaaaagatgagtcagagtgtgtgtatttagacagggaaaccaattaggatgctcttgcatgggtgagagatagtgaaggtctggacaaagagtagatgtatgtgatgga

SEQ ID NO: 41783 - DNA, 120 bp, synthetic construct
  source 1..120: mol_type = other DNA
gaattaaaggtttctagtgttggcagttgagtaacttgtggctttattaatggatgtaggacagataaaaggaacaagttggtaggggatcaaacagaagacagggtcttccctagaaag

SEQ ID NO: 41784 - DNA, 120 bp, synthetic construct; identical to SEQ ID NO: 11905
  source 1..120: mol_type = other DNA

SEQ ID NO: 41785 - DNA, 120 bp, synthetic construct
  source 1..120: mol_type = other DNA
tgatgcttctctgaattgttacatatttttcatttaagttaccccaaggctgtgtttgtattggaaataaagaagtggttttctgctgtaaaaatactgttttgctactaggcaaacagg

SEQ ID NO: 41786 - DNA, 120 bp, synthetic construct
  source 1..120: mol_type = other DNA
tgaccttgggaagcagctttgtcataaattgataagtgcaatttaagagggagatgagtaggaataaaaactgcaacttgcaagaggggctctgggctgcattgcagtcacaagataaca

SEQ ID NO: 41787 - DNA, 120 bp, synthetic construct
  source 1..120: mol_type = other DNA
ttccaaacactcctagtggggctggtttggtactccattgttattttatgatgacacaaataagaggctttatccaatgataagcgtgtgattcattgctgttctgaagagctgtgagcc

SEQ ID NO: 41788 - DNA, 120 bp, synthetic construct; identical to SEQ ID NO: 11906
  source 1..120: mol_type = other DNA

SEQ ID NO: 41789 - DNA, 120 bp, synthetic construct
  source 1..120: mol_type = other DNA
ttaaactaaagaattcaataatggcctgtacagatttggacctccgtcctatccctagagggacattttatagacttcattatatataatatatgttgtttaaagtgtattatatgtatg

SEQ ID NO: 41790 - DNA, 120 bp, synthetic construct
  source 1..120: mol_type = other DNA
gcaataaaggtgaagaatgccccattacagaaaagaaaataaacactttctcattgttcatactttctactcttgtactaagcttcagatgccactgggcgccagttgctttccaagcct

SEQ ID NO: 41791 - DNA, 120 bp, synthetic construct
  source 1..120: mol_type = other DNA
caaggatccttagggatgttggggctttctttggtgactgttgtctccttgtttgctcaaattaagctccccagcaaaagagggaagtgaaataaattaatacatgaaaccaagaactgt

SEQ ID NO: 41792 - DNA, 120 bp, synthetic construct
  source 1..120: mol_type = other DNA
ctcccgagttcacgccactctcctacctcagcctcccaagtagctgggactacaggcgcccaccaccacgctcggctaattttttgtattttttagtagagatggggtttcacaatgtta

SEQ ID NO: 41793 - DNA, 120 bp, synthetic construct; identical to SEQ ID NO: 11907
  source 1..120: mol_type = other DNA

SEQ ID NO: 41794 - DNA, 120 bp, synthetic construct
  source 1..120: mol_type = other DNA
gctaggattgttactgattcttgcccctaaaaagagaagttgaattcagaatctcttagaaggcataaaaatttaccatcaccatggcattgaggaaggcaacacaggcataaagtgatc

SEQ ID NO: 41795 - DNA, 120 bp, synthetic construct
  source 1..120: mol_type = other DNA
tttatagccctaatcatgtgctgtccctcttaatcctgggcatttaccctgctgttccctctgctgaacctcacacatgtgttccctctctaactctggttagacatttaggcttctttc

SEQ ID NO: 41796 - DNA, 120 bp, synthetic construct; identical to SEQ ID NO: 11908
  source 1..120: mol_type = other DNA

SEQ ID NO: 41797 - DNA, 120 bp, synthetic construct
  source 1..120: mol_type = other DNA
tcttttgaaagatgtttctcaaaagaaagtctcagactcaaacatgttacacttacctcctggaggttttacaatgcatattagtaaagaatctgagatgtcttaaaggaacccgcttaa

SEQ ID NO: 41798 - DNA, 120 bp, synthetic construct
  source 1..120: mol_type = other DNA
atattcttagggatacaaattgtaattgcctgcttaatcatgctctcctatactaagtggtagggatgggaccatatttgtagttctagaccagagatcaggataagccttcagtaaata

SEQ ID NO: 41799 - DNA, 120 bp, synthetic construct
  source 1..120: mol_type = other DNA
agatcaagggttcaatcctcccatgatcacatttagctgtgtaaccttcagtgagccacttgaactctgacctttgatttcatcctgtattaaatggaaatacaccccagttaaaatggc

SEQ ID NO: 41800 - DNA, 120 bp, synthetic construct; identical to SEQ ID NO: 11909
  source 1..120: mol_type = other DNA

SEQ ID NO: 41801 - DNA, 120 bp, synthetic construct
  source 1..120: mol_type = other DNA
aggcggaggttgcagtgagccaagatcacaccactgcactccagcctgggtgacagagtgagactccatctcaaaaaaaaaaaaaaaaaaaaaaaaaagaaagaaagaaagaaagaaaag

SEQ ID NO: 41802 - DNA, 120 bp, synthetic construct
  source 1..120: mol_type = other DNA
gccaagatatggaatcagtctaagtgtccatcaatggataaatggataaagaaaatgtgatatatacacacaatgaaatattcgtcagctgtaaaaaagaatgaaatgctttcatttgca

SEQ ID NO: 41803 - DNA, 120 bp, synthetic construct
  source 1..120: mol_type = other DNA
aatagaatggtggttgctagagaatggaagcgtagtgggaagggacggtgggaggagctggttaatgggtacaaaaatacagtttcatagaaggaataaattctggtattcaatagcaca

SEQ ID NO: 41804 - DNA, 120 bp, synthetic construct
  source 1..120: mol_type = other DNA
ccctgatttcatcattatacattgtatgctattatcaagatagcacatgtgcctccacaagtatgtacaactattatgtatccataaaataataaaattgtaaaaaccctcagaattaaa

SEQ ID NO: 41805 - DNA, 120 bp, synthetic construct; identical to SEQ ID NO: 11910
  source 1..120: mol_type = other DNA

SEQ ID NO: 41806 - DNA, 120 bp, synthetic construct
  source 1..120: mol_type = other DNA
gagattagagttcagatgctcttaaaaaatatcgtgttcactttcatattttatccttttcatatatgccttctcccgggctttgaaggaggaaattggtgatgttttcctcattagaca

SEQ ID NO: 41807 - DNA, 120 bp, synthetic construct
  source 1..120: mol_type = other DNA
ttgagacattgtgcctttttgtctaaaatattctatttgatgaacggttaaactaatagtctgtgagctcctttagggcaagaatcacgtccaggtttcgtctcctcagtgctgagggtt

SEQ ID NO: 41808 - DNA, 120 bp, synthetic construct; identical to SEQ ID NO: 11911
  source 1..120: mol_type = other DNA

SEQ ID NO: 41809 - DNA, 120 bp, synthetic construct
  source 1..120: mol_type = other DNA
ccaacatgaagaaacctgtctctactaaaaatacaaaattagctgcgcgtggtggtgcatgcctgtaatcccagctactcgggaggctgaggcaggagaatctcttgaacccaggaggca

SEQ ID NO: 41810 - DNA, 120 bp, synthetic construct
  source 1..120: mol_type = other DNA
attaatagttattttggtacaggatgaagtatagtctatggggcgtttatctaaggaagaagaggtgatcaaatagacaggagagatgtgttacatgtgtgtagaaaaaggctccgtatc

SEQ ID NO: 41811 - DNA, 120 bp, synthetic construct
  source 1..120: mol_type = other DNA
attttgggaggccgaggcaggaggattgcttgagctcaggaattcaagaccaacctggacaacaaagtgtgaccctgcctgtaccacaactactactagtagtactactactaataatag

SEQ ID NO: 41812 - DNA, 120 bp, synthetic construct; identical to SEQ ID NO: 11912
  source 1..120: mol_type = other DNA

SEQ ID NO: 41813 - DNA, 120 bp, synthetic construct
  source 1..120: mol_type = other DNA
cctatgtgattcctgaagtctctaacaattaatacttgacagacacagactgttatcaacagcagaatctttggattaactttcttaatattgaagaagggtatcttatactggtataaa

SEQ ID NO: 41814 - DNA, 120 bp, synthetic construct
  source 1..120: mol_type = other DNA
tcagtggtgccaatatgattcaacaattttattatggtcttcaattacattttcttccttatttctttagtattgcttctaaattcttaaagcctactgatcaatagtatcaagtgatgc

SEQ ID NO: 41815 - DNA, 120 bp, synthetic construct
  source 1..120: mol_type = other DNA
gtggtggttgttttgttttttaatggaagggatgatgggcagtgtatccctgggtgtctgagtgtatattcatcctgctaattgagttgtccattttactaatgtcttctgacagccttt

SEQ ID NO: 41816 - DNA, 120 bp, synthetic construct
  source 1..120: mol_type = other DNA
attgagttgtccattttactaatgtcttctgacagcctttcattgatctttatagttcttttctgggaaggtgagattttacagactcaaggtgattggtttaaacttggaatttctttc

SEQ ID NO: 41817 - DNA, 120 bp, synthetic construct; identical to SEQ ID NO: 11913
  source 1..120: mol_type = other DNA

SEQ ID NO: 41818 - DNA, 120 bp, synthetic construct
  source 1..120: mol_type = other DNA
atgttaattaggagatgctgatatttatagattaggaattatttgtagactctgcatgcaaatattatgggtaaaaagaaccatttaagtattttgaaaataacattagaccagatgatg

SEQ ID NO: 41819 - DNA, 120 bp, synthetic construct
  source 1..120: mol_type = other DNA
ccttccacactgtataaaacacccctgtcttccctgtcaagaaaattttgggggaaaaaaaaagaaaacattgtgcacagagagttgataatgaatttaaatattactaatggaaatact

SEQ ID NO: 41820 - DNA, 120 bp, synthetic construct
  source 1..120: mol_type = other DNA
catctttttcatgtaaatattcacatgagtatttcaaattgtgaaattacaagtgggtctctttccatgcatactagaagacagcagttattttggcagacagtgcttttcatacattca

SEQ ID NO: 41821 - DNA, 120 bp, synthetic construct; identical to SEQ ID NO: 11914
  source 1..120: mol_type = other DNA

SEQ ID NO: 41822 - DNA, 120 bp, synthetic construct
  source 1..120: mol_type = other DNA
gtgtggatatttacacttaaatgaattaaaacaaaataatattcttctgcttcctgtggcaaatgtgacaaccagggcatcatcagagtgagtagtggagtttgggatattctgttaatc

SEQ ID NO: 41823 - DNA, 120 bp, synthetic construct
  source 1..120: mol_type = other DNA
tcaggcatttgtacctttatacagtatgtgaatgtggaatgaacacgccatcacataattacataagtcatcaacaaatctttattggccatctgcttgtcagaaagcctcttcctcatg

SEQ ID NO: 41824 - DNA, 120 bp, synthetic construct
  source 1..120: mol_type = other DNA
caaaaaattggttttgcaatccaaatattgtattaacaacataaagttggaaactttcagctaatgttcattctatttaaacatgctttgggttgttggtgcccaggatacagcacccca

SEQ ID NO: 41825 - DNA, 120 bp, synthetic construct; identical to SEQ ID NO: 11915
  source 1..120: mol_type = other DNA

SEQ ID NO: 41826 - DNA, 120 bp, synthetic construct
  source 1..120: mol_type = other DNA
tctctacaactgctacttcagtagaaacaggagtccatcagaaactccatctgcttatccagtgctatttgatattatagttattatgtactctttatggactagagacggagaggttga

SEQ ID NO: 41827 - DNA, 120 bp, synthetic construct
  source 1..120: mol_type = other DNA
tctctaagatacctgcaaccccattcctacatgcagtgttaaccagcagttctcccttttactgtccacctaaggaacatgccataccacattcccatcaatagcatttcctcaccagtt

SEQ ID NO: 41828 - DNA, 120 bp, synthetic construct
  source 1..120: mol_type = other DNA
tccaggcctctgggtttgcccttggcattactgatgtaaacactgattggtttatctgcagatctcctggttttatttttgtttatttggatgcacacatctgggcgtacatctcattag

SEQ ID NO: 41829 - DNA, 120 bp, synthetic construct; identical to SEQ ID NO: 11916
  source 1..120: mol_type = other DNA

SEQ ID NO: 41830 - DNA, 120 bp, synthetic construct
  source 1..120: mol_type = other DNA
aggctctgccagacttcaggatcagaaacctaatgtcattagtggctgggagttaatgagactacggcttcaaattcagaaagctcatatgtaactgaaggctgggatgcagtggcttac

SEQ ID NO: 41831 - DNA, 120 bp, synthetic construct
  source 1..120: mol_type = other DNA
tcacctgaggtcaggagttcaagaccagcctggccaatgtggtgaaacctcgtctctactaaaaatacaaaaaattagatgggcgtggtggcctgtgcctgtagtcccagtcagtcaggt

SEQ ID NO: 41832 - DNA, 120 bp, synthetic construct; identical to SEQ ID NO: 11917
  source 1..120: mol_type = other DNA

SEQ ID NO: 41833 - DNA, 120 bp, synthetic construct
  source 1..120: mol_type = other DNA
acaagacaaatattcaaggttgggctgagagggtggtggggtttaagcagagacaggcgacaaataaataaaagaagaggtaaagctcccagttaatgatgagggccaggcagtaggggc

SEQ ID NO: 41834 - DNA, 120 bp, synthetic construct
  source 1..120: mol_type = other DNA
ccagagggcacttggtgagcttcaaatgaaaggtcacggcaacctcttacctttttgatagacatagggtttctttagttatgtttataaatacaatccagttcaggccagacctcaaag

SEQ ID NO: 41835 - DNA, 120 bp, synthetic construct
  source 1..120: mol_type = other DNA
acgtttactggggctttgtctagctcctgtccatactccgtatacctattctgatatatttaaaatcatgaaataatcctaccctgtgtaggaatatatttcagagaattatttgctatg

SEQ ID NO: 41836 - DNA, 120 bp, synthetic construct; identical to SEQ ID NO: 11918
  source 1..120: mol_type = other DNA

SEQ ID NO: 41837 - DNA, 120 bp, synthetic construct
  source 1..120: mol_type = other DNA
ggggaaaagtcttaagtgttaattaacaagttcatgggcagactcctgctgaactaatagaggcaaacgttcttaaaatggatcaaaatcacttatcttttggcttgcttcattgaaagc

SEQ ID NO: 41838 - DNA, 120 bp, synthetic construct
  source 1..120: mol_type = other DNA
atagtttaaataatgtccttttatttgtaattaagtgaggctgggcatggtggctcacacctgttatcccagcactttgggaggccaaagtagaaggacgggttgagaccaagggttcca

SEQ ID NO: 41839 - DNA, 120 bp, synthetic construct
  source 1..120: mol_type = other DNA
ttgagcccaggagtttgagaccagcttggcaatatagtgagacctcatctctcagaaagtaaaaaaaaattagccaggcctggtggctcatgcctgtagcctgttgtcaggcaagggtgt

SEQ ID NO: 41840 - DNA, 120 bp, synthetic construct; identical to SEQ ID NO: 11919
  source 1..120: mol_type = other DNA

SEQ ID NO: 41841 - DNA, 120 bp, synthetic construct
  source 1..120: mol_type = other DNA
acctgggtaccttgccaacttccatctgcttctctgatattatttgtcagcaatctttcaaaaataatattagacagcaccagcaataaaacagatactttctgcatgagtgtgttggga

SEQ ID NO: 41842 - DNA, 120 bp, synthetic construct
  source 1..120: mol_type = other DNA
gagatttgctattctttacaataaaatttaagctgaagtctctcagggctggagcctagatttttaaattatttgcatttttttttagagtgaaactctatagtaagtgaaattggccat

SEQ ID NO: 41843 - DNA, 120 bp, synthetic construct
  source 1..120: mol_type = other DNA
aaaacagttctctggaatgcctgaattccatgttggcaattgggtacaataaagcatttgcaattctagtgacaaattgtactgcagtgcagaaggtctcatcgagcttagatcattcgt

SEQ ID NO: 41844 - DNA, 120 bp, synthetic construct
  source 1..120: mol_type = other DNA
cagagtgaattcactaggttctagggtttcaggttcaatctctgtacagaaagacttaacaagaaaatcagtagtcaccagagattatacttggcattagattacacgagatgaagttaa

SEQ ID NO: 41845 - DNA, 120 bp, synthetic construct; identical to SEQ ID NO: 11920
  source 1..120: mol_type = other DNA

SEQ ID NO: 41846 - DNA, 120 bp, synthetic construct
  source 1..120: mol_type = other DNA
tcaaaggagtaggcaccagaatgatatgaaacactcagaattttctgccttttgataaaaatttcacatactggctagatagagcgatagttatcacatcaaatagagtaacggtcccac

SEQ ID NO: 41847 - DNA, 120 bp, synthetic construct
  source 1..120: mol_type = other DNA
gtgaggctatcctttcgtttgcaataacttttagactcggtgaatataatagcatgatcattcttgcctatagaacagagaggtaagcaaagcagctgtcaaatagtagttttctctaaa

SEQ ID NO: 41848 - DNA, 120 bp, synthetic construct; identical to SEQ ID NO: 11921
  source 1..120: mol_type = other DNA

SEQ ID NO: 41849 - DNA, 120 bp, synthetic construct
  source 1..120: mol_type = other DNA
gcatgttaggagcctagtcaggaaataagctgaatttctgtttcttaaagcaaaccccaaacaacaacaattccttcttttcctggatacttaccaagccaaagagaaacggattcattg

SEQ ID NO: 41850 - DNA, 120 bp, synthetic construct
  source 1..120: mol_type = other DNA
agagtggaggacaaatgttggcttcattccatgtcagtgtccttcttagattcctgggcattaatcgttaaatgttgttaggaatgaagcttaaagaaaagcaagtttgaacttcttcat

SEQ ID NO: 41851 - DNA, 120 bp, synthetic construct
  source 1..120: mol_type = other DNA
tgatggtttctatcttctcataactctgctcattgaaggtggagtcttctatttcttaagaggactgattaccaggttgatagatttccaagccttctgttgttctatactctctctttt

SEQ ID NO: 41852 - DNA, 120 bp, synthetic construct; identical to SEQ ID NO: 11922
  source 1..120: mol_type = other DNA

SEQ ID NO: 41853 - DNA, 120 bp, synthetic construct
  source 1..120: mol_type = other DNA
taagtctatccgagtctttcctccccatgggatccaggccatttgaaacaatatggttattggtgctctgtttttgttttattcttcgtagtcaaccaaaaagaacagagttgattacat

SEQ ID NO: 41854 - DNA, 120 bp, synthetic construct
  source 1..120: mol_type = other DNA
acaatgagatgtttgtaattatataaaatactaaattgttattaaattttagttagtgtcaacatgtattcatcattttctaaatgtcatctaatcagactctaatttactttcccccaa

SEQ ID NO: 41855 - DNA, 120 bp, synthetic construct
  source 1..120: mol_type = other DNA
gctggagtgcagtggcacaatctcggctcactgcaacctccacctcccaggttcaagcaattctcctgcctcagcctcccgagtagctgggattacaggtacacgccaccatgcctggct

SEQ ID NO: 41856 - DNA, 120 bp, synthetic construct; identical to SEQ ID NO: 11923
  source 1..120: mol_type = other DNA

SEQ ID NO: 41857 - DNA, 120 bp, synthetic construct
  source 1..120: mol_type = other DNA
tgttgtatggataattcatgtattataggcatgataacctgtttacagaaaattctaagcatgtggatctcctatcttttatgattttttcgtgtaaaagtttcctttaaaatcagctgt

SEQ ID NO: 41858 - DNA, 120 bp, synthetic construct
  source 1..120: mol_type = other DNA
attataggtgctggggattcaatggtgaacaaagtagataaatgtctttctcccttgaagtttattttggaagatggagggattctggcaatagaataagcaaacaaggtatttgcaggc

SEQ ID NO: 41859 - DNA, 120 bp, synthetic construct
  source 1..120: mol_type = other DNA
gaaaaggtgggttaatccagttctccttttctatggatgtgccatttggtttgagtcataatgatgaaaaggagcctgccctggaaacttctagggggagagcattcaaagcagagaagc

SEQ ID NO: 41860 - DNA, 120 bp, synthetic construct
  source 1..120: mol_type = other DNA
aacgatgataacactgagagctgtgaccctcctccgtctctgccaggtggtctgggtaacggcaggtgctaacagaagactggctaattataaaatacgactaagcggaaacagctttgt

SEQ ID NO: 41861 - DNA, 120 bp, synthetic construct; identical to SEQ ID NO: 11924
  source 1..120: mol_type = other DNA

SEQ ID NO: 41862 - DNA, 120 bp, synthetic construct
  source 1..120: mol_type = other DNA
aatatgtgtaggtgtaggtttctgtttaggtgtcggtggagaagtaagtgtaggcatctgcgtgacaccagtgattttcagtctgggttctgagtagttctagttcctggaggttccagg

SEQ ID NO: 41863 - DNA, 120 bp, synthetic construct
  source 1..120: mol_type = other DNA
ctctactaaaagtacaaaaaattagttgggtgtggtggtgggcacctgtagtgccagctactcgggaggctgaggcaggagaattgcttgaacccaggaggcggagcttgcagtgagccg

SEQ ID NO: 41864 - DNA, 120 bp, synthetic construct
  source 1..120: mol_type = other DNA
cagtataccttttgacatgtagtagttgctaaatgattgatacagatactgatgtttttggaggtagaggactttctcattctaaaccctgtttgccatacatctagaactcactaagcc

SEQ ID NO: 41865 - DNA, 120 bp, synthetic construct; identical to SEQ ID NO: 11925
  source 1..120: mol_type = other DNA

SEQ ID NO: 41866 - DNA, 120 bp, synthetic construct
  source 1..120: mol_type = other DNA
cacacccagtgagtaatggtatggctttgcttcccaaacaggttaaagattatgaagctctgtgctatcataaggaggttttcaatgggaatatctgcttttacccaccggtctttctgt

SEQ ID NO: 41867 - DNA, 120 bp, synthetic construct
  source 1..120: mol_type = other DNA
gcccttacaaatatgcatatgtttgagaagagaggaggaaattaatcagagcccctggcttaaatgatctccattcttactagcactatcgggatgtaattaaatcatggtttaattctt

SEQ ID NO: 41868 - DNA, 120 bp, synthetic construct; identical to SEQ ID NO: 11926
  source 1..120: mol_type = other DNA

SEQ ID NO: 41869 - DNA, 120 bp, synthetic construct
  source 1..120: mol_type = other DNA
tttttttaatgaggaaaggcagtgctccaatgagaacattctcacaggcaggtaacagaatagcacacttttattaggaggggtaaaaagagatgcagaaagcaaggaaatctttttaga

SEQ ID NO: 41870 - DNA, 120 bp, synthetic construct
  source 1..120: mol_type = other DNA
aatgtattaaatactaaattttcttttgctgtaggttgtttctggcaaaaccggagttttattgatggacttcctttatgtactcactctgcgttagcatgttggagacataggatttgc

SEQ ID NO: 41871 - DNA, 120 bp, synthetic construct
  source 1..120: mol_type = other DNA
aggccataggcacagaatggtgagtggatttctatcctaggagaggtcctttgctgtgttcaagtacttgggatatcgaatgacagaacttgtttttagagagatgacagcaataagcct

SEQ ID NO: 41872 - DNA, 120 bp, synthetic construct
  source 1..120: mol_type = other DNA
agaggttcagaaagatgaatctgcaacccaggtgccttgatatagatgctgtagatacgacaaactactctttttttttttttatcagcttattgcatccagacagggtttgaaatggct

SEQ ID NO: 41873 - DNA, 120 bp, synthetic construct; identical to SEQ ID NO: 11927
  source 1..120: mol_type = other DNA

SEQ ID NO: 41874 - DNA, 120 bp, synthetic construct
  source 1..120: mol_type = other DNA
tcaggtgagtctttcaccttggagtgactgatctctttctctgcatgttaagttttctacacaccgcaaatacctgtctatacacgcacacagtttatatgtgtgattcttaattgcttg

SEQ ID NO: 41875 - DNA, 120 bp, synthetic construct
  source 1..120: mol_type = other DNA
aggcgggcagatcacgaggtcaggagatcgagaccatcctggctaacatggtgaagccccgtctctactaaaaatacgaaaaaattagcctggcgtggtggcgggcgcctgtagtcccag

SEQ ID NO: 41876 - DNA, 120 bp, synthetic construct
  source 1..120: mol_type = other DNA
aaaaaaaaaagagtattggtgtcatttaatttaaaagagattgtttcaaggatgcttagttatgttggagtattcaacattatgagaattttttaaaagtttcatttttcttcattcaat

SEQ ID NO: 41877 - DNA, 120 bp, synthetic construct; identical to SEQ ID NO: 11928
  source 1..120: mol_type = other DNA

SEQ ID NO: 41878 - DNA, 120 bp, synthetic construct
  source 1..120: mol_type = other DNA
ctctcttttcatctggcccttccctacctatgataacactcaatggagtgagtggccattgcctacttggtttttgtttccccttagacctaatctgagatttgccaatctcatgttcta

SEQ ID NO: 41879 - DNA, 120 bp, synthetic construct
  source 1..120: mol_type = other DNA
actcataataggcctattctggactctgctgttagaaatactccaacaatgacacaggatcaggaatcaatagtatttgtcaagtatttccatttctagcaagggaaaaatgatctatta

SEQ ID NO: 41880 - DNA, 120 bp, synthetic construct
  source 1..120: mol_type = other DNA
tttctatttgcagtgttttctgacaaatatttttcctccagattttaagcgtgttattatgagtcaacctttatgtttgtaaagccttagtcttgttaataatgtataacttccaaatga

SEQ ID NO: 41881 - DNA, 120 bp, synthetic construct
  source 1..120: mol_type = other DNA
tatgtaccatataacctctacaaatcacagtcaatctggatagtgtccccttagggcaccttaattatatgctgtagttctagaattcttttatgtggttttttagagataatttctcct

SEQ ID NO: 41882 - DNA, 120 bp, synthetic construct; identical to SEQ ID NO: 11929
  source 1..120: mol_type = other DNA

SEQ ID NO: 41883 - DNA, 120 bp, synthetic construct
  source 1..120: mol_type = other DNA
taactgaaccattgatgtgaactctttgggatctacagcatcatccttaatgcctgtgtcataccttgtatatcattttgaatggcttttggagcttaaagtatctctgatttcaagcag

SEQ ID NO: 41884 - DNA, 120 bp, synthetic construct
  source 1..120: mol_type = other DNA
ctgtctcaacagttgcaatttgtaaagcctatagcaggtttacttttgtgctccatagcatcagctctgagaatgttaaacacattgtagacgtgatgtgttggaaatttaaagttatgt

SEQ ID NO: 41885 - DNA, 120 bp, synthetic construct; identical to SEQ ID NO: 11930
  source 1..120: mol_type = other DNA

SEQ ID NO: 41886 - DNA, 120 bp, synthetic construct
  source 1..120: mol_type = other DNA
ttttttattaactctggcacatagcaaatattatttcacttacattcatgttgtagaattttctcagataattttgtctaattacaactgacagcacttcctaatttactttaaaatatg

SEQ ID NO: 41887 - DNA, 120 bp, synthetic construct
  source 1..120: mol_type = other DNA
ttgacttgaaagttttatttatttatttatttatttttttaaaaaacacctttaatatcacagatttccttatagcaatatatgaactttctgatttctattgacttttctgattttgtt

SEQ ID NO: 41888 - DNA, 120 bp, synthetic construct
  source 1..120: mol_type = other DNA
tacagttggtaaccttccatttgtgttttattgctgtgtgtctggtaaagacgttctctaagtttgtgtgaaagtgtagtagaaggttcaggaacatacagtacttcaagaaaactgtgt

SEQ ID NO: 41889 - DNA, 120 bp, synthetic construct
  source 1..120: mol_type = other DNA
tttgtaaacaaaaacgttgactttagtctatgttgtattactgttggaaatattacctccttatgaacctcataagacatggagcctggctatggtcactgttaggagtattttgctgct

SEQ ID NO: 41890 - DNA, 120 bp, synthetic construct; identical to SEQ ID NO: 11931
  source 1..120: mol_type = other DNA

SEQ ID NO: 41891 - DNA, 120 bp, synthetic construct
  source 1..120: mol_type = other DNA
gtaagagcacacttcccaatttaagaagcattactaactttcagtggttctctgtaagcattttcctgatcacaattcctacttcccaactgataattcctatcctgaattctaagctta

SEQ ID NO: 41892 - DNA, 120 bp, synthetic construct
  source 1..120: mol_type = other DNA
accatgtatgtattctattgcaacctgctattttcacttagcattacatttctaaaattgatccacattgatgtttatagctatagatcatttatattcacaagtatacagcactctatt

SEQ ID NO: 41893 - DNA, 120 bp, synthetic construct
  source 1..120: mol_type = other DNA
aatcttgtatgtatccttctaatgtacatgtacaagaatttctttagggtttatacctagaagagaaattactgagctgtagagtatgggcatgctcattttcacaagataataccaaat

SEQ ID NO: 41894 - DNA, 120 bp, synthetic construct
  source 1..120: mol_type = other DNA
gcatgctctcagtgataacatgtaagaattctggttgttccacatctttgccatccttgatattgtcaggcattaatatttttgcttatgtaatggatgtaaaataaaatcttggggttt

SEQ ID NO: 41895 - DNA, 120 bp, synthetic construct; identical to SEQ ID NO: 11932
  source 1..120: mol_type = other DNA

SEQ ID NO: 41896 - DNA, 120 bp, synthetic construct
  source 1..120: mol_type = other DNA
gtgtgtttaaaagagatccctctgtcttctaaggtcatagagttacagctttaaaaattttctcttagatgtcaaagttggctagttgcggtggctcacacctctaatcccagtgctttg

SEQ ID NO: 41897 - DNA, 120 bp, synthetic construct
  source 1..120: mol_type = other DNA
acagaggtgggaggattgcttgagcccagagttcaaagctgcagtgagctatgattacaacattgtactctagcctgggtgacacagcgagaccctgtttcaaaaaaagaataaagtgtc

SEQ ID NO: 41898 - DNA, 120 bp, synthetic construct
  source 1..120: mol_type = other DNA
tatcctagcagtgttgattaggctgtctttgaccattgccacctttgttgtatgtgtgtttctgagatccctattttgttaaatttgcttatttctgtgccaatgtcatcttgctgaatt

SEQ ID NO: 41899 - DNA, 120 bp, synthetic construct; identical to SEQ ID NO: 11933
  source 1..120: mol_type = other DNA

SEQ ID NO: 41900 - DNA, 120 bp, synthetic construct
  source 1..120: mol_type = other DNA
ttacaggcaaacttgaagatttaccaagaaattcagaagttagtatcagattttacttgggatcaccccaggaaatgctttatgtttaggagactaggaataccttcagaagtccttgag

SEQ ID NO: 41901 - DNA, 120 bp, synthetic construct
  source 1..120: mol_type = other DNA
cagcatctctgagatggaattcttcttgttttatagctgatatgtgatctgggctacataccgtctctctgtatccagaatgtacattcttaccacccatataccagctgcccaccagct

SEQ ID NO: 41902 - DNA, 120 bp, synthetic construct; identical to SEQ ID NO: 11934
  source 1..120: mol_type = other DNA

SEQ ID NO: 41903 - DNA, 120 bp, synthetic construct
  source 1..120: mol_type = other DNA
acccgacttactgagccatgtccgtgtcgtcctgttggtaagggctgttcaggatcctcagtgatgagaattggttgtgagttagagcctgggacaatggcctgatgggaaatgctgcat

SEQ ID NO: 41904 - DNA, 120 bp, synthetic construct
  source 1..120: mol_type = other DNA
agcttgcctgttctccctctcctttcagctgtggacactgggctgctggatgtgacttgcatttcacattttcccagtgatttgggcctgatttatctcttgattgctctctggtaaccg

SEQ ID NO: 41905 - DNA, 120 bp, synthetic construct
  source 1..120: mol_type = other DNA
attgaaaaaaacccaaatatatatatgtgtgtgtgtgtatatatgtatatataagtatatatatgtatatatgtatatatgtatatgtgtatatatgtatatgtatatgtgtatatatgt

SEQ ID NO: 41906 - DNA, 120 bp, synthetic construct; identical to SEQ ID NO: 11935
  source 1..120: mol_type = other DNA

SEQ ID NO: 41907 - DNA, 120 bp, synthetic construct
  source 1..120: mol_type = other DNA
cccaggctggagtgcaatggcatgaccttggctcattgcaacctccacctcccgggttcaagcaattctcctgcctcagcctgccaagtagctgggattacaggcacctgccaccatgcc

SEQ ID NO: 41908 - DNA, 120 bp, synthetic construct
  source 1..120: mol_type = other DNA
atgagccaccacacctggcagctaagcacttttatacattaccgtatctaatcctcacagtagcccacaagacaggttccgacgattattcctatttgaagacacaggaaaagtaagttc

SEQ ID NO: 41909 - DNA, 120 bp, synthetic construct
  source 1..120: mol_type = other DNA
gcagatgtagaaactgctagggtgtgtcagatgagagatgtttttgatgctgtgacagagatgtttttgatgctggggacagctgagactctcatacatacaattggctctggtatgcct

SEQ ID NO: 41910 - DNA, 120 bp, synthetic construct
  source 1..120: mol_type = other DNA
gctgagtgtcttaataggtctaatgactgtgctgcatgaatgtaaagtaggttctgtatgcaaagggttaagaaactggatgatatagttagttttgatataaaaagaaggattaatgat

SEQ ID NO: 41911 - DNA, 120 bp, synthetic construct; identical to SEQ ID NO: 11936
  source 1..120: mol_type = other DNA

SEQ ID NO: 41912 - DNA, 120 bp, synthetic construct
  source 1..120: mol_type = other DNA
cgatcttggctcactgcagactccgcctcccgggttcaatcaattctccttcctcagcctcctgagtagctgggattacaggtgtgcaccaccacgcccagcttatttttgtatttttag

SEQ ID NO: 41913 - DNA, 120 bp, synthetic construct; identical to SEQ ID NO: 4620
  source 1..120: mol_type = other DNA

SEQ ID NO: 41914 - DNA, 120 bp, synthetic construct
  source 1..120: mol_type = other DNA
ggacatacacaatttaaaaaatctattataatagtttttctggttttggaggttggatccagctggatatatttgtgaaacccccagagaaggccaggaagatgggaaaagtagccagag

SEQ ID NO: 41915 - DNA, 120 bp, synthetic construct; identical to SEQ ID NO: 11937
  source 1..120: mol_type = other DNA

SEQ ID NO: 41916 - DNA, 120 bp, synthetic construct
  source 1..120: mol_type = other DNA
catcctaacttcttaaccgtttacatgcagaacctactttgcattgatttgctagatatattagtagaatcctagggcaagctattcatgaagcatttggtagaggaggaagaatctgta

SEQ ID NO: 41917 - DNA, 120 bp, synthetic construct
  source 1..120: mol_type = other DNA
atgggtttgcaaattacagatagtcctttggatttaccagttaggaggtcatcagtgaccttttgatagtagcttaggaaagacacgggcatggaaccactgagcacctaatgaaggaaa

SEQ ID NO: 41918 - DNA, 120 bp, synthetic construct
  source 1..120: mol_type = other DNA
gaaagtaaaatgttgcagtggagagttagcctaatcaagaaacacagagatgactaagtgaccttcccacacatgaacacaatattttgtctcatcctttgttcaatttagagactgacc

SEQ ID NO: 41919 - DNA, 120 bp, synthetic construct; identical to SEQ ID NO: 11938
  source 1..120: mol_type = other DNA

SEQ ID NO: 41920 - DNA, 120 bp, synthetic construct
  source 1..120: mol_type = other DNA
tgcaatgacctggcctgccacagcagcggggagttggggaaaagcctacattccaagcaagactgagtgtggctgcaaagaaggatgttggttcccaggagcagaggactggggcagaaa

SEQ ID NO: 41921 - DNA, 120 bp, synthetic construct
  source 1..120: mol_type = other DNA
atgagaagatgctgactcaggtttctctgctctacatggtgcaagtttttaagtttcctcaaattacggaatacaattgacaagagaagaactacttttcgggagccataaataaccttt

SEQ ID NO: 41922 - DNA, 120 bp, synthetic construct
  source 1..120: mol_type = other DNA
aaaataatacatagtctacttttatttaaaattagataacgatggactttagctatactgaagtaccatttgaggtacaatggtggacttatgaacggtctaggaggtccacagctttgt

SEQ ID NO: 41923 - DNA, 120 bp, synthetic construct; identical to SEQ ID NO: 11939
  source 1..120: mol_type = other DNA

SEQ ID NO: 41924 - DNA, 120 bp, synthetic construct
  source 1..120: mol_type = other DNA
ctgtgtttcccagactggtcttgaactcctggactcaagcagttctcccacctcggccccccaaatagttggtactacaggcgtacgtcaccacgcctggctaattttttattttttgta

SEQ ID NO: 41925 - DNA, 120 bp, synthetic construct
  source 1..120: mol_type = other DNA
ggccctttataccaaaacttcctgagcagcactattttacaggcagtgttaacataattgtaacatatttagatcttggcatatttttcaatattggctttagttaaattttgtgctcca

SEQ ID NO: 41926 - DNA, 120 bp, synthetic construct
  source 1..120: mol_type = other DNA
tatatctaaaacagaactcattatctttcctgcacgtgctactttgcctctcacattctctatttctagcaccttcactcctggtcattagattggcagcccttggattcaaaagaagca

SEQ ID NO: 41927 - DNA, 120 bp, synthetic construct
  source 1..120: mol_type = other DNA
acagaggataagattcccttcctcataacctcctggtctggttgggacaagaagtgatggtgtgtggttgtgcattctcagggtaaagcaaatggcattgatcagtgctgtggaaattct

SEQ ID NO: 41928 - DNA, 120 bp, synthetic construct; identical to SEQ ID NO: 11940
  source 1..120: mol_type = other DNA

SEQ ID NO: 41929 - DNA, 120 bp, synthetic construct
  source 1..120: mol_type = other DNA
tacaacctgggagctgatttttcccttgaaacctaaagccctcttgtaggtaaatgccacatcctgatccgtgaagatgggatattgccttgcagggctttacagctgtgaattagaaaa

SEQ ID NO: 41930 - DNA, 120 bp, synthetic construct
  source 1..120: mol_type = other DNA
tggttatgtttgcctcttttataacatgccattctgtatgtaaaaacaagtatcgtactaaggtcctgcaagagccttagtacaataatgagaaatccgcattccactgtcagtctaatg

SEQ ID NO: 41931 - DNA, 120 bp, synthetic construct; identical to SEQ ID NO: 11941
  source 1..120: mol_type = other DNA

SEQ ID NO: 41932 - DNA, 120 bp, synthetic construct
  source 1..120: mol_type = other DNA
tgaaaacagagagaaaagccttcaaaacataattattcgcatctccttgtggctgtggcatagctgaagcctgcagtaaattttcagcatctggatatatttgtgtcaaatagctgcaga

SEQ ID NO: 41933 - DNA, 120 bp, synthetic construct
  source 1..120: mol_type = other DNA
gaggtcagctttttgcgaactctgaaagtcaaagatagaggtggctgtgttgagtttagaaagtgaatcaatgggacagttggcacccctaccttccaaattcagattagccttgtagta

SEQ ID NO: 41934 - DNA, 120 bp, synthetic construct
  source 1..120: mol_type = other DNA
gggttcaagtgattctcctgtgtcagcctcctgagtagctgagattacaggtctctagtagagatggggttttaccatgttggccaggatggttgtctcgatctcctgaccttgtgatct

SEQ ID NO: 41935 - DNA, 120 bp, synthetic construct
  source 1..120: mol_type = other DNA
catggtcacagctcactacagcctcagcctcccaggctcaagcaatcctcccacctcagcctcctgaatagctgggactgcaggcatgcaccatcacacccagctaattttttaattctt

SEQ ID NO: 41936 - DNA, 120 bp, synthetic construct; identical to SEQ ID NO: 11942
  source 1..120: mol_type = other DNA

SEQ ID NO: 41937 - DNA, 120 bp, synthetic construct
  source 1..120: mol_type = other DNA
ctgtttgtgacattgtgcatacttctcaatgatcttccctcttcatactttaacttactcctctccttgcccagatcactaaagcggcatgactcagccagcagaattgtcatcatcccc

SEQ ID NO: 41938 - DNA, 120 bp, synthetic construct
  source 1..120: mol_type = other DNA
gctctggcaggttggcgaattagtatgttacagctgtaaatgtatttctcctaaggtggttttctagcatcgtgtgcctcaattcagttgtttctttaaagttcagcattgctttttttt

SEQ ID NO: 41939 - DNA, 120 bp, synthetic construct; identical to SEQ ID NO: 11943
  source 1..120: mol_type = other DNA

SEQ ID NO: 41940 - DNA, 120 bp, synthetic construct
  source 1..120: mol_type = other DNA
gatggagtttcactctttgttgcccaggctggagtgcagtggcacgatctcggctcactgcaacctctacctcccaggttcaagcgattctcctgtctcagcctcccgagtagctgggat

SEQ ID NO: 41941 - DNA, 120 bp, synthetic construct
  source 1..120: mol_type = other DNA
acttgatctagggagtctagggttgcagcattattttgtagactcgatgcggactgccttaatattttacagcatttttattttgtcttcttgttttttattgtgataaaaacataaaac

SEQ ID NO: 41942 - DNA, 120 bp, synthetic construct
  source 1..120: mol_type = other DNA
ccaggactttttcatcttgcaaaactgaaattctgtacccatttaatactaattttcccttcctcccccgtcctcctcccagcccttgacaaccacctttctactttgtttctgtgattt

SEQ ID NO: 41943 - DNA, 120 bp, synthetic construct
  source 1..120: mol_type = other DNA
attcctgagcttcatctatggtgtggcatgccatagaatttccttcttttaaggcttcataatgtcacgttgtgtatatatttatctgtatacatgacagtttctttatctgttcgtctg

SEQ ID NO: 41944 - DNA, 120 bp, synthetic construct; identical to SEQ ID NO: 11944
  source 1..120: mol_type = other DNA

SEQ ID NO: 41945 - DNA, 120 bp, synthetic construct
  source 1..120: mol_type = other DNA
aaattgaccattctggcaccctgatctttgtccattctggcacagtgaggtctctaattgtgaaaaataaatgtgtgttgtgtgtaagccgcccagtctataacacctttttatagcagc

SEQ ID NO: 41946 - DNA, 120 bp, synthetic construct
  source 1..120: mol_type = other DNA
actttgtcacccaggctggagtgcagtggcgtgatcttagctcactgcaacctctgcctcctgggttcaagtgattttcctgcctcagcctcccaagtagctgagattataggcacctac

SEQ ID NO: 41947 - DNA, 120 bp, synthetic construct
  source 1..120: mol_type = other DNA
ctcccaaagtgctgggataacaggcttgagccaccgtgcccagccatactgttttctataatggctgcaccattttacatttccaccaacagtgcgtagtgttctgatttctctgcagcc

SEQ ID NO: 41948 - DNA, 120 bp, synthetic construct; identical to SEQ ID NO: 11945
  source 1..120: mol_type = other DNA

SEQ ID NO: 41949 - DNA, 120 bp, synthetic construct
  source 1..120: mol_type = other DNA
aaaatactgcctaacaactatttatataacagtcacatggtattaggtattataagtaatctagaaatgatttaaagtatacaggagaatgtgcataggctgcatgtgaatatgacacca

SEQ ID NO: 41950 - DNA, 120 bp, synthetic construct
  source 1..120: mol_type = other DNA
gctgcgtttttactctgttgactgtttcctttgatttgcagagggtttttaagtttgatgtagtcccagtttatttttgtttttgtggcctacgcttttggtgtcgtatccaagaaatca

SEQ ID NO: 41951 - DNA, 120 bp, synthetic construct; identical to SEQ ID NO: 11946
  source 1..120: mol_type = other DNA

SEQ ID NO: 41952 - DNA, 120 bp, synthetic construct
  source 1..120: mol_type = other DNA
aggcctcagctttgctctttttcaatattttttggctatttggggttccttgagattgcatttgaattttatgggttttttttttttcctttttctacaaagaatatcattgaaattttg

SEQ ID NO: 41953 - DNA, 120 bp, synthetic construct
  source 1..120: mol_type = other DNA
cgttgccaagtgcgtgttccgattgaggctggataaaagaacggcacaatcaaaccgtgcagtgcagtctgtgaacaaattgtctccagctcgaaatgatgaaaagaatattttaacaac

SEQ ID NO: 41954 - DNA, 120 bp, synthetic construct
  source 1..120: mol_type = other DNA
tgccagaggaagaagtcagataggagctctctgtttttgttgctgttgttacttgccaaataatatttgctacatttttgggtcagtaatgaggcttaagtgagaataagtgggttttgt

SEQ ID NO: 41955 - DNA, 120 bp, synthetic construct; identical to SEQ ID NO: 11947
  source 1..120: mol_type = other DNA

SEQ ID NO: 41956 - DNA, 120 bp, synthetic construct
  source 1..120: mol_type = other DNA
aatggtgtgatcttggttcactgcaacctccgcctcctgggttcaagcgattctcctgcctcagcctcctgagtagctgggattacaggcactcgcccaccacgcccggctaattttttt

SEQ ID NO: 41957 - DNA, 120 bp, synthetic construct
  source 1..120: mol_type = other DNA
agcgcctagccaacaaaaccattttagatagcatataataaatttattagtaattccaaattctgtgatctcacttaatagaaaccacacattctactagtaggccaattaattagcctt

SEQ ID NO: 41958 - DNA, 120 bp, synthetic construct
  source 1..120: mol_type = other DNA
acattaatcatcttaaaattccagaaaggaaggtagagggcatttattttccgctaaggggtttagaacagagatacgtaacttaagtatagcttactaagagccagttgttttgatttt

SEQ ID NO: 41959 - DNA, 120 bp, synthetic construct; identical to SEQ ID NO: 11948
  source 1..120: mol_type = other DNA

SEQ ID NO: 41960 - DNA, 120 bp, synthetic construct
  source 1..120: mol_type = other DNA
aacctccgtctctgctaaaagtacaaaaaaaaaaaaagaaggccgggtgcggtggctcaagtctgtaatcacagcactttgggaggccgaggtgggtggatcacgaggtcaggagatcga

SEQ ID NO: 41961 - DNA, 120 bp, synthetic construct
  source 1..120: mol_type = other DNA
cgggaggtggagcttgcagtgagcagagatcgcgccactgcactccagcctgggcaacagagtgggactccatctaaaaaacaaacaaaaatatcttgaatgcttttgagtgactccttc

SEQ ID NO: 41962 - DNA, 120 bp, synthetic construct
  source 1..120: mol_type = other DNA
ctactcccctcagcactaagcattgaatactgcttttttttgaaggggtgagggggaagaagctgttttaaattgcagatgtatttggatttcttttttatgtaactcacatttcttatt

SEQ ID NO: 41963 - DNA, 120 bp, synthetic construct
  source 1..120: mol_type = other DNA
ccagattccagaagaatgtatttgttacatctctgtcactttttttcctcactgcatttctaatagtttaataaaaaatctcttatgaagaaaagattgcctttctcttgcgtcaaacat

SEQ ID NO: 41964 - DNA, 120 bp, synthetic construct; identical to SEQ ID NO: 11949
  source 1..120: mol_type = other DNA

SEQ ID NO: 41965 - DNA, 120 bp, synthetic construct
  source 1..120: mol_type = other DNA
tatcaggcacaaagtcaagaatattaatgaattcattatttataacccctttgttggacccaccgtactatacatgagtgagaaacagcggcaaggagctcatagtgcagcctctgagat

SEQ ID NO: 41966 - DNA, 120 bp, synthetic construct
  source 1..120: mol_type = other DNA
agaaaggcaggtgctggggtgacagagttaaggaaatcaatactgaccaccaatatagacactgcccaccaatgtagactctgaccctgacccagaggcgggtccatactcctgtactga

SEQ ID NO: 41967 - DNA, 120 bp, synthetic construct; identical to SEQ ID NO: 11950
  source 1..120: mol_type = other DNA

SEQ ID NO: 41968 - DNA, 120 bp, synthetic construct
  source 1..120: mol_type = other DNA
gaataggatgatgtgtgtacaagtggctcacacagtgcctggcacctattagggcatcactaaatgtttattcactgacctgtgaataggtatgttaggatttttccaaactcttttagg

SEQ ID NO: 41969 - DNA, 120 bp, synthetic construct
  source 1..120: mol_type = other DNA
aatacagaaaatgcagaaaaataaacttcaattctgaaagtatttaatttaaagtgaaaattaaatgacccaatatctcggcacttagcaataaccagtcgctcgtgttgcccaaactgg

SEQ ID NO: 41970 - DNA, 120 bp, synthetic construct
  source 1..120: mol_type = other DNA
gctgggattacaggtgtgtatcaccatgcctggctaattttgtatgtttagtagagacggggtttctccatgtttgtcaggctggtctcaaactcctgacctcaggtgatccacccacct

SEQ ID NO: 41971 - DNA, 120 bp, synthetic construct; identical to SEQ ID NO: 11951
  source 1..120: mol_type = other DNA

SEQ ID NO: 41972 - DNA, 120 bp, synthetic construct
  source 1..120: mol_type = other DNA
cacttcattgtgcagaaatgaggaataaatgagaatatatgtatagggcttaagaaattacccgggaagtaatgagcactcaaccgacgttaacattgcttattattgttgaattgtgaa

SEQ ID NO: 41973 - DNA, 120 bp, synthetic construct
  source 1..120: mol_type = other DNA
tgaaagaaattcatgcgaccttttaaggacatcgtagcagtgctttgctttttataagaaatcattaattacaaatgtcaagttaatggcagcttaagaaacaactgagtatattgtggt

SEQ ID NO: 41974 - DNA, 120 bp, synthetic construct
  source 1..120: mol_type = other DNA
tgggtagaacatggaaacatacttgtctggctctataataataaaattgccttctatgttttatggtataccttgtgcttttcaaagtgttttcatttgcattatcttattcacttctcc

SEQ ID NO: 41975 - DNA, 120 bp, synthetic construct
  source 1..120: mol_type = other DNA
aatttatttggggagttagcttcattttttccatattgatagtgatttattgttgttcatttttaacctgattattttatatgtcagctctgacatatatcaaattgtcctacacttatg

SEQ ID NO: 41976 - DNA, 120 bp, synthetic construct; identical to SEQ ID NO: 11952
  source 1..120: mol_type = other DNA

SEQ ID NO: 41977 - DNA, 120 bp, synthetic construct
  source 1..120: mol_type = other DNA
ttttgctatttatattcttaagtgtgtcatttttttcttgctgttgtgaatggaatctttaaaaacatatatgttctgtttgttcctgaaatatattaagtaaagtgatttttaaaaata

SEQ ID NO: 41978 - DNA, 120 bp, synthetic construct
  source 1..120: mol_type = other DNA
gtcgtttcattgcactagctcataccttcagcacagggttcaacagaagtggtaaaaagcaggcattaactatgatatttgctataggatttcaatacactgtatcaagttaaattccca

SEQ ID NO: 41979 - DNA, 120 bp, synthetic construct
  source 1..120: mol_type = other DNA
atcatgtaatattcagatattgaggcaaagacttttccagatgaaaaagacctaacagtttttatcacaatgaggaaaaggaaccaatatgattaattaagcaaattactgaaagatgca

SEQ ID NO: 41980 - DNA, 120 bp, synthetic construct; identical to SEQ ID NO: 11953
  source 1..120: mol_type = other DNA

SEQ ID NO: 41981 - DNA, 120 bp, synthetic construct
  source 1..120: mol_type = other DNA
atttggtcaatcataggttggcaggatgtgctgcttaaggaaggaaatggaacaggaacaggtctgatacacatggacatatttttgctaatgaggcagtgggaaagacggaagaagatt

SEQ ID NO: 41982 - DNA, 120 bp, synthetic construct
  source 1..120: mol_type = other DNA
agttctggtcagactgcctgaaaatgaaatgaaccacttgttctcagctgtgataaatacagttttattactgcaggactatttagtttatgtgttgagtctactaaagtgttgagcagt

SEQ ID NO: 41983 - DNA, 120 bp, synthetic construct; identical to SEQ ID NO: 11954
  source 1..120: mol_type = other DNA

SEQ ID NO: 41984 - DNA, 120 bp, synthetic construct
  source 1..120: mol_type = other DNA
gattcagcaaaggtcagaatctaatgaggatctagactttattttgaaatccacaatttttagggccttggaaaacttgcaaaggattcagaaaatcactgtggaagaaaaaggttttag

SEQ ID NO: 41985 - DNA, 120 bp, synthetic construct
  source 1..120: mol_type = other DNA
caggtcaatgccatgaaaattattgtctggttaatccggttatgatcaatttgataaatgcaaacttcaaaggtggttccttgccggggtcctgcagagtgtgtgaaacaaaagtgagat

SEQ ID NO: 41986 - DNA, 120 bp, synthetic construct
  source 1..120: mol_type = other DNA
taacgagtgctgactcatacgatcacaaggtgaggtcccacaataggccatctgcaagctgaggaacaaggaagcccgtccaagtcccaaagcctcaaaagtagtgaagccagcagtgca

SEQ ID NO: 41987 - DNA, 120 bp, synthetic construct; identical to SEQ ID NO: 11955
  source 1..120: mol_type = other DNA

SEQ ID NO: 41988 - DNA, 120 bp, synthetic construct
  source 1..120: mol_type = other DNA
cacacattcattggtgaaaaatcagcaatataaaacagcatatggttgcataaattctcaggattctttcaactgtggatctatgaaaactaattttatatctgaaaacatcatctcata

SEQ ID NO: 41989 - DNA, 120 bp, synthetic construct
  source 1..120: mol_type = other DNA
attagccgagttttgtttattataatatttctgtagtacttgctgtatacctgtactaagttctttacaagtgatagctcatgtcacctgtcttaggaactgtatgagataggtctgtta

SEQ ID NO: 41990 - DNA, 120 bp, synthetic construct
  source 1..120: mol_type = other DNA
gctaggatttgaattctgccagtctaccttcaccaggctatgctgcctctttatttttaatagcctcagttttattgtttaccatctgtttgcaattttatcctttaactgccccaacca

SEQ ID NO: 41991 - DNA, 120 bp, synthetic construct
  source 1..120: mol_type = other DNA
cctcccgagtagctgggattacaggcgcccaccaccatgcctggctaacttttgtatttttagtagagacggtgttgcaccatatttgccaggctggtcttgaactcctggtctcaagtg

SEQ ID NO: 41992 - DNA, 120 bp, synthetic construct; identical to SEQ ID NO: 11956
  source 1..120: mol_type = other DNA

SEQ ID NO: 41993 - DNA, 120 bp, synthetic construct
  source 1..120: mol_type = other DNA
tgactatctactttagttgtgattctctcagttgtttgcttaggagtctcatccagtatagtgatggagctgggatatcaatcattcaggaaactgactccatcagtgtgtcagtcacat

SEQ ID NO: 41994 - DNA, 120 bp, synthetic construct
  source 1..120: mol_type = other DNA
cttttcttgagttctgattttaaaataagcctcatttagccaagaattgacaatgactagaccaagacatgtttgacctgtgtctgtcattagcttcctcagtaactgaatgaagaaatc

SEQ ID NO: 41995 - DNA, 120 bp, synthetic construct; identical to SEQ ID NO: 11957
  source 1..120: mol_type = other DNA

SEQ ID NO: 41996 - DNA, 120 bp, synthetic construct
  source 1..120: mol_type = other DNA
tgaaattaattattggcccctagtttcagtgcttagagtaatttagggaagcccattacacaaactggcattagcatcctccccacctccttttatcatcgtcattatcatcattactga

SEQ ID NO: 41997 - DNA, 120 bp, synthetic construct
  source 1..120: mol_type = other DNA
gaaggctgatgacagtcccattgtgggctcccattatctgttggagatggactggaaggtgacgtatattcaggatttgtttgataggcaccatttggttctatctgagttattttatca

SEQ ID NO: 41998 - DNA, 120 bp, synthetic construct
  source 1..120: mol_type = other DNA
gaaaggcagctctagataaatatgagtgcaagataaaatgttcgtagagaaatgggagaaatagggctggggtagacagaaaccttaatgtaggattcaaaagatgctatttgttactat

SEQ ID NO: 41999 - DNA, 120 bp, synthetic construct; identical to SEQ ID NO: 11958
  source 1..120: mol_type = other DNA

SEQ ID NO: 42000 - DNA, 120 bp, synthetic construct
  source 1..120: mol_type = other DNA
gtggcactatctcagctcactgcaacctccacctcctggcttcaattgagtctcctgcctcagcctcttgagtagctgggattacaggcatgcatcactgcacccagctaatttttataa

SEQ ID NO: 42001 - DNA, 120 bp, synthetic construct
  source 1..120: mol_type = other DNA
gtcctttaacaacacctttttaatggaaatcttgttctgaacagttttcgttccagcattctgaagatggcatctgcatcttctgagcatgcttcttcctcagccgtttcctctgggctc

SEQ ID NO: 42002 - DNA, 120 bp, synthetic construct
  source 1..120: mol_type = other DNA
cagcccttccaaacaacatagtcaccatagaaacaactttctaaagtaacataataacattttcttgaaaagataacctgtttgccattcttggaggcaggggaggcagaggcccagaca

SEQ ID NO: 42003 - DNA, 120 bp, synthetic construct; identical to SEQ ID NO: 11959
  source 1..120: mol_type = other DNA

SEQ ID NO: 42004 - DNA, 120 bp, synthetic construct
  source 1..120: mol_type = other DNA
ttggctaagtagaggaaatgagtattttcatacattgtaggtaagagtatatattggatcattattttgggaagaaagttttacaatatgtctcaaaagtcaaactaaatgaaatcttta

SEQ ID NO: 42005 - DNA, 120 bp, synthetic construct
  source 1..120: mol_type = other DNA
ttacaatggtaaaaagttagcaaaaacttgacctccaggtaaataggtggtttgaatttattcattgaatttcatttactttctaagcttcattaaaactgtagtaaaaatttttttttt

SEQ ID NO: 42006 - DNA, 120 bp, synthetic construct
  source 1..120: mol_type = other DNA
agaacgtttcctcttgccctattccgtgcagtctccacctccatggactacactgttcagattcctctcaccatagattagttttccttgttcttcgacttcacataaatgaaataatac

SEQ ID NO: 42007 - DNA, 120 bp, synthetic construct
  source 1..120: mol_type = other DNA
acagtggcgcaatcatgacgcactgcaaccttctcctcctgggttcaagtgattctcctgcctcagcctcccgagtagctgggactacagatgtgtgccaccacgcctggctaattttgt

SEQ ID NO: 42008 - DNA, 120 bp, synthetic construct; identical to SEQ ID NO: 11960
  source 1..120: mol_type = other DNA

SEQ ID NO: 42009 - DNA, 120 bp, synthetic construct
  source 1..120: mol_type = other DNA
ttccgcattccttagctctggttctggtttcagacttcactttatattggcggggttttaaagctagaggagtctttacctacttactcttatgtacagatctgaatatggaggtcagga

SEQ ID NO: 42010 - DNA, 120 bp, synthetic construct
  source 1..120: mol_type = other DNA
agagtcccttcttcaaggagctcaatccagcaagggaggcagattctttgcaggcaggaccaggcttccctacagcagaaggaaactaaatcagggtaatgagcctcagcagggacgggc

SEQ ID NO: 42011 - DNA, 120 bp, synthetic construct; identical to SEQ ID NO: 11961
  source 1..120: mol_type = other DNA

SEQ ID NO: 42012 - DNA, 120 bp, synthetic construct
  source 1..120: mol_type = other DNA
ctgcctgccacgaaatgctctctcagcagctgctggtccagctgtgggcagccgtacaagctgtttacagcatcctgggacaggtgcttgcaaacatatggatgccatgggggatccgag

SEQ ID NO: 42013 - DNA, 120 bp, synthetic construct
  source 1..120: mol_type = other DNA
ggctggcacccaggctggtggtggcctcacatcacctatgcctgaggccagtcctggattgccccagaagaaacaatttctttactccaaagaaatccaaaggagttaaaaagtgagagc

SEQ ID NO: 42014 - DNA, 120 bp, synthetic construct
  source 1..120: mol_type = other DNA
tgatggggcctcagcaggagtgcatggaggaggacgcctactgtctggacctggaccggaggcttggcaagatgcaggacaactggaagccgtgagtcagacccgcgactggctcaagaa

SEQ ID NO: 42015 - DNA, 120 bp, synthetic construct; identical to SEQ ID NO: 11962
  source 1..120: mol_type = other DNA

SEQ ID NO: 42016 - DNA, 120 bp, synthetic construct
  source 1..120: mol_type = other DNA
gaaactcggccgaacatgagcctgagctgctccctcgaaaacacttttatctcttgttactttaggtaccatttattaattgaaactgaaattgttcttagtgaagttggatagatagcg

SEQ ID NO: 42017 - DNA, 120 bp, synthetic construct
  source 1..120: mol_type = other DNA
taattcaagtacttctatttgcatttgtgtcaaattacatccctatacatataatactaaaagacttatttatatgtttacagatacacttggcattgtgtcatactattatatttatct

SEQ ID NO: 42018 - DNA, 120 bp, synthetic construct; identical to SEQ ID NO: 11963
  source 1..120: mol_type = other DNA

SEQ ID NO: 42019 - DNA, 120 bp, synthetic construct
  source 1..120: mol_type = other DNA
tattcacttgctgtggtttgaatgtgtttcctctaaaattcaggtgatgcttggctgggtgcagtgtttcatgcccgtaatcccagcacattgggaggccagatctcttgagcccaggag

SEQ ID NO: 42020 - DNA, 120 bp, synthetic construct
  source 1..120: mol_type = other DNA
taggtgatgagagctcctgccttatgaatgggatgaaggcctttaaaaaaaagtcttcatggccaggcacggcggctcacgcctataatcccagcactttgagaggtggaggtggatgga

SEQ ID NO: 42021 - DNA, 120 bp, synthetic construct
  source 1..120: mol_type = other DNA
gctgaggcaggagaattgcttgaaccgaggaggcggaggttgcagtgagctgagatcatgccatcacactccagcctgggcgacagagcaggaggcttcatgcagccttcatcttctttt

SEQ ID NO: 42022 - DNA, 120 bp, synthetic construct
  source 1..120: mol_type = other DNA
gtctcaggtattttattttagcaaaatggactgagacaccactagtagaatagctatcctctaaaacaattttcatccttttcagcctggcacataactgcaaaacaatagtattaggtt

SEQ ID NO: 42023 - DNA, 120 bp, synthetic construct; identical to SEQ ID NO: 11964
  source 1..120: mol_type = other DNA

SEQ ID NO: 42024 - DNA, 120 bp, synthetic construct
  source 1..120: mol_type = other DNA
tgtaattgttttcgtctgaatgaattaagatatatgttgcatagctgatcattttgaagttatcgctggtaaccattgagccagagacaaaaacaggtgctatcctcatggagtttgctg

SEQ ID NO: 42025 - DNA, 120 bp, synthetic construct
  source 1..120: mol_type = other DNA
tctatagtctacattacataaaataagatgttccatgtgatttcctttgaagaatgcttgagtaatatagctgttgaactagaagtgctgagcagtatatgcttcttgggatgtcttatg

SEQ ID NO: 42026 - DNA, 120 bp, synthetic construct; identical to SEQ ID NO: 11965
  source 1..120: mol_type = other DNA

SEQ ID NO: 42027 - DNA, 120 bp, synthetic construct
  source 1..120: mol_type = other DNA
tatttcccctcgctatgacccctggtaactaccctactactctctctcatctgtacaaccaaatgtgtgtgtgtatatatatatatatatatatatatatatatatatatatatatatat

SEQ ID NO: 42028 - DNA, 120 bp, synthetic construct
  source 1..120: mol_type = other DNA
acacataatgattatatatgtgtaacaggatacatatttatatatataaatgtactgtaattgaactatgattcagccatatgaaaaatattttagaaagagtttatgcatatagaagtg

SEQ ID NO: 42029 - DNA, 120 bp, synthetic construct
  source 1..120: mol_type = other DNA
atataacaggtctttacaaattgcatatgacatatagatatatatgtcttatttacatatattaaagccttattctgatactatagttatggtacagtgtaaaatctgcatatatgtgtg

SEQ ID NO: 42030 - DNA, 120 bp, synthetic construct; identical to SEQ ID NO: 11966
  source 1..120: mol_type = other DNA

SEQ ID NO: 42031 - DNA, 120 bp, synthetic construct
  source 1..120: mol_type = other DNA
aaaaagccagagagccaagtgtgacagccctaatacatgttcaggattttagagaggttgtgcatctctttctatgttttaaatctttgtgatatttttaatgagaaatataacatgtag

SEQ ID NO: 42032 - DNA, 120 bp, synthetic construct
  source 1..120: mol_type = other DNA
tctgcatatattgttcttttatttttaaaaataaatttggaatcatcctgctcatgtaataaatgtatttttaaactttttatatcattagcatttttatatcaataaactcttttttaa

SEQ ID NO: 42033 - DNA, 120 bp, synthetic construct
  source 1..120: mol_type = other DNA
gtatccatttttgaataaaaagagcctgtctttaacaaaggtctgttttttttcttgagtactcctgaaatctctccttggatctggaggtcaaattaatatagcaatccctggccaatt

SEQ ID NO: 42034 - DNA, 120 bp, synthetic construct; identical to SEQ ID NO: 11967
  source 1..120: mol_type = other DNA

SEQ ID NO: 42035 - DNA, 120 bp, synthetic construct
  source 1..120: mol_type = other DNA
ggccaaagttcagggtgattcctcagggattgatacctacttaattggtattttacatcttcagctggtttacctttgaagcttttatgtgttgtcatggatatttctgttggaaaatgt

SEQ ID NO: 42036 - DNA, 120 bp, synthetic construct
  source 1..120: mol_type = other DNA
ctcagcctgtgccctggataccgcttaggttattggatggcattactatatggtgacacggacgcggatgcattttatctttggtgagatagggcacagaaactttaaaccttacatgtt

SEQ ID NO: 42037 - DNA, 120 bp, synthetic construct
  source 1..120: mol_type = other DNA
gtcatagactgtgccagtatttagatttgactatatgtgtacaagttatcaatgtgctctgcagtgatggtacagaggctaagatgtgtaggcatttgttatgctctttacaagatatct

SEQ ID NO: 42038 - DNA, 120 bp, synthetic construct
  source 1..120: mol_type = other DNA
gctagtacgtggtacagctgggatgagaacagagcttttcctctatttagtctaggacatttcctaccattgcaccaatttttaaaacaaaccactgaatcatctactttccagaaggaa

SEQ ID NO: 42039 - DNA, 120 bp, synthetic construct; identical to SEQ ID NO: 11968
  source 1..120: mol_type = other DNA

SEQ ID NO: 42040 - DNA, 120 bp, synthetic construct
  source 1..120: mol_type = other DNA
agatgagagaagttaaaatatttgaagtcagatgtgcacagaacagcaaagatacttggaaattttatgatagtgttataatctccttggcagatggctaagcattaaattgcagacatc

SEQ ID NO: 42041 - DNA, 120 bp, synthetic construct
  source 1..120: mol_type = other DNA
aatcctatcatctagacataattacccccatgcttattttctcaatcctatatttattaatcttttctcatttaaaactacgttgtggacatgtgttctggatattagcaaatccagttg

SEQ ID NO: 42042 - DNA, 120 bp, synthetic construct; identical to SEQ ID NO: 11969
  source 1..120: mol_type = other DNA

SEQ ID NO: 42043 - DNA, 120 bp, synthetic construct
  source 1..120: mol_type = other DNA
acagagcaagaccccttttgttacaaaatgaaaaggaaacgtagaaacaatattgttaaattaaaaggcatgcacattttaaagtatttggaaacattttgccaaaaaagtaataatact

SEQ ID NO: 42044 - DNA, 120 bp, synthetic construct
  source 1..120: mol_type = other DNA
gagtgcagtagcgtgatctcgactcactgcaacctccgcctcccaggttcaagcaattctgcctcagcctctggagtagctgggattacaggcacccaccaccacgcctggctaattttt

SEQ ID NO: 42045 - DNA, 120 bp, synthetic construct
  source 1..120: mol_type = other DNA
gaccggctgattggttattattattaaccatttttacttgccattccagtagtttttttaaaaaaagcaaaaaaccccaaaacctatttttgcagtttggcttattttttaggtttttaa

SEQ ID NO: 42046 - DNA, 120 bp, synthetic construct; identical to SEQ ID NO: 11970
  source 1..120: mol_type = other DNA

SEQ ID NO: 42047 - DNA, 120 bp, synthetic construct
  source 1..120: mol_type = other DNA
gtgagtttcctacttaatacattatttgcctgcttttctaatgggagcgcctcttctcaatatataacagctgtttataagataagattatttacccttagtgaattaagtacaattgct

SEQ ID NO: 42048 - DNA, 120 bp, synthetic construct
  source 1..120: mol_type = other DNA
cactgttaggacttaaatctttaacctatctgaaatttattctggcaaaggatagggagagctttaatttttttttccccaagttgttagctaattgtcccaacccatttattatctttt

SEQ ID NO: 42049 - DNA, 120 bp, synthetic construct
  source 1..120: mol_type = other DNA
gatctcagctcacaacaacctctgcctcccaggtttaagcgatcctcgtgcctcagtctcccaggtagctgggactacatgcatgcaccatcactcctagataatttttgtatttttagt

SEQ ID NO: 42050 - DNA, 120 bp, synthetic construct; identical to SEQ ID NO: 11971
  source 1..120: mol_type = other DNA

SEQ ID NO: 42051 - DNA, 120 bp, synthetic construct
  source 1..120: mol_type = other DNA
attgcagaagggcatagaggaccagagcaggcatcacatggagagaggaaggaaatgaggaggaggtcccaggctctttaacagtcagctctcacaggaatgaatccagtgagaactcac

SEQ ID NO: 42052 - DNA, 120 bp, synthetic construct
  source 1..120: mol_type = other DNA
aactatatcatatatatttcatatgcatttaattaccataactttagatttcattttaatgtgtagcaagggtagtttcactcaatccatttctctttataatatttcctttgccttttc

SEQ ID NO: 42053 - DNA, 120 bp, synthetic construct
  source 1..120: mol_type = other DNA
tggagcacgtatatatctaggagtttgaaatggactagtaattttgcaagggattatggtattgagcaggagaaaggaaatgacccatggaatgtgtttctcatatcacatgaagtcaac

SEQ ID NO: 42054 - DNA, 120 bp, synthetic construct; identical to SEQ ID NO: 11972
  source 1..120: mol_type = other DNA

SEQ ID NO: 42055 - DNA, 120 bp, synthetic construct
  source 1..120: mol_type = other DNA
tggattaagatgttgtaaatgaggattcttactttttatttacctgtgctggaactcctggaatcatatgaagtattttaaaaagcatatttgacttcatatttccttttattatttcat

SEQ ID NO: 42056 - DNA, 120 bp, synthetic construct
  source 1..120: mol_type = other DNA
tttgaagaccagcagaaaaaggtttcctagtcttgtaaacttaggaattatataggatgatatatgtaaaattttgctccgtttttgggatatggtaggtactttccatgataatgaaaa

SEQ ID NO: 42057 - DNA, 120 bp, synthetic construct
  source 1..120: mol_type = other DNA
aggttgtggaaagtcctccaaatattttttactacattctagtaattacgttactaaggttttgttaggttacacattttaaccaattaatatggagctctcacaatgtcatttcacgcc

SEQ ID NO: 42058 - DNA, 120 bp, synthetic construct
  source 1..120: mol_type = other DNA
actaaggaaataatgcattatagcatcctctatataactcctgtaacaacatatggaatgaaaaatattaatctagtaaaatcatatattaggaccttcaacttaactttaattctaatt

SEQ ID NO: 42059 - DNA, 120 bp, synthetic construct; identical to SEQ ID NO: 11973
  source 1..120: mol_type = other DNA

SEQ ID NO: 42060 - DNA, 120 bp, synthetic construct
  source 1..120: mol_type = other DNA
cctggccaacatggtgaaaccctgtctctactaaaaatacaaaaaaattagccgggcatggtgggcacctgtaatcccagctacttagaaggctgaggcaggagaatggcttgaacccag

SEQ ID NO: 42061 - DNA, 120 bp, synthetic construct
  source 1..120: mol_type = other DNA
aaaaaaaagcaagaaaaacccctataatgtgttcaatatactatataggtattgcaatttgaagcatttaagttagggtctgagtagcacatgctgaatgaatagtggcccagtgctttg

SEQ ID NO: 42062 - DNA, 120 bp, synthetic construct; identical to SEQ ID NO: 11974
  source 1..120: mol_type = other DNA

SEQ ID NO: 42063 - DNA, 120 bp, synthetic construct
  source 1..120: mol_type = other DNA
cctctgacatggagtatttattatattgtaacatcattgcattattataatgtaacctttccctgctcgatgactcaggctataggtagtctacgtgcctgacttgttgatctatgcacc

SEQ ID NO: 42064 - DNA, 120 bp, synthetic construct
  source 1..120: mol_type = other DNA
gaatatttgggaaattttacttttggatatcagctagttgttaccaaagtgctttaggtggtggctaaaaatgtcagtttgcctgactttgaatcttgactgcacatcgcataacagctg

SEQ ID NO: 42065 - DNA, 120 bp, synthetic construct
  source 1..120: mol_type = other DNA
cagtacatgtcagcggtggtggtgataatacgtgtatgagttccaaggtactgagtaggcacagtgtgaagtagttgtgtttgtgtcctgtgattagatagtagtgatgactgctgactc

SEQ ID NO: 42066 - DNA, 120 bp, synthetic construct; identical to SEQ ID NO: 11975
  source 1..120: mol_type = other DNA

SEQ ID NO: 42067 - DNA, 120 bp, synthetic construct
  source 1..120: mol_type = other DNA
tataaaatctgtaccttgatatgcaggggtggctgttctattaacatttctaagctatttaaaagtcagttggatgcttttcggttgcacattcatttttcatctttgcccttccattca

SEQ ID NO: 42068 - DNA, 120 bp, synthetic construct
  source 1..120: mol_type = other DNA
tgaaaattgtgaattattgattatgatcacaggattaatatgaaaccactcatatatctcgatgtgcatagcttcttttctagtgccattgtagatggattgaggaatactgtgaactgg

SEQ ID NO: 42069 - DNA, 120 bp, synthetic construct
  source 1..120: mol_type = other DNA
cactgattataggacgtgtatgcattatatctggcctgactttagcttctcaaaataggtattttatggttgaggaaatgcaggctaggagaggttggacaactgacccaagatgctata

SEQ ID NO: 42070 - DNA, 120 bp, synthetic construct
  source 1..120: mol_type = other DNA
ttcaactttagtgaaatctagcctcgtataggagaaggttcaccatggggaatttggcatttgagtcttgaagtcaaatgctggggtatgggggactacattatttgtactcaggatcca

SEQ ID NO: 42071 - DNA, 120 bp, synthetic construct; identical to SEQ ID NO: 11976
  source 1..120: mol_type = other DNA

SEQ ID NO: 42072 - DNA, 120 bp, synthetic construct
  source 1..120: mol_type = other DNA
gtgcagtggtgcaatctcggctcaccacacctctgcttcctgggttcaagtgattctcctgcctcagcctctcgaatagctgggattacaggcctgtgccaccccgcccagctaattttt

SEQ ID NO: 42073 - DNA, 120 bp, synthetic construct
  source 1..120: mol_type = other DNA
cactgcacccggcctatactttatgttaatccgtccattcactcatcataggacggctgcaggactttcacatatcccattccgacgtgtcaatgtctggaggacattatggctccattt

SEQ ID NO: 42074 - DNA, 120 bp, synthetic construct
  source 1..120: mol_type = other DNA
taaccagagtttggtcaaatgcctgttcctgaaataattactaacaaagtaaaaataacctctacaaatcagggtgtgatagcttcccttggggcacgtggctgtgttggggaggaatga

SEQ ID NO: 42075 - DNA, 120 bp, synthetic construct; identical to SEQ ID NO: 11977
  source 1..120: mol_type = other DNA

SEQ ID NO: 42076 - DNA, 120 bp, synthetic construct
  source 1..120: mol_type = other DNA
aggaatgacgttcagcacatacctgtcatgtgcatgcaagtacttttagctgtgattacttggtgtatagtatgtttgattggttatgtgttgattactgaacagctactctgatggcca

SEQ ID NO: 42077 - DNA, 120 bp, synthetic construct
  source 1..120: mol_type = other DNA
gtttccagaagagattgacgtgagagtcagaggactctcaatgtgcatggtgggcaccatctgcctggctggaagcccagctgggacaaataggcagatgaaagggaattcactctctct

SEQ ID NO: 42078 - DNA, 120 bp, synthetic construct
  source 1..120: mol_type = other DNA
gcctgaccggtggtgtgctgttggctgccttgcttctgaggctgccagatttacactgagctatgctactggctttgagccatgttagcagcttctctgattctctagcttgcagtcagc

SEQ ID NO: 42079 - DNA, 120 bp, synthetic construct
  source 1..120: mol_type = other DNA
tctgtttctcgggagacacctgactgatacacctacgtttcactctgtattatccatcttgcatgcatcatctctgatcctcacaaaaccttttcagagtagattattttacagttgagg

SEQ ID NO: 42080 - DNA, 120 bp, synthetic construct; identical to SEQ ID NO: 11978
  source 1..120: mol_type = other DNA

SEQ ID NO: 42081 - DNA, 120 bp, synthetic construct
  source 1..120: mol_type = other DNA
tactcgggaggctgaggcaggagaatggcttgaaccctggaggtggagtttgcagtgagccgagatcgcgccactgcactccagcctgggtgacagagtgagattctgtctcaaaaaaac

SEQ ID NO: 42082 - DNA, 120 bp, synthetic construct
  source 1..120: mol_type = other DNA
aatatgttaatttattgatattctagtcagtaaaagacttgcatggaaaacattgattagatgaaacactgaaacagctaaacctcacttccacttgtttaagacatcaagctgtttaaa

SEQ ID NO: 42083 - DNA, 120 bp, synthetic construct
  source 1..120: mol_type = other DNA
cgaacacagtaaactttatagatatgaagattattgggaaagatttattttaaaaagagagggatatgaaaacacggggaaatttcaggacatctcaaacattgtgctaataacacctgt

SEQ ID NO: 42084 - DNA, 120 bp, synthetic construct; identical to SEQ ID NO: 11979
  source 1..120: mol_type = other DNA

SEQ ID NO: 42085 - DNA, 120 bp, synthetic construct
  source 1..120: mol_type = other DNA
aaatatgtgaaatttaaggaacagctttctctacagctgatgatgtgggaggtttgtgaataaccgttggcaggtcctatgaagaggaggagctagtgttccatggggacgtgtgcacat

SEQ ID NO: 42086 - DNA, 120 bp, synthetic construct
  source 1..120: mol_type = other DNA
gtgggcggatcacgaggtcaggagatcgagaccatactggctaacacggtgaaaccccatctctactaaaatacaaaaaattagctgggcgtggtggcaggcgcctgtagtcccagctcc

SEQ ID NO: 42087 - DNA, 120 bp, synthetic construct; identical to SEQ ID NO: 11980
  source 1..120: mol_type = other DNA

SEQ ID NO: 42088 - DNA, 120 bp, synthetic construct
  source 1..120: mol_type = other DNA
tttcagtctttatttaaggttttgacgatacctgcaacatagacaaaagctaggattttagattgggggaaatttcctactagtagtccagtagtaccggcattttctaaccccaaattt

SEQ ID NO: 42089 - DNA, 120 bp, synthetic construct
  source 1..120: mol_type = other DNA
aagaccagcctgaccaacatagagaaaccctgtctctactaaaaatacaaaattatcccggcatggtggcacatgcttgtaatcccagctacgcacgcaggaggctaatgcaggagaatc

SEQ ID NO: 42090 - DNA, 120 bp, synthetic construct
  source 1..120: mol_type = other DNA
tattgttctgtgataggtgagcaggcacttgtgttactttgtaatactgtcttattccattttctgatgttatgacagaataccaaatggaaagaacatatatttatttatcatagttct

SEQ ID NO: 42091 - DNA, 120 bp, synthetic construct
  source 1..120: mol_type = other DNA
ttcatgagggaagaacactcatggctgatttcctcttaaaggcctcaccttttaataccatcacattgtaaaatacatgaattttggagaggatacatttaaaccatagcattaaattaa

SEQ ID NO: 42092 - DNA, 120 bp, synthetic construct; identical to SEQ ID NO: 11981
  source 1..120: mol_type = other DNA

SEQ ID NO: 42093 - DNA, 120 bp, synthetic construct
  source 1..120: mol_type = other DNA
cacttctaaaatatgtgtgtcaaaggagtgcacttccagaattttctccttctggtctgtaaggcaaaactttttcaggtgacagtgcccacaatagacaaatgtgagtcattttcctac

SEQ ID NO: 42094 - DNA, 120 bp, synthetic construct
  source 1..120: mol_type = other DNA
tggatgatttcctttttgcaaagcatcttgtgggacaagataatagtattaataacaagagaaatggtaatacagttgaacccttgagtaacgtatgtttgaactccttgggtctactta

SEQ ID NO: 42095 - DNA, 120 bp, synthetic construct
  source 1..120: mol_type = other DNA
atcatgagtgcataaaatatatgtagatcttagtctatttatgtgttaatcaactgtttatgttataccaactgtttagttggcaaggtttccaggcaacagtaggttatttttagttaa

SEQ ID NO: 42096 - DNA, 120 bp, synthetic construct; identical to SEQ ID NO: 11982
  source 1..120: mol_type = other DNA

SEQ ID NO: 42097 - DNA, 120 bp, synthetic construct
  source 1..120: mol_type = other DNA
ttaaaaaaaagttaggtgtggtgatacacacctatagtcctagctactagaggggctaaagtgggaagatcacttgagcccaggagttggaggctgcagtgaaccatgattgtgccattg

SEQ ID NO: 42098 - DNA, 120 bp, synthetic construct
  source 1..120: mol_type = other DNA
cacagtttatagttggcagagagggatttgaacattactttcttatttcagatttttttgcttttaaccactatgctgtgtttcccaaggttctgatcatttcagaaggtttgttttctg

SEQ ID NO: 42099 - DNA, 120 bp, synthetic construct; identical to SEQ ID NO: 11983
  source 1..120: mol_type = other DNA

SEQ ID NO: 42100 - DNA, 120 bp, synthetic construct
  source 1..120: mol_type = other DNA
agagagaatgagggtgaagtgaaagggatttcgccttataaaaccttcagatcttgtgagacttactcgctaccatgagaacagtatgggggaaacctcccccatgattcagttatgtgg

SEQ ID NO: 42101 - DNA, 120 bp, synthetic construct
  source 1..120: mol_type = other DNA
ccacctatttctaggtttaccaatcagctaagttaagccatctcctgggggtaaagggagtgaatgggacagaaagagccatggagtgggtgggactagagggaattcttcttactggac

SEQ ID NO: 42102 - DNA, 120 bp, synthetic construct
  source 1..120: mol_type = other DNA
ggccaatatggtgaaaccctgtctctactagaaatacaaaaattagctgggtgtggtggcacatgcctataatcctagctactcaggaggctgaggcagaagaatcgcttgaactgggga

SEQ ID NO: 42103 - DNA, 120 bp, synthetic construct
  source 1..120: mol_type = other DNA
ttaagtctggaatctagtgaaaagttcacatttctgttagaacagggaacggaagggttaatgatgttcaggaacggttttatggctcagtgggaaaattgcatgttgttagaaatatag

SEQ ID NO: 42104 - DNA, 120 bp, synthetic construct; identical to SEQ ID NO: 11984
  source 1..120: mol_type = other DNA

SEQ ID NO: 42105 - DNA, 120 bp, synthetic construct
  source 1..120: mol_type = other DNA
tcctgattctaaggccatttaagcatgggtcacactggactgctagttggcatagagaggaagtgattggtggtgaaatctgtggtacttaaaagcgctgacagtgtaggaggccagatt

SEQ ID NO: 42106 - DNA, 120 bp, synthetic construct
  source 1..120: mol_type = other DNA
agtggcgtgctctcggctcactgcaacctccgcctcccgggttcaagcgattctccagccttagcctcccaagcagctggggttacaggtgtgcaccactacacctggctaatttttgta

SEQ ID NO: 42107 - DNA, 120 bp, synthetic construct
  source 1..120: mol_type = other DNA
gtgcccagcctgtcacatagtgtataatgacagttatgcatagagatcgaaaaatgttggtcagagggcacaaagctttagttagacgggaggaatgagttcctattatacagcatggtg

SEQ ID NO: 42108 - DNA, 120 bp, synthetic construct; identical to SEQ ID NO: 11985
  source 1..120: mol_type = other DNA

SEQ ID NO: 42109 - DNA, 120 bp, synthetic construct
  source 1..120: mol_type = other DNA
tttgctgatgtgtcaaataaagtaagttttgttcaaaactgtttcatcataacatctatgagaaaaaaatgaaatggattcttggccagggctagtgtctgggtggagtttgcatgttca

SEQ ID NO: 42110 - DNA, 120 bp, synthetic construct
  source 1..120: mol_type = other DNA
gtgccctgtgatgggacggcggcctgcccagggcgggttcttgcctgacaccctgagctgctgggatggaatccagccacttgcaaccctgcactggaataagtggataattatcttact

SEQ ID NO: 42111 - DNA, 120 bp, synthetic construct; identical to SEQ ID NO: 11986
  source 1..120: mol_type = other DNA

SEQ ID NO: 42112 - DNA, 120 bp, synthetic construct
  source 1..120: mol_type = other DNA
agtccccaaagtccattgtgtcattcttatccctttgcatcctcatagcttagctcccacttgtgggtgagaacatacgatgtttgcttttttattcctgagttacttcacttagaataa

SEQ ID NO: 42113 - DNA, 120 bp, synthetic construct
  source 1..120: mol_type = other DNA
ttttgggctggttccacatttttgcaattttgaattgtgctgctattaacatgcatgtgcaagtatctttttcgtataatgccttcttttcctctgggaacttaactcttgtttctatca

SEQ ID NO: 42114 - DNA, 120 bp, synthetic construct
  source 1..120: mol_type = other DNA
ttaagaacatgaactctgaggttagaccacctgagtttgaatctctgcagcttccttctgtatgaccttgagcaagcgatttaacctttctgtgccttgctttctcatctgtaacatgga

SEQ ID NO: 42115 - DNA, 120 bp, synthetic construct; identical to SEQ ID NO: 11987
  source 1..120: mol_type = other DNA

SEQ ID NO: 42116 - DNA, 120 bp, synthetic construct
  source 1..120: mol_type = other DNA
gccctgtggaccagctgtagcatcgcatcttctccaggaaaggagagagggtgggcagtgctttgcttacctgatttcattctggttgaggggataaacctggaaaaatacttaaatgcc

SEQ ID NO: 42117 - DNA, 120 bp, synthetic construct
  source 1..120: mol_type = other DNA
gtggtttgctgttagtattatagtttttcaccttttgggtttcattatgtttgcaccaatgagacttgtcctttaatattacttgaatgaaggacgtcggttaaaggtctgtgcccaaag

SEQ ID NO: 42118 - DNA, 120 bp, synthetic construct
  source 1..120: mol_type = other DNA
atcccagagttcctgttggtacattgaattcattggttggtgacccggaagtgaccctataatggggaaagctggaaggctgtaaacatccccgagttcctgttgggacattgagttcat

SEQ ID NO: 42119 - DNA, 120 bp, synthetic construct; identical to SEQ ID NO: 11988
  source 1..120: mol_type = other DNA

SEQ ID NO: 42120 - DNA, 120 bp, synthetic construct
  source 1..120: mol_type = other DNA
atatagagctttgccatttgcttccacaatgcaatctagattatttctttggtgtcctcatatgtgttttccattttaaaggtggataaaatgtggaaatagtacgttaccctaagaaaa

SEQ ID NO: 42121 - DNA, 120 bp, synthetic construct
  source 1..120: mol_type = other DNA
atgtaactgtaatgacagattcaatttctttaaaaataaatgttaccaatattatccctaatgctattttatttgcttagaagagaatgctgcattaagcttcacctttatatgccacta

SEQ ID NO: 42122 - DNA, 120 bp, synthetic construct
  source 1..120: mol_type = other DNA
agataattgtaaggaattgacattgaaagtagagacagcttttgtagtattctgtttttcaagaaactaggttatctttttaccaaatgcagacttagcccttcccctgatagttgtctt

SEQ ID NO: 42123 - DNA, 120 bp, synthetic construct; identical to SEQ ID NO: 11989
  source 1..120: mol_type = other DNA

SEQ ID NO: 42124 - DNA, 120 bp, synthetic construct
  source 1..120: mol_type = other DNA
atactcctcaaattatgcctacttgtaatttggagtatggtcgctttttcctgtgcacaagttaaatctttgataatcttaagaaaagcatgattttagcatggagtgaggattatgaga

SEQ ID NO: 42125 - DNA, 120 bp, synthetic construct
  source 1..120: mol_type = other DNA
ttcgtgtgtctgtttttccccacttattttttaagccagttaaatgccttgctgaatgagagtgaggggaggaagtgggggtgaaatgaatgctttttagaacttcctcaacacatttag

SEQ ID NO: 42126 - DNA, 120 bp, synthetic construct
  source 1..120: mol_type = other DNA
ttcctgggcttaagcgatcctcctgcctctgcctcccaaatagctggaactacaggcgcacactactgcacccatcttttagctcttgtttgctagatgtatatggggctatgatggaga

SEQ ID NO: 42127 - DNA, 120 bp, synthetic construct
  source 1..120: mol_type = other DNA
cagcaccccttgaggctaaaactttctgtaaatctctctgtaaaacagaacaggattatgaacatagaacatggtttatcatgttctctgatgaggagaattgcatgtggatttagagga

SEQ ID NO: 42128 - DNA, 120 bp, synthetic construct; identical to SEQ ID NO: 11990
  source 1..120: mol_type = other DNA

SEQ ID NO: 42129 - DNA, 120 bp, synthetic construct
  source 1..120: mol_type = other DNA
ttagcatctctgagacttctgtggacaattgctgtaatgtgtaggtggcaaataagatgaggtcttcccactactgacccagtattctttagcgtttttctagtgaattaattttaggta

SEQ ID NO: 42130 - DNA, 120 bp, synthetic construct
  source 1..120: mol_type = other DNA
gatgtcttttgtatgctaatgaactgattgatggcttgcagaacctaggtagcttcagaattacttctggtcacctaaaggacccaggcaggaaaagagggttgagattttcagccccac

SEQ ID NO: 42131 - DNA, 120 bp, synthetic construct
  source 1..120: mol_type = other DNA
agacagtttctgtatggctgaacatgggggagtggaagtttctaaagggtgacatacctgagtatcagatggtacctccttgtaccttccctcataccttaccctatgcatctctttatc

SEQ ID NO: 42132 - DNA, 120 bp, synthetic construct
  source 1..120: mol_type = other DNA
cgcaacttgaagctagcctgttagaagttcccaaggccctacgtctggactggttaccagtgagaagtagggggcagtcttgggagactgagcccttaaccggggaatctgaggccatct

SEQ ID NO: 42133 - DNA, 120 bp, synthetic construct; identical to SEQ ID NO: 11991
  source 1..120: mol_type = other DNA

SEQ ID NO: 42134 - DNA, 120 bp, synthetic construct
  source 1..120: mol_type = other DNA
gcttacagaaaaagagtgtgaagattgaagaaacaccaccttcacttaggcagggcacctgtgttaagagaaaataccctgagataattcctatgttccaacgaatgctgtaaattagtg

SEQ ID NO: 42135 - DNA, 120 bp, synthetic construct
  source 1..120: mol_type = other DNA
tcttgcagtttctccttgcacaagctcagctacatcagttgaacaaaactttgtgttattttggggagaggagacatttatgatgtggatgatcattttaggtggatagctttttttttc

SEQ ID NO: 42136 - DNA, 120 bp, synthetic construct; identical to SEQ ID NO: 11992
  source 1..120: mol_type = other DNA

SEQ ID NO: 42137 - DNA, 120 bp, synthetic construct
  source 1..120: mol_type = other DNA
agctgggattacaggcatgcgccaccacacccagctgcgatgacaggggcacaccaccatgcctggctaatttttgtatttttttttttatagagatggggttttgccatgttgcccagg

SEQ ID NO: 42138 - DNA, 120 bp, synthetic construct
  source 1..120: mol_type = other DNA
acccagctgacaatgtcttgaaattagtcaagggtcaaatttttgaggacctttaagatattgggtctactggtcagagcaagagacatatacatgaaatactgtttaaccaacctcagg

SEQ ID NO: 42139 - DNA, 120 bp, synthetic construct
  source 1..120: mol_type = other DNA
cttttctcctacagacacaaattcttagataacaaggtcatggaatcataagaagtggctggaaccttggaaaggaaccctcgaatcttcctctatcatcccccactactcctttatcaa

SEQ ID NO: 42140 - DNA, 120 bp, synthetic construct; identical to SEQ ID NO: 11993
  source 1..120: mol_type = other DNA

SEQ ID NO: 42141 - DNA, 120 bp, synthetic construct
  source 1..120: mol_type = other DNA
gtggcagattgaaggataatattctggacattagaaaatatttgtagatagttgataaattttgcatagatatgtagaaattaaggtataatacttttttaaattgttctttcatttagc

SEQ ID NO: 42142 - DNA, 120 bp, synthetic construct
  source 1..120: mol_type = other DNA
gaatctagttaatttttaaagtagctaatggatggtgtggaaaatgtgccctctattgttaatgatagaagtctttaaaagcactgatgtagtaaccccccctggggttcagggtccact

SEQ ID NO: 42143 - DNA, 120 bp, synthetic construct
  source 1..120: mol_type = other DNA
ttttcctctgtgtatagtatttgcaaaagagtagaaaacattctaaagcactgtgatttaacaagaggtacttggctgattttagctgaaggctcttgtcaggctcttgaggtcggatct

SEQ ID NO: 42144 - DNA, 120 bp, synthetic construct
  source 1..120: mol_type = other DNA
acatggggatttatataacttctgatcttggcattaccaatcagcttctttgtcttggttagttttatggtttctgtaaaccatgggaatgtttctcaaagtggttcccagatattagcc

SEQ ID NO: 42145 - DNA, 120 bp, synthetic construct; identical to SEQ ID NO: 11994
  source 1..120: mol_type = other DNA

SEQ ID NO: 42146 - DNA, 120 bp, synthetic construct
  source 1..120: mol_type = other DNA
actgtgtcgtgcatatgtatgttggaggttagcattgaaaacaagccttcatgttcagtgcatactcatattggatgacaacattgttctaaattgtgtgataaggatttttctcaaccc

SEQ ID NO: 42147 - DNA, 120 bp, synthetic construct
  source 1..120: mol_type = other DNA
aaaacctcacttacaaattgggaagtgttattactaatgacaaatcaatggctttcattatcccagatctaagtaggaaaggaaagggtgcacctgccctgtttcagacacttgctagtt

SEQ ID NO: 42148 - DNA, 120 bp, synthetic construct
  source 1..120: mol_type = other DNA
ttcttaggaagtaccaggaaaagataagaaatttatgaaaaatgcagatggggataaaatctatgtccaaagagttagaatagaggccaagaaatgataccaatctagagtttcaggatg

SEQ ID NO: 42149 - DNA, 120 bp, synthetic construct; identical to SEQ ID NO: 11995
  source 1..120: mol_type = other DNA

SEQ ID NO: 42150 - DNA, 120 bp, synthetic construct
  source 1..120: mol_type = other DNA
tgttgaggaattatctacaatataagatatttttggtatggtcctttcctaaaaggtgggagggaaattgttggaggctctatccaaccattgacagagtatcctttgattagtagtgat

SEQ ID NO: 42151 - DNA, 120 bp, synthetic construct
  source 1..120: mol_type = other DNA
gtgcccacaagatctgatagttttataagggtctcttccctctttgtgctctccctctctcctgccgccatgtaagacacacctgcttccccttccaccatgattgtaagtttccggagg

SEQ ID NO: 42152 - DNA, 120 bp, synthetic construct
  source 1..120: mol_type = other DNA
gtagtatcctttgattaatagtatctgttatttactacagtgttccttgaggatcttatagttcagagaaggaaattattgatgaatataaatgaataataaaattctaagcctccaact

SEQ ID NO: 42153 - DNA, 120 bp, synthetic construct; identical to SEQ ID NO: 11996
  source 1..120: mol_type = other DNA

SEQ ID NO: 42154 - DNA, 120 bp, synthetic construct
  source 1..120: mol_type = other DNA
ctagtcttttccgaattgactaaggtttggcatctttttaggactaataagagacatttaccatctgttatctctgaaacttgctacctggaggcttcatctgcataataaaaaccttgg

SEQ ID NO: 42155 - DNA, 120 bp, synthetic construct
  source 1..120: mol_type = other DNA
ttccaacagggttttattctgtcacccatgctggagtggcgcatcatggcttattgcagcctcgacctccagatgatcctcccatctcagcctcctgagtagcaggaccacaggtgtggt

SEQ ID NO: 42156 - DNA, 120 bp, synthetic construct
  source 1..120: mol_type = other DNA
gcctcccaaagtgctgggattacaggcgtgagccactgtgcccagcccttaactctttcaatcagaaaaatctttgagtccacctatgacctggaagtccccctcccccaacagcttcga

SEQ ID NO: 42157 - DNA, 120 bp, synthetic construct; identical to SEQ ID NO: 11997
  source 1..120: mol_type = other DNA

SEQ ID NO: 42158 - DNA, 120 bp, synthetic construct
  source 1..120: mol_type = other DNA
tggctaaccaacacatccaggtcaataatagacctgtgggtcaccttagatctgtaagagatttgccatggacctttgcagttagtggcttgactttgttttgaattgcatagtgaaata

SEQ ID NO: 42159 - DNA, 120 bp, synthetic construct
  source 1..120: mol_type = other DNA
catcagcatcatacaccagtcggactctgttctcactcctctttcatgaagacattgagtgtgctcaggattagaaacaggagattttcccataaaattacatatattttaaacaattaa

SEQ ID NO: 42160 - DNA, 120 bp, synthetic construct; identical to SEQ ID NO: 11998
  source 1..120: mol_type = other DNA

SEQ ID NO: 42161 - DNA, 120 bp, synthetic construct
  source 1..120: mol_type = other DNA
gaggggcttccaagtgggtcttctggttccatggtgaaatgcacggggttttatagagtagcttgaggaggcggtgtctgattttcacagagcctaaaagattggttggaccaggtgtgc

SEQ ID NO: 42162 - DNA, 120 bp, synthetic construct
  source 1..120: mol_type = other DNA
aaagggaggagggagcctccatgttgaatatacctggctatctatgtttgcagcttgatttttcaggctgctttgtgttagaaaagaaataatttgggggctgctttttattaaaaggga

SEQ ID NO: 42163 - DNA, 120 bp, synthetic construct
  source 1..120: mol_type = other DNA
ggactaggtagtgtataaaccaagagcacatctcactttttcatcaactgtttactctatcacgttgcaaggactctgagggatagttaagatttaaatattcccagcagggagggaaga

SEQ ID NO: 42164 - DNA, 120 bp, synthetic construct; identical to SEQ ID NO: 11999
  source 1..120: mol_type = other DNA

SEQ ID NO: 42165 - DNA, 120 bp, synthetic construct
  source 1..120: mol_type = other DNA
aacactacataattctctaatgacacaattctggagcactgaatattccataatccctcaaaaaagtgaatccaaatataattctcattgtgacccttggtttatatagcccccaaacac

SEQ ID NO: 42166 - DNA, 120 bp, synthetic construct
  source 1..120: mol_type = other DNA
ctgttcatggtcctgtttctcactggcttagtggccttgagtaccatactataaaccaaacttattttcacaatgataaaatgagcgtgttctactagatgtcatataaattcctctttg

SEQ ID NO: 42167 - DNA, 120 bp, synthetic construct
  source 1..120: mol_type = other DNA
taccatgtagaggatgctcacattgtttgctaaattgggataaggatctttaagtttccttcctactccaagatttcatgtgaaaggtactttcttcccttaaattatcttatcattgtt

SEQ ID NO: 42168 - DNA, 120 bp, synthetic construct
  source 1..120: mol_type = other DNA
ttttcaaagaacattcacaggtaacattttagatcaaatggaaataaggtcaaatgaataacatggtacatgtatatgccaaactgtaattgttagattcaaggatggtagcattttagg

SEQ ID NO: 42169 - DNA, 120 bp, synthetic construct; identical to SEQ ID NO: 12000
  source 1..120: mol_type = other DNA

SEQ ID NO: 42170 - DNA, 120 bp, synthetic construct
  source 1..120: mol_type = other DNA
ttaaatatctctaaatggagaatgtgatatagtgatatgtggaactatatctgtcacagggtaaatctcaaaattggggttcagcccaggaggccaagtgggttcttggcttcacgcagg

SEQ ID NO: 42171 - DNA, 120 bp, synthetic construct
  source 1..120: mol_type = other DNA
tatggttatttcttgatcatatgctaaacaaggggtggattattcatgagttttccaggaagggagtgaggaatttccagaactgagggttccttccctttttagactatataggataac

SEQ ID NO: 42172 - DNA, 120 bp, synthetic construct; identical to SEQ ID NO: 12001
  source 1..120: mol_type = other DNA

SEQ ID NO: 42173 - DNA, 120 bp, synthetic construct
  source 1..120: mol_type = other DNA
tgactattttaaggatttgaagtcttcagagaaacaaagaaaaagaggaaaagtcctattactgctagatacactatagtgaatgaaaaagacttttttccagtatgcctaaacagtatt

SEQ ID NO: 42174 - DNA, 120 bp, synthetic construct
  source 1..120: mol_type = other DNA
ctagtataccttcttcacattactaaatagtaaacagattcagggaagtaaatgctgtatttagggggatatacctaagttattcacaaagctagccctagaacctcctagctcctagac

SEQ ID NO: 42175 - DNA, 120 bp, synthetic construct
  source 1..120: mol_type = other DNA
tcttgtgaagtagatacttttgagccataggatattatgtgacctaggagaaattagagaagatttttaccaactcagaaaggtttaatactcaggacgtgaatccttagcatagacatt

SEQ ID NO: 42176 - DNA, 120 bp, synthetic construct; identical to SEQ ID NO: 12002
  source 1..120: mol_type = other DNA

SEQ ID NO: 42177 - DNA, 120 bp, synthetic construct
  source 1..120: mol_type = other DNA
tataactggccccactgtttcttggcagtgtttccttcagtgttggcttcgtatgcaggcaggttttccccaggtgtttccaaaataactctccaactgctattttcccctgctgtcaca

SEQ ID NO: 42178 - DNA, 120 bp, synthetic construct
  source 1..120: mol_type = other DNA
gagatagtgtcagatcccacaggttgggggctcagtccccacaagcccccagtaaccctggacaccagtctctaatccaggctcccagaacttctaaccaactggctttgagttggggtt

SEQ ID NO: 42179 - DNA, 120 bp, synthetic construct
  source 1..120: mol_type = other DNA
gtagggtgaggtatgtgggaaggggtgcagagcttccatgccctccctgggcaccaccacccaggaacttccacatgttcagctatccagaagctcctcaaaccaggactcttgggtttt

SEQ ID NO: 42180 - DNA, 120 bp, synthetic construct
  source 1..120: mol_type = other DNA
caggtgaaaggagggaggagaagatcagagagattctgtttcttgaggcctgctcctggggcggaacacacccaacattataacaaaagacaataggagttatgagccaggaaccaatac

SEQ ID NO: 42181 - DNA, 120 bp, synthetic construct; identical to SEQ ID NO: 12003
  source 1..120: mol_type = other DNA

SEQ ID NO: 42182 - DNA, 120 bp, synthetic construct
  source 1..120: mol_type = other DNA
ggccagtgtccatagggctgtccaaacaacacatagcttcttccttttgcttagatgtcaccgtttaaggatgttcgtgcacaaggtagtatttagaaatttagaaaataaatcatcttt

SEQ ID NO: 42183 - DNA, 120 bp, synthetic construct
  source 1..120: mol_type = other DNA
gcccccaaatggcatgttcagaatggcggctccatctgcccttctctctatcagtcacgtgtagagtaaggagcagagaagatggtgtccttagagtggaaagtctatttgcataataag

SEQ ID NO: 42184 - DNA, 120 bp, synthetic construct; identical to SEQ ID NO: 12004
  source 1..120: mol_type = other DNA

SEQ ID NO: 42185 - DNA, 120 bp, synthetic construct
  source 1..120: mol_type = other DNA
attttactagtccagtggaggctcccattgtcaaagccctttatagcaaagctcttaaagtgtgtttatttcctaaagtccaaggattcattgtcttattttaaaactaatgtttaatca

SEQ ID NO: 42186 - DNA, 120 bp, synthetic construct
  source 1..120: mol_type = other DNA
atagtgagacgctgtctctaaaaaataaaaaaaaaatactaaaattagctgggtgtggtggtgcatgcctgtagtctcagctgcttgggagactgaggcaggaggatcccttgagcccag

SEQ ID NO: 42187 - DNA, 120 bp, synthetic construct
  source 1..120: mol_type = other DNA
aaaaaaaaagagatagctaagatagcttgtatttgtactctgatcagcctctttggaagcccttgtagttctgtttgaatgcctctctttggagcttgggcatggcatggcttaccacat

SEQ ID NO: 42188 - DNA, 120 bp, synthetic construct; identical to SEQ ID NO: 12005
  source 1..120: mol_type = other DNA

SEQ ID NO: 42189 - DNA, 120 bp, synthetic construct
  source 1..120: mol_type = other DNA
gactaattttgatttaggaaatgtattatatcaacaattgctgaacattttctttaattctagaagcaaaagcaactttaatctgaagtcactttatgcctgcttgttttgatctgtttt

SEQ ID NO: 42190 - DNA, 120 bp, synthetic construct
  source 1..120: mol_type = other DNA
cccaagtagctggcattacaggttcccaccactacacccaactaatttttgtatttttagtagaaatggggtttccccatgttgacctggctggtctcgaactcctgaccttgtgatctg

SEQ ID NO: 42191 - DNA, 120 bp, synthetic construct
  source 1..120: mol_type = other DNA
ggagtgcggtggcacaatcttggctcactgtaacttccacctcctgggttccagcgattctcctgcctcagcctcccaagtagctgggattacaggtgcatgccaccaagcccggctaat

SEQ ID NO: 42192 - DNA, 120 bp, synthetic construct; identical to SEQ ID NO: 12006
  source 1..120: mol_type = other DNA

SEQ ID NO: 42193 - DNA, 120 bp, synthetic construct
  source 1..120: mol_type = other DNA
ggtatattcttcactttgttggatgccaattttgtttatgaaacatttgaattcccaagtaaccttggtacttttacttattttaaaagtaattgaatcttcctctcctttcatatattt

SEQ ID NO: 42194 - DNA, 120 bp, synthetic construct
  source 1..120: mol_type = other DNA
agagaacctaaaacatttgattgtcaattttagtggaagatgcatacaaagtttcgtctcagttaccaccttatttcttgtggtcctacatattattttgcgagtggctattgctattaa

SEQ ID NO: 42195 - DNA, 120 bp, synthetic construct
  source 1..120: mol_type = other DNA
aaccctataatgattttctttcctaatttttctatgagactgcttgagaaggacggagaaggaaaagctctcgacactgtgaaatagcttactggaagagtaagcatttaagctcgtgca

SEQ ID NO: 42196 - DNA, 120 bp, synthetic construct; identical to SEQ ID NO: 12007
  source 1..120: mol_type = other DNA

SEQ ID NO: 42197 - DNA, 120 bp, synthetic construct
  source 1..120: mol_type = other DNA
attgtggctcatccaggagtgggcacaccatgggaagaacacacaaaagagaaacattttgcagaacaaagaccactccaggagtattgaggtaccaggaggaaggtggaatagaacctt

SEQ ID NO: 42198 - DNA, 120 bp, synthetic construct
  source 1..120: mol_type = other DNA
taattgacaatagggagagggtgaggaaagatccagagtttctgtccatgctggtacctcaactacaaaacaggaggcttaagggttttcgcagaatctgagtagaagtgatacaaaaat

SEQ ID NO: 42199 - DNA, 120 bp, synthetic construct
  source 1..120: mol_type = other DNA
tctactaaaaatacaaaaatgagccgggtgtggtggtgcactcctgtaatcccagctactcaggaggctgaggcaggagaattgcttaaaccacggaggcagaggttgcagtgagccgag

SEQ ID NO: 42200 - DNA, 120 bp, synthetic construct; identical to SEQ ID NO: 12008
  source 1..120: mol_type = other DNA

SEQ ID NO: 42201 - DNA, 120 bp, synthetic construct
  source 1..120: mol_type = other DNA
gaaggaacccatttttatgatgaagagacaggaaaatagagttgtgacactaccttagtactgagaggttttttaaagatctagtttggatttttgaaagacatacacagatgactagac

SEQ ID NO: 42202 - DNA, 120 bp, synthetic construct
  source 1..120: mol_type = other DNA
caattctccaacctcagcctcctgagtagctgggattacaggcatgcgccaccacgtccggctaatgttttttgtagttttagtagagacggggtttctccatgtcagtgaggctggtct

SEQ ID NO: 42203 - DNA, 120 bp, synthetic construct
  source 1..120: mol_type = other DNA
tgagcatctttggatatcagataccagctgagtttaaataactagtttccattactagatgaaattttgatgagaacctttagaaggttagtaatttctttgtccaacccaaatgtagtt

SEQ ID NO: 42204 - DNA, 120 bp, synthetic construct; identical to SEQ ID NO: 12009
  source 1..120: mol_type = other DNA

SEQ ID NO: 42205 - DNA, 120 bp, synthetic construct
  source 1..120: mol_type = other DNA
cattgaagtggattattccaaggttgaccatctagaaagtgagagatttgatatttttaactcaagtgttttgactcctagttcagagttctttccactctagcattggcctcaaaatat

SEQ ID NO: 42206 - DNA, 120 bp, synthetic construct
  source 1..120: mol_type = other DNA
gcatctttttactcactcattcaatcatcaaacactcactgaacatctgttatattccagggatgatgatacacacaggtgcagcaagaataagacatgaggctcattcttgcagagtac

SEQ ID NO: 42207 - DNA, 120 bp, synthetic construct
  source 1..120: mol_type = other DNA
agaaatgcattttttaggcaacttagaacggtctttcttaatatgcctcaggtagtaatgggatggactaatctgtgtgaaggtaaactgaatggcagattgggaatagctctacaggac

SEQ ID NO: 42208 - DNA, 120 bp, synthetic construct
  source 1..120: mol_type = other DNA
tgatcttttttgtcttagacctgtgttaacacagacactatcatgatcagttatctgctggttccctctaagtggtctctaagtgctttgagtgcccttgttgccaacatttttagaata

SEQ ID NO: 42209 - DNA, 120 bp, synthetic construct; identical to SEQ ID NO: 12010
  source 1..120: mol_type = other DNA

SEQ ID NO: 42210 - DNA, 120 bp, synthetic construct
  source 1..120: mol_type = other DNA
aagccaccacctccacctgtgctttgatcccaggtggagatacacctatcccatctcttgcccaaatcactaacttcttatttgatcttttcaggattatttccatcagcatgtaaacat

SEQ ID NO: 42211 - DNA, 120 bp, synthetic construct
  source 1..120: mol_type = other DNA
ctctctcacaaattcagattatgttagcagagggatcttccctgtatagcccatttaaaatatcaactcccattattgctctgtcctaccctactttattttctttataccaattcccca

SEQ ID NO: 42212 - DNA, 120 bp, synthetic construct
  source 1..120: mol_type = other DNA
agtgcccaaaatagtgcctgaaatgtcacagacagccccagatatttacttttttgactccatatcgtcttcagctactataccatttctttgctcacctttgtaaaacaagtcaagagt

SEQ ID NO: 42213 - DNA, 120 bp, synthetic construct; identical to SEQ ID NO: 12011
  source 1..120: mol_type = other DNA

SEQ ID NO: 42214 - DNA, 120 bp, synthetic construct
  source 1..120: mol_type = other DNA
ccagggttcacttttagatcgtcctgtctttagttacctattcattcccttagtgatctcagctggtatcatgtctttatatatgttcttcacagggatgagtcctaaatatttatcttc

SEQ ID NO: 42215 - DNA, 120 bp, synthetic construct
  source 1..120: mol_type = other DNA
tatcactaactgcctttcccacagtattccccatttcggtacatggtaccaccatttatccagttgttcagacctaaacccttctaattattctttttcctatcgttatcccacatcagc

SEQ ID NO: 42216 - DNA, 120 bp, synthetic construct
  source 1..120: mol_type = other DNA
tagaagccaccatcgtcttttgcttggctacggtaacaacctctcatgcccctagcatggcttcctgagtggttcttttagagtgggaatgagtcatgtccttcctctgcttgcaactct

SEQ ID NO: 42217 - DNA, 120 bp, synthetic construct; identical to SEQ ID NO: 12012
  source 1..120: mol_type = other DNA

SEQ ID NO: 42218 - DNA, 120 bp, synthetic construct
  source 1..120: mol_type = other DNA
ttcatttacttgtttatcaatctcctcccaagtgtaagctccatgggtgtaagaaattgttctgtctcattcacagtcttatgtgttgaatgaatgaatttaatttttacaaaaatagaa

SEQ ID NO: 42219 - DNA, 120 bp, synthetic construct
  source 1..120: mol_type = other DNA
aggaaaaacattgcaatcccagtgactagtaaaaggaaagctagagagctgggatgcaaaccctgggtgtgtctattgcaaaagcaaatctctttccacttaatccatattctttattta

SEQ ID NO: 42220 - DNA, 120 bp, synthetic construct
  source 1..120: mol_type = other DNA
atgaaactccatctctactaaaaatacaaaaatgagccgggcgtggtggtacacgcctgtaatcccagatactcgggaggctgaggcagcagaatcgcttgtacccggagagggagattg

SEQ ID NO: 42221 - DNA, 120 bp, synthetic construct; identical to SEQ ID NO: 12013
  source 1..120: mol_type = other DNA

SEQ ID NO: 42222 - DNA, 120 bp, synthetic construct
  source 1..120: mol_type = other DNA
ttttaccccttgtaaactggcagaggctcacatttgtaagttaaacaccaagcttttcaaaacctagtcctaaaacttgtatcatgattttgcttcatgtgcaagctaacctttgatttc

SEQ ID NO: 42223 - DNA, 120 bp, synthetic construct
  source 1..120: mol_type = other DNA
ctgccaatgtacaacctaacttttatcaggaatagtttattgctcaggtatagtttgctggttcatccgttcattttcaggctggagaaaagccttcagctgaaatatctaccaattgca

SEQ ID NO: 42224 - DNA, 120 bp, synthetic construct
  source 1..120: mol_type = other DNA
gagtcatggtgcctggtacaccagatgataatcaacatgttaattaaagaattatgtttataattagcctgaaagaagataatttaataggttggccaattacagagataaattggaggc

SEQ ID NO: 42225 - DNA, 120 bp, synthetic construct; identical to SEQ ID NO: 12014
  source 1..120: mol_type = other DNA

SEQ ID NO: 42226 - DNA, 120 bp, synthetic construct
  source 1..120: mol_type = other DNA
cacttgctgaaggtcattgtgttgtgcaatacaagaaagaaccatgtcttcaaaatcaccttatcttgaaataatagattttggatagagagatttaggtcttgaaaattgcttctaaaa

SEQ ID NO: 42227 - DNA, 120 bp, synthetic construct
  source 1..120: mol_type = other DNA
cagtggttttcttttcagaattttaacatggtttgtacaatctgagtctggtataggtctttgagaatgtctaccacttgtttattgtggtctcattctttagagaggaggaggatggtt

SEQ ID NO: 42228 - DNA, 120 bp, synthetic construct; identical to SEQ ID NO: 12015
  source 1..120: mol_type = other DNA

SEQ ID NO: 42229 - DNA, 120 bp, synthetic construct
  source 1..120: mol_type = other DNA
acagccatttctttgggcctgttctactttaggtatgagaggctcaggaaaactttcttatcctcagcacacacattatgatgaagtttaaccagagtcttgataagtgagcaatcttca

SEQ ID NO: 42230 - DNA, 120 bp, synthetic construct
  source 1..120: mol_type = other DNA
gagaaacaggtgcatttttgttgatgttactgtttggtgaatgtatctgtcgatgttaatctcatctcacatgaaacagacactgaatttgaatgtctgaaatatgtccagtctttttag

SEQ ID NO: 42231 - DNA, 120 bp, synthetic construct
  source 1..120: mol_type = other DNA
taggctcttcacttctttttatctttttctaaaagttaaaacatttcaggaccttacttagtttaggggatttataacataggaacaaaaaaatttcctttgcctcctggtttctgggaa

SEQ ID NO: 42232 - DNA, 120 bp, synthetic construct; identical to SEQ ID NO: 12016
  source 1..120: mol_type = other DNA

SEQ ID NO: 42233 - DNA, 120 bp, synthetic construct
  source 1..120: mol_type = other DNA
tgtgtgtgtgagtttagcttttctttagtaatttcacagctctactattctatggcctgccaagggggacacaggagtgtggcagagggagaagtcagccaggtgatttggagtttattc

SEQ ID NO: 42234 - DNA, 120 bp, synthetic construct
  source 1..120: mol_type = other DNA
aattcccacatgttgtgggagggactcagtgggagataattgaatcataggggcagtttcccccatactgttatggtggtagtgaataaatctcatgaaatctgatgattttataagggg

SEQ ID NO: 42235 - DNA, 120 bp, synthetic construct
  source 1..120: mol_type = other DNA
ctttttctttataaattactcagtctctggtatgtctttatcagcagcgtgagaatagactaatacagtaagttggtaccaggagtgtgagaacagactaatacacctgtgtatggtgat

SEQ ID NO: 42236 - DNA, 120 bp, synthetic construct; identical to SEQ ID NO: 12017
  source 1..120: mol_type = other DNA

SEQ ID NO: 42237 - DNA, 120 bp, synthetic construct
  source 1..120: mol_type = other DNA
aacggtcgctttctcatcttctgtgctgatctccctcttccactctacttttttctcctttaccaaaaatttgagtgactttacttgaggctgcccttccttagtctaaattttaattac

SEQ ID NO: 42238 - DNA, 120 bp, synthetic construct
  source 1..120: mol_type = other DNA
gacactattcagggtgcatacgataagtctagagtctattcactttagctgtagcctactatctaaagatatttgggaaatcacaggactgtactttgtcttttaatgcagtgatttgat

SEQ ID NO: 42239 - DNA, 120 bp, synthetic construct
  source 1..120: mol_type = other DNA
ggctctttctgctcatctgtagggtaaccataataatagtaatagtaattaactcatagagctcttcatttcttagccattgaccgtcgcttctgtgccagatgctgtgctatatgatag

SEQ ID NO: 42240 - DNA, 120 bp, synthetic construct
  source 1..120: mol_type = other DNA
atcaatggtagcttctttcccttttaaaggtatagaaagtatcattcattctttattctccaaatagaggactgaatatctactatgtgctgggtaccagggatgcggtatgaacgaggt

SEQ ID NO: 42241 - DNA, 120 bp, synthetic construct; identical to SEQ ID NO: 12018
  source 1..120: mol_type = other DNA

SEQ ID NO: 42242 - DNA, 120 bp, synthetic construct
  source 1..120: mol_type = other DNA
tgaaaccctgtctctactaaaaatacaaaaaaagattagccaggtgtggtggcaggtgcctgtaatcccagctactcgagaggctgaggcaggagaatcccttgaacccaggaggtcgag

SEQ ID NO: 42243 - DNA, 120 bp, synthetic construct
  source 1..120: mol_type = other DNA
aggagcaaaatagcggtatgtgtggttggattgtagcaagcagagtggagaatgacgtgagaaggtgttatagatggaggaggaagtagatcatgcaatatgtctgatggactgtgagaa

SEQ ID NO: 42244 - DNA, 120 bp, synthetic construct
  source 1..120: mol_type = other DNA
gctgcctgggaatctggcattcattactgtttgcttgacagtgccacttatcaagataaggaactatgggggatggcaaaatttggggtaatagacctattaaaatgtgatcattattgg

SEQ ID NO: 42245 - DNA, 120 bp, synthetic construct; identical to SEQ ID NO: 12019
  source 1..120: mol_type = other DNA

SEQ ID NO: 42246 - DNA, 120 bp, synthetic construct
  source 1..120: mol_type = other DNA
gtaaagttcctttctgatagaagtgtttatttctactaaactgggactagaaaagcattgatgaaagtttatatattcagagcaacattctgccttctgccttctgcttggccagctgcc

SEQ ID NO: 42247 - DNA, 120 bp, synthetic construct
  source 1..120: mol_type = other DNA
cctttggctgacattaccaaggcacactgttaatactggcctcacaggccataatctcttatgtgtcattttgtatttaaacttttgcataagagtcatcagcacagaacaacagattac

SEQ ID NO: 42248 - DNA, 120 bp, synthetic construct
  source 1..120: mol_type = other DNA
tcaacaccagtctggctaacatgatgaaactctctctctactacaaatacaaaaattagccaggcatggtgctgtgcgcctgtaatctcagctactcaggaggctgagacaggagaatcg

SEQ ID NO: 42249 - DNA, 120 bp, synthetic construct; identical to SEQ ID NO: 12020
  source 1..120: mol_type = other DNA

SEQ ID NO: 42250 - DNA, 120 bp, synthetic construct
  source 1..120: mol_type = other DNA
gatgcccagttcatccactggtggggaactgaagactagacagttacacggtagttcaaatgcaatcatatcactgcaattaaaactatgagaagactagattattctgtaatatcacca

SEQ ID NO: 42251 - DNA, 120 bp, synthetic construct
  source 1..120: mol_type = other DNA
agtctgtggatgactggtcactgtgtattggtttttagttcatgcatacaaggcaaagtgtgtagtgttgttaccttcttgttccccagtgatccaagatttacaaaaaatgaataagtg

SEQ ID NO: 42252 - DNA, 120 bp, synthetic construct
  source 1..120: mol_type = other DNA
tcctgccctttgactgcctgtaaatacgcacccagaggaacttagtgaaagtgagcttattgacgtgtgcaaggaaaatggttctgacccataggatgtaggtgttccagagtaaatgac

SEQ ID NO: 42253 - DNA, 120 bp, synthetic construct; identical to SEQ ID NO: 12021
  source 1..120: mol_type = other DNA

SEQ ID NO: 42254 - DNA, 120 bp, synthetic construct
  source 1..120: mol_type = other DNA
ggagttctagaccagcctgggcaacatggtgagaccctgtctctacaaaaataaaataaaataaataaaacacgttaattctcaatgtttccagtcttctaaattatagtgtactaagta

SEQ ID NO: 42255 - DNA, 120 bp, synthetic construct
  source 1..120: mol_type = other DNA
aaagcttgtctgaagacatttttatggtcctgtactagcatgcaaactgaggactgcctgtattttaaatgaataaatatagactgagtgaaagtccaaaaatattggcttcttttattt

SEQ ID NO: 42256 - DNA, 120 bp, synthetic construct; identical to SEQ ID NO: 12022
  source 1..120: mol_type = other DNA

SEQ ID NO: 42257 - DNA, 120 bp, synthetic construct
  source 1..120: mol_type = other DNA
ccaaaggtcttacactgacatcaaggctttccatggtctgggcccattatctctgacctcatctcccacccacttcccctagcctagtctgctctagctgtgaattttctgacgatgcta

SEQ ID NO: 42258 - DNA, 120 bp, synthetic construct
  source 1..120: mol_type = other DNA
caagtgttttacaaagaaataaaacactttggtggggtgccgtgggtcacacctgtaatcccagcactttgggaggccgaggtgggcagatcacttaagcccaggagttctagaccagcc

SEQ ID NO: 42259 - DNA, 120 bp, synthetic construct
  source 1..120: mol_type = other DNA
caacttcccccaggctagtagcatctccgatccccttatactattcttttttttctttccatagaacttttcaccttctaagattttcagatttttagtttattttttaaaatttgtcct

SEQ ID NO: 42260 - DNA, 120 bp, synthetic construct; identical to SEQ ID NO: 12023
  source 1..120: mol_type = other DNA

SEQ ID NO: 42261 - DNA, 120 bp, synthetic construct
  source 1..120: mol_type = other DNA
agagtgcaatggcactctcttggctcactgcaacctccgcctcccaggttcaagtgattctcctgccttagcctcctgagtagctgggattacaggcacacaccagcatgcccagctaat

SEQ ID NO: 42262 - DNA, 120 bp, synthetic construct
  source 1..120: mol_type = other DNA
actgcacctggccaagagttttatagtcacaggaaatacagaaaggaattcaattcaacatatattgactgaacattttctatgtacagttgtctaaaatggataattagtaacttaggt

SEQ ID NO: 42263 - DNA, 120 bp, synthetic construct
  source 1..120: mol_type = other DNA
tggaaaaattctcaggacataacttagaggaccagttacacaaagcctaaacctggaaaaaaatctcggaagactggaggagtaagagtttagggaaaatacttggcatgatgtgagaga

SEQ ID NO: 42264 - DNA, 120 bp, synthetic construct
  source 1..120: mol_type = other DNA
aagaagggactgcattgctttttttcagtgatgcattgggttttatattgaggctgtggatgcttatgatacattaaaatttgtcacagcaataatagacaggatcggtaattttcctcc

SEQ ID NO: 42265 - DNA, 120 bp, synthetic construct; identical to SEQ ID NO: 12024
  source 1..120: mol_type = other DNA

SEQ ID NO: 42266 - DNA, 120 bp, synthetic construct
  source 1..120: mol_type = other DNA
gtcatggtttatgaattctgttccttgttattaaatatcaaccaggaaactgatgtgaaagtggcatggggagatactaaataaaatgcgtaggctcacccttgagtgcttcaagatgtt

SEQ ID NO: 42267 - DNA, 120 bp, synthetic construct
  source 1..120: mol_type = other DNA
ctatttaatagatattttttgattgagtgcttcctgtgagccagcattcttacaggctttggtgatcaccattagtaaaagtgacaaggtcctttcccttacagaacttgcattctagtg

SEQ ID NO: 42268 - DNA, 120 bp, synthetic construct
  source 1..120: mol_type = other DNA
gagaagggactcagggtgataggggctgctattttagatagggcgaccgtggaagtggttttctgtgtgtgtgacctcacaggtttgtgagcagcagtcaagctaactttgctcagaatt

SEQ ID NO: 42269 - DNA, 120 bp, synthetic construct; identical to SEQ ID NO: 12025
  source 1..120: mol_type = other DNA

SEQ ID NO: 42270 - DNA, 120 bp, synthetic construct
  source 1..120: mol_type = other DNA
tgatgatttggggaaggcaacatttcttcactattgagaaagatctcatgttgagctttgtttttgaactgcaatgtccaaagtgggcaattcaatgaaagggtagtgctgatttagtgg

SEQ ID NO: 42271 - DNA, 120 bp, synthetic construct
  source 1..120: mol_type = other DNA
aaaacagactcagtttattttttattattattattatttttttttttttgagacggagtcttgctcttgtcacccaggatggagtgtagtggcgtgatctcggctcactgcaacctccat

SEQ ID NO: 42272 - DNA, 120 bp, synthetic construct
  source 1..120: mol_type = other DNA
gttggccaggctggtctcaaactcctgacctcaggtgatccacctgcctcggcctcccaaagtgctgggatgtgagccattgtgcctggcccagactcagtttaataatcagacattaat

SEQ ID NO: 42273 - DNA, 120 bp, synthetic construct; identical to SEQ ID NO: 12026
  source 1..120: mol_type = other DNA

SEQ ID NO: 42274 - DNA, 120 bp, synthetic construct
  source 1..120: mol_type = other DNA
caatctcggatcactgcaacctctgcctcccgggttcaagagattctcctgcctcagcctcccaagtagctgggactacatgtgcacactaccacacccggctaatttttgtatttttag

SEQ ID NO: 42275 - DNA, 120 bp, synthetic construct
  source 1..120: mol_type = other DNA
ctcaaggattttttggcttttatctttagagcaattggaaaccattgaagggttttaagccagcatgccgtatagtacagattgatggtgtggcctcaagctaaagctccttggaaggga

SEQ ID NO: 42276 - DNA, 120 bp, synthetic construct
  source 1..120: mol_type = other DNA
gaaattgatggattggaaaagtgttgatggagtagaatccacaggacttggtaactccaaggtggatgtcacccttttgttaagtccttccatttatctgattgctcttgaggtttcttt

SEQ ID NO: 42277 - DNA, 120 bp, synthetic construct; identical to SEQ ID NO: 12027
  source 1..120: mol_type = other DNA

SEQ ID NO: 42278 - DNA, 120 bp, synthetic construct
  source 1..120: mol_type = other DNA
agacatactttaattaatatctttattgtcctgtcaggtaggttaaccctctggatcccatcagtatttggcagtgttggtctttattcttggaatagaaactagattgtgtgtgtgtgt

SEQ ID NO: 42279 - DNA, 120 bp, synthetic construct
  source 1..120: mol_type = other DNA
agatgtattacatatggataatcataaatagaaaacattaagctatttatcaaaacctctcaaatgcctactctgcatgctgtcagaccacagtgattctggagaggaagtgtgctctga

SEQ ID NO: 42280 - DNA, 120 bp, synthetic construct; identical to SEQ ID NO: 12028
  source 1..120: mol_type = other DNA

SEQ ID NO: 42281 - DNA, 120 bp, synthetic construct
  source 1..120: mol_type = other DNA
ctctccttggtggtatagtggagctctcctgaacttaatgttgcttcattaccatgcactccatcatacaatgttaagggactggattgaagtgaaactttgcgtaagtgagttggtctc

SEQ ID NO: 42282 - DNA, 120 bp, synthetic construct
  source 1..120: mol_type = other DNA
ttcctttcccttagatgattggtacatctcacatactgatgggcatctccacacgagctctaatttctgatttgtccaaagtgcacaggcttattttaatatttgactgttaaagattgt

SEQ ID NO: 42283 - DNA, 120 bp, synthetic construct
  source 1..120: mol_type = other DNA
agctcaggagttcgagactagcctgggcaacatagtgagaccctgtctctactaagaatacaaaaaatgagcagggcatggtagcgcttgcctatagtcccagctacttgagaagctgaa

SEQ ID NO: 42284 - DNA, 120 bp, synthetic construct; identical to SEQ ID NO: 12029
  source 1..120: mol_type = other DNA

SEQ ID NO: 42285 - DNA, 120 bp, synthetic construct
  source 1..120: mol_type = other DNA
gagtctctagaagcagtgtgggatgggattacagactgaattatctgaatctaattcagatgaattaggtttagtgatcaatttctggaaatatgtctgataagccctctgtgagtaaca

SEQ ID NO: 42286 - DNA, 120 bp, synthetic construct
  source 1..120: mol_type = other DNA
gacggtgtgccttctcttcttccggggcttactgagtaagctctgttactcccacttgtcccatatatctgtggttttgtttttacctcatcttgctgtcttctcttattctcattccca

SEQ ID NO: 42287 - DNA, 120 bp, synthetic construct
  source 1..120: mol_type = other DNA
catagggtaggtgagacaaaatagtaaaagcctctggggatttgataaggcattgaacacaccagcacaatttttggttctttttttattacaccacaatatagctttgatcttgcagat

SEQ ID NO: 42288 - DNA, 120 bp, synthetic construct; identical to SEQ ID NO: 12030
  source 1..120: mol_type = other DNA

SEQ ID NO: 42289 - DNA, 120 bp, synthetic construct
  source 1..120: mol_type = other DNA
tgaccaacatggtgaaaccccatctctattaaaaatacaaaaattagctgggtgtggtggtgggtgcctgtaatcccagctactcgggaggctgagccaggagaatggcttgaacccagg

SEQ ID NO: 42290 - DNA, 120 bp, synthetic construct
  source 1..120: mol_type = other DNA
attaccaggattttaaatacaaattagagtggcacctttccaatttatatagcatattctttttttttttttttgtgagacagagtttcgctcttgttgcccaggctggagcgcaatggc

SEQ ID NO: 42291 - DNA, 120 bp, synthetic construct
  source 1..120: mol_type = other DNA
aggcatgtgccaccacgcccagctaatttttgtatttttggtagagacagggtttctgcatgttggtcaggctggtctcgaactcccaacctcaggtgagccgcctgcctcggcctccca

SEQ ID NO: 42292 - DNA, 120 bp, synthetic construct; identical to SEQ ID NO: 12031
  source 1..120: mol_type = other DNA

SEQ ID NO: 42293 - DNA, 120 bp, synthetic construct
  source 1..120: mol_type = other DNA
agactttttaggcccttgccacgtagaacctgtgttttccattttcttactgtgcatttggtgccttttgtatgctagtcattatgtaaggtgctttatcggatttacttcgtcatttta

SEQ ID NO: 42294 - DNA, 120 bp, synthetic construct
  source 1..120: mol_type = other DNA
agtccgtgattcctgcagcactcccactgcctgtattgagtcattctaattttcgtctttccccatgtacagtttcttcagtaaccttgcttaatgaattgattggaaacctgttttggc

SEQ ID NO: 42295 - DNA, 120 bp, synthetic construct
  source 1..120: mol_type = other DNA
gtgagaaagttctgttattgacctgttttcctgtgtgagttttgaaatgacatgtgtgcctgctattagaatctgttccgttcttgatgatacttggtgtcctagaaatgtgtcagacaa

SEQ ID NO: 42296 - DNA, 120 bp, synthetic construct; identical to SEQ ID NO: 12032
  source 1..120: mol_type = other DNA

SEQ ID NO: 42297 - DNA, 120 bp, synthetic construct
  source 1..120: mol_type = other DNA
aagtggttctgcagtgcaccgcaaccatccacaaagaacaacagaagctatgcttggcagcagaaggatttggcaacagactttgtttcttggagtccacttccaattccaaggtgggat

SEQ ID NO: 42298 - DNA, 120 bp, synthetic construct
  source 1..120: mol_type = other DNA
ttccatctccattttgctgatttttaattgagtctctcctgggtacaaagaactagggataagattattagcaagaacacagaaagtccttgccccatgaggtttatattctagtagaaa

SEQ ID NO: 42299 - DNA, 120 bp, synthetic construct
  source 1..120: mol_type = other DNA
gactttcaattttccatattaacgaaaagtcaaaactctaaatcccagttcatgtttaaaatacgtaaacctgggtctagatgcagttcacatagatatatctggatttgactttcattg

SEQ ID NO: 42300 - DNA, 120 bp, synthetic construct; identical to SEQ ID NO: 12033
  source 1..120: mol_type = other DNA

SEQ ID NO: 42301 - DNA, 120 bp, synthetic construct
  source 1..120: mol_type = other DNA
tgtatatgaatgaattttcatctgtgtctctatatttcagaaattagaagttgaggttttgcttttaggaactattcactttgagacagacctaccttgttattattaaaaattcaggga

SEQ ID NO: 42302 - DNA, 120 bp, synthetic construct
  source 1..120: mol_type = other DNA
taaaactcacagccacagacaatacagtatctaagacaaactaagtggcaagttattcctacgtatggtgtcagtaaatgtataggaggaagtgcaagagaggtgacatgatttctattg

SEQ ID NO: 42303 - DNA, 120 bp, synthetic construct
  source 1..120: mol_type = other DNA
cggatcacttgaggtcaggagttcaagaccggtctggccaacatagtgaaaccctgtctctattaaaaatacaaaaattagctgggtgtggtaatgcacacctgtaatcccagctacttg

SEQ ID NO: 42304 - DNA, 120 bp, synthetic construct; identical to SEQ ID NO: 12034
  source 1..120: mol_type = other DNA

SEQ ID NO: 42305 - DNA, 120 bp, synthetic construct; identical to SEQ ID NO: 4710
  source 1..120: mol_type = other DNA

SEQ ID NO: 42306 - DNA, 120 bp, synthetic construct
  source 1..120: mol_type = other DNA
gtgtatatattgttttatatataaaaagagaataagaagcagaataatatctaaaggtaataaaggtcaactagttaaataaacataactatttaaaaatgaactaaaagaaattaaaaa

SEQ ID NO: 42307 - DNA, 120 bp, synthetic construct
  source 1..120: mol_type = other DNA
agctgaataacaggccagaattccaaattaaagaaaaactaattttagacctggagactgcatgagaagggacaccagagcacgtaaacccacagcttaacatctgtagagatatagaag

SEQ ID NO: 42308 - DNA, 120 bp, synthetic construct; identical to SEQ ID NO: 12035
  source 1..120: mol_type = other DNA

SEQ ID NO: 42309 - DNA, 120 bp, synthetic construct
  source 1..120: mol_type = other DNA
caggacgcagagctcaggtggccagtgagggggagcagctgtacatacagatgaagcttgcctgctgctcacttccggctctgtggcctggttcctaaggggccactgactggcactgat

SEQ ID NO: 42310 - DNA, 120 bp, synthetic construct
  source 1..120: mol_type = other DNA
tggttttaggggagagtgtcttatggaatggctctgtcctctgacaaggttaagtaagtatgactaccaaaaatgggagagtgggtatagtttataaaaattcaacttcctgattgcttt

SEQ ID NO: 42311 - DNA, 120 bp, synthetic construct
  source 1..120: mol_type = other DNA
atttaaaaatatgagtgttagggaagcccaaacttcctaaacaaaagagatatataaaaatatatttatatattgtatattttatgaacatatgtatattataaatgatataataaacat

SEQ ID NO: 42312 - DNA, 120 bp, synthetic construct
  source 1..120: mol_type = other DNA
ttttatattatatataatatttataatatattataaatatacctttatattatatatatttaatgtagatatatgataatgtagatatatatgatatgtaggtattacatatgataacta

SEQ ID NO: 42313 - DNA, 120 bp, synthetic construct; identical to SEQ ID NO: 12036
  source 1..120: mol_type = other DNA

SEQ ID NO: 42314 - DNA, 120 bp, synthetic construct
  source 1..120: mol_type = other DNA
ttattacaaaaataaaaaagctaacaaaattaaagtttataaagtaaaaagttacaataagctaaggttaatttatcattgaacaaagaaaattttaaaaataaatttagtgcagcctaa

SEQ ID NO: 42315 - DNA, 120 bp, synthetic construct
  source 1..120: mol_type = other DNA
tgtcctatataggtgtaccgttttttaccttttatatcacatttttactgtactttttctattttgagatatgtttatataaacagataccactgtgttacagttgcctccagtattcag

SEQ ID NO: 42316 - DNA, 120 bp, synthetic construct
  source 1..120: mol_type = other DNA
aatgataagatcacctgatgacacatttctagcatgtgtccccatcattaagtgatgcatgtctgtatatatatatcatccatgggtgatgcacacacacacatacacgcacacacacac

SEQ ID NO: 42317 - DNA, 120 bp, synthetic construct
  source 1..120: mol_type = other DNA
taggagaattgaggccaaagtgtattgattatataaacaattataagtgagtttgacttacctattaaaataagaacttaaaattataagcatgactacaaagccaaatctaacactatg

SEQ ID NO: 42318 - DNA, 120 bp, synthetic construct; identical to SEQ ID NO: 12037
  source 1..120: mol_type = other DNA

SEQ ID NO: 42319 - DNA, 120 bp, synthetic construct
  source 1..120: mol_type = other DNA
tatgtcaaaatctgaacctcaaaaatagaatatacctttctttaaagttcacataccatattaaagaatattgacaatattttaggccacaaagaaaacttcagtaagttccaaagaata

SEQ ID NO: 42320 - DNA, 120 bp, synthetic construct
  source 1..120: mol_type = other DNA
gtacactattaattaaatcttgggtcaaaggcaaaataaaattgaagagtttcttgaacatcatgataatgaacatgtgatgttttagaatgcatgggatatagctaaagaagttatcag

SEQ ID NO: 42321 - DNA, 120 bp, synthetic construct
  source 1..120: mol_type = other DNA
ccacctcctgcattcaagcaattctcctttctcagcctcccgagttgctgagattacaggcacccaccaccatgcctggctaatttttgtatttttagtagagacggggttttgccatgt

SEQ ID NO: 42322 - DNA, 120 bp, synthetic construct; identical to SEQ ID NO: 12038
  source 1..120: mol_type = other DNA

SEQ ID NO: 42323 - DNA, 120 bp, synthetic construct
  source 1..120: mol_type = other DNA
tgaattagcctaatcaaggataaagggagtacaaatatttgattattagaagttacatatgagttggaaggggataatgatcacaaaaggaaattaagtcataagggaccatttgtctaa

SEQ ID NO: 42324 - DNA, 120 bp, synthetic construct
  source 1..120: mol_type = other DNA
gaccaattatcataaaataaatagtgtggtagaagtattccctgacaagacacgcgccaaggtcggatactccctacttaactatgttccttaaattattccaaagcataataaaagaag

SEQ ID NO: 42325 - DNA, 120 bp, synthetic construct
  source 1..120: mol_type = other DNA
gataaaatattttaaataaaccaatgttgcattaaaatctttatcatgaccagtgaaggttattccaggaatccaagaatagctcaatacgataaatcaattaatataattcttcatatt

SEQ ID NO: 42326 - DNA, 120 bp, synthetic construct; identical to SEQ ID NO: 12039
  source 1..120: mol_type = other DNA

SEQ ID NO: 42327 - DNA, 120 bp, synthetic construct
  source 1..120: mol_type = other DNA
ttatatacctaaaattcccaaaaattaatcagtggaaaagctgctataggagtggattgatgagagaaatccataatgtagcaggttataaaatcaatggccacataacctggcaacata

SEQ ID NO: 42328 - DNA, 120 bp, synthetic construct
  source 1..120: mol_type = other DNA
cagctactcaggaggctgaggcaggaggattgcttgagcctaacagtttgaggctgcagtgagccgagatcgtaccactgcattgcagcctaggtgacagagtgagaccctgtctcaaaa

SEQ ID NO: 42329 - DNA, 120 bp, synthetic construct
  source 1..120: mol_type = other DNA
attatgtttttatcatgtatacatgtgctaataaattaatttcctatatgtgtgttacatcagtaaatttttgaggatcatagatttgaagtgctgtttctgtttttctttgtggatttt

SEQ ID NO: 42330 - DNA, 120 bp, synthetic construct; identical to SEQ ID NO: 12040
  source 1..120: mol_type = other DNA

SEQ ID NO: 42331 - DNA, 120 bp, synthetic construct
  source 1..120: mol_type = other DNA
ggttataggaatatattcatctatcatatagaaaagaatatgtgctcagtcccaggaaatagaaaatatattaccttatttatactgttttaattaatgctttttaaaatctgattaact

SEQ ID NO: 42332 - DNA, 120 bp, synthetic construct
  source 1..120: mol_type = other DNA
ttaaaaggaaacacccacagtctgtatgaatttgattctcgtgtggatagtatagacttaagcactgaacatggtctgagcaggtttgctttgctgcttaccagcgattatagtggaaaa

SEQ ID NO: 42333 - DNA, 120 bp, synthetic construct
  source 1..120: mol_type = other DNA
gtggaataactgccagttaaactaatgttcctttgataatatttgggttattctagggttttaagttgaattagatcaagaaacaattcataattggtgttcagtggttacagtcagtat

SEQ ID NO: 42334 - DNA, 120 bp, synthetic construct; identical to SEQ ID NO: 12041
  source 1..120: mol_type = other DNA

SEQ ID NO: 42335 - DNA, 120 bp, synthetic construct
  source 1..120: mol_type = other DNA
accttgttcagatgatctaaaactcatgacaataagtacttaaaaaataattaatatctaattttatactaaattaaattctgatgattgcaccactgtactccagcctaggcaacagag

SEQ ID NO: 42336 - DNA, 120 bp, synthetic construct
  source 1..120: mol_type = other DNA
tgagcaaaaagttttgcaaaactgggaaagattttagcatcgttacacaaggttgaacctcatgcaacaccaggatttcataggagcacagttttatacagatgaggaccattgttttat

SEQ ID NO: 42337 - DNA, 120 bp, synthetic construct; identical to SEQ ID NO: 12042
  source 1..120: mol_type = other DNA

SEQ ID NO: 42338 - DNA, 120 bp, synthetic construct
  source 1..120: mol_type = other DNA
ttctcataatggaacatgatagagcaatactttatattcggtgacttctcattattcaccagcataaataatgcattaagatattaatgatgcataatagttgtgatattccagatgaac

SEQ ID NO: 42339 - DNA, 120 bp, synthetic construct
  source 1..120: mol_type = other DNA
acttgtttcttgacgatttctctaaaaattaattgaaataataaaacaattataaggaaataaatattaacattattgctgtttcttctctctactttattcattttgactttcacagaa

SEQ ID NO: 42340 - DNA, 120 bp, synthetic construct
  source 1..120: mol_type = other DNA
tttttagagaaaaataaagtagatggtaagtgtggcagaaaggaaatatcctaatattttgtgactatcttgtcaatgtagaataagtgattagatacttgaacagagttccgatagaac

SEQ ID NO: 42341 - DNA, 120 bp, synthetic construct
  source 1..120: mol_type = other DNA
ttttttttttttgttttctgagatggagtctcactctgtctcccgggctggagtgcagtggtgcaatctcggctcactgcaacctccaccttctaggttcaagtgattctcctgcctcag

SEQ ID NO: 42342 - DNA, 120 bp, synthetic construct; identical to SEQ ID NO: 12043
  source 1..120: mol_type = other DNA

SEQ ID NO: 42343 - DNA, 120 bp, synthetic construct
  source 1..120: mol_type = other DNA
cttgccttatgatgccttacgccttatgatgtgaactaaagactcattctggaaatttttaaaagattttaaagaattctcattgtagtcataggtgagctcctaatttcccattatgtt

SEQ ID NO: 42344 - DNA, 120 bp, synthetic construct
  source 1..120: mol_type = other DNA
cagatgaaacttgttggaaaaaacctacctggagttcacctcttgcacacagtttcatctcaaacactgcaaaaagattggcagatattttaatccacctaacctgtcagcttcagccaa

SEQ ID NO: 42345 - DNA, 120 bp, synthetic construct; identical to SEQ ID NO: 12044
  source 1..120: mol_type = other DNA

SEQ ID NO: 42346 - DNA, 120 bp, synthetic construct
  source 1..120: mol_type = other DNA
tgtttgtgaaaaactgaaaactacacttggagtatatactgcagagggcccgctgccaccgttagaaccctggtaacagagtatatactacagagtgcctgctgccactgttagaaccct

SEQ ID NO: 42347 - DNA, 120 bp, synthetic construct
  source 1..120: mol_type = other DNA
tgaacacactgcagcaaatgaagctctaacacagaagttggcgcatttttttttttttctgtatagagccagatgggaaatattttagttttgtgggtcagatgttttctattcagcttg

SEQ ID NO: 42348 - DNA, 120 bp, synthetic construct
  source 1..120: mol_type = other DNA
tatttttttctttttcttgcaattttttttcaactgttgaaaaatgtgcaagccattcttaactcttgggctgtgatttggtccatggccatgatgtgcttagcccagctctaacatatg

SEQ ID NO: 42349 - DNA, 120 bp, synthetic construct
  source 1..120: mol_type = other DNA
aaggagaatacttatgtcaggagctactggtgaagttttatgaaagtatagggatggcatttgagtgggactccttgacagatggtacttaagttaatgaatgtttttgatgtttgaaag

SEQ ID NO: 42350 - DNA, 120 bp, synthetic construct; identical to SEQ ID NO: 12045
  source 1..120: mol_type = other DNA

SEQ ID NO: 42351 - DNA, 120 bp, synthetic construct
  source 1..120: mol_type = other DNA
ttcctggaagacccttgcgcgttcttcacctgaaggaagtctcttcattgtttaggtatctgtcaaatgttttttcctttgtaaagtcttcctgtgtttacaatgcatctccctccttta

SEQ ID NO: 42352 - DNA, 120 bp, synthetic construct
  source 1..120: mol_type = other DNA
gctcctctctttcaagcaaaattaattcctcctttgactgcgtaacttgctgctaactcatgtgtccctttacatttactttggcgtttctcaaattatgaaagcacctgcaggcagaga

SEQ ID NO: 42353 - DNA, 120 bp, synthetic construct; identical to SEQ ID NO: 12046
  source 1..120: mol_type = other DNA

SEQ ID NO: 42354 - DNA, 120 bp, synthetic construct
  source 1..120: mol_type = other DNA
gttactggagtacaggtggtatttggttacatgagtaagttctttagtggtgatttgtgagattttggggcacccatcacctgagcagtatacactgcaccatatttgttgtcttttatc

SEQ ID NO: 42355 - DNA, 120 bp, synthetic construct
  source 1..120: mol_type = other DNA
actaagttacttcacttagaataatagtctccaatctggccaggcgtggtggctcacgcctgtaatcccagcactttgggaggccgaggcgggtggatcacctaaggtagggagttcgag

SEQ ID NO: 42356 - DNA, 120 bp, synthetic construct
  source 1..120: mol_type = other DNA
tgggaggcggacgttgcagtgagtcgagattgcgccactgcactcctgcctgggcgacaacagtgagactccatctcaaaaaaaaaaaaaaatagtgtccagtctcatccaggtcactgc

SEQ ID NO: 42357 - DNA, 120 bp, synthetic construct; identical to SEQ ID NO: 12047
  source 1..120: mol_type = other DNA

SEQ ID NO: 42358 - DNA, 120 bp, synthetic construct
  source 1..120: mol_type = other DNA
gcagctattgtaaaaggggtcgagttcttgatttgattctctgcttggttgctgttggtgtatagaagagctactgatttgtgtacattgatcttgtatccagaaactttgcttaattct

SEQ ID NO: 42359 - DNA, 120 bp, synthetic construct
  source 1..120: mol_type = other DNA
ttcctcttgtctgattggtctggctaggacttccagtactatgttgaagaggagtggtgcaggtgggcatccctgtcttgttccagttctcagatggaatgctttcaacttttccccatt

SEQ ID NO: 42360 - DNA, 120 bp, synthetic construct
  source 1..120: mol_type = other DNA
tttctgcatctattgagatgatcatgtgatttttgtttttaattctgtttatatggtatatcacatttattgacttgcatatattaaaccatccctgcatccctggtatgaaacccactt

SEQ ID NO: 42361 - DNA, 120 bp, synthetic construct; identical to SEQ ID NO: 12048
  source 1..120: mol_type = other DNA

SEQ ID NO: 42362 - DNA, 120 bp, synthetic construct
  source 1..120: mol_type = other DNA
ttaagctaggagggttgtatttttccaggaattcatctgtctcttctaggttttctagtttatgtgtgtaaagatgttcatagcagccttgaatgatcttttgtatttcagtggtgtcag

SEQ ID NO: 42363 - DNA, 120 bp, synthetic construct
  source 1..120: mol_type = other DNA
ttttatcttttgtatttcttttctttcaatttcatttagttctgctctgatcttggttatttctttcttctgctgggtttgggtttggtttgtttttgtttctctagttccttgaggtgt

SEQ ID NO: 42364 - DNA, 120 bp, synthetic construct
  source 1..120: mol_type = other DNA
ttgttgtctggttcaaataattttttgattttcatcttggtttcgtttttgacccaatgctcattcaggagcaggttatttaatttccatgtatttgcatggttttgaaggttccttttg

SEQ ID NO: 42365 - DNA, 120 bp, synthetic construct; identical to SEQ ID NO: 12049
  source 1..120: mol_type = other DNA

SEQ ID NO: 42366 - DNA, 120 bp, synthetic construct
  source 1..120: mol_type = other DNA
ttgggtgagtttcctgaaggcagcagatggctggtgagttcttatccattctgtggttctatatcttttgagtggagcatttaggccatttacattcaatgttagtattgaaatgtgagg

SEQ ID NO: 42367 - DNA, 120 bp, synthetic construct
  source 1..120: mol_type = other DNA
tgttttgatgtgtttccaggatttgtttcaagattctgagctccttttagcagttcttgtagtggtggcttggtgatggtgaattctctcagcatttgtttgtctgaaaaagactgtatc

SEQ ID NO: 42368 - DNA, 120 bp, synthetic construct
  source 1..120: mol_type = other DNA
aatctgataggttttcctttataggctacctggtgcttctgtctcacagctcttaagattatttccttcatcttaactttggataacctgaggacaatgtgcttaggtgaagatcttttt

SEQ ID NO: 42369 - DNA, 120 bp, synthetic construct; identical to SEQ ID NO: 12050
  source 1..120: mol_type = other DNA

SEQ ID NO: 42370 - DNA, 120 bp, synthetic construct
  source 1..120: mol_type = other DNA
ttgttttttctttaagctatctaattccttgaatatttctcccttcacttcttgtatcattttttgtatttccttgcacggggctttgcctttctctggtccctccttgattagcttaat

SEQ ID NO: 42371 - DNA, 120 bp, synthetic construct; identical to SEQ ID NO: 12051
  source 1..120: mol_type = other DNA

SEQ ID NO: 42372 - DNA, 120 bp, synthetic construct
  source 1..120: mol_type = other DNA
cagagtcccatgatgtgaaccttctatgagtctctcagctgtggatacaagtgtctgtcctggtgcaggtggtgcgagtgtgcaatggactccataagggttctttgctttggtggctga

SEQ ID NO: 42373 - DNA, 120 bp, synthetic construct
  source 1..120: mol_type = other DNA
atgtcctttgtcttctgctaccagggtggataggggaggaccatcaggtaggggagggctaggcacgtttgagctcagactgtccttgggtgggtcctgctgcagctgctctcgggggtg

SEQ ID NO: 42374 - DNA, 120 bp, synthetic construct; identical to SEQ ID NO: 12052
  source 1..120: mol_type = other DNA

SEQ ID NO: 42375 - DNA, 120 bp, synthetic construct
  source 1..120: mol_type = other DNA
gctagagatttccttctgcctgtggagttttaccccgtgctcctctcccattggatccctgtggtgccaggcaggtatggggtgcttggggacccagcgagctcccagggcctttctgct

SEQ ID NO: 42376 - DNA, 120 bp, synthetic construct; identical to SEQ ID NO: 12053
  source 1..120: mol_type = other DNA

SEQ ID NO: 42377 - DNA, 120 bp, synthetic construct
  source 1..120: mol_type = other DNA
tattagtcctttctcatgctgctaataaagacctgagactggataatttataaaggaaagatgtttaattgactcacagttccacagggctggggaggcctcaggaaacttagaatcata

SEQ ID NO: 42378 - DNA, 120 bp, synthetic construct
  source 1..120: mol_type = other DNA
agaacagcagcatgggggtaaccatcaccatgattcaattacctcccactgggtccctcccatgacatgtgggaattatgggaactacaatttaagatgagatttgggtggggacacagc

SEQ ID NO: 42379 - DNA, 120 bp, synthetic construct
  source 1..120: mol_type = other DNA
ggtacagaaggaaatgctaagattttttgtcagcataactttctgatactttggcataaaactattttagttgcacatgttttttccagtaggtaatacagaacttaaaattatatttca

SEQ ID NO: 42380 - DNA, 120 bp, synthetic construct
  source 1..120: mol_type = other DNA
ttctacccagagtcttgtactcgtatgtttggggcagttttactcacaatagcctaaaactggaaatgaaatgaccaaaagtgtcatcaactgataaagggatactatgtggtaacaaaa

SEQ ID NO: 42381 - DNA, 120 bp, synthetic construct; identical to SEQ ID NO: 12054
  source 1..120: mol_type = other DNA

SEQ ID NO: 42382 - DNA, 120 bp, synthetic construct
  source 1..120: mol_type = other DNA
aagtccccaaaagcacaaactacaaagcaaaataaagatgtatttggctaaattaaaattaaagacttctgaatatcagcaaataccatagtatgtaaagcaaacaaataaaacagagca

SEQ ID NO: 42383 - DNA, 120 bp, synthetic construct
  source 1..120: mol_type = other DNA
gcaatcaataagaaagaaagaatatccaagtaggaaaatgttcaatatgtttgaagaaatatttcacggaaaagagaactcagatggcttccaaatattttaaaagatgttgaagattat

SEQ ID NO: 42384 - DNA, 120 bp, synthetic construct
  source 1..120: mol_type = other DNA
tgcatttctgttagaagcgtaaattgatactgcctctttaaaaagcaaggtgattatacctactaatgtttaagaaggtcataattgggacccagcaaattcaatccaagaaatatacct

SEQ ID NO: 42385 - DNA, 120 bp, synthetic construct; identical to SEQ ID NO: 12055
  source 1..120: mol_type = other DNA

SEQ ID NO: 42386 - DNA, 120 bp, synthetic construct
  source 1..120: mol_type = other DNA
tttcatagctaaacatacttttactgtacaatccagcaatcacagtccttggtatttacccaaatgagtaaaagcttatgtccccacaaacacctgcacatagatgtttatagaaccttg

SEQ ID NO: 42387 - DNA, 120 bp, synthetic construct
  source 1..120: mol_type = other DNA
cgtgaaaagacatggaggaaccttaaatgcatgtcactaagtgaaagaagccaatctgaaaaaggctacataatacgacattctggaacagtcaaatctctggagacagtaaagagatca

SEQ ID NO: 42388 - DNA, 120 bp, synthetic construct
  source 1..120: mol_type = other DNA
acccatcaaatatccaacacaaagggttaaccccagtgtaaactatagtctttgggggatagtgatacctgaatgtaggtttgacatcaattgtaacagcggtgtcactttgatgaaaga

SEQ ID NO: 42389 - DNA, 120 bp, synthetic construct; identical to SEQ ID NO: 12056
  source 1..120: mol_type = other DNA

SEQ ID NO: 42390 - DNA, 120 bp, synthetic construct
  source 1..120: mol_type = other DNA
aaaataggtacaaaatattagaatatataaatgtgtgtacaggaaaatcctaagaaagtacacattaatgataaacattaaattcattagtggctcctacttcagaacaggcagaatgaa

SEQ ID NO: 42391 - DNA, 120 bp, synthetic construct
  source 1..120: mol_type = other DNA
gtattgatgaagtactctgtcagaaaatagccatggaaaattatgctggatttgcagccagaaaattttaaacataagcagcaaacactcaagaagttaatctgggaagtttttgatgct

SEQ ID NO: 42392 - DNA, 120 bp, synthetic construct
  source 1..120: mol_type = other DNA
gttaagctgatgaataggaatgttggagaagagaagagctgagaatgtttgcacgagataactgtactgcaactgtggatatgaccgggctgcactttgcatttattgtctggccagtac

SEQ ID NO: 42393 - DNA, 120 bp, synthetic construct; identical to SEQ ID NO: 12057
  source 1..120: mol_type = other DNA

SEQ ID NO: 42394 - DNA, 120 bp, synthetic construct
  source 1..120: mol_type = other DNA
tgacacagactcagctcacttcaacctctgcctcccaagttcaagcgattctcatgtctcagcctctcaagtagctgggactacaggcgcgtgccaccacacccggctaatttttgtatt

SEQ ID NO: 42395 - DNA, 120 bp, synthetic construct
  source 1..120: mol_type = other DNA
gcctgcccctacttcagattccagctgcaagtagtagattgtcatctttacttctgtctgactgatttaaatcaggggttcccatgatccccctcctcatgatagagcagctcacataac

SEQ ID NO: 42396 - DNA, 120 bp, synthetic construct
  source 1..120: mol_type = other DNA
cccatgtcctgtccagcgcattaccctccagatacctagttttagttcagcaacctagttttaattctgactcttatctttttgggtttttaaggaggctccattttgtaggcatggttg

SEQ ID NO: 42397 - DNA, 120 bp, synthetic construct; identical to SEQ ID NO: 12058
  source 1..120: mol_type = other DNA

SEQ ID NO: 42398 - DNA, 120 bp, synthetic construct
  source 1..120: mol_type = other DNA
tcttattatatcacagtatcacaagagttaattcagtctcccatgttcatggagagactgactgtgcttggcattccttttctaattttcctagacacagccactcagtattttaaaaat

SEQ ID NO: 42399 - DNA, 120 bp, synthetic construct
  source 1..120: mol_type = other DNA
aatggctttcaatacagtggctttaattcatgtacatcattgtagttgtttatttggtgtctattgagaaaatggaaaatgactaaaaatgctagtatgaattcagaaacactattacat

SEQ ID NO: 42400 - DNA, 120 bp, synthetic construct
  source 1..120: mol_type = other DNA
cacacacgcatatacattttcaaaatatataaattattcagtatatagataatgcttctggagtgtatggtggtttcattgattgtttcttataacccccaaccccctggcccacaggta

SEQ ID NO: 42401 - DNA, 120 bp, synthetic construct
  source 1..120: mol_type = other DNA
tctttgtaaggggagttattgaaataatattaatgggtacagtttttttaggggaggggaataagggagtgatataaataaaatgatgtttgagaaattgtacttataggccaggcatgg

SEQ ID NO: 42402 - DNA, 120 bp, synthetic construct; identical to SEQ ID NO: 12059
  source 1..120: mol_type = other DNA

SEQ ID NO: 42403 - DNA, 120 bp, synthetic construct
  source 1..120: mol_type = other DNA
gaaggaggaaggattactttttgcagtaattttgatcataatgcagtgaaaaatctgatctagattggtacaaaagggaaggggcccagaaaatttggagacaaagctgtggtagtcatt

SEQ ID NO: 42404 - DNA, 120 bp, synthetic construct
  source 1..120: mol_type = other DNA
cttaatcaccgaaaatacaacaattcagaatgtataattaactctatgtaggatttataggtaatatgaagttctggagtattttaaacgttgtaataagatcttttaatatttttaccg

SEQ ID NO: 42405 - DNA, 120 bp, synthetic construct
  source 1..120: mol_type = other DNA
tatttaaaatatatttgttatattcacacagtaaacacgctatttagagtgttgatgacgtgctaagcaatgtccaaagtcatggggacagagcagagatcgagacagagtgcaccatct

SEQ ID NO: 42406 - DNA, 120 bp, synthetic construct; identical to SEQ ID NO: 12060
  source 1..120: mol_type = other DNA

SEQ ID NO: 42407 - DNA, 120 bp, synthetic construct
  source 1..120: mol_type = other DNA
gtccagcaggtgaagggggtaagtggtatgagatatgatgtggaagagatagttgggggctgattttcagggactttgaaagctagaacaagaagtttggattttattttaaattcaatg

SEQ ID NO: 42408 - DNA, 120 bp, synthetic construct
  source 1..120: mol_type = other DNA
gaaatactttgattcagaagtttcgtcagattggatttaagaggtaagagagaaagaggaattaaagagttttggatttgaggacattgttgagatgaggaaggcagaagtcatagagaa

SEQ ID NO: 42409 - DNA, 120 bp, synthetic construct; identical to SEQ ID NO: 12061
  source 1..120: mol_type = other DNA

SEQ ID NO: 42410 - DNA, 120 bp, synthetic construct
  source 1..120: mol_type = other DNA
tcatttaatagtgcattagtacatattcgtttaatatgggcactaaagtgtaagttctatatacagttgtattttagtggtaactctattttgttgctgcaaaaattgaaatgcagatga

SEQ ID NO: 42411 - DNA, 120 bp, synthetic construct
  source 1..120: mol_type = other DNA
atataattattgtcatatttcttatggggaagcagaaggaaaaaataaaactaatagaaaactccatcacagaatgcgagggcaaagattgatttatgaagaaaaggagggaaagaacaa

SEQ ID NO: 42412 - DNA, 120 bp, synthetic construct
  source 1..120: mol_type = other DNA
gtaataacttctatgaaagttaaaatcatcgtctgccatttttgtaataccctacccacaggaaagaaaagtaaaggtgggtattagacttaaagacttcagtacacctttagaactcag

SEQ ID NO: 42413 - DNA, 120 bp, synthetic construct
  source 1..120: mol_type = other DNA
cagtttctaaaaagtactctgcaactcacattgagagtttcactgtaaaagagtattcctaatatattgggagcgttcacatataagttcagtgattgacttctttgaaaaggccatggt

SEQ ID NO: 42414 - DNA, 120 bp, synthetic construct; identical to SEQ ID NO: 12062
  source 1..120: mol_type = other DNA

SEQ ID NO: 42415 - DNA, 120 bp, synthetic construct
  source 1..120: mol_type = other DNA
catttgttccttcagaaacaagttacatcattctcttaaccaaccacgttattctttgtcatcgtcactcattcatcactcaaccatgggtgcacattctcattcatcagctctcccatc

SEQ ID NO: 42416 - DNA, 120 bp, synthetic construct
  source 1..120: mol_type = other DNA
tgcatggactctagtaatccaaggatggcctgcaagactccattctttgatgttatatccaaaattatttatcagcatatagatttttaaaatcagattatcaatgagatgtgtgtccag

SEQ ID NO: 42417 - DNA, 120 bp, synthetic construct
  source 1..120: mol_type = other DNA
tcaaaatccttaaccttggctctattagcttcatttggatttctgtgagcttccatcagcaccaagagaccagtaccactgtagcaacataacagagttatgttacttttttatataaaa

SEQ ID NO: 42418 - DNA, 120 bp, synthetic construct; identical to SEQ ID NO: 12063
  source 1..120: mol_type = other DNA

SEQ ID NO: 42419 - DNA, 120 bp, synthetic construct
  source 1..120: mol_type = other DNA
ttttgtatcatatgcatgcctctgttaaattattcaacacatatctaaatgtgctcaatgttatttttcctgatcaaattatgaacagtgcaattcctagagtctttttttttttcattt

SEQ ID NO: 42420 - DNA, 120 bp, synthetic construct
  source 1..120: mol_type = other DNA
agagttatcattgaccagagtgttttcactctactgtggctcccagacagtgactttctgctagagagaaagagctggagatgaaactgaccctatttgaatacggaagaataaaattat

SEQ ID NO: 42421 - DNA, 120 bp, synthetic construct; identical to SEQ ID NO: 12064
  source 1..120: mol_type = other DNA

SEQ ID NO: 42422 - DNA, 120 bp, synthetic construct
  source 1..120: mol_type = other DNA
aatatgttttcacagcacatgtggtgctgttatactccgaaccaatctaatgggctttaattatgccaaggtctgtggatcccggagatgctgacaaattcataatgtgttttaaattgc

SEQ ID NO: 42423 - DNA, 120 bp, synthetic construct
  source 1..120: mol_type = other DNA
attcatgaatctcatgtgacattcctatccttaccatggagcagatgaaatgctgaagttgactttaggaaacccagatttgaggcccgagttttcactcactttttgtttgaatcggta

SEQ ID NO: 42424 - DNA, 120 bp, synthetic construct
  source 1..120: mol_type = other DNA
ggaaacatctgagagggctcttccttattgttttggttgagggatgtttaaatcgtaactagcaggcctgctagaagttctctgcttagttgggaatctagttgattctgttaatatttt

SEQ ID NO: 42425 - DNA, 120 bp, synthetic construct
  source 1..120: mol_type = other DNA
aatttggtatttgcctgctttcttagttctgaaaatgggagaggaccaaacactactctcgtcattcaaatactgagtaaagctctgctccagtgataaacttttcagtgatcctgtata

SEQ ID NO: 42426 - DNA, 120 bp, synthetic construct; identical to SEQ ID NO: 12065
  source 1..120: mol_type = other DNA

SEQ ID NO: 42427 - DNA, 120 bp, synthetic construct
  source 1..120: mol_type = other DNA
gcagagttcctggtacattgtaaggactcactagatgtttgtgaaatcgaattgataagacctttcattctccaagcagaaggaagttgttgtattataagtagttatagaaattatgaa

SEQ ID NO: 42428 - DNA, 120 bp, synthetic construct
  source 1..120: mol_type = other DNA
tgaaaattctacttagagactgaaaaaaaactctatgctaatctctctttatgctcatccaagatcatccctgattgaatacataccattcaaatctgtaaaactcaagattgcaagtat

SEQ ID NO: 42429 - DNA, 120 bp, synthetic construct; identical to SEQ ID NO: 12066
  source 1..120: mol_type = other DNA

SEQ ID NO: 42430 - DNA, 120 bp, synthetic construct
  source 1..120: mol_type = other DNA
tgtctttctaagaacaaaagacaaaagcaatctaataatgactttagatctgtagtctatccagagttaaagtgcttgccttttcttttccctcctctttattcgcatggtagaattaag

SEQ ID NO: 42431 - DNA, 120 bp, synthetic construct
  source 1..120: mol_type = other DNA
tgataaaaccagtagcctcacctgttaaggcccattgatctaaagaaaaatctcaggtgcagtataattgtgtaattgttgctaatattgttatcaaattatttgacactgttctctttg

SEQ ID NO: 42432 - DNA, 120 bp, synthetic construct
  source 1..120: mol_type = other DNA
aatgacatatttttaaaaataccaagcctcaaacttccactcaaaagcttttctgttattttactgattcatacatttattttctgtcaaacaagcaaacactgaattaaaaatgggaaa

SEQ ID NO: 42433 - DNA, 120 bp, synthetic construct
  source 1..120: mol_type = other DNA
cctttgaacttaagaactctaggaatttagacgaaagatacaatcattataataagagattgtgagagagtcattacaagccttgatatatttacaatgtccattcttataaccagttcc

SEQ ID NO: 42434 - DNA, 120 bp, synthetic construct; identical to SEQ ID NO: 12067
  source 1..120: mol_type = other DNA

SEQ ID NO: 42435 - DNA, 120 bp, synthetic construct
  source 1..120: mol_type = other DNA
gggtaaagtcatgtactttttagggcttttgatatttactgtcatattgcccttcagaatagtttacaatcttctgagctgtgtttctacgcatccatttgcccattcttacatctgcac

SEQ ID NO: 42436 - DNA, 120 bp, synthetic construct
  source 1..120: mol_type = other DNA
ttcttcgagtatttgtcttttttggcatatagctgccatttatacacgtggtcacaaaccacatgatattgcatgtatataacaatttccagttttcctgataacatattgctttggtta

SEQ ID NO: 42437 - DNA, 120 bp, synthetic construct
  source 1..120: mol_type = other DNA
gactggagtgcagtggtgcaatgtcagctcactgcaacctctgcctctcgggttcaagtgattctcctgcctcagcctcccaagtagctgggattacgggtgcacgccaccactcctggc

SEQ ID NO: 42438 - DNA, 120 bp, synthetic construct; identical to SEQ ID NO: 12068
  source 1..120: mol_type = other DNA

SEQ ID NO: 42439 - DNA, 120 bp, synthetic construct
  source 1..120: mol_type = other DNA
taattatcttattgcttgagaatacagattcatgaggccaaatccaagaaatacattttatccaactggatagtcctagttatcagataattcagtaattccaaccaccacagccttgtt

SEQ ID NO: 42440 - DNA, 120 bp, synthetic construct
  source 1..120: mol_type = other DNA
gtatggagagatacagatcactctactgtaattccatctcagcagttaatgggcccagctttgcaataggatgatttctgagtgtgatatgattcttttataagcagtaggtacaagttg

SEQ ID NO: 42441 - DNA, 120 bp, synthetic construct
  source 1..120: mol_type = other DNA
ctagacttgcctgtaagctcatcccatttttggcaagtcccttcagcttcttttgttttctgagttctgaagtgacaataataattctatttcctcatccattataactgaacatcatat

SEQ ID NO: 42442 - DNA, 120 bp, synthetic construct; identical to SEQ ID NO: 12069
  source 1..120: mol_type = other DNA

SEQ ID NO: 42443 - DNA, 120 bp, synthetic construct
  source 1..120: mol_type = other DNA
ttcaacaataaagcaaaaactacagactgtctaaggaaaactccgttttattatttggtttgttacttaccaaaacatacaatttaagacctgaaaatatctagaatacatagagtatta

SEQ ID NO: 42444 - DNA, 120 bp, synthetic construct
  source 1..120: mol_type = other DNA
ataaaaattaaaagcacaacgaggtatcatttcacagattggaatgtggagcaggaggaactttcactcactcctgacggtataagcactttggcaaactgtaattatttagtaaatttg

SEQ ID NO: 42445 - DNA, 120 bp, synthetic construct; identical to SEQ ID NO: 12070
  source 1..120: mol_type = other DNA

SEQ ID NO: 42446 - DNA, 120 bp, synthetic construct
  source 1..120: mol_type = other DNA
ctctgtcacccaggctggagtgcagtggcacaatcactgcttactgcagcctggacctcccaggctcaagcgatcctcccatctcaacctcccaagtatctgaaactacaggcatgcgcc

SEQ ID NO: 42447 - DNA, 120 bp, synthetic construct
  source 1..120: mol_type = other DNA
ttacaggcatgagccactgtgcccagccaacaaatttaaataacatactgtgtaggtctacataaatttgtggtaaaattataaagaaaaacaggagaatgttgtggagagacacagaaa

SEQ ID NO: 42448 - DNA, 120 bp, synthetic construct
  source 1..120: mol_type = other DNA
tttcaataaaactatgagggcctagaagatgttggtttggactcagtctgcaaactctgaacatagcctacagaaatgttggcaatacatgaaaaattatgtcttaactacaattttact

SEQ ID NO: 42449 - DNA, 120 bp, synthetic construct; identical to SEQ ID NO: 12071
  source 1..120: mol_type = other DNA

SEQ ID NO: 42450 - DNA, 120 bp, synthetic construct
  source 1..120: mol_type = other DNA
ctggcactattttaaaatactcgtgtatgcagtctatggactattctatcatttaatctatttatgatagcaagtttcacttatgcacatccaaaaattttgaggacatttaaattgatt

SEQ ID NO: 42451 - DNA, 120 bp, synthetic construct
  source 1..120: mol_type = other DNA
tatcagctttgacttttttcgtgtgggttttagttttcatgatttaagttgtctttgtggcattaaaaaaccacagaagtagatttgttaaggatgtaaccaaaaagagctagaaggaac

SEQ ID NO: 42452 - DNA, 120 bp, synthetic construct
  source 1..120: mol_type = other DNA
ctgagtttcagttcatcgtttctactgtatcccctcttccttaatatgatgattcattgtaacacaaatatacaatttaattagtagaaagctgattttaactcttacgggtacgtactt

SEQ ID NO: 42453 - DNA, 120 bp, synthetic construct; identical to SEQ ID NO: 12072
  source 1..120: mol_type = other DNA

SEQ ID NO: 42454 - DNA, 120 bp, synthetic construct
  source 1..120: mol_type = other DNA
ttgtgcttagcatgaactaagcactttgctcagttgtgaattcacagatgttcttaaactgaaaaggaacaaggaatgctagtctagatttttatagtatgagatagtcacattattgta

SEQ ID NO: 42455 - DNA, 120 bp, synthetic construct
  source 1..120: mol_type = other DNA
tttatcaagctaacttgagttttgtttttgtttttcatatttgttagcattctgtgaaacttcagggctcctgaaatattcagtgctttgacccttagagtctgttccattccttatgat

SEQ ID NO: 42456 - DNA, 120 bp, synthetic construct
  source 1..120: mol_type = other DNA
ggctattaatagatgcctttcaagtatgagccttcggtttgctgtacttaatatttttttaaagtatacaataacaacattgtgcaataaagtttgcataatattatcagaggcattcga

SEQ ID NO: 42457 - DNA, 120 bp, synthetic construct; identical to SEQ ID NO: 12073
  source 1..120: mol_type = other DNA

SEQ ID NO: 42458 - DNA, 120 bp, synthetic construct
  source 1..120: mol_type = other DNA
aaaccattggagcagaacacatctccccatatatacaagcattgtacctagggtggacacgttcctcctcttactttcaggaacgtcctactctgtctatgaagtagctgccctttcacc

SEQ ID NO: 42459 - DNA, 120 bp, synthetic construct
  source 1..120: mol_type = other DNA
cttggtctcaatgacttcaagaatgaagccgcggacccttgcggtgagtgttacagttcttaaaggtggtgtgtccagagtttgttctttctgatgctcagatgtgttcggagtttcttc

SEQ ID NO: 42460 - DNA, 120 bp, synthetic construct; identical to SEQ ID NO: 12074
  source 1..120: mol_type = other DNA

SEQ ID NO: 42461 - DNA, 120 bp, synthetic construct
  source 1..120: mol_type = other DNA
tagattagctagacacagagcactgattggtgcatttacaaaccttgagctagacacagggtgctgattggtgtgtttacaaaccttgagctagacacagagtgctgattggtgtattta

SEQ ID NO: 42462 - DNA, 120 bp, synthetic construct
  source 1..120: mol_type = other DNA
aaaccttgagctagacacagagtgctgattggtgtatttacaatcccttagctagacataaaggttctccaagtccccactagattagctagacacagagcactgattggtgcatttaca

SEQ ID NO: 42463 - DNA, 120 bp, synthetic construct; identical to SEQ ID NO: 12075
  source 1..120: mol_type = other DNA

SEQ ID NO: 42464 - DNA, 120 bp, synthetic construct
  source 1..120: mol_type = other DNA
gacacgcaggagcccatggccggggggaggctcgggcatggcaggctgcaggtcccgtgccctgccctgcggggaggcagctgaggcccggcgagaatttgagcacagcaccggtgggct

SEQ ID NO: 42465 - DNA, 120 bp, synthetic construct
  source 1..120: mol_type = other DNA
ctcaccagcacaagcgccacgcgcagctctggttcctgcccacacctctccctccacacctccctgcaagcagagggagccagctccagcctcggccagcacagagaagggctcccacag

SEQ ID NO: 42466 - DNA, 120 bp, synthetic construct; identical to SEQ ID NO: 12076
  source 1..120: mol_type = other DNA

SEQ ID NO: 42467 - DNA, 120 bp, synthetic construct
  source 1..120: mol_type = other DNA
aaaaggttaaatatctccacaggtagctactttatgttcacctgtcttaggtaaacagctgatttacctgtgaacatgtaattgactattatcctacttgatccttttcttttgcaactt

SEQ ID NO: 42468 - DNA, 120 bp, synthetic construct
  source 1..120: mol_type = other DNA
cattttcttctgggtgtgtctttaaccttggcaaaataaacttctaaattgattgagtcctgtctcagatactttttggtttacaataatgtaatatctctttatatattatttttatcc

SEQ ID NO: 42469 - DNA, 120 bp, synthetic construct; identical to SEQ ID NO: 12077
  source 1..120: mol_type = other DNA

SEQ ID NO: 42470 - DNA, 120 bp, synthetic construct
  source 1..120: mol_type = other DNA
ggctttaagagtttctgcagagatacacaagttgaaaattatactggttatgtaaacacaaatggggaaaatctaaacataaaagctgatatttctccattttctaacacaaatactttg

SEQ ID NO: 42471 - DNA, 120 bp, synthetic construct
  source 1..120: mol_type = other DNA
ttatcttatggggtctattgtgccttcagatataaactgatgacagtgtgaagtcattacagtgagacatttaaaacctaaacatttagaacatgaagtttgagtatgatatgacatgca

SEQ ID NO: 42472 - DNA, 120 bp, synthetic construct
  source 1..120: mol_type = other DNA
atccttccacttcagcctcctgagtagctgggactataggtgtgtgccaccacaaccagctaatttttttttttaagtagagttgggatttcaccatgttgcccagtctagtctggaact

SEQ ID NO: 42473 - DNA, 120 bp, synthetic construct
  source 1..120: mol_type = other DNA
gaagataaaaagtcatagtcatttgggaaaacacttactcttatcatagaagtggctgaaataatactgagaaaccatattatcacatgctatattgcagttctatgtcagtaaatattc

SEQ ID NO: 42474 - DNA, 120 bp, synthetic construct; identical to SEQ ID NO: 12078
  source 1..120: mol_type = other DNA

SEQ ID NO: 42475 - DNA, 120 bp, synthetic construct
  source 1..120: mol_type = other DNA
agctccttccgtggaattcattatttcataggcaagctgttgccgcagagatgttagaacctgaatataaaatctgaatagtattttataatgagatgtgcaatgactttactgtggact

SEQ ID NO: 42476 - DNA, 120 bp, synthetic construct
  source 1..120: mol_type = other DNA
tctggagctttttatagcgtactcccttggagatatttccagggcgaagatgacatttttaacaatgaaaaactacctgctttctggtaaccttaccttggagagaatattttgaaatga

SEQ ID NO: 42477 - DNA, 120 bp, synthetic construct
  source 1..120: mol_type = other DNA
aaagagcttagatgagatttgaaatatttattagaaatatgaaagtgaaatgtcatgtggttagtttgtaagaacttagtgaccatagggaaaattggaatttactattgctacctgaat

SEQ ID NO: 42478 - DNA, 120 bp, synthetic construct; identical to SEQ ID NO: 12079
  source 1..120: mol_type = other DNA

SEQ ID NO: 42479 - DNA, 120 bp, synthetic construct
  source 1..120: mol_type = other DNA
atgctcctttttgcaaatgtgtgttcaaatatttgcttatggagtatgtcgtaggctgaattatcctcaaagatatccagtttcgaattcagggaacctatgaatgttgccttatatgac

SEQ ID NO: 42480 - DNA, 120 bp, synthetic construct
  source 1..120: mol_type = other DNA
gaagaggagaaggagatgtaatggctgaagtaaaggttggagtgatgcactttaaagatggaggaagggaccacaagccaaggaatgtagaaagcctttagaagctgaaaacagtgagga

SEQ ID NO: 42481 - DNA, 120 bp, synthetic construct; identical to SEQ ID NO: 12080
  source 1..120: mol_type = other DNA

SEQ ID NO: 42482 - DNA, 120 bp, synthetic construct
  source 1..120: mol_type = other DNA
catgagtttctggaccagatcctagtattcaacttccaataacattttcaggtgtttttttttttttttttgaaagattacatgaataacgtaatggcagaatcaaatttagaaactcag

SEQ ID NO: 42483 - DNA, 120 bp, synthetic construct
  source 1..120: mol_type = other DNA
aagctccacctccagggttcacaccattctcctgcctcagcctcccgagtagctgggactacaggcacccgcaaccacgcccagctaattttttgtatttttattagagacagggtttca

SEQ ID NO: 42484 - DNA, 120 bp, synthetic construct
  source 1..120: mol_type = other DNA
aaatgctttcacatatctcaattaggcagccttgaaaataaaacttaagaagaagctctcttttaaaatatatttatagctaaaggtttaaaataacatgggttaaaaagtggtactagc

SEQ ID NO: 42485 - DNA, 120 bp, synthetic construct; identical to SEQ ID NO: 12081
  source 1..120: mol_type = other DNA

SEQ ID NO: 42486 - DNA, 120 bp, synthetic construct
  source 1..120: mol_type = other DNA
gcaggcaccagacatttaccagattcattcttgaaccactattgccataaattgtggcacaatgaaattaacataaactgggattagcttggagaaaagagaaggctgattattttaatg

SEQ ID NO: 42487 - DNA, 120 bp, synthetic construct
  source 1..120: mol_type = other DNA
agaatttgactcctgtaaagatccagtggatctttccggttagtaacctacatgtgaatgaataagatgagtacatgtgtgttttctttctcctctttgtcctttgtcgaatttctaagc

SEQ ID NO: 42488 - DNA, 120 bp, synthetic construct
  source 1..120: mol_type = other DNA
ttgagtctgaagatactatgttttttttcaaaaccagcataaaccaaaatttttagaccatcatcaagtttttacattattttaacaatctactcttgaaaaatcatatctacattattt

SEQ ID NO: 42489 - DNA, 120 bp, synthetic construct
  source 1..120: mol_type = other DNA
ttaggtttttctgtaatatactttgaacaggaaacacatgcaacaatgaagaatatttaacaaaatccatagtgaataggtcctgtggaggatcacaaagccccagtagcttataaagtc

SEQ ID NO: 42490 - DNA, 120 bp, synthetic construct; identical to SEQ ID NO: 12082
  source 1..120: mol_type = other DNA

SEQ ID NO: 42491 - DNA, 120 bp, synthetic construct
  source 1..120: mol_type = other DNA
atttggtggtaataagtagaagggactggagatgaagagatgggggcagggggatcaggttagagagatgacatctaggaaattagagaagacaatcaggtgtgacgattaggaacatta

SEQ ID NO: 42492 - DNA, 120 bp, synthetic construct
  source 1..120: mol_type = other DNA
agagtttttgcttgatttccagtatcagatatgggtattacagcttcttctttaggacattgatgctttaattaaaaatatatatgaatatattaatgacaccttacagcatttcttggc

SEQ ID NO: 42493 - DNA, 120 bp, synthetic construct
  source 1..120: mol_type = other DNA
tctactaaaattgtttccttaaatatctctggtgatatcttagtttcagatccaaaggctctgacttcctcaccctatttgacccacatactgtgatgtgtttgctctcgacagatgtat

SEQ ID NO: 42494 - DNA, 120 bp, synthetic construct; identical to SEQ ID NO: 12083
  source 1..120: mol_type = other DNA

SEQ ID NO: 42495 - DNA, 120 bp, synthetic construct
  source 1..120: mol_type = other DNA
ttacttgcttctttcctgggactattattataagagacagaggtctgatcatcttgttcctattttttatggacctggtatagtctgtgtggacttcctggatgaccaacaaccacaaac

SEQ ID NO: 42496 - DNA, 120 bp, synthetic construct
  source 1..120: mol_type = other DNA
aaccctacctccccacctccacaaaaggctgatgattgtgcttcaaagtaaatggaagtggaccgaggagtatttatttatttcctgagctgaaatcagtgttgtccatctcatttaaaa

SEQ ID NO: 42497 - DNA, 120 bp, synthetic construct
  source 1..120: mol_type = other DNA
ttaatggtaagatctgttcaaaggcacgtcaacatggtcaaaattagttatatagttcttctgagttttagccaaggactttaaccatcctgatggggaaatgatacaaaagtttaaaca

SEQ ID NO: 42498 - DNA, 120 bp, synthetic construct; identical to SEQ ID NO: 12084
  source 1..120: mol_type = other DNA

SEQ ID NO: 42499 - DNA, 120 bp, synthetic construct
  source 1..120: mol_type = other DNA
ctaaaaatcttttttgtgtgactggatgtagctgtttcacctcttacggttaatgttttcatcatgtgcattttttgtgttcttttacattcaacctatttgtagtttttaatctatgat

SEQ ID NO: 42500 - DNA, 120 bp, synthetic construct
  source 1..120: mol_type = other DNA
gttgttttttcatatgcctgctgtattttttgtacctgtattcctccattcttgctttcttttgtgcagaatagtgtgccattttgaaacctctgttgatttctttactatgtatttttt

SEQ ID NO: 42501 - DNA, 120 bp, synthetic construct
  source 1..120: mol_type = other DNA
gaaaacctgctccaacatagcttcatttcctttcccttccttcatactctttttttgtgacatatacacccatacatcatacatatatgttccaaacccaataagatactattataacta

SEQ ID NO: 42502 - DNA, 120 bp, synthetic construct; identical to SEQ ID NO: 12085
  source 1..120: mol_type = other DNA

SEQ ID NO: 42503 - DNA, 120 bp, synthetic construct
  source 1..120: mol_type = other DNA
gtcagccattaatcatatatccatttgatgggatgtgtattatttttctcttactgctttaaatacttctatttttgtctgactgtcatgcaaacaatttgactgcagtgtgtctgggtg

SEQ ID NO: 42504 - DNA, 120 bp, synthetic construct
  source 1..120: mol_type = other DNA
gtttggggccattcattatttgtttaaatgcatttttctgaccgcttctttctctcctattcttctgagactcccattacacgtatattgatgtacttgacgttattccactggtttctg

SEQ ID NO: 42505 - DNA, 120 bp, synthetic construct
  source 1..120: mol_type = other DNA
tcttcttcaatctgcaattgaacctctttagtatatttattattttagttattgtattcaaatacagattttccatttgatttatttttgtaatttttgcatcctttttgataatttcta

SEQ ID NO: 42506 - DNA, 120 bp, synthetic construct; identical to SEQ ID NO: 12086
  source 1..120: mol_type = other DNA

SEQ ID NO: 42507 - DNA, 120 bp, synthetic construct
  source 1..120: mol_type = other DNA
attcttttatgtctctattgaaggttattgttgctgggtttttttattttttctttgtttagtaaattgtctgagctgagtctgtgacatgtctctccttgatgggtggccaataacgtc

SEQ ID NO: 42508 - DNA, 120 bp, synthetic construct
  source 1..120: mol_type = other DNA
taagactagctttctagagactttgctattccttcatagcttagagttcaggtaatgatggtacagagattgtgctcagacactttgaggagtaagtttttagtcctctaccagccaacc

SEQ ID NO: 42509 - DNA, 120 bp, synthetic construct
  source 1..120: mol_type = other DNA
gtctttcttgtgcatgtgcaacttcagtcaaaaatatactgagttagagctggtagaggatcaccaggtgtgtgctagcagatctgttggacctccctgggatgtgtcactttcatagat

SEQ ID NO: 42510 - DNA, 120 bp, synthetic construct
  source 1..120: mol_type = other DNA
ctgtggggagatgggagtagcccaggaaagaacaccacagatttactgttcttacccaaattgtggcagtttttaagcataaaagtttcttatatttttgtatgcctttggttaatttcc

SEQ ID NO: 42511 - DNA, 120 bp, synthetic construct
  source 1..120: mol_type = other DNA
catggggggaggtgcatataatttatttaaaaaatgcagcgtataaatatttttatctatcctgaattgatccttcaacataaaaaagtgttatgttatggctgtatcttatcaggtgct

SEQ ID NO: 42512 - DNA, 120 bp, synthetic construct; identical to SEQ ID NO: 12087
  source 1..120: mol_type = other DNA

SEQ ID NO: 42513 - DNA, 120 bp, synthetic construct
  source 1..120: mol_type = other DNA
agtggtgactcacctgcagtcagcaaaggaaagccctctgtatttaaatatatctacagcacatccatccagacaggatcacagtattattgccttccagcacttttgctcctgctagta

SEQ ID NO: 42514 - DNA, 120 bp, synthetic construct
  source 1..120: mol_type = other DNA
caggctcactgtcacatttaggtttttttttttttaaatcaatcacaaatgttaccacaaatggacagggcaataaaaagaaaacaactgggaggcaggctgatatgaccttgtggaagg

SEQ ID NO: 42515 - DNA, 120 bp, synthetic construct
  source 1..120: mol_type = other DNA
atttcatgatgagaattaggacctagcacaaagaggacccttaaaaagtgatatagctattattacttgtataattgtctctacatttttttatattcttgaaactgcatagaaatttca

SEQ ID NO: 42516 - DNA, 120 bp, synthetic construct; identical to SEQ ID NO: 12088
  source 1..120: mol_type = other DNA

SEQ ID NO: 42517 - DNA, 120 bp, synthetic construct
  source 1..120: mol_type = other DNA
actggactaggatttttaaggggattttggtacatagagggctgaggagcttagggctgctgattagttagggcagtggggatgaagtcataaattgtattcttatgttgaataagttct

SEQ ID NO: 42518 - DNA, 120 bp, synthetic construct
  source 1..120: mol_type = other DNA
aacaggggctatgtgatttttaagcagtaagtacctataaggaagtggactatagggcaggctggttaatgcttagctatgcttctactcaaagtgtatgcttttattgaaaaacctagc

SEQ ID NO: 42519 - DNA, 120 bp, synthetic construct
  source 1..120: mol_type = other DNA
tgaaattaatccagctcattttcagagaatgagacacctgcaaacagtgagatggttggtatttgtatggttatgcctgaacgaatctgcactatattacataattaattgaatttgaag

SEQ ID NO: 42520 - DNA, 120 bp, synthetic construct; identical to SEQ ID NO: 12089
  source 1..120: mol_type = other DNA

SEQ ID NO: 42521 - DNA, 120 bp, synthetic construct
  source 1..120: mol_type = other DNA
tctatcaagtgtgttcaatctgtggtctactgagatcctgcagacggcaaagctgagatattactgcaaataacaagtatttgtgactaacaaatacttagctcatacactatttttgtc

SEQ ID NO: 42522 - DNA, 120 bp, synthetic construct
  source 1..120: mol_type = other DNA
taaaaaaaaaaaccttttttgaggaaagagtgaaaatgtgctccaaagtaattcgtggctagaggaactgcaacagtgtttcaaatatttccatttatatgtttgttctgtggtgtgtta

SEQ ID NO: 42523 - DNA, 120 bp, synthetic construct
  source 1..120: mol_type = other DNA
tctgacatacttgttcgggatacttgttttccagagagttggtatgtggagcttttattgagattgtgattttttttatcatgaataaaaagatagaaaccagtctgcctgaagtgagtt

SEQ ID NO: 42524 - DNA, 120 bp, synthetic construct; identical to SEQ ID NO: 12090
  source 1..120: mol_type = other DNA

SEQ ID NO: 42525 - DNA, 120 bp, synthetic construct
  source 1..120: mol_type = other DNA
tgttgtattatgaaagatgcatgtcaaggagcaaaatgaacaccgagcaaaccatatgggatgctacgaattcactagggattttcataattagctgctaagttggcacagctgtgggtc

SEQ ID NO: 42526 - DNA, 120 bp, synthetic construct
  source 1..120: mol_type = other DNA
caaaggatttaagaccggggaaaacccagagacatcagcttcatttgttaggatcacatttagccttgtctttcaaaaagctgacctgaacgaatgagttgacacaggaaaaatctttcc

SEQ ID NO: 42527 - DNA, 120 bp, synthetic construct
  source 1..120: mol_type = other DNA
aactaggaacatggtgtaatgttatgattggggttttgaagcaatgtaaagaggaaaaagtgaactaagatttttcttagatcttgcctgttacttcctttctacagtatttcctacgag

SEQ ID NO: 42528 - DNA, 120 bp, synthetic construct; identical to SEQ ID NO: 12091
  source 1..120: mol_type = other DNA

SEQ ID NO: 42529 - DNA, 120 bp, synthetic construct
  source 1..120: mol_type = other DNA
gctctgttttaaagtatactgttttcacatctcttggtggaagaacagcttttctcttaatttatatctctctgattctgagctctcaatctgatttagggttttcttaaattaggcaga

SEQ ID NO: 42530 - DNA, 120 bp, synthetic construct
  source 1..120: mol_type = other DNA
ctgaggtatcttggctagttacccatgagatctgaattccatgttcctggtacggggatttactgctgtcaaactgtcaacattaactacatcattcatttgcaaaatacattttgagat

SEQ ID NO: 42531 - DNA, 120 bp, synthetic construct
  source 1..120: mol_type = other DNA
tggaaacctagtgttaacaaaacagcccaaccaaaagcagatttgtcattagggctctaactgcctgtatccctatagtgtatgtgcatctgtttgattttccagaaatagatgaaatca

SEQ ID NO: 42532 - DNA, 120 bp, synthetic construct; identical to SEQ ID NO: 12092
  source 1..120: mol_type = other DNA

SEQ ID NO: 42533 - DNA, 120 bp, synthetic construct
  source 1..120: mol_type = other DNA
gtaaatgcatagaaaaaggactgcaaataggccaggcgtggtggcctgtaatcccagcactttgggaggccgaggcaggcggatcatgaggtcaggagatcgagaccatcctggctaaca

SEQ ID NO: 42534 - DNA, 120 bp, synthetic construct
  source 1..120: mol_type = other DNA
cttgcagtgagccgagattgtaccactgcattccagcctgggtaacagggccagactctgtctcaaaaacaaaaacaaaacaaaacaaaaaatatattaaaaaaagaaaaaggactggaa

SEQ ID NO: 42535 - DNA, 120 bp, synthetic construct
  source 1..120: mol_type = other DNA
ctacaaggagatgtttttatgtgtgattttatgtgtgatttaaaaatatgaaatagtgtgcataggtggggaccttcacgccgagggagaaaaaaatataagcaaaggcatcaggatgtg

SEQ ID NO: 42536 - DNA, 120 bp, synthetic construct; identical to SEQ ID NO: 12093
  source 1..120: mol_type = other DNA

SEQ ID NO: 42537 - DNA, 120 bp, synthetic construct
  source 1..120: mol_type = other DNA
agccatgctgctggcttaaagtctgttacctttcccaaagtatatatattctgataaaatcggtgttgtctccatatgaaaagtattattaccctcctgcaagcttgctttaggcactat

SEQ ID NO: 42538 - DNA, 120 bp, synthetic construct
  source 1..120: mol_type = other DNA
aactgcagtttttggttttgtgttccgatgtgatctgagtatttcgaagcacttataatgcagagcgtactatatgaaagttctcatgatttgggagcacactcatagtaagggcaagga

SEQ ID NO: 42539 - DNA, 120 bp, synthetic construct; identical to SEQ ID NO: 12094
  source 1..120: mol_type = other DNA

SEQ ID NO: 42540 - DNA, 120 bp, synthetic construct
  source 1..120: mol_type = other DNA
tgttgactttaaaaggtacaaattatgctgatgattctgtttaaaataactagatcatttttctttagagcaaaacagacaacactacaaatctctgatgtgtattaagttttcctgaaa

SEQ ID NO: 42541 - DNA, 120 bp, synthetic construct
  source 1..120: mol_type = other DNA
aagcatggtgaagatgactcagaacaaaatgggtggcgtttgtaagacacagggaattgcctttgaagattgttggcgtgtttatttatgctaactcccacgatctgaaaaaatagctgt

SEQ ID NO: 42542 - DNA, 120 bp, synthetic construct
  source 1..120: mol_type = other DNA
acattttgatctaagcaaaggcatgaaacaatttaaatacacccagaatatgaagttttaaatgttaccggaaagtgtcttttcttgacaatactggaacattttggatgttatgaacag

SEQ ID NO: 42543 - DNA, 120 bp, synthetic construct
  source 1..120: mol_type = other DNA
tggtgcttcatcatttccagaaatggagaggaattacaatatgcaaaactaatgataatagctcacttattttaagttctttttatattcttgacactgtgataagctctctacatatat

SEQ ID NO: 42544 - DNA, 120 bp, synthetic construct; identical to SEQ ID NO: 12095
  source 1..120: mol_type = other DNA

SEQ ID NO: 42545 - DNA, 120 bp, synthetic construct
  source 1..120: mol_type = other DNA
tcaaggcattttttttcaagtcagttcaccagcacaccatttgataacatagcgccctttcagcagtgccaaagtataagccctcacattttaaatggatataaatgaaataaacactta

SEQ ID NO: 42546 - DNA, 120 bp, synthetic construct
  source 1..120: mol_type = other DNA
agagagtccttttcctagcctttgaacttttatatgaggattttagaaagaaagcccttgtctggccaactgcagactttaaatgcagttagctgtgccagatttgagaggactctttgc

SEQ ID NO: 42547 - DNA, 120 bp, synthetic construct; identical to SEQ ID NO: 12096
  source 1..120: mol_type = other DNA

SEQ ID NO: 42548 - DNA, 120 bp, synthetic construct
  source 1..120: mol_type = other DNA
aaacagtgtaaattgtaatgtggatgcattgcatcagcttatcaaatttatcctcccagtgttctttttatgaagaaagcgtaacttgcttacatgttgtgtttaatgtatttgtaatgt

SEQ ID NO: 42549 - DNA, 120 bp, synthetic construct
  source 1..120: mol_type = other DNA
aagcatacatgattaataacttacggttctaactcaccaatcagttctttttcattatttattatgatttattggaaaacatttccataaactgaaagaaaagaaagaaatgcattcaca

SEQ ID NO: 42550 - DNA, 120 bp, synthetic construct
  source 1..120: mol_type = other DNA
cctcaaactcttgggcccaagcattcctcctgcctcagccctctgaatagttgggactacagccatgtgcctttttttatatttaaaaaaaattaaggcctggcgcggtggctcatgtct

SEQ ID NO: 42551 - DNA, 120 bp, synthetic construct
  source 1..120: mol_type = other DNA
tggtggtgcatgcctgtagtcccagctacttgggaggctgagacagaagaattgcttgactccaggaggtgtaggttgcagtgagccgagatcgcaccatcgcactccaccctgggaaac

SEQ ID NO: 42552 - DNA, 120 bp, synthetic construct; identical to SEQ ID NO: 12097
  source 1..120: mol_type = other DNA

SEQ ID NO: 42553 - DNA, 120 bp, synthetic construct
  source 1..120: mol_type = other DNA
ttgtggataaggagaaacctgtgtttgggaatattttatactaattcagttttatatttgcttatctttaatattaatttgagacaactattatttttctgttctttaatttttttatca

SEQ ID NO: 42554 - DNA, 120 bp, synthetic construct
  source 1..120: mol_type = other DNA
atcctgttcacacgagtgatagtaataatccttactatagatgaccacaggaattatagatacagctcccagggcaatgcgtatcagagtaagctgtgtctccttacattttcagagctg

SEQ ID NO: 42555 - DNA, 120 bp, synthetic construct
  source 1..120: mol_type = other DNA
tgcaacctctgcctcctgggttcaaactattctccagcctcagcctcctgagtagctgggattacaggcttgtgccgctgcgtctggctactttttgtatttttagtagagatggggttt

SEQ ID NO: 42556 - DNA, 120 bp, synthetic construct; identical to SEQ ID NO: 12098
  source 1..120: mol_type = other DNA

SEQ ID NO: 42557 - DNA, 120 bp, synthetic construct
  source 1..120: mol_type = other DNA
caggagatgctggctaacaccgtggagaaatcagaaggggcaagtacccaatttatgtagacttgtagtattttaatgagctcagctactataggaacaatttctttcacaggtgtcaga

SEQ ID NO: 42558 - DNA, 120 bp, synthetic construct
  source 1..120: mol_type = other DNA
ttgtggtgtcttgaaaactaaaaaaatatatccaagcttgatgtgatctgtgtcactaggcctcgtgcttatgtctgttgtttaaaaccgacctttctttgagcgtttctgtgtttcatt

SEQ ID NO: 42559 - DNA, 120 bp, synthetic construct
  source 1..120: mol_type = other DNA
catggaaagtaaaatttcatggcactgttatatattttaagtaaccaaattttggtgatatggctttaggctattgtaattttgcaaacagctaatccttctcctctgaaaattgaaatt

SEQ ID NO: 42560 - DNA, 120 bp, synthetic construct; identical to SEQ ID NO: 12099
  source 1..120: mol_type = other DNA

SEQ ID NO: 42561 - DNA, 120 bp, synthetic construct
  source 1..120: mol_type = other DNA
atttggttattttattttcaatgagacttcctgtgactgatatctgggctgttacccagtcttaaccaatttattaaagtttagaattaagcaggaggattaatggtcaaattttttgtt

SEQ ID NO: 42562 - DNA, 120 bp, synthetic construct
  source 1..120: mol_type = other DNA
tgctgttgttattaatcattactctggtctggataaataaagagattaaaaaatggtaatatataaatgattatccatagaaaggagtgatcagttataacgttattttcatcagccttg

SEQ ID NO: 42563 - DNA, 120 bp, synthetic construct
  source 1..120: mol_type = other DNA
attagactagaagcttattttacaaaagcttagtattttagtttttcaggttcattttttgtttacaacaaagtttgaaattattaaaatatataaagtttcttttaaaaatttctattc

SEQ ID NO: 42564 - DNA, 120 bp, synthetic construct; identical to SEQ ID NO: 12100
  source 1..120: mol_type = other DNA

SEQ ID NO: 42565 - DNA, 120 bp, synthetic construct
  source 1..120: mol_type = other DNA
ggaagtaatttgaaatactgttttaggatttatggtttttttgagatggggtcttgctatatggcccaggctggtcttgagctcctgagctcaaacaatcctcctgcctcagtctctgga

SEQ ID NO: 42566 - DNA, 120 bp, synthetic construct
  source 1..120: mol_type = other DNA
tttgaattgttcactctctagaatgtctccatcacagataaagtagtaatttgtgtgatgtgttgaacactattttataaagcgcagtatagttaccataagacatgaattaggaagtat

SEQ ID NO: 42567 - DNA, 120 bp, synthetic construct
  source 1..120: mol_type = other DNA
tagggaaaaatgaaagtttctctcatactgctgagtatttttgattatacccagaaatgatattcattcctagcttgccacaggtgatgccagttaatgagcacagccccagccacagcg

SEQ ID NO: 42568 - DNA, 120 bp, synthetic construct; identical to SEQ ID NO: 12101
  source 1..120: mol_type = other DNA

SEQ ID NO: 42569 - DNA, 120 bp, synthetic construct
  source 1..120: mol_type = other DNA
ttaaccattttattcataaggatgtgcaccagctagatatcatgtctgatgatatgtgactcatggatgctgctggcacttgtaggaaccaagtcttctgaactccaaatatcatctttt

SEQ ID NO: 42570 - DNA, 120 bp, synthetic construct
  source 1..120: mol_type = other DNA
acttttcctaggatgaagtgtgtcaggaaggtaatgtgaattttcaagaaatcatttctttcctttcagatgaacagtgagtcaaaaagaacctcgtgttgccctgattcccaactcttt

SEQ ID NO: 42571 - DNA, 120 bp, synthetic construct
  source 1..120: mol_type = other DNA
cacatagcaatacaaacacacttgatgataaggaaaatttttccatttagaaccatgcctttgttttttgtggttaaggaccattttgctagtattcttgggtcatgaataaatacatgg

SEQ ID NO: 42572 - DNA, 120 bp, synthetic construct
  source 1..120: mol_type = other DNA
acagaagaagatgtgtaagatgaaatgggagaaaatattacctaatgtatgaagttttggttccctaaaaagttgcttattgtgactattagtaaaataactcatatttttgtggcacca

SEQ ID NO: 42573 - DNA, 120 bp, synthetic construct
  source 1..120: mol_type = other DNA
actatcatttagcttttattcttattaaaatcatgtcaatagtaaataggccaagacctgtctatctcagtagctgcccacagaagctttcagatcttgaggatggagacagtacacagg

SEQ ID NO: 42574 - DNA, 120 bp, synthetic construct; identical to SEQ ID NO: 12102
  source 1..120: mol_type = other DNA

SEQ ID NO: 42575 - DNA, 120 bp, synthetic construct
  source 1..120: mol_type = other DNA
attcttttttgtatacttttaaactccctgggttggactgctattaattcctgactgccttttctctgggcttgatggctttcttccttctctgggacatagccagtccagttcccactt

SEQ ID NO: 42576 - DNA, 120 bp, synthetic construct
  source 1..120: mol_type = other DNA
cctcccctcgaccccagtattctcatcaatcctggcacatgtagtttgccgatttaatgatgccgcagcagtgttagaatagagagttgatgatagcatttgcttgtttccatgtgtttt

SEQ ID NO: 42577 - DNA, 120 bp, synthetic construct
  source 1..120: mol_type = other DNA
taatttaaggatttcatctcctatgagcacagatatcaagtgagaggtgacgtagtatagtagaaagggctttggttttggagtccaggaaatttactgaaagttctttttcaaataata

SEQ ID NO: 42578 - DNA, 120 bp, synthetic construct; identical to SEQ ID NO: 12103
  source 1..120: mol_type = other DNA

SEQ ID NO: 42579 - DNA, 120 bp, synthetic construct
  source 1..120: mol_type = other DNA
tgatcgtgggtattggtagtttaccgctatgtaagttatggatgatactttaaaaatctataaaattcacaatgtaatgttataaatattgtgatgagcaaataatattgaaatgaatat

SEQ ID NO: 42580 - DNA, 120 bp, synthetic construct
  source 1..120: mol_type = other DNA
gcagggatagaaaaacaattatagtataatttcatgtatgttatagaagtatatataattatcatgttggcatgaagaaggaattgtgtacgtggaacttgttgttcctttacattttct

SEQ ID NO: 42581 - DNA, 120 bp, synthetic construct
  source 1..120: mol_type = other DNA
ccaaggaacaatttgagctcattaggcaattccttaaaattttaatagaaaataatacttgtcaggaagacaatccaaaacatgtccagagatattcttaaaatgatttttatgtttcag

SEQ ID NO: 42582 - DNA, 120 bp, synthetic construct; identical to SEQ ID NO: 12104
  source 1..120: mol_type = other DNA

SEQ ID NO: 42583 - DNA, 120 bp, synthetic construct
  source 1..120: mol_type = other DNA
aaaattagctgggtgtggtggcgcacacctgtaatcccagctactcgggaggctgaagcaagagaatcgcttgaacccaggagatggaggttgtagagagcagagattgcaccactgttc

SEQ ID NO: 42584 - DNA, 120 bp, synthetic construct
  source 1..120: mol_type = other DNA
tctaagaacattcaaaaatgcatggggctgggcacggtggctcacacctgtcatcccagcaatttgggaggctgaggcatgtggatcacttgaggtcaggaattcgagaccagcctagcc

SEQ ID NO: 42585 - DNA, 120 bp, synthetic construct; identical to SEQ ID NO: 12105
  source 1..120: mol_type = other DNA

SEQ ID NO: 42586 - DNA, 120 bp, synthetic construct
  source 1..120: mol_type = other DNA
atataaatgcaagagcaaaagatgaagaagatctgtgtattatctcatagtggttaaagctcatagattatagtacaaactccctgagttcatttcctggtaacataagtgacttaacct

SEQ ID NO: 42587 - DNA, 120 bp, synthetic construct
  source 1..120: mol_type = other DNA
taaagtgtgtagaacaatcgtggcatgcaagaagcactatgagtatgctgtcatcattgtgatggtctctgcattgagtatgcctgagtaagctcctatcagatctgatccttctgaaga

SEQ ID NO: 42588 - DNA, 120 bp, synthetic construct
  source 1..120: mol_type = other DNA
aagttggtggcttaaaacaacatacatttattattttctagcgttagaggtcacaagtctaaaatcaatctccattggctaaaatcagggtgttggcagcactgcattgcttccagggac

SEQ ID NO: 42589 - DNA, 120 bp, synthetic construct; identical to SEQ ID NO: 12106
  source 1..120: mol_type = other DNA

SEQ ID NO: 42590 - DNA, 120 bp, synthetic construct
  source 1..120: mol_type = other DNA
ttgcaaaccgatcaataggaatttcagtctgtcttatgtacataccaatttatagattcacatacattttgtatttaacgggcttcattctctgaaggttttctgagtttccagtagtta

SEQ ID NO: 42591 - DNA, 120 bp, synthetic construct
  source 1..120: mol_type = other DNA
gcaatttgttgagttcctatcgtattccagacaggcatcttcctaagccatgaatacaaaatagtgagtgtggtattatttttctttgttaatagcagcctgttcagtctttggctatag

SEQ ID NO: 42592 - DNA, 120 bp, synthetic construct
  source 1..120: mol_type = other DNA
ttcttctggtattatggtatctgctcagaggcactacatcgtaaagccttttttgttcaagctttagggcagatagatcaaggatcaaaatgaaaagagttaatgttgtgtccacgctag

SEQ ID NO: 42593 - DNA, 120 bp, synthetic construct; identical to SEQ ID NO: 12107
  source 1..120: mol_type = other DNA

SEQ ID NO: 42594 - DNA, 120 bp, synthetic construct
  source 1..120: mol_type = other DNA
agccaaagaatgaacaggctcctattaacaaagaaaaataataccacactcatcatgttttatttgtgtttcaggaagatgcctgcttggaatatgataagaactcaacaaattgagcat

SEQ ID NO: 42595 - DNA, 120 bp, synthetic construct
  source 1..120: mol_type = other DNA
aatgttttatttttataacagtaatatatgagtataaaataaaaatgccctcttcatagtcctcattcccccctaagataaccacagctaaaagattagtatatagccatctataacttt

SEQ ID NO: 42596 - DNA, 120 bp, synthetic construct
  source 1..120: mol_type = other DNA
aaaatcaggacacaaaatgtccagaggaagagaagattcagatttagttgatccaagctctaggtgagatttctgtagttctctttgccctgttctgtgtttgcttggttcacaggctag

SEQ ID NO: 42597 - DNA, 120 bp, synthetic construct; identical to SEQ ID NO: 12108
  source 1..120: mol_type = other DNA

SEQ ID NO: 42598 - DNA, 120 bp, synthetic construct
  source 1..120: mol_type = other DNA
taacattgtctgctacatcatatagcagatacatagttagcatctgtatgctttcactggaaatgtttatatttgggaccctccatgttcttgagccaaactaggaccaacaagtaaaat

SEQ ID NO: 42599 - DNA, 120 bp, synthetic construct
  source 1..120: mol_type = other DNA
cctgtctcattcgtacagtgttcattcaacaaaaatagattgagttgcttttgtgcattctggagctagggggacaggtatgaataacaatgcctccttgctcttgagaatcttagcaat

SEQ ID NO: 42600 - DNA, 120 bp, synthetic construct
  source 1..120: mol_type = other DNA
ctcataactgtgaaatgctgaatggattagtgtgtgtttatattgtagacaatacgatgctactagctatttatatctgaaacttctattctcaaatatctagtctaacttaaccttatt

SEQ ID NO: 42601 - DNA, 120 bp, synthetic construct
  source 1..120: mol_type = other DNA
ttagccagcatcttgtccaaagcctctgtatataaatatttacctacctgtcatctgcaaaattgatgcagtgatgtaatggtgaatgtgattataatctcttgaagggttcatagctaa

SEQ ID NO: 42602 - DNA, 120 bp, synthetic construct; identical to SEQ ID NO: 12109
  source 1..120: mol_type = other DNA

SEQ ID NO: 42603 - DNA, 120 bp, synthetic construct
  source 1..120: mol_type = other DNA
atttgtaaacatatgatagcaaataaatgacatggcatatttctgattcaatcttaataaactattctgcaatttatgagtgacttaaagatatgtggaacctattgagtcagccattct

SEQ ID NO: 42604 - DNA, 120 bp, synthetic construct
  source 1..120: mol_type = other DNA
acaaacacaaaagcaaaaacaacaattaacactccttcctgcatttttttggtgtgttttcttcaaagcactgaacaccttctgaagactatgtattcgcggtctgtttattgccttcct

SEQ ID NO: 42605 - DNA, 120 bp, synthetic construct
  source 1..120: mol_type = other DNA
caatgcatgttatgtactaggtagtaaggaaatatttgctgactggagggactgcaagatggaatttatagaccaaaatcaaggggctgaaaagtaccaaaaattctgtttctgctactg

SEQ ID NO: 42606 - DNA, 120 bp, synthetic construct; identical to SEQ ID NO: 12110
  source 1..120: mol_type = other DNA

SEQ ID NO: 42607 - DNA, 120 bp, synthetic construct
  source 1..120: mol_type = other DNA
caaataatatgcacgcatacaaaatcttgtatttcatctctgatttgaagacttaaaagaagtcttcctttttgttgagttaaataacttccttttttttttttgagttaattcttgctc

SEQ ID NO: 42608 - DNA, 120 bp, synthetic construct
  source 1..120: mol_type = other DNA
ggctaattaattttttttttttttttttttggtaaagataggttcttggtatattgcccaggctgtccttgaactcctgaccttaagtgatcctcccaccttaacctcccaaaatgttgg

SEQ ID NO: 42609 - DNA, 120 bp, synthetic construct; identical to SEQ ID NO: 12111
  source 1..120: mol_type = other DNA

SEQ ID NO: 42610 - DNA, 120 bp, synthetic construct
  source 1..120: mol_type = other DNA
ccagaaaccttagaactgtccttagaccactgaaaaaagtacaaagagcagcgcagcaagaacacacagaatgggcctaatattgccgcgcactgatttccatagccctggaaaatgtga

SEQ ID NO: 42611 - DNA, 120 bp, synthetic construct
  source 1..120: mol_type = other DNA
ggatcacttgagcccaggagtttgagaccagcttgggcaacgtggtgacactgtctctacaaaagataaaaaaaattagctggacatggtggctaatagccatagccagcatacctatag

SEQ ID NO: 42612 - DNA, 120 bp, synthetic construct
  source 1..120: mol_type = other DNA
aaaaaaaaaagcatcccaaatctcacacaacaatgaatgagattggacaatgcaaagataaagctaaatgaaagttaaataacacgagagatcacagaagaaacagcagctaaaccagca

SEQ ID NO: 42613 - DNA, 120 bp, synthetic construct; identical to SEQ ID NO: 12112
  source 1..120: mol_type = other DNA

SEQ ID NO: 42614 - DNA, 120 bp, synthetic construct
  source 1..120: mol_type = other DNA
ttgattcttgaggtacaggctctaaagctccagcatggatttgatgtggatggtactaatgatacagatatttaagttttgttgatttgtatgtagtttccccataagaggttttttgtt

SEQ ID NO: 42615 - DNA, 120 bp, synthetic construct
  source 1..120: mol_type = other DNA
tctgcctcctggtttaaagcgattctcctgcctcagcctcccaagtagctgggattgcaggcacccaccaccacgcctggctaatttttgtgtatttttagtacagatggggtttctcca

SEQ ID NO: 42616 - DNA, 120 bp, synthetic construct
  source 1..120: mol_type = other DNA
tgagccaccacgcctggcccccataaggggtttttagttcctcgggaaactattcaagcattggttaggaagaaatatgtgcagctgggtgaatccagctaatgatcggattattctcat

SEQ ID NO: 42617 - DNA, 120 bp, synthetic construct
  source 1..120: mol_type = other DNA
ctccagcagaccgttcctaatttaactgctatcctgtgacctcagttcttacaaaggaatctaaaactgtaacctttctttatttctggctccaattagttctttatactattcgttctc

SEQ ID NO: 42618 - DNA, 120 bp, synthetic construct; identical to SEQ ID NO: 12113
  source 1..120: mol_type = other DNA

SEQ ID NO: 42619 - DNA, 120 bp, synthetic construct
  source 1..120: mol_type = other DNA
tagctttatagtaagtcttttttatttatttatttattttttgagacagagtctcgctctgtcactgggctggagtgcagtggcaccatcttggttcactgcaaccaacctctgcctccc

SEQ ID NO: 42620 - DNA, 120 bp, synthetic construct
  source 1..120: mol_type = other DNA
tggaatccatctcccgacctcgtgatccgcccacttcggactcccaaagtgctgggattacatgtgtgagccactgcgcccagcctgtagtaagttttgaagttacataatgtctgtctc

SEQ ID NO: 42621 - DNA, 120 bp, synthetic construct
  source 1..120: mol_type = other DNA
gacttgttagaatgtgtaaaaatttttctgtattcctctgtgtacctgccagtttttcatagtatatagatctaaaatgtaagactttattatatgaaatttattattcataatagatct

SEQ ID NO: 42622 - DNA, 120 bp, synthetic construct; identical to SEQ ID NO: 12114
  source 1..120: mol_type = other DNA

SEQ ID NO: 42623 - DNA, 120 bp, synthetic construct
  source 1..120: mol_type = other DNA
ctaacaaagtctatctattattatgtctaataccacatttatcactgtattttagaaatgtttaatattaagattagtccccctcattcttttcccctgacccccaaattgttcttattc

SEQ ID NO: 42624 - DNA, 120 bp, synthetic construct
  source 1..120: mol_type = other DNA
aagagacttactgtattatttacttagcacccatccatccacttgaatttgttaacattaaggtttatgcaacagccactttaacgtattctgtacttagagaaaggagatattgataat

SEQ ID NO: 42625 - DNA, 120 bp, synthetic construct; identical to SEQ ID NO: 12115
  source 1..120: mol_type = other DNA

SEQ ID NO: 42626 - DNA, 120 bp, synthetic construct
  source 1..120: mol_type = other DNA
agtgcatatcctgaggatttgaacaaattcagaaaacattgaaatagtattacatgaactgttcctattctaaagtaagattaatttaggaagtagtagctcttagttctttattaccta

SEQ ID NO: 42627 - DNA, 120 bp, synthetic construct
  source 1..120: mol_type = other DNA
cattgtatgacagatctaaaaaaactgggagagttctgcctaatactgcaaaaccagagtaaagttaggaaattgggctaatgtttaattaagtcaatcactggccttacttttgtgctt

SEQ ID NO: 42628 - DNA, 120 bp, synthetic construct
  source 1..120: mol_type = other DNA
tctttttatttataattctcccacattaatgtcatgtctgtctgttctaatttagtgctttgtatttttcattttaaaagtacctggtctgctcctgtgaacatttaggtagatacctca

SEQ ID NO: 42629 - DNA, 120 bp, synthetic construct; identical to SEQ ID NO: 12116
  source 1..120: mol_type = other DNA

SEQ ID NO: 42630 - DNA, 120 bp, synthetic construct
  source 1..120: mol_type = other DNA
aaaaataaagaaaaatacatatgtataataataggttctcaatatatattagtttctttccctttctactttcgggatgaattcactgcttgttgaaatgtaattgactgatctaaatgc

SEQ ID NO: 42631 - DNA, 120 bp, synthetic construct
  source 1..120: mol_type = other DNA
acatctaggccagaaacgatgtacttttaccttgttttgaatcttttattgtttggatcagacctcgtttaaaaatgtagaggaaaaatttaatagttccatttctacctggaaatacta

SEQ ID NO: 42632 - DNA, 120 bp, synthetic construct
  source 1..120: mol_type = other DNA
tttaatcagaatatattaaatttaaaaggaaatatgattgaggcattagaaacttctgaggtagcgaggacttgaagagacctaaatcccagcagtaagagaagtgcactgaggtaggtc

SEQ ID NO: 42633 - DNA, 120 bp, synthetic construct
  source 1..120: mol_type = other DNA
ttgaggatacaagatcttgaaggaaaaagagaaataaggcttacactctgaagaggctttccccttgaggtatttctctgttggtggtgacgtttttattattattattacgagacaggg

SEQ ID NO: 42634 - DNA, 120 bp, synthetic construct; identical to SEQ ID NO: 12117
  source 1..120: mol_type = other DNA

SEQ ID NO: 42635 - DNA, 120 bp, synthetic construct
  source 1..120: mol_type = other DNA
ctgaaaacctgccttcaatctactcagctcacattgaattggtgttatctgcccatcatctagctgccagccgtaggtacatcttttctggaggaagaaacagaattagcttgtatacaa

SEQ ID NO: 42636 - DNA, 120 bp, synthetic construct
  source 1..120: mol_type = other DNA
cagtagaaatagacccataagtgatccagatattggaattatcagtcacagaccttaaaacaattggggaatctacaatgaaaaaaatcaaatggaaattcgaacactgaaaaccacagt

SEQ ID NO: 42637 - DNA, 120 bp, synthetic construct; identical to SEQ ID NO: 12118
  source 1..120: mol_type = other DNA

SEQ ID NO: 42638 - DNA, 120 bp, synthetic construct
  source 1..120: mol_type = other DNA
tttaaaagctgtaataagactgatacctgatgacacattagaaaaagttgaatcagaagacaaaggcatgatatctttaatgttgtgaggaaaaataatcactaactctgtattatagcc

SEQ ID NO: 42639 - DNA, 120 bp, synthetic construct
  source 1..120: mol_type = other DNA
gaaaagagtaaatgcaggagggaaagaagactaagtaaatatatggccaaatgtaaattaatgctaactatacaaaataatcgtattaatgccttgtggggtttaaaatatatgtgcaat

SEQ ID NO: 42640 - DNA, 120 bp, synthetic construct
  source 1..120: mol_type = other DNA
atcacaatggaagattattaaatgtcatggatgcccatgcaacctctagggtactaaccaaaagaataagaaagaataaccaacaactttccagagggaaaaatgcaatatcaagatatt

SEQ ID NO: 42641 - DNA, 120 bp, synthetic construct
  source 1..120: mol_type = other DNA
ttgtgtaccttaaataaatgaactttatgatatgtaaattatatttccataaagctatataaagagaacatgagaccaatataatacaaataatatgaaaatatgataaatataactaat

SEQ ID NO: 42642 - DNA, 120 bp, synthetic construct; identical to SEQ ID NO: 12119
  source 1..120: mol_type = other DNA

SEQ ID NO: 42643 - DNA, 120 bp, synthetic construct
  source 1..120: mol_type = other DNA
agccaagcatggtggtgtgtgcctgcaatcccagctactcgggaggctgaggcaggagaatagcttcaatccaggaggcagaggttgcagtgagctgagatcgcaccactgtactccagc

SEQ ID NO: 42644 - DNA, 120 bp, synthetic construct
  source 1..120: mol_type = other DNA
gaaagtattgcgagaaatcaagatggacatttccctatgttaaaaaaagtcagtttataagaaaaataaaataattctgaatttacatgaatctaatgatatagctttcaagcttataaa

SEQ ID NO: 42645 - DNA, 120 bp, synthetic construct
  source 1..120: mol_type = other DNA
gcaccatatgctgagaaagtacacatttgtttcaagtgcagatggagcatttaccaaaattgattatggaggaagtataagcaaatttcaaaggtttgaaataagagtgtattcctttct

SEQ ID NO: 42646 - DNA, 120 bp, synthetic construct; identical to SEQ ID NO: 12120
  source 1..120: mol_type = other DNA

SEQ ID NO: 42647 - DNA, 120 bp, synthetic construct
  source 1..120: mol_type = other DNA
tgactaattgatgagcccttggaaagactgaatacgaaaaagagagaatataaaattaacaatattagaaatgaaaataggaaatcactgcagaacctccaaacaatgaaaagataataa

SEQ ID NO: 42648 - DNA, 120 bp, synthetic construct
  source 1..120: mol_type = other DNA
tttattaaatgaaatgaatttataattaaagccttctcacaaagaagtccaggcccagatggcctcactggttaattccaccaaacatataaggaaacaataataccaatcttaaactct

SEQ ID NO: 42649 - DNA, 120 bp, synthetic construct
  source 1..120: mol_type = other DNA
ctgtaggtgtagaaatcctccacaaaatattaaaatattgggaaatccatcccattgacatatcaactcaatagcctattacaaccaagttgggattcaaaaccaattattgtcacttac

SEQ ID NO: 42650 - DNA, 120 bp, synthetic construct; identical to SEQ ID NO: 12121
  source 1..120: mol_type = other DNA

SEQ ID NO: 42651 - DNA, 120 bp, synthetic construct
  source 1..120: mol_type = other DNA
ctaatacaagatgtgtaaacctttacacagaaaattgagaaacattttgagaaaaataaagatgaccttaaaaaaaggataaatataccatgttcatatattgggaggctcaatattaca

SEQ ID NO: 42652 - DNA, 120 bp, synthetic construct
  source 1..120: mol_type = other DNA
agattatcaaatacaactttgaagaaaagaacaaggttagagtctttgactcctggatatcaagacttattttaatgttacaataagaccgttgggtattaggacaaagacagaaaaata

SEQ ID NO: 42653 - DNA, 120 bp, synthetic construct
  source 1..120: mol_type = other DNA
acaagggtgggtgaggagacaactcttaactccctccctaccatcttacataaaaaatcaataccaggtatgtcgcaactttcatgggaaaggcaaaataatgaactttctagaaaattt

SEQ ID NO: 42654 - DNA, 120 bp, synthetic construct; identical to SEQ ID NO: 12122
  source 1..120: mol_type = other DNA

SEQ ID NO: 42655 - DNA, 120 bp, synthetic construct
  source 1..120: mol_type = other DNA
actaaaaatacaaaaattagccgggtgtggtggcgggcacctgtaatcccagctatccaggaaactgagacaggagaatcgcttgaacccaggaggcggaggttacagtgagccgagatt

SEQ ID NO: 42656 - DNA, 120 bp, synthetic construct
  source 1..120: mol_type = other DNA
taatttaaaaataattacttttatattagattcttatgtcctctctgctaaatcaagttggtgtttaaataactgttgtttcttttaagggaaattttgtttttattttgaaattttgaa

SEQ ID NO: 42657 - DNA, 120 bp, synthetic construct
  source 1..120: mol_type = other DNA
gattcaagtttttggaaaaaatgttcctttgtcttatatgttttatgggtttgtaattgcgtaaattctaaaattggttaagtttactgtgaattttatatttccttgtcttgattagct

SEQ ID NO: 42658 - DNA, 120 bp, synthetic construct; identical to SEQ ID NO: 12123
  source 1..120: mol_type = other DNA

SEQ ID NO: 42659 - DNA, 120 bp, synthetic construct
  source 1..120: mol_type = other DNA
gaaaaaatcccataactttatctttgcactgatgggagtgtgtgtgtgtgtgtgtgtatgcatgtgtgaatgtctgacatgcagaagtgaacctgataatggcaaaatacaatgtctttg

SEQ ID NO: 42660 - DNA, 120 bp, synthetic construct
  source 1..120: mol_type = other DNA
tttggggaagagaataaatataaaaattcgcccttttagaggtagaaaagtgcacaattgcactgtgctggacatgccttttttgcttctgtttgccccaggatctaaaggaatggattc

SEQ ID NO: 42661 - DNA, 120 bp, synthetic construct
  source 1..120: mol_type = other DNA
acaacagtgtgtttgtaaaatgcaaaggaggaagtaagtttagaacagatttttctgaaaactaagtaaattacaaaagaaggcaaaatgctctgttacaagtaacctattggatttcat

SEQ ID NO: 42662 - DNA, 120 bp, synthetic construct; identical to SEQ ID NO: 12124
  source 1..120: mol_type = other DNA

SEQ ID NO: 42663 - DNA, 120 bp, synthetic construct
  source 1..120: mol_type = other DNA
acctttgagattgagtatgtctctcaatgttgaaattttttattctgatttatttgcaaggaatcctagggcgttgtagagacagtctttgttgacatatggcttttttgtttgttctgt

SEQ ID NO: 42664 - DNA, 120 bp, synthetic construct
  source 1..120: mol_type = other DNA
actatttgttaaggcatgcctttatattgtgaaattgtatgaaatgctagaaagattagagtaagagaaattttactttaagtgtcatgagagaaactgtagttagacactatgtctcta

SEQ ID NO: 42665 - DNA, 120 bp, synthetic construct
  source 1..120: mol_type = other DNA
attatcattattttatgtacctggtgcatttccagcctaatgtctttttgagttctgattgctaaattaactgaattctttttgtttggtgagattaaatgttgttaatgaaaaacttga

SEQ ID NO: 42666 - DNA, 120 bp, synthetic construct
  source 1..120: mol_type = other DNA
tttggctttttctttccacagcaagttgatgtggaaaaatgggtatgtgtttccatgtatttgcaaagaaattgtgatctaaaagtgcatgcttgctctcgcctctaatctttcattttg

SEQ ID NO: 42667 - DNA, 120 bp, synthetic construct; identical to SEQ ID NO: 12125
  source 1..120: mol_type = other DNA

SEQ ID NO: 42668 - DNA, 120 bp, synthetic construct
  source 1..120: mol_type = other DNA
tcaaaattccactgcttagtccttatatttctgcatgtactgtagaagaagacaattatatatatagtcatagaaagtcatagaacctttttttttttttggtatagatggagtctcact

SEQ ID NO: 42669 - DNA, 120 bp, synthetic construct
  source 1..120: mol_type = other DNA
aaggtgaatgaccatgtagaaaaacgcagttacaggattctggaggctaattcttagagcccacattgtcacaagttgtgcaaaaagttacattgcttcttttggtctcggtttccttat

SEQ ID NO: 42670 - DNA, 120 bp, synthetic construct; identical to SEQ ID NO: 12126
  source 1..120: mol_type = other DNA

SEQ ID NO: 42671 - DNA, 120 bp, synthetic construct
  source 1..120: mol_type = other DNA
tgagaattttgccatcttttcagtgccctttcagtagtgttttccaacaatttcatgttctcttgtctttttttttaaattttttttagccctttaaagacaaggaaacttgttttttaa

SEQ ID NO: 42672 - DNA, 120 bp, synthetic construct
  source 1..120: mol_type = other DNA
ttgaaatttcctaccttcctctttggctatagttaaaatgctgatccaagattcacatttttcttgtcttggtaagggaagcctgcttccttctcagaacacgtatgacacctctttgtc

SEQ ID NO: 42673 - DNA, 120 bp, synthetic construct
  source 1..120: mol_type = other DNA
caagctgcttttacttactttgtaaatagcacttgccagtaaataaaatcaccttttcaccattgtctaaaagtcttcccttcagttcctctgtggatttggttacttttgatctgcctg

SEQ ID NO: 42674 - DNA, 120 bp, synthetic construct; identical to SEQ ID NO: 12127
  source 1..120: mol_type = other DNA

SEQ ID NO: 42675 - DNA, 120 bp, synthetic construct
  source 1..120: mol_type = other DNA
ttgcagcaaattttagattggagctctttttttctttgaagacctatccagttcatgtcttatgctttggccattagaagtttgaaattctactgttacaggtagactttgaaggccaac

SEQ ID NO: 42676 - DNA, 120 bp, synthetic construct
  source 1..120: mol_type = other DNA
aagagtgaaataccccacagacatttcaagtcatacagatctcatttcagtaattaaaatgcccaaatctgtataataggtgaacttgaagctaattcaagttaacttgtcaggaatcga

SEQ ID NO: 42677 - DNA, 120 bp, synthetic construct
  source 1..120: mol_type = other DNA
agcttggcaggaaaggtctgctttgatcatagtgtcatgcactgggcttgccaggtttctaatgctgactttctctgtgggcgcttggcattggtctttcggggagcttctatccccaga

SEQ ID NO: 42678 - DNA, 120 bp, synthetic construct
  source 1..120: mol_type = other DNA
gtctagtatggcccccatttgcttgttggcagtgtggtcacttcccagttgcagccctgtaggactacacccagccttttgcctctcaatctccaggcatagtaagacaccagtctacag

SEQ ID NO: 42679 - DNA, 120 bp, synthetic construct; identical to SEQ ID NO: 12128
  source 1..120: mol_type = other DNA

SEQ ID NO: 42680 - DNA, 120 bp, synthetic construct
  source 1..120: mol_type = other DNA
tagcttagcttagcctcccttaaacgggctgagaacacttacattagcttacagtggggcaacatcatctaacacaaagcctattttatactaaagtgttgaatatctcatgtaatttat

SEQ ID NO: 42681 - DNA, 120 bp, synthetic construct
  source 1..120: mol_type = other DNA
gttaagtcagggaccttcttgtaaatccccttcggagactggtcattgttttgttttgggacagtgacctgttttaacttctgttatacttgcttgtctagggtgcgtttaccaccacca

SEQ ID NO: 42682 - DNA, 120 bp, synthetic construct
  source 1..120: mol_type = other DNA
tctttctttctcctttctccctcccctctccatccccttttccctaattcccttcctgccttcatctccttccttctctccatcatcactgtctctttgagcagctgtgcatctgtttaa

SEQ ID NO: 42683 - DNA, 120 bp, synthetic construct; identical to SEQ ID NO: 12129
  source 1..120: mol_type = other DNA

SEQ ID NO: 42684 - DNA, 120 bp, synthetic construct
  source 1..120: mol_type = other DNA
acacacgactgctattatgtgagaacctgcgaaatgctttcaagctatcaaggttcattcatgtttgaaatggtttttaaaaatatatggagtcttctgtattctgacatgggcaatttt

SEQ ID NO: 42685 - DNA, 120 bp, synthetic construct
  source 1..120: mol_type = other DNA
gacaagctgggaaatgaagaaagccctagatacctcttctatttcatgttttaggcatttatgcagctctttgctttataaacctgtcacagagataaagtgtgagaacttatagtagct

SEQ ID NO: 42686 - DNA, 120 bp, synthetic construct
  source 1..120: mol_type = other DNA
tactcgaaagagaagacattccatttaactactgtctgtacagagctgtttataggttgaaaaagaacttgctacaaatctgccgaaaaatagaatgaattctttttaaacatatctgca

SEQ ID NO: 42687 - DNA, 120 bp, synthetic construct; identical to SEQ ID NO: 12130
  source 1..120: mol_type = other DNA

SEQ ID NO: 42688 - DNA, 120 bp, synthetic construct
  source 1..120: mol_type = other DNA
agagacagtgtctcactatggtgcccaagctagtcttgcactcctgggctcaagcagatactcctgccctggcctcccaaagtgctgggattacaggcatgagccactgcacccagacac

SEQ ID NO: 42689 - DNA, 120 bp, synthetic construct
  source 1..120: mol_type = other DNA
ctatcattaattaactatagctacctagaaatcctagtctttggtggtgaaatcactttgttttctcaacataatgaagtttacctgatatttcctcacaaaggagaggttaccggttgg

SEQ ID NO: 42690 - DNA, 120 bp, synthetic construct; identical to SEQ ID NO: 12131
  source 1..120: mol_type = other DNA

SEQ ID NO: 42691 - DNA, 120 bp, synthetic construct
  source 1..120: mol_type = other DNA
atgaaactgaaataccagttttaaaaagtcaaggttgaactgaaaggcatcattataatagaggagctttgctacattacctgaattattgtttccttctttgcaccaagaacagattaa

SEQ ID NO: 42692 - DNA, 120 bp, synthetic construct
  source 1..120: mol_type = other DNA
gatctactacactgagtggctcatgcttacagacgaaagatgattctgcttctttttgtcatccatttgacacccagggccgtctatgtgttaaaatgtagcaatagcaatttctcttcc

SEQ ID NO: 42693 - DNA, 120 bp, synthetic construct
  source 1..120: mol_type = other DNA
tagcctaaagaactaaaatttccacctttgtgtttctatgcaaattaatcatcatccaaaaaattctaagacagcacgttggaatccatgctgcgtgcctgtcctataattgcccatata

SEQ ID NO: 42694 - DNA, 120 bp, synthetic construct
  source 1..120: mol_type = other DNA
attctccacacccaaagaggctgctttcttcaatatttatctttatgtgtttcttttttctactttccatcatatcaatttttaaagggtttttgttgttattctttttctgtttgttgc

SEQ ID NO: 42695 - DNA, 120 bp, synthetic construct; identical to SEQ ID NO: 12132
  source 1..120: mol_type = other DNA

SEQ ID NO: 42696 - DNA, 120 bp, synthetic construct
  source 1..120: mol_type = other DNA
attctattttgtcgtgtatgcagattgctctcctctgtgtattattcttcctacagtcagacatgacttagcaatgccgaatagcagacctcggtcacttggctgaccactctttttttt

SEQ ID NO: 42697 - DNA, 120 bp, synthetic construct
  source 1..120: mol_type = other DNA
gaagaaagtatctcttcacaaaccatgtgctgtaccaaaatgttaggtttttgtgtttctttgaattaaggcttaataatgattttgcctaattctttagtgatatctctaccattagtg

SEQ ID NO: 42698 - DNA, 120 bp, synthetic construct
  source 1..120: mol_type = other DNA
aactaaacagcctgtattttctaagccaaggatgaaagcttctttacaatttttccttgaaattgtaatattgaaaatgaaaaaattagtctcaacagaatttccctttaataatataca

SEQ ID NO: 42699 - DNA, 120 bp, synthetic construct; identical to SEQ ID NO: 12133
  source 1..120: mol_type = other DNA

SEQ ID NO: 42700 - DNA, 120 bp, synthetic construct
  source 1..120: mol_type = other DNA
taagagaaaaagaaatgtttttgtgatttttctgtgaaattcacctttcacaatattcagtgtctaagaaattgcttactgttattttgcatgaaacgagagccgctcattgcagcatat

SEQ ID NO: 42701 - DNA, 120 bp, synthetic construct
  source 1..120: mol_type = other DNA
tttgcagaggatcaatttttaagatgataccttttttggtgcttaaataggttgtcaatggaatcactgaaagtagagcagcatgttttcacagaaaaaggaagaaactaacgtcaaaac

SEQ ID NO: 42702 - DNA, 120 bp, synthetic construct; identical to SEQ ID NO: 12134
  source 1..120: mol_type = other DNA

SEQ ID NO: 42703 - DNA, 120 bp, synthetic construct
  source 1..120: mol_type = other DNA
tcagctatatatatgtggtactttgtatgttttctgtatggttatacacatttgttttacttttgaatccatgtaacttttcttcacatgcttttaaaaggtttttaaaaatcaagcttt

SEQ ID NO: 42704 - DNA, 120 bp, synthetic construct
  source 1..120: mol_type = other DNA
taaaacaattttagtagctctccatttagaatattcactctggggattatgttgactttgcatttatgcccttttgcatgaatacaatgggaaattcttccactgggaaattaggggagg

SEQ ID NO: 42705 - DNA, 120 bp, synthetic construct
  source 1..120: mol_type = other DNA
taaagcatgtggacatgtcatcgaaggaatatgtaagggacagacaggaagagtagactatggttattttaggatatataatagaaaatttttgtttcatttttgtatgcccactacctt

SEQ ID NO: 42706 - DNA, 120 bp, synthetic construct
  source 1..120: mol_type = other DNA
gaaagagactgtgagaaatattaaatcaaaattccagatatagatggaaaagattgctttgaagaaaaggaagcgcgttcttgtcagtctgttgaattttgtggttaaatccatcatgtt

SEQ ID NO: 42707 - DNA, 120 bp, synthetic construct; identical to SEQ ID NO: 12135
  source 1..120: mol_type = other DNA

SEQ ID NO: 42708 - DNA, 120 bp, synthetic construct
  source 1..120: mol_type = other DNA
ctgcatttgctgtattcattttatcatctcattcttaattcaactgtacaatattgtatggacttccccttgggaagggtgaatgaaatggtcgcctgaaacagacatctgaaggtctct

SEQ ID NO: 42709 - DNA, 120 bp, synthetic construct
  source 1..120: mol_type = other DNA
ataatttaattaggcccccagttcttttaacttcgaggccagaaggccaatagttattttcacacttgcaatggatgatctggaaaggttagaattggattaaggggagggcatatgcat

SEQ ID NO: 42710 - DNA, 120 bp, synthetic construct; identical to SEQ ID NO: 12136
  source 1..120: mol_type = other DNA

SEQ ID NO: 42711 - DNA, 120 bp, synthetic construct
  source 1..120: mol_type = other DNA
atgttaaactggcctttgcaggcacctttatcttcaactgaggccaggattctcatggattgttacagtccttcggtgaccctgttgtgtgattcactacttattttattttttaagaga

SEQ ID NO: 42712 - DNA, 120 bp, synthetic construct
  source 1..120: mol_type = other DNA
agcatgaggcactttgccttgctctgggccaactgtatttaaaaaacacagagccaaaaaacaaaaaaagcaaaccagaaagaacaaaatatagagccagtaattttaatgtgtgtgtaa

SEQ ID NO: 42713 - DNA, 120 bp, synthetic construct
  source 1..120: mol_type = other DNA
ctttacggtaaaaggagcactttctggttaacttcaagaccttgtccttcacttttaaaacattttgttttgactagtgtggctgtcaagtgttattaaagttcacgtggattttatagc

SEQ ID NO: 42714 - DNA, 120 bp, synthetic construct
  source 1..120: mol_type = other DNA
ggccacaataaatcaaatgcattatagaaaaaaaagtgctctctaaagacagcctcattctctgaaggagtatagtttttcaaagtagatttttcccttttcttctcagttatgtgaaaa

SEQ ID NO: 42715 - DNA, 120 bp, synthetic construct; identical to SEQ ID NO: 12137
  source 1..120: mol_type = other DNA

SEQ ID NO: 42716 - DNA, 120 bp, synthetic construct
  source 1..120: mol_type = other DNA
gtctggccccccaaaaaaagtggtttttcagcagtttttcttattttaataccttttaatatctgtttttagaatagttctgagttttttcaaacaaaacataaagttattttgagaaac

SEQ ID NO: 42717 - DNA, 120 bp, synthetic construct
  source 1..120: mol_type = other DNA
tcttaaggcacaggtcagtatcatcactcttattctgaaaatttttaaagacctccttttcctgcaaaaagaattacaaacttctcgtcataatattttgtaccttccatggtctttccc

SEQ ID NO: 42718 - DNA, 120 bp, synthetic construct; identical to SEQ ID NO: 12138
  source 1..120: mol_type = other DNA

SEQ ID NO: 42719 - DNA, 120 bp, synthetic construct
  source 1..120: mol_type = other DNA
tatacctagggctgcaggaggatggggagagtgagtagctttgaggaaactggatgaggcttcatagagaaggtagtctttaatcagagttttaaaaagtagagggagaaaaaaatctga

SEQ ID NO: 42720 - DNA, 120 bp, synthetic construct
  source 1..120: mol_type = other DNA
ttattctatacagtttggaagttacagaagaaaaatccttcaattacactaatagaaaaaaactactggaggctttcctattaaaaaggctttataaggcagggaagactagagagaggg

SEQ ID NO: 42721 - DNA, 120 bp, synthetic construct
  source 1..120: mol_type = other DNA
gcatattcagggaagggaaagtgggtatgtttggagcacaggatgattgaagatgaggctagagatgagtgagacaaatgtctctctgtgcttctcaaagtagtctctggaccaacggca

SEQ ID NO: 42722 - DNA, 120 bp, synthetic construct; identical to SEQ ID NO: 12139
  source 1..120: mol_type = other DNA

SEQ ID NO: 42723 - DNA, 120 bp, synthetic construct
  source 1..120: mol_type = other DNA
acctccacctcccgggttcaagcagttatcctgcctcagcctcccgagtagctgggattacaggcaggcatcaccacgcccagctaatctttgtagttttactagagatggggttttgcc

SEQ ID NO: 42724 - DNA, 120 bp, synthetic construct
  source 1..120: mol_type = other DNA
cctcttgtatgttccgcatgcaggtaggcacctggaatacaatggtgactaaggtaccatggttcccacccagtggaaaccataatataatgggaaagagattattattaagtacattat

SEQ ID NO: 42725 - DNA, 120 bp, synthetic construct
  source 1..120: mol_type = other DNA
ttcaacagcactttgcttgtctgcaagagctcttaatacattctttcctactaacgttcctttgagagcaagagagtattttatcaacttggttaagttactcttttgtgtttttctctc

SEQ ID NO: 42726 - DNA, 120 bp, synthetic construct; identical to SEQ ID NO: 12140
  source 1..120: mol_type = other DNA

SEQ ID NO: 42727 - DNA, 120 bp, synthetic construct
  source 1..120: mol_type = other DNA
taccatcttcagtatcttacttttgatagagtagttttaggaggagagaggtgtaagagtcaaataagagatattttcttttctgattttgttttgaagagttcatttattagagaaata

SEQ ID NO: 42728 - DNA, 120 bp, synthetic construct
  source 1..120: mol_type = other DNA
cttcttcaccaggtttctcttttaccacatctgctcctcctttcacccagttattcactaggcttctcttgggcacagttttcttattctttgcctcatgtatatatgcacatatatatg

SEQ ID NO: 42729 - DNA, 120 bp, synthetic construct
  source 1..120: mol_type = other DNA
tgaacaacacaggagttaggggtgccaatctccttcacagtaggaagtcacatataacttttgattccctcaaaagataactattaatatccccctgttgaccagaagccttaccaatac

SEQ ID NO: 42730 - DNA, 120 bp, synthetic construct; identical to SEQ ID NO: 12141
  source 1..120: mol_type = other DNA

SEQ ID NO: 42731 - DNA, 120 bp, synthetic construct
  source 1..120: mol_type = other DNA
aggctggagtgcagtggcgcgatctcggctcactgcaagctccgcctcccaggttcacgccattctcctgcctcagcctcctgagtagctgggactacaggtgcccgccaccacacccag

SEQ ID NO: 42732 - DNA, 120 bp, synthetic construct
  source 1..120: mol_type = other DNA
gccaccgcgcccggcctcattccattcttataagagctttattaaattataaaagcaatacatattctatacgatttggaagttgcagaagaaaaattctgatcacactaataggaaaaa

SEQ ID NO: 42733 - DNA, 120 bp, synthetic construct
  source 1..120: mol_type = other DNA
gtcttgctgtcacccaggctgaggtgcagtggtatgatcatggctaactatagccttgaactccgggactcaagtgattctcttgcttcaacctcctgtgtagctaggactacaggtgtg

SEQ ID NO: 42734 - DNA, 120 bp, synthetic construct; identical to SEQ ID NO: 12142
  source 1..120: mol_type = other DNA

SEQ ID NO: 42735 - DNA, 120 bp, synthetic construct
  source 1..120: mol_type = other DNA
ccaactggattaagaaaatgtggcacatatacgccatggaatactatgcagccatgaaaaaggatgagtttatgtcctttgtagggacatggatgaagctggaaaccatcattctcagca

SEQ ID NO: 42736 - DNA, 120 bp, synthetic construct
  source 1..120: mol_type = other DNA
gggagagatgggagggatagcattaggagatatacctaatgtgaatgacaagttaatgggtgcagcacaccaacatggcacatggcacatgtatacgtatgtaacaaacctgcacattgg

SEQ ID NO: 42737 - DNA, 120 bp, synthetic construct
  source 1..120: mol_type = other DNA
attgtctatttaatgaaattcaaaagtataggatgagaagtataggaaatacatggacgtgattttaatgatgatttaataatatcatttcttttaatgtgttacatcacatgaataggt

SEQ ID NO: 42738 - DNA, 120 bp, synthetic construct
  source 1..120: mol_type = other DNA
gtcagatcaatagtgaatattgtaattgtgaaatgctgaagccattttttaaatcaaattaactaaaataagaatatgttttatctaccattgctaactaacattgttctggaaattttg

SEQ ID NO: 42739 - DNA, 120 bp, synthetic construct; identical to SEQ ID NO: 12143
  source 1..120: mol_type = other DNA

SEQ ID NO: 42740 - DNA, 120 bp, synthetic construct
  source 1..120: mol_type = other DNA
tgtgctaggtactgttttaggtcctggatatagtagtgaataagaccaagttcttgctctctttaattaacacttagtagaataatcatagtatctacctcagagttactagaaacatta

SEQ ID NO: 42741 - DNA, 120 bp, synthetic construct
  source 1..120: mol_type = other DNA
caaagttgttacctttttaaaaaataaaggcagatgttaagcacaatttatatttaaagtctataaacataggggattatcgtgggctacctgtcttgaggtcagactgacatttctgct

SEQ ID NO: 42742 - DNA, 120 bp, synthetic construct
  source 1..120: mol_type = other DNA
ctataaccttgggagccatttctttgtagttaagagtcagaatcagaatctgcaggtcaatttgatttcacatccccatggcactgaattccacctaacataccagcatatctgccaccg

SEQ ID NO: 42743 - DNA, 120 bp, synthetic construct; identical to SEQ ID NO: 12144
  source 1..120: mol_type = other DNA

SEQ ID NO: 42744 - DNA, 120 bp, synthetic construct
  source 1..120: mol_type = other DNA
gaagaataaggagatgatggtgttgcaagagtgattactcctgtggaaatgcacgtgtatgtagacacacaataaacctcattttagtgcagtgacatgctgtgcaccaaaataaattct

SEQ ID NO: 42745 - DNA, 120 bp, synthetic construct
  source 1..120: mol_type = other DNA
cagatgatcatgaatatcacatgaagtgagagatgtacaaatacatccccagttacttgtcttcctgtactgacagagaacatttcctttgtcttttataagggaagaaaagactacaat

SEQ ID NO: 42746 - DNA, 120 bp, synthetic construct
  source 1..120: mol_type = other DNA
tgccaaattacaggtcagaataagactctgctggtacaactataaaccttaacgatggctggtcactgtggctcatgcctataatcccggcaccttgggaagtggaggtgggagattgct

SEQ ID NO: 42747 - DNA, 120 bp, synthetic construct; identical to SEQ ID NO: 12145
  source 1..120: mol_type = other DNA

SEQ ID NO: 42748 - DNA, 120 bp, synthetic construct
  source 1..120: mol_type = other DNA
aacaacagacgaacaaaacctctacttacaactactgattttgtactttgtagtatctgtgctgcctgtccacctcccggtcttcaactgataagctggcttttgatgttggcttgcaag

SEQ ID NO: 42749 - DNA, 120 bp, synthetic construct
  source 1..120: mol_type = other DNA
gtcaggaaagaatgttctaatgaaagtttttcctagaaggggaaagtgtatatcattcctcttggttattcccacatcattagttggatgttcaaactaggcttcaaaccttattcttct

SEQ ID NO: 42750 - DNA, 120 bp, synthetic construct; identical to SEQ ID NO: 12146
  source 1..120: mol_type = other DNA

SEQ ID NO: 42751 - DNA, 120 bp, synthetic construct
  source 1..120: mol_type = other DNA
tataaaattggactgttttgtcttttacaatgagcatgcatcactttgtaattaaaaataaagaccaagtagaaaaaagaatggaaggaaatagttcaacttttattaagttgttccctt

SEQ ID NO: 42752 - DNA, 120 bp, synthetic construct
  source 1..120: mol_type = other DNA
taaactttttaatagaccaatgcatcgtcttataaaagaaattccaagaacccctggcaccagaaagataaataaatatattattctgattttgttttgtacaggctctatcattcctct

SEQ ID NO: 42753 - DNA, 120 bp, synthetic construct
  source 1..120: mol_type = other DNA
tcatacattgagaagattatgtaatagtcaaaacaaaacaagtcagtgttttctccctgcgtcctgatttccttatgctactctgttttttcccgtagttccctacctcttctgaattcc

SEQ ID NO: 42754 - DNA, 120 bp, synthetic construct
  source 1..120: mol_type = other DNA
agccaatagtgggtacactataaatgtttgaatggatgaaaagctacctgcaactgtaaaaatgtgaattggatgaatgaagataaagaattctgccaggtgacattcaggttagattat

SEQ ID NO: 42755 - DNA, 120 bp, synthetic construct; identical to SEQ ID NO: 12147
  source 1..120: mol_type = other DNA

SEQ ID NO: 42756 - DNA, 120 bp, synthetic construct
  source 1..120: mol_type = other DNA
atgaacagaatgaagaatggcatgctgaagcttctatgttaggtattgggaagaaagagtgaagaagagacatgtggctcatgaggcttatgcttgacttgtgctagaagaaattgtttg

SEQ ID NO: 42757 - DNA, 120 bp, synthetic construct
  source 1..120: mol_type = other DNA
tagtacaatctttagatgataatactttgcatccttttttgagtcagcatccaaaaataactactgagaacattttcaaaaaattgttacaattgtcacgtcacaaaaccccaagtcctt

SEQ ID NO: 42758 - DNA, 120 bp, synthetic construct
  source 1..120: mol_type = other DNA
atcagatcagtgtgagtggtgaatttagccttagatgagtataaataaacatcgctttaaagcaattcttagtggaagaaaaagacatcaaccttccctaagtgtcacacccagtttcta

SEQ ID NO: 42759 - DNA, 120 bp, synthetic construct; identical to SEQ ID NO: 12148
  source 1..120: mol_type = other DNA

SEQ ID NO: 42760 - DNA, 120 bp, synthetic construct
  source 1..120: mol_type = other DNA
acgagttggagatgacctcatcttagttagcgtgtcctctgaaaggtacttggtaagtgtggaaagtaggatcatgtatctgctgatatgctaaatgacaagtcaataaaatgatctctt

SEQ ID NO: 42761 - DNA, 120 bp, synthetic construct
  source 1..120: mol_type = other DNA
ttatcaggttgttcaggcaggcttccctcataaccttgatatgcatgttcatgatattgatagtaccttttaataaattactttattgatagaatgtaaatgcagtctaatcaggaatta

SEQ ID NO: 42762 - DNA, 120 bp, synthetic construct
  source 1..120: mol_type = other DNA
gggagaaatagacaaaagaagaaatagtttgaagtctatcattgacactgcattgtttcaaagagtaggggctggaaatgggagaatgaaggaagaagtttgtgtttaatcatgaaatgc

SEQ ID NO: 42763 - DNA, 120 bp, synthetic construct; identical to SEQ ID NO: 12149
  source 1..120: mol_type = other DNA

SEQ ID NO: 42764 - DNA, 120 bp, synthetic construct
  source 1..120: mol_type = other DNA
aacttatttagtaagttgtagttttgccagagagtagtccaatacagaagtttacagtaaattgaaatgaagtaagttgaaatgaagatgtgaaggatgctagagcaaaatattcatttt

SEQ ID NO: 42765 - DNA, 120 bp, synthetic construct
  source 1..120: mol_type = other DNA
catgtggcaatttagcagataccgggttatagaaagtattttaccactaccataaatcaaaatgtagttcatgtgttactggtttaggattaagtaagtagttgataccccctttgttct

SEQ ID NO: 42766 - DNA, 120 bp, synthetic construct; identical to SEQ ID NO: 12150
  source 1..120: mol_type = other DNA

SEQ ID NO: 42767 - DNA, 120 bp, synthetic construct
  source 1..120: mol_type = other DNA
tatgtatgttaagatgatgtattttgatcagatatgcattttgaattgtagttgtacctggaaaccaatagcagtagaaataattcatgcacacttttaatatataaattatacacatac

SEQ ID NO: 42768 - DNA, 120 bp, synthetic construct
  source 1..120: mol_type = other DNA
tggaaaattcagacctcacagggccaggacttctaacatctattctacaactaactacctgagaaagtcatctaattctctgaactctggctttctcatctgtaaaaaatgaggttgatg

SEQ ID NO: 42769 - DNA, 120 bp, synthetic construct
  source 1..120: mol_type = other DNA
tttacctcctatagaaggaaataaacctcatgattaattaaaatttacaagtgatttccaaactacattttattgttttttttattttattttatttattttttgagacaggatcttgcc

SEQ ID NO: 42770 - DNA, 120 bp, synthetic construct
  source 1..120: mol_type = other DNA
tgtgctacatagccaattatttatgttctctttcctggtaatcttttatatggagctataagagagcagccaaccaggttgttaaaatttcactttcatttgataatgaagtcgttgctt

SEQ ID NO: 42771 - DNA, 120 bp, synthetic construct; identical to SEQ ID NO: 12151
  source 1..120: mol_type = other DNA

SEQ ID NO: 42772 - DNA, 120 bp, synthetic construct
  source 1..120: mol_type = other DNA
gaaagatcaagaagtgagttcgtgaaaggactttgggataggcagagggagttgaaataatctatagaataaaccctgaataactaaagttgggctgtgtgtatatatatgcacacttgc

SEQ ID NO: 42773 - DNA, 120 bp, synthetic construct
  source 1..120: mol_type = other DNA
gtaacctttagaaaccctcagttccttcatctggagtctggggaataataaagaacttaactcataggggtgttacgggattaaatgctggaatccaacaaggctcgtagttctgtgaat

SEQ ID NO: 42774 - DNA, 120 bp, synthetic construct
  source 1..120: mol_type = other DNA
ttaaatgctggaatccaacaaggctcgtagttctgtgaatggcacataaaaattatttagtaagttactgtcactatttacttgggagatttgtgcctgttaagaatggttaaagaagtt

SEQ ID NO: 42775 - DNA, 120 bp, synthetic construct; identical to SEQ ID NO: 12152
  source 1..120: mol_type = other DNA

SEQ ID NO: 42776 - DNA, 120 bp, synthetic construct
  source 1..120: mol_type = other DNA
gctgagatcgcaccattgcattccagcctgggcgacaagagtgaaattccatctcaaaagaaaaaaaagaaatgatctgggcttggtggtgcacacctgtaatcccagctactaaggagg

SEQ ID NO: 42777 - DNA, 120 bp, synthetic construct
  source 1..120: mol_type = other DNA
aaaaaaaaaaaaagaatgcttaaagaaacagcagatatttaaccagaagaagagatagttgggaaagaaacagtgaaaggaacattataggtgatattaactaaagatctatcatgtgaa

SEQ ID NO: 42778 - DNA, 120 bp, synthetic construct
  source 1..120: mol_type = other DNA
ttacaactccttggtgatcagtgtctattgaccgatgagcgatttttctttcactaacagcgatggttaagctaagattaaactaatagtgcatggggtacactaatacaactattacaa

SEQ ID NO: 42779 - DNA, 120 bp, synthetic construct; identical to SEQ ID NO: 12153
  source 1..120: mol_type = other DNA

SEQ ID NO: 42780 - DNA, 120 bp, synthetic construct
  source 1..120: mol_type = other DNA
aatttaaaatagaaaaaacatggccaagtagatattactgactgaatttatttcaaactaaacaaaatgaatcttacaaaacaatttttttctgtgtgttaggtgtaaaaatcactccag

SEQ ID NO: 42781 - DNA, 120 bp, synthetic construct
  source 1..120: mol_type = other DNA
aacattgccaaataaacaactgattgaaaatatattaggaaaagcagaatgcttatctaaagggtgatggaaaatgcttaagagaaagctattctacagttcaaaaaatttctttctttc

SEQ ID NO: 42782 - DNA, 120 bp, synthetic construct
  source 1..120: mol_type = other DNA
tgtgctgcacccattaacttgtcatttacattacgtatatctcctaatgttatccctcccccctccccccaccccacaacaggccccggtgtgtgatgttccccttcctgtgtctaagtg

SEQ ID NO: 42783 - DNA, 120 bp, synthetic construct
  source 1..120: mol_type = other DNA
attgcataataaattgctgaactgcctcaagttgtgtgaaaataatgataaaagagtgatcataaatattttcaagtgatttattatatgaaccaattcatttttgattaatttgctgtg

SEQ ID NO: 42784 - DNA, 120 bp, synthetic construct; identical to SEQ ID NO: 12154
  source 1..120: mol_type = other DNA

SEQ ID NO: 42785 - DNA, 120 bp, synthetic construct
  source 1..120: mol_type = other DNA
ataaaataaatacgtaggataacaaaggaaactaaaggtattgaagtatagtctgtgtactccagctaaagaactcctggaaggtgatttatcgtgtcccttccatttctgagatgttgc

SEQ ID NO: 42786 - DNA, 120 bp, synthetic construct
  source 1..120: mol_type = other DNA
aaggtgatttatcgtgtcccttccatttctgagatgttgcacttctatcgtgtaatgtcttgttactcttggatcagcagtcttgattgacaacccctgcaactactctgcattccaatc

SEQ ID NO: 42787 - DNA, 120 bp, synthetic construct
  source 1..120: mol_type = other DNA
gctgcaagctccacctcccgggttcacgccattctcctgcctcagcctcctgagtagctgggactgtaggtgcctgccaccacacccggataattttttatatttttagtagagacgggg

SEQ ID NO: 42788 - DNA, 120 bp, synthetic construct; identical to SEQ ID NO: 12155
  source 1..120: mol_type = other DNA

SEQ ID NO: 42789 - DNA, 120 bp, synthetic construct
  source 1..120: mol_type = other DNA
cagtttcagtaactgaaactgttgttgctttctgaatattgcataccacaagcctgacgtgatgtagtttttacccagacttccctttgctgtttaagcagcaaaattggaagcattcaa

SEQ ID NO: 42790 - DNA, 120 bp, synthetic construct
  source 1..120: mol_type = other DNA
gcataccacaagcctgacgtgatgtagtttttacccagacttccctttgctgtttaagcagcaaaattggaagcattcaaattagaatattttcttcagaagagtagaccttatttagag

SEQ ID NO: 42791 - DNA, 120 bp, synthetic construct
  source 1..120: mol_type = other DNA
tttggaaattgcctttttaactccgtcacctattttattactgctgtaaactccttattacctaaaatcaaggtcgttggtttggcgccagcctttgtctgtggacctatcagtcattcc

SEQ ID NO: 42792 - DNA, 120 bp, synthetic construct; identical to SEQ ID NO: 12156
  source 1..120: mol_type = other DNA

SEQ ID NO: 42793 - DNA, 120 bp, synthetic construct
  source 1..120: mol_type = other DNA
ctcaaagcccccaacccatgagaaactctgctctcattttgttgtctgcagtgttctctccttacaattcctgtagcacgttgattatgatttacacagcatttttaaaggctttttcct

SEQ ID NO: 42794 - DNA, 120 bp, synthetic construct
  source 1..120: mol_type = other DNA
ggttcacaccattttcctgcctcagcctcctgagtaactgggattacaagtgcctgccaccatgcctggctaattttttgtatttttagtagagacagggtttcaccatgttagccagga

SEQ ID NO: 42795 - DNA, 120 bp, synthetic construct
  source 1..120: mol_type = other DNA
ttttattggtacaaaatatcacatgtagcccataaatatgtatatattttacatatgcatatacatacacaaaatacacaaaatgctgtacctcagtatataaaaagtgttgtgtgtaat

SEQ ID NO: 42796 - DNA, 120 bp, synthetic construct
  source 1..120: mol_type = other DNA
tgtttatatactgaggtacagcattttgtgtatgtattttactctatgagattacaagcacccttggggtggagaatgtgtactattaatatacatagtacattcagtgaacccatgatg

SEQ ID NO: 42797 - DNA, 120 bp, synthetic construct; identical to SEQ ID NO: 12157
  source 1..120: mol_type = other DNA

SEQ ID NO: 42798 - DNA, 120 bp, synthetic construct
  source 1..120: mol_type = other DNA
tgatttttgttagcttctccacatacgtgtttactggataacattgccagatgctaggaacacagctgtgaacctgtgtcaggtagcttctaaaagggaaaaagaaaataagcccaagaa

SEQ ID NO: 42799 - DNA, 120 bp, synthetic construct
  source 1..120: mol_type = other DNA
caataaaggaatcttagctgggattacagctaagactgtaagaatgacagattgaagtaaagaagaaattgtacaaaagcaggcagctagttgaggttgaggagaggaataagagcaaat

SEQ ID NO: 42800 - DNA, 120 bp, synthetic construct
  source 1..120: mol_type = other DNA
aagagagtgaacgacctcttcttgatggtgacttgagaatagtatctttatgttaaagagacccgtaggatgtttaaaaggcctgtggagtacacctaaggtgactactttaggcgtgac

SEQ ID NO: 42801 - DNA, 120 bp, synthetic construct; identical to SEQ ID NO: 12158
  source 1..120: mol_type = other DNA

SEQ ID NO: 42802 - DNA, 120 bp, synthetic construct
  source 1..120: mol_type = other DNA
tctgaaatgtgctagtatctgaatttcggaagaaatgtagcttggttttagatagctgttaggaaatatcgccatctaatggcttttgcatcaaattgcagataacagttcctgaaggac

SEQ ID NO: 42803 - DNA, 120 bp, synthetic construct
  source 1..120: mol_type = other DNA
ttcatcatcaaaaagctgtcagagtgtgatatgtagaaaacctaattataattttaagtgctcattttgttcatcaaccatcgttaaaacaaaaatagtatcttgttacaaataaactta

SEQ ID NO: 42804 - DNA, 120 bp, synthetic construct; identical to SEQ ID NO: 12159
  source 1..120: mol_type = other DNA

SEQ ID NO: 42805 - DNA, 120 bp, synthetic construct
  source 1..120: mol_type = other DNA
aaaactccacttcaattagagggcctgtccttgctgcaaagttgacagtcatctttggaattgtgataatgagctgattgttaattagagctttttgtctgtgtctaaatattctgtaat

SEQ ID NO: 42806 - DNA, 120 bp, synthetic construct
  source 1..120: mol_type = other DNA
tatgtgatagcttcctatggattgttttcttcaattttttgacctcagagtattgcctggttggactaatgtcaagatttcttattttctgaggtcatgccttatagctggaatacgaat

SEQ ID NO: 42807 - DNA, 120 bp, synthetic construct
  source 1..120: mol_type = other DNA
tgttctggttattccaacttacataggttcacatttgattctaaatgtgtttgtatgtttaacagaggattttatgtgtctgaggtcatgcttttagtgggaatatccctaactgtggga

SEQ ID NO: 42808 - DNA, 120 bp, synthetic construct
  source 1..120: mol_type = other DNA
tctgtctggctatcagcacctgacactgacagtccagacctgaatgattttttatccttacagggtatctcattggtggtgatgtcctcaggttgctgcatggacacatggacgagtgtc

SEQ ID NO: 42809 - DNA, 120 bp, synthetic construct; identical to SEQ ID NO: 12160
  source 1..120: mol_type = other DNA

SEQ ID NO: 42810 - DNA, 120 bp, synthetic construct
  source 1..120: mol_type = other DNA
gattaattttctttttagaatgtttaatctcaaactcagttttgaagtcagagttctcaaattgcgtacaattttaggaccctttgctatgacctctcatttattgatacagatgataga

SEQ ID NO: 42811 - DNA, 120 bp, synthetic construct
  source 1..120: mol_type = other DNA
accataaaaatatttagaatagtttgctactgctctaccttacaaattaatcaatgaatgtagtaagatgaatatgtaaataagagattgcagtgagagaaggtactgtgtggatggttt

SEQ ID NO: 42812 - DNA, 120 bp, synthetic construct; identical to SEQ ID NO: 12161
  source 1..120: mol_type = other DNA

SEQ ID NO: 42813 - DNA, 120 bp, synthetic construct
  source 1..120: mol_type = other DNA
attagtttcaaacagaaatataaacttaagaactagagagatgtcaagcatattctgggaatagcaattattccagagtgattagggggaaaatggaggaaaaggtggaaagtagacaag

SEQ ID NO: 42814 - DNA, 120 bp, synthetic construct
  source 1..120: mol_type = other DNA
gagaacttagattagaggtggggagaatctgagtcacggaaatgaaatgcagtaattcgtgtgacaaaatccaagaacttagcccagataatgccatcagaatggagaggtttacttgca

SEQ ID NO: 42815 - DNA, 120 bp, synthetic construct
  source 1..120: mol_type = other DNA
atctttttttctgcctcaggggaagacagctggagctaaggattgcaggagatggtacatgtttgctatgaaagatggagttaaactttggttacagatgagtacagtctatgagacgtc

SEQ ID NO: 42816 - DNA, 120 bp, synthetic construct
  source 1..120: mol_type = other DNA
taaaggaatggggtctatcatatgttcatcagatggagagggaagagctgggattagatgtgtttgtcgattgggcatggccttatgaaggctgtaaagacctggaatagcctaatcagg

SEQ ID NO: 42817 - DNA, 120 bp, synthetic construct; identical to SEQ ID NO: 12162
  source 1..120: mol_type = other DNA

SEQ ID NO: 42818 - DNA, 120 bp, synthetic construct
  source 1..120: mol_type = other DNA
accagttgtgtgactcatgtaggtgacatagtttctttaaacaatggtttcccctctttgtaaaatgcagcttaaatattatctcctgctttatggggctattgaaaagactaaataaga

SEQ ID NO: 42819 - DNA, 120 bp, synthetic construct
  source 1..120: mol_type = other DNA
acatttattgttattatttagtctgttgctattatttagtctgaagaggcagcatttagccagatatgattgaaaagtttgagggactctgggcatatggatgacagaatggcagagcat

SEQ ID NO: 42820 - DNA, 120 bp, synthetic construct
  source 1..120: mol_type = other DNA
gacatttcaaagatattttaatcatgttctggacccactctccctttgcatatatgttgaagcctgcccctcctttccaaatagtcttcttgatttcatgttgataatttcagttcaact

SEQ ID NO: 42821 - DNA, 120 bp, synthetic construct; identical to SEQ ID NO: 12163
  source 1..120: mol_type = other DNA

SEQ ID NO: 42822 - DNA, 120 bp, synthetic construct
  source 1..120: mol_type = other DNA
tcattgtaaggaacttgggggaggcaaaggatagctcaccccggaagcagcctttatttatttgttatcagtctgtactgggggagacatgcataatgatcatctaaaaatatacttttt

SEQ ID NO: 42823 - DNA, 120 bp, synthetic construct
  source 1..120: mol_type = other DNA
tgatctggctatactcattaattgtatgctgttgttaacgttaaataactaaagtccaatttactttgttaggagacatagtggaaactattaaggagatggccagaaaagatgtttact

SEQ ID NO: 42824 - DNA, 120 bp, synthetic construct; identical to SEQ ID NO: 12164
  source 1..120: mol_type = other DNA

SEQ ID NO: 42825 - DNA, 120 bp, synthetic construct
  source 1..120: mol_type = other DNA
tttgcttttatggattgaatcctgacgtgttcatgaaatacagcatcattattgttttaagttacttgagatttttttccgaaagacaaatcgctctaaaatgactagtagacaacttgt

SEQ ID NO: 42826 - DNA, 120 bp, synthetic construct
  source 1..120: mol_type = other DNA
ttaactatagtgtcgtaactttttagttcttattaaactcttcaattagtgagatagaatgagttaaagagaagcaagtctggtagttgggaagggatgtgtcagtatcccttgtcaatc

SEQ ID NO: 42827 - DNA, 120 bp, synthetic construct
  source 1..120: mol_type = other DNA
aaataactaaaagagtgtaactggattgtttgtaacacaaaggatcagtgcctgaagtgatggatccctcatttaccctgaagtgattattatgcatagtatgcctgaatcaaggcatct

SEQ ID NO: 42828 - DNA, 120 bp, synthetic construct
  source 1..120: mol_type = other DNA
ggcttgacatttgactactaaattttatttcaagcctgacatattttatgtggagagtattttctgttctagattttgtttctagattgcatctcattatttccatccaaaattttatgt

SEQ ID NO: 42829 - DNA, 120 bp, synthetic construct; identical to SEQ ID NO: 12165
  source 1..120: mol_type = other DNA

SEQ ID NO: 42830 - DNA, 120 bp, synthetic construct
  source 1..120: mol_type = other DNA
cgtttatttctaaatgtatacacttacccacatatacagagatgaaatgcattaggtgatgataagagctaaggagaaaaataatgcatggaaggggatggagagtgttcatgtgtgtgg

SEQ ID NO: 42831 - DNA, 120 bp, synthetic construct
  source 1..120: mol_type = other DNA
gctcttggcatatgcttgctgtgtcttgttactttcaaatgcaggccaattaagtcatagtttctgacagtatctggaaataaatgctacatttgcttcccaaaatgtgactcagcagga

SEQ ID NO: 42832 - DNA, 120 bp, synthetic construct; identical to SEQ ID NO: 12166
  source 1..120: mol_type = other DNA

SEQ ID NO: 42833 - DNA, 120 bp, synthetic construct
  source 1..120: mol_type = other DNA
tgagagttagatgagttagctaaacagtcttgatggaatagtcagtacataaaggagagctactttctgctctttgcctcttctcctttgggagagattcgctttttaccccaaacttaa

SEQ ID NO: 42834 - DNA, 120 bp, synthetic construct
  source 1..120: mol_type = other DNA
actctcaaggcaaggactgggtaaaatgactgcttcaaaaacgtgggcttctaacacaagattaaaaacattcataggaatttgagctgttggatcttggcaaaaatgaaaaacaatgag

SEQ ID NO: 42835 - DNA, 120 bp, synthetic construct
  source 1..120: mol_type = other DNA
ctgggtttattaacttaatctatatgtaagcaatatctttcagaagaaaaaaagaaagagaagcatcttcttttgtaaatttccagatgcctttatggttgtattgtgttctgcaaagca

SEQ ID NO: 42836 - DNA, 120 bp, synthetic construct
  source 1..120: mol_type = other DNA
ctattgttgtttcaaatctgtgctgattcatttacattttatgcagaggtgtcatctcaaaacatacctattttcccttgtgcagcaacttgaatagagctattgtggcaaactgagctc

SEQ ID NO: 42837 - DNA, 120 bp, synthetic construct; identical to SEQ ID NO: 12167
  source 1..120: mol_type = other DNA

SEQ ID NO: 42838 - DNA, 120 bp, synthetic construct
  source 1..120: mol_type = other DNA
aattcttttaatatttattgagggacttgtatagcccagacatctttggcatgtgctgggtatgaaaacatgtctaaggccctgccactatctttctggaactcaccgtctctattagtc

SEQ ID NO: 42839 - DNA, 120 bp, synthetic construct
  source 1..120: mol_type = other DNA
atggcagaaggcgaatgggaaggaggcatgttttacgtggctggaggaggagcaagagagcaaaggggaagtgctacacagttttaacaaccagatctcgtgagaactcactatcacaag

SEQ ID NO: 42840 - DNA, 120 bp, synthetic construct
  source 1..120: mol_type = other DNA
ccatcttttaagatctcaacaacactatattcaggatgaagtgaatgttaatctgggagaagccatttataattttggtaaaacttagatggtagaaaacatattttaccattcaaccat

SEQ ID NO: 42841 - DNA, 120 bp, synthetic construct; identical to SEQ ID NO: 12168
  source 1..120: mol_type = other DNA

SEQ ID NO: 42842 - DNA, 120 bp, synthetic construct
  source 1..120: mol_type = other DNA
gcaagctctgcctcccgggttcatgccattctcctgcctcatcctcccaagtagctgggactacaggcacccgccaccacgcctggctaattttttgtatttttagtagagatggggttt

SEQ ID NO: 42843 - DNA, 120 bp, synthetic construct
  source 1..120: mol_type = other DNA
cccacactttcacttcccgcatcccatagtgccactgatcacacgtgttggtctgcatattcatctcttccattcagttttcagccagggctgtgccattcatttcttgcataccttttg

SEQ ID NO: 42844 - DNA, 120 bp, synthetic construct; identical to SEQ ID NO: 12169
  source 1..120: mol_type = other DNA

SEQ ID NO: 42845 - DNA, 120 bp, synthetic construct
  source 1..120: mol_type = other DNA
actccagtatgcttggctaagtcatctatattgagaataccttgatttcaagtgagtaactctacatacgggaagagtctctggaccaatagaataggaatctgaacgttgataacagtg

SEQ ID NO: 42846 - DNA, 120 bp, synthetic construct
  source 1..120: mol_type = other DNA
gcatacttgccaacatgcacaatttttgtgatgttaaattatgttttctcccactattttctcttatttcttcccatttaagcagccagcagtccctgtgtttctttgcctgaggggagg

SEQ ID NO: 42847 - DNA, 120 bp, synthetic construct
  source 1..120: mol_type = other DNA
ggattcttcagacagaaaaaggagacgttttccccagacttaaaagacattcacatggatcaactggacttccaaacatacacaaaagagaacctgggcctaaacttcacattttatatc

SEQ ID NO: 42848 - DNA, 120 bp, synthetic construct; identical to SEQ ID NO: 12170
  source 1..120: mol_type = other DNA

SEQ ID NO: 42849 - DNA, 120 bp, synthetic construct
  source 1..120: mol_type = other DNA
gctgaggtcatgccactgcactctggcctgcctgacagagcgagactgtttcaaaaaaaaaaaagaaagaaaagaaaaaatgataaattgtgttaacagagaagacaaaaatctatgaaa

SEQ ID NO: 42850 - DNA, 120 bp, synthetic construct
  source 1..120: mol_type = other DNA
gtctagggaagtagaagttacaggccaagtcataagtgaatacatggaggtgatatacatcagccttgcctaaaaaggtgggatatcttaaagtggcagcttacaggtcataagtgggtt

SEQ ID NO: 42851 - DNA, 120 bp, synthetic construct
  source 1..120: mol_type = other DNA
ggaagtctgttaaccagtaccctgggtctgagtgacctgtaggggtaggggacttaacacttgtatggcctggccttacaccctgtttataatttggtatctttttttttttttttgaga

SEQ ID NO: 42852 - DNA, 120 bp, synthetic construct
  source 1..120: mol_type = other DNA
ccattctcctgcctcagcctcccgagtagctgggactacaggcacccaccaccacatctggctaattttttgtatttttagtagagacagggtttcaccatgttagccaggatggcctca

SEQ ID NO: 42853 - DNA, 120 bp, synthetic construct; identical to SEQ ID NO: 12171
  source 1..120: mol_type = other DNA

SEQ ID NO: 42854 - DNA, 120 bp, synthetic construct
  source 1..120: mol_type = other DNA
aaaaatccacgtggagagggtaaaaagacaagctacagactgagagaaaagatttgcaaaccatatctgataaaggactagtatctaaaatacataaagaatcaacagtaaaatacaaac

SEQ ID NO: 42855 - DNA, 120 bp, synthetic construct
  source 1..120: mol_type = other DNA
gaccacaatgagataacactgtatgcttatcagaatgactcaaacaaaaatattgacagccacgtgctggtgagaatgcagagaaactgtcatatattgcttgtaaaatggtacagccac

SEQ ID NO: 42856 - DNA, 120 bp, synthetic construct; identical to SEQ ID NO: 12172
  source 1..120: mol_type = other DNA

SEQ ID NO: 42857 - DNA, 120 bp, synthetic construct
  source 1..120: mol_type = other DNA
tctctattaaaaatgcaaaaaattagctgggcatggtggcacatgcctgtaatcccagttacacaggagcctgaggcagtagaatcacttgaactcaggagttggaggttgcagtgagct

SEQ ID NO: 42858 - DNA, 120 bp, synthetic construct
  source 1..120: mol_type = other DNA
ccattttcataacatttttaaatgataaaattttaggaatggaggacagattataggccatcagatgttagggaaacaggggagggaaatgagagggaggtggatgtggatataaaaggg

SEQ ID NO: 42859 - DNA, 120 bp, synthetic construct
  source 1..120: mol_type = other DNA
caacttgaaggaactttgtggcgtaggatcttgcctgtgatggtgaacccagtgttggatataaaatactccaggaataaatgctgagtgccatgaagtaaaaccagtactcaggaaaaa

SEQ ID NO: 42860 - DNA, 120 bp, synthetic construct
  source 1..120: mol_type = other DNA
caatctgagctgactccattggctacttgtacatattttcctaaatatagtgggggaggggaggggaggtacagaagtggagtgtgtgagacgtgcagtttcgggggaacaatgggtata

SEQ ID NO: 42861 - DNA, 120 bp, synthetic construct; identical to SEQ ID NO: 12173
  source 1..120: mol_type = other DNA

SEQ ID NO: 42862 - DNA, 120 bp, synthetic construct
  source 1..120: mol_type = other DNA
caagggatttttattatttgttacaactgcacatgaccagagtgatctcaattttttaaggcattcatagagactggacaaagagcaaagatttctggggtcccctttcgggataccaag

SEQ ID NO: 42863 - DNA, 120 bp, synthetic construct
  source 1..120: mol_type = other DNA
ggtggataaaaagcagtggccctcagactggaagggggcatgtaaagagagaccctgaatataggagatctagcaagcaaattggtcctgcccaatatctgatattaaggtactgcttta

SEQ ID NO: 42864 - DNA, 120 bp, synthetic construct
  source 1..120: mol_type = other DNA
tttataataattgttgacattatttcacaccaacctccccactcccactgagaaaaactaataaaggtagacactctcctttcccccgaaagtagagagtgaacaaagcagtgaagatgt

SEQ ID NO: 42865 - DNA, 120 bp, synthetic construct; identical to SEQ ID NO: 12174
  source 1..120: mol_type = other DNA

SEQ ID NO: 42866 - DNA, 120 bp, synthetic construct
  source 1..120: mol_type = other DNA
attgccatttgggatttgccataagacaatatgagattactatggccctcgtctgtcaattctgcaagaagcaaaagtaaacctttagggagaaaattacatataaaactcaaattgcct

SEQ ID NO: 42867 - DNA, 120 bp, synthetic construct
  source 1..120: mol_type = other DNA
acaagttatgggctcagttttctccaaaactgcctctatctcagataccaatcacaaatgggatccccagaccacttgcggttctgaccaactggctatacatttagaggttcccataat

SEQ ID NO: 42868 - DNA, 120 bp, synthetic construct; identical to SEQ ID NO: 12175
  source 1..120: mol_type = other DNA

SEQ ID NO: 42869 - DNA, 120 bp, synthetic construct
  source 1..120: mol_type = other DNA
atcataggctacatgatggaattcaatctctagcatccttcctatccctagatgttgtgctggatcaaacctctacccctttaatcgtgtggtttatctttccagcatggccagctccca

SEQ ID NO: 42870 - DNA, 120 bp, synthetic construct
  source 1..120: mol_type = other DNA
tgtcttccaggaatgaaggacaaagatcagcctacttacttattatcaaacatgggcacagaagatgataggacttgactaaagatcaagagcatatacatagtactgaaaaaggcacat

SEQ ID NO: 42871 - DNA, 120 bp, synthetic construct
  source 1..120: mol_type = other DNA
aggagttcgagacctgcctgggcaacataaagaggccttgtctctacaaaaaaaaaaaagttttttaattagctgggtatggcaagtggagagctgagtatagcaagtatggaggagagc

SEQ ID NO: 42872 - DNA, 120 bp, synthetic construct
  source 1..120: mol_type = other DNA
ttattatgttctaagaattaaaagatgcaacaatttagtagagaactggaaactataaaaaatgatcatatagacattctaaaactaaaaaataaataacttagaaacaatggatagatt

SEQ ID NO: 42873 - DNA, 120 bp, synthetic construct; identical to SEQ ID NO: 12176
  source 1..120: mol_type = other DNA

SEQ ID NO: 42874 - DNA, 120 bp, synthetic construct
  source 1..120: mol_type = other DNA
cctgtctccaccctccttccccccaaaaaagattgggaaatatagaaaagaacaaaaaagatggtaaatgatattatagatggtctatcctacatgcatgtaattggagtcccaaaatga

SEQ ID NO: 42875 - DNA, 120 bp, synthetic construct
  source 1..120: mol_type = other DNA
gaaagatggatggagggagacaaagagaactcacaggtgcgtggagtaaaggaagtatttaatacaattgcttgaaagttctccaaaattgactaactatattaagctactgattcaaga

SEQ ID NO: 42876 - DNA, 120 bp, synthetic construct
  source 1..120: mol_type = other DNA
gcaagagtaagatttgcagttgatttcaactcagaaacaatgggagacatgggatgtaagcttaaaagtgcttaaagaaaatatctggcaatctaaaattttatatccggtaacacagtg

SEQ ID NO: 42877 - DNA, 120 bp, synthetic construct; identical to SEQ ID NO: 12177
  source 1..120: mol_type = other DNA

SEQ ID NO: 42878 - DNA, 120 bp, synthetic construct
  source 1..120: mol_type = other DNA
aaataccaaaaagagtttctttgagtagaagaaaactatctcatatgtaactttggaggtatagaaacggaaaaaaagccacagaaagataaatacgagagttaaatcagaggatactga

SEQ ID NO: 42879 - DNA, 120 bp, synthetic construct
  source 1..120: mol_type = other DNA
tgggtggattgctccagtctaggagttcaagaccagcctgggaaacatggcgaaaccccatctctacaaaaaatacaaaaatcagccaggcctggtggcatgcacctgtagttctacata

SEQ ID NO: 42880 - DNA, 120 bp, synthetic construct
  source 1..120: mol_type = other DNA
caaaaaattatagagaacaactcattacaacactggcacatgagtcaaggggaaagtaacttgaattaaatggtggttcttgcatggtctggaaagtggtaaagttactaattagatcct

SEQ ID NO: 42881 - DNA, 120 bp, synthetic construct; identical to SEQ ID NO: 12178
  source 1..120: mol_type = other DNA

SEQ ID NO: 42882 - DNA, 120 bp, synthetic construct
  source 1..120: mol_type = other DNA
gctatacacatcctgtatataattcctccctttttgtgtgatgggactgggtatatgacggacttcattcccatgactagattacattatttgacaaagctgaaagaatgttgcaaatgt

SEQ ID NO: 42883 - DNA, 120 bp, synthetic construct
  source 1..120: mol_type = other DNA
gctgtgttttgagagggactgtttaggagactgtattgcaaagttgctgagagccctctccagctgtcagagcgcaatgaaataaggccttcagtcataaaactgcaaggcactgaattc

SEQ ID NO: 42884 - DNA, 120 bp, synthetic construct
  source 1..120: mol_type = other DNA
acttccaacctacggaatggtagaataagaaatggtggtgtttctcagccatgaagtcaggggtaactgattacacaggaatagactaccaaaacattctgtgtgacatcaccttgggaa

SEQ ID NO: 42885 - DNA, 120 bp, synthetic construct; identical to SEQ ID NO: 12179
  source 1..120: mol_type = other DNA

SEQ ID NO: 42886 - DNA, 120 bp, synthetic construct
  source 1..120: mol_type = other DNA
tcttattgcgtatgtctgcgtgaatttcacttgagacagcaattcaaatatatcaaccttaatttaattccatcagagatgttttccttcttacagcccataacttggttatgtatacca

SEQ ID NO: 42887 - DNA, 120 bp, synthetic construct
  source 1..120: mol_type = other DNA
cttgctgatgtcaattttaagggtgcaccttcctgtttactgtgatttgagggttctgttgtgctgttgctttcagattaatatccaaagtctttatctttaactcctttttatccttgt

SEQ ID NO: 42888 - DNA, 120 bp, synthetic construct
  source 1..120: mol_type = other DNA
attctgcagcctttctactctcactgccacgctctcattcctcatatcctcattcttttctttgcatgctgaattcttactcagctccaggagtgaacccaaatatctccctcatgaaaa

SEQ ID NO: 42889 - DNA, 120 bp, synthetic construct; identical to SEQ ID NO: 12180
  source 1..120: mol_type = other DNA

SEQ ID NO: 42890 - DNA, 120 bp, synthetic construct
  source 1..120: mol_type = other DNA
aatagaaagataatagttcttcatattatttacttttgcaacatttacacatacacatttgtagctctccatccttctcttttaaagagaataatccaagtttatttgagatagcctggt

SEQ ID NO: 42891 - DNA, 120 bp, synthetic construct
  source 1..120: mol_type = other DNA
tttttaaaaaattaatagactttattatacacttttaggtttacaggaaaattgagcagaaagcacagagaattctgcctcaccagttttcttgttattaacatcttgtattagtatggt

SEQ ID NO: 42892 - DNA, 120 bp, synthetic construct
  source 1..120: mol_type = other DNA
tatagactttgactaataacatgtatccacaattgcagtatcacacacaataatttcactgctctcaaaattccctgttccccatttattccttcttccctcccctgaactcctgaaaaa

SEQ ID NO: 42893 - DNA, 120 bp, synthetic construct
  source 1..120: mol_type = other DNA
gaaaaacattccaatggatgtgttacagtttattcacattttggctgcttccaagttgtggtaattaaaagctactattaatatttacatgcaagttttgtatagacctaatttatttgg

SEQ ID NO: 42894 - DNA, 120 bp, synthetic construct; identical to SEQ ID NO: 12181
  source 1..120: mol_type = other DNA

SEQ ID NO: 42895 - DNA, 120 bp, synthetic construct
  source 1..120: mol_type = other DNA
tctcctgggttcacgccattctcctgcctcagcctccagagtagctatgactacaggtgcccaccaccatgcccggctaattttttgtgtttttagtagagatggggtttcaccgtgtta

SEQ ID NO: 42896 - DNA, 120 bp, synthetic construct
  source 1..120: mol_type = other DNA
tacatatttcggatgccagtcctttcccagatatgcgattgcaaatattgtctttcagtctctggcttgtctttttattctcttaatagtgttttcttgcagatcagaggtttttaattt

SEQ ID NO: 42897 - DNA, 120 bp, synthetic construct; identical to SEQ ID NO: 12182
  source 1..120: mol_type = other DNA

SEQ ID NO: 42898 - DNA, 120 bp, synthetic construct
  source 1..120: mol_type = other DNA
tctttgttagagatcaatgtgctatatttgtgtgggtctatttctaggctctctattctgttccactgacctgtttgtctgttctttcaccaataccacactgtgttgaatactgtagct

SEQ ID NO: 42899 - DNA, 120 bp, synthetic construct
  source 1..120: mol_type = other DNA
tatctacaaaataacttgctgggattttgactgtgattgctttgaaactatagatcaaattgggaagaactgatgtcttgaaatattgagtcttcctatccatgaacatggaatagctct

SEQ ID NO: 42900 - DNA, 120 bp, synthetic construct
  source 1..120: mol_type = other DNA
ataatatttttactttaaatacgtgttgttcattgctggtatagaagaaattgatttttgtgtattaatgtcctgaaactttcctataattgtctattagtttcaggagatttttgttgt

SEQ ID NO: 42901 - DNA, 120 bp, synthetic construct; identical to SEQ ID NO: 12183
  source 1..120: mol_type = other DNA

SEQ ID NO: 42902 - DNA, 120 bp, synthetic construct
  source 1..120: mol_type = other DNA
ttttttctttagcatgttgatatgatggattatactatggttcagtgatatcttaattaccttatgtatacaaaaggagaaaatattcatttttgctatcatacttgtattcaaacagca

SEQ ID NO: 42903 - DNA, 120 bp, synthetic construct
  source 1..120: mol_type = other DNA
atatcacagaaattctatggtatattcattgaaagttgagtttggataaatgaagtagtattttattacttccctgcattgcagtaactaaaatacattgatatggcttcttctttgtcc

SEQ ID NO: 42904 - DNA, 120 bp, synthetic construct
  source 1..120: mol_type = other DNA
tgactgattgaattgtcttttattattatttacctcttctggtgttcagtatttgttatatactctaccctttttcttgacaaaaaatgaaaccagaatgttatgtattcagaaaatagg

SEQ ID NO: 42905 - DNA, 120 bp, synthetic construct; identical to SEQ ID NO: 12184
  source 1..120: mol_type = other DNA

SEQ ID NO: 42906 - DNA, 120 bp, synthetic construct
  source 1..120: mol_type = other DNA
tttccttcaatttatgaaagaccctagaccctggattttatccagctagctttctctgagattaaaatgaccaataatatgggtagaatattctagatctaaggtcaaccaatcaaggca

SEQ ID NO: 42907 - DNA, 120 bp, synthetic construct
  source 1..120: mol_type = other DNA
attttattgttacacagccatcctatttttaaaaacatattgtctatgtttgcttttgtatgataataacagaattaaataatgagacagagaccatatggctcgcaaaaccgaaaatat

SEQ ID NO: 42908 - DNA, 120 bp, synthetic construct
  source 1..120: mol_type = other DNA
cctgtgctggagctacagtaagggtgacaaagcaggtgacttcagaagaggatttaaataagagagaaggtaggaaaagaagtattcttttaatctatataatgtatgcattcttttcag

SEQ ID NO: 42909 - DNA, 120 bp, synthetic construct; identical to SEQ ID NO: 12185
  source 1..120: mol_type = other DNA

SEQ ID NO: 42910 - DNA, 120 bp, synthetic construct
  source 1..120: mol_type = other DNA
taaaataatgtgtttattatttttttaaaaaaagaatgctgagatcctgccattgaattgcaggaggaggctagcactgaagtgactgatttatgatgaagctattaataggtaggcttc

SEQ ID NO: 42911 - DNA, 120 bp, synthetic construct
  source 1..120: mol_type = other DNA
taactccctatatggaaggattgaatataaattatgaccacaatcatggtcatgatcatcaccatcaccatctgcatcctcagagctgacatttgttgtgcaaggacttttccaagtggt

SEQ ID NO: 42912 - DNA, 120 bp, synthetic construct
  source 1..120: mol_type = other DNA
tgacatcttaagaaagttaataacaatcaaatgtgaaagtgagtcatcaacttttagttgccctgcagaacaaacaagagagtaactgtgatgtcattggttgacagagccctgtggcag

SEQ ID NO: 42913 - DNA, 120 bp, synthetic construct
  source 1..120: mol_type = other DNA
ccctataaaattttattgtaaatatatgcccaactgtcaagctatgaagaactcgtaaggatttgtgcttttattaatatgctaatgctagtcttttctgggccttagattctaaagatg

SEQ ID NO: 42914 - DNA, 120 bp, synthetic construct; identical to SEQ ID NO: 12186
  source 1..120: mol_type = other DNA

SEQ ID NO: 42915 - DNA, 120 bp, synthetic construct
  source 1..120: mol_type = other DNA
gtaggcataacttacagccttaagtctggaatttttcaaagtactgttgaacaagctcatactgctggttattatatgtgcatatttttaacattcctattcagtgaaattacagtgact

SEQ ID NO: 42916 - DNA, 120 bp, synthetic construct
  source 1..120: mol_type = other DNA
cattgcaaaaatagtctccagttaacaaagagctgcatgagctcttttgtattttcatatccgtcgaccttcctgaattctggcatccttcctgccatttgcattaaaatcccttgtgat

SEQ ID NO: 42917 - DNA, 120 bp, synthetic construct
  source 1..120: mol_type = other DNA
gttcaaagttggtaataccatttggcaaacttgttggtctttagaacaattgtcctcctagactctgatttgatacttgaaatgcattgcagggaaaagggacaatcccttaatggagca

SEQ ID NO: 42918 - DNA, 120 bp, synthetic construct; identical to SEQ ID NO: 12187
  source 1..120: mol_type = other DNA

SEQ ID NO: 42919 - DNA, 120 bp, synthetic construct
  source 1..120: mol_type = other DNA
tttccttttgactttatatttgtcatgtaaaattttaataaaaataccattagatttttataaaagatcattgttaaattcaaaaggtaaagttgtcaaagtaaaccatttgcgtgataa

SEQ ID NO: 42920 - DNA, 120 bp, synthetic construct
  source 1..120: mol_type = other DNA
tgtaattgttcctctaacgtaattaatgctaatagtttgatgttcattatttgacaactttctccatgctcatacagatatatgttcacatatgtacatatatgatagatttttagtgat

SEQ ID NO: 42921 - DNA, 120 bp, synthetic construct
  source 1..120: mol_type = other DNA
tttatttacatgttttatttaataattaaaggattgcagattaaaagtgttcaaagtttacctgtgaatcatagacttgttaagaagtgcttttctcttcattatattctagatagagta

SEQ ID NO: 42922 - DNA, 120 bp, synthetic construct; identical to SEQ ID NO: 12188
  source 1..120: mol_type = other DNA

SEQ ID NO: 42923 - DNA, 120 bp, synthetic construct
  source 1..120: mol_type = other DNA
aaccaaggttaagtatgttgccaaaatgaaataatgggtctagtcaagtggttctcaaaatatggaccatcaacatcacctgggaatttgttggaactgcagattcttgggcctcaccct

SEQ ID NO: 42924 - DNA, 120 bp, synthetic construct
  source 1..120: mol_type = other DNA
tttttaattggcacataattgtacatatttatggggtacaatatgatatttcaatacatacacacagtatagaatgatcaaatcagccgttggcatgtatatcaatgcaaacatttataa

SEQ ID NO: 42925 - DNA, 120 bp, synthetic construct; identical to SEQ ID NO: 12189
  source 1..120: mol_type = other DNA

SEQ ID NO: 42926 - DNA, 120 bp, synthetic construct
  source 1..120: mol_type = other DNA
ctacactgagggtgattttgtccccaaagggacatctgacaatgttggagaactcttagaactcttttggttgtcacagctggtgggaggctactggtggcatttagttggtagagggca

SEQ ID NO: 42927 - DNA, 120 bp, synthetic construct
  source 1..120: mol_type = other DNA
attgcaaccagcgagagagttttttaaagtcctgactccagatctgtttaatgtcattggtgagggtgcacataaggatttctaaaaactatccatgtgagtactttatgcagcgacagt

SEQ ID NO: 42928 - DNA, 120 bp, synthetic construct
  source 1..120: mol_type = other DNA
taggtcctaatggatggattagggtgatcccaaactaactgattaaattttatctaaagaaatagacaattatgtacccctgttgtgttataatgggaagtagaaacaccaatttgtgaa

SEQ ID NO: 42929 - DNA, 120 bp, synthetic construct
  source 1..120: mol_type = other DNA
aagtcctccaggacatatggtacagactgattatcaccaaataaatggcaagaagggaagacaagagaggaatggggactattctagaataaaagaaacttaagacccctaactgataag

SEQ ID NO: 42930 - DNA, 120 bp, synthetic construct; identical to SEQ ID NO: 12190
  source 1..120: mol_type = other DNA

SEQ ID NO: 42931 - DNA, 120 bp, synthetic construct
  source 1..120: mol_type = other DNA
agaaagtaagtctattggatttggtaacatgaaggtcacttgatgactttagcaaagtctgtttcagtggagaaatgggtctggaagcaagattggagcccactggaaactgacaggagt

SEQ ID NO: 42932 - DNA, 120 bp, synthetic construct
  source 1..120: mol_type = other DNA
agttaacactcaggaaagaaagagggcatgtgcatcagctttggtttccaaaataatctcaaggcgttggtgcagtcatgaatttggatacttacagcaattacttagcattatgtatgg

SEQ ID NO: 42933 - DNA, 120 bp, synthetic construct
  source 1..120: mol_type = other DNA
gttaaaatattaagaattgtgttcttacatttctttaaaatgctttaaataatctaaaacagaatttggaagtgcaaatatttatatacatatgttgaaataatgatatattaaactata

SEQ ID NO: 42934 - DNA, 120 bp, synthetic construct; identical to SEQ ID NO: 12191
  source 1..120: mol_type = other DNA

SEQ ID NO: 42935 - DNA, 120 bp, synthetic construct
  source 1..120: mol_type = other DNA
attagagtccaaagaatgaaacatgtttaactcacatttgggcttttgtttgtttgttgaaacagaactgttcattatgaaggtggcgctgtgtctgttcatgcacgttccctttggaga

SEQ ID NO: 42936 - DNA, 120 bp, synthetic construct
  source 1..120: mol_type = other DNA
aagcgaacaaaggaaacaccgagaaagtggtggacagtttctcttttgtctatttccttccacctacctttatcattccttagcctcagttcaccagctagcaaacctgagaaataagca

SEQ ID NO: 42937 - DNA, 120 bp, synthetic construct
  source 1..120: mol_type = other DNA
gacacgacaagttctttgcaagcctgtcgcacatctcagatctgacagactgtggatttaaccttctaaaagtacatttaaaacaggaaacttgaacatgagcgtaggacagagtcatta

SEQ ID NO: 42938 - DNA, 120 bp, synthetic construct
  source 1..120: mol_type = other DNA
acataaatgtataaagtatttttttctgatgacttaactgtctgaatatttccttttagttcctgtaaatgaatacaatatgatgataaaggtgtcattttgaactattttaagtagaat

SEQ ID NO: 42939 - DNA, 120 bp, synthetic construct; identical to SEQ ID NO: 12192
  source 1..120: mol_type = other DNA

SEQ ID NO: 42940 - DNA, 120 bp, synthetic construct
  source 1..120: mol_type = other DNA
accattctcctgcctcagcctcccgagtagctgggactacaggcacctgccaccacgcccagctaatttgttgtatttttagtagagacagggtttaaccgtgttagccaggatggtctc

SEQ ID NO: 42941 - DNA, 120 bp, synthetic construct
  source 1..120: mol_type = other DNA
cctgtctaatggtgatgagaatagtttagaggccttcagtcgtttctgctcctgtgtcccatgcaatgattttgaaaaactttgtccattcttgaacactgtgaggttgacatagaaatc

SEQ ID NO: 42942 - DNA, 120 bp, synthetic construct
  source 1..120: mol_type = other DNA
gtggtttaatacctttgtttattgaaaatggtcttctttaacaataaaaatatatattattcagtctttccttttcactacatcctactcctctgcaacaaaaatatttatataaattta

SEQ ID NO: 42943 - DNA, 120 bp, synthetic construct; identical to SEQ ID NO: 12193
  source 1..120: mol_type = other DNA

SEQ ID NO: 42944 - DNA, 120 bp, synthetic construct
  source 1..120: mol_type = other DNA
taaaaatgaaagagtaaagaagtgtttatacaaattaattgtatacataattactaattatatatgtaattaaattgtcactataagtgcagtttcgagaggttgtattgaccttgtaaa

SEQ ID NO: 42945 - DNA, 120 bp, synthetic construct
  source 1..120: mol_type = other DNA
ttgtagagagagaccctacatctgtcttatttttggttaaaaaaaaaacatgaaagcttctgaaaacctgataggactttgtttttattgttatcgatactattgatgagctgtgactac

SEQ ID NO: 42946 - DNA, 120 bp, synthetic construct
  source 1..120: mol_type = other DNA
gaaatagaagtttggagtttattttcactttgattacagataatcaatatatagaaaggagatgatcttatggtcagccactggggaaagggaatgctacttgcttctcatagtccagat

SEQ ID NO: 42947 - DNA, 120 bp, synthetic construct
  source 1..120: mol_type = other DNA
gcagtaggaaagtaggagattcatatgtacggaatatcattattttaagaagtttttcagattatactgactctttaaactactttggctttattgtagatatgtaaattaagctacatt

SEQ ID NO: 42948 - DNA, 120 bp, synthetic construct; identical to SEQ ID NO: 12194
  source 1..120: mol_type = other DNA

SEQ ID NO: 42949 - DNA, 120 bp, synthetic construct
  source 1..120: mol_type = other DNA
atagaaaatgctctcctatattttactccaggcaaaattatagggatattgtaagtgagatatgtgttagttcctgtaataggaatactcatggaaataaaaactatgaattacatagag

SEQ ID NO: 42950 - DNA, 120 bp, synthetic construct
  source 1..120: mol_type = other DNA
gggcacagttttttgatgttaccataggaaattgctttataaaactccattactattgccaattttagtttttactacatatgattttcttgccttgccctctcatttgggaggaggtgg

SEQ ID NO: 42951 - DNA, 120 bp, synthetic construct
  source 1..120: mol_type = other DNA
aatcctcttagagacttcaaaggagcactggtacatatgagttctattgaatagaactgagcccagaacatcttccagatacgctagcaaatagtatatatctggttaaaattttgtgct

SEQ ID NO: 42952 - DNA, 120 bp, synthetic construct; identical to SEQ ID NO: 12195
  source 1..120: mol_type = other DNA

SEQ ID NO: 42953 - DNA, 120 bp, synthetic construct
  source 1..120: mol_type = other DNA
ctagagaatcgcttgaacccgggaggcggagtttacagtgagccaagatcgcgccactgtactccagcctgggtgacagagcgagactccgtctcaaaataaaaataatagtaataataa

SEQ ID NO: 42954 - DNA, 120 bp, synthetic construct
  source 1..120: mol_type = other DNA
taacaaactttaatttcatcttaagacaataccgtgttatctggttttattagtatacggttattaacttaattggggggcttcccaaattaattgtctttataaacaaattcatgtgaa

SEQ ID NO: 42955 - DNA, 120 bp, synthetic construct
  source 1..120: mol_type = other DNA
accaagtactctcaatttgtagaacacaaacatttttaataagtctgtatgaacccaagtttattaaataataagattatattgaaaatctccatatatttactttttctttgactcatt

SEQ ID NO: 42956 - DNA, 120 bp, synthetic construct; identical to SEQ ID NO: 12196
  source 1..120: mol_type = other DNA

SEQ ID NO: 42957 - DNA, 120 bp, synthetic construct
  source 1..120: mol_type = other DNA
tgtgccatcactctgcaccttagcatggttaaagctcctaaatacacaaccttcagttaacaaggtaatgtgcaaagcaagaacagcttgtattttgatttttctattttatcctacctg

SEQ ID NO: 42958 - DNA, 120 bp, synthetic construct
  source 1..120: mol_type = other DNA
aacgtttatcatttctgcgcattaacaacattcagtatccttcaaagcaaatttttaatgatcataacttatcattttactgaaacattctatattttctgtttattacattttttcctg

SEQ ID NO: 42959 - DNA, 120 bp, synthetic construct
  source 1..120: mol_type = other DNA
atagtctaactatagacttcagtttatatatatgagttccaattaatcatacttagacgttgaccacaatactactgtttttcaagtctgtgcaaatacagcaacagtttttaactagta

SEQ ID NO: 42960 - DNA, 120 bp, synthetic construct; identical to SEQ ID NO: 12197
  source 1..120: mol_type = other DNA

SEQ ID NO: 42961 - DNA, 120 bp, synthetic construct
  source 1..120: mol_type = other DNA
aacattaagacaatatatatgactgttcattgtccgacatatgttttaatagctactccttctgtgattgtgggtgctattggatcaagtcctaactgttttcattaggtggagtggaag

SEQ ID NO: 42962 - DNA, 120 bp, synthetic construct
  source 1..120: mol_type = other DNA
ttctactcatggacaaagagaaagctgatgtaaaatcaacagcatttaccttccggtcttccaaggtgagacagaaaatattttgggtttcctataaatgttacccggtcatatttcctt

SEQ ID NO: 42963 - DNA, 120 bp, synthetic construct
  source 1..120: mol_type = other DNA
cttccatacattcctctctggtaaaactgacttttctaaaccattaaaacctgcctatagaaacaatctaaatgtacaataaagggtaatgattacataaagggtaatgattgcataaat

SEQ ID NO: 42964 - DNA, 120 bp, synthetic construct; identical to SEQ ID NO: 12198
  source 1..120: mol_type = other DNA

SEQ ID NO: 42965 - DNA, 120 bp, synthetic construct
  source 1..120: mol_type = other DNA
tttataatgaaaaggagtttaattgacttatacttccgcatggctgggaaggcctcaggaaacttacaatcatgacagaaggggaagcaggcaggtcttacatggaggcaggtgagagag

SEQ ID NO: 42966 - DNA, 120 bp, synthetic construct
  source 1..120: mol_type = other DNA
cacgtctttccctcgagacgtggagattacaaattgagatgagatttgggtggggacacagagccaaaccatatcaattgcatatttctgttcataatttaatgaagattgtgaaacttg

SEQ ID NO: 42967 - DNA, 120 bp, synthetic construct
  source 1..120: mol_type = other DNA
ctaggtataggcatcttcacagtgttattcagggctcattgaaaagaaaaaaacgtattactttgttttttcactgctaggaaattcttagtattcaatcgcctttcccatattttgtat

SEQ ID NO: 42968 - DNA, 120 bp, synthetic construct
  source 1..120: mol_type = other DNA
caaaacaaggtcatgatttggcttagtagaactacaatacatgcactacaatgctttttcaatactggattaggtttaaatttttactttgcccctctctagagatctatatgttaggta

SEQ ID NO: 42969 - DNA, 120 bp, synthetic construct; identical to SEQ ID NO: 12199
  source 1..120: mol_type = other DNA

SEQ ID NO: 42970 - DNA, 120 bp, synthetic construct
  source 1..120: mol_type = other DNA
tctaacaagaaaacatattcattatttagagtgataattgtaacaaaattaaaagtagttatttacaactacttaaaagttttttagtgctttaatcatatttcatttcttctgattttg

SEQ ID NO: 42971 - DNA, 120 bp, synthetic construct
  source 1..120: mol_type = other DNA
tcaacgttttgatgaatttccttcctaatcatttttcttttgctgtgtaaacgcacacaaccttgcaacatggggatatagggatcaccaacacccctcccccatgcaattgaaatctac

SEQ ID NO: 42972 - DNA, 120 bp, synthetic construct
  source 1..120: mol_type = other DNA
tctctactaaaaatacaaaaattagtcgggcgtggtgacatgtgcctgcagtcccagctactcgggaagctgaggcaggagaatcgcttgaactcgggaggcagaggatgcagttagctg

SEQ ID NO: 42973 - DNA, 120 bp, synthetic construct; identical to SEQ ID NO: 12200
  source 1..120: mol_type = other DNA

SEQ ID NO: 42974 - DNA, 120 bp, synthetic construct
  source 1..120: mol_type = other DNA
ttcatactatcccaatatgtatgtatacactctgatttatgcgatcattattctttatgtaatcattaccctttattgtacatttaggttgtttctatagttatatacatatattcatat

SEQ ID NO: 42975 - DNA, 120 bp, synthetic construct
  source 1..120: mol_type = other DNA
tgggttataccgaatggtagcagatgcctctgattctatgagttaactggagagctccaggaaagacagtcagggtaggtctttattctccattgtgaaaatagagaggcacagctggta

SEQ ID NO: 42976 - DNA, 120 bp, synthetic construct; identical to SEQ ID NO: 12201
  source 1..120: mol_type = other DNA

SEQ ID NO: 42977 - DNA, 120 bp, synthetic construct
  source 1..120: mol_type = other DNA
tataacatacccaaataaaatctcgaagaagtagaaaaacatgaaccggtacatcacagtggaagacattggaatgatttgccaaatttgagtattttaaaaagctgggagtctgtggtg

SEQ ID NO: 42978 - DNA, 120 bp, synthetic construct
  source 1..120: mol_type = other DNA
taacaggcaaaatacatctaacgaaaattggaggaaaaagaggaagagtgaaaggtacggtaggtgctccagttgccttctatgaaacaaacatcaaagatcttcttaagattgaaaact

SEQ ID NO: 42979 - DNA, 120 bp, synthetic construct
  source 1..120: mol_type = other DNA
ttcttcatcatgcgtaatccagcctaataaaaagaagtaaagtgttactaaagagtcagagacataaacacagatgcaggcatgcagacaatgaggaaaatgagaccacagagcgaatgg

SEQ ID NO: 42980 - DNA, 120 bp, synthetic construct; identical to SEQ ID NO: 12202
  source 1..120: mol_type = other DNA

SEQ ID NO: 42981 - DNA, 120 bp, synthetic construct
  source 1..120: mol_type = other DNA
accaacctggccaacacagtgaaaccctgtctctactaaaaatacaaaaattagctaggcgtggtggcatgcacctgtaatcccagctgcttgggaggctgagggaggagaattgcctga

SEQ ID NO: 42982 - DNA, 120 bp, synthetic construct; identical to SEQ ID NO: 12203
  source 1..120: mol_type = other DNA

SEQ ID NO: 42983 - DNA, 120 bp, synthetic construct
  source 1..120: mol_type = other DNA
ccagtcaaaatggtgattattaaaaagtcaagaaacaacagatgctggtgaggctgtggagaaacaggaacgcttttacattgttgttgggaatataaattagctcaaccattgtggacg

SEQ ID NO: 42984 - DNA, 120 bp, synthetic construct
  source 1..120: mol_type = other DNA
aaacccaaatgcccatcaatgatagaccagataaagaaaatgtggtacatacaccatggaacactatgcagccacaaaaaggaatgagataatgtcctttgaagtgacatggatgaagct

SEQ ID NO: 42985 - DNA, 120 bp, synthetic construct
  source 1..120: mol_type = other DNA
ccagggcctctcggtggggcgggggtgcaaggggagggagagcatcaggactaatagctaatgcatgtggggcgtaaaacctagatgatgggttgataggtgccgcaaaccaccatggca

SEQ ID NO: 42986 - DNA, 120 bp, synthetic construct; identical to SEQ ID NO: 12204
  source 1..120: mol_type = other DNA

SEQ ID NO: 42987 - DNA, 120 bp, synthetic construct
  source 1..120: mol_type = other DNA
gaactgggaacatgccaacagttagtgccctcagagcttgggagggtgttcaggaagcagggaccctgtcctcccacactccttggctttttaaataaaagaattgctgccattctgtga

SEQ ID NO: 42988 - DNA, 120 bp, synthetic construct
  source 1..120: mol_type = other DNA
ggccgggctaggaacacagaagaatcggtggacacagggttatctctgcaccaaaacaactggccagggtggggtggttacatataactgggctgtagctttccaggctggctggttcac

SEQ ID NO: 42989 - DNA, 120 bp, synthetic construct; identical to SEQ ID NO: 12205
  source 1..120: mol_type = other DNA

SEQ ID NO: 42990 - DNA, 120 bp, synthetic construct
  source 1..120: mol_type = other DNA
tgtggttgggggtgggagggtactgtcttagaaaaataaagtgaaaacttgtaggtaaaaatatacgtgcaagttaatttcatctttctttgtcatgccaaaaaaatggaaaagtcacac

SEQ ID NO: 42991 - DNA, 120 bp, synthetic construct
  source 1..120: mol_type = other DNA
tgtaaatattgttgaataaaacaacattttattggaagtatttttcatggctatctttccagatcaatatatatcaatatattgttatatatatttccagatcaatatatattgttaggt

SEQ ID NO: 42992 - DNA, 120 bp, synthetic construct
  source 1..120: mol_type = other DNA
gttgaatatgttatatacataatatatattgatctggagatatgtataacaatatattgatctggaaaaatatccatgaaaatattgttcagtaaaatattgttttactcaacattttga

SEQ ID NO: 42993 - DNA, 120 bp, synthetic construct; identical to SEQ ID NO: 12206
  source 1..120: mol_type = other DNA

SEQ ID NO: 42994 - DNA, 120 bp, synthetic construct
  source 1..120: mol_type = other DNA
aaaaccattgcactgacattctgggacataagttctgtgcacatttttgatttgtttatttaggatggattcctacaaatggaaatagtgacttaaaagctgtgaatatttttgaatgtt

SEQ ID NO: 42995 - DNA, 120 bp, synthetic construct
  source 1..120: mol_type = other DNA
tttctctgaatatccctcctaatattctctccatgttagaatagggctcatatttgaggacttttgactctccagatccttctgtgatttctgctcagggattctgtttctggaatttgg

SEQ ID NO: 42996 - DNA, 120 bp, synthetic construct
  source 1..120: mol_type = other DNA
cactcgagtgtacaggttaataacgcttccatgcttccagccacttcattcatacaggtaatttcatatgatgaagtggttgaaggcagtgaaagtgaaggtgagatttcaagagaaata

SEQ ID NO: 42997 - DNA, 120 bp, synthetic construct; identical to SEQ ID NO: 12207
  source 1..120: mol_type = other DNA

SEQ ID NO: 42998 - DNA, 120 bp, synthetic construct
  source 1..120: mol_type = other DNA
catagatttatcataattcatgcagctactttattatatttgaatatttagcttattttcaatttttcacttttaagctgaatatttttatctctgaatatttctatatattgctgacta

SEQ ID NO: 42999 - DNA, 120 bp, synthetic construct
  source 1..120: mol_type = other DNA
tgacacttagtggggattgctaaatgtccctagtgagtgaatgcacctggccaaagtactcttcagaactttgcaccagtatttattctaagcagcagggtatgaaactttacatttctg

SEQ ID NO: 43000 - DNA, 120 bp, synthetic construct
  source 1..120: mol_type = other DNA
gagtaagttaacctctttaactgtaaagctcctatcattttagaagcaaattataatgatttagtattcccatgaatgaaacaaatgccacagtaagcaatttttagcaaatggtctttt

SEQ ID NO: 43001 - DNA, 120 bp, synthetic construct
  source 1..120: mol_type = other DNA
ttttacagtttaatctcgagtgtacttcagattattcaaggcatttaatatatcttaaatatatatgcatctcctaatatttcaaatgagctccgaatcataacttgtagggacagaaac

SEQ ID NO: 43002 - DNA, 120 bp, synthetic construct; identical to SEQ ID NO: 12208
  source 1..120: mol_type = other DNA

SEQ ID NO: 43003 - DNA, 120 bp, synthetic construct
  source 1..120: mol_type = other DNA
ttttgtttacaacaatgcctgacatccaagactatagtctggagctggtgattcaaattcctatttcgttggttaaaagtagagcagtggtgtctttttcttacatctgtttttctgtca

SEQ ID NO: 43004 - DNA, 120 bp, synthetic construct
  source 1..120: mol_type = other DNA
aattttctaattcttagatccctgattttcagaagtttgtagataccaataactttataagaggagagctataatttaaataaatttaattaaaactatctgctaattaaaatgtttagg

SEQ ID NO: 43005 - DNA, 120 bp, synthetic construct; identical to SEQ ID NO: 12209
  source 1..120: mol_type = other DNA

SEQ ID NO: 43006 - DNA, 120 bp, synthetic construct
  source 1..120: mol_type = other DNA
ccaatgacataaaaatccattcatgctgaaaagtattttctgcaattatataataaagcagcattgaacttataattattgaaacacaataaaaagagaccttgattaaagatgaaaata

SEQ ID NO: 43007 - DNA, 120 bp, synthetic construct
  source 1..120: mol_type = other DNA
atacatattggattcacttaaaggtatatttgatactttttccccacctcagtgttactggtaggttgaaaattcttgccctctctttacatacttctgccacatttcccatgaagaaga

SEQ ID NO: 43008 - DNA, 120 bp, synthetic construct
  source 1..120: mol_type = other DNA
taccatatttcccatgaagagtacttacattatgaaaggcaaacacttaaaaaaaatgatgtaacatatatcttagacctgaggtatactttgagtatgcaatagtgaactgactgctgg

SEQ ID NO: 43009 - DNA, 120 bp, synthetic construct; identical to SEQ ID NO: 12210
  source 1..120: mol_type = other DNA

SEQ ID NO: 43010 - DNA, 120 bp, synthetic construct
  source 1..120: mol_type = other DNA
cattggggtgtctttgacagtaatgtgaacattcaccagccagtctcaaatacaggatttgagggaagaatcaacaattgctggcaaccctatatattcagaaaaaaactgaataaaata

SEQ ID NO: 43011 - DNA, 120 bp, synthetic construct
  source 1..120: mol_type = other DNA
tagaagttgtaaccattgttttcaagtgtgttgaaatgtttgttttaatcataaggcaggtcttgccaatcatatgtgtatccaatccccaaccctccagataaaattttttagcttaaa

SEQ ID NO: 43012 - DNA, 120 bp, synthetic construct
  source 1..120: mol_type = other DNA
atgccactgaaacatttctctgtaggcgatttcctctggtttttcctccctgtgtacaatgaatagaagtcttttgctatggaaatgatggaataacagtttcaaataagactgtcaatg

SEQ ID NO: 43013 - DNA, 120 bp, synthetic construct; identical to SEQ ID NO: 12211
  source 1..120: mol_type = other DNA

SEQ ID NO: 43014 - DNA, 120 bp, synthetic construct
  source 1..120: mol_type = other DNA
tattatttttatctggattttttatttttcattcagaatatgtttcagatgttttaaaatgtacactttcacacagtgaaaataaaggtagaggtgaataacttactatgtgtcaaacaa

SEQ ID NO: 43015 - DNA, 120 bp, synthetic construct
  source 1..120: mol_type = other DNA
ggcagaaccaaacttaactacatagtaagactaaaaccctctttagtaagaaaactaaagattttataaagaacttgtaattttttttcttatcaaaacagttatacaaagttacccatg

SEQ ID NO: 43016 - DNA, 120 bp, synthetic construct
  source 1..120: mol_type = other DNA
tgataaaatagtgccaattatggttttacagaagatagagaaattcagttatagttgtatgctggtcttttttaacgactgtaagaacgagaatgaacccattgaagccttctgtgatta

SEQ ID NO: 43017 - DNA, 120 bp, synthetic construct
  source 1..120: mol_type = other DNA
aacattgtgacgaattagagtaatcaatcagggttcagccagagatgcagaaccagtggagatatgtatatattaaggcatttattatataggtttgcttaatgagattgtgagggctgg

SEQ ID NO: 43018 - DNA, 120 bp, synthetic construct; identical to SEQ ID NO: 12212
  source 1..120: mol_type = other DNA

SEQ ID NO: 43019 - DNA, 120 bp, synthetic construct
  source 1..120: mol_type = other DNA
aggggagggtattgtacggggtgttagagggctgttatttaggcactgtgaccttaagctttgtggctacggctgtggaagcccctcatagaccccttcagcatgagaaactttaaaaat

SEQ ID NO: 43020 - DNA, 120 bp, synthetic construct
  source 1..120: mol_type = other DNA
tttttttttttttttgcatttctgtcctggaagggctaactaagcctggcctggcctgtcagtaccagtcgtttctcttaccacgtaacatttttagactttcttttcacagtgaccaac

SEQ ID NO: 43021 - DNA, 120 bp, synthetic construct
  source 1..120: mol_type = other DNA
taaaaactccatcatctgaggatctattagttacctgatagagtaatttggatagacatacggatgattttaactatgctagaagaattcctctgaaccgcatgctctgtattataagaa

SEQ ID NO: 43022 - DNA, 120 bp, synthetic construct; identical to SEQ ID NO: 12213
  source 1..120: mol_type = other DNA

SEQ ID NO: 43023 - DNA, 120 bp, synthetic construct
  source 1..120: mol_type = other DNA
acgccattctcctgcctcagcctcccaagtagctgggactacaggcacccgccaccacgctcagctaattttttattttattttatttttagtagagatggggtttcaccgtgttagcca

SEQ ID NO: 43024 - DNA, 120 bp, synthetic construct
  source 1..120: mol_type = other DNA
gcccagccacatctgggtctattttaatattcatttgaaaattagatgttccaagcacttacgaatgggattatttgaatgctcataatgggagtagtttgtcagcacagtttttatggg

SEQ ID NO: 43025 - DNA, 120 bp, synthetic construct; identical to SEQ ID NO: 12214
  source 1..120: mol_type = other DNA

SEQ ID NO: 43026 - DNA, 120 bp, synthetic construct
  source 1..120: mol_type = other DNA
catacgcacctcttagactgaaaaagcagtgcttgcaataattctagactgtgctgaaaagagtcattttatctttgagtatttttatagctcttaaggtctcaagattattcttgcagg

SEQ ID NO: 43027 - DNA, 120 bp, synthetic construct
  source 1..120: mol_type = other DNA
ttaaattttatatagtcttttgaaggaggtttccatttaatagcaaaatacttaagctagagtgttttaatggcaatctgatctacagattgaaaaatttctactgattaacttttaatt

SEQ ID NO: 43028 - DNA, 120 bp, synthetic construct
  source 1..120: mol_type = other DNA
cattatgtatgtgttttcctttatatttttgaacatattttatatttataatagttgctgtaaagtcctcgtctgctagttgtaggatctgggccatctttgcattgatttgtattgcct

SEQ ID NO: 43029 - DNA, 120 bp, synthetic construct
  source 1..120: mol_type = other DNA
attggatattgggaatgatatgtagtagaggctctgaatttcaagtttttttctgaagagtgattttggttttgcaggcagttaaccttgttgggttgaaacttcagttttctctctttt

SEQ ID NO: 43030 - DNA, 120 bp, synthetic construct; identical to SEQ ID NO: 12215
  source 1..120: mol_type = other DNA

SEQ ID NO: 43031 - DNA, 120 bp, synthetic construct
  source 1..120: mol_type = other DNA
cacctaccaatcacgcaaggtgctatttgtcttttgagagatctacttttcaatttcttcctgcttttggtccaagtgcctttaagtcaattcttaaaaggattttttccaaattttata

SEQ ID NO: 43032 - DNA, 120 bp, synthetic construct
  source 1..120: mol_type = other DNA
tggtacagctaatacagagttttagtaagattattacttgcctaatctgagcactttatttccagtaatacaggctactattctgttggatgcttttactagatgtcacatttgttgttc

SEQ ID NO: 43033 - DNA, 120 bp, synthetic construct; identical to SEQ ID NO: 12216
  source 1..120: mol_type = other DNA

SEQ ID NO: 43034 - DNA, 120 bp, synthetic construct
  source 1..120: mol_type = other DNA
tgtggtggtgggcgcctgtcgtcccagctactcgggaggctgagacagcagaattgcttggaaccaggaggctgaggttacagtgagctgagactgtgccactgcattccagcctgggtg

SEQ ID NO: 43035 - DNA, 120 bp, synthetic construct
  source 1..120: mol_type = other DNA
acaattaatgtttacgtgacttcttaatatataatccatgcacccataaatagtctagacacaaaccaatttgcttgaagaaaagaccaaaaaaaaaaaatgttagaggctcactgttct

SEQ ID NO: 43036 - DNA, 120 bp, synthetic construct
  source 1..120: mol_type = other DNA
ttattgtctgttttattacagatacttagaatagtgtttcaggttatttgcataatgattgaatcaacttaattgataattatatattttcttagttgaccttgacattttgtgttaaaa

SEQ ID NO: 43037 - DNA, 120 bp, synthetic construct
  source 1..120: mol_type = other DNA
attttaaaattgttcgtttttgtttagcagacatacattttactctgactgaatcttcaaaacattcgtttaactataattctaaataaaagtcataagaccaaagacatagaagacacg

SEQ ID NO: 43038 - DNA, 120 bp, synthetic construct; identical to SEQ ID NO: 12217
  source 1..120: mol_type = other DNA

SEQ ID NO: 43039 - DNA, 120 bp, synthetic construct
  source 1..120: mol_type = other DNA
aataatcattttaataggttcattaacaatcgttgtcaccgttattattgtcaaagttgtcaaaaaattttgaagtgtttatcccggggacactattctgaaatctacatgcattatctt

SEQ ID NO: 43040 - DNA, 120 bp, synthetic construct
  source 1..120: mol_type = other DNA
aacttgctaacatcttagaggtaatgagtggcagaggctggactcaaaattaaatctctctgtcccccaaatctatgctcttaatcactaataatgaaaaaaaaaaatccacaaaaaccc

SEQ ID NO: 43041 - DNA, 120 bp, synthetic construct
  source 1..120: mol_type = other DNA
attcaagcataagttagaggtcgaactgttagagtaaaatatttggccattatttcaggggacttcagagggctgaatttttcaaggaacatatttgcaataaggcaaaattctattgcc

SEQ ID NO: 43042 - DNA, 120 bp, synthetic construct; identical to SEQ ID NO: 12218
  source 1..120: mol_type = other DNA

SEQ ID NO: 43043 - DNA, 120 bp, synthetic construct
  source 1..120: mol_type = other DNA
tacatcactcatatataggattatgggatgcgtgcatttaaatatgaagtgaagaaatatacagtgccgtcttctggattctagtttagtaccgttcactttgtcctccatgctgtgaca

SEQ ID NO: 43044 - DNA, 120 bp, synthetic construct
  source 1..120: mol_type = other DNA
aaggaagagttaaaggtgtgtaattgtgacttattctgtcttcattactagactctgagattggaaccaagtctttgatttatgtatattcagcatctagcagagtgctgaaaccatagt

SEQ ID NO: 43045 - DNA, 120 bp, synthetic construct; identical to SEQ ID NO: 12219
  source 1..120: mol_type = other DNA

SEQ ID NO: 43046 - DNA, 120 bp, synthetic construct
  source 1..120: mol_type = other DNA
tacccttgaattagagtcaacaattattatagttagccagatttgctttcctttcctcctgtctttcttttctctgtgtgtgtgtatgcagtcagacatccacagtacagttacatagca

SEQ ID NO: 43047 - DNA, 120 bp, synthetic construct
  source 1..120: mol_type = other DNA
tatttttatgcctttcagtctcttttaatgtagaacaaattctcagcttatttttttcctgtagcatcgagtttttaaaaaatccatgccagttatagaatgcctcatgttctggatgtg

SEQ ID NO: 43048 - DNA, 120 bp, synthetic construct
  source 1..120: mol_type = other DNA
ccatgaacttgcagctaggtataaggctgtgctgtccaaatcagtaactgctagacacatgtggcaatttggtatttgtatataactcgaactagatgaacacaatttttagttttgttt

SEQ ID NO: 43049 - DNA, 120 bp, synthetic construct; identical to SEQ ID NO: 12220
  source 1..120: mol_type = other DNA

SEQ ID NO: 43050 - DNA, 120 bp, synthetic construct
  source 1..120: mol_type = other DNA
tctggtctgctggtttattatctcagcatattttcccattgtgaatttccactcctattttatcgaagtcgtaacttgcatcctgaggacagttgaaattgtttttatgtttaagtagcc

SEQ ID NO: 43051 - DNA, 120 bp, synthetic construct
  source 1..120: mol_type = other DNA
ccagacctccaattattaaagagttcttaaattcacagagtaaaccctacttgaccatagtgtatgattcttttgaaattctactagatttaattaattaatatgttattcagaattatt

SEQ ID NO: 43052 - DNA, 120 bp, synthetic construct
  source 1..120: mol_type = other DNA
gggctatacggaaacaggtgatgtgctgtagtttgccaatccttggtctagactagtctgccatgaaaggtagctgttctttgaaactttatcacagctcacctgtgaaaccagctggtc

SEQ ID NO: 43053 - DNA, 120 bp, synthetic construct; identical to SEQ ID NO: 12221
  source 1..120: mol_type = other DNA

SEQ ID NO: 43054 - DNA, 120 bp, synthetic construct
  source 1..120: mol_type = other DNA
cacttttcaactctctttgctgttctatttttaggacatgaaaaccgcaagttctttcattttagtcattcttttctttattaatcagggcacttaaggctataatattttgcctttgaa

SEQ ID NO: 43055 - DNA, 120 bp, synthetic construct
  source 1..120: mol_type = other DNA
aaattatcttgctataaatgttgaatgaagataagcacagatgggaacaaacggttctacttatatatagtacacaactgatctgtgctgtcaaaagtctgcaaggtggtgaaccttgtg

SEQ ID NO: 43056 - DNA, 120 bp, synthetic construct
  source 1..120: mol_type = other DNA
aaggatagggataggaagagagcactaaggaggattttgagataccgtaatgttttctttcttgagctgggtgttggtcatgcaggaatgttcacttgtgaaaatcatggaactgttttc

SEQ ID NO: 43057 - DNA, 120 bp, synthetic construct
  source 1..120: mol_type = other DNA
attgttcagtgcttattattgaccagtctatgttcagaactactgtatgactggtgtgccagtgcaacgttagctttgctgctttgtaccaagtttgcttaggctgaggatcagtcgttc

SEQ ID NO: 43058 - DNA, 120 bp, synthetic construct
  source 1..120: mol_type = other DNA
aatgtagatatgtgaaaaggctctgctgtttgttttactcgactcattgcattttttgagtagttctttaaaatgataactgagatgggcaaggtgatgggggcttgtaattctagctat

SEQ ID NO: 43059 - DNA, 120 bp, synthetic construct; identical to SEQ ID NO: 12222
  source 1..120: mol_type = other DNA

SEQ ID NO: 43060 - DNA, 120 bp, synthetic construct
  source 1..120: mol_type = other DNA
gaatcacgcacagcccgagttatccggagcacagtcttccttttcaatagatttataaggtactttttcttttgtaggcgtagttgtttgatacttcattttcatttctttattggatat

SEQ ID NO: 43061 - DNA, 120 bp, synthetic construct
  source 1..120: mol_type = other DNA
ttaaaaagaatatggttttggaaattggatgtgtaatttgtaattgataggtatagattaggatgatttaatgactacttttccttgtactgaacctatttagttcctttttcttttcct

SEQ ID NO: 43062 - DNA, 120 bp, synthetic construct; identical to SEQ ID NO: 12223
  source 1..120: mol_type = other DNA

SEQ ID NO: 43063 - DNA, 120 bp, synthetic construct
  source 1..120: mol_type = other DNA
taattctcataagaactgttcttccacctaataattgcatatctatagactaaattaaacttgtgaccaacatgttttctggtaacattataccaacatatgctctgacttgcgagagat

SEQ ID NO: 43064 - DNA, 120 bp, synthetic construct
  source 1..120: mol_type = other DNA
ttctgagcttttgttatgtttagagatattcatttcctgtcatcataagttgcaaacctttttaccagtttattggtttgggaaagaatttgaaaggatttttgtagtagttgaattggt

SEQ ID NO: 43065 - DNA, 120 bp, synthetic construct; identical to SEQ ID NO: 12224
  source 1..120: mol_type = other DNA

SEQ ID NO: 43066 - DNA, 120 bp, synthetic construct
  source 1..120: mol_type = other DNA
gcattataaaactagtcaagaagttctacttggaaattataacttattttggaaacaaacttagccttttcatatcttgttcttcccactagtttttctttactagagctgatcaatcct

SEQ ID NO: 43067 - DNA, 120 bp, synthetic construct
  source 1..120: mol_type = other DNA
ttcagtggcactgcagagataccatttggtaggttaatttaatactagaccaaaaactggttatttgttttgaaaactattttgtgggaaagctactatctcagtgttatagacataatg

SEQ ID NO: 43068 - DNA, 120 bp, synthetic construct
  source 1..120: mol_type = other DNA
acatctgctctttggaagaataattttaaaatttaactattacttttctgattagatagagtaccaagtatgagaaatttggattctgtgataaaaaatgttgaattatacactttctgc

SEQ ID NO: 43069 - DNA, 120 bp, synthetic construct
  source 1..120: mol_type = other DNA
gattcccagtctcattttttctattttctttcttcttgccttgctctcttttttctaactttataagatgaatgctgatattattgagacctttgttgacataaacatttagtgttatac

SEQ ID NO: 43070 - DNA, 120 bp, synthetic construct; identical to SEQ ID NO: 12225
  source 1..120: mol_type = other DNA

SEQ ID NO: 43071 - DNA, 120 bp, synthetic construct
  source 1..120: mol_type = other DNA
ttacaggtgtgcatcaccactcctggctaatttttttatttttagtagagacgtggtttcaccatgttgcccaggctggtctcgaacacctgatctcaagtgatccacccacctcggcct

SEQ ID NO: 43072 - DNA, 120 bp, synthetic construct
  source 1..120: mol_type = other DNA
atttcctgagtatttttctgttactaatttctaatttaatgccattatggtcagagaatatactttgtgagactgatcgctttgaaatttattaagacttgttttatggcttagaataaa

SEQ ID NO: 43073 - DNA, 120 bp, synthetic construct; identical to SEQ ID NO: 12226
  source 1..120: mol_type = other DNA

SEQ ID NO: 43074 - DNA, 120 bp, synthetic construct
  source 1..120: mol_type = other DNA
tgaacatagcccctctagtttccccccaccccacctttggtattagcatcctatgacctttaacctctttgtatctttacatttaaagtgcatttcttttaagcaataagtagttgggtc

SEQ ID NO: 43075 - DNA, 120 bp, synthetic construct
  source 1..120: mol_type = other DNA
gtcccacctagtaataggataaagaggagatacacacacacacgccaccaccatcaccacccttacacgggagcgtgagagcatatgggttacaaaaaataaaccacctaagaacacttt

SEQ ID NO: 43076 - DNA, 120 bp, synthetic construct
  source 1..120: mol_type = other DNA
ggttacttacggattaaagctgtaatactttatttgtattttagtggttacttacggtttatagcatgtatctttaatttgccacagtctacctttaattgatattttgtcactctatga

SEQ ID NO: 43077 - DNA, 120 bp, synthetic construct
  source 1..120: mol_type = other DNA
taaagagatttaaataacaaaaacatctatatttgcacatgtagttatcatttctagtgctctttttgtgtgtgtgtgtggatctgtattttcttcaggtattgttttcttctgcatgaa

SEQ ID NO: 43078 - DNA, 120 bp, synthetic construct; identical to SEQ ID NO: 12227
  source 1..120: mol_type = other DNA

SEQ ID NO: 43079 - DNA, 120 bp, synthetic construct
  source 1..120: mol_type = other DNA
ttgagctttttcctgggatgctgttaagttacctaggaagagtttgatttgtttggatcttgcctttagaattttctgggtgggaagagcagtgtttactctggggcaagtgattcccca

SEQ ID NO: 43080 - DNA, 120 bp, synthetic construct
  source 1..120: mol_type = other DNA
ctctaatcctttcaggtgattctgttccctgccttgagtagttttctcatgacattctcatcagtgttctgctgaatatttgagggggaccttctgtaggtctccagggttccctcttgt

SEQ ID NO: 43081 - DNA, 120 bp, synthetic construct
  source 1..120: mol_type = other DNA
gcctggaaattctcctaggcagtaaactgaggcagctgtaggactcacctgatttgtttccattcctcaggaattcctgtcctttattcattgctctccagtgtcttgaaagttttcgtg

SEQ ID NO: 43082 - DNA, 120 bp, synthetic construct; identical to SEQ ID NO: 12228
  source 1..120: mol_type = other DNA

SEQ ID NO: 43083 - DNA, 120 bp, synthetic construct
  source 1..120: mol_type = other DNA
taacaatgtctctcccttgtgatcacctgagaagtgccatggataaacacaattaacctttctttctcttgtgcttaactgaccttaatcatgtattagctttttcaaaaactaaatttt

SEQ ID NO: 43084 - DNA, 120 bp, synthetic construct
  source 1..120: mol_type = other DNA
gtaatcatgtttctattgcatatatatataaacttgcaagtttcacttaaatgcacaggagtattacctattataagtcccaaatttaggctgggcacggtagtgactcgcacctataat

SEQ ID NO: 43085 - DNA, 120 bp, synthetic construct; identical to SEQ ID NO: 12229
  source 1..120: mol_type = other DNA

SEQ ID NO: 43086 - DNA, 120 bp, synthetic construct
  source 1..120: mol_type = other DNA
ttagctggatgtggtgggcatgagcctgtaatctcagctgttctggaggctaaggctcgagaatcacttaaaccctgaactcaggaggcagaggttgcagtgagccaagatcataccact

SEQ ID NO: 43087 - DNA, 120 bp, synthetic construct
  source 1..120: mol_type = other DNA
ctgagcattttaaagagcatatgcttttcagtaaaatattttattcattttatcacattcatgaaagcaccgtctttaaaatctcagtatttttacaatattttcacccatgtatttttc

SEQ ID NO: 43088 - DNA, 120 bp, synthetic construct
  source 1..120: mol_type = other DNA
ttggaaagaaagtcaagatagttaatcatttgtgtttttcttatgtggtttatgttctgtgatccttctgttctctctctcccaggtcacggtggttgtggtagtactgtgtgtgtatgt

SEQ ID NO: 43089 - DNA, 120 bp, synthetic construct; identical to SEQ ID NO: 12230
  source 1..120: mol_type = other DNA

SEQ ID NO: 43090 - DNA, 120 bp, synthetic construct
  source 1..120: mol_type = other DNA
aattaacaattgtatatattacattatatatgtaaagtatatattatacattatataatatagtataaactatatactatagagtatattatacattaataatatactatatcagcatat

SEQ ID NO: 43091 - DNA, 120 bp, synthetic construct
  source 1..120: mol_type = other DNA
atttttcttctggatatattaataaatatattcttgaagtagatgagagaggggaggaacctgtatttgttaggtaataatatagtttaatctttaaattacaaaatgtagccacaaggt

SEQ ID NO: 43092 - DNA, 120 bp, synthetic construct
  source 1..120: mol_type = other DNA
catctttgtattagaggaaagccctgaaacataacataattaataattttagaagtttggacaacatttcttctgacaagagacttctcttacaaagtaattgaatagttacattcctca

SEQ ID NO: 43093 - DNA, 120 bp, synthetic construct
  source 1..120: mol_type = other DNA
actgaatcgtttttgaattttattcacttattaacagttgagtttgaatttgttatacatttatttatgtttaattggagttaatggggtaaaatgtttagaaaaatacttcactgcatg

SEQ ID NO: 43094 - DNA, 120 bp, synthetic construct; identical to SEQ ID NO: 12231
  source 1..120: mol_type = other DNA

SEQ ID NO: 43095 - DNA, 120 bp, synthetic construct
  source 1..120: mol_type = other DNA
ccagcatagtcagaaaattagtcagaaacatttgcttgaaataaaatgttaccatacagttttgctaatacagagagcaggaatggaagtgtaatatttctatgcattaacaacttgtca

SEQ ID NO: 43096 - DNA, 120 bp, synthetic construct
  source 1..120: mol_type = other DNA
agttcttttcagatacattcaaagctatgagtttaaaaactgagaatctcagtaagctcaacaaatgaacacatttacatgccagtaatatatctttcttccaaggctagaaaatacttc

SEQ ID NO: 43097 - DNA, 120 bp, synthetic construct
  source 1..120: mol_type = other DNA
ttgaactcacaggaattaaacagaatggcaagctagggtccatgaaaacttaggaattcctttttgaagacaaaccacaaggaaatgtcagaattatgaatctgggaagatgaagcctga

SEQ ID NO: 43098 - DNA, 120 bp, synthetic construct; identical to SEQ ID NO: 12232
  source 1..120: mol_type = other DNA

SEQ ID NO: 43099 - DNA, 120 bp, synthetic construct
  source 1..120: mol_type = other DNA
aaattgtgaatcactgacaatagagaaatgtttatggtttattttaggggccttgatgctctcagcaagaaagcgaaggcttccacagtcgatttgcctatagagtccgtaagcctaagt

SEQ ID NO: 43100 - DNA, 120 bp, synthetic construct
  source 1..120: mol_type = other DNA
gaagaatcggcaaaatctcttccaggaagaggtccgtttctatcaacactcatttctcttctgttattctcttgtaaaaacagcttcttggttgggaaaattttccatctattttgacca

SEQ ID NO: 43101 - DNA, 120 bp, synthetic construct; identical to SEQ ID NO: 12233
  source 1..120: mol_type = other DNA

SEQ ID NO: 43102 - DNA, 120 bp, synthetic construct
  source 1..120: mol_type = other DNA
ctaccggagtaggctgagctccaggaaccctacttggacagagcaaccctacccttctcctttgcatctattacatttccatgtatgattgtattgccccaaaagtttcactgctaaaaa

SEQ ID NO: 43103 - DNA, 120 bp, synthetic construct
  source 1..120: mol_type = other DNA
gttggagactacgagggttgatgggataaatcaggcttgttcagctggattcccattcttttcaatgcatcttgtatgcagaataatgatttttttctgaataaatacttagctttgtaa

SEQ ID NO: 43104 - DNA, 120 bp, synthetic construct
  source 1..120: mol_type = other DNA
ggtattctgctcactatctgggtgatgaaatcatttatacttcaaaccccagtgacacgcaatatacccacataacaaacctgcacatgtaacccccaaagcctaaaataaaagttgtga

SEQ ID NO: 43105 - DNA, 120 bp, synthetic construct; identical to SEQ ID NO: 12234
  source 1..120: mol_type = other DNA

SEQ ID NO: 43106 - DNA, 120 bp, synthetic construct
  source 1..120: mol_type = other DNA
acttctcatataagacaatctggatggggacttggaaatgttcttaggtccatggtatctcttaaattctgtgtgaaataagttaattggtttagatagtggtttatatagctctttatg

SEQ ID NO: 43107 - DNA, 120 bp, synthetic construct
  source 1..120: mol_type = other DNA
aaaatgcattacagcatttttgatttgctttaaaaatatcttttcatgagctttacctgatatactatatctttaagaataataataatgcctatctaagaataaggatctgctcttatg

SEQ ID NO: 43108 - DNA, 120 bp, synthetic construct
  source 1..120: mol_type = other DNA
tttcacatgcaaatgtgtgtcttcctgtcctttgaatgatcacagttttctttatgattagtagatgaaccttcagtcagacttctatttttaaatcaacttagcatttttagtctgtaa

SEQ ID NO: 43109 - DNA, 120 bp, synthetic construct; identical to SEQ ID NO: 12235
  source 1..120: mol_type = other DNA

SEQ ID NO: 43110 - DNA, 120 bp, synthetic construct
  source 1..120: mol_type = other DNA
gccaggaatttgagaccagcctggacaacatagcaagaccccatctctacaaaaaataaaataaaaatcaaacacaaaagcaaaaaaaatcacataatagctacagcaattttataacat

SEQ ID NO: 43111 - DNA, 120 bp, synthetic construct
  source 1..120: mol_type = other DNA
ggagaaagtcattcagggtgcagtctttgcagatgaggggcctttatatggatgtgtgttaaatatttcctttttgcttttggagttagttccgcaagggtccctcttaattccttacat

SEQ ID NO: 43112 - DNA, 120 bp, synthetic construct
  source 1..120: mol_type = other DNA
cctgtgggctctctgcaaacacagctcctcattatttttgacctcctgtagcttctacttgtctcttgtcaaaaactaaagggtctgagatttttaccctatttgcaagctagtaagtta

SEQ ID NO: 43113 - DNA, 120 bp, synthetic construct
  source 1..120: mol_type = other DNA
acctgcacatgcagctagttgagttacagaaaaggaatcctgagctcagggagtgtgagttagttacactggacagaaagcctgcctggcctttgctgtggatggagacatctctctctt

SEQ ID NO: 43114 - DNA, 120 bp, synthetic construct; identical to SEQ ID NO: 12236
  source 1..120: mol_type = other DNA

SEQ ID NO: 43115 - DNA, 120 bp, synthetic construct
  source 1..120: mol_type = other DNA
acagtttcctgaactttccatacacatcacacctctgggacgttgtctcaccttttccagaattgttgtatatccttcaagacccagttcacatgtcactgtcttttaaagttactcttg

SEQ ID NO: 43116 - DNA, 120 bp, synthetic construct
  source 1..120: mol_type = other DNA
tcgagaccagcctgaccaacatagtgaaaccctgtctctactaaaaatacaaaaaattagccgagcgtggtggcgggagcctgtaaccccagctactcaggaggctgaggcaggagaacc

SEQ ID NO: 43117 - DNA, 120 bp, synthetic construct; identical to SEQ ID NO: 12237
  source 1..120: mol_type = other DNA

SEQ ID NO: 43118 - DNA, 120 bp, synthetic construct
  source 1..120: mol_type = other DNA
tacctaagtatagaaaggagataatgcaaaaaaagttaaaaaaaaaaagaaaaaagaatgcatttttaatgggaagaatttagtcaaaatatttgaaaattctttacaatctaattaaat

SEQ ID NO: 43119 - DNA, 120 bp, synthetic construct
  source 1..120: mol_type = other DNA
agtttggaactttcagactaaaaggtgacatgcggctgccatttctgagaacaggaccagggatattgaggctttataggaatttggattcatcattttacccacagtaacgattgagat

SEQ ID NO: 43120 - DNA, 120 bp, synthetic construct
  source 1..120: mol_type = other DNA
gcagagactaaagtgtggtgatgtttttaacactacatcctaccttcttcacttggtataagatgaatttcttggataaactcgatgcttaagtaaagagttgcatcacctagcctggac

SEQ ID NO: 43121 - DNA, 120 bp, synthetic construct
  source 1..120: mol_type = other DNA
aggccagcctgggcaaccacctctaaattttaaaaaagaagaatttcatgtatgaatgtttgagggtagaaagtgttacgtgcagaaagaacattgttttttaggtaaatctagaaaata

SEQ ID NO: 43122 - DNA, 120 bp, synthetic construct; identical to SEQ ID NO: 12238
  source 1..120: mol_type = other DNA

SEQ ID NO: 43123 - DNA, 120 bp, synthetic construct
  source 1..120: mol_type = other DNA
tgtgattttaaaatggcttacctatttaaatagaacgagaaaggagctcttgaaggtggagcaatgtttctattgggatgtgttcagttggaaataacagaatacccaaacccaaactgg

SEQ ID NO: 43124 - DNA, 120 bp, synthetic construct
  source 1..120: mol_type = other DNA
gagtcatcttcctctagtgcggccttttcttgatggtctcagctgtctgctgtcagctcctagtactgcatactttctttctgacatgggaaaagtgaaagagggcttgttccagaagtt

SEQ ID NO: 43125 - DNA, 120 bp, synthetic construct; identical to SEQ ID NO: 12239
  source 1..120: mol_type = other DNA

SEQ ID NO: 43126 - DNA, 120 bp, synthetic construct
  source 1..120: mol_type = other DNA
ctacctagcactatgcttgaatagagtaggcagtcaataaatatttgcttgaattatttaataaatacgttacagagatttccattgacttttctgtagcagggtgcatttggctatcaa

SEQ ID NO: 43127 - DNA, 120 bp, synthetic construct
  source 1..120: mol_type = other DNA
tattacctgtaaaatggcaatagtcattcccctcataaggttgttgggtggcttaaatgttataatatatagaaaatgctcagcatcgcatattgttgttcttcttatcattattcccat

SEQ ID NO: 43128 - DNA, 120 bp, synthetic construct
  source 1..120: mol_type = other DNA
ctttacttagatttgttggatatagcaaagaatgttatggattagccaatagagcacatagaatcataattattgtaggtgtatactggttcttgttttcctcatcggaaaatggcagga

SEQ ID NO: 43129 - DNA, 120 bp, synthetic construct
  source 1..120: mol_type = other DNA
agatctcaatgacattcatatatggtaaaatttgtggttaatctctttacctccactccttctcttctccagtctttactcagacctcagggagctctcacacacttcttatgaactttc

SEQ ID NO: 43130 - DNA, 120 bp, synthetic construct; identical to SEQ ID NO: 12240
  source 1..120: mol_type = other DNA

SEQ ID NO: 43131 - DNA, 120 bp, synthetic construct
  source 1..120: mol_type = other DNA
atttatatattagtgcaaatgaagagaatctcttcccataatctacaaggtaattttagtgggagatggggtgtttccactggatagaattatgagagtttttttaatgtttttgagttc

SEQ ID NO: 43132 - DNA, 120 bp, synthetic construct
  source 1..120: mol_type = other DNA
tttttattgaattcattgtaatcataagatagccacatatacctaaatatatacttcagtttgtctggaaaagtctcagatctgcagcaataattggagtcctgtaagacatgtgtatct

SEQ ID NO: 43133 - DNA, 120 bp, synthetic construct
  source 1..120: mol_type = other DNA
cgaaataggtagaccatagattctctcctggggttatatgtgaaataagccactgtctttgtattttttcttcagtgtgtctattttgcacagagagaaaaccaagaaggtgggaataag

SEQ ID NO: 43134 - DNA, 120 bp, synthetic construct; identical to SEQ ID NO: 12241
  source 1..120: mol_type = other DNA

SEQ ID NO: 43135 - DNA, 120 bp, synthetic construct
  source 1..120: mol_type = other DNA
agtatggccaaaatgaatgtttgaagacttggaaagaatacagccattagccattatttctgcacattcaaaccaatttcccagtgtctcaaggaggcagatctccctaaatgccataaa

SEQ ID NO: 43136 - DNA, 120 bp, synthetic construct
  source 1..120: mol_type = other DNA
cagaaacgtatcgtataaacaagacacatcctttaaaatttcagcttggtgatagtctcattgtcccttactcttgcaagttcccaggtaggagtcctcagactccagtttacaagatcc

SEQ ID NO: 43137 - DNA, 120 bp, synthetic construct; identical to SEQ ID NO: 12242
  source 1..120: mol_type = other DNA

SEQ ID NO: 43138 - DNA, 120 bp, synthetic construct
  source 1..120: mol_type = other DNA
agtgaaggtaatttcttggaatttcttttaatctaaatttttctgtaagtctcagatttttttagtcttttgtgaaattttgagtccaagaattcaaagacattgaagcatgaagcctcc

SEQ ID NO: 43139 - DNA, 120 bp, synthetic construct
  source 1..120: mol_type = other DNA
taatctcataactttgggaggccaaggcagtgggatcacttgaggaagggagttggagaccatcctaggcaacataaagagaccctgtctctacaaaaagataaaagatcttaacttagt

SEQ ID NO: 43140 - DNA, 120 bp, synthetic construct
  source 1..120: mol_type = other DNA
cataccaagttgccattgcacttcgaagatgacagtggtgctctgagacatctcataatgaaagccactacagatactgatggcatggttttccgttttatttttggaaaggcattaact

SEQ ID NO: 43141 - DNA, 120 bp, synthetic construct; identical to SEQ ID NO: 12243
  source 1..120: mol_type = other DNA

SEQ ID NO: 43142 - DNA, 120 bp, synthetic construct
  source 1..120: mol_type = other DNA
tttggacttccgtgcttttttattgtcgtctattttttctctaagagtgaaagtgtagccacagaacatctcttcacatcctaacttcacatcctaacttccattctcttcacatcctaa

SEQ ID NO: 43143 - DNA, 120 bp, synthetic construct
  source 1..120: mol_type = other DNA
attcttcttccaccttattttggaataagaaaatgtacctttttgacctggggaagcagtcccactaatatcaatcttcctcaagctctctgtttctatctcagtcccttatcaagatat

SEQ ID NO: 43144 - DNA, 120 bp, synthetic construct
  source 1..120: mol_type = other DNA
atcaatgttcttttatagcagatgttttcaattaattctacattgtgggcctctatccttggtagtaactataaaccttcatcagactttagcagatgtacacttctgtgctgaggtaat

SEQ ID NO: 43145 - DNA, 120 bp, synthetic construct
  source 1..120: mol_type = other DNA
tatttctctgcatactttttcattactttagaaactcacataactgatatcttcttaactgactggatgaattataataattcacagactccatttatctgtaaaatgtattggtaccca

SEQ ID NO: 43146 - DNA, 120 bp, synthetic construct; identical to SEQ ID NO: 12244
  source 1..120: mol_type = other DNA

SEQ ID NO: 43147 - DNA, 120 bp, synthetic construct
  source 1..120: mol_type = other DNA
gatatcaatgtcactgatactgcttttgtaaaatcagggaagtttccttagttttttggctttggaatacggtcatgtgtcacttactcatgggaacagttctaaggaatacatcttgca

SEQ ID NO: 43148 - DNA, 120 bp, synthetic construct
  source 1..120: mol_type = other DNA
ggatggcctactgcgcggctacgctatactggatggcctactgcgcgtctacgctatacgggatggcctactgctcctgggctacataacctatggctgtacatttgtacagcaatatgt

SEQ ID NO: 43149 - DNA, 120 bp, synthetic construct
  source 1..120: mol_type = other DNA
ctgattcattgttgaccaaatcattgttatgcagcatatgaagtagtgtagaaattacttatttattgaatatgtgcgaaaaagcttttggtctttgacatttcaatattactcatgatt

SEQ ID NO: 43150 - DNA, 120 bp, synthetic construct; identical to SEQ ID NO: 12245
  source 1..120: mol_type = other DNA

SEQ ID NO: 43151 - DNA, 120 bp, synthetic construct
  source 1..120: mol_type = other DNA
tcataaactcctgggctcaagtgatcctcccaccttggctcccaaagtactgggattataggtatgagccactacgcctggtgtaatgcccttttcttaattttgtccttttttcctttt

SEQ ID NO: 43152 - DNA, 120 bp, synthetic construct
  source 1..120: mol_type = other DNA
ttttattgcgatttatttttttctgttttactgatgtttatttgatgttcttttcctctatttcaaaagacgtatttaccatttttcacccaattgcttagcaattaaagtgtttattta

SEQ ID NO: 43153 - DNA, 120 bp, synthetic construct; identical to SEQ ID NO: 12246
  source 1..120: mol_type = other DNA

SEQ ID NO: 43154 - DNA, 120 bp, synthetic construct
  source 1..120: mol_type = other DNA
atatatataattttagatagataatatgataatgatatatgttttcattttagatggataatatgataatgatatatattatatatatacctatataattttagataatacaatagttta

SEQ ID NO: 43155 - DNA, 120 bp, synthetic construct
  source 1..120: mol_type = other DNA
aaactttatcatgtcctttttcccagttgctattgttctaaattgggaacagatattcttacagaataaaattagttctgcttagaacttagtacttctcattcctctgctatattccac

SEQ ID NO: 43156 - DNA, 120 bp, synthetic construct
  source 1..120: mol_type = other DNA
agccagaggagagcctgagtaatgagtgtattagctcttaatctctgtacaaatgtcacagaggcgctatacacaaaaaagctcttctcatgaagttggcgtcttttctgtgtgtttctt

SEQ ID NO: 43157 - DNA, 120 bp, synthetic construct; identical to SEQ ID NO: 12247
  source 1..120: mol_type = other DNA

SEQ ID NO: 43158 - DNA, 120 bp, synthetic construct
  source 1..120: mol_type = other DNA
gagtagctgggattacaggcgcccaccaccatgcctggctaattttttgcatttttattagagatggggtttcactgtgttggtcaggctggtcttaaattcctgacctcatgatccgcc

SEQ ID NO: 43159 - DNA, 120 bp, synthetic construct
  source 1..120: mol_type = other DNA
aaacatcttgccatcctcttgtaagcaattatactgtttctgaataaacttaggggtataaaagtagaaaatatttaccatgcttgctttgaaagaatttaatgattttgaaaaattaaa

SEQ ID NO: 43160 - DNA, 120 bp, synthetic construct
  source 1..120: mol_type = other DNA
aatcagtttctttactgcagaatttcaggtctttaatatacattgtgaatctctaaatccacggaaatgatataagaaaataaaagggtttcaaagttagtggctattggtcttctcatc

SEQ ID NO: 43161 - DNA, 120 bp, synthetic construct; identical to SEQ ID NO: 12248
  source 1..120: mol_type = other DNA

SEQ ID NO: 43162 - DNA, 120 bp, synthetic construct
  source 1..120: mol_type = other DNA
atgtacgtgtatgtatgtttgcataagtttttagatgtaacagaggatattttgttcttgatccaatattttagggctgcatattagcttatctcaattttcgagctagaaaatcacata

SEQ ID NO: 43163 - DNA, 120 bp, synthetic construct
  source 1..120: mol_type = other DNA
cgactggttgatcagcagattggaaagactggaagcttcttcaggtatgttttctagttttttccttgttgtgatagatcactcctatttttctttgcttcgtatcctttaagacaaaaa

SEQ ID NO: 43164 - DNA, 120 bp, synthetic construct
  source 1..120: mol_type = other DNA
ggtcactgcactccaacatggacaatatattgagaccccatctttaaaaaacaaaaagaaaaaactctgatgtttggtgtaatataagtgttttccttttaaattatgttaagtattttt

SEQ ID NO: 43165 - DNA, 120 bp, synthetic construct
  source 1..120: mol_type = other DNA
gaattctcattctttttcaaattgattactgctagtctattctataaataagaagatcagtttggagttctcattgttttccttgtattcaaaagattatttggatagattggggagaca

SEQ ID NO: 43166 - DNA, 120 bp, synthetic construct; identical to SEQ ID NO: 12249
  source 1..120: mol_type = other DNA

SEQ ID NO: 43167 - DNA, 120 bp, synthetic construct
  source 1..120: mol_type = other DNA
tgacacccaaatgaatctactgctcttccatctgtttgcacagtatttcattatttgcctttctttatcactaatgccctcttatgttacttatttttcctctcagtttccttcattagt

SEQ ID NO: 43168 - DNA, 120 bp, synthetic construct
  source 1..120: mol_type = other DNA
ttaaaattcactcaaaaaataccactgtccatacaaaatagttctgagacttttgcatgataaagacccactcagggacaggtttgttggaattgaatagagacagagaaacaaccatga

SEQ ID NO: 43169 - DNA, 120 bp, synthetic construct; identical to SEQ ID NO: 12250
  source 1..120: mol_type = other DNA

SEQ ID NO: 43170 - DNA, 120 bp, synthetic construct
  source 1..120: mol_type = other DNA
attgtctggggtaaatacctgagattcattgtcttgcaccaagaaaattaaggacatggacacacacacaaggagtgagtttaggagcagaggtttaataagcaaaagaaagagaaagga

SEQ ID NO: 43171 - DNA, 120 bp, synthetic construct
  source 1..120: mol_type = other DNA
ttgagaaatctggcctgcaccagagtgcaccagattttataggcaggcttgaggaagcagtgtctgatttgcatagggcccaaagattggttggactcggtatgacatttgcataggaag

SEQ ID NO: 43172 - DNA, 120 bp, synthetic construct
  source 1..120: mol_type = other DNA
gccgccattttgaacatgcctagtcccaggtggtcttttcctattggcacaactgctggcattcacccgtggaagcttccaacttgcttctctatgtctgcagctcgattttgcaggctg

SEQ ID NO: 43173 - DNA, 120 bp, synthetic construct; identical to SEQ ID NO: 12251
  source 1..120: mol_type = other DNA

SEQ ID NO: 43174 - DNA, 120 bp, synthetic construct
  source 1..120: mol_type = other DNA
atcctttaaggtcaaccaagtacagtccagtgttttcagagtcttcagttttgtcagttacaggcacagtttcatcagatacaaattattatttgctgttgtctttttccagtcaatctg

SEQ ID NO: 43175 - DNA, 120 bp, synthetic construct
  source 1..120: mol_type = other DNA
agaaactgaggcaaagaacatttaaatgactgactcaaaatcttagaaaaattattgttactgccaaggttaaaactcagctccctagcatcagacttgcaatatgaccatgatactttg

SEQ ID NO: 43176 - DNA, 120 bp, synthetic construct
  source 1..120: mol_type = other DNA
aactgttttttctccagaggaagtggtgttgcttagtttttagaggcagtaacaatgatgagatgcacatgtgtatgtatataacttatttcaattgtgctttgctctttacaaagtgca

SEQ ID NO: 43177 - DNA, 120 bp, synthetic construct; identical to SEQ ID NO: 12252
  source 1..120: mol_type = other DNA

SEQ ID NO: 43178 - DNA, 120 bp, synthetic construct
  source 1..120: mol_type = other DNA
ttaaattatattacaacaacattttcagctatattataggtattgcaaagaattgtttagatgtatatcctgaaatagatttagaatatatttttaagtgaaaattcatttttagaatgt

SEQ ID NO: 43179 - DNA, 120 bp, synthetic construct
  source 1..120: mol_type = other DNA
aggctgtagaaatatgtacaccgctgtttactttggtgaccaaggagttcaaattagaggaaagaaaaagagtaaaacactgggttctctaggacagggaattgcttgtcaaaacttgtg

SEQ ID NO: 43180 - DNA, 120 bp, synthetic construct
  source 1..120: mol_type = other DNA
ttattctttacattctaccactaatttagtggcagggacaatagtgttatctacccgatagggctgttagggggattaaatgattaatatttgtaaagtacataaaaaagtatttggtgg

SEQ ID NO: 43181 - DNA, 120 bp, synthetic construct; identical to SEQ ID NO: 12253
  source 1..120: mol_type = other DNA

SEQ ID NO: 43182 - DNA, 120 bp, synthetic construct
  source 1..120: mol_type = other DNA
atctgtccgtccaataattccagttagattcatacaaagttgcctggctgtagatattacatattgtaagaggccttttatcaacatggtgttcagctgcaaataagggaaagttctact

SEQ ID NO: 43183 - DNA, 120 bp, synthetic construct
  source 1..120: mol_type = other DNA
tctaatgctggcagatggctgcagcctacaggttgctgcatctttactccaggcaagaggattgaggtaggactcaaccgacggagatactgataatgacaagcattacctctacattta

SEQ ID NO: 43184 - DNA, 120 bp, synthetic construct
  source 1..120: mol_type = other DNA
tatgattttacactgtcatgaatcatagctcctgtcatttctgttgccaatagtgaggaaaaaaagctgatgaatatggaaaggggaaagacgtgtgagtagaaacacaaacggcaaagc

SEQ ID NO: 43185 - DNA, 120 bp, synthetic construct
  source 1..120: mol_type = other DNA
tatgtacgtgtgtatatatgtgtgtgtgtgtgtgtgtagatctatacatatatatgtatagatatatacatatgtatagatacctacacacacacacacacatatatatatatacacaca

SEQ ID NO: 43186 - DNA, 120 bp, synthetic construct; identical to SEQ ID NO: 12254
  source 1..120: mol_type = other DNA

SEQ ID NO: 43187 - DNA, 120 bp, synthetic construct
  source 1..120: mol_type = other DNA
tccctgggagagctttgcttcccaaagaaagcctttctaggagaaagactcaggccctacctcaatctcttgcctggaacaaagatgcagtaactggtaggctgcagccatctgccagca

SEQ ID NO: 43188 - DNA, 120 bp, synthetic construct
  source 1..120: mol_type = other DNA
agagtagtaggactttcccttacttgcagctgaacaccatgttgataaaaggcctcttacaatgtgtaatatttacagccaggcaactttgtaagaatctaactgaaattactggatgga

SEQ ID NO: 43189 - DNA, 120 bp, synthetic construct; identical to SEQ ID NO: 12255
  source 1..120: mol_type = other DNA

SEQ ID NO: 43190 - DNA, 120 bp, synthetic construct
  source 1..120: mol_type = other DNA
ctaagcaggctttcataggctttctcttgatcttaatttctttgagcctcctggtgtaatcttaaattccccaattatatttacatttttaaataccatggtgagaaatgatctgaggcc

SEQ ID NO: 43191 - DNA, 120 bp, synthetic construct
  source 1..120: mol_type = other DNA
attttaaattgacaaactgtaactgtatagatttgtgggatacggtgtgatgttatgatgtatgtatataatataggatgattaaatcaagctaattaaatatccataacctcagatact

SEQ ID NO: 43192 - DNA, 120 bp, synthetic construct
  source 1..120: mol_type = other DNA
ttttccctgacttcaagtgtgtctagtgattatgtcgctgggccaaagttaattgaaaagacaaagattggtatgagtaagtacagttgattgagttgatgtatttcagaatggtggcat

SEQ ID NO: 43193 - DNA, 120 bp, synthetic construct; identical to SEQ ID NO: 12256
  source 1..120: mol_type = other DNA

SEQ ID NO: 43194 - DNA, 120 bp, synthetic construct
  source 1..120: mol_type = other DNA
gtttgaaaccagcctggccaacatagtgaaaccccgactctactaaaatacaaaaaattagccaggcatggtggcaggtgcctgtaatcccagctactcaggaggccgaggcaggagaat

SEQ ID NO: 43195 - DNA, 120 bp, synthetic construct
  source 1..120: mol_type = other DNA
acgagtctttgagtggtctccagatatcaaagcttcatgctcatgtacagaacaacttgtggtacctgtaaataggatggtttaaggcttccaaagtccttataattctttcttgcagag

SEQ ID NO: 43196 - DNA, 120 bp, synthetic construct
  source 1..120: mol_type = other DNA
agaaagaacaagagctcacatgatatttattgtctgagatccattattagtgatgcagaaatcatagctaactgatttgagtagtaccaacaattcaggcaacactattgactttctcca

SEQ ID NO: 43197 - DNA, 120 bp, synthetic construct; identical to SEQ ID NO: 12257
  source 1..120: mol_type = other DNA

SEQ ID NO: 43198 - DNA, 120 bp, synthetic construct
  source 1..120: mol_type = other DNA
ttactacaaatataaaaataagctgggcgtagtggtgcgcacctgtagtccctgctactcaggaggctgaggcaggagaatcgcttgaacctgggaggcagaggttgcagtgagccgaga

SEQ ID NO: 43199 - DNA, 120 bp, synthetic construct
  source 1..120: mol_type = other DNA
tctcctttgggaactgagcttaagtttcattgtcagggacagaactgaagttttggcttttaggcactgttactgacagatggctatttattaccattgtctggtctgattgcatcttgc

SEQ ID NO: 43200 - DNA, 120 bp, synthetic construct
  source 1..120: mol_type = other DNA
ttaaagcctctgtgtgggtctgagttcagaggtgcttctctgcattgtgagtaacttagttcaatcttctcaagccaacttgcctcttgatggcccttttagtcctaagcttttaaagtg

SEQ ID NO: 43201 - DNA, 120 bp, synthetic construct
  source 1..120: mol_type = other DNA
tatagtgaaagtagtcttgatggatattagccgaggtgctttggcacccatgaaaggtacctgctctggagagaggtgaccaggatgaggtctcagagtgtagtcagcccattaggatac

SEQ ID NO: 43202 - DNA, 120 bp, synthetic construct; identical to SEQ ID NO: 12258
  source 1..120: mol_type = other DNA

SEQ ID NO: 43203 - DNA, 120 bp, synthetic construct
  source 1..120: mol_type = other DNA
attaaatgtataaaaataccacagtacgcacctagcaccttttatttttggatttagcagttgttggtagctacaagattaatttgatttattaaaagcaaggttttcccatgttcacac

SEQ ID NO: 43204 - DNA, 120 bp, synthetic construct
  source 1..120: mol_type = other DNA
ctacacaataactttataaagtgaataatattagtattcccatttcacagctgggaaactgagacatggtgaaattgtctttccaaggccagacagcatgtaagccaccgaggcaggcct

SEQ ID NO: 43205 - DNA, 120 bp, synthetic construct; identical to SEQ ID NO: 12259
  source 1..120: mol_type = other DNA

SEQ ID NO: 43206 - DNA, 120 bp, synthetic construct
  source 1..120: mol_type = other DNA
gagttacattgggtgatgcaggcttagtggcgaatgattcaaaatactactcttcattaaatcacaaagtgttttggtcttctggtagtactttctcatattctcaggtctgaagtgatt

SEQ ID NO: 43207 - DNA, 120 bp, synthetic construct
  source 1..120: mol_type = other DNA
tgtgctttttgtcaatgtattgcacaacctttctccttccttccccttactttacacttgctaactacaacaactagactattctatgcacctttatttgttttctttgcgatcactggg

SEQ ID NO: 43208 - DNA, 120 bp, synthetic construct
  source 1..120: mol_type = other DNA
gctgctttgaggtacacatcttttggaagaacttgctccaggggatccatcttaaaaaattctcaggtgtttatgtcttgtaaacctttgagtaaggctttagagcaaacagttacatct

SEQ ID NO: 43209 - DNA, 120 bp, synthetic construct
  source 1..120: mol_type = other DNA
gcactgtgctgacagtgtcatatgcattactccactggatttccacagttactctataaggtaggttttattacaatttccatttacaaatgaagaatctgaggctacacagctcagatg

SEQ ID NO: 43210 - DNA, 120 bp, synthetic construct; identical to SEQ ID NO: 12260
  source 1..120: mol_type = other DNA

SEQ ID NO: 43211 - DNA, 120 bp, synthetic construct
  source 1..120: mol_type = other DNA
caaaaatcagctgggtgtggtggcatgcgcctgttgtcccagttacttgggaggctgaggcaggaggatcgcttaagcctgggaggcagaggctgtagtgaaccaagatcatctcaaaaa

SEQ ID NO: 43212 - DNA, 120 bp, synthetic construct
  source 1..120: mol_type = other DNA
tctaataccgttacttgttgtataatgaactgcttttagttgacattctcttttcttttaactggactttaacttctatagtttgtctatttttttataaatcatggttccttaaactga

SEQ ID NO: 43213 - DNA, 120 bp, synthetic construct; identical to SEQ ID NO: 12261
  source 1..120: mol_type = other DNA

SEQ ID NO: 43214 - DNA, 120 bp, synthetic construct
  source 1..120: mol_type = other DNA
ccaagccgtgttatattttagttttaacctctgttgcttttttctcctttttggagctttatgagtgctcaagatttaatgggcttattttcttctttagccacaaaaccagcataaaaa

SEQ ID NO: 43215 - DNA, 120 bp, synthetic construct
  source 1..120: mol_type = other DNA
tcatatcaatttatttttctctatttctgtgacttacggaaactctatttagagtaatgtatttatttcatgagttaaccccctgttaacaggaagcaaaatgtgcactgcttctttttt

SEQ ID NO: 43216 - DNA, 120 bp, synthetic construct
  source 1..120: mol_type = other DNA
acatttttctccggctcagtggtgattcagtttgtgatacacaaaattcactgcaaacatttaaaaagatgtgttgtaattatgctatatattgactcatcattcaactcttgctatttg

SEQ ID NO: 43217 - DNA, 120 bp, synthetic construct
  source 1..120: mol_type = other DNA
aaataagacaacttagatgcaatgcgtaagttatcactcattggcagtttaatttaaactcgtggaaaaaaacaacagatttgtgcctttacagaaccctctcagatgcacaggcccaga

SEQ ID NO: 43218 - DNA, 120 bp, synthetic construct; identical to SEQ ID NO: 12262
  source 1..120: mol_type = other DNA

SEQ ID NO: 43219 - DNA, 120 bp, synthetic construct
  source 1..120: mol_type = other DNA
tacaggcatgcaatgtgaaataagcacatcatggagaatgggttatccatcccctttcaagcatttcttctttgagttacaagcaatccagttacgttctttaagttaaagagttaattg

SEQ ID NO: 43220 - DNA, 120 bp, synthetic construct
  source 1..120: mol_type = other DNA
tagagccccccactacccttcccagcctctggtaactatccttctacttcctgtgtccatgaactcaaatgttttgatttttagatctcgcaaataagtgagaacatgtgatgattgtct

SEQ ID NO: 43221 - DNA, 120 bp, synthetic construct
  source 1..120: mol_type = other DNA
ttctttatccattcatctgcagacggacatttaggttgcttccaaatcattgcaattatgaacagtactgcaaccaccatggagtgcagatatctcttcggtatactgatttctttcttt

SEQ ID NO: 43222 - DNA, 120 bp, synthetic construct; identical to SEQ ID NO: 12263
  source 1..120: mol_type = other DNA

SEQ ID NO: 43223 - DNA, 120 bp, synthetic construct
  source 1..120: mol_type = other DNA
cctccttgtttctctgtgcctcgctgtgtctctcgccaaggtctaacaggctggtttaatttctcctgatttactaatttacctgattttatttgaatcaaactaactttgattccatgt

SEQ ID NO: 43224 - DNA, 120 bp, synthetic construct
  source 1..120: mol_type = other DNA
tgatcagtgttgtccattcagcatttctctacctcttacgactatcatcactgctccacaaaggagcatattggtaattcttccctgttgatctttgtttcatttgccttattttatttc

SEQ ID NO: 43225 - DNA, 120 bp, synthetic construct; identical to SEQ ID NO: 12264
  source 1..120: mol_type = other DNA

SEQ ID NO: 43226 - DNA, 120 bp, synthetic construct
  source 1..120: mol_type = other DNA
tgaaaggatgatggtctgtcacatccctaagttatttcatttaggaatgcaaatgtcgttcatgttctgtgtgtttccctgttctttctagtcatttcccagtttacttccccatctttt

SEQ ID NO: 43227 - DNA, 120 bp, synthetic construct
  source 1..120: mol_type = other DNA
caggtttcgactcccaggtaggagggaaaaaaatccccaaacaaatacctgtggtttgaataatttgtaattaattcactgggtctctgattgtgacttctttcgctgatctgctgtgga

SEQ ID NO: 43228 - DNA, 120 bp, synthetic construct
  source 1..120: mol_type = other DNA
aaagggtttccatgtcatgattttcaggtggggccaggtgctccttctggagtaatcttttgtccagtattattactcctacttgaaatagaggtggaagagagactttccttctcccag

SEQ ID NO: 43229 - DNA, 120 bp, synthetic construct; identical to SEQ ID NO: 12265
  source 1..120: mol_type = other DNA

SEQ ID NO: 43230 - DNA, 120 bp, synthetic construct
  source 1..120: mol_type = other DNA
ggggcaaaatccccaggctagattcttcttggtaggtaaagtcagcctacgtagagcactcttgccctgtggcttgtttctagtttttctatacagattctcaacaaattttgttcaacc

SEQ ID NO: 43231 - DNA, 120 bp, synthetic construct
  source 1..120: mol_type = other DNA
aacaggaccacttttttttggttacaaaaaacatgataaggaatattctctacccatcacagcacttggccacagctcccaataccattaagttatttctagacatttagttacatcctt

SEQ ID NO: 43232 - DNA, 120 bp, synthetic construct
  source 1..120: mol_type = other DNA
gttctacaaacaaacagcacagaaatttgccgaattcaccaagtaaaatttttcctcaaattgaaacacagataaggaaatcctagcactaagaaatataaattccctatgttgtgtcct

SEQ ID NO: 43233 - DNA, 120 bp, synthetic construct; identical to SEQ ID NO: 12266
  source 1..120: mol_type = other DNA

SEQ ID NO: 43234 - DNA, 120 bp, synthetic construct
  source 1..120: mol_type = other DNA
agggcattggtaaagactcaccaaatgaggtaactttcaacctttgcaagctgattgagattttgcagtcttagacggtgggagtgtatttagatctgagaataacatcagcaaaggatt

SEQ ID NO: 43235 - DNA, 120 bp, synthetic construct
  source 1..120: mol_type = other DNA
ctggtaggtgcttaataaatatatatgattcatatgtaggtatacatattaattgttgtttgtgggaggaagcggcaggaattgaggctgcaaaggaaggttgcactatctggtttaggg

SEQ ID NO: 43236 - DNA, 120 bp, synthetic construct
  source 1..120: mol_type = other DNA
ttggaggatgggttggggagggaggagaaactggaggagaggatatagtaagaggctattcagtgaaaggagaggatgagtttaggagataaatttggacacaggattaatgaattttaa

SEQ ID NO: 43237 - DNA, 120 bp, synthetic construct
  source 1..120: mol_type = other DNA
gatggatgagagaagcaattttacatatatacgtacaaagaaaggtgttatgttcagcttttgaaaaagttagttgggggtacttagagacattctcattgaaatgtccagaagataatt

SEQ ID NO: 43238 - DNA, 120 bp, synthetic construct; identical to SEQ ID NO: 12267
  source 1..120: mol_type = other DNA

SEQ ID NO: 43239 - DNA, 120 bp, synthetic construct
  source 1..120: mol_type = other DNA
gctaatgttactggccttttgttgtcaggcctcattaagttgcatgaattgactaagtattgagatttagtggcagaaataaaatgtaagtagacattacttcctattgttttatgattc

SEQ ID NO: 43240 - DNA, 120 bp, synthetic construct
  source 1..120: mol_type = other DNA
ttctggtcttttttaaaatatgtattttatacaaatgaatatattttacatagttgcaattataatctatatgttattttggatctactcttaaaaagttacattgattattatatattt

SEQ ID NO: 43241 - DNA, 120 bp, synthetic construct; identical to SEQ ID NO: 12268
  source 1..120: mol_type = other DNA

SEQ ID NO: 43242 - DNA, 120 bp, synthetic construct
  source 1..120: mol_type = other DNA
aagcatatatcagcataatttaaatatacgcataatattgtatacctattcctttttttatttaaaaatggactctttggtgtttctcatttgttgtcctttaagaattttttattatac

SEQ ID NO: 43243 - DNA, 120 bp, synthetic construct
  source 1..120: mol_type = other DNA
ccaggagttcaagaccagtctgggcaacataatgagaccacccccgtctctacaaaaaaaaaaaaaaaaaaaagctcagcatggtggcatgcacctatagtcccagccactcaggaggct

SEQ ID NO: 43244 - DNA, 120 bp, synthetic construct
  source 1..120: mol_type = other DNA
attccaataaaccagggttattcttgaggtattggccatctaatatgcctgcatatttcagtttattccaataaaattgaaaataaaacgtgttttctctgactttattgttataattaa

SEQ ID NO: 43245 - DNA, 120 bp, synthetic construct
  source 1..120: mol_type = other DNA
tttaatgttaaaccccaaattctgaaagctttctattagactaggctaaataggagaaaaatcggggatttgttttcatatagccatttttgcactttgtgacatacgctatttacttcc

SEQ ID NO: 43246 - DNA, 120 bp, synthetic construct; identical to SEQ ID NO: 12269
  source 1..120: mol_type = other DNA

SEQ ID NO: 43247 - DNA, 120 bp, synthetic construct
  source 1..120: mol_type = other DNA
cttggggcctcctttataaaggcactaatcccattcttaagggctctaccttcatgacctaatcacctccccaaggggaacatctcctaataccattgtcaggcctttgagcccaaaggc

SEQ ID NO: 43248 - DNA, 120 bp, synthetic construct
  source 1..120: mol_type = other DNA
caccctaactgatacatatattctcccccacccttaagaaggtactttgtaatattctcccccgcccttaagaatgtactttgtacacctaccccaaacctataagaactaatgataatc

SEQ ID NO: 43249 - DNA, 120 bp, synthetic construct; identical to SEQ ID NO: 12270
  source 1..120: mol_type = other DNA

SEQ ID NO: 43250 - DNA, 120 bp, synthetic construct
  source 1..120: mol_type = other DNA
tccagaatctataaggaacttaaataacccaacgagcaaaagccaaataaccccattaaaaaattgtcaaaagacttgaacagacacttctcaaaagaagacagacaagcagccaacaaa

SEQ ID NO: 43251 - DNA, 120 bp, synthetic construct
  source 1..120: mol_type = other DNA
cggtggctcacacctgtaatcccagcactttaggagaccaaggtgggcggatcgcctgagatcaggagttcgagaccagcctggccaacatggtgaaaccccatctctactaaaaataca

SEQ ID NO: 43252 - DNA, 120 bp, synthetic construct
  source 1..120: mol_type = other DNA
tccagcctgggtaacaaaagcgaaactccatctcaaaaagaaaaaaggcttatattgttggtgggaatgtaaattagttcagccactgtggaaagcagtttggagatttatcaaaaaact

SEQ ID NO: 43253 - DNA, 120 bp, synthetic construct
  source 1..120: mol_type = other DNA
agcaaagacatgtcatcaatctaggtacccatccacagtaaactgcataaagaaaatgtggtacctatgcgtcatgaaatactacggattggataaagaaaatgtggtacatatacacca

SEQ ID NO: 43254 - DNA, 120 bp, synthetic construct; identical to SEQ ID NO: 12271
  source 1..120: mol_type = other DNA

SEQ ID NO: 43255 - DNA, 120 bp, synthetic construct
  source 1..120: mol_type = other DNA
ttattttttataaaaaggcagccgtgtgctctatagcaatcaataatggggagaaaacaaacaaaaacatcgggatagcatgaccagtctattaaaaatgcttttccatttccatgattt

SEQ ID NO: 43256 - DNA, 120 bp, synthetic construct
  source 1..120: mol_type = other DNA
atacttatataaagatctgctttaactcgtcagcctcttgtagcattagtttctgttgtctttgatttttaactgttatgcattgttggaacacagcagctgattttgaacagctccaaa

SEQ ID NO: 43257 - DNA, 120 bp, synthetic construct; identical to SEQ ID NO: 12272
  source 1..120: mol_type = other DNA

SEQ ID NO: 43258 - DNA, 120 bp, synthetic construct
  source 1..120: mol_type = other DNA
ggacccattctcattgttgacaaggcaagcttgttcagaaaacatgaacacagaggtacacatttagctttacaagttcatgctaaaatttctgataatgaaatttattttctcttcttt

SEQ ID NO: 43259 - DNA, 120 bp, synthetic construct
  source 1..120: mol_type = other DNA
tattttacatatttctcttatttaacaaactaagaaatcttgtgtactataaacctcaaggagaatgtcatgatctccatggattgggatgcactgttgcaggattacactttcagtgcc

SEQ ID NO: 43260 - DNA, 120 bp, synthetic construct
  source 1..120: mol_type = other DNA
cctggaaagcctgaaaatggtcatgaacgtattctttaaggccccacctctgtgttgcttcgtgtacgccctccttcgggtagcgttaccggcttcctctgctaaacaccacgtctcagt

SEQ ID NO: 43261 - DNA, 120 bp, synthetic construct; identical to SEQ ID NO: 12273
  source 1..120: mol_type = other DNA

SEQ ID NO: 43262 - DNA, 120 bp, synthetic construct
  source 1..120: mol_type = other DNA
tccctgaatgaattctcaaatccttttagatatatttttaaatacaataacttttaaaaagtgtgtcaaatttttcatgagtgtttttaatctcttaattattttttgagatgcagtcga

SEQ ID NO: 43263 - DNA, 120 bp, synthetic construct
  source 1..120: mol_type = other DNA
accatgcccggctaatttttgtatttttagtagagacagggttttaccatattggtcaggctggtcttgagctcctgacctcaggtgatccacctgccttggcctcccaaaattctggga

SEQ ID NO: 43264 - DNA, 120 bp, synthetic construct
  source 1..120: mol_type = other DNA
aagttggaaaattagtgggaaactactgtaatgtttaaataactgagtcaaatgtaactggaggaatgcatttgctttgtaaaaaagtgctgctgatgcttgattctgaagggggaattc

SEQ ID NO: 43265 - DNA, 120 bp, synthetic construct; identical to SEQ ID NO: 12274
  source 1..120: mol_type = other DNA

SEQ ID NO: 43266 - DNA, 120 bp, synthetic construct
  source 1..120: mol_type = other DNA
ggaaagcagggagggagggaggatcagctgaaagtaatttctcttttcaggttctggatgtcttgtgctcactctgtgtttgccacggggttgcagtccgttctaaccagcatctcatct

SEQ ID NO: 43267 - DNA, 120 bp, synthetic construct
  source 1..120: mol_type = other DNA
gtgacaatctcctaccaggaagagacttgttattgcagacacgtcttgtgaaccatgtcagcaggtaaattcagacagacaatgtcacctgacaggtaccataataaaagaattaatgtt

SEQ ID NO: 43268 - DNA, 120 bp, synthetic construct
  source 1..120: mol_type = other DNA
aatgaacctagcaaaatatggatttgccgcaaacacatgtataagagcttttattcacattcctatgtagatacataaccattggcatcttcaggaccaccctgacaactgtataggtat

SEQ ID NO: 43269 - DNA, 120 bp, synthetic construct
  source 1..120: mol_type = other DNA
gtgcagtggcacgatctcggctcactgcaagctccacctcccgggttcaggccattgtcctgcctcagcctcccgagtagctgggactacaggtgcccgccaccacgcctggctaatttt

SEQ ID NO: 43270 - DNA, 120 bp, synthetic construct; identical to SEQ ID NO: 12275
  source 1..120: mol_type = other DNA

SEQ ID NO: 43271 - DNA, 120 bp, synthetic construct
  source 1..120: mol_type = other DNA
ctgtgctttcctaggaaccatgatgattcacattttatagacgaaaaaactggaactggaagtggaacttagatctaaatccagagactgagcttataaccaccgcgccacactgccttt

SEQ ID NO: 43272 - DNA, 120 bp, synthetic construct
  source 1..120: mol_type = other DNA
aaagccgtctgcaagctgaggaacaaggacgcccgtctgagtcccaaaacctcaaaagtagggaggccagaagtgcagccttcagcctgtggctgaaggcccgagagcccctggcaaacc

SEQ ID NO: 43273 - DNA, 120 bp, synthetic construct
  source 1..120: mol_type = other DNA
gtccctctgtctgcttttattctagctgtgctggcagctgattagatggtgcccacccagattgaggatgggtcggcctctcccagcccactgactcaaatgttaatctcgtttggcaac

SEQ ID NO: 43274 - DNA, 120 bp, synthetic construct; identical to SEQ ID NO: 12276
  source 1..120: mol_type = other DNA

SEQ ID NO: 43275 - DNA, 120 bp, synthetic construct
  source 1..120: mol_type = other DNA
cctcagcctcctgagtagctgggattacaggtgcacaccaccacacccagctaatttttgtatttttagtagagacggggtttcaccatgttggccagcctggtctcgaactcctgacct

SEQ ID NO: 43276 - DNA, 120 bp, synthetic construct
  source 1..120: mol_type = other DNA
agggcaaagactttacatttattctattattcaatcctcacaagatgcttaaatttatagatgtttaccagtccattttccaggaggataaatggaggatgagcaaggtttcataactag

SEQ ID NO: 43277 - DNA, 120 bp, synthetic construct; identical to SEQ ID NO: 12277
  source 1..120: mol_type = other DNA

SEQ ID NO: 43278 - DNA, 120 bp, synthetic construct
  source 1..120: mol_type = other DNA
gagtgatatgttctgagaccttcattcatttctacctagtattaccatagggtatatgtccactcctaaaatggaattaaatacaacttactgttgtattttttctgttcacagtgaggc

SEQ ID NO: 43279 - DNA, 120 bp, synthetic construct
  source 1..120: mol_type = other DNA
ataatgaacaacaaagcttattaatcaccttggttccttcataaacaacatgacctacctcagccccatgccccatgtgacacaaagcttagcttaggaaaatttctccatgtccggaat

SEQ ID NO: 43280 - DNA, 120 bp, synthetic construct
  source 1..120: mol_type = other DNA
ggtgacactgccaagaaatctcagaagcaaaactgctgatggaatgttcacagtgaagctggctttctctgtgtactacctcagtggtagttttaataattttttagtaattaaggaaat

SEQ ID NO: 43281 - DNA, 120 bp, synthetic construct; identical to SEQ ID NO: 12278
  source 1..120: mol_type = other DNA

SEQ ID NO: 43282 - DNA, 120 bp, synthetic construct
  source 1..120: mol_type = other DNA
atacacaagtgaaattgtgagatgtaaatgaaaacaatgaaaggtttttttggactttccttacatgtgattcccgtctctttaaagcatgagacccaatatttttctgggcgtcagtga

SEQ ID NO: 43283 - DNA, 120 bp, synthetic construct
  source 1..120: mol_type = other DNA
tttaaagcatgagacccaatatttttctgggcgtcagtgaaggttctgctcagtataagaaatggtactatgaattgatggtggaccacacagagccctttgtgacagctgaagcaactc

SEQ ID NO: 43284 - DNA, 120 bp, synthetic construct
  source 1..120: mol_type = other DNA
tctggtcaggtacgtactatccattttctttcaccgtgttccagaagatcttttgctgggcatttctgaaagctattggtgctgcttccattaggtacttctatagggtattaattattc

SEQ ID NO: 43285 - DNA, 120 bp, synthetic construct; identical to SEQ ID NO: 12279
  source 1..120: mol_type = other DNA

SEQ ID NO: 43286 - DNA, 120 bp, synthetic construct
  source 1..120: mol_type = other DNA
tcaataatttgtaaagtgtggtatgaggactcagatcataacaaatgacactttgtttcagaagtataaaatggtttaaaaataaaggaataggtcatttcaccagctaccaactcttag

SEQ ID NO: 43287 - DNA, 120 bp, synthetic construct
  source 1..120: mol_type = other DNA
tgtagattttttagatgttaaaattcatctggattctgcagacataagcttatattaataaagctgcatttggaatatagtcctggtatgatcttggcatagtttataaattatttagca

SEQ ID NO: 43288 - DNA, 120 bp, synthetic construct
  source 1..120: mol_type = other DNA
gttgaactacacctaagattttatgctaatgagtttatatctaaaagcattccatgtagttgtatctaacaatgatacttactgaattctttcttcattgagtgccaatagctcagttgt

SEQ ID NO: 43289 - DNA, 120 bp, synthetic construct
  source 1..120: mol_type = other DNA
ctctgcctcccgggttcaagcgattctcatgcctcagcctcctgagtagctgagactaacaggcttgcaccaccatgcccggctaatttttatatatattttagtagagtcggggtttca

SEQ ID NO: 43290 - DNA, 120 bp, synthetic construct; identical to SEQ ID NO: 12280
  source 1..120: mol_type = other DNA

SEQ ID NO: 43291 - DNA, 120 bp, synthetic construct
  source 1..120: mol_type = other DNA
aagtccatgttataaaacatttgaactataatcctttagatactattaccccctctctccctagctcctagtattgctctgcaggaaataagtactcaaatgaataaatgaagcacgtgg

SEQ ID NO: 43292 - DNA, 120 bp, synthetic construct
  source 1..120: mol_type = other DNA
caatttgaagctttttctttcgatacattaaaagtacctggttcttatggaattgaattgtatgcgttataccttttattacaaagtatctgttcagtagaacaataagaacaacaaaaa

SEQ ID NO: 43293 - DNA, 120 bp, synthetic construct
  source 1..120: mol_type = other DNA
aggcctacagttgaaaagtattttctcttaagccactgggagtctattaaatgctttgctgattttagattcgtaattaatgaagacaaatctaaattagttggaatgtgagttatgaag

SEQ ID NO: 43294 - DNA, 120 bp, synthetic construct; identical to SEQ ID NO: 12281
  source 1..120: mol_type = other DNA

SEQ ID NO: 43295 - DNA, 120 bp, synthetic construct
  source 1..120: mol_type = other DNA
atccaggtcccaggtgtttgagaggaccaaaagtataaaaaaatcttggtgctttgagagaatttaaatatagaagtagtgtggaggaatgtacaggaaagatgggtacaggtttctaat

SEQ ID NO: 43296 - DNA, 120 bp, synthetic construct
  source 1..120: mol_type = other DNA
tttctgcattgcttttatatgacttttttaaaaagctgcctttattatattcagggaattctagaagagacacttgatagtgaatttattgcctgtggatttgaatattggtaaaataga

SEQ ID NO: 43297 - DNA, 120 bp, synthetic construct; identical to SEQ ID NO: 12282
  source 1..120: mol_type = other DNA

SEQ ID NO: 43298 - DNA, 120 bp, synthetic construct
  source 1..120: mol_type = other DNA
tagaccataggttggtcttgccggggcaataaataacatttatccaatatcattttcacacctccagttatatcctgctttacttaagaagccaaccaagatcttgtgtgaaataaatga

SEQ ID NO: 43299 - DNA, 120 bp, synthetic construct
  source 1..120: mol_type = other DNA
agggagtttagcatttgaaaaagggactgacatgaagtacctgctgtgcctgagactctgttacttgtaaaacattaatcgtcaaaataactaaacaaggtgatggtacttggtgttctg

SEQ ID NO: 43300 - DNA, 120 bp, synthetic construct
  source 1..120: mol_type = other DNA
aagtccctggagatgttcctttgacatcattatataatctgctcatagataatttctggatcagttgccatccgtctacatgcagaagtttctgtgtatcagaaggtccattttacaaca

SEQ ID NO: 43301 - DNA, 120 bp, synthetic construct; identical to SEQ ID NO: 12283
  source 1..120: mol_type = other DNA

SEQ ID NO: 43302 - DNA, 120 bp, synthetic construct
  source 1..120: mol_type = other DNA
caacctgttcaaggaatgtttgagaatttcaacatcgatggcctcttctttccagtcgttagtttctctgcaggaataaagttagtatgtctatgttttttggtctctttcctttctcat

SEQ ID NO: 43303 - DNA, 120 bp, synthetic construct
  source 1..120: mol_type = other DNA
ctcacctaagatgggcatcctgcaaggctgaatgctttgtttacggatcccacagtgtttagatgtgggcagtctccctcaaaccagggtcctgaactatttcaaggtgttttttttttt

SEQ ID NO: 43304 - DNA, 120 bp, synthetic construct
  source 1..120: mol_type = other DNA
ctcttatttcaatagaaattaaatatcctttttgttgatgaggcccagatggctttcttcagtgttcctctccacctttattctctttattcctttattctctgcccatggtcaatggtg

SEQ ID NO: 43305 - DNA, 120 bp, synthetic construct
  source 1..120: mol_type = other DNA
gtaactactctgtcacttatttttatacacacacacacctgtacacttagaaggactccatttgtttcagttattcttttagttataattctcccaggaataattcctagttacaaaagc

SEQ ID NO: 43306 - DNA, 120 bp, synthetic construct; identical to SEQ ID NO: 12284
  source 1..120: mol_type = other DNA

SEQ ID NO: 43307 - DNA, 120 bp, synthetic construct
  source 1..120: mol_type = other DNA
tttgtatgcctgtagtcttagctacccgggaggctgagttgggaggatcacttgaacccaggagctggaggctgtagtaacctgtgactgtgtcactgcacccctgcctgaacaacagag

SEQ ID NO: 43308 - DNA, 120 bp, synthetic construct
  source 1..120: mol_type = other DNA
aatggaactcagattaaaatagttttgcttaaatgagcagaatgtataaaagattttagtaagttctttttcgttgttgagattgataaacaattagcgataaggttacctgctttcttc

SEQ ID NO: 43309 - DNA, 120 bp, synthetic construct
  source 1..120: mol_type = other DNA
ggtttcaggatgaaactgttccagctcagatcatcaggccttagttcgattctcatagggaatgagcaacccagatccctcacagacacagttcacaatagggttcgcactcctatgaaa

SEQ ID NO: 43310 - DNA, 120 bp, synthetic construct; identical to SEQ ID NO: 12285
  source 1..120: mol_type = other DNA

SEQ ID NO: 43311 - DNA, 120 bp, synthetic construct
  source 1..120: mol_type = other DNA
cttcattcccgtaagaatgtggtgcatgtgcttttggttacttctccagcaggtgatgtcttcactgacccattaattaacttaagcaggttttctcttttgatgaatatgatgtcctca

SEQ ID NO: 43312 - DNA, 120 bp, synthetic construct
  source 1..120: mol_type = other DNA
ttgtgaattagaaaactttaatgtacaccagagataaaattgactctaacgtgcatcctctttagagtacgctttctgcttggagggcgacatggagaattcaaatttcttcctccacct

SEQ ID NO: 43313 - DNA, 120 bp, synthetic construct; identical to SEQ ID NO: 12286
  source 1..120: mol_type = other DNA

SEQ ID NO: 43314 - DNA, 120 bp, synthetic construct
  source 1..120: mol_type = other DNA
agtcatgctgatacacagtggctttacacttggaccacaacccataggaacgaatttcacagtaatacagttgtacagttgacatgtaggactgaaatgagtctcataaaataacactta

SEQ ID NO: 43315 - DNA, 120 bp, synthetic construct
  source 1..120: mol_type = other DNA
tgcaacctctgcctcctgggttcaagcgattctcctgtctcagcctcccaagtagctgggattacaggcgcccaccaccacacctggctaatttttgtatttttagtagagatggggttt

SEQ ID NO: 43316 - DNA, 120 bp, synthetic construct
  source 1..120: mol_type = other DNA
agtagttttcccaacccaataaactgattccctaatgtacgaacagattacaacctgaggtgttaaaaacactgttcaaggttgtctttaaagttttattaaaataattaatattactta

SEQ ID NO: 43317 - DNA, 120 bp, synthetic construct; identical to SEQ ID NO: 12287
  source 1..120: mol_type = other DNA

SEQ ID NO: 43318 - DNA, 120 bp, synthetic construct
  source 1..120: mol_type = other DNA
aaagtacattgatcagttcgggtggggcagaaacaaatcacaatggtggaatgtcatcagttaaggctatttttacttcttttgtggatcttcagttacttcaggccatctggatgtata

SEQ ID NO: 43319 - DNA, 120 bp, synthetic construct
  source 1..120: mol_type = other DNA
aaggtataatagtgttaagatgatttaatatctggggtaatgtactgcacttgaagtaatatcatacagatgtgacacacaccgatcttagagtgtagttcttaagcccccaaccttttt

SEQ ID NO: 43320 - DNA, 120 bp, synthetic construct
  source 1..120: mol_type = other DNA
ctatgagactctaaggagaatatagagaaagatgaggatgccgtataggaaacatggagttttcaatttcttctcatttccttcttcgatacgcttatttggaagatatttagctgactt

SEQ ID NO: 43321 - DNA, 120 bp, synthetic construct
  source 1..120: mol_type = other DNA
tcaccttctttactgggatgcttagagtatgtttgtcatagttaatagataccatattacttggcaaatagtcacccaacaaatgttagctgttgttcctctttttctgtttcatagatg

SEQ ID NO: 43322 - DNA, 120 bp, synthetic construct; identical to SEQ ID NO: 12288
  source 1..120: mol_type = other DNA

SEQ ID NO: 43323 - DNA, 120 bp, synthetic construct
  source 1..120: mol_type = other DNA
caacctaagtttataggaaaaaagatttgggagactagaaatgaacaactagatgacatcatggtagaaacttaaggattacctgagacccagataacctctatcagggaaaggaaacag

SEQ ID NO: 43324 - DNA, 120 bp, synthetic construct
  source 1..120: mol_type = other DNA
gctgtggggtcacacagaagtgcttaatcaagacgtaaacaaccagtcccttaccttgggttttttatgaacattcaatttcttccttttaatgggaacatataaagattttgtttcttt

SEQ ID NO: 43325 - DNA, 120 bp, synthetic construct; identical to SEQ ID NO: 12289
  source 1..120: mol_type = other DNA

SEQ ID NO: 43326 - DNA, 120 bp, synthetic construct
  source 1..120: mol_type = other DNA
ggtaccaaaatttatttaaagaatatcatgaaggctgggcgcagtggctcacgcctgtaatcccagcactttgggaggccgaggcgggcggatcacgaggtcaggagatcgaaaccatcc

SEQ ID NO: 43327 - DNA, 120 bp, synthetic construct
  source 1..120: mol_type = other DNA
agaggcggagcttgcagtgagcagagatcgcgccactgcactccagcctgggcgacagagtgagactccgtctcaaggggaaaaaaaaaaaaaaagaatgtcgtgaaatagatggcttag

SEQ ID NO: 43328 - DNA, 120 bp, synthetic construct
  source 1..120: mol_type = other DNA
ttttagatcgtgttgcctcctcatctagaaagaataagagaaaaactggcagagaatatccatgaactctgggttatgaataaaattgagcttggctggcagtatggtccggtatgtaat

SEQ ID NO: 43329 - DNA, 120 bp, synthetic construct; identical to SEQ ID NO: 12290
  source 1..120: mol_type = other DNA

SEQ ID NO: 43330 - DNA, 120 bp, synthetic construct
  source 1..120: mol_type = other DNA
atttacttttctctcgctcatgtttcttttctttcagttccaattgtgtgtaaaagcggaaacctgtgggcaagtgttcctagttggtttcacaggtagaatgaagactgagaaaccatg

SEQ ID NO: 43331 - DNA, 120 bp, synthetic construct
  source 1..120: mol_type = other DNA
acctgtgtaatcctagtgtatatcatatacttgtttgtgtcaaaaccatggtaatactttcatttgtatgatatattctaagtgtcccaaaggccataacactttcttatacctgactga

SEQ ID NO: 43332 - DNA, 120 bp, synthetic construct
  source 1..120: mol_type = other DNA
atatttattcagtgttttgcattcttgcatacagattattaggtcaaattgtcattacagtgaactgggttgtgttgttatttcagttgtactggtgatgacctagcggagagttcttgc

SEQ ID NO: 43333 - DNA, 120 bp, synthetic construct; identical to SEQ ID NO: 12291
  source 1..120: mol_type = other DNA

SEQ ID NO: 43334 - DNA, 120 bp, synthetic construct
  source 1..120: mol_type = other DNA
agcgattctcctgcttcagcctcccaagtagctggttttacaggcatgcaccaccacacgtggctaattttgtatttttagtagagaccagtttcaccatgtggccaggctggtctcgaa

SEQ ID NO: 43335 - DNA, 120 bp, synthetic construct
  source 1..120: mol_type = other DNA
taaaagactggaccatctattagtcagtaggaagagagatgctacaaatgtgtaagtaatcaattgccagaggaattacaggcaacattctccagaagtttcaaaaataggaagagatga

SEQ ID NO: 43336 - DNA, 120 bp, synthetic construct
  source 1..120: mol_type = other DNA
catattataatagcaaatatttcaacgggcttctaagatgatctccactgcaaactcctagtaagttcacctaagtggttatgttttgcagtggaaccttaggtgtgtttcttctttaag

SEQ ID NO: 43337 - DNA, 120 bp, synthetic construct
  source 1..120: mol_type = other DNA
tttttttttttttttttgagacggagtcttgctctgtcgcccaggctggagtgcagtggcgggatctcggctcactgcaagctccgcctcccgggttcacgccattctcctgcctcagcc

SEQ ID NO: 43338 - DNA, 120 bp, synthetic construct; identical to SEQ ID NO: 12292
  source 1..120: mol_type = other DNA

SEQ ID NO: 43339 - DNA, 120 bp, synthetic construct
  source 1..120: mol_type = other DNA
caggaggtgttctctcatctaatgtatgatttgcagtctgcttcttttccaagaccttccctgaaactcctttttgtgtagtagttagaatccttgaccttgtgatgtcaattattctag

SEQ ID NO: 43340 - DNA, 120 bp, synthetic construct
  source 1..120: mol_type = other DNA
tttttctttggagcaatttatacttagctacccagcatgctggattttttgaagaagaggaagttatcgttactttgggatatatttcccaggagtatggtgcaagggccctattttgtg

SEQ ID NO: 43341 - DNA, 120 bp, synthetic construct
  source 1..120: mol_type = other DNA
gtactggggacccaattttgaaaaggccttgacttttaaggtattatgtttgccttcttggcgcttcctctttagttgaatgattggtaggcaaacaattacagagtaaagaagtaatat

SEQ ID NO: 43342 - DNA, 120 bp, synthetic construct
  source 1..120: mol_type = other DNA
aggtaaatatttgatccaagactgagggatgtgtacaagatagctggcaatcagaaagcatgaccgtgtagtaggcagaggacctggcatgtgtaaaagcgaggaggcagaagagacagg

SEQ ID NO: 43343 - DNA, 120 bp, synthetic construct; identical to SEQ ID NO: 12293
  source 1..120: mol_type = other DNA

SEQ ID NO: 43344 - DNA, 120 bp, synthetic construct
  source 1..120: mol_type = other DNA
gtagcaggagaaggaagggaatctgcgcagatttctggtttcattgagacacttgagaagatgatggtgttggttattctggtatagagagtagagacaaagtggagatgacctaaatag

SEQ ID NO: 43345 - DNA, 120 bp, synthetic construct
  source 1..120: mol_type = other DNA
tctgcaatcaaataagtatatctaatatatgattctatataagtcttgttcattcataatgatgaccagaaagaaaggaataaatacatcatttctaacttggtgactgctgaagactta

SEQ ID NO: 43346 - DNA, 120 bp, synthetic construct
  source 1..120: mol_type = other DNA
tccctgacagcatatggctgccatctaggtgctgccacggcgttaatgccgatgcgatttaggtctctgagaagataacaaacctaattactaatgcaaggagagagaacatctttctca

SEQ ID NO: 43347 - DNA, 120 bp, synthetic construct; identical to SEQ ID NO: 12294
  source 1..120: mol_type = other DNA

SEQ ID NO: 43348 - DNA, 120 bp, synthetic construct
  source 1..120: mol_type = other DNA
gtgcctaggacataccaggcatgtttaaggtgtttgggacacatcaaagaacaaaagagaccaaaatctttgcatttttgatcttctaattcacggagacagacaatagcccaataactc

SEQ ID NO: 43349 - DNA, 120 bp, synthetic construct
  source 1..120: mol_type = other DNA
gatataagcaaatgctgcaaggagctgactgagtgagcctgtgggaatctggggtagaagtctgcatggcgggggttcatggaagctctgtcaaacagaagggaaggaacgaagataatg

SEQ ID NO: 43350 - DNA, 120 bp, synthetic construct; identical to SEQ ID NO: 12295
  source 1..120: mol_type = other DNA

SEQ ID NO: 43351 - DNA, 120 bp, synthetic construct
  source 1..120: mol_type = other DNA
tattgatgctatatgttaattgagctgtgaagtgatttttaattccagctagaactttttataatgcataagtggattggatcagtatttgttgagaataagactttgaccctgttaatt

SEQ ID NO: 43352 - DNA, 120 bp, synthetic construct; identical to SEQ ID NO: 4950
  source 1..120: mol_type = other DNA

SEQ ID NO: 43353 - DNA, 120 bp, synthetic construct
  source 1..120: mol_type = other DNA
tttgaaaattcagttttctctaacaattttattgtattatatcaggaaaaaccacaatagaccaaatattaaaagaaaattagttcttcaccataggtaatttgagaagcactgatttaa

SEQ ID NO: 43354 - DNA, 120 bp, synthetic construct; identical to SEQ ID NO: 12296
  source 1..120: mol_type = other DNA

SEQ ID NO: 43355 - DNA, 120 bp, synthetic construct
  source 1..120: mol_type = other DNA
tggattgagcctgggagattgaggctccagtgagctgtgatcacgccactgcactccagcctggatgacagagcaggaccctgtctcaaaaatgatagtaataaaaataaatttaaaagg

SEQ ID NO: 43356 - DNA, 120 bp, synthetic construct
  source 1..120: mol_type = other DNA
taggactacaggagcttgccactgcatccagcctgagcacatattttgagaaaagctactgtagagtattttatatcacccagtaaaggcaaatttgctttttagtgattgctgccagtt

SEQ ID NO: 43357 - DNA, 120 bp, synthetic construct
  source 1..120: mol_type = other DNA
ttttgatatagaaaagtaaagagaatatttttgcaaagccagtaactttactcttgtcctccttccatccttgatgtcctacagaactggatttgttccaataggtcacttatcctaata

SEQ ID NO: 43358 - DNA, 120 bp, synthetic construct
  source 1..120: mol_type = other DNA
gaaattattttaccagggacccggaacataaaatttaaaccgcatttcaaattctagaatttggactcgggtatatagtcatgagctgcctaacagtgtttgactcaatgatggactgca

SEQ ID NO: 43359 - DNA, 120 bp, synthetic construct; identical to SEQ ID NO: 12297
  source 1..120: mol_type = other DNA

SEQ ID NO: 43360 - DNA, 120 bp, synthetic construct
  source 1..120: mol_type = other DNA
aagtgatgtataactctatatcctcaaggatgcagattatcatgtaaataaacacattaggcataagattgagcttagggtctactaggaacttaaaagaaaaagcaatatatacacatc

SEQ ID NO: 43361 - DNA, 120 bp, synthetic construct
  source 1..120: mol_type = other DNA
tacgtggattcagcatctctgatcttcctttgcgctcttgacatgaggcttgtatatttagcttagtaattcatagcagctcattatttcttcatcttttacaacagaatgttttattga

SEQ ID NO: 43362 - DNA, 120 bp, synthetic construct; identical to SEQ ID NO: 12298
  source 1..120: mol_type = other DNA

SEQ ID NO: 43363 - DNA, 120 bp, synthetic construct
  source 1..120: mol_type = other DNA
aaacatctgtacttctctaagattcataccatgcccaattccaagggtttagagaaagtacagtactttcttcctatatttcctttattcacttatttaattggcaggccccagagcagc

SEQ ID NO: 43364 - DNA, 120 bp, synthetic construct
  source 1..120: mol_type = other DNA
ttaagggcttggtccaccgaggaaatgttgctggagtcactcaactcctctgaaccctaggttttcttctccttagtagaatgaggatcataatgtatttgcttcatggaattattatag

SEQ ID NO: 43365 - DNA, 120 bp, synthetic construct
  source 1..120: mol_type = other DNA
aataaatatatcatgggagggatgaacagcttcatttgtttacatctttagaagttccaagtaacaaataagcaagaaattattccagaatatcccttattttgggttgaggagcaattt

SEQ ID NO: 43366 - DNA, 120 bp, synthetic construct
  source 1..120: mol_type = other DNA
gacactctcagaacagcacagcttggcagatcatgcctgccagatgaccctcaaatgtgaccagtgttaccaaaggttcagtttctggtttagtttttactattttccgaattccagatc

SEQ ID NO: 43367 - DNA, 120 bp, synthetic construct; identical to SEQ ID NO: 12299
  source 1..120: mol_type = other DNA

SEQ ID NO: 43368 - DNA, 120 bp, synthetic construct
  source 1..120: mol_type = other DNA
ggtgaaggatgggaggaatagtagggacccaggacacagggatggagaggaaagcagtatggaagggagacaaataactgataaggggagaggtggaatttttgtccaagagagcaagtt

SEQ ID NO: 43369 - DNA, 120 bp, synthetic construct
  source 1..120: mol_type = other DNA
ccttctccttcttctcttcctccttctttctccttccccttcttcctcttcttctcctcctccttcctcttctccttcccctacttcctcttctcctccttctcctcctcctccctcttc

SEQ ID NO: 43370 - DNA, 120 bp, synthetic construct; identical to SEQ ID NO: 12300
  source 1..120: mol_type = other DNA

SEQ ID NO: 43371 - DNA, 120 bp, synthetic construct
  source 1..120: mol_type = other DNA
cactgcaacctctgcctcccagattcaagtgattctcctgcctcagcctcccgagtagctgggattacaggcacctgccaccacctctggttaatttttctttcgtatttttttttgtag

SEQ ID NO: 43372 - DNA, 120 bp, synthetic construct
  source 1..120: mol_type = other DNA
tcccaagttctaaatgttgtgaatctttatgttcagtcctgggccatttcttctcagtgtgcaagctctctgaaggtattctcaccactccactccgtgacttaattaccacacaggtgc

SEQ ID NO: 43373 - DNA, 120 bp, synthetic construct
  source 1..120: mol_type = other DNA
agctttatgtcccctgtatttgcatttagggtgttgagtctttcaacatgccaggctattcatcctgctacacatgccaggaacctgggaatcacctttgactcttccctttgtttcatt

SEQ ID NO: 43374 - DNA, 120 bp, synthetic construct
  source 1..120: mol_type = other DNA
atctcctaactggtcctcccacttgccgtctttattctgcacacagcagcctgagttcatacacacacgtgcattcattcatattttgcttaaaactgttcaatggcttcccatggaact

SEQ ID NO: 43375 - DNA, 120 bp, synthetic construct; identical to SEQ ID NO: 12301
  source 1..120: mol_type = other DNA

SEQ ID NO: 43376 - DNA, 120 bp, synthetic construct
  source 1..120: mol_type = other DNA
tttccttctagaccaggggtgtccaatctttttgcttccctgggccacattggaagaattatcttgggccacacacaaaatacactaacactaatgatagctgatgaactaaaacacaaa

SEQ ID NO: 43377 - DNA, 120 bp, synthetic construct
  source 1..120: mol_type = other DNA
ggaactataattaaaaaaaaaaaaggttttattttttagagcagatttaggttctcagcaaagttaaaagaaagatacagagacttttcttatgccccctgtttccacaggcaactgccc

SEQ ID NO: 43378 - DNA, 120 bp, synthetic construct; identical to SEQ ID NO: 12302
  source 1..120: mol_type = other DNA

SEQ ID NO: 43379 - DNA, 120 bp, synthetic construct
  source 1..120: mol_type = other DNA
ttaatgttactatcaccacatcatcaactccaacatgattgccaccctatgctaacctagtctaagctaccattgtttcccacctgaaattataatatcctcccaacagatccaattgaa

SEQ ID NO: 43380 - DNA, 120 bp, synthetic construct
  source 1..120: mol_type = other DNA
ttccaagtctccatgaattgtcattctactctctatgtccatgtgtgcacatttttttaacacccacttgtgaatgagaacatgggtatttgcctttctgggtctagcttatttcagtta

SEQ ID NO: 43381 - DNA, 120 bp, synthetic construct; identical to SEQ ID NO: 12303
  source 1..120: mol_type = other DNA

SEQ ID NO: 43382 - DNA, 120 bp, synthetic construct
  source 1..120: mol_type = other DNA
tgcatcctcgccaacatctgtttttttgtttgtttgtttgcatttttaagaatagccattctgactggtgtaggatgacatcccacctgggttttagtttgcatttctctgatgattagt

SEQ ID NO: 43383 - DNA, 120 bp, synthetic construct
  source 1..120: mol_type = other DNA
ttgtttgtttcttgcatattctggatgaatgagtagtttgatgtcagatgaattctttgcaaatattttcttgcattctgcaggtagtctcttcactctgttgattctttctctcactgt

SEQ ID NO: 43384 - DNA, 120 bp, synthetic construct
  source 1..120: mol_type = other DNA
attttcttctagtatttttataattttgagtcttttgtttaagtcttaacccatcttgagttgatttttgtacatggtgagagataggggaccagttttactcttctgcatatggccatc

SEQ ID NO: 43385 - DNA, 120 bp, synthetic construct; identical to SEQ ID NO: 12304
  source 1..120: mol_type = other DNA

SEQ ID NO: 43386 - DNA, 120 bp, synthetic construct
  source 1..120: mol_type = other DNA
ttgggcaatattgtcattttaacaatactgattcttcagatttttgatcatgggctgtttttgtgtttgtttgcatcatctataatttctttcatcattgttttatagtttctcttgtac

SEQ ID NO: 43387 - DNA, 120 bp, synthetic construct
  source 1..120: mol_type = other DNA
gttagattgttactggtctatagatatgctaccaatttttgtacattgattttacatgctgcaactttactgaattccatttatcaaataagagttttttgtggcatctttaggttttcc

SEQ ID NO: 43388 - DNA, 120 bp, synthetic construct
  source 1..120: mol_type = other DNA
gaataggagtggtaaaagtaaatatccttgttttgttccagttcttacagggaaagttttcaactttccccattcagcataatgttagctgtgagattgttgtatatggcctttattatt

SEQ ID NO: 43389 - DNA, 120 bp, synthetic construct; identical to SEQ ID NO: 12305
  source 1..120: mol_type = other DNA

SEQ ID NO: 43390 - DNA, 120 bp, synthetic construct
  source 1..120: mol_type = other DNA
tcaggagttccagaccagcctggccaacatggtgaaaccccaactttattaaaaatacaaaaattagctgggtgtgatggtgcacaccagtaatcccagctactcaaggaggctgaggca

SEQ ID NO: 43391 - DNA, 120 bp, synthetic construct
  source 1..120: mol_type = other DNA
aaattgtcccaacaatgaaaagcccaggatcagatggatttacagatgaattatacctaacatacatagaactaatatcaatcctcctgaaactgtttcaaaaagtcaaggagcaggaaa

SEQ ID NO: 43392 - DNA, 120 bp, synthetic construct
  source 1..120: mol_type = other DNA
aaaaataccagcaaacaaaatgcaatagcacctctagctattctgtactttgtagccagtgtgttcatttcaaacattaaggtgaccatgtcaatctttctatttaaaatcccttaatgg

SEQ ID NO: 43393 - DNA, 120 bp, synthetic construct
  source 1..120: mol_type = other DNA
accctgtctctactaaaattataaaaattagccaagcgtcatggcaggtgcctgtaatcccagctgctcgggaggctgaggcaggagaattgcttgaacccaggaggcagaggttgcagc

SEQ ID NO: 43394 - DNA, 120 bp, synthetic construct; identical to SEQ ID NO: 12306
  source 1..120: mol_type = other DNA

SEQ ID NO: 43395 - DNA, 120 bp, synthetic construct
  source 1..120: mol_type = other DNA
tttattatactttaagttttagggtacatgtgtacaacgtgcaggttaaatatgtatacatgtgccatgttggtgtgctgcacccattaactcgtcatttaacattagctatatctccta

SEQ ID NO: 43396 - DNA, 120 bp, synthetic construct
  source 1..120: mol_type = other DNA
gggccatagcagaaaaagaattgtcttgggccacacataaaatacactataatactaacaatagctgatgagctaaattttaaaaatcacacaaagaaatctcataatattttaagaaag

SEQ ID NO: 43397 - DNA, 120 bp, synthetic construct; identical to SEQ ID NO: 12307
  source 1..120: mol_type = other DNA

SEQ ID NO: 43398 - DNA, 120 bp, synthetic construct
  source 1..120: mol_type = other DNA
taactgggtttttacataccaaatgcctacctacagggtgcctcacatttgcttcctaacagtctgtttacttttctgcagctatatagtttaagtactaaaatgctacattaccaatcc

SEQ ID NO: 43399 - DNA, 120 bp, synthetic construct
  source 1..120: mol_type = other DNA
cccttattttgtgcttttctagcctttctatcagctttgcagttccaacttatagtgtgctgtttctctcaccacccttcagcagacttaaaaaaaaaatgagttaaacaatgttaaatc

SEQ ID NO: 43400 - DNA, 120 bp, synthetic construct
  source 1..120: mol_type = other DNA
aaaacctcctaggattgggcaaagagtacttagatacaatatccaaaacatgacctattaaagaaaacagtccatccattggagttaattaaaagtaaaactttctgtacttcaaaagaa

SEQ ID NO: 43401 - DNA, 120 bp, synthetic construct; identical to SEQ ID NO: 12308
  source 1..120: mol_type = other DNA

SEQ ID NO: 43402 - DNA, 120 bp, synthetic construct
  source 1..120: mol_type = other DNA
ctactagggagactgaggcaggagaattgcttgaacctgggaggaagtggttgccgtgagccgagattatgccactgtcctcctgcctgggtggcagagcaagattctgtctcaaaaaaa

SEQ ID NO: 43403 - DNA, 120 bp, synthetic construct
  source 1..120: mol_type = other DNA
actaccttacacacaataaaatggctataatttttgacagacataccaagtgttggtgaagctataggaaaactgaaacccacatgtattactgcaggcaatgtaaaatggtgccaccac

SEQ ID NO: 43404 - DNA, 120 bp, synthetic construct
  source 1..120: mol_type = other DNA
ctcaagagaaataaaagcttatgtccctgcaaagatttacacgtaaatgttcacagaagcattattcataagagccaaaaactggaaactgtgcaaatgttcatcaactaaggaatagat

SEQ ID NO: 43405 - DNA, 120 bp, synthetic construct
  source 1..120: mol_type = other DNA
cagaagactccatattgtgtaattctattcctatgaaatgcccaaaacaggcatattgatagagacataaagtagcttaggggctgtctggaggtgagagtgagaaacgcctgcagcagg

SEQ ID NO: 43406 - DNA, 120 bp, synthetic construct; identical to SEQ ID NO: 12309
  source 1..120: mol_type = other DNA

SEQ ID NO: 43407 - DNA, 120 bp, synthetic construct
  source 1..120: mol_type = other DNA
ggtgctggcaaaattcccttttgctcagaaggtcagtctcttttttctgttgagacctttcactgattagttgaggcccagtcacattatggaaggtagtctgatttacttaaagtgcac

SEQ ID NO: 43408 - DNA, 120 bp, synthetic construct
  source 1..120: mol_type = other DNA
ttacctaaatagtcaacattgtacttgacaggtaatttttcaacactagctcccctcctgctctccttgctttgaagtccctactatctattatttctgtctttatatctgtgtgtatcc

SEQ ID NO: 43409 - DNA, 120 bp, synthetic construct; identical to SEQ ID NO: 12310
  source 1..120: mol_type = other DNA

SEQ ID NO: 43410 - DNA, 120 bp, synthetic construct
  source 1..120: mol_type = other DNA
aggttcaagcaattctcctgccacagcctcccaagtagctgggattacaggtgtccaccaccacgcctggctaatttttgtagttttagtagagacggggtttcaccatgttgttcaggc

SEQ ID NO: 43411 - DNA, 120 bp, synthetic construct
  source 1..120: mol_type = other DNA
agcctggccaacatggtgcaaacccatctctactaaaaatacaaaaattagctgggtatggtggtgagcacctgtaacctcagctactttggagactggggcagtagaattgcttgaacc

SEQ ID NO: 43412 - DNA, 120 bp, synthetic construct
  source 1..120: mol_type = other DNA
gggtaggtatccagttgtgggattgcagggctgaatggtagttctatttttagtttttggagaaatattcatgctgtttcccaaaggggttgaactaatttatgttcctactaacagtgt

SEQ ID NO: 43413 - DNA, 120 bp, synthetic construct
  source 1..120: mol_type = other DNA
cagatcattttttaatgtgtttatttggctgcttgtatttcctcttttgagaaatgtctatttatgtccttttttctttcttttcttttcttttttttttcaggaccagagtctcactct

SEQ ID NO: 43414 - DNA, 120 bp, synthetic construct; identical to SEQ ID NO: 12311
  source 1..120: mol_type = other DNA

SEQ ID NO: 43415 - DNA, 120 bp, synthetic construct
  source 1..120: mol_type = other DNA
tttgaagatactttctcccattctgtaggttgtctatttactctgtagattattttgctgtgcagatgctttttagtttgattaagtcccatttgtctatttttgtttttgatgcatttg

SEQ ID NO: 43416 - DNA, 120 bp, synthetic construct
  source 1..120: mol_type = other DNA
tgagagatagaggtgcaatttcattcttccgcatatggctagccattttttccagcaccatttattgaagaggttgtcatttctccagtgtttatttttgttaactttgtcaaagatcag

SEQ ID NO: 43417 - DNA, 120 bp, synthetic construct; identical to SEQ ID NO: 12312
  source 1..120: mol_type = other DNA

SEQ ID NO: 43418 - DNA, 120 bp, synthetic construct
  source 1..120: mol_type = other DNA
ccccaaacttaccccagtatttctttttacccttaacctatagtacacggtcagatcttaatactccagtcaacccttctctgcccctcccacacagacccacgatctcctgcttctgta

SEQ ID NO: 43419 - DNA, 120 bp, synthetic construct
  source 1..120: mol_type = other DNA
tctaaaacatgtaactttttaaaatgtggaaccctacttggttttattataattcttcagtcatcatcttttctcctatcagactgtaaacgctgtcaagagaaacatgtgcagtagtac

SEQ ID NO: 43420 - DNA, 120 bp, synthetic construct
  source 1..120: mol_type = other DNA
aatcatcgctttgtccccctggcccatgctgtataggctgcctacctgttagtcacttagcaaccatcttggttatcagcttgattgtcatgacactgtagtgcttttgttcaagtaacc

SEQ ID NO: 43421 - DNA, 120 bp, synthetic construct
  source 1..120: mol_type = other DNA
aagggaagaaaaatactgtatactgaagttgctaagatctataaaaacaacaattcttctgtctgtgaaattgtgagcagtatgttgttataatagttctattttctattagttactagt

SEQ ID NO: 43422 - DNA, 120 bp, synthetic construct; identical to SEQ ID NO: 12313
  source 1..120: mol_type = other DNA

SEQ ID NO: 43423 - DNA, 120 bp, synthetic construct
  source 1..120: mol_type = other DNA
tctctcagaagcccttaaggatgaattaactaattacattttctatggctcaggcttacttttgatgtcagtacaccatgtgactttgtctctcggtctggactcacattaactacattc

SEQ ID NO: 43424 - DNA, 120 bp, synthetic construct
  source 1..120: mol_type = other DNA
atgtgctcaaaggtttaattgcctgagtttatggtaaatcctaatattatgatcaatcttgagttctctcagagctgggttggacatccctctttgatacttttacagccttgtgattac

SEQ ID NO: 43425 - DNA, 120 bp, synthetic construct; identical to SEQ ID NO: 12314
  source 1..120: mol_type = other DNA

SEQ ID NO: 43426 - DNA, 120 bp, synthetic construct
  source 1..120: mol_type = other DNA
gtgtatagatggatagatacccatatgtataagcttatatgtatctgtctaaatggttaagcttatacatatagatacttgtctatatggaaatacatatatataatgtacgtatatgta

SEQ ID NO: 43427 - DNA, 120 bp, synthetic construct
  source 1..120: mol_type = other DNA
cccaaaatattatgccgttatttcttactctatcaaggcaggagaaaccactcagtgccgtgggtactaaagacaaattgtctcaaaatgtctcctgtatatacgcatttctataaaagg

SEQ ID NO: 43428 - DNA, 120 bp, synthetic construct
  source 1..120: mol_type = other DNA
gatgcctttagaggaaggaaacagaattagaagaagttggagggagacttacttttcagtgtattcctttttgtgccatttcagttcgcagtgtcttatcccttactcagaaatgaataa

SEQ ID NO: 43429 - DNA, 120 bp, synthetic construct
  source 1..120: mol_type = other DNA
gatcgagaccatcctggctaacacggtgaaaccccgtctctactaaaaatacaaaaaattagccgggtgtggtggcgggcacctgtagtcctggctacttgggaggttgaggcaggagaa

SEQ ID NO: 43430 - DNA, 120 bp, synthetic construct; identical to SEQ ID NO: 12315
  source 1..120: mol_type = other DNA

SEQ ID NO: 43431 - DNA, 120 bp, synthetic construct
  source 1..120: mol_type = other DNA
ccaagaagtaagttgaatgactaagcaatattaaataatctgtgtagagatttagtgcaaccaaataactcttgatggacacacagatgccttgcttttactgaagctttaaaattcaga

SEQ ID NO: 43432 - DNA, 120 bp, synthetic construct
  source 1..120: mol_type = other DNA
cattaaaaatacaaaaattagctgggcgtggtggcaagtgcctgtaatcccagctactcgggaggctgagacaggagaatcgcttgaacttgggaggcagaggctgcagtgagtcaagat

SEQ ID NO: 43433 - DNA, 120 bp, synthetic construct
  source 1..120: mol_type = other DNA
aacaatagtttctatcacattgctgagtgatgaaacaaagctcagaatatatttgggagtgtgttataaaaattgtgttattttcccagtgtgtgtttatatgttaacagaggtatccat

SEQ ID NO: 43434 - DNA, 120 bp, synthetic construct; identical to SEQ ID NO: 12316
  source 1..120: mol_type = other DNA

SEQ ID NO: 43435 - DNA, 120 bp, synthetic construct
  source 1..120: mol_type = other DNA
gtgcaggacttgtaagtagcaggcctgtagatgtattaaataatagcatcgagatataatcaaagtagccaccccataatctctatcagtcacctcaggcctcatgttaccccagaaaaa

SEQ ID NO: 43436 - DNA, 120 bp, synthetic construct
  source 1..120: mol_type = other DNA
tattgttacctcgtgcagttttaggttctaaaatttttcttgaaaatttaaatagttccaaaagatgtgttttatgggtacattttgcatatttacatttcaaaatgacactttttcatc

SEQ ID NO: 43437 - DNA, 120 bp, synthetic construct
  source 1..120: mol_type = other DNA
aactgtattttcaaattatttctcctactgtatattatgctaataatcaatgttttatgcttggcagtctttgagtactctatcctacattataagtaagatatgtatctaaattgaatt

SEQ ID NO: 43438 - DNA, 120 bp, synthetic construct; identical to SEQ ID NO: 12317
  source 1..120: mol_type = other DNA

SEQ ID NO: 43439 - DNA, 120 bp, synthetic construct
  source 1..120: mol_type = other DNA
tgacagctcaattatgcctttgttcagtttcttgaaagccaaaaattggaatctacctaacttccaaaagaattcattatcctctcattttcattatcctcatcctttccaaaccactct

SEQ ID NO: 43440 - DNA, 120 bp, synthetic construct
  source 1..120: mol_type = other DNA
agtaattatacctgttactcttttactcagaagaataagaaagtagaaatgttaatttcacattatctttgacagcataatacatttaatcaattgtatcaaatgctatgcgtgagtgtg

SEQ ID NO: 43441 - DNA, 120 bp, synthetic construct
  source 1..120: mol_type = other DNA
taaaggcagttttcactgacaaaacaatcagctaaaacagaattatcttttgtcaaaaatatctggttgtatttttctgttgaaacaaatgggttaatacatgtccccatgacaatcatc

SEQ ID NO: 43442 - DNA, 120 bp, synthetic construct; identical to SEQ ID NO: 12318
  source 1..120: mol_type = other DNA

SEQ ID NO: 43443 - DNA, 120 bp, synthetic construct
  source 1..120: mol_type = other DNA
gcctaaaatgttggggttttttaacaaccattttgcaagcaatttggcatcattgtgtaaaattgaacatttgcacgtcttggtacccaacagttccactcatagagatataccctagag

SEQ ID NO: 43444 - DNA, 120 bp, synthetic construct
  source 1..120: mol_type = other DNA
agttggctatagtctaataataaaatcacggaattataaatgacaccatagatgaacctaaaaaataataagggtgtaaaaaacattctacaagggtgatgcaatgtaaaaccatctttg

SEQ ID NO: 43445 - DNA, 120 bp, synthetic construct; identical to SEQ ID NO: 12319
  source 1..120: mol_type = other DNA

SEQ ID NO: 43446 - DNA, 120 bp, synthetic construct
  source 1..120: mol_type = other DNA
tgcgtaacagaaattgtcagattggattcaaaaagataatttatgatatacagctataagaggtacatcaataactttagaacatagaaaagttgaaaatagtaagaatgacacactagg

SEQ ID NO: 43447 - DNA, 120 bp, synthetic construct
  source 1..120: mol_type = other DNA
aagaaaagaaggccactatatggagaattgagaaaacaagcatcatgctataactactcatgtatacaccaagtaaaacagcttcaaaaatcaatgaagaaaaatactagtagattttca

SEQ ID NO: 43448 - DNA, 120 bp, synthetic construct
  source 1..120: mol_type = other DNA
agcttgacatatatagagtgctgcatgcatgaaacatttataaaatttagtatcctttaggacattagacactgatatcgtaaagatcatatccactggatcacaaagaataacagcaaa

SEQ ID NO: 43449 - DNA, 120 bp, synthetic construct
  source 1..120: mol_type = other DNA
taaaaagataacccatatttcttgatcttgctaaatgaacctatccttttttcatgcctttatactcttataaatggatgattcaaaaccagatttttaaaaagctttttaatattttgg

SEQ ID NO: 43450 - DNA, 120 bp, synthetic construct; identical to SEQ ID NO: 12320
  source 1..120: mol_type = other DNA

SEQ ID NO: 43451 - DNA, 120 bp, synthetic construct
  source 1..120: mol_type = other DNA
agagcaatattaatgaatttggtgggggcgggatgaaatataaacaccaatgatgccaagagcctgttttaaaaacctactaagcaggggaaaaagactctgaaaagattgacaaaggaa

SEQ ID NO: 43452 - DNA, 120 bp, synthetic construct
  source 1..120: mol_type = other DNA
caataagaaagaaaatacgaatagagctataactattaaaggaattgaatcaaacacacatacacacacacacacacacacacacacacacacacgtcccaaacaacttttctattgatt

SEQ ID NO: 43453 - DNA, 120 bp, synthetic construct; identical to SEQ ID NO: 12321
  source 1..120: mol_type = other DNA

SEQ ID NO: 43454 - DNA, 120 bp, synthetic construct
  source 1..120: mol_type = other DNA
ggggcaacagaaaccaataatctataaggtaaaatctcaaatttttcctttaaggtttaggaatgagacaatataagtcactactacttgatgtattcaataaggccagtgcagtgagac

SEQ ID NO: 43455 - DNA, 120 bp, synthetic construct
  source 1..120: mol_type = other DNA
accatttccttaaccttgctttatttctttttaagtgtgcttctgcacttgatgttatttatgtttcatgtcctctaatctgaaatatgcacttgctaaaggaaaaaaatctgtgcatca

SEQ ID NO: 43456 - DNA, 120 bp, synthetic construct
  source 1..120: mol_type = other DNA
tagccgggtggccgggcgtggtggctcacgcctgtaaccccagcactttgggaggccgaggcgggcggatcacgaggtcaggagatcgagaccatcctggctaacatggtgaaaccccgt

SEQ ID NO: 43457 - DNA, 120 bp, synthetic construct; identical to SEQ ID NO: 12322
  source 1..120: mol_type = other DNA

SEQ ID NO: 43458 - DNA, 120 bp, synthetic construct
  source 1..120: mol_type = other DNA
gaacaatatcaagaactcctaaaaattaataaaaagatgcccaaatagaaaaatgagcaaaggatatgaacataattcataaaaaacccctgcagatccaataagcatatgaaagacact

SEQ ID NO: 43459 - DNA, 120 bp, synthetic construct
  source 1..120: mol_type = other DNA
ttagcctaatcttataagacccatttcttttccagaaataaactttagagatacttttgtactcatgcaaaacaaacctgaaaagaatattcattgcagcatagattgcaatagcactga

SEQ ID NO: 43460 - DNA, 120 bp, synthetic construct
  source 1..120: mol_type = other DNA
cacaatcttggctcgctgcaacctccgcctcccgggttcaagcaattctcctgcctcagcctccctagtacaggcgcccgccaccacgcccagctaatttttgtattttttagtagagac

SEQ ID NO: 43461 - DNA, 120 bp, synthetic construct
  source 1..120: mol_type = other DNA
tttttatagattcatctaatggcatactatagagcagttaaaatgaattaactatagctagatagattcaaaggacaaatctcaaaaatactccttagagccaaaaaacaaaaaaagcat

SEQ ID NO: 43462 - DNA, 120 bp, synthetic construct; identical to SEQ ID NO: 12323
  source 1..120: mol_type = other DNA

SEQ ID NO: 43463 - DNA, 120 bp, synthetic construct
  source 1..120: mol_type = other DNA
aaaagaggagataggaggaatataactagtctttaggaagttcaggccaggagcagtggcttacgcctgtaatcccagcactttgggaagtcgaggtgggcagatcatcagaggtcagga

SEQ ID NO: 43464 - DNA, 120 bp, synthetic construct
  source 1..120: mol_type = other DNA
agaattgcttgaacccaggaggcggaactttcagtgagccgagatcgtgccactgcactccagcctgggtgacagagcaagactctgtctcaaaaaaaaaaaaaaaaaaaaaaaaaaaaa

SEQ ID NO: 43465 - DNA, 120 bp, synthetic construct
  source 1..120: mol_type = other DNA
ggcggatcacttgaggtcaggagttccagaccagcccggccaacatggtgaaaccctgtctctactaaaaatacaaaaattagctgggcgtggtggcacaacctgtaatcccggctactt

SEQ ID NO: 43466 - DNA, 120 bp, synthetic construct; identical to SEQ ID NO: 12324
  source 1..120: mol_type = other DNA

SEQ ID NO: 43467 - DNA, 120 bp, synthetic construct
  source 1..120: mol_type = other DNA
taggcataacctagcggatgactttaaaggtccattcttctgaacattctgtatggatgcacaggccatataacctagatacaacctagatacactgataaaagtcatagattagaaatt

SEQ ID NO: 43468 - DNA, 120 bp, synthetic construct
  source 1..120: mol_type = other DNA
ttctgagtttgactctcacttccccttgctgaaagcatgtatttcctgagtgccagggttttatatgacacacatatgcattttaagttgcttttgtgtaactattagaaatatggtcga

SEQ ID NO: 43469 - DNA, 120 bp, synthetic construct
  source 1..120: mol_type = other DNA
gataatcggtcaagttcaatatatcaattggaattaaatgctatattccctattaaaaatagctaatttttgtactgtgcagccagtggagccggaaatcattatcctcaataaactaat

SEQ ID NO: 43470 - DNA, 120 bp, synthetic construct; identical to SEQ ID NO: 12325
  source 1..120: mol_type = other DNA

SEQ ID NO: 43471 - DNA, 120 bp, synthetic construct
  source 1..120: mol_type = other DNA
atataatagacataatttaatggaaaattcttaagaaattttgaagaatggatgattcgttgtagtttttttctttcctcctgtgcctctttttctccttcctctcaaaacaaacaagca

SEQ ID NO: 43472 - DNA, 120 bp, synthetic construct
  source 1..120: mol_type = other DNA
gcaataaagaaatacgcaactgaaaaacaatccactcactccaagagcttgtggtcctcactatctcatatgcctaattgagtgtttgagattgttcgaaaagctgtagatttaaatgaa

SEQ ID NO: 43473 - DNA, 120 bp, synthetic construct
  source 1..120: mol_type = other DNA
cgagaccagcctggccaacatggtgaaactctgtctctactaaaaatacaaaaattagccacgcatggtggcaggtgcctgtaatcccagctacttgggaggctgaggcgggagaatcac

SEQ ID NO: 43474 - DNA, 120 bp, synthetic construct; identical to SEQ ID NO: 12326
  source 1..120: mol_type = other DNA

SEQ ID NO: 43475 - DNA, 120 bp, synthetic construct
  source 1..120: mol_type = other DNA
atactgaatgtgtacccgtatgtatactgtttacatagacacaagcacatgtacaaaattcactttggtaaatatttacctcagtgaaaaatggtttagaaatacagttggatttttctg

SEQ ID NO: 43476 - DNA, 120 bp, synthetic construct
  source 1..120: mol_type = other DNA
ccagaaatttaaaaatgcaccaatgtgccgtgttcttcattttctctgattgggcctaatttaggatttaaatccaatgagccttgtagccagaatgcagcctgacagtgataaattaat

SEQ ID NO: 43477 - DNA, 120 bp, synthetic construct; identical to SEQ ID NO: 12327
  source 1..120: mol_type = other DNA

SEQ ID NO: 43478 - DNA, 120 bp, synthetic construct
  source 1..120: mol_type = other DNA
attaaagcttttaatcacctgggtgcaggtgggctgagtccgaaaagagagtcagcgaagggagataagggtggtgccattttataggatttgggtagataaaggaaaattacagtcaaa

SEQ ID NO: 43479 - DNA, 120 bp, synthetic construct
  source 1..120: mol_type = other DNA
gaccggccattttcacttcttttgtggtggaatgtcatcagttaaggcggggcagggcattttcacttcttttgtgattcttcagttacttcaggccacctgggcatataggtgcatgtc

SEQ ID NO: 43480 - DNA, 120 bp, synthetic construct
  source 1..120: mol_type = other DNA
ttattttgagacagagtttcactcttgttgcccaggctggagtgcgatggcgccatctcggctcaccgcaagctccgcctcccgggttcaagcgattctcctgcctcagcctcccaagca

SEQ ID NO: 43481 - DNA, 120 bp, synthetic construct; identical to SEQ ID NO: 4980
  source 1..120: mol_type = other DNA

SEQ ID NO: 43482 - DNA, 120 bp, synthetic construct
  source 1..120: mol_type = other DNA
tgtcttcattcatctctgctggcattttacaggatgtttgtgttctgcactgatttgatattgggttcacattgggtgccctcctcccctctgtgagtcactgttccttctcgtgcctca

SEQ ID NO: 43483 - DNA, 120 bp, synthetic construct
  source 1..120: mol_type = other DNA
ttgtcaccatatctgtactgttcatgggtttggatctgtgaaattatgagaccctgccatttggctgagtacaatataggaagcaagatagaagctcactttggctctgcgatctatctg

SEQ ID NO: 43484 - DNA, 120 bp, synthetic construct
  source 1..120: mol_type = other DNA
tcttagactggaggccctgggttctttatctgttcttttctgtcctaaggcataagggctttgttcctttggtattcaaaagcagagattttaatatcacaaggccctgctataaagatc

SEQ ID NO: 43485 - DNA, 120 bp, synthetic construct
  source 1..120: mol_type = other DNA
tgtttcaaaggggctgaggggtgtaggaagcccttcaagtaaaaaggagtttggggtcaggggagtagggcacatcttcatattacatgtttttatttaaaaacaaacaaaagtaaaaaa

SEQ ID NO: 43486 - DNA, 120 bp, synthetic construct; identical to SEQ ID NO: 12329
  source 1..120: mol_type = other DNA

SEQ ID NO: 43487 - DNA, 120 bp, synthetic construct
  source 1..120: mol_type = other DNA
taacttgatccatattaaacaagtaagcttgggaggtgggggtggcttaaaaaaaacaaaaggttggtgcttactgtttttggtattctgccttgtttttgttaaatcactttaattggc

SEQ ID NO: 43488 - DNA, 120 bp, synthetic construct
  source 1..120: mol_type = other DNA
aatgaagcacaaaactgagctgcaacttaacatgaaaattccccagtggagccaaacactgtcaattttttgtttatatctttggtgacttgatgcaaatagaatcgacagttggccagg

SEQ ID NO: 43489 - DNA, 120 bp, synthetic construct
  source 1..120: mol_type = other DNA
tttattttattaaattatgtagttgccaaaataaaactaagagctaataactataaaagtattttgatactttgtaaagtgagcatattaaatcatttgtttaatttcatatatattcct

SEQ ID NO: 43490 - DNA, 120 bp, synthetic construct; identical to SEQ ID NO: 12330
  source 1..120: mol_type = other DNA

SEQ ID NO: 43491 - DNA, 120 bp, synthetic construct
  source 1..120: mol_type = other DNA
attttacttgaaagtgttcagtttctggttcatgtcaattacatttgattcaaaggctttgttcatttttaaccacaagaagataatcattcatattagcagttggttgtcctctgtgta

SEQ ID NO: 43492 - DNA, 120 bp, synthetic construct
  source 1..120: mol_type = other DNA
caaacagaaaattcgtttcataaattattgctgttaccattaattcatactggtgaaacattcatgatgtcaatagtgttatccattataattagttaaagtccatgaatttcatagatg

SEQ ID NO: 43493 - DNA, 120 bp, synthetic construct
  source 1..120: mol_type = other DNA
acaattctaagcttcaaatcctttctcgtacaaggttatagaggaaagaaggttaaaaaagtgtagtttacatctgaagatgaatgtgaacaaattattgggctacttaaacagatgcaa

SEQ ID NO: 43494 - DNA, 120 bp, synthetic construct
  source 1..120: mol_type = other DNA
aaaataaagaggaatgattttgtcaatattatccagcttcgcacattagcataacttgtctataagtttttattgggaaagacctccttcccaccttccacctttcaaaagtacttcctc

SEQ ID NO: 43495 - DNA, 120 bp, synthetic construct; identical to SEQ ID NO: 12331
  source 1..120: mol_type = other DNA

SEQ ID NO: 43496 - DNA, 120 bp, synthetic construct
  source 1..120: mol_type = other DNA
gaagactgggctcttcatcatgtaccctgaggctgcctccagcaaactgttaaacttggaaattagactatgctagcttgattacctgttggtgcatttgaaatgcagtgggagcttttt

SEQ ID NO: 43497 - DNA, 120 bp, synthetic construct
  source 1..120: mol_type = other DNA
ggcctgggcaacaaagtgagaccttgcctcaaaaaagaacaaaaataaaacccaaaaccataaatatataatatgtaaaatatatatattaatgttttgggttttttttaatttaaatac

SEQ ID NO: 43498 - DNA, 120 bp, synthetic construct
  source 1..120: mol_type = other DNA
gaatacaatgatttatagaagttgttaaaaaaaattcccacatggcttctttattaaaaaacaaaagctacagttaattgcccatacaaacagagtttttatttaaaatggaacaaaatt

SEQ ID NO: 43499 - DNA, 120 bp, synthetic construct; identical to SEQ ID NO: 12332
  source 1..120: mol_type = other DNA

SEQ ID NO: 43500 - DNA, 120 bp, synthetic construct
  source 1..120: mol_type = other DNA
tcagccaggcttgtcttgaactcctgacctcaagcgatccacctgcctcggcctcccaaagtgctgggattatagaagtgagctaccaagcccagcctatacataaattacttacaatat

SEQ ID NO: 43501 - DNA, 120 bp, synthetic construct
  source 1..120: mol_type = other DNA
ccatgtattggtcactattctaggtgctggggggtcactgtgaataaaatggacaaactccctgctttcaaggagcttgccttgtaatgatgccagtcatagcccagattagtagtctat

SEQ ID NO: 43502 - DNA, 120 bp, synthetic construct
  source 1..120: mol_type = other DNA
ggcgtgatctctcctcactgcaatctctgcctcttgggtttaagcgattctcctgcctcagtctctcgaatagctgggattacaggcacccgccaccacaccttgctaatcattgtattt

SEQ ID NO: 43503 - DNA, 120 bp, synthetic construct; identical to SEQ ID NO: 12333
  source 1..120: mol_type = other DNA

SEQ ID NO: 43504 - DNA, 120 bp, synthetic construct
  source 1..120: mol_type = other DNA
aggctgttatctgctgggaactgttttaaggataatggcagttagaaaaatgaatcagaaacagatcctgacctcaaggtatagtcaataatggagaatacaacagtgacagaagaatgg

SEQ ID NO: 43505 - DNA, 120 bp, synthetic construct
  source 1..120: mol_type = other DNA
aatattttcaactttgtatttcttccaacgattacaacttatacctgttttattacgataataccttctctctccagcctagaatgtagaagcagtctctgctaagagatccttgaactc

SEQ ID NO: 43506 - DNA, 120 bp, synthetic construct
  source 1..120: mol_type = other DNA
tcttcctaaataacgtaactaggaatgacagtaaggaaataagttacaaatgcatttaaatttccctgtggaataagaaataggtagtatctgaaggatacactgatttatgaaataaat

SEQ ID NO: 43507 - DNA, 120 bp, synthetic construct; identical to SEQ ID NO: 12334
  source 1..120: mol_type = other DNA

SEQ ID NO: 43508 - DNA, 120 bp, synthetic construct
  source 1..120: mol_type = other DNA
taatgaggtagggccagaaaatgatatttacagagatttttatgaaaaggccaattatacacaaatttctttgtctctgatttgtagttaccagctgacaagtggatacaagcctgcccc

SEQ ID NO: 43509 - DNA, 120 bp, synthetic construct
  source 1..120: mol_type = other DNA
gggcgcgggatcgaatccggcagggctggacttatggcatccaacaggtacatgggaattagcatttggtctgagacttacttaagtgggaattagcataatttgtaacaggaaggatta

SEQ ID NO: 43510 - DNA, 120 bp, synthetic construct
  source 1..120: mol_type = other DNA
ctcaagaatttacatgaccttagttctggctgtgatcgtgaacacatgtgaggcacacaatgaataatactacactggtgacttataatatggttttgtggtatttctctctctgagact

SEQ ID NO: 43511 - DNA, 120 bp, synthetic construct; identical to SEQ ID NO: 12335
  source 1..120: mol_type = other DNA

SEQ ID NO: 43512 - DNA, 120 bp, synthetic construct
  source 1..120: mol_type = other DNA
atcagtagatattcaggtatttgggtattaaggtattcaggattaggtattcagtacaaatttgcctgaaagagggaaggaagaaaagacaagacaaaacagtatttctggctgggcggg

SEQ ID NO: 43513 - DNA, 120 bp, synthetic construct
  source 1..120: mol_type = other DNA
aattagctgggcatggggcacatgcctgtagtcccagctactcagggggctgaggtgggaggatcacttgagcccaggaggttgaggctgcagtgagactctgtttcaaaacaacaacaa

SEQ ID NO: 43514 - DNA, 120 bp, synthetic construct; identical to SEQ ID NO: 12336
  source 1..120: mol_type = other DNA

SEQ ID NO: 43515 - DNA, 120 bp, synthetic construct
  source 1..120: mol_type = other DNA
ttcagttctgtactctaatattaagcatccttttgccaagatagtaagatagcctgttcactctctctgtgtcaacacattttaaccacagtttaacattggagcctctcgtacaataga

SEQ ID NO: 43516 - DNA, 120 bp, synthetic construct
  source 1..120: mol_type = other DNA
tttttcagttagggacatagaagggtggtccataacacgctggaattttttgaagaagggaaagcagccttaagttcttcattgcctgaaaaccactgagggagaaccagcactaatttg

SEQ ID NO: 43517 - DNA, 120 bp, synthetic construct
  source 1..120: mol_type = other DNA
cgtggcagatggaagtggttagagatcactgaagttgttttttgttattgttgtttttccttctcatggagagggtctgctttccatagatgcgcttattcatttgattgaatcctgtat

SEQ ID NO: 43518 - DNA, 120 bp, synthetic construct; identical to SEQ ID NO: 12337
  source 1..120: mol_type = other DNA

SEQ ID NO: 43519 - DNA, 120 bp, synthetic construct
  source 1..120: mol_type = other DNA
tactttcctcttcttcggttgcaagatgatgtagtagttctttaaagccaaataaatgaataaaagggggagtactggatagagtcctctagtctaggtgtggaatttcagccaagtgga

SEQ ID NO: 43520 - DNA, 120 bp, synthetic construct
  source 1..120: mol_type = other DNA
aggtacctccctgattatgatattgggctcctcccctagcccaccagccctcctccagaacagctgatttttgctgatttggggaataagcttgtagtggaggctagtgttttacaaaat

SEQ ID NO: 43521 - DNA, 120 bp, synthetic construct
  source 1..120: mol_type = other DNA
caatagatactcaataactaactatgtgttgaacacaatggatttttaaaggttctgcaaagaatacattttccttaaataatacctttgaagaatgtagtttaggccgggcatggtggc

SEQ ID NO: 43522 - DNA, 120 bp, synthetic construct
  source 1..120: mol_type = other DNA
agctgggcatggtggcggacacctgtagtcccagctactcgggaggctgaggcaggagaatggtgtgaacccgggaggcagagcttgcagtgagccgagatggcgccactgcactccagc

SEQ ID NO: 43523 - DNA, 120 bp, synthetic construct; identical to SEQ ID NO: 12338
  source 1..120: mol_type = other DNA

SEQ ID NO: 43524 - DNA, 120 bp, synthetic construct
  source 1..120: mol_type = other DNA
ggacttctgtgtcttcccatttaaagtggcaggtgtaggatcctaatcataggcatcctgacatattttagtcctttgaattgagtaaagacatacttggcatcttgacagatcttatca

SEQ ID NO: 43525 - DNA, 120 bp, synthetic construct
  source 1..120: mol_type = other DNA
cacgcattatgaatcagttgctgttaggtgtgcagataccaagaagattcctgtctcaaagagtgtacagtccctgtaaccactgggaagaaagtaaacaataaaaggcttgtaagccaa

SEQ ID NO: 43526 - DNA, 120 bp, synthetic construct
  source 1..120: mol_type = other DNA
aagaagattcctgtctcaaagagtgtacagtccctgtaaccactgggaagaaagtaaacaataaaaggcttgtaagccaaaaaatggcaatcaaagagacttctgtaattctctgatata

SEQ ID NO: 43527 - DNA, 120 bp, synthetic construct; identical to SEQ ID NO: 12339
  source 1..120: mol_type = other DNA

SEQ ID NO: 43528 - DNA, 120 bp, synthetic construct
  source 1..120: mol_type = other DNA
tgttcatcatgatgcttttatgatcttgcatgttttatgtatatcacaaaatctattgctcagtggcattccttaaataataatagtaataatttactgtttgtttatccattctcctat

SEQ ID NO: 43529 - DNA, 120 bp, synthetic construct
  source 1..120: mol_type = other DNA
ttgttggcctttttactgaattgtgtttctaaaagtatattttggatagaagaaccatgtcaggtatggaaggattttcttccgtttgtaagttgctttttcactttcttaatgaggtct

SEQ ID NO: 43530 - DNA, 120 bp, synthetic construct; identical to SEQ ID NO: 12340
  source 1..120: mol_type = other DNA

SEQ ID NO: 43531 - DNA, 120 bp, synthetic construct
  source 1..120: mol_type = other DNA
tttatgtctgtccttaagttaatattccattgtcttcatttttatcacatagtaaatttaaaatcaggtagggcaagtcttccaacttctttcatattttataaaggttttttgttcttc

SEQ ID NO: 43532 - DNA, 120 bp, synthetic construct
  source 1..120: mol_type = other DNA
gggaagaattgatattttagccatatttagtcgaccaattcatgaacatggtacatttgtccatttattttcatcctctttagtttctcttagcattgctttgcagttttcagactagag

SEQ ID NO: 43533 - DNA, 120 bp, synthetic construct
  source 1..120: mol_type = other DNA
atcttatatcctgtgatttggctaaatttatatgtcagttctatttttttgtaaattcagtgggattgtctatatacataatcatgaggtctgcaaaaactaaacctcactttttctttt

SEQ ID NO: 43534 - DNA, 120 bp, synthetic construct; identical to SEQ ID NO: 12341
  source 1..120: mol_type = other DNA

SEQ ID NO: 43535 - DNA, 120 bp, synthetic construct
  source 1..120: mol_type = other DNA
ttcagtcatgatgcattgtccttttttacacagagctgtattctatttgttaatattttgcttaggacttttgtagctaagtttatgggcaatacactggtatatatttttttcttataa

SEQ ID NO: 43536 - DNA, 120 bp, synthetic construct
  source 1..120: mol_type = other DNA
aatttatcattgaaaccacgagcctagagttttatactataggaaaggtattttgttatgaattcaatgtatttgatagcttgagagctatttagattttctatttatttgtgtgtcaac

SEQ ID NO: 43537 - DNA, 120 bp, synthetic construct
  source 1..120: mol_type = other DNA
tctctcttttcattcctggtaatgatagttgatgttttctctctttttatcttgatcacttctctaagggattaattgattttataaatcttttcaaaggttaattgaacttaaatgtac

SEQ ID NO: 43538 - DNA, 120 bp, synthetic construct; identical to SEQ ID NO: 12342
  source 1..120: mol_type = other DNA

SEQ ID NO: 43539 - DNA, 120 bp, synthetic construct
  source 1..120: mol_type = other DNA
gtgtaataatcaaagagttcttgagcttccctctaactttataattctttaacatttgtgcatccctagaggatgtaggtagcagtgatgacagtcaatatatttttaggttggaaagat

SEQ ID NO: 43540 - DNA, 120 bp, synthetic construct
  source 1..120: mol_type = other DNA
ttggtatctatagtcttaatagagatataattacctgttttccttccgctcccccactctgcttaatatcaaacattttgaaagttacttactctacatttagaaggaactctgacaaca

SEQ ID NO: 43541 - DNA, 120 bp, synthetic construct
  source 1..120: mol_type = other DNA
aaataagggaaaacactacagctcagagaatttataaccttgagtcttcaaggaaagagttaattatggtcagtatccaggaaaaggagtacagtttcccctgcacatagaaatatgcat

SEQ ID NO: 43542 - DNA, 120 bp, synthetic construct
  source 1..120: mol_type = other DNA
aatggtgccagataagtaaaatgttaagaagttattctgatgacatacagtgttttatactatttgtagctaatacgtattaataatttcatcttcgtaacaccgttgtggacaacatat

SEQ ID NO: 43543 - DNA, 120 bp, synthetic construct; identical to SEQ ID NO: 12343
  source 1..120: mol_type = other DNA

SEQ ID NO: 43544 - DNA, 120 bp, synthetic construct
  source 1..120: mol_type = other DNA
ctaatttttttttttttttgtatttttagtagaggcggggtttcaccatattggccaggctggtcttgaactcctgatgttgtgatccacccaccttggcctcccaaagtgctgggatta

SEQ ID NO: 43545 - DNA, 120 bp, synthetic construct
  source 1..120: mol_type = other DNA
cagtgtagacagggaaaatagactaaattgctaccactaccatacaatgaaagtgttaagctgaagagtcataacacagggggtttaaatcagcttggtgatatgagggaaatctttaaa

SEQ ID NO: 43546 - DNA, 120 bp, synthetic construct; identical to SEQ ID NO: 12344
  source 1..120: mol_type = other DNA

SEQ ID NO: 43547 - DNA, 120 bp, synthetic construct
  source 1..120: mol_type = other DNA
agatgctcgagtgccttcacatggaagctgacttcccccagaatgaaaaatcgaagagtgagtacaaggatgctgtaatgcttgttacaattacttctattatattctgtttgttagaag

SEQ ID NO: 43548 - DNA, 120 bp, synthetic construct
  source 1..120: mol_type = other DNA
aggtacagctaagtcaatcgggttcatgcatttcaggcagagagaatagtatatgtaaaggcttagagacacaaggaggattgcaaatgggaatttcagagagctttgtacgaccagatg

SEQ ID NO: 43549 - DNA, 120 bp, synthetic construct
  source 1..120: mol_type = other DNA
agaatgattctagtggctctttaggaaaaaggctgaatgtaaacaaaactggagatgaggacagcagtttggtgacaaaaaagaagtatagatgaggagtgttggagaccttgtctttgg

SEQ ID NO: 43550 - DNA, 120 bp, synthetic construct; identical to SEQ ID NO: 12345
  source 1..120: mol_type = other DNA

SEQ ID NO: 43551 - DNA, 120 bp, synthetic construct
  source 1..120: mol_type = other DNA
taagaggagcttgatgagctgtggtctctgagaaggttgaagggaatgaaattcagagcatgggtaaagggattggcctcctgtaaaaggaacaacaacacttattcccctaaggttagt

SEQ ID NO: 43552 - DNA, 120 bp, synthetic construct
  source 1..120: mol_type = other DNA
tttcctaaggagtagaagttagggcaggctggactggattagaagccttgaagagagcagtaaagatgtgttgggtatagaattctcagctgacaattattttttcttttagtactcaga

SEQ ID NO: 43553 - DNA, 120 bp, synthetic construct
  source 1..120: mol_type = other DNA
gatgagttgcttctctcttgctgttttcaggattctctctctgtttttggatttgaacagtttgattatgatgtgtctagttttaatttctttgagtttatccccaaagtttactgtact

SEQ ID NO: 43554 - DNA, 120 bp, synthetic construct; identical to SEQ ID NO: 12346
  source 1..120: mol_type = other DNA

SEQ ID NO: 43555 - DNA, 120 bp, synthetic construct
  source 1..120: mol_type = other DNA
tataatttacctctttattgatattcactatttggtgaagcatcatttttgtacttttttttttttttgagatggagttttgctcttgttgcccaggctggagtgcaatggcgtgatctc

SEQ ID NO: 43556 - DNA, 120 bp, synthetic construct
  source 1..120: mol_type = other DNA
aaattaactaaaggctggccaaaatccagggagtgtttatttgattaaaatgtccaaatgttgctaagaacagcaactagtgatgttttaacttgctcctgccccatcaccctctctcta

SEQ ID NO: 43557 - DNA, 120 bp, synthetic construct
  source 1..120: mol_type = other DNA
cagagttggaccaccaccatgcctggctaattttgtatttttagtagatatggggtttcactgtgttgatcaggctggtctcgaactcctgacctcaggtgatccacctgcctcggcctc

SEQ ID NO: 43558 - DNA, 120 bp, synthetic construct
  source 1..120: mol_type = other DNA
tgtctaataagcccaacatctcggcctcctgaggaataatttctattgactgctttttacccctttatgtatgggacatactgtcttgtctttttgcatgtctcacaatttttgtgaaaa

SEQ ID NO: 43559 - DNA, 120 bp, synthetic construct; identical to SEQ ID NO: 12347
  source 1..120: mol_type = other DNA

SEQ ID NO: 43560 - DNA, 120 bp, synthetic construct
  source 1..120: mol_type = other DNA
tgccttcaacactcaaccaggcaatttataatttcacattagccttctcttactgcatgtgcagagcctcaaggtctttcagaggtgtaagctttctcaggtttttcctgaatacatgca

SEQ ID NO: 43561 - DNA, 120 bp, synthetic construct
  source 1..120: mol_type = other DNA
tgcctcagctgttattgctgcctcacaaagctgcaaggctaacaaattgcctcagatgattttcaacaaatgtccttggagaaacaactatttgcactgggcaagctctaagtcaagtgg

SEQ ID NO: 43562 - DNA, 120 bp, synthetic construct
  source 1..120: mol_type = other DNA
gctgattttcactatgattgagggtcctttggttttcaatatgctgtggaattagagagagggtgatgcagcaggagcaaattaaaacatcactagtttgctgttcttaccaacatttgg

SEQ ID NO: 43563 - DNA, 120 bp, synthetic construct; identical to SEQ ID NO: 12348
  source 1..120: mol_type = other DNA

SEQ ID NO: 43564 - DNA, 120 bp, synthetic construct
  source 1..120: mol_type = other DNA
ctcagcagagcaggtatagatgttgagagtgaaggtagtgaaattggacagtaattggggttaagagagcaagtaggggaaaagctaataagggcaagaaagtatggaaagttatatagg

SEQ ID NO: 43565 - DNA, 120 bp, synthetic construct
  source 1..120: mol_type = other DNA
actgacagttgtttgacaaggtttgattttaccgaagttatgtgaacagtgagcaatgagaatagagtggcatattctacagtagaagctgagattatgtttagtgtttactatgtgcca

SEQ ID NO: 43566 - DNA, 120 bp, synthetic construct
  source 1..120: mol_type = other DNA
gggaggaatcagtaaagggagaaatatcttcagagttagatgttgaaaggatcaggaatcagtaaagggagaaaatgtcttcagaattagatgttgaaaggatcaaaatttcaacaagta

SEQ ID NO: 43567 - DNA, 120 bp, synthetic construct; identical to SEQ ID NO: 12349
  source 1..120: mol_type = other DNA

SEQ ID NO: 43568 - DNA, 120 bp, synthetic construct
  source 1..120: mol_type = other DNA
tataactacggcaacagtgggaagggacagattggagggggcagtgcttggaggtagaccagttgggaggctttagaaaaattgtttttttgaacaaggatggtgggaataaaaattaaa

SEQ ID NO: 43569 - DNA, 120 bp, synthetic construct
  source 1..120: mol_type = other DNA
caagggcataaaaagtttaataaaattgaatcaagccttatgtaattaatcagaattataatttattttctcttaggagaatgcttacatattccagataaaacatgaactctgtatttg

SEQ ID NO: 43570 - DNA, 120 bp, synthetic construct
  source 1..120: mol_type = other DNA
agaaggttgaaaggatggctgattaataccaataattttaaaaagtattatcattagacctaaaagattctagatatgtataaaattttagcttttccttatagcttcttgtaacttaag

SEQ ID NO: 43571 - DNA, 120 bp, synthetic construct; identical to SEQ ID NO: 12350
  source 1..120: mol_type = other DNA

SEQ ID NO: 43572 - DNA, 120 bp, synthetic construct
  source 1..120: mol_type = other DNA
tgcctatcaaacacataaatatatcgtgtttaaaatcgagcaaagcataaggatgttcgggggagagttctgtgcctttgacaggatgctacccattagctatttgtctgggctgctata

SEQ ID NO: 43573 - DNA, 120 bp, synthetic construct
  source 1..120: mol_type = other DNA
cttggatctttttaaaaaactcctacaaacccagatttcactttgtattagtattttagcaagaggtataatgttgaactgttgcttctttaaaacgtagttgcaaactaccctaaacta

SEQ ID NO: 43574 - DNA, 120 bp, synthetic construct
  source 1..120: mol_type = other DNA
gtgaaaccccgtctctactgaaaatacaaaaaaattagctgggcttggatggtggcacatgcctgtaaccccagctactcaggaagccgaggcaggggaattgcttgaacccaggaggcg

SEQ ID NO: 43575 - DNA, 120 bp, synthetic construct; identical to SEQ ID NO: 12351
  source 1..120: mol_type = other DNA

SEQ ID NO: 43576 - DNA, 120 bp, synthetic construct
  source 1..120: mol_type = other DNA
attccctatagtaataaaggggattagtggtatgttttaattccaagagaattgtgtagggggcttttggggaaattattacatttttataccgaatttgccttctaaaatatttgattt

SEQ ID NO: 43577 - DNA, 120 bp, synthetic construct
  source 1..120: mol_type = other DNA
caaaaaaactgtagtatagttttcatggtatataatgactatagtatatactaattctatatttagaaaattaggagttacatctattaatgcatactagaatgtaatgtaatattttat

SEQ ID NO: 43578 - DNA, 120 bp, synthetic construct
  source 1..120: mol_type = other DNA
ggaagattacaggcatgttttaaggaaacaatttatcggtaatctgttttttgaggaaatactaactctgagtaaaaatttgactttcctgtttgtttagtattgcagcactgagaacga

SEQ ID NO: 43579 - DNA, 120 bp, synthetic construct
  source 1..120: mol_type = other DNA
ctcagcctcccaagtagctgggattacaggcatatgccaccaggccctgatgatttttgtattttttgtagagatgggatttcaccatgttggccagactggtctcgaattcctgacctc

SEQ ID NO: 43580 - DNA, 120 bp, synthetic construct; identical to SEQ ID NO: 12352
  source 1..120: mol_type = other DNA

SEQ ID NO: 43581 - DNA, 120 bp, synthetic construct
  source 1..120: mol_type = other DNA
gttattgatcgtttcattaattaagcccatgtgatagggagccatctcatgctacagccatggtgtctccactgctttacttcatctcattttaaattgttacatatgacctagctgtat

SEQ ID NO: 43582 - DNA, 120 bp, synthetic construct
  source 1..120: mol_type = other DNA
aaggagaaacaaataggaacttccttcttctcttttcttttctttctttctttttctttctttctttctttctttctttttctttctttctttctctttctttctttctttctttctttc

SEQ ID NO: 43583 - DNA, 120 bp, synthetic construct; identical to SEQ ID NO: 12353
  source 1..120: mol_type = other DNA

SEQ ID NO: 43584 - DNA, 120 bp, synthetic construct
  source 1..120: mol_type = other DNA
tgaaaactagcatttaaccagtaactagtaactctgtgcgagctattggaggcaaagtaggaagaagaggggctataacatgaagcagctcccaagttccaccatttttagttgtgcgat

SEQ ID NO: 43585 - DNA, 120 bp, synthetic construct
  source 1..120: mol_type = other DNA
tgaagcagctcccaagttccaccatttttagttgtgcgatgttggtcaagtctgaaatttcctcctctgcatctaactcagatgttagctgggtgaccaccttctttgagatatcaattc

SEQ ID NO: 43586 - DNA, 120 bp, synthetic construct
  source 1..120: mol_type = other DNA
ctcatttcctagggatacttttcccccttttgcatcacactggtcctaatgttggatgctgacctttttatttttcccccagatcttttaaatacagcatttgtatgtatagcagatcac

SEQ ID NO: 43587 - DNA, 120 bp, synthetic construct; identical to SEQ ID NO: 12354
  source 1..120: mol_type = other DNA

SEQ ID NO: 43588 - DNA, 120 bp, synthetic construct
  source 1..120: mol_type = other DNA
cctggtgctttccacttcacccagctggtctgacagtggctgatcctagatcagaaagcacttggtaaaatgggaaagaagataagaaggtatcattatcatcatcgctctaggttgaat

SEQ ID NO: 43589 - DNA, 120 bp, synthetic construct
  source 1..120: mol_type = other DNA
tgcagcggcaccggggaaaggttccgaatcttccgtgccgagaagacctatgcagtgaaggccggacggtggtattttgaatttgagacggtcactgctggagacatgagggttggttgg

SEQ ID NO: 43590 - DNA, 120 bp, synthetic construct; identical to SEQ ID NO: 12355
  source 1..120: mol_type = other DNA

SEQ ID NO: 43591 - DNA, 120 bp, synthetic construct
  source 1..120: mol_type = other DNA
ttgacgcagcgattccgtatcaggagtttatctttaagctataattagtggtttgtatgaacatttaatagctacaatgcttaatgtagtgttgtttataatcacaaacggttttcattt

SEQ ID NO: 43592 - DNA, 120 bp, synthetic construct
  source 1..120: mol_type = other DNA
atatgggcgaggtgcctgtaatcccagcactttgagaggctgagatggagggatcacttggggctaggagtgcaagaccagcctgggcaacaaagtaagatcctgtctctacaaaaaaaa

SEQ ID NO: 43593 - DNA, 120 bp, synthetic construct
  source 1..120: mol_type = other DNA
cacaccactgcactccagcctgggcaacagagtgagaccttgtctcaaaacaaacaaaaaaataataataacaacaaggtatatatgcttatagccacaataggataataatagtcactt

SEQ ID NO: 43594 - DNA, 120 bp, synthetic construct
  source 1..120: mol_type = other DNA
agaataaataagcaatcatgaagagatttgacgtttggatatttcttggagtgaaatgtcctgtgtaggaaagcatttctaggcttgaaattagggcagttgacccacttagttttgaaa

SEQ ID NO: 43595 - DNA, 120 bp, synthetic construct; identical to SEQ ID NO: 12356
  source 1..120: mol_type = other DNA

SEQ ID NO: 43596 - DNA, 120 bp, synthetic construct
  source 1..120: mol_type = other DNA
atgccttttgatacctgatgtaaacttttttaaaaagacagtgtgttatattaagaagaattatgtcattgctttgcattggcgactctgtctggtaacgtaccgattcacaatgaaggt

SEQ ID NO: 43597 - DNA, 120 bp, synthetic construct
  source 1..120: mol_type = other DNA
caaatgtacttacaatatgagatttcactttatgtatatatataaaaaggttggcatctatattcaatttttggcttgttacttcagcagatatcctaaggatatttttaggtttgattt

SEQ ID NO: 43598 - DNA, 120 bp, synthetic construct
  source 1..120: mol_type = other DNA
tcattttcaatgacagatgcccagcttgattccctagctcataattatttgtatttgtgggagtagagaaaaacaaaccgtattctgggaaacattcattgtcgcagaaaaatgatatat

SEQ ID NO: 43599 - DNA, 120 bp, synthetic construct; identical to SEQ ID NO: 12357
  source 1..120: mol_type = other DNA

SEQ ID NO: 43600 - DNA, 120 bp, synthetic construct
  source 1..120: mol_type = other DNA
tcttggcaagcaggcgatgtcgtggggtgtatggttgacatgaacgaacacaccatgatgttcacactgaatggtgaaatccttcttgatgattcaggctcagaactggctttcaaggac

SEQ ID NO: 43601 - DNA, 120 bp, synthetic construct
  source 1..120: mol_type = other DNA
tgagttgcagctgtaaatcgtgagggtgccttgtgactgacttgatcagatgcccttgaaataacattattagaaatgctatctatacgacttagctaggatttctagaaggctgaaatg

SEQ ID NO: 43602 - DNA, 120 bp, synthetic construct
  source 1..120: mol_type = other DNA
tcatctcataaaagtgaaatgaggacccacaatggatcaggtactttgctggatgctgaggtgacaaagatgaatgaaacactgtcctatctttgtatagattacagattacctgccagg

SEQ ID NO: 43603 - DNA, 120 bp, synthetic construct; identical to SEQ ID NO: 12358
  source 1..120: mol_type = other DNA

SEQ ID NO: 43604 - DNA, 120 bp, synthetic construct
  source 1..120: mol_type = other DNA
gaggtggatggatcacaaggtcaggagttcgagaccagcctgaccaacatagtgaaaccccatgtctactaaaaaatacaaaaaattagctgggcatggtggcatgcacctgtaatccca

SEQ ID NO: 43605 - DNA, 120 bp, synthetic construct
  source 1..120: mol_type = other DNA
aaaaaaaaagatggaaggtgttggtgaagcaaggaagacatttactcttcagacatgcactcccaatttggtggccttggccacacagggctgtttatatttaagttagtttgaattttt

SEQ ID NO: 43606 - DNA, 120 bp, synthetic construct
  source 1..120: mol_type = other DNA
tgcctcctggattcaagtgattctcctgcctcagcttcccaagtagctgggattacaggtgcttaccaccatgcccagctaatttttgtatttttagtagagacggggtttcaccttgtt

SEQ ID NO: 43607 - DNA, 120 bp, synthetic construct; identical to SEQ ID NO: 12359
  source 1..120: mol_type = other DNA

SEQ ID NO: 43608 - DNA, 120 bp, synthetic construct
  source 1..120: mol_type = other DNA
gatagctgagcccaggagtttgcgaccagcctgggcaacatagcaagactctgtttctacaaaaattaaaaaaattagccagttgtggtggcatgttcctgtagctccagctgctcaggt

SEQ ID NO: 43609 - DNA, 120 bp, synthetic construct
  source 1..120: mol_type = other DNA
ccttatttcaaagataagccaacacttcttttcaaaatggcttttgaatatatcctgttatatgtttgcatatggatttgcatataaaaatgtatatatatttgcatatatatagtcttg

SEQ ID NO: 43610 - DNA, 120 bp, synthetic construct
  source 1..120: mol_type = other DNA
gactcactgcaacctccgcctcccaggttcaagcaattctcctgcctcagcctcccaagtagctgggattacaggggtgtgccaacacgcctcgctaatttttgtatttttagtagagac

SEQ ID NO: 43611 - DNA, 120 bp, synthetic construct
  source 1..120: mol_type = other DNA
tagtctatataaatttgtcactgatcttcaaaatgttagccagtttgttgcttgtatgaagttttatattcattcatttagctagcttttgagcaggtatgaacatcatttccctaacac

SEQ ID NO: 43612 - DNA, 120 bp, synthetic construct; identical to SEQ ID NO: 12360
  source 1..120: mol_type = other DNA

SEQ ID NO: 43613 - DNA, 120 bp, synthetic construct
  source 1..120: mol_type = other DNA
gtgaaattagtgctctaaccctcccctacctgtctccctttctctgatattggttttagggatgtcaaagtattagtgggaaggtaggaggaaggctttttattggtgttatctatctgt

SEQ ID NO: 43614 - DNA, 120 bp, synthetic construct
  source 1..120: mol_type = other DNA
gagttctgtttgtatggtacgtggttcacatgatacacacagatttgcagaatgctcatccgtactatttaagcacgtaacaaatgttcatggtaccacacagtcacatagaccaatcac

SEQ ID NO: 43615 - DNA, 120 bp, synthetic construct
  source 1..120: mol_type = other DNA
tattggtatctctatcatagagttaacacaggattttgatgaattgtctgaaattttgtggttgaggttgctgggcttttattagaggttttgggaggacctgcgttttggtcttcaagg

SEQ ID NO: 43616 - DNA, 120 bp, synthetic construct; identical to SEQ ID NO: 12361
  source 1..120: mol_type = other DNA

SEQ ID NO: 43617 - DNA, 120 bp, synthetic construct
  source 1..120: mol_type = other DNA
cacctagcctgtctttatgtctgtatcatgttcgatttgccatttttaactatcttcataatctcttcttattgctacagagaaagctcagtcatttatacactgactattaaagtatgt

SEQ ID NO: 43618 - DNA, 120 bp, synthetic construct
  source 1..120: mol_type = other DNA
atgctgtagatccctgtctggtcagcttagtagacaacatggccaagtatattttgacctttctatctattgcatagtttatacaactgaaatgatttgctgaccagtataagttgtttc

SEQ ID NO: 43619 - DNA, 120 bp, synthetic construct; identical to SEQ ID NO: 12362
  source 1..120: mol_type = other DNA

SEQ ID NO: 43620 - DNA, 120 bp, synthetic construct
  source 1..120: mol_type = other DNA
aacacggtgaaaccctgtctctactaaaaatacaaaaaattagcccagcgtggtggcgggcacttgtagttccagctactcgggaggctgaggcaggagaattgcttgaacctgggaggt

SEQ ID NO: 43621 - DNA, 120 bp, synthetic construct
  source 1..120: mol_type = other DNA
aaaataaaaagatgctgttaggtctcttctaaggggctgcagacctcttcctcaaatagggactgcagcagccctcaggaaactcatctgttaactggataaaaaccaaatgacagaaac

SEQ ID NO: 43622 - DNA, 120 bp, synthetic construct
  source 1..120: mol_type = other DNA
gcattgttgaactagagtgaaattccactagaatttcagggtttaaaggccgcattgtctatgtggcagatcctctgttaggattctcccttctctttggctttttaaaaatctcttcag

SEQ ID NO: 43623 - DNA, 120 bp, synthetic construct
  source 1..120: mol_type = other DNA
agtttttccatgaattcttgtctcttctcaccattggactgataaccattcaaaatcaggattggggaagcccagggaaagaggttgcagtgttcactcttatggacagaatcccaagat

SEQ ID NO: 43624 - DNA, 120 bp, synthetic construct; identical to SEQ ID NO: 12363
  source 1..120: mol_type = other DNA

SEQ ID NO: 43625 - DNA, 120 bp, synthetic construct
  source 1..120: mol_type = other DNA
cgagaaatctcagttctacagcccaaggaaccaaattccatcaataaccagggagcttggaagatgactccaaccctcagatgagaatgtagcccacgttaccatcttgattatatcctt

SEQ ID NO: 43626 - DNA, 120 bp, synthetic construct
  source 1..120: mol_type = other DNA
ctttaaatggctaagtttgtggtagtgtgttccatagcaatagaaaaccggtatgttgatcaaggggctttcttaggttcaaccgaaccttcagactcacaagactatcaaagaccaccc

SEQ ID NO: 43627 - DNA, 120 bp, synthetic construct; identical to SEQ ID NO: 12364
  source 1..120: mol_type = other DNA

SEQ ID NO: 43628 - DNA, 120 bp, synthetic construct
  source 1..120: mol_type = other DNA
ttgggaccaaggctttttatattaaagccatgatttttatatggagcatccctttatgtacacattcctcaagagcctagtggaggtgatcctcatcacattagttgggggacaagaaca

SEQ ID NO: 43629 - DNA, 120 bp, synthetic construct
  source 1..120: mol_type = other DNA
attatgaagatggcaaaacatgccatatcaagcatgacacagacacagagacagggtagttatatgagaaatgtaattacagagcacttataaaacctttcagtactttagcaaccacaa

SEQ ID NO: 43630 - DNA, 120 bp, synthetic construct
  source 1..120: mol_type = other DNA
acaatataagtatttacagagaaaaccctaaagaatctatacacattactaggaacaattggagtgtttcacaaggtagaatttctattctagcagcagttaagaaaagtaaattaaaga

SEQ ID NO: 43631 - DNA, 120 bp, synthetic construct
  source 1..120: mol_type = other DNA
gacttattaccaaataaatgagaggtgtgttatgttcatggagaagacaaaagcctgaagatattaattcttccaaaagtgatctatagcttcaatccgtcgatcagacttttcaaataa

SEQ ID NO: 43632 - DNA, 120 bp, synthetic construct; identical to SEQ ID NO: 12365
  source 1..120: mol_type = other DNA

SEQ ID NO: 43633 - DNA, 120 bp, synthetic construct
  source 1..120: mol_type = other DNA
aaaagaggcctgtgacaaatggggatctgtagtgaaaatatgagatggtcacttcttcacaccctatatgataacgaactccaaatggtcttaaatgtcaacagcaaaactttgaaacca

SEQ ID NO: 43634 - DNA, 120 bp, synthetic construct
  source 1..120: mol_type = other DNA
aactgaaaaaaatgttagtgctaagaaaatataatttctgaaatcaagcaaaatgatgaaaaggtatgaacaggtatttcatagaagcaacaactcagagggacaataaacgtgtgaaga

SEQ ID NO: 43635 - DNA, 120 bp, synthetic construct; identical to SEQ ID NO: 12366
  source 1..120: mol_type = other DNA

SEQ ID NO: 43636 - DNA, 120 bp, synthetic construct
  source 1..120: mol_type = other DNA
caaagccaggatacaactgaaagcacacaggatggatgaattaactggaaactacggtaataaatgacaacatggatatttaagggaaagaagtcccaaaagataactatggtaggccga

SEQ ID NO: 43637 - DNA, 120 bp, synthetic construct
  source 1..120: mol_type = other DNA
ttaattaacctggattatctgggaagccaatgtcatcacaaggatccttataagaaggaagtaggagtgtgtgtttctgtgtgtgtgtgtgtgtgtgtgtgtgtgtgtgtgtgcgtgtgt

SEQ ID NO: 43638 - DNA, 120 bp, synthetic construct
  source 1..120: mol_type = other DNA
actcagccctgttgagcaataggttggtagatacttaagagtatttttaaaagaaccaactaaataaataaaaacaggtgatgatgagagtgtgtcacaaacaaaagtttatcagtaatc

SEQ ID NO: 43639 - DNA, 120 bp, synthetic construct
  source 1..120: mol_type = other DNA
gcaattctcctccctcaacctcccaagtaacttggattccaggcacatgccaccatgcctggctaatttttgtatttttaatagagacggggtttcaccatgttagccaggctggtggct

SEQ ID NO: 43640 - DNA, 120 bp, synthetic construct; identical to SEQ ID NO: 12367
  source 1..120: mol_type = other DNA

SEQ ID NO: 43641 - DNA, 120 bp, synthetic construct
  source 1..120: mol_type = other DNA
aagcaaaatgaacggctttgaatgaatggcttctctgtatttctttatcttctccaactccctagtgtttgattgcctcatatcctacatagtcctttggtgcttcccattgccgccttc

SEQ ID NO: 43642 - DNA, 120 bp, synthetic construct
  source 1..120: mol_type = other DNA
tatttttttggagacttattttgcaatgcctcttttgggggtaattttggagatttgttaaggtctctcacccattctgcagttttgataaggtggtgggagtgggggcatgtacgctcc

SEQ ID NO: 43643 - DNA, 120 bp, synthetic construct; identical to SEQ ID NO: 12368
  source 1..120: mol_type = other DNA

SEQ ID NO: 43644 - DNA, 120 bp, synthetic construct
  source 1..120: mol_type = other DNA
ctagttcatttatgatctaagcccagctcaccaatttaaaaaatcagaacttgagtcccaaataccagctaataataaattgtactttttctttgccttgtgctctcttccttgccacgt

SEQ ID NO: 43645 - DNA, 120 bp, synthetic construct
  source 1..120: mol_type = other DNA
cctcctgagttcaagcgattctcctgtctcagcctccagagtagctgggattacaggcatgcgccaccatgcccggctaattttgtatttttagtacagacagggtttcaccatttggtg

SEQ ID NO: 43646 - DNA, 120 bp, synthetic construct
  source 1..120: mol_type = other DNA
tgcactgggggaaaatttacttcttaaagcacactcatagggcaaatttccatgggtcaaaaaactattattaatttaataggaaaaaagtgcattcttgagctcctatattaaacctaa

SEQ ID NO: 43647 - DNA, 120 bp, synthetic construct
  source 1..120: mol_type = other DNA
ctaccaaagcttgttcttaactatcacatagtataaactccagattcccttacagaatatatcataccgaatatgtacataattcaaacttcagtgtaaggaaagcaaaacaaaaccagc

SEQ ID NO: 43648 - DNA, 120 bp, synthetic construct; identical to SEQ ID NO: 12369
  source 1..120: mol_type = other DNA

SEQ ID NO: 43649 - DNA, 120 bp, synthetic construct
  source 1..120: mol_type = other DNA
tcctgcttcaacctcctgagtagctgggattacaggcacacaccacgacgcctggctaattttttgtattttttgtagagatggggttttaccatgttggccaggctggtctcaaactcc

SEQ ID NO: 43650 - DNA, 120 bp, synthetic construct
  source 1..120: mol_type = other DNA
taatgaaatgaatttcccataaagtagaattcaaattcttctaatgagggatgatttccgggttccttggggctccacacacatggctttggtggacatgtgtctgctggcagatacagc

SEQ ID NO: 43651 - DNA, 120 bp, synthetic construct
  source 1..120: mol_type = other DNA
gtaatagtgtggggccttaatccagtatggctggtgtcctcataagaagaggagaagacaccagggttgactgtgctcagagaaaagaccatgtgaggatacagccagaaggctgccatc

SEQ ID NO: 43652 - DNA, 120 bp, synthetic construct; identical to SEQ ID NO: 12370
  source 1..120: mol_type = other DNA

SEQ ID NO: 43653 - DNA, 120 bp, synthetic construct
  source 1..120: mol_type = other DNA
ggttatttatgtttggagattaccacattctacagtgtctgctgtggatacgtatcttgtgttgtccatttcaagcttctcagctattctgcaagtaaagatcatctcagaggcccatga

SEQ ID NO: 43654 - DNA, 120 bp, synthetic construct
  source 1..120: mol_type = other DNA
ggtcctctcagaactcatggaattcctttcctcgggagaaaaccagattatttttgtaattaaaatagctgtatagctgtagacagaaaagaaaataaaaaagagaggcagggaaaactt

SEQ ID NO: 43655 - DNA, 120 bp, synthetic construct
  source 1..120: mol_type = other DNA
tatgctttgtaccctcagttgaaatattgcagcagttagattatttgatggaaatgggtggcttattcagaagtctggttttcaacatggtgtgaattaaggttagtaggtctgtaccat

SEQ ID NO: 43656 - DNA, 120 bp, synthetic construct; identical to SEQ ID NO: 12371
  source 1..120: mol_type = other DNA

SEQ ID NO: 43657 - DNA, 120 bp, synthetic construct
  source 1..120: mol_type = other DNA
aaatcaaaggcaagtgtttttctgtttgtttgtgttttaccttccctctcagagttctttattttttatttttattttatttttattttattttttgagacagagtgttgctcttgttgc

SEQ ID NO: 43658 - DNA, 120 bp, synthetic construct
  source 1..120: mol_type = other DNA
agataattttttttttttgtatttttagtagagatggagtttcaccacaatggccaggctggtctcaaactcctaacctcagatgatctgcccaccttggcctcccaaaatgttgggatt

SEQ ID NO: 43659 - DNA, 120 bp, synthetic construct; identical to SEQ ID NO: 12372
  source 1..120: mol_type = other DNA

SEQ ID NO: 43660 - DNA, 120 bp, synthetic construct
  source 1..120: mol_type = other DNA
atttcatttttttatagctgcatagtatttcatgatgtatgtgtaccacattttctttatccagttcactgttgatgggcactgaggttgattccatgtttttactattctgaatcgtgc

SEQ ID NO: 43661 - DNA, 120 bp, synthetic construct
  source 1..120: mol_type = other DNA
gttctttgagaaatctccaaactgctttccacagtggctcaacttatttacattcccaccaacagcgtataagcattctcttttctccacagcctcgtcagcatctgttcttttttgact

SEQ ID NO: 43662 - DNA, 120 bp, synthetic construct
  source 1..120: mol_type = other DNA
ttttgaaaagtatctgttcatgtttttttgcccattttttaaatgggggtgatttgttttttacttgttgggttatttaagtcccttatagattctggatattaggacctttgtcagaaa

SEQ ID NO: 43663 - DNA, 120 bp, synthetic construct
  source 1..120: mol_type = other DNA
gtttcctcatctgaaaaaatgggattaatattaaataatataggcaaaagtacttatgtattatatggcacatagtaggccacaagcagctagctgttaccttttcttctgatcaaaaaa

SEQ ID NO: 43664 - DNA, 120 bp, synthetic construct; identical to SEQ ID NO: 12373
  source 1..120: mol_type = other DNA

SEQ ID NO: 43665 - DNA, 120 bp, synthetic construct
  source 1..120: mol_type = other DNA
taagttgtagctactgttttaacagatttgcaaatagttagggtgggtctggctcaggcccaagtaactgattgggctcatatgcactaatttaagatccactgccagaatgaaaacttc

SEQ ID NO: 43666 - DNA, 120 bp, synthetic construct
  source 1..120: mol_type = other DNA
gaaggtgggacccatattttacatgtgctgggggagaggcatgattttgtggaaatctgttttattgtgttgaaatacttgtgtgtgttctgcctacttcatgctaataaagaattgaac

SEQ ID NO: 43667 - DNA, 120 bp, synthetic construct
  source 1..120: mol_type = other DNA
tgtagacagtggtatacaatggtaactagttttttatttacctgttacctgtcttttgtattcaaagttgtgctccagaaagtcaggggttatttttgattttgttcacagctatattcc

SEQ ID NO: 43668 - DNA, 120 bp, synthetic construct; identical to SEQ ID NO: 12374
  source 1..120: mol_type = other DNA

SEQ ID NO: 43669 - DNA, 120 bp, synthetic construct
  source 1..120: mol_type = other DNA
gctaactcctaagcagtgtgcccagagtcaacctaatttgttattttttttttttcttgtagaatcagggtctcgccatgttgcccaggctggtctcaaattcctgggctcaagcgagcc

SEQ ID NO: 43670 - DNA, 120 bp, synthetic construct
  source 1..120: mol_type = other DNA
cttttgcactatagctcagagttgagtcgttgcaacagaggccatatgatccatgaaacctaaaatgtcttctctgtagtcatttatagagtttgctgagccccaggataaagcatgggc

SEQ ID NO: 43671 - DNA, 120 bp, synthetic construct
  source 1..120: mol_type = other DNA
ttcctcatgtggaaaatggtaataacgattcctatctcattggatggttgtaagggttcaccaagatgaaacatcaggaaacattaactactaatatggagccatgtgtgctgggaattt

SEQ ID NO: 43672 - DNA, 120 bp, synthetic construct; identical to SEQ ID NO: 12375
  source 1..120: mol_type = other DNA

SEQ ID NO: 43673 - DNA, 120 bp, synthetic construct
  source 1..120: mol_type = other DNA
tctacctgtggaggtacttgcataaatacattcctttaaaggggaccaaaacagtaaagcaataaatagaaataccatctactggtataattgctataaactaatgcaaaaatggggtgt

SEQ ID NO: 43674 - DNA, 120 bp, synthetic construct
  source 1..120: mol_type = other DNA
aattacaaacattcccactacacagagaaaaaattgacttttaatacatctctcctacttaaagaactgagatgatagtgtaaaaataattttccatcacctcctttttaacttaatatt

SEQ ID NO: 43675 - DNA, 120 bp, synthetic construct
  source 1..120: mol_type = other DNA
atctgccctgcagaaaagtgcaaaaaaatgctttggtaacacctgtatattcttcaatcgtcaattatttttatttgccatattaattttatctctctctacagtttattttgttgagcc

SEQ ID NO: 43676 - DNA, 120 bp, synthetic construct; identical to SEQ ID NO: 12376
  source 1..120: mol_type = other DNA

SEQ ID NO: 43677 - DNA, 120 bp, synthetic construct
  source 1..120: mol_type = other DNA
ttactggacttagaactctgtgtttttaatcacttcatagtaatatctgtctgccatcttcttagatgttaactcttctacaaaaccttcctgactcccatctctccatacttcctttgc

SEQ ID NO: 43678 - DNA, 120 bp, synthetic construct
  source 1..120: mol_type = other DNA
atctaggctcactgcaatgtccacttcccaggttcaagagattctcctgcctcagcctcccaagtaactgggactacaggtgcccaccaccatgcccggctaatttttatatttttagta

SEQ ID NO: 43679 - DNA, 120 bp, synthetic construct; identical to SEQ ID NO: 12377
  source 1..120: mol_type = other DNA

SEQ ID NO: 43680 - DNA, 120 bp, synthetic construct
  source 1..120: mol_type = other DNA
ggaggatttctgttactgaattcaccacctgccaacattgagtgttaggactcaaacagtatgttgtttgggccattttatgtccacaccactcttacaaatttctttatgggaaagaaa

SEQ ID NO: 43681 - DNA, 120 bp, synthetic construct
  source 1..120: mol_type = other DNA
tgttaaattgggagccatagagaacaaaattaccaggaattccactattctgaagcttttaaataaaaaccctgctgctgttttcctatttaaaaataaaccatatgttatctttctttc

SEQ ID NO: 43682 - DNA, 120 bp, synthetic construct
  source 1..120: mol_type = other DNA
ttctagaattgtaaacatagctatggggaacagtttaggacataaatatttgtgcatattactagacactgaatattttaaatgaaagtatttcaaatatgcagaaaagtttaggtatta

SEQ ID NO: 43683 - DNA, 120 bp, synthetic construct
  source 1..120: mol_type = other DNA
tgaggaaatgtttctatcttggtagctcctagtttatgttaaatgggtgctagatttactaatttctgttaatgcagttcaagctgtctgagatctattgtatttacacaatacaataga

SEQ ID NO: 43684 - DNA, 120 bp, synthetic construct; identical to SEQ ID NO: 12378
  source 1..120: mol_type = other DNA

SEQ ID NO: 43685 - DNA, 120 bp, synthetic construct
  source 1..120: mol_type = other DNA
cagagctaactacaattcttgtcaaaattgttggcttattcttaggatccattggttttatgctctacaaattagaggatctaatttgtagtctgcattccaatactgacgtttttagtg

SEQ ID NO: 43686 - DNA, 120 bp, synthetic construct
  source 1..120: mol_type = other DNA
ggagtttgagaccagcctggccaacatggtgaaaccctatctctactaaaaatacaaaaattagccggacgcagtggcgtgcacctgtagtctcagctactcgggaggctgtggctggag

SEQ ID NO: 43687 - DNA, 120 bp, synthetic construct; identical to SEQ ID NO: 12379
  source 1..120: mol_type = other DNA

SEQ ID NO: 43688 - DNA, 120 bp, synthetic construct
  source 1..120: mol_type = other DNA
ataagattatatatataatttgtgcattataaatgtacctcattcatgcataaatacatgcttcatacattaaacatgtatttttcccccatgcttagatccagtttattccagaaaaaa

SEQ ID NO: 43689 - DNA, 120 bp, synthetic construct
  source 1..120: mol_type = other DNA
ctggtgttagtatgtatcaagctctttagccagaaggaggagcaaggcaagtgaaccacatcccttggcacttagttccttcttactttccctatatgagagagtacatgcactcctgag

SEQ ID NO: 43690 - DNA, 120 bp, synthetic construct
  source 1..120: mol_type = other DNA
ctagtaaattataatgtcaagatcaaatcctggttttctcacccttatgggtaatatttaatgtcattgttccctttattacactacttttttcaccctagggtgacagctctcacaaag

SEQ ID NO: 43691 - DNA, 120 bp, synthetic construct; identical to SEQ ID NO: 12380
  source 1..120: mol_type = other DNA

SEQ ID NO: 43692 - DNA, 120 bp, synthetic construct
  source 1..120: mol_type = other DNA
aaggaacttctgcttagacaattattatgacttacttaaaatgatgaccttgatgtgttatatagtagtggaatctaagcaaagatggtactttctaccagctatcagtggatgggaaac

SEQ ID NO: 43693 - DNA, 120 bp, synthetic construct
  source 1..120: mol_type = other DNA
ggtttgtgcgcatcaagctctttagctagaagaaagatcaaggcaaagggaaccacatccattctcatattagttacgttacaagtagcttgttagaatgatgaaaaatactttcctttt

SEQ ID NO: 43694 - DNA, 120 bp, synthetic construct
  source 1..120: mol_type = other DNA
cagaactctatgactatatccatagcacagtaatctgtttaatcatctcttacaaaatgatgccatgtgtggaccgcatttgggattctgaaaacgtgatgtgccttagtcatctttaga

SEQ ID NO: 43695 - DNA, 120 bp, synthetic construct; identical to SEQ ID NO: 12381
  source 1..120: mol_type = other DNA

SEQ ID NO: 43696 - DNA, 120 bp, synthetic construct
  source 1..120: mol_type = other DNA
ggttctgatgaagacagctcatggccatctagtgcccgatcgtgttgacaaagacaaagaagctactaaaccagagtttaacaaccacaaagattatgcccaggaaaagccctctcgtct

SEQ ID NO: 43697 - DNA, 120 bp, synthetic construct
  source 1..120: mol_type = other DNA
cctcctcctcttcccccttctcctcctccccctcctcctcctccccctcctcctcttcccccttctcctcctcccccttctcctcctcccccttctcctcctcccccttctcctcctccc

SEQ ID NO: 43698 - DNA, 120 bp, synthetic construct
  source 1..120: mol_type = other DNA
gtttacattcttgcctgaaacttgcagagcattttctccaaatagtattttttatgataaaggcggcaagttattttaacatcctttcttatactaaatcagagtttctcagtctcagca

SEQ ID NO: 43699 - DNA, 120 bp, synthetic construct; identical to SEQ ID NO: 12382
  source 1..120: mol_type = other DNA

SEQ ID NO: 43700 - DNA, 120 bp, synthetic construct
  source 1..120: mol_type = other DNA
gactatgatttcttgatgcaaacgtccacggtatgaggttgcagcttttgtcgtttatttctatctgtcactcattatgttttacatctccagtaatacataccgattcatcatacttag

SEQ ID NO: 43701 - DNA, 120 bp, synthetic construct
  source 1..120: mol_type = other DNA
atttgtaatggcatgcataatcttaattttgctctgtttcttgacaaaattttaaattgcccttgaatttttcaactacatttgattttcttcatcttactgaattgtctgaagatcaat

SEQ ID NO: 43702 - DNA, 120 bp, synthetic construct
  source 1..120: mol_type = other DNA
tttgagtttgatgttcacatgttctgaactatttcaaaatgagtttaggccaggtgcagtggcttaaacctgtaatcccagtactttgggagttagaggtggatggatcatctgaggtca

SEQ ID NO: 43703 - DNA, 120 bp, synthetic construct
  source 1..120: mol_type = other DNA
aattgcttgaacccaggagacagaggttgcagtgagccgacacggtgtcactgcactccagcctgggtgacagagtaagactctgtctcaaaaaaaaaaaaagtgagcttaaagttcaaa

SEQ ID NO: 43704 - DNA, 120 bp, synthetic construct; identical to SEQ ID NO: 12383
  source 1..120: mol_type = other DNA

SEQ ID NO: 43705 - DNA, 120 bp, synthetic construct
  source 1..120: mol_type = other DNA
aaaaaaaaaaaaaagtgaacatagatttgcatacatgtataagcttgaagaatttgaagcttccctatgcttaatggattcgtggttttattacatacatacactgtatatgtgcacata

SEQ ID NO: 43706 - DNA, 120 bp, synthetic construct
  source 1..120: mol_type = other DNA
tgtttgctcagatcacatcttttctctctttcctgttatttcttatttaattcaggatctctggtaaaagacgtttcttagtttgtagtgttagtcctttgtgcctacaatattttcatt

SEQ ID NO: 43707 - DNA, 120 bp, synthetic construct; identical to SEQ ID NO: 12384
  source 1..120: mol_type = other DNA

SEQ ID NO: 43708 - DNA, 120 bp, synthetic construct
  source 1..120: mol_type = other DNA
gttcgcacagtaacagttactctaggagatgaaaaaggaaaagtgcatgaaaggttagttttcctcaattttttgcaagaatgacatgtgaaaaaaatattggtgaacctagctattcct

SEQ ID NO: 43709 - DNA, 120 bp, synthetic construct
  source 1..120: mol_type = other DNA
gtgcaaacattgtacagtaagagcagtgcagccttttggggtaatgatcatatattccttcaggtaacatgactaacagcttgggttaccaatacttagcctttgttttagggttgagag

SEQ ID NO: 43710 - DNA, 120 bp, synthetic construct
  source 1..120: mol_type = other DNA
gaactcggactgaggagaagtgggttctttcctcagctttgccattgactcgctgtgtggctttgggtaagtcagttacactttctgtgccatctttttttcatttgtaaaacaaaccaa

SEQ ID NO: 43711 - DNA, 120 bp, synthetic construct; identical to SEQ ID NO: 12385
  source 1..120: mol_type = other DNA

SEQ ID NO: 43712 - DNA, 120 bp, synthetic construct
  source 1..120: mol_type = other DNA
aatattttttgggggccatgcttaattttcagggatggcaacagtataagtaaagaactcaatatagggatgggataactgaaagatgattttgttggaggaaatggaagatagggaagg

SEQ ID NO: 43713 - DNA, 120 bp, synthetic construct
  source 1..120: mol_type = other DNA
tgttctttcccttctgcttgcctggctttagccttttttgctggttttgttaatatgtttactgtacagtggcaaagaaagagaatgctgataaggctcaaattacttaactttgttacc

SEQ ID NO: 43714 - DNA, 120 bp, synthetic construct
  source 1..120: mol_type = other DNA
taaatctgtctctcagatcactgggaattgtccagaaaggggcaaaattttagccaaattttaagtatatcaaatcactgaaggcttatgtagaatttgcctaaggactttgatagtgtc

SEQ ID NO: 43715 - DNA, 120 bp, synthetic construct; identical to SEQ ID NO: 12386
  source 1..120: mol_type = other DNA

SEQ ID NO: 43716 - DNA, 120 bp, synthetic construct
  source 1..120: mol_type = other DNA
tagtttgcaagatatacctgctttctcttttatctgtggttgtacaaagataaaaatgttcttttgaaattcagcatcaaacgcagcaactgctatatggtatgtgcgggtgagagcatg

SEQ ID NO: 43717 - DNA, 120 bp, synthetic construct
  source 1..120: mol_type = other DNA
ggtcagtgatgatatcagtcttctagggaggaagacttctttcccccattaaaggaaaacacagtttgtaagatcaaaaagtaaaatagacacatgtacatgtgcccctggtctgaaaat

SEQ ID NO: 43718 - DNA, 120 bp, synthetic construct
  source 1..120: mol_type = other DNA
tcaccccaacaaagctgcacaatcaccaccacaaatgcctgtagcgagaccactgaggcacttgcagatgctgctgacataaattacagctgaagaatctgcacagatactacactaccg

SEQ ID NO: 43719 - DNA, 120 bp, synthetic construct; identical to SEQ ID NO: 12387
  source 1..120: mol_type = other DNA

SEQ ID NO: 43720 - DNA, 120 bp, synthetic construct
  source 1..120: mol_type = other DNA
gcctgaaaagaaattcaaaataatgatcttaagggaactcagtgagatacaataaaatgcagatacttcaacaagattaggaaaccaattcatgatctgaatgagatattcaatgaagaa

SEQ ID NO: 43721 - DNA, 120 bp, synthetic construct
  source 1..120: mol_type = other DNA
gaacttgaagacaggtcttttgaaataacccatccagagggagaaaaagaaataaaaataagaaagaaggaaaaaagcctatagaacttatgggatgccactgagcaatggagaaaggca

SEQ ID NO: 43722 - DNA, 120 bp, synthetic construct
  source 1..120: mol_type = other DNA
ggcacattataatcaaactgtcaaatatcaaagaaaaagaatcctaagagtaatgagagaatagcaccaagtcatatatacttggatttccatttgactatcagcaagtttctcagcaga

SEQ ID NO: 43723 - DNA, 120 bp, synthetic construct; identical to SEQ ID NO: 12388
  source 1..120: mol_type = other DNA

SEQ ID NO: 43724 - DNA, 120 bp, synthetic construct
  source 1..120: mol_type = other DNA
gtcaaaagtaactacagctacaagtagttgttaaggaacatacaatatagagagatgtaaattaaggcatcagaaatataaattgtgaggggagggtaaaagtccagagtattttttttt

SEQ ID NO: 43725 - DNA, 120 bp, synthetic construct
  source 1..120: mol_type = other DNA
ggcatgcaccaccacacccaggtaatttttgtatttttaatagagatggggtttcacgatgttggccaggatggtctcgatctcctgaccttgtgatccgctcacctcggcctcccaaag

SEQ ID NO: 43726 - DNA, 120 bp, synthetic construct
  source 1..120: mol_type = other DNA
taaccacaaagaaaaaattgcagcagtcacactaatgagaaagggaaaggtatcaaagcttagcaccacaaaaaggtatcaaaccacaaaggtaagcaagagagcaagaaagaaatgaag

SEQ ID NO: 43727 - DNA, 120 bp, synthetic construct; identical to SEQ ID NO: 12389
  source 1..120: mol_type = other DNA

SEQ ID NO: 43728 - DNA, 120 bp, synthetic construct
  source 1..120: mol_type = other DNA
cactggagcatccaaatatatgaagtatgttttatctaaagggagagataggcttcaatgcaacaatagtagggaagttcaacaccccactttcaacaacagcagataatccagacagaa

SEQ ID NO: 43729 - DNA, 120 bp, synthetic construct
  source 1..120: mol_type = other DNA
catgtggcattctccaggacagatcatatgttaggccacaaaataaatctttaaaaatttaagatgatatcgtatatattttctgatcacactagtataaaactagaaatcaatactgag

SEQ ID NO: 43730 - DNA, 120 bp, synthetic construct
  source 1..120: mol_type = other DNA
gacacaacataccaaaagctatgggatacagcagaggcagttctaagagggaagtttacagtattaaatgcctacatttaagaagtaaaaaataaaccacctaatattgcacctccaaaa

SEQ ID NO: 43731 - DNA, 120 bp, synthetic construct
  source 1..120: mol_type = other DNA
tttttgaaaagacaaaatcagtaaacctttagctagacaaagaaagagatgactcaaataaataaaatccacattgaaaagaagacattacaacctataccacagaaatacaaaggataa

SEQ ID NO: 43732 - DNA, 120 bp, synthetic construct; identical to SEQ ID NO: 12390
  source 1..120: mol_type = other DNA

SEQ ID NO: 43733 - DNA, 120 bp, synthetic construct
  source 1..120: mol_type = other DNA
tagatgacatgatcctatatataaaaatacctttaaaagtttactaaaaaactgttaaaactaatacattcagtaaatttgcaggatacaaaatcagcatacaaaaatcagtatttcttt

SEQ ID NO: 43734 - DNA, 120 bp, synthetic construct
  source 1..120: mol_type = other DNA
gccgaggcgggtggatcatctgaggtcaggagttctagaccagcctggccaaaatggtgaaacctcgtctctactaaaaatacaaaaaaattagccgggcatggtggcaggcacctgtaa

SEQ ID NO: 43735 - DNA, 120 bp, synthetic construct
  source 1..120: mol_type = other DNA
aaaaaaatcagttatctaggaatacatttaacaaaggaggtgtaagatctctacactgcaatctataaaacattggtgaaataaatttaagaggacagaaataaatggaaagatatctca

SEQ ID NO: 43736 - DNA, 120 bp, synthetic construct; identical to SEQ ID NO: 12391
  source 1..120: mol_type = other DNA

SEQ ID NO: 43737 - DNA, 120 bp, synthetic construct
  source 1..120: mol_type = other DNA
atatccaactaattttcaacaaaggtgccaagaacacacattggggaaaggacagtttcttcaataaatggtacagggaaaattgaatatccacatgcagaagaatgaaattggacccct

SEQ ID NO: 43738 - DNA, 120 bp, synthetic construct
  source 1..120: mol_type = other DNA
ggattttttggacgagacctcaaaagcacaggcaacaaaagcaaaaatagacaagtgggattatatcaaactaaaaatcctctgcacagccaaggaaacaattaacagagtgaaaagaca

SEQ ID NO: 43739 - DNA, 120 bp, synthetic construct
  source 1..120: mol_type = other DNA
accttaataaacatttctcaaaagaaggcatacaaatggccaacagacatatgaaaacatgctcaacatcactaatcatcagcaaagtgcaaatcaaaaccacaatattaccttattcca

SEQ ID NO: 43740 - DNA, 120 bp, synthetic construct; identical to SEQ ID NO: 12392
  source 1..120: mol_type = other DNA

SEQ ID NO: 43741 - DNA, 120 bp, synthetic construct
  source 1..120: mol_type = other DNA
agaacctgtcattcgcaccaatatgggtgagcctggaggatattgtgtttagtgaaataagccagacatagaaagaaaaatactgcattgcccactcatatgtagaatcgaaaaaagtta

SEQ ID NO: 43742 - DNA, 120 bp, synthetic construct
  source 1..120: mol_type = other DNA
cgctggtgtcctattggacagtagggtgactatagtcaaccatcaggtattgtatatctcaaaatagctagaagagaggattttgtatgttctcaccacaaagaaatgaaaaatgttcaa

SEQ ID NO: 43743 - DNA, 120 bp, synthetic construct; identical to SEQ ID NO: 12393
  source 1..120: mol_type = other DNA

SEQ ID NO: 43744 - DNA, 120 bp, synthetic construct
  source 1..120: mol_type = other DNA
ggtggaaccgagtacaaaattatttcctgcggtttttgcacaagctacaagtcccaatgttttccagtttgagttgggaagaataaaggtaataaaacttattcctggtattgtatttgt

SEQ ID NO: 43745 - DNA, 120 bp, synthetic construct
  source 1..120: mol_type = other DNA
aggtcacaagggtaacaaaataattaaaaagtgtttctctttagttatcatatgtatattattcaataaaaggcctatagaaaaaaaaatgccgagattacacacattgcagcagtcatt

SEQ ID NO: 43746 - DNA, 120 bp, synthetic construct
  source 1..120: mol_type = other DNA
atcagctaaagctcaaagaagaggtaacatttagtttgattactaactgtaaaatagaagctcttggggtacgtttattaggagaggtcattctgggcagaggatgagaagaagcaaaaa

SEQ ID NO: 43747 - DNA, 120 bp, synthetic construct
  source 1..120: mol_type = other DNA
ttaagatggataaaaggtagaacaagtccaagttgaaaaggtcttgtgtgccatgtgaaaaggttagcatctattacatagacaagggaaatccattggaaatttgaagaaggggattga

SEQ ID NO: 43748 - DNA, 120 bp, synthetic construct; identical to SEQ ID NO: 12394
  source 1..120: mol_type = other DNA

SEQ ID NO: 43749 - DNA, 120 bp, synthetic construct
  source 1..120: mol_type = other DNA
cccactgtccctacctactatccagcgaaaccacagccaagggaacgggcttggtggaatccgcggggaaagaagaccctgttgagcttgactctagtctggcacggtgaagagccatga

SEQ ID NO: 43750 - DNA, 120 bp, synthetic construct; identical to SEQ ID NO: 12395
  source 1..120: mol_type = other DNA

SEQ ID NO: 43751 - DNA, 120 bp, synthetic construct
  source 1..120: mol_type = other DNA
ctgtattcaggagacccatctcatgtgcagagacacacatatgctcaaaataaagggatggaggaagatctaccaagcaaatggaaaacaaaggcagggattgcaatcctagtctctgat

SEQ ID NO: 43752 - DNA, 120 bp, synthetic construct
  source 1..120: mol_type = other DNA
gcacccagattcataaagcaagtccttagagacgtacaaagagacttagactcccacacaataataatgggagactttaacaccccactgtcaacattagacatatcaacgagacagaaa

SEQ ID NO: 43753 - DNA, 120 bp, synthetic construct
  source 1..120: mol_type = other DNA
tactccaaaattgaccacatagttggaagtaaagcactcctcagcaaatgtaaaagaacagaaattataacaaactgtctctcagaccacagtgcaatcaaactagaactcaggattaag

SEQ ID NO: 43754 - DNA, 120 bp, synthetic construct
  source 1..120: mol_type = other DNA
gacacaacataccagaatctctgggacacatttaaagcagtgtgtagagggaaacttatagcactaatgcccacaagagagagcaggaaagatctaaaattgacaccctaacatcgcaat

SEQ ID NO: 43755 - DNA, 120 bp, synthetic construct; identical to SEQ ID NO: 12396
  source 1..120: mol_type = other DNA

SEQ ID NO: 43756 - DNA, 120 bp, synthetic construct
  source 1..120: mol_type = other DNA
taaaccaggaagaagttgaatccctgaatagaccaataacaggctctgacattgaggcaataattaatagcctaccaaccaaaaaaagtccaggaccagacagattcacagccgaattct

SEQ ID NO: 43757 - DNA, 120 bp, synthetic construct
  source 1..120: mol_type = other DNA
gcagagacacaaccaaaaaaaagaactttagaccaatatctctgatgaacatcgatgcaaaaatcctcaataaaatactggcaaacggaatccagcaacacatcaaaaagcttatccacc

SEQ ID NO: 43758 - DNA, 120 bp, synthetic construct
  source 1..120: mol_type = other DNA
cagaaaaggcctttgacaaaattcaacagcccttcatgctaaaaactctcaataaattaggtattgatgggacgtatctcaaattaataagagctatttatgacaaacccacagccaata

SEQ ID NO: 43759 - DNA, 120 bp, synthetic construct
  source 1..120: mol_type = other DNA
aagaaataaagggtattcaattaggaaaagaggaagtcaaattgtccctgtttgcagatgacataattgtatatttagaaaaccccatcatctcagcccaaaatctccttaagctgataa

SEQ ID NO: 43760 - DNA, 120 bp, synthetic construct; identical to SEQ ID NO: 12397
  source 1..120: mol_type = other DNA

SEQ ID NO: 43761 - DNA, 120 bp, synthetic construct
  source 1..120: mol_type = other DNA
ctactttaaagttcatatggaaccaaaaaagagcctgcattgccaagtcaatcctaagccaaaagaacaaagctggaggcatcatgctacctgacttcaaactatactacaaggctacag

SEQ ID NO: 43762 - DNA, 120 bp, synthetic construct
  source 1..120: mol_type = other DNA
acaagaaatggggaaacgattccctatttaataaatggtgctgggaaaactggctagccatatgtagaaagctgaaactggatcccttccttacaccttatacaaaaattcatccaaggt

SEQ ID NO: 43763 - DNA, 120 bp, synthetic construct; identical to SEQ ID NO: 12398
  source 1..120: mol_type = other DNA

SEQ ID NO: 43764 - DNA, 120 bp, synthetic construct
  source 1..120: mol_type = other DNA
ctcaaaagaagtcatttatgcagccaacagacacgaaaaaatgctcatcatcaatggccatcagagaaatgcaatcaaaaccacaatgagataccatctcacaccagttagaatggtgat

SEQ ID NO: 43765 - DNA, 120 bp, synthetic construct
  source 1..120: mol_type = other DNA
caaggatctagaactagaaataccatttgacctagccatcccattactgggtatatacccaaaggattataaatcatgctgttataaagacacatgcacacgtatgtttattgtggcatt

SEQ ID NO: 43766 - DNA, 120 bp, synthetic construct
  source 1..120: mol_type = other DNA
gtcctttgtagggacatggatgaagctggaaaccacaattctcagcaaactatcacaaggacaaaaaaccacacaccgcatgttcttactcacaggtgggaattgaacaatgaaaacact

SEQ ID NO: 43767 - DNA, 120 bp, synthetic construct
  source 1..120: mol_type = other DNA
acatggcacatgtatacatatgtaacaaacctgcacattgtgcacatgtaccctagaagttaaagtataataaaaaaaagaataggatttaacaatgaattggactaatagaatttgtag

SEQ ID NO: 43768 - DNA, 120 bp, synthetic construct; identical to SEQ ID NO: 12399
  source 1..120: mol_type = other DNA

SEQ ID NO: 43769 - DNA, 120 bp, synthetic construct
  source 1..120: mol_type = other DNA
taaaattttcatcatcaagaaatcagttgtaattcatctttgagtgtgaatggaatatttgagggcagatgtagagagtgggaagagatggctgaggagagagcctggttgtatcaacta

SEQ ID NO: 43770 - DNA, 120 bp, synthetic construct; identical to SEQ ID NO: 12400
  source 1..120: mol_type = other DNA

SEQ ID NO: 43771 - DNA, 120 bp, synthetic construct
  source 1..120: mol_type = other DNA
aaaattattttaggcagatgtggtggtgcacgcctttagtcccagatcctccagaggctgaggtgggaggatcacttgagagtgcagacatggaggctgctgtgagccgtgattgcgctg

SEQ ID NO: 43772 - DNA, 120 bp, synthetic construct
  source 1..120: mol_type = other DNA
aaattggacaaggagttgtagtttctcagaagcctgactgatatattcagtcatctattgactattgacttctactgacattttcattggccgactaatagctatcacaaattgaatgca

SEQ ID NO: 43773 - DNA, 120 bp, synthetic construct
  source 1..120: mol_type = other DNA
ttccctccctcccttccttccttccttgtccctgtcccttttctttcttgctgacagtctcactctgtcacccaggctagagtgcactgatgtgatctcagctcactacaacctctctct

SEQ ID NO: 43774 - DNA, 120 bp, synthetic construct
  source 1..120: mol_type = other DNA
ttcttactgacagtctcactctgtcacccaggctagagtgcagtgatgtgatctcagctcactacaacctctctctctctctttttttctttctctctccttgcttccctccctccatcc

SEQ ID NO: 43775 - DNA, 120 bp, synthetic construct; identical to SEQ ID NO: 12401
  source 1..120: mol_type = other DNA

SEQ ID NO: 43776 - DNA, 120 bp, synthetic construct
  source 1..120: mol_type = other DNA
tctgacaaccccatttaaaattgctgcccttgattctggttcccccattctagctttctgtcccccaaacccccaggcccatgacatctcttttaaaataccatttaattcatttaattt

SEQ ID NO: 43777 - DNA, 120 bp, synthetic construct
  source 1..120: mol_type = other DNA
cgcctattgttagagggcaataggaaagcagtttgaggatgaagtagtctacagcatgcagttgagggggctctagaggagaagaagagatagaagataatgcagaaatatgagataatg

SEQ ID NO: 43778 - DNA, 120 bp, synthetic construct; identical to SEQ ID NO: 12402
  source 1..120: mol_type = other DNA

SEQ ID NO: 43779 - DNA, 120 bp, synthetic construct
  source 1..120: mol_type = other DNA
gtcattcaggaagtttggcactgaaagtccctaaagacttgccagctttcccggaggtcccagcctggtaaagaaatataaaggatatatgggtatgcttggccttctctctgtgccatt

SEQ ID NO: 43780 - DNA, 120 bp, synthetic construct
  source 1..120: mol_type = other DNA
tttcttgtgttgactttgcttgactcatagggttatcttactttccctgtctctgtcctgtgcagaattctagtcattactttgtgaaccccaagggatgttctacatttattctttttc

SEQ ID NO: 43781 - DNA, 120 bp, synthetic construct
  source 1..120: mol_type = other DNA
tggagcagaatgcccaaccagtttttgaaggtagatgtgtctcgaataagtgaacgccaaggctggttggtgcagtgtttggatcctctgcagttcatgtctcttcatatccctgaggaa

SEQ ID NO: 43782 - DNA, 120 bp, synthetic construct; identical to SEQ ID NO: 12403
  source 1..120: mol_type = other DNA

SEQ ID NO: 43783 - DNA, 120 bp, synthetic construct
  source 1..120: mol_type = other DNA
tatgacttagcagagtactgtaatagagaatagtgagatattagagatggaatcataagaatcacttatgattcctatgttcaacccttcattttatagatgtaaaaaactgatccaaga

SEQ ID NO: 43784 - DNA, 120 bp, synthetic construct
  source 1..120: mol_type = other DNA
ctttgtttatgattttctgtttttccatatgatagccaattaaattgcagagatttcatttaagcagccttcttatcaataaggagctaagtttctaagttttgggccaagatttccctc

SEQ ID NO: 43785 - DNA, 120 bp, synthetic construct
  source 1..120: mol_type = other DNA
atttttatatctttagatgttcttggcattttttattttaatatctttaaaatttaacctatgctttggaaaacagtttgtcagttcctcaaaaaataaaattatagcgttaacatgtga

SEQ ID NO: 43786 - DNA, 120 bp, synthetic construct
  source 1..120: mol_type = other DNA
gttcaccagcttatgagtcaataaacaaaatgtgatatatccatataatattatttggcaataaaaatgattgaagtactgatatatgctacaaaatgcaagaactttgaagacattata

SEQ ID NO: 43787 - DNA, 120 bp, synthetic construct; identical to SEQ ID NO: 12404
  source 1..120: mol_type = other DNA

SEQ ID NO: 43788 - DNA, 120 bp, synthetic construct
  source 1..120: mol_type = other DNA
aaaatcaaagaaaaattaatctggctagttaattctttttatgtattacatatgtatttacattttttacatgaggtaattagatatctttcataatgtactcttgagatggttcagttt

SEQ ID NO: 43789 - DNA, 120 bp, synthetic construct
  source 1..120: mol_type = other DNA
ttgtttatgaaggaaaacgttgtgtctctactgagcatggaattttaacattataatttaacattttggcatgctatcatcgaaaaccaacataacaccttgtctcagtagtttatatta

SEQ ID NO: 43790 - DNA, 120 bp, synthetic construct; identical to SEQ ID NO: 12405
  source 1..120: mol_type = other DNA

SEQ ID NO: 43791 - DNA, 120 bp, synthetic construct
  source 1..120: mol_type = other DNA
gtgtgcaatggtggtagatttatgtcagtgtgtactttgtttctccttaacacatgtcacagtttataatttaatttactccattttggtcagcgggggtggtttactccctcaattgaa

SEQ ID NO: 43792 - DNA, 120 bp, synthetic construct
  source 1..120: mol_type = other DNA
tataagctccctgggggcaggaatcatgtctatattattcaccattgtatcatcagtgcgcagtgctaatacataataggcactcagtgatatttgatgaacaattgaatgacaatgaca

SEQ ID NO: 43793 - DNA, 120 bp, synthetic construct
  source 1..120: mol_type = other DNA
gccacagatccttgatacaatggaggaggaaggaggtgctagatgaatgtcaaattctatgtagaagaaaatttgtagaacatctagaaatgattaaaagtactatgcagccattaaaca

SEQ ID NO: 43794 - DNA, 120 bp, synthetic construct
  source 1..120: mol_type = other DNA
aacattttgagcaccaacataatgctcaaaggaaatggggtatttcacatttcagactttcagattcaggatgctcaaccggtaagtataatgcaaacatttcaaagtctgaataaagtc

SEQ ID NO: 43795 - DNA, 120 bp, synthetic construct; identical to SEQ ID NO: 12406
  source 1..120: mol_type = other DNA

SEQ ID NO: 43796 - DNA, 120 bp, synthetic construct
  source 1..120: mol_type = other DNA
ctctatgccattgagaacaagtacatgcctggtttgctgcgtgctggctactatgacctgctgattgacatccacctgagctcctatgccactgccaggctcatgatgaacaacgagtac

SEQ ID NO: 43797 - DNA, 120 bp, synthetic construct
  source 1..120: mol_type = other DNA
cccagttttgtaagcattagtaatgaatgttaccagtacagtccagagttcccactggacatcctcaagtccaaaaccatacagatgctgacagaagctgttaaagagggcagtcttcat

SEQ ID NO: 43798 - DNA, 120 bp, synthetic construct
  source 1..120: mol_type = other DNA
tacctctcatcaagcttttctataccctgctgatcatgggcatctttcacaacgaggacttgaagcacatcttgcagttgattgagcccagtgtgtttaaagaagctgccactccggagg

SEQ ID NO: 43799 - DNA, 120 bp, synthetic construct; identical to SEQ ID NO: 12407
  source 1..120: mol_type = other DNA

SEQ ID NO: 43800 - DNA, 120 bp, synthetic construct
  source 1..120: mol_type = other DNA
ttgtttcccagatgctttttaccttcattacattggaatacctgaaatacaagccatcaaatacccctttccacccatatttccactcttaccaaccttagaatacttgtttaccagtag

SEQ ID NO: 43801 - DNA, 120 bp, synthetic construct
  source 1..120: mol_type = other DNA
tcactgcagcctagaactcctgggctcaagccatcctcccacctcagcttctacagcagctgggactgtaggtatgccaccatgcccagttaatttttttttatttttagtcgaaatgag

SEQ ID NO: 43802 - DNA, 120 bp, synthetic construct; identical to SEQ ID NO: 12408
  source 1..120: mol_type = other DNA

SEQ ID NO: 43803 - DNA, 120 bp, synthetic construct
  source 1..120: mol_type = other DNA
ctctgggtatgcacttaggggaaacacaagtgaaccctgcctttcagaatctcacagcctctaaggaaatatacactcatttatgcattaaaaaatcttattgctaattgcattaaatac

SEQ ID NO: 43804 - DNA, 120 bp, synthetic construct
  source 1..120: mol_type = other DNA
cagagattttgacttttaagctgagttcagatttaagagttgtgctcagcagttacaagaaaaaggaacaaggcagggtgttctaggagctttccatgcaaaacaaatagcccagcaaag

SEQ ID NO: 43805 - DNA, 120 bp, synthetic construct
  source 1..120: mol_type = other DNA
accatgctcagaggagggtggggcaaaggagatggagaaaaggggttggacactgtgactacttcagagacagcactgatagaaatggttatattgtagatggtgacacagagggtttta

SEQ ID NO: 43806 - DNA, 120 bp, synthetic construct
  source 1..120: mol_type = other DNA
ttctctcttagaaatgtttctaccaacatactcactcagttataaatccttttggttttcagtaggagaaagacccagctaatcactgaatgaatgagcattcaccacttaattgtctta

SEQ ID NO: 43807 - DNA, 120 bp, synthetic construct; identical to SEQ ID NO: 12409
  source 1..120: mol_type = other DNA

SEQ ID NO: 43808 - DNA, 120 bp, synthetic construct
  source 1..120: mol_type = other DNA
taatggactcacagttccacatggctggggaggcctcacaatcctggcgaaaggcaaatgaggagcaaagtcacatcttacatggtggcaggcaagagggcatgtgcaggggaacttcca

SEQ ID NO: 43809 - DNA, 120 bp, synthetic construct
  source 1..120: mol_type = other DNA
caattcaaggtgagatttcatggggaaagaaccagaccatatcagttaacatccactaaagggacatttgtttgccatttttgcttatacaaattatgtttcatctcctgggaccgagca

SEQ ID NO: 43810 - DNA, 120 bp, synthetic construct; identical to SEQ ID NO: 12410
  source 1..120: mol_type = other DNA

SEQ ID NO: 43811 - DNA, 120 bp, synthetic construct
  source 1..120: mol_type = other DNA
aacatgtcagctgcactcacagccaggaagacaaaggaatttagatcaccacctcaagaacaggtacagaaatgaaatgaaaattcttcgtatttatgttggcttttagtcattcaggat

SEQ ID NO: 43812 - DNA, 120 bp, synthetic construct
  source 1..120: mol_type = other DNA
caaaagagggacttattagaagatatcaggtatatcaccgactctttgagaaggccaagatatgccagagtctgaagttcttcaaataggagcaaatttcaaccacaaatgggtcttcat

SEQ ID NO: 43813 - DNA, 120 bp, synthetic construct
  source 1..120: mol_type = other DNA
gcttgtggtttcttcctttcattgcttacccccaaagtcaggtctcctgagggtacaacagaacaaagggaacctgcctatatcagagaatgggctagttgggggatgtaaattttctgg

SEQ ID NO: 43814 - DNA, 120 bp, synthetic construct
  source 1..120: mol_type = other DNA
ttttttgatttcttacccttaccattttcttctctatccagggtagctcagaatgaaagtgtttatagggactaattacagaatttttttttttctcaccagaatgtaatttctttgagg

SEQ ID NO: 43815 - DNA, 120 bp, synthetic construct; identical to SEQ ID NO: 12411
  source 1..120: mol_type = other DNA

SEQ ID NO: 43816 - DNA, 120 bp, synthetic construct
  source 1..120: mol_type = other DNA
aaaagctgcaacaaaagcctcctctttctagataaaggatcagggaaggggcagcttagcaagacagaaatgtgttagataataactgcactactgaagccaaaaaccacagaaaaaact

SEQ ID NO: 43817 - DNA, 120 bp, synthetic construct
  source 1..120: mol_type = other DNA
aaggcccatttcttccaaagtatcagtagaggttatggaaggagaagtagcaagacactcttacctttctagcaaggttcacatcagtacaggtctaatgaggaaccagaactttttacc

SEQ ID NO: 43818 - DNA, 120 bp, synthetic construct; identical to SEQ ID NO: 12412
  source 1..120: mol_type = other DNA

SEQ ID NO: 43819 - DNA, 120 bp, synthetic construct
  source 1..120: mol_type = other DNA
caaagatgttaaaattatctgatgaagttttgaaagcaatcgccctgtaattccttcaaaatggaaaagaaatagaaagcctcaacggcagagaaacaaaatatatggcaaagaaccaaa

SEQ ID NO: 43820 - DNA, 120 bp, synthetic construct
  source 1..120: mol_type = other DNA
ctaccccatctgaagaaaagatgaagatgaatataacaaaagatctaacatttgtgatgttggagtctcagaggataggagaaagagggtgaactgaagaaaataatgctgaaaactttt

SEQ ID NO: 43821 - DNA, 120 bp, synthetic construct
  source 1..120: mol_type = other DNA
gtctttaaagaaatgacactacctacagggggagaaacaatttgagtgacagcagatttctcattagaaagtatggagggcagaaggaagtggcacagcaattttcaaatgctgaaagaa

SEQ ID NO: 43822 - DNA, 120 bp, synthetic construct
  source 1..120: mol_type = other DNA
aagaatgctaaaggaagttctttaaatataaggaaaatgaaaaatgaaggaaatttggaaaattcagaaaggaagaaattaacactgggtaatgttgtaatatggtgaatgcagtgcatt

SEQ ID NO: 43823 - DNA, 120 bp, synthetic construct; identical to SEQ ID NO: 12413
  source 1..120: mol_type = other DNA

SEQ ID NO: 43824 - DNA, 120 bp, synthetic construct
  source 1..120: mol_type = other DNA
atcagaacaaacggaaccacaggtgaaatgacagactgaagtcatagcatatcaataatctaaatataccaattacaagaaattggcagagtgaatttataaaactcaatctaactatat

SEQ ID NO: 43825 - DNA, 120 bp, synthetic construct
  source 1..120: mol_type = other DNA
aagttgacttcagagcacagaaaattaccaaggagataaggatcatacataatggtcagtccaccaagaagataaatatatatgaattaaacaacaaagcaaaatatgtgaagccaaaac

SEQ ID NO: 43826 - DNA, 120 bp, synthetic construct; identical to SEQ ID NO: 12414
  source 1..120: mol_type = other DNA

SEQ ID NO: 43827 - DNA, 120 bp, synthetic construct
  source 1..120: mol_type = other DNA
acaacacacttctaaataatctatggtttgaggaagtatggggagaaatttaaagattcattaaactaaaagaaattggacacatcacatttgaaaatttttgccacagctaaagcaagg

SEQ ID NO: 43828 - DNA, 120 bp, synthetic construct
  source 1..120: mol_type = other DNA
agcagaaagaagtcactaatgtagataataacagaaagtaatgaaactgaaaacaggacaatagaaaaaatggatccaaaagctggtttttaaaaaatagcaataaagttgacaaacctc

SEQ ID NO: 43829 - DNA, 120 bp, synthetic construct
  source 1..120: mol_type = other DNA
cataccaggaatgaaactacttatcatggcacaccctgctgacgtcaggtgataacatgggatttttttcttctcacctttgaaataacgataagtagatgagctgatgaatatgttaat

SEQ ID NO: 43830 - DNA, 120 bp, synthetic construct; identical to SEQ ID NO: 12415
  source 1..120: mol_type = other DNA

SEQ ID NO: 43831 - DNA, 120 bp, synthetic construct
  source 1..120: mol_type = other DNA
aggaattatcctctattttgactgcactaatgttgctatcctggttatgagattgtactacagttttgcaaagtgttaccaatcgggaaactgcataaagcgtacttgaagtctctctgt

SEQ ID NO: 43832 - DNA, 120 bp, synthetic construct
  source 1..120: mol_type = other DNA
aagcatctttctcttccgaatttataaatttaatagtattgttcaaacataaatggtaaagtttcccgcagtttaactgaaccattaatgttagcagcgcgtagttatcccttataaaga

SEQ ID NO: 43833 - DNA, 120 bp, synthetic construct
  source 1..120: mol_type = other DNA
agtggaaaattctacacgtaaatacttagtacaaagtttatttcatgcacaaaattatttaaaatattttataaaatttccttcaggctatgtgtgtaaggtgtgtatgaaacatagatg

SEQ ID NO: 43834 - DNA, 120 bp, synthetic construct
  source 1..120: mol_type = other DNA
ttcagaaaaattccacaaagttccaaagcacaaaacttgaatttgctgtgcaccaagtactatgtctaatccacttaaatgaagtgatatgtcagcactgccttgggtattataagtaat

SEQ ID NO: 43835 - DNA, 120 bp, synthetic construct; identical to SEQ ID NO: 12416
  source 1..120: mol_type = other DNA

SEQ ID NO: 43836 - DNA, 120 bp, synthetic construct
  source 1..120: mol_type = other DNA
aaaaagagttcttgtaaatattcaatgaatgttcaatagagatgttagctagaaaataatggaaatttaggataagcatgatacaatactttttaaaaatagcatttagatctcttagtt

SEQ ID NO: 43837 - DNA, 120 bp, synthetic construct
  source 1..120: mol_type = other DNA
cttgttaagctatggatgatttgatttattctgcggtactggttggattgtgtgatggacacctgtggaggaataatttatgaacaatcagagattttgagcatttttgcttttgtggta

SEQ ID NO: 43838 - DNA, 120 bp, synthetic construct
  source 1..120: mol_type = other DNA
gctcactgcaacctccacctcccaggttcaaacaattctactgcctcagcctcctgagtagctgggactacaggcatgcaccaccacacccaactaatttttgtatctttagtagagatg

SEQ ID NO: 43839 - DNA, 120 bp, synthetic construct; identical to SEQ ID NO: 12417
  source 1..120: mol_type = other DNA

SEQ ID NO: 43840 - DNA, 120 bp, synthetic construct
  source 1..120: mol_type = other DNA
gtatatgcgaatattttcacgaatacacacgatacctgttagaaagttatataaaaacatttattattatggcaaaatggcaaaataactgtccctatgtggggagtcctgagggataga

SEQ ID NO: 43841 - DNA, 120 bp, synthetic construct
  source 1..120: mol_type = other DNA
aggttaaggttggtttagtcaatgggtacaaagtttcggttatacaagatgaatgaattctggagatccatggcacaacagggtgcttctagttcacaatactgtattgtgcacttaaaa

SEQ ID NO: 43842 - DNA, 120 bp, synthetic construct; identical to SEQ ID NO: 12418
  source 1..120: mol_type = other DNA

SEQ ID NO: 43843 - DNA, 120 bp, synthetic construct
  source 1..120: mol_type = other DNA
gaatgcctatggaaaccctacattaagttgttatgtcagtaatccaaatctgttaagggaagtctcccctccttttattctaagaactttaaaaatggaattgattaggtattctggacg

SEQ ID NO: 43844 - DNA, 120 bp, synthetic construct
  source 1..120: mol_type = other DNA
gttatcttattttaatgaagataataaaaacaccactttgcatattaatttggtttatgaatgaagtaccactaaatgactcccagaaaattatactacatgtgtgtgtacatgtatgtg

SEQ ID NO: 43845 - DNA, 120 bp, synthetic construct
  source 1..120: mol_type = other DNA
gggatactagaattctagtatccctacaaatacagggatactttaaaactttagaattactgcttcagatataaagcattccctggtttagggtacctaattatgcctgttctctctgtt

SEQ ID NO: 43846 - DNA, 120 bp, synthetic construct; identical to SEQ ID NO: 12419
  source 1..120: mol_type = other DNA

SEQ ID NO: 43847 - DNA, 120 bp, synthetic construct
  source 1..120: mol_type = other DNA
aaaaagagagaggaagaaaagaggctgaccagtgaatgttatttatgagggctggtaagcaacattgcttaacttaatgttagatgtttttgacattgttctaagttgtgcatgaaagaa

SEQ ID NO: 43848 - DNA, 120 bp, synthetic construct
  source 1..120: mol_type = other DNA
tttaacaattagagggcgtctgctatccctggtagaaaaggtgacatatctgaagaagaagcaagcagaaaaaccagttgagagtgactccaaaaagtcctgtaagcagtatgagagtgc

SEQ ID NO: 43849 - DNA, 120 bp, synthetic construct
  source 1..120: mol_type = other DNA
tgtagctcccagaaataaacagcagcatcagtctatgtgtatagcaacagactgagaggtagcagcatgataaagatggatggtctccatagagaactagaaatttaggtattttatcag

SEQ ID NO: 43850 - DNA, 120 bp, synthetic construct; identical to SEQ ID NO: 12420
  source 1..120: mol_type = other DNA

SEQ ID NO: 43851 - DNA, 120 bp, synthetic construct
  source 1..120: mol_type = other DNA
acttttacagcacttttttttgacttacaacagaaaacctttattcatacagttacttctaaatttatttttcagtgtcacaatcacaaatttgagtcaagttttctttaaaatcagagt

SEQ ID NO: 43852 - DNA, 120 bp, synthetic construct
  source 1..120: mol_type = other DNA
ttactgcaacctctgcttccctgtctcagcctcctgagtagctggaattacaggcatgcaccaagacgcctgattagtttttatatttttagtagagactgagttttaccatgatggcca

SEQ ID NO: 43853 - DNA, 120 bp, synthetic construct
  source 1..120: mol_type = other DNA
tgcatggccagagttcaacgtttcttatgaatcactttctattattatcaagtttatgatcttgagtggttaaaatgacagtgtggttttcagatataggggaatatattggcattttat

SEQ ID NO: 43854 - DNA, 120 bp, synthetic construct
  source 1..120: mol_type = other DNA
catcgtgcataaattggtcaccccacttaattttggtaatttcactgtttatttgaaaagatttggacttttctattgcttttacatttactatgtttcatgttacattgcaaagtaatt

SEQ ID NO: 43855 - DNA, 120 bp, synthetic construct; identical to SEQ ID NO: 12421
  source 1..120: mol_type = other DNA

SEQ ID NO: 43856 - DNA, 120 bp, synthetic construct
  source 1..120: mol_type = other DNA
aaagaaaggtttgtgttttttatctttgcatgattgtaactgatctgtattgaaatatgtatcatccaatgaaggttattttcttcaaagaatatctagagccttttcaagcctggtaca

SEQ ID NO: 43857 - DNA, 120 bp, synthetic construct
  source 1..120: mol_type = other DNA
aatgtccaactgatttgtcttctcttatttttcttttaaaaaatatccataatgactttgcagccactctgcagcagctgatttctgagaccatggtccgatgggctcaggagtctgtca

SEQ ID NO: 43858 - DNA, 120 bp, synthetic construct; identical to SEQ ID NO: 12422
  source 1..120: mol_type = other DNA

SEQ ID NO: 43859 - DNA, 120 bp, synthetic construct
  source 1..120: mol_type = other DNA
attatacgattattatactaaatagcttttcttttttttatttattattatcatactttaagttttatggtacatgtgcacaatgtgcaggttagttacatatgtatacatgtgccatgc

SEQ ID NO: 43860 - DNA, 120 bp, synthetic construct
  source 1..120: mol_type = other DNA
caacagtccccagagtctgatgttccccttcctgtgtccatgtgttcacattgttcaattcccacctatgagtgagaatatgcggtgtttggttttttgttcttgcgatagtttactgag

SEQ ID NO: 43861 - DNA, 120 bp, synthetic construct
  source 1..120: mol_type = other DNA
tgtatatgtgccacattttagagatagaaacaaaagctaagttagaaagttgctcagtaatgaaacaagactaattttacagtgtggcacacagccaatatctttcagtgttttttttta

SEQ ID NO: 43862 - DNA, 120 bp, synthetic construct; identical to SEQ ID NO: 12423
  source 1..120: mol_type = other DNA

SEQ ID NO: 43863 - DNA, 120 bp, synthetic construct
  source 1..120: mol_type = other DNA
acagtccctcattggaagaccttctaaaatttttatgctaaatgttaatatatacattagggagaagaaaacggaattcagagaaaaagaatgggatgcaacacgtttttttgagtatac

SEQ ID NO: 43864 - DNA, 120 bp, synthetic construct
  source 1..120: mol_type = other DNA
acaaccaaagcccaggctgtttttttgtggtacagcaaaagcccaggctccaccacgacacaatatatgcacgcaggaaatctgtatttgcaccccctaaatatttaaaatatttttaaa

SEQ ID NO: 43865 - DNA, 120 bp, synthetic construct
  source 1..120: mol_type = other DNA
ggatgttaaacagtgattagaagacaaatatttagcagaaaaaaaagctgatgtagttacatagatatcaggcaaaagaggagataataaaggtaactgctacatgaataaaatagacca

SEQ ID NO: 43866 - DNA, 120 bp, synthetic construct
  source 1..120: mol_type = other DNA
tttgacagaactcaaatacaatcctgagggaagaaaacaagtgtataatgatacagactgtttcatatcatttctatacattttaactcagaaaacaatattgcatattgctcatggacc

SEQ ID NO: 43867 - DNA, 120 bp, synthetic construct; identical to SEQ ID NO: 12424
  source 1..120: mol_type = other DNA

SEQ ID NO: 43868 - DNA, 120 bp, synthetic construct
  source 1..120: mol_type = other DNA
tagtgataaaactcaaaatgatgttaaaaagcaaaatgcttctttttgtggtattcaaaatatttaacacagagagattcttagtaaatgacagcctgactgctatttaatttacctaaa

SEQ ID NO: 43869 - DNA, 120 bp, synthetic construct
  source 1..120: mol_type = other DNA
cccttgtttaccttagtttgttctggcatgaaataagtcagacccatattagccttgggcatcaagttttttttctgacctatgctatctaaaagccctgttcattaaaaataataaatg

SEQ ID NO: 43870 - DNA, 120 bp, synthetic construct
  source 1..120: mol_type = other DNA
tctcataggctgtatgttctattcttgctctagatctaacaagaaaatgttttatagaaaagactcttggcatcgatttgatttatgttaaaatagaaatcaacagagctctttatttgc

SEQ ID NO: 43871 - DNA, 120 bp, synthetic construct; identical to SEQ ID NO: 12425
  source 1..120: mol_type = other DNA

SEQ ID NO: 43872 - DNA, 120 bp, synthetic construct
  source 1..120: mol_type = other DNA
aatttttatataaacatggtataacactaattcatatttttatccagaagaaggttggacacatggttggatatccataaaattaggaatgatgtgtccaaagtatatttcattttaact

SEQ ID NO: 43873 - DNA, 120 bp, synthetic construct
  source 1..120: mol_type = other DNA
aatactgtgattgcttttacttttcaactcacataaattatttctaaaagatttatgaggaacttggttaactatttagatgttgctctgagctttaccccatacgtccattgtcctttc

SEQ ID NO: 43874 - DNA, 120 bp, synthetic construct; identical to SEQ ID NO: 12426
  source 1..120: mol_type = other DNA

SEQ ID NO: 43875 - DNA, 120 bp, synthetic construct
  source 1..120: mol_type = other DNA
cagcctcccgaggagctgggattagaggcgcccgccacctcgcccggctaatttttttgtgtttttagtagagacggggtttcactgtgttagccaggatggtctcgatctcctgacctc

SEQ ID NO: 43876 - DNA, 120 bp, synthetic construct
  source 1..120: mol_type = other DNA
ttttaaagaagactttttgaaaaaaacacacaaaccttagggagttgaacgtactactagtttttttttccttgattttgataaaaatttcctgtcttatactgtgtaatttttggcctc

SEQ ID NO: 43877 - DNA, 120 bp, synthetic construct
  source 1..120: mol_type = other DNA
aattcagttctcatcacgttaccagtccatggcacaagcatgttcttcagactccaccatcctccatgacacagacattggttggtttcacttaatttccaatccagattgagatttgat

SEQ ID NO: 43878 - DNA, 120 bp, synthetic construct
  source 1..120: mol_type = other DNA
agctcactgcaacctccgcctcccaggttcactacattctccttcctcagcctgccgagtggctgggactacaggcgcccaccaccattccctgctaatttttttggtatttttagtaga

SEQ ID NO: 43879 - DNA, 120 bp, synthetic construct; identical to SEQ ID NO: 12427
  source 1..120: mol_type = other DNA

SEQ ID NO: 43880 - DNA, 120 bp, synthetic construct
  source 1..120: mol_type = other DNA
gaagaactccagagagtatctggggtaaactatgataatatttggtctcaaggaagatgtgtttggtggggtcaaacatgcaggccttccagtccaggaaatcatctcatgaggtgcaaa

SEQ ID NO: 43881 - DNA, 120 bp, synthetic construct
  source 1..120: mol_type = other DNA
cactcccctgccccttacctaaagcaagtattattatccatattattctaacagaatcaaagagattgcatcatttcccatggaagcacagctgatagcggtagtgaggcatcacaaatg

SEQ ID NO: 43882 - DNA, 120 bp, synthetic construct; identical to SEQ ID NO: 12428
  source 1..120: mol_type = other DNA

SEQ ID NO: 43883 - DNA, 120 bp, synthetic construct
  source 1..120: mol_type = other DNA
gttacttctgtcgtataagtaggcagaatcaaaaagctatgtttgatcatctcagttatttactggaaaacagcagtgttggtcttggtaagtaaatgacttttatttcatctttaaggt

SEQ ID NO: 43884 - DNA, 120 bp, synthetic construct
  source 1..120: mol_type = other DNA
tcgacatcactcatcatcagcaaagtgcaaattgaaaccacagtgagctatcacctcacacctgttagaatgcctattattgaaaagacaaaacataataagtgttggcgagggtgtggg

SEQ ID NO: 43885 - DNA, 120 bp, synthetic construct
  source 1..120: mol_type = other DNA
gggtatatatatccaagggaaatgaataatcagtatgtcgaagagatacgtgtacttccatggtcattgcagcattattcacaatagctgagatatggaatcaacctaagtgttcatcag

SEQ ID NO: 43886 - DNA, 120 bp, synthetic construct; identical to SEQ ID NO: 12429
  source 1..120: mol_type = other DNA

SEQ ID NO: 43887 - DNA, 120 bp, synthetic construct
  source 1..120: mol_type = other DNA
cgctgccagagtagattttgagtgttttcaccacacaaaagtgtatgtgaggtaatatgtatgttaactagctcaattgagtcattccacaaagtatacatatatttcaaaacatgtaca

SEQ ID NO: 43888 - DNA, 120 bp, synthetic construct
  source 1..120: mol_type = other DNA
ttttgtatggagtttatagttacagcacgatccaggttatatttcatcttcatttgaattaatagcctccccagctatgagaggttcaacaccactggatgtggctgcagcttcggtgat

SEQ ID NO: 43889 - DNA, 120 bp, synthetic construct
  source 1..120: mol_type = other DNA
taagtaaggttggtgcagaagtcattgtggttttgcaatgtgacattatggccaaaaccgcaattaattttgcaccaacacaatatgttctagtgctattagaattaaagtacattataa

SEQ ID NO: 43890 - DNA, 120 bp, synthetic construct
  source 1..120: mol_type = other DNA
aaacatttttctatggaaggagaaccaacgttctgtatctgtattcttatgtgtttttttcttttcgtgatatctgctgccacttttgacttaatcatacacttcagtttttaaaaaggt

SEQ ID NO: 43891 - DNA, 120 bp, synthetic construct; identical to SEQ ID NO: 12430
  source 1..120: mol_type = other DNA

SEQ ID NO: 43892 - DNA, 120 bp, synthetic construct
  source 1..120: mol_type = other DNA
tctatctcactcccagtaaaaatcaaagatgttgcaatagctcctacatcatctgttcctacataccagcctgatttcatctcctacagctttcccgcactctctcttctttgcttcagc

SEQ ID NO: 43893 - DNA, 120 bp, synthetic construct
  source 1..120: mol_type = other DNA
ggcattctttcagtcaatgctccaaagtcaccctcttgatcagctcttccacatccatgctgtgtaaaactgaaaccttttctccacttccttaaactcttcctgtttcctttactgctt

SEQ ID NO: 43894 - DNA, 120 bp, synthetic construct
  source 1..120: mol_type = other DNA
ataaatatatttaatcaaactctatgtagttatgtatttttaaaaattcatcccctactataatgtcaagccagggaggtcagagtggtttttcctctgttgttaactgctttgtcctgc

SEQ ID NO: 43895 - DNA, 120 bp, synthetic construct; identical to SEQ ID NO: 12431
  source 1..120: mol_type = other DNA

SEQ ID NO: 43896 - DNA, 120 bp, synthetic construct
  source 1..120: mol_type = other DNA
atggtacagccagtgtggaaagcagtttggcagttccttaacaaattaaacatacacctaccataaactatatgcctagcctttccactgctaacaatttacccagtagaaaggaaaata

SEQ ID NO: 43897 - DNA, 120 bp, synthetic construct
  source 1..120: mol_type = other DNA
ccgaccatcaatgtattagttgataaataacactgtgatatacccatatacggtgaaatgtcatcccacaataaaaaagaatgaattgctgacatatgctacagtgtgaatgaatcccaa

SEQ ID NO: 43898 - DNA, 120 bp, synthetic construct; identical to SEQ ID NO: 12432
  source 1..120: mol_type = other DNA

SEQ ID NO: 43899 - DNA, 120 bp, synthetic construct
  source 1..120: mol_type = other DNA
ttacttccattgataatgacttttctaaggatttcttttaaaattgaatttcttgtgaaatattgtagaggactaacattcgtataaaacaaaaatattttaagaggaaaggccaggcaa

SEQ ID NO: 43900 - DNA, 120 bp, synthetic construct
  source 1..120: mol_type = other DNA
aaatgctgtgtgtctgatttgaaccaaggatgtttgactgtgatcttaggtttttctctacgtattttctcacacctgcttccccattaaattgatatatcattttggaaacaatttctc

SEQ ID NO: 43901 - DNA, 120 bp, synthetic construct
  source 1..120: mol_type = other DNA
aagttaaatgctattaaattcagaaacattcttctttcgtagttttacacataatcctgcagctcttggcccacccagacagacttggttgccctgtctgacaaggaattgcgggtggat

SEQ ID NO: 43902 - DNA, 120 bp, synthetic construct
  source 1..120: mol_type = other DNA
ggttctagtccgtgagtcttgagccctgggcagatatgtttgtggcatttattaaaaagaatgtctgcttagagagagctgaaaaaaaaaaagcttatagtaggatcataaatattttta

SEQ ID NO: 43903 - DNA, 120 bp, synthetic construct; identical to SEQ ID NO: 12433
  source 1..120: mol_type = other DNA

SEQ ID NO: 43904 - DNA, 120 bp, synthetic construct
  source 1..120: mol_type = other DNA
ctttcttagatttgctgtcttctgtaatggtaggacttgatttcttgaggtcttttgagttatcattaaaactgcatagagatataataaggattcatctcagcactttcatgaaggaag

SEQ ID NO: 43905 - DNA, 120 bp, synthetic construct
  source 1..120: mol_type = other DNA
gttctcctaaattttttattttgaattctaataatagtttggattatgacatcattctataataataacaagttagtgagaatcaatagtttatgcctccataatgctttactctgaaaa

SEQ ID NO: 43906 - DNA, 120 bp, synthetic construct
  source 1..120: mol_type = other DNA
gtataacatttatttgttcagaacttccatataatcatatttgtttacttatcttccccattctactttaggggagagtgtggaggaaaatgcaaatgtcgtggtgagattgctcattcg

SEQ ID NO: 43907 - DNA, 120 bp, synthetic construct; identical to SEQ ID NO: 12434
  source 1..120: mol_type = other DNA

SEQ ID NO: 43908 - DNA, 120 bp, synthetic construct
  source 1..120: mol_type = other DNA
aacaaagagagctgaagaagatggtgtagatttagcagagggaaatttaggttgtagaagatgcatcttatgaattttcctaggggagctagggcaaggtgggttgttgtaaatgatacg

SEQ ID NO: 43909 - DNA, 120 bp, synthetic construct
  source 1..120: mol_type = other DNA
caaatgaaagggggacttgactaaactgttatggtggtaaaacctagaaaaggtttcattctgaggagtgtgatgctttgttgaggtacagaagacagatacgagaagcagtcactatct

SEQ ID NO: 43910 - DNA, 120 bp, synthetic construct; identical to SEQ ID NO: 12435
  source 1..120: mol_type = other DNA

SEQ ID NO: 43911 - DNA, 120 bp, synthetic construct
  source 1..120: mol_type = other DNA
cacacacaccatgctacatgcttatcagtttcccatgaaggaaccagggagctcttaggttctctcagtagtagaaaatgtatccagagacctctggcccaggaccacactagcaagggt

SEQ ID NO: 43912 - DNA, 120 bp, synthetic construct
  source 1..120: mol_type = other DNA
gagggaggatgtgagcctctagggccatccagatttggctctcatcagcaagagaacatgtaattatattttccctgcagagatggggagggagatatgttgagatatgttggattcttt

SEQ ID NO: 43913 - DNA, 120 bp, synthetic construct
  source 1..120: mol_type = other DNA
gccatctttgtcaccctttctctacatgtgtgccacttacagaaatagtctaagctcacacgtcctttgatcagttattttctttgttaatgcactcactaccactaggaaggaaaagaa

SEQ ID NO: 43914 - DNA, 120 bp, synthetic construct
  source 1..120: mol_type = other DNA
gccatcaaataagcagttcctccttttcccctcaaaggaatcttaatactaaaatttccacagatgtgttcttggtgttagaatctcaagtctgatctttaaccagttgttattctccct

SEQ ID NO: 43915 - DNA, 120 bp, synthetic construct; identical to SEQ ID NO: 12436
  source 1..120: mol_type = other DNA

SEQ ID NO: 43916 - DNA, 120 bp, synthetic construct
  source 1..120: mol_type = other DNA
tgctccattaaaaataatagctgcagtctaatcactgaacaagtgtttgtttagttggaaatgtctcgttggttgtaaaaattagtaatgggatttcagtgcaagtcattaatagagtac

SEQ ID NO: 43917 - DNA, 120 bp, synthetic construct
  source 1..120: mol_type = other DNA
accaaaagtcattttcttttgtgtatttagctctatgtgtttgccatcgttttaggggaaagtgagagggaaggtatagggggtggatattaagagctatttagaccatataaattagtg

SEQ ID NO: 43918 - DNA, 120 bp, synthetic construct
  source 1..120: mol_type = other DNA
caggctagagtgcagtggcatgatctcagctcactgcaatctatgcctcccaggttcaagtgattctcctgcctcagcctcctgagtagctgggactacaggcacatgccaccacgccca

SEQ ID NO: 43919 - DNA, 120 bp, synthetic construct; identical to SEQ ID NO: 12437
  source 1..120: mol_type = other DNA

SEQ ID NO: 43920 - DNA, 120 bp, synthetic construct
  source 1..120: mol_type = other DNA
aacacattgattggtgctggggtagttaagaactgtaagtatatttctaaagtgggatgagcatgaagccagggctttcttacaaagcacctttttctctacccttattatctatatttc

SEQ ID NO: 43921 - DNA, 120 bp, synthetic construct
  source 1..120: mol_type = other DNA
tgttagaaaactggagtctgatttttataaaaacttaaactttgctgctagtaagattctttcatcttagtaaatggaaacagagactattaaaaatttctgtgctggaggtgattactg

SEQ ID NO: 43922 - DNA, 120 bp, synthetic construct; identical to SEQ ID NO: 12438
  source 1..120: mol_type = other DNA

SEQ ID NO: 43923 - DNA, 120 bp, synthetic construct
  source 1..120: mol_type = other DNA
aagaactgttaggatttatgttcgtcatttcctccacattatatatccagccttgggagaaatcagggtcgaagacagatggatatgcaattcatttcttagcacaaagcaagaaagaag

SEQ ID NO: 43924 - DNA, 120 bp, synthetic construct
  source 1..120: mol_type = other DNA
gtcagattctcagtatatcttaacagtccccaaaaggataaaaactattattctaatggatgaaccaactggcctagaccatagtataaataacttggtgtatgctgaaatcactgaaaa

SEQ ID NO: 43925 - DNA, 120 bp, synthetic construct
  source 1..120: mol_type = other DNA
ctagacagaattgtaacattgatgtcacaaagttgttctaatgtttttttttcccctgtatagttgattcatgccgggaagggagaagccatcagaattaggtccattttgagatccctc

SEQ ID NO: 43926 - DNA, 120 bp, synthetic construct; identical to SEQ ID NO: 12439
  source 1..120: mol_type = other DNA

SEQ ID NO: 43927 - DNA, 120 bp, synthetic construct
  source 1..120: mol_type = other DNA
gtgcagtggcacaatcttggctcactgcaagctccgcctcccgggttcaagcaattctcctgcctcagcctcccaagtagctgggactacaggcgcccgtcaccatgcccggctaatttt

SEQ ID NO: 43928 - DNA, 120 bp, synthetic construct
  source 1..120: mol_type = other DNA
gcatccagacttttttccattgtttttaaagctcattgtttttaaagctgtgtttgctttgggattttaattttcttttatatgacatttcagacagcttccagagaagcagaaacatgc

SEQ ID NO: 43929 - DNA, 120 bp, synthetic construct
  source 1..120: mol_type = other DNA
agttatgcattttgatagttttcattgtcactttcttgtaatgcttttctattaaaagcactgatgatagcttttgacttagagattttaaaatcccctctctgttaaaaagagtgtttg

SEQ ID NO: 43930 - DNA, 120 bp, synthetic construct
  source 1..120: mol_type = other DNA
tgcctcagcctcccaagtagcagggactacaggcatgtgtcaccacgttgggctaattttttgcattttttgtagagacagggtttcaccatgttagccaggatggtctcgacctcctga

SEQ ID NO: 43931 - DNA, 120 bp, synthetic construct; identical to SEQ ID NO: 12440
  source 1..120: mol_type = other DNA

SEQ ID NO: 43932 - DNA, 120 bp, synthetic construct
  source 1..120: mol_type = other DNA
gagttcgagaccagcctggacaacatggcaaaaccccatctctactaaaaatacaaaagttaaacaagcatggtggtgggcatttgtaatcccagctactcaggaggccgaggcaggaga

SEQ ID NO: 43933 - DNA, 120 bp, synthetic construct
  source 1..120: mol_type = other DNA
aggaagtgcatgctatatatattccttttctttcattaattatgcccctagagaaggcaggctataatagctcaagtctagaatgaaaggggtcaccatatacctgaaggtagctcatcc

SEQ ID NO: 43934 - DNA, 120 bp, synthetic construct; identical to SEQ ID NO: 12441
  source 1..120: mol_type = other DNA

SEQ ID NO: 43935 - DNA, 120 bp, synthetic construct
  source 1..120: mol_type = other DNA
accagtgacatacagattaggaaatagggaagcattaaattttgtaataacataataacaaagaaccaagaacatagattgtaagagagcccaggggtcctttacagaatgggccccaaa

SEQ ID NO: 43936 - DNA, 120 bp, synthetic construct
  source 1..120: mol_type = other DNA
atatgcagtatattgtctacatcgggagtcacagtggtttgtgtgtgtgtttgtgaattttgtatcagtcacaatgaaagttaacttttaacaacacaatccattggtatttgttagatc

SEQ ID NO: 43937 - DNA, 120 bp, synthetic construct
  source 1..120: mol_type = other DNA
ctcctgcttcagcctcccgagtagctgggactacaggcgcccgccactatgcccggctaattcttttgtatttttcgtagacacggggtttcaccatgttagccaggatggtctcgatct

SEQ ID NO: 43938 - DNA, 120 bp, synthetic construct
  source 1..120: mol_type = other DNA
tgcttttttcagccaggtgtggtggtgcacgcctgtagtcccagctactcaggagtctgaggcaggagaatcacttgaacctgggagacggaggttgcagtgagccacggccgtgccact

SEQ ID NO: 43939 - DNA, 120 bp, synthetic construct; identical to SEQ ID NO: 12442
  source 1..120: mol_type = other DNA

SEQ ID NO: 43940 - DNA, 120 bp, synthetic construct
  source 1..120: mol_type = other DNA
ctcagacatttttatcatatttatttccaagctagagtatgcctcagaataataatgaaagaaggaggggttcagaaaacttgaggaacaagcacataatcttgcagctcttggcccaga

SEQ ID NO: 43941 - DNA, 120 bp, synthetic construct
  source 1..120: mol_type = other DNA
ctccagtgtgtttgaggagatggtgcaaataaaacagcaacttgagccaatccgtgagtcttgagttacaggcagatgcatttgtggcattcattagaaacaatgtctgcttggataaga

SEQ ID NO: 43942 - DNA, 120 bp, synthetic construct
  source 1..120: mol_type = other DNA
gcttaaaaagcaaagcatatagagcaggatcggtgagcttctccctttttccctaggcacagctacggtttaagataatagaacactgtacatttaaattcctttttaatgcgattttta

SEQ ID NO: 43943 - DNA, 120 bp, synthetic construct; identical to SEQ ID NO: 12443
  source 1..120: mol_type = other DNA

SEQ ID NO: 43944 - DNA, 120 bp, synthetic construct
  source 1..120: mol_type = other DNA
gaacgaatactaccaggcattatcctttcatctagtttcctttagaacattatttgtttgttttcatgattcacatataaaattttttcattgactatacgtggaaacagaaaagttgtc

SEQ ID NO: 43945 - DNA, 120 bp, synthetic construct
  source 1..120: mol_type = other DNA
gtgtgtggtcagcaccagtttggcgtaattatcatgtggtcaaacaggaagtaaataaattcttcagtatttgaaattggcacataatcccatgatttctcatatcagcggtccccaatt

SEQ ID NO: 43946 - DNA, 120 bp, synthetic construct
  source 1..120: mol_type = other DNA
tgacccttaaatgcacgttaaatgctattatgattaatgaaacatatttcatatgaaagccatactggttttatagtgtcatttcatcatttcgttattgttctaagacgtgaaaatgta

SEQ ID NO: 43947 - DNA, 120 bp, synthetic construct; identical to SEQ ID NO: 12444
  source 1..120: mol_type = other DNA

SEQ ID NO: 43948 - DNA, 120 bp, synthetic construct
  source 1..120: mol_type = other DNA
aaactgtgtttaaaatgtaagaagtctagaaagcagccatttgtaatctatcctgtatatgacacagccattgacaccaaaattcacttctctcttttagatgggaatgtggtggaacct

SEQ ID NO: 43949 - DNA, 120 bp, synthetic construct
  source 1..120: mol_type = other DNA
gatctccgggcggctgcttctttagatacggtgagattggagcgatggacttcctcctctcttgactcttcactctgtgccttatgatgttcttttttatatatccattcattaatttat

SEQ ID NO: 43950 - DNA, 120 bp, synthetic construct
  source 1..120: mol_type = other DNA
cccactgaccaaaaagaatatgataagaattctgataaggtgctatatgggattcaataagaggttcacataactctaatttgggaggtcacagtgactcctgttaacctctgttcagta

SEQ ID NO: 43951 - DNA, 120 bp, synthetic construct; identical to SEQ ID NO: 12445
  source 1..120: mol_type = other DNA

SEQ ID NO: 43952 - DNA, 120 bp, synthetic construct
  source 1..120: mol_type = other DNA
caaagcacattaggacttgagccgacagtagccccttcatgaaatatatgagagcagaatcacaaaaatgaaatgaaaatttcttttttctttgttttgtgtattcacctgacgttgtgg

SEQ ID NO: 43953 - DNA, 120 bp, synthetic construct
  source 1..120: mol_type = other DNA
tgagatctattgtgagaataagctcctctctttgcctagcaaaggaaaatactcacatctgtgatattattgtcttcttacattgatcctaccattgatatttaatgatagagtctgaac

SEQ ID NO: 43954 - DNA, 120 bp, synthetic construct
  source 1..120: mol_type = other DNA
taaagaatacatttccatgtgtcatagtgctatcatcttccggatagtgaaattgtatgtccccatgttaatccctttgaagattatctactgccaaacacaaatggccttctactctct

SEQ ID NO: 43955 - DNA, 120 bp, synthetic construct; identical to SEQ ID NO: 12446
  source 1..120: mol_type = other DNA

SEQ ID NO: 43956 - DNA, 120 bp, synthetic construct
  source 1..120: mol_type = other DNA
gaaacattttccataccacaaatttaattcattttaggtagtcccatatactgaggtatgagtcttctctgatcgcccttgctcccagtcaagttccagagtgttcctccaagcctccct

SEQ ID NO: 43957 - DNA, 120 bp, synthetic construct
  source 1..120: mol_type = other DNA
gaatactattctggatgttgggagtggggagtaattgtgttgggagtccttggccactttaggtgagatgaatagatctccccttttgactgtgtttgatgatttaactcatcttctaga

SEQ ID NO: 43958 - DNA, 120 bp, synthetic construct; identical to SEQ ID NO: 12447
  source 1..120: mol_type = other DNA

SEQ ID NO: 43959 - DNA, 120 bp, synthetic construct
  source 1..120: mol_type = other DNA
gtctgggttgagaaccagatggcactgagggaagtggaaaatcagaagagtaattctttaacttccctaatctaagattctgtaaaattgaaccaaaatgcctatctcacagatattttc

SEQ ID NO: 43960 - DNA, 120 bp, synthetic construct
  source 1..120: mol_type = other DNA
cagtagatgttcactgtgtacattttctctcccttccttctctggcaaatttgctgtctcagcctttttttcctcctttctgttccaatattccctcttctttttcttcttaccatccat

SEQ ID NO: 43961 - DNA, 120 bp, synthetic construct
  source 1..120: mol_type = other DNA
aggaaagaaaggaggagaacagaaacatcttctgtatcaaagaaggggtggtcttcagatctaggggatagagataagttgggaaatctaaccttatataaaataaagtaactaagtggt

SEQ ID NO: 43962 - DNA, 120 bp, synthetic construct; identical to SEQ ID NO: 12448
  source 1..120: mol_type = other DNA

SEQ ID NO: 43963 - DNA, 120 bp, synthetic construct
  source 1..120: mol_type = other DNA
tacatcatgcttgacgctgggaaatttctcccaattattgaaatgggcatagaagttataggaatgtatacatcaacttgaaataaacaacttctataagattatagaaatcttaacatt

SEQ ID NO: 43964 - DNA, 120 bp, synthetic construct
  source 1..120: mol_type = other DNA
ttaggagatcgagaccatcctagctaacacggtgaaaccccgtctctataaaaaatacaaaaaattagccggacgtggtggtgggtgcctgtaggcccagttacgtggaaggctgaggca

SEQ ID NO: 43965 - DNA, 120 bp, synthetic construct
  source 1..120: mol_type = other DNA
gataagccaagatactcttaagttggaaaacatggtaataggcctggcctaaaatattattagaaacctcgagagataaagacgaggctttaaagacaacattttctaagttaataatca

SEQ ID NO: 43966 - DNA, 120 bp, synthetic construct
  source 1..120: mol_type = other DNA
aacctctctgtatatgcaattatagtttgtcacacagcatagaaaaatcactggtattttctctaactttattattctgttcaggatcaagtctcactctatcttactgagttgggaatg

SEQ ID NO: 43967 - DNA, 120 bp, synthetic construct; identical to SEQ ID NO: 12449
  source 1..120: mol_type = other DNA

SEQ ID NO: 43968 - DNA, 120 bp, synthetic construct
  source 1..120: mol_type = other DNA
gcaaaattttttgatacaaatgagctggaaaattcgtgaaaaaagatacagtctcatgctgttacccttatgcaataaaactcttttacattagagatatgtcagtgttaagccaagcaa

SEQ ID NO: 43969 - DNA, 120 bp, synthetic construct
  source 1..120: mol_type = other DNA
agtccactttaataacagtaattcttataatttattttcttcgttagatataggaaagggtcaaaatatgtatagtcataagatcattttattaatttgacaaatatagatcaagaataa

SEQ ID NO: 43970 - DNA, 120 bp, synthetic construct; identical to SEQ ID NO: 12450
  source 1..120: mol_type = other DNA

SEQ ID NO: 43971 - DNA, 120 bp, synthetic construct
  source 1..120: mol_type = other DNA
agtaaatgattaacgtagaactcagggatacatagacatccaaacaacctcataaagaatcctgttcaagatatagttacttgtaaaattgggcgtctggtcttcatattgcaatcagtg

SEQ ID NO: 43972 - DNA, 120 bp, synthetic construct
  source 1..120: mol_type = other DNA
ggagtttattaaggagtattgactcacacgatcaccgggtgaagtcccacaataggccgtctgcaagctgaggggcaaggaagccagttcaagtcccaaaacctcaaaagtagggaagcc

SEQ ID NO: 43973 - DNA, 120 bp, synthetic construct
  source 1..120: mol_type = other DNA
cagcacgggacaaagataaaggccagaagataaaggcaagtcaggttcttctgcctgcctttatcctagccgtgctggcagctgattagatggtgcccacccagattgagaatgggtcag

SEQ ID NO: 43974 - DNA, 120 bp, synthetic construct
  source 1..120: mol_type = other DNA
cgtgtagtatacacggtgatagtattctccaagataatttatatgggattgggcaatttcacttcagatgaccttataatgtagcattagagtgtgatatgaggagaaatgaaaaaaaaa

SEQ ID NO: 43975 - DNA, 120 bp, synthetic construct; identical to SEQ ID NO: 12451
  source 1..120: mol_type = other DNA

SEQ ID NO: 43976 - DNA, 120 bp, synthetic construct
  source 1..120: mol_type = other DNA
atttacttaatcattgtggtagcattttccttgtgatcataacactgtttctgaatataaaatggctaagcagttcaggaaattatgcacaaggttgataagtttccggtgcatttggac

SEQ ID NO: 43977 - DNA, 120 bp, synthetic construct
  source 1..120: mol_type = other DNA
cagctttgctgctatggagatttagataccgtcgctcaatgttgcattgcatatgtggcattgccttatagttgcaaaatttataatgaatagttcatatgttttcagatgactgacagg

SEQ ID NO: 43978 - DNA, 120 bp, synthetic construct; identical to SEQ ID NO: 12452
  source 1..120: mol_type = other DNA

SEQ ID NO: 43979 - DNA, 120 bp, synthetic construct
  source 1..120: mol_type = other DNA
tcctataaatttttagcatgcatactttctatagaatttcttttccagctcagaattttatttttcaaagctttataatgcaacatggatcagttaaaatttctcactctctagaatgtt

SEQ ID NO: 43980 - DNA, 120 bp, synthetic construct
  source 1..120: mol_type = other DNA
ttgacaatattaaagtttacttcatttccagtgtgttggagagtcaaagattttattctccttaagctgaaacttcagtaaatctagctgcagcttcttttctgtttgatggggttttag

SEQ ID NO: 43981 - DNA, 120 bp, synthetic construct
  source 1..120: mol_type = other DNA
atagtaatttttttttttggtcctccatttttcccagaaatatgaacaagaacttttcaaactggcactgccttgcctgagtgcagttgcgggagctttgcctccagactacatggagtc

SEQ ID NO: 43982 - DNA, 120 bp, synthetic construct
  source 1..120: mol_type = other DNA
tgatgtgtgaagtctgaaattgaataaggtactaaagtgaactttctctaatacatgccccctttgaattggtatccttttaataggggtccctttaatttataaaacgatagtaataat

SEQ ID NO: 43983 - DNA, 120 bp, synthetic construct; identical to SEQ ID NO: 12453
  source 1..120: mol_type = other DNA

SEQ ID NO: 43984 - DNA, 120 bp, synthetic construct
  source 1..120: mol_type = other DNA
atcccttcacccatcactacatctcagcaaggcccagggttaacagctgatgttcagcatgataaaacgcagcacaagatggaagggaatatcaaatgagaatttttatggaaaattcca

SEQ ID NO: 43985 - DNA, 120 bp, synthetic construct
  source 1..120: mol_type = other DNA
catgccaccttatcttactgattctatggtgactcagcaagatcagttttagcaaggtagacacttggtagttattatccacggcttctgaatttgcttgggagttcaactttgaggctt

SEQ ID NO: 43986 - DNA, 120 bp, synthetic construct; identical to SEQ ID NO: 12454
  source 1..120: mol_type = other DNA

SEQ ID NO: 43987 - DNA, 120 bp, synthetic construct
  source 1..120: mol_type = other DNA
gcttgcccctttggggacttcttaacagatacaggtttatgtggtgatatcagtgatttctagacgattacgattttttatatattgcttcttaagtatgtgtatgtcttatagttcaat

SEQ ID NO: 43988 - DNA, 120 bp, synthetic construct
  source 1..120: mol_type = other DNA
tgtatatatatttaattttccattcatagatacgttttaagccttagatttatcatcagacttggtcatcatttgcatgtcctcaacatcaaggaattaaatattcatttaaacacaaaa

SEQ ID NO: 43989 - DNA, 120 bp, synthetic construct
  source 1..120: mol_type = other DNA
actaaatttagtgcttgttttttcttttttgtgtaatctattgtcctaatctttgaatgtattttaattatttcaatttatatatttaataataattgttattatagttttataatatgt

SEQ ID NO: 43990 - DNA, 120 bp, synthetic construct; identical to SEQ ID NO: 12455
  source 1..120: mol_type = other DNA

SEQ ID NO: 43991 - DNA, 120 bp, synthetic construct
  source 1..120: mol_type = other DNA
tgactggtcactgttcaaatatttctgaccatgacagttttctgttttaaaatgagaacttgatctaaattaggaaaaaatacttaattacaattagcttatataataatataatattta

SEQ ID NO: 43992 - DNA, 120 bp, synthetic construct
  source 1..120: mol_type = other DNA
taaaaaagcaacaatcaccaagagcttcaggaggaaatgatgactccgggttcagaattcaccttttaaggaaactttggttttatatgtaggtttttttggtttattttttgagtcctg

SEQ ID NO: 43993 - DNA, 120 bp, synthetic construct
  source 1..120: mol_type = other DNA
accataccttgctaattgttaatattttttatagagatgagatcttgctatgttgcccaggctggtctccaactgttgttggcctcaagcagttgttcagccagcctcagcctcccaaac

SEQ ID NO: 43994 - DNA, 120 bp, synthetic construct
  source 1..120: mol_type = other DNA
tgttgtatttcttactaccaactagatctgcagtttactaaaaatagattacatcggccaggtgatttttttgtgtgttttcaagaaaaacaacagaaatgagaaaactaaagtagctgc

SEQ ID NO: 43995 - DNA, 120 bp, synthetic construct; identical to SEQ ID NO: 12456
  source 1..120: mol_type = other DNA

SEQ ID NO: 43996 - DNA, 120 bp, synthetic construct
  source 1..120: mol_type = other DNA
actaggtaagtcagtaaggatctatcttatataaaaactctgctaaatactgagtgggtggagttggtgatggagaggaatattacaggaaggttttccagtctaattactcagattctg

SEQ ID NO: 43997 - DNA, 120 bp, synthetic construct
  source 1..120: mol_type = other DNA
gagaagacgctgagatgcatactctagttttcctatttaaaatgcatgttttgtatttacacttcataggtggggtcccaagatgggtcagaataaatatccttgggaccatgcatccct

SEQ ID NO: 43998 - DNA, 120 bp, synthetic construct
  source 1..120: mol_type = other DNA
atcatgcaatatgtccatgtaacaaaactgcacatttactccctgaatctgaaatttaaaataaaagaaaatagcattgaatatctttatagtgacttatgctggataaaatttcaatct

SEQ ID NO: 43999 - DNA, 120 bp, synthetic construct; identical to SEQ ID NO: 12457
  source 1..120: mol_type = other DNA

SEQ ID NO: 44000 - DNA, 120 bp, synthetic construct
  source 1..120: mol_type = other DNA
tatattttgtcttttcctctcaattcttaatttctgtcagcctttctgtgtttattctcttctctccttaacatttttcttttcctttttggtttttattcctctcccatatttttaagt

SEQ ID NO: 44001 - DNA, 120 bp, synthetic construct
  source 1..120: mol_type = other DNA
ttgacaaatgaagtgaaaaggatttcacttcattgtgagtcacatgtatattacataagctgtcccttttttctgtgtaaggtcctaggaaccgggttgctaaaggaaattgaccttggt

SEQ ID NO: 44002 - DNA, 120 bp, synthetic construct; identical to SEQ ID NO: 12458
  source 1..120: mol_type = other DNA

SEQ ID NO: 44003 - DNA, 120 bp, synthetic construct
  source 1..120: mol_type = other DNA
gttgtttcttgttttttcttctctaggaaaaagaaatttatcgctggccaatcaaagaatctttaaaaactatgctggcttggggctggagaattgaaagaactcgggagggagacagca

SEQ ID NO: 44004 - DNA, 120 bp, synthetic construct
  source 1..120: mol_type = other DNA
tttctaaagaataatctgaaaattctgaagagtcacaaaatttagaagggagagaaaaaagctatatatatattttttttagtttcaaaggaggttaaatgatgattaagttactggact

SEQ ID NO: 44005 - DNA, 120 bp, synthetic construct
  source 1..120: mol_type = other DNA
catgttctcactcataagtggaagctgaacaatgaaaacacatggacagaggaaggggaacatcacacaccggggcctgtcagggagtggggggctaggggagggatagcattaagagaa

SEQ ID NO: 44006 - DNA, 120 bp, synthetic construct; identical to SEQ ID NO: 12459
  source 1..120: mol_type = other DNA

SEQ ID NO: 44007 - DNA, 120 bp, synthetic construct
  source 1..120: mol_type = other DNA
gaattcacagaagatgttgctgctggaccatgtcaagggagttcgacaaacaagcaaggctctacccataggtcttcggtgctcaaggtggcaagagtaaggcacagccttgatgtggaa

SEQ ID NO: 44008 - DNA, 120 bp, synthetic construct
  source 1..120: mol_type = other DNA
tcctgacccctcagctcactatgtatgtggtttacaccaaatattgtttattattgctatttacacaaatatcatttttgaaaaaaaaatgagggtctaacagcatgtgcttcacatgct

SEQ ID NO: 44009 - DNA, 120 bp, synthetic construct
  source 1..120: mol_type = other DNA
atggaagctataaaagtgtattttatctatttttttgtctgtgtacttttctaagtagattagcttttattttaatctgtttcaacaaatgctgagcacaaactgcgtactagataataa

SEQ ID NO: 44010 - DNA, 120 bp, synthetic construct
  source 1..120: mol_type = other DNA
catggtatggtaagggtgggactagtggtatgaataaggcactacacagtatagagaaagggatgtttttttttttaattattctgtcaggtagataagaaataagaaattactacaaat

SEQ ID NO: 44011 - DNA, 120 bp, synthetic construct; identical to SEQ ID NO: 12460
  source 1..120: mol_type = other DNA

SEQ ID NO: 44012 - DNA, 120 bp, synthetic construct
  source 1..120: mol_type = other DNA
gggcttaaatcctggtagtgctactttctaaagatgtacctttgtgtacttgatctctgtttgcctcattaagtgtgaattcttattgttactattgttatgtcaatatttctgtggagg

SEQ ID NO: 44013 - DNA, 120 bp, synthetic construct
  source 1..120: mol_type = other DNA
tacaccaaaggccacaagtctatttataacttgccattattttcacccaaaggttctttaagcataaaccaatattatttgaaatattaacatagattgtcgtttctccgttacttgcct

SEQ ID NO: 44014 - DNA, 120 bp, synthetic construct
  source 1..120: mol_type = other DNA
aacactttttatagcatcattttataaaaggaatacaaatggatgagtgaagatcatgtgtagatgtgattctgagcctgaattcctcagctttttttcactggggcttagcactccctc

SEQ ID NO: 44015 - DNA, 120 bp, synthetic construct; identical to SEQ ID NO: 12461
  source 1..120: mol_type = other DNA

SEQ ID NO: 44016 - DNA, 120 bp, synthetic construct
  source 1..120: mol_type = other DNA
accatgaataccacaggaagacatgaatcctgatttcaggaaatttactgtccacttagggttttataatttgcatatgtaagacaaacttaaggacatgaataataccagtatcaactt

SEQ ID NO: 44017 - DNA, 120 bp, synthetic construct
  source 1..120: mol_type = other DNA
aaacatttctgacaatttcaggcatatcccacaggttttcaacaattatttactcccaaattccaatttcttaccttgtatctgtttttcagtactacacatgtaggacaaaaactattt

SEQ ID NO: 44018 - DNA, 120 bp, synthetic construct
  source 1..120: mol_type = other DNA
ttccttcaacagatacttattgagcacctattatgtatgctgcattgttctaagcttttcaaatagatcagtgatgaaatggaaaaaaatctctgctgtcaaggagcttacattctaatg

SEQ ID NO: 44019 - DNA, 120 bp, synthetic construct; identical to SEQ ID NO: 12462
  source 1..120: mol_type = other DNA

SEQ ID NO: 44020 - DNA, 120 bp, synthetic construct
  source 1..120: mol_type = other DNA
gatggttgccatggattctagcttgtgtccccaaatcaatagctgtgttaggtgaggtaaagaccataggagtgctggggacagcaaggagagaataatgactttgattttatatgttgt

SEQ ID NO: 44021 - DNA, 120 bp, synthetic construct
  source 1..120: mol_type = other DNA
gaatagccatttactaaaattcctgatccatttctttgtgtcaggcactttgctaaggattttacatccattacctagtttcataccaacctttgaggctggtggcctatttagcatatt

SEQ ID NO: 44022 - DNA, 120 bp, synthetic construct
  source 1..120: mol_type = other DNA
ccccgtctctactaaaaatatgaaaattagctggtgacagagatgcgtgcctgtaatcccagctactcgggaggctgaggcaggagaatcgcttgaacctgggaggcagaggttgcagcg

SEQ ID NO: 44023 - DNA, 120 bp, synthetic construct; identical to SEQ ID NO: 12463
  source 1..120: mol_type = other DNA

SEQ ID NO: 44024 - DNA, 120 bp, synthetic construct
  source 1..120: mol_type = other DNA
gccagggtgctgtcaaaactgacccgtaagttaagtatcgctcatgagcctgttattagttatagcatatgtaacactcacttttatttcacaagcatgataatgagctatattttcatt

SEQ ID NO: 44025 - DNA, 120 bp, synthetic construct
  source 1..120: mol_type = other DNA
cacataacatgccattgggtggaaggaggtaagtgcccaggatggttagtgaaacttccttaaaattgataaagaggtatatttcattttttaaaagctttaattcagaaattaaagaag

SEQ ID NO: 44026 - DNA, 120 bp, synthetic construct
  source 1..120: mol_type = other DNA
gtctttgattaactcttgcttgcgtgaggaagagtaaatttcattgcagccaatttggatttgtaagaaactcaaaaatgtaatgatcctctgcataagataatgtttcagaattttgga

SEQ ID NO: 44027 - DNA, 120 bp, synthetic construct; identical to SEQ ID NO: 12464
  source 1..120: mol_type = other DNA

SEQ ID NO: 44028 - DNA, 120 bp, synthetic construct
  source 1..120: mol_type = other DNA
atatttggcagcatggtttatttgaatgtggcgatctataatggatccatggaatttatagattatatactctaattttttaatgctatcaaaattgatagctgggtgtggtggcacgtg

SEQ ID NO: 44029 - DNA, 120 bp, synthetic construct; identical to SEQ ID NO: 12465
  source 1..120: mol_type = other DNA

SEQ ID NO: 44030 - DNA, 120 bp, synthetic construct
  source 1..120: mol_type = other DNA
cctactttgaaatagcagatttgaaagtaagataaaatttattgccttgagacataaagttaataggtcaatatggtgttcaaataacatattagcattgttggtaactgtattgttcca

SEQ ID NO: 44031 - DNA, 120 bp, synthetic construct
  source 1..120: mol_type = other DNA
aaagaatccgggaggtaatcttatcaaaacccaaaaggtcacagaaagattaacttggctagtctaaggtctctcacctagtttggacagagattgatttagaaatcaaatctttgactg

SEQ ID NO: 44032 - DNA, 120 bp, synthetic construct
  source 1..120: mol_type = other DNA
ttcattattgaattaatgtcttcaaacattatgaataacaatgaccattttcatttgctgtttagttactgtataatattgcaaatccttacaattctctgggattcacattctaaagaa

SEQ ID NO: 44033 - DNA, 120 bp, synthetic construct
  source 1..120: mol_type = other DNA
atatttttgttcatttaaggctatggcagaaatgatggctgaaaactaccataatatatgggcaaagaaaaagaaaatggagttggagtccaaaggtaatattttctaaaaacgtttatt

SEQ ID NO: 44034 - DNA, 120 bp, synthetic construct; identical to SEQ ID NO: 12466
  source 1..120: mol_type = other DNA

SEQ ID NO: 44035 - DNA, 120 bp, synthetic construct
  source 1..120: mol_type = other DNA
caacttaaatatctcctatctcacccctttttatttcctatctcagcctcttttgtctggtccagctatgttactgtctcttacatgcttttgcttgcacttttcccgtttttttattca

SEQ ID NO: 44036 - DNA, 120 bp, synthetic construct
  source 1..120: mol_type = other DNA
gttagtctatacacatattgtttataatgtggtgtctgtgtgtgtgcgcgcatatgcgctgtcgttaatgacttcctatatggttttctttcccctgataggaatatactattttcgagc

SEQ ID NO: 44037 - DNA, 120 bp, synthetic construct; identical to SEQ ID NO: 12467
  source 1..120: mol_type = other DNA

SEQ ID NO: 44038 - DNA, 120 bp, synthetic construct
  source 1..120: mol_type = other DNA
aacaaaggtctctggttttcctaggcagaggaccctgcggccttccgcagtgtttgtgtccctgggtacttgagattagggagtggtgatgactcttaacgagcatgctgccttcaagca

SEQ ID NO: 44039 - DNA, 120 bp, synthetic construct
  source 1..120: mol_type = other DNA
agaagaatttttcttagtacagaacaaaatgaaaagtctcccatgtatacttctttctacacagacacggcaaccatctgatttctcaatcttttccccacctttcccccctctctattc

SEQ ID NO: 44040 - DNA, 120 bp, synthetic construct; identical to SEQ ID NO: 12468
  source 1..120: mol_type = other DNA

SEQ ID NO: 44041 - DNA, 120 bp, synthetic construct
  source 1..120: mol_type = other DNA
agacgctcctcacttcctagatgtgatggcggctgggaagaggcgctcctcacttcctagatgggatggcggccgggcagagacgctcctcactttccagactgggcagccaggcagagg

SEQ ID NO: 44042 - DNA, 120 bp, synthetic construct
  source 1..120: mol_type = other DNA
cgtctgcaatcctggcacctccagaggccgaggctggcggatcacttgcggttaggggctggagaccggcctggccaacacagcgaaaccccgtctccaccaaaaaaatacgaaaaccag

SEQ ID NO: 44043 - DNA, 120 bp, synthetic construct
  source 1..120: mol_type = other DNA
cagagggagaccgtggggagagggagactgtggggagagggagactggagagggagagggagagggagagggagacgggagagggagagggagagggagaagattccacatttttaattg

SEQ ID NO: 44044 - DNA, 120 bp, synthetic construct; identical to SEQ ID NO: 12469
  source 1..120: mol_type = other DNA

SEQ ID NO: 44045 - DNA, 120 bp, synthetic construct
  source 1..120: mol_type = other DNA
gagatttttttctgattttttaaatatttgcatatacttactggttcagcatcccaaatcccaaatccaaaagcttaaatgctccaataagtgtttcctttgagcatcatgtagatactc

SEQ ID NO: 44046 - DNA, 120 bp, synthetic construct
  source 1..120: mol_type = other DNA
tcgatattttctttaagtcataccactcgtaaatggcacatccatacttctgcatacaacttgtactggctcaaatttgtattctgtagttgggaaactaacctagtggcagcagactaa

SEQ ID NO: 44047 - DNA, 120 bp, synthetic construct
  source 1..120: mol_type = other DNA
agtttagaaccaaaatggcagaccagtaggaaacgtgttgaactatacagtcaggatcctggcttttaggttattgagattagcaaaccagagaaatgagtcttgggcatagaagatagg

SEQ ID NO: 44048 - DNA, 120 bp, synthetic construct
  source 1..120: mol_type = other DNA
tctttttttcaaagttgttttctcactcagagacattaatagtggggaggatccttatagccaacagttgtaggcagttgcatcctgccagctctactcccactgccgataagaggtagg

SEQ ID NO: 44049 - DNA, 120 bp, synthetic construct; identical to SEQ ID NO: 12470
  source 1..120: mol_type = other DNA

SEQ ID NO: 44050 - DNA, 120 bp, synthetic construct
  source 1..120: mol_type = other DNA
tagtgcccccaaattagtaaaaaatgttattttcccactgccacttcaagtattttgtaccatggtcatctgttgttaagccacagacagcccactgctgtcaagcatttttttactgtt

SEQ ID NO: 44051 - DNA, 120 bp, synthetic construct
  source 1..120: mol_type = other DNA
taatatcctcagagttactgctcactcatttacctctccatgtagctgatttccttcagcacaagatgtctacacccatatcataaatgggaaagttgagggtggaggagcaacgtaaat

SEQ ID NO: 44052 - DNA, 120 bp, synthetic construct; identical to SEQ ID NO: 12471
  source 1..120: mol_type = other DNA

SEQ ID NO: 44053 - DNA, 120 bp, synthetic construct
  source 1..120: mol_type = other DNA
tgcttttatttttaactgatacataattgtctatatgaggtacagtgtgatatttgcatacatgtatacaatgtgtaatgatcaaatcagggtaattagccaacccatcacctcaaacat

SEQ ID NO: 44054 - DNA, 120 bp, synthetic construct
  source 1..120: mol_type = other DNA
taggacaaaagtcaaatttggtttctactaaacttagtaacatattctataccctctgctgttcacaagtgtttgttattattgtcttctgacaactgtttgtgcttgatattattaata

SEQ ID NO: 44055 - DNA, 120 bp, synthetic construct
  source 1..120: mol_type = other DNA
attgcatgtctgtagatggcgctttcagtcaaagccagcactagggaagcagacatttcctcctttgcttgcttatttattgtgtagggctaattcaacatttgtgattgttgcagtagc

SEQ ID NO: 44056 - DNA, 120 bp, synthetic construct; identical to SEQ ID NO: 12472
  source 1..120: mol_type = other DNA

SEQ ID NO: 44057 - DNA, 120 bp, synthetic construct
  source 1..120: mol_type = other DNA
tttttaaatctgaaagaaagactacttttagtaagtattatcaggataagtatactaggaatctagactcttgctaaaatgtacttgcccacgtggtttaaagtcaagtattagacactt

SEQ ID NO: 44058 - DNA, 120 bp, synthetic construct
  source 1..120: mol_type = other DNA
ttctcttctctctgtgcgacagcagatgaagcataacccctgaaacatgccttataacttttctaaatccagctaagtatgatttagcatttgtttctactctccacattcagaattgct

SEQ ID NO: 44059 - DNA, 120 bp, synthetic construct
  source 1..120: mol_type = other DNA
cagtctttctgtgagtagtttttctgaattaattgaaacattaaaggcagtagaggcagaagagtcttatatgctctatgtattattaaaggatatggaaagttttatagtgtggtccaa

SEQ ID NO: 44060 - DNA, 120 bp, synthetic construct; identical to SEQ ID NO: 12473
  source 1..120: mol_type = other DNA

SEQ ID NO: 44061 - DNA, 120 bp, synthetic construct
  source 1..120: mol_type = other DNA
aaatcagcatccatcatttaggcaaaatccccaggcaaaaaatcacactctgtttttgtaaatgcaacacttcgttgcatagtaagagagtcactcactgaagctttatatcatatgcaa

SEQ ID NO: 44062 - DNA, 120 bp, synthetic construct
  source 1..120: mol_type = other DNA
cacacaattttaccttctaagaggctttgtacaaattgctttcccattttcatttttgctcttccagaggatttaaggacctggaactggacacgccttctattgagaaacgatttgcct

SEQ ID NO: 44063 - DNA, 120 bp, synthetic construct
  source 1..120: mol_type = other DNA
acatcaggatatagaacaacacaggctgctgagctatttgtgatggtataaacccatctattcatcctactactaagtagagttcaacggtcaatggatgaacaagttcttggggagtgg

SEQ ID NO: 44064 - DNA, 120 bp, synthetic construct; identical to SEQ ID NO: 12474
  source 1..120: mol_type = other DNA

SEQ ID NO: 44065 - DNA, 120 bp, synthetic construct
  source 1..120: mol_type = other DNA
cttagattcagcacagatgatgaaagcagcctccggtcacttctgttattttgtggtcctcccacattgttgaattaaaattcgacttgttaatttcttaccttaatgtcagagcacctt

SEQ ID NO: 44066 - DNA, 120 bp, synthetic construct
  source 1..120: mol_type = other DNA
tttaacactcactccttttgtcattcaacacctttcctctgggaccattcatcttggatcccttagctgctgtttgtcttaggatgtaaatctagtttctgccatagcatcagattaaag

SEQ ID NO: 44067 - DNA, 120 bp, synthetic construct
  source 1..120: mol_type = other DNA
catctttctcataaacaattgacttctctttcagcctgcctctacagttcaaatactatattattgctctctttgagcccttctttttcttaaaagcttacactacaagctaatttataa

SEQ ID NO: 44068 - DNA, 120 bp, synthetic construct
  source 1..120: mol_type = other DNA
gtaggggtgaattattgaagcttttacacacaaagctaaatattgcaatttctgatctacatttgaaaggatccgatatgcgtagcaactccaatatccagtcttgtttttggagaaaca

SEQ ID NO: 44069 - DNA, 120 bp, synthetic construct; identical to SEQ ID NO: 12475
  source 1..120: mol_type = other DNA

SEQ ID NO: 44070 - DNA, 120 bp, synthetic construct
  source 1..120: mol_type = other DNA
actcctgatgttgtgtgtaccgttttcagatggcttggccagggcaaattaggtacaagaactctgttagaggagcagatagagctgtgattgtcaatatcgtgtttattttaatttcca

SEQ ID NO: 44071 - DNA, 120 bp, synthetic construct
  source 1..120: mol_type = other DNA
ctaatgtagccattcctagacctaagttaattgtggtagtaaaaatatgcatatgcctttttctaattgttgtataataccgtagattgtaatctctccacatctttttcacattttgca

SEQ ID NO: 44072 - DNA, 120 bp, synthetic construct
  source 1..120: mol_type = other DNA
tatgaatccagccattttgcataatgtgcttaagagagattcaaatgccaaagtgccatgcaaatgaaatttgcaagtgttaaaaaaccataattttcttttacttgttcatggggagag

SEQ ID NO: 44073 - DNA, 120 bp, synthetic construct; identical to SEQ ID NO: 12476
  source 1..120: mol_type = other DNA

SEQ ID NO: 44074 - DNA, 120 bp, synthetic construct
  source 1..120: mol_type = other DNA
cctcgtctattaatatatgcatgaaccttttccatatgcatgaaggaggtgagaaaggccaccttctaagctaaatgaattaggttaatcaattcttgaccttggtaaaccatggggaaa

SEQ ID NO: 44075 - DNA, 120 bp, synthetic construct
  source 1..120: mol_type = other DNA
tttgccaacctaatattaaaattgctgtcctcctcctcatcccagatcctgacttcctgcagttttttagtttgtgtcttaaattgagaagctttaactttcggtcacacgaagaggcaa

SEQ ID NO: 44076 - DNA, 120 bp, synthetic construct
  source 1..120: mol_type = other DNA
ctctattctattccattttcccctctctatgtcaataagatctcaaagctacacaaatgtgtttgtgtctctaaccacaactatgggctgtcctcaatagctttttaaatttagatttgg

SEQ ID NO: 44077 - DNA, 120 bp, synthetic construct; identical to SEQ ID NO: 12477
  source 1..120: mol_type = other DNA

SEQ ID NO: 44078 - DNA, 120 bp, synthetic construct
  source 1..120: mol_type = other DNA
gcacgtaaatattctgtggcatgaaaataactgcatgaatcatcttcccagcattcttggtcagactttaactctgcattccctaccgcattccttcttcaaatgacttcattctatctg

SEQ ID NO: 44079 - DNA, 120 bp, synthetic construct
  source 1..120: mol_type = other DNA
aataggaaagtctgagttaattcataaataggcacattataagaacatttagtacagaatattgtgggaccttagtcctgctcattttatggaagatcagagaggataaattgtttatat

SEQ ID NO: 44080 - DNA, 120 bp, synthetic construct; identical to SEQ ID NO: 12478
  source 1..120: mol_type = other DNA

SEQ ID NO: 44081 - DNA, 120 bp, synthetic construct
  source 1..120: mol_type = other DNA
ttgtttaggacaccttgcagtgagcctgaagacctaattactgctgtctgcttccttttaaagtacttgcattcagcgattacagataatttgctataaatacaacttttgtggacttta

SEQ ID NO: 44082 - DNA, 120 bp, synthetic construct
  source 1..120: mol_type = other DNA
ctgttgtcttttcttcccattcaatatagcactcagagtctgttccaatcatttgaagatccaaagtttgtcctggggtgcacatagttagcgattcatgaattgatagatccatatata

SEQ ID NO: 44083 - DNA, 120 bp, synthetic construct
  source 1..120: mol_type = other DNA
tttaaaatacattcttgtgttgcccgtatactcagcacccccggtgcatctgtttacagatgcttaatgtggcttaatttctactaagtctataattcattcgtttaccatattgagtac

SEQ ID NO: 44084 - DNA, 120 bp, synthetic construct; identical to SEQ ID NO: 12479
  source 1..120: mol_type = other DNA

SEQ ID NO: 44085 - DNA, 120 bp, synthetic construct
  source 1..120: mol_type = other DNA
gcaaatgatgttatcagagctcagaatgtgggactttatctagttgagatcagcaaagacttagccggcaaattgccactgagttgagatctacaggaggaccagagtgaataggatatg

SEQ ID NO: 44086 - DNA, 120 bp, synthetic construct
  source 1..120: mol_type = other DNA
ggaaagtgcactttaagaaaggccaggttaaaagaatattgtgtaggcaactaagtagcaatgtgaccttcggtaagtcacacatttctatgtctccatttaatacccataatgcaggga

SEQ ID NO: 44087 - DNA, 120 bp, synthetic construct
  source 1..120: mol_type = other DNA
tatgaaaacattgagaatatttcattttgagaaaatagtgagaataattccaaactgttgcaagtttgctctgttcaccataatcacatcctgccactgtggctggagacggtagagtga

SEQ ID NO: 44088 - DNA, 120 bp, synthetic construct
  source 1..120: mol_type = other DNA
caaagcctcagctcccattcatcccctgaaagattccactacgtagatctgtcttcttttcctttctttcaggtcgttcttcctttaattgatcagtatttcaaaaaccatcgtttatac

SEQ ID NO: 44089 - DNA, 120 bp, synthetic construct; identical to SEQ ID NO: 12480
  source 1..120: mol_type = other DNA

SEQ ID NO: 44090 - DNA, 120 bp, synthetic construct
  source 1..120: mol_type = other DNA
gctaagtgtaatggtggatagaaggataaaatatcactcatttcacaatctacacatagaggccggatatgcatcaccctattagtatttgtgataaatggtacttttgacattagtttc

SEQ ID NO: 44091 - DNA, 120 bp, synthetic construct
  source 1..120: mol_type = other DNA
ctataaaatttctgaagctttcccctcttaacaatgctttctcatttctgtttaaaccaaagggttctttatggactcagttgtgattctgctggggatatcaggtccttttactcaaac

SEQ ID NO: 44092 - DNA, 120 bp, synthetic construct
  source 1..120: mol_type = other DNA
accaagcttttagattgtatcggaacaaaatttctataaaagtgaatacacagtataaagcagaacactggagaaaatacagactttccttggacttgacgtcgatgctgtgctgaaagg

SEQ ID NO: 44093 - DNA, 120 bp, synthetic construct
  source 1..120: mol_type = other DNA
cctgcactacgtaacactggggaatgcagctggagtggaattgtcagttcatctctttcacttattgtctattttaccaagtagcaagtggccagtcatgtgatatgggattgcaacagt

SEQ ID NO: 44094 - DNA, 120 bp, synthetic construct; identical to SEQ ID NO: 12481
  source 1..120: mol_type = other DNA

SEQ ID NO: 44095 - DNA, 120 bp, synthetic construct
  source 1..120: mol_type = other DNA
gtgagtgcacgcaagtagctagaatatctcaaggcaccaagttacccttaaacgtcgtgaaattgaggacacgttgaagtctcctactcctccctgggtctgttagcctttttaaatagg

SEQ ID NO: 44096 - DNA, 120 bp, synthetic construct
  source 1..120: mol_type = other DNA
aaataaatcaatgcaaattctgctattttcctcctctcctgtcttgtgttttattatctccattcagtttcagccttacccttagaactattcactgagcccatactatgcatatatcga

SEQ ID NO: 44097 - DNA, 120 bp, synthetic construct; identical to SEQ ID NO: 12482
  source 1..120: mol_type = other DNA

SEQ ID NO: 44098 - DNA, 120 bp, synthetic construct
  source 1..120: mol_type = other DNA
catactatatttttactaatttttttagatatgtttagatatacaaataccattttgttacagttgcctacagtattcggtacagtaacatgctgcacaagtatgtagcctggagcaata

SEQ ID NO: 44099 - DNA, 120 bp, synthetic construct
  source 1..120: mol_type = other DNA
gatgcatgactgtatttcatcttcagtttttcttctactaatagaaaaagcgttggtaaattttacttctcccattggtatttcccaaaaaaaggagcatgtgccatttaaaattccaac

SEQ ID NO: 44100 - DNA, 120 bp, synthetic construct
  source 1..120: mol_type = other DNA
cagagagaaagaaaatcatagaggaaaatatgaataaggaaatgataaatgatggtgcatgtctgtacaaaatgctgtgcagtcattaacattatgatggagatgagtataatactttcg

SEQ ID NO: 44101 - DNA, 120 bp, synthetic construct
  source 1..120: mol_type = other DNA
ccctgccactatgaataaataagcatgtcttcattcgcatgataaacactatgataatggttttaagtgtttaacagacgtgagtagcaatagttgtgtgggtttgagttaacttttcca

SEQ ID NO: 44102 - DNA, 120 bp, synthetic construct; identical to SEQ ID NO: 12483
  source 1..120: mol_type = other DNA

SEQ ID NO: 44103 - DNA, 120 bp, synthetic construct
  source 1..120: mol_type = other DNA
gggtggatatagaggggcgagagatttatggaaatcaagccagtcaaagttgatcttgaacaacttgtaggtcagagattaacaaaggaacatattttctaaatgtagataactacataa

SEQ ID NO: 44104 - DNA, 120 bp, synthetic construct
  source 1..120: mol_type = other DNA
cattaatactaagaagctattaaagctttttatgtgaaagaatgatcagagcttccctctgagaaatacagtctggcagcaaaggtatgattgatgagagtgggagagttgggaggccat

SEQ ID NO: 44105 - DNA, 120 bp, synthetic construct
  source 1..120: mol_type = other DNA
gtggcatgatctcggctcactgcaacctccgcctcccaggttcaagcaattctcctgcctcagcctcctgagtagctgggattacaggcacccaccaccatgcccggctaattttttttt

SEQ ID NO: 44106 - DNA, 120 bp, synthetic construct; identical to SEQ ID NO: 12484
  source 1..120: mol_type = other DNA

SEQ ID NO: 44107 - DNA, 120 bp, synthetic construct
  source 1..120: mol_type = other DNA
gaaacagggaagagagaaagtcaacatgacttggcgatgagtaatatggcaagtagaaaaaggtccaacttggtgctgaaatttcaactctgggtagttggaacattgttggtatcatga

SEQ ID NO: 44108 - DNA, 120 bp, synthetic construct
  source 1..120: mol_type = other DNA
atagaaacaacatatttcagaaaaagaatcgtttcgaagaagaggttacatttggtcaggtatttatcggagtataaggtacccgcaggtcattcagttggagaaatccagcagattgga

SEQ ID NO: 44109 - DNA, 120 bp, synthetic construct
  source 1..120: mol_type = other DNA
tatataatgcttgaagctccgaggaagtagataaaactgaaggagagtagagaaagaggcaaaaggttttgaataccctggagaattattacatttacagggtttttggaaataggtctt

SEQ ID NO: 44110 - DNA, 120 bp, synthetic construct; identical to SEQ ID NO: 12485
  source 1..120: mol_type = other DNA

SEQ ID NO: 44111 - DNA, 120 bp, synthetic construct
  source 1..120: mol_type = other DNA
ttataataattaatccttatagtttctatgaataccatgccctaaaagtggattgcacaggaggggaaagagttacaatttgccctctttgaggaccttgccttctgtatctgtatttct

SEQ ID NO: 44112 - DNA, 120 bp, synthetic construct
  source 1..120: mol_type = other DNA
atttgataaatgagacatagagcagtctgccattatagcaaaacatcctaggtttggattaattgagtaagacctaatcctagcattataaattctggatcatcaagaatatctcagaat

SEQ ID NO: 44113 - DNA, 120 bp, synthetic construct; identical to SEQ ID NO: 12486
  source 1..120: mol_type = other DNA

SEQ ID NO: 44114 - DNA, 120 bp, synthetic construct
  source 1..120: mol_type = other DNA
acattttcttggaaaactacaaaataccctacataattttcatcaatacatgaatccacattgttacagaagtgaggggtgatggccaaaacttactgtaaaagaggtcaacctcacaaa

SEQ ID NO: 44115 - DNA, 120 bp, synthetic construct
  source 1..120: mol_type = other DNA
gttaatgcagagttttgcaagagaacatagtcagtgaggacttagctgttctcgttattgggaaaaatcaagctgagtgtgggtggtactatacacatggatcttcaaggttagattttc

SEQ ID NO: 44116 - DNA, 120 bp, synthetic construct
  source 1..120: mol_type = other DNA
gggtatggacctcttgcagcctgggttgggagctgtacaggagggctggatgtcagaacgctgacctacttattttattgagtttatttagtttaatgagtttattcttggaagaaactc

SEQ ID NO: 44117 - DNA, 120 bp, synthetic construct
  source 1..120: mol_type = other DNA
ggacaaacagcagggatctcccaggttcaagtgtctgatctgagagttagtggataccagcgttgtcaggctgaatgctgaatgtgggcagccattatttggaatggctcattgctaatt

SEQ ID NO: 44118 - DNA, 120 bp, synthetic construct; identical to SEQ ID NO: 12487
  source 1..120: mol_type = other DNA

SEQ ID NO: 44119 - DNA, 120 bp, synthetic construct
  source 1..120: mol_type = other DNA
cagagtttcagtggtacatttgggcagataaaaccaaattttttcctggtggtttttcagtagttatatccttatggggttcatatagattgcttttatattaattagctttgctttcaa

SEQ ID NO: 44120 - DNA, 120 bp, synthetic construct
  source 1..120: mol_type = other DNA
tttgttaaagagatgcactcaaagactctttctttaatacctttactccacattctgctcagagaattgattctttctgcgtgacatcatgttgcttttttccggctcatatatcagctg

SEQ ID NO: 44121 - DNA, 120 bp, synthetic construct; identical to SEQ ID NO: 12488
  source 1..120: mol_type = other DNA

SEQ ID NO: 44122 - DNA, 120 bp, synthetic construct
  source 1..120: mol_type = other DNA
tacactagtccaaagcataactgaaagtaaaaagactattattaaagagcaaatgaatgaaaatggcaggctgtgccgtattttatctcaggggtaaaaacaaaacaaagccaggccctt

SEQ ID NO: 44123 - DNA, 120 bp, synthetic construct
  source 1..120: mol_type = other DNA
aatgctcttgactacagatttgcatgtcttctgcattccaaacattggaacgtcatagtcaagacactgaagccaaggagcttcggagcttcacttggcaagagtggcttttctagcacc

SEQ ID NO: 44124 - DNA, 120 bp, synthetic construct
  source 1..120: mol_type = other DNA
ctgccgtggggctttagaatctttagtggctggtggaatttgtgtttcacactttcctgcatccgattttataaactgccgaagaaaatgtgaaccctttgctctctaggttttgagaca

SEQ ID NO: 44125 - DNA, 120 bp, synthetic construct
  source 1..120: mol_type = other DNA
ttaaactgaggaacgggtatatatatatacatatatatatatacacacacacacatatgcacaaataagttcttcacattacactttttgagaaataatagtttctggatatagtaggtt

SEQ ID NO: 44126 - DNA, 120 bp, synthetic construct; identical to SEQ ID NO: 12489
  source 1..120: mol_type = other DNA

SEQ ID NO: 44127 - DNA, 120 bp, synthetic construct
  source 1..120: mol_type = other DNA
tcagcaagtgctatctaattatacatatcagctgcccttttgcggtcttattaatgagcataataatactttctatggtgctatttctaacttcctgcttattgtatatccttcttttcc

SEQ ID NO: 44128 - DNA, 120 bp, synthetic construct
  source 1..120: mol_type = other DNA
atgtcgtggtgagagaatcacttgaggacaggagttcaagaccagctggggcaacatagcaagaccttggctctacaaaaaataaaaataaaaaattagccaggtgcagtggtgcacacc

SEQ ID NO: 44129 - DNA, 120 bp, synthetic construct; identical to SEQ ID NO: 12490
  source 1..120: mol_type = other DNA

SEQ ID NO: 44130 - DNA, 120 bp, synthetic construct
  source 1..120: mol_type = other DNA
gaagataaatgtataatacagtttgtcatgcttgttaggggtgaaaaactagaccttaacattagttccttccctgtgtggtcctagtatttcaattagacattgtggtttcatccctta

SEQ ID NO: 44131 - DNA, 120 bp, synthetic construct
  source 1..120: mol_type = other DNA
tcaaatttgctttgatatttgcctataaaatataaacttcaacatggctttattaatcaaacatctagtacagatttgccaaattattagaatctttaagtctttttttttttttttgaa

SEQ ID NO: 44132 - DNA, 120 bp, synthetic construct
  source 1..120: mol_type = other DNA
acaggcacacgccaccacacacggctaatttttagtagaaacggggtttcaccatgttggccaggctggtctcgaactcctgacttcaggtgatctgcccacctcggtctgccaaagtgc

SEQ ID NO: 44133 - DNA, 120 bp, synthetic construct; identical to SEQ ID NO: 12491
  source 1..120: mol_type = other DNA

SEQ ID NO: 44134 - DNA, 120 bp, synthetic construct
  source 1..120: mol_type = other DNA
tttctagtcttattaaaattattagattttattaacttatctaaagcttattatactttatttacataaattacatactaaactagtagacttagccctttaaaatacacacacagggcc

SEQ ID NO: 44135 - DNA, 120 bp, synthetic construct
  source 1..120: mol_type = other DNA
ccagcctgggaaacatggcgagaccccatctcgactaagaatacaaaaaattagccatgtctggtggcatacacctttggtcccagctactcaggaggctggggtgggaggattgcttga

SEQ ID NO: 44136 - DNA, 120 bp, synthetic construct
  source 1..120: mol_type = other DNA
acccatttccagaatgaatcagaagtgttataacccaactatttactttttgatttatcagctatgccagtgtggatttttccaaacagagagacccagtagcatatatgcagtgcttgt

SEQ ID NO: 44137 - DNA, 120 bp, synthetic construct
  source 1..120: mol_type = other DNA
atctctaagtcttaagcatttaagcttcacatattccctgtactgtcttgtatttcctgtactatcttggtttaaagattttttcatgacctaaacctaagagtaaattaagacagaatt

SEQ ID NO: 44138 - DNA, 120 bp, synthetic construct; identical to SEQ ID NO: 12492
  source 1..120: mol_type = other DNA

SEQ ID NO: 44139 - DNA, 120 bp, synthetic construct
  source 1..120: mol_type = other DNA
ttaagataatagtgtttttatgcctaatctattatttttgagacatttaaaccattttatgttatgtttaaaaagctaaggtttttaaaaaggaagacaagcggtattacccatagaatt

SEQ ID NO: 44140 - DNA, 120 bp, synthetic construct
  source 1..120: mol_type = other DNA
taacgaattttggaaatccaggtaggacataaataggacgtaggcaggttgacaagtgatatccttatcatttgccattttcaaggaccagtgttgactaaagaaacagtgctttgattc

SEQ ID NO: 44141 - DNA, 120 bp, synthetic construct
  source 1..120: mol_type = other DNA
gcagcatctgataactaagagtccaacagtaataatgatggtggcacaggtggtgcttatcagagtgccttaaaggctttctttttacatgtgaaaataaatcaaatgccttgatgatac

SEQ ID NO: 44142 - DNA, 120 bp, synthetic construct; identical to SEQ ID NO: 12493
  source 1..120: mol_type = other DNA

SEQ ID NO: 44143 - DNA, 120 bp, synthetic construct
  source 1..120: mol_type = other DNA
tcgtgtcccagcccagtctctcctcctccctatgcttcttcagcttccttggccttctctctgcctcttgaatgtgttagattcctttctgcccagggtttttgcacatgctgtaattat

SEQ ID NO: 44144 - DNA, 120 bp, synthetic construct
  source 1..120: mol_type = other DNA
acctccttgataatactccgtcctgctactattataatagtctctggtgccgtgtacttttcctccatgtcactgatggtatgcctaccagattaatatctctcttctctcgcataaact

SEQ ID NO: 44145 - DNA, 120 bp, synthetic construct; identical to SEQ ID NO: 12494
  source 1..120: mol_type = other DNA

SEQ ID NO: 44146 - DNA, 120 bp, synthetic construct
  source 1..120: mol_type = other DNA
tcttattccttaagaggtccatgaaaacacttaggccacttacagtgaatagaaaataacacataattaatgacccttaaaataataagatcatgaaactcaaccaacaatgatcctttc

SEQ ID NO: 44147 - DNA, 120 bp, synthetic construct
  source 1..120: mol_type = other DNA
ctttttaacatcctagtgagacattgaatgacctggacactcctcagagttagtggagaatttgtgaattaatcacataggtacatctaggaatacctgatgttattacaaaaagccagc

SEQ ID NO: 44148 - DNA, 120 bp, synthetic construct
  source 1..120: mol_type = other DNA
aaacagtagctgttgttaaaatattcagtttttttctaggtgagtatgcctgacttataccagtagataaatcttaatgttacgtttggaagagttttaaaagtagatactaaataaagt

SEQ ID NO: 44149 - DNA, 120 bp, synthetic construct; identical to SEQ ID NO: 12495
  source 1..120: mol_type = other DNA

SEQ ID NO: 44150 - DNA, 120 bp, synthetic construct
  source 1..120: mol_type = other DNA
ctaacaaggtgaaaccccgtctctgctaaaaatacaaaaaattagccgggcgtggtggcaggcgcctgtagtcccagctactcgggaggctgaggcaggagaatggcgtgaacccaggag

SEQ ID NO: 44151 - DNA, 120 bp, synthetic construct
  source 1..120: mol_type = other DNA
gatagaagcatatttgaggattcagtgtgccattaagttgagaatgtaatggttcaatcatgcgcaatctgtaactattttcttatccttgttattcgtagctggaggatcattgagatc

SEQ ID NO: 44152 - DNA, 120 bp, synthetic construct
  source 1..120: mol_type = other DNA
atattggaattagatgcctataatgaaagtaataaagtatacatagcattagatcaacatagtattagagcgatacagataattctttcagttgaacatagcattataggagaatttcct

SEQ ID NO: 44153 - DNA, 120 bp, synthetic construct; identical to SEQ ID NO: 12496
  source 1..120: mol_type = other DNA

SEQ ID NO: 44154 - DNA, 120 bp, synthetic construct
  source 1..120: mol_type = other DNA
ttataaaacagaactggcatatgatatgtcaaatttaacattgagaattcctgagttatagaaactttatttaaaaaaacaatttgggattaatatgcaaaaattatttatagttatatt

SEQ ID NO: 44155 - DNA, 120 bp, synthetic construct
  source 1..120: mol_type = other DNA
tactttttatgtttacgtacaccttgatgcactgatataaatacacaatcttaaggacaaataggcaatctatcattgtttccctgagtgctcagaggtgatgagaggtgtgtatctgag

SEQ ID NO: 44156 - DNA, 120 bp, synthetic construct
  source 1..120: mol_type = other DNA
gccacctgaaagttttatcatcttacaaaactctgctggcccttcctgttcttcctgataacgtgattgacatttctgattatggtaatctggatagctttaagaaggacaatatttaag

SEQ ID NO: 44157 - DNA, 120 bp, synthetic construct
  source 1..120: mol_type = other DNA
gaagactctactttttctgccttcttagagtccctttcccattttttacatagaggtgtttctatttaaagttgtgctgtgtctaaaaggggtctaccaagatgtaaaaatgtgtggagt

SEQ ID NO: 44158 - DNA, 120 bp, synthetic construct; identical to SEQ ID NO: 12497
  source 1..120: mol_type = other DNA

SEQ ID NO: 44159 - DNA, 120 bp, synthetic construct
  source 1..120: mol_type = other DNA
cctgcctctctgatttggggctgattaatagtggcataggactcatatacgttgcactggatctcttcctcctcatgggccttctctttcccattgtctatactgcatctttcttatctt

SEQ ID NO: 44160 - DNA, 120 bp, synthetic construct
  source 1..120: mol_type = other DNA
atagctctggcttagatctcttccctgcactgcagacttttttttttttttcaatcaattgcctattctacatctttacccgaattactaataggcccatcacacttaatatgtgcaaag

SEQ ID NO: 44161 - DNA, 120 bp, synthetic construct; identical to SEQ ID NO: 12498
  source 1..120: mol_type = other DNA

SEQ ID NO: 44162 - DNA, 120 bp, synthetic construct
  source 1..120: mol_type = other DNA
attaattctttgaaaatataaatcgtatcatatcccatcctgctcaaaacctaagaatgtcttcctaccgcactgaaaatccaagggcttgctctaaccaagctctagaacctgacctct

SEQ ID NO: 44163 - DNA, 120 bp, synthetic construct
  source 1..120: mol_type = other DNA
tccctgtacctggatctccttctcagatacatggatggtttatttcttcatgtcattccaacctctgctcaaatgccgcctccaggaaggactcatgagcactatccctgttattctacc

SEQ ID NO: 44164 - DNA, 120 bp, synthetic construct
  source 1..120: mol_type = other DNA
ataattatataatatatatttatgtaaatatatattatatgatatataatatatttatagaaatatatattatataatataattatatataatctttttgtatataacaaatatttttta

SEQ ID NO: 44165 - DNA, 120 bp, synthetic construct
  source 1..120: mol_type = other DNA
actattttgttcattactggaaatttgagagtgcctggttttaatctttctttgttaagtgaattaatcatcaaatgaatacttctaagagttccaggagaagccccagagctggcatct

SEQ ID NO: 44166 - DNA, 120 bp, synthetic construct; identical to SEQ ID NO: 12499
  source 1..120: mol_type = other DNA

SEQ ID NO: 44167 - DNA, 120 bp, synthetic construct
  source 1..120: mol_type = other DNA
tcagtgtgtacttaggtcattcattttaggttactttttgtataaagaatataacatataccagtattacaaaaacttacattcagataatagttgtcaatctcaggacccaggagatga

SEQ ID NO: 44168 - DNA, 120 bp, synthetic construct
  source 1..120: mol_type = other DNA
aagtggtcaaattattttgttaccttgaattcatcattttatttgctttctgtatccccattacgaagaaaaatatatgtaatgcttttatcactcatatttctgtacttccttgtaaaa

SEQ ID NO: 44169 - DNA, 120 bp, synthetic construct
  source 1..120: mol_type = other DNA
tggtgctttttggtttttgccaaagaccaataacattcaaggaaattaatttaccttcatgcaatggaattcaggcaaattaattcatcttaatgcagtgggatgaaataagaaagcaga

SEQ ID NO: 44170 - DNA, 120 bp, synthetic construct; identical to SEQ ID NO: 12500
  source 1..120: mol_type = other DNA

SEQ ID NO: 44171 - DNA, 120 bp, synthetic construct
  source 1..120: mol_type = other DNA
gaaaagaagaacattgagaaattctcagggcaatttatacagcattttgtttcctctttaggcaatgatgcaacatcaattgtcaactgtcttcatattttgggtcagactttggatgca

SEQ ID NO: 44172 - DNA, 120 bp, synthetic construct
  source 1..120: mol_type = other DNA
gtggcagcttatgtctatgatcatatatagattattatttaatgtcaggtaatttctgtagcagctaggaccataaaggagggttgaactggtaatgtatcacgcaggaaaaatggtaat

SEQ ID NO: 44173 - DNA, 120 bp, synthetic construct
  source 1..120: mol_type = other DNA
gtttaagattgcatactaagtgtgtaggtagacgaattcccatctgtgtgctttctactctgccctgtcaacttgaccagaaatctagcatgttgaccaaatacaaaatcagttcattta

SEQ ID NO: 44174 - DNA, 120 bp, synthetic construct; identical to SEQ ID NO: 12501
  source 1..120: mol_type = other DNA

SEQ ID NO: 44175 - DNA, 120 bp, synthetic construct
  source 1..120: mol_type = other DNA
atttcggattaactatactcactcagaagctgtgttttgttagttaaattggagaccgttagtgataagcatacagcattagcacagacttttgcagcaaggttttaataagttgactat

SEQ ID NO: 44176 - DNA, 120 bp, synthetic construct
  source 1..120: mol_type = other DNA
ataaacatcataagagaaccacaattcatttatatttcatttgttcctgttggaagatacgagtcctcccttatttactttctaggacagtgatgaagactggcctggagagtgttaaaa

SEQ ID NO: 44177 - DNA, 120 bp, synthetic construct
  source 1..120: mol_type = other DNA
attacaccacagtggccctgctgccaatgctgtcttcattatttgaacatattggccagcatcagttcggagaagacctaatatgtatgtaaatttatatcttggagttttttttttttt

SEQ ID NO: 44178 - DNA, 120 bp, synthetic construct; identical to SEQ ID NO: 12502
  source 1..120: mol_type = other DNA

SEQ ID NO: 44179 - DNA, 120 bp, synthetic construct
  source 1..120: mol_type = other DNA
aataatgtgaagacgactgagacaaagtctgtgtctaaataattggccttttagagtggctcaaatatcctctgtttagaggtttctgacagtttttagggaagctttaatcttctgttt

SEQ ID NO: 44180 - DNA, 120 bp, synthetic construct
  source 1..120: mol_type = other DNA
cagaatcaccaactcagactcgtgcattgtccattcctcaggtgatgggcacctctgtgcaaaaactgctgagttactcagtgggtgccacaactaccagtggcagaacgtttattttaa

SEQ ID NO: 44181 - DNA, 120 bp, synthetic construct
  source 1..120: mol_type = other DNA
agtatggtgaaaccccgtctctactaaaaatacaaaaattagctgggcatgatggtgcacacctgtaatcccagctactcgggaggctgagacaagataatcacttgaacctatgtggtg

SEQ ID NO: 44182 - DNA, 120 bp, synthetic construct
  source 1..120: mol_type = other DNA
atgtgccttttgtttagttatttttatttgtataaatttacgggtttcaagtacagttgtctgggcttttagggcatccatcacccaaataatgaacattgtgcccattaagtaatttct

SEQ ID NO: 44183 - DNA, 120 bp, synthetic construct; identical to SEQ ID NO: 12503
  source 1..120: mol_type = other DNA

SEQ ID NO: 44184 - DNA, 120 bp, synthetic construct
  source 1..120: mol_type = other DNA
atgtccaggtgtcttgttatagaattctgactagcttatatgctttgggaaccagcaagagtatttacgtggagaggtaagaatgtttaaagtttaactttgtattaattgctgcttcaa

SEQ ID NO: 44185 - DNA, 120 bp, synthetic construct
  source 1..120: mol_type = other DNA
aattgatataataaaggacaatggagttatgcaaagaaagtaaagcactaatggtaaagactacacttaatatgaagtttcagctgagtgtttgagtcttatgaaagcacctgctagtat

SEQ ID NO: 44186 - DNA, 120 bp, synthetic construct; identical to SEQ ID NO: 12504
  source 1..120: mol_type = other DNA

SEQ ID NO: 44187 - DNA, 120 bp, synthetic construct
  source 1..120: mol_type = other DNA
agtacaatttcagtacagcaaattacagaaatttgctttttccaacttcacaaaatcattcaaaagtttatttcaaagaataaacccatgagactagccaacggaatttgcaggggaata

SEQ ID NO: 44188 - DNA, 120 bp, synthetic construct
  source 1..120: mol_type = other DNA
aattgggtttactctgaacattttacatttcttaccttcattttaagtaaactcaattttcatattatttttatggttatgacctatattaaggaagtataataatttattgatatgtga

SEQ ID NO: 44189 - DNA, 120 bp, synthetic construct
  source 1..120: mol_type = other DNA
ggaattataggtcaaagggtatgcctgtattacaggattacggtactcatttcactgttttcagaaaatcctttccatttacattctcaaattttagaagtgaatgctaatttcctcatt

SEQ ID NO: 44190 - DNA, 120 bp, synthetic construct; identical to SEQ ID NO: 12505
  source 1..120: mol_type = other DNA

SEQ ID NO: 44191 - DNA, 120 bp, synthetic construct
  source 1..120: mol_type = other DNA
tataaaatatatacataaaacatatatatatatataaaatatataaaaattatatacagatagcattttatgacatggtaatgttgaatttttatataatcaaattttatataattttga

SEQ ID NO: 44192 - DNA, 120 bp, synthetic construct
  source 1..120: mol_type = other DNA
tccagttctttatatttaactttataatcctattgtttgtatcctaaatatttgttaaatgccagatactaggatacagaaataaacaagatacttctctactctcataggttttatatc

SEQ ID NO: 44193 - DNA, 120 bp, synthetic construct
  source 1..120: mol_type = other DNA
ttagaaggcgacttttgaagcttataacttttctctatgcaacagaaaacaggtagaagctatatgaggtaggtctgtgtctagtagcttctgttttctcaatgaagaatgccttgagtc

SEQ ID NO: 44194 - DNA, 120 bp, synthetic construct
  source 1..120: mol_type = other DNA
ctcttgggtattatgtaggattcaaattaaatttttaaaatcatcaaccatttgtaaagtaatcatttattaactatttattttattccctgatttaaaataaaaccatcatgtaaagta

SEQ ID NO: 44195 - DNA, 120 bp, synthetic construct; identical to SEQ ID NO: 12506
  source 1..120: mol_type = other DNA

SEQ ID NO: 44196 - DNA, 120 bp, synthetic construct
  source 1..120: mol_type = other DNA
atttacaaaaagttacagtggaactttttctaaaatatctacaaatatagatattttaacataagtcatccaaaagaaaaattgatatttccagaatgccaacacaaattatcagaatca

SEQ ID NO: 44197 - DNA, 120 bp, synthetic construct
  source 1..120: mol_type = other DNA
ttttttcaaatggtgaggatattgctattgaaagcatatgatgtttagcaatacagaaattggatttgggagttaattttattaggaccaatattatcattccttttaggttaaatttgc

SEQ ID NO: 44198 - DNA, 120 bp, synthetic construct
  source 1..120: mol_type = other DNA
cattaggagaatgtctagctgcctttgctggtgcttttcctgtagcatttttggaaactcatctggacaaacataatatttactccatctacaataccaagtcttcacgagaaagagcag

SEQ ID NO: 44199 - DNA, 120 bp, synthetic construct
  source 1..120: mol_type = other DNA
ttaaatgttattgtttggtattctatgtgatgtaccctgtgatagatgagggagatatgatacatatagggcagcaatcagaatatgtggtaattcaagagcaaggtgactgagcaggcc

SEQ ID NO: 44200 - DNA, 120 bp, synthetic construct; identical to SEQ ID NO: 12507
  source 1..120: mol_type = other DNA

SEQ ID NO: 44201 - DNA, 120 bp, synthetic construct
  source 1..120: mol_type = other DNA
gcagaaagaatggccaaaattgtctagatgaacatgcaaaccaaaaaagagaagagaatcaaagatagattcctaaagataatcagcatttgaaagttcagcaagggctgggcgcagtgg

SEQ ID NO: 44202 - DNA, 120 bp, synthetic construct
  source 1..120: mol_type = other DNA
ccgggcgtggtggtgtgtgcctgtaatcctggctactcaggaggctgaggcatgagaatcgcttgaactggggaggcagagtttgcagtgagccaagactgcgccactgcactccagcct

SEQ ID NO: 44203 - DNA, 120 bp, synthetic construct; identical to SEQ ID NO: 12508
  source 1..120: mol_type = other DNA

SEQ ID NO: 44204 - DNA, 120 bp, synthetic construct
  source 1..120: mol_type = other DNA
gagccgtgagtgggggacttcaaaacttcctcgaaaacggggaatggaggccaaggtggagccagtcataaatggcttgtaggtcatgagagcagcaaagttagaggaggaaatatttga

SEQ ID NO: 44205 - DNA, 120 bp, synthetic construct
  source 1..120: mol_type = other DNA
agctttgaaatagctaccttgaaacacaggagaaggagccagttgcaggcatgccacgtcttgctaaattttgaagtccaaaatgaaatagttgcctgtggaaatccgccatatcatctc

SEQ ID NO: 44206 - DNA, 120 bp, synthetic construct
  source 1..120: mol_type = other DNA
ccaaacataccgtctttggagaaactcatggaagaaatcgtggaattagccgagtccggcattcgctacactcaaatgccacatgtcatggaagtcatactgcccatgctttgcagctac

SEQ ID NO: 44207 - DNA, 120 bp, synthetic construct; identical to SEQ ID NO: 12509
  source 1..120: mol_type = other DNA

SEQ ID NO: 44208 - DNA, 120 bp, synthetic construct
  source 1..120: mol_type = other DNA
aatcaataaacacagcagtaaaaactaatgattttatagccagagacaaaaataaaacattcaacttttagcaatccacttgtagccatctgttatatagagaatgtgaagagaagggag

SEQ ID NO: 44209 - DNA, 120 bp, synthetic construct
  source 1..120: mol_type = other DNA
tgccagaatattatgtcatattttgttttttgtttgtttgtttatgagatggagtttcactcttgttgcccaggcaagagtgcaatggtgagatcttggctcactgcaacctccgcctcc

SEQ ID NO: 44210 - DNA, 120 bp, synthetic construct
  source 1..120: mol_type = other DNA
gttcgccaggctggtctcgaactcctgacctcaggtgatccacccacctcggcctcccaaagtgctgggattacaggtgtgagccaccacgtctatgtcatctttaaatgttgaagtttc

SEQ ID NO: 44211 - DNA, 120 bp, synthetic construct
  source 1..120: mol_type = other DNA
aaaactccagaaaaatgcagcaatgacttattaatttgggtagatgattatggttgactttaacttttctcttgtatacttttccccagtgcatatatgttactttcagggggaaaaaag

SEQ ID NO: 44212 - DNA, 120 bp, synthetic construct; identical to SEQ ID NO: 12510
  source 1..120: mol_type = other DNA

SEQ ID NO: 44213 - DNA, 120 bp, synthetic construct
  source 1..120: mol_type = other DNA
agtaaacatttttttaatggcagctatgcaattagaacttggactagaaaaatggctgaggcatgagctgtacccttaaggaagtcatgtgctggagaaggaggctttaattatgttaca

SEQ ID NO: 44214 - DNA, 120 bp, synthetic construct
  source 1..120: mol_type = other DNA
cccagcctataataaataaagtgaaacctcagctcttgaaaactcatttcttgccgttaatggagaaactcaagaaaaaggcagctacggtggtgtctgaggaagaccacctgaaagctg

SEQ ID NO: 44215 - DNA, 120 bp, synthetic construct; identical to SEQ ID NO: 12511
  source 1..120: mol_type = other DNA

SEQ ID NO: 44216 - DNA, 120 bp, synthetic construct
  source 1..120: mol_type = other DNA
ttaaatattacaacactgtgctgaaaccatcatgagctctgtggtcagtacatttaactttggggggatggttttttttttttaaattaactttaaggagtagctgagaaaccactttat

SEQ ID NO: 44217 - DNA, 120 bp, synthetic construct
  source 1..120: mol_type = other DNA
tgatagatcacgcctactgtttgtaggcacctgcttacttgcctcctaggtttcatgtaacagttgaggagagagaataggttcccctgaggagtttgagggaatataaaccttcttctg

SEQ ID NO: 44218 - DNA, 120 bp, synthetic construct
  source 1..120: mol_type = other DNA
ttactatctagctttccctatctcttggcattttgttctcttaatttgcagttctcagtttgagacgtgcttaaatagactagcaatttccaacaataacccacactcattttacttgta

SEQ ID NO: 44219 - DNA, 120 bp, synthetic construct; identical to SEQ ID NO: 12512
  source 1..120: mol_type = other DNA

SEQ ID NO: 44220 - DNA, 120 bp, synthetic construct
  source 1..120: mol_type = other DNA
acaaagaaaataaaaatttcaacctcagttttatcatctgagatatcttaccagtttacttaatcagactgttgtacaaatcaagttactttgaatacataatattttttaaatatgcat

SEQ ID NO: 44221 - DNA, 120 bp, synthetic construct
  source 1..120: mol_type = other DNA
gaaataatggctgcttaacatgcaactttgtatcttcacaaagatacaaatttatttatcctgtgtaactcatgtttgggggatgcaatagatcatccaaggtattctgaaggaaaattc

SEQ ID NO: 44222 - DNA, 120 bp, synthetic construct
  source 1..120: mol_type = other DNA
attgcttgagctcaggagttagaggctgcagtgccctatcattgcacagctgcatcccagcctgggtgacagagccagaccctgtccctaaatacatacatgaatgaatgtataaataaa

SEQ ID NO: 44223 - DNA, 120 bp, synthetic construct; identical to SEQ ID NO: 12513
  source 1..120: mol_type = other DNA

SEQ ID NO: 44224 - DNA, 120 bp, synthetic construct
  source 1..120: mol_type = other DNA
tctgaatatgtacttttgaatctcatgggcatatattaatataaacataaattggctaatgtgttatgtttttccccaaatatttaaagataaattgattttgccagtctttttatgttc

SEQ ID NO: 44225 - DNA, 120 bp, synthetic construct
  source 1..120: mol_type = other DNA
tcagtatatgcctttcaccagctaaccaggcgtttgaatattcattctactccttggtaaacatgtgatcttgcaatgaaattttctgaatcttagttttcccatctttgcaatgtgcat

SEQ ID NO: 44226 - DNA, 120 bp, synthetic construct
  source 1..120: mol_type = other DNA
aacttgcaggttctgtgtaacctctaattacaaagacttctttaagtggttttaactgaaatttcctttgcaacttctcagaatttcaaaagagaagagcagaacttcgttgtacagaat

SEQ ID NO: 44227 - DNA, 120 bp, synthetic construct
  source 1..120: mol_type = other DNA
tttttttagattttcgaagatttgtaactggaatctgacagatttggtaatgttataaattggttcaaatatgcaagctgttttaaggttactggaatttgtttgaatcaggcatggtaa

SEQ ID NO: 44228 - DNA, 120 bp, synthetic construct; identical to SEQ ID NO: 12514
  source 1..120: mol_type = other DNA

SEQ ID NO: 44229 - DNA, 120 bp, synthetic construct
  source 1..120: mol_type = other DNA
gttggttgacttgtatatgaaaagcaagctccccaaaccaaggaagccatttccttctctaggacttgcctaacgatgggagggactgctgtctccccaggatcagcaaatctccaagat

SEQ ID NO: 44230 - DNA, 120 bp, synthetic construct
  source 1..120: mol_type = other DNA
caagtgtgaatatttgtgtgcttatgtgtaccaaagaaacagacctcaaaataaattcgctgcattatttaaaagccacatggacgaattccaggttctcacacatgaagtgggaagtat

SEQ ID NO: 44231 - DNA, 120 bp, synthetic construct
  source 1..120: mol_type = other DNA
tatgtttaattcctgctaaatgagaaataaatatattacatgtggtaacatttggctgccaaatggccaaagatccaaaaatgactgctactcaggcagagcaaattagcctctactgac

SEQ ID NO: 44232 - DNA, 120 bp, synthetic construct; identical to SEQ ID NO: 12515
  source 1..120: mol_type = other DNA

SEQ ID NO: 44233 - DNA, 120 bp, synthetic construct
  source 1..120: mol_type = other DNA
gactgattataacacagtttgctcttatttgcaagaagaaaaaaggggagtaatagataagaacctctcaattttaacatttctgacccacaaattttctcaaactaaaaaattattttt

SEQ ID NO: 44234 - DNA, 120 bp, synthetic construct
  source 1..120: mol_type = other DNA
ctcctgcctcagcctcccaagtagctgggactatacaggcgcatgccaccatgcccagttaattttcgtatttttagtagagacagggtttcaccatattggccaggctggtctcaaact

SEQ ID NO: 44235 - DNA, 120 bp, synthetic construct
  source 1..120: mol_type = other DNA
gcatttattacaagttctctgtgtttatttgtgggtgtgagaaaggtgggttttgcctgttgcattatacaattgtactctgtttttttcttaagatttcatttcctgttgaaatgtaat

SEQ ID NO: 44236 - DNA, 120 bp, synthetic construct; identical to SEQ ID NO: 12516
  source 1..120: mol_type = other DNA

SEQ ID NO: 44237 - DNA, 120 bp, synthetic construct
  source 1..120: mol_type = other DNA
aacctcactgttcgtagcagcaaaatgtttgtcatgctgcttaccttgatggaggcttgtaaaatcagaataatgtgtgtgttgtgcctcacagattataggcatgcaacaaattttaat

SEQ ID NO: 44238 - DNA, 120 bp, synthetic construct
  source 1..120: mol_type = other DNA
aaaacgtacgagagaaagaaactgataggatagtcaaagatgtcagaggtaagtgaggatttgaataggtcttggaaaatgagtcttttctagatgggtcataaggagagagggtggagg

SEQ ID NO: 44239 - DNA, 120 bp, synthetic construct; identical to SEQ ID NO: 12517
  source 1..120: mol_type = other DNA

SEQ ID NO: 44240 - DNA, 120 bp, synthetic construct
  source 1..120: mol_type = other DNA
ttcaagaccagtctggccaagatggtgaaaccccatctctactaaaaatacaaaaaaaaaattagccaggcgtggtggtgggtgcctctaatcccagctacttgggaggctgaggcagag

SEQ ID NO: 44241 - DNA, 120 bp, synthetic construct
  source 1..120: mol_type = other DNA
gggctcaggtgattgatttaagaaagggctcaggttagtccacttcccttcttaaatatgcccacatatgggccatgttattacatcttcatatctgatccaaatgcacagattgaaaat

SEQ ID NO: 44242 - DNA, 120 bp, synthetic construct
  source 1..120: mol_type = other DNA
gctttgaatacagagaaacgacaaaacaggtttggcagctgccccaaaggagctgcatagtttggggaggaaataggcactaaacaaatgaacaaaaaatacccaatatgtgcgtacagg

SEQ ID NO: 44243 - DNA, 120 bp, synthetic construct; identical to SEQ ID NO: 12518
  source 1..120: mol_type = other DNA

SEQ ID NO: 44244 - DNA, 120 bp, synthetic construct
  source 1..120: mol_type = other DNA
aataaatttagactaagaaaactccaaaccaatacaatttagactaagaaaactccaaaccaatacaatttagactatattggggatgtcgctttgctgaaactaaattaccggtattgg

SEQ ID NO: 44245 - DNA, 120 bp, synthetic construct
  source 1..120: mol_type = other DNA
aaatgatccattttttaatgaatgagtcaatttaacagtacaaattattcatcatattttttctaataaacttactgagaataatctcttacaagttggtatgtataaaaatgggattca

SEQ ID NO: 44246 - DNA, 120 bp, synthetic construct
  source 1..120: mol_type = other DNA
aacgtaatatataagctatcattgctatatggtgactcacttgtttcactactttcactatggtaaaaatgtctttcaacctcatgctatgatacactttaccttctgttaagtaaaaca

SEQ ID NO: 44247 - DNA, 120 bp, synthetic construct
  source 1..120: mol_type = other DNA
ttgtaactttgaattactgctacaaaatattcaacatgcacaaataagtggatgtgggacaattattttaattttgacattagaacatgccatcttgatagaatactcattacccagtga

SEQ ID NO: 44248 - DNA, 120 bp, synthetic construct; identical to SEQ ID NO: 12519
  source 1..120: mol_type = other DNA

SEQ ID NO: 44249 - DNA, 120 bp, synthetic construct
  source 1..120: mol_type = other DNA
gaaaattagaaagcacacaatatctgaaattactatagaattttttatatatttatctgcttccctaaaattacaattttcatttgtcttctaaaaattacgtgggaatgcataccagtg

SEQ ID NO: 44250 - DNA, 120 bp, synthetic construct
  source 1..120: mol_type = other DNA
gaggaagatgaagtgacaagttagggaagagtcatagtggttctacatgtgagaaaagcaggttcagatcccagcacttctctttgttccataggcagctgtttctgatcaggaaaggaa

SEQ ID NO: 44251 - DNA, 120 bp, synthetic construct; identical to SEQ ID NO: 12520
  source 1..120: mol_type = other DNA

SEQ ID NO: 44252 - DNA, 120 bp, synthetic construct
  source 1..120: mol_type = other DNA
cccaagactcaaacataaagactgctctttttttgaggctgtttttatttgtaagttatgttaatcacctccgggacacattcaagaaccaaacaggaaagacacaaaccaatctctggt

SEQ ID NO: 44253 - DNA, 120 bp, synthetic construct
  source 1..120: mol_type = other DNA
agataaggtgttgacttttaaatcagctgctgttctcctctgcaagatttaagttcctctgcaagatttaagttctcaagattttacaatgtcctctgagtttctgttcttcatagctat

SEQ ID NO: 44254 - DNA, 120 bp, synthetic construct
  source 1..120: mol_type = other DNA
gacattctaaaatgagtgaattgaggggaagctgtgggagtgggctgcatcacgcagctctactggcagttctctagagtttgattctcagttgcattttccttgctattactgggtcat

SEQ ID NO: 44255 - DNA, 120 bp, synthetic construct; identical to SEQ ID NO: 12521
  source 1..120: mol_type = other DNA

SEQ ID NO: 44256 - DNA, 120 bp, synthetic construct
  source 1..120: mol_type = other DNA
agataccgaggatgaagtacgagatataatccgcagcaatattcatttacaaggcaaggtaagccaaattttattcttaagccacatttactacctatacattagttaatctctctttaa

SEQ ID NO: 44257 - DNA, 120 bp, synthetic construct
  source 1..120: mol_type = other DNA
ttaaagaaaattaccagagattgtcaaattttggaaaaaatatatgtcatcagttgaaatacagattggatgtattcttttttaattattatactttaagttttagggtacatatgcaca

SEQ ID NO: 44258 - DNA, 120 bp, synthetic construct
  source 1..120: mol_type = other DNA
tcttttggacgtagagaaggtgtctataagaaaatgttggctaggcacagtggctcacacctttaatcccaacagtttgggaggctgaggcaggcaaatcacttgagcccaagagtttga

SEQ ID NO: 44259 - DNA, 120 bp, synthetic construct; identical to SEQ ID NO: 12522
  source 1..120: mol_type = other DNA

SEQ ID NO: 44260 - DNA, 120 bp, synthetic construct
  source 1..120: mol_type = other DNA
acagaaagtataacacgggcatctgcttttggggaggttccaggaagcttaaaatcatggcagatggtgaaggagaggcaggcatctcgcctggcaggagcaggaacaagagcagtgagg

SEQ ID NO: 44261 - DNA, 120 bp, synthetic construct
  source 1..120: mol_type = other DNA
ccccgcctccaacactgaggattacatttccacataaggctgctaaaccacttatgaaagttttgccccatgatcaactcagctcccaccaggtcccgtctccaacactgaggattacat

SEQ ID NO: 44262 - DNA, 120 bp, synthetic construct
  source 1..120: mol_type = other DNA
agatccacactatatcaataggctatatcgagatttgcagcaataggaataagtgagtttacctaaggagaagagaagcgtgtacagttggaataaaaacatggatggaaatcgatagaa

SEQ ID NO: 44263 - DNA, 120 bp, synthetic construct; identical to SEQ ID NO: 12523
  source 1..120: mol_type = other DNA

SEQ ID NO: 44264 - DNA, 120 bp, synthetic construct
  source 1..120: mol_type = other DNA
catattcacaatgcacaagtattcattcagagcaaatttcatgtgaagtttgatgtgtactcagttgtttactaacaattcttttagagtgagattaattactattagagtatgatctct

SEQ ID NO: 44265 - DNA, 120 bp, synthetic construct
  source 1..120: mol_type = other DNA
ttttatgtacatgggtatttgagaagatcaggtaccccatgaaagggtgcaggggatccccaggggaccctagaccatacctggagcaccattatctagttcaacaattactgagttaga

SEQ ID NO: 44266 - DNA, 120 bp, synthetic construct
  source 1..120: mol_type = other DNA
gtaagaatattttggacagtttagatgacgtattcaggagacaggaagaaggaagagagcaaaaaaggaaacattgattgtccatatttcacctccaaatgaataagacctgaaaataaa

SEQ ID NO: 44267 - DNA, 120 bp, synthetic construct
  source 1..120: mol_type = other DNA
tcttgaatacattgtcttgaaattgtagggctgttcatcctgaggccagaggagtaattttatgttagaataaagattctactttattaattatgtattaaatagaactaagagtacaga

SEQ ID NO: 44268 - DNA, 120 bp, synthetic construct; identical to SEQ ID NO: 12524
  source 1..120: mol_type = other DNA

SEQ ID NO: 44269 - DNA, 120 bp, synthetic construct
  source 1..120: mol_type = other DNA
ctcggttcactgcaacctccacctccttgggttcaagcgattctcctgcctcagcctcccgagtagctgtgattacaggcgtgcaccaccacacccagctaattttttgtatttttaatc

SEQ ID NO: 44270 - DNA, 120 bp, synthetic construct
  source 1..120: mol_type = other DNA
tgtccatttttaataacatacttattctatattatttctttgaactgatatgttctacccccattaaattgcttgcttttgtcaatttctatgacttataataatgtttctaaacacatg

SEQ ID NO: 44271 - DNA, 120 bp, synthetic construct; identical to SEQ ID NO: 12525
  source 1..120: mol_type = other DNA

SEQ ID NO: 44272 - DNA, 120 bp, synthetic construct
  source 1..120: mol_type = other DNA
tctcacggtattttatattttgttttagtagcccttatcacaattttaaatatttgtttaatgtctgtcttctctactagatgataaatttcatgatgaccaggactttatctgtctttc

SEQ ID NO: 44273 - DNA, 120 bp, synthetic construct
  source 1..120: mol_type = other DNA
ctgcctcagcctcccgagtagctgggactacaggcgcccgccaccacgcctggctaattttttgtatttttagtagaaacggggtttcaccgtgttaaccaggacggtctcgatctgctg

SEQ ID NO: 44274 - DNA, 120 bp, synthetic construct
  source 1..120: mol_type = other DNA
tttcaatatacataagcatagtcacatgattagtgtagtcagacaaattagcatatctatctcctcgcatagttaccttttgcctgtatgtgctaagagctcctggaatctactctcagc

SEQ ID NO: 44275 - DNA, 120 bp, synthetic construct
  source 1..120: mol_type = other DNA
taactgcagctgcgcgtcatgtcttaactggtaaacactgtaaagcccaataaataatgatgggtggactcttcctatctttagattgtaaccttgtttttagattcccatcttcccatt

SEQ ID NO: 44276 - DNA, 120 bp, synthetic construct; identical to SEQ ID NO: 12526
  source 1..120: mol_type = other DNA

SEQ ID NO: 44277 - DNA, 120 bp, synthetic construct
  source 1..120: mol_type = other DNA
taaagaataagagtccggtgtgcttagtatttcataaagacaatttctaagcttacaaatcttgtagcaatatatagattatatattttgggagatcctggcctttgttttgttgtcttt

SEQ ID NO: 44278 - DNA, 120 bp, synthetic construct
  source 1..120: mol_type = other DNA
aaacatgtttgagatattatcttttaccggtttaatatttgaaacattttcttttttgccacttgtttaaccttgccttttattaggtatatttttgagctaattttctctgaaatcagg

SEQ ID NO: 44279 - DNA, 120 bp, synthetic construct
  source 1..120: mol_type = other DNA
gttgtgtcctactttacactacaaagctcagtttgatattcattacctttgcacaagaatgtgtaaaacaagaatacttgaaacattatcaatgggagggtcatatttttacagaagaga

SEQ ID NO: 44280 - DNA, 120 bp, synthetic construct; identical to SEQ ID NO: 12527
  source 1..120: mol_type = other DNA

SEQ ID NO: 44281 - DNA, 120 bp, synthetic construct
  source 1..120: mol_type = other DNA
catagcaataataaacattttgcttgtattcctgttttatattatctgaaccctcacccctgccctggacagtttaataatgcaaagatatcatctaatgtagtatccttttaacttcct

SEQ ID NO: 44282 - DNA, 120 bp, synthetic construct
  source 1..120: mol_type = other DNA
tcttgcttactcaaataccctcccccaaacgttaataatttctctattgtcatgcaatttatcactacacttgatgagattaaagtcactaggatacccttaagctgtatggctattaac

SEQ ID NO: 44283 - DNA, 120 bp, synthetic construct
  source 1..120: mol_type = other DNA
tcatgaaattttaagtgatttatataaagtcatagagttttatctccagaattatatatatatatgtttaagattattaaaggttaattaaatggctacatttctgacagcattgctcta

SEQ ID NO: 44284 - DNA, 120 bp, synthetic construct; identical to SEQ ID NO: 12528
  source 1..120: mol_type = other DNA

SEQ ID NO: 44285 - DNA, 120 bp, synthetic construct
  source 1..120: mol_type = other DNA
gatataaaatgtgctgaagaaagtatagaagcaacccatacttaatgtagatatgaagtaggtaatccctgtataagtcttaaggtaggaattatctagaaaaagtgggaggatcagagt

SEQ ID NO: 44286 - DNA, 120 bp, synthetic construct
  source 1..120: mol_type = other DNA
ctttaatatccctctgctaatgataacatgtgactgagtcacagaggagcgtgcaaagaatattttaacttgcaaacgtcagtgtaaaaaacagtaggtggacaggaaacacttgttgat

SEQ ID NO: 44287 - DNA, 120 bp, synthetic construct
  source 1..120: mol_type = other DNA
aagctaacacatcagcacatcaagacattcagacagggttacaaggtacatctttgtgttcgcctttggatcacatatctcacagataactatttacttatcattgatttagaggaaagc

SEQ ID NO: 44288 - DNA, 120 bp, synthetic construct
  source 1..120: mol_type = other DNA
gaacttaaaatatgtttgtcaactgtcacccatgctgatcataatgctgtaattcctgtaaaaagctatcatctacagactggggtctcaaaatggaaatttaaattgaagtatgttggg

SEQ ID NO: 44289 - DNA, 120 bp, synthetic construct; identical to SEQ ID NO: 12529
  source 1..120: mol_type = other DNA

SEQ ID NO: 44290 - DNA, 120 bp, synthetic construct
  source 1..120: mol_type = other DNA
gtctgggaagtacagtgctcaatggcctagagattactaattaatttaggtttatatgttgggattttttctttctaatacaattaatctctttcttctcttagagttccaaacactatt

SEQ ID NO: 44291 - DNA, 120 bp, synthetic construct
  source 1..120: mol_type = other DNA
tgttcacaaagcgttgtcttcttctctttatcctgctgtattaaagaatagtagaatttttattaactgtctctttttgtgtttattactttagctcttacaataaaattagttacaatg

SEQ ID NO: 44292 - DNA, 120 bp, synthetic construct
  source 1..120: mol_type = other DNA
tttctttgattttagaggtgacatagctttgaagtacacagtattgggaaaatgtgatattcttactaagggaattatatagcatttgcaactatctaaattttatctttgggtaacttt

SEQ ID NO: 44293 - DNA, 120 bp, synthetic construct; identical to SEQ ID NO: 12530
  source 1..120: mol_type = other DNA

SEQ ID NO: 44294 - DNA, 120 bp, synthetic construct
  source 1..120: mol_type = other DNA
tagaatctaccttaataggggtacaatagtccaagagaaggatggaaaagctttattgattcttctacataaaacttgactaattttgttggatattttcggagaactgtggtctttaat

SEQ ID NO: 44295 - DNA, 120 bp, synthetic construct
  source 1..120: mol_type = other DNA
ggcatcagacttgtcttgatttgaattctgacctcccaacttctctgccccatgacattggtcaagttatttactggcgaattttctcatctgtatcataatgggatcagccttatagag

SEQ ID NO: 44296 - DNA, 120 bp, synthetic construct
  source 1..120: mol_type = other DNA
agaactgacttatgggaataatgtaaaaagatttgacaggcccgtcaaccttctcttagacatagagcagacatacttaatagagaagtagcctggtacattcaagtctggcttaggtgg

SEQ ID NO: 44297 - DNA, 120 bp, synthetic construct; identical to SEQ ID NO: 12531
  source 1..120: mol_type = other DNA

SEQ ID NO: 44298 - DNA, 120 bp, synthetic construct
  source 1..120: mol_type = other DNA
aaacatcatacttttcccttttgctaagacagctgtatttcttgccatcgtgtcacactcactgggtctaaaatgtattagcatcctcctcaaatgtgctacttctcaattctctgactc

SEQ ID NO: 44299 - DNA, 120 bp, synthetic construct
  source 1..120: mol_type = other DNA
cttgccatcgtgtcacactcactgggtctaaaatgtattagcatcctcctcaaatgtgctacttctcaattctctgactcaattatgctgtcaccttttggtcagatagaatattaacct

SEQ ID NO: 44300 - DNA, 120 bp, synthetic construct
  source 1..120: mol_type = other DNA
ttcacaatagtaaagacttggaaccaacccaaatgcccatcaatgatagactggataaagaaaaagtggcacatatacaccatggaatactatgcagccataaaaaaagaatgagttcat

SEQ ID NO: 44301 - DNA, 120 bp, synthetic construct
  source 1..120: mol_type = other DNA
tggatacagggaggggaacatcacacactggggcctgtcggggggtgggggcaatgggagggagagtattaagacaaatacctaatgcatatggggcttaaaacctagaagatgggttga

SEQ ID NO: 44302 - DNA, 120 bp, synthetic construct; identical to SEQ ID NO: 12532
  source 1..120: mol_type = other DNA

SEQ ID NO: 44303 - DNA, 120 bp, synthetic construct
  source 1..120: mol_type = other DNA
caacctggtgcttttaagaaacacacttaaactcatttaaaaagtattcaggcctcaacttattaaattagaatttcagtgagagcccagcatgtgtgctacttaaaagctacacaggtg

SEQ ID NO: 44304 - DNA, 120 bp, synthetic construct
  source 1..120: mol_type = other DNA
cccttcataaacctgtctaactgttacgtctcatgagtccttaacccaatttgttatcataaagctcagctttccatcctgcaatggcaccgtctctcattctatcacatctgttgttgt

SEQ ID NO: 44305 - DNA, 120 bp, synthetic construct; identical to SEQ ID NO: 12533
  source 1..120: mol_type = other DNA

SEQ ID NO: 44306 - DNA, 120 bp, synthetic construct
  source 1..120: mol_type = other DNA
ttgagtatgtactcccataaagttcacttaataccttttgttttggaatcctcagggccatccatttgttttttaatgtttgcttggacagagactaagtcctctattgacactgattac

SEQ ID NO: 44307 - DNA, 120 bp, synthetic construct
  source 1..120: mol_type = other DNA
tggttttataaaggaataaactgaaatttgggaaagtcgagtcacttgaccaatgttacaaagcttggaaatgactgagccaggattgaaatgcaagtcactgtgcgctatgtttgctgc

SEQ ID NO: 44308 - DNA, 120 bp, synthetic construct
  source 1..120: mol_type = other DNA
aaacaccctttttctgaaattgtgcttacctttcaggcatcgggctgtcaatctctttcttcagggatatgaaaagtcttggattgaaacagaagaacattactttgaagataaactgat

SEQ ID NO: 44309 - DNA, 120 bp, synthetic construct
  source 1..120: mol_type = other DNA
atatgggtattaggaaacttttaaatcttaattgttactgcattcaatgcttatgggaaaatgtgctcttgtcatttccaagagatctcatcaacatcaaggggttgagaatttaaaatg

SEQ ID NO: 44310 - DNA, 120 bp, synthetic construct; identical to SEQ ID NO: 12534
  source 1..120: mol_type = other DNA

SEQ ID NO: 44311 - DNA, 120 bp, synthetic construct
  source 1..120: mol_type = other DNA
catggacccatctaaatatctggcaaaagccatcttctcaacaaaatttacaagccatctcaaaacttggcagactagtcagaggcttcatgattcccaagataaagacatcttgtgtaa

SEQ ID NO: 44312 - DNA, 120 bp, synthetic construct
  source 1..120: mol_type = other DNA
aaatgtgtagactattggatatcttgtggaaatctgcccattatccacattaaggcttaattacaggaaagaacaccattcatgtacagagaaaattagtttccatggctaagtcagtgg

SEQ ID NO: 44313 - DNA, 120 bp, synthetic construct; identical to SEQ ID NO: 12535
  source 1..120: mol_type = other DNA

SEQ ID NO: 44314 - DNA, 120 bp, synthetic construct
  source 1..120: mol_type = other DNA
ttatccctgctcatattaatttttggtcaaattattaaatatctctgttttgagctgcataattttacaatggtaatgtaacagatatctagcatattatattacatttatatatgttat

SEQ ID NO: 44315 - DNA, 120 bp, synthetic construct; identical to SEQ ID NO: 5170
  source 1..120: mol_type = other DNA

SEQ ID NO: 44316 - DNA, 120 bp, synthetic construct
  source 1..120: mol_type = other DNA
gaaatggtatggttgggagggttcctatgagacataggaggagcaaataaagacacccgtgtctgagtattctgtgccatgtgttcatgttttaagttcatcttgttgttgttaggagag

SEQ ID NO: 44317 - DNA, 120 bp, synthetic construct
  source 1..120: mol_type = other DNA
tgtagttgattctgattcttcttatgaaatggtttttctgtttatcacaaacaaactttataaataaaacaaaagaaccaaagcaaattccagtgccgcaagtgtatggagaccgatggt

SEQ ID NO: 44318 - DNA, 120 bp, synthetic construct; identical to SEQ ID NO: 12536
  source 1..120: mol_type = other DNA

SEQ ID NO: 44319 - DNA, 120 bp, synthetic construct
  source 1..120: mol_type = other DNA
ctgccctgcaatgggaaagaaagcctgttttgcccccaggcctttcccattctctgcagaatttgggatgtaatttaattaaaaactcatatccacatgaatctcctcagaagagttcat

SEQ ID NO: 44320 - DNA, 120 bp, synthetic construct
  source 1..120: mol_type = other DNA
ctctcttattatttcctaactaacaaaatcatctcattcctaagcatagagcaactctctctctggcattgtcaggtaatgaggtatttctcataagtgaatttttctcatggctgaagt

SEQ ID NO: 44321 - DNA, 120 bp, synthetic construct
  source 1..120: mol_type = other DNA
taatttttagggatcattattatggccatcttgttttttaattgtcatatcataatttggggactctttccatcaaatgtcaaatttcacttctgtcaaaagcccccacctcatttaagt

SEQ ID NO: 44322 - DNA, 120 bp, synthetic construct; identical to SEQ ID NO: 12537
  source 1..120: mol_type = other DNA

SEQ ID NO: 44323 - DNA, 120 bp, synthetic construct
  source 1..120: mol_type = other DNA
gttattttaagcagcgatgatacgtgtgcatgtgcctagccttctgcttaaacactgatgttttcttcttgctttccccagcaaactggaggaagattttttatatatggcctatgcaga

SEQ ID NO: 44324 - DNA, 120 bp, synthetic construct
  source 1..120: mol_type = other DNA
ggataagaatctgtgtatttcattaatttcaactttttgtttgtagcatgaatctccgttctaaattccatggcaggtcatcattgtttcctacttaaacattttatttatgaggagcca

SEQ ID NO: 44325 - DNA, 120 bp, synthetic construct
  source 1..120: mol_type = other DNA
aagggcacacactacacctttgtggagttttttgtctgatggggaagataaagtttaagcaaatggttgtagaaaaaccctgatgaacttaatggcagagaaatgtatccctccattttt

SEQ ID NO: 44326 - DNA, 120 bp, synthetic construct; identical to SEQ ID NO: 12538
  source 1..120: mol_type = other DNA

SEQ ID NO: 44327 - DNA, 120 bp, synthetic construct
  source 1..120: mol_type = other DNA
taggagtattgggaacaggtcccatggcatagtagtgaggtctgcttaaggaagtctttggctgttgaaccatgagttggccatgcaaaaatagtacagcttagtatttactgagtgttt

SEQ ID NO: 44328 - DNA, 120 bp, synthetic construct
  source 1..120: mol_type = other DNA
ctggggtgaagagagaagaaggcaaagtaaattgtggatgcgttaaagatgcctgtgagacatctaagtggaggtgtcaaacatgcaattagacattcatgtctgacattcagtatctca

SEQ ID NO: 44329 - DNA, 120 bp, synthetic construct
  source 1..120: mol_type = other DNA
aggacacagaacattaaaagatggttagaaggaaaggagctcataaaaaagttggagagaaccttaagtgtgagctaacataggagctagaagctataggacttattgtgtggtcaccaa

SEQ ID NO: 44330 - DNA, 120 bp, synthetic construct; identical to SEQ ID NO: 12539
  source 1..120: mol_type = other DNA

SEQ ID NO: 44331 - DNA, 120 bp, synthetic construct
  source 1..120: mol_type = other DNA
agcacacatatattctggtgagaaggagccaacagaataggaaagggaatcatttgtgaagtgaggtctggagtccatgagacctgctggagaagacaggttacaggacataagggaaaa

SEQ ID NO: 44332 - DNA, 120 bp, synthetic construct
  source 1..120: mol_type = other DNA
tccaagaatgctcaaatccctgactaatggcatagtatttgcatgtaacctacacacatcctcctgtatacttagatcatctctagattacttataatacctaatacaatgtaaatgcca

SEQ ID NO: 44333 - DNA, 120 bp, synthetic construct
  source 1..120: mol_type = other DNA
ttggttgactccatggattcagaaccaatggagggccaactgtatatttatagaaacataaaactgtatgtttaaagtaacataaaaatatatgccatgaaagaaaagtttcacaaaatt

SEQ ID NO: 44334 - DNA, 120 bp, synthetic construct; identical to SEQ ID NO: 12540
  source 1..120: mol_type = other DNA

SEQ ID NO: 44335 - DNA, 120 bp, synthetic construct
  source 1..120: mol_type = other DNA
tacaaaaattagccaggcacggtggtgcacacctgtaatcccagctcctcaggaggctgaggcaggagaattgcttgaatctgggaggcggaaagttgcagtgagccgtgattgcaccac

SEQ ID NO: 44336 - DNA, 120 bp, synthetic construct
  source 1..120: mol_type = other DNA
tttccttttaaggttatttgctcgctctctctctgaagacaaaaggacagtcacctgctgacacctaagtgtttgatgaagtctataaaggaaggctagaggagagagagaagcaaagga

SEQ ID NO: 44337 - DNA, 120 bp, synthetic construct
  source 1..120: mol_type = other DNA
gtctacgaatttgtagcagtaatgctccccctggctgtgtgaggacaactagcaattctcagaaccaaatgcaaattctgagaagccaggaagttagattcatcaagggtgaagatttct

SEQ ID NO: 44338 - DNA, 120 bp, synthetic construct; identical to SEQ ID NO: 12541
  source 1..120: mol_type = other DNA

SEQ ID NO: 44339 - DNA, 120 bp, synthetic construct
  source 1..120: mol_type = other DNA
atttgaggagggctaccttgttgatgctttatctcaaattttccccttcataattaaataatcatattcattttattgtttaatgtaactcagggatgtccagcttgcaccacgcagttt

SEQ ID NO: 44340 - DNA, 120 bp, synthetic construct
  source 1..120: mol_type = other DNA
acctgcgtagtgtgtatgggaactgtaccctcacttgcactgccttaggatcttatacatttgccatcaatggcaagaatgcattaaattttcagccaggtcatgtcagctatcctgtat

SEQ ID NO: 44341 - DNA, 120 bp, synthetic construct
  source 1..120: mol_type = other DNA
tttccatttgtgttaaccacaaacttaagtgtgattgatttctctgtttatctcagttggtagtgtgcagctgaaatttttataccctttcccagactggttaacctactttgttttcaa

SEQ ID NO: 44342 - DNA, 120 bp, synthetic construct
  source 1..120: mol_type = other DNA
gattgcttaaactcgaattctaactttggtaaaactgccaaagatggatgagtattcctcagtgatttgcttgataacccattttagactattgttgattattaatatcgaacttcctag

SEQ ID NO: 44343 - DNA, 120 bp, synthetic construct; identical to SEQ ID NO: 12542
  source 1..120: mol_type = other DNA

SEQ ID NO: 44344 - DNA, 120 bp, synthetic construct
  source 1..120: mol_type = other DNA
gtcatttctaataatgtagtaactacccataaacccacttctgacaagaaacaacctagagaatttacgtgttatcctatgggcttctcattaacctataccctgtctccccacacaaag

SEQ ID NO: 44345 - DNA, 120 bp, synthetic construct
  source 1..120: mol_type = other DNA
tttaaaagggcagtaggctgtgtgtaatattttgggctctacttattgaattaatagtgttttctaagattcctccatacttttttgtgctgttggagttcatttttttttattgttgtg

SEQ ID NO: 44346 - DNA, 120 bp, synthetic construct
  source 1..120: mol_type = other DNA
ttgctaatgtgaacagggattgaatgcctattcttatccatttcacctatcttacaagagctacagggtgtacccattttcaaataaaggaacaaatgtcatactgttttccaaagttac

SEQ ID NO: 44347 - DNA, 120 bp, synthetic construct; identical to SEQ ID NO: 12543
  source 1..120: mol_type = other DNA

SEQ ID NO: 44348 - DNA, 120 bp, synthetic construct
  source 1..120: mol_type = other DNA
ctttgtatctttcaagccacacttcattctaaactctattcccctactcctatcatatatacttcctctttaaaaaatcctatggagaacttcagtgcatcccatcggtttgctgttgcc

SEQ ID NO: 44349 - DNA, 120 bp, synthetic construct
  source 1..120: mol_type = other DNA
tttgaagctgcttcaccccaacggtggttttaccaatttgaataaggtaacagtatggaggaagatatctgcaatgatatcacaaattaaacactcaacaatgttgctgctgttttgagt

SEQ ID NO: 44350 - DNA, 120 bp, synthetic construct
  source 1..120: mol_type = other DNA
atgcctagtgttccattctttcttggttaaaagtataaaatgctgcggtcacattcttatgagtttctctcttctgtctcacccatgagctctctgttagtcagatttaaatccacaatg

SEQ ID NO: 44351 - DNA, 120 bp, synthetic construct; identical to SEQ ID NO: 12544
  source 1..120: mol_type = other DNA

SEQ ID NO: 44352 - DNA, 120 bp, synthetic construct
  source 1..120: mol_type = other DNA
attctgatccagaaagccaaatcctgctacaggactgtctaatataacttcccatttgcttagcattatcatctatgtcacgtggatgccatttgctattgaagaacatatcttttgttc

SEQ ID NO: 44353 - DNA, 120 bp, synthetic construct
  source 1..120: mol_type = other DNA
ataggtttggtgaatttgtcagatacagtctgtacaccaagtaaattcaggtttaatagtttttaaaaatcacaaattttaacttcattaggagcaaatctcattaaattttcctaggaa

SEQ ID NO: 44354 - DNA, 120 bp, synthetic construct
  source 1..120: mol_type = other DNA
tatggcttaaaaacatatcattataatcccaaataacaatttgtctgaatgtattctttatctcaatccttgtgtctctcctatgtttctgaaggtcatgaaatttttatagaagactat

SEQ ID NO: 44355 - DNA, 120 bp, synthetic construct; identical to SEQ ID NO: 12545
  source 1..120: mol_type = other DNA

SEQ ID NO: 44356 - DNA, 120 bp, synthetic construct
  source 1..120: mol_type = other DNA
tgctttctgagggaatcattaacatctttgcttttgtgatgaaatgtgcagtttaacatattacccagacaatgaaactgtcctaggcctgcgtccccacctttatttcctcctttgcaa

SEQ ID NO: 44357 - DNA, 120 bp, synthetic construct
  source 1..120: mol_type = other DNA
cggagtgagtggaagggtcacattgtttaccttccctcccatccccagttcatctccatgcccagagtactgtgtctcaccgaattaaaaatatgtttatgatttgtagcttatatttca

SEQ ID NO: 44358 - DNA, 120 bp, synthetic construct; identical to SEQ ID NO: 12546
  source 1..120: mol_type = other DNA

SEQ ID NO: 44359 - DNA, 120 bp, synthetic construct
  source 1..120: mol_type = other DNA
caattctcctgcctcagcctcccgagtagctggcattacaggtgcccgccaccatgcccagctaatatttgtatttttagtagagacagggtttcaccatgttgttcaggctggtctgga

SEQ ID NO: 44360 - DNA, 120 bp, synthetic construct
  source 1..120: mol_type = other DNA
ttgcaatggcagcataaaaaaaagagaaaatccttttaaggtttgcagtttggtttgaatgaggcaaatgtatgaataagtagcgggtatagtatgatgtggacctcatagttatctctg

SEQ ID NO: 44361 - DNA, 120 bp, synthetic construct
  source 1..120: mol_type = other DNA
atgtcatctaagcattctatcttacatgtgtttaaacaaggttgatgataaattaatacaaatgatttgctcttctatgtctaatgttcttttgcactttctaaaatctcaacatattcc

SEQ ID NO: 44362 - DNA, 120 bp, synthetic construct; identical to SEQ ID NO: 12547
  source 1..120: mol_type = other DNA

SEQ ID NO: 44363 - DNA, 120 bp, synthetic construct
  source 1..120: mol_type = other DNA
atctcagcgatgtggtctggaatttccaacagacgtgaggaaaatatttattgaagaacaacatgatgtcaagtttttcagtaaacccttggtttgatattttttcctgaatagaagtct

SEQ ID NO: 44364 - DNA, 120 bp, synthetic construct
  source 1..120: mol_type = other DNA
gtattgtagtttacaactattttctcaaatgctctcagcttttaaatgtcctacgtaatttgaaatgctgcttaatgttacttagcccaaaggaaagttaatagtattttccccctttgc

SEQ ID NO: 44365 - DNA, 120 bp, synthetic construct
  source 1..120: mol_type = other DNA
gtgcagggaaatagaaattagattctttttcttttccttttaatttacatgtctggactttgagctagaagtctggaaatatatcagtagccagcaatgagtctttaattaaagtggacc

SEQ ID NO: 44366 - DNA, 120 bp, synthetic construct
  source 1..120: mol_type = other DNA
accttccaggatgcatttgttatgaacctctctgcagcattgaagtcaatgtgtcaaaaatataaaaacaatctaatttgaggaacccatgactattgctggctgagaaaaatgccataa

SEQ ID NO: 44367 - DNA, 120 bp, synthetic construct; identical to SEQ ID NO: 12548
  source 1..120: mol_type = other DNA

SEQ ID NO: 44368 - DNA, 120 bp, synthetic construct
  source 1..120: mol_type = other DNA
cttggattcttttgtgaaaaggaggtcttgaaaatctttctacaagtttgtagctccaatgcatttggtctcttcaggatcccttcctttgacacaagtttattcttcttgcaatttaaa

SEQ ID NO: 44369 - DNA, 120 bp, synthetic construct
  source 1..120: mol_type = other DNA
caatgttctgaccttatccctcttgatgtttttcaacaccagttttattacttgaaaacagacatgataaatggtattgctggtgagattggaaagaagcctgcttttccattgtgctag

SEQ ID NO: 44370 - DNA, 120 bp, synthetic construct; identical to SEQ ID NO: 12549
  source 1..120: mol_type = other DNA

SEQ ID NO: 44371 - DNA, 120 bp, synthetic construct
  source 1..120: mol_type = other DNA
ggcgggtggatcacttgagatcaggagtttgagaccagcctggccaatgtggtgaaacctcatctctactaaaaatacaaaaattagccgggcgtggtagtgcacgcctgtaatcccagc

SEQ ID NO: 44372 - DNA, 120 bp, synthetic construct
  source 1..120: mol_type = other DNA
acaaaaaagctttttagtttgtaagtgtaaactattctactttgccttctttttttaaaaaaaaaaaaagtgaaatatttgctgccaaaatgaattttagactgtcttgaagaaactatt

SEQ ID NO: 44373 - DNA, 120 bp, synthetic construct
  source 1..120: mol_type = other DNA
cccctgcctcagcctcccgagtagctaggactacagtggcgcgccaccacgcccggctaagctaattttttgtatttttagtagagacggggtttcaccatgttggccacaatggtcttt

SEQ ID NO: 44374 - DNA, 120 bp, synthetic construct
  source 1..120: mol_type = other DNA
atagttcttgtatcatcatccttgcaaatttcaaaatgtaaatcatgtatatactatcagatgcagctctgatccgatggatataatggttaatggcatacaatgggcctaacacttaat

SEQ ID NO: 44375 - DNA, 120 bp, synthetic construct; identical to SEQ ID NO: 12550
  source 1..120: mol_type = other DNA

SEQ ID NO: 44376 - DNA, 120 bp, synthetic construct
  source 1..120: mol_type = other DNA
tagaaaggctcctcattcagaaaagaagtccgaaagacgacaagtgatggcatcttaatatttagacactaggattcaggccagactaaggacaagaagtcaaatgacatatggagcatg

SEQ ID NO: 44377 - DNA, 120 bp, synthetic construct
  source 1..120: mol_type = other DNA
agacaggcttttaaagtgctgggaattgccacacatttataggtgtaatgcaggacaccagatttggggatttgcgcttcctaatgagatttttttttttttagtgatctccatctgatt

SEQ ID NO: 44378 - DNA, 120 bp, synthetic construct
  source 1..120: mol_type = other DNA
tgctactcttaacaaaatactgtgtatgtggtatgaaatattacaaagctgagaaacagagatatatataattaattccctataaagatactcttctctgaggttgactatgtgacacca

SEQ ID NO: 44379 - DNA, 120 bp, synthetic construct
  source 1..120: mol_type = other DNA
aaatatgaaaggctacttgtcagtttcaataattcttataacacattatatcaaataaatttggaaataacataaagtgtgtggtaattgaattctatccctatacctggttaattatta

SEQ ID NO: 44380 - DNA, 120 bp, synthetic construct; identical to SEQ ID NO: 12551
  source 1..120: mol_type = other DNA

SEQ ID NO: 44381 - DNA, 120 bp, synthetic construct
  source 1..120: mol_type = other DNA
ctacttctctatcaaaagcattaaaaagaacagttaaatcttataaagaggccgatgttaattgaaagggaagaaatgttttaccagttacctgaaaaaaataattattggagttgaatg

SEQ ID NO: 44382 - DNA, 120 bp, synthetic construct
  source 1..120: mol_type = other DNA
agcattatgggtttttctcacctagatcaacaaagaactttgatactgcagtagaacacatttattaactatgattttattaaaaaaactcagaaacattctttagatggttacttcttt

SEQ ID NO: 44383 - DNA, 120 bp, synthetic construct; identical to SEQ ID NO: 12552
  source 1..120: mol_type = other DNA

SEQ ID NO: 44384 - DNA, 120 bp, synthetic construct
  source 1..120: mol_type = other DNA
gaaaccagcatattctctcagatggatctgagacacaaataaaatattgtcatacctgctaacatactcaaaccaatacccagctcgtatcccacagtatgcaccattaagtatggaaga

SEQ ID NO: 44385 - DNA, 120 bp, synthetic construct
  source 1..120: mol_type = other DNA
tgctacaagaatgaatgggctgtaagatatactgccctccatggctacataatttgaactttgaatgggtttatttggtgcttttcatagtaacagcattttaaattaaaaagtcttcct

SEQ ID NO: 44386 - DNA, 120 bp, synthetic construct
  source 1..120: mol_type = other DNA
ggaggtatatggtatccaaaatatggactaaagcattaagagttgcttttcatgctattgaatcatagaggggaaagagggaaggaattctgagggccagtgttctccagtactcacgct

SEQ ID NO: 44387 - DNA, 120 bp, synthetic construct
  source 1..120: mol_type = other DNA
tattgggggaaggggtgttaaaatcccagggaatgaagagttagggaaatagagaaacgatatggggaatgagggagggcaagtagaagatagagtgttcttgagctgatcacagctgtt

SEQ ID NO: 44388 - DNA, 120 bp, synthetic construct; identical to SEQ ID NO: 12553
  source 1..120: mol_type = other DNA

SEQ ID NO: 44389 - DNA, 120 bp, synthetic construct
  source 1..120: mol_type = other DNA
tctccttggtgagtggtaatgatggtagcagctggctttcataagtacactgtgtgggggcagtcatttctagggccattctggctcagaagcaaggcaagtagccaaggcttagaaaga

SEQ ID NO: 44390 - DNA, 120 bp, synthetic construct
  source 1..120: mol_type = other DNA
tgtatagaagacatgcagctggccctctttatctgtggcttccacatccttggattcagccaactacagatttaaatattcgaaaaaatatttgcttctgtagccaacaagtacagactt

SEQ ID NO: 44391 - DNA, 120 bp, synthetic construct
  source 1..120: mol_type = other DNA
gtacgtaggttaagtgcaaacactataacattttatataagggacagatgttaatatctgtaggatgtcctggaaccagtcccccacagatactaggagacaaacatgtattgaagcagc

SEQ ID NO: 44392 - DNA, 120 bp, synthetic construct; identical to SEQ ID NO: 12554
  source 1..120: mol_type = other DNA

SEQ ID NO: 44393 - DNA, 120 bp, synthetic construct
  source 1..120: mol_type = other DNA
tcactttctctgctgaaaacaagtcagggaagcccatagataaacttttacagtgtggtgaacataaacaacacaacacaggagacctggattatcagccaggtgctgtgtgacctcaac

SEQ ID NO: 44394 - DNA, 120 bp, synthetic construct
  source 1..120: mol_type = other DNA
ggagacctggattatcagccaggtgctgtgtgacctcaacctctctgtttctcagctttctgttctttgaacaaagagttttcaactagatgttctcagatgtcaaatctacccttaaca

SEQ ID NO: 44395 - DNA, 120 bp, synthetic construct; identical to SEQ ID NO: 12555
  source 1..120: mol_type = other DNA

SEQ ID NO: 44396 - DNA, 120 bp, synthetic construct
  source 1..120: mol_type = other DNA
taatcccagctactcgggaggccgaggcacaggaatcgcttgaacccaggaggcggaggttgcagtgagccaagattacaccattgcactccaggctgggcagcagagtgagactccatc

SEQ ID NO: 44397 - DNA, 120 bp, synthetic construct
  source 1..120: mol_type = other DNA
ggggaaaaaaaaactattgaaagacaaagagtagggccttccaagaatagaaagaaacccatgccatggagtcttgtcagtttgatgtgaattgtcagaatatttgactccaagctttct

SEQ ID NO: 44398 - DNA, 120 bp, synthetic construct
  source 1..120: mol_type = other DNA
tataatttatataatattcataaatttcataaagttcattataaatatcaatatcattaaatatagtatgtaatatataaaacattgatattaggtatattaaatataatactatttaaa

SEQ ID NO: 44399 - DNA, 120 bp, synthetic construct; identical to SEQ ID NO: 12556
  source 1..120: mol_type = other DNA

SEQ ID NO: 44400 - DNA, 120 bp, synthetic construct
  source 1..120: mol_type = other DNA
caagagttgatctggggtagggttaataaccattcatgaagatctagaattacaaagactagagcttctatagttgtgagttttcaaaattcaagtaatgagctgctgtgatccaatcta

SEQ ID NO: 44401 - DNA, 120 bp, synthetic construct
  source 1..120: mol_type = other DNA
tctcttttgtcaggctatgccaggagagaaagaactgcatagtacttgctttctgtattccaggcagtatccagtgctttttaaggcttaaacaaataagtgggtaaatgaccgctgttt

SEQ ID NO: 44402 - DNA, 120 bp, synthetic construct
  source 1..120: mol_type = other DNA
gattttagagtttctcattcttttctttccttgttataccttgttaattaagctttcagtggtatagtgtaaattgtgtcaactggaccctgaaatagaaaattatttcaacttagttga

SEQ ID NO: 44403 - DNA, 120 bp, synthetic construct; identical to SEQ ID NO: 12557
  source 1..120: mol_type = other DNA

SEQ ID NO: 44404 - DNA, 120 bp, synthetic construct
  source 1..120: mol_type = other DNA
attaaatgagctaaagcccacaatttgattattatttgtatatgtataattctgaagacctctttaaacatgaactgaaagacaaacttttagagctactaattttgtagcacttcaaac

SEQ ID NO: 44405 - DNA, 120 bp, synthetic construct
  source 1..120: mol_type = other DNA
atgcaaattttcttgaatacctattattttcagagaactgtactggatgtacagtatgtgtgtactggtgtggttaaaacaaagaaagcccgctctcttcatggatcttctaggaaactt

SEQ ID NO: 44406 - DNA, 120 bp, synthetic construct
  source 1..120: mol_type = other DNA
cacgaagcctggctatttttagttttttgtagagacagggtcttgctatttgcccaggctggtctagagctcctgggctcaagcagtcctcccacttcagcctcccaaagtgctgaggtt

SEQ ID NO: 44407 - DNA, 120 bp, synthetic construct
  source 1..120: mol_type = other DNA
actctacagaaatgtagctaatctacatttttcaagaacttaaatacaacagaaaaaaataattgaagtagataagttgtctcttatccatacttttgacttcccttagtctgagttgac

SEQ ID NO: 44408 - DNA, 120 bp, synthetic construct; identical to SEQ ID NO: 12558
  source 1..120: mol_type = other DNA

SEQ ID NO: 44409 - DNA, 120 bp, synthetic construct
  source 1..120: mol_type = other DNA
acaaacaaacaaaagaacacaaagtagatgggctcattttgtatgatgcacagatgatagatttggtagattcagcctgtcagtcgctcaggttctgccccagaggtcaatgtagctgag

SEQ ID NO: 44410 - DNA, 120 bp, synthetic construct
  source 1..120: mol_type = other DNA
ctttgcaccaacttaatattttctccatcgatgacgagcaagggacaattgtaattccccttatttcaatatttttttctcacataagacaagttgtcgaagaactaaatatagttgttt

SEQ ID NO: 44411 - DNA, 120 bp, synthetic construct
  source 1..120: mol_type = other DNA
tgtaaaatacttctgttcattaccagtgatttgaacatgggtctgaaatatgaccatattcgaccttggaaaaacctcctaacaagcttattaggatatgcactgataattcttggttgc

SEQ ID NO: 44412 - DNA, 120 bp, synthetic construct; identical to SEQ ID NO: 12559
  source 1..120: mol_type = other DNA

SEQ ID NO: 44413 - DNA, 120 bp, synthetic construct
  source 1..120: mol_type = other DNA
taataaactttccctatgacagattaaattacatgcccagaagctgttctcaaagggcaaagtactggaaagaaataatattaaagaatcctgaagggagagcttccaatttcagttcaa

SEQ ID NO: 44414 - DNA, 120 bp, synthetic construct
  source 1..120: mol_type = other DNA
tcttcctcaaaacattgattattaaaatttagatgcgatgttaaaaaaaatgagtgacctgtccagggagtttatttttaagcaaggtagtctgagatcctgtctatttcttggtccttg

SEQ ID NO: 44415 - DNA, 120 bp, synthetic construct; identical to SEQ ID NO: 12560
  source 1..120: mol_type = other DNA

SEQ ID NO: 44416 - DNA, 120 bp, synthetic construct
  source 1..120: mol_type = other DNA
ttcatgagcgaataatttcttatcattttcttactgaaaaactctctcacaaaaggagctggttaagctttaagcgaaagttccacatggagctctggcaatgggaggaacataaaagat

SEQ ID NO: 44417 - DNA, 120 bp, synthetic construct
  source 1..120: mol_type = other DNA
gtgtgtctgtgtggttctgtttctgttttgtttttgacttcacaggaagaggtttaaacatgaaggcaaaccttatagatgttagcatggctacatataaagcaaagctgcctctttttt

SEQ ID NO: 44418 - DNA, 120 bp, synthetic construct
  source 1..120: mol_type = other DNA
gtgacaaaaaaaaccctgatcaattttgttttcgcagcacgatattatcaaagatttaagaaacaaatttgccagcctcggcgagaactctctggtaacagcataaatgtctgtgttggt

SEQ ID NO: 44419 - DNA, 120 bp, synthetic construct
  source 1..120: mol_type = other DNA
atattctgtaactagcaagccttcattttttaaacctcttccatcttccagtgtctattttctgtattttggatggaaagtttatggcagcaaagctgtcattctggctacctctgctgc

SEQ ID NO: 44420 - DNA, 120 bp, synthetic construct; identical to SEQ ID NO: 12561
  source 1..120: mol_type = other DNA

SEQ ID NO: 44421 - DNA, 120 bp, synthetic construct
  source 1..120: mol_type = other DNA
cagtaccatgcagtatcgtttgttaccaccagagaatacaaaatataaaggcacattgcatctcttattctttgggggtgactggggagatctgtatcataaatccactacttcgttgaa

SEQ ID NO: 44422 - DNA, 120 bp, synthetic construct
  source 1..120: mol_type = other DNA
ttatggccatggcatgggagattattcaaaacgtgacaaacttatgcacaaatgtataaatcagaaagtgcaagtttcattgatgaagtacagtacttcaaaactgtgatacaggctttg

SEQ ID NO: 44423 - DNA, 120 bp, synthetic construct; identical to SEQ ID NO: 12562
  source 1..120: mol_type = other DNA

SEQ ID NO: 44424 - DNA, 120 bp, synthetic construct
  source 1..120: mol_type = other DNA
aaaggtaaggttccttgagttcccctcacgagtgtctgttcttcagatttcctcgttgctctcaaggtcctccctcatttcaattccactgactcatttagtcctggggtttctggttca

SEQ ID NO: 44425 - DNA, 120 bp, synthetic construct
  source 1..120: mol_type = other DNA
gaaactatgttataactaaaccttagcagactgatcctataaaatgggggtgcacgagctttttctttaaggctggagagtcaatatgttcagcttcgagggttatgcaacctgtcacag

SEQ ID NO: 44426 - DNA, 120 bp, synthetic construct
  source 1..120: mol_type = other DNA
tttatttacacacactttgtttacacacataggtggcaagctgtaatttttttatgtaatttatggtattttgccatagtttgctgactcttgatacaaatatggagacttttaaagtga

SEQ ID NO: 44427 - DNA, 120 bp, synthetic construct; identical to SEQ ID NO: 12563
  source 1..120: mol_type = other DNA

SEQ ID NO: 44428 - DNA, 120 bp, synthetic construct
  source 1..120: mol_type = other DNA
ctgttgagggaagagggagagaaattttctttaaagaaacttttaagtagctcatacttattttaatgtttattaaacacataattaatcttgaatcttaataatttcaggtctcgatat

SEQ ID NO: 44429 - DNA, 120 bp, synthetic construct
  source 1..120: mol_type = other DNA
cattttttggaacataagtcagtctccctatgccattaaacagattgcctgggggggcataataataattttaaaagtgcagcattggaggtagaataggttaatatagaaggcgaaatg

SEQ ID NO: 44430 - DNA, 120 bp, synthetic construct
  source 1..120: mol_type = other DNA
tggaccaatggtagcagctactctgaaacttggaattgctattttaaatggtgggaactccacagtacagcaggtaacagcttccagtcattcatataatgtacttttcagacaaatgga

SEQ ID NO: 44431 - DNA, 120 bp, synthetic construct; identical to SEQ ID NO: 12564
  source 1..120: mol_type = other DNA

SEQ ID NO: 44432 - DNA, 120 bp, synthetic construct
  source 1..120: mol_type = other DNA
tttatcaaaaaataatgtctcctgcttatgttttacttaagaagaccctcattacttagtatgtatattcagaagtccttagatccagagacaggagtgagagatcctgtaatgtatact

SEQ ID NO: 44433 - DNA, 120 bp, synthetic construct
  source 1..120: mol_type = other DNA
aaatatatatcccaccatctcctttgatcctgcaagccacatccctttgtttgaaaaaaaacaatgattgtttcattttttatttgaccaaaagttatcacaccccccgtaaatggctat

SEQ ID NO: 44434 - DNA, 120 bp, synthetic construct
  source 1..120: mol_type = other DNA
tactttgtgcatatgtatcctttacatatttagtttgtattgccttcgctatctgaaaaagattactactaaaatttagtctgcttaactgagccctttttagaacagcattgataacag

SEQ ID NO: 44435 - DNA, 120 bp, synthetic construct
  source 1..120: mol_type = other DNA
catgtcagaaatagctgtttcgttatgctatgtaacagtaagctaacaagacaaagcattgctttagcgtttttttacatgtatgtttaaccaaaattttgaccatagattctggacgtc

SEQ ID NO: 44436 - DNA, 120 bp, synthetic construct; identical to SEQ ID NO: 12565
  source 1..120: mol_type = other DNA

SEQ ID NO: 44437 - DNA, 120 bp, synthetic construct
  source 1..120: mol_type = other DNA
ctacaggcacatgctaccacgcccagctgatttttgtattttttagtagagacggggtttcactatgttggtcaggctggtctcaaactcctgacctcatgatttgcccacctcagcctc

SEQ ID NO: 44438 - DNA, 120 bp, synthetic construct
  source 1..120: mol_type = other DNA
tgcactagagtatctgaatcaccaaattactttaagagtgaccaggagagaattaagagtaatatattacccctgacatttttggtgcttgtggtgatgtgtaaggcaactaaccctctt

SEQ ID NO: 44439 - DNA, 120 bp, synthetic construct; identical to SEQ ID NO: 12566
  source 1..120: mol_type = other DNA

SEQ ID NO: 44440 - DNA, 120 bp, synthetic construct
  source 1..120: mol_type = other DNA
gaagcatttgtttcttactctgacgataattgcacatagaagaatagttaatgattaacaacactttaaagtgggataatcggcagtgtcttgttttctatcttgttttaaggggttggt

SEQ ID NO: 44441 - DNA, 120 bp, synthetic construct
  source 1..120: mol_type = other DNA
agaccagcctgggtaacagggcaagactccatctctacaaaaagattaaaaaaaaaaaaaaagctaggcatggtggcaacacacctgtaccatagtcctagctactcaggaggctgaggt

SEQ ID NO: 44442 - DNA, 120 bp, synthetic construct
  source 1..120: mol_type = other DNA
gccttccccgtgtttaaatagggatcttggagaattagcgtatattctgcatacttgaaaatgagttgtgtatgcttttttaaaaaagaaaattctatttagttttatttaggagcttgt

SEQ ID NO: 44443 - DNA, 120 bp, synthetic construct; identical to SEQ ID NO: 12567
  source 1..120: mol_type = other DNA

SEQ ID NO: 44444 - DNA, 120 bp, synthetic construct
  source 1..120: mol_type = other DNA
gaaaatgttctattagtcctctaaatgtttttttttcccttgttattatagtgtccttgacctaaatgcatttgagcgacaaaacaaagctgaaggtcttgggatggtgacagaggaagg

SEQ ID NO: 44445 - DNA, 120 bp, synthetic construct
  source 1..120: mol_type = other DNA
caagtagagagataagaagttattttaaagttgatgaaatgcttacatgactcatttcaaagttcatagttggacaccggtcacaccctaaaaccaaccttccacgccggtcattaactc

SEQ ID NO: 44446 - DNA, 120 bp, synthetic construct
  source 1..120: mol_type = other DNA
atagatgaacctttcaagaacatttgactttctttggccactttagcaaagtcgggctctcagattcttttatttccttaggatagtgatcctttgagctccttcagtctactctcattc

SEQ ID NO: 44447 - DNA, 120 bp, synthetic construct; identical to SEQ ID NO: 12568
  source 1..120: mol_type = other DNA

SEQ ID NO: 44448 - DNA, 120 bp, synthetic construct
  source 1..120: mol_type = other DNA
tgtgtggtttggatatgtcttcttgtcaattattagttttggaacattgggtcttttattggactaatcttatttcaaaaaataattttttctcccatctgccatttgtagtctatgttt

SEQ ID NO: 44449 - DNA, 120 bp, synthetic construct
  source 1..120: mol_type = other DNA
tgctaccactatgtggctcccgtgtttattttattttctgcttgacatttggatgtacaagtgcagtcaacaaaaataagtcatatggttactaaactgagttagctaccttcaagaaca

SEQ ID NO: 44450 - DNA, 120 bp, synthetic construct
  source 1..120: mol_type = other DNA
ggacccatctgcagaacttggagccactgcagatctcagggcctatcacctgcctacctccagcatctctccaaagtcctaagcaattttcagctataaaatttctaaaaatgaatgaag

SEQ ID NO: 44451 - DNA, 120 bp, synthetic construct; identical to SEQ ID NO: 12569
  source 1..120: mol_type = other DNA

SEQ ID NO: 44452 - DNA, 120 bp, synthetic construct
  source 1..120: mol_type = other DNA
gtattatttccttacaaacagaaaaacaaaagcaaaatctcaactttttttctttttccccatttccttttctttcgactactgtaaatgtactaccctcccttcctcagtcatcactca

SEQ ID NO: 44453 - DNA, 120 bp, synthetic construct
  source 1..120: mol_type = other DNA
tgagcgtggtaattattaaaaatgaactgtcttttgtttatttgctcctttatttgttgttagctttgtgtacagacttgatagtgacaatttccgtgcattcttttttgttgtagactg

SEQ ID NO: 44454 - DNA, 120 bp, synthetic construct
  source 1..120: mol_type = other DNA
cagatatgaaggggcaacaagcatttcaattacattttcggattggttttgttgcttttcagttaaaaacctttctggtgggcccagcgtctgcaactgttgtgtcaatgaatgatccta

SEQ ID NO: 44455 - DNA, 120 bp, synthetic construct; identical to SEQ ID NO: 12570
  source 1..120: mol_type = other DNA

SEQ ID NO: 44456 - DNA, 120 bp, synthetic construct
  source 1..120: mol_type = other DNA
cagtggaaataagggatgagattttagatagtacttaggacgccaacaaggcttccaagattaaattgtgctttctgaatacatgctattgccttaatcaagagacctattaggagcata

SEQ ID NO: 44457 - DNA, 120 bp, synthetic construct
  source 1..120: mol_type = other DNA
aagattctgtaaaagttaaaaaagcctacatacactcacaggagaagaaaaatcaatcatccctcttggaagggatagaaaaggctgaaaaagcaacatctgttagtgatgtcacttgct

SEQ ID NO: 44458 - DNA, 120 bp, synthetic construct
  source 1..120: mol_type = other DNA
actgtttttattaagctaagtctcttcctaatgacgacaatatgaccataaattatatagccatggaaaacgtataagctcaaatgcatgaacttttgatacccgcaaccctccaatgag

SEQ ID NO: 44459 - DNA, 120 bp, synthetic construct; identical to SEQ ID NO: 12571
  source 1..120: mol_type = other DNA

SEQ ID NO: 44460 - DNA, 120 bp, synthetic construct
  source 1..120: mol_type = other DNA
agtggtgcagtctcatctcactgcaacctccacttcccgggttcaagcgattctcctgcctcagcctctcaagtagctgggattacaggcctgccaccacaattggctaatttttgtatt

SEQ ID NO: 44461 - DNA, 120 bp, synthetic construct
  source 1..120: mol_type = other DNA
gctgccccttgacttattgttctttgtccctttccgggacacaaatctcttgccaaattttgcatttattgttaagtttcaaaattgcttttgaactttttatggttacaaatgttccta

SEQ ID NO: 44462 - DNA, 120 bp, synthetic construct
  source 1..120: mol_type = other DNA
tctgtctcctttttatactaagtttctctcatttctgtgaaagcctgagcctcccagttttttttttttaaaggttcttcaggaaatgtgttagtttgtaatatgctcaatgctgtctgt

SEQ ID NO: 44463 - DNA, 120 bp, synthetic construct
  source 1..120: mol_type = other DNA
agaaccattaaccccattaccaaatcattatgacattgaaagtgcaatttttctgctttcaaaattcttcttggaatatagcagaagatactgaattttttttttttgatcatgaggtag

SEQ ID NO: 44464 - DNA, 120 bp, synthetic construct; identical to SEQ ID NO: 12572
  source 1..120: mol_type = other DNA

SEQ ID NO: 44465 - DNA, 120 bp, synthetic construct
  source 1..120: mol_type = other DNA
tactttcacaagtgtagtttagtattctgtgtaccttattctgccattcttgtgggtaaattttctcttcaaggaaaacttgtgatgttggttcgtggcaccaaatacattttcttaaca

SEQ ID NO: 44466 - DNA, 120 bp, synthetic construct
  source 1..120: mol_type = other DNA
acaaataaattcagaacaatgctttatgcatataaaggaatttaggtggaagtacttagcggctgggatgttgcggggctgggggagacgtgtagtctgaattaggaatcaagggggtgg

SEQ ID NO: 44467 - DNA, 120 bp, synthetic construct; identical to SEQ ID NO: 12573
  source 1..120: mol_type = other DNA

SEQ ID NO: 44468 - DNA, 120 bp, synthetic construct
  source 1..120: mol_type = other DNA
cctccaaagatagtgaccagcattattatttccttcatggcagtgggagagctctgagttatgcctaatgatagattagagggaattcttcagagtagacttttcacagttaaagaaatc

SEQ ID NO: 44469 - DNA, 120 bp, synthetic construct
  source 1..120: mol_type = other DNA
atcagagtctcaaggcagggagatcagtaaggatgctgatgaatggaatggatgaaaaacaataagaatttcagtgagagtcttgacagctgagaagcttaggctttggctataagagaa

SEQ ID NO: 44470 - DNA, 120 bp, synthetic construct
  source 1..120: mol_type = other DNA
tttcacatagtggtcattttcgttgtcttggcatcggaaataggaatgcattgtatacaacgctgtcagactgttaactaaattttaacaaatgcactctggaatttatagaacaaacaa

SEQ ID NO: 44471 - DNA, 120 bp, synthetic construct; identical to SEQ ID NO: 12574
  source 1..120: mol_type = other DNA

SEQ ID NO: 44472 - DNA, 120 bp, synthetic construct
  source 1..120: mol_type = other DNA
catttagaaactatagcacactgaattcagaaaggccatataatactgaaattatctgtttatttcctgtatcttccattagactgtgaacttcttcaggttcgagattatgttcacctc

SEQ ID NO: 44473 - DNA, 120 bp, synthetic construct
  source 1..120: mol_type = other DNA
aatggcattacatttagctaagttacaggattataataaacctgaattgaaatgatgagataacatatctagcacaatgcctagcacactgtagtcactaactaaatattaactgtaagc

SEQ ID NO: 44474 - DNA, 120 bp, synthetic construct
  source 1..120: mol_type = other DNA
tttaaaatatctgtagcatttttcagttttggcaagatgcagaatcgatcttaaggtcccctcaagatccacaatcagcataatttcctctatggcagcggggtgctttagagtcaactg

SEQ ID NO: 44475 - DNA, 120 bp, synthetic construct; identical to SEQ ID NO: 12575
  source 1..120: mol_type = other DNA

SEQ ID NO: 44476 - DNA, 120 bp, synthetic construct
  source 1..120: mol_type = other DNA
acattttaatccatgaagatggtgttcaggagatataaacacaattaataaattcaaatcgctttattcagcagcttggcatgatgtttccatattttttagtattattgccactgcacc

SEQ ID NO: 44477 - DNA, 120 bp, synthetic construct
  source 1..120: mol_type = other DNA
aactcagaagcagcaacaatattgaaatacctctccctttattacagtattaaaaatcttaagcctcttataacaatgaaaccaaagggatgtccttcacaatatgtaccttgagccctc

SEQ ID NO: 44478 - DNA, 120 bp, synthetic construct
  source 1..120: mol_type = other DNA
atcacaaaatagactgctgatcctgtaccttctgcagacataaagccatcatccatctctgttactctaccacttatttgcagcatgggcaatggcagcattttaatcagataggaatgt

SEQ ID NO: 44479 - DNA, 120 bp, synthetic construct; identical to SEQ ID NO: 12576
  source 1..120: mol_type = other DNA

SEQ ID NO: 44480 - DNA, 120 bp, synthetic construct
  source 1..120: mol_type = other DNA
cacttaaagtgtgtacatggtttattgaattgatttgttttttgaaaaaaaaattgcagatgggctcacagggaaagaatcaataagcctatgtaatgaactcataatattttgatttaa

SEQ ID NO: 44481 - DNA, 120 bp, synthetic construct
  source 1..120: mol_type = other DNA
cgtgaatttaaacactgaggaatggacttatcagccaattatgggagattcaacacaataatgtgcctataacacttaaacttgccacgtctgatttgcatacgtggtgattttcacata

SEQ ID NO: 44482 - DNA, 120 bp, synthetic construct
  source 1..120: mol_type = other DNA
aagcctctcactttgaaagtcacagactgcggactggtaagtccatcagctctctgtcactgtgatcattcataatttcacttaaagtaaacatacgatcattgcctcattttctttctc

SEQ ID NO: 44483 - DNA, 120 bp, synthetic construct; identical to SEQ ID NO: 12577
  source 1..120: mol_type = other DNA

SEQ ID NO: 44484 - DNA, 120 bp, synthetic construct
  source 1..120: mol_type = other DNA
gtaactaggggacgcctttcttttcacctttctttattagttttagctctcacaacacgagccaccaaagtctgtcttttggtttcatatttagaattaaggttgtttgccatttcctcc

SEQ ID NO: 44485 - DNA, 120 bp, synthetic construct
  source 1..120: mol_type = other DNA
ttttagctctcacaacacgagccaccaaagtctgtcttttggtttcatatttagaattaaggttgtttgccatttcctcctcctatggaagtaatgctcaaaccagtcacatctctattt

SEQ ID NO: 44486 - DNA, 120 bp, synthetic construct
  source 1..120: mol_type = other DNA
ttaataaaagaaactcttggccccgcttttttggatacacagaatgctttccattgaatcatttggtcataatccgggtacaaagcaaatttaacacgtgtgagagatgcagaaaaaggt

SEQ ID NO: 44487 - DNA, 120 bp, synthetic construct
  source 1..120: mol_type = other DNA
tgagttttaaaattcaaacgttcttttcttacaaagaaaaagtgcctctatctgccaagcgcatgatcttatgagcttcagatagaaaagtggctatgacttgtgactgtttttggttca

SEQ ID NO: 44488 - DNA, 120 bp, synthetic construct
  source 1..120: mol_type = other DNA
gacgatgagttcacctgtgacctcttccgattcctgcaactactctgtgagggacacaactcaggtttgtgagtccccggaacttctgatgatactaaggcataaataatgttttcaagc

SEQ ID NO: 44489 - DNA, 120 bp, synthetic construct; identical to SEQ ID NO: 12578
  source 1..120: mol_type = other DNA

SEQ ID NO: 44490 - DNA, 120 bp, synthetic construct
  source 1..120: mol_type = other DNA
atccagacatggtggtgcgtgctcatagtcccatctacttgggaggctggggcaggaggattgcttgaggccaggagttcgaggctgcagtgagctgtgattgccccactgcactggagc

SEQ ID NO: 44491 - DNA, 120 bp, synthetic construct
  source 1..120: mol_type = other DNA
taccttgagcgtatacatacttcattgtactagttaacataatgtatctccattacttgtttacacatctaactctctactaggcttgtgcacccctgaaggcaggaactccatcttaat

SEQ ID NO: 44492 - DNA, 120 bp, synthetic construct; identical to SEQ ID NO: 12579
  source 1..120: mol_type = other DNA

SEQ ID NO: 44493 - DNA, 120 bp, synthetic construct
  source 1..120: mol_type = other DNA
ggagttcttagaatgactcaacttgaacttctgagcaagcattaataacatttttttatcttgcatagattttcagaattatctgagaactcagactggcaataatacaactgtcaacat

SEQ ID NO: 44494 - DNA, 120 bp, synthetic construct
  source 1..120: mol_type = other DNA
ataactagaaaggagtttttgagatagtttatctctgatcacaatctctcagcaattcttagagcaaaacagccactgttatctctgcttctgaacgtgcctcctacttttgctcattat

SEQ ID NO: 44495 - DNA, 120 bp, synthetic construct
  source 1..120: mol_type = other DNA
ttttatactctgctccttcttctacagttgttagacaaattggggaagaatatttggaacatttgtaggaataggaaagaaaggctttgcaactactaccatacacttaaatttgatagt

SEQ ID NO: 44496 - DNA, 120 bp, synthetic construct
  source 1..120: mol_type = other DNA
tcatatttgagaacgttaatcaaactgaattgaagacgtaggcctcttaaataatgagagccctgtacaacttttttcccctcattttatttataagctaaaccaggcacagtattttta

SEQ ID NO: 44497 - DNA, 120 bp, synthetic construct; identical to SEQ ID NO: 12580
  source 1..120: mol_type = other DNA

SEQ ID NO: 44498 - DNA, 120 bp, synthetic construct
  source 1..120: mol_type = other DNA
ttacaagcaatccaaccagtttcctcagggacagacacaaaagccatggatatcagcgagttctcactgatgcaatgttattagttttgttggagaaaatggaggccagatgtcggtacc

SEQ ID NO: 44499 - DNA, 120 bp, synthetic construct
  source 1..120: mol_type = other DNA
tatcagacagtaatttttaaagctaagttttcttcttcttgtcttctcttcagttgttagctatatctaagaaggaggttcacatattgtatgtttaggaaattcattgaagaatgatat

SEQ ID NO: 44500 - DNA, 120 bp, synthetic construct; identical to SEQ ID NO: 12581
  source 1..120: mol_type = other DNA

SEQ ID NO: 44501 - DNA, 120 bp, synthetic construct
  source 1..120: mol_type = other DNA
tggctgctatctgtagcactgaactccatagaaaaatgcagtatatctagagtagtttccatatctcctattgacccctttctgagtttctttgcaaattgctacaattaaaatattagg

SEQ ID NO: 44502 - DNA, 120 bp, synthetic construct
  source 1..120: mol_type = other DNA
tgtattaagcacttagtaaatattaaggaaggaagggcgagcaggcacaacatttaaccattctttctggtattccactaaaagtgggaagaagtttcatagaaacttaagaaagagaag

SEQ ID NO: 44503 - DNA, 120 bp, synthetic construct
  source 1..120: mol_type = other DNA
acttcagattttttaaagattttataaaattctgggtttttctgcaatcaccaaaactttgcttgatgaccagtcatctttcctttctgtcttgtctcagtggacatgttaccctgaatc

SEQ ID NO: 44504 - DNA, 120 bp, synthetic construct
  source 1..120: mol_type = other DNA
aagcttgtggggagaagaaaggttaagttaaaaataaattgtatcccaggagcgtaacagttacagctgtttgagtaaataaatgactcatggccaagtacagccaaccaagagtaagtg

SEQ ID NO: 44505 - DNA, 120 bp, synthetic construct; identical to SEQ ID NO: 12582
  source 1..120: mol_type = other DNA

SEQ ID NO: 44506 - DNA, 120 bp, synthetic construct
  source 1..120: mol_type = other DNA
ttattgccttagtattctcatgcatgcctagaatgataccagtacaacaacattcatgtgtcatgtcctgaataaataacaggattgactgatgacattagcaagccactggattttcca

SEQ ID NO: 44507 - DNA, 120 bp, synthetic construct
  source 1..120: mol_type = other DNA
tagaagcatccattgagctcttactatatgcaaaactctagggtgttgtcatagaacacagatttctatgtgaatgtttaaaggatattggataaagtcacatggcttattgtgcttggt

SEQ ID NO: 44508 - DNA, 120 bp, synthetic construct
  source 1..120: mol_type = other DNA
attttagtattcagaaaagttgtaaagatagcacagagggtttctgtatatgattcacccagctttccccaatgctgacattttatatactcatggcacatttgtcaaaactaagaaatt

SEQ ID NO: 44509 - DNA, 120 bp, synthetic construct; identical to SEQ ID NO: 12583
  source 1..120: mol_type = other DNA

SEQ ID NO: 44510 - DNA, 120 bp, synthetic construct
  source 1..120: mol_type = other DNA
gggaagaattgtttgagtaagaggacgttgtattgtcaaggttcctacagtaagaccatgaggtagttgttgagaaaagagaaagtttgatctgtccttggcacaggtccttctggtagt

SEQ ID NO: 44511 - DNA, 120 bp, synthetic construct
  source 1..120: mol_type = other DNA
gacattctgtgtgtttcaggttttaaaagaaaaaatgggtactttggctttgggcttgcaactctgtcacatgagggttggccaaacaacttttggtcacctaggggttgcaggagagca

SEQ ID NO: 44512 - DNA, 120 bp, synthetic construct; identical to SEQ ID NO: 12584
  source 1..120: mol_type = other DNA

SEQ ID NO: 44513 - DNA, 120 bp, synthetic construct
  source 1..120: mol_type = other DNA
actatatctggtacattaaatgagctggatttaatgacctacagattaaaataacctgattccttctcaccactgtcccttcagacttgctttgtcgaccatttctttaccactagaagg

SEQ ID NO: 44514 - DNA, 120 bp, synthetic construct
  source 1..120: mol_type = other DNA
tcagtcactttgtcacaagaataatctcatttcagtaaaacttccgcttacccttgggcctgattttcagctggaaaacctagagtgagggtgcaggcaagaactcccatctggatgttg

SEQ ID NO: 44515 - DNA, 120 bp, synthetic construct
  source 1..120: mol_type = other DNA
ttgctgtgggagagaggaggtatggggaaggaaaggtctcttccggggcacatgtaatcccagagtgcaccacggagctggccctctggtgtggtgtgttgtatttttttatctaacgtg

SEQ ID NO: 44516 - DNA, 120 bp, synthetic construct; identical to SEQ ID NO: 12585
  source 1..120: mol_type = other DNA

SEQ ID NO: 44517 - DNA, 120 bp, synthetic construct
  source 1..120: mol_type = other DNA
caaagtttcccccttttcaatttcaacccctttgtatccttagagtggaaatatctatttttagtcaccccttttgcaggtagtgagtctactgcttttgtagacagtcagtcgttctca

SEQ ID NO: 44518 - DNA, 120 bp, synthetic construct
  source 1..120: mol_type = other DNA
gcctcaagagatgctgagacaggaaaaagttctatttcaacatcttggatctggccatctcttccaatcacttgtttctagcataagatctgaaatgtttttatgtggcctgcaatttaa

SEQ ID NO: 44519 - DNA, 120 bp, synthetic construct
  source 1..120: mol_type = other DNA
gggtttacaaaactgaatgatggtagaattttttcattggaaagtgaaaacagaaattggctccatgaaaacagtctgcgtgctacagcggatccaccctagtattgatacttcagaagt

SEQ ID NO: 44520 - DNA, 120 bp, synthetic construct; identical to SEQ ID NO: 12586
  source 1..120: mol_type = other DNA

SEQ ID NO: 44521 - DNA, 120 bp, synthetic construct
  source 1..120: mol_type = other DNA
agggaggaacgcaagacactggagccatctcagcctaatgactcccaattagttattttaaccacttccaattgccttggattctggattcgtgaaattaataagcaagtattactcttt

SEQ ID NO: 44522 - DNA, 120 bp, synthetic construct
  source 1..120: mol_type = other DNA
atcacctctcatctaaagcatattctcagattcttttgaatacaaaatagtgactattgattgatttgactaaatagccaaagcacccagaccttattttttttcctctaaatagaggag

SEQ ID NO: 44523 - DNA, 120 bp, synthetic construct
  source 1..120: mol_type = other DNA
atcactgtatctccttctttcactttgagttcctatcttttcagataacgtgctagcagtgaaatatatcagcactaagtcaacttttcccctgttattgtacagtttgttttggcaaat

SEQ ID NO: 44524 - DNA, 120 bp, synthetic construct; identical to SEQ ID NO: 12587
  source 1..120: mol_type = other DNA

SEQ ID NO: 44525 - DNA, 120 bp, synthetic construct
  source 1..120: mol_type = other DNA
tattcaaatttgagacaatggatattaagaaattgaatgtaatggacaaatgaaacagtcgagtccccaaacattgtacatttcacaagcttcatcttcctggccattgctcactggaat

SEQ ID NO: 44526 - DNA, 120 bp, synthetic construct
  source 1..120: mol_type = other DNA
ctgttacaagggagacaattttgttacagggtcttaaacaagcagatgttctcagtagggcgatgcttacccctaaccagtgtatttaattttgtgacagagaaaaagtagctattatat

SEQ ID NO: 44527 - DNA, 120 bp, synthetic construct
  source 1..120: mol_type = other DNA
cacaaacagaaaagttcttgtgaatgtgtctcttcaatgcagtgaattttgatggtataatctgagaccttcagagtgtgagtatttgccaggcggtcaggtagaagaatgtcagattaa

SEQ ID NO: 44528 - DNA, 120 bp, synthetic construct
  source 1..120: mol_type = other DNA
gcctgcaaatgacaatatgcaggatatattgtcaaagatcagcagggctggatgctagtaaaagtggtaaggatacatcttaatgtcaaagataaacaaagctggatactagttaagcga

SEQ ID NO: 44529 - DNA, 120 bp, synthetic construct; identical to SEQ ID NO: 12588
  source 1..120: mol_type = other DNA

SEQ ID NO: 44530 - DNA, 120 bp, synthetic construct
  source 1..120: mol_type = other DNA
ggcaggtactttagtggagggctgggatcatccttgacatgcagtcttgaacagttagaaactatatttattagtgtttgttcaagtctttatagaccaaagttgaggccaagttgagaa

SEQ ID NO: 44531 - DNA, 120 bp, synthetic construct
  source 1..120: mol_type = other DNA
gtaagtaaaggaaaccaacatatgaaccaaatgtagaccctcacaagagagttctcatcctgatgtttttccatcagggtattaacatctggtgctacctagcacttgttcatggtttat

SEQ ID NO: 44532 - DNA, 120 bp, synthetic construct; identical to SEQ ID NO: 12589
  source 1..120: mol_type = other DNA

SEQ ID NO: 44533 - DNA, 120 bp, synthetic construct
  source 1..120: mol_type = other DNA
tagtacaatgttgtactaataggtaatacctgtgtaggtttttggttaatttatctaacaaatacatttataagtttatcttctatggtgcttatatgcctatatttcttctatatgaag

SEQ ID NO: 44534 - DNA, 120 bp, synthetic construct
  source 1..120: mol_type = other DNA
tagatgtcaaatgtgcagaaggtcttgagtcttgcttggcattggagaatattccactgttgtggttctttcatattattgctatatatgttcattgtcggtacaaatactttttttttt

SEQ ID NO: 44535 - DNA, 120 bp, synthetic construct
  source 1..120: mol_type = other DNA
gactacaggtgtgtactaccctgcccagataaatttttgtatttttagtagagacgggtttttgccatgttgcccagcctggtctcaaactcctgagctcaggtgatctgtgcgcctcgg

SEQ ID NO: 44536 - DNA, 120 bp, synthetic construct; identical to SEQ ID NO: 12590
  source 1..120: mol_type = other DNA

SEQ ID NO: 44537 - DNA, 120 bp, synthetic construct
  source 1..120: mol_type = other DNA
ttttaaattctctttattatcttatttaaaggatcagcatgggcttatggaatcagagtgtagcatagaataaaatagcactcagatatgatagatgccttggatttcttgctggcttat

SEQ ID NO: 44538 - DNA, 120 bp, synthetic construct
  source 1..120: mol_type = other DNA
taaaaagtaagctctccagtctataaagaatattttatttgttagtgtgtttgtccataatcagtgggggtttcggacatttgggtaacagtcagctgtgtaagctgctgctttgaaaag

SEQ ID NO: 44539 - DNA, 120 bp, synthetic construct
  source 1..120: mol_type = other DNA
ttttttttttttttcctgtagcaggcaggaaatgtagcagttaagagcttgggctccaaatccaccgccagagtttaaatcctggcttccttacctctgggaggtatgacccttggacaa

SEQ ID NO: 44540 - DNA, 120 bp, synthetic construct
  source 1..120: mol_type = other DNA
taaatacaaccaaaacaactaagaaatgtttggtattacggtgcctatcactttttcttaacttcttcctattttctctccgtgtctgccatacatggcgtaactccacttcagttaact

SEQ ID NO: 44541 - DNA, 120 bp, synthetic construct; identical to SEQ ID NO: 12591
  source 1..120: mol_type = other DNA

SEQ ID NO: 44542 - DNA, 120 bp, synthetic construct
  source 1..120: mol_type = other DNA
gagaggctaagaaatctgcccaggttgctgagcacattaagcctggattcaaacccaacaatgtggctccagatcccacactcttaacaccacggtgcttactgcttctccgattgactc

SEQ ID NO: 44543 - DNA, 120 bp, synthetic construct
  source 1..120: mol_type = other DNA
aactatacacactgactcatgaagaaatgtagaaaggtgcttttcattatgaatcagaaaaagcgtacagtttgctctcaggatctggtctgaagacctggcactaacctttaataatta

SEQ ID NO: 44544 - DNA, 120 bp, synthetic construct
  source 1..120: mol_type = other DNA
gtgatttttcaactctaaagggctgagcaaatgtttatttttattattaatatgaaacgattttagtttctggctctttggctcattttctttatctaaaacatgttgcttctttgattg

SEQ ID NO: 44545 - DNA, 120 bp, synthetic construct; identical to SEQ ID NO: 12592
  source 1..120: mol_type = other DNA

SEQ ID NO: 44546 - DNA, 120 bp, synthetic construct
  source 1..120: mol_type = other DNA
agatgattctcaaattttttgacatgttcttaaaactaaaggatttgacgtcgtctgatacttttaaagaatatgaccccgatggcaagggagtcatttccaagagggacttccacaaag

SEQ ID NO: 44547 - DNA, 120 bp, synthetic construct
  source 1..120: mol_type = other DNA
cgaaggacatcggcttcaacgtcgccgtccttctgacaaacctctctgagcacatgcccaacgatacccgacttcagacttttctggaattagcagagagcgtcctgaattatttccagc

SEQ ID NO: 44548 - DNA, 120 bp, synthetic construct
  source 1..120: mol_type = other DNA
agttcatatttgacgtggtcaacgaaggcggagagaaagagaagatggaactctttgtgaacttctgcgaggacaccatctttgaaatgcagctggcggctcagatctcggagtcggact

SEQ ID NO: 44549 - DNA, 120 bp, synthetic construct; identical to SEQ ID NO: 12593
  source 1..120: mol_type = other DNA

SEQ ID NO: 44550 - DNA, 120 bp, synthetic construct
  source 1..120: mol_type = other DNA
tagccaacatgccagaccccactcaggatgaggttagaggagatggggaggagggagagaggaaacccctggaagccgccctgccctccgaggatctgaccgacttaaaggagctgacag

SEQ ID NO: 44551 - DNA, 120 bp, synthetic construct
  source 1..120: mol_type = other DNA
ccatgcctgaggtgcaggaaaaatttcaggtaatttatctctaagtcacagcagcattctctctggacttcaggtgggtataataaatgatcattagaccaggtttcatgctagtgccag

SEQ ID NO: 44552 - DNA, 120 bp, synthetic construct
  source 1..120: mol_type = other DNA
cagtacccaccctaactgtagcctacatctttctccacgtttatataattttatatgcacatttgaaaagttgggaaaagaaagaaaacttttagatacctgtaagtggcattattctca

SEQ ID NO: 44553 - DNA, 120 bp, synthetic construct; identical to SEQ ID NO: 12594
  source 1..120: mol_type = other DNA

SEQ ID NO: 44554 - DNA, 120 bp, synthetic construct
  source 1..120: mol_type = other DNA
ggcattgaaggatgagtaagattttagtaggtgcttaagataaagaaggatatttctaaatgagaaaagagagtgaaaaggagtccagaaagtttgtccctgctgctggtgcagtaggtc

SEQ ID NO: 44555 - DNA, 120 bp, synthetic construct
  source 1..120: mol_type = other DNA
gtatcttatataggttatggtttgacacatggtcacatggctccctcaattcattcaaaggtgatgggtaatcctggttttcttttccccattgactcattcaaggaacagaaggcaaaa

SEQ ID NO: 44556 - DNA, 120 bp, synthetic construct
  source 1..120: mol_type = other DNA
ttcgtttcagtttgtcattacatctctttttcttgtactctgtctttgggagctgcaagggagaatctcatattgtcaaggagccacagaactaattgtgccatctccgtggagaggctc

SEQ ID NO: 44557 - DNA, 120 bp, synthetic construct; identical to SEQ ID NO: 12595
  source 1..120: mol_type = other DNA

SEQ ID NO: 44558 - DNA, 120 bp, synthetic construct
  source 1..120: mol_type = other DNA
ctgcctcagcaggtctggtgtggggcctgggagccttcattttcaccaacactcctgggatcaacgcagcaataaaaaagagctggatgtgaggcgatgaaaatgcataactccctcata

SEQ ID NO: 44559 - DNA, 120 bp, synthetic construct
  source 1..120: mol_type = other DNA
gggaagaaagaaaggaagcttttaggtgcctgtagtgccactattctcccatagcattgaaattttctcctctattctgttattttctttggtctgttttcatcgttatgtttttgtagt

SEQ ID NO: 44560 - DNA, 120 bp, synthetic construct
  source 1..120: mol_type = other DNA
tacctcatatgagttaagattaagtatagcttatatatattaatatttctggtttatgtattaatacatatgacttcactttaatttaatgaaggactgatattttgcacctaaaggata

SEQ ID NO: 44561 - DNA, 120 bp, synthetic construct; identical to SEQ ID NO: 12596
  source 1..120: mol_type = other DNA

SEQ ID NO: 44562 - DNA, 120 bp, synthetic construct
  source 1..120: mol_type = other DNA
tgcctataatcccagctacttggaagactgaggcaggagaatcacttgaacccgggagctggaggttgcagtgagctgagatggcgcccctgcattccagcctgggtgacagagcgagac

SEQ ID NO: 44563 - DNA, 120 bp, synthetic construct
  source 1..120: mol_type = other DNA
tgcagaattggaaggaatctgctatgcataaagattcttcaagcctataaaatgtcctctatatttcaacttcacagaattacccatctccaggggactgtgatcaacagaaaatcctac

SEQ ID NO: 44564 - DNA, 120 bp, synthetic construct
  source 1..120: mol_type = other DNA
tttagtttctggagagcttatgttttgtttgtttgttttcataggggagaagatggagaaaaagaagagaaagccaaggaagacaagggcaaacaaaagttgaggcagcttcacacacac

SEQ ID NO: 44565 - DNA, 120 bp, synthetic construct; identical to SEQ ID NO: 12597
  source 1..120: mol_type = other DNA

SEQ ID NO: 44566 - DNA, 120 bp, synthetic construct
  source 1..120: mol_type = other DNA
aggacaagtgaataaacatagtctaaggacctgcaacagattttaaagcaagatgtgccttctaggacacaagtaattcaaaaatgttccagaactagattagtcagtatttctataaca

SEQ ID NO: 44567 - DNA, 120 bp, synthetic construct
  source 1..120: mol_type = other DNA
cactttccattgataataagaaggtctattcaaaattgttctttaagagagggattacagttctttatatactgtcctgtacattttacagaggtgttcccctaattagtaaagcacaca

SEQ ID NO: 44568 - DNA, 120 bp, synthetic construct
  source 1..120: mol_type = other DNA
aaggcctttattaacatgcatgtgtaatgtcacatgtatacacatatatgtgtctcctatccttttcctccatgcttatctcctatccttttcctcctttataaaaattaaacatatgtg

SEQ ID NO: 44569 - DNA, 120 bp, synthetic construct; identical to SEQ ID NO: 12598
  source 1..120: mol_type = other DNA

SEQ ID NO: 44570 - DNA, 120 bp, synthetic construct
  source 1..120: mol_type = other DNA
attatatattttatgcaaatatattttaatttagttgtaactacatttcctaaaccatcttgtattttccctatattgtttaatacagagttcactgaacagaaatgtttcctagataac

SEQ ID NO: 44571 - DNA, 120 bp, synthetic construct
  source 1..120: mol_type = other DNA
caggtatagttctattataggtcatggctgcaggtatagttctattataggtggtttaaaggttgaatgggcgctgcagcaccccagtgggttcctgaagaatgtgtttaactacagttg

SEQ ID NO: 44572 - DNA, 120 bp, synthetic construct
  source 1..120: mol_type = other DNA
tcccttttcctgcatctctttgctatctttctcggctcaccgatttgcatgcacatgaccagtcatggccacatccgtctaacaaaggccccttttcccctaagtgagagctcagcctag

SEQ ID NO: 44573 - DNA, 120 bp, synthetic construct
  source 1..120: mol_type = other DNA
tggggaaatgacacgaacagagatgggctgtgtacacagaggggaatatcattctgaggtgttacattttgatgtagctttattatggtaaatcccctgacatatccacttaaattatat

SEQ ID NO: 44574 - DNA, 120 bp, synthetic construct; identical to SEQ ID NO: 12599
  source 1..120: mol_type = other DNA

SEQ ID NO: 44575 - DNA, 120 bp, synthetic construct
  source 1..120: mol_type = other DNA
ttttcacatagtagctggagtgggccttccaaatcataatccaactgcaccaagtcctcctgaaatcctctaatagcttcccatcccacctagaataaaataataattatactggaatat

SEQ ID NO: 44576 - DNA, 120 bp, synthetic construct
  source 1..120: mol_type = other DNA
tgcagatgagcagagtgatgctacagaaaagattaagtcatttgtccatatcccacactaggaaatggagggaggcaggcttcatatccaggcaatgaggcctcggaggttgtaaactga

SEQ ID NO: 44577 - DNA, 120 bp, synthetic construct
  source 1..120: mol_type = other DNA
ctgtgtttccttctatttctcaaacacaccaacatcactcctaactcagggcctctgcccttgttgctcctctctttgacacactctttctttccccaaatatttgtatgacttgctccc

SEQ ID NO: 44578 - DNA, 120 bp, synthetic construct; identical to SEQ ID NO: 12600
  source 1..120: mol_type = other DNA

SEQ ID NO: 44579 - DNA, 120 bp, synthetic construct
  source 1..120: mol_type = other DNA
agcctgttgattcagtgaccttttcataatgtttttcaccctcagaactattttgctcgcaacttttacaacatgagaatgttagccttatttgtcgcatttgctatcaatttcatcttg

SEQ ID NO: 44580 - DNA, 120 bp, synthetic construct
  source 1..120: mol_type = other DNA
gatgaacgtatctactactgctagtgaacatgtctaaacctattatgaaatactggtgcctaggcactgatatcactgttatctaggaaggcaagatagatttgttcctgagaagtgaga

SEQ ID NO: 44581 - DNA, 120 bp, synthetic construct
  source 1..120: mol_type = other DNA
ttgtgactatgcctgggtgtggcataccgtattatattacattcttttgtaattgagaagagagcttagccatctaattttttagcatgcattggaatcctcagaatttttggttgaata

SEQ ID NO: 44582 - DNA, 120 bp, synthetic construct; identical to SEQ ID NO: 12601
  source 1..120: mol_type = other DNA

SEQ ID NO: 44583 - DNA, 120 bp, synthetic construct
  source 1..120: mol_type = other DNA
agaggagagcagcggctacatggagcccacgttgcgtatcttagctattctgcacacggtcatttctttcttctgcatcattggatactactgcttgaaagtaagatagtaaggcaccaa

SEQ ID NO: 44584 - DNA, 120 bp, synthetic construct
  source 1..120: mol_type = other DNA
gaaactttgtgcacaaagtttctgagggaatgctccatgaatcaacatgcatggggcaaatggaggaaggatgggacagaggggaaagctgggctactgtagacagacacagcaggtgcc

SEQ ID NO: 44585 - DNA, 120 bp, synthetic construct; identical to SEQ ID NO: 12602
  source 1..120: mol_type = other DNA

SEQ ID NO: 44586 - DNA, 120 bp, synthetic construct
  source 1..120: mol_type = other DNA
agaaaataatgcagctttatccccagaggcctgccaagggaacaatataatttggtgaatagaacccaagataatctctctgagtgctcagggctgcccattacctgtccaaacctcttt

SEQ ID NO: 44587 - DNA, 120 bp, synthetic construct
  source 1..120: mol_type = other DNA
tagaatgtaaagagttattcaggaactcctttcctcccgtttattctgttttatgggagtgcatattcttggctatttccagaatatcagtgtctatctgctatctgtgccttgtgtaaa

SEQ ID NO: 44588 - DNA, 120 bp, synthetic construct
  source 1..120: mol_type = other DNA
tggtgatgctgagcatgaaattattaaagaggtttctcaaataaaactgcactttagtagcatgcatttgggaacattgctgcaattgctaaattttatttcattcattcatgttgagag

SEQ ID NO: 44589 - DNA, 120 bp, synthetic construct
  source 1..120: mol_type = other DNA
tatctattctatcttctgtttttccaaaaccttctagatgcttcttcctgcttgaatatagctgattcattttcattccatttttaccttcctagaagtacacaggaaatatttctttcc

SEQ ID NO: 44590 - DNA, 120 bp, synthetic construct; identical to SEQ ID NO: 12603
  source 1..120: mol_type = other DNA

SEQ ID NO: 44591 - DNA, 120 bp, synthetic construct
  source 1..120: mol_type = other DNA
gttcctgcagatttgtcaaaagtttagcagaggtgaataatagttatatattcagccaagaaaaatctaaagactcagtgctgtccaactcttaatggtggatgtcctcaatttttgccc

SEQ ID NO: 44592 - DNA, 120 bp, synthetic construct
  source 1..120: mol_type = other DNA
gcgttcagggatgtgtgtagcaggaagtgcatgacctgcaggcagggttatctcatccaaaagcagaggcaaaaattattcattaacgaaaaagttgtagcattaaaggaaaatgcattg

SEQ ID NO: 44593 - DNA, 120 bp, synthetic construct
  source 1..120: mol_type = other DNA
tctatccaataaacatttagccctgtgagatcaagacccaaactactagctgctgttctgagtataagtccatcacaaaagtataatttttcactgtaaaaagaattagtgcaatagttg

SEQ ID NO: 44594 - DNA, 120 bp, synthetic construct
  source 1..120: mol_type = other DNA
catgtttatcctaaatgctaaatgttttgtttagcaattctaccattaatactaatttctaagcaagtcagtccctttaggcaaactctctatgtattagtgaagacgctagagttgtgc

SEQ ID NO: 44595 - DNA, 120 bp, synthetic construct; identical to SEQ ID NO: 12604
  source 1..120: mol_type = other DNA

SEQ ID NO: 44596 - DNA, 120 bp, synthetic construct
  source 1..120: mol_type = other DNA
tatcagcttataatcttttgtatatatttacatgttaatatttaaaataatattcaaatacctatgatgcaggaaattatgtgatgttagccaaattcattgtaagtttacgtggcagga

SEQ ID NO: 44597 - DNA, 120 bp, synthetic construct
  source 1..120: mol_type = other DNA
ctactgggacaaatttgttaaaagaaaggtaatattacttggaatcctctacatttttcttaaagcacagtttagatttttatttgatgtgattcagatgtagaataagatattgaggta

SEQ ID NO: 44598 - DNA, 120 bp, synthetic construct
  source 1..120: mol_type = other DNA
cagttcaagcaattctcctgcctcagtctcccgagtggctgggattccaggcgcctgccaccacacccggctaatttttgtatttttagtcgagatggggtttcgccatgttggcctggc

SEQ ID NO: 44599 - DNA, 120 bp, synthetic construct; identical to SEQ ID NO: 12605
  source 1..120: mol_type = other DNA

SEQ ID NO: 44600 - DNA, 120 bp, synthetic construct
  source 1..120: mol_type = other DNA
gtaaatgtacatatatatttttttactttgttagaagcaatgtgttcgatttttatgtggaggaggtacaagtgttttgttccctcgtgacctggcatcttgagtcgcactgcgctagtg

SEQ ID NO: 44601 - DNA, 120 bp, synthetic construct
  source 1..120: mol_type = other DNA
tattaaagcaagagtttcttgctttaatgaagaaaactctatatctgtagtcaaataaataggtaaaccataatggcagctaatcctgttcctggatttcccgctatggtacctaatttg

SEQ ID NO: 44602 - DNA, 120 bp, synthetic construct; identical to SEQ ID NO: 12606
  source 1..120: mol_type = other DNA

SEQ ID NO: 44603 - DNA, 120 bp, synthetic construct
  source 1..120: mol_type = other DNA
aatcttgtattttcacattctgtctccttttctaatcttttctcctgtatagtggactccttttttgctaccagtgatctctcctcctgcttgtctttaattgcttttcctgttccctcc

SEQ ID NO: 44604 - DNA, 120 bp, synthetic construct
  source 1..120: mol_type = other DNA
aatctccacctcctgggttcaagtgattctcctacctcagtctcccaagtagctgggattacaggtgtctaccaccatgcctggctaatttttgtatatttagtaaagacaaggtctcac

SEQ ID NO: 44605 - DNA, 120 bp, synthetic construct
  source 1..120: mol_type = other DNA
agactcactcaggaggtatatgaaccagaggccaagaagagctgtatcccagagttggacataactgagctcacaggggagctgtgagcacatccaagccctgctctaaaaacatgacaa

SEQ ID NO: 44606 - DNA, 120 bp, synthetic construct; identical to SEQ ID NO: 12607
  source 1..120: mol_type = other DNA

SEQ ID NO: 44607 - DNA, 120 bp, synthetic construct
  source 1..120: mol_type = other DNA
tcaggcatggcctggttgcttcctggacccatctcttgctgagtttagcaaacttaggcacattacatgaagttttctaaggtacagtttctttatctgcagaatatcaataacgtgaaa

SEQ ID NO: 44608 - DNA, 120 bp, synthetic construct
  source 1..120: mol_type = other DNA
tcttctttggtatgactccctctcttgaatgagagagaaatcttgttcctcagataggtattatgtaagatgctgtgaatttgtttagaccttaagcagtgtgatcacagaaggtgagcc

SEQ ID NO: 44609 - DNA, 120 bp, synthetic construct; identical to SEQ ID NO: 12608
  source 1..120: mol_type = other DNA

SEQ ID NO: 44610 - DNA, 120 bp, synthetic construct
  source 1..120: mol_type = other DNA
cggctctatcctacagacttagattgaaaggggaaaacattaatacatttttaaacttgtgcattgatttcctttccttcaatgtcagaagaatagatagatgaggaaaacagaaagtat

SEQ ID NO: 44611 - DNA, 120 bp, synthetic construct
  source 1..120: mol_type = other DNA
cttaatttgccttttctgtctttaaatgatccttaaatctaagtaaaacacatgcaaaaactcaatatatggctgttttctggtaattcctgtttgaaaaaacgttaattttcttatgtt

SEQ ID NO: 44612 - DNA, 120 bp, synthetic construct
  source 1..120: mol_type = other DNA
atcataccattacttgtaaagtttacttcaaaatgaaacactctttatatactgctttcatggaataatatgtttctaaaccagttgagttgaatgcacctgaatttaaatgtcacacac

SEQ ID NO: 44613 - DNA, 120 bp, synthetic construct
  source 1..120: mol_type = other DNA
ttattgtagtcacttaatgattttggaagaaacataatactttctcttaacatgagtagggatgtgatggttactttgaaaacatatttctggttctgtgaagcagtattattttcttaa

SEQ ID NO: 44614 - DNA, 120 bp, synthetic construct; identical to SEQ ID NO: 12609
  source 1..120: mol_type = other DNA

SEQ ID NO: 44615 - DNA, 120 bp, synthetic construct
  source 1..120: mol_type = other DNA
cctgtaaaatgaaacaccgatgggcaatccttaggatctgtgttccttatgttagaatatcatgaaacaagaactagggtgtgaggctgagcatcccacaaacattttcagatccttaac

SEQ ID NO: 44616 - DNA, 120 bp, synthetic construct
  source 1..120: mol_type = other DNA
aatagttttaaattggcatagttttctaccattatacatagtaactgtttgtaagtaagtttgacccctagcaaagtaccaagaagttcatatggcatttaacaccttgacatatggaga

SEQ ID NO: 44617 - DNA, 120 bp, synthetic construct; identical to SEQ ID NO: 12610
  source 1..120: mol_type = other DNA

SEQ ID NO: 44618 - DNA, 120 bp, synthetic construct
  source 1..120: mol_type = other DNA
tgactggagctttggagtccccccgccccccaaccaggaaggccgtgttctgattggcttagctcagccatggccctcccccagaggtggggtcagcctcaccgaaacaaacagcatggc

SEQ ID NO: 44619 - DNA, 120 bp, synthetic construct
  source 1..120: mol_type = other DNA
ccaccataggaaattcatacatcctgatataaaccattattctgttttagattgctttaatgtaaaataattatgctcccatgcaaactactacattttttcccccaactcttccttttt

SEQ ID NO: 44620 - DNA, 120 bp, synthetic construct
  source 1..120: mol_type = other DNA
aaaaattgtttttaatcctggagtaagttaaatgagccttaacccttagtgaaaaaaatctcctaaaaagtcaccttcgatttgcaactacttagcatttataatttaagaaagattcgc

SEQ ID NO: 44621 - DNA, 120 bp, synthetic construct
  source 1..120: mol_type = other DNA
gctggaatattggaaaggctgggaaagttacaatttctagcctataaatcagtggcaagttctgaaaaaatgaaaattaacacatatattttaatatacgtgtttgtaatctgcaaagat

SEQ ID NO: 44622 - DNA, 120 bp, synthetic construct; identical to SEQ ID NO: 12611
  source 1..120: mol_type = other DNA

SEQ ID NO: 44623 - DNA, 120 bp, synthetic construct
  source 1..120: mol_type = other DNA
attctgttggaatgcaattgcaagtgcatatgaaagtgaggaaatgtttgatgtgtacatatgttggccaatttagtacagtttcaaggaataaatgttatatgtagctgggcacaatgg

SEQ ID NO: 44624 - DNA, 120 bp, synthetic construct
  source 1..120: mol_type = other DNA
aaaaaaaaattcgctgggagcggtagcacatgcctgtaatcccagctactcgggaggctgaggcacgagaatcgcttgaaccggggaggcagagattgcagtgagccaagattgcaccat

SEQ ID NO: 44625 - DNA, 120 bp, synthetic construct
  source 1..120: mol_type = other DNA
gaaggtgatgatgttttgttttccaagatcctctaagaacacatcatgaaactctaggatacagtgtcagagttggctctcagctcctcccttggcatctgggatagaactcgtttccca

SEQ ID NO: 44626 - DNA, 120 bp, synthetic construct; identical to SEQ ID NO: 5240
  source 1..120: mol_type = other DNA

SEQ ID NO: 44627 - DNA, 120 bp, synthetic construct
  source 1..120: mol_type = other DNA
tgatatgattaatgagcccatctctcattccatttctttcaatagctgaaatagtaaaatgaaaatatatgaaaaactgagatgcagatttgtgagtacgttcattaaggttttaattgg

SEQ ID NO: 44628 - DNA, 120 bp, synthetic construct
  source 1..120: mol_type = other DNA
attttattttttttattctccttttaccaaagagcctttggagactaaatatagggccgtaatatatatccaaatagaaaaaaattacctattactaaaaaccgccaggtgtctcaagat

SEQ ID NO: 44629 - DNA, 120 bp, synthetic construct
  source 1..120: mol_type = other DNA
catgggcccagaactctgggtgtcttaggagcattctctaagagttcaaaatcaggtcttccaagtatctttcagaaccataaactattaatacactatcttacaactaatttctcatcc

SEQ ID NO: 44630 - DNA, 120 bp, synthetic construct; identical to SEQ ID NO: 12613
  source 1..120: mol_type = other DNA

SEQ ID NO: 44631 - DNA, 120 bp, synthetic construct
  source 1..120: mol_type = other DNA
tggccaatcacctctcaacatgcattcattcttcactattactgtgtctctctgaaacatagccatggttaccagacgaaattcagaattcctagttaaatgtaaattttagataagcag

SEQ ID NO: 44632 - DNA, 120 bp, synthetic construct
  source 1..120: mol_type = other DNA
cattcaaattttactgtgcagcaagcacatgtgtagaccacacatgcacctttggcccagcttgtcacttaggtcgttactcatcttatgcccataaattttccttttcctcagtctttg

SEQ ID NO: 44633 - DNA, 120 bp, synthetic construct
  source 1..120: mol_type = other DNA
ctgagtagctgggactacaggcgcccgccaccacgcccggctaattttttgtacttttagtagagacggggtttcaccatgttagccaggatggtctcgatctcctgacctcgtgaaccg

SEQ ID NO: 44634 - DNA, 120 bp, synthetic construct; identical to SEQ ID NO: 12614
  source 1..120: mol_type = other DNA

SEQ ID NO: 44635 - DNA, 120 bp, synthetic construct
  source 1..120: mol_type = other DNA
cacttttgctgctttttttggctctggtaacctcaccctggggtttgtccagtagtcttctaatttaatggctttgccacttacaatgattttagacaatagcttaactagagcaagctc

SEQ ID NO: 44636 - DNA, 120 bp, synthetic construct
  source 1..120: mol_type = other DNA
aatatattgaacgttgaccagcacttagtaggtgctaaagaaattttcctaaaatgccatttttcacaaaccgttatccttctcatggtactgcagtggcactcaagttcctgtggggta

SEQ ID NO: 44637 - DNA, 120 bp, synthetic construct; identical to SEQ ID NO: 12615
  source 1..120: mol_type = other DNA

SEQ ID NO: 44638 - DNA, 120 bp, synthetic construct
  source 1..120: mol_type = other DNA
taagagcagccaccatatttttattctgcattagtcctggccctcccccaaaagtgtattcattttccagcctatgtgaataatcaacattaattataacccaggagacttctacaacag

SEQ ID NO: 44639 - DNA, 120 bp, synthetic construct
  source 1..120: mol_type = other DNA
aatttcataactagtaggtctcagcaaacactgatttagtcagtgaataaatgaaaagcaaagaagggaagaaaaggagggagagaaagcgactggttcttttgttggctgtagagcaag

SEQ ID NO: 44640 - DNA, 120 bp, synthetic construct
  source 1..120: mol_type = other DNA
gctgcttgccatcccaccatgcacagaacagcacccataataaaggattatctgaaccaaaatatgaatagcgctgggttgagaaagcctgctgcggagtaggaagtcaataaatgtttc

SEQ ID NO: 44641 - DNA, 120 bp, synthetic construct; identical to SEQ ID NO: 12616
  source 1..120: mol_type = other DNA

SEQ ID NO: 44642 - DNA, 120 bp, synthetic construct
  source 1..120: mol_type = other DNA
gccgaggcgggtggatcacgaggttaggagatcaagaccatcctggttaacacagtgaaaccccgtctctactaaaaatacaaaataattagccgggcgtggtggcggacgcttgtagtc

SEQ ID NO: 44643 - DNA, 120 bp, synthetic construct
  source 1..120: mol_type = other DNA
aaaaaaaaaaaaaaaaaaaaaagtatagtgtacgaagatgaagtaaatggagtaattataacagagtgaaatcagagttactttttaattgtatttttttaattgacatattcatggggt

SEQ ID NO: 44644 - DNA, 120 bp, synthetic construct
  source 1..120: mol_type = other DNA
gaaactatatattattgtgacctgccgtcatcctacagcggtatagaaccccagaacttattttttctatctagctataactttgtatcttttaacaaatctctccctattcctacctct

SEQ ID NO: 44645 - DNA, 120 bp, synthetic construct; identical to SEQ ID NO: 12617
  source 1..120: mol_type = other DNA

SEQ ID NO: 44646 - DNA, 120 bp, synthetic construct
  source 1..120: mol_type = other DNA
ctcccttgcagaaaataaaaaagcaacaaataaaacaaagaaaaataaaactacccctcaaatgacaatgtacagttttaaagatttttttgaagggagggtctgcacctgttctaaact

SEQ ID NO: 44647 - DNA, 120 bp, synthetic construct
  source 1..120: mol_type = other DNA
aaaacaaatgtgtatgccttaacacagcccctggcccatatcaagcactcaggaacttagttattattttgttcctagtatagtatttgctccacttgctattatggagaaccaaaatag

SEQ ID NO: 44648 - DNA, 120 bp, synthetic construct
  source 1..120: mol_type = other DNA
aacgtttcatatttgacaaggtcatgctgactcggaagaaaactggtctaggtccagaaaatgcacttacgttccaatggaacctgttcttaatgttaagacttcccattatcctgaagc

SEQ ID NO: 44649 - DNA, 120 bp, synthetic construct
  source 1..120: mol_type = other DNA
atttggcttaacagactccttcatttccagagtcttgtagcccagcacattttaaaataattgcctctctaaaagctttgaactgggtccacagttaagtccacattatcatcagttttc

SEQ ID NO: 44650 - DNA, 120 bp, synthetic construct; identical to SEQ ID NO: 12618
  source 1..120: mol_type = other DNA

SEQ ID NO: 44651 - DNA, 120 bp, synthetic construct
  source 1..120: mol_type = other DNA
cactgcaacctccgcctccctaggttcaagtgattctcctgcctcagcctcccgcatagctgggattataggcgcgtgccaccatgcccggctaatttttgtatttttagtagagatggg

SEQ ID NO: 44652 - DNA, 120 bp, synthetic construct
  source 1..120: mol_type = other DNA
ttgcagaaatatgtagagctttatagtcctaacaggtgaaacatgcagaaattcacagtaaccttgcacttcatttatagaaatgaatgaaaccctctgttaaggtaacatgttttctcc

SEQ ID NO: 44653 - DNA, 120 bp, synthetic construct; identical to SEQ ID NO: 12619
  source 1..120: mol_type = other DNA

SEQ ID NO: 44654 - DNA, 120 bp, synthetic construct
  source 1..120: mol_type = other DNA
gagctgaaagacctttcaaacagagacatttaattatagattgagaaaaatagccttcaaaacagtgttggtcactagctgtggtatttttcactttggccattgtttacaaagcaagat

SEQ ID NO: 44655 - DNA, 120 bp, synthetic construct
  source 1..120: mol_type = other DNA
atttagtttaggatatgattgaaaatttaaaaataatttacagtcataacaaaaacgaaatgcattttattaggaatgtaatttatagaaaatagccctcataaaatgaagaaagggccg

SEQ ID NO: 44656 - DNA, 120 bp, synthetic construct
  source 1..120: mol_type = other DNA
tacaaaattagctgggtgtggtggcgcatgcctataatccccactactcgggaggctgaggcaggagaatcgcttgaacccgggaggcagaggttgcagtgagctcagattgtgccacag

SEQ ID NO: 44657 - DNA, 120 bp, synthetic construct; identical to SEQ ID NO: 12620
  source 1..120: mol_type = other DNA

SEQ ID NO: 44658 - DNA, 120 bp, synthetic construct
  source 1..120: mol_type = other DNA
taaaagtgaagatggtgatacaccagatatgaaatgtgacgatatgctaacagtaagttcataacctttgatctcacataaacaaaaatgtctcctgcttctgcagtctaagtaattgtg

SEQ ID NO: 44659 - DNA, 120 bp, synthetic construct
  source 1..120: mol_type = other DNA
ttccatatgtgctgcacagcctaataattagaattgctgagtaatgtacttagaactcgaaggagtaatgtcatcacttaagcctgttgttcacatatcccaggacaacgggtaaaacta

SEQ ID NO: 44660 - DNA, 120 bp, synthetic construct
  source 1..120: mol_type = other DNA
tatcttggcttaaatgtcttttttggtcttggttttcaaaaatcaacagctgttaaagctttcatattgctttatatcgctgttctacaacctgtctctctaatattggcagctgagagg

SEQ ID NO: 44661 - DNA, 120 bp, synthetic construct
  source 1..120: mol_type = other DNA
gggatgtaggtatagaggctgatataatgatacataaattactctagaaaaaatagcccaaaagattgatgagaatgaccagtattacaaagactaacaattaagataattttatactaa

SEQ ID NO: 44662 - DNA, 120 bp, synthetic construct; identical to SEQ ID NO: 12621
  source 1..120: mol_type = other DNA

SEQ ID NO: 44663 - DNA, 120 bp, synthetic construct
  source 1..120: mol_type = other DNA
ataaagtcgtaaaggcaaatggtaaactgggaaagatatatttaacaccataacaaagggccattttccttaatctaccaagtccttatcacatcaataagaaataagccaatagaagaa

SEQ ID NO: 44664 - DNA, 120 bp, synthetic construct
  source 1..120: mol_type = other DNA
actttttacctatcaggtttgcaaagtattcacgtttgttaaaacccacagttggtgaattgatgggaaaaatcagcattttcatgactctggttgggaggttgaattgacaacaatttt

SEQ ID NO: 44665 - DNA, 120 bp, synthetic construct
  source 1..120: mol_type = other DNA
attagctgccctcacaagctaggaataatctaaatgatcattagtagtgtcctgattaagtcagttacgataaatccataacaagtatgcatctgtttgaaaatgagagaaattcatgta

SEQ ID NO: 44666 - DNA, 120 bp, synthetic construct; identical to SEQ ID NO: 12622
  source 1..120: mol_type = other DNA

SEQ ID NO: 44667 - DNA, 120 bp, synthetic construct
  source 1..120: mol_type = other DNA
taaaagcctaagacagttttttccccaccatgttatagaagataatctgccttcagttattcccacaattagtataactacatgcagtgactgttccctggcagggaggagagaacagaa

SEQ ID NO: 44668 - DNA, 120 bp, synthetic construct
  source 1..120: mol_type = other DNA
catacaggtggctgacctgagggaattaaaggacagaggttgagggaagctctgctgaaactcgatgttacattttgatccactgcctgttcttgagccatttatttatagcccaaatct

SEQ ID NO: 44669 - DNA, 120 bp, synthetic construct
  source 1..120: mol_type = other DNA
cttcagacaagattgtcattctttagcttttcaatattaagcattttgttctcttcccaactttctttttaataaaaaaaatcttaagaataaataactctcaaatgaattgcaggttag

SEQ ID NO: 44670 - DNA, 120 bp, synthetic construct; identical to SEQ ID NO: 12623
  source 1..120: mol_type = other DNA

SEQ ID NO: 44671 - DNA, 120 bp, synthetic construct
  source 1..120: mol_type = other DNA
aagaaaatgccatcccagttacaaatccacagtcttgtagattttttttatttgtcaagtgcttatatagcacttggctataaatgctattgtcccaggcattgtctcaagagctttaca

SEQ ID NO: 44672 - DNA, 120 bp, synthetic construct
  source 1..120: mol_type = other DNA
tgagctaccaagagtttgagtaacttgtcataagtcacacagttaggaagaggtgacactcttcaaccagtactctaagttacactacctcacagatagtaacttcattcatgcttctgt

SEQ ID NO: 44673 - DNA, 120 bp, synthetic construct; identical to SEQ ID NO: 12624
  source 1..120: mol_type = other DNA

SEQ ID NO: 44674 - DNA, 120 bp, synthetic construct
  source 1..120: mol_type = other DNA
tgctttaggtggctggctactagacagggaaatagaaataacttattaatgtcacatgataccacagggtggaagatattgatacggacatagatcaagtgccttaatacttgagatcca

SEQ ID NO: 44675 - DNA, 120 bp, synthetic construct
  source 1..120: mol_type = other DNA
ctgcctttctatcaccccctgatttggcccacctgcccacttcttaaaaccatctcctatccttccttttgctgcttttctcgcaccacaaagcagagaaaaatgtataagttttttttt

SEQ ID NO: 44676 - DNA, 120 bp, synthetic construct
  source 1..120: mol_type = other DNA
agagtcactaacatgcaacactttaccccctcctcccacgcctattcattcattccaggcctagggctgaagatgtgttaaggatccttcatctcctcttccatgcgctgcctttaatat

SEQ ID NO: 44677 - DNA, 120 bp, synthetic construct
  source 1..120: mol_type = other DNA
agggaggtgcagaaggtagcagtagcaggtacattgcctgcagtgacttccaggaaattcagttctattctaggacaaacacccgacaaaatttataaatctcaatatctaccagcctca

SEQ ID NO: 44678 - DNA, 120 bp, synthetic construct; identical to SEQ ID NO: 12625
  source 1..120: mol_type = other DNA

SEQ ID NO: 44679 - DNA, 120 bp, synthetic construct
  source 1..120: mol_type = other DNA
atgcatttccattacttttgttaattttgcttaggaagacaactgccttcacctggttgattttgcctaatttcatgggggcatgaatacagaagacagagaaacttggttccggtgagg

SEQ ID NO: 44680 - DNA, 120 bp, synthetic construct
  source 1..120: mol_type = other DNA
atatctctacacataacaataaacttactatcttgtctttgactgggttgagtatatgtcttagatgtttcttccctgcaagagaaaactcagttccaagacacaagccactttttcatc

SEQ ID NO: 44681 - DNA, 120 bp, synthetic construct
  source 1..120: mol_type = other DNA
gccacattacctagattgacattccaattgtagcgtccaaacacttacttttaatttgcttcttaccagtacttgtgcaggggcttctttaaaaagccaacaaaatttaaaatataactg

SEQ ID NO: 44682 - DNA, 120 bp, synthetic construct; identical to SEQ ID NO: 12626
  source 1..120: mol_type = other DNA

SEQ ID NO: 44683 - DNA, 120 bp, synthetic construct
  source 1..120: mol_type = other DNA
tcacagggggatttttttttttttccagattaggatgttttgagcctgagaatctaattaaaccagcagtatcctgatagaatttgaacctcctctacaagaatgtaggaggagaaagag

SEQ ID NO: 44684 - DNA, 120 bp, synthetic construct
  source 1..120: mol_type = other DNA
aggggaaggtgtcaagacttatgcactttgggaaaaatagctttccaggtgattaagatgaaaagtacactcctagggaaataaacttgcttaggtaattgttctaaattacctcactta

SEQ ID NO: 44685 - DNA, 120 bp, synthetic construct; identical to SEQ ID NO: 12627
  source 1..120: mol_type = other DNA

SEQ ID NO: 44686 - DNA, 120 bp, synthetic construct
  source 1..120: mol_type = other DNA
taggctgattctatgaaaagaaaggtggataaaaggattttcagttgcagcaggataatttggtagctgaaagcctgacagccatgtattggaagttattcaccacatacctcctattcc

SEQ ID NO: 44687 - DNA, 120 bp, synthetic construct
  source 1..120: mol_type = other DNA
taatttattaagcctaaataatcagatgcacaagactgtcttttcagcatgactgttaagtccactaccgatctctgctggaatcccttcatcacaatgcataaagctgatgtaaaatga

SEQ ID NO: 44688 - DNA, 120 bp, synthetic construct
  source 1..120: mol_type = other DNA
ttacatgtctagaaactacaagtgaatcattcttttggggacagactcacattaaccagtattacataagcctgatgtacgagtcagaataccaacatgctactcattaaaagttaatgc

SEQ ID NO: 44689 - DNA, 120 bp, synthetic construct
  source 1..120: mol_type = other DNA
ggaactgatggatgatcagttcatccatcagttgctgggcaatcttagccactagtgctgtcacacgcagttcctcaaagaagcagggatggagagctaggacattccaagacctggact

SEQ ID NO: 44690 - DNA, 120 bp, synthetic construct; identical to SEQ ID NO: 12628
  source 1..120: mol_type = other DNA

SEQ ID NO: 44691 - DNA, 120 bp, synthetic construct
  source 1..120: mol_type = other DNA
tcacctgaggtcaggagttgttcgagaccagcctggccaacatggtgaaactccatctctaccaaaaatacaaaaattagctgggcatggtggcggacacctgtaatctcagctacttgg

SEQ ID NO: 44692 - DNA, 120 bp, synthetic construct
  source 1..120: mol_type = other DNA
aaaggaaaaaagcaatccagttcttaataaaagtaagaaatgtgtggtaaaacaaattcaaacagtatgcctgagtatatggtgaaaatagtttccccttctcacagattcactgttagc

SEQ ID NO: 44693 - DNA, 120 bp, synthetic construct
  source 1..120: mol_type = other DNA
tcaggatatttttttaagtgatggatggtctgtaagattttacttccagagattgactcagtaggtagtaccaggaacccagaatgttgccacgtccaggagactctgatatgaggttag

SEQ ID NO: 44694 - DNA, 120 bp, synthetic construct; identical to SEQ ID NO: 12629
  source 1..120: mol_type = other DNA

SEQ ID NO: 44695 - DNA, 120 bp, synthetic construct
  source 1..120: mol_type = other DNA
cacattgtgctttttaaagtgtcctgagaatgtgagatctgtgggttgaggcagtgaaggctcctcattcatcccacaaatgatttgaggacttaccatgtgctggacgttattttaggc

SEQ ID NO: 44696 - DNA, 120 bp, synthetic construct
  source 1..120: mol_type = other DNA
tccaggctggaaatagaaatgagtataattggcacagagatgatacttaaagccatgaaactgggaaaggtcccccaagggagtgtcctaaaagtaaaaagctcaaagaacccagtcctg

SEQ ID NO: 44697 - DNA, 120 bp, synthetic construct
  source 1..120: mol_type = other DNA
cccatcattctggtcagcagcaactaactaggttttgaattgatgggtgacacatccattaagtcagggtatctggaacagtctaagaaaatctcagaggaaggattattaatttaggcc

SEQ ID NO: 44698 - DNA, 120 bp, synthetic construct; identical to SEQ ID NO: 12630
  source 1..120: mol_type = other DNA

SEQ ID NO: 44699 - DNA, 120 bp, synthetic construct
  source 1..120: mol_type = other DNA
tggtatctggagatatctgttattgtcactatgaggtagggtgctattggtatctaaggggtagagatcaagggatctttttaaaatagcatacagtgcacaggatagcccctgcccaag

SEQ ID NO: 44700 - DNA, 120 bp, synthetic construct
  source 1..120: mol_type = other DNA
gacgttttagggtttaaacaataagatgctatttcctccccaggtctcctctcttttgtattctagatattaaagtagaaaataatttcagcatcatatttcatatatactatgtgaggg

SEQ ID NO: 44701 - DNA, 120 bp, synthetic construct
  source 1..120: mol_type = other DNA
atgtgttcgtaatatgattacctcattagcacagatggttcagagccaagatactagatacaagatgctagaaaattttccattttctccaaagtgagagagaaagtgctaggcggagta

SEQ ID NO: 44702 - DNA, 120 bp, synthetic construct; identical to SEQ ID NO: 12631
  source 1..120: mol_type = other DNA

SEQ ID NO: 44703 - DNA, 120 bp, synthetic construct
  source 1..120: mol_type = other DNA
taatacaaggtaagtatcctcctcactgaagctgatgaacatctagaatttgagccacatgttgctgaagttaatattcaaggtagggtaatgacgtcaagtgtttcctggcaaagccaa

SEQ ID NO: 44704 - DNA, 120 bp, synthetic construct
  source 1..120: mol_type = other DNA
gggaagatacagtgttattttgtcttctttcaaataacataatggaaaaggcactttccttggtttgattctcacctctgggtttcagactcatgaaccccagctttacaatcttgggtg

SEQ ID NO: 44705 - DNA, 120 bp, synthetic construct; identical to SEQ ID NO: 12632
  source 1..120: mol_type = other DNA

SEQ ID NO: 44706 - DNA, 120 bp, synthetic construct
  source 1..120: mol_type = other DNA
gacccactagctcttccttttacttccgggcaacttggagtgtggtgtttttctctctcagaaaagtcatgttatcttttccgcttaacacatgtatcctggcttgaattaaatgtctgt

SEQ ID NO: 44707 - DNA, 120 bp, synthetic construct
  source 1..120: mol_type = other DNA
taacgtgttttctaagagggcaaagttataacttcgaagaaagtgtgaagccagcaggtctcaggagggaaaaggagcttaaaacagctcaacacagtgtttctgattgtcacagtcaat

SEQ ID NO: 44708 - DNA, 120 bp, synthetic construct
  source 1..120: mol_type = other DNA
caggagtttgagaccagcctggtcaacaagacgaaaccctgtctgtacaaacagaaattatcagggtgtggtggtgtgcgcctgtaatcccagctacttgggacgctgaggcaggaggat

SEQ ID NO: 44709 - DNA, 120 bp, synthetic construct
  source 1..120: mol_type = other DNA
catggtggctcacgcctgtaatcccagcactttgggaggccgaggcaggcggatcacaaggccaggagatcgagaccatcctggctaacacggtgaaaccctgtctctcctaaaaataca

SEQ ID NO: 44710 - DNA, 120 bp, synthetic construct; identical to SEQ ID NO: 12633
  source 1..120: mol_type = other DNA

SEQ ID NO: 44711 - DNA, 120 bp, synthetic construct
  source 1..120: mol_type = other DNA
cattttaaaacactcttttcagtgagtgtatgtcccagtaactgcacatacttctgtccccaaagacagaacaccgcctcctttctcctaggagtatcggatatgtagtcacgtttacca

SEQ ID NO: 44712 - DNA, 120 bp, synthetic construct
  source 1..120: mol_type = other DNA
taattattgatgcttttggagaactaagagaccaacaggaacaagtcaaagaagacatggaggtaagcttctccattcatgactcagcttctttgttgtcctgggccctcgttttcctca

SEQ ID NO: 44713 - DNA, 120 bp, synthetic construct; identical to SEQ ID NO: 12634
  source 1..120: mol_type = other DNA

SEQ ID NO: 44714 - DNA, 120 bp, synthetic construct
  source 1..120: mol_type = other DNA
tggtagggtctctagggctggtatctgattcactcctggatggtcagggaatttcctagaagaagggatgtctgagctgaggcctgaagactgtggaagtctgtgggtttgataaggaga

SEQ ID NO: 44715 - DNA, 120 bp, synthetic construct
  source 1..120: mol_type = other DNA
tttgagcccatcaccacctgaaattatataccaagactgattttagggaagttgatgtgcaggtttttttcttagcagcctcagtgctaccagatgcagattaaattctgatgatgaggc

SEQ ID NO: 44716 - DNA, 120 bp, synthetic construct
  source 1..120: mol_type = other DNA
gcattttaaaaagataactatggtttaaaatgtgaggcatgaagtagaaactggcaagaacagggacagggaagtgggctgtcagcattttccaggtgggagattctgaagcttttgcta

SEQ ID NO: 44717 - DNA, 120 bp, synthetic construct
  source 1..120: mol_type = other DNA
ttcaggcattagccaccagatggatggtggcatagttagctgacctagggaacccagaggaagaacaggttcatcggtaaagctgatgagtgtgatttgagccacttcaatttaagagac

SEQ ID NO: 44718 - DNA, 120 bp, synthetic construct; identical to SEQ ID NO: 12635
  source 1..120: mol_type = other DNA

SEQ ID NO: 44719 - DNA, 120 bp, synthetic construct
  source 1..120: mol_type = other DNA
aatctggtccctagtgccgaaagttgttctccattcacatccactggctaattctgtacctagcacagcacctggaagacccttgctaaactgtagatgggatgtctcatagcttggtat

SEQ ID NO: 44720 - DNA, 120 bp, synthetic construct
  source 1..120: mol_type = other DNA
taactttagtcaatgtcatgaacaagagttgatcactaagcctggacattttcacctaggctagagaaaggaagagacgttgcttttcagccatcatcatcatcatcttgttccctgtct

SEQ ID NO: 44721 - DNA, 120 bp, synthetic construct
  source 1..120: mol_type = other DNA
cgtgtattgagtgaaccaaataatagctgcccctacatggcgagttgtgttttccttttgttttgctttctgaactctgacgttaatatttccctttgttttctagaccaaatgcttcat

SEQ ID NO: 44722 - DNA, 120 bp, synthetic construct; identical to SEQ ID NO: 12636
  source 1..120: mol_type = other DNA

SEQ ID NO: 44723 - DNA, 120 bp, synthetic construct
  source 1..120: mol_type = other DNA
tgtttctcattttagataggaattcttaggctgcttcctagggagatgcgagtctccgtttttcttcttacagatcttaagaggactttcagatctcgtcaggcactgttggataccaac

SEQ ID NO: 44724 - DNA, 120 bp, synthetic construct
  source 1..120: mol_type = other DNA
aaacagaagagatgccgagtagcattatagggaaaaaaaattggcttaactatactcagtggaacttgatcagtaaattacaacttctcattaagctagtcttcagttctaattcatcag

SEQ ID NO: 44725 - DNA, 120 bp, synthetic construct; identical to SEQ ID NO: 12637
  source 1..120: mol_type = other DNA

SEQ ID NO: 44726 - DNA, 120 bp, synthetic construct
  source 1..120: mol_type = other DNA
agaacaaaatgtgtgcattaaacagtgaggcacggaattactttcagatattagttgtggtatcttgatgtaaagttcctgttatgttgaatgagtatggaaaagattgcctttgttaaa

SEQ ID NO: 44727 - DNA, 120 bp, synthetic construct
  source 1..120: mol_type = other DNA
tgtttaatcagatagatgatttccaatgaacttcaaagtattatgtacaatgcatgttaaatgcctaaggtgtttaagctatttgaaattcctcttccactgtgcagattgttagtagtt

SEQ ID NO: 44728 - DNA, 120 bp, synthetic construct
  source 1..120: mol_type = other DNA
tcaggacctactacagccttgacttcctgggctcaataaatcctcctgtttcagccccacaagtacctgaaactacaggcatgcaccaccacacctggcttttttttgtgtttttttttt

SEQ ID NO: 44729 - DNA, 120 bp, synthetic construct
  source 1..120: mol_type = other DNA
gcccagccaacatatttttatcattataatggtcaggatgaagattattatgagacgttaaggtctggtatagttagttaggaaccatctaaattaatgtggacttctctattccgtgcg

SEQ ID NO: 44730 - DNA, 120 bp, synthetic construct; identical to SEQ ID NO: 12638
  source 1..120: mol_type = other DNA

SEQ ID NO: 44731 - DNA, 120 bp, synthetic construct
  source 1..120: mol_type = other DNA
tgtttcggaagagctgtttcctccccccaccttttgtatttactttgagactaaagactgaagaataatctaaattcatactcagacaaaaaaaggaattctggaaagaaaaccattctg

SEQ ID NO: 44732 - DNA, 120 bp, synthetic construct
  source 1..120: mol_type = other DNA
cctggaaggaaactgtctgtctaatggtcacagagcactgtagcacttaacagattgccatggacaccagttgcgaagggaaatagtgccttactatatgtgggttgagctatgcagaag

SEQ ID NO: 44733 - DNA, 120 bp, synthetic construct; identical to SEQ ID NO: 12639
  source 1..120: mol_type = other DNA

SEQ ID NO: 44734 - DNA, 120 bp, synthetic construct
  source 1..120: mol_type = other DNA
atacactttcaaaagaaaccattcattgcatgtttattatgcaagtttaaatgaacaaagaaaaccttcagaaacaagttgatcaacgtgagagaaatttcatgataattattcatagta

SEQ ID NO: 44735 - DNA, 120 bp, synthetic construct
  source 1..120: mol_type = other DNA
gttttgggttttgctcattctttcagccacctgtgatcagttttgttgattaaggacttcttgtcaggccattttttaatatcaaagctgaagcaatatccattcagggatttcatcagt

SEQ ID NO: 44736 - DNA, 120 bp, synthetic construct
  source 1..120: mol_type = other DNA
acaattaaaaagtcagattcagaatggaaacaaggtcattttgcaaacattggagctcttttattacaagtctgcttgttaattttagaactgtaaaaccgctctgattaaactatttaa

SEQ ID NO: 44737 - DNA, 120 bp, synthetic construct
  source 1..120: mol_type = other DNA
ccaggtcatgtaagccatttattggtttgttttaaaaatatgtattttatttatacatgaagtttggtgagaagtgctcgattagttcagacaacatctggcacttgatgtctgtccttc

SEQ ID NO: 44738 - DNA, 120 bp, synthetic construct
  source 1..120: mol_type = other DNA
ctcccacccccaaccacaccgtctgcagccagccccaggcacctgtctcaaagctcccgggctgtccacacacacaaaaaccacagtctccttccggccagctgggctggcagcccgacc

SEQ ID NO: 44739 - DNA, 120 bp, synthetic construct; identical to SEQ ID NO: 5272
  source 1..120: mol_type = other DNA

SEQ ID NO: 44740 - DNA, 120 bp, synthetic construct
  source 1..120: mol_type = other DNA
cccttcagcactgccacaaatgtccagccctccgacagctcggcgaggtaggttaggagcagccagcccagagccggcaggtgagactgaggtggcctgggaggcatgcgcccggtggag

SEQ ID NO: 44741 - DNA, 120 bp, synthetic construct
  source 1..120: mol_type = other DNA
ggattgtcagcagctgaagaggtcctgggggtgattggactagtaaaatatttttccctgaaaaagccttttcacaagacctatgggaccacctggatcttgccccaaagaggtcctctg

SEQ ID NO: 44742 - DNA, 120 bp, synthetic construct
  source 1..120: mol_type = other DNA
ccctttccctgcacagggcgcagggccaagctccgctccccactcccatgtctctgtgtctggagaggagctggagaccacacagaaaactcctccgcgtatggtccagagagccctggg

SEQ ID NO: 44743 - DNA, 120 bp, synthetic construct; identical to SEQ ID NO: 12641
  source 1..120: mol_type = other DNA

SEQ ID NO: 44744 - DNA, 120 bp, synthetic construct
  source 1..120: mol_type = other DNA
ggccagagtgagccccgtggacaagaaccccatccttggggggccggcagggaaaggcctgtctcccttaggctgggagcctgggtcccacggcctgtgtctggcctccgtgtgtgagga

SEQ ID NO: 44745 - DNA, 120 bp, synthetic construct
  source 1..120: mol_type = other DNA
cttctgctttgagaacagacttccggctgctccatagacactcttgttcagggttaagaagagacagcgtgaattgctgcccatgtccatggaaaaatccttagttctttgctcaagtaa

SEQ ID NO: 44746 - DNA, 120 bp, synthetic construct
  source 1..120: mol_type = other DNA
ccagaccaggtcacaggtctatctgaggcctccaagcacaggccaactgctccggctgtccacgcggcgccacagaactctgcctggttgatccgcggggctgaggcccatttcttactc

SEQ ID NO: 44747 - DNA, 120 bp, synthetic construct; identical to SEQ ID NO: 12642
  source 1..120: mol_type = other DNA

SEQ ID NO: 44748 - DNA, 120 bp, synthetic construct
  source 1..120: mol_type = other DNA
gcctgctgacggaagaggaaggaggcatgcttcaaagagcgttgcagcaggtgcctgcggaaggctctctggataaccatggccgacacctcttcgtgcttgcgccggagtgtggtggtg

SEQ ID NO: 44749 - DNA, 120 bp, synthetic construct
  source 1..120: mol_type = other DNA
agactcccccaggacccttttggtgaaggcaaagagaatgtccatgcaatggatgcggtccccactcaccatgggcaggtccatgttgatgaggcttatctggttgggcttggcgatacg

SEQ ID NO: 44750 - DNA, 120 bp, synthetic construct
  source 1..120: mol_type = other DNA
gggctcggtgctctcctccgtggccacgctgaagttctccaggatgatggcaatgtacatgttgaccacgatgaggaaggagatgatgatgtaggtggtgaagaagaggatgcccacggc

SEQ ID NO: 44751 - DNA, 120 bp, synthetic construct
  source 1..120: mol_type = other DNA
gaagaggcacagcatgctgttggcgaaggtctggaagttgaacatgtcgtcgatgccagcctcccacttgacataagcgaagttggccatgccaaagatggagtagatgaacatgacgag

SEQ ID NO: 44752 - DNA, 120 bp, synthetic construct; identical to SEQ ID NO: 12643
  source 1..120: mol_type = other DNA

SEQ ID NO: 44753 - DNA, 120 bp, synthetic construct
  source 1..120: mol_type = other DNA
gagtctccatgtctgcatctgtgacccagaaaaatgggtcctttgcagggttccttctcagccccctcattccttaatcttcagtgtgtacctacacaatagagctgtcctaggcccatc

SEQ ID NO: 44754 - DNA, 120 bp, synthetic construct
  source 1..120: mol_type = other DNA
ccttgggatctcctaggtgcttatcagaaatgcagaatctcagctccaccccagcccattgcatcttaagaagcccagatgatttatgtgcccatcgaagggcatgaaacactggcccag

SEQ ID NO: 44755 - DNA, 120 bp, synthetic construct
  source 1..120: mol_type = other DNA
tgactacctgggtttggagttttaaggggcatggatataaatcatggaataaagagtgaaataaacttgtcttatatggcccaagtgccctttccagactccttatataataatgtcact

SEQ ID NO: 44756 - DNA, 120 bp, synthetic construct; identical to SEQ ID NO: 12644
  source 1..120: mol_type = other DNA

SEQ ID NO: 44757 - DNA, 120 bp, synthetic construct
  source 1..120: mol_type = other DNA
atgctgaaccttccaaagcctctgagactgtccctcaatggttccattcctgctgctgacatcctgcattctctaaaactcctctccagtcccataaggcacgctctcaccctcatcctg

SEQ ID NO: 44758 - DNA, 120 bp, synthetic construct
  source 1..120: mol_type = other DNA
gtatatggcagaaagatgaaagtcacagtcaccgcaaggcagagccccttgggggtagagttaaagagtttgggctccgagcacaagtgacaaaagaaaaaatataagtaaactggactt

SEQ ID NO: 44759 - DNA, 120 bp, synthetic construct
  source 1..120: mol_type = other DNA
aaagaactcttacaactcaacaagaaaaagagaaataacccaattaaaaatgagctaaggatctgaatagagatttctccaaggaagatatataaatgaccaacatgcacatggaaagat

SEQ ID NO: 44760 - DNA, 120 bp, synthetic construct; identical to SEQ ID NO: 12645
  source 1..120: mol_type = other DNA

SEQ ID NO: 44761 - DNA, 120 bp, synthetic construct
  source 1..120: mol_type = other DNA
tccctcaaaactttagataagtggttttcaggggtgagggagaggggaaatgaatggggattgactattaaatgggtagagtttcctttggggaaaggaatatattctaaaattagatag

SEQ ID NO: 44762 - DNA, 120 bp, synthetic construct
  source 1..120: mol_type = other DNA
tataaaaaaaagatctgggctccgaggtcaaacagacatgggtcaggattgggtctctgcttctccctagctgcacaatctccctcctttggtgctgaattgactgggtgaattgcatga

SEQ ID NO: 44763 - DNA, 120 bp, synthetic construct
  source 1..120: mol_type = other DNA
catcctgagcttccttctccttcaacctaagtgcaggcagaattagcctccacagcacccactcccattcccagactcatccttgaagctctctaagcagttagagaactgtgttcccag

SEQ ID NO: 44764 - DNA, 120 bp, synthetic construct
  source 1..120: mol_type = other DNA
aggggagaaggggggtgagaaatgcactgaaaaaaattatgaaagaagctagggttgtacatggcattcagcagagacccaggggctggaggagaggcctggctggggagggcttctccg

SEQ ID NO: 44765 - DNA, 120 bp, synthetic construct; identical to SEQ ID NO: 12646
  source 1..120: mol_type = other DNA

SEQ ID NO: 44766 - DNA, 120 bp, synthetic construct
  source 1..120: mol_type = other DNA
gcctctcatcccagaccacccaccctcccactctaccctctagtgagcccaaagcccctgcaacactgccacagagagtgcagaggaaaaagtcctggaggctaaagccactggctgtcc

SEQ ID NO: 44767 - DNA, 120 bp, synthetic construct
  source 1..120: mol_type = other DNA
attgtgcttcccttttagttcccacagtctgaaggctcaagggcaaatttaaacttcaaccttagtaattatgtcagtgcttagattaatatattttctccacttttttatggaatttat

SEQ ID NO: 44768 - DNA, 120 bp, synthetic construct; identical to SEQ ID NO: 12647
  source 1..120: mol_type = other DNA

SEQ ID NO: 44769 - DNA, 120 bp, synthetic construct
  source 1..120: mol_type = other DNA
gtggggtggggtggggctgtgaaggctgcactgcttttcctggggaaagcctgcatccttgaggggaaggaggagatttgctcaggtacagagggttcctgtgggtggggagtgtcctgg

SEQ ID NO: 44770 - DNA, 120 bp, synthetic construct
  source 1..120: mol_type = other DNA
gctggccatgtggcacgaaagcttcccagggaccccagaagatcctccccactcccacaaaaccaggagcctggctcaccaggggccgtgggatgggcttctggggcttcttggagccca

SEQ ID NO: 44771 - DNA, 120 bp, synthetic construct
  source 1..120: mol_type = other DNA
ggcaccaggatcttgccttcttgatgaggatgccaggattgaccacctcctggctttctctcctggacaaaatatgtccctattctgcaccacagattcttccccaaatctatttatcca

SEQ ID NO: 44772 - DNA, 120 bp, synthetic construct; identical to SEQ ID NO: 12648
  source 1..120: mol_type = other DNA

SEQ ID NO: 44773 - DNA, 120 bp, synthetic construct
  source 1..120: mol_type = other DNA
tacaggcctaggcatgttacatccctggacacacccttctccccacctcattccagcaggagcaagaagaggaccatccccaacagggaaggtgagatgggacctggagcctgagtggcc

SEQ ID NO: 44774 - DNA, 120 bp, synthetic construct
  source 1..120: mol_type = other DNA
tgaagaaagacccaaagatgatgaaaatgacaaaatagatgtacatgtagaggttgtattcccactgaggctgctcttcatactgcaagggagaaatcacacagggagatcagacaggct

SEQ ID NO: 44775 - DNA, 120 bp, synthetic construct
  source 1..120: mol_type = other DNA
ctgtgggccagaggtgggtagggatagaggtgagaggagtggatggtggcaggtgaggacagcagacatgctgagctcagggctggcagagtatcagtgcctggctccggccctgggcca

SEQ ID NO: 44776 - DNA, 120 bp, synthetic construct
  source 1..120: mol_type = other DNA
cctggggtaaaagtcagtaaactacagtgagtttaatttgaaagacatttgagaattctgggacttcttaggagaccaagcaaccttgccccagagccaggcttgggcattccagagagg

SEQ ID NO: 44777 - DNA, 120 bp, synthetic construct
  source 1..120: mol_type = other DNA
ctgtggcaacctacccccctggagtccacagctgcatacataatgtccatccagcctttaaatgttgcctgggaggaaaagacaagattaagacaatcatttaattctgtacctcgcttg

SEQ ID NO: 44778 - DNA, 120 bp, synthetic construct; identical to SEQ ID NO: 12649
  source 1..120: mol_type = other DNA

SEQ ID NO: 44779 - DNA, 120 bp, synthetic construct
  source 1..120: mol_type = other DNA
atgccccaagaaggccatgcagcagggaataagcttcttgattgaggccgagagtctgagggggcttgcaggaggtctgcccttcagatccaccctcatttccatttctaaaacatcaca

SEQ ID NO: 44780 - DNA, 120 bp, synthetic construct
  source 1..120: mol_type = other DNA
catggactttcaagggaagttcccgaagaatctcaaccttcccttgtacttaagggggttcttttgtcaatggtgtgttggtaaatggttaacagctgacgtcccagaagaaaagaaaaa

SEQ ID NO: 44781 - DNA, 120 bp, synthetic construct
  source 1..120: mol_type = other DNA
tcaatggagttgagaagagatggaaaagagcttagcattatggtactcccactgtacagacataatagaagtaaaaagcctcaagagcatagatgataatactaaaatgtaatgatgaat

SEQ ID NO: 44782 - DNA, 120 bp, synthetic construct; identical to SEQ ID NO: 12650
  source 1..120: mol_type = other DNA

SEQ ID NO: 44783 - DNA, 120 bp, synthetic construct
  source 1..120: mol_type = other DNA
tctctctctgttgcccaggctggaatgcaatggtgtgatctcagctcactgcaacctctgcctcccgagttcaagtgattctcctgcctcagcctcctgaatagctgggattacaggcgt

SEQ ID NO: 44784 - DNA, 120 bp, synthetic construct
  source 1..120: mol_type = other DNA
tgggattacaagtatgagctaccatgcctggcccccaagcttcctttctaagcacaagctcaggtacacaaacttcctgtgtcgaagaattcttatgaggcaggtagggcagaaggggaa

SEQ ID NO: 44785 - DNA, 120 bp, synthetic construct
  source 1..120: mol_type = other DNA
tttatgactgaattcttcccaaacaccgagtggctttgtctggaaaggtcagcagttcttagtctacaaaaggaggccttttcttccaaagttctgacattctgagggacaattgcagga

SEQ ID NO: 44786 - DNA, 120 bp, synthetic construct
  source 1..120: mol_type = other DNA
gtttccagtggatatagaaagtctgctgagttttcctctgctttggggaccagagacaggtgtctgggcttgagattggaacagcaagacaagcaagttgcagctctatgcattgtggtt

SEQ ID NO: 44787 - DNA, 120 bp, synthetic construct; identical to SEQ ID NO: 12651
  source 1..120: mol_type = other DNA

SEQ ID NO: 44788 - DNA, 120 bp, synthetic construct
  source 1..120: mol_type = other DNA
agtgcagtggtgagatctcagctcacagcaagctccacctcccgggttcacgccattctcctgcctcagcctcccgagtagctgggactacgggtgcccaccaccacgcccagctaattt

SEQ ID NO: 44789 - DNA, 120 bp, synthetic construct
  source 1..120: mol_type = other DNA
tgcgtctggctggaaatatgttcttttaaacaacacaagagctaacactatattttataacagagggtggccacagtcacaactttgctaatagttcagttcctgagtagtctatggtct

SEQ ID NO: 44790 - DNA, 120 bp, synthetic construct
  source 1..120: mol_type = other DNA
gaacatggtatcggttctagaactgaaagtctggggatttcccaaggagccaaatccctggagagtcctgagcctcctttgggcactgtgatcctcctatgaagatccagcatggcccca

SEQ ID NO: 44791 - DNA, 120 bp, synthetic construct; identical to SEQ ID NO: 12652
  source 1..120: mol_type = other DNA

SEQ ID NO: 44792 - DNA, 120 bp, synthetic construct
  source 1..120: mol_type = other DNA
attgaccaccacctcaagtggacagagaagtggctcagttcctgggggtgcccagagcacatgcccttttcaagaccccctgccaccccaagaaagaatgaactccctggctgcaggggg

SEQ ID NO: 44793 - DNA, 120 bp, synthetic construct
  source 1..120: mol_type = other DNA
ttcccttcttggccctgccctgaatctgtgttctttaaaatctgattttcaccaaggtgtgtgctgattgaggataccagcaacttgatgggaaaggacctctcaaaacatgtccccaag

SEQ ID NO: 44794 - DNA, 120 bp, synthetic construct; identical to SEQ ID NO: 12653
  source 1..120: mol_type = other DNA

SEQ ID NO: 44795 - DNA, 120 bp, synthetic construct
  source 1..120: mol_type = other DNA
ggaggtgaagctggtgtggactgtgtggtgtgggccagatgccaggttgggggatgctgttccccagcaggcacgctgaaccctggaacagggtggaaaacccagctcttaggacaccaa

SEQ ID NO: 44796 - DNA, 120 bp, synthetic construct
  source 1..120: mol_type = other DNA
caaatgtccttgctcccaaagagacatttaactctgaacattatcttgtggatggtttcccaccaggaataagctatgtgtgtctccatggattggcggtgtgggcaaggttcaaagcca

SEQ ID NO: 44797 - DNA, 120 bp, synthetic construct
  source 1..120: mol_type = other DNA
agtaaacacaaacacacacatgtgtatttgttttcttgctatatatcacggctgatgtttttcttggtgcgctttcaagtctgccttatctgctctcattctttggtaaaatgtggtgac

SEQ ID NO: 44798 - DNA, 120 bp, synthetic construct
  source 1..120: mol_type = other DNA
cctcaccctcccgaccacagcccctgtctgatgctgggaatgcagcttgctctatgcctcttccctcaccctcccgaccacagccccactggccatcacagacagagggctggcagcctg

SEQ ID NO: 44799 - DNA, 120 bp, synthetic construct; identical to SEQ ID NO: 12654
  source 1..120: mol_type = other DNA

SEQ ID NO: 44800 - DNA, 120 bp, synthetic construct
  source 1..120: mol_type = other DNA
aggggtcctgggtggcagtgggctgggcctgtgggaccgcctcccactccctggtgggaaggcagccacctctcttaccctcatgccctcaaatcgtgacagagctctcagaggacggag

SEQ ID NO: 44801 - DNA, 120 bp, synthetic construct
  source 1..120: mol_type = other DNA
ctccccactgttggggacagacagtaggccttctggtcccactaagacggtgctgggtgcgagagagccacaggcctcctgtgtccactctttattagtcctggggtggactgtcatcac

SEQ ID NO: 44802 - DNA, 120 bp, synthetic construct; identical to SEQ ID NO: 12655
  source 1..120: mol_type = other DNA

SEQ ID NO: 44803 - DNA, 120 bp, synthetic construct
  source 1..120: mol_type = other DNA
ctccttcgccaaagaagccttttttggggaagaagaggcagtcctgggttaagtaggagcaaatagacaatcgtggggcgtttccccaaggccagactgtgcagcatttcaacatcttca

SEQ ID NO: 44804 - DNA, 120 bp, synthetic construct
  source 1..120: mol_type = other DNA
cttcttacttcaccgctggcctgtgatcacaggccaaaaatggcctgctgcctgacctcccctgcagtcaccattagcaccacccgggtgctcaggccagcctggggttcggagaggctg

SEQ ID NO: 44805 - DNA, 120 bp, synthetic construct
  source 1..120: mol_type = other DNA
acccctcaaggatgctgggctattggcccccaatcctggagagtcggggggcatctctcagggacctctccttgagggcaggacctccagagtgccaggtccagctggtctgcctgccca

SEQ ID NO: 44806 - DNA, 120 bp, synthetic construct; identical to SEQ ID NO: 5287
  source 1..120: mol_type = other DNA

SEQ ID NO: 44807 - DNA, 120 bp, synthetic construct; identical to SEQ ID NO: 12656
  source 1..120: mol_type = other DNA

SEQ ID NO: 44808 - DNA, 120 bp, synthetic construct
  source 1..120: mol_type = other DNA
ctctgcttggaacgtctgccagacattggcctggctaaccccaacttcaaacccgctcaaatgtgaccaaagtgcgcctactctgatcatcctatttaaaagtggtaacctgcaccttcc

SEQ ID NO: 44809 - DNA, 120 bp, synthetic construct
  source 1..120: mol_type = other DNA
tggggaagagtttttattttgttccctaagatccccagcaccataacagtacttgcacacagtagagacccaactgcatttattgaaaaataatgcagaattcatcttggaaacatcctt

SEQ ID NO: 44810 - DNA, 120 bp, synthetic construct; identical to SEQ ID NO: 12657
  source 1..120: mol_type = other DNA

SEQ ID NO: 44811 - DNA, 120 bp, synthetic construct
  source 1..120: mol_type = other DNA
ctgccgattccctttcccttgccttggctctgagctccccaaggtggccagcggctggtgggtgggtttccccagaagtctgcgcagagtccctctggcttgccttgtgggagaccctca

SEQ ID NO: 44812 - DNA, 120 bp, synthetic construct
  source 1..120: mol_type = other DNA
catctcagggaggctctgagggctgggccaggcagtccagtgtgtctagagctctccttgccccccttccaccccagcaccccctcaccccagcattagcatcctcttggccacctgggg

SEQ ID NO: 44813 - DNA, 120 bp, synthetic construct
  source 1..120: mol_type = other DNA
ggtagcttcaacctggactctggccaggcttactgggggctgagcctctgagtggggtatggagactgcacaggcctgagcctgttctgtaaccacaggaaggatagctcctgctggtat

SEQ ID NO: 44814 - DNA, 120 bp, synthetic construct; identical to SEQ ID NO: 12658
  source 1..120: mol_type = other DNA

SEQ ID NO: 44815 - DNA, 120 bp, synthetic construct
  source 1..120: mol_type = other DNA
gccccaggccctccttggacatagcctgggcaggcagccctcacagctacctgatcatctagggcagcaacccagagcccctgagccagtgttcatggcttcctcctcctctggggtgac

SEQ ID NO: 44816 - DNA, 120 bp, synthetic construct
  source 1..120: mol_type = other DNA
actgtcctcctcgtgtgtgcatggaggctctgaaatgaccatctgtctagtgggcctgatggacacttacagtctgctgtggtgtgtgctagagcacaagcttgtctgctcacttccctt

SEQ ID NO: 44817 - DNA, 120 bp, synthetic construct
  source 1..120: mol_type = other DNA
tctagaggcaggaccctgtctcctatttcttctcttcctctgagcctgggaacctgaggacaaggcctgggtcactcagacttacgtcctccttcctctctgcctgccccacagcactgc

SEQ ID NO: 44818 - DNA, 120 bp, synthetic construct; identical to SEQ ID NO: 12659
  source 1..120: mol_type = other DNA

SEQ ID NO: 44819 - DNA, 120 bp, synthetic construct
  source 1..120: mol_type = other DNA
ctttccattttttctttttttttctttttgagacagtcttgctctgttgcccaggctggagtgcagtggtgcaatcttggctcactgcaacctccgcctcccgggttcaagtgattctcc

SEQ ID NO: 44820 - DNA, 120 bp, synthetic construct
  source 1..120: mol_type = other DNA
cttgtgatccgcccaccttggcctcctaaagtgttgggattacaggcatgagccactgtgcctggcctaggcaccgtttctgacaacacctcccttccggggagagcagaaacaggaact

SEQ ID NO: 44821 - DNA, 120 bp, synthetic construct
  source 1..120: mol_type = other DNA
tcaagtctgagttttgggctaggcctttctaaaacttgccattttaacaaggagagagggtatgcaggctcagctcacagctttctgctggaaacaacataaaatatttttgttttcact

SEQ ID NO: 44822 - DNA, 120 bp, synthetic construct; identical to SEQ ID NO: 12660
  source 1..120: mol_type = other DNA

SEQ ID NO: 44823 - DNA, 120 bp, synthetic construct
  source 1..120: mol_type = other DNA
tgagctaacagagaaactccagtggctcccagatggcttctacctccagcctactgatttgttcctgtttctctctctgtccagactgtgctatgaggctcctgtctaggcaactgaaca

SEQ ID NO: 44824 - DNA, 120 bp, synthetic construct
  source 1..120: mol_type = other DNA
atacatatggcccactgaggcactgtagatggcacaacaggataattcaggtcccaaaatggattttgggagttgttcaagataaaaaaaaagtaggtgtattgtatttttttctgaata

SEQ ID NO: 44825 - DNA, 120 bp, synthetic construct
  source 1..120: mol_type = other DNA
caccaaagtaaccactgctaacatttaggtgagtattatttttgacagtgtgtatgtgtgtgcacatacacacaatcaccacaattttatgagacacactaaatatttgccttgaaatta

SEQ ID NO: 44826 - DNA, 120 bp, synthetic construct
  source 1..120: mol_type = other DNA
tttatttagccaataaccttattaataatgcacatttcggttctttacagtttatccctagtggaaataaagttgcagtggacaggggattgttgaggataaattgggttgccagggcaa

SEQ ID NO: 44827 - DNA, 120 bp, synthetic construct; identical to SEQ ID NO: 12661
  source 1..120: mol_type = other DNA

SEQ ID NO: 44828 - DNA, 120 bp, synthetic construct
  source 1..120: mol_type = other DNA
tctggtttatttggggacattaactctttggtaacaccaacctggtttgtgacaccaacctgcctttaaatctcacttgcttttgtttaccataccgaagttccatgtacttcattttca

SEQ ID NO: 44829 - DNA, 120 bp, synthetic construct
  source 1..120: mol_type = other DNA
aacaatttttgtggtttcattgttttacattacaattttaaaaattaaatatagtttggtaaggagtaaatatccattttaatgctttttttcagaatgtagctcatcaaatgccccaac

SEQ ID NO: 44830 - DNA, 120 bp, synthetic construct
  source 1..120: mol_type = other DNA
tattcctgaattagtatcacatgaatttccctggacatttaaataattttcaagataaactttaccaatgtttcgtcatatttcctcagaaatgttgaaagcttgttatcgcattgaatc

SEQ ID NO: 44831 - DNA, 120 bp, synthetic construct; identical to SEQ ID NO: 12662
  source 1..120: mol_type = other DNA

SEQ ID NO: 44832 - DNA, 120 bp, synthetic construct
  source 1..120: mol_type = other DNA
ttcccaacttttatatcatgtgttcaattttcttaattaattacactggctagtaattcaagactattattaaataatgagcaatagctaaaaaggcaaatcatccttttcttattcttc

SEQ ID NO: 44833 - DNA, 120 bp, synthetic construct
  source 1..120: mol_type = other DNA
attcagtagtagaaaacgtattttatttctattcttaccagagttctgaaaatcaggcattcactgaaataattatatggttttttatctttgtcctattaatacaaatagttttcctaa

SEQ ID NO: 44834 - DNA, 120 bp, synthetic construct; identical to SEQ ID NO: 12663
  source 1..120: mol_type = other DNA

SEQ ID NO: 44835 - DNA, 120 bp, synthetic construct
  source 1..120: mol_type = other DNA
accaggcatggtggcgcatgcctgtaatcccagctactcaagaggctgaggcaggagaatccttgaacccgggaggcggaggttgcggtgagctgagatcatgccactgcagtccagcct

SEQ ID NO: 44836 - DNA, 120 bp, synthetic construct
  source 1..120: mol_type = other DNA
tggaattattttcttccttgagaatgtgaaagatctgtttttggggatgtgagaaattagattagctagtggttatcaatttggttgccttaaattttcaaggaatcagctttggaattt

SEQ ID NO: 44837 - DNA, 120 bp, synthetic construct
  source 1..120: mol_type = other DNA
attttgttatatttttaatttcttgaattaaataatttatgttctttctatttaataataaaagtatttaagtaatgaattttccttttattacagctttggctgtattccacatgcagt

SEQ ID NO: 44838 - DNA, 120 bp, synthetic construct; identical to SEQ ID NO: 12664
  source 1..120: mol_type = other DNA

SEQ ID NO: 44839 - DNA, 120 bp, synthetic construct
  source 1..120: mol_type = other DNA
tccgcctcccaggttcacgccattctcctgcctcagcctccggagtagctgggactacaggcgcccgccaccaagccccgctaattctttgtatttttagtagagacggggtttcaccgt

SEQ ID NO: 44840 - DNA, 120 bp, synthetic construct
  source 1..120: mol_type = other DNA
tccatttctagcactttccatatctgtaaaataggattaataataatacctatctcatagggttattgtgagaattaaatgaattaatgcttataaaatgcttaaaacagtatctggaat

SEQ ID NO: 44841 - DNA, 120 bp, synthetic construct
  source 1..120: mol_type = other DNA
caagaactaatagaaatatggcaaagtttcccagtactagtgcactgttgtcactttttcctgtttgtttttttctccagtggttttggttttatatattgaagtgctatgcaatcccaa

SEQ ID NO: 44842 - DNA, 120 bp, synthetic construct
  source 1..120: mol_type = other DNA
ttatataaatacatatatgtataattatataaatatatatttttataaagatatattcatatgtgaatatatttatatggattatatttatatatttaatatacaaatatattttttata

SEQ ID NO: 44843 - DNA, 120 bp, synthetic construct; identical to SEQ ID NO: 12665
  source 1..120: mol_type = other DNA

SEQ ID NO: 44844 - DNA, 120 bp, synthetic construct
  source 1..120: mol_type = other DNA
gtagagatgggggtctcactatgttgcctaggctggtcttgaattcctggcctcaagcgatcctcctgtctcagcctcccaaagtgttaggattataggcatgagccactgcacccagcc

SEQ ID NO: 44845 - DNA, 120 bp, synthetic construct
  source 1..120: mol_type = other DNA
ctttattagttcactatatatataatatatacacatgtaatatataatatacacacatatattttatatatatatatatatttgtgtgtgtgtgtgtatatatatacatatatatatata

SEQ ID NO: 44846 - DNA, 120 bp, synthetic construct
  source 1..120: mol_type = other DNA
ctgggaccacaggcatatgccaccatgcccagctaatttttaaaaatctttttgtagaggtggggtcttactatgttgcttaggctggtcttgaactcctgggctcaagccaccctcctg

SEQ ID NO: 44847 - DNA, 120 bp, synthetic construct
  source 1..120: mol_type = other DNA
tttttgatccatcctgagtcctttccttttaaaagatgaattttatccagttacatttattattaaaacatgtgtttgatcttgcctctattatattattttgttttctgattttgtttt

SEQ ID NO: 44848 - DNA, 120 bp, synthetic construct; identical to SEQ ID NO: 12666
  source 1..120: mol_type = other DNA

SEQ ID NO: 44849 - DNA, 120 bp, synthetic construct
  source 1..120: mol_type = other DNA
aacaaaactagttaacatattgtcaaaccatctttctctgaagcctacagagatttggctctagctgccaatggtaaaacagcaggcaggctgcaagtcatggctccaggcccattctgg

SEQ ID NO: 44850 - DNA, 120 bp, synthetic construct
  source 1..120: mol_type = other DNA
cttggatcaaagtgccctttctctcactctgcagtctaaagcattctctgttagttgctcatctatggggttctcacctccccagcaatacaggctcttactttccctggtccagcaaag

SEQ ID NO: 44851 - DNA, 120 bp, synthetic construct
  source 1..120: mol_type = other DNA
ctcaacctcccaagtagcttggattacaggtgagtgccaccacactcagcaaattgttgtatttttagtagagatgggcttttgccatgttggccaggctggtctcgaactcctgacctc

SEQ ID NO: 44852 - DNA, 120 bp, synthetic construct; identical to SEQ ID NO: 12667
  source 1..120: mol_type = other DNA

SEQ ID NO: 44853 - DNA, 120 bp, synthetic construct
  source 1..120: mol_type = other DNA
ctgtagctcccacatggctgaatacatagagctagatacaaggagggtttttagaagactgactgaacaaatgagaagtcaaggcaaaggactctggaatctgactgcttgggttcaaat

SEQ ID NO: 44854 - DNA, 120 bp, synthetic construct
  source 1..120: mol_type = other DNA
catcatcatgtgtgaactatagggcgcagcctccagcctgaagacatagactcagtggagccagcactgtactgtgagccagcgtggttaactgcactgtgacagcttgacagaacactg

SEQ ID NO: 44855 - DNA, 120 bp, synthetic construct; identical to SEQ ID NO: 12668
  source 1..120: mol_type = other DNA

SEQ ID NO: 44856 - DNA, 120 bp, synthetic construct
  source 1..120: mol_type = other DNA
gtctcgaaccagctgtgctccacgatgtggtagcaggtcttgcgcaaccgccaccagaccttccctggggcctgtgtggtgtccaccgcacagcagggacagcgccggacacagcctatg

SEQ ID NO: 44857 - DNA, 120 bp, synthetic construct
  source 1..120: mol_type = other DNA
ggcaatatggtgagcagggccgtgtgagcgagggccgtgggcaccacccgtgggggccacacgctctgcgggcactctttgaggaggatggatggactgagcacccagcgagtgggtgaa

SEQ ID NO: 44858 - DNA, 120 bp, synthetic construct
  source 1..120: mol_type = other DNA
cttctccatgtttgtagtttctgagccttgggaagggcagatccctcaatgagagcccccatggatgtgtcacatggagggcaaactctcattttgtttttctctttttttgagatgttt

SEQ ID NO: 44859 - DNA, 120 bp, synthetic construct
  source 1..120: mol_type = other DNA
gccagcgcgcccaactaattttttgtgtttttagtagagatggggtttcaccatgttggccaggctggttttgaactcctgacctctggtgatccacctgccttagcctcacaaagtggg

SEQ ID NO: 44860 - DNA, 120 bp, synthetic construct; identical to SEQ ID NO: 12669
  source 1..120: mol_type = other DNA

SEQ ID NO: 44861 - DNA, 120 bp, synthetic construct
  source 1..120: mol_type = other DNA
aggtgggcagatatctaaggcagggtgttggtgccacgtggccctgggctccaaggagctgctggtcctcctgtcccctctgggtggaactgaggctagggcagagggctgcccgggcca

SEQ ID NO: 44862 - DNA, 120 bp, synthetic construct
  source 1..120: mol_type = other DNA
ggggtctatggacaggggtgtgggacagggtgggaaagggtgtgagtgtgggctgagtagcagcctttggcctcgagcccagagtctgcaggagcttagggctccctgaagggaggcagc

SEQ ID NO: 44863 - DNA, 120 bp, synthetic construct
  source 1..120: mol_type = other DNA
tgtgggggctgtgaaagagctctgggaagccactggggatggggactgcatctagctgggagcaaaacggacatggggtagcaacctggacacacagtgggacatggacacatcgtggtg

SEQ ID NO: 44864 - DNA, 120 bp, synthetic construct; identical to SEQ ID NO: 12670
  source 1..120: mol_type = other DNA

SEQ ID NO: 44865 - DNA, 120 bp, synthetic construct
  source 1..120: mol_type = other DNA
attccactacataagaccactgcacccattcccagccacttgaatgctagctgcttagctggccctcctccagaaaatcatcttcagctgggggactgccgtcccaaggggtggccggtg

SEQ ID NO: 44866 - DNA, 120 bp, synthetic construct
  source 1..120: mol_type = other DNA
ggaaagcctttccgtagcttccttctttgcttcatcctgtttctcttactttctcctgagaacacccctcaacaagtcatttgcataggaatccctctgcttctagggaacggtacgtca

SEQ ID NO: 44867 - DNA, 120 bp, synthetic construct; identical to SEQ ID NO: 12671
  source 1..120: mol_type = other DNA

SEQ ID NO: 44868 - DNA, 120 bp, synthetic construct
  source 1..120: mol_type = other DNA
ctcctcctagctcagctgggggatgaaaggagttgggtgatgaaaggggcaggccagaggagagcagcatgcttattttttctttccaaacactggagccgtctgaagtccatggggctg

SEQ ID NO: 44869 - DNA, 120 bp, synthetic construct
  source 1..120: mol_type = other DNA
ctccttatataggctcccccatgaactgatttgaagaaaggaagacttataaaattcattcaaaggttagcatccgtgtgagagagccacttctctcccatggcattttgcctctctcct

SEQ ID NO: 44870 - DNA, 120 bp, synthetic construct
  source 1..120: mol_type = other DNA
aagctcacatgggcccatctcacaaaagaggagaaggcacaagtgctggacggagtgaggtcaagctgcaggacagtggccaccaagcactctgaacacgtgccctccaccttccgtggg

SEQ ID NO: 44871 - DNA, 120 bp, synthetic construct; identical to SEQ ID NO: 12672
  source 1..120: mol_type = other DNA

SEQ ID NO: 44872 - DNA, 120 bp, synthetic construct
  source 1..120: mol_type = other DNA
attggccctgggccctgtaccgtctctcccctgtcaggacagggatgcccaccctcccctctgcagactggtcttccacgctgcctgtgacagtggctgtggctcccaacagcaaatgca

SEQ ID NO: 44873 - DNA, 120 bp, synthetic construct
  source 1..120: mol_type = other DNA
cgccagtcggcctgagatgcactggcctcggcctcagaggaggcagtcgctgacacctggctccaggtcctggaatccggaggggcctctgggccaccggacacaggctgggattcctgc

SEQ ID NO: 44874 - DNA, 120 bp, synthetic construct
  source 1..120: mol_type = other DNA
tggggcctccatctcactgaagactcctccctcaaggggcctgagcaggcaggtgggaggctcctggtaggtccaagcaaagggcctagagacaggaagcccctggccggcctggcataa

SEQ ID NO: 44875 - DNA, 120 bp, synthetic construct; identical to SEQ ID NO: 12673
  source 1..120: mol_type = other DNA

SEQ ID NO: 44876 - DNA, 120 bp, synthetic construct
  source 1..120: mol_type = other DNA
tgggaccacagggaggcaggaggatgtgaaaccaagcccagagccttagatcaagttccacacatggggagcagctgctctccacagccaggcccagccagtgcaggcccagaggaagca

SEQ ID NO: 44877 - DNA, 120 bp, synthetic construct
  source 1..120: mol_type = other DNA
ccctgcctgctttgtgcagactctggtcccaagtgttaaaaataacaggttgcgagataagatagtgctgtccctgacacctcagtcttagggatgcttatttttaaatctcagaatgag

SEQ ID NO: 44878 - DNA, 120 bp, synthetic construct
  source 1..120: mol_type = other DNA
gggctagaggctctgttctaaactcatgaggaacacccagcaagtctctcttgccatgcctccgtttccctgtctgtacaatgagctccccatgcccagccagggcatgagtggtggata

SEQ ID NO: 44879 - DNA, 120 bp, synthetic construct; identical to SEQ ID NO: 12674
  source 1..120: mol_type = other DNA

SEQ ID NO: 44880 - DNA, 120 bp, synthetic construct
  source 1..120: mol_type = other DNA
tggttgctcgccttcctcaaaccgtgtttccttgcgggtgggaggcaccttctccgtctctgggggtggcggggagtagggggtggcaatgcagctgggcagctggccctgggcggcaag

SEQ ID NO: 44881 - DNA, 120 bp, synthetic construct
  source 1..120: mol_type = other DNA
tctgtcctcatcaggggctgtgaggttgtctgcactgaaggagctgagcagcaaggccaggaagagattcaggacctgtcgagataatgggtcaggctcaccaaggcactgcaccatgcc

SEQ ID NO: 44882 - DNA, 120 bp, synthetic construct
  source 1..120: mol_type = other DNA
ttttattgaatgtggaaggtttggctataaaagaaaatacaaatttgaatccctctttccaagggcccagacacagtctgaattgaggatgtcgtgtcctggctcaggttcaatgggaga

SEQ ID NO: 44883 - DNA, 120 bp, synthetic construct; identical to SEQ ID NO: 12675
  source 1..120: mol_type = other DNA

SEQ ID NO: 44884 - DNA, 120 bp, synthetic construct
  source 1..120: mol_type = other DNA
aatagctggaaaagaggtcaggaaggcacaggcagccttcaggcatttggactaatcatggggtcaggacatggagagctgaccatgtctaggctgtgaggggtgctaggaagggtgctg

SEQ ID NO: 44885 - DNA, 120 bp, synthetic construct
  source 1..120: mol_type = other DNA
aagggggtttgcataaccctctgcctttggatggttctggagaattgcttgtcgttaagccctcctgcaagtgtgaagctttagcttttgtttaaaaagaaggcctttgatgtgtgacaa

SEQ ID NO: 44886 - DNA, 120 bp, synthetic construct
  source 1..120: mol_type = other DNA
ggcttggtgtctcctccctcccagcacctttatagcagggtggtgtgtgagggtgggtgcacagttctttttggaaatccactctgagactctgttccggtttctcaagagcctctaaaa

SEQ ID NO: 44887 - DNA, 120 bp, synthetic construct; identical to SEQ ID NO: 12676
  source 1..120: mol_type = other DNA

SEQ ID NO: 44888 - DNA, 120 bp, synthetic construct
  source 1..120: mol_type = other DNA
ccacagcctcactcacaccaggccctgcatcccccaacctccaggagtcctgggcctaggctgggagtagggcgggtggtgtgggtacctgggcagccatgcccacccacagagtctagg

SEQ ID NO: 44889 - DNA, 120 bp, synthetic construct
  source 1..120: mol_type = other DNA
cctcccacgcctggcagcggcccaattccttaggcggctggggagggggctgtgtgggctggcattagctccctcctccagcagcctctaattttctcatccccaggcagatctgctggg

SEQ ID NO: 44890 - DNA, 120 bp, synthetic construct
  source 1..120: mol_type = other DNA
aacccttcaccccaagggatagctagtttggggggacataagggggagttgggggccagccaaagagcagggttctagtggcactatgcactgatgccctggctcctctctctctgggct

SEQ ID NO: 44891 - DNA, 120 bp, synthetic construct
  source 1..120: mol_type = other DNA
tctggaatctatagcccatagtacttgccccacagcagcctgaaaaagtgaatgtaaaacctctctgtgagctgatgtgactgcactgcccacgacagagacatacagctacaggtgcga

SEQ ID NO: 44892 - DNA, 120 bp, synthetic construct; identical to SEQ ID NO: 12677
  source 1..120: mol_type = other DNA

SEQ ID NO: 44893 - DNA, 120 bp, synthetic construct
  source 1..120: mol_type = other DNA
tttgctcatcctgttccttccctcttcagcattgcctgtttatcaggtcagctccaaaatctcttccagaaagatttccttgattttcctagctgaatgggaacagtaccatggtctcct

SEQ ID NO: 44894 - DNA, 120 bp, synthetic construct
  source 1..120: mol_type = other DNA
taagctggtgaatgatgtcagggctggcgctagacctcatttgcctctgtattcccaacagcatgtggcacaatgttttccatgcaataagggcttagaaaatgtttaagataaattgaa

SEQ ID NO: 44895 - DNA, 120 bp, synthetic construct; identical to SEQ ID NO: 12678
  source 1..120: mol_type = other DNA

SEQ ID NO: 44896 - DNA, 120 bp, synthetic construct
  source 1..120: mol_type = other DNA
gccaacatggtgaaaccccgtctctactaaaaatacaaaaaattagtcaggcgtggtacatgcctgtgatcccagctactagggaggctgaggcagaagaatcacttgaacctgtgaggc

SEQ ID NO: 44897 - DNA, 120 bp, synthetic construct
  source 1..120: mol_type = other DNA
tgagtaagtagacaactggatagatagatgagtagatagatggaattggtgaatgagtgaatggtgagttgatagatgggaggtggatgaatgagtagaggagtgaatggttgggtgagt

SEQ ID NO: 44898 - DNA, 120 bp, synthetic construct
  source 1..120: mol_type = other DNA
tgataagcagattaatgaaaggatgagtgaatgagtaaaagtgggttggtggatgaatgacaaggtgaatgagtggataaatggatgggtggtttggtaactggggaagaatctactgat

SEQ ID NO: 44899 - DNA, 120 bp, synthetic construct; identical to SEQ ID NO: 12679
  source 1..120: mol_type = other DNA

SEQ ID NO: 44900 - DNA, 120 bp, synthetic construct
  source 1..120: mol_type = other DNA
taaatggataattggatgggtgggtagctgggtagatgagtggatggtgtgtgtgtggcccttggccaacttaccacaaggttgccaatgaccataacaagcaagaagaccagcaggcat

SEQ ID NO: 44901 - DNA, 120 bp, synthetic construct
  source 1..120: mol_type = other DNA
cctgagtcgctgtccctcagctccgagtagttcttgccaaagagctgcatgcccaccacagcaaagatgaacacgatgatggctagcaccagtgtcaggttccccagtgcccccactgag

SEQ ID NO: 44902 - DNA, 120 bp, synthetic construct
  source 1..120: mol_type = other DNA
atgggcaccctcactctctctagctcctgcctgaaagcccaaggagcccttggagggcactgacacctattccccccccgccatttctcccagagcacccactactgtttctctccacag

SEQ ID NO: 44903 - DNA, 120 bp, synthetic construct
  source 1..120: mol_type = other DNA
tccaggaactgcccactagattctcccaacagggaatgtccttgctctttcacacctgtcctcatcaggtatcctttgggacagctcaaaccatctctgactggtcacctctgcctccca

SEQ ID NO: 44904 - DNA, 120 bp, synthetic construct; identical to SEQ ID NO: 12680
  source 1..120: mol_type = other DNA

SEQ ID NO: 44905 - DNA, 120 bp, synthetic construct
  source 1..120: mol_type = other DNA
acctcctccaggaagccttccctgactatacctcccaccccatgtctggacctctcaagcatttcaagctccaagtgtggtccacagaccagcagctttgacatcacctcagaccgactg

SEQ ID NO: 44906 - DNA, 120 bp, synthetic construct
  source 1..120: mol_type = other DNA
ctctgttatctgccatgtggctgtgggaaattcgtctcatctctctgagtctcctcatctgtgaaatggaaatgtagtaataccagccccactcctggatcctgtgagggctaaagggtt

SEQ ID NO: 44907 - DNA, 120 bp, synthetic construct
  source 1..120: mol_type = other DNA
catccaggggtaccaagcaaatggctgttgggtgaaggcatgacagatcaaagtagggatgaccaagtgatgacctcagattgggttgtgccgagccttccacaccccccaccatccccc

SEQ ID NO: 44908 - DNA, 120 bp, synthetic construct; identical to SEQ ID NO: 12681
  source 1..120: mol_type = other DNA

SEQ ID NO: 44909 - DNA, 120 bp, synthetic construct
  source 1..120: mol_type = other DNA
ggacagctctcttctccagcctgctctcccagcccttgcagctgctcaccaagcataccaggcacaccagcttggccttcaggaatggcctgggcccttcgcaggctccacagagactca

SEQ ID NO: 44910 - DNA, 120 bp, synthetic construct
  source 1..120: mol_type = other DNA
catggctcccctgacccagggcctctgtccttgctgttcctgctcctcaggaggcccttcctcctcatctacctgctggaccctgcccactgtgataatcagcagccattgcttcctgag

SEQ ID NO: 44911 - DNA, 120 bp, synthetic construct; identical to SEQ ID NO: 5312
  source 1..120: mol_type = other DNA

SEQ ID NO: 44912 - DNA, 120 bp, synthetic construct
  source 1..120: mol_type = other DNA
gccctgcagtgtgccaattgatgggagcctggttcccagaggagagaatgttctgtgacggtgtggatggcaggaagtcagggtcctgtacgcagggcctcttgaccatgctgaggagtt

SEQ ID NO: 44913 - DNA, 120 bp, synthetic construct
  source 1..120: mol_type = other DNA
ggggtcaaagacgggcatggctgaggcacctcgctggggttggcaatcaggtggggaggtcactctggtctgggcacccgccctgacggggctctgtgctaggagaggcatttgctggtc

SEQ ID NO: 44914 - DNA, 120 bp, synthetic construct
  source 1..120: mol_type = other DNA
gcactgccacacagggcaccacccaccagcccagccctcctgacttcaggggtccctttagtgcttgtgcccagagggaactgttcctccctcagccgggtcttgggaaagggagggacc

SEQ ID NO: 44915 - DNA, 120 bp, synthetic construct
  source 1..120: mol_type = other DNA
tgttgctctcctgttccagccacgcctgttccttgctgttccctcctcggggcctttgcacttgctgctgctccctttccccgggtcatgcctttccccagccgcataactcactccctt

SEQ ID NO: 44916 - DNA, 120 bp, synthetic construct; identical to SEQ ID NO: 12683
  source 1..120: mol_type = other DNA

SEQ ID NO: 44917 - DNA, 120 bp, synthetic construct
  source 1..120: mol_type = other DNA
cactcagcagcacagcctgcacagctttgctgagagctcctacaggtggggcccgggtagcgcctcacttggacccccacttttggtcttccccagcactgccggggtgcaccagggtgg

SEQ ID NO: 44918 - DNA, 120 bp, synthetic construct
  source 1..120: mol_type = other DNA
gctaggactcaggaaaaaagagacaggagaggctcgtggggaatgcccttcggggaaatgataaaagaattttcagggatcaacagcatcacctggaagctctttggaaatgcagaaact

SEQ ID NO: 44919 - DNA, 120 bp, synthetic construct; identical to SEQ ID NO: 12684
  source 1..120: mol_type = other DNA

SEQ ID NO: 44920 - DNA, 120 bp, synthetic construct
  source 1..120: mol_type = other DNA
actctaatgtgcagctaagcttgagaagtacatacattttggtaacagacctcttccttccacaggctcatgccaggctttctaaggccatgcgatcaaagcttcatggtttaagatgtg

SEQ ID NO: 44921 - DNA, 120 bp, synthetic construct
  source 1..120: mol_type = other DNA
ctccataggaggtttctaggagttacagctaatggctgtaaagtggatactctctatgacagggcgattattgttactgtcagcagcatttattatgattgctgagagtggccaagagct

SEQ ID NO: 44922 - DNA, 120 bp, synthetic construct
  source 1..120: mol_type = other DNA
aggttcactgagcaatgagtgcaaatggccgctttccaggaattgggggaacttatggggaaccccaaattctctttgaccttggcatatgactttaatgggaccatactccatgcactg

SEQ ID NO: 44923 - DNA, 120 bp, synthetic construct
  source 1..120: mol_type = other DNA
tttcttttttttttttacatttgtggcacattccactgtacagatgtgctataactggtttagccatttccctgtgatagtcattcctttttccctattaaaaacattgccacaataaat

SEQ ID NO: 44924 - DNA, 120 bp, synthetic construct; identical to SEQ ID NO: 12685
  source 1..120: mol_type = other DNA

SEQ ID NO: 44925 - DNA, 120 bp, synthetic construct
  source 1..120: mol_type = other DNA
tggtgaaatttcctgttcatatcctttgctcttaattgttctattaacgtgtttgcttttttatatggtttataaacatactttatatattaaggatattacccttttgtctattagtac

SEQ ID NO: 44926 - DNA, 120 bp, synthetic construct
  source 1..120: mol_type = other DNA
caccaccaaactctaatgaatattaacattatgccatatttgtttcaaatcttgctttctttttccttaccaaaaaaaaaaaaatagcaaatacttaaatagcatttgatgtatgccagg

SEQ ID NO: 44927 - DNA, 120 bp, synthetic construct; identical to SEQ ID NO: 12686
  source 1..120: mol_type = other DNA

SEQ ID NO: 44928 - DNA, 120 bp, synthetic construct
  source 1..120: mol_type = other DNA
gtaaataggctatgctttatatattctcttttattcttaacatgttttttattctttgttccttttattcttaacatcatgtttgagatttattgacacatgtataagtattcattctaa

SEQ ID NO: 44929 - DNA, 120 bp, synthetic construct
  source 1..120: mol_type = other DNA
ccagtttcccctatgactaaaagtactgtaaagaactttcttatacatgtttccttgtacagatgtgtgagactttcttaagaagatatatatatatatggaattgttgagttgtagggt

SEQ ID NO: 44930 - DNA, 120 bp, synthetic construct
  source 1..120: mol_type = other DNA
ctgtgagttcccactgttccacaaccctgtcaacacacagaagtctattttttattctgttagggtaaaaaatagtatttcagtgttgctttaatttccattcctctgtttctcttcatt

SEQ ID NO: 44931 - DNA, 120 bp, synthetic construct
  source 1..120: mol_type = other DNA
aatattgcctggattccatgtatttctggttaaatacttatcataatatcaatttccagtttgtggtagtgagttcacttagtttgtaacatctcttgttgtacagagattataaatttt

SEQ ID NO: 44932 - DNA, 120 bp, synthetic construct; identical to SEQ ID NO: 12687
  source 1..120: mol_type = other DNA

SEQ ID NO: 44933 - DNA, 120 bp, synthetic construct
  source 1..120: mol_type = other DNA
gcaacctccacctcccaggttcaagcaattctcctgcttcagcctcctgagtagccagaactacaggtgcatgccaccacatccagctaatttttgtatttttagtagagacaggctttc

SEQ ID NO: 44934 - DNA, 120 bp, synthetic construct
  source 1..120: mol_type = other DNA
ttataatgccacctctgttatttatcaagtcaccaaatatggattgttctatttctgtggtctcaattctgtagcacaatctgtttttccacccctgcaccaatactataatatttttag

SEQ ID NO: 44935 - DNA, 120 bp, synthetic construct
  source 1..120: mol_type = other DNA
agtattgagattttgactggaattacattgaacttataggttaatttgggaagaatttgtatccctacaatattcatactttcattcatgaaaatggtacatcgctctacttttatgtct

SEQ ID NO: 44936 - DNA, 120 bp, synthetic construct; identical to SEQ ID NO: 12688
  source 1..120: mol_type = other DNA

SEQ ID NO: 44937 - DNA, 120 bp, synthetic construct
  source 1..120: mol_type = other DNA
tctaaatttacaatcatttaattatcttcccaactgtattaatatgctatttgatgcgtacattgaaattttaatctcaatgtctatatttttcatttctggagattttatttggttctt

SEQ ID NO: 44938 - DNA, 120 bp, synthetic construct
  source 1..120: mol_type = other DNA
tacgatcttggctcactgcaatctcggtcccgctggggatccaagtgatcctgccacctcagcctcccaagtagctaggaccacaggtgcacaccaccacacccggctatttttgtgtat

SEQ ID NO: 44939 - DNA, 120 bp, synthetic construct; identical to SEQ ID NO: 12689
  source 1..120: mol_type = other DNA

SEQ ID NO: 44940 - DNA, 120 bp, synthetic construct
  source 1..120: mol_type = other DNA
ccttttaggggccccaagacatcattctaggatcactttctatgttaattttttagatgtaggttccaggactactcaggtgtaaatttgaaccccaaatctgtataaggccaaatccat

SEQ ID NO: 44941 - DNA, 120 bp, synthetic construct
  source 1..120: mol_type = other DNA
gtgtgtaggttttttctggttcaccatttttctgaatgtatagtcatatccttacggggctactcagtttcaacccctactcacactgtcccaaggttgaatgtcttgtctctacatgct

SEQ ID NO: 44942 - DNA, 120 bp, synthetic construct
  source 1..120: mol_type = other DNA
tttactgctatggtttttaagcttctttttgtttttggcacttggggtttctgttaaagtagcccctcttatctacggggaatacattcccacaaggctcctagtgagtgcctgaaacca

SEQ ID NO: 44943 - DNA, 120 bp, synthetic construct
  source 1..120: mol_type = other DNA
cacaataagagattaacaacttctctttgtcatatatttggcttctctttggcacatccgtattgccagcaacattactattctgctttggggaataatgattaagtaaaataagggtta

SEQ ID NO: 44944 - DNA, 120 bp, synthetic construct; identical to SEQ ID NO: 12690
  source 1..120: mol_type = other DNA

SEQ ID NO: 44945 - DNA, 120 bp, synthetic construct
  source 1..120: mol_type = other DNA
ggtgaccatgggtaactgaaaccatgtttccatggtttcaaaattgtggataagaggaactactgtactttctcatgcacttagctatgtaattcaaaggatgtttcctgtattttaaat

SEQ ID NO: 44946 - DNA, 120 bp, synthetic construct
  source 1..120: mol_type = other DNA
atttgtgtgatgggctaaaaagttagctaaatctatcagtcttctcctttgtggaatttgtcttcagagacatgcttagaaaggcttttcccatgctgattatttactcatgcttatttt

SEQ ID NO: 44947 - DNA, 120 bp, synthetic construct
  source 1..120: mol_type = other DNA
acaactacattgcctgttatcaatattttaacgacaagtttagtacaatgcagttcagctacaacttgctgacccagtgaagccaccagtgctgttcatcacacctaacttgctgctcag

SEQ ID NO: 44948 - DNA, 120 bp, synthetic construct; identical to SEQ ID NO: 12691
  source 1..120: mol_type = other DNA

SEQ ID NO: 44949 - DNA, 120 bp, synthetic construct
  source 1..120: mol_type = other DNA
aatggggccagaagtccccctaccacccccacaccagcctcgatgatgatctcacaagctcctttttaaggccagtgggatcatggcaactctgccctgggatcctctaaagatgggctg

SEQ ID NO: 44950 - DNA, 120 bp, synthetic construct
  source 1..120: mol_type = other DNA
aagaggcaggacttgatttggtatcaagaaaaaaaaaatcagaattagaatccagacattctgacttccaggagcagtctaacaacaacaacaatagcacagctatcatttgttttgagt

SEQ ID NO: 44951 - DNA, 120 bp, synthetic construct
  source 1..120: mol_type = other DNA
tatttattgggccaattactgagtaaactgcttgagatcagctagttagtaagagctgagtcagaattcaaatctggctctgcctgatttacttactacacccagctatccatccatctg

SEQ ID NO: 44952 - DNA, 120 bp, synthetic construct; identical to SEQ ID NO: 12692
  source 1..120: mol_type = other DNA

SEQ ID NO: 44953 - DNA, 120 bp, synthetic construct
  source 1..120: mol_type = other DNA
aaacttcttttcactccaccctcccactccaaatctacatttctcagctccttagaagccgaccctgagattccctccctcctccaagatgtcctctatgatgattcccaccctcaaaag

SEQ ID NO: 44954 - DNA, 120 bp, synthetic construct
  source 1..120: mol_type = other DNA
cgacctgcagcatctcctcgaattcacttgtcatgttgtagtgctccagcgccatgaagagtgtgttgagtacgatgcacatagtgatggtgaggtcagtaaacgggtccatgaccacca

SEQ ID NO: 44955 - DNA, 120 bp, synthetic construct
  source 1..120: mol_type = other DNA
cagccaatgagttagtttgattctgttgactgagtcatatgtaactggaataccttccaggaaagatttatgacttgctctgggagatgacagggctgctaggtgacagcgggacagtgg

SEQ ID NO: 44956 - DNA, 120 bp, synthetic construct; identical to SEQ ID NO: 12693
  source 1..120: mol_type = other DNA

SEQ ID NO: 44957 - DNA, 120 bp, synthetic construct
  source 1..120: mol_type = other DNA
ggaacaagatcaggatggggggtgccccattcagactggaagggatgtggagttgcctagggcaggaatggctgggaaagatgtaggatgcctggaatagtctgaagtagatatgggaat

SEQ ID NO: 44958 - DNA, 120 bp, synthetic construct
  source 1..120: mol_type = other DNA
ggagaaacacaggcatggtgatacccaggagagaacaagctgaaacagatgaaaagacatggaaggacaggcaaggctacacagaacagagaaggctgggacagtgtggggatgtctaaa

SEQ ID NO: 44959 - DNA, 120 bp, synthetic construct
  source 1..120: mol_type = other DNA
gacgctgactgcgctgagggcccgctgccgtgctcctggctcctcgaagccatctacacacggagcctgggaggtcagcatctggggcccgcctggctcctccgatggcgtggtctgagt

SEQ ID NO: 44960 - DNA, 120 bp, synthetic construct
  source 1..120: mol_type = other DNA
cttgatgggacactggatgctgggcttctctgttcccaactccctcccagttaagaactccctccacccctcctcccaatcactgtctccttcattctcctttcttcttcactgcctctc

SEQ ID NO: 44961 - DNA, 120 bp, synthetic construct; identical to SEQ ID NO: 12694
  source 1..120: mol_type = other DNA

SEQ ID NO: 44962 - DNA, 120 bp, synthetic construct
  source 1..120: mol_type = other DNA
cattgcagcagtgttcctaataccataagaacaaaacaccaatcaatagcaaccatattcaaatcaattatagacacagtccaactctgggctctgatagacaacaaagagaacgaggca

SEQ ID NO: 44963 - DNA, 120 bp, synthetic construct
  source 1..120: mol_type = other DNA
tgggggaggggaaaaagagggagaagttcccttttcacttcatgtacttctgcactgtggggtttgttttcaccatgcatgcaccatttttatcagtaaaaaacccaggcctggaaacag

SEQ ID NO: 44964 - DNA, 120 bp, synthetic construct
  source 1..120: mol_type = other DNA
gctgagctgttcagcatgcaatagcaagactctaatcttcatagggcagagggaagatgggcctagattagccagggtagaagaagcagggcatagggtggataccaaatagatctgggc

SEQ ID NO: 44965 - DNA, 120 bp, synthetic construct; identical to SEQ ID NO: 12695
  source 1..120: mol_type = other DNA

SEQ ID NO: 44966 - DNA, 120 bp, synthetic construct
  source 1..120: mol_type = other DNA
ctcaactgggctagtgctgtttatcttgctcttgtgctccaggaattctccatgaaaagagcttccccagatagctgtcaccttttcagcctaagcctcagaacaaagatgcagagcagc

SEQ ID NO: 44967 - DNA, 120 bp, synthetic construct
  source 1..120: mol_type = other DNA
gtttgttacacagcattattattataatagctgactaatacaccatcctagtccaggcagtcatcttctctttcccaaaaccactgcaacagcctcctaactggcttcttttcttcttct

SEQ ID NO: 44968 - DNA, 120 bp, synthetic construct
  source 1..120: mol_type = other DNA
cctcccaccctactcctccccatcttactcacacagtatatccaaacttatctatggtctagaaggccctgcacagtccaaatcctaactcatgaaattcattttaatgtttcaccacac

SEQ ID NO: 44969 - DNA, 120 bp, synthetic construct; identical to SEQ ID NO: 12696
  source 1..120: mol_type = other DNA

SEQ ID NO: 44970 - DNA, 120 bp, synthetic construct
  source 1..120: mol_type = other DNA
tggcactagatagatattggttggatggataaattcttgggaatcaatcggaaggcttgggttagagttccagctctgttcctaacttgctaggtggccacaggaaatgaggatgaagat

SEQ ID NO: 44971 - DNA, 120 bp, synthetic construct
  source 1..120: mol_type = other DNA
tcatacaagcaaggggcaaagtaagtcttcagcccctacctcccaatctggataaactgaacgtgagctgtctgctgggctggcccttccttcccatccttgttgattaggcacccacag

SEQ ID NO: 44972 - DNA, 120 bp, synthetic construct; identical to SEQ ID NO: 12697
  source 1..120: mol_type = other DNA

SEQ ID NO: 44973 - DNA, 120 bp, synthetic construct
  source 1..120: mol_type = other DNA
attcctggtaatgaagtgcttgaacttggattcctcccgacatgtgcagtacaatgagatgattttctccttaatgagattaggaaattctattagcgctcccagctgctgacccgattc

SEQ ID NO: 44974 - DNA, 120 bp, synthetic construct
  source 1..120: mol_type = other DNA
ggggtgcccagtttcctcccttcaccctgtgctccagaggagtgtggggccctgggcattctgcagtgtaccccaggatcctcactccttcctgcttactaataccaataacagataata

SEQ ID NO: 44975 - DNA, 120 bp, synthetic construct
  source 1..120: mol_type = other DNA
caaagagattaattaacctgtaccaagtcccacagattgagcgagagtctgagtggcacaaaataagccacgtggctgggagccctgcatcttcaggccatcctccaccttcctggtcaa

SEQ ID NO: 44976 - DNA, 120 bp, synthetic construct
  source 1..120: mol_type = other DNA
gcaaggacacctgatggctgattgggcagccatcagtctgtcatagaactgactaagtgaccaaagctctgattggcctttcacaatctggccagtcccttcctatcacctttgtaacag

SEQ ID NO: 44977 - DNA, 120 bp, synthetic construct; identical to SEQ ID NO: 12698
  source 1..120: mol_type = other DNA

SEQ ID NO: 44978 - DNA, 120 bp, synthetic construct
  source 1..120: mol_type = other DNA
cctcctgagttcaagtgattctcctgtctcagcctcccaagtagctgggattacaggcacgcgcctccatgcccggctaatttttgtatttttagtagagatggggtttcaccatgttgg

SEQ ID NO: 44979 - DNA, 120 bp, synthetic construct
  source 1..120: mol_type = other DNA
atcgcacctggctttcttttgagttttgtctgtctgtccccattagcatggatgctctatgagggcccagttttttttttgtaagtttatgcacctagagcccagcacacagtaggtgct

SEQ ID NO: 44980 - DNA, 120 bp, synthetic construct
  source 1..120: mol_type = other DNA
acagggcggaggaggtggcttcctggggatgtggcctctgggtcgcctgcccccagtaatgagaccaccccattgcagtccacagtgctgttctttttgccatggagggcgtggccagga

SEQ ID NO: 44981 - DNA, 120 bp, synthetic construct; identical to SEQ ID NO: 12699
  source 1..120: mol_type = other DNA

SEQ ID NO: 44982 - DNA, 120 bp, synthetic construct
  source 1..120: mol_type = other DNA
gggttgggccgggggtatttggaagaggggatgtggggttagagataatcctgtatcttctgggatgtctactcccctcaaatctatgtctctggagctgggagcctgaaacttaactgg

SEQ ID NO: 44983 - DNA, 120 bp, synthetic construct
  source 1..120: mol_type = other DNA
catgtccttgaactcctaccaacccataccatggggtctcgtcccccagccccggctccagtgccgggatactggcctcaggttggggatatcacaacacccaaaactaccctgtccctc

SEQ ID NO: 44984 - DNA, 120 bp, synthetic construct
  source 1..120: mol_type = other DNA
cctggaaaagctagaaccacagctgggattaccattgctctgggaccatcttctgagtcagacttggggagcctgtcctccccacactcctcagttcctgaagacatccgttttctcctc

SEQ ID NO: 44985 - DNA, 120 bp, synthetic construct; identical to SEQ ID NO: 12700
  source 1..120: mol_type = other DNA

SEQ ID NO: 44986 - DNA, 120 bp, synthetic construct
  source 1..120: mol_type = other DNA
agatgagcagagaagtggcagaaccagaaggcagaggctcttctagaaggtttagctggccaaaagtgtactggaatatgtggcatggggtagtgagaagaacaagtggatgcttctaat

SEQ ID NO: 44987 - DNA, 120 bp, synthetic construct
  source 1..120: mol_type = other DNA
attggaccttcttcactaccccaccagaaggcatcccttgaccagaataaactatgtgcatgtatacatgcatctcttatccagcatgcactatgctcacagggaccatctttacccagg

SEQ ID NO: 44988 - DNA, 120 bp, synthetic construct; identical to SEQ ID NO: 12701
  source 1..120: mol_type = other DNA

SEQ ID NO: 44989 - DNA, 120 bp, synthetic construct
  source 1..120: mol_type = other DNA
gcacctacagtcaggtgagggcttagaggctcctcggtggcactgctcacccacctcgtgttctttcttgagcatttccatggcctcctggaagcgcttttccttctcctcggtctcagc

SEQ ID NO: 44990 - DNA, 120 bp, synthetic construct
  source 1..120: mol_type = other DNA
ggacctgagggtctgggggagcaagggggcagaggtcaccctcactggggccccttctgggttatggcatttccaagtcacctagtctagttgtgccaggggttcaaatagccatagcct

SEQ ID NO: 44991 - DNA, 120 bp, synthetic construct
  source 1..120: mol_type = other DNA
aactcagggcatgctgtgcccacagagggagaatattccatcctacagggagaaagagtgtcccactcacagagcagagagcatcctatacaaagggactggtacttcatcaccagcaaa

SEQ ID NO: 44992 - DNA, 120 bp, synthetic construct
  source 1..120: mol_type = other DNA
gtagcctggaccctgagcccacacttgctgtcccttgtgggcacacacacacctgctgatagaggcgctcccagcagtcctgcgtcatcaggcggaagagtgcaagaaaggcccaggcaa

SEQ ID NO: 44993 - DNA, 120 bp, synthetic construct; identical to SEQ ID NO: 12702
  source 1..120: mol_type = other DNA

SEQ ID NO: 44994 - DNA, 120 bp, synthetic construct
  source 1..120: mol_type = other DNA
ctctttactcttcttatatgtactctgctaggcctaaatcaagctcccttctgcccatacgtcacaccatccccagctactatcaagttgcctctcctcacagagaggaagcacacaagc

SEQ ID NO: 44995 - DNA, 120 bp, synthetic construct
  source 1..120: mol_type = other DNA
agggcaaaggcagggccatggggttgagaaatgattctggaggggatgggctggggcttggccatgtcaggagctcatttgcacaactgtgcacacagccactggttcactgaggcagat

SEQ ID NO: 44996 - DNA, 120 bp, synthetic construct; identical to SEQ ID NO: 12703
  source 1..120: mol_type = other DNA

SEQ ID NO: 44997 - DNA, 120 bp, synthetic construct
  source 1..120: mol_type = other DNA
gtccaggctgctggagaaaccacatttgctccaagggacagatcagcagcaacggagggaagactggagctggagggagcagttctggggagcttctggaagggaatggagctgggggtg

SEQ ID NO: 44998 - DNA, 120 bp, synthetic construct
  source 1..120: mol_type = other DNA
tgtgctgggggcaaggtggggaagctggggaagggtcctggcaggtaagggagacaaaagaaggcctcgctgtccctggggtcagggcataaatagaaaatacagtcagttgagaaaaca

SEQ ID NO: 44999 - DNA, 120 bp, synthetic construct
  source 1..120: mol_type = other DNA
gtaagagaaacatcatgctggtgaggggcactctggcccaaaagtttccgccttgcatccagggctctggggaggtggagacctcactagcggtcttccttcttctctgccccttccctg

SEQ ID NO: 45000 - DNA, 120 bp, synthetic construct
  source 1..120: mol_type = other DNA
gaagccctgggcagggcctcagctctccccacaggaagcttctgcaccctacccgaaaccactcagggggcccaccaaggccaggaggcaagggtctgggcagttacggcttggctgccg

SEQ ID NO: 45001 - DNA, 120 bp, synthetic construct; identical to SEQ ID NO: 12704
  source 1..120: mol_type = other DNA

SEQ ID NO: 45002 - DNA, 120 bp, synthetic construct
  source 1..120: mol_type = other DNA
ggtgacttgggtgtacatggaagttttagaactgctgttatgaggccactgctgaactactcattgagtgtctatgttttgttttccaaagtggactgctggtgtatgtaagaggcccta

SEQ ID NO: 45003 - DNA, 120 bp, synthetic construct
  source 1..120: mol_type = other DNA
cagcctggagaatggaagtgtgagccacggggcagtgaaacaacagaggggctcacacaacttggcacaatcattgggcttgttccaaccctcttgcagggttctggggtacacgtatat

SEQ ID NO: 45004 - DNA, 120 bp, synthetic construct; identical to SEQ ID NO: 12705
  source 1..120: mol_type = other DNA

SEQ ID NO: 45005 - DNA, 120 bp, synthetic construct
  source 1..120: mol_type = other DNA
tggtgacgcgtgtgtgggaggtgaccccggtctgctggtctcacaaagtcttccccagctgcagagcaagttcgcacctggatcactgaggtaaaggtccagggattcccagaccaagcc

SEQ ID NO: 45006 - DNA, 120 bp, synthetic construct
  source 1..120: mol_type = other DNA
gctgcaggccgatgagggcaaagacgctgaggcagaagactgtgaggaccatcacatcagccagcttcttcacagactggatcagggcccccacgatggtcttcagccctggggaaggca

SEQ ID NO: 45007 - DNA, 120 bp, synthetic construct
  source 1..120: mol_type = other DNA
aggcttctcctgggctttgagacccaagccccactttcctcacagctgagattctgtcctgatttccctgggcaggagtctaggctggctttgtagtttcagagggagcctgctcctctt

SEQ ID NO: 45008 - DNA, 120 bp, synthetic construct; identical to SEQ ID NO: 12706
  source 1..120: mol_type = other DNA

SEQ ID NO: 45009 - DNA, 120 bp, synthetic construct
  source 1..120: mol_type = other DNA
gtcaggtgtgtgctgggggctgtgggtgacggtctggcggggtcatggcgggtgatgtctaaggggcctgcgctggctcaggcccacctttagggaaggttcaggaacaggactgacctg

SEQ ID NO: 45010 - DNA, 120 bp, synthetic construct
  source 1..120: mol_type = other DNA
gtgttctgttagttgcacagcctagctccctgcagaagccagcaccacatagcagaatgacagaaaagcatgtgtagacaccagtctggcccttagcgactgtcctaggacaagtgcaag

SEQ ID NO: 45011 - DNA, 120 bp, synthetic construct
  source 1..120: mol_type = other DNA
tgttaggagcgcctgtggcttctgtgcctgctgctgctgggcctgtgacccacaggcagggaggccatgatgagcaaacacaagatggggagaggatgacctccccatggtgccactgac

SEQ ID NO: 45012 - DNA, 120 bp, synthetic construct
  source 1..120: mol_type = other DNA
ggtggtgagattcacaagctcttcatggtccagagctcctcatctgtaacagagcttcctgtaccctttggtgggtttactgggctggagacctgcatgtctcgaagggaacaaagtgaa

SEQ ID NO: 45013 - DNA, 120 bp, synthetic construct; identical to SEQ ID NO: 12707
  source 1..120: mol_type = other DNA

SEQ ID NO: 45014 - DNA, 120 bp, synthetic construct
  source 1..120: mol_type = other DNA
ctgaattaacaggctgggtggaagagcccttggaaatcaccaattctgatttcactctcattttatggaaaagcgactgagtctagagaggactagggctatttcagactcagctcagag

SEQ ID NO: 45015 - DNA, 120 bp, synthetic construct
  source 1..120: mol_type = other DNA
tgagattggtgggcttcctccttttccccaggaccgagaaatatttccctttgtaaatctttcttataaaacacaccaggaatatgccttaagtcctgtggttagtgtgtttgtctactt

SEQ ID NO: 45016 - DNA, 120 bp, synthetic construct
  source 1..120: mol_type = other DNA
tgagcgggagcagactgcctccttgctactggcccttggcaggggtctgggccacttgtgggagctctgggggagatgcggcccttatgaacatactatagtgggtttagaggccagaaa

SEQ ID NO: 45017 - DNA, 120 bp, synthetic construct; identical to SEQ ID NO: 12708
  source 1..120: mol_type = other DNA

SEQ ID NO: 45018 - DNA, 120 bp, synthetic construct
  source 1..120: mol_type = other DNA
attctcctgcctcagtctcccaagtagctgggattacatgcgtgcaccaccacgcccaactaatttttatatttttagtagagatggggtttcaccatgttggccaggctagtcttgaac

SEQ ID NO: 45019 - DNA, 120 bp, synthetic construct
  source 1..120: mol_type = other DNA
gctgctttcggaaaagacttctggaaggaacctctgggcactgcccctccagagcaagttcctccaaacaggaggagctttgagtctggggagagggaatacaaacttaggataggaatg

SEQ ID NO: 45020 - DNA, 120 bp, synthetic construct
  source 1..120: mol_type = other DNA
gcctagatttcccagatgcaattgccaacatctgtcaaggagaatttcttcctgaggctaccatgcatggtttgctaaacctctaccgcaccatgcagcgagggctgttagacaccaagg

SEQ ID NO: 45021 - DNA, 120 bp, synthetic construct; identical to SEQ ID NO: 12709
  source 1..120: mol_type = other DNA

SEQ ID NO: 45022 - DNA, 120 bp, synthetic construct
  source 1..120: mol_type = other DNA
gctggggtgggcagcctgaagcccattctgaggctccagggggacaagcatgtccactgccaatagcccctggcacctgagccctgggaaaggtattctggtgacaggcacattcgaagg

SEQ ID NO: 45023 - DNA, 120 bp, synthetic construct
  source 1..120: mol_type = other DNA
tttcacctgaaatgactgatatagttttcagggcccggaggactcggaaggtgcgtaaggctgagacattgcccaggtccacaaattcagttgtgtatctgtaacaagggaaattcacac

SEQ ID NO: 45024 - DNA, 120 bp, synthetic construct; identical to SEQ ID NO: 12710
  source 1..120: mol_type = other DNA

SEQ ID NO: 45025 - DNA, 120 bp, synthetic construct
  source 1..120: mol_type = other DNA
aaccctcctaacataggacttcggcttgagtgccgtaaggatgtccacacagcaagcttcccggtggctctcttggtgatggtgctaaggataactggtgctagaaggcaaccactctgc

SEQ ID NO: 45026 - DNA, 120 bp, synthetic construct
  source 1..120: mol_type = other DNA
aagcaagtgcatttctggtcctagttttggttcacatcttctgtgatctgttgatcagcttgtgcctggctcagaagtccttgaaatcatgaggtggaggtggcctgaatactcattgga

SEQ ID NO: 45027 - DNA, 120 bp, synthetic construct
  source 1..120: mol_type = other DNA
ttgaaatcatgaggtggaggtggcctgaatactcattggaaaaaacagagttcccaagacagaggcactggaagatgggaagagaggttgcctgaatatctgttcttccaactactcaca

SEQ ID NO: 45028 - DNA, 120 bp, synthetic construct
  source 1..120: mol_type = other DNA
gtctccaccggaggagtggcctccagaagcaagatgcccttcctggggtctgtcctgcttgggtccgagtgaggatcagcagggcaagtggctgtgggccccctcctggaacttgggcag

SEQ ID NO: 45029 - DNA, 120 bp, synthetic construct; identical to SEQ ID NO: 12711
  source 1..120: mol_type = other DNA

SEQ ID NO: 45030 - DNA, 120 bp, synthetic construct
  source 1..120: mol_type = other DNA
tcactctgctgggcggtctggacctccaggcccttccagtctgctcccagcttcccaattccccttcaggctttgaatatctacaggaaagaacttggccagctgagtcaaggggcttaa

SEQ ID NO: 45031 - DNA, 120 bp, synthetic construct
  source 1..120: mol_type = other DNA
actcgcaaagccctacacagatgggacgtcagcagacacactgccagagcttgctttcctctgatgacaccagaccctttctgtggtgtggcttccatttcgtctcctgtattcacttca

SEQ ID NO: 45032 - DNA, 120 bp, synthetic construct; identical to SEQ ID NO: 12712
  source 1..120: mol_type = other DNA

SEQ ID NO: 45033 - DNA, 120 bp, synthetic construct
  source 1..120: mol_type = other DNA
taccgggtgtggctaaggacagcagctccccttgcctaggatactggtttcgcggctgtctcttctagttacagggagtgagtggaatactgtgcaggttagagagggaaccaaccgtcc

SEQ ID NO: 45034 - DNA, 120 bp, synthetic construct
  source 1..120: mol_type = other DNA
atctctagcttatattctgcctgtctttgcttgtcccagggtggaacctgcccccagcacagtgtccccagcacagacagtgcttggcctccattcattgtctgccttctaggcagctgg

SEQ ID NO: 45035 - DNA, 120 bp, synthetic construct
  source 1..120: mol_type = other DNA
tctgtctgggagagcaatcatgagttagaggaagtcttaaaagaggacttacagggtaagggtgtggaatgtctggggccatgttggtgacttggtgtgctactgcctcttttattctac

SEQ ID NO: 45036 - DNA, 120 bp, synthetic construct
  source 1..120: mol_type = other DNA
ctttgcccctctcaggctggcaaaaccctcctccaggccagtctgctccttcagtgatggctaagctgctggccagaggcagacagctggacagcagacaggggcagaaagagcaaaggg

SEQ ID NO: 45037 - DNA, 120 bp, synthetic construct; identical to SEQ ID NO: 12713
  source 1..120: mol_type = other DNA

SEQ ID NO: 45038 - DNA, 120 bp, synthetic construct
  source 1..120: mol_type = other DNA
atggttaggagttgggagacttggttttagtctcagcattgcttctgattcagtctataactttgggcaagtgctaggttctctgtgagactcactttctccatctgtgtaatggaggtc

SEQ ID NO: 45039 - DNA, 120 bp, synthetic construct
  source 1..120: mol_type = other DNA
agatggaggattccactgaatggaatgtttcccttcactcaaatctcctttgatcatcctagagtcccttgttactgaaccattgcatctctaagagaatgcatttcaaagccagaatcc

SEQ ID NO: 45040 - DNA, 120 bp, synthetic construct; identical to SEQ ID NO: 12714
  source 1..120: mol_type = other DNA

SEQ ID NO: 45041 - DNA, 120 bp, synthetic construct
  source 1..120: mol_type = other DNA
cagagacacagcctgagccaaagcttggcccagggcaatgacttttcctgggatctggggctgcctctgtggtgatactgtcttgcccaggctccaggttggggagctaggaaaggctca

SEQ ID NO: 45042 - DNA, 120 bp, synthetic construct
  source 1..120: mol_type = other DNA
ccctactccattcccaagtcagtgcaacctcctcggctctgacatgaaaagttctccctctctctgaaacctcagatgtgcctccccactctgttctcagctgatgatcaagcttcttat

SEQ ID NO: 45043 - DNA, 120 bp, synthetic construct
  source 1..120: mol_type = other DNA
ccccttggcactgcattcccaccctcttgggccagctcacgggctttgctcctgcaatccccttgctcatctacatcatctagcattctctctctactggatcattttcaccagcctgca

SEQ ID NO: 45044 - DNA, 120 bp, synthetic construct
  source 1..120: mol_type = other DNA
acctcctctcttcccactctctcttgaaccctccttaaccaagtgcatgtccttttcctccactggaacctctcttgtcaagggcaccagtgaccttccccctctgtcaaatccaatagt

SEQ ID NO: 45045 - DNA, 120 bp, synthetic construct; identical to SEQ ID NO: 12715
  source 1..120: mol_type = other DNA

SEQ ID NO: 45046 - DNA, 120 bp, synthetic construct
  source 1..120: mol_type = other DNA
ttcaaatgtcatacatcccaaactggacttttgattttcttcctacttcagccagtgtcgctctctccaattttccatttcaaccaatgggaacaccgtccacctagcagctgctcaaac

SEQ ID NO: 45047 - DNA, 120 bp, synthetic construct
  source 1..120: mol_type = other DNA
ttccaagatatagcctcctaactactccgtctgtctctaccttctccagtctgtggtccacaccatagccaggggagtctctacagaatgtaaagcgggtcacagctctgcctgttctta

SEQ ID NO: 45048 - DNA, 120 bp, synthetic construct; identical to SEQ ID NO: 12716
  source 1..120: mol_type = other DNA

SEQ ID NO: 45049 - DNA, 120 bp, synthetic construct
  source 1..120: mol_type = other DNA
ccttcaataggtagattcagggattccaagcatcctagaaagtgagagctgaattgagcttctgataccacagcacacaacactatcctttcacatgtcgggaaactgagggtttgcaag

SEQ ID NO: 45050 - DNA, 120 bp, synthetic construct
  source 1..120: mol_type = other DNA
ttgctctgttgcccaggctggagtgcagtgatgtgatcacagctcactgcagccttgacttcatgggttcaagtgatcctcccaagtagctgagactgcaggtgtgtgccaccacaccca

SEQ ID NO: 45051 - DNA, 120 bp, synthetic construct
  source 1..120: mol_type = other DNA
gagccaccgcactcagccttcaaaatgcctttgatggttgagcctctgatcacgacttctgcagatgtcccatcagaacccagcatctgttcactgatacttccagggtggagtgcagcc

SEQ ID NO: 45052 - DNA, 120 bp, synthetic construct
  source 1..120: mol_type = other DNA
tcagttttctcacccataaaatgggctaagccatccccaggtagcctacttctctggctggtgtgaggatccactgtattgtgtcagtggtcgggtgctttaaaatgtgccaaacattga

SEQ ID NO: 45053 - DNA, 120 bp, synthetic construct; identical to SEQ ID NO: 12717
  source 1..120: mol_type = other DNA

SEQ ID NO: 45054 - DNA, 120 bp, synthetic construct
  source 1..120: mol_type = other DNA
tgtctctccccaccaggatgagctcagggcctccaccctaccttcctccagcctgtgtgcagagctgcatgtggactgcagggaggaagccagaaagagaggggtggtctggggcctggg

SEQ ID NO: 45055 - DNA, 120 bp, synthetic construct
  source 1..120: mol_type = other DNA
aacgcgtgcaggcagaagcctcgagccagaatcttgaccagagactcaaaggtgtaaatggcggtgaaggtgtacctgggcaggagaggccggtggggtttcttagggaggcctgagcag

SEQ ID NO: 45056 - DNA, 120 bp, synthetic construct; identical to SEQ ID NO: 12718
  source 1..120: mol_type = other DNA

SEQ ID NO: 45057 - DNA, 120 bp, synthetic construct
  source 1..120: mol_type = other DNA
cagcagctagcaatgggcccagtcaatcctcaactgcttacagggtgggtgggtccagctgtccaccttgggcttgaaggggtgttgatattataatgcatggggctgatgggagtcggg

SEQ ID NO: 45058 - DNA, 120 bp, synthetic construct
  source 1..120: mol_type = other DNA
ccagctgagagcactgctaggttctgtgtgaacatggagaacaactaggcagactgctttgggaagagagctgccccaacattctgttggtctcctgaaaactgcagccaaatgcagtaa

SEQ ID NO: 45059 - DNA, 120 bp, synthetic construct
  source 1..120: mol_type = other DNA
ggcagcagagtgtgttactgaagtggggatagccctggggtacctcctagctgcctacctcctagctgcctacctcctagctgcatggcatcaggccagctatttctctaattcttagtc

SEQ ID NO: 45060 - DNA, 120 bp, synthetic construct; identical to SEQ ID NO: 12719
  source 1..120: mol_type = other DNA

SEQ ID NO: 45061 - DNA, 120 bp, synthetic construct
  source 1..120: mol_type = other DNA
catggcatggaatggaaaggaagggagggggccacgtggagaagaggccctgaagatactcactcgacatacttggtccagggtggagggtcgtgctgggccatgaacacgcagttggtg

SEQ ID NO: 45062 - DNA, 120 bp, synthetic construct
  source 1..120: mol_type = other DNA
aggccagtgctaccagacaataaacagggtctccaaggagacacactggggctgtgaccagtccatgccaatccccctccacccaggctggtctctttcccttccccggcacttgcagct

SEQ ID NO: 45063 - DNA, 120 bp, synthetic construct
  source 1..120: mol_type = other DNA
ccgcagtcaggcgaggggccctgtcctcagtcacataggagagaaatgggcatttataaattgctcctcagggggagggcaaggccagagtggcagggctctgagttccctcctccactt

SEQ ID NO: 45064 - DNA, 120 bp, synthetic construct
  source 1..120: mol_type = other DNA
ggctgcttcctgcctgtgcacctagtcttcaagctagccctctgctccacctgggaatctccttctcaccctgcaggagcccgtcagtaggaccccacccaactccctagcagcctgtcc

SEQ ID NO: 45065 - DNA, 120 bp, synthetic construct; identical to SEQ ID NO: 5347
  source 1..120: mol_type = other DNA

SEQ ID NO: 45066 - DNA, 120 bp, synthetic construct
  source 1..120: mol_type = other DNA
tctcacaaatccctacccagccccagaggagtggctaggccttccactccctgtggctgcccccaagcgctcaacaccatgcccggcctcagccccgtatgcacagctgccaaactggtg

SEQ ID NO: 45067 - DNA, 120 bp, synthetic construct
  source 1..120: mol_type = other DNA
tgcctctcgggaatctaaccaggtagatgccctccgtgctgctcctcttctagggagtcaggcaatcaggaaatcagcatctcaaaccagcctccagtttataattatttagtttctcat

SEQ ID NO: 45068 - DNA, 120 bp, synthetic construct; identical to SEQ ID NO: 12721
  source 1..120: mol_type = other DNA

SEQ ID NO: 45069 - DNA, 120 bp, synthetic construct
  source 1..120: mol_type = other DNA
ttaacaagccccccaaccagtctttattcatccccacggatctgctgctaagcatctactggggagcccaggtgactcctaaaatatgcaagcaatgatgctaagagtgaatattcattg

SEQ ID NO: 45070 - DNA, 120 bp, synthetic construct
  source 1..120: mol_type = other DNA
gaggttaagttgaaggtcactgtggtaggcagaataatgcccccaccacccccaaggtggccatggaggaatccccggaaactgtgaatatgctaatttgtatgacaaaatgagaccgtg

SEQ ID NO: 45071 - DNA, 120 bp, synthetic construct
  source 1..120: mol_type = other DNA
agagatcctcctgcctcagcctcctgagtaactaggactacaggtgcacactaccatagccagctaatttttaatttttttttgtagacacaacgtcttaccatgttgcttagctggtct

SEQ ID NO: 45072 - DNA, 120 bp, synthetic construct; identical to SEQ ID NO: 12722
  source 1..120: mol_type = other DNA

SEQ ID NO: 45073 - DNA, 120 bp, synthetic construct
  source 1..120: mol_type = other DNA
cctctgacctccaaagctgtaaggtgataaatctgctttgctttaagccactgcattggtggtaatttgttacagcattcctgggaaagtactcctggtaccaagctgatcaatggctga

SEQ ID NO: 45074 - DNA, 120 bp, synthetic construct
  source 1..120: mol_type = other DNA
ctgcatgagtcatgctgcttctggctctcacatgccaagcaggtaagctattccacgcctggcctctgccacccatggggcggtgtgaaaaccaaacgaggtagagagcaccgtcgaatg

SEQ ID NO: 45075 - DNA, 120 bp, synthetic construct
  source 1..120: mol_type = other DNA
aacgctctgacatgggatattatgaaaaaaccaaacatgcctctggctgggctgggcaggaaggcttcctggaagaggcatttagataagcaccaaggctggccagggttgctccagcaa

SEQ ID NO: 45076 - DNA, 120 bp, synthetic construct
  source 1..120: mol_type = other DNA
gggggaacaggccccattgcagggagcagtggtgtgaacaggctgccttgtactacaggccttggctggacccaggcagaggtgagtgagacttgaacacccagactcagggaagagcca

SEQ ID NO: 45077 - DNA, 120 bp, synthetic construct; identical to SEQ ID NO: 12723
  source 1..120: mol_type = other DNA

SEQ ID NO: 45078 - DNA, 120 bp, synthetic construct
  source 1..120: mol_type = other DNA
gtttgcactgccttgtaatttcaggctgatgattgagctggtcccttgtgtgggctgaggcaaaggccagctctccaggtctatgctcagctgaacatcttcaatcttgtcatgtcattg

SEQ ID NO: 45079 - DNA, 120 bp, synthetic construct
  source 1..120: mol_type = other DNA
aaccacccaaagaaaaggtaattaactctggaggggtattttcatgtgtttgtgctattaaatcaacaggcacacacacatacaccacagacatgtggtttgattgcccatttgaatctg

SEQ ID NO: 45080 - DNA, 120 bp, synthetic construct
  source 1..120: mol_type = other DNA
gtttcttttatttaatcccagcaggaacacattctgcaggattataacaaaaatacatataaaaaaatcattccacatgcccatatttactttttggtaacttcccagagatacactgca

SEQ ID NO: 45081 - DNA, 120 bp, synthetic construct; identical to SEQ ID NO: 12724
  source 1..120: mol_type = other DNA

SEQ ID NO: 45082 - DNA, 120 bp, synthetic construct
  source 1..120: mol_type = other DNA
cataaaaatttaagcacagcaaaagttcaccattcaaaacatgagacctgatgttctttagaaatgcatagtgactgataatgggcacaggatttcttttggggtggtgcaaatgttctg

SEQ ID NO: 45083 - DNA, 120 bp, synthetic construct
  source 1..120: mol_type = other DNA
aagaccagcatggccaagatggtgaaaccccacctttactaaaaatacaaaaattagcccggcgtggtggcggacgcctgtaatcccagctactcaggaggctgaggcagagaatcgctt

SEQ ID NO: 45084 - DNA, 120 bp, synthetic construct; identical to SEQ ID NO: 12725
  source 1..120: mol_type = other DNA

SEQ ID NO: 45085 - DNA, 120 bp, synthetic construct
  source 1..120: mol_type = other DNA
caacatcctggtgaagctgatgctactggtccacacaccacactcaatgtcaaggctcaacagtgttgctgaggggctgctcccaaaccccacaaatctaggcctcttcttccccccagt

SEQ ID NO: 45086 - DNA, 120 bp, synthetic construct
  source 1..120: mol_type = other DNA
ttccctggggcagctgtcctgggggatagaggctggctccgagccctcagggccagtttttccaggtggaagcagcacctcacagcctcagagccattgctcaatggacagtctggccag

SEQ ID NO: 45087 - DNA, 120 bp, synthetic construct
  source 1..120: mol_type = other DNA
gggcttctgtggctgccaaacagtgctgggttggttagatacctggaggagaagccccaggtgagagctggaggatgctgttagagaggccacacccccggagtgaggccagagacgggc

SEQ ID NO: 45088 - DNA, 120 bp, synthetic construct; identical to SEQ ID NO: 12726
  source 1..120: mol_type = other DNA

SEQ ID NO: 45089 - DNA, 120 bp, synthetic construct
  source 1..120: mol_type = other DNA
gtctcatgaaccccaccagaaaggcaggggtaggctggagagcagacacgtggttggacgcatgcattttactgcacatgtgcatgcagacaccacttgccatgcatgcccctccaatga

SEQ ID NO: 45090 - DNA, 120 bp, synthetic construct
  source 1..120: mol_type = other DNA
tatttagtccctcactaggtatctgtaatcctgatgcctcctgccttggccagaggttagtgagtgaagtctttgtcttggcctcaaaaaagtccattcagagaaggggctgaaggggac

SEQ ID NO: 45091 - DNA, 120 bp, synthetic construct
  source 1..120: mol_type = other DNA
ctggccaaagggaggcctgcccaggccctcgcagtgaaatactcatgcctctgactgcagctggcaccaccctcccggaaggctccatctatggggccccttctctgaagtccagagaac

SEQ ID NO: 45092 - DNA, 120 bp, synthetic construct; identical to SEQ ID NO: 12727
  source 1..120: mol_type = other DNA

SEQ ID NO: 45093 - DNA, 120 bp, synthetic construct
  source 1..120: mol_type = other DNA
gtgtggtggggagggatatttggagccaatatcagagcccgacagacgtcatttcttctgggatcctcagtagcttagcttctagaatgttctgaagaatcagaagagggtttctcaaac

SEQ ID NO: 45094 - DNA, 120 bp, synthetic construct
  source 1..120: mol_type = other DNA
tcttcatttccaaccagctcccaggtcatgaccatgcatttgtcttaggaccagcagggaatcagcgctactctcactcctaaactagaatggaggtggggtgggggcagcacgtgcaca

SEQ ID NO: 45095 - DNA, 120 bp, synthetic construct
  source 1..120: mol_type = other DNA
ttggtggcactgaaccggaagatggtcttgcctttattcagtacgatgaaagtctggggacagacagtagcattaggcccttgtgtagaaaggcttttgggggcagcttttggctcagag

SEQ ID NO: 45096 - DNA, 120 bp, synthetic construct; identical to SEQ ID NO: 12728
  source 1..120: mol_type = other DNA

SEQ ID NO: 45097 - DNA, 120 bp, synthetic construct
  source 1..120: mol_type = other DNA
ggaaggacttacgggtgaggagaagggaaaacgaaaatgcagaagcagtcccctgagagagcttttcttgggaccctgtctcctggagtccaggacaaatgtcagccccatcccacagga

SEQ ID NO: 45098 - DNA, 120 bp, synthetic construct
  source 1..120: mol_type = other DNA
tgctgagacacatgcacatcaggtgcccaagcagcccttgaggacagcagtgcctccccacctgccccggtgtgtggtggtcacagctctgtggcctcacggaggtctaggggaatgtca

SEQ ID NO: 45099 - DNA, 120 bp, synthetic construct
  source 1..120: mol_type = other DNA
ctgaccagatagattaggaccaaaagttctgttgtggtgcctccattgccttgtggggctgcaggcagcgtggccagggatcaacaagtggaaacagaaagtgagaggccggaatcatcc

SEQ ID NO: 45100 - DNA, 120 bp, synthetic construct
  source 1..120: mol_type = other DNA
gtcaggtccacctgccgtggagcctgcctgtcccagctaacttcagcctaatcgccactcatcctctccccataagcttgactcacactaccagctgtggccttaaccctaaccccaatt

SEQ ID NO: 45101 - DNA, 120 bp, synthetic construct; identical to SEQ ID NO: 12729
  source 1..120: mol_type = other DNA

SEQ ID NO: 45102 - DNA, 120 bp, synthetic construct
  source 1..120: mol_type = other DNA
cccccatgagcttcctcagcctggtgctgactgcagtactgtgcctggccactgtcttcctcatactcagccttctgggaaaaatacctcccccaaattcaaatccaccttcctctggaa

SEQ ID NO: 45103 - DNA, 120 bp, synthetic construct
  source 1..120: mol_type = other DNA
gacaggggcagttacctcttgggtcggagccatgctaggaggaagcccaagtctccctgccctagcagacaaaagccacttcccttccctatgatcagaagggacaatggcagaacatca

SEQ ID NO: 45104 - DNA, 120 bp, synthetic construct
  source 1..120: mol_type = other DNA
ccgtggcctgagccagccagcatagccatgcatagttcgtgggtgtggggactacatgctgtccccattaaggagaaaggaccacaggctatgctctgtggcccaaactcaggcagggcc

SEQ ID NO: 45105 - DNA, 120 bp, synthetic construct; identical to SEQ ID NO: 12730
  source 1..120: mol_type = other DNA

SEQ ID NO: 45106 - DNA, 120 bp, synthetic construct
  source 1..120: mol_type = other DNA
gaggtgggtggtagtcaccttttgggtgctatagaaggggtccaggtcctccaggggctctccgatgagctcttggggtggattgccatagagatctggcagctttttggaggcctgcag

SEQ ID NO: 45107 - DNA, 120 bp, synthetic construct
  source 1..120: mol_type = other DNA
tgtgaacctgcggaagctgctggtgccccgaggtaataggaagtttgccatcttctcatcctgcttctgggcacaggctctcctcacgttgcctgtggggaagctggaagacacagacaa

SEQ ID NO: 45108 - DNA, 120 bp, synthetic construct
  source 1..120: mol_type = other DNA
accatttgcagagaggctccagaccccaggatgccaacaactccacaggcacacctgggcaacactggcctgggtaaacccaaagcccccccaggctacgaggcacacatgtagacaggc

SEQ ID NO: 45109 - DNA, 120 bp, synthetic construct; identical to SEQ ID NO: 12731
  source 1..120: mol_type = other DNA

SEQ ID NO: 45110 - DNA, 120 bp, synthetic construct
  source 1..120: mol_type = other DNA
ccttccttggaaaggtcaaaattaccctggcactttaggtaacccgaagataactctgccttccatctcccccatcccctttaaaaatacatacatgcttacagattttgtaataaccaa

SEQ ID NO: 45111 - DNA, 120 bp, synthetic construct
  source 1..120: mol_type = other DNA
tgctgatcccaagtgacagcagaaccggaaaacagtgaccactcatcagcgaggacatccagccggcacaggcatgtgatgccaaaccgggagaatgtggcccctggtggcctcaaacaa

SEQ ID NO: 45112 - DNA, 120 bp, synthetic construct
  source 1..120: mol_type = other DNA
ggctgcatcgctaatgaccacatcaaaccagggaatggtgggcacccgttcaagagggcacggtggacacctgttggacatctctgccagaacagaatcctttcccctcacgagggtcag

SEQ ID NO: 45113 - DNA, 120 bp, synthetic construct; identical to SEQ ID NO: 12732
  source 1..120: mol_type = other DNA

SEQ ID NO: 45114 - DNA, 120 bp, synthetic construct
  source 1..120: mol_type = other DNA
tttctactctataaaagcatttccctgtctcccttccatgtttgagtgaacagacatctgtaacactcatcaatgcatgtgagtgaggacttttttttcttagctcatggatatttgggt

SEQ ID NO: 45115 - DNA, 120 bp, synthetic construct
  source 1..120: mol_type = other DNA
aaacagtctggatgacagcagcttcttacagggcaaccctctccactgtgagcaatcagttccataaattgggaagccacctcttttgcttggacttaatttctaaaaacagtgttctct

SEQ ID NO: 45116 - DNA, 120 bp, synthetic construct; identical to SEQ ID NO: 12733
  source 1..120: mol_type = other DNA

SEQ ID NO: 45117 - DNA, 120 bp, synthetic construct
  source 1..120: mol_type = other DNA
ttaggctgccctccagtcactaaataccctcctttgcccagggaatcactctcctcactgctaatggcatagaccagttttgcctgtctgtgtattaatagttcaggggcccttcttaac

SEQ ID NO: 45118 - DNA, 120 bp, synthetic construct
  source 1..120: mol_type = other DNA
tttccttgaattgtgaatgtaggcaacaaagcagaaattgtgaccaaaagaaactgcagctatttccctgtcatgttacagttgctgctggcctctcaaataacattaatactcatcacg

SEQ ID NO: 45119 - DNA, 120 bp, synthetic construct
  source 1..120: mol_type = other DNA
ttggtttcctttttaatcctatgtgttttattttgtctcaaaatatgtgcttctgagatgggcttcgctcaactggtagagaaaggttaagaccctggcttggtccttgctcaggtgctg

SEQ ID NO: 45120 - DNA, 120 bp, synthetic construct; identical to SEQ ID NO: 12734
  source 1..120: mol_type = other DNA

SEQ ID NO: 45121 - DNA, 120 bp, synthetic construct
  source 1..120: mol_type = other DNA
ggcctccagcagagcatccactcgctcggggccctggcctgggaggggtatagtctgcccaagggagctgctgaaaccagattccagatgaagctctctgctgcagcagccgggcagcct

SEQ ID NO: 45122 - DNA, 120 bp, synthetic construct
  source 1..120: mol_type = other DNA
ccctgcccttcctttagcagctcagggcccacgccctgctgtggccaagcctggctgagtcctgcctgcagggcttccggtgctgccagggtgaggagggctcaggggtggtctgaggat

SEQ ID NO: 45123 - DNA, 120 bp, synthetic construct
  source 1..120: mol_type = other DNA
gttggtctcacatagccccagagtttggggaggctggacctggcttgattgtaagaccacagtcgctcatcccctagatgctagcacctcatgattctccaccccccaccaggacagctg

SEQ ID NO: 45124 - DNA, 120 bp, synthetic construct
  source 1..120: mol_type = other DNA
tagagccccacccccaactccatcctgccccaggttcatcagcttctggaactggatgcatccctccctgcatccggaaggctcctgagagctcatgatgggagcagactgtgaatcttc

SEQ ID NO: 45125 - DNA, 120 bp, synthetic construct; identical to SEQ ID NO: 12735
  source 1..120: mol_type = other DNA

SEQ ID NO: 45126 - DNA, 120 bp, synthetic construct
  source 1..120: mol_type = other DNA
gtgtattcacatcaaggtagagatgctgcacaaggagaatattaactgttcacaccagaaactagacccccctgcactgttttctcaactggctttcctgaaggagggttttctgaatgc

SEQ ID NO: 45127 - DNA, 120 bp, synthetic construct
  source 1..120: mol_type = other DNA
tgtaggcactgtctgaagtgggagatggatgtggggggaactacttgtcccggtttacatgggactttcctcattttggcagtaaaatttctgcaccttgggataccccccagtcctgga

SEQ ID NO: 45128 - DNA, 120 bp, synthetic construct; identical to SEQ ID NO: 12736
  source 1..120: mol_type = other DNA

SEQ ID NO: 45129 - DNA, 120 bp, synthetic construct
  source 1..120: mol_type = other DNA
gcactcgccttctgcctgcccctcagtgctaaagaagaggctcaggaagagggtgtgggtgccctcaaaacaggagctcactccccataggtggaggtcaggactccctgatcacactct

SEQ ID NO: 45130 - DNA, 120 bp, synthetic construct
  source 1..120: mol_type = other DNA
gatgtagcttgacaagctgtaacttcaccccagtcatccacaggcccccaaatgtggagatgacagccaggaacctcgctcactccaggcttccttgcttggagtcacccatcagaactt

SEQ ID NO: 45131 - DNA, 120 bp, synthetic construct
  source 1..120: mol_type = other DNA
tacatggtcctaaaaatgactacacagaatacttttcttcccaaagtgatggatcccaaatcaacaagagataatgaggggatgaggaagagtcatcagtaaagagagtctgtggtggct

SEQ ID NO: 45132 - DNA, 120 bp, synthetic construct; identical to SEQ ID NO: 12737
  source 1..120: mol_type = other DNA

SEQ ID NO: 45133 - DNA, 120 bp, synthetic construct
  source 1..120: mol_type = other DNA
taatatctattttacagggctgctgtgaaacataaatgtattgatatttgcacatgcttgacacacagaaagtgccaaatgaatttagttggtattgtggttattgttgttattattatt

SEQ ID NO: 45134 - DNA, 120 bp, synthetic construct
  source 1..120: mol_type = other DNA
cacaggatggagtagtttacttgcacgcctgcctccctcctggatttttgtcctggtctcccaaagcagggactggtgaatgaaggaatgaaagaatgagggagtgtgagattaaccttc

SEQ ID NO: 45135 - DNA, 120 bp, synthetic construct
  source 1..120: mol_type = other DNA
gcactgcacttagtgcagttcgtggatcaccttacttcatccttgcaacaatcctaggaagacgggggttattagcctcgctttacagatgggaaatctgactgtaggagagatgaagtg

SEQ ID NO: 45136 - DNA, 120 bp, synthetic construct
  source 1..120: mol_type = other DNA
ctgtgtctgtgacccccacttcaaggctaagagtcagccctgtcagcctcatctgagcctggttctccctctatgcagcccagatgctcccagggagacctagccgatttctgcccatgc

SEQ ID NO: 45137 - DNA, 120 bp, synthetic construct; identical to SEQ ID NO: 12738
  source 1..120: mol_type = other DNA

SEQ ID NO: 45138 - DNA, 120 bp, synthetic construct
  source 1..120: mol_type = other DNA
tgtgactcatattatatttctgttggatggcactggcatcaagttccagccaccaggccctaagcccttaaaaaaattctacctgaggccgggcacagtggctcatgcctgtaatcccag

SEQ ID NO: 45139 - DNA, 120 bp, synthetic construct
  source 1..120: mol_type = other DNA
gcacctgtaatcccagctaccaggaggctgaggcaggaaaattgcttgaactcgggaggcagaggttgcagtgagcggagattgcaccactgcactgcactccagcttgggcgacagagc

SEQ ID NO: 45140 - DNA, 120 bp, synthetic construct; identical to SEQ ID NO: 12739
  source 1..120: mol_type = other DNA

SEQ ID NO: 45141 - DNA, 120 bp, synthetic construct
  source 1..120: mol_type = other DNA
acattggtccgtccttgcacggggcctcagctaaccagctccccacaggctccgctcctttgaggctgcataggcattaaccctgtccagtctggagcccagttctgggggagatgggag

SEQ ID NO: 45142 - DNA, 120 bp, synthetic construct
  source 1..120: mol_type = other DNA
ggaatgccctcatttacatacatttacatctcatttattccaacacccaggctgaagccgaggctaattcagctgacaggaaaaccccacccgctttagctctgctgctctgctgaagtg

SEQ ID NO: 45143 - DNA, 120 bp, synthetic construct
  source 1..120: mol_type = other DNA
gacaaactggcctgggggtagccactctcttcactgaaaggtgggtggccctgcttttttcttcatagcccttccccacagtaaggatgggggccgggggcttggcagcagcttattcaa

SEQ ID NO: 45144 - DNA, 120 bp, synthetic construct
  source 1..120: mol_type = other DNA
ttgtcagcccctttacacatgcccaggtccatccacagggtatctagaatatgctgagtggcacttcgctgtcagccaaggcagcactgcccctggccctgggtctccagggtggggacc

SEQ ID NO: 45145 - DNA, 120 bp, synthetic construct; identical to SEQ ID NO: 12740
  source 1..120: mol_type = other DNA

SEQ ID NO: 45146 - DNA, 120 bp, synthetic construct
  source 1..120: mol_type = other DNA
tctagggtctcttagtgtccagagggaaataagccaatcaaccaatacactaaatttatgccacaaaagtgtccatgatgtattatagccaaatgtgcaacccttttttcttaatattct

SEQ ID NO: 45147 - DNA, 120 bp, synthetic construct
  source 1..120: mol_type = other DNA
cccagaaagtcccactattcctttcagtcaactgctctgatttctatcacctaggttggttttgcctgttctggaacttcatgcatatggaattctaccttatgggctcttctgtgtcag

SEQ ID NO: 45148 - DNA, 120 bp, synthetic construct; identical to SEQ ID NO: 12741
  source 1..120: mol_type = other DNA

SEQ ID NO: 45149 - DNA, 120 bp, synthetic construct
  source 1..120: mol_type = other DNA
aagctcagcaattagacatctaataggcacctaggctccgcaagcaagtgggggctttccttgggtttccagttttgctggcaactagctgtcgctttatttaactggcagtctgtgctg

SEQ ID NO: 45150 - DNA, 120 bp, synthetic construct
  source 1..120: mol_type = other DNA
ggccctcagcctccttgtaccccacaccagctggtgtcccttgagtggagccctgggctcagtacagaatgaatgcggggctggggttcttcctaggagcatgcccagaggcagcagagc

SEQ ID NO: 45151 - DNA, 120 bp, synthetic construct
  source 1..120: mol_type = other DNA
ggctggtcccacccatggtctgatttttcccccatcttagatcatttggggtacctcccagccaagcctgagtgtagggggatggctaatgtagcttgagtaccctgagaactgatttgg

SEQ ID NO: 45152 - DNA, 120 bp, synthetic construct
  source 1..120: mol_type = other DNA
aggagaagcctctctcctgttcaaaatccattcccagaaaccacgggggctccctgggcaagggtaagggtgaagtcctgtctgagctctgcccacttccccgtgtgaccttgagcctat

SEQ ID NO: 45153 - DNA, 120 bp, synthetic construct; identical to SEQ ID NO: 12742
  source 1..120: mol_type = other DNA

SEQ ID NO: 45154 - DNA, 120 bp, synthetic construct
  source 1..120: mol_type = other DNA
ctggctgctctgggccacaatgacctcccaccagggaagctcagcccctaagttcaaccttacattcttcctgtcctgggcggatctctccctggccctctgaggcgaacctaggaggtc

SEQ ID NO: 45155 - DNA, 120 bp, synthetic construct
  source 1..120: mol_type = other DNA
atgttggacttggggcataccaggtaccccttggggaaatgaagttgcagggggaggctgtgggtaccaagctccccagcccatggctgtggctcttcagggaagacaagtgacggcagg

SEQ ID NO: 45156 - DNA, 120 bp, synthetic construct; identical to SEQ ID NO: 12743
  source 1..120: mol_type = other DNA

SEQ ID NO: 45157 - DNA, 120 bp, synthetic construct
  source 1..120: mol_type = other DNA
ctctgctccaacccacagagtttgcccctgcctcagggcctttgcacttgcagttccctctgtaacattctttccctagacctcctcgggcttggttctttcatgttattcaggtctcag

SEQ ID NO: 45158 - DNA, 120 bp, synthetic construct
  source 1..120: mol_type = other DNA
ttctgtatggattggtttaatggtatctccctacttgtatgtaaacttcataagaacaattgttatagcttgtacaccttctagaaccttccatggcccaaaggcatgaactctgcctca

SEQ ID NO: 45159 - DNA, 120 bp, synthetic construct
  source 1..120: mol_type = other DNA
tccacaggctactcactggccctgctttttcctctctctgccttcttcatgtatttagccgcagggcttttactccagctcccttctcccaatcctatcaccctggatacctgccctaga

SEQ ID NO: 45160 - DNA, 120 bp, synthetic construct; identical to SEQ ID NO: 12744
  source 1..120: mol_type = other DNA

SEQ ID NO: 45161 - DNA, 120 bp, synthetic construct
  source 1..120: mol_type = other DNA
cagctcccttctatctctctcctccctcttcaaccatcaaactctttgaaagagctgtctatacatgctgtctccacgtcctcacctccagctcgcttctcaacccactccaaactggct

SEQ ID NO: 45162 - DNA, 120 bp, synthetic construct
  source 1..120: mol_type = other DNA
ggagtttctcctaccaaggtcaccagcaccctcaccatggctcgatctaatggacacttctttttaaattattcattctttttctatctatccatgaacttctgagaatgcaccttaagt

SEQ ID NO: 45163 - DNA, 120 bp, synthetic construct
  source 1..120: mol_type = other DNA
tctctgcagacttctcctgctttgatggttggagtatttctgggctcctgactcagcccccttccttcttaccctctacaccacgttagaatcacctgggtgcttccaaaactcccgatg

SEQ ID NO: 45164 - DNA, 120 bp, synthetic construct
  source 1..120: mol_type = other DNA
ccaagtgatgctaatgtcaccaggagtgagaaccccaggtctgcactctcgctgggcaatctaactcagtgccacatctccaatgaccaacctctgctgaaagctctaagtttccatttc

SEQ ID NO: 45165 - DNA, 120 bp, synthetic construct; identical to SEQ ID NO: 12745
  source 1..120: mol_type = other DNA

SEQ ID NO: 45166 - DNA, 120 bp, synthetic construct
  source 1..120: mol_type = other DNA
gagctggggaggtggtatagtacacagcagatattgacacttgggctcaaacccaagttctgctacttagaaaatgtgacggtgtgcaactatttaacctttctggaccaccagtttcac

SEQ ID NO: 45167 - DNA, 120 bp, synthetic construct
  source 1..120: mol_type = other DNA
ttagctatttttagtaacattactgaggataaattcccaattcctgagcagagctcacaagggcccccgtgactgtgaccttggctttaactccgctcttctcttcctcacaccatgggg

SEQ ID NO: 45168 - DNA, 120 bp, synthetic construct; identical to SEQ ID NO: 12746
  source 1..120: mol_type = other DNA

SEQ ID NO: 45169 - DNA, 120 bp, synthetic construct
  source 1..120: mol_type = other DNA
ctcttctcccatccccagctgtctctggtgcttcccactagtcctccaagcccaatcttcatgctgagtgagtcaatactagaatttttccagaggagctttgatcaacacacagagagg

SEQ ID NO: 45170 - DNA, 120 bp, synthetic construct
  source 1..120: mol_type = other DNA
cccttctgctcagatcctcctggctcagttctaggcttatttgccccacagaaagtagatctcaaggtgtcttcacattgcgtggtgcccccaatccactgattctctagatgacattga

SEQ ID NO: 45171 - DNA, 120 bp, synthetic construct
  source 1..120: mol_type = other DNA
ctgtgttccacaccctggctgtcacctgacctcaccctctccatgctcctgcaacagcagcctgaccaccctcattccacctcgcactcattaccaccgattcatatgcacctgcccaat

SEQ ID NO: 45172 - DNA, 120 bp, synthetic construct
  source 1..120: mol_type = other DNA
acctgggagagggcttgggatgccatggcatggtgggggtcacgtggtttgccatctggatgatactgcctaggctcactgggagacacacctggggtctcagcaggaggcgagcagatg

SEQ ID NO: 45173 - DNA, 120 bp, synthetic construct; identical to SEQ ID NO: 12747
  source 1..120: mol_type = other DNA

SEQ ID NO: 45174 - DNA, 120 bp, synthetic construct
  source 1..120: mol_type = other DNA
tctgttccggctcagagagaggagggcagagaactctctccaatctcaccgcaaagagatctccaccccttcgagaagcacagagatcagacagaggagatgcggcccctttagggcgtc

SEQ ID NO: 45175 - DNA, 120 bp, synthetic construct
  source 1..120: mol_type = other DNA
atatccagccctgctcggtcagcccccgcaaaccccgctctctggaaccacattcatggcgcgcctagtcgccgctctgaccttggggtctccggcctccggtatccgggtcccaatccc

SEQ ID NO: 45176 - DNA, 120 bp, synthetic construct; identical to SEQ ID NO: 12748
  source 1..120: mol_type = other DNA

SEQ ID NO: 45177 - DNA, 120 bp, synthetic construct
  source 1..120: mol_type = other DNA
gtcccccggccgggccccggggtgggcggctgctgcttggcgcggactcggctcggcgcggggctcggggcactgggcgcaggctcagcggccccgggggagcgatccctgcatcctacg

SEQ ID NO: 45178 - DNA, 120 bp, synthetic construct; identical to SEQ ID NO: 12749
  source 1..120: mol_type = other DNA

SEQ ID NO: 45179 - DNA, 120 bp, synthetic construct
  source 1..120: mol_type = other DNA
ctgcaactcaggaaataaaggtcgcttccattctttggtgagcctactgtgtgccggtctggaaatatctgcttaaacgatcagtcatcgtccaagacccaattcgcctctcacctacgt

SEQ ID NO: 45180 - DNA, 120 bp, synthetic construct
  source 1..120: mol_type = other DNA
ttgtacgtgtttatgggggtacagtataatgttttaatacatgtgtacatcgaataatcaaatcagcgtagttagcatgtccatcacctcaaatctttatcatttatttacggtaataac

SEQ ID NO: 45181 - DNA, 120 bp, synthetic construct; identical to SEQ ID NO: 12750
  source 1..120: mol_type = other DNA

SEQ ID NO: 45182 - DNA, 120 bp, synthetic construct
  source 1..120: mol_type = other DNA
ttttttttttgagacggagttttgctcttgtcgcccaggctggagtgcaatggcacgaacttggctcactgcaacctccacctaccgggttcaagcgattcttccgcctcagcctcccag

SEQ ID NO: 45183 - DNA, 120 bp, synthetic construct; identical to SEQ ID NO: 12751
  source 1..120: mol_type = other DNA

SEQ ID NO: 45184 - DNA, 120 bp, synthetic construct
  source 1..120: mol_type = other DNA
cacatatttgtgaattttccaccttttcttttgccattgatttccagattttaataaaatgtctcttgtgcggcatatagttgaatcttttttttaattcattatattcagccacttcat

SEQ ID NO: 45185 - DNA, 120 bp, synthetic construct
  source 1..120: mol_type = other DNA
cacctcctgggttcacgccaatctcctggtttaggagtagctgggactacaggcgccccccaccacgcctggctaattttttgtatttttagtagagacgagatttcaccgtgttagcca

SEQ ID NO: 45186 - DNA, 120 bp, synthetic construct
  source 1..120: mol_type = other DNA
taaagtaaatagtggccgaggtgggtggatcgtgtgagtcctggagttcgagaccagcctgggcaacatggcaaaaccccttttctactaaaaaaaattagtcaggtgtggtagtacaca

SEQ ID NO: 45187 - DNA, 120 bp, synthetic construct; identical to SEQ ID NO: 12752
  source 1..120: mol_type = other DNA

SEQ ID NO: 45188 - DNA, 120 bp, synthetic construct
  source 1..120: mol_type = other DNA
agggccaactgtgcttgctgttgccgttttgtaaactgttctctgtcttacaacctttttgctcctcttttccactcttgtcatcctttatatttcgttgacttttttttttttgtagtg

SEQ ID NO: 45189 - DNA, 120 bp, synthetic construct
  source 1..120: mol_type = other DNA
tctgctcttttatgacccccttgtatgttgtggatgtcacaaattacatctttttatattgtctccattaacaaatttttatagttgtttttatacctttgtctttaatttctataccaa

SEQ ID NO: 45190 - DNA, 120 bp, synthetic construct
  source 1..120: mol_type = other DNA
aggctggagtgcagtggcgcgatcttggctcactgcaacctccatctcctgggttcaagcgattatcctgcctcagcctcccgggtagctgagactacaggcgcccgccaccatgcctgg

SEQ ID NO: 45191 - DNA, 120 bp, synthetic construct; identical to SEQ ID NO: 12753
  source 1..120: mol_type = other DNA

SEQ ID NO: 45192 - DNA, 120 bp, synthetic construct
  source 1..120: mol_type = other DNA
ttactcaatcatgttattttagtatagaaagtaggaatccctgccttcagtctgcatcagaatctcttagagggttgttaaaaattcattcgtcagggcccagtcctagagattctcatc

SEQ ID NO: 45193 - DNA, 120 bp, synthetic construct
  source 1..120: mol_type = other DNA
ggctagaagtccaagagcaaggtgttggcaggtttggtttctttcgaggcctcactccttgccttgcagatggccaccttttcactgtgtcctcacatttctctgtgcatgcacatcctt

SEQ ID NO: 45194 - DNA, 120 bp, synthetic construct; identical to SEQ ID NO: 12754
  source 1..120: mol_type = other DNA

SEQ ID NO: 45195 - DNA, 120 bp, synthetic construct
  source 1..120: mol_type = other DNA
tctgcctcctgggttcaagcaattctcctgcctcagactccccagtagctgggattacaggcacgcgccaccatgcttggctactttttgtacttttagtagagacggtttcgccatgtt

SEQ ID NO: 45196 - DNA, 120 bp, synthetic construct
  source 1..120: mol_type = other DNA
tgtcttctaataagctttctgcccctgtctttctcttatacgactctcataatgtgtatattgatctccttgatggagtccctaaggctttcttcactccttctcattcctttttttttt

SEQ ID NO: 45197 - DNA, 120 bp, synthetic construct
  source 1..120: mol_type = other DNA
aatttattttaattttttaattttttttttttttttgagacggagtctcgctctgttgcccaggctggagtgcagtggcacgatctcagctcactgcaagctccgccacctgggttcacg

SEQ ID NO: 45198 - DNA, 120 bp, synthetic construct; identical to SEQ ID NO: 12755
  source 1..120: mol_type = other DNA

SEQ ID NO: 45199 - DNA, 120 bp, synthetic construct
  source 1..120: mol_type = other DNA
gtgcctggcctcctctagtgaatttttcaattcagttactgtattcttcagctccaaaattttcatttggttattttttaatgttttctgtcttttttttggttttctcattttgttcaa

SEQ ID NO: 45200 - DNA, 120 bp, synthetic construct
  source 1..120: mol_type = other DNA
atttcgttcctttaataggaccatgttttcctctttattcatgtgcttggtaacttgtactggtgatttctacatttgaaaaatcatctgtctctcctggtctttgtactggtgattggc

SEQ ID NO: 45201 - DNA, 120 bp, synthetic construct
  source 1..120: mol_type = other DNA
ttcctttttcaggagcccataatctcttgctccctctagtgtctgcgtatgatactgcagtttctctggagctgctacaagtctcccagctgtcggtggcctccagacttttagagtatg

SEQ ID NO: 45202 - DNA, 120 bp, synthetic construct
  source 1..120: mol_type = other DNA
ggaggccaaggtaggcagatcacctgaggtcgggagttcgagaccagcctgaccaacatagagaaaccctgtctctactaaaaatacaaaatcagacgggcgtggtggggcatgcctgta

SEQ ID NO: 45203 - DNA, 120 bp, synthetic construct; identical to SEQ ID NO: 12756
  source 1..120: mol_type = other DNA

SEQ ID NO: 45204 - DNA, 120 bp, synthetic construct
  source 1..120: mol_type = other DNA
ggagaagctgggaggtgggagttttctcctgcttgttctgcactgagccaaggatgagtgatgagggagtgagtgcttgccagtctaaactgtcacctttgttctccatggttctttgtt

SEQ ID NO: 45205 - DNA, 120 bp, synthetic construct
  source 1..120: mol_type = other DNA
tctcaggtagaagctaggagctgggggttatctcatgatcatgcttgagcagggagggaagagactatggcaaatgagtgctacaaatttttctgctggattcgatgcagctggttttgt

SEQ ID NO: 45206 - DNA, 120 bp, synthetic construct
  source 1..120: mol_type = other DNA
ttcctactccaccatcttcacctcttgctgaggtcaccaccttgacatcatatcttgataagttgtcaacttctctggattgggagcctttgggggattagggatcatgctgtctctgtg

SEQ ID NO: 45207 - DNA, 120 bp, synthetic construct; identical to SEQ ID NO: 12757
  source 1..120: mol_type = other DNA

SEQ ID NO: 45208 - DNA, 120 bp, synthetic construct
  source 1..120: mol_type = other DNA
gatcttcccacttcagcctcctgagtagctgggaccacaggcaccatggtgggactaccccactatgcctggctaatttttgtatttttggtagagacagggtctcgctatgttgctcag

SEQ ID NO: 45209 - DNA, 120 bp, synthetic construct
  source 1..120: mol_type = other DNA
attgaatgcattcagcacctagtaagcattgagtaaatgatagcgatgatagtcgtcattattgtaaagatgtttgtggtttgttcatttcagatgcttgctctgtcaaggcacagccta

SEQ ID NO: 45210 - DNA, 120 bp, synthetic construct; identical to SEQ ID NO: 12758
  source 1..120: mol_type = other DNA

SEQ ID NO: 45211 - DNA, 120 bp, synthetic construct
  source 1..120: mol_type = other DNA
tcttgtttttagtctttttgctaaagaacatctgcagcacatgacagaaaagcagctgaacctctatgaccgcctgattaacgagcctagtaatgactgggatatttactactgggccac

SEQ ID NO: 45212 - DNA, 120 bp, synthetic construct
  source 1..120: mol_type = other DNA
atcctagataatttttttctttcttttttttttttgagactgagtttcactctcgttgcccaggctggagtgcaatggcatgatctcggctcactgcaacctctaccttccaggttcaag

SEQ ID NO: 45213 - DNA, 120 bp, synthetic construct
  source 1..120: mol_type = other DNA
tagtctcgaactcctgacctcaggtgatccgcccgcctcggcctcccaaaatcctgggattacaggcatgagccactgtgcctggcttataatttttttcttttattcatgaagtagaca

SEQ ID NO: 45214 - DNA, 120 bp, synthetic construct; identical to SEQ ID NO: 12759
  source 1..120: mol_type = other DNA

SEQ ID NO: 45215 - DNA, 120 bp, synthetic construct
  source 1..120: mol_type = other DNA
aaaaattcaaaaattagccgaacatggtggcggacaactgcagtctcagctacttgggaggctgaggcaagagaatcgcttgagcctgggagacagagattgcagtgagctgagattgca

SEQ ID NO: 45216 - DNA, 120 bp, synthetic construct
  source 1..120: mol_type = other DNA
ctatgagtaaaaaaacatccaaaacagtaatggcttaaacaaggtagaactgtctttctcatgacagaagtccagaggaaggcacactccagagctcatagaggggcttcaaaaagtcat

SEQ ID NO: 45217 - DNA, 120 bp, synthetic construct
  source 1..120: mol_type = other DNA
cctcctttgtagatcccgctcaggaaattatccagcatacttccacttatttgccattggccacagcttagttacttggctacgtctaaccataaggaaaaataatatagtctattccat

SEQ ID NO: 45218 - DNA, 120 bp, synthetic construct; identical to SEQ ID NO: 12760
  source 1..120: mol_type = other DNA

SEQ ID NO: 45219 - DNA, 120 bp, synthetic construct
  source 1..120: mol_type = other DNA
gtggatgtaccatggtctgttcatcttttgaccagctgagggacattaggattatttccagctttaggtgattataaatgaagccactgtaaacatttgcatacagattttgtgaacata

SEQ ID NO: 45220 - DNA, 120 bp, synthetic construct
  source 1..120: mol_type = other DNA
atttcagcatgagatcacatgctcctcctctgggaagccgaggcaggtggatcacttgaggccaggagttcgagaccagcctggccagcatgacaataccccgtctctactaaaaatgca

SEQ ID NO: 45221 - DNA, 120 bp, synthetic construct
  source 1..120: mol_type = other DNA
tccaacctgggcgacagagtgagactctttcaaaaaaataaatagggctgggcgcggtgagtcaacacctgtaatcccagcactttgggaggtcgaggcgggtggatcacctgaggccag

SEQ ID NO: 45222 - DNA, 120 bp, synthetic construct
  source 1..120: mol_type = other DNA
gagtcaggagaatcgcttaaacctgggaggtggaggttgcagtgagccaagattgggccactgcactccagcctgggtgacagaatgagactctgtctcaaaaataaataaataaaactt

SEQ ID NO: 45223 - DNA, 120 bp, synthetic construct; identical to SEQ ID NO: 12761
  source 1..120: mol_type = other DNA

SEQ ID NO: 45224 - DNA, 120 bp, synthetic construct
  source 1..120: mol_type = other DNA
aaggctgaggcaaaggatctcttgaggccaggagtttgggaccagcctgggcaacatagaccccctatctccaaaaataaaaataagttagctgggcttggtggtgcacactgtattccc

SEQ ID NO: 45225 - DNA, 120 bp, synthetic construct
  source 1..120: mol_type = other DNA
ttcttagctcacagggcatagtttgccagcttctgtgctaagcaaaagaggtcaaactcaaccagacgcggtggctcacgcctgtaatcccagcactttggtaggctgaggtgggcggat

SEQ ID NO: 45226 - DNA, 120 bp, synthetic construct
  source 1..120: mol_type = other DNA
ggggcaggagaatctcttaaaccagggagtcggaggttgcagtaagccgagatcatgccactatactccagcctgggtgacagagcgaggctccatctcaaaaaaaaaaaaaaaaagatc

SEQ ID NO: 45227 - DNA, 120 bp, synthetic construct; identical to SEQ ID NO: 12762
  source 1..120: mol_type = other DNA

SEQ ID NO: 45228 - DNA, 120 bp, synthetic construct
  source 1..120: mol_type = other DNA
cctcccttttttttttttttgagacaggatctcactctgtcacccaggctggagtgcagtggtgcagtcatggctcagtgcaggctccacctcctgggctcaagcgatcctcccacctca

SEQ ID NO: 45229 - DNA, 120 bp, synthetic construct
  source 1..120: mol_type = other DNA
caaactcctgagctcaagcaatccacctgcctcggcctcccaaagtgctgggattacaggtgtgagccaccatgcctggccagattttccattttggaagatactttcactggatataga

SEQ ID NO: 45230 - DNA, 120 bp, synthetic construct; identical to SEQ ID NO: 12763
  source 1..120: mol_type = other DNA

SEQ ID NO: 45231 - DNA, 120 bp, synthetic construct
  source 1..120: mol_type = other DNA
ggttctctgggcatcttggatctgtgttttcatatcttttattattgttgaaaaattctcagctgttaccccttcagctatttcttctgctttgttttctccctcttttccttctaggat

SEQ ID NO: 45232 - DNA, 120 bp, synthetic construct
  source 1..120: mol_type = other DNA
ggcgcaatcttggctcactacaacctctgcctcctgggtccaagcgattcttgtgcctcaggctcctgagcaactgggaccacaggcacgtgccgccatgcctggctaatttttttgtat

SEQ ID NO: 45233 - DNA, 120 bp, synthetic construct
  source 1..120: mol_type = other DNA
actgtgctcagtctgtccaacagcttttgggttctctgttttgtgttttttattcttttttctctttgtgcatcagtttgggttatttgtattagataatatctattgacctgtcttcca

SEQ ID NO: 45234 - DNA, 120 bp, synthetic construct
  source 1..120: mol_type = other DNA
attctgcatatctgctactgtatttgtttttagcatttccatttgacttttggagtttccaactctgctagaatttctcatctgttcatacattttgtctgctttttccactggcgcctt

SEQ ID NO: 45235 - DNA, 120 bp, synthetic construct; identical to SEQ ID NO: 12764
  source 1..120: mol_type = other DNA

SEQ ID NO: 45236 - DNA, 120 bp, synthetic construct
  source 1..120: mol_type = other DNA
gctcactgcaacctccacctcccaggttcaagcgattctcctgcctcagcctcctgagtagctgagactacaatcacgtgccaccacacctggctaattttttttttttttgagacggag

SEQ ID NO: 45237 - DNA, 120 bp, synthetic construct
  source 1..120: mol_type = other DNA
catgccattctgctgcctcagcatcccgagtagctgggactacaggcgcccgccaccacgcccggctaattttttgtattttcagtagagacggggtttcaccgttttagccaggatggt

SEQ ID NO: 45238 - DNA, 120 bp, synthetic construct
  source 1..120: mol_type = other DNA
gcccacacttggcttttaacaattcattgcaaattttagtggcacaggcctgcagtcccagctgccctggaggctgaggcagcaggatcgctggagcccaggaattcttggctgcagtgc

SEQ ID NO: 45239 - DNA, 120 bp, synthetic construct; identical to SEQ ID NO: 12765
  source 1..120: mol_type = other DNA

SEQ ID NO: 45240 - DNA, 120 bp, synthetic construct
  source 1..120: mol_type = other DNA
atcacaaggtcaggagaccaagaccagcctgactaacacagtgaaaccccatctctactaaaaaaaaaaaaattacaaaaaatcagccgagcgtggtggcgggcgcctgtggtgccagct

SEQ ID NO: 45241 - DNA, 120 bp, synthetic construct
  source 1..120: mol_type = other DNA
aaacaaaaaaaaaaatttttttagctgaattccttttacccatttgtatgatgtccagtgtctcttcttcctgtgcctgccacaggtgagcaagtgcatggctctcgtttctcctttgaa

SEQ ID NO: 45242 - DNA, 120 bp, synthetic construct; identical to SEQ ID NO: 12766
  source 1..120: mol_type = other DNA

SEQ ID NO: 45243 - DNA, 120 bp, synthetic construct
  source 1..120: mol_type = other DNA
aggctttgcttgtaattggcatcttaaataagtgtcccaagggtgtagagaaaggtcagggggagcagcacactgccagacccactgccgtagactgaggctggccttctcattcttctg

SEQ ID NO: 45244 - DNA, 120 bp, synthetic construct
  source 1..120: mol_type = other DNA
ttctgtctcttaaaactgaggacctctaactgatagacaaaggagagagcttttgtttcaagagatatatacattgcaagggaaaacacaatgtctggggaacaatggaattgccaaatg

SEQ ID NO: 45245 - DNA, 120 bp, synthetic construct
  source 1..120: mol_type = other DNA
tacccaattctgctgtcataacacaaaaggagcatgggtaatatgtaaaccattgggagcagctgttccaataaaacgacttgcaaatataggctcacacagtttgccaccccctggtat

SEQ ID NO: 45246 - DNA, 120 bp, synthetic construct; identical to SEQ ID NO: 12767
  source 1..120: mol_type = other DNA

SEQ ID NO: 45247 - DNA, 120 bp, synthetic construct
  source 1..120: mol_type = other DNA
tcttagatgcccagctgccctaccccagaccactggtcctgcctcaagtgatggacataaccctctcctaggacatacatgtaaatgcacaatgtgactcattctcatacttttttgttc

SEQ ID NO: 45248 - DNA, 120 bp, synthetic construct
  source 1..120: mol_type = other DNA
gtgcttgctcattgcctcagcccaagtgtactcaaagaaaagaggcagccagctgtgcgtgctgtatggaaagcctcccgccctccctgcagctccccgccctcagtggcccagggcttt

SEQ ID NO: 45249 - DNA, 120 bp, synthetic construct
  source 1..120: mol_type = other DNA
ccacaggcaggagtggtgtgggcacactgcttaggagtcaacatcttcatcattgggctttctttaaaacgtgcactttgtaatttgaaagagaattattaaagcatactgaaaaaagga

SEQ ID NO: 45250 - DNA, 120 bp, synthetic construct; identical to SEQ ID NO: 12768
  source 1..120: mol_type = other DNA

SEQ ID NO: 45251 - DNA, 120 bp, synthetic construct
  source 1..120: mol_type = other DNA
tcagctggttcagtgtccaagcaaggtgaatgcaaatcaagtccctcaaaaccataggggttgggctaagggctctcttctgtctaccttttttaacatttgaagatggtcagctccctc

SEQ ID NO: 45252 - DNA, 120 bp, synthetic construct
  source 1..120: mol_type = other DNA
ggactacaggccaatgtcaaaatcagccagacatctctaaatcttttacatcatcattattaaataggcagcagcagaaatcagcatataccagctctcaaaagtatgtggaagaaacta

SEQ ID NO: 45253 - DNA, 120 bp, synthetic construct; identical to SEQ ID NO: 12769
  source 1..120: mol_type = other DNA

SEQ ID NO: 45254 - DNA, 120 bp, synthetic construct
  source 1..120: mol_type = other DNA
gacagggtcttgctctgtcatccaggctgaagtgtgatcatagttcactgtggcctggaacacctggctcaagtgatcctccggcctcagcctctcaagtaactgaaactacaggtgcgt

SEQ ID NO: 45255 - DNA, 120 bp, synthetic construct; identical to SEQ ID NO: 12770
  source 1..120: mol_type = other DNA

SEQ ID NO: 45256 - DNA, 120 bp, synthetic construct
  source 1..120: mol_type = other DNA
ctgggtggagtgggagggagaattttcactgtatatccttctgaatctggatctacctgtgtatttccggtccccacagggtcagtaagggtgtttagacttagaaggttggtacatacc

SEQ ID NO: 45257 - DNA, 120 bp, synthetic construct
  source 1..120: mol_type = other DNA
atttccccatctgtataaggggattaaacttgatggttttcaagtcccttccagtttcatgatcggcctatgtctatgtctcagtcccaacttccagccctgttttacagaagggagggc

SEQ ID NO: 45258 - DNA, 120 bp, synthetic construct; identical to SEQ ID NO: 12771
  source 1..120: mol_type = other DNA

SEQ ID NO: 45259 - DNA, 120 bp, synthetic construct
  source 1..120: mol_type = other DNA
gcctgtgggctcccccagcgaggccactggaaacacagagggtttccaggcaaaaaataagtgaattctacagcttggatttcatgttttcaaacacacagtgtgatctttttttacggc

SEQ ID NO: 45260 - DNA, 120 bp, synthetic construct; identical to SEQ ID NO: 12772
  source 1..120: mol_type = other DNA

SEQ ID NO: 45261 - DNA, 120 bp, synthetic construct
  source 1..120: mol_type = other DNA
cctgtagtcccagctactcaggaggtaggaggatcacttaaggccagcagttccaggctgcagtgagctatgattgcgccactgcaccccagcctgggcaacacagtgagaccctgtctt

SEQ ID NO: 45262 - DNA, 120 bp, synthetic construct
  source 1..120: mol_type = other DNA
tagagaaaccctatctctactaaaaatacaaaattagccaggcatgagtggtgcctgcctgtaatcccagctactcgggaggcgaatgcaggagaatcacttgaacctgggaggcggagg

SEQ ID NO: 45263 - DNA, 120 bp, synthetic construct; identical to SEQ ID NO: 12773
  source 1..120: mol_type = other DNA

SEQ ID NO: 45264 - DNA, 120 bp, synthetic construct
  source 1..120: mol_type = other DNA
tgagaagtgctgggaggcaggcgggtggctgaagctggaagtgtgctgggaggcaaaatccaggccagagtgagccaaaagcagcagcaaatgcgagcaggaagaggaacgaaagccaga

SEQ ID NO: 45265 - DNA, 120 bp, synthetic construct
  source 1..120: mol_type = other DNA
ccacgttccaacggctttcgctttctgtttcctgggaaggttgaacgcaggtacctgctcatgggttcctgtgcatccttaactcccacaatgtccctgtgtagcctacaaataaagcct

SEQ ID NO: 45266 - DNA, 120 bp, synthetic construct
  source 1..120: mol_type = other DNA
tctctgccaatcacctctttgtgagcacatgctacttctggcgtgtcagctctgaggcagagctgagggtcaccagccccacgtaccttaggacaggtccttgtgcagttcatgatggtg

SEQ ID NO: 45267 - DNA, 120 bp, synthetic construct; identical to SEQ ID NO: 12774
  source 1..120: mol_type = other DNA

SEQ ID NO: 45268 - DNA, 120 bp, synthetic construct
  source 1..120: mol_type = other DNA
ggtgcttaattatacacactgggtatcatctcctaattatttcacattgctcaatagcttcctacccagcttataatttggtgaaggcagggactgtatcatataactcttatctgtctt

SEQ ID NO: 45269 - DNA, 120 bp, synthetic construct
  source 1..120: mol_type = other DNA
ccacttaatgattctttgaacttacacagcgctctcagcagcctgagatcagcaggctgaaacgagttaatcacatgaccataggcctgctctagcagtgttacttagaggacctctaca

SEQ ID NO: 45270 - DNA, 120 bp, synthetic construct; identical to SEQ ID NO: 12775
  source 1..120: mol_type = other DNA

SEQ ID NO: 45271 - DNA, 120 bp, synthetic construct
  source 1..120: mol_type = other DNA
ctacaagtcttatgttacaaatcctatgagagggagagggggagcctctgaccaccaggcaaacggaaatacattttaaacatctgcaaggcatggtttgcacccctttggggtgaccct

SEQ ID NO: 45272 - DNA, 120 bp, synthetic construct
  source 1..120: mol_type = other DNA
agaatggctggcttacagcaatctattgtcctcttggacttctggatgcttgagtttcaatttctcttaaagcaattaaggagcacctcacctgcataagaactgcaggccccagatatt

SEQ ID NO: 45273 - DNA, 120 bp, synthetic construct
  source 1..120: mol_type = other DNA
tgctatgtcttcagctgattaaatgttacctttggggtcagtgcatgaacaaagtgcctacttgcatgtgaattttcttagcaaaatccaaggggtgatttgcagatatttagcagatta

SEQ ID NO: 45274 - DNA, 120 bp, synthetic construct; identical to SEQ ID NO: 12776
  source 1..120: mol_type = other DNA

SEQ ID NO: 45275 - DNA, 120 bp, synthetic construct
  source 1..120: mol_type = other DNA
ccttacacgctttccttaactgatcatcacagtaatcctgtgaggtgactccagcaagttccacttacaggtaaggaaccaaggcgaggagagtgagttaggccatgtgcccagggacgt

SEQ ID NO: 45276 - DNA, 120 bp, synthetic construct
  source 1..120: mol_type = other DNA
tgagtttggaaacaacagaaatggattaaaaacagcaaaatgaaaggggcccactgacacctgaagtgacagttgagaacagatgagacagaactgatggttgtgattgaaccatgagtc

SEQ ID NO: 45277 - DNA, 120 bp, synthetic construct
  source 1..120: mol_type = other DNA
tgtcaactggccccactggtctagaaggcataaggtcacaggattaagagccttaagaatagtcatattctttaacccactcctagaaaaatctgtaataagaaattagaatgttttggg

SEQ ID NO: 45278 - DNA, 120 bp, synthetic construct; identical to SEQ ID NO: 12777
  source 1..120: mol_type = other DNA

SEQ ID NO: 45279 - DNA, 120 bp, synthetic construct
  source 1..120: mol_type = other DNA
ctgtgtgcccctggctggagtgcagtggcacaatcacagttcactgcagcctggaactcttgtgctcaagcaatcctcccatctcagcctcctgagtagctgggactataggtgcatacc

SEQ ID NO: 45280 - DNA, 120 bp, synthetic construct
  source 1..120: mol_type = other DNA
ggctgcccaattaaaaataaatacatacataaatttctccacattttccaattatttattaagttcagcatactaatttaaggaagccaaaaaatgttaaatgtttggtatgtaaatgag

SEQ ID NO: 45281 - DNA, 120 bp, synthetic construct
  source 1..120: mol_type = other DNA
gagcatggatttcagatttcggatttggggtgctcaactagtaagtgtaaggcaaatattccaaaatctgaaaacatatgaaaccccaaacactgaaacccaagcatttaggataaggaa

SEQ ID NO: 45282 - DNA, 120 bp, synthetic construct
  source 1..120: mol_type = other DNA
cgctgggccagagggcccggttcagcctggactctgggatgcacaagactctgggaggtagaaactgaggagcagagctgcagtctgagaagagcagctctgaagtctcatcccaggctt

SEQ ID NO: 45283 - DNA, 120 bp, synthetic construct; identical to SEQ ID NO: 12778
  source 1..120: mol_type = other DNA

SEQ ID NO: 45284 - DNA, 120 bp, synthetic construct
  source 1..120: mol_type = other DNA
gatgagccactgcacctggccggactcccctttcttaacgttttatgggcaacaggagaggatgctaaatatttaccaagtctcaaaaggtagaattaatttattcattcatacaactga

SEQ ID NO: 45285 - DNA, 120 bp, synthetic construct
  source 1..120: mol_type = other DNA
catctggccttttaaaaaatttatatatatttttacagtatttacataactaatatttatggataaaataacatgcgccagggcctagggatccagaaaggaagaagacacagccattgc

SEQ ID NO: 45286 - DNA, 120 bp, synthetic construct; identical to SEQ ID NO: 12779
  source 1..120: mol_type = other DNA

SEQ ID NO: 45287 - DNA, 120 bp, synthetic construct
  source 1..120: mol_type = other DNA
ttcattttgcccccagtgagggaacagttctgacttagtggtcactttttaaagcccaggcaatttacatactggtttcttttgaaaaagatggagtagccacacagcaaccacccgccc

SEQ ID NO: 45288 - DNA, 120 bp, synthetic construct
  source 1..120: mol_type = other DNA
tacactaaatggcttgcatcagcttatgttccctgccaagccacactcctggcaatcatctttgcaataaattcttcagattgaaacaataaatagggactaatgaccagtttctcacgc

SEQ ID NO: 45289 - DNA, 120 bp, synthetic construct
  source 1..120: mol_type = other DNA
ttgaaacaataaatagggactaatgaccagtttctcacgctcttctatggactgcagatactgctgcttgccttcctgagattcatccttcttcttcaaataaggctcaatggatttgta

SEQ ID NO: 45290 - DNA, 120 bp, synthetic construct; identical to SEQ ID NO: 12780
  source 1..120: mol_type = other DNA

SEQ ID NO: 45291 - DNA, 120 bp, synthetic construct
  source 1..120: mol_type = other DNA
ccaactggcattttccacatgatttctttgtagttatggccaaattattcatttctgggaatgttccaattctaaaattctgtgccccattattctcaaacaaacctcaccaaatgagct

SEQ ID NO: 45292 - DNA, 120 bp, synthetic construct
  source 1..120: mol_type = other DNA
gccataatataggaaacagtcccatctatttactatctgactagaagaggagccttaaatactcaaacaaatcctgccctgaaaaactaatagcgtaacacacatagcactgccccccat

SEQ ID NO: 45293 - DNA, 120 bp, synthetic construct; identical to SEQ ID NO: 5401
  source 1..120: mol_type = other DNA

SEQ ID NO: 45294 - DNA, 120 bp, synthetic construct; identical to SEQ ID NO: 12781
  source 1..120: mol_type = other DNA

SEQ ID NO: 45295 - DNA, 120 bp, synthetic construct
  source 1..120: mol_type = other DNA
taaagaaagggtctcactctgtcacccaggctggagtgcagtggtgcaatcacagctcactgcagtcctcaatgcctgagctcaagtgatcctcccacctcagcctcctaagtagctggg

SEQ ID NO: 45296 - DNA, 120 bp, synthetic construct
  source 1..120: mol_type = other DNA
atctgcctgccttggcctcccgaagcactgggattacaggtctgggccaccacacacccgtcaagcctattttttttttttttctttgagaaggagttttgctcttgttgcccaggctgg

SEQ ID NO: 45297 - DNA, 120 bp, synthetic construct
  source 1..120: mol_type = other DNA
ttaaagccactgttatttgaacacaaatctaacagacacaatacccaaaagtaaagtaaatcaacattgtcttggtcatcttaaggttgaagtgacctggatacagattattaagagata

SEQ ID NO: 45298 - DNA, 120 bp, synthetic construct; identical to SEQ ID NO: 12782
  source 1..120: mol_type = other DNA

SEQ ID NO: 45299 - DNA, 120 bp, synthetic construct
  source 1..120: mol_type = other DNA
aggagggtgaggcgggagaatcatttgaactgaggaggagaaggttgcagtgagcagagatcgcgccactgcactccagcctgggtgacagagcaagattccatctcaaaaaaaagaaaa

SEQ ID NO: 45300 - DNA, 120 bp, synthetic construct
  source 1..120: mol_type = other DNA
cactacacttgacagaggtaaggcttcttctattgtcttcataaaatacgcagcatagtaccctggggctatgaaatccacaaaagctgactcagcatggactttccaaagaggagaaga

SEQ ID NO: 45301 - DNA, 120 bp, synthetic construct; identical to SEQ ID NO: 12783
  source 1..120: mol_type = other DNA

SEQ ID NO: 45302 - DNA, 120 bp, synthetic construct
  source 1..120: mol_type = other DNA
ctcctgagtagctgggattatagacgcccgccaccacacctggctaatttttgtatttttagtagagacggggttttaccacgttggtcaggctggtctcgaactctgaccttgtgatct

SEQ ID NO: 45303 - DNA, 120 bp, synthetic construct; identical to SEQ ID NO: 5403
  source 1..120: mol_type = other DNA

SEQ ID NO: 45304 - DNA, 120 bp, synthetic construct
  source 1..120: mol_type = other DNA
ggaacccaaagatgtgtcttaagcaaatactcctagagttccccaagagactggatattatcaatacatttatgtatacctggcatccaactagagcagtttgcttttacaagaaatggc

SEQ ID NO: 45305 - DNA, 120 bp, synthetic construct
  source 1..120: mol_type = other DNA
caattgatacaattctgctttattttttttagtccagatgggtcacaccttatgttcttggttctgaaagagtcctacagggaaaggttactgaaaagcatctacctttcctgtgttgcc

SEQ ID NO: 45306 - DNA, 120 bp, synthetic construct; identical to SEQ ID NO: 12785
  source 1..120: mol_type = other DNA

SEQ ID NO: 45307 - DNA, 120 bp, synthetic construct
  source 1..120: mol_type = other DNA
agatctggagtctggagtctgacagctttggctgactcccggctctcaagtcactctctatgtgtccttgtggaagtccattaccctctctgggcctcacctttaaattgaaggtagata

SEQ ID NO: 45308 - DNA, 120 bp, synthetic construct
  source 1..120: mol_type = other DNA
tcggtcttcactgcaccctgtgcaatttttgctatacctgagaaccacctgaatcaactttctttaaagtatctcttgggttttctttaacttgttttgcttaaattcacattaaaaaac

SEQ ID NO: 45309 - DNA, 120 bp, synthetic construct
  source 1..120: mol_type = other DNA
tccacctcccgggttcctgcctcagcctcccgagtagccaggattacaggcgtccgctatcacgcccggctaatttttgtatttttagtagagacaaggtttcaccatgttggccaggtt

SEQ ID NO: 45310 - DNA, 120 bp, synthetic construct; identical to SEQ ID NO: 12786
  source 1..120: mol_type = other DNA

SEQ ID NO: 45311 - DNA, 120 bp, synthetic construct
  source 1..120: mol_type = other DNA
taccaaggacatgtcatgctgggagctgagggagactcacacatctcccctgctggacaagcataagtgccagacagaaactctccactgctcccttaataaaagagctcagcagcatgg

SEQ ID NO: 45312 - DNA, 120 bp, synthetic construct
  source 1..120: mol_type = other DNA
atagaatgctcctgaaggaaagtaaactcagaaaccagaacttgcaccatggttagaattttggatgcatttacccaagaaaaggaattaggttgcacagcaagttcacccagcagagag

SEQ ID NO: 45313 - DNA, 120 bp, synthetic construct
  source 1..120: mol_type = other DNA
ggtcaaagtagagtcaacttcattcttaatcttgattaaagcatccaataccatggggccacatctaacaaagaaaaatatccagtggtatttatgtaacgttcaacctccctacacttt

SEQ ID NO: 45314 - DNA, 120 bp, synthetic construct
  source 1..120: mol_type = other DNA
agttctattttgatgatcacagtgcaaacacatttctaggaaatggaaagctaaagtagtagtagacaagtatgacacaacttccatacagtggccgagtttttgttttttacttctgaa

SEQ ID NO: 45315 - DNA, 120 bp, synthetic construct; identical to SEQ ID NO: 12787
  source 1..120: mol_type = other DNA

SEQ ID NO: 45316 - DNA, 120 bp, synthetic construct
  source 1..120: mol_type = other DNA
aggcatttaatccactgagtgcagagagcagcacctgcatcccacaggattgctggaggtgagttaatacacacgagatctttacagcagcatctgacatataaatcatagtttaactat

SEQ ID NO: 45317 - DNA, 120 bp, synthetic construct
  source 1..120: mol_type = other DNA
ttcatagtacctggcatacagtaagtgctccacaaatctattttctggttgccaccctgcccccattccactcactaattttctatgcatgagattaaaaatatacttaaaaatacgtca

SEQ ID NO: 45318 - DNA, 120 bp, synthetic construct; identical to SEQ ID NO: 12788
  source 1..120: mol_type = other DNA

SEQ ID NO: 45319 - DNA, 120 bp, synthetic construct
  source 1..120: mol_type = other DNA
gcgattctcctgcctcagcctcccgagtagctgggattacaggtgcatgccaccacacccggcaaatttttgtatttttagtagagataggttttcccatgttggccaggctggtctcaa

SEQ ID NO: 45320 - DNA, 120 bp, synthetic construct
  source 1..120: mol_type = other DNA
gctggacctctgctaacactgggaattggaagctttaaaaacctttgctattctgatactggagaagtgttattgttttcagtgttttaaatcgagacttttgaatactacataggttga

SEQ ID NO: 45321 - DNA, 120 bp, synthetic construct
  source 1..120: mol_type = other DNA
ctgcccgcacaaagctctgttccagaggactcattctagagactcagtctgtccacattctttgcctctgtttaccagggtcttggaaattctttttcatgatctgaggctcttatatat

SEQ ID NO: 45322 - DNA, 120 bp, synthetic construct; identical to SEQ ID NO: 12789
  source 1..120: mol_type = other DNA

SEQ ID NO: 45323 - DNA, 120 bp, synthetic construct
  source 1..120: mol_type = other DNA
ttttgttgctacatttttattctaatgatctgcctgttcttgtcctagcatattttaaatgacaacaacatctttgttttttttacattacaaaggctaatatttgcagcctataaaaat

SEQ ID NO: 45324 - DNA, 120 bp, synthetic construct
  source 1..120: mol_type = other DNA
gaaaccgtctctactaaaaatacaaaaaattagctgggtgtggttgcacgtgcctgtagtcccaattacttgggaggctgaggcaggaaaattgcttgaaccccagaggcggaggttgca

SEQ ID NO: 45325 - DNA, 120 bp, synthetic construct
  source 1..120: mol_type = other DNA
ctgcagatcatactgggacagagaaaaatattaaaaagtcaaagtcctctctttaagctgtttcatgctaaatttcctaataggtagggctcattaaagagtacaacataaattttctca

SEQ ID NO: 45326 - DNA, 120 bp, synthetic construct
  source 1..120: mol_type = other DNA
atgaatctggaaatcaatttggagaccactgcctccttaacaacattaagtcttccaacccacaaacagggcatgtctttccatttatttatgtcttcttaaatttctttcaacaatgtt

SEQ ID NO: 45327 - DNA, 120 bp, synthetic construct; identical to SEQ ID NO: 12790
  source 1..120: mol_type = other DNA

SEQ ID NO: 45328 - DNA, 120 bp, synthetic construct
  source 1..120: mol_type = other DNA
acaggcttttttctaggtaagcagggttttacatatataaatataaatatttatataaatatgaatatataaatataaatatttatataaatatgaatatataaatataaatatttatat

SEQ ID NO: 45329 - DNA, 120 bp, synthetic construct
  source 1..120: mol_type = other DNA
ggcctcaagcaatcctcctgccttggcctcacaaagaaagtgctagtattacaagtgtgagccaccatgcctagcctagaaaaatacatttatctgctaatatctgctacacgccagtat

SEQ ID NO: 45330 - DNA, 120 bp, synthetic construct; identical to SEQ ID NO: 12791
  source 1..120: mol_type = other DNA

SEQ ID NO: 45331 - DNA, 120 bp, synthetic construct
  source 1..120: mol_type = other DNA
tggaatcatggctcactgcagcctcgacctcctgggttcaagtgatcctcccaccccaccctcccaagtagctcggactacaggagtgtgccaccacacctggcaaattttttgagacac

SEQ ID NO: 45332 - DNA, 120 bp, synthetic construct
  source 1..120: mol_type = other DNA
gtgtgctaccatgcctggctaatttttgtatttttagtagagacagggttttgccatgttgtccagggtggtcttgaactcctggactcaagtcatctgcctgctttggcctctcagaat

SEQ ID NO: 45333 - DNA, 120 bp, synthetic construct
  source 1..120: mol_type = other DNA
atcccagcactttgggaggccgaggtgggcagatcacctgaggtcaggagttcgagaccagcctgaccaacacgcagaaaccccatctccaccaaaaatacaaaagaattagctgggcgt

SEQ ID NO: 45334 - DNA, 120 bp, synthetic construct; identical to SEQ ID NO: 12792
  source 1..120: mol_type = other DNA

SEQ ID NO: 45335 - DNA, 120 bp, synthetic construct
  source 1..120: mol_type = other DNA
ctgtagccattgaaatacacacacacacaaatagtattttgcatattgaccttacatcctgcagccttgctaaatttacttattcttttagttttgtagactccctgaaattttctatgt

SEQ ID NO: 45336 - DNA, 120 bp, synthetic construct
  source 1..120: mol_type = other DNA
aactcaaatacagagtggacaaccttccttattcctgatcttatggggaaagtgttcaatatctcacaataaagtatgctattagctgtgattttcacagtcttcatctggctgatgaag

SEQ ID NO: 45337 - DNA, 120 bp, synthetic construct
  source 1..120: mol_type = other DNA
ttaacccattatcatttttaaaaatcatgaatgagtgttgaatcttgccaaatgcttttctgcatatattaaagcaatcaaatgggttttccccctttattctgttaatatggtgaatca

SEQ ID NO: 45338 - DNA, 120 bp, synthetic construct
  source 1..120: mol_type = other DNA
tgggagtatttaatagtttttacattcaatacagttattgacgtggccggatttaggtctatcattttactatttgttccatcattttgctgctgttctcttcttcttttcttattctaa

SEQ ID NO: 45339 - DNA, 120 bp, synthetic construct; identical to SEQ ID NO: 12793
  source 1..120: mol_type = other DNA

SEQ ID NO: 45340 - DNA, 120 bp, synthetic construct
  source 1..120: mol_type = other DNA
gaggctgaggtgggaggattgcttgagcctaggaggtctcagggagggaggattgcttggttgagcctgggagggtttagtgagccatgattgtgctactgccttccagcctggatgaca

SEQ ID NO: 45341 - DNA, 120 bp, synthetic construct
  source 1..120: mol_type = other DNA
acctgtttagagttactattgtgcaactttatgtaatgcaagaatcctgctacattattataggtctatttacctgctgttcccagcccctacgctatagttatcatatgccttacatct

SEQ ID NO: 45342 - DNA, 120 bp, synthetic construct; identical to SEQ ID NO: 5412
  source 1..120: mol_type = other DNA

SEQ ID NO: 45343 - DNA, 120 bp, synthetic construct; identical to SEQ ID NO: 12794
  source 1..120: mol_type = other DNA

SEQ ID NO: 45344 - DNA, 120 bp, synthetic construct
  source 1..120: mol_type = other DNA
agcttcttggatatgtgaattatgtctttcatgggctcaggaaattcttggccatgagttcttcaaatagatatttattttgccttttctttctctccattttttctggaagtccaatta

SEQ ID NO: 45345 - DNA, 120 bp, synthetic construct
  source 1..120: mol_type = other DNA
ttcctgcttcagcatcccaagtagctaggactacaggtatgtgccaccacgcctggctaatttttcaaagaaaaaatttttttagtagagacaaggtctcacaggttgcccaagctggtc

SEQ ID NO: 45346 - DNA, 120 bp, synthetic construct; identical to SEQ ID NO: 12795
  source 1..120: mol_type = other DNA

SEQ ID NO: 45347 - DNA, 120 bp, synthetic construct
  source 1..120: mol_type = other DNA
atcgcttgagcctggaaggcagaggttgcagtgagccaagattgcgccactgcactccagcctggatgacagagcaagactccgtctcaagaaacaaacaaacaaacaacaacaaaaaac

SEQ ID NO: 45348 - DNA, 120 bp, synthetic construct
  source 1..120: mol_type = other DNA
ttccatttggcttttcaatagtttctacttctccactgaaatttcctatttcattatgagcataatttcctttatctatgaggaaatttaaaaattctttaaattccactgggcgcggtg

SEQ ID NO: 45349 - DNA, 120 bp, synthetic construct
  source 1..120: mol_type = other DNA
caacatggcgaaaccccaactctactacaaaaattagacggtgtgtgacgcgcgcctgtagtcccagctactcaggaggctgaggcaagggaatcgcttgaacccgggaggcggaggttg

SEQ ID NO: 45350 - DNA, 120 bp, synthetic construct; identical to SEQ ID NO: 5414
  source 1..120: mol_type = other DNA

SEQ ID NO: 45351 - DNA, 120 bp, synthetic construct
  source 1..120: mol_type = other DNA
cccaggctggagtgcagtggtgtgatcttggctcactgcaacctccgcctcccatgttcaagtgattctcccccattagcctcccaagtggctgggattacaggcatgtgccaccatgcc

SEQ ID NO: 45352 - DNA, 120 bp, synthetic construct
  source 1..120: mol_type = other DNA
ccaactgttagtcccgttacttcccataccaacttggacttgtcctcagcaaaatcatgtaagagtaaaatggtaatttgtccaatgccatttcattcttccaagtatcaactcccctcc

SEQ ID NO: 45353 - DNA, 120 bp, synthetic construct
  source 1..120: mol_type = other DNA
aatgtctgcccactcgtggtccttctctactgttcaggcagttgtttcttatatttttttccggagttgatcattgttatttgtaggagggttagtctgatgagagctactgtgacaaaa

SEQ ID NO: 45354 - DNA, 120 bp, synthetic construct; identical to SEQ ID NO: 12797
  source 1..120: mol_type = other DNA

SEQ ID NO: 45355 - DNA, 120 bp, synthetic construct
  source 1..120: mol_type = other DNA
gttttagccacattctctgacattctctaagttttgatttgcaacgtctttattttctaagtatctggcaatattttttacgtgttcctgatcaaatagttagaagtgtactttttttta

SEQ ID NO: 45356 - DNA, 120 bp, synthetic construct
  source 1..120: mol_type = other DNA
acctccgcctcccaggttcaagtgattctcatgcctcagcctcccaaatagctgggatcacaggcacctgccacaacgcccagcttatttttatattttagtagagatggggtttcacca

SEQ ID NO: 45357 - DNA, 120 bp, synthetic construct
  source 1..120: mol_type = other DNA
tttagttttattgtatttcggtccaaaactgtggtctgtgcaatttctattcctttgaattttgctagggacttttggttgctgagtatttgaaaattttgtctatttaagaaggttata

SEQ ID NO: 45358 - DNA, 120 bp, synthetic construct; identical to SEQ ID NO: 12798
  source 1..120: mol_type = other DNA

SEQ ID NO: 45359 - DNA, 120 bp, synthetic construct
  source 1..120: mol_type = other DNA
gccctcagcttacagtcagcagaatgacagagacctcgggctcacaaccacaaggaactgcattccaccaatagcgcaaatgagcaaaaaatattttcctctaggctccagaaaggaatg

SEQ ID NO: 45360 - DNA, 120 bp, synthetic construct
  source 1..120: mol_type = other DNA
cagaaatagaaaactaacacgccagtccaatttttaacattttaaccacatccctaccttgtccattcaaggcaagtttctggcggttctgttattattatagaaaacacaggtccagat

SEQ ID NO: 45361 - DNA, 120 bp, synthetic construct
  source 1..120: mol_type = other DNA
ggaattattttggtattattcttctgaatcaggtaacaacctcattttttttttttttttggagacagagtctcactctgttgcccaggctggagtgcaatggcatgatctcagctcact

SEQ ID NO: 45362 - DNA, 120 bp, synthetic construct
  source 1..120: mol_type = other DNA
acccagctaatttctgtatttttagtagagaggggagtttcaccatgttggccacattggtcttgaactcccaacctcagatgatctgcccgcctgagcctcccaaagtgctgggattat

SEQ ID NO: 45363 - DNA, 120 bp, synthetic construct; identical to SEQ ID NO: 12799
  source 1..120: mol_type = other DNA

SEQ ID NO: 45364 - DNA, 120 bp, synthetic construct
  source 1..120: mol_type = other DNA
cagatgtaacgctggatataaactcacacattactgacacataatcttcttagaaaaggcaggcattcaatatccaacaagtattaagcacctatcatatgctaatatatcagacatggt

SEQ ID NO: 45365 - DNA, 120 bp, synthetic construct
  source 1..120: mol_type = other DNA
gaaagtacagggagctctggatgaatacagcagagacttcaatgagtgaagagtcagagaaggcttcctcacatgtcatctaagtggaggcttgacaaaccagaattaaggggaaggagt

SEQ ID NO: 45366 - DNA, 120 bp, synthetic construct
  source 1..120: mol_type = other DNA
catctctacaaaaaataaaaaaattagctgggtgtcgtagtgtgcgtctcaggaggcagaagtgggaggactgcttgggcccgagaggttgaggctgcagtgagccaagatcatgccact

SEQ ID NO: 45367 - DNA, 120 bp, synthetic construct; identical to SEQ ID NO: 12800
  source 1..120: mol_type = other DNA

SEQ ID NO: 45368 - DNA, 120 bp, synthetic construct
  source 1..120: mol_type = other DNA
catgctaaaaaccttgacgacttgtggtcaagaccgtctaccagtaacattatttcttggtaaagtgtcccgtattaactgaagctgaaaatacaaacatcagctaacagtagaaaagaa

SEQ ID NO: 45369 - DNA, 120 bp, synthetic construct
  source 1..120: mol_type = other DNA
attttgtaaactgacatgaacatctaatgccaccttgtggtatttgggaggaagtgagaggaaagattcctgaaggtatcaactccagtggactttgcttgcttaatgtcccattttttt

SEQ ID NO: 45370 - DNA, 120 bp, synthetic construct; identical to SEQ ID NO: 5419
  source 1..120: mol_type = other DNA

SEQ ID NO: 45371 - DNA, 120 bp, synthetic construct
  source 1..120: mol_type = other DNA
atagttaaatgcttttttaaaaaattaaactatttatttatttatttatctttgagactgagttttgctcttgttgcccaggctggagtgcaatggtgcaatcttggctcaccacaacct

SEQ ID NO: 45372 - DNA, 120 bp, synthetic construct
  source 1..120: mol_type = other DNA
taattttgtatttttagtagagatgtggtttgtctatgttggtcagggtagtctcaaactcccaacctcaggtgatctgcctgccttggcctcccaaactgctaggattacaggcgtgag

SEQ ID NO: 45373 - DNA, 120 bp, synthetic construct
  source 1..120: mol_type = other DNA
aagacagacgaatcacttgaggtcaggagttcaagaccagcctggccaacatggtgaaactccgtctctactaaagatacaaaaattagcccggtgtggtggcacatgtctgtaatccca

SEQ ID NO: 45374 - DNA, 120 bp, synthetic construct; identical to SEQ ID NO: 12802
  source 1..120: mol_type = other DNA

SEQ ID NO: 45375 - DNA, 120 bp, synthetic construct
  source 1..120: mol_type = other DNA
gaacttgggaggtaaaggttgcagtgagctaagactgtgccactgtataccaccctgggtgacaaagtgaaactcaagctaaaaaaaaaaaaaaaagagagagagttttgctctgtcact

SEQ ID NO: 45376 - DNA, 120 bp, synthetic construct
  source 1..120: mol_type = other DNA
tttttttacatttatttttgtagagataggggtctcactgtgttgcctaggctggtcttgaactcctggccccaagtgatcctctgcctggccctcccgaagagttgggatataggcatg

SEQ ID NO: 45377 - DNA, 120 bp, synthetic construct
  source 1..120: mol_type = other DNA
ccataagcacaggatcactaacattgcccttttatagccctgtccacttcctcccaccctacctcccctgtactccgtaagccctagcaatcactaatctgttctctacttctcaaattc

SEQ ID NO: 45378 - DNA, 120 bp, synthetic construct; identical to SEQ ID NO: 12803
  source 1..120: mol_type = other DNA

SEQ ID NO: 45379 - DNA, 120 bp, synthetic construct
  source 1..120: mol_type = other DNA
acaaaactattttccagagtgggtggctgctgtgcctgaggcagatagtagggtaagtgggacaatatgccttttaaaaaatggggctacttcaagtttttacttctaatttggacactt

SEQ ID NO: 45380 - DNA, 120 bp, synthetic construct
  source 1..120: mol_type = other DNA
ccgacttcaagtgattcttctgcctcagcctcctgagtagctgggactacaggtgcctgccaccacgccgagctaatttttatatttttagtagagacggggtttcaccatgttggccag

SEQ ID NO: 45381 - DNA, 120 bp, synthetic construct
  source 1..120: mol_type = other DNA
agctttattgcccaggctggagatcatggctcactgcagcctttaactcctgggctcaggcgatcatcctgactcagcctcccaagtagctgggactataggtgcacaccatcatgtcca

SEQ ID NO: 45382 - DNA, 120 bp, synthetic construct; identical to SEQ ID NO: 12804
  source 1..120: mol_type = other DNA

SEQ ID NO: 45383 - DNA, 120 bp, synthetic construct
  source 1..120: mol_type = other DNA
cctggcctcaagtgatccacctgcctcagcgttccaaagtgttgggattacaggtgtgagcaaccgcgcctggcccctaaccgggctttaaacagaatctgggactggagcataatcccc

SEQ ID NO: 45384 - DNA, 120 bp, synthetic construct
  source 1..120: mol_type = other DNA
cagcctcccaagtagctgggattacaggcgcgtgtcacacgcccggctaacttttttgtatttttagtagggatggggtttcaccgttttagccaggatggtcttgaactcctgatgtcg

SEQ ID NO: 45385 - DNA, 120 bp, synthetic construct; identical to SEQ ID NO: 12805
  source 1..120: mol_type = other DNA

SEQ ID NO: 45386 - DNA, 120 bp, synthetic construct
  source 1..120: mol_type = other DNA
tactacactgaatatctaagtcgacatatcccaacatcagttttggagtgccccaaaatgtcatcattttttttttttcagtacaactaatttaaatttgttttgtgtcaaaaatgtatt

SEQ ID NO: 45387 - DNA, 120 bp, synthetic construct
  source 1..120: mol_type = other DNA
ctactaaaaatacaaaaaaattagacaggcacgatggcgggcacctgtaatctcagctacttgggaggccgaggcaggagaattgcttgaaatccgggaggcggagggtacggtgagcca

SEQ ID NO: 45388 - DNA, 120 bp, synthetic construct
  source 1..120: mol_type = other DNA
aagattctgaaatcaaaatcaccagagtggtcatggttctgaaagtgatagagctttgctcatcttgaggtctgtacaaagagttaattctcaggattatgttatctgtgttccaccaaa

SEQ ID NO: 45389 - DNA, 120 bp, synthetic construct; identical to SEQ ID NO: 12806
  source 1..120: mol_type = other DNA

SEQ ID NO: 45390 - DNA, 120 bp, synthetic construct
  source 1..120: mol_type = other DNA
caaatccaaaaggaaagagggccccttgaaagcatttttacgttaatctaaagactaatgagtattcaaggcagaaagtacattcctaggaaatcttggatagtatgaatttcatagttt

SEQ ID NO: 45391 - DNA, 120 bp, synthetic construct
  source 1..120: mol_type = other DNA
gtggataaagatttggaggccagagaagaaggtggggaaatagagaggaagaaagcaaaaaggactgtatgaagataagcctgagtaaaatacaaggtgcaggcttgctgaaaagtgtga

SEQ ID NO: 45392 - DNA, 120 bp, synthetic construct
  source 1..120: mol_type = other DNA
ataagataacccgggggagggggggtcaagtttctagcatagcccagaaaaaaatttttgctctacaagattggcaaccttatcagtctttgtattattctgatttgtaaataggtatcc

SEQ ID NO: 45393 - DNA, 120 bp, synthetic construct
  source 1..120: mol_type = other DNA
ccctccacctcccaggttcaagcaattctcctgcctcagcctcctgtgtagctaggattataggcgcccaccaccacgcccagctaattttttttttatttttttagtagagacggggtt

SEQ ID NO: 45394 - DNA, 120 bp, synthetic construct; identical to SEQ ID NO: 12807
  source 1..120: mol_type = other DNA

SEQ ID NO: 45395 - DNA, 120 bp, synthetic construct
  source 1..120: mol_type = other DNA
ctataagcataaaaagaattcagaacctgaacctgaatgttacccacaggtaacacaccaagctcattactgaattcttttgaggtggcttttgtgggtatacatgtacattcccacaag

SEQ ID NO: 45396 - DNA, 120 bp, synthetic construct
  source 1..120: mol_type = other DNA
gaggggcttggaactctctcgttagtggggctctcacaatttaattgtttgctcagcaactataaaaggaacaggtaaacaagctcattatcaatcatcaatttaatactgagaggatgt

SEQ ID NO: 45397 - DNA, 120 bp, synthetic construct; identical to SEQ ID NO: 12808
  source 1..120: mol_type = other DNA

SEQ ID NO: 45398 - DNA, 120 bp, synthetic construct
  source 1..120: mol_type = other DNA
caaaaaggagggtaaggattcttgcttgcccaccttaaaggggttgttgagaatcccagaagaggaacagacttagaaaggatttgcaaatccttagtcccttatgtatacaaaagcaat

SEQ ID NO: 45399 - DNA, 120 bp, synthetic construct
  source 1..120: mol_type = other DNA
aaatctgttactgcacacggcatagtaataaacaagaacagcgccaagccctctacctgtcattccatgtcaactctatgaggtccgtattattatatgacctttagagtcagaaacact

SEQ ID NO: 45400 - DNA, 120 bp, synthetic construct
  source 1..120: mol_type = other DNA
ctcccttcccctgccctgtccccaacaattcacatgtcctttcctcacccatcccggtcctcaacctcgcacccttgaggaattacctcgcttcccaattcccatccttcacaccccgca

SEQ ID NO: 45401 - DNA, 120 bp, synthetic construct; identical to SEQ ID NO: 12809
  source 1..120: mol_type = other DNA

SEQ ID NO: 45402 - DNA, 120 bp, synthetic construct
  source 1..120: mol_type = other DNA
cccatcagctccaggcagtctctgtggctttcctgacttttccctctctgaggctccaggactcacctgcaggcaggctccgccaagggttgtggccggcaaccggcgcctcaaggagag

SEQ ID NO: 45403 - DNA, 120 bp, synthetic construct
  source 1..120: mol_type = other DNA
aactgtttatcctgtgcctgggcagggaaaggacccatgggtgtggaggccaagcgctcggggatcctagagaccccttttcccgtcccccccagccgctccggtgcgctccgtagggct

SEQ ID NO: 45404 - DNA, 120 bp, synthetic construct; identical to SEQ ID NO: 12810
  source 1..120: mol_type = other DNA

SEQ ID NO: 45405 - DNA, 120 bp, synthetic construct
  source 1..120: mol_type = other DNA
gcaacccggggaattcatttttagttaatcattttacttgggagggagagtgagtgtcccagtttttctctaaaatgtgaattagttgtccagagaaataccctagattttctttcattc

SEQ ID NO: 45406 - DNA, 120 bp, synthetic construct
  source 1..120: mol_type = other DNA
attgtttgttatggaaagttagcttcaatgctgttgagatttcaatccctgatttccccaaatgtgttctcatttctctttccacttcagtcacccagtttaaaaatagagggactttgt

SEQ ID NO: 45407 - DNA, 120 bp, synthetic construct
  source 1..120: mol_type = other DNA
gtcttgccagtgctgtcttctttattccagatggtttgaccataattgaatgcttttgaattctctgatatattttggtatcgatgttaggggcttttggtaaaattaacatttagtttg

SEQ ID NO: 45408 - DNA, 120 bp, synthetic construct
  source 1..120: mol_type = other DNA
tgtccactgaagggatgggtcgcccctccacacctgtgggtgtttctcgttaggtggaacgagagacttggaaaagaaagagacacagacaaagtatagagaaagaaaaaagggggccca

SEQ ID NO: 45409 - DNA, 120 bp, synthetic construct; identical to SEQ ID NO: 12811
  source 1..120: mol_type = other DNA

SEQ ID NO: 45410 - DNA, 120 bp, synthetic construct
  source 1..120: mol_type = other DNA
gcaaagaggcgttccttcctcttttgctaatcctcttcagcacagaccctttacgggggtctgggggacggtcaggtctttcccttcccacgaggccatatttcagactatcacatgggg

SEQ ID NO: 45411 - DNA, 120 bp, synthetic construct
  source 1..120: mol_type = other DNA
ttcaagcatttgtttaacaaagcacatcttgcacagcccttaatccatttaaccctgagttgacacagcacatgtctaagggagcacagggttggaggtagggttacagattaaaatgga

SEQ ID NO: 45412 - DNA, 120 bp, synthetic construct; identical to SEQ ID NO: 12812
  source 1..120: mol_type = other DNA

SEQ ID NO: 45413 - DNA, 120 bp, synthetic construct
  source 1..120: mol_type = other DNA
tgattttggtttcctcatttgtgttgcaaacggcaataacttgggcccacttaagagaaatattggttaaacttttctttttgttctttttttgggggtctctttttttttggttctttt

SEQ ID NO: 45414 - DNA, 120 bp, synthetic construct; identical to SEQ ID NO: 12813
  source 1..120: mol_type = other DNA

SEQ ID NO: 45415 - DNA, 120 bp, synthetic construct
  source 1..120: mol_type = other DNA
ttttgaaatatgtgtaccttgtggagctattgacatatgcattacatctttgtgggggaacacttgaaatctattcttagtgattttcaagtatgcaatgccttggttttgtgtgtgtgt

SEQ ID NO: 45416 - DNA, 120 bp, synthetic construct
  source 1..120: mol_type = other DNA
aagcgattctcctggctcagcctcccaagcagctaggactacaggcgtgtgccaccatgccaggctaattttgtatttttagtagagacggggtttcaccatgttgatcaggctggtctt

SEQ ID NO: 45417 - DNA, 120 bp, synthetic construct; identical to SEQ ID NO: 12814
  source 1..120: mol_type = other DNA

SEQ ID NO: 45418 - DNA, 120 bp, synthetic construct
  source 1..120: mol_type = other DNA
ggcggaggttgcagtgagctgagatcatgccactgcactgcagcctgggcaacagagcaagactccatctcaaaaaaaaaaaaattgtactgtgttatacaatagatctcttgaacttat

SEQ ID NO: 45419 - DNA, 120 bp, synthetic construct
  source 1..120: mol_type = other DNA
tgtcatggcttttgaatatatgctctctattttgtatgttctctaaacagttcagggaccagctagagatgaacaaccagctaagtaacacaaaccattggcactcagtcaaggaatgac

SEQ ID NO: 45420 - DNA, 120 bp, synthetic construct; identical to SEQ ID NO: 12815
  source 1..120: mol_type = other DNA

SEQ ID NO: 45421 - DNA, 120 bp, synthetic construct
  source 1..120: mol_type = other DNA
gccagcactttgggaggccgaggcgggaggatcacctgaggtcaggagttcaagaccagcctgaccaacatggagaaacctcgtctctactaaaaatacaaaaatttgctgggcgtggtt

SEQ ID NO: 45422 - DNA, 120 bp, synthetic construct
  source 1..120: mol_type = other DNA
gtgacaagagcaaaactccatttcaaaaacaaacaaaaaacagaaacaaaattagctaggtttggaggcacatgcctgtaatcccagctactcagaaggctgaggcaggagaatcgcttg

SEQ ID NO: 45423 - DNA, 120 bp, synthetic construct
  source 1..120: mol_type = other DNA
ggtactatggatccaaaatattttgatagtttgagctcaaagtctagcagggagataaatagattaattattaaaccacataagaaatattgatagatatgaacaagtgtgagagcaagg

SEQ ID NO: 45424 - DNA, 120 bp, synthetic construct
  source 1..120: mol_type = other DNA
cagtggtgtgatcttggctcactgcaacctctgcctcctgggttcaagtgattctcctacctcagccacccgggtagctggcattacaggggtgtgccagtatgcctggctaatttttgt

SEQ ID NO: 45425 - DNA, 120 bp, synthetic construct; identical to SEQ ID NO: 12816
  source 1..120: mol_type = other DNA

SEQ ID NO: 45426 - DNA, 120 bp, synthetic construct
  source 1..120: mol_type = other DNA
gaagtgcgttgtttgcccacagtttggatcttatactgtaagcagcgggaaattgttaaagacttttaggcaggagaatgatgaaaccatgttattttatttatttttcagtaaattagt

SEQ ID NO: 45427 - DNA, 120 bp, synthetic construct
  source 1..120: mol_type = other DNA
tttcctagctgttaatgataggattgggtgatgccatcatatggggggggtggtgaaagaaaagaaatcaaggatgacttaggttatagtttggtagttgggtggtaataatcattaacc

SEQ ID NO: 45428 - DNA, 120 bp, synthetic construct
  source 1..120: mol_type = other DNA
actcattatattacagtcatataatgtatgactataataagataaattatagtcacatcttgttttggactaaaaatggtattcagtttgatcacatagacttggctttgaataactttt

SEQ ID NO: 45429 - DNA, 120 bp, synthetic construct; identical to SEQ ID NO: 12817
  source 1..120: mol_type = other DNA

SEQ ID NO: 45430 - DNA, 120 bp, synthetic construct
  source 1..120: mol_type = other DNA
actgcaacctctgcctcgcgggttcaagcgattctcctgcctcagcctcccgagtagctgggatcacaggcgtgcgccactacgcccagctaatttttgtacttttaatagagacggggt

SEQ ID NO: 45431 - DNA, 120 bp, synthetic construct
  source 1..120: mol_type = other DNA
cttcccaatgttatttttacattaccattgctgccccaatccagagaagagtttcaaaaatgatttcagcaatgattacattttggggagacatgttaatgcatttagaaggggcaacaa

SEQ ID NO: 45432 - DNA, 120 bp, synthetic construct
  source 1..120: mol_type = other DNA
tttgtcatatttcaaataaggttatggcatttgtgcagctagtttctgtgagggccttgtagaaagtttacattgatatttgtctgggaaacaatagcgctagacagagagggcacgcca

SEQ ID NO: 45433 - DNA, 120 bp, synthetic construct; identical to SEQ ID NO: 12818
  source 1..120: mol_type = other DNA

SEQ ID NO: 45434 - DNA, 120 bp, synthetic construct
  source 1..120: mol_type = other DNA
gtttgtgcatctaatatcaatggtgtgagggacatcatgagcttttttagaagatcattagatctgtatgagatcttgtgtcctagtgccttgcaagtagtggatatgcaataaactttt

SEQ ID NO: 45435 - DNA, 120 bp, synthetic construct
  source 1..120: mol_type = other DNA
acaatgatgtgactgaaggatataatgatgtgactgaagggtataatggtcgtgtgtttttcatagtacacaatgaacatcccttttctgaaaagcttgggaccagaaatatttaggatt

SEQ ID NO: 45436 - DNA, 120 bp, synthetic construct; identical to SEQ ID NO: 12819
  source 1..120: mol_type = other DNA

SEQ ID NO: 45437 - DNA, 120 bp, synthetic construct
  source 1..120: mol_type = other DNA
aattacatgaaagactttttgacttgaaattcattcaggatatctggagtttgactgatgttagttcctgaaatgaactagcttaatatttaggatgctctcttcacaaaccccttgtac

SEQ ID NO: 45438 - DNA, 120 bp, synthetic construct
  source 1..120: mol_type = other DNA
ggctcaagtgatactcccacctcagcctccagagtagctcgtattataggtgtgcactaccacacccaactaattttcatgttttttgtagagatggggttttaccatgttgtccaggca

SEQ ID NO: 45439 - DNA, 120 bp, synthetic construct
  source 1..120: mol_type = other DNA
ctgaccttttaaattcatccgtttgtagtagatatttgctaaagctaagctatatggttgcagttaccagtgggcttattctgtttttttgtttgttttgttaaccccgtctcttagaca

SEQ ID NO: 45440 - DNA, 120 bp, synthetic construct
  source 1..120: mol_type = other DNA
ccatcttggctcactgcaagctccatgtcccaggttcacgccattctctcgcctcagcctcctgagtagctgggattacaggcatgcgccaccacgcctggctaattttttgtattttta

SEQ ID NO: 45441 - DNA, 120 bp, synthetic construct; identical to SEQ ID NO: 12820
  source 1..120: mol_type = other DNA

SEQ ID NO: 45442 - DNA, 120 bp, synthetic construct
  source 1..120: mol_type = other DNA
taaaaatagagaagttgatatactaaagttgatctctaaatgtgtattgatttttgattctcttatcttgcagacacgttggtcgtcattgcctccgagcccactttagccctcagctct

SEQ ID NO: 45443 - DNA, 120 bp, synthetic construct
  source 1..120: mol_type = other DNA
cgcctcttgggttcacgccattctcctgcctcagcctcctgagtagctgggactacaggcgcccaccaccacgcctggctaatttttttgtatttttagtagagacagggtttcaccgtg

SEQ ID NO: 45444 - DNA, 120 bp, synthetic construct; identical to SEQ ID NO: 12821
  source 1..120: mol_type = other DNA

SEQ ID NO: 45445 - DNA, 120 bp, synthetic construct
  source 1..120: mol_type = other DNA
accatgcctggctaattttttgtatattttgtagagacgaggtttcaccattttgcccaagcaggtcttgaactcctgggctcaagtgatccccctgcctcggctgggattataggcatg

SEQ ID NO: 45446 - DNA, 120 bp, synthetic construct
  source 1..120: mol_type = other DNA
gttatacgaatagtaggatgaagttctacatatctttcacccacatttgccaactgttaacattttattgtgtttgcttatcactcttttttgtattttagattatgccatatgaaattt

SEQ ID NO: 45447 - DNA, 120 bp, synthetic construct
  source 1..120: mol_type = other DNA
tcactgaatgctttaagggtaaattgtgaacatcatgaccatttacttctaaatatttcttctaagaacaaagaaattgttttacataatgcagtataattatataaacataattatcaa

SEQ ID NO: 45448 - DNA, 120 bp, synthetic construct; identical to SEQ ID NO: 12822
  source 1..120: mol_type = other DNA

SEQ ID NO: 45449 - DNA, 120 bp, synthetic construct
  source 1..120: mol_type = other DNA
tgggcagtagagtgagacccctcatctctattttaaaaaaaagaagattggatgtggtggctcacacttgtaattccagcactttgggaacctgaggcaggaggatcccttgagcccagg

SEQ ID NO: 45450 - DNA, 120 bp, synthetic construct
  source 1..120: mol_type = other DNA
tgtaatcctagcactttcggaggctgaggtgggcggattgcttgagcccaggagtttgagaccagcctgggcaacatggtgaaaccccttctctacaaaaaatacaaaaactagctgggt

SEQ ID NO: 45451 - DNA, 120 bp, synthetic construct
  source 1..120: mol_type = other DNA
tagcccagtgacaaaggaaaccaagaaactactgaggtaccgagctgaatctagttcttgatttttgagaacctgaaagggaatcttgaaaagccagatgagagcagatggtaatgtatg

SEQ ID NO: 45452 - DNA, 120 bp, synthetic construct; identical to SEQ ID NO: 12823
  source 1..120: mol_type = other DNA

SEQ ID NO: 45453 - DNA, 120 bp, synthetic construct
  source 1..120: mol_type = other DNA
ctgaaaccccatcttgactgaaaatacaaaaattagctgggcgcggtggcatgtgcctgtagtcccagctactcaggaggctgaggcaggaggatgacttgaatccaggaggcggaggtt

SEQ ID NO: 45454 - DNA, 120 bp, synthetic construct
  source 1..120: mol_type = other DNA
taactgaattaaagttggtataaaaataagataagtggaggaacatgttttcctaatactgtgggtttatccagcccaccatactgttaccggaaaaggggtcttgacccagaccccaag

SEQ ID NO: 45455 - DNA, 120 bp, synthetic construct
  source 1..120: mol_type = other DNA
gggaacatgctgtctttgagtttctttttttcttctctctttctctctctttttttttttaaatatatatatatatatattaggtctttaaggttttattttattttattttaattttta

SEQ ID NO: 45456 - DNA, 120 bp, synthetic construct; identical to SEQ ID NO: 12824
  source 1..120: mol_type = other DNA

SEQ ID NO: 45457 - DNA, 120 bp, synthetic construct
  source 1..120: mol_type = other DNA
tgatgcaatcacagctcactgcagcttctacctccctgggctcagaagatcctcccacctcagcctcccgagtaactgggactgcaagctcggaccatcatgcttggctaaattttcttt

SEQ ID NO: 45458 - DNA, 120 bp, synthetic construct
  source 1..120: mol_type = other DNA
gtctggcctaagttttccttatatagggatcttgtctatgtaaggactaaactaagctgtgcctacatgcgggggaccagacagcatgacagaatttattattctattgatttaaagaaa

SEQ ID NO: 45459 - DNA, 120 bp, synthetic construct
  source 1..120: mol_type = other DNA
ggtattaccaagctgcttccttagctgtaaacatgttagaaccgtgggttgtcactggcaaggaatgtgccttgctagttttaagatggagtttatttatttattttatttatttttttg

SEQ ID NO: 45460 - DNA, 120 bp, synthetic construct
  source 1..120: mol_type = other DNA
aagtgattctcctgcctcaccctcctaggtaggtgggattacagtcgtgcgccaacacacccggctaatttttttctatttttagtagagatggggtttcaccgtgttggccaggctggt

SEQ ID NO: 45461 - DNA, 120 bp, synthetic construct; identical to SEQ ID NO: 12825
  source 1..120: mol_type = other DNA

SEQ ID NO: 45462 - DNA, 120 bp, synthetic construct
  source 1..120: mol_type = other DNA
tcaagtgattctactgcctcagtctcccgagtagctgggattacaggcgcccgccaccacatctggctaatttgtatttttagtagagacgaggtttctccatgttggtcaggctggtct

SEQ ID NO: 45463 - DNA, 120 bp, synthetic construct
  source 1..120: mol_type = other DNA
aatattaaaccaagtttacttttagttattttcaaacggtctggttttattttagtgctgttcctttgggaaccacggccaaagaagagatggagcggttctggaataagaatataggtt

SEQ ID NO: 45464 - DNA, 120 bp, synthetic construct; identical to SEQ ID NO: 12826
  source 1..120: mol_type = other DNA

SEQ ID NO: 45465 - DNA, 120 bp, synthetic construct
  source 1..120: mol_type = other DNA
aacatttttgaaacaatttcaaatttacataaacgttgcagaaataacatacagagttcccatatacctttatatggaaggtatatagtatatatgctaagttatatagaagttgcaact

SEQ ID NO: 45466 - DNA, 120 bp, synthetic construct
  source 1..120: mol_type = other DNA
cctcagcctcccgagtagctggggctacaggtgtgcaccactacggccagctaatttttgtatttttagtagagatgggatttcaccaggttggccaggatggtcttgatctcttgacct

SEQ ID NO: 45467 - DNA, 120 bp, synthetic construct
  source 1..120: mol_type = other DNA
attcagacatgctaataagcagattcccagctgcttaacatgtctgaatgatacaagaagaagttgcaatgatgatgatatccaagtattattcctgtatttgttttcttcttctttttt

SEQ ID NO: 45468 - DNA, 120 bp, synthetic construct
  source 1..120: mol_type = other DNA
agctgggattacagacatgaacctccatgcccggctaatttttgtcttttagtaagagatgaggttttgccatgttgtccaggctggtctcaaactcctggccataagtgatccacccac

SEQ ID NO: 45469 - DNA, 120 bp, synthetic construct; identical to SEQ ID NO: 12827
  source 1..120: mol_type = other DNA

SEQ ID NO: 45470 - DNA, 120 bp, synthetic construct
  source 1..120: mol_type = other DNA
tctgacttcttctacctcccttttctcctttcaagggacccttgtcattatatttagacctccccaaatatttcaggacaatgcctccatctcaaggtctttaatttaataatatctgca

SEQ ID NO: 45471 - DNA, 120 bp, synthetic construct
  source 1..120: mol_type = other DNA
ttatgtctgtcccatgacaaaatacattcaccacatcgcggtggccccaaaagtttcaacctactgtagcctcatctcaaagtcttaaaatttcatctaaatctccccatctgaaccaga

SEQ ID NO: 45472 - DNA, 120 bp, synthetic construct
  source 1..120: mol_type = other DNA
tagacattcctgctcaaaaagtgagaaaatggaaggaaaaaaggagtctctggttctaaccaggtttgaaattcagccaggcaaacaccatttgatttcaaggcctgagaataatccttt

SEQ ID NO: 45473 - DNA, 120 bp, synthetic construct; identical to SEQ ID NO: 12828
  source 1..120: mol_type = other DNA

SEQ ID NO: 45474 - DNA, 120 bp, synthetic construct
  source 1..120: mol_type = other DNA
gtggtggtgcgcctgtagtcccagctacttgggaggctgaggcacaagaatctcttgaacctgggtggtggaggttgcagtgagccgagattgcgagattgtggcgccactgcactccag

SEQ ID NO: 45475 - DNA, 120 bp, synthetic construct
  source 1..120: mol_type = other DNA
ctgcctctgtttctgccttctgatgagatggttgaggggatctactagtaacatgcttaatttcaaaacgccttttatgtgactaaatattctgccctttcaatctttctcaggtattaa

SEQ ID NO: 45476 - DNA, 120 bp, synthetic construct; identical to SEQ ID NO: 12829
  source 1..120: mol_type = other DNA

SEQ ID NO: 45477 - DNA, 120 bp, synthetic construct
  source 1..120: mol_type = other DNA
tgacagtaaatatctttttttttttttttttctgagacagagtctcacactattgccagggctgcaatgcagtggcgcagtcccggctcactgtaacccccgcctccctggttcacgcgg

SEQ ID NO: 45478 - DNA, 120 bp, synthetic construct
  source 1..120: mol_type = other DNA
tcctgacctcgtgatctgcccgccctggcctcccaaagtgctgggattacaggcatgagccaccgcgcctggcaacagtgaatatcttaattttagtatttttgctgggaaggctgagaa

SEQ ID NO: 45479 - DNA, 120 bp, synthetic construct
  source 1..120: mol_type = other DNA
ttgaactcctggactcaagtgatcttcctgactcagcctcctgagtagctgggactacaggtgcatgccaccacacctggctagtttttaattttttgtaaagacggtctcaatatatta

SEQ ID NO: 45480 - DNA, 120 bp, synthetic construct; identical to SEQ ID NO: 12830
  source 1..120: mol_type = other DNA

SEQ ID NO: 45481 - DNA, 120 bp, synthetic construct
  source 1..120: mol_type = other DNA
gttcctaatttcctcctgagcctttactagctgaattaacattcatattttcctttttgaaatacaatttgtataccatacggttcacacattgaaagcatacagtttagtggcttttgt

SEQ ID NO: 45482 - DNA, 120 bp, synthetic construct
  source 1..120: mol_type = other DNA
cggtttactgcaacctctgccttctgtgttcaagtgatctcctgcctcagcctcccaagtagctgggattacagatgtgcatcaccatgcctgactaatttttgtgtttttagtagagac

SEQ ID NO: 45483 - DNA, 120 bp, synthetic construct
  source 1..120: mol_type = other DNA
aatgttttcatcactccagaaagaaacactacatttcttagccatcaccaccaatcgtttgtccctcccagctctagacaatcagttatttactttccatcttataaacttacctattcc

SEQ ID NO: 45484 - DNA, 120 bp, synthetic construct; identical to SEQ ID NO: 12831
  source 1..120: mol_type = other DNA

SEQ ID NO: 45485 - DNA, 120 bp, synthetic construct
  source 1..120: mol_type = other DNA
ttaaagacggagtctcgctctgttgccaggctggagtgcagtggcgcagtctcagctcattgcaaccttcacctcccaggttcaagcgatattcctgcctcagcccccaagtagctggga

SEQ ID NO: 45486 - DNA, 120 bp, synthetic construct
  source 1..120: mol_type = other DNA
caaagtgctgggattacaggcatgagccacggcatccggcctatgtttaacattttgaggaactaccagactgttttccaaagtgactgtaccattttacattcacactagcagtgtata

SEQ ID NO: 45487 - DNA, 120 bp, synthetic construct
  source 1..120: mol_type = other DNA
ctgcccaatttcaaaggcacttccacatttttgggtattcgttacagctgcactcctcttctagttaccacaatctatactaattttctatttgctgccataacaaattactgcaaacgt

SEQ ID NO: 45488 - DNA, 120 bp, synthetic construct
  source 1..120: mol_type = other DNA
ggaagaatccatgtccttgcctttcctagcttctagaggctatctgaattccttggcttctgccctccttcctccatcttcagaaccagcaatgctacattgagttcttcagtcacatca

SEQ ID NO: 45489 - DNA, 120 bp, synthetic construct; identical to SEQ ID NO: 12832
  source 1..120: mol_type = other DNA

SEQ ID NO: 45490 - DNA, 120 bp, synthetic construct
  source 1..120: mol_type = other DNA
tagaaatggagtttggccatgttgctcaagctggctttgagctcctgggctcaagctgtcctcccacttcggcctcccaaagttctgggattacggctcactccctctttatcttaaggt

SEQ ID NO: 45491 - DNA, 120 bp, synthetic construct; identical to SEQ ID NO: 5447
  source 1..120: mol_type = other DNA

SEQ ID NO: 45492 - DNA, 120 bp, synthetic construct; identical to SEQ ID NO: 12833
  source 1..120: mol_type = other DNA

SEQ ID NO: 45493 - DNA, 120 bp, synthetic construct
  source 1..120: mol_type = other DNA
ttttggcgggagatactttgaaactctaaatattctttctcatcagatatttactcaccagtatctgttggaggtacttgcctaaatcatttattactgtgatagttgccaaatgtaatg

SEQ ID NO: 45494 - DNA, 120 bp, synthetic construct
  source 1..120: mol_type = other DNA
aggattatactttgttattatttattttggtgttcaaattgtctcagacctggccaataggagttcttcaaaatgactcctgtgaaatcagtatctgggtgctagatgtgctcattgcta

SEQ ID NO: 45495 - DNA, 120 bp, synthetic construct
  source 1..120: mol_type = other DNA
atacatatatacatacatctctgtttatctcatcttcagaagtggcattgataacagtttttgctgatgtctttgaagataagtccctgtaaatctgctttttgtttttttaggctaacc

SEQ ID NO: 45496 - DNA, 120 bp, synthetic construct; identical to SEQ ID NO: 12834
  source 1..120: mol_type = other DNA

SEQ ID NO: 45497 - DNA, 120 bp, synthetic construct
  source 1..120: mol_type = other DNA
atcctgatctcaggtgaaaccctgtctctactaaaaatacaaaaattagctggccgtggtggcacgtgcttgtagtcccagctactcaggagtctgaggcaggagaatcgcttgaacccg

SEQ ID NO: 45498 - DNA, 120 bp, synthetic construct
  source 1..120: mol_type = other DNA
gagcatcctaaattattctgaatctgtatatttaaagccgtggccttttttcacaggtcatataaagaatggttgtaggttggtgaggtgagtctttcactaccttatttgcttttctgg

SEQ ID NO: 45499 - DNA, 120 bp, synthetic construct
  source 1..120: mol_type = other DNA
gggaacacggggctatatccagagtggcatgtcagggaaagatatctgagatacctgaagtcatattttctattacccattttttgggttttttgaaagaggcctggaagtaaatggtta

SEQ ID NO: 45500 - DNA, 120 bp, synthetic construct
  source 1..120: mol_type = other DNA
tatttttttattgttttttttgcttttgaggcagagtctccctctgttactcaggctggagtgcagtggcgtgatcacggcttgctgcaacctcgacctcccgggctcaggcaatcctcc

SEQ ID NO: 45501 - DNA, 120 bp, synthetic construct; identical to SEQ ID NO: 12835
  source 1..120: mol_type = other DNA

SEQ ID NO: 45502 - DNA, 120 bp, synthetic construct
  source 1..120: mol_type = other DNA
aattaatctgaagatccagtcactcacatgtcttggagttgattctggctcttggatggggcccttattttctcaccacataggtcctttcacatgtctttgtaggctgctttgggtttc

SEQ ID NO: 45503 - DNA, 120 bp, synthetic construct
  source 1..120: mol_type = other DNA
tcatcaagtcctgcccaggttcaagggtagaggctaaatacttgcttgatgagaaatgacaagattctggaagatcctgggggactggaaataatattatggttatttttagaaaacaat

SEQ ID NO: 45504 - DNA, 120 bp, synthetic construct; identical to SEQ ID NO: 12836
  source 1..120: mol_type = other DNA

SEQ ID NO: 45505 - DNA, 120 bp, synthetic construct
  source 1..120: mol_type = other DNA
aaattgttcatcccagttaggaggctgactgtgtcagaatacaattttaaaacctcttttttgttgtccttgaaattgttgcaagcctcagctccttctgggtttcggtctcctgattct

SEQ ID NO: 45506 - DNA, 120 bp, synthetic construct
  source 1..120: mol_type = other DNA
gagttgatcagagtggtatgtggctcttcttccaccttttatatttctcttgttaaatctgagttgatcagagtggtatctagttagtattaatatttttaatttatttgggaatactcc

SEQ ID NO: 45507 - DNA, 120 bp, synthetic construct
  source 1..120: mol_type = other DNA
gtctaagctaacattccaagatgagcgttagctttcttcagagactcttgttctttccattttacccaccagttctctcttgagcatgagaactaggtctagaataacaatgttggttgt

SEQ ID NO: 45508 - DNA, 120 bp, synthetic construct
  source 1..120: mol_type = other DNA
ggataggtaacttattaggaaataagtggtatgttcagtttggatattttggggcatataataagggaggattcaaggatgaccatgtattatatgaaactgtggataaatgaaactcag

SEQ ID NO: 45509 - DNA, 120 bp, synthetic construct; identical to SEQ ID NO: 12837
  source 1..120: mol_type = other DNA

SEQ ID NO: 45510 - DNA, 120 bp, synthetic construct
  source 1..120: mol_type = other DNA
tgggattacaggcatgcaccaccacgcctggctaaatttttgtatttttagtagagatggggtttcaccgtgttggccagcctggtctcgaacacctgacctcatgatccacccgcctca

SEQ ID NO: 45511 - DNA, 120 bp, synthetic construct
  source 1..120: mol_type = other DNA
aacccgggctggagtacagtggcacagtcatagctcactgcagtctggagttcctggcctcaagcgaccctctcacttcagtctcccaagtagctgggaccacaggcctctgccaccaca

SEQ ID NO: 45512 - DNA, 120 bp, synthetic construct; identical to SEQ ID NO: 12838
  source 1..120: mol_type = other DNA

SEQ ID NO: 45513 - DNA, 120 bp, synthetic construct
  source 1..120: mol_type = other DNA
aatcatttttttttttctcagccctatcagtgatgcagtctggtaaaggtagggatccttctccataaatcagttttctttattctttaatttatttttgtaacctaatcctgatacagg

SEQ ID NO: 45514 - DNA, 120 bp, synthetic construct
  source 1..120: mol_type = other DNA
agcaattttcctgcctcagcctcccgagtaactgagattacaggcatgtgccaccacatccggctaattttgtattttcagtagagacggggtttctccatgttggtcaggctgattgcg

SEQ ID NO: 45515 - DNA, 120 bp, synthetic construct
  source 1..120: mol_type = other DNA
gcacagtggctcacacctgtaattccagtactttgggaggccgaggtgggcggatcatgagatcagatcaagaccagcctggctaaggtgatgaaacccctttactaaaaatacaaaaat

SEQ ID NO: 45516 - DNA, 120 bp, synthetic construct; identical to SEQ ID NO: 12839
  source 1..120: mol_type = other DNA

SEQ ID NO: 45517 - DNA, 120 bp, synthetic construct
  source 1..120: mol_type = other DNA
tttcagaattagtttatatttttgccaagatagactctctactatggtgtcatcttttcctttttaaaattgtctttgtgtgtttctttacagttggtctcttcccatggcgatgtccat

SEQ ID NO: 45518 - DNA, 120 bp, synthetic construct
  source 1..120: mol_type = other DNA
acttggctgtttcattggccctagtctccgcctcctttgaaactcagcacttgatttagagggaacagtaagtctcttaagtttattgttcattcatccctttaacaattaattatgagt

SEQ ID NO: 45519 - DNA, 120 bp, synthetic construct
  source 1..120: mol_type = other DNA
tccagcgattctcctgcctcagcctcctgagtagctgggattacaggcatgtgccaccacgcctggctaaatttttgtatttttagtagagacggggtttcaccatgttagccaggatgg

SEQ ID NO: 45520 - DNA, 120 bp, synthetic construct; identical to SEQ ID NO: 12840
  source 1..120: mol_type = other DNA

SEQ ID NO: 45521 - DNA, 120 bp, synthetic construct
  source 1..120: mol_type = other DNA
agctacagagtgaattatatactggtcttagataattagtacatcctttttaggtaggaaggtttattatatggagtgcagattataatcagttttctgggatctgatgtatcttttcac

SEQ ID NO: 45522 - DNA, 120 bp, synthetic construct
  source 1..120: mol_type = other DNA
catatttttacttttttagctttcctttatttagccttatagcatactttgctctcctacccccaccaaaaacagaaacaaaaactagattatgttccctggatacatgctcttaaagca

SEQ ID NO: 45523 - DNA, 120 bp, synthetic construct
  source 1..120: mol_type = other DNA
ttcattgttgttcttccttactggattgtctgttccctgagggcttagactgcatctgtctgtatttttaattatctagtagggtacctagaatgcagtagataatttagtaaatatttg

SEQ ID NO: 45524 - DNA, 120 bp, synthetic construct
  source 1..120: mol_type = other DNA
ctgcatattgactataataactacctaactagtattgtatttcaactggcatttctgtgtgatgtgattactagtttagctgaaagctattcagttcagtgggagccagaagaggttatt

SEQ ID NO: 45525 - DNA, 120 bp, synthetic construct; identical to SEQ ID NO: 12841
  source 1..120: mol_type = other DNA

SEQ ID NO: 45526 - DNA, 120 bp, synthetic construct
  source 1..120: mol_type = other DNA
tcttgttgcccaggctggagtgcaatggcacagccttggctcactgcaacctcatgagaccagcctcctgggttcaagctattcttctgcctcaacctctcaagtagctgggattacagg

SEQ ID NO: 45527 - DNA, 120 bp, synthetic construct
  source 1..120: mol_type = other DNA
cactgtgcctggccccttggtatatctttaacctcatcctagggaataagaggaaatatcttgcctagaatcggtatgaaattatatacctgagagacagaagccccactgttttacctt

SEQ ID NO: 45528 - DNA, 120 bp, synthetic construct; identical to SEQ ID NO: 12842
  source 1..120: mol_type = other DNA

SEQ ID NO: 45529 - DNA, 120 bp, synthetic construct
  source 1..120: mol_type = other DNA
tgtagactatgtttttaactgacgtggtcatcagtagggccagtggctctagtgtagggatcctgtatttaaggaactgctgatgagacattggcaggaattatctgaatctaagcctct

SEQ ID NO: 45530 - DNA, 120 bp, synthetic construct
  source 1..120: mol_type = other DNA
tttgttctttttcattcctttggttggtaaagggacgatggaatcaaggtataaggatgatttgtgttgttaggaatccatatgtagttcctggtttttaacctgcttgcactgaactgg

SEQ ID NO: 45531 - DNA, 120 bp, synthetic construct
  source 1..120: mol_type = other DNA
gctttctactcagtttggtgatattgatgaacagatttaatcctaaaaatcactgaaagaacaagagcagtttatttattaggctgtagtttcccttattatctcagtatatttgtcacc

SEQ ID NO: 45532 - DNA, 120 bp, synthetic construct; identical to SEQ ID NO: 12843
  source 1..120: mol_type = other DNA

SEQ ID NO: 45533 - DNA, 120 bp, synthetic construct
  source 1..120: mol_type = other DNA
atagccgggcatggtggcgggcacctgtagtcccagctgcttgggaggctgaggcaggagaatggcgtgaacctgggaggcggagcttgcagtgagctgagattgcgccactgcactcca

SEQ ID NO: 45534 - DNA, 120 bp, synthetic construct
  source 1..120: mol_type = other DNA
caggaattcaaggctgcagtgagctgtcactgtgccactgcactccagcctgatgacagcaagaccctatctcaaaaaaaagaaaaaaaaaagaaaaaagttgttttttttctgtcttta

SEQ ID NO: 45535 - DNA, 120 bp, synthetic construct
  source 1..120: mol_type = other DNA
tttcttcaaatgttgaaggtccctccatcaaaatcgtaaaggaataggtttttgccaggtggatgacttaagcaaattactcagttctctaaacctcagcttattccttataaaatgggc

SEQ ID NO: 45536 - DNA, 120 bp, synthetic construct; identical to SEQ ID NO: 12844
  source 1..120: mol_type = other DNA

SEQ ID NO: 45537 - DNA, 120 bp, synthetic construct
  source 1..120: mol_type = other DNA
ctcccttccttagactctcctaatgactgtgttcactttagcacttagattaaaattcaaatatccacctttgccctgccagctctggctcttccctaactcattcctgccattcctccc

SEQ ID NO: 45538 - DNA, 120 bp, synthetic construct
  source 1..120: mol_type = other DNA
ttgctgcactgtgcttggttagttctttcttatcctttacatcttagcaaaatgttaactcaaagagcactttgcttaccaccatatttaaagtacaagcttccttacatctgttttaca

SEQ ID NO: 45539 - DNA, 120 bp, synthetic construct
  source 1..120: mol_type = other DNA
ggctataatgtagtggcgcgatctcagctcactgcaacctccacctcccgggttcacgccattctcctgcctcagcctccccagcagctgggactacaggcgcctgccaccacgcctggc

SEQ ID NO: 45540 - DNA, 120 bp, synthetic construct; identical to SEQ ID NO: 12845
  source 1..120: mol_type = other DNA

SEQ ID NO: 45541 - DNA, 120 bp, synthetic construct
  source 1..120: mol_type = other DNA
tttttagtagagacagggtctcactatttggccaggctggtctcaaactcctgacctcaaggaatctgcccgcctcagcctcccaaagtgttgggattacaggcgtgagccaccacgccc

SEQ ID NO: 45542 - DNA, 120 bp, synthetic construct
  source 1..120: mol_type = other DNA
aatgaacatacccatgtaaatcactttgctcatagtggtcacttagaagtgttcatttttcccaccttctaattaacctcctgttacacattagaaattagatagggataatatatagtc

SEQ ID NO: 45543 - DNA, 120 bp, synthetic construct
  source 1..120: mol_type = other DNA
gcgatctcagctcactacaactctgcctcccaggttcaagtgattctcctgcctcagcctcccgactagctgggattacaggcatgcaccaccacgcctggctaattttgtatttttagt

SEQ ID NO: 45544 - DNA, 120 bp, synthetic construct; identical to SEQ ID NO: 12846
  source 1..120: mol_type = other DNA

SEQ ID NO: 45545 - DNA, 120 bp, synthetic construct
  source 1..120: mol_type = other DNA
tattgtttatggaataataacaagaaaaaaaaagtgtacgttttcagtacagataaaaccattcatttcccccacccaatattttcaatccacagttagttgtatatccacagatgcaga

SEQ ID NO: 45546 - DNA, 120 bp, synthetic construct
  source 1..120: mol_type = other DNA
gagtttgtgaagaggaggtagaggagggcattccaacagagaaattcctttatggaaaggcatagggattggaaatctcccggatcattggatgattatgacgaggtctgtttctttttt

SEQ ID NO: 45547 - DNA, 120 bp, synthetic construct
  source 1..120: mol_type = other DNA
gtagctgggattacaggcacctgccaccatgccaaactaattttttttgtatttttagtagagttggggtttcaacatcttggccaggctggtcttgaactcctgacctcgtgatccacc

SEQ ID NO: 45548 - DNA, 120 bp, synthetic construct
  source 1..120: mol_type = other DNA
actttgggaggccgaggcaggtggatcacaaggtcaagagatcaagaccatcctggccaacatggtgaaaccccatctctactaaaaatacaaaaattagctgggcatggtggcatgtgc

SEQ ID NO: 45549 - DNA, 120 bp, synthetic construct; identical to SEQ ID NO: 12847
  source 1..120: mol_type = other DNA

SEQ ID NO: 45550 - DNA, 120 bp, synthetic construct
  source 1..120: mol_type = other DNA
ttaacactagtttgactttaaaatagaatttattaaaaagaaacttgacaatttttgtttgtttgtttttttttgagatggagtcttgccctgtcgcccaggctggagtgcaatggtgcc

SEQ ID NO: 45551 - DNA, 120 bp, synthetic construct
  source 1..120: mol_type = other DNA
tagagacgggatttcaccatgttggccaggctggtcttgaactccttacctcaagtgatccgcctgcctctgcctcccaaagtactgggattacaggcatgagctactgcgcctggcctg

SEQ ID NO: 45552 - DNA, 120 bp, synthetic construct
  source 1..120: mol_type = other DNA
gaggctgaggcgggtggatcacctgagatcaggagtttgagaccagcctggccaacatagtgaaaccccatctctactaaaaatccaaaaaaaaaaaaaaaaaaaaattagccagttgtg

SEQ ID NO: 45553 - DNA, 120 bp, synthetic construct; identical to SEQ ID NO: 12848
  source 1..120: mol_type = other DNA

SEQ ID NO: 45554 - DNA, 120 bp, synthetic construct
  source 1..120: mol_type = other DNA
tattttaagctttgaaccaatatatacagatattcatgtatctgtatatgaattgtacaattagcttgaatggatataagaatggtcctgcatgttttgggtagtctttaaaaacagtca

SEQ ID NO: 45555 - DNA, 120 bp, synthetic construct
  source 1..120: mol_type = other DNA
aaaaatataaaaaattagctgggtgtaggtggcacattcctgtaacgtgggctacttgggagactgaagcacgagaatcgcttgaacccaggaggcagaggttgcagtgagccgagatca

SEQ ID NO: 45556 - DNA, 120 bp, synthetic construct; identical to SEQ ID NO: 12849
  source 1..120: mol_type = other DNA

SEQ ID NO: 45557 - DNA, 120 bp, synthetic construct
  source 1..120: mol_type = other DNA
ctgagttcaattctaactctgtcactaactgtgagaccttaccttgaaaaagttatttgtcaccacacctgccaccaagcctcagtatttttgtccacaaatttggataatacctttttt

SEQ ID NO: 45558 - DNA, 120 bp, synthetic construct
  source 1..120: mol_type = other DNA
ctgcctcagctttcccagtagctaggattacaggcacgcgtcaccatgcctggttaattttgtatttttagtagagacggggtttcaccatgttggccaggctagtcttgaactcctgac

SEQ ID NO: 45559 - DNA, 120 bp, synthetic construct
  source 1..120: mol_type = other DNA
aggctggtctcaactcctgagctcaagtgatccgcctaccttggcctcccaaagtgctgggattacaggcgtgagccaccatgctcagcctggataatacctttttgctgtgtatggggg

SEQ ID NO: 45560 - DNA, 120 bp, synthetic construct
  source 1..120: mol_type = other DNA
atcaacaaaagttccagactcataaaaacatatgcattaaatatgtacaattttttcatgtttcaattatacccaataaaggtattttttaaaaaaaatcaaagatagcccaaatgtgtt

SEQ ID NO: 45561 - DNA, 120 bp, synthetic construct; identical to SEQ ID NO: 12850
  source 1..120: mol_type = other DNA

SEQ ID NO: 45562 - DNA, 120 bp, synthetic construct
  source 1..120: mol_type = other DNA
tcagaaacaaaaaaggaaaaaagagaaggccaaggaaccaaatattcagtgtttattctctagagtccaaaggagagaggcattgaacctggaaggcacaaattatccagtcagtggaga

SEQ ID NO: 45563 - DNA, 120 bp, synthetic construct
  source 1..120: mol_type = other DNA
ggtcttggattttggttattagaagaggttttgccatctatcttctatactttagtctcttgtaattttgacaagcctgaaggtaggctttgggctgtagaaaatgcaccaagagttctt

SEQ ID NO: 45564 - DNA, 120 bp, synthetic construct
  source 1..120: mol_type = other DNA
aattcctaatacaggcttggtggtgattattatttacattaataatcagaatagttaatcttatacctctcagaaaatgtgtgatatttgtagttaaacaagtccttctcagcccttcct

SEQ ID NO: 45565 - DNA, 120 bp, synthetic construct
  source 1..120: mol_type = other DNA
gagtactcttgacctcaagagaggttgtggggaagcagatgggcagaatacatcatgatgagattagtgtgacaacactggaaataaaagaacagttatgtgctgtcacactgagtttta

SEQ ID NO: 45566 - DNA, 120 bp, synthetic construct; identical to SEQ ID NO: 12851
  source 1..120: mol_type = other DNA

SEQ ID NO: 45567 - DNA, 120 bp, synthetic construct
  source 1..120: mol_type = other DNA
aggagtggggtcagtttcctgatgcccaatatactgaacatcagaggagaattcagaaaatctcatatttaattctcatatgtttttcacttgtagtgatgaaagctttggctaaagtag

SEQ ID NO: 45568 - DNA, 120 bp, synthetic construct
  source 1..120: mol_type = other DNA
aatgatcccagatctccttgacctcccagagatttgtataaaaaaaaatttttcctgattacaagaacatattaccaagaatgaaaatattatacaaatgtatacttagaaaagttgccc

SEQ ID NO: 45569 - DNA, 120 bp, synthetic construct; identical to SEQ ID NO: 12852
  source 1..120: mol_type = other DNA

SEQ ID NO: 45570 - DNA, 120 bp, synthetic construct
  source 1..120: mol_type = other DNA
cagctactcgggaggctgaggcaggagaattgcttgaacctgggaggcggaggttgcagtcagctgagatcgtgccaccgcactccagtctgggcgacagagcgagactccgtctcaaag

SEQ ID NO: 45571 - DNA, 120 bp, synthetic construct
  source 1..120: mol_type = other DNA
attctgtattattcataggaaaacaaaagctgaagacactgttattcacatcctagtatttccaagagttttgactctcgtaggtcatttgagagtaggtggtgttatcctaggataaca

SEQ ID NO: 45572 - DNA, 120 bp, synthetic construct
  source 1..120: mol_type = other DNA
tatttgatgcatagatcagggatgagtttgcccagatatctaaggcatatatttggctattgaagtttcagagctttgtgctggcactgaaattcaaaagatagttttgaatttcctatc

SEQ ID NO: 45573 - DNA, 120 bp, synthetic construct; identical to SEQ ID NO: 12853
  source 1..120: mol_type = other DNA

SEQ ID NO: 45574 - DNA, 120 bp, synthetic construct
  source 1..120: mol_type = other DNA
ggctgggcacagtggctgacaactataatcccagtgctttgggaggccaaggcagaaggatcgcttgagcccaggagttagagaccagcctgagcaacatagcaagaccccgtctctatg

SEQ ID NO: 45575 - DNA, 120 bp, synthetic construct
  source 1..120: mol_type = other DNA
acctgggctggagtgcagtagcacaatcacagctcactttgtgcctggctaatattttttatttttgtttttattttttgtcttatttttagtagagacagggtctcattatgttgccca

SEQ ID NO: 45576 - DNA, 120 bp, synthetic construct
  source 1..120: mol_type = other DNA
tgctgttggatattatacaactcctccaaccttagaaatcagattggatactgccaccctcatttcttgttccacagtgattttcacacagtacttcatttttgctgaaaacccagcttt

SEQ ID NO: 45577 - DNA, 120 bp, synthetic construct; identical to SEQ ID NO: 12854
  source 1..120: mol_type = other DNA

SEQ ID NO: 45578 - DNA, 120 bp, synthetic construct
  source 1..120: mol_type = other DNA
ttttttttttaattcccattttacagatgatgtcttatttctttgtgtgtgtgtgtgtgtgtgtgtgtgtgtgtgtgtgtgtgtgtgtgttttgtcatttgagatggagcctcacgcctc

SEQ ID NO: 45579 - DNA, 120 bp, synthetic construct
  source 1..120: mol_type = other DNA
caccacaactggctcatttttgtatttttagtagagatggggtttcaccatgttgcccaggctggtcttgaactcctcaccacaaataatctgcccaccttggcctcccaaagtgttggg

SEQ ID NO: 45580 - DNA, 120 bp, synthetic construct
  source 1..120: mol_type = other DNA
tcagtcattggtggtcgatagccactgagctccaacagataatgcagccctgtcagacattaaaatattcatactttttctttcacatagggaaataatcttccaagtatatacacatag

SEQ ID NO: 45581 - DNA, 120 bp, synthetic construct; identical to SEQ ID NO: 12855
  source 1..120: mol_type = other DNA

SEQ ID NO: 45582 - DNA, 120 bp, synthetic construct
  source 1..120: mol_type = other DNA
atttatttctatgctttctactaagagttttatagttttagttctagcatttaggtctctaattcattttaatttaaatttttgtgtaatagagatttgaatgatttaaaatttttcctc

SEQ ID NO: 45583 - DNA, 120 bp, synthetic construct
  source 1..120: mol_type = other DNA
tgagaccagcctggccaacatggcaaaaccctgtctctactaaaaatgcaaaaattagcgaggcatggtggcatgcatctataaggccagctacctgggaggctgaggcacaagaatggc

SEQ ID NO: 45584 - DNA, 120 bp, synthetic construct
  source 1..120: mol_type = other DNA
ttctgactcttctctggactgagtacactgtttttaccttttcttagttagatgatgaactagatgatatagcaaggcttgatgtctaaactggcaagtgaagtttttatagagacggat

SEQ ID NO: 45585 - DNA, 120 bp, synthetic construct; identical to SEQ ID NO: 12856
  source 1..120: mol_type = other DNA

SEQ ID NO: 45586 - DNA, 120 bp, synthetic construct
  source 1..120: mol_type = other DNA
ccagcctggccaacttggtgaaaccctgtctctactaaaaatacaaaaattagctgggcgttgtggtgggcacctgtcatccccactactcaggaggctgaagcaggagactcgcttgaa

SEQ ID NO: 45587 - DNA, 120 bp, synthetic construct
  source 1..120: mol_type = other DNA
ttagaattgtatgaggtgccaggggtcccagttttatgtatcatattagttgtaacttatgagcagctgtgacaagctacttggttttctcctcaggggtctctctttttggcatgtcgg

SEQ ID NO: 45588 - DNA, 120 bp, synthetic construct
  source 1..120: mol_type = other DNA
ggaatgggatccgacacttggtaagttaattcgggatttgcacattttctctgtgaagggagtggggagactgggaggattctttccttcattactgggtttagtgctgttctttttttt

SEQ ID NO: 45589 - DNA, 120 bp, synthetic construct
  source 1..120: mol_type = other DNA
gttggcgttatagacgcatgccaccactcctggtttttgtatttttagtagagatggggtttcaccatgttggccaggctggtctcaaactcctggccttaagtgatccgcctgcctaag

SEQ ID NO: 45590 - DNA, 120 bp, synthetic construct; identical to SEQ ID NO: 12857
  source 1..120: mol_type = other DNA

SEQ ID NO: 45591 - DNA, 120 bp, synthetic construct
  source 1..120: mol_type = other DNA
aggcgcctcccaccacgcccggctaattttttgtatttttagtagagatggggtttccccatgttagccaggctggtctcaaactcctgaccttgtgatccacccctctcagcttcccaa

SEQ ID NO: 45592 - DNA, 120 bp, synthetic construct
  source 1..120: mol_type = other DNA
tacctatttatgtgtcaggtactgttgtagacactggggattcagttatgagctagataaccattgttgctgctttcattcttccgttcctgttgacccagagtagtgcttctgacagga

SEQ ID NO: 45593 - DNA, 120 bp, synthetic construct
  source 1..120: mol_type = other DNA
aggttaggaatcttttttttttttttttttttttgagacagagtcttgctccattgcccaggctggagtgcaatggtgcaatctcagctcactgcaacctccacctcccaggttcaagtg

SEQ ID NO: 45594 - DNA, 120 bp, synthetic construct; identical to SEQ ID NO: 12858
  source 1..120: mol_type = other DNA

SEQ ID NO: 45595 - DNA, 120 bp, synthetic construct
  source 1..120: mol_type = other DNA
gtggtgtgcgcctgtggtcccagctacccgtaaggctgaggtgggaggatcgaatgagcctgggaggcggaggttgcactgagccgagattgtgccactgcacttcagcctgggtgacag

SEQ ID NO: 45596 - DNA, 120 bp, synthetic construct
  source 1..120: mol_type = other DNA
acatggagaaacgctgtctctactaaaaatacaaaattagccgggcatggtggcacatgcctgtaatcccagctactcgggaggctgaggcaggagacttgcttgaacccgggaggcaga

SEQ ID NO: 45597 - DNA, 120 bp, synthetic construct
  source 1..120: mol_type = other DNA
tgtaatcccagctacttgggaggctgaggcaggagaatccaggaggcagaggttgcagtgagccaagatcatgccactgcactctagcctgggtgacaaaagtgaaactcagtctcaaaa

SEQ ID NO: 45598 - DNA, 120 bp, synthetic construct; identical to SEQ ID NO: 12859
  source 1..120: mol_type = other DNA

SEQ ID NO: 45599 - DNA, 120 bp, synthetic construct
  source 1..120: mol_type = other DNA
aatgacttcctattccacagaacaaagctctgtaaagaaaatcagctgatcagcttcctctgttcatattttggctcagacagagacttgccctatatttgtctttgtctcaatatgggg

SEQ ID NO: 45600 - DNA, 120 bp, synthetic construct
  source 1..120: mol_type = other DNA
tttattttttcttctagcaagtactggctgtgagtgtgggacaggattttgtgttttctgtgacagtctgcagtttttggcctctgaacttgatagttgacttgccagaagatctaatgg

SEQ ID NO: 45601 - DNA, 120 bp, synthetic construct; identical to SEQ ID NO: 12860
  source 1..120: mol_type = other DNA

SEQ ID NO: 45602 - DNA, 120 bp, synthetic construct
  source 1..120: mol_type = other DNA
tgggctcatttagtgacttataatataatattaatatgttaatatccctaagacacaagagagtcaaaattagtgttttgttaaatgtggggctgggggcatggtagctcatgtctgtaa

SEQ ID NO: 45603 - DNA, 120 bp, synthetic construct
  source 1..120: mol_type = other DNA
tgatgggtgcctgtagtcccagctacttgggaggctgaggcaggaggattgcttgaacctgggaggtcaaggcctcagtgagctgagattgtgccactgcactccagcctaggtgacaaa

SEQ ID NO: 45604 - DNA, 120 bp, synthetic construct
  source 1..120: mol_type = other DNA
gcttgagcccaggagttcaatactagcctgggcaagacataacaagagtctatctctattttttagtattaaaaagaaaagtgggttttaactcaattggtagaaaaccaatttagtggc

SEQ ID NO: 45605 - DNA, 120 bp, synthetic construct
  source 1..120: mol_type = other DNA
tcaagagtttgagaccatcctggccaacatggtgaaaccccatctctactaaaaatacaaaaattagcttggcatggtggcatgcgcctgtagtcccagccactggcagggctgaggcaa

SEQ ID NO: 45606 - DNA, 120 bp, synthetic construct; identical to SEQ ID NO: 12861
  source 1..120: mol_type = other DNA

SEQ ID NO: 45607 - DNA, 120 bp, synthetic construct
  source 1..120: mol_type = other DNA
gtcaaaacaaaattgagaaatagtgttctagatctcagagtatcctttagaatactagtcctctgataaatagagtttccctctataaaaagattctgagattgactgtatctaggaaat

SEQ ID NO: 45608 - DNA, 120 bp, synthetic construct
  source 1..120: mol_type = other DNA
cgagatcaggagatcaagaccatcctggctaactcgatgaaaccccatctctactaaaaatacaaaaacaaaattagccaggcgtggtggcgtgtgcctctagtcccagctacttgggag

SEQ ID NO: 45609 - DNA, 120 bp, synthetic construct
  source 1..120: mol_type = other DNA
aaaactgtttagaaagtcttgcagttaaatgtttatgaactttgtatgaccacagaacttttttttttttggcccatacaatggctttcaacattctgagagcaagtgtttggaagaata

SEQ ID NO: 45610 - DNA, 120 bp, synthetic construct; identical to SEQ ID NO: 12862
  source 1..120: mol_type = other DNA

SEQ ID NO: 45611 - DNA, 120 bp, synthetic construct
  source 1..120: mol_type = other DNA
tctgagacaggaactgttaatgtcctatttactgaaattccttttttttttttttgctttgtccacagatgtgggacctaggaaaaggcctgaagattccccagctataccagtctggag

SEQ ID NO: 45612 - DNA, 120 bp, synthetic construct
  source 1..120: mol_type = other DNA
cttatctccagcctgggaaaagttctccttatttgtttagatccttttgtattttcagatctccttggagcagtagagtacctggtagaccataatagtggaaaagggtctagttttccc

SEQ ID NO: 45613 - DNA, 120 bp, synthetic construct
  source 1..120: mol_type = other DNA
gcttttggctccttcttcctgagacagtggaaacaatgccagctctgtggcttctgccctggggatgggccgggttggggggtgggttggtgaggctttgggtgccactgcctgtgggtt

SEQ ID NO: 45614 - DNA, 120 bp, synthetic construct; identical to SEQ ID NO: 12863
  source 1..120: mol_type = other DNA

SEQ ID NO: 45615 - DNA, 120 bp, synthetic construct; identical to SEQ ID NO: 12864
  source 1..120: mol_type = other DNA

SEQ ID NO: 45616 - DNA, 120 bp, synthetic construct
  source 1..120: mol_type = other DNA
aaataccgaaatcacagcaatgaccactgtagtctaggggtccagatgtttacccgaaggtatatttcacttgctgtgagctgacgagttgagggaataatcagaaagagagctccctct

SEQ ID NO: 45617 - DNA, 120 bp, synthetic construct
  source 1..120: mol_type = other DNA
cccatttcttctggagttggtgtgtttggatgtgggagtggaggggggatcagttcgaaaatcatttaacctgggcatttgtgttacctcaggtactgtagtaatgctaggatacaaatg

SEQ ID NO: 45618 - DNA, 120 bp, synthetic construct
  source 1..120: mol_type = other DNA
tctcaagaactgttaaagagatacgccaataggatttggcgattgaatttaggggaaaagtctctcatgatttccagattactgagttaggttaaagaatgcctgaggtgtcattaaata

SEQ ID NO: 45619 - DNA, 120 bp, synthetic construct; identical to SEQ ID NO: 12865
  source 1..120: mol_type = other DNA

SEQ ID NO: 45620 - DNA, 120 bp, synthetic construct; identical to SEQ ID NO: 12866
  source 1..120: mol_type = other DNA

SEQ ID NO: 45621 - DNA, 120 bp, synthetic construct
  source 1..120: mol_type = other DNA
atctcggctcactgcaacctccaccttctgagttcaagcaattctcctgcccctgcctcccgactagctgggattacaggcgcccaccaccatgcccagctaagttttgtacttttagta

SEQ ID NO: 45622 - DNA, 120 bp, synthetic construct
  source 1..120: mol_type = other DNA
ccacgcctggaccactaacttacattcataaggtgtctgttcacttcactgaaccaagactggcttaattctgtagcaatacagcaattctgttttttatccatcttcttggatctgtct

SEQ ID NO: 45623 - DNA, 120 bp, synthetic construct
  source 1..120: mol_type = other DNA
tgtactcagagttatatcctatatgtacactgcctgtcagtttgggttactgtgtggcatatgttgaacatgaaagatgtgtgtttctcacatcaacttttatgaatctggtcctttttg

SEQ ID NO: 45624 - DNA, 120 bp, synthetic construct
  source 1..120: mol_type = other DNA
ctgcagccctcactcttcatggtcactggcaagtatagcaattccaaatatagttgtctgctcagtttgtttgctgtgagcttgtcttatgtattatatatgagggagaagttgattgaa

SEQ ID NO: 45625 - DNA, 120 bp, synthetic construct; identical to SEQ ID NO: 12867
  source 1..120: mol_type = other DNA

SEQ ID NO: 45626 - DNA, 120 bp, synthetic construct
  source 1..120: mol_type = other DNA
ccttctcaaaaccctattttgtctcttcatgttactcaaagtcagaattcttagggttgtctgtagactctacatgattgaaccaccctgtttcttccctcatttttagctgctctctct

SEQ ID NO: 45627 - DNA, 120 bp, synthetic construct
  source 1..120: mol_type = other DNA
tcatctccttcaggtcttgaatgccattctctcaacaaagccttccctaaccacttattcaaaattgcagtttctgtcctgccattccttatctctcttgcttgttttatttttctcaat

SEQ ID NO: 45628 - DNA, 120 bp, synthetic construct; identical to SEQ ID NO: 12868
  source 1..120: mol_type = other DNA

SEQ ID NO: 45629 - DNA, 120 bp, synthetic construct
  source 1..120: mol_type = other DNA
cacaacctccgcctcccaggtacaagcgattctccctgcctcagcctcccaagtagctgggattacaggcgtgcaccaccacatccggctaatttttttgtatttttagtagagacgggg

SEQ ID NO: 45630 - DNA, 120 bp, synthetic construct
  source 1..120: mol_type = other DNA
ttttatctggtatagtttgtatgactttctacgtaatgaaccttctaaaatgagggtaaatgacaggttgggttccttgagttgttctttttaagttttgcaagggacaatatgttgtca

SEQ ID NO: 45631 - DNA, 120 bp, synthetic construct
  source 1..120: mol_type = other DNA
gtcagaatcattttctagctagtgttaaagattttttttttcttttttttttgggacggagtctcactctcacccaggctggagtgcagtggtgtgatcttggttcactgcaacctctgc

SEQ ID NO: 45632 - DNA, 120 bp, synthetic construct
  source 1..120: mol_type = other DNA
caggctggtcttggactcctgacctcaagtgatcctcccaccttggcctcccaaagtgctgggattataggtgtgaaccaccgtgcccagcctaaaggggttttaattatctggttttgt

SEQ ID NO: 45633 - DNA, 120 bp, synthetic construct; identical to SEQ ID NO: 12869
  source 1..120: mol_type = other DNA

SEQ ID NO: 45634 - DNA, 120 bp, synthetic construct
  source 1..120: mol_type = other DNA
tttctttggctttccagatgcatagaagtctcctctgccagatccttctcctcttgtctgacctcgagatgacaaaatctccagggctgagtcatggccttcttaatttctccatctgta

SEQ ID NO: 45635 - DNA, 120 bp, synthetic construct
  source 1..120: mol_type = other DNA
atcgctcttttttccccccaaatctcccttgatttctcctttaaaacccccttctcaaagctatgctcaaactaaaattcttaggagtcattctagatatttctttttgttcttacccca

SEQ ID NO: 45636 - DNA, 120 bp, synthetic construct; identical to SEQ ID NO: 12870
  source 1..120: mol_type = other DNA

SEQ ID NO: 45637 - DNA, 120 bp, synthetic construct
  source 1..120: mol_type = other DNA
gagggagagcactaggataaatacctaatgcacgcggagcttaaaccctagatgacgggttgataggtgcagcaaaccaccatggcacatgtatacctgtgtaacaaacctgcacgttca

SEQ ID NO: 45638 - DNA, 120 bp, synthetic construct
  source 1..120: mol_type = other DNA
acagtctcacgtaggctacttcggttgccttctaactagtttcctcttcagttgttgctctgtcccccacccactctgttcattcatcacactacagccatagtgacctttttaaaacgt

SEQ ID NO: 45639 - DNA, 120 bp, synthetic construct
  source 1..120: mol_type = other DNA
ccattaggatggctgtaataaaagatgggcagttttaagtgttgctgaggacttggagaaattggaaccctcgtggttctgctgggaatataaaacgtttcaatcactttggaaaacatt

SEQ ID NO: 45640 - DNA, 120 bp, synthetic construct; identical to SEQ ID NO: 12871
  source 1..120: mol_type = other DNA

SEQ ID NO: 45641 - DNA, 120 bp, synthetic construct
  source 1..120: mol_type = other DNA
tgctcttgtcgctcaggctggagtgcaatggtgcgatcttggctcggcacgatctcggctcagcacgatctcagcttactgcaacctccgcctttcgggttcaagcgattctcctgcctc

SEQ ID NO: 45642 - DNA, 120 bp, synthetic construct
  source 1..120: mol_type = other DNA
gatccgcccacttcacccacccaaagtgctgggattacaggtgtgagccaccacgcccagtggtgtatgggttcttttatatgaaatgtctagaacaggcaaagccatagagacagaaag

SEQ ID NO: 45643 - DNA, 120 bp, synthetic construct
  source 1..120: mol_type = other DNA
ctaaaaagcgtgaattttttctggcgtttgacttacattgcaataaaactgttataaaaatagtaaaattaggtcactcctaatctcaggcactccctgcttaaaatgtatcagtggttt

SEQ ID NO: 45644 - DNA, 120 bp, synthetic construct; identical to SEQ ID NO: 12872
  source 1..120: mol_type = other DNA

SEQ ID NO: 45645 - DNA, 120 bp, synthetic construct
  source 1..120: mol_type = other DNA
tatttactttttccttctcattcactagtatattccataagggtagggatgctgtctcacttactatactcccaacatttatgacagattctggcacatgatatctacttaataaattct

SEQ ID NO: 45646 - DNA, 120 bp, synthetic construct
  source 1..120: mol_type = other DNA
agaaataaaaaacaggccaggcgcagtagctcacgcctgtagtcccaacactttgggaggctgaggtgggcggatcacaaggtcaggagttcgagaccagcctggccaatatggtgaaac

SEQ ID NO: 45647 - DNA, 120 bp, synthetic construct
  source 1..120: mol_type = other DNA
gccgagatcgtgccactgcactccagcctgggcaaaagagcgagactctgtctcaataaataaataaataaataaataaatagaaggaaataaaaaacaattagccgggcatggaggcat

SEQ ID NO: 45648 - DNA, 120 bp, synthetic construct; identical to SEQ ID NO: 12873
  source 1..120: mol_type = other DNA

SEQ ID NO: 45649 - DNA, 120 bp, synthetic construct
  source 1..120: mol_type = other DNA
tatagtcttctaatttcactgtggttttttattgatgttatgattttttctttttctttaggggccttggacaagttgttactgactatgttcatggggatgccttgcagaaagctgcca

SEQ ID NO: 45650 - DNA, 120 bp, synthetic construct
  source 1..120: mol_type = other DNA
atactttgaagaattgatgtatgcctctttgcctctgctttgtcatgccattaagctcacaataaggaagaaataacagataagtccattggtggacagccttcttctcttaatcacaag

SEQ ID NO: 45651 - DNA, 120 bp, synthetic construct
  source 1..120: mol_type = other DNA
acagtataactaaacatgatatatcagcttttgcctttcaatttatcaatctcttaaagagaatccaactttattacgattagtatatgatcaaacttccatatttgccttgggaataat

SEQ ID NO: 45652 - DNA, 120 bp, synthetic construct; identical to SEQ ID NO: 12874
  source 1..120: mol_type = other DNA

SEQ ID NO: 45653 - DNA, 120 bp, synthetic construct
  source 1..120: mol_type = other DNA
acaatgggaatctctaatgtgaaaatgtattctatgaaaataatttttttaaataaaatgttatataataaaagtgtcttctatgcttttatatattagctatcagtagttttattcatt

SEQ ID NO: 45654 - DNA, 120 bp, synthetic construct
  source 1..120: mol_type = other DNA
caagctccgcctcccaggttcatgtcattctcctgcctcagccccccgagtaactgggattacaggcacccaccaccacgcccagctaatattttgtattttcagtggacatggggtttc

SEQ ID NO: 45655 - DNA, 120 bp, synthetic construct
  source 1..120: mol_type = other DNA
ttcttctggggcttagcagttaggtaaatcagacacaaagtactggaaaacaaaaaggacttgtaataggcagaaaaataccaagtgtataagtaatttggtataaacagagtataaggt

SEQ ID NO: 45656 - DNA, 120 bp, synthetic construct; identical to SEQ ID NO: 12875
  source 1..120: mol_type = other DNA

SEQ ID NO: 45657 - DNA, 120 bp, synthetic construct
  source 1..120: mol_type = other DNA
aatagcagtggcacaccaacagatagtggtggtgggaccagtccaccctggtgggagagaatatataaacaatattctgacattgtttagaattgctgatgcttgatgatgataaaaaac

SEQ ID NO: 45658 - DNA, 120 bp, synthetic construct
  source 1..120: mol_type = other DNA
gatgaaatggagtcttccataaagtcaaaatggggatggcagtgactctggataatatgggaatccatagctatctctagtaccatcagatcctagatatacaaggctgtctagtgctaa

SEQ ID NO: 45659 - DNA, 120 bp, synthetic construct
  source 1..120: mol_type = other DNA
taagcttcattagatggtgaacgaagttggagtggaggctggttgggcactgcctgccccatgtccctgctggtttggtcattaggatggagctgagctgtctttgggaagtcagtaggt

SEQ ID NO: 45660 - DNA, 120 bp, synthetic construct
  source 1..120: mol_type = other DNA
agcgtgggcaacatagcaagaccctgtctctacaaaaatacaataaaacaaaaaaaagattagccgggcatcactggcagtggcatgtgcctgtagttctagctacttgggaggccgagg

SEQ ID NO: 45661 - DNA, 120 bp, synthetic construct; identical to SEQ ID NO: 12876
  source 1..120: mol_type = other DNA

SEQ ID NO: 45662 - DNA, 120 bp, synthetic construct
  source 1..120: mol_type = other DNA
taatcagcactgtgccaggtactgtggataacgataaaattttacctgcctttgaagggaattcatagtctaattggggcaacagaagaatgactgcaatacggtgtagtaagtgcagtg

SEQ ID NO: 45663 - DNA, 120 bp, synthetic construct
  source 1..120: mol_type = other DNA
tgtaacctgggttttgaaagataaggagctgacagtggctggggaagctgggatgaggtgtagggttgactggaggatggcagatcaagcaaaagatgatatgtagtttggtatgaccca

SEQ ID NO: 45664 - DNA, 120 bp, synthetic construct
  source 1..120: mol_type = other DNA
gcgcgatcttggctcactgcaacctctgcctcccatactcaagacatcctcccacctcagcctcttgagtagctgggactacaggcacatgccaccatccctggctaatttttgtatttt

SEQ ID NO: 45665 - DNA, 120 bp, synthetic construct; identical to SEQ ID NO: 12877
  source 1..120: mol_type = other DNA

SEQ ID NO: 45666 - DNA, 120 bp, synthetic construct
  source 1..120: mol_type = other DNA
tgagagttatactaagatgtgaacgcttgagggaggaaggagctttgctcaattttttgttgtaaataggtggatgggaggtagtgtcattaaagaaaaatgttgaaggaaaattagata

SEQ ID NO: 45667 - DNA, 120 bp, synthetic construct
  source 1..120: mol_type = other DNA
tggtactggaatcagtaactactgaagttttggatttgtgagacggctaggaagagatagaatttgtagacttctattttttggcaatatggcagactcaattttagaaagtatttactt

SEQ ID NO: 45668 - DNA, 120 bp, synthetic construct
  source 1..120: mol_type = other DNA
actgcaacctccgcttcctgggttcaagcggttctcctgcctcaacctcctgagtagctgggattacaggtgcccacaaccacacctggctaatttttgtatttttagtagagatggggt

SEQ ID NO: 45669 - DNA, 120 bp, synthetic construct; identical to SEQ ID NO: 12878
  source 1..120: mol_type = other DNA

SEQ ID NO: 45670 - DNA, 120 bp, synthetic construct
  source 1..120: mol_type = other DNA
tcacaccattctcccacctcagcctctggagtagctgggactacaggcgcctgccaccatgcccggctaattttgttttcatatttttagtagagacggggtttcaccgtgtcagccagg

SEQ ID NO: 45671 - DNA, 120 bp, synthetic construct
  source 1..120: mol_type = other DNA
gttgtccaggttggagtgcagtggcgtgatcaaactcactgcagccttgatctcctgtgctcaagtgatcctcccacctcagccttctgaaagtagctgggattacagacttgtgccacc

SEQ ID NO: 45672 - DNA, 120 bp, synthetic construct; identical to SEQ ID NO: 12879
  source 1..120: mol_type = other DNA

SEQ ID NO: 45673 - DNA, 120 bp, synthetic construct
  source 1..120: mol_type = other DNA
aggccgaggcgggtggatcatctgaggttgggagttcgagaccatcctgaccaacagagagaaaccctgtctctactaaaaatacaaaaaaaaaaaaaaaaaaaagggccgggcgtggtg

SEQ ID NO: 45674 - DNA, 120 bp, synthetic construct
  source 1..120: mol_type = other DNA
tgaaactccatcccccccaaaagaaaaactgatatttatctgaaaaagcagagagcagagcaatgtgtgtatcttgccttggctcaggttggaggaaagagtctcttctgagaatgtgtg

SEQ ID NO: 45675 - DNA, 120 bp, synthetic construct
  source 1..120: mol_type = other DNA
aatcctcaccagagagagaagggttaccccaacacaagcttcaaaaatccccataaagttccagtgaacgtgaactgtcagcaaaaatcacagtactggaatgtcctgagcaagagtcag

SEQ ID NO: 45676 - DNA, 120 bp, synthetic construct
  source 1..120: mol_type = other DNA
aagcttttggagagagtggtatatacttgatgttatcgtctcaattcatagaatcttaaaaagtagatgtctacttaggagagttttctcctctggacacctgataatgagtgtcagggt

SEQ ID NO: 45677 - DNA, 120 bp, synthetic construct; identical to SEQ ID NO: 12880
  source 1..120: mol_type = other DNA

SEQ ID NO: 45678 - DNA, 120 bp, synthetic construct
  source 1..120: mol_type = other DNA
gccgggtgtggtggcatgcgcctgtatagtcctagctacttgggagattgacgcgggagaattgcttgaacccaggaagtggaggttgcagtgagctgagattgcgccactgcactccag

SEQ ID NO: 45679 - DNA, 120 bp, synthetic construct
  source 1..120: mol_type = other DNA
gtttgagaccagcctggccaacatggtgaaaccccgtctctactaaaaatacaaatattagcctgccatggtggcttatgcctgtagtcccagctactcaagaggctgaagcaggagaat

SEQ ID NO: 45680 - DNA, 120 bp, synthetic construct
  source 1..120: mol_type = other DNA
taaaaaactagtctttcagttgtagattatgctggtgatgatgggagacacaatgtatctattggtattcttttgagaaacagagtttgtaaattgggcataagactatgtatatgagat

SEQ ID NO: 45681 - DNA, 120 bp, synthetic construct; identical to SEQ ID NO: 12881
  source 1..120: mol_type = other DNA

SEQ ID NO: 45682 - DNA, 120 bp, synthetic construct
  source 1..120: mol_type = other DNA
gggtatggtggcatgagcctatagtcccagctactcgagagactgaggcaggagaattgcttgaacatgggaggtggaggttgcagtaagccgagatgtgccactgcactccagcctggg

SEQ ID NO: 45683 - DNA, 120 bp, synthetic construct
  source 1..120: mol_type = other DNA
ttttttttttgagatggagtcttgctctttcacccaggctggagtgcagtggtgcaatctcagctcactggaacctctgcctctgggttcaagagattctcctgcctcagcctcccgagt

SEQ ID NO: 45684 - DNA, 120 bp, synthetic construct
  source 1..120: mol_type = other DNA
cttggcctcccaaaggattacaggcgtgagccactgcacccagcctcaaatggtctttaatgttggtgtttctttgtatatttgttctggattattataattaaaatgaacaatacattg

SEQ ID NO: 45685 - DNA, 120 bp, synthetic construct
  source 1..120: mol_type = other DNA
tattatattattatttttgcagcatgaaaattattgagctggaggtagtttgggagaaaccaagcagtatgaaacagtcttgacaaaaccaatgtccttcctcttatccacccttctacc

SEQ ID NO: 45686 - DNA, 120 bp, synthetic construct; identical to SEQ ID NO: 12882
  source 1..120: mol_type = other DNA

SEQ ID NO: 45687 - DNA, 120 bp, synthetic construct
  source 1..120: mol_type = other DNA
accaggctggagtgcagtggcacgatcttggctcactgcaatctctgcctcctgggttcaagcaattcccctgcctcagcctcttgagtagctgggattacaggcacccactaccatgcc

SEQ ID NO: 45688 - DNA, 120 bp, synthetic construct
  source 1..120: mol_type = other DNA
gagccaccgtgcccggccaaggtagcaggctttaaagcatgacctttagcatgcactttattcttaatgactgaaatttgctttgggtgttggagtatctttagtaagtcattagtttct

SEQ ID NO: 45689 - DNA, 120 bp, synthetic construct
  source 1..120: mol_type = other DNA
gaaagttcatctgtagacaatatggatgttaactcttaatcctttagcgtgatggcgtgttcttaatagagctatcagtttagctgtctaagctgttgcttataaagtattccaaaatgg

SEQ ID NO: 45690 - DNA, 120 bp, synthetic construct; identical to SEQ ID NO: 12883
  source 1..120: mol_type = other DNA

SEQ ID NO: 45691 - DNA, 120 bp, synthetic construct
  source 1..120: mol_type = other DNA
agtgcaatagcactattttggctcactgcaacccccacctttcgggtttaagcaattctcctgccttggcctcctgagtagctgggattacaggtgtgcgccaccacacctggctaattt

SEQ ID NO: 45692 - DNA, 120 bp, synthetic construct
  source 1..120: mol_type = other DNA
gcacccagctgacaaccagtctttcatgtacaaacaatgagaaggctttagcatagttaggaaatgcccaagttcgagatgattttgagaggttattatttaagaaagaaaatgcctgtt

SEQ ID NO: 45693 - DNA, 120 bp, synthetic construct; identical to SEQ ID NO: 12884
  source 1..120: mol_type = other DNA

SEQ ID NO: 45694 - DNA, 120 bp, synthetic construct
  source 1..120: mol_type = other DNA
cctggccaatatgatgaaaccccgtctctgttaaaaatacaaaaattagccgggcatggtggtgcgtgcctgtagtctcagctacttgggaggctgagacagacgaatctcttgaaccag

SEQ ID NO: 45695 - DNA, 120 bp, synthetic construct
  source 1..120: mol_type = other DNA
gagagagagatgcataagtcataaataccaaaatacaagaaaacatcttgctttaaagtgacaatatgcacaataggagggttttttttaagaactgaggagcttttggttagattgatt

SEQ ID NO: 45696 - DNA, 120 bp, synthetic construct
  source 1..120: mol_type = other DNA
caagagtgtgatgacaaaggtacaaaaactttatttaaagattgaacttattctgtattacgaattttctctttaaaaatggtttatgagctttttttggctactaatcttaatatttca

SEQ ID NO: 45697 - DNA, 120 bp, synthetic construct
  source 1..120: mol_type = other DNA
tgctcaccgaagtctccacctcttgggttcaggcaattctcctaactcagcctcccaagtagctgggactacaggtgagagccaccatgcctggctaatttttgtatttttagtagagac

SEQ ID NO: 45698 - DNA, 120 bp, synthetic construct; identical to SEQ ID NO: 12885
  source 1..120: mol_type = other DNA

SEQ ID NO: 45699 - DNA, 120 bp, synthetic construct
  source 1..120: mol_type = other DNA
ccgcaacctccacctcctgggttcaagcaattctcctgcctcaggctcccgagtagctgggattacaggcatgcgccaccacatctggtggctaattttgtatgtttagtagagacgggg

SEQ ID NO: 45700 - DNA, 120 bp, synthetic construct
  source 1..120: mol_type = other DNA
tcttaatcatagacattagttacaatcattaactacagcaataaatttgtttcctcacagacaagagaaaaccatcaggcaggtgactaagagctgacacacagagtaccttcataaaca

SEQ ID NO: 45701 - DNA, 120 bp, synthetic construct; identical to SEQ ID NO: 12886
  source 1..120: mol_type = other DNA

SEQ ID NO: 45702 - DNA, 120 bp, synthetic construct
  source 1..120: mol_type = other DNA
taaggacgtaaaaagggcaaaagggataaaaatggatattctttcaatacaaaccaaaagaaagctggtatatatgtatttatatcattcaaagtagactttagggcaaaaagcattatt

SEQ ID NO: 45703 - DNA, 120 bp, synthetic construct
  source 1..120: mol_type = other DNA
cggttctataaaaaaatgaaaataataaaaaatttgcctggttcagtggcacatgcctgtagtctcagctacttgggaggctgaggcaggaggattgcaggagcccaggagtttgaagtt

SEQ ID NO: 45704 - DNA, 120 bp, synthetic construct
  source 1..120: mol_type = other DNA
cctttatgtacctgataatagcctcaaaatttctaaaacaaaatgacagaattccagaagaaagcatggaaaatttcaggtgtatttcagaggtggacagattagttaaaaaaattaacg

SEQ ID NO: 45705 - DNA, 120 bp, synthetic construct; identical to SEQ ID NO: 12887
  source 1..120: mol_type = other DNA

SEQ ID NO: 45706 - DNA, 120 bp, synthetic construct
  source 1..120: mol_type = other DNA
gggtcatctgggaacctatagaggctcccttaatgcggagaaagggtaagtgaaagacccccaaatgtccacattcccaccatggttccctgcaatcctagctataggagagtcccttga

SEQ ID NO: 45707 - DNA, 120 bp, synthetic construct
  source 1..120: mol_type = other DNA
ccaacccccagcagactgaatcctgccttagggtccaacagcctccgcatctccacatccctggagccccattgacattccctatccacagctgctacccatggaaatgcaagcagcctt

SEQ ID NO: 45708 - DNA, 120 bp, synthetic construct
  source 1..120: mol_type = other DNA
tgatcctcttctagcatagacaaagtcgattcacttggcttatccacaaatgggtcatggacccattccttgccagtttggggggtctttagcggttgggaagtagctctcaaactctct

SEQ ID NO: 45709 - DNA, 120 bp, synthetic construct; identical to SEQ ID NO: 12888
  source 1..120: mol_type = other DNA

SEQ ID NO: 45710 - DNA, 120 bp, synthetic construct
  source 1..120: mol_type = other DNA
ccatctcacttctggccggacagggtggctcacgcctgcaatcccagcactttgggggccgaggtgggtggatcacaaggtcaagagatcgagaccatcctggccaacatggtgaaatcc

SEQ ID NO: 45711 - DNA, 120 bp, synthetic construct
  source 1..120: mol_type = other DNA
cgagattgtgccactgcactccagcctggcgagagagcaagaatgcgtctcaaaaaaaaaaaaaaaagaaagaaagaaagaaagaaagccatctcacttctgtgtataagagaagaggtg

SEQ ID NO: 45712 - DNA, 120 bp, synthetic construct
  source 1..120: mol_type = other DNA
atcacatcctgcaaaatgttattatgttcaggtgacatttttggccagccagaatttctctatggatgacacggagcgtagactcacatttagaagctacctctttgacccaagaagtga

SEQ ID NO: 45713 - DNA, 120 bp, synthetic construct; identical to SEQ ID NO: 12889
  source 1..120: mol_type = other DNA

SEQ ID NO: 45714 - DNA, 120 bp, synthetic construct
  source 1..120: mol_type = other DNA
gcagcctctcctaaaagttcataacaaatgtccttagcagcaggcaggatcaactcttccccaatagtaaagggcttcttagctttaacaatgcagttagccactaagaatgatgctctc

SEQ ID NO: 45715 - DNA, 120 bp, synthetic construct
  source 1..120: mol_type = other DNA
cagggtgatttgtttccatgtggcaaagcagttttgaaagtttcatggctcttttggatagttggtcaccacatattatacaaagcaggcttggagaatatgaatcacctgttgcaatga

SEQ ID NO: 45716 - DNA, 120 bp, synthetic construct
  source 1..120: mol_type = other DNA
attgacatttggttttcactcattttagctagagctagcctgtgggtttaccaaaactgtgactgatacaagttgcgcagtgctcctccctcagcctcccaagtagctgggattacaggc

SEQ ID NO: 45717 - DNA, 120 bp, synthetic construct; identical to SEQ ID NO: 12890
  source 1..120: mol_type = other DNA

SEQ ID NO: 45718 - DNA, 120 bp, synthetic construct
  source 1..120: mol_type = other DNA
ttctttcattctataggttgtcttttcactttgttgattgtttcttttgctatgcagaagctttttagtttgtaataatcccatttgtttatttttgcttttgttgcctacgcttttgag

SEQ ID NO: 45719 - DNA, 120 bp, synthetic construct
  source 1..120: mol_type = other DNA
tttgtatagggtgagaggcggggggagtgtctagtctcatttttctgcatatggatgtccagttttcccagcaccatttattgaagtgactgtgctttccccaatgagtattcttggtga

SEQ ID NO: 45720 - DNA, 120 bp, synthetic construct
  source 1..120: mol_type = other DNA
tgtactgtattttgaagtctggtagtgtgatgcctttagctttgttccttttgcttagaattgctttagctatttgtgctcttttgtggttccatacaaattttaagattttttttttat

SEQ ID NO: 45721 - DNA, 120 bp, synthetic construct; identical to SEQ ID NO: 12891
  source 1..120: mol_type = other DNA

SEQ ID NO: 45722 - DNA, 120 bp, synthetic construct
  source 1..120: mol_type = other DNA
tgagttttttggtggagtctttaggtttttctatatataagatcatgtcatctgcaaacagacaatttggcttcctcctttccaatttgaacttcttttattactttctcttgcctaatt

SEQ ID NO: 45723 - DNA, 120 bp, synthetic construct
  source 1..120: mol_type = other DNA
gatctcggctcactgcaacctccgcctcccagtttcaagcaattttcctgcctcagcctcccaagtagctgggattacaggcgcgtgccatcatgcctggctaatttttgtatctttagt

SEQ ID NO: 45724 - DNA, 120 bp, synthetic construct
  source 1..120: mol_type = other DNA
ctttagtcttcttgatcaagagtatttctccatctgttttagggttcttttttttttctaaatagttttatcatttttctgagtgactcttttattactaaattaggttattcccaatat

SEQ ID NO: 45725 - DNA, 120 bp, synthetic construct
  source 1..120: mol_type = other DNA
ttatttgctgataaatctttagtttcaaaaatttttattatatacaagccaggtatggtagctcatgcttgtaatcctagcactttaagaggctgaaacacaaggattacttgagcctag

SEQ ID NO: 45726 - DNA, 120 bp, synthetic construct; identical to SEQ ID NO: 12892
  source 1..120: mol_type = other DNA

SEQ ID NO: 45727 - DNA, 120 bp, synthetic construct
  source 1..120: mol_type = other DNA
tgttggtaaggatgtgaagcaactggaacccttgtgcaatgttggtgggaatgtgaaatactgtgagctctgtggaaaacagtatgatgattcctcaaaaagttaacaataaaatcacca

SEQ ID NO: 45728 - DNA, 120 bp, synthetic construct
  source 1..120: mol_type = other DNA
ctacccaagcatccattgatagataaacggataagcaaaatgtggtctatacgtacaatgggatattattctgccttaaaaaggatggttgtaatcccagcactttgggaggccgaggca

SEQ ID NO: 45729 - DNA, 120 bp, synthetic construct
  source 1..120: mol_type = other DNA
gaatctgaggcaggagaatcgcttgaacctggaaggcggaggttgcagtaagccgagatcgcgccattgcactccagcctgggcaagactctgtctaaaaaaatataaataaataaataa

SEQ ID NO: 45730 - DNA, 120 bp, synthetic construct; identical to SEQ ID NO: 12893
  source 1..120: mol_type = other DNA

SEQ ID NO: 45731 - DNA, 120 bp, synthetic construct
  source 1..120: mol_type = other DNA
actagtcctgaagtatctctttctttccactagggggagcagatttcctgcttctcatccagtctctccttcaccggaggttgcacccttttcccccaactccaaaaaaagaaaaatcac

SEQ ID NO: 45732 - DNA, 120 bp, synthetic construct
  source 1..120: mol_type = other DNA
ggaaaaaaaaattttacaaatcaaaaaactgttgggcagaaagtttggggaaactaaccagaattcaagtgtaaccctggtgtgatttagagttaggggagagaacaaggaaaatcttac

SEQ ID NO: 45733 - DNA, 120 bp, synthetic construct; identical to SEQ ID NO: 12894
  source 1..120: mol_type = other DNA

SEQ ID NO: 45734 - DNA, 120 bp, synthetic construct
  source 1..120: mol_type = other DNA
gactgattgattgacacaggttcttgctctgtcacctgggctggagtgcagtggcacaatcatggctcactgtaaccttgaactcctgggcgcccgtgatcctcttggctcagcctccca

SEQ ID NO: 45735 - DNA, 120 bp, synthetic construct
  source 1..120: mol_type = other DNA
ccagctatcagacagaaagcagaaccaaaggaaatcctcactcactctgcttggtaacaaacactgaatctgaatagctatcaccctgttcaaaattgagcacggagaaaaaaaaatcag

SEQ ID NO: 45736 - DNA, 120 bp, synthetic construct
  source 1..120: mol_type = other DNA
ctaggaaattgttgggtatcttaagtggaagtgagtgagtcatgagctctgtaacagaagaagatgaaggtaggctaagatggaagataaactaggtgtgatgaaagaggaaaaagaaaa

SEQ ID NO: 45737 - DNA, 120 bp, synthetic construct
  source 1..120: mol_type = other DNA
ggctcatgcctgtaattcccgcattttggaaggccgaggcaggcggatcacccgaggtcaggagttcaagaccagcctggccaacatggtgaaacccccgtctctaataaaaatacaaaa

SEQ ID NO: 45738 - DNA, 120 bp, synthetic construct; identical to SEQ ID NO: 12895
  source 1..120: mol_type = other DNA

SEQ ID NO: 45739 - DNA, 120 bp, synthetic construct
  source 1..120: mol_type = other DNA
tataaggtaggtttccttttggctgcaagcagaagaatacacacccactatctcccattaaaagagtactaccacagaatcgctcatagaaaaagatgtctgggtaggcaggtccagttt

SEQ ID NO: 45740 - DNA, 120 bp, synthetic construct
  source 1..120: mol_type = other DNA
atggcttcaagtaccacattctcctttgattgattcaaaggcaggaagcagggttgcaggtagggcagtaaaagccttggtcgtcagaacatctttttcatcattccctgcagacttctt

SEQ ID NO: 45741 - DNA, 120 bp, synthetic construct; identical to SEQ ID NO: 12896
  source 1..120: mol_type = other DNA

SEQ ID NO: 45742 - DNA, 120 bp, synthetic construct
  source 1..120: mol_type = other DNA
tcaacatgtatatctcctgatgcccgcaccagtactgagtgaaaaactttgctgaatgttcctgtttgtctgaacttaaaaggagcacatgcatagaacaaagagccagcatttgttaaa

SEQ ID NO: 45743 - DNA, 120 bp, synthetic construct
  source 1..120: mol_type = other DNA
ccagcctggccaacacggtgaaaccctgtctctactaaaaatacaaaaactatcaaggcgtgatggtgcacatctgcagtcctagctactcataaggctgaggcaggagaaacacttgaa

SEQ ID NO: 45744 - DNA, 120 bp, synthetic construct
  source 1..120: mol_type = other DNA
gtttcctgtcctccctcatttctgtttaacagagatactaaccatagaatcattggattcttaaaaaaatgaggaacaaatatagggaaaaaataacaatacagcaggatttttggatga

SEQ ID NO: 45745 - DNA, 120 bp, synthetic construct
  source 1..120: mol_type = other DNA
tggatgatgagtatttgtgcaagttttaaactttttataataaaagttgtttttccaatcttattgtgttaaaatataaataacataaaatttaccatcttagccattttcaagtgtaca

SEQ ID NO: 45746 - DNA, 120 bp, synthetic construct; identical to SEQ ID NO: 12897
  source 1..120: mol_type = other DNA

SEQ ID NO: 45747 - DNA, 120 bp, synthetic construct
  source 1..120: mol_type = other DNA
tattggacttatagctccacatagctggggaggcctcataatcacagtggaaggcaaggaggggcaagtcacatctcacatggatggcagcaggcaaaaagagcttgtgcagggcaactc

SEQ ID NO: 45748 - DNA, 120 bp, synthetic construct
  source 1..120: mol_type = other DNA
tgtgggagctacaagatgagatttgggtggggacacagagccaaaccatctcactatctgttttttttgtttttgtttttgtttttttgagacggagtctttctgttgccaggctggagt

SEQ ID NO: 45749 - DNA, 120 bp, synthetic construct
  source 1..120: mol_type = other DNA
tatttttagtagagacggggtttcaccatgttggccaggatggtctcaatctgttgacctcaggtgatccacccacctcggcctcccaaagtgctgggattacaggcgtgagccaccaca

SEQ ID NO: 45750 - DNA, 120 bp, synthetic construct; identical to SEQ ID NO: 12898
  source 1..120: mol_type = other DNA

SEQ ID NO: 45751 - DNA, 120 bp, synthetic construct
  source 1..120: mol_type = other DNA
ggaagctgaagtaggagaactgcttgaacctgggaggcggaggttgcagtgagctgagatcacaccagtgcactccagcctgggcaacagagagagactccatctcaaaaaaaaaaaaaa

SEQ ID NO: 45752 - DNA, 120 bp, synthetic construct
  source 1..120: mol_type = other DNA
aactggtttcatctccctcgaagctggtttctctccctcaaagctactactgcagaattaggggcttatttggtatgggtttattacttcctgtgacttagaatcttggagaattcaata

SEQ ID NO: 45753 - DNA, 120 bp, synthetic construct
  source 1..120: mol_type = other DNA
cacactcagcatctcacctaaacacgatcaatatgggcctctattgtatctttttccaaggtaatatgatcctgacaatattctctggaaaaatttcactcatagactaacccatatttt

SEQ ID NO: 45754 - DNA, 120 bp, synthetic construct; identical to SEQ ID NO: 12899
  source 1..120: mol_type = other DNA

SEQ ID NO: 45755 - DNA, 120 bp, synthetic construct
  source 1..120: mol_type = other DNA
caggctggaatgcagtggcacaatcacagctcactgcagcctcgacctccggggctcaagccatcctcccacctcagcttcccaagtaacgagactacaggtgtacaccaccatgcccgt

SEQ ID NO: 45756 - DNA, 120 bp, synthetic construct
  source 1..120: mol_type = other DNA
agcctgagccaccgcgcccagctgttaatcgtgacttaatacatgtgcatcttcccctgtttcctgtgtttgctttcataagtccactgctcctgctgtgaagatgggtacattcatctg

SEQ ID NO: 45757 - DNA, 120 bp, synthetic construct
  source 1..120: mol_type = other DNA
cctggggatacagagatgaaaaagataccaggaggctgggcgtggtggctcacgcctgtaatcccagtactttgggaggccaaggtgagtggatcacttgaggtcaggagttcgcgacca

SEQ ID NO: 45758 - DNA, 120 bp, synthetic construct; identical to SEQ ID NO: 12900
  source 1..120: mol_type = other DNA

SEQ ID NO: 45759 - DNA, 120 bp, synthetic construct; identical to SEQ ID NO: 12901
  source 1..120: mol_type = other DNA

SEQ ID NO: 45760 - DNA, 120 bp, synthetic construct
  source 1..120: mol_type = other DNA
ctgtgcctccgtaaacgtgaggcacaggaacatctacctcaccaaccactgttaagactgaatcaaagggcagcaggcggactacccggaatgaagaaagcaatcaataaatgtggattg

SEQ ID NO: 45761 - DNA, 120 bp, synthetic construct
  source 1..120: mol_type = other DNA
cagcaaggaacggaagccaggttgtcaagcctcagttggctttcacgtattctccttttcaggcgggtatttaggaagagaggagggtgaggagcacagcgcacttctgcagcagcagct

SEQ ID NO: 45762 - DNA, 120 bp, synthetic construct; identical to SEQ ID NO: 5510
  source 1..120: mol_type = other DNA

SEQ ID NO: 45763 - DNA, 120 bp, synthetic construct; identical to SEQ ID NO: 12902
  source 1..120: mol_type = other DNA

SEQ ID NO: 45764 - DNA, 120 bp, synthetic construct
  source 1..120: mol_type = other DNA
taaatttctttcaaagataaattcgaaagcccctccattcattccttcaagaactcaacagatgtccttgaggctcattttctgccgggcactcggttcacaaggctcaagagacccctg

SEQ ID NO: 45765 - DNA, 120 bp, synthetic construct
  source 1..120: mol_type = other DNA
actagagaataaaaacagcccaggggcgccggcgccggccaagggccttgacggggatcagcaagcgcgaggccaagtgcgggccccaacttcctgggcccgggccttccgcgcgccccc

SEQ ID NO: 45766 - DNA, 120 bp, synthetic construct
  source 1..120: mol_type = other DNA
gacgccacgggccgcgctcagccctcccgcccgaggcccctctcgccgtgtttcccaggacttcctccccgcgcccgcccgacttcaggtcggggccgcgcagggtcccgcgcgctccag

SEQ ID NO: 45767 - DNA, 120 bp, synthetic construct; identical to SEQ ID NO: 12903
  source 1..120: mol_type = other DNA

SEQ ID NO: 45768 - DNA, 120 bp, synthetic construct
  source 1..120: mol_type = other DNA
agtttggccgggggttggactttccttcccggaggcggcacccaaacagctaccccgtgcggaaacccaaacttctgctgccacttggagtctcgcggccgccgcctccgccccgcgttc

SEQ ID NO: 45769 - DNA, 120 bp, synthetic construct
  source 1..120: mol_type = other DNA
cggcccggcgccccggcaacttcgccgagagttgaggcgaagtttgggcgaccgcggcaggccccggccgagctcccctctgcgcccccggcgtcccgtcgagcccagccccgccggggg

SEQ ID NO: 45770 - DNA, 120 bp, synthetic construct
  source 1..120: mol_type = other DNA
ggtgcgagaaggcggtcaagagcctggtcaagaaactcaagaagacggggcagctggacgagctggagaaggccatcaccacgcagaacgtcaacaccaagtgcatcaccatccccaggt

SEQ ID NO: 45771 - DNA, 120 bp, synthetic construct; identical to SEQ ID NO: 12904
  source 1..120: mol_type = other DNA

SEQ ID NO: 45772 - DNA, 120 bp, synthetic construct
  source 1..120: mol_type = other DNA
ggagcccctcctccgccgccgcctcccgcccccgcggcccgcgctcgtggaggtggtggtgtctttgcgtttcttttcttcagtcgggtctccccactttcctctacaggaatgcggtcc

SEQ ID NO: 45773 - DNA, 120 bp, synthetic construct
  source 1..120: mol_type = other DNA
tctcccgccccctgagcatgcacgcactttggttgcagtgcaatgctctgacttccaaatgggagagacaagtggcggaaaatagggtcttctcccacctcccacccccccatcccgact

SEQ ID NO: 45774 - DNA, 120 bp, synthetic construct
  source 1..120: mol_type = other DNA
ttcctgtagagccttccttcccaaagcgcgctgccatctgtctggatctcctttatccttcccgttgcgcgctagctaggtcgggcgggagcccacagatggctgatagaaggggtcagt

SEQ ID NO: 45775 - DNA, 120 bp, synthetic construct
  source 1..120: mol_type = other DNA
agcgtgtgtgttgggggctggctcttttgggggtcccaggctgccgaggaatgagtagaaagcaccagggactgtcagccgcaaagggattgtcatccctgctcctgggccagggtggac

SEQ ID NO: 45776 - DNA, 120 bp, synthetic construct; identical to SEQ ID NO: 12905
  source 1..120: mol_type = other DNA

SEQ ID NO: 45777 - DNA, 120 bp, synthetic construct
  source 1..120: mol_type = other DNA
ctacttctctttctggggaggggtctgccaaacctaccttctccttatctgcctgggtgcattgaagacaagtgctttatgtattgaaacagaagaaaaaaagtggtatcaattgtaaaa

SEQ ID NO: 45778 - DNA, 120 bp, synthetic construct
  source 1..120: mol_type = other DNA
caagcaagcaaccagccatggaaagtagataaggttgttaggcttaagattatcacatttttaaagcagaggaaaccttaaaagagagaggtgaaaaggcttgagtcatagacatggggt

SEQ ID NO: 45779 - DNA, 120 bp, synthetic construct
  source 1..120: mol_type = other DNA
tgtgcggttgcttctttaatctttgggctggtgatagcttggcagagaggccttgctttcccttgccttggtaggagtttgtcctctgtggggccatacctttggcctgccttttcctct

SEQ ID NO: 45780 - DNA, 120 bp, synthetic construct; identical to SEQ ID NO: 12906
  source 1..120: mol_type = other DNA

SEQ ID NO: 45781 - DNA, 120 bp, synthetic construct
  source 1..120: mol_type = other DNA
tcaatgtgtctgctaagccccatagattgcagtgttgcttgtcaaattgtctgctttcaccacaactgccttttagtttggaaagtagagaaaggaaaatgtttaacttagtcattcccc

SEQ ID NO: 45782 - DNA, 120 bp, synthetic construct
  source 1..120: mol_type = other DNA
catgagcagcaacagcaacatttggcaattagagctgtatactagggacttccagaccacaggcttgcttctctgtgacaccagctctgacttgtttcaattatcaggggagctggcgtg

SEQ ID NO: 45783 - DNA, 120 bp, synthetic construct; identical to SEQ ID NO: 12907
  source 1..120: mol_type = other DNA

SEQ ID NO: 45784 - DNA, 120 bp, synthetic construct
  source 1..120: mol_type = other DNA
ttgggagctagaccaagcttaaagcattgcttgtttggaagggaatttgggctttcttgtgtcagagcacccagtccagtggaaaattggagaattgaagcaaacactaggtctgacaca

SEQ ID NO: 45785 - DNA, 120 bp, synthetic construct
  source 1..120: mol_type = other DNA
tcaagcgattcttgtgcctcagcctcccgagtagctgggattacaggcgcccgccaccacgcccagctaatttttgtatttttagtagagacggggtttcaccatgttggtcaggctggt

SEQ ID NO: 45786 - DNA, 120 bp, synthetic construct
  source 1..120: mol_type = other DNA
ttgacttttgccagggtactctcactttgagaaaggaaaaagatcctagtctttaacatgccttttccagatttctggggatagacctattactaaggctgtagaggcctcccttttctc

SEQ ID NO: 45787 - DNA, 120 bp, synthetic construct
  source 1..120: mol_type = other DNA
gtagggcctgagaagaggaggtgcctgcaggacaataggtagctgatgagggatctgactcagctgcagctgaacctaggcgccacttgacgttccctgggaacatttagaaccttggaa

SEQ ID NO: 45788 - DNA, 120 bp, synthetic construct; identical to SEQ ID NO: 12908
  source 1..120: mol_type = other DNA

SEQ ID NO: 45789 - DNA, 120 bp, synthetic construct
  source 1..120: mol_type = other DNA
tctgtttttttctgaaaaaaacacaaaattcaggtcctgtacctgccattttaccacctgcaaggatttgggaatccatttaagtttcacagcttttatatctgcacctgtcaagtcagg

SEQ ID NO: 45790 - DNA, 120 bp, synthetic construct
  source 1..120: mol_type = other DNA
tcattcattattgaattattcagtccttcgttgagaacatactacaatgaccacagcagggtccctgtactcaaagagctccctgtctagagcgggagacagacttgcccaaaggtatga

SEQ ID NO: 45791 - DNA, 120 bp, synthetic construct; identical to SEQ ID NO: 12909
  source 1..120: mol_type = other DNA

SEQ ID NO: 45792 - DNA, 120 bp, synthetic construct
  source 1..120: mol_type = other DNA
ttctctttgaagtaaaaagtaagttagtactgcaaactgaaattcaggtttccttggtgggaacagggactttagatgtatcagctcagaatatgacagggagtgttaataaaaagtgga

SEQ ID NO: 45793 - DNA, 120 bp, synthetic construct
  source 1..120: mol_type = other DNA
agatcacaaccattctggctaacacggtgaaaccctgtctctactaaaaatacaaaaaaattagccgagcttggtggcaggcgcctgtagtcccagctactcgggaggctgaggcaagag

SEQ ID NO: 45794 - DNA, 120 bp, synthetic construct
  source 1..120: mol_type = other DNA
caacttgcagatggttgttttgaaattcaaagcttcggtgtgacctagcttctcatttctctagttaacacttgctgagaataaatcctagacgcctgagtttctgaatgaacataggtg

SEQ ID NO: 45795 - DNA, 120 bp, synthetic construct
  source 1..120: mol_type = other DNA
acagtcgcatttaattctgatgagaaatgcaagaagttgatgaaattgaaagaatttgtttcaagcttatcacatcaggaatccaactaaatgagttaaaaaataaatattggtttaata

SEQ ID NO: 45796 - DNA, 120 bp, synthetic construct; identical to SEQ ID NO: 12910
  source 1..120: mol_type = other DNA

SEQ ID NO: 45797 - DNA, 120 bp, synthetic construct
  source 1..120: mol_type = other DNA
ctgattaaaacaaaagcaaaacttaaagactccattccctcccccaaatccccatctcatagtgttggttggctggcaagagaactgcccaagaaggctgctcatgatggcagcctgctg

SEQ ID NO: 45798 - DNA, 120 bp, synthetic construct
  source 1..120: mol_type = other DNA
ctgagccatggagccttcagtcttcccatcttcaagcacaatggttcctggaaacagtgggaagttgccatcctaagcccaccctacagaagtttggtttctaattttactgtgttctaa

SEQ ID NO: 45799 - DNA, 120 bp, synthetic construct; identical to SEQ ID NO: 12911
  source 1..120: mol_type = other DNA

SEQ ID NO: 45800 - DNA, 120 bp, synthetic construct
  source 1..120: mol_type = other DNA
aaacaaatctatagcatactatccactgttggttatctaagacccttcctataaacagcagcctgccacagtggcaactgctgtagaatgttttggcagagactcagtttaaaatgaaaa

SEQ ID NO: 45801 - DNA, 120 bp, synthetic construct
  source 1..120: mol_type = other DNA
taaatgctgtcaaagaaaaattaataaacaagagtttggggattattttggaggtaggagtcagcagaccttggtaggttctagacgtggctctgtttctgattagctgtgtgacctggg

SEQ ID NO: 45802 - DNA, 120 bp, synthetic construct
  source 1..120: mol_type = other DNA
ttattttttgagatggagtttcgctcttgttgcccaggctaaagtgcaatggcgcggtcttgcctcactgcaacctccgcttcccaggttcaagtgattgtcctgcctcagccttctgag

SEQ ID NO: 45803 - DNA, 120 bp, synthetic construct; identical to SEQ ID NO: 12912
  source 1..120: mol_type = other DNA

SEQ ID NO: 45804 - DNA, 120 bp, synthetic construct
  source 1..120: mol_type = other DNA
tactctgtgagtctaaatcagtgaaatttaactacaaaggaatatgaaaataatgctaggatgaagatgtggaggctgtgcctcttgagatgcagtgaacagtttttcttcttttgttgc

SEQ ID NO: 45805 - DNA, 120 bp, synthetic construct
  source 1..120: mol_type = other DNA
tgtcaaagtttacccaggaagcttcctttatttatttccaagcatctatataaagaaaggctgcacttgattgcgtaagcatgagccttttgttaggcagcgtggatgttgcaagtttaa

SEQ ID NO: 45806 - DNA, 120 bp, synthetic construct
  source 1..120: mol_type = other DNA
ctccagtattgtattgtattgtttgtttgtttctttatctctgtctctctctttttttgttttttgagacggagtcttgctgtgtcgcccaggctggagtgcagtggcgtgatctcagct

SEQ ID NO: 45807 - DNA, 120 bp, synthetic construct; identical to SEQ ID NO: 12913
  source 1..120: mol_type = other DNA

SEQ ID NO: 45808 - DNA, 120 bp, synthetic construct
  source 1..120: mol_type = other DNA
cattttttccttaaaaaatcacctctgggctaagcccaaatgtggagtaatgaatccagaaaggactttttgagtagttacaagtggctgaaagcaggcactggtgatggaaattgggtt

SEQ ID NO: 45809 - DNA, 120 bp, synthetic construct
  source 1..120: mol_type = other DNA
caagtggctgaaagcaggcactggtgatggaaattgggtttttccttttgcttcaaatcttcctggttgtaaactttttcttacccttattgaagtcagactcaaggtgggtctaatttc

SEQ ID NO: 45810 - DNA, 120 bp, synthetic construct
  source 1..120: mol_type = other DNA
gggggaggacaggaagagcacagttgggcagaaagagcaaagcctctcaagtctgatgggtttgggtttgagtctgacagttattagctatgtggtgaccttgggtactttgcttcaact

SEQ ID NO: 45811 - DNA, 120 bp, synthetic construct; identical to SEQ ID NO: 12914
  source 1..120: mol_type = other DNA

SEQ ID NO: 45812 - DNA, 120 bp, synthetic construct
  source 1..120: mol_type = other DNA
aaaaaatcaacgcaagtgagataagatgtatcaagtactttgccagtatcgatcataatacatagtagatgcttagtaaacgctcatttttcctttccaaggggaaatttggcagatgat

SEQ ID NO: 45813 - DNA, 120 bp, synthetic construct; identical to SEQ ID NO: 5522
  source 1..120: mol_type = other DNA

SEQ ID NO: 45814 - DNA, 120 bp, synthetic construct
  source 1..120: mol_type = other DNA
ctgcccgtaagtgcatggaagtgcatgatgtttattgttgctggtgtttttttgaggcccaagttggaatgcacttccggctccccctcaagtactagcttactggttaggtgggctgtt

SEQ ID NO: 45815 - DNA, 120 bp, synthetic construct; identical to SEQ ID NO: 12915
  source 1..120: mol_type = other DNA

SEQ ID NO: 45816 - DNA, 120 bp, synthetic construct
  source 1..120: mol_type = other DNA
ctgtgttggccatggacagcatgtgtacctgtgggaccaatggctgggcaaggggtgcaggggcatgaaggaattggctagagcttggacttgtggcctggggactctacttgggtgtgc

SEQ ID NO: 45817 - DNA, 120 bp, synthetic construct
  source 1..120: mol_type = other DNA
ggacttattaaagtattggtcaaggcaggatgatagaacgcattctgtgtaaccgtttgttaccttgatttgtctttaaatactacatatggtgtgtaggccttcctctgtatttttgct

SEQ ID NO: 45818 - DNA, 120 bp, synthetic construct
  source 1..120: mol_type = other DNA
ttatatgggtagcattttggagatgttcacaggaattgatttccctcaccctcaacccaggccagagtgaatttaatgcagatgagggagaaggtgctacatattatagctgctcattca

SEQ ID NO: 45819 - DNA, 120 bp, synthetic construct
  source 1..120: mol_type = other DNA
gatgagggagaaggtgctacatattatagctgctcattcaaaaagtggagcagagagctggaccactgaatgtgcctttgtttgctggaaatctttattaagtaccagagatatagagat

SEQ ID NO: 45820 - DNA, 120 bp, synthetic construct; identical to SEQ ID NO: 12916
  source 1..120: mol_type = other DNA

SEQ ID NO: 45821 - DNA, 120 bp, synthetic construct
  source 1..120: mol_type = other DNA
aacttcgtactttgtgtttggaccttgctctgtaagtgtccaggagattttaaagcaggggagtggcacggtgaaagccaccactctatcgtttcttgtttcatttcctcctcttaccca

SEQ ID NO: 45822 - DNA, 120 bp, synthetic construct
  source 1..120: mol_type = other DNA
ctgtcaggagagaagacatgttgttcagccaggagggctcagggaccccaggcgttcaggtaattagccagtgagtcatgtcaggcttttgatatggataccttgggaaactaagtgggg

SEQ ID NO: 45823 - DNA, 120 bp, synthetic construct
  source 1..120: mol_type = other DNA
cagtgttttcaatttctttgttgatgatcatcaatcaaggccaggctttccaattccagaccacactgcaatcagtggaaactacctaaattcagtactgcagacccatagcaggatgta

SEQ ID NO: 45824 - DNA, 120 bp, synthetic construct; identical to SEQ ID NO: 12917
  source 1..120: mol_type = other DNA

SEQ ID NO: 45825 - DNA, 120 bp, synthetic construct
  source 1..120: mol_type = other DNA
ctcatcagtaaaatgggaaaaacaatgacctccctcaaggagggatgttattgaagttatttacttaaatcagattagatttattttagattaaaagcttcttgcaagctgtgaaatgtt

SEQ ID NO: 45826 - DNA, 120 bp, synthetic construct
  source 1..120: mol_type = other DNA
attctcctgcctcagcctcccgagtagctgggattacaggcatgcaccaccatgcctggctaattttgtatttttagtaaagacggggtttttctatgttggtcaggctggtctcgaact

SEQ ID NO: 45827 - DNA, 120 bp, synthetic construct
  source 1..120: mol_type = other DNA
aaaaaccctttctgacagagatgggagttaaggcttctaagttcacacccagatttccacagagaccttagagacaatcataaatattgcacaaaattatattggaatatgagctcgggg

SEQ ID NO: 45828 - DNA, 120 bp, synthetic construct; identical to SEQ ID NO: 12918
  source 1..120: mol_type = other DNA

SEQ ID NO: 45829 - DNA, 120 bp, synthetic construct
  source 1..120: mol_type = other DNA
gatctccttgatcttatttacttacctacagtactctgggtacttatgtatttatgtttacagaggaggaggctgaagcattgaggggtcagtggcagaacaggaatcttaactctggtc

SEQ ID NO: 45830 - DNA, 120 bp, synthetic construct
  source 1..120: mol_type = other DNA
caaggttcagattacttaggtaagttgctttaagtctcaggctaagggctggagctggatttgccactgaagctctacaccttctagaatctagggtgactacataatttatcaaacaaa

SEQ ID NO: 45831 - DNA, 120 bp, synthetic construct
  source 1..120: mol_type = other DNA
ggtcttgatacctgaccaaggtaatggagaattggatccgccagctcatgtgctgttgcttaagtggaagggaatgtgcaaattatgtcctgctattctaagtgaaaggacttgcccaag

SEQ ID NO: 45832 - DNA, 120 bp, synthetic construct
  source 1..120: mol_type = other DNA
atgtctactactgaagggaaaggaggtggaggtcaaggtcaggtgtgtatggagcaggtgggggtggcagtggcagggcattcacgtggctctactatgtcggcaccatcatcaggccct

SEQ ID NO: 45833 - DNA, 120 bp, synthetic construct; identical to SEQ ID NO: 12919
  source 1..120: mol_type = other DNA

SEQ ID NO: 45834 - DNA, 120 bp, synthetic construct
  source 1..120: mol_type = other DNA
gaattctgcagagaacatgtaagggctgtgctgtttcactcctgctttgggctctcagggtttgtttccgcgatcatccaaacctcatcctccttctcttgccccagataatttattgga

SEQ ID NO: 45835 - DNA, 120 bp, synthetic construct
  source 1..120: mol_type = other DNA
gagaaatgtgaaatataaattcaaaccaaacttggcacctgtttggagagcttcagctgatactacagtgcccctgtcgttagcctttgtggctcagctgggtcttataaatagaacacg

SEQ ID NO: 45836 - DNA, 120 bp, synthetic construct
  source 1..120: mol_type = other DNA
tggtgtcatggggatgactaggccatcttgtgggtaaggctggaagcggcttttgagtctcctgagttacagctcttcttacccttgccagcctcccttccccagctgaggccctcagtc

SEQ ID NO: 45837 - DNA, 120 bp, synthetic construct; identical to SEQ ID NO: 12920
  source 1..120: mol_type = other DNA

SEQ ID NO: 45838 - DNA, 120 bp, synthetic construct
  source 1..120: mol_type = other DNA
attgtatcacatgcagtcaatgacagaaataatggaccctcagaagcctctcgaggtcaagggcccaggctattcctttgactcatcagggtgattagtatggaggtaggtgcttagtaa

SEQ ID NO: 45839 - DNA, 120 bp, synthetic construct
  source 1..120: mol_type = other DNA
ctaagtgagactcctgaacacttactgatgatgtcttgctgacttctgaggacatgatggtaagtctgccctcatggagcttgcagtcaggtggagagatagtgctataattgtgtttgg

SEQ ID NO: 45840 - DNA, 120 bp, synthetic construct
  source 1..120: mol_type = other DNA
atgcccagggccacacattttgtgatgcaagccaggttgtttcaggtttcaagcagttgcgatttctgtctccacccctccaccagtcttattttcctgttgacaaaatgataacaactt

SEQ ID NO: 45841 - DNA, 120 bp, synthetic construct; identical to SEQ ID NO: 12921
  source 1..120: mol_type = other DNA

SEQ ID NO: 45842 - DNA, 120 bp, synthetic construct
  source 1..120: mol_type = other DNA
attatataaagttttgccgtcgtcggacggaactttctgcagatagggaatacccttgagtcttcagtcgcaaagagctaatcactaacttcaagtgtgcaagtgccctttcattccaat

SEQ ID NO: 45843 - DNA, 120 bp, synthetic construct
  source 1..120: mol_type = other DNA
gtttttcttgcttgattaaaagagttacagtttttgctctgattgtttaaaaaaagaatctatcactgctactgatccaagaggtgagggttggcatggggtgggcactccagtaaatac

SEQ ID NO: 45844 - DNA, 120 bp, synthetic construct
  source 1..120: mol_type = other DNA
ttcctggaaaattcttcagtttccagaagcagtggccaggtgagccggggcatgaaaccagacgaagttgccgcagtgcgaggctggttctgtttgcctcagttctgaagttaatggtcc

SEQ ID NO: 45845 - DNA, 120 bp, synthetic construct; identical to SEQ ID NO: 12922
  source 1..120: mol_type = other DNA

SEQ ID NO: 45846 - DNA, 120 bp, synthetic construct
  source 1..120: mol_type = other DNA
tatctgctttaacttcaacgatgagaaaatcaaaccatatgctggacatcattctgcccagctgggctgagtcagaattgcagttcaaactacttctgctctccctgggtttcgtgtgct

SEQ ID NO: 45847 - DNA, 120 bp, synthetic construct
  source 1..120: mol_type = other DNA
ctgaacatccctacaatatctgaaattgaatgtttgccatttcttcttctttctcctcacacaacctactctgatgttcatgattactggagcccccaggttctaaaaagtgttgaatta

SEQ ID NO: 45848 - DNA, 120 bp, synthetic construct; identical to SEQ ID NO: 12923
  source 1..120: mol_type = other DNA

SEQ ID NO: 45849 - DNA, 120 bp, synthetic construct
  source 1..120: mol_type = other DNA
cctccggggttcatgctattctcctgcctcagcctcccgagtagctggcactacaggcgtctgccaccacacctggctaattttttttttttgtatttttagtagagacggggtttcttt

SEQ ID NO: 45850 - DNA, 120 bp, synthetic construct
  source 1..120: mol_type = other DNA
cctctgaactctccttggcttcttgcctttggctgttttctcaatgcatatattttcctgggggacaaatctaagttttcatctgatgctctgccttcagaggggaaccattccttaatg

SEQ ID NO: 45851 - DNA, 120 bp, synthetic construct
  source 1..120: mol_type = other DNA
acctatttaattgtattatcattgttgtttaattcatcacatatttactgagcttcttttgttggtggtggtgccatcagacacagtggtccaggagctgcaatgcgttgctgatgagga

SEQ ID NO: 45852 - DNA, 120 bp, synthetic construct
  source 1..120: mol_type = other DNA
gaaatcagtctgcaggcaaagaggaattcaaatttagcctgaagcacaggttttctgtgcttctaggcaccggctgcattccaaccgtagtgccataaaaatacaggaaggaagggaaac

SEQ ID NO: 45853 - DNA, 120 bp, synthetic construct; identical to SEQ ID NO: 12924
  source 1..120: mol_type = other DNA

SEQ ID NO: 45854 - DNA, 120 bp, synthetic construct
  source 1..120: mol_type = other DNA
ttgtcaccgtttttgtccagcggctgtcaccataggggctcctctggtgtggaggagagagaattagaggcagcaggcctgggttctaggtctgcctcattgtgaaccagcttcaggacc

SEQ ID NO: 45855 - DNA, 120 bp, synthetic construct
  source 1..120: mol_type = other DNA
caaagaaatgactctattactcatttgaatagtttcagaatcactgtatagtcaactctggactagaaatgggggcctgcagttgaggacaggatggaaagaggtttggggttcagggtg

SEQ ID NO: 45856 - DNA, 120 bp, synthetic construct; identical to SEQ ID NO: 12925
  source 1..120: mol_type = other DNA

SEQ ID NO: 45857 - DNA, 120 bp, synthetic construct
  source 1..120: mol_type = other DNA
tctggaagtgtgttgatttggtcaccacaagtgctggtggtgagtagttgccctgaggtttggagttccagttccctcctatctctgggtcagtggtttctcaacatctttgaagtagtg

SEQ ID NO: 45858 - DNA, 120 bp, synthetic construct
  source 1..120: mol_type = other DNA
ggattaaacaggcccttacaaatgcccacacttttttcatgaaactaagttagaggccttagccaactccagcataccttagtgtcagttctttggcattgccccggtggattctagggg

SEQ ID NO: 45859 - DNA, 120 bp, synthetic construct; identical to SEQ ID NO: 5532
  source 1..120: mol_type = other DNA

SEQ ID NO: 45860 - DNA, 120 bp, synthetic construct; identical to SEQ ID NO: 12926
  source 1..120: mol_type = other DNA

SEQ ID NO: 45861 - DNA, 120 bp, synthetic construct
  source 1..120: mol_type = other DNA
gtcctggccacacagtgaggatcagaagacagagcatggagagtggaatgggacacatggatcaaggaacgtggacctgagcaagcaaaagcaagtcactcgggtcccactatcacattg

SEQ ID NO: 45862 - DNA, 120 bp, synthetic construct
  source 1..120: mol_type = other DNA
ctcgtgcctcagactcccaagtagctggtattacaggcgcctgccaccacacctggctaatttttagtagagatggggtttcactatgttggccagattggtcttgaactcctgacttca

SEQ ID NO: 45863 - DNA, 120 bp, synthetic construct
  source 1..120: mol_type = other DNA
tcactggcagcaagaatgacttcatgttcttgctcccatgaaaattctctgctttcaggaatacactttcctctaggttttttctttgtctgcaagtgggggggtgttctttgccagatc

SEQ ID NO: 45864 - DNA, 120 bp, synthetic construct
  source 1..120: mol_type = other DNA
ctggcaccctctcagctgtggctgcatttcaggtatggatgggagtgattatctgtgcatcagaaaactcaagattgtcatgtgagcaagttgtgtgatcatcagtaaatgcagagctgg

SEQ ID NO: 45865 - DNA, 120 bp, synthetic construct; identical to SEQ ID NO: 12927
  source 1..120: mol_type = other DNA

SEQ ID NO: 45866 - DNA, 120 bp, synthetic construct
  source 1..120: mol_type = other DNA
agccatggtttagatcagagttcttgtactgacatggcccagctgattgacagctcagatgtgatcactccgtctcaactagaagaataaaaataaaaaccttgagctggagcggagagg

SEQ ID NO: 45867 - DNA, 120 bp, synthetic construct
  source 1..120: mol_type = other DNA
ttctccctggagcccgtggcccagaagatgggtgcacagtagggttacttgatgctaaacggctttcccgatagacttgggatctcactgttcttgtcttagctttacttgttgggttgg

SEQ ID NO: 45868 - DNA, 120 bp, synthetic construct; identical to SEQ ID NO: 12928
  source 1..120: mol_type = other DNA

SEQ ID NO: 45869 - DNA, 120 bp, synthetic construct
  source 1..120: mol_type = other DNA
actttgggagccgaggtgggcgaatcacgaggtcaggagttcgagaccagcccgaccaatatggtgaaaccctgcctctactaaaaatacaaaaatgagccaggtgtggtggcgggtgcc

SEQ ID NO: 45870 - DNA, 120 bp, synthetic construct
  source 1..120: mol_type = other DNA
tcttaaaaaaaagggggtgctggagagcatgtggggtggatagggctgactagagacctttgtcagggtgacctttctccagagagcccagtaggctcagaaggaaggtccctcagcacc

SEQ ID NO: 45871 - DNA, 120 bp, synthetic construct
  source 1..120: mol_type = other DNA
ttagttctgaagaggccaggctaggagaccccagagggacacccagaaatcccagatatacctcctccatctgctctgcctgccagatgacccttgctactttactgttttttctttgag

SEQ ID NO: 45872 - DNA, 120 bp, synthetic construct
  source 1..120: mol_type = other DNA
ttggtcatgtgcagagcaccttcccattggtttatctttacaactgccctgggtggagacatggcaaggtggtcctatccctattttgcaggtgatcaggcacaacttacagttagcgca

SEQ ID NO: 45873 - DNA, 120 bp, synthetic construct; identical to SEQ ID NO: 12929
  source 1..120: mol_type = other DNA

SEQ ID NO: 45874 - DNA, 120 bp, synthetic construct
  source 1..120: mol_type = other DNA
tgagcaggcgcagacttggagaggctgagggacttggcccagggcatatagctaggaagcggccaggcagtaagtgggtagcaccactgcatgttgggggtggggaagcatgagctggat

SEQ ID NO: 45875 - DNA, 120 bp, synthetic construct
  source 1..120: mol_type = other DNA
tgggagtgtggacaagtgtgcacgagggggaggcacacccaggccgagtggaacaccaccctaagggggtggtgacaggtggcactgggagtggctggagtcggggttcaccttactcag

SEQ ID NO: 45876 - DNA, 120 bp, synthetic construct; identical to SEQ ID NO: 12930
  source 1..120: mol_type = other DNA

SEQ ID NO: 45877 - DNA, 120 bp, synthetic construct
  source 1..120: mol_type = other DNA
ggcaggatgatgatgatgtccacttcttggggacgatggggcagggtggtaaacacttctcaatgcttgcttatgggctctgatgtgaaccactcactataggctgaatcctggttttcc

SEQ ID NO: 45878 - DNA, 120 bp, synthetic construct
  source 1..120: mol_type = other DNA
ttttctggggatttaaatcagctttgacttgggtctgaaagtaacccgtgacagcagtaagcctctcgatctgttgtttgcagtgtttcagctaaaatattataaacagaccaccaaact

SEQ ID NO: 45879 - DNA, 120 bp, synthetic construct
  source 1..120: mol_type = other DNA
aggaatccaggagaatttattgtattgttaccatctggtttcatggagtctgtttcttttgattttaattgtgccctctggagagaaagatcctcgaaatggtggaaaaagaagatacca

SEQ ID NO: 45880 - DNA, 120 bp, synthetic construct
  source 1..120: mol_type = other DNA
cgtctccaggccccagtctcctctggagggatttcccagatggcttccaggccagagcctgacaggagagataggacctgcctccacggtaacaaatggctgaaggcggtttggggtgtt

SEQ ID NO: 45881 - DNA, 120 bp, synthetic construct; identical to SEQ ID NO: 12931
  source 1..120: mol_type = other DNA

SEQ ID NO: 45882 - DNA, 120 bp, synthetic construct
  source 1..120: mol_type = other DNA
tctcaattctagaaggtaatagccttctagaattgtccatttgcataagcatttttatgcttattgctgtaatcagtgtgtcagtcaaacgggaaggaggaactacatcaggtatttagc

SEQ ID NO: 45883 - DNA, 120 bp, synthetic construct
  source 1..120: mol_type = other DNA
aaagggaacaggtggtgttcccagagcccagggttggggtcaccagtgggcctgtctagagcagttgcagctgcttctaaaattgccgacccaaggtagaaaaggagagaggggagaaac

SEQ ID NO: 45884 - DNA, 120 bp, synthetic construct
  source 1..120: mol_type = other DNA
acagcagagcacaggaagatgagggatggatcagagggcaaactggacttggaccagcacagggtgcaagcctgatgctctaattttatattttatcagcattttcttatatgtggcttt

SEQ ID NO: 45885 - DNA, 120 bp, synthetic construct; identical to SEQ ID NO: 12932
  source 1..120: mol_type = other DNA

SEQ ID NO: 45886 - DNA, 120 bp, synthetic construct
  source 1..120: mol_type = other DNA
gcggtcccagcagtctgaattttgtacactctccgagggctgctgatgtgcatttgagcttgacaatcatgattataggcaatgatgcaccgtgtggaagctgggggcaggatactgagg

SEQ ID NO: 45887 - DNA, 120 bp, synthetic construct
  source 1..120: mol_type = other DNA
ctgtgcccctttaggcccaagcctgcccttgctcttaacctcttaatgggtttcttctttcttctgttaaacagctaaaaatatcaaatcatggggttgctgtgacggttaaatgtaata

SEQ ID NO: 45888 - DNA, 120 bp, synthetic construct
  source 1..120: mol_type = other DNA
tctgaaaatcaatgatgaacacttaggaggcttgtagcctgctttgagtcaacaggaagactggacttgagagtttggaatctatagtctaacttcccttcctcaccctgtctttgtaaa

SEQ ID NO: 45889 - DNA, 120 bp, synthetic construct; identical to SEQ ID NO: 12933
  source 1..120: mol_type = other DNA

SEQ ID NO: 45890 - DNA, 120 bp, synthetic construct
  source 1..120: mol_type = other DNA
aagggtggctggattgtgactgtcacgctcctggcatcagatgatactggtagcaagctagggtcgtctgtgcactttgctctctctcagtcttcccagcagccctgtcaagcggggagt

SEQ ID NO: 45891 - DNA, 120 bp, synthetic construct
  source 1..120: mol_type = other DNA
agggaaagaggaactgggtcggggtgcctgctgacttgcagcgctgtgttggcatgcgaggtagcactggttgggaggcggttacctgaaggaagcaaaggcagctggtggttcctatct

SEQ ID NO: 45892 - DNA, 120 bp, synthetic construct
  source 1..120: mol_type = other DNA
ccctgttgatggctgaggaagccaaggctctgagaaggcacatggtttacccgaggggacacaggcaaggaatctgaacccggattgcattttctgttttagggctctttgtgtgaccac

SEQ ID NO: 45893 - DNA, 120 bp, synthetic construct
  source 1..120: mol_type = other DNA
ggacccaggaagtcagcctgcacctcggcgagtcagaagatgtggccatccaccaaccatcagatgttcccctacgcttagggctgtgaccagaagtggcatcaagatgggaggcgaagc

SEQ ID NO: 45894 - DNA, 120 bp, synthetic construct; identical to SEQ ID NO: 12934
  source 1..120: mol_type = other DNA

SEQ ID NO: 45895 - DNA, 120 bp, synthetic construct
  source 1..120: mol_type = other DNA
tgtgttagaggcaggacctgagcttttcactccataaatatatattacttctaatgtggccagggccgagctgaagatcataattatgtgagatctgctttacaggcatttagggaaatg

SEQ ID NO: 45896 - DNA, 120 bp, synthetic construct
  source 1..120: mol_type = other DNA
aatcagacccttccagggtgctcctgacttgatgttccagagcgtttggagtcaagagttgcactcttttttcttgcattaaatgcacttgagttttaacccagtctctgggcggatggc

SEQ ID NO: 45897 - DNA, 120 bp, synthetic construct; identical to SEQ ID NO: 12935
  source 1..120: mol_type = other DNA

SEQ ID NO: 45898 - DNA, 120 bp, synthetic construct
  source 1..120: mol_type = other DNA
agccttagaaaggttaaagaaggccagtgaagtcttctggctcatctggtcctgaggtgggtgagcattaaacccagatcctttttgtgtttcagtattggatcctttggccgtcatatc

SEQ ID NO: 45899 - DNA, 120 bp, synthetic construct
  source 1..120: mol_type = other DNA
tggaagtgtgtcttgagcctgtccttacacaggtgtggctgtcatcaaggccatcttcatgggcacgtgacgagtacagtcacatagagttcatgctcaggagggccctatgcttggttt

SEQ ID NO: 45900 - DNA, 120 bp, synthetic construct
  source 1..120: mol_type = other DNA
gctctctgtaacctctgcctgcgggttcaagtgattctcctgcttcagcctcccgagtagctgggattacaggcacctgccaccacacccagctaatttttgtatttcttttagtagacg

SEQ ID NO: 45901 - DNA, 120 bp, synthetic construct
  source 1..120: mol_type = other DNA
tcttaataattttctctttgacctagtgttttggagcatgagcatggatagaggagatgtgggcagcatgtgcccattgagccttctgccccattcacatgtagcatttgagcacagact

SEQ ID NO: 45902 - DNA, 120 bp, synthetic construct; identical to SEQ ID NO: 12936
  source 1..120: mol_type = other DNA

SEQ ID NO: 45903 - DNA, 120 bp, synthetic construct
  source 1..120: mol_type = other DNA
aaacgattgagttagctttatggatgtttctctggttctggtacatcacaaaatgcacatccaagtcctaaaatacaattcatgtaatgttggtgattccacatactagttaaaggcttt

SEQ ID NO: 45904 - DNA, 120 bp, synthetic construct
  source 1..120: mol_type = other DNA
aaaaataccatgacacatcaagagagagactgtggaggaaagagaaaaagctttctattttagtaccatgattgatactttttttttttttgccttttgcacaaagggttccatattttc

SEQ ID NO: 45905 - DNA, 120 bp, synthetic construct
  source 1..120: mol_type = other DNA
gggttgcggagctaagaagcatcatataggcaagtgagcatgtgtgcttgctctgaagattccaagcttccaggtggtggtggctctgttgatagagataaaaagttgaggaatttcaga

SEQ ID NO: 45906 - DNA, 120 bp, synthetic construct; identical to SEQ ID NO: 12937
  source 1..120: mol_type = other DNA

SEQ ID NO: 45907 - DNA, 120 bp, synthetic construct
  source 1..120: mol_type = other DNA
ttggcacactgcagccttgacctcccagctcaagcgatcttcccacctcagcctcctgagtagcttgggactacaggcacacatctctatgctgggctaattttcatgttttttttgttg

SEQ ID NO: 45908 - DNA, 120 bp, synthetic construct
  source 1..120: mol_type = other DNA
gtgtgagccactgcgcccggccttatctccatctcttaactagttgtttgatgttgggcaggttgttcaagcctcctggagccttggtttacccatctataaaatgggtataatggtaat

SEQ ID NO: 45909 - DNA, 120 bp, synthetic construct
  source 1..120: mol_type = other DNA
atgctagcaatggtcatgatggtgaagaatgaggggaggaggaagaaacaattcctgtgggtgctaggaccaaaagtagtatcctctaggaatcctggccttcaaggtctaacttccaag

SEQ ID NO: 45910 - DNA, 120 bp, synthetic construct; identical to SEQ ID NO: 12938
  source 1..120: mol_type = other DNA

SEQ ID NO: 45911 - DNA, 120 bp, synthetic construct
  source 1..120: mol_type = other DNA
cagtgtttctttaagtgctgctcactactgtcctgagagactccaagaagcagttactttgtttgggcctcagttcatcatctgtgagatgagaggattgggctttgtgcctaaactgcc

SEQ ID NO: 45912 - DNA, 120 bp, synthetic construct
  source 1..120: mol_type = other DNA
taattggaaccacaatcgcaggtttcagggactcaggaaagggtgcagcccagcttgtggttgagaaatgaatgtcagatgttaggaagaaaaaggcctatctcaacatagcaggggttt

SEQ ID NO: 45913 - DNA, 120 bp, synthetic construct; identical to SEQ ID NO: 12939
  source 1..120: mol_type = other DNA

SEQ ID NO: 45914 - DNA, 120 bp, synthetic construct
  source 1..120: mol_type = other DNA
ggatttggggacggtgggagggcatacatggatgggagggtggactccgttcctgagggggccagtgtggaggagggtcaggcagcccatggagatgggacagtgttctgaaatgcttca

SEQ ID NO: 45915 - DNA, 120 bp, synthetic construct
  source 1..120: mol_type = other DNA
tctcctttctgtggttgccgccctgttgattcatgtgtcagccttagagaaagtggctgtgacttctgcattcctgggaatacactgacatgagaagaagtagccgctcttgttcacagt

SEQ ID NO: 45916 - DNA, 120 bp, synthetic construct
  source 1..120: mol_type = other DNA
caattcctcatgtcttgtaagcatcactgtcctccaaagttggagcccagctcagacagctgcatagtattttatagagaaggtgtgttgttgaaatgttgattatgcaaattgaattgt

SEQ ID NO: 45917 - DNA, 120 bp, synthetic construct; identical to SEQ ID NO: 12940
  source 1..120: mol_type = other DNA

SEQ ID NO: 45918 - DNA, 120 bp, synthetic construct
  source 1..120: mol_type = other DNA
caccaccagcgaggtgtgctatgaggaatttttgttgatgatgaaaagtgaatgctaactgattgcacaccacgtgccccataccttacatagattatcttatttaattgttgctaataa

SEQ ID NO: 45919 - DNA, 120 bp, synthetic construct
  source 1..120: mol_type = other DNA
tgtaatcccagcactttgggagaccaaggtgggtgggtcatttgaggtcaggagttcaagaccatcctgaccaacatggtgaaaccccatctctactaaaaatacaaaattagccgggca

SEQ ID NO: 45920 - DNA, 120 bp, synthetic construct
  source 1..120: mol_type = other DNA
aagagcgaaactccatctaaaaaaaaaaaaaaaaaaaaggaatgaagtatgtgccacaacatgggtgaatcttgaaaacattgtgctgagttgaagaattcagacatcaaaagccacata

SEQ ID NO: 45921 - DNA, 120 bp, synthetic construct; identical to SEQ ID NO: 12941
  source 1..120: mol_type = other DNA

SEQ ID NO: 45922 - DNA, 120 bp, synthetic construct
  source 1..120: mol_type = other DNA
aatatatattaaaatcaaatgtattcctctaatggtgtccatgtcactgacttagtttctgataggtttgtattgggtaggaaagaaaggaatgggacatttacgtgtacactgaggcag

SEQ ID NO: 45923 - DNA, 120 bp, synthetic construct
  source 1..120: mol_type = other DNA
gcctcctcactttctattggggaagtcacagtggaaaagggggttttggctcctttatgtctttgggtatgttctgggtcactgaggatcagctctattccacctggcattttgtgcttt

SEQ ID NO: 45924 - DNA, 120 bp, synthetic construct
  source 1..120: mol_type = other DNA
aacaattcctgttgtgctactcgctttgggcagttagcgaaagggactaattgtgtgcaaatacatacgtttggtgtttgttgggagacttgccatgtgacactgcttcttcttttcttc

SEQ ID NO: 45925 - DNA, 120 bp, synthetic construct
  source 1..120: mol_type = other DNA
ccctgttggccccagcacagggtaaatgaaactgtagcttatagtaatatttacgtatgggagtcaatgagctgtttaaatacttggatgtcagaaaaaggtttcaaatttagcaagccc

SEQ ID NO: 45926 - DNA, 120 bp, synthetic construct; identical to SEQ ID NO: 12942
  source 1..120: mol_type = other DNA

SEQ ID NO: 45927 - DNA, 120 bp, synthetic construct
  source 1..120: mol_type = other DNA
cttatggagttggtgtaagcatctgcatgagatgatggacgttaaagtgctttgttagctgttgagactcttactgaaatgaaacccaaggatgggtgccactgaaagaaacaagaatga

SEQ ID NO: 45928 - DNA, 120 bp, synthetic construct
  source 1..120: mol_type = other DNA
aatcggattatgaggcacctgatctgtttaaggctgtgtgagtagaaccaggtcctgccttccggaagttcatggttaaattgtgttttcatgggtcacctggaaggcgagcttgttcag

SEQ ID NO: 45929 - DNA, 120 bp, synthetic construct; identical to SEQ ID NO: 12943
  source 1..120: mol_type = other DNA

SEQ ID NO: 45930 - DNA, 120 bp, synthetic construct
  source 1..120: mol_type = other DNA
ttcttttgagcagtggagtggatttgtgagtgttcatatctgtcctcatctgtgggaattgtatgtccaaggtgctaattcagggccatactgggatgacctgtgtgtatagacttgtcc

SEQ ID NO: 45931 - DNA, 120 bp, synthetic construct
  source 1..120: mol_type = other DNA
ggaagatctggatataccatgtttctgtaggcatgatacgtggtcccttagcttggtatttaaagttctttggaagtgaccgctttctggatttacctctgtgcagcccctctgctcctc

SEQ ID NO: 45932 - DNA, 120 bp, synthetic construct
  source 1..120: mol_type = other DNA
caaacccaaaacaggtcccatctccttagtcttaactgtctatgaatggtctgttgcctcacttcccagctctggtatgtagtacgtgctcagtacacatttttgaatgcattaatttgg

SEQ ID NO: 45933 - DNA, 120 bp, synthetic construct
  source 1..120: mol_type = other DNA
actgttctttttgttgtttttcttaactccttgcccctgcctcccatcaccccagtggaagagttatagtcaaggtagtgtagtcaaggtcgtgcaaaagctacacacttgaacctgttc

SEQ ID NO: 45934 - DNA, 120 bp, synthetic construct; identical to SEQ ID NO: 12944
  source 1..120: mol_type = other DNA

SEQ ID NO: 45935 - DNA, 120 bp, synthetic construct
  source 1..120: mol_type = other DNA
ttcctcagcccagctaccctttccagctgtgactgctggttgtggagctgaatgtgtgtggggtgtgggcctgtgtgtggactccccacccctgtgcggttttcctaagcacatagcaca

SEQ ID NO: 45936 - DNA, 120 bp, synthetic construct
  source 1..120: mol_type = other DNA
tgccaaactcgttgctggattgccataaacacttacttggattgattagagaggctatttgccgtattgaaggtggcagaattatttcaccttttccagaggtgttgacgttcaagggta

SEQ ID NO: 45937 - DNA, 120 bp, synthetic construct
  source 1..120: mol_type = other DNA
ccctatttttaaaagtgcctgcctctgctggttttgttgtggcagcgctcaaaggcaggaagacagataagatcggatttcaggattttcgtctgccccccatctccgcccccaactttt

SEQ ID NO: 45938 - DNA, 120 bp, synthetic construct; identical to SEQ ID NO: 12945
  source 1..120: mol_type = other DNA

SEQ ID NO: 45939 - DNA, 120 bp, synthetic construct
  source 1..120: mol_type = other DNA
gcctttatcgtggcccccagtaagtgataaatattcgtactaatttggggcagtgtcctttttccagctgttttcccatgagtgccctctgttccgtcaggtggccgaagacggataact

SEQ ID NO: 45940 - DNA, 120 bp, synthetic construct
  source 1..120: mol_type = other DNA
cctcttctcttgacagagacctctgggcctagataaatgtataaactgcattgcaggaatgaagccgtttccattaagaactggggtctatgtcctgggatccagttcttctcccccttt

SEQ ID NO: 45941 - DNA, 120 bp, synthetic construct; identical to SEQ ID NO: 12946
  source 1..120: mol_type = other DNA

SEQ ID NO: 45942 - DNA, 120 bp, synthetic construct
  source 1..120: mol_type = other DNA
tcttgccctctgtgtccttcctctgcgttctacagggagggagtagctgcctctgtttggtggtggggactcaggcaggatgggtagggaggggtaggggaacaagatcatggcgcacct

SEQ ID NO: 45943 - DNA, 120 bp, synthetic construct
  source 1..120: mol_type = other DNA
ctgtggaatgctgaggcagggctgagcttgggcagggtggctgagagaattgtggctctagctgtgggcagaaattcatggccttgaagaatggctactgtatataccagtgataaatat

SEQ ID NO: 45944 - DNA, 120 bp, synthetic construct
  source 1..120: mol_type = other DNA
atgccctggctggagatcccgtggggttttcaacctgcctgaagcaacgcagggcctgctaatgcctcctgttgccctaggtcaggccagggcccattgttgacatctgtgctgtgctgc

SEQ ID NO: 45945 - DNA, 120 bp, synthetic construct
  source 1..120: mol_type = other DNA
catccagacctcaggaagcaatcattttagcctcttctccttctccctcaccatccaggacatcactgagccctgtcagttctgcccccagaatatctaagttcatccaatgccccattt

SEQ ID NO: 45946 - DNA, 120 bp, synthetic construct; identical to SEQ ID NO: 12947
  source 1..120: mol_type = other DNA

SEQ ID NO: 45947 - DNA, 120 bp, synthetic construct
  source 1..120: mol_type = other DNA
aagagagccctttctaattcctccccttcatcttaactctatccccaatacactctctcacagagactgttcttttccttctgagaccctactccagcttgtagttctaaatctgtgatt

SEQ ID NO: 45948 - DNA, 120 bp, synthetic construct
  source 1..120: mol_type = other DNA
ttttgttctctgctatgctcaggacccagatcaaaggagctcagtaactatttacaggcgtacatcatatgtggaggacacttatgctgtgatggccccacacacagcttcctttggggt

SEQ ID NO: 45949 - DNA, 120 bp, synthetic construct; identical to SEQ ID NO: 12948
  source 1..120: mol_type = other DNA

SEQ ID NO: 45950 - DNA, 120 bp, synthetic construct
  source 1..120: mol_type = other DNA
tctctcccacccagggctcagcacagtacctggaacagtcaagccctcaataaatgtttactgagtgcattaaaaaaaaaaaaaagattttaatgagtcatgctttaactgaagatttta

SEQ ID NO: 45951 - DNA, 120 bp, synthetic construct
  source 1..120: mol_type = other DNA
aaggaaaccaagagagaagtagctttatctgggtggaggggagtgggcctttcagagcctcgaaatcttcccacctgctgcgccactcccaccacataagcaccccacccttcttcccag

SEQ ID NO: 45952 - DNA, 120 bp, synthetic construct
  source 1..120: mol_type = other DNA
gaagtccgtcattcggctgcgagtaatttctgatgggagaggggcttcccccggcccttcccgcctctctgagccttgccacggtcacttggtttgcccagcctaagtcactgcctgtcg

SEQ ID NO: 45953 - DNA, 120 bp, synthetic construct; identical to SEQ ID NO: 12949
  source 1..120: mol_type = other DNA

SEQ ID NO: 45954 - DNA, 120 bp, synthetic construct
  source 1..120: mol_type = other DNA
gggtgatctttctaaaggacagatcttgcttcagcacctccctggttagaacccttccgtccagtggttcctagtgcttcggggataactcgccttgtcccttggggtctgcacagcgtc

SEQ ID NO: 45955 - DNA, 120 bp, synthetic construct
  source 1..120: mol_type = other DNA
tggagtgactgatttcaagtacaactgccaccatgggagaggtctgtgaaaatcactggaattgaaaatgaccatgctttgcccaaaaaggttgagaatccccactctgatgatactaga

SEQ ID NO: 45956 - DNA, 120 bp, synthetic construct
  source 1..120: mol_type = other DNA
actgcaaatgtgtccccccagctgctgagcatgcctaggtctgacacacaccacgatatgttgaaatcattggtttctgggttattcttctcacagtcccaggcagtgagccctcaagga

SEQ ID NO: 45957 - DNA, 120 bp, synthetic construct
  source 1..120: mol_type = other DNA
ctcgttctaaaacggagcatttggtccttgcagcctgccttgtggtttatgacttagtagattgaaaatgacagttgtgctctattttcatttggaaagaaaaaaaaaagtggaaaacca

SEQ ID NO: 45958 - DNA, 120 bp, synthetic construct; identical to SEQ ID NO: 12950
  source 1..120: mol_type = other DNA

SEQ ID NO: 45959 - DNA, 120 bp, synthetic construct
  source 1..120: mol_type = other DNA
agacataattttcattgtaagttctttgtgtgtgcaaatgctttttgtgtggaatgcttgccatgcactgaaaaatgctttgtgatagcagttttgaaaaattgagtcattttgccctga

SEQ ID NO: 45960 - DNA, 120 bp, synthetic construct
  source 1..120: mol_type = other DNA
catgtaagtcttacatcctcctctttggtgattggatactgaccctctccccaggggttcctgcacagagctggaattctctctggtgtctttgcattctagtgggtggaatgccttgtt

SEQ ID NO: 45961 - DNA, 120 bp, synthetic construct; identical to SEQ ID NO: 12951
  source 1..120: mol_type = other DNA

SEQ ID NO: 45962 - DNA, 120 bp, synthetic construct
  source 1..120: mol_type = other DNA
cggcccacttcccacccacccgggtctccagataacatgaagccatagctcccaggctcgtcagcgggggaaaccaactcagtgcttctcagaaaatagaaccccagcccattagtgatg

SEQ ID NO: 45963 - DNA, 120 bp, synthetic construct
  source 1..120: mol_type = other DNA
gtgaatgaaataattcattctgtgcttgagtgtctaagacccagggggtttaggaataattaggatactggctgtacccttggagttctgtgctgcttgggggatacgactcaaactcac

SEQ ID NO: 45964 - DNA, 120 bp, synthetic construct
  source 1..120: mol_type = other DNA
ccccagcctgtagcgggatatgtcagaagatttggatttagaggaacttgggtttgacaaaatagaagtgtatgtatataaacagagttgggagtgatgggggataggatgctgacagca

SEQ ID NO: 45965 - DNA, 120 bp, synthetic construct
  source 1..120: mol_type = other DNA
acttgttctgcctctctgtgtctgtgacatccagccctgtgtgggctaccctggttgcaaagtgggcctcctgccgttgagcagctatggtccagtgggcaggtacaccacagtcatgga

SEQ ID NO: 45966 - DNA, 120 bp, synthetic construct; identical to SEQ ID NO: 12952
  source 1..120: mol_type = other DNA

SEQ ID NO: 45967 - DNA, 120 bp, synthetic construct
  source 1..120: mol_type = other DNA
atcactatctaattttagaacattttcaacaccacaaaaagaaacctcatacccattaacagtcacttcctgcccatcccccttagccctggcaacttagtctactttctggttctctgg

SEQ ID NO: 45968 - DNA, 120 bp, synthetic construct
  source 1..120: mol_type = other DNA
cattcctttttatggccaaatagtattccagtgtatggatataccacattttgtttgtcctttcttcagttgatagacatttgggttgttttcacttcttggctattgtaaataatgctg

SEQ ID NO: 45969 - DNA, 120 bp, synthetic construct; identical to SEQ ID NO: 12953
  source 1..120: mol_type = other DNA

SEQ ID NO: 45970 - DNA, 120 bp, synthetic construct
  source 1..120: mol_type = other DNA
tttgagattgagtcttgctgggatgtccaggctggagtgcaatggtgccatctcggctcactgcagcctctgcttcctgggttcaagtgattctcctgcctcagcctcctgagtcactgg

SEQ ID NO: 45971 - DNA, 120 bp, synthetic construct
  source 1..120: mol_type = other DNA
ctcccaaagtgttgggattacgggcatagccaccgcacctggccttccatttgtatatcttgtttggaggaacatctacaaatcctttagccatttctttttttttctttcctttttttt

SEQ ID NO: 45972 - DNA, 120 bp, synthetic construct
  source 1..120: mol_type = other DNA
gggattacaggcgcccgccaccactcctggctaattttttgtatttttttttttttttagtagagatgaggtttcaccgtgttggtcaagctggtcttgaactcctgacctcaggtgatc

SEQ ID NO: 45973 - DNA, 120 bp, synthetic construct
  source 1..120: mol_type = other DNA
atataaattcctttatcagatacatggtttgcaaatattttcttccattttatttctttcaattctgtgggttgttttttcactctcttgatggtgttttttgaagcacaaaagttttta

SEQ ID NO: 45974 - DNA, 120 bp, synthetic construct; identical to SEQ ID NO: 12954
  source 1..120: mol_type = other DNA

SEQ ID NO: 45975 - DNA, 120 bp, synthetic construct
  source 1..120: mol_type = other DNA
catctatcctcatgacagtcttgactactatagctttgtagtattaatcaacttttaaaatatatatatatgtgtatatatatatatatatatttttttgagacagagtcttgctctgtc

SEQ ID NO: 45976 - DNA, 120 bp, synthetic construct
  source 1..120: mol_type = other DNA
cgcccggccaattttttttttgtatttttagtagagacgaggtttcaccgtgttagccaggatggtctcgatctcttgacctcgtgatccacccatgtgggcctcccaaagtgctgggat

SEQ ID NO: 45977 - DNA, 120 bp, synthetic construct
  source 1..120: mol_type = other DNA
gatagacaaggaaattaggggagaagacaagaaaataggaaaataagatgacataagagttaatgttagtacaacaactaatatgttgtaaggtttgtgagattgttggaagtagcctgc

SEQ ID NO: 45978 - DNA, 120 bp, synthetic construct; identical to SEQ ID NO: 12955
  source 1..120: mol_type = other DNA

SEQ ID NO: 45979 - DNA, 120 bp, synthetic construct
  source 1..120: mol_type = other DNA
ttctgccaccaggttgaggttagttgggaccaatttggcggtggagaagtggcaggggctgccctcctggatgcattttagaagtgttttcttgcatcatgcttcctgagtgctggctaa

SEQ ID NO: 45980 - DNA, 120 bp, synthetic construct
  source 1..120: mol_type = other DNA
ctcagcgctggagggtcctctctctcgcccactccctctgacatgcctctgagactgcctgcccgatggaaatatccagcatgtatgagggaggtcctggccaaaactgaacagcttctc

SEQ ID NO: 45981 - DNA, 120 bp, synthetic construct
  source 1..120: mol_type = other DNA
acatgtcatattgggtggacctcttcgtcccacacccaataaagggctttaccatttttcagtagcatcctttcttaagagaaacaaaaaatagatttgaataccagtctttaaaggggt

SEQ ID NO: 45982 - DNA, 120 bp, synthetic construct; identical to SEQ ID NO: 12956
  source 1..120: mol_type = other DNA

SEQ ID NO: 45983 - DNA, 120 bp, synthetic construct
  source 1..120: mol_type = other DNA
atgttgttactgcctgtggcttttcacacctcctgtctcaaatattggagcttttttggctacagccctgtgatgaaggcagtgtgggtgctgttgaccctatcttacccatatggacac

SEQ ID NO: 45984 - DNA, 120 bp, synthetic construct
  source 1..120: mol_type = other DNA
caatctttgaattcctggaactcatgccatgagcacttccaggagcaccttagtgcttcattacaaagatgatgagacgtaggaaagtctttttttttttcccacggaagcagaatctca

SEQ ID NO: 45985 - DNA, 120 bp, synthetic construct; identical to SEQ ID NO: 12957
  source 1..120: mol_type = other DNA

SEQ ID NO: 45986 - DNA, 120 bp, synthetic construct
  source 1..120: mol_type = other DNA
agataatgtctggttaaccaccctcctggagtcatggcaaggctgatacagattcagtggcattaactcatttgttcattcagcacattttactggcaacttatgctgtgctgggctctg

SEQ ID NO: 45987 - DNA, 120 bp, synthetic construct
  source 1..120: mol_type = other DNA
ttcccccaaggaaaagacataggagccaagaccaaagggtgggtaggagtaatcagaagagcatgtctctcatctctggacttctgtagagagacttctgtaaccactgtaccctctgga

SEQ ID NO: 45988 - DNA, 120 bp, synthetic construct
  source 1..120: mol_type = other DNA
acagagagaaatccacccgaaggactttttacatctctctaacatctcctgttcagtttatctcagctggcctttgctgagcaccagttagttgccttgtgcatccttgggtgatggatt

SEQ ID NO: 45989 - DNA, 120 bp, synthetic construct; identical to SEQ ID NO: 12958
  source 1..120: mol_type = other DNA

SEQ ID NO: 45990 - DNA, 120 bp, synthetic construct
  source 1..120: mol_type = other DNA
tgagcaagtacctggctggagaagcgtgtggtaaaggggagcagctgtgattattatgggtatcattcctagtggttctgcaattagtcttgacagtaagtgctgcaggacttcagacaa

SEQ ID NO: 45991 - DNA, 120 bp, synthetic construct
  source 1..120: mol_type = other DNA
tgatgggggtatctgttctgcatggaggatagatgacttctcagccattgggaaaccagctaaccagctttctgcttgatggttgtagtaaaatcccatgattagtgacaatggcatgcc

SEQ ID NO: 45992 - DNA, 120 bp, synthetic construct
  source 1..120: mol_type = other DNA
aatgcaatgtttatcttgaaagaagttgtcaactacttggaaatccccaagcttacttcctccaggaagccattctggactacttcacccagttctcatagctcccgggccctccatctt

SEQ ID NO: 45993 - DNA, 120 bp, synthetic construct; identical to SEQ ID NO: 12959
  source 1..120: mol_type = other DNA

SEQ ID NO: 45994 - DNA, 120 bp, synthetic construct
  source 1..120: mol_type = other DNA
atcttgaaagtccaactccttcattttacagaggaggaaacctgtgccccaaagcaggtccccccaagttccagcccagtgccaccccactgcacagagcagctgtctccttttgatcat

SEQ ID NO: 45995 - DNA, 120 bp, synthetic construct
  source 1..120: mol_type = other DNA
gtttgtcgagcatggattttcaaactttctttatagagagctgttgttagcttaaaaatgcctggaaacatgatcaagtgtaatgttttaatgataacatagaagcacatagtactaagc

SEQ ID NO: 45996 - DNA, 120 bp, synthetic construct
  source 1..120: mol_type = other DNA
ggagttcaagaccagcctggccaacgtggcaaaaccccgtctctgcccaaaatacaaaaattagccgggcgtggtgacgggtgcctgtaatcccagctactcaggaggctaagacaggag

SEQ ID NO: 45997 - DNA, 120 bp, synthetic construct
  source 1..120: mol_type = other DNA
ttctttcaacatgcttgtgttgggtgctgcctggcacagcaattggtgcccactaactcacagcgtcggggaagataggcacggaacaagtcatctggtgtggtccctgcagtgggggag

SEQ ID NO: 45998 - DNA, 120 bp, synthetic construct; identical to SEQ ID NO: 12960
  source 1..120: mol_type = other DNA

SEQ ID NO: 45999 - DNA, 120 bp, synthetic construct
  source 1..120: mol_type = other DNA
ttctctaggaggttttcatccagcatgggaacacaaaacaccagtttaaaatagctaggtaaggcttcacagtctctcaatgtgatgtgggtgtcctgagtcgtgaacatcccattgtgc

SEQ ID NO: 46000 - DNA, 120 bp, synthetic construct
  source 1..120: mol_type = other DNA
acttttcctctttgtgtcccttgagctcagggacatgcatcccctgttgtacctagcacagaatcatgcacaagcaggtgcttgttaactgttggtgtgtaccaacaaacatttacggag

SEQ ID NO: 46001 - DNA, 120 bp, synthetic construct; identical to SEQ ID NO: 12961
  source 1..120: mol_type = other DNA

SEQ ID NO: 46002 - DNA, 120 bp, synthetic construct
  source 1..120: mol_type = other DNA
agcaagggcagtcatgatggagtgttggggctgaagcccattgcagggaggcccatagtcaatgggaggtgggcagtagacacagagagctgggttattcttgccacacagctgtgctgg

SEQ ID NO: 46003 - DNA, 120 bp, synthetic construct
  source 1..120: mol_type = other DNA
gaagcagatggatggaaccctggctgaattatctcagacttgccaaagacattcataaaattcagacccgcacacactcgggaatgggaaaaatgaattattttgtaagaagcttatagt

SEQ ID NO: 46004 - DNA, 120 bp, synthetic construct
  source 1..120: mol_type = other DNA
ccaaaggtagaattgcccaagagagcttctgaaaggaaaaagtcatagcaagttgatatttttaaagtgaaataacataggttggatttttctagtaacttcaaggggtaaagactttga

SEQ ID NO: 46005 - DNA, 120 bp, synthetic construct
  source 1..120: mol_type = other DNA
ggtagctgggattataggcacacgctaccacgcctggctattttttgtatattttgtggaggtggggtttcaccgtgttgcccaggctggtctcaaactcctgagctcaagcgatctgcc

SEQ ID NO: 46006 - DNA, 120 bp, synthetic construct; identical to SEQ ID NO: 12962
  source 1..120: mol_type = other DNA

SEQ ID NO: 46007 - DNA, 120 bp, synthetic construct
  source 1..120: mol_type = other DNA
ataatttttaaaaccccctgtatgtatcaaactcactttggagatgtaaggcatggcctctgtcctggtgacagtatctgagtgggaggcctggtaaaatgtctgtgtttaggatgatga

SEQ ID NO: 46008 - DNA, 120 bp, synthetic construct
  source 1..120: mol_type = other DNA
gggaatctcaccctggccctaccaggtaagaaattgggcctgggaaattgggaagggaatttttcaagcttcatggctgctccaggacttgaactaagactttcctttagagcaagcttg

SEQ ID NO: 46009 - DNA, 120 bp, synthetic construct; identical to SEQ ID NO: 12963
  source 1..120: mol_type = other DNA

SEQ ID NO: 46010 - DNA, 120 bp, synthetic construct
  source 1..120: mol_type = other DNA
cttgcatgttttcaggcagggcatgattgtatctgtaacataataatatgtaagaatgtgtacttcttagcctttgcagagaggcgggaggcctgtttcctgcagcccccgccctgtcct

SEQ ID NO: 46011 - DNA, 120 bp, synthetic construct
  source 1..120: mol_type = other DNA
gacgcaggctggctgccagcgggtgccggtgggcactcctgacacaggccactgccagccggccttgtgggtcctgagggcatcgtgggtggctctccccccacgagtgactgtgcctgg

SEQ ID NO: 46012 - DNA, 120 bp, synthetic construct
  source 1..120: mol_type = other DNA
agagagcttgctcttggggcagtttgtactgggcgtttagggttataaaaacctagatttgctgaaaacggctctcttttatcttctgacaagaacatttgtgaagaaaacaaaacagac

SEQ ID NO: 46013 - DNA, 120 bp, synthetic construct
  source 1..120: mol_type = other DNA
tgaggaaattttgcttaaaaaaaaatctctactgataggacctctgcatattcatgcatgtttttcctccagaactttgtgtcccaccactgtgctaggcagtttacaaatgccatctga

SEQ ID NO: 46014 - DNA, 120 bp, synthetic construct; identical to SEQ ID NO: 12964
  source 1..120: mol_type = other DNA

SEQ ID NO: 46015 - DNA, 120 bp, synthetic construct
  source 1..120: mol_type = other DNA
ccttttcattttacacatgaggaaactgaaggttatactcccctttccttcttagaaaagagaaattgatctgtaggcttcagggactcttcagttagcctgggggtactgtgcgggtca

SEQ ID NO: 46016 - DNA, 120 bp, synthetic construct
  source 1..120: mol_type = other DNA
gcccatttcctatcgggggatttatggagctggtgatctcttgggttttttggccatttgttagagccaaaagaggtcacaggaaatgatatactagtttcattgcccaaaatactgagg

SEQ ID NO: 46017 - DNA, 120 bp, synthetic construct
  source 1..120: mol_type = other DNA
aaggataggtttttttcacagagcaatgatgttccctgtggtccctatgtagggtggtaaggaatagggctttgggatcctacagaccagggttcaaatcctggccccaccacttgtaag

SEQ ID NO: 46018 - DNA, 120 bp, synthetic construct; identical to SEQ ID NO: 12965
  source 1..120: mol_type = other DNA

SEQ ID NO: 46019 - DNA, 120 bp, synthetic construct
  source 1..120: mol_type = other DNA
tgggcaacagagtgagaccctgtctcaaaaaaaaaaaaaaaaaaaaaaatcagccaggcgcagtggctcacacctgtaatcccagcactttgggaggccgaggcgggtggatcacctgag

SEQ ID NO: 46020 - DNA, 120 bp, synthetic construct
  source 1..120: mol_type = other DNA
gcaggagaatcgcttgaacccaggaggaggagtttgcagtgagccaagattgtgccatcgcactccagcttgggcaacaagagcaaaactccgtctcaaaaaaaaggaaaaaagaattct

SEQ ID NO: 46021 - DNA, 120 bp, synthetic construct; identical to SEQ ID NO: 12966
  source 1..120: mol_type = other DNA

SEQ ID NO: 46022 - DNA, 120 bp, synthetic construct
  source 1..120: mol_type = other DNA
gtgtgtcctgctttccaactttcggatatgctgtagaatagactgaaacaaatcactggaaaataggttgttgtcgattttatttagaagcttttgttcctttggattttcgtctcttat

SEQ ID NO: 46023 - DNA, 120 bp, synthetic construct
  source 1..120: mol_type = other DNA
gactacagaagcaggccaccacgtctggctaatttttgtatttttctgttgagaagaggtcttgctatcatgggcaggctggtcttgaactcctggcctcaagtgatcctcccgcctcag

SEQ ID NO: 46024 - DNA, 120 bp, synthetic construct
  source 1..120: mol_type = other DNA
tctgcagtttacacagcttgttgatctccacagtgagaattaacttcacaacctgggtccaagaggctggaggattgtcagtctttagaaaaaaaaaaatctattatctttagagaagat

SEQ ID NO: 46025 - DNA, 120 bp, synthetic construct; identical to SEQ ID NO: 12967
  source 1..120: mol_type = other DNA

SEQ ID NO: 46026 - DNA, 120 bp, synthetic construct
  source 1..120: mol_type = other DNA
gacctgagcttggtgaatttacctggcatctgagcctggcctgaacaattcagaaacctcatttcatcagtcttggagtcagggctcctgtctcttagcaaaaagctaaagcatacatca

SEQ ID NO: 46027 - DNA, 120 bp, synthetic construct
  source 1..120: mol_type = other DNA
gccaaatggtcagagagctgggtgggtcggggaaagggagggagggagtcatgggaagcagttgtgttgaatggctacaggccctggtggctgggtgcatccccgtatgccatccaggcc

SEQ ID NO: 46028 - DNA, 120 bp, synthetic construct
  source 1..120: mol_type = other DNA
tagagattaagagcggctccagtgtgtgtacggagagcctctttgaagcgctgttgcctttctgtggctagatccacgatcttctctctgggatcaccccataggacatttgctttccac

SEQ ID NO: 46029 - DNA, 120 bp, synthetic construct; identical to SEQ ID NO: 12968
  source 1..120: mol_type = other DNA

SEQ ID NO: 46030 - DNA, 120 bp, synthetic construct
  source 1..120: mol_type = other DNA
gctgagttcactggtgctggggttaggtcactgctgggctgaagcgcactgaccataagagcaacatgtgggcaagagccgcggcactggggtaatttattgccgccgctcgcttcacca

SEQ ID NO: 46031 - DNA, 120 bp, synthetic construct
  source 1..120: mol_type = other DNA
ggcagggtgggttaggtgtggggtatttgtcactgagaagcagaaactgtatgctcgacacacactccctgagtccttagggaattgcgtagtttttttcttttcttttctgggttcatc

SEQ ID NO: 46032 - DNA, 120 bp, synthetic construct
  source 1..120: mol_type = other DNA
gatgctctgtttacagatgaggagattgaggcatgagttgtgattgctcacaattgcctcctgagtggtggggccatgctggggcactgtgcccagactctagacttccaggggtccggg

SEQ ID NO: 46033 - DNA, 120 bp, synthetic construct; identical to SEQ ID NO: 12969
  source 1..120: mol_type = other DNA

SEQ ID NO: 46034 - DNA, 120 bp, synthetic construct
  source 1..120: mol_type = other DNA
tttgtcggatgagtatgtctcttcctcagctctgtggttagctgggagagctccgacagtagagtctggcaggtctggttcaagcatccctttggtgtaacatggtgtgaatggtggggc

SEQ ID NO: 46035 - DNA, 120 bp, synthetic construct
  source 1..120: mol_type = other DNA
gagggcagctcttacggccactgcctggtatgttttggcgtgagcagtagggtcatcgtggtggtcagtttttccactgccatcaaatgggatccatttagctctcagacagacaaggta

SEQ ID NO: 46036 - DNA, 120 bp, synthetic construct
  source 1..120: mol_type = other DNA
aatggataagtaaatatttaccctgtctgaggtcgaatgtgaactgtctaccaggtgttttgtttttctgtctcctccctctgtttctgcagtgcctccccctgtaaaaaaggaaaccaa

SEQ ID NO: 46037 - DNA, 120 bp, synthetic construct
  source 1..120: mol_type = other DNA
tcaggcacctcctccaggaagcattcccagatgactggcccatcctgccctttccctcctctgagccgcaccctgcagacggccctctacctgtgaatccatacaggatgtaggcaaagg

SEQ ID NO: 46038 - DNA, 120 bp, synthetic construct; identical to SEQ ID NO: 12970
  source 1..120: mol_type = other DNA

SEQ ID NO: 46039 - DNA, 120 bp, synthetic construct
  source 1..120: mol_type = other DNA
gaggacagcttaggctgaaagtggtagggagactatcaatgaagctggggggagctgagcttctgaaacttgggaataaattttcagccttgctaatgtgttcctctgaaaaaatatctt

SEQ ID NO: 46040 - DNA, 120 bp, synthetic construct
  source 1..120: mol_type = other DNA
aatagaatccaccttccctatcactcaccccttttaaaatgtgactaactctgagctaaccaagccttggccagacgtggatatggttatgcacggactccgttttgtggtttgtcattt

SEQ ID NO: 46041 - DNA, 120 bp, synthetic construct; identical to SEQ ID NO: 12971
  source 1..120: mol_type = other DNA

SEQ ID NO: 46042 - DNA, 120 bp, synthetic construct
  source 1..120: mol_type = other DNA
gaaggattaaaagagctggtgtgtgtaaaacccaggaacatagttcctggtgtatagtgacttataatttcgaaaaccttaagattttattcataagattttttttttcaaggccaactt

SEQ ID NO: 46043 - DNA, 120 bp, synthetic construct
  source 1..120: mol_type = other DNA
cacctcagactcctaagtagctgggactgcaggtgcacgccaccacacccagctagtttttaaatatattttttagtagagtgaacctcgccattttgccaagcctggtctggaactcct

SEQ ID NO: 46044 - DNA, 120 bp, synthetic construct
  source 1..120: mol_type = other DNA
atgtgcaccttgagcacagagtgttgagtgcgtggtggatggatgtcatttgcgttttacagatgcggcaacagaaactcaggcccagccacttacccgaggccacatagtcccaggtag

SEQ ID NO: 46045 - DNA, 120 bp, synthetic construct; identical to SEQ ID NO: 12972
  source 1..120: mol_type = other DNA

SEQ ID NO: 46046 - DNA, 120 bp, synthetic construct
  source 1..120: mol_type = other DNA
gtgtatggtagcccccacttgttcttggttttgccttatgaggtttcagtcagctacagtctggaaataggtgaatatagtacagtcagatgtgttgagagaaagagaccacatttatat

SEQ ID NO: 46047 - DNA, 120 bp, synthetic construct
  source 1..120: mol_type = other DNA
acacagtgtctatagagtttggtactgtctctggtttcaggcatccactggtggtcttggaacgtattcccctcggataattgcaattacttctaaaatctaaaatcttctggccatgtt

SEQ ID NO: 46048 - DNA, 120 bp, synthetic construct
  source 1..120: mol_type = other DNA
gcatatactcaaatataaagattgttaacgagctatattacattcttctttatcatactgagtctgaagttgatgtgtcctttatacttgtggcacatctcagtttgcactgtccacatt

SEQ ID NO: 46049 - DNA, 120 bp, synthetic construct; identical to SEQ ID NO: 12973
  source 1..120: mol_type = other DNA

SEQ ID NO: 46050 - DNA, 120 bp, synthetic construct
  source 1..120: mol_type = other DNA
aaactcagagaggcccagcaacttacccaaggccacgtagtcccaggtagagttagaatttggaatagggcctgctgactccggtactaggtgccttccactcacctgacctccttctct

SEQ ID NO: 46051 - DNA, 120 bp, synthetic construct
  source 1..120: mol_type = other DNA
ctcctgtcagataagcggctgcattagattctcataggagcgtgaaccctattgtgaactgcatattggagggatctaggttgcacactccatatcagaatctaatgcctgatgatctga

SEQ ID NO: 46052 - DNA, 120 bp, synthetic construct
  source 1..120: mol_type = other DNA
agagaaagagaatttgcacgtagcaacttaggcaaagtattcaaggaaagtgccaggggacaggaaggacaccatgggctggtggcctgttcagtaacagcttcagggtatcagttcaga

SEQ ID NO: 46053 - DNA, 120 bp, synthetic construct
  source 1..120: mol_type = other DNA
agtggggggtatgaggtgggggtgaggaggtggtggtgggcagcaattgcagaggccagagatcttggctgtgttctacctgccacgctgggaatgctaagtacttctcaagccttcaag

SEQ ID NO: 46054 - DNA, 120 bp, synthetic construct; identical to SEQ ID NO: 12974
  source 1..120: mol_type = other DNA

SEQ ID NO: 46055 - DNA, 120 bp, synthetic construct
  source 1..120: mol_type = other DNA
agccaggagatagtcgttgagttgtttctatttgccaggcatcgagctgtgttctcgggtttcattgttgttgttttcattttgagtgtgtttgttttgttttacttttaggagcaatca

SEQ ID NO: 46056 - DNA, 120 bp, synthetic construct
  source 1..120: mol_type = other DNA
tgctcagagacttggacctttctgaacatcatgaagctagggatttcagtcccagcctctctctcgagagccctaacttagccactatacctcactgcctctctgtgaccagggttgagt

SEQ ID NO: 46057 - DNA, 120 bp, synthetic construct
  source 1..120: mol_type = other DNA
accctgtccaggagatgggtgcttcttcaggacactacctggctaagaacactgcattaacaggagatagagatccagtgtgtgtgaaccttgtgaaaacatctctgtctgttcctccaa

SEQ ID NO: 46058 - DNA, 120 bp, synthetic construct; identical to SEQ ID NO: 12975
  source 1..120: mol_type = other DNA

SEQ ID NO: 46059 - DNA, 120 bp, synthetic construct
  source 1..120: mol_type = other DNA
accgtattttttaggaagtgaatggggctttgagaaggacaacctcactgttttgcccatttctgagatggaaaatcaaggaacattgccccatctccaccccgggaatctatatgcccc

SEQ ID NO: 46060 - DNA, 120 bp, synthetic construct
  source 1..120: mol_type = other DNA
agggactccaaggctgtagaatgggaggaattgtgggaggaaaagcactgggcagaaggtctcagtcaaatgcacctgcagttattagctatgtgacttgggcataatgccacctgtgag

SEQ ID NO: 46061 - DNA, 120 bp, synthetic construct; identical to SEQ ID NO: 12976
  source 1..120: mol_type = other DNA

SEQ ID NO: 46062 - DNA, 120 bp, synthetic construct
  source 1..120: mol_type = other DNA
tcctcctctgacccatgttttgcacttccttgcttgtcactcctctttaaacacttgtccaaactgtttgtggcccgtcctgtattacgcccagggcagatgcagtagcccagcccaagc

SEQ ID NO: 46063 - DNA, 120 bp, synthetic construct
  source 1..120: mol_type = other DNA
gggaaaagcccttctggacctcttatctctctctcctggccagaggaaaaccatgtcccatttgtcctgtttgagcactatcaggcctatagccataatcttttacaccgtaacataact

SEQ ID NO: 46064 - DNA, 120 bp, synthetic construct
  source 1..120: mol_type = other DNA
caaagtatgatcctatcgccagaaaaatggagccaaatctgaaattaatttacaaagtcattagtattttccatttgtgacccccaaaatgaatgtaggtgtagttccttgcaattaact

SEQ ID NO: 46065 - DNA, 120 bp, synthetic construct; identical to SEQ ID NO: 12977
  source 1..120: mol_type = other DNA

SEQ ID NO: 46066 - DNA, 120 bp, synthetic construct
  source 1..120: mol_type = other DNA
tgggtgcttgtctgcttgtgcctttaatgttcagcacttgagatattttcacgtttagcaccttcacgtttagcagtactcctcattagaggaaaatgggatgatgtgggcagagtcacc

SEQ ID NO: 46067 - DNA, 120 bp, synthetic construct
  source 1..120: mol_type = other DNA
cccaccaagccagtcacccaccactgcacattgagaatctgctgctctgtgaatgaaattggcctggggttaatgagtggtgaatgtgtgtcagtgtttggtatttgcagcaggagctct

SEQ ID NO: 46068 - DNA, 120 bp, synthetic construct
  source 1..120: mol_type = other DNA
gatgtcatttccccagtggtgtgtgtgagagagcaagcagcactaagaaaagccactgctgagagttcacagtccttgcttcagtgttgtcttacgctcggggtgccttaaagggcttac

SEQ ID NO: 46069 - DNA, 120 bp, synthetic construct; identical to SEQ ID NO: 12978
  source 1..120: mol_type = other DNA

SEQ ID NO: 46070 - DNA, 120 bp, synthetic construct
  source 1..120: mol_type = other DNA
atgagccactgaggggtggggctgggattggaaccgaagctggctgcccttcagcccccagggtcctgctggggagatgtacccagggggtcctgtgctgggagagtggaagcaggggtg

SEQ ID NO: 46071 - DNA, 120 bp, synthetic construct
  source 1..120: mol_type = other DNA
aggggtcagcaatctgggttctagcactgagaggggcaaaacgtgggtttgtaggggagagagggtgacccccagtgagggtaagaaagataagctccagtgagctcttctcaccctggg

SEQ ID NO: 46072 - DNA, 120 bp, synthetic construct
  source 1..120: mol_type = other DNA
tctgggacagaaaggggtcaaaacaccctttttcattgttaagattagataatttgagagccaaaacttcttgcagggtgcctggtaccaagtaggccctctctaaataaataaatgata

SEQ ID NO: 46073 - DNA, 120 bp, synthetic construct; identical to SEQ ID NO: 12979
  source 1..120: mol_type = other DNA

SEQ ID NO: 46074 - DNA, 120 bp, synthetic construct
  source 1..120: mol_type = other DNA
agatgccagaagcattgccctgccttggcctgttggtggtggggtatgtgtgtgtgttttcatcgtattataaaaacgtgaaacatttgaattacgggcaagtggtattctaccagattt

SEQ ID NO: 46075 - DNA, 120 bp, synthetic construct
  source 1..120: mol_type = other DNA
ctcccgtttcacaggtgtttactctcttttaaattggtgtgtgtccttcccagctagaattttgtagtgtattatttgtaaagccaaataaccccactgcaatgtgtttgaaccaccaaa

SEQ ID NO: 46076 - DNA, 120 bp, synthetic construct
  source 1..120: mol_type = other DNA
tttgacttaaaacttggaactttcaaccctgcataattgcagatacattaaagattgtgccatcttgagctcccagggtcatctgaacctttcatgtgaggaaacacatcccagagtcag

SEQ ID NO: 46077 - DNA, 120 bp, synthetic construct
  source 1..120: mol_type = other DNA
cttcagcctcctgagtagctggtattacaggcgtgcaccaccacacctggctaatttttgtattttttagtagagacagggtttcgccatgttggccaggctggtctcgaactcctgacc

SEQ ID NO: 46078 - DNA, 120 bp, synthetic construct; identical to SEQ ID NO: 12980
  source 1..120: mol_type = other DNA

SEQ ID NO: 46079 - DNA, 120 bp, synthetic construct
  source 1..120: mol_type = other DNA
tccccaaggtggttagaggccatcacctgcctgaggtcagctcaatgggcagggctgggcatctcctggtggtctacccaccatgccagttcatcaggctggggtctgacctctttctgg

SEQ ID NO: 46080 - DNA, 120 bp, synthetic construct
  source 1..120: mol_type = other DNA
ttttgaccacttttctgaaaaaggacaagggtgtttttttgttttgtcattttttttcccagtagatgttcctatttggttcacagatataaacacttgaaccaggtgatatcagcactg

SEQ ID NO: 46081 - DNA, 120 bp, synthetic construct; identical to SEQ ID NO: 12981
  source 1..120: mol_type = other DNA

SEQ ID NO: 46082 - DNA, 120 bp, synthetic construct
  source 1..120: mol_type = other DNA
aatgtagcaaggagtgtgctttttcagtttgcttattattttcaacaaatgtttttggtgggtaattttacctttgttgatcaccagctttgtttggggtgcatcatttctctcaagccg

SEQ ID NO: 46083 - DNA, 120 bp, synthetic construct
  source 1..120: mol_type = other DNA
cttctgtctgggtgttgccagggctcttctgttagcgacagagaaaataggaggtactagaattcggacttctaggaagggctgtattgtccttatcatcagaatccctccctcccgtcc

SEQ ID NO: 46084 - DNA, 120 bp, synthetic construct
  source 1..120: mol_type = other DNA
tgtcttttctctttcttgaactcgtctccccacccgtccacagggttgctggccagagatctgtcagagtttctccgggcttctctttctctgggtggggatgtggactcttaggatgtc

SEQ ID NO: 46085 - DNA, 120 bp, synthetic construct
  source 1..120: mol_type = other DNA
caggatggagcttgcttgccatcgcagtggatttgcggaagagggttccagagtgtggggagagcgtgctggggaggggagctatttgttcctttccagtcatcgctgtactgagcggtt

SEQ ID NO: 46086 - DNA, 120 bp, synthetic construct; identical to SEQ ID NO: 12982
  source 1..120: mol_type = other DNA

SEQ ID NO: 46087 - DNA, 120 bp, synthetic construct
  source 1..120: mol_type = other DNA
cagctgagaatttataaatacccctcacctcctcccctccctggaagatgtgaaaacaccatcccattaaccctccaaagcagttggttgacttgatcagggaagatatgaaatataatt

SEQ ID NO: 46088 - DNA, 120 bp, synthetic construct
  source 1..120: mol_type = other DNA
tcaaagcaaaagcccttcactgtgcctatttgcaaaattacctttgagagactgaagtgtcggaaatgcatttagacacagattgtgccttatattagctctccgttgccccataaaatg

SEQ ID NO: 46089 - DNA, 120 bp, synthetic construct
  source 1..120: mol_type = other DNA
tggatcttgaggattttaagaaccagatttcttctctttgctcacattaggggaaaaaaaataaacctcagatgccccgtgatatctcgttgcgtcaggttttcctataaaatgtcaaga

SEQ ID NO: 46090 - DNA, 120 bp, synthetic construct; identical to SEQ ID NO: 12983
  source 1..120: mol_type = other DNA

SEQ ID NO: 46091 - DNA, 120 bp, synthetic construct
  source 1..120: mol_type = other DNA
taaaaggccctgggaaatgttaactgatcaaaaatgctgggtaagtagaattattatttcaccctgaccaacttcagtcagattagcatatctgctgtcaccaggtatggcacaggcatg

SEQ ID NO: 46092 - DNA, 120 bp, synthetic construct
  source 1..120: mol_type = other DNA
agcctgaccaacatgacgaaaccccgtctctactaaaaaaaaatacagaattagccaggtgtggtggcacatgcctgtaatcctagctacttgggaggctgaggcaggagagtcacttga

SEQ ID NO: 46093 - DNA, 120 bp, synthetic construct; identical to SEQ ID NO: 12984
  source 1..120: mol_type = other DNA

SEQ ID NO: 46094 - DNA, 120 bp, synthetic construct
  source 1..120: mol_type = other DNA
aacttctctttattccaccgttctctctttacttctgcctaccttagcagcatgctgcagaataaactctgctaggaggaagtttgaaatctccaggctgagaaactatgcagagagcaa

SEQ ID NO: 46095 - DNA, 120 bp, synthetic construct
  source 1..120: mol_type = other DNA
caccaggtcaacacatgcgaacccaactgtcctgaacaaacgggggtttgtggttgcgctacaaaacccaggcttcagtctcttcgagttctgttttgatttggaaggagtgacgccttc

SEQ ID NO: 46096 - DNA, 120 bp, synthetic construct
  source 1..120: mol_type = other DNA
gggggcattggcaagtcggcatcagacagtagcaacttgttgccagatcttctgagtttttttcaagagaagccaaaaatcaagatttacacacaaaatctcccagtttgtaaaagttgg

SEQ ID NO: 46097 - DNA, 120 bp, synthetic construct; identical to SEQ ID NO: 12985
  source 1..120: mol_type = other DNA

SEQ ID NO: 46098 - DNA, 120 bp, synthetic construct
  source 1..120: mol_type = other DNA
ttccatgcttctccctgagattatggccaagatggatgcagtgggaggaacttcagtgggggaatgttggggaaagacctgggtccgattctcagaccctgtaaagttcattgtatttca

SEQ ID NO: 46099 - DNA, 120 bp, synthetic construct
  source 1..120: mol_type = other DNA
attcagctccatacatggcagaactttctaacagagctctgtaccttgtggttgttggactagatgatctgtgagctgtttttcattacctggaaagtccgataccttgagtccaccccc

SEQ ID NO: 46100 - DNA, 120 bp, synthetic construct
  source 1..120: mol_type = other DNA
cagtttgcctggggatgaggtggggtggtatgggggaataaaggcttctctaatgctgtgaggtgtcattcatgttttccattctcctgctctccgaatttaaattagggtcaatcatac

SEQ ID NO: 46101 - DNA, 120 bp, synthetic construct; identical to SEQ ID NO: 12986
  source 1..120: mol_type = other DNA

SEQ ID NO: 46102 - DNA, 120 bp, synthetic construct
  source 1..120: mol_type = other DNA
cggggctttgttggcaataaactaggtctttctgcagaacttttgaggacaaatcaccaatgggttggaaagcatttccttcaggaatggcgaaactctatttttcaccttgttaatgct

SEQ ID NO: 46103 - DNA, 120 bp, synthetic construct
  source 1..120: mol_type = other DNA
tctcaggcttctggatagacagagaatggacatctggtttgttttggaatgacaggctagactagaggcgtccagaggcctggtaacggcagaggctgctggcatcttaagacattcaaa

SEQ ID NO: 46104 - DNA, 120 bp, synthetic construct
  source 1..120: mol_type = other DNA
ccatgtagagctggaacacagggacatgatcccatgtgcaggagacagctccagcctctgcatacccgtcggctcactcctgggttggaacatcctcctcattttctctggcatgtcctt

SEQ ID NO: 46105 - DNA, 120 bp, synthetic construct; identical to SEQ ID NO: 12987
  source 1..120: mol_type = other DNA

SEQ ID NO: 46106 - DNA, 120 bp, synthetic construct
  source 1..120: mol_type = other DNA
gaacatattaaggcagctcattaatgttttagtatttagagtttgtcatacagtgagcaaaggcagacacctttgacacagtctattggagcaaaatatgtctaggcttttgcttgcttt

SEQ ID NO: 46107 - DNA, 120 bp, synthetic construct
  source 1..120: mol_type = other DNA
ctcccaggttcaagtgattctcatgcctcagcctcccaagtagctgggactacaggcatacaccactacgcctggctcatttttgtctttttagtagaaaccattttcaccatgttgacc

SEQ ID NO: 46108 - DNA, 120 bp, synthetic construct
  source 1..120: mol_type = other DNA
gatggagtctcgcactgtcgcctgggctagagtgcatagtgtgatctcggctcctgccgccacacacagatcataatgtgatctgcaacctccgcctcctgggttcacatgattctcctg

SEQ ID NO: 46109 - DNA, 120 bp, synthetic construct; identical to SEQ ID NO: 12988
  source 1..120: mol_type = other DNA

SEQ ID NO: 46110 - DNA, 120 bp, synthetic construct
  source 1..120: mol_type = other DNA
tcatactatatgtatgacttttgtctgattttttttaatgcagcataattattttcagattcatccatctttttgcatgttttagtagtgactttttgtggttgggtgatatttcttttt

SEQ ID NO: 46111 - DNA, 120 bp, synthetic construct
  source 1..120: mol_type = other DNA
tttggccctaaaatccacgtaattaatgatttaatgagttaaatagtgatttaactatataaatatagtttgctaccatgtttgctatgtgccaggcttgatggtgcttgtagggcacag

SEQ ID NO: 46112 - DNA, 120 bp, synthetic construct
  source 1..120: mol_type = other DNA
tgatagagctgccgtgttcttagacacaaagacagctgttatgctgtctttgcaaaaatgttgaggtcttgctttccacaggcttgtggcctgatgcacgtttccagttttgcacaatgt

SEQ ID NO: 46113 - DNA, 120 bp, synthetic construct
  source 1..120: mol_type = other DNA
ttctctgattcctgctcagaggattgcgtgatgggggctggagtgcaggcaggaagttagccttgtggattccctcatcctcacaaagccaggcgcacagggaggggttgggggtagggg

SEQ ID NO: 46114 - DNA, 120 bp, synthetic construct; identical to SEQ ID NO: 12989
  source 1..120: mol_type = other DNA

SEQ ID NO: 46115 - DNA, 120 bp, synthetic construct
  source 1..120: mol_type = other DNA
tttcacaatccacgaaggggggagtttgaagaaggcttggcaaaatttgatagacctgggaaagagattgttaatctctcattctgtgctcaaggatgctgtgccatttaaaaaacaaaa

SEQ ID NO: 46116 - DNA, 120 bp, synthetic construct
  source 1..120: mol_type = other DNA
cttgcacaagcttgttccagtaataacgttaaaattcaggagtggatgttcggcaacatcattgggcaggattttctggttcgtgaatgaaaggttatgggtgacactgtatgtcagtgt

SEQ ID NO: 46117 - DNA, 120 bp, synthetic construct
  source 1..120: mol_type = other DNA
gcccaggtggtaaggagaggagccagctttccaatgcaagtcccaatttccagtctcctgttgtttccaccgtgtctccctgcaaggcggctggggcacgcagaacaacagcttgacaca

SEQ ID NO: 46118 - DNA, 120 bp, synthetic construct; identical to SEQ ID NO: 5592
  source 1..120: mol_type = other DNA

SEQ ID NO: 46119 - DNA, 120 bp, synthetic construct
  source 1..120: mol_type = other DNA
acatttacatataccaaggggtgcccagccctgttcttcctgcacatagaatcttaaatgtttcctagattgagccattaatcttcgattttttgcaaaggaagttaagacagagatacc

SEQ ID NO: 46120 - DNA, 120 bp, synthetic construct
  source 1..120: mol_type = other DNA
acacatcatttgaataaaatgtgacagcctgccagagaccagactttgaaggttatagacccagggcacgtggccagagcagctgtcagtggaggtgcggcctagagcgggtagtgtgga

SEQ ID NO: 46121 - DNA, 120 bp, synthetic construct; identical to SEQ ID NO: 12991
  source 1..120: mol_type = other DNA

SEQ ID NO: 46122 - DNA, 120 bp, synthetic construct
  source 1..120: mol_type = other DNA
accagggaaactcggaagtagcggggttgatttgggagctagatggggcctgacatatgaagctgctacctggttacagccaggcagagttgaaagggtgtcctttggcggggtgagaag

SEQ ID NO: 46123 - DNA, 120 bp, synthetic construct
  source 1..120: mol_type = other DNA
ctcttgtttaacgttcccctccattgttaccaaacaatccaggccccagtgatgtgtggtgttctgagagtagaggagggaagagagagagagagccagaactgtttacagagcccggga

SEQ ID NO: 46124 - DNA, 120 bp, synthetic construct
  source 1..120: mol_type = other DNA
cactctgttctttctgctcttgatggaagctcctgccctttattgtggtgttagcttctttgttcagttacaccgacagctgagttttctatttggggccatagttttggggtcatgatt

SEQ ID NO: 46125 - DNA, 120 bp, synthetic construct
  source 1..120: mol_type = other DNA
tcctcacgtgttcagggggaaaagaaggtggtggtgaaatgccccccaccagctccaaagtcctgtggttctgaggctggaatattctgcaaaaggacatttgcacaccacccttccact

SEQ ID NO: 46126 - DNA, 120 bp, synthetic construct; identical to SEQ ID NO: 12992
  source 1..120: mol_type = other DNA

SEQ ID NO: 46127 - DNA, 120 bp, synthetic construct
  source 1..120: mol_type = other DNA
catcctttctgtttgttgctccatgtacagtagggaagaggaatttttgttggtagtccacatttttgattacttatttgctctgctgctatattatgattcaggttttctccaaggccc

SEQ ID NO: 46128 - DNA, 120 bp, synthetic construct
  source 1..120: mol_type = other DNA
tttcacaggtatttggaatgctagaaggtactagaaggtgagaagacactagagatccgttgaacccatcattttttaaatgagataatccatacctaaagactcctccatgagtcggta

SEQ ID NO: 46129 - DNA, 120 bp, synthetic construct; identical to SEQ ID NO: 12993
  source 1..120: mol_type = other DNA

SEQ ID NO: 46130 - DNA, 120 bp, synthetic construct
  source 1..120: mol_type = other DNA
ttcccctgctgtttttaattgcacctctcaagaccagctgattgcttaaagaacatttctggtattgggcccatggcagtaatgtgcgtctgtggatccctttgctatgaggcttgactt

SEQ ID NO: 46131 - DNA, 120 bp, synthetic construct
  source 1..120: mol_type = other DNA
ttgcttatttcctacgtcttctgaaaggtactatgaagcttaccagttgctgatgcacgctatcagctaataattccattaccattactattttctgagcaaatgtgacctgcaagcccc

SEQ ID NO: 46132 - DNA, 120 bp, synthetic construct
  source 1..120: mol_type = other DNA
tcagaaacacacagaagtcacttcatcataccaggcctttggtgctaaatgatgatgaatttgaagagtgtgggacagtggggatggtggactgtaagagttcgaggaggggaggatgga

SEQ ID NO: 46133 - DNA, 120 bp, synthetic construct; identical to SEQ ID NO: 12994
  source 1..120: mol_type = other DNA

SEQ ID NO: 46134 - DNA, 120 bp, synthetic construct
  source 1..120: mol_type = other DNA
attgtagctgttttagggatgcagctttcagacaagggccacttagttgatgaggccggcttaatcgaggagggctgttgccaccctgacattgttaagtgtgggcctggcttctctgaa

SEQ ID NO: 46135 - DNA, 120 bp, synthetic construct
  source 1..120: mol_type = other DNA
gtacccttagacagaaaggaatgctaattggccacttaactgtcctcagggtacagatgccagaatatacagggcacccattctttgttaccatttgggatggaaactgcttatataagc

SEQ ID NO: 46136 - DNA, 120 bp, synthetic construct
  source 1..120: mol_type = other DNA
actttttcaagaaacatggtcatttcccacccttcctttacttccagctccccattcatacccaacagtggctaactgaaaggtttgcaaatcctgaaggctttggggcttcttttaaaa

SEQ ID NO: 46137 - DNA, 120 bp, synthetic construct
  source 1..120: mol_type = other DNA
ctgcctctccgcgtgaatgtcactgagtcgcccggttgacccgttgcatgttatgcagcacttgtgacattgttttatctctctagccggtgactcataattaaggaagtcaaaactgtg

SEQ ID NO: 46138 - DNA, 120 bp, synthetic construct; identical to SEQ ID NO: 12995
  source 1..120: mol_type = other DNA

SEQ ID NO: 46139 - DNA, 120 bp, synthetic construct
  source 1..120: mol_type = other DNA
ctgggaaaagagggcagagagaggatacccagacctaatggcttctgctctgtggaagaaagtgaaaaacagaatgactaagagtcctgtaataagaattgtttgttttgtgaagttgaa

SEQ ID NO: 46140 - DNA, 120 bp, synthetic construct
  source 1..120: mol_type = other DNA
agagtcctgtaataagaattgtttgttttgtgaagttgaactaatagtgaggtttgccggcagataagacttgagaaattgcagttgtcaggggaggggacttttccatgtcctgctttt

SEQ ID NO: 46141 - DNA, 120 bp, synthetic construct
  source 1..120: mol_type = other DNA
tcggctcactgcaacctccacctcccaggttcaagtgattctcttgcctcagcctccccagtagctgggattacaggtgcccaccaccatgcctggctaatttttttgtatttttagtag

SEQ ID NO: 46142 - DNA, 120 bp, synthetic construct; identical to SEQ ID NO: 12996
  source 1..120: mol_type = other DNA

SEQ ID NO: 46143 - DNA, 120 bp, synthetic construct
  source 1..120: mol_type = other DNA
ctctctgttgcccaggctggagtgcagtggcacaatctcggctcactgcaacctccacctcctgggttcaagcgattctcctgcctcagcctcctgagtagctgggactacaggcttgcg

SEQ ID NO: 46144 - DNA, 120 bp, synthetic construct
  source 1..120: mol_type = other DNA
ccttgtaatccacccacctcagcctcgcaaagtgctgggattacaagcatgagccattgcacccaggctattttccctttttcctttccctctaaagttagagtttttgaaaaatatttg

SEQ ID NO: 46145 - DNA, 120 bp, synthetic construct
  source 1..120: mol_type = other DNA
tttatcatttctttgggttggaagcattcaatatcctccttctatttgaaactatgtaatatatgaatgttactatgtatgttactatataagcattcaatattctcctatttgaaacta

SEQ ID NO: 46146 - DNA, 120 bp, synthetic construct
  source 1..120: mol_type = other DNA
agtataatcatcttacagtggtttaggacactagaactgatttttcctctttagctgtaattttgagacctttaacaaatttctccccatccctctgttccctttacacttttcagcctc

SEQ ID NO: 46147 - DNA, 120 bp, synthetic construct; identical to SEQ ID NO: 12997
  source 1..120: mol_type = other DNA

SEQ ID NO: 46148 - DNA, 120 bp, synthetic construct
  source 1..120: mol_type = other DNA
ttttaatgaaagctgaggtgaagtccactgttgccttaagcccatcagaacgttgccaagggctgtgagtatgctgaatgggtccatgagtgatctcttaaaaaaacataaaccattgtc

SEQ ID NO: 46149 - DNA, 120 bp, synthetic construct
  source 1..120: mol_type = other DNA
cacagaccaacccagatctttgtagcatcttttatttgtgacttgaaagttctatgatcctgctgacactcaagaaaaagcaatccccatcaacttggtgcttggagaaaaaagtttgtg

SEQ ID NO: 46150 - DNA, 120 bp, synthetic construct; identical to SEQ ID NO: 12998
  source 1..120: mol_type = other DNA

SEQ ID NO: 46151 - DNA, 120 bp, synthetic construct
  source 1..120: mol_type = other DNA
cagcctgcaggatccctttatccagtgagttactgagtgagaagtgctgggtaaacgcttgctctgaggtgtaaattgcttctgtttggccaggtgcagtggctcacgcctgtaatccaa

SEQ ID NO: 46152 - DNA, 120 bp, synthetic construct
  source 1..120: mol_type = other DNA
atgcctgtaatcccagctacgcagaaggctgaggcaggagaatcacctgaactggaggttgcagtgagccaagatcactccgctgtactccagcctgggcaacaagagcaaaactccgtc

SEQ ID NO: 46153 - DNA, 120 bp, synthetic construct
  source 1..120: mol_type = other DNA
atttggcaatgtttagaggtattttttttcagttgtcacagctgcaggtgggtcacagctaccggcatccagtgtgagggagccagacatgctgttaagcattctatatctgtctctaca

SEQ ID NO: 46154 - DNA, 120 bp, synthetic construct; identical to SEQ ID NO: 5600
  source 1..120: mol_type = other DNA

SEQ ID NO: 46155 - DNA, 120 bp, synthetic construct
  source 1..120: mol_type = other DNA
ggataaggcaaggtgtttcttggcttccccctccaaggatctgcccaggagccttctgcaacctctgtggctcctgcccaggttgccccatctgcctggggcacttgtcatggacctgag

SEQ ID NO: 46156 - DNA, 120 bp, synthetic construct
  source 1..120: mol_type = other DNA
ttggtttccccctagactggcagcattcatgcccaaagcactagatattgtccatttataagttcagatgaaaattgagttgttcttggtggaaatgttttagtgactggtatcaagggt

SEQ ID NO: 46157 - DNA, 120 bp, synthetic construct
  source 1..120: mol_type = other DNA
tggtcactgtggtagaacttgcagtgagacctcaattatctagaacctggccaaccacatacttgacctcactagatgtctttgtggcaccaaatgaaaagaacaggctaatgttggaaa

SEQ ID NO: 46158 - DNA, 120 bp, synthetic construct
  source 1..120: mol_type = other DNA
aaatgccagggtgtagtatattcagtgtacatcctgagttctgtttgtaactctttgattccaagcttcagaaaattacaattataggctaattttttatactactactaatcgtaatat

SEQ ID NO: 46159 - DNA, 120 bp, synthetic construct; identical to SEQ ID NO: 13000
  source 1..120: mol_type = other DNA

SEQ ID NO: 46160 - DNA, 120 bp, synthetic construct
  source 1..120: mol_type = other DNA
tcctcaagggtcagctgtcacagttctccaaagtgagttttcaggcagacatagagttagccagtgtcgcctcaccaggacattttgttttctgaacattgggcctctgtggtttgtcac

SEQ ID NO: 46161 - DNA, 120 bp, synthetic construct
  source 1..120: mol_type = other DNA
ttggcagatggtgttttcagggctttcttatttgttcctttattaagcagttgtcctggggcggtccattgcatggaagaaataaaggcatgttctaatacttgcgtattaaagagcagc

SEQ ID NO: 46162 - DNA, 120 bp, synthetic construct; identical to SEQ ID NO: 13001
  source 1..120: mol_type = other DNA

SEQ ID NO: 46163 - DNA, 120 bp, synthetic construct
  source 1..120: mol_type = other DNA
cgggtgtggtggtgcgcacctataatcccagctactcaggaggctgaggcaggagaatcgcttgaacccgggggcagaggttgcagtgagccaagatcgtgccattgcactccagcttgg

SEQ ID NO: 46164 - DNA, 120 bp, synthetic construct
  source 1..120: mol_type = other DNA
actctgagggcagatgggcatatatctgctgcagcatgtatgttctgggaacatgtgtgtatgtaccagtgtgggttcagggcattcattggcaaccccaagatctaaaacagctccttt

SEQ ID NO: 46165 - DNA, 120 bp, synthetic construct
  source 1..120: mol_type = other DNA
aatattagaggagtatttgggggtaagttcacattttatgcaaattgactctaaggcctctaggtaggttgtccttctgaaatggttaagtcttatccagcttcaagatctgggcatagg

SEQ ID NO: 46166 - DNA, 120 bp, synthetic construct; identical to SEQ ID NO: 13002
  source 1..120: mol_type = other DNA

SEQ ID NO: 46167 - DNA, 120 bp, synthetic construct
  source 1..120: mol_type = other DNA
ctgggggtgggcgggtgggagagggaagtcccatgatgatggcagaggtacgagaggacaggcagagacatacaatggcagtctgtcccttctgctcacattccactggccaatgcaagt

SEQ ID NO: 46168 - DNA, 120 bp, synthetic construct
  source 1..120: mol_type = other DNA
agtcatcaagtggccaacacagtacctggcacatagcagcagtcacttccacctctgttgttactattactactcaatgggcaagttgaaaaagaaagtttgtctgaaagtgactagaaa

SEQ ID NO: 46169 - DNA, 120 bp, synthetic construct
  source 1..120: mol_type = other DNA
gatatggtaggtattcaataactatgctgtgattgatgaatggtcacttttaataatggtgatgcagcatgggatgacagaaaaagcgctgttcatccaacctgcccctatctcccatgt

SEQ ID NO: 46170 - DNA, 120 bp, synthetic construct; identical to SEQ ID NO: 13003
  source 1..120: mol_type = other DNA

SEQ ID NO: 46171 - DNA, 120 bp, synthetic construct
  source 1..120: mol_type = other DNA
accattttgggacactttacgggtcccgcttgaagccaatgggaggaaacctaatttcctgccacaggaaattgttctgctagggaagaatatatttaaggattaaaaccttctgtcaga

SEQ ID NO: 46172 - DNA, 120 bp, synthetic construct
  source 1..120: mol_type = other DNA
tactcctaatgctagcagctggtcttgggctgggaggaagggctgggccagggagaagagtgggtcataaatagaccattttctgcaaccaagtatatttatggtaacatcagctcagaa

SEQ ID NO: 46173 - DNA, 120 bp, synthetic construct
  source 1..120: mol_type = other DNA
ttaagacttatttattggatttacttaatgggcccagtgccctataaggcctgggagagtgtgttctggacacatcagctatattaaatccagcagctgaaactcccaattcactcttat

SEQ ID NO: 46174 - DNA, 120 bp, synthetic construct
  source 1..120: mol_type = other DNA
tgaatgagatgtcttccctgtcgtgagtttgggaattgcatggcacagagaagcaggggcatggtccagatgacttttagaaaatactgccaagccagactggcggtcgtgtgctcacaa

SEQ ID NO: 46175 - DNA, 120 bp, synthetic construct; identical to SEQ ID NO: 13004
  source 1..120: mol_type = other DNA

SEQ ID NO: 46176 - DNA, 120 bp, synthetic construct
  source 1..120: mol_type = other DNA
tcatagtaagcaggcagtaatagttacatgacaatactgacaatagattcctgccactttctggaatatctttctgggtagtgtctgttcaaatcatatatctctttttttaaaaaaatt

SEQ ID NO: 46177 - DNA, 120 bp, synthetic construct
  source 1..120: mol_type = other DNA
tgctctggtgcaatcacagctcactgcagcctcaacctgctgggttcaagcaatcctcccatctcagcctcccgagttgctgggactataggcatgggtcaccacgcccagctaattttt

SEQ ID NO: 46178 - DNA, 120 bp, synthetic construct
  source 1..120: mol_type = other DNA
gtccagtcagtgttttagatgaaaaatattaagaccaagacactaagtgatttttttcaactttgtacagttagcaagtactgaaccattatttaaactgaggcttattaagtccattgc

SEQ ID NO: 46179 - DNA, 120 bp, synthetic construct; identical to SEQ ID NO: 13005
  source 1..120: mol_type = other DNA

SEQ ID NO: 46180 - DNA, 120 bp, synthetic construct
  source 1..120: mol_type = other DNA
tttcacgcagcatcattaatttagattcattcatagcgttgcatgtatcagtagttgatccttttttgttactgagttgtatttctttgtatggatatgttatggctcattcatctgtta

SEQ ID NO: 46181 - DNA, 120 bp, synthetic construct
  source 1..120: mol_type = other DNA
taaatactttgaagtggaatggtggatcatatggtaggcttatggttttttagctttttaagaaacttccaaatgtttgagggatgaatatcccaattacccagatttgatcattacaca

SEQ ID NO: 46182 - DNA, 120 bp, synthetic construct; identical to SEQ ID NO: 13006
  source 1..120: mol_type = other DNA

SEQ ID NO: 46183 - DNA, 120 bp, synthetic construct
  source 1..120: mol_type = other DNA
tagtgtctgttcaaatcatgtatctcttttttaaaagattgaattgttggctgggcgcagtggctcacgcctgtaatcccagtactttgggaggccgaggcaggcggatcacgaggtcag

SEQ ID NO: 46184 - DNA, 120 bp, synthetic construct
  source 1..120: mol_type = other DNA
atggcgtgaccccaggaggtggagcttgcagtaagccaaggttgtgccactgcactccagcctgggcgacagagcgagactccatctcaaaaaaaaaaaaaaaaaaaaaaaaaaaaaaaa

SEQ ID NO: 46185 - DNA, 120 bp, synthetic construct
  source 1..120: mol_type = other DNA
taacagtgtctttcaaagaccagaggcttaaatcttgatgcggtctgattttttttttattattattaagtgctttttggtgtggtatctgagaaatcattgtctatcccaaaaagtcac

SEQ ID NO: 46186 - DNA, 120 bp, synthetic construct; identical to SEQ ID NO: 13007
  source 1..120: mol_type = other DNA

SEQ ID NO: 46187 - DNA, 120 bp, synthetic construct
  source 1..120: mol_type = other DNA
ccacttctatcacctagatggagcttacctccacagccccattctcccccgctgctggcatgagcttttctccaaggccttctcttgcagaggaggctatgatgtccagctggccctttt

SEQ ID NO: 46188 - DNA, 120 bp, synthetic construct
  source 1..120: mol_type = other DNA
ccactctcccttttactcctgttcaacctccagctcaccctacttatccagggctgggtttggggagtatctgctgtgatagagaataataacgctaatttgtgggtgtttatgaagcac

SEQ ID NO: 46189 - DNA, 120 bp, synthetic construct
  source 1..120: mol_type = other DNA
aaccctcctttaccccaggtcttatggctccacatccgccagtcctccttttatacctcagggacgagtcccaggctgtcttctcgatctgcctggtaattactgtttttcagctgtagg

SEQ ID NO: 46190 - DNA, 120 bp, synthetic construct
  source 1..120: mol_type = other DNA
cccttcccaggccagtggcttggagagtgtgattggatccctctgtttctctctttggttggtgctgttggtggcatctggccagcccttccttcacagagtgcccatgaattctctgta

SEQ ID NO: 46191 - DNA, 120 bp, synthetic construct; identical to SEQ ID NO: 13008
  source 1..120: mol_type = other DNA

SEQ ID NO: 46192 - DNA, 120 bp, synthetic construct
  source 1..120: mol_type = other DNA
agagtacccctgcctgcctccccggcctcgtctcaagccagctctctctcatgatcccctctccagtccttctggccttcattctgttcttccgacctcaccatgttttccactttccac

SEQ ID NO: 46193 - DNA, 120 bp, synthetic construct
  source 1..120: mol_type = other DNA
ctgtccagtccttcagcaaagtggggtgccatggtcatacactcttggggttccttgttattttcgttcaggacactttcattgtgtgtaattgtaggtttctgtgatgatgatgatgat

SEQ ID NO: 46194 - DNA, 120 bp, synthetic construct
  source 1..120: mol_type = other DNA
cctgcctcagcctcctgagtagctgggattacaggcgcccgccaccatgcctggctgatttttgtacttttagtagagacagggtttcaccatgttggccaggctggttttgaactcctg

SEQ ID NO: 46195 - DNA, 120 bp, synthetic construct; identical to SEQ ID NO: 13009
  source 1..120: mol_type = other DNA

SEQ ID NO: 46196 - DNA, 120 bp, synthetic construct
  source 1..120: mol_type = other DNA
tctcatcatccagatcacctggggatttcacaaagggaaagattctgatttagtaggttggggtaggcgctgagaatgtacatttttaacaaacttccctgaacctctgctgctggtcag

SEQ ID NO: 46197 - DNA, 120 bp, synthetic construct; identical to SEQ ID NO: 13010
  source 1..120: mol_type = other DNA

SEQ ID NO: 46198 - DNA, 120 bp, synthetic construct
  source 1..120: mol_type = other DNA
cacacagtgaaaccacgtctctactaaaaatacaaaaacaaaattagctgggcgtagtggcgggtgcctgtggtcccagctactcaggaggctgaggcgggagaatggcatgaacccggg

SEQ ID NO: 46199 - DNA, 120 bp, synthetic construct
  source 1..120: mol_type = other DNA
tttctttttttcccctgactttctaatgtgcaagggaagacctgagtgaatgaggggagacagcctttgtactttgtcactcttctttggatcactgtagtcctcatatctgtgcctaaa

SEQ ID NO: 46200 - DNA, 120 bp, synthetic construct
  source 1..120: mol_type = other DNA
tcccatggaatgccactccctgaagagcagtacaaagttggggaacccaccggggactggtgggtgaggcccgctctgccagctgggagtcctcacggggcctttgttgtcttctcctga

SEQ ID NO: 46201 - DNA, 120 bp, synthetic construct; identical to SEQ ID NO: 13011
  source 1..120: mol_type = other DNA

SEQ ID NO: 46202 - DNA, 120 bp, synthetic construct
  source 1..120: mol_type = other DNA
caccaggtatgctgcctggcctgcctgtggggacagcaggtgccaggggtcatcacctctccccggctccccatccccccgagggtctgcggtgcacttgggggtgcggggactttggtg

SEQ ID NO: 46203 - DNA, 120 bp, synthetic construct
  source 1..120: mol_type = other DNA
ccattccatccccgaaaacactaacttccccgcaggcatcgagccccagagcaatattccaggtaggcacgtgggcggcacaggctggcctgggaggcaggggcagcggtcagccccgac

SEQ ID NO: 46204 - DNA, 120 bp, synthetic construct
  source 1..120: mol_type = other DNA
gacctcagctcccccctcactagtgatgcttttcttggcatagaggagcagcgtgacccttccgcccggccttggtgcagtcatttattttggaagcggaaatagcaacactgtttctct

SEQ ID NO: 46205 - DNA, 120 bp, synthetic construct
  source 1..120: mol_type = other DNA
catcaggcctcggtgaggggctccaacctgggtgggaattgaagtgactttgagttttcactctgcagggagaaatgggctttgccgtcaaagactgcaaatgtttttagaagcccctca

SEQ ID NO: 46206 - DNA, 120 bp, synthetic construct; identical to SEQ ID NO: 13012
  source 1..120: mol_type = other DNA

SEQ ID NO: 46207 - DNA, 120 bp, synthetic construct
  source 1..120: mol_type = other DNA
cagggtctgggggaggtttcagagaaatagatcacactgtctttgccgtcattgaacttgcaacctaactgctgagtgaggacacgtcccttagagacaacaaataataacacctggtct

SEQ ID NO: 46208 - DNA, 120 bp, synthetic construct
  source 1..120: mol_type = other DNA
tcaccttgaaggaccaggataagttagcctggcagaggctctaggagtacacatttcagacttgggagttgatccggtcctgcgtgagcaaaggcagttatgatccaagcgggagtcaga

SEQ ID NO: 46209 - DNA, 120 bp, synthetic construct; identical to SEQ ID NO: 13013
  source 1..120: mol_type = other DNA

SEQ ID NO: 46210 - DNA, 120 bp, synthetic construct
  source 1..120: mol_type = other DNA
tccagtatttgtagagcaaccgcgatgtgcaaggggcagggcatagaagagggtccgagctgctcacagatgatgggggagattgacaggacagtcagtagtcactgggccatctcgtgt

SEQ ID NO: 46211 - DNA, 120 bp, synthetic construct
  source 1..120: mol_type = other DNA
aagtgttagccaagctgttagagtgggcaaggggtgtgccaggcagagtcatgggggttgggcaggacagcctggtgcattctggggacagtaagagctcagtgtgtctggagtccagag

SEQ ID NO: 46212 - DNA, 120 bp, synthetic construct
  source 1..120: mol_type = other DNA
ttggcatttagtcagggctgatgggaaccgctgcaggctgtaagcagggcctgtgccttagtgagatgtcaccagcagcagggtagagagtggccttgatcacctcaagcagtcacatgg

SEQ ID NO: 46213 - DNA, 120 bp, synthetic construct; identical to SEQ ID NO: 5614
  source 1..120: mol_type = other DNA

SEQ ID NO: 46214 - DNA, 120 bp, synthetic construct
  source 1..120: mol_type = other DNA
ctcgcacacagcccagaagagattgtgcaattccttcccccacctttcccagacagagtctccctctgttgcccaggctggcgtgtagtagcgcgatctcagcttactgcaacctctgcc

SEQ ID NO: 46215 - DNA, 120 bp, synthetic construct
  source 1..120: mol_type = other DNA
taggctggtctcaaactcctgacctcaggtgatctgcccgcttcgacctcccaaagtgctgggattacaccgcacctggctgaggttgtgcaattcctgagagaccgaaagagactcgca

SEQ ID NO: 46216 - DNA, 120 bp, synthetic construct
  source 1..120: mol_type = other DNA
aagaccttcctgtatccgatgccaagtgaccgctgcaagcttgcagctattcagtgcaggcgtgggaagcaggccagcggagcagcatgtctccagctgctgtgtttcttcccactctgc

SEQ ID NO: 46217 - DNA, 120 bp, synthetic construct; identical to SEQ ID NO: 13015
  source 1..120: mol_type = other DNA

SEQ ID NO: 46218 - DNA, 120 bp, synthetic construct
  source 1..120: mol_type = other DNA
cctgccccccagggtgtggtagtgtctcgggccagagggtcacgttgttccccatgtcccttcacctacatatgcgcccttttagacttgtgagaaggccccttggacttcctaggtctt

SEQ ID NO: 46219 - DNA, 120 bp, synthetic construct
  source 1..120: mol_type = other DNA
gatgatattatcctcattttatacctgaggaaaaaattaaggctcatagaagttaaacggcttagccaaactcacgtagctgattcgtggggttgtctagaccctgtgactgattctgta

SEQ ID NO: 46220 - DNA, 120 bp, synthetic construct
  source 1..120: mol_type = other DNA
aagagattcccacaaacagcgcaaggcagcattcacttgaggccagatgctggacccagtctcaggactgatagatttcatggggtggaattagaccccatagggtggttaacaaatagt

SEQ ID NO: 46221 - DNA, 120 bp, synthetic construct
  source 1..120: mol_type = other DNA
agcctccatctcctaggctcaagtaattgtccagcctcagccttcaccacttacggcttatttttttttttttttttttctgtagagacagggtctccctatatcacccaggctggtctc

SEQ ID NO: 46222 - DNA, 120 bp, synthetic construct; identical to SEQ ID NO: 5616
  source 1..120: mol_type = other DNA

SEQ ID NO: 46223 - DNA, 120 bp, synthetic construct
  source 1..120: mol_type = other DNA
ttgagactttttcccacgtgcatcatcatcttttgcataaagtgtttgtctggttgctgagttgcagggtttctgaggcaggtttgtgagtttcctgaaattgatctttccagcacctga

SEQ ID NO: 46224 - DNA, 120 bp, synthetic construct
  source 1..120: mol_type = other DNA
aggtggtgtaagctaaagaaaaaatgtgtcacttattctagttgagaatttagcagccctgagctgggagtcttggttaggatcataaaactatctgagacctctgagatcataatcata

SEQ ID NO: 46225 - DNA, 120 bp, synthetic construct; identical to SEQ ID NO: 13017
  source 1..120: mol_type = other DNA

SEQ ID NO: 46226 - DNA, 120 bp, synthetic construct
  source 1..120: mol_type = other DNA
ctgaaggtaaggctctcccccgacccctaccatcagcccagctcagcccatcaggtttctggttacggtgatgttgaggtcaccacggaatggggaaacttgagaacagtggtggcagga

SEQ ID NO: 46227 - DNA, 120 bp, synthetic construct
  source 1..120: mol_type = other DNA
tgcagtttggtgcaaagccacggacagccatgcagactccagccccctgacatttatagacctgtttcagatatacttatttgagtgtttcatcttataattgtgtaatttttcttaaaa

SEQ ID NO: 46228 - DNA, 120 bp, synthetic construct
  source 1..120: mol_type = other DNA
acagtcctgatgtttgtgcatcaggcatatatatctctgtgccttgccactgagatcatagtgcatatctggtgttttcattctcttttctccttatgttattttgtaaacacgtttccg

SEQ ID NO: 46229 - DNA, 120 bp, synthetic construct; identical to SEQ ID NO: 13018
  source 1..120: mol_type = other DNA

SEQ ID NO: 46230 - DNA, 120 bp, synthetic construct
  source 1..120: mol_type = other DNA
tggactggtttttgtgcccatttgcttccagaccttgactgacagcgtcagatgaagaaactcatcatttggaatattaggagatgcttgaaaccctttagaacaggctgacctgggcag

SEQ ID NO: 46231 - DNA, 120 bp, synthetic construct
  source 1..120: mol_type = other DNA
caaactgaaggctagaagcgaagttaacacttgagaaattaaaggccatgatggtgaacttgactccgggctttcagcttttgagattggctgctttagatttattttctatggcattta

SEQ ID NO: 46232 - DNA, 120 bp, synthetic construct
  source 1..120: mol_type = other DNA
cagactgaaaggtggtcatttgctgtgaacttccctctagattgtgtagactaggatgaggatgatgggatgtttcttgagctctgacccaaggcagcatcctctgttgacataattctc

SEQ ID NO: 46233 - DNA, 120 bp, synthetic construct
  source 1..120: mol_type = other DNA
ggcctagttgcacctctgctgggaagatgtgaatcgggggcgagtcgcccagtgagtcagggttaggcttctgggtaagacaccgtgctgacaggcctggcttcccctctgcttcatgag

SEQ ID NO: 46234 - DNA, 120 bp, synthetic construct; identical to SEQ ID NO: 13019
  source 1..120: mol_type = other DNA

SEQ ID NO: 46235 - DNA, 120 bp, synthetic construct
  source 1..120: mol_type = other DNA
cgtttagaccacctgtccccaccttcctcacttggaggaacaaggctcagacaaggcatttgctgacttttacgttggagacgtaaaagtctgtggctgtggctcccggggggaagccct

SEQ ID NO: 46236 - DNA, 120 bp, synthetic construct
  source 1..120: mol_type = other DNA
tgggatcaataaggcaggaccaaaaatgattctaaaacaagaaggaggtgcagatgaagtactctgagggttcgagggatggagcgatgggattccaggctggccaggcgtctcctctgt

SEQ ID NO: 46237 - DNA, 120 bp, synthetic construct
  source 1..120: mol_type = other DNA
catgtccacctgtaatgcgttgtgccaggtgcccagggagaaagtccagaagagggaggaatagtatatgccaaggaggaaagtgtggatggagtggggagacatgggagaggttgtgcc

SEQ ID NO: 46238 - DNA, 120 bp, synthetic construct
  source 1..120: mol_type = other DNA
gtctcaagagggacaaggtgggaaaaggaggctgaaatggcaggtggggcactgggaaaagacccctgagtgtctgcttagcgccctcttgcctatagaataaagttgtttgtgggtttt

SEQ ID NO: 46239 - DNA, 120 bp, synthetic construct; identical to SEQ ID NO: 13020
  source 1..120: mol_type = other DNA

SEQ ID NO: 46240 - DNA, 120 bp, synthetic construct
  source 1..120: mol_type = other DNA
ttgcctgtgcttaactatgtccaggaagcagttggaaagtcaggaaagcggctggcgctggaggcgcagatttggaaaccatgaacacatgtggcagcctttcccatagcggggcctgag

SEQ ID NO: 46241 - DNA, 120 bp, synthetic construct
  source 1..120: mol_type = other DNA
gacccagccttcctcccatgcactgatcactgttcctgtacttctgtcttaccgccccattacccatccatagatctgactctggaaacaccgatgaagtttggctgaagtcatgccagt

SEQ ID NO: 46242 - DNA, 120 bp, synthetic construct
  source 1..120: mol_type = other DNA
tcagaggggaggcaagccctgaaggacagtggctacaagcgggccctgcagagatgcaaaatgagatttaagaagaggccttggatttggcatcagggtttcaagggggagcttttaggg

SEQ ID NO: 46243 - DNA, 120 bp, synthetic construct; identical to SEQ ID NO: 13021
  source 1..120: mol_type = other DNA

SEQ ID NO: 46244 - DNA, 120 bp, synthetic construct
  source 1..120: mol_type = other DNA
gggcagggactcctggttgagacctggctcagcatcctgccccaggcaggctctcggagaccctgggacctgggaccgttgtttgcagggcaggagatatgagcaggtgatgttcctgtt

SEQ ID NO: 46245 - DNA, 120 bp, synthetic construct
  source 1..120: mol_type = other DNA
tctgcctggtgagtaagttgttccctgctttaaagtgagatgattagggcggagccatgactgaggaaaataatgtaccagggagagccctgagggagcagttgagctggagttaaagga

SEQ ID NO: 46246 - DNA, 120 bp, synthetic construct; identical to SEQ ID NO: 13022
  source 1..120: mol_type = other DNA

SEQ ID NO: 46247 - DNA, 120 bp, synthetic construct
  source 1..120: mol_type = other DNA
tgcactggcctagttgcacctctgctgggaaggtgtgaatcgggggcaagttgccccgtgagtcagggttaggattctgggtgagactccacgctgacaggcccggcttcccctctgctt

SEQ ID NO: 46248 - DNA, 120 bp, synthetic construct
  source 1..120: mol_type = other DNA
tgctgctgcccaaggctcttttacaatgcagcctctggctccggtcttccccacacttgtgaaatcacaggcagggtcttccccacacttgtgaaatcacaggcaggcaacataatgaca

SEQ ID NO: 46249 - DNA, 120 bp, synthetic construct
  source 1..120: mol_type = other DNA
ttggtttggtattttagtccgcagatacataggttggaattagtaccctgggtgctgggacacagctggcgtgggctcacagagacctcatcctctagcataggagactcaggtacacag

SEQ ID NO: 46250 - DNA, 120 bp, synthetic construct
  source 1..120: mol_type = other DNA
acccaggcaggactgagaagtggtggatgaggaacatgggaactggagtgtggaatctcctagattgaggaagagctgccttccgcaggtgaggtgggcccagcagaaaccagcccattt

SEQ ID NO: 46251 - DNA, 120 bp, synthetic construct; identical to SEQ ID NO: 13023
  source 1..120: mol_type = other DNA

SEQ ID NO: 46252 - DNA, 120 bp, synthetic construct
  source 1..120: mol_type = other DNA
tggagctggaggttcctgcgtctccaacacctctgcactgggaggagagattagcacagactcagaaatctggccaggagcagggctgtttgaagggaaggccgtgggcacgtgccatcg

SEQ ID NO: 46253 - DNA, 120 bp, synthetic construct
  source 1..120: mol_type = other DNA
atttgttggtaaatccttgaaaccagatcttaatttgcttgcttgcttgatcagttgattgattggtcaggggaggggttgccacctccccctgagagatttcttttaagatttaatgcc

SEQ ID NO: 46254 - DNA, 120 bp, synthetic construct; identical to SEQ ID NO: 13024
  source 1..120: mol_type = other DNA

SEQ ID NO: 46255 - DNA, 120 bp, synthetic construct
  source 1..120: mol_type = other DNA
agtgattctcctgcctcagcctccagagtagctgggattacaggcacccgtcaccacacccagctaatttttgtatttttagtagagacggggtttcgccaggttggccaggctggtctc

SEQ ID NO: 46256 - DNA, 120 bp, synthetic construct
  source 1..120: mol_type = other DNA
attgaaggcagaacccacaggtggtgaccatactttctggtctgccactcctcttgcacaagttctgggaggaagcagctgaggcatggtgggcgggagggacctagaaaggagggaaat

SEQ ID NO: 46257 - DNA, 120 bp, synthetic construct
  source 1..120: mol_type = other DNA
cctgcagactttgccactggcctgatttcactgctccctcaaacaagcatcttcttaatgatgtgtcaggttcctagtgtccggggttttccacaacactgtccggtgtgtgtctgtgag

SEQ ID NO: 46258 - DNA, 120 bp, synthetic construct
  source 1..120: mol_type = other DNA
agcaccatgcgacacaatgggtggcctgccagctttttctttttttgaatggtgggctgggttgccgttcctgggagcctagctctttctcttctgcctggactaaacccagagaatgct

SEQ ID NO: 46259 - DNA, 120 bp, synthetic construct; identical to SEQ ID NO: 13025
  source 1..120: mol_type = other DNA

SEQ ID NO: 46260 - DNA, 120 bp, synthetic construct
  source 1..120: mol_type = other DNA
tttaagtttccaaatcaacatagctcacattttagtgaccacattgtttagaatatagcttatctcattggaatgttgaagcatcaagcaaagccagagccagacgtggctgacgtggct

SEQ ID NO: 46261 - DNA, 120 bp, synthetic construct
  source 1..120: mol_type = other DNA
gagagaaaacgacaagaatgctttgcctctccatcttgatggtgatcaagataggaccaggctattttcaagttcacagaatcgggctattatcattgttgttaacaccatgtgctgagt

SEQ ID NO: 46262 - DNA, 120 bp, synthetic construct; identical to SEQ ID NO: 13026
  source 1..120: mol_type = other DNA

SEQ ID NO: 46263 - DNA, 120 bp, synthetic construct
  source 1..120: mol_type = other DNA
attatctggccccagatgtcagtagtgctgaagttgaaaaacctgacctagggtgtcctaatcctccagctgacacttcctgggtgtgtgtggagtgcaggggtgttactggcctgcccc

SEQ ID NO: 46264 - DNA, 120 bp, synthetic construct
  source 1..120: mol_type = other DNA
gcttctgacttttctctcttgggctttacacaccttcagaaggtctgatgagcagggatcctcccagtgggttccccctcctagacgttgcctggcatccagtgagcagggttctcaggc

SEQ ID NO: 46265 - DNA, 120 bp, synthetic construct
  source 1..120: mol_type = other DNA
ggtcaagttggacagtcaggatgctcacagagaggcacacccttagtaactgcgtcgcttcgggtatatttaagagccagagggacttcagaggcaggctgaagctttgagatggaagag

SEQ ID NO: 46266 - DNA, 120 bp, synthetic construct
  source 1..120: mol_type = other DNA
ttggaagaggttggcccagggcgcagggcagtcctggtccagaggctgtggcatcggtgtgagtgggaattccgagggcccggccaagggctgagagaatgggcctggagatgctgcaga

SEQ ID NO: 46267 - DNA, 120 bp, synthetic construct; identical to SEQ ID NO: 13027
  source 1..120: mol_type = other DNA

SEQ ID NO: 46268 - DNA, 120 bp, synthetic construct
  source 1..120: mol_type = other DNA
ctgttgggaacccactcggctgctgcaggcttggaagctgctgctccacaggctgggagtttttgcccccaaggctgtgcagagccaaaatctgaaagcccttttaggggcagggattaa

SEQ ID NO: 46269 - DNA, 120 bp, synthetic construct
  source 1..120: mol_type = other DNA
cctggtcctcttcaggtttggcccagcccctccttgaagactccttccatccagtcaaggccaagcaggcggggcagggcctttatgagctaaataaataaataaataaataaataaata

SEQ ID NO: 46270 - DNA, 120 bp, synthetic construct; identical to SEQ ID NO: 13028
  source 1..120: mol_type = other DNA

SEQ ID NO: 46271 - DNA, 120 bp, synthetic construct
  source 1..120: mol_type = other DNA
accgacccctccaattcggagcgcttctgcctagggctgctctccaatgtcaacaggaatgcagcagtggagctgacacggagacacatcggtatggggtggctccattccccgcccccc

SEQ ID NO: 46272 - DNA, 120 bp, synthetic construct
  source 1..120: mol_type = other DNA
cactgccccagcaagtcccctacactctctgttgccctgtttaggggccagacaggtagtgttcaggccacttgatcattcccactcaaagatataatctcagaaaatctggaagccaca

SEQ ID NO: 46273 - DNA, 120 bp, synthetic construct
  source 1..120: mol_type = other DNA
tggcacaatcttgcctcactgcaacctctgcctcctgggttcaagcgattctcctgcctcagcttcccaagtagctgggattacaggcacccaaccaccacgcccagctaatttttgtgt

SEQ ID NO: 46274 - DNA, 120 bp, synthetic construct
  source 1..120: mol_type = other DNA
ggctgaaatcctctaaataaaaatactctgaaagtacagatggataggttgataagtaggcagtcattgttggaagagtgatcttctcttattttcatgtatcattattctaaacaattt

SEQ ID NO: 46275 - DNA, 120 bp, synthetic construct; identical to SEQ ID NO: 13029
  source 1..120: mol_type = other DNA

SEQ ID NO: 46276 - DNA, 120 bp, synthetic construct
  source 1..120: mol_type = other DNA
tatctcgggctctcacagaagacttcatttgaagagaggattgattctgtagtgaagagaagaaaagtttggaggccatgggcctaggtctgtgctctcattttctaggaaagggacctg

SEQ ID NO: 46277 - DNA, 120 bp, synthetic construct
  source 1..120: mol_type = other DNA
agacctcattgtcagtgacagacagccaccactaccagacctgttgttcccatttcgctttttgttttttacttcaaaaaagatacttattctgggtggcataccactgtttgattgatt

SEQ ID NO: 46278 - DNA, 120 bp, synthetic construct; identical to SEQ ID NO: 13030
  source 1..120: mol_type = other DNA

SEQ ID NO: 46279 - DNA, 120 bp, synthetic construct
  source 1..120: mol_type = other DNA
cacgttggccaggctagtctcgaactcctgacctcaggtgatctgcccgcctcagcctcccaaggtactgggattacaggtgtgagccaccatgcccggcctatttttttaagttactga

SEQ ID NO: 46280 - DNA, 120 bp, synthetic construct
  source 1..120: mol_type = other DNA
gcaccctgcagaactaaagccagaaaaaatggggagtggttggaggaaggggacagtagtgggaataggaggcaggacaggggacatccagtgatgcatgggtcggtcacctcgtgttca

SEQ ID NO: 46281 - DNA, 120 bp, synthetic construct
  source 1..120: mol_type = other DNA
gagctcattgtcagagtttacgcaactgtttgagttgcagagccaatttaaaaataatttctgtccatctggagtggatttaagagatgaaagaaaagtaaatgatataaacctctggaa

SEQ ID NO: 46282 - DNA, 120 bp, synthetic construct
  source 1..120: mol_type = other DNA
tgaatctctgaatcttggagtgtgaagagaccaaataatagtggggtagtagtagcagtagcagcaagaaaagctgacaccaggcacttactgtgtgtctcacagtaatcctgcaagggt

SEQ ID NO: 46283 - DNA, 120 bp, synthetic construct; identical to SEQ ID NO: 13031
  source 1..120: mol_type = other DNA

SEQ ID NO: 46284 - DNA, 120 bp, synthetic construct
  source 1..120: mol_type = other DNA
ggtgaataacttgactgaggcccatgcctactcagtggcaaaggctgtcactgagacctatcctgtgtgcccatctcttgtcatctgcctcccttggctttaggaatccggcagtgccca

SEQ ID NO: 46285 - DNA, 120 bp, synthetic construct
  source 1..120: mol_type = other DNA
tgtgagcaaaggcaccctgtccagtctaacctgaatctctgtaggaagaggcgtgcggctctactacatcggaggggaggtcttcgcagagtgcctcagtgacagcgctatttttgtcca

SEQ ID NO: 46286 - DNA, 120 bp, synthetic construct; identical to SEQ ID NO: 13032
  source 1..120: mol_type = other DNA

SEQ ID NO: 46287 - DNA, 120 bp, synthetic construct
  source 1..120: mol_type = other DNA
agaggtagatgcggccctgctctgcccccgcagaccttacaggcctgcagagcacagaagacaaagacacggatgagttcaatataagggacgggtgccaagcaccaagccagcagccca

SEQ ID NO: 46288 - DNA, 120 bp, synthetic construct
  source 1..120: mol_type = other DNA
gagcagcccaggcaaagggcctgaggtaatggagggcaggacatggatgggtagctctctggctggaggagggtcatgtatgagaccgtcaggggaaatgtttcaaaagcacaacagcat

SEQ ID NO: 46289 - DNA, 120 bp, synthetic construct
  source 1..120: mol_type = other DNA
gtttggacagggccacgcctggacagcaagatcaggcaggtggctgatcccatctaaggcctctttcctcaggaaaccaaggcagaaagccccagccaaagtccacttttcacaggacgt

SEQ ID NO: 46290 - DNA, 120 bp, synthetic construct; identical to SEQ ID NO: 13033
  source 1..120: mol_type = other DNA

SEQ ID NO: 46291 - DNA, 120 bp, synthetic construct
  source 1..120: mol_type = other DNA
agtggccaagccgggatggggcctagggctgatggactctcaagtttggtgctcttctgcttcttggctctgctgggggtcagggcccaggttcagccctgttccaccacccttgtcctt

SEQ ID NO: 46292 - DNA, 120 bp, synthetic construct
  source 1..120: mol_type = other DNA
atagaatgtcagagctggaaggacctctgaggccagcccttcattatacagagacacagggtccccaagagaaagcgaccagctcagagtcacacagcaagaacaggagcctgctgttgg

SEQ ID NO: 46293 - DNA, 120 bp, synthetic construct
  source 1..120: mol_type = other DNA
tttaaactttatttgtgactgtctttagttttactgtctggagaatcagatgcacaccttcacttagctgtgaatgtcacctccacccagcccagtgcccagaggccaaaatttggccca

SEQ ID NO: 46294 - DNA, 120 bp, synthetic construct
  source 1..120: mol_type = other DNA
ccagcccgtctctgggggcactgcctgctgtggaacggccagagctcctgttcctaggtgggtgaccagaccccacacagcatgggcaacctggcccaggtcccttatctctctgtcccc

SEQ ID NO: 46295 - DNA, 120 bp, synthetic construct; identical to SEQ ID NO: 13034
  source 1..120: mol_type = other DNA

SEQ ID NO: 46296 - DNA, 120 bp, synthetic construct
  source 1..120: mol_type = other DNA
aggatgcaacctgaagatcttcaacaaccaggagttcgctgccctcctggcccagtcggtcaaccagggctttgaggctgtctaccagttgacccgaatgtgcaccatccgcatgagctt

SEQ ID NO: 46297 - DNA, 120 bp, synthetic construct
  source 1..120: mol_type = other DNA
gccctagcgtcaagagcagaaagaccaaagatcagagagaggccaaggcctggcaggcaggaggggccgggccaacagcagatgatgaggaattgcagaacgatgtttgctggcaccgaa

SEQ ID NO: 46298 - DNA, 120 bp, synthetic construct
  source 1..120: mol_type = other DNA
gcagtcacactggtagaagagctgtgtctagaactctgccctcttggcttcttccttagtctcattttaggcagatggctttaggatgaccctcttcaggaagttaggtcttcagctcat

SEQ ID NO: 46299 - DNA, 120 bp, synthetic construct; identical to SEQ ID NO: 13035
  source 1..120: mol_type = other DNA

SEQ ID NO: 46300 - DNA, 120 bp, synthetic construct
  source 1..120: mol_type = other DNA
gtgagtggcaccatcttggcttactgcaatctctgcctccaggacgtgcctcagcctcccaagtagctgggactacaggtgcgtgctaccacgcctggctaattttttgtattttagtag

SEQ ID NO: 46301 - DNA, 120 bp, synthetic construct
  source 1..120: mol_type = other DNA
tactggtttaaacatggccctgatatagtcaggtctacctggtctgcttggttgaatctctcaggccatcctgctttgggtttagagaatccagtcccttttctttccactcacggacca

SEQ ID NO: 46302 - DNA, 120 bp, synthetic construct; identical to SEQ ID NO: 13036
  source 1..120: mol_type = other DNA

SEQ ID NO: 46303 - DNA, 120 bp, synthetic construct
  source 1..120: mol_type = other DNA
tcagggaacacagccccttggtttcttgggtgtctctgaaatccaggagtgaccagtggagcaatcaaagtggtcagacctcaaaagaacttacaactatgttatggcctgaagagatca

SEQ ID NO: 46304 - DNA, 120 bp, synthetic construct
  source 1..120: mol_type = other DNA
gaaaggttagaaaattaatctttttttagtgaagaagggaaatatttaaagatggactgcagtggaaaagagtaaggggatgtccatttgctcttcttataccagactgtagtctggagg

SEQ ID NO: 46305 - DNA, 120 bp, synthetic construct
  source 1..120: mol_type = other DNA
cagcaacactgttcctggtgtggcattgcagctctcccgctccaagtgctaggaagaggctctttggtggcagagcctttccctggggacactatcaccacgcgggatgtcctgccagca

SEQ ID NO: 46306 - DNA, 120 bp, synthetic construct
  source 1..120: mol_type = other DNA
gagagtaaggtttcagctcttctctctgtgaggtggctgaaagcagggcccagggcccacacctctcacctccagctggcaccagcgactccagcctcagcagatagcctttgctcagtg

SEQ ID NO: 46307 - DNA, 120 bp, synthetic construct; identical to SEQ ID NO: 13037
  source 1..120: mol_type = other DNA

SEQ ID NO: 46308 - DNA, 120 bp, synthetic construct
  source 1..120: mol_type = other DNA
ttagggggcctgttacagtaactggtgggcctctggggtaccctgcaattgactttacatatttaactctttgccattgactttacatgtttaactctttaaagtcgacttccttccccc

SEQ ID NO: 46309 - DNA, 120 bp, synthetic construct
  source 1..120: mol_type = other DNA
ttctaggacagcgtctaacagcatctttgggaagatgactgtcaccaaagcagaaaaagctttctgacttgtgtaaccccctggagattttttaagtcccccaccccacccctttcccta

SEQ ID NO: 46310 - DNA, 120 bp, synthetic construct; identical to SEQ ID NO: 13038
  source 1..120: mol_type = other DNA

SEQ ID NO: 46311 - DNA, 120 bp, synthetic construct
  source 1..120: mol_type = other DNA
aagggcaagaaatggcgtctgctctggtggcttaagtgagcagaacaggtagtattacaccaccggccccctccccccagactctttttttgagtgacagctttctgggatgtcacagtc

SEQ ID NO: 46312 - DNA, 120 bp, synthetic construct
  source 1..120: mol_type = other DNA
cagtgcctcttccagtgaacattcccagcccagccccgccccgccccgccccaccactccagcagaccttgccccttgtgagctggatagacttgggatggggagggagggagttttgtc

SEQ ID NO: 46313 - DNA, 120 bp, synthetic construct
  source 1..120: mol_type = other DNA
tttttcactttgaaaagttggaaggatctgctgaggcccagtgcatatgcaatgtatagtgtctattatcacattaatctcaaagagattcgaatgacggtaagtgttctcatgaagcag

SEQ ID NO: 46314 - DNA, 120 bp, synthetic construct
  source 1..120: mol_type = other DNA
agttgcattcattaaatcaactttatcatatgctcttttaaatgtttggtttatatattttctttaaaaatcctgggctggcacattgactgggaaacctgagtgagacccagcaactgc

SEQ ID NO: 46315 - DNA, 120 bp, synthetic construct; identical to SEQ ID NO: 13039
  source 1..120: mol_type = other DNA

SEQ ID NO: 46316 - DNA, 120 bp, synthetic construct
  source 1..120: mol_type = other DNA
ttttcccagccttttgcagaacacagtagacagaactgccaccttcaattggtactttattctttgctgctgtttttgtataaaatgacctatcccacgtttttgcatgaatttatagca

SEQ ID NO: 46317 - DNA, 120 bp, synthetic construct
  source 1..120: mol_type = other DNA
gatggagaggcttcctgatgcctcatctgcagggtcctgtgcctctgaagttctagccatgaggtttccaggtaggacagctgctccccaagcctcctgaggacacaggaagagacggaa

SEQ ID NO: 46318 - DNA, 120 bp, synthetic construct
  source 1..120: mol_type = other DNA
cctggtgtgaaatgatctatggcctgtttcttacacaggaagccccctgaacctcctgtacatgtgttcatgttcccagccagctctgagacccaggaaccaaatattccattttggctt

SEQ ID NO: 46319 - DNA, 120 bp, synthetic construct; identical to SEQ ID NO: 13040
  source 1..120: mol_type = other DNA

SEQ ID NO: 46320 - DNA, 120 bp, synthetic construct
  source 1..120: mol_type = other DNA
ttccttggccctttttctttattgactagaccaccagaggaggatgtgtgggattgtaggcaaacccacctgtggcatcactgaaaataaatttgatcatacctaagaggttaggaaatg

SEQ ID NO: 46321 - DNA, 120 bp, synthetic construct
  source 1..120: mol_type = other DNA
gttttcttagttttaaaatcctgttgtatgaatggcatttgtatattaaaacacttttttaaaggacagttgaaaagggcaagaggaaaccagggcagttctagaggagtgctggtgact

SEQ ID NO: 46322 - DNA, 120 bp, synthetic construct
  source 1..120: mol_type = other DNA
ctagcactgggacacagatccttgtcttcagcaccttccaaggagccaacttttattccctttcctctctcccctccccacctcgcttcttcccaatttagtaacttagatgcttccagc

SEQ ID NO: 46323 - DNA, 120 bp, synthetic construct; identical to SEQ ID NO: 13041
  source 1..120: mol_type = other DNA

SEQ ID NO: 46324 - DNA, 120 bp, synthetic construct
  source 1..120: mol_type = other DNA
atgcttttactcaagactacagaaaggtttgaagtagtgtgtgcatggcatgcacgtatgtaagtaatctggggaagaagcaaagatctgtttcattcttagcctcaggcctcatgaggg

SEQ ID NO: 46325 - DNA, 120 bp, synthetic construct
  source 1..120: mol_type = other DNA
tgcacccgtttagccctggaccctgtttcttactgtgtgacttggctagagttgggagttcccccaaaataaacgtgtccccattttaccagaaccaaacctcaacacagcgaagctgta

SEQ ID NO: 46326 - DNA, 120 bp, synthetic construct
  source 1..120: mol_type = other DNA
aaaacgtacgcaagaggacatggatccaaaatgatgatgaagcatctcccatggggaggtgatggtggggagatgatgggctaaacaggcaacttttcaaaaacacagctatcatagaaa

SEQ ID NO: 46327 - DNA, 120 bp, synthetic construct; identical to SEQ ID NO: 13042
  source 1..120: mol_type = other DNA

SEQ ID NO: 46328 - DNA, 120 bp, synthetic construct
  source 1..120: mol_type = other DNA
gaaccaagccccactcccttgctaggggtgaaagcattacagagagatggagccatctatccaagaagccttcactcaccttcactgctgctgttgcaactcggctgttctggactctga

SEQ ID NO: 46329 - DNA, 120 bp, synthetic construct
  source 1..120: mol_type = other DNA
tctaacttttatatcttaaaagcagagcacctgtttaagcattgtacccctattgttaaagatttgtgtcctctcattccctctcttcctcttgtaagtgcccttctaataaacttttca

SEQ ID NO: 46330 - DNA, 120 bp, synthetic construct; identical to SEQ ID NO: 13043
  source 1..120: mol_type = other DNA

SEQ ID NO: 46331 - DNA, 120 bp, synthetic construct
  source 1..120: mol_type = other DNA
agccatgcctggaatcctgactcagagaatctgtaagatcataaatgtttgttgttttaggcttctatatttgtggtgagattgttatacagcaataggtaactaatacagacggaatag

SEQ ID NO: 46332 - DNA, 120 bp, synthetic construct
  source 1..120: mol_type = other DNA
ttccttcagttttgttgacagaaaagatttgaaaactatctgacttgaaaaataatttaatatccattcactaaggtcatttactttctcagcatagataccgatttttgaattgtccct

SEQ ID NO: 46333 - DNA, 120 bp, synthetic construct
  source 1..120: mol_type = other DNA
tttctcaagctgggcaagtttagaaaatagaatatatagcaatggaagatgtggaaatgaattcccttaaaactggtctccataaaccccaggggtaagagaacaccagtttggagcttt

SEQ ID NO: 46334 - DNA, 120 bp, synthetic construct; identical to SEQ ID NO: 13044
  source 1..120: mol_type = other DNA

SEQ ID NO: 46335 - DNA, 120 bp, synthetic construct
  source 1..120: mol_type = other DNA
tatgccttcccccaccaaacaaacaggtaacctagttaacaggtgtgtcgtaggattcgaagttcgcctccagctccgagagtgcgcctacatctcttccaacaaaatccactcacactt

SEQ ID NO: 46336 - DNA, 120 bp, synthetic construct
  source 1..120: mol_type = other DNA
gcgtctgtttcttcccgaagtgaactcctacaacctagccaccttctccccagagctgtcgactggctgttgaaggccaatttttgtgcctacgcaggtcctcaacacagaacaaaacaa

SEQ ID NO: 46337 - DNA, 120 bp, synthetic construct
  source 1..120: mol_type = other DNA
accactccctcaaacaggccttcgcctccgcccgcgctgaggcccaggcccaggtccagattcagagccgcccgccggctggcgctgccctgtaggcgcctgcgcagagcgaccctcccc

SEQ ID NO: 46338 - DNA, 120 bp, synthetic construct; identical to SEQ ID NO: 13045
  source 1..120: mol_type = other DNA

SEQ ID NO: 46339 - DNA, 120 bp, synthetic construct
  source 1..120: mol_type = other DNA
gcgcggcgctgaggaggggcggcctggccgggacgcctcggggcgggggccgaggagctctccgggccgccggggaaagctacgggcccggtgcgtccgcggaccagcagcgcgggagag

SEQ ID NO: 46340 - DNA, 120 bp, synthetic construct
  source 1..120: mol_type = other DNA
gcggcggcggcggcggcggctgggagcgcgcggaatcctctgggagggcgaccgcggcggcctgacgagccgggccgggcgggccggctgaatgccgggcggcggtgcctcgcgtccctc

SEQ ID NO: 46341 - DNA, 120 bp, synthetic construct
  source 1..120: mol_type = other DNA
cgttgggtcggctggaatgtgttgccttagggtctaagtgaaagttgtaaattgtttgtctaaatttattttctccagccaatttctgttttgtctttgtcccctactttctcttcctag

SEQ ID NO: 46342 - DNA, 120 bp, synthetic construct; identical to SEQ ID NO: 13046
  source 1..120: mol_type = other DNA

SEQ ID NO: 46343 - DNA, 120 bp, synthetic construct
  source 1..120: mol_type = other DNA
tttctcaaactagattttcaaagacacaagtgtgtttagttaacctgaaaggtttatttgctggtgcagaggctttaaaaagccctgttgaagattgatagctgtttcccttcaaaaacc

SEQ ID NO: 46344 - DNA, 120 bp, synthetic construct
  source 1..120: mol_type = other DNA
acaggataatagcggaattaccctgaattgactttctgcaaacatataatcttagctaatttttgttagtaacctttgacttttgccagaattagcatccttctagtcttagtagcagct

SEQ ID NO: 46345 - DNA, 120 bp, synthetic construct
  source 1..120: mol_type = other DNA
tttttatggtggatttcataaattacttttgccataccctgcagagactagataatatatatttcagttgaaatctaggaagttctaaaatgtaacttttttttaatgctaaggacttac

SEQ ID NO: 46346 - DNA, 120 bp, synthetic construct; identical to SEQ ID NO: 13047
  source 1..120: mol_type = other DNA

SEQ ID NO: 46347 - DNA, 120 bp, synthetic construct
  source 1..120: mol_type = other DNA
cgttttttttatttttgaagtgggagtgtatgtttctgtttaggtcactgccttcattgtaaatcttgagtttagaaaaaaccaaactgcaaatctgtttttcagacttaatgaaaattt

SEQ ID NO: 46348 - DNA, 120 bp, synthetic construct
  source 1..120: mol_type = other DNA
ttaaaaacctctgcttcactttcttaagctacattttagtcgagcgattgtgtgtgaattctttttctgtattccccttcagtttttctttctccccgcaaattaaggagcgagaattaa

SEQ ID NO: 46349 - DNA, 120 bp, synthetic construct; identical to SEQ ID NO: 13048
  source 1..120: mol_type = other DNA

SEQ ID NO: 46350 - DNA, 120 bp, synthetic construct
  source 1..120: mol_type = other DNA
atatatgtttggatttctcttattttgttgaactagaagactgtgtggttacgccccaaaatttttttttgtcttaaagccatgatgaatggggtgactctgaggtgaccattaatcgcg

SEQ ID NO: 46351 - DNA, 120 bp, synthetic construct
  source 1..120: mol_type = other DNA
ggctggagtgcagaggcgcgatctccactcactgcaaaccccgccttccgggttcaagcgattctcctgcgtcagcctcctgagtagctgggattacaggcatgtgccaccacgcttggc

SEQ ID NO: 46352 - DNA, 120 bp, synthetic construct
  source 1..120: mol_type = other DNA
gccactgcgcctgtcctataacagcatttaatacagttttgtaaaattatcacattttgggctttttgttcaacagttgatgaagtctcaattgttttaaaatgagaaattcaaacagtt

SEQ ID NO: 46353 - DNA, 120 bp, synthetic construct; identical to SEQ ID NO: 13049
  source 1..120: mol_type = other DNA

SEQ ID NO: 46354 - DNA, 120 bp, synthetic construct
  source 1..120: mol_type = other DNA
tactgcaaattatattatagatcagataagtaccaaagaccagttgtaaagagggtctgttaacattttaatcagtttaaaattggcggtaacagtaaagaccgttcagcccaaagactg

SEQ ID NO: 46355 - DNA, 120 bp, synthetic construct
  source 1..120: mol_type = other DNA
cttttttactcccaatgtttagggcaacggtcttttcttctctcctgtctccctccctccctccctttctccctttttcttctttttcttctttttctttttttttttctgagacggagt

SEQ ID NO: 46356 - DNA, 120 bp, synthetic construct
  source 1..120: mol_type = other DNA
gcgccaccatgccaagctaatttttttgtattattagtagaggacggggtttcaccattttgggcaaggctagtcttgaactcctgacctcaggtgatccacccgcctcagcctcccaag

SEQ ID NO: 46357 - DNA, 120 bp, synthetic construct
  source 1..120: mol_type = other DNA
acccaggctcaagcaatcccacttcagctgctgcggtagctgggactacaggcacacaccatcacacctgtctaattttttgaaaaatttttgtagagatgggggtctctctctgttgcc

SEQ ID NO: 46358 - DNA, 120 bp, synthetic construct; identical to SEQ ID NO: 13050
  source 1..120: mol_type = other DNA

SEQ ID NO: 46359 - DNA, 120 bp, synthetic construct
  source 1..120: mol_type = other DNA
ccatctcacacatctaacttaacgggtcttttgaaagtattgccacatttgctttgcttctgtgtctgtctctttcttttctctcccccttcctgtcacctattcctttctcctctgttt

SEQ ID NO: 46360 - DNA, 120 bp, synthetic construct
  source 1..120: mol_type = other DNA
gtatattctcaaatgcttacttgtactccttttggagactaattactttaagtccccaagttagcatctgaactccctgtgggcttggtctggtggctcacatctataatctcagcactt

SEQ ID NO: 46361 - DNA, 120 bp, synthetic construct; identical to SEQ ID NO: 13051
  source 1..120: mol_type = other DNA

SEQ ID NO: 46362 - DNA, 120 bp, synthetic construct
  source 1..120: mol_type = other DNA
atggagtagtttcatctctgtctctggaagagctatttaaaaaaataaaaatattttttcccatctgattgcaacacacatgctgcttcagaatgggaatggagtggaggaggcatggga

SEQ ID NO: 46363 - DNA, 120 bp, synthetic construct
  source 1..120: mol_type = other DNA
taacatcatcatagccctctataaccttcaacttctgggttcaagagatcttgcctcagcctccagagtagctaggactacaggccggcaccaccacgcctggctgatttttttaaaact

SEQ ID NO: 46364 - DNA, 120 bp, synthetic construct
  source 1..120: mol_type = other DNA
gtatgttaatatggatgaatgtatgctactcaggtcttttcaagtcaaaatgtatttctaaatataagatgaattaaggatatttgtcagtgatattcactagtgaattctagagcatat

SEQ ID NO: 46365 - DNA, 120 bp, synthetic construct; identical to SEQ ID NO: 13052
  source 1..120: mol_type = other DNA

SEQ ID NO: 46366 - DNA, 120 bp, synthetic construct
  source 1..120: mol_type = other DNA
cagtacctcagacttccagagtgttttttaaaggtacagccccacccttgattctagttagtggagctggcctaacctgcgggggattttgatacatccccctttgaaggaataagctag

SEQ ID NO: 46367 - DNA, 120 bp, synthetic construct
  source 1..120: mol_type = other DNA
gtttgagaccagcctgaccaacatggtgaaaccccgtctctactaaaaatacaaaaattcattgggcatggtggcacatgcctgtaatcccagctactcacatgcctgtaatcccagctt

SEQ ID NO: 46368 - DNA, 120 bp, synthetic construct
  source 1..120: mol_type = other DNA
aaagttttataaaatgtatttttcagttatcagttattaaaattcagtttggtttccaccatcttttaaaacagtggttcccaaagtatggtccacagactcctggagatccctaggatc

SEQ ID NO: 46369 - DNA, 120 bp, synthetic construct; identical to SEQ ID NO: 13053
  source 1..120: mol_type = other DNA

SEQ ID NO: 46370 - DNA, 120 bp, synthetic construct
  source 1..120: mol_type = other DNA
atgcataaagcatttctgcacattgaagtacagtgttcttttctaggaaaagcacttgtgttattgagctgcaagctgaactagctgctttttagtgggacaccatttttatttttattt

SEQ ID NO: 46371 - DNA, 120 bp, synthetic construct
  source 1..120: mol_type = other DNA
ctggccacttcgaggagaacatttatagccagtgctaaaatctgatgtttcaagtgaaaatcagatttttgggaaactcctgtcactatgacttgccagtttcttaatacttaaagactt

SEQ ID NO: 46372 - DNA, 120 bp, synthetic construct
  source 1..120: mol_type = other DNA
tttctagcactgtgggaggcggaggtgggagaattgcttttggccaagagttcgagaccctgtttctacaataacatataaaaattaggtgtagtggcatgtagttctagctgctcagga

SEQ ID NO: 46373 - DNA, 120 bp, synthetic construct; identical to SEQ ID NO: 13054
  source 1..120: mol_type = other DNA

SEQ ID NO: 46374 - DNA, 120 bp, synthetic construct
  source 1..120: mol_type = other DNA
cttgagttttggtgttgaataaaagatgaatatccattgttttctgagaaggctgttaaaatactcctctcttccaattagctgtccatgtgagacacgttttcttcatgtactttaaac

SEQ ID NO: 46375 - DNA, 120 bp, synthetic construct
  source 1..120: mol_type = other DNA
tgggaatccagctgtctcctattaagctaggcattaagagaaatttgtgaagatgtaaaacagtgttactctgattcctgactttgttttagaaaattctgtttttcataagatgtttat

SEQ ID NO: 46376 - DNA, 120 bp, synthetic construct
  source 1..120: mol_type = other DNA
tggtgtctttaataatgaagagtataaataaaggtccaacttggccaacatgacgaaaccctttctctactaaacatacaaaaattagctgggcatggtggtacatgtctgtaatcccag

SEQ ID NO: 46377 - DNA, 120 bp, synthetic construct
  source 1..120: mol_type = other DNA
gaatatgaataaagggatcctgagatcagagagtttgacagctgctgttttaaagtaactatttctatgcattatcgactaaattactgattgattgaattgtttttatggtttgtacta

SEQ ID NO: 46378 - DNA, 120 bp, synthetic construct; identical to SEQ ID NO: 13055
  source 1..120: mol_type = other DNA

SEQ ID NO: 46379 - DNA, 120 bp, synthetic construct
  source 1..120: mol_type = other DNA
gtggctctggttagtctgggaattgtcccacctggccagatggggagattctccttggaaaatcagactgctgttttacaaatggagaaatacatgctggtacacaaaaactgatgtcca

SEQ ID NO: 46380 - DNA, 120 bp, synthetic construct
  source 1..120: mol_type = other DNA
taggtaaacaagaagcatacatctcgatttgtcctttgtcattcatcttaaaagttaaaaaaaaactttttgttgcttttattgctgtataaatgtgctcttggaagttcgccaactgcc

SEQ ID NO: 46381 - DNA, 120 bp, synthetic construct
  source 1..120: mol_type = other DNA
cctttttttcctgttggtaaacctaagtttagagtttattcctagtaataacattgatatattaccaggcccagcttttttctcctcccctagttaaatttaagcacttttgcgccgggc

SEQ ID NO: 46382 - DNA, 120 bp, synthetic construct
  source 1..120: mol_type = other DNA
attagctgggcatggtgatgcgcccctgtagtcccagctactggggaggctgaggcaggagaatcgcttgaacccaggaggcagaagtggcagtgagccaagatggcaccactgcactcc

SEQ ID NO: 46383 - DNA, 120 bp, synthetic construct; identical to SEQ ID NO: 13056
  source 1..120: mol_type = other DNA

SEQ ID NO: 46384 - DNA, 120 bp, synthetic construct
  source 1..120: mol_type = other DNA
tcaacgtcaggtgacagcttacaattaatagcaaggctagaggaaaaacaacaggcagataacaagaatcagctgtctcttcttgctaactctttacctctcataactcttgactgcatc

SEQ ID NO: 46385 - DNA, 120 bp, synthetic construct
  source 1..120: mol_type = other DNA
ctagaaatgggtcgtcttttatttgtcccccctttttcacccttcatatttcagttggttaaagactccagtcttttctacctagaaatagctcactgatttccccctcccctccttggc

SEQ ID NO: 46386 - DNA, 120 bp, synthetic construct; identical to SEQ ID NO: 13057
  source 1..120: mol_type = other DNA

SEQ ID NO: 46387 - DNA, 120 bp, synthetic construct
  source 1..120: mol_type = other DNA
cctaccttgaaattaggcatggcccagagtttcttgcattggcactgttgacattttaggctggataatttattttgcgtgttgtccagtgcattgcagggtatttagcagcaaccatgg

SEQ ID NO: 46388 - DNA, 120 bp, synthetic construct
  source 1..120: mol_type = other DNA
gactttggccagtcaaacatgagcagaagtggtagcctttaaaagaagatatatgagctgtcctatcccttctcctgccatttaaggacatatgtagaaatggagcctttgtcagtctaa

SEQ ID NO: 46389 - DNA, 120 bp, synthetic construct
  source 1..120: mol_type = other DNA
catagactagccaatcctgactgatacgttgtgccaagacctaggttacctatgaactttccatgctccctcatttatagtcccaaatcactttatacctacttcttttagcatttatta

SEQ ID NO: 46390 - DNA, 120 bp, synthetic construct; identical to SEQ ID NO: 13058
  source 1..120: mol_type = other DNA

SEQ ID NO: 46391 - DNA, 120 bp, synthetic construct
  source 1..120: mol_type = other DNA
ttttctttctttttccttcctccctccctgcctccctcccttacttcaggctctgttacccaggctggagtgcagtggcgtgatcttggctcactgcaacctctgcctcccaggctcaag

SEQ ID NO: 46392 - DNA, 120 bp, synthetic construct
  source 1..120: mol_type = other DNA
caaccgtgcctttgttgccaggctggtcctgagcttaagtgatccaaccatgtcggcctcttaaagtgctgggattacaggcatgagccactgtacccggacttggttgttttgtttttt

SEQ ID NO: 46393 - DNA, 120 bp, synthetic construct
  source 1..120: mol_type = other DNA
cattttcttagttcaagttgtttaagagttcaccatttgggaaaatccatgttactgactgcagtgccattgtgctatttgagttgccagtataacacgtttgtcttggaaggtctgaat

SEQ ID NO: 46394 - DNA, 120 bp, synthetic construct
  source 1..120: mol_type = other DNA
gagttgccagtataacacgtttgtcttggaaggtctgaatttgtagctgtcacatttgtaatgattctgtatataagtgctagcatctaacttctttattatacattctaacttagttgg

SEQ ID NO: 46395 - DNA, 120 bp, synthetic construct; identical to SEQ ID NO: 13059
  source 1..120: mol_type = other DNA

SEQ ID NO: 46396 - DNA, 120 bp, synthetic construct
  source 1..120: mol_type = other DNA
gatgagagaattgagagagatgttaacattcagtcatgcggctagacctttaattagaatatataattttatttatatcgatattatgctcttgcctaccatacttccataatctagaac

SEQ ID NO: 46397 - DNA, 120 bp, synthetic construct
  source 1..120: mol_type = other DNA
ctgtttgtttaagaaagcgaggtcattatcatttgtattcaaagcaacttggtattaaaacaaactttgagataccgttaaggccccagcatagcataaattttagaaatgatgacattt

SEQ ID NO: 46398 - DNA, 120 bp, synthetic construct; identical to SEQ ID NO: 13060
  source 1..120: mol_type = other DNA

SEQ ID NO: 46399 - DNA, 120 bp, synthetic construct
  source 1..120: mol_type = other DNA
tgtaatttaacgtatctttccttttccctctttcccgattcctttcctttctactgagtctcactctgttgcccaggctggggtgcagtggcacaatcataactcacagcagccttcaac

SEQ ID NO: 46400 - DNA, 120 bp, synthetic construct
  source 1..120: mol_type = other DNA
aaaatgcgtaatgcattttaggaaaaatcttcttgtaaaactattattatttttttgagatagggtctcactgtgtcacccaggctgtagtgcagtggcacaatcacagctcaccaaggc

SEQ ID NO: 46401 - DNA, 120 bp, synthetic construct
  source 1..120: mol_type = other DNA
tcaacagtagcttttttactgaacactatgtatcagacacgttatgcagaatttttcctttgagcttctgtataccctccttttaatccagattcagagtaacttcattttctgactact

SEQ ID NO: 46402 - DNA, 120 bp, synthetic construct; identical to SEQ ID NO: 13061
  source 1..120: mol_type = other DNA

SEQ ID NO: 46403 - DNA, 120 bp, synthetic construct
  source 1..120: mol_type = other DNA
ggaatgtagggatagtgaaggaaagaggcacgtcagagatcttttgcaaagcttcccaaggctaggtaattgagtggaattgatactttaacaaaggtcttcagaagaggaagagatttt

SEQ ID NO: 46404 - DNA, 120 bp, synthetic construct
  source 1..120: mol_type = other DNA
aacaagcacacaaagtacaggctccagtcctgctttatcttctttattcttaagctaatggccttttcctattctctgtggggtcttgggatcagataagttagttttctacctgttgaa

SEQ ID NO: 46405 - DNA, 120 bp, synthetic construct
  source 1..120: mol_type = other DNA
ttgagatataatttccataccataaaattcactatttgaaagtgtacaattcagtggtttttactatagtcagagttgtgcaaccatcaccattatcaatttttaggactttttcattat

SEQ ID NO: 46406 - DNA, 120 bp, synthetic construct; identical to SEQ ID NO: 13062
  source 1..120: mol_type = other DNA

SEQ ID NO: 46407 - DNA, 120 bp, synthetic construct
  source 1..120: mol_type = other DNA
cctcaagtagaagtgtgaagagtagaattgctgggtcatatttactctgtttaacattttgtattaataccagactgttttccaaagtacctgtgccattttgtaatcccagcaccaagg

SEQ ID NO: 46408 - DNA, 120 bp, synthetic construct
  source 1..120: mol_type = other DNA
tgtcgagcatctttcatgtgcttattggccatcgtctttggagaagtgtcctttagaatccttttgttcatttctaaattggggtttttttttttttttaattggtctcttttaacaaag

SEQ ID NO: 46409 - DNA, 120 bp, synthetic construct; identical to SEQ ID NO: 13063
  source 1..120: mol_type = other DNA

SEQ ID NO: 46410 - DNA, 120 bp, synthetic construct
  source 1..120: mol_type = other DNA
catcaaattttaattatgtgcattgaatctctgacttaaccagagcaatttcatcttttcccaagtagtcagatctacttcgtaaaatgtgttctgatgtgtgtcttttttttttttctt

SEQ ID NO: 46411 - DNA, 120 bp, synthetic construct
  source 1..120: mol_type = other DNA
aaaacttgaacaaatggacaatatgtctattacgaatacaccaacaagtaatgatgcctgtctgagcattgtgcatagtttgatgtgccatagacaaggtggagagagtgaaacatttgc

SEQ ID NO: 46412 - DNA, 120 bp, synthetic construct
  source 1..120: mol_type = other DNA
aacattggatgggaggcttcaggttagtcttataagagtttttctataccctctatggtggcagatttaaaaacttgctacgtttcctttcaagctactacagggtaatttaatttgtgc

SEQ ID NO: 46413 - DNA, 120 bp, synthetic construct; identical to SEQ ID NO: 13064
  source 1..120: mol_type = other DNA

SEQ ID NO: 46414 - DNA, 120 bp, synthetic construct
  source 1..120: mol_type = other DNA
aagtgcaaccatgcctggctaatttttgtatttttagtagagatggggtttcaccatgttggtcaggctggtcttgaaccgctgacctcaggtgatccacccgcctcagccttccagaat

SEQ ID NO: 46415 - DNA, 120 bp, synthetic construct
  source 1..120: mol_type = other DNA
ttcactgttagcaaatgtttcattggtcacatttttcaggtagaacttcataatacagctcccttgcttaaataaatcttacagaaattttgtcgtagattttaaagttttatttcaaga

SEQ ID NO: 46416 - DNA, 120 bp, synthetic construct
  source 1..120: mol_type = other DNA
tgcagccttgacctactgggcttatgcagttctcctgccttagcctcctgagtagctaggactacaggcacataccaccatgcctgggtaattttttattatttgtggagacaagggtct

SEQ ID NO: 46417 - DNA, 120 bp, synthetic construct
  source 1..120: mol_type = other DNA
aaacctgagcacaggccttgaaattataccaaggtttaaattctaggtctgatgtatgacatggccaagttagttattgtgaattttagttttcttatttatgaaatggggattgtaata

SEQ ID NO: 46418 - DNA, 120 bp, synthetic construct; identical to SEQ ID NO: 5662
  source 1..120: mol_type = other DNA

SEQ ID NO: 46419 - DNA, 120 bp, synthetic construct
  source 1..120: mol_type = other DNA
acgaacgagttgtatcacctggaattggtaagtagactttgctttcatcctaagaaacataaagggaaaaggatctcaatagtgtttcaatttttgtaagttaaattataaatttggaag

SEQ ID NO: 46420 - DNA, 120 bp, synthetic construct
  source 1..120: mol_type = other DNA
tgcccctttagaacattgtttttgagaaataagatggaaagcattataaatttgaatacttagttatgtattgttagatagcgtttatgctacttctgaattgaaatggttcatgaactt

SEQ ID NO: 46421 - DNA, 120 bp, synthetic construct; identical to SEQ ID NO: 13066
  source 1..120: mol_type = other DNA

SEQ ID NO: 46422 - DNA, 120 bp, synthetic construct
  source 1..120: mol_type = other DNA
tactgtaaaaaaatatgatagaggaatgcaccaaaaacaaatataaagaatattttttgagttaagacctatttttgaagaaaatctcacagagccagtttaaatggatgttaaataccc

SEQ ID NO: 46423 - DNA, 120 bp, synthetic construct
  source 1..120: mol_type = other DNA
gcactcttttgtattttttcagtcttgttacattttgagtaaataaatcaaggctactttaaagcatatgcccatcacagcttacctaattgtatttttaaaaagaaaaagtgttttaag

SEQ ID NO: 46424 - DNA, 120 bp, synthetic construct
  source 1..120: mol_type = other DNA
actaattaatttgcagagaaactcttataaagaaccactgtcagccaggcacggtggttcacacctgtaatcccagtactttgggaggcttaagcgggtggatcacctgaggtcaggagt

SEQ ID NO: 46425 - DNA, 120 bp, synthetic construct; identical to SEQ ID NO: 13067
  source 1..120: mol_type = other DNA

SEQ ID NO: 46426 - DNA, 120 bp, synthetic construct
  source 1..120: mol_type = other DNA
ccggacgtggtggtgggtgcctgtagtcccagctacttgggaagctgaggcaggagaatggtgtgaacccgggaggcagaggttgcagtgagccgagatagtggcactgcactccagcct

SEQ ID NO: 46427 - DNA, 120 bp, synthetic construct
  source 1..120: mol_type = other DNA
gaattttagaggtgggtcagaaatactaggtgaccttaaccaaaatttaggaagagtatgcaattctacttgtttttttttttccacctttctcccatatcactggtaatggaggaagac

SEQ ID NO: 46428 - DNA, 120 bp, synthetic construct
  source 1..120: mol_type = other DNA
tgggaagggttgctttaagattggtgaaaactctgcttctttgctacgcagacattgatattgtatcacttctttttttttttgaaagtaaacacgtttcatatcttcaccattttccat

SEQ ID NO: 46429 - DNA, 120 bp, synthetic construct; identical to SEQ ID NO: 13068
  source 1..120: mol_type = other DNA

SEQ ID NO: 46430 - DNA, 120 bp, synthetic construct
  source 1..120: mol_type = other DNA
aatgggacagttccttcatttttgagttaaagtcttgtggtaatcatttccagcctatcttttacctttcatgaaactttctatgaccacgttgacctgtgtattcattttaacaagtat

SEQ ID NO: 46431 - DNA, 120 bp, synthetic construct
  source 1..120: mol_type = other DNA
agtgataataccatgagataggtgctgtgtcctggttgctggtgatgataaagaacacagacctaaggtgggcccagtggtttcagcttttttgtcacctatagagaatatattctttga

SEQ ID NO: 46432 - DNA, 120 bp, synthetic construct
  source 1..120: mol_type = other DNA
ctcctgcctcagcctcctgagtagctgggattacaggtgcccgccaccatgcccagcatttttttttgtttgtatttttagtagagatggggtttcaccatgttggccggctggtctcga

SEQ ID NO: 46433 - DNA, 120 bp, synthetic construct; identical to SEQ ID NO: 13069
  source 1..120: mol_type = other DNA

SEQ ID NO: 46434 - DNA, 120 bp, synthetic construct
  source 1..120: mol_type = other DNA
atggaaaaatattacaaaagactgcaaactccatgacagcagggatatttgttttgtttatggatatatcccaagtactagaacagtacctggaacagaagtgctcaagaaatatttttt

SEQ ID NO: 46435 - DNA, 120 bp, synthetic construct
  source 1..120: mol_type = other DNA
ggcaatacatggtccataaatcaaaatactataaaaaggtatacagtgaaaagaagtgctcccacccctgcccccattcccccctacctcaggtaatcactttttttagtttctggtgtt

SEQ ID NO: 46436 - DNA, 120 bp, synthetic construct
  source 1..120: mol_type = other DNA
tatgatcatagtgtacaatagtgctttgtaacttgctttgattctcttggcaaaaatatattgcagacttctatccttgttgatacctttagttttacctgagaaacatttattatggat

SEQ ID NO: 46437 - DNA, 120 bp, synthetic construct; identical to SEQ ID NO: 13070
  source 1..120: mol_type = other DNA

SEQ ID NO: 46438 - DNA, 120 bp, synthetic construct
  source 1..120: mol_type = other DNA
gaagaaaatcattgaactttgttgaagggtgtaatataaggctgaataagtgtagacataccaattttgtgccccaaacaatttttttctttttattatttttataacttggccaatgtt

SEQ ID NO: 46439 - DNA, 120 bp, synthetic construct
  source 1..120: mol_type = other DNA
cagaatatcatcttcatgacttttgatgcatgaacatacttcttaagaggtttttaagaggttgtacatagaaacttgcacaatggatgattattactgccttaaactagtctcaattta

SEQ ID NO: 46440 - DNA, 120 bp, synthetic construct
  source 1..120: mol_type = other DNA
tttgtggtctactaattgactgctttaagaagagaacctactgttagttcagtggattgttaagttctggagtagtgttagtttagaagcaataaaggattggttgctaaaggtaaaaag

SEQ ID NO: 46441 - DNA, 120 bp, synthetic construct; identical to SEQ ID NO: 13071
  source 1..120: mol_type = other DNA

SEQ ID NO: 46442 - DNA, 120 bp, synthetic construct
  source 1..120: mol_type = other DNA
tatgttgcttaacaataattctagatcctgggattggatatctatcagatcccactcatatctccacagtgtgaaattaacaaaaagatatagttaaatactcagtctctatttagaccg

SEQ ID NO: 46443 - DNA, 120 bp, synthetic construct
  source 1..120: mol_type = other DNA
ttgctggaggctgttgaaacatagactagcttcaaatttgagagtcagattgattgataaaatatatctcatgctgttaccgctgaataaatgacttttgctggtaaagtagtatgcttt

SEQ ID NO: 46444 - DNA, 120 bp, synthetic construct
  source 1..120: mol_type = other DNA
ttaaaatatgtttaattttctatatagctccatcaagtatgatggtgaaggatgaatatgtgcatgactttgagggacagccatcgttgtccactgaaggacattcaattcaaaccatcc

SEQ ID NO: 46445 - DNA, 120 bp, synthetic construct; identical to SEQ ID NO: 13072
  source 1..120: mol_type = other DNA

SEQ ID NO: 46446 - DNA, 120 bp, synthetic construct
  source 1..120: mol_type = other DNA
atttaaataattaacaagtagttttgatccaagatgtttatgaaggtctgtgttaatggaattgcaacctttcttttaatgcggtgttcttattttggtttttctgggacaatattacct

SEQ ID NO: 46447 - DNA, 120 bp, synthetic construct
  source 1..120: mol_type = other DNA
aaaatatatgtgtaattaaaaaaaaaaagtgtttcagaaagatccttcttttctgccatgtcataggagggagaggggctgctaggttcaggtttttgggggcatgatcatatgacctgg

SEQ ID NO: 46448 - DNA, 120 bp, synthetic construct
  source 1..120: mol_type = other DNA
tggtgttagttgcatgcagttgctaaaggaatttatgtaaacccacatcagaatagatttttgacagctctgggctaatactgtgttagttgctaccgaaagtaccattattgtatttgc

SEQ ID NO: 46449 - DNA, 120 bp, synthetic construct; identical to SEQ ID NO: 13073
  source 1..120: mol_type = other DNA

SEQ ID NO: 46450 - DNA, 120 bp, synthetic construct
  source 1..120: mol_type = other DNA
agagcacagctacctacttctgtttatattatctggagattgaatttctgtgcctttgtcaatgcttactaaagtgacttcattttgactgtgttgtttcctgaggttgaatcctattca

SEQ ID NO: 46451 - DNA, 120 bp, synthetic construct
  source 1..120: mol_type = other DNA
ccttatgtggtggcatgcgcctgtagtcccagctgctccgggggctgaggcaggagaaatggcgtgaacccgggaggcggagcttgcagtgagcagagagcgagtcactgcactccagcc

SEQ ID NO: 46452 - DNA, 120 bp, synthetic construct
  source 1..120: mol_type = other DNA
gctattttacgtgagctgatttagtcgtattgtttaactttattttacatacttagaattgtataagggaagtattcagtatggataactacagtgagtcactttacaatttatgttctt

SEQ ID NO: 46453 - DNA, 120 bp, synthetic construct; identical to SEQ ID NO: 13074
  source 1..120: mol_type = other DNA

SEQ ID NO: 46454 - DNA, 120 bp, synthetic construct
  source 1..120: mol_type = other DNA
ttgatactttgagcaatggtgacatgttactctcttccatctgattatactcccatttagaaaagaatgaggtgatgccagttataaataattataactttagtgctttccaaataggat

SEQ ID NO: 46455 - DNA, 120 bp, synthetic construct
  source 1..120: mol_type = other DNA
gcaatatcataggatggtttttgaatagaatacaagccaagagaagcttgattctcttggtatattacatacagagagggcaattaatttcttgtacatctgggaatatgatggtgttct

SEQ ID NO: 46456 - DNA, 120 bp, synthetic construct
  source 1..120: mol_type = other DNA
ccagtaaatggtatattgattggacagcagagctagatctttttaacttcctcatcttcactatcacatcctatttaaaataattttctgctctgcttttctctgtcaaaccctagcatt

SEQ ID NO: 46457 - DNA, 120 bp, synthetic construct
  source 1..120: mol_type = other DNA
aggatgaactgacatacctctgaagaagttaatatgataggccagacgtacagtggtgttttgctggcatttgaaatatgtttgtgaagaaataagccactacaattagttagacattac

SEQ ID NO: 46458 - DNA, 120 bp, synthetic construct; identical to SEQ ID NO: 13075
  source 1..120: mol_type = other DNA

SEQ ID NO: 46459 - DNA, 120 bp, synthetic construct
  source 1..120: mol_type = other DNA
atagttgagaaaaaagtaggcagcctttataaaagcaaattaacccatgtgggccttaatttttagacagcactaccacctggactggaagtaggactgcaccatacacacctaatttgc

SEQ ID NO: 46460 - DNA, 120 bp, synthetic construct
  source 1..120: mol_type = other DNA
ttttctgttttttaaaaatgtttttacatcttttattcatcctgtgattttgtttcattaaatagtgcttttcagtattttttgtaaacagtattatttttcatagttatcctacctttt

SEQ ID NO: 46461 - DNA, 120 bp, synthetic construct; identical to SEQ ID NO: 13076
  source 1..120: mol_type = other DNA

SEQ ID NO: 46462 - DNA, 120 bp, synthetic construct
  source 1..120: mol_type = other DNA
gtgtactttggataatgttgaatctatagataactctgtgctggcatgattgggaggaataccctacagataacatgtagtttcaggtagaataggagcattgttcatatggcttagtaa

SEQ ID NO: 46463 - DNA, 120 bp, synthetic construct
  source 1..120: mol_type = other DNA
atcctgctactcaaaaacagccacttctaatattttgttattttccttccagtcatataaacaggtatatgtaaattgacaggggctcctactctatgtgtattgtatatatcttgcttc

SEQ ID NO: 46464 - DNA, 120 bp, synthetic construct
  source 1..120: mol_type = other DNA
gacaagttatttcacctcattaagcctcaagagtaataatagtagtatctacctcaaggggtgttcgtaagaagtaaacgtaataatttatgtgaggtgtttagcacagtgttttaacac

SEQ ID NO: 46465 - DNA, 120 bp, synthetic construct
  source 1..120: mol_type = other DNA
taatagcacttggcagatagcactgaaatgttagttattaaatatccacaaaagtattaatagtttaagactatttgcttattgtaaacttttaagttcttagacattgcataagcttgt

SEQ ID NO: 46466 - DNA, 120 bp, synthetic construct; identical to SEQ ID NO: 13077
  source 1..120: mol_type = other DNA

SEQ ID NO: 46467 - DNA, 120 bp, synthetic construct
  source 1..120: mol_type = other DNA
ccccaaaagaaaagaactatcttttcagctaaaatgagaattacagaaatgctgacttcagcattgaatacataaatatgcagcagaataaaactaggtttcaaaatagaacagctgtaa

SEQ ID NO: 46468 - DNA, 120 bp, synthetic construct
  source 1..120: mol_type = other DNA
aaagagtaaatcgctaagtagctttcttcagttcaaagtttgtgtataatttttgaaactgtagaggtaataaaacagaaaacacttgaaaataaaatactgaaagtcccttgtaacaca

SEQ ID NO: 46469 - DNA, 120 bp, synthetic construct
  source 1..120: mol_type = other DNA
ctcctaattaaaagaaaattatgaagaattatatttttatttttacttgtttatttttgagagagggcctggctctgttgcccaaactggagtgcagtggcatgatctcagattactaca

SEQ ID NO: 46470 - DNA, 120 bp, synthetic construct; identical to SEQ ID NO: 13078
  source 1..120: mol_type = other DNA

SEQ ID NO: 46471 - DNA, 120 bp, synthetic construct
  source 1..120: mol_type = other DNA
atttttgatctttgtgggtacataggagatgtatatatttatggggcacatgagatgttttgatacaggcatataatgcatgataatcacatcatggaagatggggtatacatcccttca

SEQ ID NO: 46472 - DNA, 120 bp, synthetic construct
  source 1..120: mol_type = other DNA
ctttttgtactattaaccatcctcaccttcccccaatcccccactacctttcccagcctctggtaaccatccttctactctctgtctctatgggttcaattgttttgatttttagatccc

SEQ ID NO: 46473 - DNA, 120 bp, synthetic construct; identical to SEQ ID NO: 13079
  source 1..120: mol_type = other DNA

SEQ ID NO: 46474 - DNA, 120 bp, synthetic construct
  source 1..120: mol_type = other DNA
cgcccataatgattaattcaaagggtcttaaattcttaaataggtctacataattttctttgtgtaaatgttctgttattgattatgttggtttaatttttcttctagctgtttaaaaaa

SEQ ID NO: 46475 - DNA, 120 bp, synthetic construct
  source 1..120: mol_type = other DNA
gtgctggctagcagtagatgtcatagtttaataaactttttgctgatttaagaggcaaatacttgttctggttagggaaaaggtgatattagtggggcagaagcattcttttaacgatat

SEQ ID NO: 46476 - DNA, 120 bp, synthetic construct
  source 1..120: mol_type = other DNA
tacagaaaagtatgtaacacaagtaagtatatagtctaacatcactaaaaccaatactcatgtaaccactacacagattgagaactaaaacattatggcatcccagaaaccctcctaccc

SEQ ID NO: 46477 - DNA, 120 bp, synthetic construct
  source 1..120: mol_type = other DNA
attttgagatgaactcttgttctgtcacccaggctagagtgcagtcatgcaattcggctcactgcaacctccacctccaggttcaagccattctcctgcctcagcctcccgagtagctgg

SEQ ID NO: 46478 - DNA, 120 bp, synthetic construct; identical to SEQ ID NO: 13080
  source 1..120: mol_type = other DNA

SEQ ID NO: 46479 - DNA, 120 bp, synthetic construct
  source 1..120: mol_type = other DNA
taggcgcccgccaccacgcccggctaatttttgtatttttagtagagacggggtttcactatgttggtcaggctggtctcgaactcctgacctcttgatctgcccgcctcggcctcccaa

SEQ ID NO: 46480 - DNA, 120 bp, synthetic construct
  source 1..120: mol_type = other DNA
agtgttgttactgttttttgttgtgttttttttggccaccaaaacattgggtaattgttgtcttagacaatctctgtagttttggtttaaccagtgtacctatcagttgtttgctgaagc

SEQ ID NO: 46481 - DNA, 120 bp, synthetic construct; identical to SEQ ID NO: 13081
  source 1..120: mol_type = other DNA

SEQ ID NO: 46482 - DNA, 120 bp, synthetic construct
  source 1..120: mol_type = other DNA
aaaataatttcataaatacttcaaaactggctttttaagaagacactcagtgaagacacttagtgtatcactggtttttatgttctaagcataatgaaatatatgtaaacaaatatttat

SEQ ID NO: 46483 - DNA, 120 bp, synthetic construct
  source 1..120: mol_type = other DNA
gcttggcagcattttgaaaagtaattagggtacatagcttttacaagttgttttcttttaaaaaaattttaagcatcaatcatacttcattttaggttattttttttttttccgtaagat

SEQ ID NO: 46484 - DNA, 120 bp, synthetic construct
  source 1..120: mol_type = other DNA
cttttaaatatgtcgaacctatttccaccctggggtctttgctttcgcttcctctttgaaatctgttcagtcttcacatagataaaaggttattcaggtcccatcttttcagatgggatg

SEQ ID NO: 46485 - DNA, 120 bp, synthetic construct; identical to SEQ ID NO: 13082
  source 1..120: mol_type = other DNA

SEQ ID NO: 46486 - DNA, 120 bp, synthetic construct
  source 1..120: mol_type = other DNA
tgtaaaccagagtagcacctcttttttcccagtgatttaaaattatatattattgttcaaatgagtacactaaatacatctccaaagttaaaattgtggtagttaacatgacctgacttc

SEQ ID NO: 46487 - DNA, 120 bp, synthetic construct
  source 1..120: mol_type = other DNA
tgggatagctgacttgcttatgcactttctctcaattagggaatctataaaaatatgtcatgagtcgatgttattcaaggacagttccctggaatacatcttagggtcagtgtgttttta

SEQ ID NO: 46488 - DNA, 120 bp, synthetic construct
  source 1..120: mol_type = other DNA
tgaggtaagaaccaaattccagattttaaaaaatgacttttagaacttgaggataagtggtaattggaaattaaaaaaaaaaattagtgttttaagaacagtgctaagtactgagctaga

SEQ ID NO: 46489 - DNA, 120 bp, synthetic construct; identical to SEQ ID NO: 13083
  source 1..120: mol_type = other DNA

SEQ ID NO: 46490 - DNA, 120 bp, synthetic construct
  source 1..120: mol_type = other DNA
tgtttgggtcaactctccaatgtccacaggacagaagccattgagagagcaaggtattgattgtatagtcagatagttactttaaaaaattgagcatagtacattgtcttttattcaagg

SEQ ID NO: 46491 - DNA, 120 bp, synthetic construct
  source 1..120: mol_type = other DNA
aagcactccatcttaattgtcggtgtttttgttgtttaacatataatgataaaagatagccttttttatgttagtaggtttctatgtttcgaatagtaagtataccttttgaaattcagt

SEQ ID NO: 46492 - DNA, 120 bp, synthetic construct
  source 1..120: mol_type = other DNA
gaaatggttaagtaaattatgataaatttttccttttttatacagtcattaaaatgtttaaaagtttatataatgaggctgggtgcggtggctcacacctataatcccagcactttggga

SEQ ID NO: 46493 - DNA, 120 bp, synthetic construct
  source 1..120: mol_type = other DNA
ctcaggaggctgagacaggagaattgcttgaacccaggaggtggaggttgcagtgagctgagatcgtgccactgcaccccagcctgggtgacagagtgagactccatttcaaaaaaaaaa

SEQ ID NO: 46494 - DNA, 120 bp, synthetic construct; identical to SEQ ID NO: 13084
  source 1..120: mol_type = other DNA

SEQ ID NO: 46495 - DNA, 120 bp, synthetic construct
  source 1..120: mol_type = other DNA
atagtacttgttgagttgtaagggtttaatgagaattcatactacatgctcctgacacatagtaagtgttgtaaatatgtgcatcattattagatatgaacaggaaaagaaaaaaggaaa

SEQ ID NO: 46496 - DNA, 120 bp, synthetic construct
  source 1..120: mol_type = other DNA
atgtaatttcttttttcttcctaaggttgcacataggcaaaggtgtgcagttggaatgtaaaggtgaaggtgatgtttgggtcaggtgccttagtgaccacgcggtctttgtacagagtt

SEQ ID NO: 46497 - DNA, 120 bp, synthetic construct; identical to SEQ ID NO: 13085
  source 1..120: mol_type = other DNA

SEQ ID NO: 46498 - DNA, 120 bp, synthetic construct
  source 1..120: mol_type = other DNA
gtgatctcggctcactgcaacctgcgcctcctgggttcaagcaattctcgtgcctcagcatcccaagtagctgggattacaggcacatgttactgtgcctggcaattttttgtattttta

SEQ ID NO: 46499 - DNA, 120 bp, synthetic construct
  source 1..120: mol_type = other DNA
gttacatgttttagagtaatacaaaggctcttgaaaatactgagtgaagcctccaaagttgtattcctgtaacttgaaatttgtaagaatcagactctggactttcatcttagccaatct

SEQ ID NO: 46500 - DNA, 120 bp, synthetic construct
  source 1..120: mol_type = other DNA
acctgtttttgaaagagaaaggcagttgtaattagatagcctaaatatatttttaattgtgtgtcatcctcaacattttcattgtcagtgattgtaaattggtagaattaactgtgtctc

SEQ ID NO: 46501 - DNA, 120 bp, synthetic construct; identical to SEQ ID NO: 13086
  source 1..120: mol_type = other DNA

SEQ ID NO: 46502 - DNA, 120 bp, synthetic construct
  source 1..120: mol_type = other DNA
tttaatgtgtttctcccccaacttttttttcctggagtcgttgaaagccaattccaaacagcatagtcactcataaaatatttctgtgtgagtaactcataaaatactcctgtgtaactc

SEQ ID NO: 46503 - DNA, 120 bp, synthetic construct
  source 1..120: mol_type = other DNA
caatagaataaagcaataaagtattatatttattgataggatatccatgtgtatagaaaagttagttattaaacaatacataaggcctgatttagtggctcatgcgtgtaatcttagcac

SEQ ID NO: 46504 - DNA, 120 bp, synthetic construct
  source 1..120: mol_type = other DNA
gcctgtagttttagctacttgggaggctgagatgggagcattgcttgagcccaggagttcaaggctgcggagagccatgatcatgccactgtgctccagactaggtgatagagtgagacc

SEQ ID NO: 46505 - DNA, 120 bp, synthetic construct; identical to SEQ ID NO: 13087
  source 1..120: mol_type = other DNA

SEQ ID NO: 46506 - DNA, 120 bp, synthetic construct
  source 1..120: mol_type = other DNA
gcctggctaatttttgtatttagtagagacggggtttcaccgtgttggccaggctggtctggaactcctgacctcaagtgatcagcccaactcagctcccaaagtgcaaggattgcaggt

SEQ ID NO: 46507 - DNA, 120 bp, synthetic construct
  source 1..120: mol_type = other DNA
attatttattttttcttcctgtcattgcttcaccctatgtggcaattttgccttaccctggcatctgggattcacatctcagaaccaaatcttataaatttaggaagtagggggactttg

SEQ ID NO: 46508 - DNA, 120 bp, synthetic construct
  source 1..120: mol_type = other DNA
gaattggctgtattttaccagcacttgatttatgggcaggtgcccacttgtagcccccagagagtttggctgttgtctctctccatattattccaagaagtcaaattcctgttccctgcc

SEQ ID NO: 46509 - DNA, 120 bp, synthetic construct
  source 1..120: mol_type = other DNA
agtttggagaggatgactattttaaatagtttttctgttatttgtatgtggttgaagcagagagagaaggtgattatgtatacccacttaacccatcttgactcagaagtctcttgtttt

SEQ ID NO: 46510 - DNA, 120 bp, synthetic construct; identical to SEQ ID NO: 13088
  source 1..120: mol_type = other DNA

SEQ ID NO: 46511 - DNA, 120 bp, synthetic construct
  source 1..120: mol_type = other DNA
taagattttaaaataattatgtctgtttaccaagtatattactgttctttagaagagtcttactagtcagaaagagacagttacaagtacaaccccatccacaatttcactttccatggc

SEQ ID NO: 46512 - DNA, 120 bp, synthetic construct
  source 1..120: mol_type = other DNA
gctgttctgagtagatgatgaaatctcactccattctgcttgggatgtaaaaccttttgccagcatatccatgctgtctacattacccacccattagtcactgagtagcgagctcagttt

SEQ ID NO: 46513 - DNA, 120 bp, synthetic construct
  source 1..120: mol_type = other DNA
attacctgttgttgttaatctcttactatgcctaatttgtaagttaaacttcattatgaggtatgtatgtataggaaaaaacatagtatatgcacagtactatctaaagtttcatgcatc

SEQ ID NO: 46514 - DNA, 120 bp, synthetic construct; identical to SEQ ID NO: 13089
  source 1..120: mol_type = other DNA

SEQ ID NO: 46515 - DNA, 120 bp, synthetic construct
  source 1..120: mol_type = other DNA
tataagccaagaagctaggactaaattgtggtttttttcacccttctaagttgactttttttcctgcttctctcatgacatagtagtcattttttacttaacgaaaatctgatgtaatga

SEQ ID NO: 46516 - DNA, 120 bp, synthetic construct
  source 1..120: mol_type = other DNA
agtttttaatagctttattgagattttgagagagaattcacatgacatacaagtcacccatttaaattggacaattcaatgattgttagtatattcacaacattgtgcagtcattactac

SEQ ID NO: 46517 - DNA, 120 bp, synthetic construct
  source 1..120: mol_type = other DNA
tgcctattcagggcattttatatagaagagaattatgtaatatagtcttttatgacttacttcttttcactaagcataatgtttcaagcttcatccatgtagcacataccaattcttcac

SEQ ID NO: 46518 - DNA, 120 bp, synthetic construct; identical to SEQ ID NO: 13090
  source 1..120: mol_type = other DNA

SEQ ID NO: 46519 - DNA, 120 bp, synthetic construct
  source 1..120: mol_type = other DNA
ggtagttttgatttgcaaacttcctgtgttaatattgagttgggtttgtttttgaacacatttattttagaggaaggggcagcagatgcttctaaaccactggtggactaggtcagaggg

SEQ ID NO: 46520 - DNA, 120 bp, synthetic construct
  source 1..120: mol_type = other DNA
agcacaatcttgtttatgttcaggtgcatttttcattctggattactgtttcctaatgttaatttaagattatatagtattgcatttaagccttgtcaaaggaaaatggcaaaatttgac

SEQ ID NO: 46521 - DNA, 120 bp, synthetic construct
  source 1..120: mol_type = other DNA
aaattagctcaggagtggtggtcagaaatattttttggatctgagccaaaaagaatatttaaagcctttgattactttgaattgcctttgtcaacaatttagtcaaattatgaaaggaag

SEQ ID NO: 46522 - DNA, 120 bp, synthetic construct; identical to SEQ ID NO: 13091
  source 1..120: mol_type = other DNA

SEQ ID NO: 46523 - DNA, 120 bp, synthetic construct
  source 1..120: mol_type = other DNA
cctatgtgtgacatattacttggttatttttttaaatgactcgtgggggtgggggagtgttaatgttaaaggcatacttgaatcttggagattataattaagttttattccctactccca

SEQ ID NO: 46524 - DNA, 120 bp, synthetic construct
  source 1..120: mol_type = other DNA
agacctaaatgtaaaacacaaaactataaaacttctagaagataatataagagaaaaagtgagaactttttttttgagacggagtcttgctctgttgcccaggctggagtgcagtggtgc

SEQ ID NO: 46525 - DNA, 120 bp, synthetic construct
  source 1..120: mol_type = other DNA
agagatggggtctcaccatgttggccaggctggtcaggaactcctgacctcaagtgatcctcctgcctcggcctcccaaagtgctgggattacaggagagagccactgtgcctggccaag

SEQ ID NO: 46526 - DNA, 120 bp, synthetic construct; identical to SEQ ID NO: 13092
  source 1..120: mol_type = other DNA

SEQ ID NO: 46527 - DNA, 120 bp, synthetic construct
  source 1..120: mol_type = other DNA
gcaagacctcatctctaccaaaaaaaaaaaaaaaaaaattagccaggcatggtggcatgtgcctgtagtcctggctagttgggaggctgatgtgggaggacccttgagcccaggtgttca

SEQ ID NO: 46528 - DNA, 120 bp, synthetic construct
  source 1..120: mol_type = other DNA
tgttcagcatcataaatgtgtacaaacccatagaatgtacaacaccaagagtgaacccttacgtaaactgggttttgggtgataatgatgtgtcagtgtaaattcattgattgtaacaat

SEQ ID NO: 46529 - DNA, 120 bp, synthetic construct
  source 1..120: mol_type = other DNA
aatttacttctttaaaaaagtggttgtagagctatttaccttttcaaatgtttgagtccctgctttgttctgtactgggtaatgccttccaaatgtcatagcctagaagttctgaaacga

SEQ ID NO: 46530 - DNA, 120 bp, synthetic construct; identical to SEQ ID NO: 13093
  source 1..120: mol_type = other DNA

SEQ ID NO: 46531 - DNA, 120 bp, synthetic construct
  source 1..120: mol_type = other DNA
gccaccatgcccctgtcattgctttctttactaaagtattttaggacctaatagtccaggaaatacatatatgtatattggacaaattcatgtctgtttaaagaatagggtagtctgagt

SEQ ID NO: 46532 - DNA, 120 bp, synthetic construct
  source 1..120: mol_type = other DNA
gcaatttgttatttggagagtgtatgttattgtatgtttttgtggttcatgtaaataccatggttgaagatgatcagaattttttcaagcatctgaaaattatggtttaagttctaaaac

SEQ ID NO: 46533 - DNA, 120 bp, synthetic construct
  source 1..120: mol_type = other DNA
tccttttagatagggagtatagccacatggttcagaaattaaagtgatttaaaaacagtggacattgagcagccttgcttcagaacctgtccttgttctcctttcctgcaaattcttttt

SEQ ID NO: 46534 - DNA, 120 bp, synthetic construct; identical to SEQ ID NO: 13094
  source 1..120: mol_type = other DNA

SEQ ID NO: 46535 - DNA, 120 bp, synthetic construct
  source 1..120: mol_type = other DNA
cccatataattagcaggtatcggtgatgggatttaaaactgggccttttttttccttaaaaattatgaacatttacaaacaaagaaatgtagagagaaactaatgaagtcccatataccc

SEQ ID NO: 46536 - DNA, 120 bp, synthetic construct
  source 1..120: mol_type = other DNA
acgcatctctgaaaaatgttgatctctcttatatagcgacagtgccattttgttaaactcctccaaataagcaaaaatgataagacaaaaagttggccaggcgaccaaagctatcaactc

SEQ ID NO: 46537 - DNA, 120 bp, synthetic construct
  source 1..120: mol_type = other DNA
atacagaggcgtgtggcagccaaagccatcatgatgttgacatgatcttcttggtgagctccaagccacctttcctaactagttttagaccaatcacaatgtacataaaagtttacatgt

SEQ ID NO: 46538 - DNA, 120 bp, synthetic construct; identical to SEQ ID NO: 13095
  source 1..120: mol_type = other DNA

SEQ ID NO: 46539 - DNA, 120 bp, synthetic construct
  source 1..120: mol_type = other DNA
ttactcagttgattagtttctttgagcagtaatagaaattaaagtttttttttactgggatgatgacatttttgaattggtaaaatctgttcttctgtaatagttgctttttgcctatga

SEQ ID NO: 46540 - DNA, 120 bp, synthetic construct
  source 1..120: mol_type = other DNA
atctcctccttttttgttgatgcttattataattctgcctcaccagccagggtgggttgtaatcactgaagtgcttggctttattctagtaaggaaagcatatttcaatttcagaattgg

SEQ ID NO: 46541 - DNA, 120 bp, synthetic construct
  source 1..120: mol_type = other DNA
ggtttcacactgatggggaattttttactgcagagttaaactcctgactatagacttttatgatggaaacacgtggcacccatcttccacgtctgaaggcataactagtgattcattcaa

SEQ ID NO: 46542 - DNA, 120 bp, synthetic construct; identical to SEQ ID NO: 13096
  source 1..120: mol_type = other DNA

SEQ ID NO: 46543 - DNA, 120 bp, synthetic construct
  source 1..120: mol_type = other DNA
agaactattattaagtttcatattctcatcagttgccaccactgagtaatagtgtattactctgttacactttgaaattgagagagagacttcatctcggtcatctaagaggtcttagtg

SEQ ID NO: 46544 - DNA, 120 bp, synthetic construct
  source 1..120: mol_type = other DNA
tcttatcccttcacctccacttctaaagaaaaaaataggtgaggtgttggtggattgtggtaatttactttataattggttgtagctagaagacacatgtgaaatgtaaagttccttaac

SEQ ID NO: 46545 - DNA, 120 bp, synthetic construct
  source 1..120: mol_type = other DNA
tgtagggaggatgggaagagatcaccctgtccctctgatgtcttccaaatcttttctgttaggtctgtcagctgctgctggaattggtgttgatgaccttcgtcgcttatgcatactcag

SEQ ID NO: 46546 - DNA, 120 bp, synthetic construct; identical to SEQ ID NO: 13097
  source 1..120: mol_type = other DNA

SEQ ID NO: 46547 - DNA, 120 bp, synthetic construct
  source 1..120: mol_type = other DNA
tcagagcttgaagattaggagaaacacattcttattaattcttcacctgttatgtatgaaggaatcattccagtgctagaaaatttagccctttaaaacgtcttagagccttttatctgc

SEQ ID NO: 46548 - DNA, 120 bp, synthetic construct
  source 1..120: mol_type = other DNA
tacttcaaaaataatgtgccatgtgggtgagttaattttaccaagagtaactttactctgtgtttaaaaagtaagttaataatgtattgtaatctttcatccaaaatattttttgcaagt

SEQ ID NO: 46549 - DNA, 120 bp, synthetic construct
  source 1..120: mol_type = other DNA
aatttaaaattacgtttgttattcctagtggatgactgttgatgaagtatacttttcccctgttaaacagtagttgtattcttctgtatttctaggcacaaggttggttgctaagaagcc

SEQ ID NO: 46550 - DNA, 120 bp, synthetic construct
  source 1..120: mol_type = other DNA
aaataatgaataaactgaatattttggaaactgctaaattctatgttaaatactgtgcagaataatggaaacattacagttcataataggtagtttggatatttttgtacttgatttgat

SEQ ID NO: 46551 - DNA, 120 bp, synthetic construct; identical to SEQ ID NO: 13098
  source 1..120: mol_type = other DNA

SEQ ID NO: 46552 - DNA, 120 bp, synthetic construct
  source 1..120: mol_type = other DNA
gtccaatctcagtgatgaggtaccttctactaaatgacaggcaacagccagttctattgggcagctttgtttttttccctcacactctaccgggacttccccatggacattgtgtatcat

SEQ ID NO: 46553 - DNA, 120 bp, synthetic construct
  source 1..120: mol_type = other DNA
tagctatagaaacacttgtgtgatgatagtcctccttatatcacctggaatgaacacagcttctactgccttgctcagaaggtcttttaaatagaccatcctagaaaccactgagtttgc

SEQ ID NO: 46554 - DNA, 120 bp, synthetic construct; identical to SEQ ID NO: 13099
  source 1..120: mol_type = other DNA

SEQ ID NO: 46555 - DNA, 120 bp, synthetic construct
  source 1..120: mol_type = other DNA
tgcagtggtatgatctcagctcactgcaacctctgcctcccgggttcaactgattctcctgcctcagcctccctggtagctaggattacaggtgcccgccaccatgcctggctaactttt

SEQ ID NO: 46556 - DNA, 120 bp, synthetic construct
  source 1..120: mol_type = other DNA
cctggcctcattgttcccttttctactttaaggaaagttttcatgtttaatcatctggggaaagtatgtgaaaaatatttgttaagaagtatctctttggagccaagccacctgtcttgg

SEQ ID NO: 46557 - DNA, 120 bp, synthetic construct
  source 1..120: mol_type = other DNA
cgcttttgagaaaacatctagtatgttatgatcagctattcctgagagcttggttgttaatctatatttctatttcttagtggtagtcatctttgatgaataagactaaagattctcaca

SEQ ID NO: 46558 - DNA, 120 bp, synthetic construct
  source 1..120: mol_type = other DNA
ctcaaagagtctcaaaatgttgaatttcagtgcaagctgaatgagagatgagccatgtacacccaccgtaagacctcattccatgtttgtccagtgcctttcagtgcattatcaaaggga

SEQ ID NO: 46559 - DNA, 120 bp, synthetic construct; identical to SEQ ID NO: 13100
  source 1..120: mol_type = other DNA

SEQ ID NO: 46560 - DNA, 120 bp, synthetic construct
  source 1..120: mol_type = other DNA
gaaggcaaaataaaatgtcctgtctcccagatgatatacatcttattatttttaaagtttattgctaattgtaggaaggtgagttgcaggtatctttgactatggtcatctggggaagga

SEQ ID NO: 46561 - DNA, 120 bp, synthetic construct
  source 1..120: mol_type = other DNA
agagtcacattagttcacaccctttctgagagccttttgggagaagcagttttattctctgagtggaacagagttctttttgttgataatttctagtttgctcccttcgttattgccaac

SEQ ID NO: 46562 - DNA, 120 bp, synthetic construct
  source 1..120: mol_type = other DNA
ggtacactcagcttaaagtaatgcatttttttttcccgtaaaggcagaatccatcttgttgcagatagctatctaaataatctcatatcctcttttgcaaagactacagagaataggcta

SEQ ID NO: 46563 - DNA, 120 bp, synthetic construct; identical to SEQ ID NO: 13101
  source 1..120: mol_type = other DNA

SEQ ID NO: 46564 - DNA, 120 bp, synthetic construct
  source 1..120: mol_type = other DNA
gacaggactgtgttgcctttactaaatggtctgagacagctatggttttgaatttttagttttttttttttaacccacttcccctcctggtctcttccctctctgataattaccattcat

SEQ ID NO: 46565 - DNA, 120 bp, synthetic construct
  source 1..120: mol_type = other DNA
accagataaccaaacttactagaacgttctttaaaacacaagtacaaactctgggacaggacccaagacactttcctgtgaagtgctgaaaaagacctcattgtattggcatttgatatc

SEQ ID NO: 46566 - DNA, 120 bp, synthetic construct
  source 1..120: mol_type = other DNA
attttcccccttagaataatattttgaaaggtttcattgcttccacttgaatgctgctcttacaaaaactggggttacaagggttactaaattagcatcagtagccagaggcaataccgt

SEQ ID NO: 46567 - DNA, 120 bp, synthetic construct; identical to SEQ ID NO: 13102
  source 1..120: mol_type = other DNA

SEQ ID NO: 46568 - DNA, 120 bp, synthetic construct
  source 1..120: mol_type = other DNA
tcatttctctctgttgatgtggatacttttcacaccgtttatttaaatgctttctcaataggtccagagccagtgttcttgttcaacctgaaagtaatggctctgggttgggccagacag

SEQ ID NO: 46569 - DNA, 120 bp, synthetic construct
  source 1..120: mol_type = other DNA
attccagctctgaaattctaagtgaccttggctaccttgcagcagttttggatttcttccttatctttgttctgctgtttgagggggctttttacttatttccatgttattcaaaggaga

SEQ ID NO: 46570 - DNA, 120 bp, synthetic construct
  source 1..120: mol_type = other DNA
ctaggcttgatattttattactgttcttttatggacaaaaggttacatagtatgcccttaagacttaattttaaccaaaggcctagcaccaccttaggggctgcaataaacacttaacgc

SEQ ID NO: 46571 - DNA, 120 bp, synthetic construct; identical to SEQ ID NO: 13103
  source 1..120: mol_type = other DNA

SEQ ID NO: 46572 - DNA, 120 bp, synthetic construct
  source 1..120: mol_type = other DNA
ttaactttattcttggctctttttaggtccattttgattaagtgacttttggctggatcattcagagctctcttctagcctacccttggatgagtacaattaatgaaattcatattttca

SEQ ID NO: 46573 - DNA, 120 bp, synthetic construct
  source 1..120: mol_type = other DNA
cttgtcattgatagaaggactcacgggcttggattgattaagactaaacatggagttggcaaactttcttcaagtattgagttctgttcaatgcattggacatgtgatttaagggaaaag

SEQ ID NO: 46574 - DNA, 120 bp, synthetic construct; identical to SEQ ID NO: 13104
  source 1..120: mol_type = other DNA

SEQ ID NO: 46575 - DNA, 120 bp, synthetic construct
  source 1..120: mol_type = other DNA
cccaggagttcctttgtggctttctgtatacttttgcctggttaaagtctgtggctaaaaaatagtcgaacctttcttgagaactctgtaacaaagtatgtttttgattaaaagagaaag

SEQ ID NO: 46576 - DNA, 120 bp, synthetic construct
  source 1..120: mol_type = other DNA
agtgcaggcggtgggcgaagccccgagtcacacacacccacgacgccggccctgctcccacagcggccctctggggtagcgactggtattacctgcatttcacgagggaggaaactgagg

SEQ ID NO: 46577 - DNA, 120 bp, synthetic construct
  source 1..120: mol_type = other DNA
tgggggcagtttgcccaggccggggtgggtccagccatctcagcaggcaggaatctgccaagttgggggatgcttagggaattagtcagatgcggggatttccagggaatcacagggggt

SEQ ID NO: 46578 - DNA, 120 bp, synthetic construct; identical to SEQ ID NO: 13105
  source 1..120: mol_type = other DNA

SEQ ID NO: 46579 - DNA, 120 bp, synthetic construct
  source 1..120: mol_type = other DNA
aacccgggaggcggaggttgcaatgagctgagatcgcaccactgcactccagcctgggcaacagagcaagactctgtctcaaaaaaaataataataatgataataataataatagcaact

SEQ ID NO: 46580 - DNA, 120 bp, synthetic construct
  source 1..120: mol_type = other DNA
cacccaggctggagtgcaggggcatgagctcaacttagtgcaacccctgcctcttgggtccaagtgattatcttgcctcagcctcccaagtagctgggattacaggcacgtgccaccatg

SEQ ID NO: 46581 - DNA, 120 bp, synthetic construct; identical to SEQ ID NO: 13106
  source 1..120: mol_type = other DNA

SEQ ID NO: 46582 - DNA, 120 bp, synthetic construct
  source 1..120: mol_type = other DNA
agccccgtcccccagtagtcccaccccgcagagagctctcaggcttccagctctggcccaggcccaggtcctcggtgccatgtgaagggtggagagctctcctgggggacagagttgtac

SEQ ID NO: 46583 - DNA, 120 bp, synthetic construct
  source 1..120: mol_type = other DNA
aggtcctcctaaatgtcttcccagccccttcgagagaattgtggaagtggggttgccagatcaaacacaagacacccagttaaaattcaactgtaggtacgtgacgagtactttttgttg

SEQ ID NO: 46584 - DNA, 120 bp, synthetic construct
  source 1..120: mol_type = other DNA
tctctgcctcagcctcccgagtagctgggactacaggcacccgccgccacacccggctaattttttgtatttttagtagagacggggttccaccatcctggccaggctggtcttgaactc

SEQ ID NO: 46585 - DNA, 120 bp, synthetic construct; identical to SEQ ID NO: 13107
  source 1..120: mol_type = other DNA

SEQ ID NO: 46586 - DNA, 120 bp, synthetic construct
  source 1..120: mol_type = other DNA
cctggcccatttctttctttctttctttctttctttctttctttctttctttctttctttctttctttctttctctctttctttctctctctctctctatttccttctttctttctttct

SEQ ID NO: 46587 - DNA, 120 bp, synthetic construct
  source 1..120: mol_type = other DNA
ccaaaatgctaggattacaggcatgagccactctgtccagcctgtcttaattatttcaaattgcagaaaacttcagacaaacatgaaggttgtttgtaaggaccttcttgggctgtgcct

SEQ ID NO: 46588 - DNA, 120 bp, synthetic construct
  source 1..120: mol_type = other DNA
gcccagggagggggaggtgcgtggtggtgacgggcggctcccgcacagagcctcagacctgggcaggtgaggcaggcaggtgggtctggcccggcgcggcccgatgcgggggcagggatg

SEQ ID NO: 46589 - DNA, 120 bp, synthetic construct; identical to SEQ ID NO: 13108
  source 1..120: mol_type = other DNA

SEQ ID NO: 46590 - DNA, 120 bp, synthetic construct
  source 1..120: mol_type = other DNA
tgtctccatgtctctctgtctctctgtcttcgtctctctgtttctggctctctttgtctctctgtgtctcagtttatttctgtctctttctgtgtctctttgtctgtgtctctgtgtccc

SEQ ID NO: 46591 - DNA, 120 bp, synthetic construct
  source 1..120: mol_type = other DNA
cggctcactgcaagctccgcctcccgggttcacgccattctcctgcctcagcctcccaagtagctgggagtacaggtgcccgccaccacgcccggctaatttttttttttgcatttttta

SEQ ID NO: 46592 - DNA, 120 bp, synthetic construct
  source 1..120: mol_type = other DNA
ctctctgtttctctgtctctctctttgtctctgtctctctgtctctgtctctgtgtccctctgtctctctgtttgtctctctctgtgtctgtctctgtctccgtgtctctctgtctctgt

SEQ ID NO: 46593 - DNA, 120 bp, synthetic construct
  source 1..120: mol_type = other DNA
ctctgtctatctctgtctcagtcccttcttttgccaccatccccctcccgtggccgccctcacgtgtcagcaccataccctccctgtggtcagggccacctgctccagggtgtcctcagg

SEQ ID NO: 46594 - DNA, 120 bp, synthetic construct; identical to SEQ ID NO: 13109
  source 1..120: mol_type = other DNA

SEQ ID NO: 46595 - DNA, 120 bp, synthetic construct
  source 1..120: mol_type = other DNA
agatcagcaatctgccggtcgccctgtgcagggaggataaacagggagaaggcactgcacatgcaaagtctcagcggggacaaagactcaggggagagtgtgcggggcctggggtgtgag

SEQ ID NO: 46596 - DNA, 120 bp, synthetic construct
  source 1..120: mol_type = other DNA
aaccattgagggttctggagcaacggagtggtacagtcatggtggggctagcggtgtactggatggggtgaggcacagggaccgaatttcagatcagaaggctcatctggtagtcagact

SEQ ID NO: 46597 - DNA, 120 bp, synthetic construct
  source 1..120: mol_type = other DNA
gtcaggagtttgagaccaacctgccaacacggtgaaaccccgtctctactgaatatacaaaaaaattagctgggggtggtggcgggcgcctataatcccagctactcggcaggctgaggc

SEQ ID NO: 46598 - DNA, 120 bp, synthetic construct; identical to SEQ ID NO: 13110
  source 1..120: mol_type = other DNA

SEQ ID NO: 46599 - DNA, 120 bp, synthetic construct
  source 1..120: mol_type = other DNA
gggagaccaaggcgggtgagtcacctgagatcaggagttcgagaccagcctcaccaacgtggtgaaaccctttctctactaaaaaaaaaaaacaaaaacaaaattagccaggcatggtgg

SEQ ID NO: 46600 - DNA, 120 bp, synthetic construct
  source 1..120: mol_type = other DNA
agactccgtctcgacaaacaaacaaacaaacaaacaataaataaataaataaaccttgtttgtagtgaagaggtctcactgggttacccaggctaatcttgaactcctggcttcaagtga

SEQ ID NO: 46601 - DNA, 120 bp, synthetic construct
  source 1..120: mol_type = other DNA
gggagacggcccccaggatgcccccaaaccggtactctgcaccccctgggcccacatctaaggacgacaaggcagaggcctcaaatgccaggtcctgtggctttgtccccggggcggtgg

SEQ ID NO: 46602 - DNA, 120 bp, synthetic construct; identical to SEQ ID NO: 13111
  source 1..120: mol_type = other DNA

SEQ ID NO: 46603 - DNA, 120 bp, synthetic construct
  source 1..120: mol_type = other DNA
caccatggctgccctgagtgtacgcagtggtcagcccagtgctgatgtcacctgtgtggggacttcctggaccttcacctcggatccgctgcccggccccgagggaaattccagagaagc

SEQ ID NO: 46604 - DNA, 120 bp, synthetic construct
  source 1..120: mol_type = other DNA
ttctgctgcgtcccacggggacttggggaaaacttggactccccagccccagccctggcatcattttttttttttttttgagacagagtttcactcttgttgcccaggcatgggtgcagt

SEQ ID NO: 46605 - DNA, 120 bp, synthetic construct
  source 1..120: mol_type = other DNA
ttagtacagacagggtttcgccatgttggccaggctggtcttgaactcctgacctcaggtgatccacccgcctcagcctcccaaagtgctgggatgacaggcgtgagccacagtgctcag

SEQ ID NO: 46606 - DNA, 120 bp, synthetic construct; identical to SEQ ID NO: 13112
  source 1..120: mol_type = other DNA

SEQ ID NO: 46607 - DNA, 120 bp, synthetic construct
  source 1..120: mol_type = other DNA
gagaattgcttgaacctgggaggcggaggttgcagcgagccgaggtcgcaccactgcactccagcctgggtgacagagcaagactccatctcaaaaaaacaaaagaggagtgtgggaaca

SEQ ID NO: 46608 - DNA, 120 bp, synthetic construct
  source 1..120: mol_type = other DNA
tacctcctttggaagccttttgtgagaatttggtaagttctggtatgtgttaagtgtttggagtggggcttggggtatggtgaagagtttatattaaaaaaaagaaaaaaaaccttcaag

SEQ ID NO: 46609 - DNA, 120 bp, synthetic construct
  source 1..120: mol_type = other DNA
gatccacctggccaacatggtgaagccctgtctctagtataaatacaaaaattagccgggggtggtggtgcacacctatagtcccagctactgaagaggctgaggcaggagaatctattg

SEQ ID NO: 46610 - DNA, 120 bp, synthetic construct; identical to SEQ ID NO: 13113
  source 1..120: mol_type = other DNA

SEQ ID NO: 46611 - DNA, 120 bp, synthetic construct
  source 1..120: mol_type = other DNA
aacatctccagacattgctgagtgtcccctgggggtgtaatcacccttggttgagccctactggtctggcgggtttcagacacagctggatccaggaccctcggtcagtgtcacaaggat

SEQ ID NO: 46612 - DNA, 120 bp, synthetic construct
  source 1..120: mol_type = other DNA
ctggagcccaataatgtgacctgagctcactgcaacctctgcctcccgggttcaagtgattctcctgcctcagcctcccgagtagctgggactacgggcgtgcgacaccatgtctggcta

SEQ ID NO: 46613 - DNA, 120 bp, synthetic construct; identical to SEQ ID NO: 13114
  source 1..120: mol_type = other DNA

SEQ ID NO: 46614 - DNA, 120 bp, synthetic construct
  source 1..120: mol_type = other DNA
ggatcacatggttgtatggagtgagccaattgggtgaaaactcgtggtcgggatgggcacggcggctcacgcctgtcatcccagcactttgggaggccgaggcgggcagatcatgaggtc

SEQ ID NO: 46615 - DNA, 120 bp, synthetic construct
  source 1..120: mol_type = other DNA
gaatcgcttgaacccgggaggcggagcttgcagcgagccgagatcgtgccactgcactcccagcctgggcaacagagtaagactctgtctcaaaaaaaaaaaaaagtacaaaacatgagc

SEQ ID NO: 46616 - DNA, 120 bp, synthetic construct
  source 1..120: mol_type = other DNA
ggtgacggggtaagactctgtctcaaaaaaaaaaaaaaagggccgagtgcggtggctcacgcctgtaatcccagcactttgggaggctgaggcgggtggatcacgaagtcaggagttcaa

SEQ ID NO: 46617 - DNA, 120 bp, synthetic construct; identical to SEQ ID NO: 13115
  source 1..120: mol_type = other DNA

SEQ ID NO: 46618 - DNA, 120 bp, synthetic construct
  source 1..120: mol_type = other DNA
gtggtggtgggcgcctatagtcccagctactcaggaggctgaggcaggagaatggtgtgaacccgggaggcagaggttgcagtgagccgagatcgcgccaccacactccagcctgggcga

SEQ ID NO: 46619 - DNA, 120 bp, synthetic construct
  source 1..120: mol_type = other DNA
gaaggcccagctgtgctaagcaggccacccatcccatggaagggctggcatggaggcagcaccagtagacatcagaggatgaatgagtgggatccagtgctgctcaatgaatacatgcgg

SEQ ID NO: 46620 - DNA, 120 bp, synthetic construct
  source 1..120: mol_type = other DNA
tccagcctcagcctcccgagtagctgggactacaggcgcccaccaccacacccggctaattttttgtattttcatttgtttgtttatttgtttgtttgttttgagatggagtctcactct

SEQ ID NO: 46621 - DNA, 120 bp, synthetic construct; identical to SEQ ID NO: 13116
  source 1..120: mol_type = other DNA

SEQ ID NO: 46622 - DNA, 120 bp, synthetic construct
  source 1..120: mol_type = other DNA
gccaggctggtcttgaactcctgacctcgtgatccacccacctcagcctcccaaagtgctgggattacaggcgtgagtcaccgcgcctggccaattttttgtatttttagtagagatggg

SEQ ID NO: 46623 - DNA, 120 bp, synthetic construct
  source 1..120: mol_type = other DNA
ttgctttgttttgtttctcttttttaattgagacacagtcccgctctgtcacccaggctggagtgcagtggtgcgatcttggcccactgcaacctccacctcccaagttcaagcgattct

SEQ ID NO: 46624 - DNA, 120 bp, synthetic construct
  source 1..120: mol_type = other DNA
ctcaagtgatctgctcacctaagcctcccaaagtgcagggattacaggtgtgagccactacacccagcctcttttttttctttttctttttgagacagggtttcgctttgccatgcaggc

SEQ ID NO: 46625 - DNA, 120 bp, synthetic construct; identical to SEQ ID NO: 13117
  source 1..120: mol_type = other DNA

SEQ ID NO: 46626 - DNA, 120 bp, synthetic construct
  source 1..120: mol_type = other DNA
tttgtccccaggcaaggattcagggacatctcagagccgctggggtctcgtcggtaaagtggtggtggacggcatggaggaactttagccctggaccagaaactttaggtcagtctatgt

SEQ ID NO: 46627 - DNA, 120 bp, synthetic construct
  source 1..120: mol_type = other DNA
ttcaaagcacctctcaagtcgggtgagtcagcagaggcctgcagacagggttgacgggggcagggtgtggggatgtgggagacccagactgggggccagcaaaggctgttcggaggaggt

SEQ ID NO: 46628 - DNA, 120 bp, synthetic construct
  source 1..120: mol_type = other DNA
ccacctcccgggttcaagcgattctcctgcctcagcctcctgagtagctgggattacaggcggccgccaccacgcacagctagttttgtatttttagtagagatggggtttctccatgtt

SEQ ID NO: 46629 - DNA, 120 bp, synthetic construct
  source 1..120: mol_type = other DNA
aattatgtgggtccatggggaggagcctttgaggtggcaggagggaaccagtcctgatgagggaagattaaaggacagtggggctggggatggtggcccacacctgtgtttgcagcactt

SEQ ID NO: 46630 - DNA, 120 bp, synthetic construct; identical to SEQ ID NO: 13118
  source 1..120: mol_type = other DNA

SEQ ID NO: 46631 - DNA, 120 bp, synthetic construct
  source 1..120: mol_type = other DNA
gcaggcgtctgtagtcccagctactcgggaggctgaggcaagagaatggcctgaacccaggaggcggagcttgcagtaagctgagattgtgccactgcactccagcttgggcgacagagc

SEQ ID NO: 46632 - DNA, 120 bp, synthetic construct
  source 1..120: mol_type = other DNA
agtgagccgaggtcgcaccattgcactccagcctgggcaacaagagcaaaactccatctcaaataaataaataaataataaaaaaataaaaaataaagagggtgggcatgatggctcaag

SEQ ID NO: 46633 - DNA, 120 bp, synthetic construct
  source 1..120: mol_type = other DNA
aaataaaataaaataagccaggtgtggtggcgggtgcctgtcatcccagctaactgggaggctgaggcaggagaatcacttgaactggggagaaggaggttgcagtgagccaagacagct

SEQ ID NO: 46634 - DNA, 120 bp, synthetic construct; identical to SEQ ID NO: 13119
  source 1..120: mol_type = other DNA

SEQ ID NO: 46635 - DNA, 120 bp, synthetic construct
  source 1..120: mol_type = other DNA
ggttcaagcaattctcctgcctcagcctcctgagtagccgggactacaggcgcgcgccactgcgaggctaattttttgtacttttagtagagacggggtttcaccgtgttagccaggatg

SEQ ID NO: 46636 - DNA, 120 bp, synthetic construct
  source 1..120: mol_type = other DNA
gacacgtctggctaatttttttgtatttttactagagacgaggttttgccgtgttccccatgctggtctcaaactcctgggatccagtgatccacccaccttagcctcccaacatgctgg

SEQ ID NO: 46637 - DNA, 120 bp, synthetic construct
  source 1..120: mol_type = other DNA
tttaatttattttattttatttatttatatatattttttgagacagagtctcgctctgtcacccaggctggagtgcagtggtgcgatctcagctcactgcaacctctgcctccagggttc

SEQ ID NO: 46638 - DNA, 120 bp, synthetic construct; identical to SEQ ID NO: 13120
  source 1..120: mol_type = other DNA

SEQ ID NO: 46639 - DNA, 120 bp, synthetic construct
  source 1..120: mol_type = other DNA
cagtctagaatttgctgatttttttctgtgataatttaagtttttgaatagtgatgcattcccgtgtcgtaaaactgaagagtcaaaagcatacccagactgcagccgctggggaagagt

SEQ ID NO: 46640 - DNA, 120 bp, synthetic construct
  source 1..120: mol_type = other DNA
gaggtcaggagtttgagaccagcctgactaacatagcaagaccccatctctacaaaaaatacaaaaaaattagctaggcatggttaactgctgtttttgtcaagatgggttattactatg

SEQ ID NO: 46641 - DNA, 120 bp, synthetic construct; identical to SEQ ID NO: 13121
  source 1..120: mol_type = other DNA

SEQ ID NO: 46642 - DNA, 120 bp, synthetic construct
  source 1..120: mol_type = other DNA
acactgtcagcccctccacctggaactttagaacttacctgtagccccagccttcacctgaaaccccagtcccccacctggaacccagtcccccacctggaacctgggcctccccaacct

SEQ ID NO: 46643 - DNA, 120 bp, synthetic construct
  source 1..120: mol_type = other DNA
ccccagtcccccacctgtaatccagcttgggtgagacagcaagaccctgtctcaaaaaaaaaaaaaaaaaaaaggccgagcacggtggctcacgcctgtaatcccagcactttgggaggc

SEQ ID NO: 46644 - DNA, 120 bp, synthetic construct
  source 1..120: mol_type = other DNA
ctactcgggaggctgaggcaggagaatcccttgaaccgggagacagaggttgcagtgagccgagatcgtgccactgctctctagcctgggcaacagagcaagactccgtttcaaaaaaaa

SEQ ID NO: 46645 - DNA, 120 bp, synthetic construct
  source 1..120: mol_type = other DNA
gctggagagcagtggtgcgatctcggctcactgcaacctctacctcccgggttcaagcgattctcctgcctcagcctcccgagtagcttggactacaggcgcccgccaccacgcccggct

SEQ ID NO: 46646 - DNA, 120 bp, synthetic construct; identical to SEQ ID NO: 13122
  source 1..120: mol_type = other DNA

SEQ ID NO: 46647 - DNA, 120 bp, synthetic construct
  source 1..120: mol_type = other DNA
gaactcctgacctcaggtgatccacccgcctcagcttcccaaagttctgggattacatgcgtgagccaccgcgcccggcctatttttcacttttttttttttagccgaatgtggcgagga

SEQ ID NO: 46648 - DNA, 120 bp, synthetic construct
  source 1..120: mol_type = other DNA
gggctcggccaagcgggcagcctcgcgcacgcgcactcaacccggacgcgggcctctccgccgcagcccgcgcccgccacctggcggccacagcggtccgcgcagaccgccggccccttt

SEQ ID NO: 46649 - DNA, 120 bp, synthetic construct; identical to SEQ ID NO: 13123
  source 1..120: mol_type = other DNA

SEQ ID NO: 46650 - DNA, 120 bp, synthetic construct
  source 1..120: mol_type = other DNA
gacggggtttcaccttgttagccaggatggtctcgatctcctgacctcatgatccacccgcctcggcctcccaaagtgctgggattacaggcgtgagccaccgcgcccggccaaggcccc

SEQ ID NO: 46651 - DNA, 120 bp, synthetic construct
  source 1..120: mol_type = other DNA
gagccggggggaacgtggggtcagcgaggggttctaggggaggaaatggtaggagagctcctgccctgcaggctggagggcaggatctgtgtgtttggggggagtcatgggtgggtagga

SEQ ID NO: 46652 - DNA, 120 bp, synthetic construct
  source 1..120: mol_type = other DNA
gacctgggcctctcccatctgtaacccaggccctcacctagaacctctgaacctggaacccagcccccacctgggacctgggcctctcccatctgtaacccaggccctcacctagaacct

SEQ ID NO: 46653 - DNA, 120 bp, synthetic construct
  source 1..120: mol_type = other DNA
tggctcacgcctgtaatcccagcactttgggaggccaaggcgggcagatcacgaggtcaggagatcgagaccatcctggctaacacggtgaaaccccgtctctactaaaaatacaaaaaa

SEQ ID NO: 46654 - DNA, 120 bp, synthetic construct; identical to SEQ ID NO: 13124
  source 1..120: mol_type = other DNA

SEQ ID NO: 46655 - DNA, 120 bp, synthetic construct
  source 1..120: mol_type = other DNA
ccgacctggagcctgggcctctctcatctataacccagaccctcacctagaacctgggcccctgcaactgtaacctgtggcactcactgtaagcccggacttcacctgaaaccccagtcc

SEQ ID NO: 46656 - DNA, 120 bp, synthetic construct; identical to SEQ ID NO: 13125
  source 1..120: mol_type = other DNA

SEQ ID NO: 46657 - DNA, 120 bp, synthetic construct
  source 1..120: mol_type = other DNA
gtgaggatgagagaatgcaaagaaagcattttccccaggactaccataaatagtcataagcatcactttttcctattaccatagcattaccatttgtcacggtttacccacccgaggtca

SEQ ID NO: 46658 - DNA, 120 bp, synthetic construct
  source 1..120: mol_type = other DNA
aggttcacgccattctcctgcctcagcatcccgagtagctgggactacaggcgcccgccaccgcgcccggctaattttttgtatttttagtagagacggggtttcaccttgttagccagg

SEQ ID NO: 46659 - DNA, 120 bp, synthetic construct
  source 1..120: mol_type = other DNA
ccggccaaggccccgacttttagaccactagtggaggaggtctgggacacgggtctgcggccagagagaggccaggagggaggactggcgggcatttctccgcagggtgggggtgaacgg

SEQ ID NO: 46660 - DNA, 120 bp, synthetic construct; identical to SEQ ID NO: 13126
  source 1..120: mol_type = other DNA

SEQ ID NO: 46661 - DNA, 120 bp, synthetic construct
  source 1..120: mol_type = other DNA
ctcacctagaacctgggacctctgaacctggaacccagcccccacctggggcctggaacctccaccaggaacttgtgcccccctctttggaacccttgccttcacctgaaaacccagtta

SEQ ID NO: 46662 - DNA, 120 bp, synthetic construct
  source 1..120: mol_type = other DNA
gagaccatcctggctaacacggtgaaaccccgtctctactaaaaatacaaaaaattagccaggcgttgtggcgggcgcctgtagtcccagctactcgggaggctgaggcaggagaatggc

SEQ ID NO: 46663 - DNA, 120 bp, synthetic construct; identical to SEQ ID NO: 5717
  source 1..120: mol_type = other DNA

SEQ ID NO: 46664 - DNA, 120 bp, synthetic construct
  source 1..120: mol_type = other DNA
tctataacccagaccctcacctagaacctgggcccctgcaactgtaacctgtggcactcactgtaagcccggacttcacctgaaaccccagtcccgcacctgtaaacctacaccccgcca

SEQ ID NO: 46665 - DNA, 120 bp, synthetic construct
  source 1..120: mol_type = other DNA
gaacctgcagtttggtgaggatgagagaatgcaaagaaagcattttccccaggactaccataaatagtcataagcatcactttttcctattaccatagcattaccatttgtcacggttta

SEQ ID NO: 46666 - DNA, 120 bp, synthetic construct; identical to SEQ ID NO: 13127
  source 1..120: mol_type = other DNA

SEQ ID NO: 46667 - DNA, 120 bp, synthetic construct
  source 1..120: mol_type = other DNA
catcccgagtagctgggactacaggcgcccaccaccacgcccagctaaattttgcattttttagtagagacggggtttcaccatgttagccaggatggtctcaatctcctgacctcgtga

SEQ ID NO: 46668 - DNA, 120 bp, synthetic construct
  source 1..120: mol_type = other DNA
ggctcatgcctataatcccagctttttcggaggccaaggtaggtggattacttgatgtcaggagttcgagaccagcctgggcaacatggtgaaactccgtctttactaaaaatacaaaaa

SEQ ID NO: 46669 - DNA, 120 bp, synthetic construct
  source 1..120: mol_type = other DNA
cagaggttgcagtgaaccaagactgcgtcactgcactccagcctgggcgacagagcaagactctgtctcaaaaaaagaaaaacacaggccaggaacggtggctcacacctgtaatcccag

SEQ ID NO: 46670 - DNA, 120 bp, synthetic construct
  source 1..120: mol_type = other DNA
cactaaaaataaaaaaaaaaaacctagccaggtgtggtggcgcacgcttgtaatcccagctactcgggaggctgaggcaggagaatcgcttgaacccaagaggtggaggttgcagtgagc

SEQ ID NO: 46671 - DNA, 120 bp, synthetic construct; identical to SEQ ID NO: 13128
  source 1..120: mol_type = other DNA

SEQ ID NO: 46672 - DNA, 120 bp, synthetic construct
  source 1..120: mol_type = other DNA
tctgattccgccatatgatccggttccgtgctggcccagcctggcctgggttggatgcctggtccgatgcccaaagccccatcaccctgaagcagatggagctggcatcctgaatgagac

SEQ ID NO: 46673 - DNA, 120 bp, synthetic construct
  source 1..120: mol_type = other DNA
ttagaatagttcttttttaaaaaaaaaaattttttttttgagacaggatctggctctgttgccaggcaggaatgcagtggcgtgatcatggctcactgcaacctccacctcccgggctca

SEQ ID NO: 46674 - DNA, 120 bp, synthetic construct
  source 1..120: mol_type = other DNA
ttgcccaggctggagggcaatggcgcgatctcggctcactgcaacctccgcctcctaggttcaggcaattctcctgcttcagcctcccgagtagctgggattacaggcgccagccaccac

SEQ ID NO: 46675 - DNA, 120 bp, synthetic construct; identical to SEQ ID NO: 13129
  source 1..120: mol_type = other DNA

SEQ ID NO: 46676 - DNA, 120 bp, synthetic construct
  source 1..120: mol_type = other DNA
gcagcctcaaactcccagcctctgttgatcctactgcctcagcctcccgagtagctgggactacaagcgtgggccactgctcctggtctattttcagttttttttttttgtttgtttttg

SEQ ID NO: 46677 - DNA, 120 bp, synthetic construct
  source 1..120: mol_type = other DNA
aagcaattctcctgcctcagccttccaagtagctgggactacaggcatgcaccactacgcctggctaatttttgtattttttaagtagagacaggctttcaccatgttgcccaggctggt

SEQ ID NO: 46678 - DNA, 120 bp, synthetic construct; identical to SEQ ID NO: 13130
  source 1..120: mol_type = other DNA

SEQ ID NO: 46679 - DNA, 120 bp, synthetic construct
  source 1..120: mol_type = other DNA
tctgtcgccaggttggagtgcagtggcgtgatctccgctcactgcaacctctgtctcccgggttcaagtgattctcctgcctcagcctcccgagtacctgggattagaagggtgcgccac

SEQ ID NO: 46680 - DNA, 120 bp, synthetic construct
  source 1..120: mol_type = other DNA
aggcgtgagccactgcacctggcctgttatttatgtatttatttttttttgagacaagttcttgctatgttgcccaggctggcctcaaactcctaggctcaagagatcctcccaaagttc

SEQ ID NO: 46681 - DNA, 120 bp, synthetic construct
  source 1..120: mol_type = other DNA
attaatgagatattttattttatttttatttatttatttttttgagacggagtctcgctctgtctcccaggctggagtgcggtggcgcgatcttggttcactgcaagctccgcctcctgg

SEQ ID NO: 46682 - DNA, 120 bp, synthetic construct; identical to SEQ ID NO: 13131
  source 1..120: mol_type = other DNA

SEQ ID NO: 46683 - DNA, 120 bp, synthetic construct
  source 1..120: mol_type = other DNA
ttacaggcgggcgccacgacacctggctagtttttgtatttttagtagagacgggggttttaccatgttgcccaggctggtcttgaactcttgacctcaggtgatcacctgccttggccc

SEQ ID NO: 46684 - DNA, 120 bp, synthetic construct
  source 1..120: mol_type = other DNA
cctctgcctcctgggttcaagcgatcctcctgcctcagcctcccaagtagctgagattacgggcgcccgccaccacgcctggctaatttttgtatttttagtagagacagggttttacca

SEQ ID NO: 46685 - DNA, 120 bp, synthetic construct
  source 1..120: mol_type = other DNA
actttggaaattcagtgtgtagggcaggcatggtgcctcatgcctgtaatcccagaactttgggaggccgaggcaggtggatcacctgaggttaggagttcgggaccagcctgaacaata

SEQ ID NO: 46686 - DNA, 120 bp, synthetic construct
  source 1..120: mol_type = other DNA
ttgcagtgaaccaagatcatgccattgcactccagcccgggcaacagagcgagactccgtctcaaaaaaaaaaaaagagagtcagtgtggagggaagtgtctctgttgggtccgggtgct

SEQ ID NO: 46687 - DNA, 120 bp, synthetic construct; identical to SEQ ID NO: 13132
  source 1..120: mol_type = other DNA

SEQ ID NO: 46688 - DNA, 120 bp, synthetic construct
  source 1..120: mol_type = other DNA
atttcgtggaattctccaagaagtgtttggagagatggaagaccacgtctgcaaaggagaagtgaagtttgaagagaaggcaaaaagtgacaaagctcgctgtgacagggagattaaaaa

SEQ ID NO: 46689 - DNA, 120 bp, synthetic construct
  source 1..120: mol_type = other DNA
gaccacgtctgcaaaggagaagtgaagtttgaagagaaggcaaaaagtgacaaagctcgctgtgacagggagattaaaaattacattcctccgaaatgtaagaaagggtaagaaaggaaa

SEQ ID NO: 46690 - DNA, 120 bp, synthetic construct
  source 1..120: mol_type = other DNA
caaaaagtgacaaagctcgctgtgacagggagattaaaaattacattcctccgaaatgtaagaaagggtaagaaaggaaagaaaaaggatcgcaatgctcctagaaggccaccatctgcc

SEQ ID NO: 46691 - DNA, 120 bp, synthetic construct
  source 1..120: mol_type = other DNA
caaccatatgagcagaaagcagttaagctacaggagagatatgaaaagggtattgctgcatatcgtgctaagggcaaaagtgaagcaggaaagaagggctcaaagaagaacaaaccagaa

SEQ ID NO: 46692 - DNA, 120 bp, synthetic construct; identical to SEQ ID NO: 13133
  source 1..120: mol_type = other DNA

SEQ ID NO: 46693 - DNA, 120 bp, synthetic construct
  source 1..120: mol_type = other DNA
gttctcctgcctcagcctcctgagtagctgggattacaggcacatgccaccacgctcagctaatttttgtatttttagtagagatggggtttcaccatgttggccaggctgctttcaaac

SEQ ID NO: 46694 - DNA, 120 bp, synthetic construct
  source 1..120: mol_type = other DNA
ggcagcacagcacacttgtaggaattagtatcaacagtacatcttgcgttttttaagatgctgcattttttaacattttgtaataaaattatgcgtatcaaaaaaacaaagaaattccgt

SEQ ID NO: 46695 - DNA, 120 bp, synthetic construct
  source 1..120: mol_type = other DNA
taataaaattatgcgtatcaaaaaaacaaagaaattccgtgtgtagttcacactcacagcacatctccgtccaggcacttgagagaatgactaggaggggttcttggaggaggtggtctt

SEQ ID NO: 46696 - DNA, 120 bp, synthetic construct; identical to SEQ ID NO: 13134
  source 1..120: mol_type = other DNA

SEQ ID NO: 46697 - DNA, 120 bp, synthetic construct
  source 1..120: mol_type = other DNA
tcctcctcccgggttcaagcgattctcctccctcagccttctgagtagctgggattacagacatgcacctgtaatttctactaaaaatacaaaaattagccgggcgtggtggcgcacgcc

SEQ ID NO: 46698 - DNA, 120 bp, synthetic construct
  source 1..120: mol_type = other DNA
tccagctaaacaacctggcgctagtgcaggaaaaggtggaaggcacggggctagcacaggagggttcaatattttcaaccttatcaagccatattttggcaactcttgtttttcacgaga

SEQ ID NO: 46699 - DNA, 120 bp, synthetic construct
  source 1..120: mol_type = other DNA
tctctttcccctggtccaagagtggctcaaaagaaggatttttgactggaattggccactttgtgttactttttgacccttgacctcgccccaaagggggatgcgggggaggggctctgg

SEQ ID NO: 46700 - DNA, 120 bp, synthetic construct; identical to SEQ ID NO: 13135
  source 1..120: mol_type = other DNA

SEQ ID NO: 46701 - DNA, 120 bp, synthetic construct
  source 1..120: mol_type = other DNA
cgaggaggcgtgccctgcggccgggcgtgcggtgtccgcggcggcgcagggagggggagggaggtaaacaagatggcggcggcgtgtcgggcgcggaagggggaggcggcccggggcgcc

SEQ ID NO: 46702 - DNA, 120 bp, synthetic construct
  source 1..120: mol_type = other DNA
gggggacgcgccgcccggggcccggcaccttcgggaaccccccggcccggagcctgcggcctgcgccgcctcggccgccgggagccccgtggagcccccgccgccgcgccgccccgcgga

SEQ ID NO: 46703 - DNA, 120 bp, synthetic construct
  source 1..120: mol_type = other DNA
gtgcgggccctcgcgggcgccgggcagcgaccagccctgagcggagctgttggccgcggcgggaggcctcccggacgcccccagccccccgaacgctcgcccgggccggcgggagtcggc

SEQ ID NO: 46704 - DNA, 120 bp, synthetic construct
  source 1..120: mol_type = other DNA
ccggggggtagcgacgtcgcggacccggcctgtgggatgggcggcccggagaagactgcgctcggccgtgttcatacttgtccgtgggcctgaggtccccggaggatgacctagcactga

SEQ ID NO: 46705 - DNA, 120 bp, synthetic construct; identical to SEQ ID NO: 13136
  source 1..120: mol_type = other DNA

SEQ ID NO: 46706 - DNA, 120 bp, synthetic construct
  source 1..120: mol_type = other DNA
aggtggtggacccgcagcagctgggcatgttcacggagggcgagctgatgtcggtgggtatggacacgttcatccaccgcatcgactccaccgaggtcatctaccagccgcgccgcaagc

SEQ ID NO: 46707 - DNA, 120 bp, synthetic construct
  source 1..120: mol_type = other DNA
agaagaagttgcgaaggatccccaacggggaggccaacgtgaagaagtaagtatggcttgctggggtcggggccgggccgggccagtcacggtgctgatggttctgtcttccttccttct

SEQ ID NO: 46708 - DNA, 120 bp, synthetic construct
  source 1..120: mol_type = other DNA
ggccagttgtcgcagcggggcgtgcgtttgcatgggctcttggactccagttaaaatgccctggtagcgaaaccctcctgagaagggagcggcccccaatcccctaagactagccccttg

SEQ ID NO: 46709 - DNA, 120 bp, synthetic construct; identical to SEQ ID NO: 13137
  source 1..120: mol_type = other DNA

SEQ ID NO: 46710 - DNA, 120 bp, synthetic construct
  source 1..120: mol_type = other DNA
cggggctgccgctgggcatcccggacgcctctgcatctgtgcgcggagaagctcctacctagggcagcactggccggcctgagcctctcccagctggtgggggtggccgggggtgtccct

SEQ ID NO: 46711 - DNA, 120 bp, synthetic construct
  source 1..120: mol_type = other DNA
tatctgctgggctaggcctcgagggactggcaaggacaccctgcgcagggcaccatgaccttggaaggaggtccggggaggggctgctgcggtgtctgctctcaccttcctcctgctcag

SEQ ID NO: 46712 - DNA, 120 bp, synthetic construct
  source 1..120: mol_type = other DNA
agtgcagtggcgcgaactgggctcactgcaagctccgcctcccgggttcatgccattctcctgcctcagcctcccgagtagctgggactacaggcacccgccaccacgcccggccaattt

SEQ ID NO: 46713 - DNA, 120 bp, synthetic construct; identical to SEQ ID NO: 13138
  source 1..120: mol_type = other DNA

SEQ ID NO: 46714 - DNA, 120 bp, synthetic construct
  source 1..120: mol_type = other DNA
gtcttgaacttctgacctcgtgatccacctgcctcagcctcccaaagtgctgggattaaaggcgtgagccaccgcgcccggccagcacgcttcttaatcagcatgcaggctgtgacatgc

SEQ ID NO: 46715 - DNA, 120 bp, synthetic construct
  source 1..120: mol_type = other DNA
tggacccgggtagaaggtgtggccagtgccttgagtcagtggagcagttgcctgtgcctggtctctgtgagatgggttggtcaggggctaggcagagcctgtgcctggtctctgtgagat

SEQ ID NO: 46716 - DNA, 120 bp, synthetic construct
  source 1..120: mol_type = other DNA
cacgcctgtaatcccagcactttgggaggctgaggtgggtggatcgcctgaggtcaggagttcgagaccagcctggccaacatggtgaaaccccatctctactaaaaatacaaaagttag

SEQ ID NO: 46717 - DNA, 120 bp, synthetic construct; identical to SEQ ID NO: 13139
  source 1..120: mol_type = other DNA

SEQ ID NO: 46718 - DNA, 120 bp, synthetic construct
  source 1..120: mol_type = other DNA
tggagacaggcaagaaggttgcaggaacctagtctggcccagtgcctgggagaacgggagggaacacggaggcagggaggcagaggggttggcaggacctggactggactgtgcgtcgca

SEQ ID NO: 46719 - DNA, 120 bp, synthetic construct
  source 1..120: mol_type = other DNA
atgaggggtgagccctgtcccttcctggtcactgtctgccatcaggagctgccccgcttacagctgtgattcaggagccactgcatttcctccagccccctgggtgctgccagggggtcc

SEQ ID NO: 46720 - DNA, 120 bp, synthetic construct
  source 1..120: mol_type = other DNA
cgctgcagggaaaaagcctcctttgtgtgtgggaagtttaataaactccgctcagattgtgtctcgcagcgagtgtctggaaccttccagacaagcctcaggcgtccggtcctccagttg

SEQ ID NO: 46721 - DNA, 120 bp, synthetic construct; identical to SEQ ID NO: 13140
  source 1..120: mol_type = other DNA

SEQ ID NO: 46722 - DNA, 120 bp, synthetic construct
  source 1..120: mol_type = other DNA
tgagtgtggtggcgcacgcctgtaatcccagctactctggaggctgaggcaggagaatcacttgaacccgggaagcagaggttgcggtgagccaagaccatgccattgcactccagcctg

SEQ ID NO: 46723 - DNA, 120 bp, synthetic construct
  source 1..120: mol_type = other DNA
tgagaccagcgtggccaacatggtgaaaccctctctctactaaaaatagaaaaactagccaggtgtggtggcacatgccaataatcccagctacttcatctgaggtcaggagttcaagac

SEQ ID NO: 46724 - DNA, 120 bp, synthetic construct; identical to SEQ ID NO: 13141
  source 1..120: mol_type = other DNA

SEQ ID NO: 46725 - DNA, 120 bp, synthetic construct
  source 1..120: mol_type = other DNA
ctccccgtgcttctcgggggacagcacggctagctgctgctgcggagcccacagtggggttctgggggggggggtgcaggcagaaggccgccatgcctccctccccctttccaccccagt

SEQ ID NO: 46726 - DNA, 120 bp, synthetic construct
  source 1..120: mol_type = other DNA
cctggcggtgtcccacggccctgccctttcctgtcacttccacctgttgcaaaacactgtgctttcgtatcttttctttctacctgtttggaaatgtgaaaatcactgctgccgtaggaa

SEQ ID NO: 46727 - DNA, 120 bp, synthetic construct
  source 1..120: mol_type = other DNA
ctcagtgtgcctggttgcggcgatgattggcagatgcttggacctatggtaaagaggattttcgcgagctgggagtcagtcctggactttgtaggtctttacatcccaggcggcctttat

SEQ ID NO: 46728 - DNA, 120 bp, synthetic construct
  source 1..120: mol_type = other DNA
tcaggggctgggcagccgcagaacagcgggggtaatgggtccactgggggttctgggctgtgcacacagtgggcttccggtgcccagccagctggggcaggcctggaatgttggttcctc

SEQ ID NO: 46729 - DNA, 120 bp, synthetic construct; identical to SEQ ID NO: 13142
  source 1..120: mol_type = other DNA

SEQ ID NO: 46730 - DNA, 120 bp, synthetic construct
  source 1..120: mol_type = other DNA
ctgggattacaggtatgagccactgcttcgccacgttcacctttatttacttatttatttatttttgagacggagtctcgctctgtcccccaggctggagtgctgtggcacgatcttggc

SEQ ID NO: 46731 - DNA, 120 bp, synthetic construct
  source 1..120: mol_type = other DNA
atggtctcgatctcctgaccttgtgatccgcccgcctcggcctcccaaagtcctgggattacaggcttgagtcactgtgcccggcccacctttttattttttattttatagagacaaggg

SEQ ID NO: 46732 - DNA, 120 bp, synthetic construct
  source 1..120: mol_type = other DNA
tttttttttttttttttgagatggagtctcgctctgtcacccaggctggagtgcagtggcgtgatcttggctcactgcaagctctgcctcccgggttcacaccattctcctgcctcagcc

SEQ ID NO: 46733 - DNA, 120 bp, synthetic construct; identical to SEQ ID NO: 13143
  source 1..120: mol_type = other DNA

SEQ ID NO: 46734 - DNA, 120 bp, synthetic construct
  source 1..120: mol_type = other DNA
tggattggcctgtcctgaacatttcacacgagtggtgtcacacaccgcgtggccttttgcgtccggcttgtctcacggagtgtgctgtcctcaaggggcatccgcgccgtggcctgggtc

SEQ ID NO: 46735 - DNA, 120 bp, synthetic construct
  source 1..120: mol_type = other DNA
ctgctttggtgcacgtgtgctcagccggcgtccctctagaatccttgagggccttgtttcagccacatcaggagggattcagggaccagggcacgcgggtctggagctgggtgttcctgg

SEQ ID NO: 46736 - DNA, 120 bp, synthetic construct; identical to SEQ ID NO: 13144
  source 1..120: mol_type = other DNA

SEQ ID NO: 46737 - DNA, 120 bp, synthetic construct
  source 1..120: mol_type = other DNA
ggaagcctggcgatctagagaagctgatgtgcacccatcatcccggaggtgactgccaccaggcgggggtggctccacccccactcctcccctggcataaatcgggggacgcacgtgcct

SEQ ID NO: 46738 - DNA, 120 bp, synthetic construct
  source 1..120: mol_type = other DNA
tgaagtgtccccgttgaggtggaggcagggcagggcgccttcggtgagggcgagtcctcctgtgcccgtttccccatctgtagaatgatggctcatggaggagacatggtgtcggcaggt

SEQ ID NO: 46739 - DNA, 120 bp, synthetic construct
  source 1..120: mol_type = other DNA
gcctcactgcccctcctcagggttaggactgtgctggagcctgggtgggtgtggggtggtccctgcacaggcagcaggaggtgggccagagcggtgctggacctgaaggcccgtggctcc

SEQ ID NO: 46740 - DNA, 120 bp, synthetic construct; identical to SEQ ID NO: 13145
  source 1..120: mol_type = other DNA

SEQ ID NO: 46741 - DNA, 120 bp, synthetic construct
  source 1..120: mol_type = other DNA
cccggggcctttgccgagcccagcctcaccctcagcgtccccctcaatgccctgggtgcctgccaggctgtggacacaggccctggccagttctataaataaccttgccgggccctgctg

SEQ ID NO: 46742 - DNA, 120 bp, synthetic construct
  source 1..120: mol_type = other DNA
cagggcaccgggcacagccaggggccggaaccagttgctcactggctccgcttctgggggactgtgtccctctgtgccccgtccccatcacaccttgctttcccttcatcctgctctcct

SEQ ID NO: 46743 - DNA, 120 bp, synthetic construct
  source 1..120: mol_type = other DNA
gggactggtgcactgggagggaaaggtgagccaaggcttcctgcaagaggcagccctgagctgggggtggggaaggctgggtcgtgggatacccctgacaccccaagttttttttttgag

SEQ ID NO: 46744 - DNA, 120 bp, synthetic construct
  source 1..120: mol_type = other DNA
aggcgcccatcaccacgcccggctaatttttgtatttttagtagagacaaggtttcaccatgttggccaggctggtttcgaactcctgacctcaggtgatccacctcggcctcccatagt

SEQ ID NO: 46745 - DNA, 120 bp, synthetic construct; identical to SEQ ID NO: 13146
  source 1..120: mol_type = other DNA

SEQ ID NO: 46746 - DNA, 120 bp, synthetic construct
  source 1..120: mol_type = other DNA
actcacgagagcaagagatccagaccatcctggccaacatggtgaaaccccatctctactaaaaatacaaaaattagctgggcgtggttgcgggcacctgtagtcccagcgactcagggg

SEQ ID NO: 46747 - DNA, 120 bp, synthetic construct
  source 1..120: mol_type = other DNA
aatgggatcctgtcatcccagcgttttccgaggccgaggtgggcagatgacttgagcctagtagttcaaacgagaccagcctgggcagcacggtgaaactgtctctactaaaatacaaaa

SEQ ID NO: 46748 - DNA, 120 bp, synthetic construct; identical to SEQ ID NO: 13147
  source 1..120: mol_type = other DNA

SEQ ID NO: 46749 - DNA, 120 bp, synthetic construct
  source 1..120: mol_type = other DNA
tgtactgttcctcagggtgtgtacctgggagtggagctgctggctcacagggtaacagacctttggagaagctgcagacgcttccacgcccacccactgggtgtgaggaccttgctcctc

SEQ ID NO: 46750 - DNA, 120 bp, synthetic construct
  source 1..120: mol_type = other DNA
gcctcccgagtagctaggacttgaggcacgtacctccacacctggctaatttttgtatttttagtagagacagggtttcgccgtgttgctcaggctggtctcgaactcctgagctcaggt

SEQ ID NO: 46751 - DNA, 120 bp, synthetic construct
  source 1..120: mol_type = other DNA
gggcgtggccaactgggcggcagctgcagagggggcagtgacaggcgggtgggtgtggcaggaccccacaatgtctctttctgtggcgtctccttcttcgcctgccccttcctatgggcc

SEQ ID NO: 46752 - DNA, 120 bp, synthetic construct; identical to SEQ ID NO: 13148
  source 1..120: mol_type = other DNA

SEQ ID NO: 46753 - DNA, 120 bp, synthetic construct
  source 1..120: mol_type = other DNA
gccggctgtggtgacacgtgcctgtagtcccagctactcgggaggctgaggcagggaaatcacttgaacctgggaggcagaggttgcagtgagctgagatcgggccaccgtgctccagcc

SEQ ID NO: 46754 - DNA, 120 bp, synthetic construct
  source 1..120: mol_type = other DNA
cagactagagggcgctgtgctcccaccccctaccgccctgagcctggacgcgtggcccctgcagggccctttcccacagcactgtgaactcacagcttctctctagggaagggaggaggt

SEQ ID NO: 46755 - DNA, 120 bp, synthetic construct
  source 1..120: mol_type = other DNA
cctgtcctctctgtcccagggaaattcaactactgaggaggttacggcacaaaaatgtcatccagctggtggatgtgttatacaacgaagagaagcagaaaatatatcctttccggtgtt

SEQ ID NO: 46756 - DNA, 120 bp, synthetic construct; identical to SEQ ID NO: 13149
  source 1..120: mol_type = other DNA

SEQ ID NO: 46757 - DNA, 120 bp, synthetic construct
  source 1..120: mol_type = other DNA
tacgggcacagcctccctacggggactttgcttcctaaggccctgtgcccagagcaagagccagaagtggtcctgaggctggggctgtgttccctgagccacgcggtcaggggccctggg

SEQ ID NO: 46758 - DNA, 120 bp, synthetic construct
  source 1..120: mol_type = other DNA
ctccccttccccgtaggctccttcctcctgggacgctggggcccctgggccttttcagaggggtggctgagggcagggtgggccctggtcccgaggaggggcaaggtgggtgcagagggt

SEQ ID NO: 46759 - DNA, 120 bp, synthetic construct
  source 1..120: mol_type = other DNA
caggaaatgctggacagcgtgccggagaagcgtttcccagtgtgccaggcccacgggtgcgtgcgcggggcaggggccagggtggggcgggggccgggggccaggcagggcaggctcctt

SEQ ID NO: 46760 - DNA, 120 bp, synthetic construct
  source 1..120: mol_type = other DNA
tgcaatggtgcgatctcggctcactgcaagctccgcctccgaggttcacgccattcttctgcctcagcttcccgagtagctgggattacaggcgcccgccaccacgcccggctaattttt

SEQ ID NO: 46761 - DNA, 120 bp, synthetic construct; identical to SEQ ID NO: 13150
  source 1..120: mol_type = other DNA

SEQ ID NO: 46762 - DNA, 120 bp, synthetic construct
  source 1..120: mol_type = other DNA
gggcctgctgttccagcaagactttggggtgcagccggcctgtggcccacaggaaaatgagacctgtggacatccggggccctgccagacgtggctcggccggacgagggtggccactgc

SEQ ID NO: 46763 - DNA, 120 bp, synthetic construct
  source 1..120: mol_type = other DNA
cccctgtgaggggcagggaggcctcggccccaggacgggtgtgtgctgcccgcaggtacttctgtcagctgattgacggcctggagtacctgcatagccagggcattgtgcacaaggaca

SEQ ID NO: 46764 - DNA, 120 bp, synthetic construct
  source 1..120: mol_type = other DNA
agggctgcacggcaccgccacaggcactgcacccgttcgcggcggacgacacctgccggaccagccagggctccccggctttccagccgcccgagattgccaacggcctggacaccttct

SEQ ID NO: 46765 - DNA, 120 bp, synthetic construct; identical to SEQ ID NO: 13151
  source 1..120: mol_type = other DNA

SEQ ID NO: 46766 - DNA, 120 bp, synthetic construct
  source 1..120: mol_type = other DNA
tcctaccccgtagcctccactagtggaaggtggtgaagacagaggtgtccttgagtccacagggcctctggtccagcagccacgggacgcctctgtccctggggtagagctggggctcct

SEQ ID NO: 46767 - DNA, 120 bp, synthetic construct
  source 1..120: mol_type = other DNA
tcgggaaggggagctacgccatcccgggcgactgtggccccccgctctctgacctgctgaaaggtgggagcctcatccctctgcccgcagccccagggaggcggggcttttgtgcagaaa

SEQ ID NO: 46768 - DNA, 120 bp, synthetic construct
  source 1..120: mol_type = other DNA
accctgcttctgggccctgttcaccctccgaactcccaccccagagggcagtgctgccctgcgcctcccccagccccaccctcgggggctccctggcttgcagggtctgtcagggttgtc

SEQ ID NO: 46769 - DNA, 120 bp, synthetic construct; identical to SEQ ID NO: 13152
  source 1..120: mol_type = other DNA

SEQ ID NO: 46770 - DNA, 120 bp, synthetic construct
  source 1..120: mol_type = other DNA
gcagcacaggtgagcggcccctgggggcagtggggccgaggctgcagggaggccggccatgtgggcagctggttgagcgggcgctagagcagggcgtggtgggggtgccaggctgggctg

SEQ ID NO: 46771 - DNA, 120 bp, synthetic construct
  source 1..120: mol_type = other DNA
tccgtccctgccctaggcatggagatgcgccaggaagggcacagctggtcccaaacactggcgagagcctctctttttcccctcctcctggggctcccagcagcagggtgtggctgggat

SEQ ID NO: 46772 - DNA, 120 bp, synthetic construct
  source 1..120: mol_type = other DNA
cccttgagccgtctgctggagcccctccgagccccgaggccacccactgagaccggctctgggagtgggagtgtccggacccctgaggcgctggtgctgattgtgccttgggggtctctg

SEQ ID NO: 46773 - DNA, 120 bp, synthetic construct; identical to SEQ ID NO: 13153
  source 1..120: mol_type = other DNA

SEQ ID NO: 46774 - DNA, 120 bp, synthetic construct
  source 1..120: mol_type = other DNA
ggcgccactgcttctgggcgtttgcagctggttccggaagaaacatcctccggctgaagcaccagtgcccatcccaccgagcccagacaccaaggaccggtggcgcagcatgactgtggt

SEQ ID NO: 46775 - DNA, 120 bp, synthetic construct
  source 1..120: mol_type = other DNA
ggctctgctgactcggccaggatgtcccacgggagcagggtgcctgcctgtctgcaacaaggacagcttctgccctctggtggccaatcccacgtccccaaagcctccagcccacctgca

SEQ ID NO: 46776 - DNA, 120 bp, synthetic construct
  source 1..120: mol_type = other DNA
ccaggcaccacccaccggccttggcctgagtcccagcaggagcaggcgggggagccccagggtcgggggagggtaggtgagagtcagggtgcagggtggcccctcagacagctggcatga

SEQ ID NO: 46777 - DNA, 120 bp, synthetic construct; identical to SEQ ID NO: 13154
  source 1..120: mol_type = other DNA

SEQ ID NO: 46778 - DNA, 120 bp, synthetic construct
  source 1..120: mol_type = other DNA
ggggctttctgctttactgtttcagcgggaagtggtgggcaggggccggcctgagaaggggggtacgccaggcaggttgggatgtgaggacccagtgcacagggtccacccccgggcccg

SEQ ID NO: 46779 - DNA, 120 bp, synthetic construct
  source 1..120: mol_type = other DNA
gggggcccccgagagcacagtgtatgggggtccccggggggtacagtgtctgggggccccccaggaggatgcagcatgtgggggccccccaggagggtacagcgtgtgtggggcccccag

SEQ ID NO: 46780 - DNA, 120 bp, synthetic construct; identical to SEQ ID NO: 13155
  source 1..120: mol_type = other DNA

SEQ ID NO: 46781 - DNA, 120 bp, synthetic construct
  source 1..120: mol_type = other DNA
gcttccctcctggggaccctcaggcctgtgtgagacctgggctgccctggggtgaggtgcctgggaggagagcaggggctgggccacctttttcatgaccctgctaagcccactgtgggt

SEQ ID NO: 46782 - DNA, 120 bp, synthetic construct
  source 1..120: mol_type = other DNA
aggctcaacttcaggcttcagcgtgagccccgtccctgacctgcagagcccccttgcgttggggcaggacagcccggcgccctcgggtcaggccatcctctgcgctctgccggggctgct

SEQ ID NO: 46783 - DNA, 120 bp, synthetic construct
  source 1..120: mol_type = other DNA
acaggagtgtggggtggggcaagggcccagtggcggctgtgcccgctgatgcagagctggggcaccttgtccacagggtctgccccaccagagacgggctgggcccaagctcagacctat

SEQ ID NO: 46784 - DNA, 120 bp, synthetic construct
  source 1..120: mol_type = other DNA
cacctcccggattcaagcaattctgcctcagcctcctgagtagctgggattacaagtgcgcgccagcatgcccggctaatttttgtatgtttagtagagacgggggtttcaccatgttgg

SEQ ID NO: 46785 - DNA, 120 bp, synthetic construct; identical to SEQ ID NO: 13156
  source 1..120: mol_type = other DNA

SEQ ID NO: 46786 - DNA, 120 bp, synthetic construct
  source 1..120: mol_type = other DNA
cccctgccattgtgagaacagtgtccacctgggcagggtgggcagccccaggcctgtgggtttcaccagggtgctggtgatggttggtggctagcagggactgggggcagctgggggccc

SEQ ID NO: 46787 - DNA, 120 bp, synthetic construct
  source 1..120: mol_type = other DNA
cctctagaaccaaccatgggccagggtgccccaggggagcacgggagggtcctgccttgtcagcttgcctcctactcgtgaggttcctgcagtcagtacctgggtggggtcccacctgcg

SEQ ID NO: 46788 - DNA, 120 bp, synthetic construct; identical to SEQ ID NO: 13157
  source 1..120: mol_type = other DNA

SEQ ID NO: 46789 - DNA, 120 bp, synthetic construct
  source 1..120: mol_type = other DNA
agggcggagggccgggcccccaaccctgcccgcaaggcctgctccgccagcagcaagatccgccggctgtcggcctgcaagcagcagtgaggctggccgcctgcaggtggggcgcggcgg

SEQ ID NO: 46790 - DNA, 120 bp, synthetic construct
  source 1..120: mol_type = other DNA
gtggcttggccacgtagcgatccccgtggagggtgccgtctcggggcctggtgtctggccagcgtgctggtcatggaggcctacgtgtggcggggctctgggggggcgtgccgtcctcac

SEQ ID NO: 46791 - DNA, 120 bp, synthetic construct
  source 1..120: mol_type = other DNA
ccagtgggtggtgggtggtggggaggggccgcggcctccatggctctgccggggtgccgcaggctctgagccagctgccaagtatggctgaggctgagtcgtgccggacgctgccctgtc

SEQ ID NO: 46792 - DNA, 120 bp, synthetic construct; identical to SEQ ID NO: 13158
  source 1..120: mol_type = other DNA

SEQ ID NO: 46793 - DNA, 120 bp, synthetic construct
  source 1..120: mol_type = other DNA
atcctcccaggggcccgcgggaggcggagaaccggtgcccaggctgacctcttccgtcttccttccaccctgcagcccgtgtccaggagccccgccaggtgcccgcgccaggccctcagt

SEQ ID NO: 46794 - DNA, 120 bp, synthetic construct
  source 1..120: mol_type = other DNA
cagccctcccccctcggccgcccggcagtgcacgcggcttgttgacttcgcagccccgggcggagccttcccgggcgggcgtgggaggagggaggcggcctccatgcactttatgtggag

SEQ ID NO: 46795 - DNA, 120 bp, synthetic construct
  source 1..120: mol_type = other DNA
ccacctggaagccgcgcggccgctttggttttttgtttggttggttccattttctttttttctttttttttttaagaaaaaataaaaggtggatttgagctgtggctgtgaggggtgttt

SEQ ID NO: 46796 - DNA, 120 bp, synthetic construct; identical to SEQ ID NO: 13159
  source 1..120: mol_type = other DNA

SEQ ID NO: 46797 - DNA, 120 bp, synthetic construct; identical to SEQ ID NO: 13160
  source 1..120: mol_type = other DNA

SEQ ID NO: 46798 - DNA, 120 bp, synthetic construct
  source 1..120: mol_type = other DNA
cctggatcgggaaggggtttgagaggagtgcggcttggatccccatcctggatctgtgctggagggaggcgggaggctatttgggggtgtgtttgggctcaggatctgggtctgacgctg

SEQ ID NO: 46799 - DNA, 120 bp, synthetic construct
  source 1..120: mol_type = other DNA
ggggaatgctgaagttgatgcgtggacttggagaggggaagttgaagtggatgcaggggcctggcgctgcagcggatctgggtggcatgtgctgggattgccaatgcggagctgtgaatg

SEQ ID NO: 46800 - DNA, 120 bp, synthetic construct
  source 1..120: mol_type = other DNA
ctacccggccctccggggctagcggctgagcggtgctggggctggcagaccccgcccccacgcggcctctcggagccgggagccgatcgggccggggctggggtctggcggcccagcccc

SEQ ID NO: 46801 - DNA, 120 bp, synthetic construct; identical to SEQ ID NO: 13161
  source 1..120: mol_type = other DNA

SEQ ID NO: 46802 - DNA, 120 bp, synthetic construct
  source 1..120: mol_type = other DNA
gcggcgctgctcccgggggcgacgggtgagcggcggcgcggcgggcgggcgactgcggggcgcgcgggccggacccggcctctggctcgctcctgctctttctcaaacatggcgcggggc

SEQ ID NO: 46803 - DNA, 120 bp, synthetic construct
  source 1..120: mol_type = other DNA
gcgggcggacgtgtccggctgcccgaggccgccccgctcgggactccccggggaggtggagtcgggcggagtcgtccgaggtccggggctgccctctggggtgtgagtgggcgagggcca

SEQ ID NO: 46804 - DNA, 120 bp, synthetic construct
  source 1..120: mol_type = other DNA
tgccgaacccggggcggggtttgaggttggggtggaaggcggctcccgggcggggtgtgagctccgagcctctagggcttcgtccagtgggagtcgggggcgacgtgtggtgagacccct

SEQ ID NO: 46805 - DNA, 120 bp, synthetic construct
  source 1..120: mol_type = other DNA
tgtttcttctttcgtgcgtctggggagtgttgaagtgagtccagtaaccagacggctacggattgttttcatagtggaaacttgaacgtttgctcattctgcgggttttggaaattttgg

SEQ ID NO: 46806 - DNA, 120 bp, synthetic construct; identical to SEQ ID NO: 13162
  source 1..120: mol_type = other DNA

SEQ ID NO: 46807 - DNA, 120 bp, synthetic construct
  source 1..120: mol_type = other DNA
cctaatagctaccgtctatgtattgtgcattactacgatgtaaatgcatacactattgtataattacattatttaatcaccacaagtaaactcccaggagtagtggcatttgccccactt

SEQ ID NO: 46808 - DNA, 120 bp, synthetic construct
  source 1..120: mol_type = other DNA
gtatacatcatactatctggcgtagcccatttttcttcttcagtcgtctgatgagcaattggtctttattatccactttggattctgtcctcatgatttgagtatcagataggcttcatt

SEQ ID NO: 46809 - DNA, 120 bp, synthetic construct
  source 1..120: mol_type = other DNA
tatagttaggcatgaaacacaggtaacatttccacaccgctattaacttgaataacacagtgcactcttttccaccagaagtagcacaagaagcgttcatgtattcaagtaacagtagtg

SEQ ID NO: 46810 - DNA, 120 bp, synthetic construct; identical to SEQ ID NO: 13163
  source 1..120: mol_type = other DNA

SEQ ID NO: 46811 - DNA, 120 bp, synthetic construct
  source 1..120: mol_type = other DNA
atgtatatcccatctgagaatgctatttgcttcctttctgccatttcataactttttttctttgaaaacgtgcccccaatccaactcttctatgaatgcctcttgaatgtctcctccttt

SEQ ID NO: 46812 - DNA, 120 bp, synthetic construct
  source 1..120: mol_type = other DNA
ccgtgaaggtttataagatttcccatttgtattcagcacttagaacaacacttagcagcttatgattggggccatctctgagtatcctaccagggatctcatttctcattactgcagacc

SEQ ID NO: 46813 - DNA, 120 bp, synthetic construct; identical to SEQ ID NO: 13164
  source 1..120: mol_type = other DNA

SEQ ID NO: 46814 - DNA, 120 bp, synthetic construct
  source 1..120: mol_type = other DNA
gtaagtccagtttatgcaatattaacttgtaattccgtataaataatcaggaaaagttgtatggcgtgttgaaagcaattggttatttgtcctaccttcaccagcagttatgcagaaaat

SEQ ID NO: 46815 - DNA, 120 bp, synthetic construct
  source 1..120: mol_type = other DNA
cagttcccactgggccatgtgtgttttggttaaacatcctttctgattggttggtacccttgtagtgccagttgttaaatatttttaatatcatttctatagggaggcattagtattcaa

SEQ ID NO: 46816 - DNA, 120 bp, synthetic construct
  source 1..120: mol_type = other DNA
cttttgaagttgtgtccccaactgtcctggggcctactccaagggaggaaacaaggcttttactgactgactggcaagttactcttcagagttaggttccttattctgtactgtggaatt

SEQ ID NO: 46817 - DNA, 120 bp, synthetic construct; identical to SEQ ID NO: 13165
  source 1..120: mol_type = other DNA

SEQ ID NO: 46818 - DNA, 120 bp, synthetic construct
  source 1..120: mol_type = other DNA
ttccttaagtgaagtaggccttgaacttcacagaatttatgaaaagtgaattctaaaggtggaagggagggggaatgattaaagccttaaagttctcaaggaaaaggtcaattttttttt

SEQ ID NO: 46819 - DNA, 120 bp, synthetic construct
  source 1..120: mol_type = other DNA
ggtttagaatattagatgatccgctttgttgttgaaattaagagaggaattgacataaaaataatcaagaggaagataaatcttgttcctgtgaggagggccgctcatgtagggaagacc

SEQ ID NO: 46820 - DNA, 120 bp, synthetic construct
  source 1..120: mol_type = other DNA
atatgttcatgtgtaataaatggaattttgaaaatgccattatcctatggatggcccttctgatgtgagaacgtgtctcttcaaaccacagagccccttgcaaatgtcgacacacctctt

SEQ ID NO: 46821 - DNA, 120 bp, synthetic construct; identical to SEQ ID NO: 13166
  source 1..120: mol_type = other DNA

SEQ ID NO: 46822 - DNA, 120 bp, synthetic construct
  source 1..120: mol_type = other DNA
ttgctttccaggtaagtttcttatggctacccttcttcatcatgaagaaaattggttggtagacttgtaattattcatctcagacatcactttcttaaatactagtggactaagttcagt

SEQ ID NO: 46823 - DNA, 120 bp, synthetic construct
  source 1..120: mol_type = other DNA
taaaaaaaattgacttgcaaagtatacacacaggttgctttgaaatttcttgaagggttgcaagaatatgctacatattctatctgtcttgtctcgtttaattctctcttctctcttttt

SEQ ID NO: 46824 - DNA, 120 bp, synthetic construct
  source 1..120: mol_type = other DNA
ttcttacttatttgctgcttaatttccaaactcttaagcccatttgttcccagatacaggtgaccagtgctcagaagataactgtaggttttgataacatcggctctaccccaagattct

SEQ ID NO: 46825 - DNA, 120 bp, synthetic construct; identical to SEQ ID NO: 13167
  source 1..120: mol_type = other DNA

SEQ ID NO: 46826 - DNA, 120 bp, synthetic construct
  source 1..120: mol_type = other DNA
cgtacgtccatgctcctttcatatagagtaaatacattgttagagccacttcagcaggaaagtttcctttcccttttttgcaaaccatgagaatttgcttcagattgccttgattacagt

SEQ ID NO: 46827 - DNA, 120 bp, synthetic construct
  source 1..120: mol_type = other DNA
tattgatttatacatatattcatagcaaattcttttcttctaaaagttacataagcacaggactgaaaatttgtattagagaaaggaaaaaaaccatcaccagccattattaacatttgg

SEQ ID NO: 46828 - DNA, 120 bp, synthetic construct
  source 1..120: mol_type = other DNA
gtgggcgaatcacgaggtcaggagttcgagaccagcctggccaacatgatgaaaccctgtctctactaaaaataacaaaaaattagctggacgtagtggcaggcacctgtaatcccagct

SEQ ID NO: 46829 - DNA, 120 bp, synthetic construct
  source 1..120: mol_type = other DNA
aaacaaacaaaaaaacagcaacaaaccattctttaatcattctatttcagcagtttatgaaagctaataaaagtgtttaaattgacaaacagcttcagtttacagaggaaagagcttcag

SEQ ID NO: 46830 - DNA, 120 bp, synthetic construct; identical to SEQ ID NO: 13168
  source 1..120: mol_type = other DNA

SEQ ID NO: 46831 - DNA, 120 bp, synthetic construct
  source 1..120: mol_type = other DNA
aagtttcaggatttctaagaggagaaatggaagttcatggtgtaaagggtgggctcagagaattatgggccttgaaaatcaggagagtggttttaatgtggaaaaagaatgtctaattgt

SEQ ID NO: 46832 - DNA, 120 bp, synthetic construct
  source 1..120: mol_type = other DNA
atttgaaacaaagaaatcagaggaattagtagtagggcctgtgtgtggctgttcccttgcttgtgtgctcttccctcacatacctgcatggcttcctccctcacctcctgcaagtctttg

SEQ ID NO: 46833 - DNA, 120 bp, synthetic construct
  source 1..120: mol_type = other DNA
atcatatgtacttatttactgtttattgtctccttcctatcattctatgctttgtgaaagtggatgtcttcgttttgttcactaatgtatctcaagtgtatggaaagtgcctggtgcatc

SEQ ID NO: 46834 - DNA, 120 bp, synthetic construct
  source 1..120: mol_type = other DNA
gataatgcctttaacttaatgagtaatttggcacgaggattaaggggagacgaattctggtttaagcatgttgagtttgaggtgaaggtagccaaataaaattgctcagtagtcagcaaa

SEQ ID NO: 46835 - DNA, 120 bp, synthetic construct; identical to SEQ ID NO: 13169
  source 1..120: mol_type = other DNA

SEQ ID NO: 46836 - DNA, 120 bp, synthetic construct
  source 1..120: mol_type = other DNA
gtcctggtccgtttgctgggatatggttctttcctgttttgcaggttcatgctatttttcccccacctctcttagtaaagatgtatatattcagaattacttgtgatcttctggttgtat

SEQ ID NO: 46837 - DNA, 120 bp, synthetic construct
  source 1..120: mol_type = other DNA
catggttgctgatgttacaggtgtcagctttactatctcctggagctccctgatggctatccttttaaatgcttttcctgttgtttttctcaatgaaccaaacactggtgcagttgtatc

SEQ ID NO: 46838 - DNA, 120 bp, synthetic construct
  source 1..120: mol_type = other DNA
ggagtagtatataagcaccaacatatctggctgtaattagagtctaatcagtgtatctgtgactcacttttcaaaagaggatagttcctaatttacctgatcgttgtgaagatagtgtac

SEQ ID NO: 46839 - DNA, 120 bp, synthetic construct; identical to SEQ ID NO: 13170
  source 1..120: mol_type = other DNA

SEQ ID NO: 46840 - DNA, 120 bp, synthetic construct
  source 1..120: mol_type = other DNA
cttttgggcataatccaagcttccttgcttactggttttagccaaatatagtctaaatatccctaggattcatggcttcaagatgagcagtatcttgttgctcctgtattatacgagaaa

SEQ ID NO: 46841 - DNA, 120 bp, synthetic construct
  source 1..120: mol_type = other DNA
gtaagtcaaaaagggaaagaaaaagagaacaattatccgtaagtttagctgaggaaagctttagaagttgaacacaatacttagctctgagttttctggtaaccaaggcaagtaaggaag

SEQ ID NO: 46842 - DNA, 120 bp, synthetic construct; identical to SEQ ID NO: 13171
  source 1..120: mol_type = other DNA

SEQ ID NO: 46843 - DNA, 120 bp, synthetic construct
  source 1..120: mol_type = other DNA
actatttagtctggcttacaaagacatttttctcatgcccttatcttttggtgtgtctccatttgatacacttcatcagagtactgctaccaaaggcagagccagacatttaccttcaaa

SEQ ID NO: 46844 - DNA, 120 bp, synthetic construct
  source 1..120: mol_type = other DNA
gagtgtggccctactgtactggtctcacagtaatcccagtattcatggaaaagataggcacgtacattagcatgagggcattctgtggttagaagcattctgatttcattgggaaaaaca

SEQ ID NO: 46845 - DNA, 120 bp, synthetic construct
  source 1..120: mol_type = other DNA
ttctgcagttgctgtactacttcaggtctgttccagtgtttccttgttctcaccaccaagactgaacctccttatttttgttcatttgcttcaggaaaaccattccatctagatttccta

SEQ ID NO: 46846 - DNA, 120 bp, synthetic construct; identical to SEQ ID NO: 13172
  source 1..120: mol_type = other DNA

SEQ ID NO: 46847 - DNA, 120 bp, synthetic construct
  source 1..120: mol_type = other DNA
gttcagcacgtggttgttgatttgagtactttctccagttgaaaaactgacattttaattttgttattcaatgtgtgatagatttaaataaaaacacccaagattgtgtattgtagattt

SEQ ID NO: 46848 - DNA, 120 bp, synthetic construct
  source 1..120: mol_type = other DNA
atgtttgtcagtgaggaaagacaatttctgattgccagtcccaccaaagcgttggcagattaacacagcattgtagattactttcctaggaagagatgctccttttttctccctttccat

SEQ ID NO: 46849 - DNA, 120 bp, synthetic construct
  source 1..120: mol_type = other DNA
tttcttcactttattcttaaaaaaaaaaaaaaaggccacataagtattttatgtagatctcatctatcatttaagttttgtcagatccagcctgctcttgccttaccatgggagaaggga

SEQ ID NO: 46850 - DNA, 120 bp, synthetic construct; identical to SEQ ID NO: 13173
  source 1..120: mol_type = other DNA

SEQ ID NO: 46851 - DNA, 120 bp, synthetic construct
  source 1..120: mol_type = other DNA
cagttatccaaggtataaataacatcaagacccttatgcctctgagcctgatagatccttatcttttaataaccaaccccccactttcttcagtagccatgatgctactgtatcaatgct

SEQ ID NO: 46852 - DNA, 120 bp, synthetic construct
  source 1..120: mol_type = other DNA
tacagtacatctcaagcctaagttttcatatacacatagtttagtctcaaagggcaaatgtttccctgaaaggagttcagtcaacactagatgcttatatctttaggctccaagggagtc

SEQ ID NO: 46853 - DNA, 120 bp, synthetic construct
  source 1..120: mol_type = other DNA
tgtccttgcttggttcaattcagctgtgttcttctaggagactgcaaccacaatttaactgctttgctttggtattttgtttgacaagggagatgaatgtttcagatgagacggagtctc

SEQ ID NO: 46854 - DNA, 120 bp, synthetic construct
  source 1..120: mol_type = other DNA
ctgtctcagcctcccgtgtagctgggattacaggcatctgccaccacgcctggctatttttttttttttttttgtatttttagtagagatggggtttcaccgtgttggccaggctggtgt

SEQ ID NO: 46855 - DNA, 120 bp, synthetic construct; identical to SEQ ID NO: 13174
  source 1..120: mol_type = other DNA

SEQ ID NO: 46856 - DNA, 120 bp, synthetic construct
  source 1..120: mol_type = other DNA
ttggtaaaaccttttttcccccagtgtacaatcaccttcatcataaatcaagaggttgtatatgtgagggtctgtttctctgtaatctctgttctgtttgcccatttgtccttgtgccat

SEQ ID NO: 46857 - DNA, 120 bp, synthetic construct
  source 1..120: mol_type = other DNA
cttgtcagttcccactgaataaaaaaaccctgtggggattctgatttgattttattgaatctacagatcactttatggaatattgacctctttacagtattgaatcttccagttaggaac

SEQ ID NO: 46858 - DNA, 120 bp, synthetic construct
  source 1..120: mol_type = other DNA
aggtttattcctagtttttagatttttaaaaaacgttttctatttattactggtttaagaatgattttttaatttaattttttttggtatagtgagtaaccttatattagtgaccttgct

SEQ ID NO: 46859 - DNA, 120 bp, synthetic construct; identical to SEQ ID NO: 13175
  source 1..120: mol_type = other DNA

SEQ ID NO: 46860 - DNA, 120 bp, synthetic construct
  source 1..120: mol_type = other DNA
aatcatgaatagctgttgaattttatcagtttttttgtttttgtttacatcacctaaactgccaaactcccttactgttttctttcttttttttttttttttttttgagacaggatctca

SEQ ID NO: 46861 - DNA, 120 bp, synthetic construct
  source 1..120: mol_type = other DNA
caccacacctggctcaaacttttattttggcatcttttgtacaatgtttttgtatatcctctacctaaaatgactttcctttcttcactagctttccttaagtcttagtttaggtgtcat

SEQ ID NO: 46862 - DNA, 120 bp, synthetic construct
  source 1..120: mol_type = other DNA
gtgaatctgagggcaggaatctcaatcctaattatctctatcctcctaaaggttttttctttcttcctacacaggttacattcactgttgtgttctgagaaaaggtgttcaggccttgct

SEQ ID NO: 46863 - DNA, 120 bp, synthetic construct; identical to SEQ ID NO: 13176
  source 1..120: mol_type = other DNA

SEQ ID NO: 46864 - DNA, 120 bp, synthetic construct
  source 1..120: mol_type = other DNA
tttgtcctacgtgaggggttgtggggagtaggggtggaaatcactgtagattatcaagtaatcctttttttctttgtgtacttttggaataaatctagattatgttgatgtaactgttag

SEQ ID NO: 46865 - DNA, 120 bp, synthetic construct
  source 1..120: mol_type = other DNA
tacacactgggtgtgtccctacactgttaatttgggttggaactgaaaatatactttctgtgtgtgcctactgctactgtagtgaagttcttgagccaggtctgttcagtcatattgttg

SEQ ID NO: 46866 - DNA, 120 bp, synthetic construct
  source 1..120: mol_type = other DNA
tattgtgttctgtgtcagtattgcctaccagagctgtctcaacattagctctgattctctgtctagcatctagaccagagactggcacgtaataggagctccaaagaaatacttgttgaa

SEQ ID NO: 46867 - DNA, 120 bp, synthetic construct
  source 1..120: mol_type = other DNA
ccctcaaaccttctgagattggtactgtttgttagtatgttataaatttaggaagtaagttgaagaaatttaggttcaaataagttaagtgacttcctcaggattactcagtgcctgact

SEQ ID NO: 46868 - DNA, 120 bp, synthetic construct; identical to SEQ ID NO: 13177
  source 1..120: mol_type = other DNA

SEQ ID NO: 46869 - DNA, 120 bp, synthetic construct
  source 1..120: mol_type = other DNA
aaaacaaggtcacttgacaggactgtaattgtaatcacactatacagctttacttcctgccctttagtagtaggaccattcccttgtccttaaacatgcttctaaaataccagttttaat

SEQ ID NO: 46870 - DNA, 120 bp, synthetic construct
  source 1..120: mol_type = other DNA
ctctcacctattgtttcctcagacaactgtaagtagtagaattgatggattaaaagatactttttaaaggctctgactcttctaaaatgtgttgttaaactcctcagatctgctaaccag

SEQ ID NO: 46871 - DNA, 120 bp, synthetic construct; identical to SEQ ID NO: 13178
  source 1..120: mol_type = other DNA

SEQ ID NO: 46872 - DNA, 120 bp, synthetic construct
  source 1..120: mol_type = other DNA
actagaggaaaattttatgtacattatatggtgttctctattttgacaagcttactttgatattactgctgcaaggtagccccaggagggttgaattgagaagaactgagtattttgagg

SEQ ID NO: 46873 - DNA, 120 bp, synthetic construct
  source 1..120: mol_type = other DNA
ataaaaagaaaaggagaatctatatagtatgctttactccaaagctggatgagggagaaaagaggacacgtctccttgagaagggggcatgtgttgagaatggagaaaaggggtaaggca

SEQ ID NO: 46874 - DNA, 120 bp, synthetic construct
  source 1..120: mol_type = other DNA
gtgatctgctttcagctgtagtgaagcaaactgcataaaggacattgtgcatgttaggtcttttacttgcctgttggtacatgtttgtaatatttggaaatactctcactgcgaagaaaa

SEQ ID NO: 46875 - DNA, 120 bp, synthetic construct; identical to SEQ ID NO: 13179
  source 1..120: mol_type = other DNA

SEQ ID NO: 46876 - DNA, 120 bp, synthetic construct
  source 1..120: mol_type = other DNA
tgaccagaagggcattgctagtgaatttcaaagagagatttcagttgagctctgaactggaggaagatgggtgatagaaggctggagagggccagtaacaagggttgaaaaaggaaagag

SEQ ID NO: 46877 - DNA, 120 bp, synthetic construct
  source 1..120: mol_type = other DNA
tgttccatatattaatactatacacaactgtttacctctcagcttttctagcaagacatatgggcttgtgaattaaccctgggtagccctggcattagatagaattaatagtgcttccat

SEQ ID NO: 46878 - DNA, 120 bp, synthetic construct
  source 1..120: mol_type = other DNA
ccatgaataataaccccaagggtcctgttgtctctttttcctcatgtcacttcctttggtactaactgtcaccatgctaacatctgcaaactttgaaaattctgatttattctgcaatat

SEQ ID NO: 46879 - DNA, 120 bp, synthetic construct; identical to SEQ ID NO: 13180
  source 1..120: mol_type = other DNA

SEQ ID NO: 46880 - DNA, 120 bp, synthetic construct
  source 1..120: mol_type = other DNA
atacttagacttgggtcccattcccaagatgtctcattatgtatatgcaaatattccaaaatctgaaaaaaatcccaaatccaaaacacttctggtcctgagcattttgcatgagggata

SEQ ID NO: 46881 - DNA, 120 bp, synthetic construct
  source 1..120: mol_type = other DNA
tgtattcagattttagaaatgtaaagcttagagaaatgtgcatctcaagattaagaaagctatgcccactgttaaagactggggcatggaaacaaagttggacagtgtagtagaaaggtc

SEQ ID NO: 46882 - DNA, 120 bp, synthetic construct
  source 1..120: mol_type = other DNA
tagtggtatagcaaatagttgcgtaggtttcactcgtgggctggtgataatatagtgaggattcacatccgcctgtaatctgggtagaatatttgtataaatcattttggttttttggtt

SEQ ID NO: 46883 - DNA, 120 bp, synthetic construct
  source 1..120: mol_type = other DNA
ggattctacagtggaattttgtcactacttttgggaagaagtttacctttggtggcctacgaataaaaaccacattggcacaatgccatttatcatatgggataattctgtgtgtttata

SEQ ID NO: 46884 - DNA, 120 bp, synthetic construct; identical to SEQ ID NO: 13181
  source 1..120: mol_type = other DNA

SEQ ID NO: 46885 - DNA, 120 bp, synthetic construct
  source 1..120: mol_type = other DNA
agtagaaacactttgatcattcttctcaggactcaggattttaattatctgtttaatgcctttcccttccaccctagtgaactactcaagtgcaaataccttgtcttactcatctctgca

SEQ ID NO: 46886 - DNA, 120 bp, synthetic construct
  source 1..120: mol_type = other DNA
tgttgcagagtgaggagaacttgggctttgggctggcggaaggaggtgtcttcgtttacgttttttagattgaaattttgccatgtatatgcgtttaaaaatttaaaacctagttgaata

SEQ ID NO: 46887 - DNA, 120 bp, synthetic construct; identical to SEQ ID NO: 13182
  source 1..120: mol_type = other DNA

SEQ ID NO: 46888 - DNA, 120 bp, synthetic construct
  source 1..120: mol_type = other DNA
gaaaggagaagtacagagtgtatttttcataatgttacttaaattctgtagacatgaaactagatataaaacccttatgttcttggctcatacaccactataaaccaaatctgcaaatta

SEQ ID NO: 46889 - DNA, 120 bp, synthetic construct
  source 1..120: mol_type = other DNA
gtgtttctgtattttaacttcagtgataataaaagctgtgagtagtgcctcttctcatcagtaatgttatgcaggagggcattaatgacttcaaggccttgttggtaagttcaggatgag

SEQ ID NO: 46890 - DNA, 120 bp, synthetic construct
  source 1..120: mol_type = other DNA
aaatcttcattaaatgattttctaaaccagttattgctggaaatgagaatggaaaaacattgcatacctacaattatatttactgctaacaaatgtttgcaaattgtactacacatgtag

SEQ ID NO: 46891 - DNA, 120 bp, synthetic construct; identical to SEQ ID NO: 13183
  source 1..120: mol_type = other DNA

SEQ ID NO: 46892 - DNA, 120 bp, synthetic construct
  source 1..120: mol_type = other DNA
aaccttgtacccaacttatacatcctttttttctcccagcatatttgggagacattgttttagcaaatatttttctgatcactatctaaggagccaggattcagagatgtgaaaaacaaa

SEQ ID NO: 46893 - DNA, 120 bp, synthetic construct
  source 1..120: mol_type = other DNA
tatgcaaagagcactatggaacatattgaaaggagataccaattattgtgaaggtaagggcgaggtttagagcacataatggcaaagatcctgttgaaatagggtcttaaaggatgagtc

SEQ ID NO: 46894 - DNA, 120 bp, synthetic construct
  source 1..120: mol_type = other DNA
gaagtaaattggaaccccaaactaaaagtcttgttaggctaggtgtttagcccttatctcatcagcataggggagccatggtgatctgagaactgggagagtattcagggcaatattttt

SEQ ID NO: 46895 - DNA, 120 bp, synthetic construct
  source 1..120: mol_type = other DNA
ataaaagtaatgcttagaaaacatgggttgaatgactaatcatgagtaaagaggatttaggagagaattatgacaatgtccttcggtggtagttttaatgctttgtgggtcacagactcc

SEQ ID NO: 46896 - DNA, 120 bp, synthetic construct; identical to SEQ ID NO: 13184
  source 1..120: mol_type = other DNA

SEQ ID NO: 46897 - DNA, 120 bp, synthetic construct
  source 1..120: mol_type = other DNA
gtctgtaaagataatagacaagtatgtgaattaagccagcaaccaagaaacagctacttgagggagaacctgacattcctgaatttgagttgagcaagtgagttgggagtctgcagggcc

SEQ ID NO: 46898 - DNA, 120 bp, synthetic construct
  source 1..120: mol_type = other DNA
ggtgaagtctaggagaaatcagacacaggtttccaggtgtcccattccagtggcatagcatagatggccttaattctctcaacaacaatgtgtgacagcatgcacgaagttgtcaaccag

SEQ ID NO: 46899 - DNA, 120 bp, synthetic construct; identical to SEQ ID NO: 13185
  source 1..120: mol_type = other DNA

SEQ ID NO: 46900 - DNA, 120 bp, synthetic construct
  source 1..120: mol_type = other DNA
cttcagggagttagctctgtctatcctgcccctgtctgcctagccactccttttctaggtagagtggaccttgctgttcacgtcatagatggccattccgtgtacctagactccttttta

SEQ ID NO: 46901 - DNA, 120 bp, synthetic construct
  source 1..120: mol_type = other DNA
ttgaatgctgctgtgcatgaggcatggtgttagatggcagattgacagaaatgactaatacaggtatctggcctcaaggagtttacagtttcataggagaaagaaaaacaaaactagcaa

SEQ ID NO: 46902 - DNA, 120 bp, synthetic construct
  source 1..120: mol_type = other DNA
ctcctggggttgagccataaagatcaagtagatacaagtgggcatgaagctagtattttgctgccagtcatttctgtagttaggttgcctatgtggttggagcatgtatgtattgttaca

SEQ ID NO: 46903 - DNA, 120 bp, synthetic construct; identical to SEQ ID NO: 13186
  source 1..120: mol_type = other DNA

SEQ ID NO: 46904 - DNA, 120 bp, synthetic construct
  source 1..120: mol_type = other DNA
ttggaagcaaaaaacttcaggaaaaaacctgggtccaaatgttgctacatttccttgggcttccacgtgtatgtggttcttaatataatttgaaacttctaagagcaacaaatagttgtt

SEQ ID NO: 46905 - DNA, 120 bp, synthetic construct
  source 1..120: mol_type = other DNA
tctttctctttttccagcgttacagtgtttctgccacctctgtacaaaagacaattttacttgtgtgacagatgggctctgctttgtctctgtcacagagaccacagacaaagttataca

SEQ ID NO: 46906 - DNA, 120 bp, synthetic construct
  source 1..120: mol_type = other DNA
gataggccgtttgtatgtgcaccctcttcaaaaactgggtctgtgactacaacatattgctgcaatcaggaccattgcaataaaatagaacttccaactactggtaagttgtataaaatt

SEQ ID NO: 46907 - DNA, 120 bp, synthetic construct; identical to SEQ ID NO: 13187
  source 1..120: mol_type = other DNA

SEQ ID NO: 46908 - DNA, 120 bp, synthetic construct
  source 1..120: mol_type = other DNA
attcagagcagcacttaacagtctagatgttttcattttgtaatttcagcttgttttatgatctttttgcgtaaattaattatacatgatttctagatttttggtccttcacctgtagtt

SEQ ID NO: 46909 - DNA, 120 bp, synthetic construct
  source 1..120: mol_type = other DNA
ggcaaaaccctatctctactaaaataacaaaaattagctgggcatggtggcacatgcttgtaatcccacctacttgggtggctgaggcacaacaatctttgaacctgggaggcagaggtt

SEQ ID NO: 46910 - DNA, 120 bp, synthetic construct
  source 1..120: mol_type = other DNA
cttcataaactttttaattttaagattccggtttaatatggaagtctgagcacatgtatttaactcttacctctttccccagatcccaaaggaatataaaaatgagggcaacctgtatta

SEQ ID NO: 46911 - DNA, 120 bp, synthetic construct
  source 1..120: mol_type = other DNA
tagtcatcgaaaagtccagccaataacttagacaaaggatttggggggtgaggttagggtatgggggcaaactctcagttcccttttaggaagcacctggcttcagtgctcagaggagca

SEQ ID NO: 46912 - DNA, 120 bp, synthetic construct; identical to SEQ ID NO: 13188
  source 1..120: mol_type = other DNA

SEQ ID NO: 46913 - DNA, 120 bp, synthetic construct
  source 1..120: mol_type = other DNA
aattaccaatgaaaagttaggagttcaaaagaagtagtctgaactagatagattagatgtcatcctgtgaaataggtttaccacatgatagggaagaactttcaaacagtacagggtcta

SEQ ID NO: 46914 - DNA, 120 bp, synthetic construct
  source 1..120: mol_type = other DNA
atgccataattttatagtcaagtttgggacaagttttaagaaactgtgttacaattcagagaaaagacagttggtgagcatattaagagatatagggaacagatttagatgatccaatat

SEQ ID NO: 46915 - DNA, 120 bp, synthetic construct
  source 1..120: mol_type = other DNA
aaagaattatataagcatttaacacacataaacattggttacctgtaaaaggtgaaaaaaaaaaacaggttcagattttctgcttaaatatcaaagggcaaatggaacatttttacgatc

SEQ ID NO: 46916 - DNA, 120 bp, synthetic construct; identical to SEQ ID NO: 13189
  source 1..120: mol_type = other DNA

SEQ ID NO: 46917 - DNA, 120 bp, synthetic construct
  source 1..120: mol_type = other DNA
aaaaaaaaaagtaaaagatatgttctgcctttaaaaaattggtggacctattggccgggcatggctcatgcctgtaatcccagcactttgggaagccaaggtaggtggatcacttgaggt

SEQ ID NO: 46918 - DNA, 120 bp, synthetic construct
  source 1..120: mol_type = other DNA
acatcataccactgtactccagcctgggcaacaagagtgaaaatccatctcaaaaaaaaaaaaaattggtggagagatatatactgaaatgtgagttgtttagaagtgatgaagatgtat

SEQ ID NO: 46919 - DNA, 120 bp, synthetic construct; identical to SEQ ID NO: 13190
  source 1..120: mol_type = other DNA

SEQ ID NO: 46920 - DNA, 120 bp, synthetic construct
  source 1..120: mol_type = other DNA
gtggtggcagtggccagctgcaggaattgtgtaggattgggaaaatgggggttgccacctacagtgtttttgtcgttgttgatgtttatttcactcgaggccctttttcagtaaagtcat

SEQ ID NO: 46921 - DNA, 120 bp, synthetic construct
  source 1..120: mol_type = other DNA
tgccaaatgaagaggacccttcattagatcgcccttttatttcagagggtactacgttgaaagacttaatttatgatatgacaacgtcaggttctggctcaggtaacataattgtttctc

SEQ ID NO: 46922 - DNA, 120 bp, synthetic construct
  source 1..120: mol_type = other DNA
tctttaagcttgatgtatatatgactgtggctggtttaaaatagattggaacttaactttaactgttaaagcgaatcaataagtcagctccatggtggtataaatttcaaagcgttctca

SEQ ID NO: 46923 - DNA, 120 bp, synthetic construct
  source 1..120: mol_type = other DNA
gtcaaagatattcacatgatctgcagctaacccattctattcaggattgtttagcagcttgatgtttacatttgaaaacaggcatgacagaaatgtattcagaattgtgaaggttattta

SEQ ID NO: 46924 - DNA, 120 bp, synthetic construct; identical to SEQ ID NO: 13191
  source 1..120: mol_type = other DNA

SEQ ID NO: 46925 - DNA, 120 bp, synthetic construct
  source 1..120: mol_type = other DNA
atcccctgtgtttttagaatttgacacttggtgaagaataaatagatctaggtttcaaggcaagctttgtcattgattggctgtataaccttggttagaacatgtttcctctttgggctt

SEQ ID NO: 46926 - DNA, 120 bp, synthetic construct
  source 1..120: mol_type = other DNA
gtactatcctttgaaaagtatgagtcatcttcaaataagggctaaattcatgaataaagtgaaaatttgtaaagcgtatataatgaaaatttcactaattttggtgaaagcccatctcta

SEQ ID NO: 46927 - DNA, 120 bp, synthetic construct
  source 1..120: mol_type = other DNA
cgcaccactgcactccagcctgggaaacagactccatctaaaaaaaaaaaaaaaaaaaaattttcactaattttataattgagtgatattaaaggaatgttaaagcagaagttgtgactg

SEQ ID NO: 46928 - DNA, 120 bp, synthetic construct; identical to SEQ ID NO: 13192
  source 1..120: mol_type = other DNA

SEQ ID NO: 46929 - DNA, 120 bp, synthetic construct
  source 1..120: mol_type = other DNA
ctggtggacagaggttattttagagctttcctgggacttcccatttattctcagttcagatcttcaaaaagattttgctcattctggaagtcatcctgctcaaaactgtgataatcaagg

SEQ ID NO: 46930 - DNA, 120 bp, synthetic construct
  source 1..120: mol_type = other DNA
gaataagcccacctaactgattaaaggaattggtgggtgggtggcagttgattactggataagaatatcttcattaaccttttaagatataaacatgagaaacaatggaataattctgtt

SEQ ID NO: 46931 - DNA, 120 bp, synthetic construct
  source 1..120: mol_type = other DNA
ttaccctgcaaaaacttgtctgcattgcttgctagctctgtggctttgggcagttaaccaatgtctcatgcttgagttatttcatctttaaaatgaaagtgatggattctgtgcacatca

SEQ ID NO: 46932 - DNA, 120 bp, synthetic construct; identical to SEQ ID NO: 13193
  source 1..120: mol_type = other DNA

SEQ ID NO: 46933 - DNA, 120 bp, synthetic construct
  source 1..120: mol_type = other DNA
tagttctttcattaattgaggaaaaggtataagcatttcacattctgaattcatatgtttattacttagtaccgtgaccataattaaggaaaggccctgtctctacctctaaagactgtg

SEQ ID NO: 46934 - DNA, 120 bp, synthetic construct
  source 1..120: mol_type = other DNA
agtgtttgttatggcgtgtgcagcttatgagctcttgtaatatatgcatgttgttcgggtcttatttcctgttcactgcatgtaaagctgtggagtccctgtttcccttttgaagttttc

SEQ ID NO: 46935 - DNA, 120 bp, synthetic construct; identical to SEQ ID NO: 13194
  source 1..120: mol_type = other DNA

SEQ ID NO: 46936 - DNA, 120 bp, synthetic construct
  source 1..120: mol_type = other DNA
aattctcctgcctcagcctcctgagtagctgggattacaggtgtgcaccaccatgcccagctaatttttgtatatttattagagaccaggtttcaccatgttggccaggctgatcttgaa

SEQ ID NO: 46937 - DNA, 120 bp, synthetic construct
  source 1..120: mol_type = other DNA
atccaatatagataatacagtggatcaagatttgctttttaattttaattgacatctagaatccagtgataaaggggaagacaaaacctttcctcgtcctgttggcctttcttgaccata

SEQ ID NO: 46938 - DNA, 120 bp, synthetic construct
  source 1..120: mol_type = other DNA
ttgcaatttccagattagtctcctgaaattaactcttaagtgtacttttaagtctgtggtgtggccctctacaaggctttcataaaatgtaataaattagtatctacactaaacaacata

SEQ ID NO: 46939 - DNA, 120 bp, synthetic construct; identical to SEQ ID NO: 13195
  source 1..120: mol_type = other DNA

SEQ ID NO: 46940 - DNA, 120 bp, synthetic construct
  source 1..120: mol_type = other DNA
taaataagatatgagtgaggaacatgatgtacactggcattttctttgttagtgtcaatgtaatttaaaatgacacttaccggatggtggataggatattaagtgatggtctcacatata

SEQ ID NO: 46941 - DNA, 120 bp, synthetic construct
  source 1..120: mol_type = other DNA
ggagaaagccaagttccattagtggaaaaacagtgctccattaccaaggtaagttacttagccttgttcttcaagatactagtgttgtctatgtagccagttgtcagcaagtaaattgct

SEQ ID NO: 46942 - DNA, 120 bp, synthetic construct
  source 1..120: mol_type = other DNA
ccttttttcctcccatcagtgaaactgttacgagattcatctttctaaaataagattttaaaattatcttgcttccagccatggccctttttctcagaaatctttaaaggttcctctttt

SEQ ID NO: 46943 - DNA, 120 bp, synthetic construct; identical to SEQ ID NO: 13196
  source 1..120: mol_type = other DNA

SEQ ID NO: 46944 - DNA, 120 bp, synthetic construct
  source 1..120: mol_type = other DNA
ataatatctccccagtgagataaattcctaaagggatagcttaaagtatcagttttctgggtcactcattagtgcctatcatgatgtttgaaacatgtaatattgttgattgtgttgagt

SEQ ID NO: 46945 - DNA, 120 bp, synthetic construct
  source 1..120: mol_type = other DNA
ggggagaagaagttgctgttaagatattctcctctagagaagaacgttcgtggttccgtgaggcagagatttatcaaactgtaatgttacgtcatgaaaacatcctgggatttatagcag

SEQ ID NO: 46946 - DNA, 120 bp, synthetic construct
  source 1..120: mol_type = other DNA
atgtagattagacccattaagtcgaatacaatatattagtaacttttagaactaggaacttcttcaagattttcttgactcttgatagcattcctaaaatctcttaatgttttataaaat

SEQ ID NO: 46947 - DNA, 120 bp, synthetic construct; identical to SEQ ID NO: 13197
  source 1..120: mol_type = other DNA

SEQ ID NO: 46948 - DNA, 120 bp, synthetic construct
  source 1..120: mol_type = other DNA
gctgaagaaggaaggaagcctgtcagcagggagtcagaatgagtggggactgcaagcagtgaccttagactgtgctgctgccactttcttagcttccgttaatacctttatgcccatgat

SEQ ID NO: 46949 - DNA, 120 bp, synthetic construct
  source 1..120: mol_type = other DNA
ttctcgagtagctgggactacaggcgtgcaccaccatgcccagctaatgtttgtatttttagtagagatggggtttcaccatgttggccaggttggcctccatctcttgacctcgtgatc

SEQ ID NO: 46950 - DNA, 120 bp, synthetic construct
  source 1..120: mol_type = other DNA
ccctacccctgaatcaaatgtatttcccagctttcctatttaaaaaaaaaaaaaaatgctgtcattatctcttagcttggccagacctgtagtcatctttttccttctcccaccttccat

SEQ ID NO: 46951 - DNA, 120 bp, synthetic construct; identical to SEQ ID NO: 13198
  source 1..120: mol_type = other DNA

SEQ ID NO: 46952 - DNA, 120 bp, synthetic construct
  source 1..120: mol_type = other DNA
cataattgatgtctgatcccacctactctgccctaactgtgttatttgaagctggtcccagacaatatgttttcatctgtaaacacttataaaatgtaatttgtatcttcaaatgatgag

SEQ ID NO: 46953 - DNA, 120 bp, synthetic construct
  source 1..120: mol_type = other DNA
ttctaagtccacaagttatatttagttgatatttctcttatgtgtcttaaaatttaggtccccccttcatcttttttctcctctcgcagcttatttgttgaagaaattggattgtttatc

SEQ ID NO: 46954 - DNA, 120 bp, synthetic construct
  source 1..120: mol_type = other DNA
catcctattgcatcatatgtggaggtgtatagtgtttgattaagacggggcagtgaggtatatgatgaatgtaggtagcgattatcagtggcacctgacaatgtaatacctcttaagtta

SEQ ID NO: 46955 - DNA, 120 bp, synthetic construct
  source 1..120: mol_type = other DNA
ccccatctctactaaaaatacaaaaaaattagccaggcatgatggcaggtgcctataatcccagctacttgggaagctaaggcagagaattgcttgaacctgggaggtggaggttgcagt

SEQ ID NO: 46956 - DNA, 120 bp, synthetic construct; identical to SEQ ID NO: 13199
  source 1..120: mol_type = other DNA

SEQ ID NO: 46957 - DNA, 120 bp, synthetic construct
  source 1..120: mol_type = other DNA
accatgttggcaactctcaaatctccatttgaaagcttaaacctcacccagggtctggattttgtcacattccaagttacaaacacagcagcacaaaatgttggtgagtctgtgccctga

SEQ ID NO: 46958 - DNA, 120 bp, synthetic construct
  source 1..120: mol_type = other DNA
tagcccctccacctcagttcctttatcttctcctgatttagttaattccacccccggcagccctttatatttatggccccttacatataaccttccttctatcttgtccataacctgtgg

SEQ ID NO: 46959 - DNA, 120 bp, synthetic construct; identical to SEQ ID NO: 13200
  source 1..120: mol_type = other DNA

SEQ ID NO: 46960 - DNA, 120 bp, synthetic construct
  source 1..120: mol_type = other DNA
gcacagtttatgtacttcttacctaaagaatctagcattccgttttttaaatcttaacagtcttacaaagtaagactttattcttgtataaaaggagaaacaggctccttgtcagtaaca

SEQ ID NO: 46961 - DNA, 120 bp, synthetic construct
  source 1..120: mol_type = other DNA
tccagctacttctaggttaaattagattgtcgtggaccagtctagcttaggagcctagctagtgtctttaccattattcctatgagaaaacatgttttaaactcgtgttttggcttacag

SEQ ID NO: 46962 - DNA, 120 bp, synthetic construct
  source 1..120: mol_type = other DNA
gtttttctaagctagcaaccttggaatcataatcatcttgtcttgcgtctttgtgaactgtgtacacaatctgtcactaaagcttgtcatttcttgttgaaactcactttcagttttgtc

SEQ ID NO: 46963 - DNA, 120 bp, synthetic construct; identical to SEQ ID NO: 13201
  source 1..120: mol_type = other DNA

SEQ ID NO: 46964 - DNA, 120 bp, synthetic construct
  source 1..120: mol_type = other DNA
gtgtgtgactcaggattgagagtaaaaagtaataaccattgaacaaataaatcataaatggtctgcagcccaaccgaaatgttaattctgttttacagacaatggtacttggactcagct

SEQ ID NO: 46965 - DNA, 120 bp, synthetic construct
  source 1..120: mol_type = other DNA
tcacatggagattgttggtacccaaggtaattctataagcagttctattatttaagctttaaattttcatgaataatgtctatgaaaatagaaggtggaggctgggcctggtggctcatg

SEQ ID NO: 46966 - DNA, 120 bp, synthetic construct
  source 1..120: mol_type = other DNA
gcatggtggcatgcacctgtagtcccagctactcagggggctgaggtaggaggattacctgagcctgggaggtcgaagctgcagtgagcagacatcatgccactgcactcccagctgagt

SEQ ID NO: 46967 - DNA, 120 bp, synthetic construct
  source 1..120: mol_type = other DNA
aggtagagctaggaatctggaaatttgtttagagattctctagtcgttgtaacaaaactgtgattttttttgagttcttaaaagtagcattcaatcttatgatttttgaggatctcagtt

SEQ ID NO: 46968 - DNA, 120 bp, synthetic construct; identical to SEQ ID NO: 13202
  source 1..120: mol_type = other DNA

SEQ ID NO: 46969 - DNA, 120 bp, synthetic construct
  source 1..120: mol_type = other DNA
tgtaacagttttattgagttataattcacatcataaagttcacccacttaaagtgtaaaattcagtggtttttagaatactcagagttgtacagccagcaaacactacagtcaattttag

SEQ ID NO: 46970 - DNA, 120 bp, synthetic construct
  source 1..120: mol_type = other DNA
caactgctcctttttgtctgtagatttgcttattctgcacattttatataaatgaatcatacaatatgtggtcttttgtgactggcttctttcacttagcatgttttcaaggttcattta

SEQ ID NO: 46971 - DNA, 120 bp, synthetic construct
  source 1..120: mol_type = other DNA
ttgtagctaatgctgcagtgaacatttgtgtacaagttgtatgtagtttcatgttttcagttatcttgggtatatacctaggagttgaattactgtatcatatgataactctatttaatg

SEQ ID NO: 46972 - DNA, 120 bp, synthetic construct; identical to SEQ ID NO: 13203
  source 1..120: mol_type = other DNA

SEQ ID NO: 46973 - DNA, 120 bp, synthetic construct
  source 1..120: mol_type = other DNA
gtgacttttggtgtagtgattcacttgagtttaataatgccgtaagtattgtaggtcatgtgggctgaaatgctttgataatttgggttgggagaagagacttttgaacctaaagatgtg

SEQ ID NO: 46974 - DNA, 120 bp, synthetic construct
  source 1..120: mol_type = other DNA
gctgtattgcagacttaggactggcagtaagacatgattcagccacagataccattgatattgctccaaaccacagagtgggaacaaaaaggtatacttttgaacaactatatttaatat

SEQ ID NO: 46975 - DNA, 120 bp, synthetic construct
  source 1..120: mol_type = other DNA
ctgaagccagagttacctgacttaaaaagatgcctgctgatgaaaggttgcccttccagaaaatatcattaggcatgttaattataataacagtagtaactaacgtttatagggcaccta

SEQ ID NO: 46976 - DNA, 120 bp, synthetic construct; identical to SEQ ID NO: 13204
  source 1..120: mol_type = other DNA

SEQ ID NO: 46977 - DNA, 120 bp, synthetic construct
  source 1..120: mol_type = other DNA
ccttgtattcccagcatccatcacagtgcctaatacatggtagatcctcagtagatatttgttgagtccatgagtcttcaaaagaacttaattaggtaggtgttattaccctttaattca

SEQ ID NO: 46978 - DNA, 120 bp, synthetic construct
  source 1..120: mol_type = other DNA
cacagcattttttcaaactactgtcttggccttggagacagctggagagccagcagcattagtctattcaaattgcatgtataattttgagatttctggattccctggggactctcaatt

SEQ ID NO: 46979 - DNA, 120 bp, synthetic construct; identical to SEQ ID NO: 13205
  source 1..120: mol_type = other DNA

SEQ ID NO: 46980 - DNA, 120 bp, synthetic construct
  source 1..120: mol_type = other DNA
taaaatgcatggtttctacctagtacgtgtataggtggtgtacattaggacacctttaacagtcacaattgttatgtatgtctttcattggaaaccaagatcatgaggcagatagtgtga

SEQ ID NO: 46981 - DNA, 120 bp, synthetic construct
  source 1..120: mol_type = other DNA
tgtataaagaaatgtctgaaaggaggttcatccaaatatggcagtaaggggatgattttcaaagttctttttgcaaattttttttaggtacatggcccctgaagttctcgatgattccat

SEQ ID NO: 46982 - DNA, 120 bp, synthetic construct
  source 1..120: mol_type = other DNA
tatgcaatgggcttagtattctgggaaattgctcgacgatgttccattggtggtaaattgctctcctctcccccagtagtttgtcatgagcagaagttgttcaagaattgtcttcttttt

SEQ ID NO: 46983 - DNA, 120 bp, synthetic construct; identical to SEQ ID NO: 13206
  source 1..120: mol_type = other DNA

SEQ ID NO: 46984 - DNA, 120 bp, synthetic construct
  source 1..120: mol_type = other DNA
tgttgtattctagagttagtttgttttaacttctagctttttagatggagtacttttaatgtttactcaggaaacagtctcttaggcttggggacctagacttggctgagacctagtgcc

SEQ ID NO: 46985 - DNA, 120 bp, synthetic construct
  source 1..120: mol_type = other DNA
aagtctcactgatagggtatatatatccctgtgcaagtgagagcctgtgcacttacagaatagaatctcatttgctgcacaatagggttctaggggaaaatgtcaatctggtcatcacag

SEQ ID NO: 46986 - DNA, 120 bp, synthetic construct
  source 1..120: mol_type = other DNA
ctcagggaagtggcttgtggatacagatgtggatgagatagagaaagctgtaatctctgttccacatacctactttagtaatgaaacactgtaataggtctctcaggtgatcttttaatg

SEQ ID NO: 46987 - DNA, 120 bp, synthetic construct
  source 1..120: mol_type = other DNA
cttattatgatcttgtaccttctgacccatcagttgaagaaatgagaaaagttgtttgtgaacagaagttaaggccaaatatcccaaacagatggcagagctgtgaagtgagtatttctt

SEQ ID NO: 46988 - DNA, 120 bp, synthetic construct; identical to SEQ ID NO: 13207
  source 1..120: mol_type = other DNA

SEQ ID NO: 46989 - DNA, 120 bp, synthetic construct
  source 1..120: mol_type = other DNA
tgaacaaatccctttagttctctggactttaatatccctttgcaaggtgaggaactcagataaggtgattacaaaggtgtttcaaatgattttccgttttattcatctgattgcccagat

SEQ ID NO: 46990 - DNA, 120 bp, synthetic construct
  source 1..120: mol_type = other DNA
gatgaattttatttaacctctccttaattgctagctgttactattacaatattggtgaagcagagcatattcctccaggtttgaagatttgtagcttaaaaaggctataaaaagctgttc

SEQ ID NO: 46991 - DNA, 120 bp, synthetic construct
  source 1..120: mol_type = other DNA
ttcagcatgcttaaggaatttgcatgtgacatagtttaataaatgagagtgctgctagattttgtcttttagaaatttgatctacttgggaggctgaagtgggaggattgctggagcctg

SEQ ID NO: 46992 - DNA, 120 bp, synthetic construct; identical to SEQ ID NO: 13208
  source 1..120: mol_type = other DNA

SEQ ID NO: 46993 - DNA, 120 bp, synthetic construct
  source 1..120: mol_type = other DNA
tcttatccagaccaatggaaaatggtgcatgcattaatttttttttttatattttcttgtaggccttgagagtaatggctaaaattatgagagaatgttggtatgccaatggagcagcta

SEQ ID NO: 46994 - DNA, 120 bp, synthetic construct
  source 1..120: mol_type = other DNA
ttaatttgggaggtcaattgttctacctcactgagagggaacagaaggatattgcttccttttgcagcagtgtaataaagtcaattaaaaacttcccaggatttctttggacccaggaaa

SEQ ID NO: 46995 - DNA, 120 bp, synthetic construct; identical to SEQ ID NO: 13209
  source 1..120: mol_type = other DNA

SEQ ID NO: 46996 - DNA, 120 bp, synthetic construct
  source 1..120: mol_type = other DNA
tcatatagtagtgaggaacataattcatgcaattgtattttgtatactattattgttctttcacttattcagaacattacatgccttcaaaatgggattgtactataccagtaagtgcca

SEQ ID NO: 46997 - DNA, 120 bp, synthetic construct
  source 1..120: mol_type = other DNA
cttatttatctgggtaacccaaactttttctgttttgtttttggaagggtttttgtggtatgtcatttggtattctattctgaaaatgcctttctcctaccaaaatgtgcttaagccact

SEQ ID NO: 46998 - DNA, 120 bp, synthetic construct
  source 1..120: mol_type = other DNA
attgtgttgtctaagtatacttttaaaaaatcaagtggcactctagatgcttatagtactttaatatttgtagcatacagactaatttttctaaaagggaaagtctgtctagctgcttgt

SEQ ID NO: 46999 - DNA, 120 bp, synthetic construct; identical to SEQ ID NO: 13210
  source 1..120: mol_type = other DNA

SEQ ID NO: 47000 - DNA, 120 bp, synthetic construct
  source 1..120: mol_type = other DNA
ccttgttacttgggagaggtggtagctaaagaacattctgagtataggtttttctccatttacagatgtctttggtcaaatattgaaagcaaacttgtcatggtcttcttacattaagtt

SEQ ID NO: 47001 - DNA, 120 bp, synthetic construct
  source 1..120: mol_type = other DNA
tagctctgaggcaagacttcgactttatagtgctatcagttccccgatacagggtcagagtaacccatacagtattttggtcaggaagagaaagtggccatttacactgaatgagttgca

SEQ ID NO: 47002 - DNA, 120 bp, synthetic construct
  source 1..120: mol_type = other DNA
tttaaaaacatcatgggaaaaatgcttagaggttactattttgactacaaagttgagtttttttctgtagttaccataatttcattgaagcaaatgaatgagtttgagaggtttgttttt

SEQ ID NO: 47003 - DNA, 120 bp, synthetic construct
  source 1..120: mol_type = other DNA
ctaccagatctgctttatgaaatccaggggaccaatgcattttatcactaaaactatttttatataattttaagaatataccaaaagttgtctgatttaaagttgtaatacatgatttct

SEQ ID NO: 47004 - DNA, 120 bp, synthetic construct; identical to SEQ ID NO: 13211
  source 1..120: mol_type = other DNA

SEQ ID NO: 47005 - DNA, 120 bp, synthetic construct
  source 1..120: mol_type = other DNA
agattcaacgtggctaaaacatcttctggtaaattgtgcgtccatattcattttgtcagtagccaggagaaatggggatgggggaaatacgacttagtgaggcatagacatccctggtcc

SEQ ID NO: 47006 - DNA, 120 bp, synthetic construct
  source 1..120: mol_type = other DNA
aacggctgatggaagttgtgggacccacttccatttccttcagtcattagaggtggaagggaggggtctccaagtttggagattgagcagatgaggcttgggatgcccctgctttgactt

SEQ ID NO: 47007 - DNA, 120 bp, synthetic construct; identical to SEQ ID NO: 13212
  source 1..120: mol_type = other DNA

SEQ ID NO: 47008 - DNA, 120 bp, synthetic construct
  source 1..120: mol_type = other DNA
agagtgcacaacaaaatcactatcccattagacacatcatcaaaagcttatttttattcttgcactggaagaatcgtaagtcaactgtttcttgaccatggcagtgttctggctccaaat

SEQ ID NO: 47009 - DNA, 120 bp, synthetic construct
  source 1..120: mol_type = other DNA
tactggaatacccatgggccctctcaagagtgctggacttctaggacattaagatgattgtcagtacattaaacttttcaatcccattatgcaatcttgtttgtaaatgtaaacttctaa

SEQ ID NO: 47010 - DNA, 120 bp, synthetic construct
  source 1..120: mol_type = other DNA
ttttcacgttgtgccaacggaatagggtgtttgatatttcttcatatgttaaggagatgcttcaaaatgtcaattgctttaaacttaaattacctctcaagagaccaaggtacatttacc

SEQ ID NO: 47011 - DNA, 120 bp, synthetic construct; identical to SEQ ID NO: 13213
  source 1..120: mol_type = other DNA

SEQ ID NO: 47012 - DNA, 120 bp, synthetic construct
  source 1..120: mol_type = other DNA
gtaaataggaaatagaagagtgatgcttatgttaagtcctaacactacagtagaagaatggaagcagtgcaaataaattacatttttcccaagtgccagtggcatattttaaaataaagt

SEQ ID NO: 47013 - DNA, 120 bp, synthetic construct
  source 1..120: mol_type = other DNA
gttttctaaccctgcctagtgcaagttacaatattatagcgtgttcggggagtgccctcctgtctgcaggtgtgtctctgtgcctgggggcttttctccacatgcttaggggtgtgggtc

SEQ ID NO: 47014 - DNA, 120 bp, synthetic construct
  source 1..120: mol_type = other DNA
gtggtccccaaacccttgattgactctggggaggggctttgtgaataggattgctctcacattaaagatagttacttcaatttgaaggctggatttagggatttttttttttccttataa

SEQ ID NO: 47015 - DNA, 120 bp, synthetic construct; identical to SEQ ID NO: 13214
  source 1..120: mol_type = other DNA

SEQ ID NO: 47016 - DNA, 120 bp, synthetic construct
  source 1..120: mol_type = other DNA
gctgcgctgggggctcggtctatgacgagcagcggggtctgccatgggtcgggggctgctcaggggcctgtggccgctgcacatcgtcctgtggacgcgtatcgccagcacgatcccacc

SEQ ID NO: 47017 - DNA, 120 bp, synthetic construct
  source 1..120: mol_type = other DNA
gcggaaacgaggaaagtttcccccgcgacactcacgcagcccgactcccgtagctgcagggattgtgagtttttcttgaaaaagagaaggaaagttcagttgcaaggggcgcggggcacg

SEQ ID NO: 47018 - DNA, 120 bp, synthetic construct
  source 1..120: mol_type = other DNA
tgagaagttggttatctgaaggcggccggggagcagcggcccggagcggcagcctgagctgccaaagcagccagcgcacctgggccactccgcccatggcgatgccgcgtgcccacccag

SEQ ID NO: 47019 - DNA, 120 bp, synthetic construct; identical to SEQ ID NO: 13215
  source 1..120: mol_type = other DNA

SEQ ID NO: 47020 - DNA, 120 bp, synthetic construct
  source 1..120: mol_type = other DNA
ggagttgatggttctatgcaattatcgtttgttggaaaccgaagggttaaaatcctaactaggctacccacctgatcgctgtctctgaaggtttttaaggaaaaaataaaaataaaaaaa

SEQ ID NO: 47021 - DNA, 120 bp, synthetic construct
  source 1..120: mol_type = other DNA
aaacctctgagacttcaaaagttagattttttttttttggagacggagtctcgctctgtcaccaggctggagtgcagtggcgcaatctcggctcactgcaactttgcctctgggttcaag

SEQ ID NO: 47022 - DNA, 120 bp, synthetic construct; identical to SEQ ID NO: 13216
  source 1..120: mol_type = other DNA

SEQ ID NO: 47023 - DNA, 120 bp, synthetic construct
  source 1..120: mol_type = other DNA
ctcttctggtgacttggagatgacccatgtagactttggatgaaatgtagaggagttgacagtccacatcacccggaggcactcattttatttatccagggacatgggcagatttacctt

SEQ ID NO: 47024 - DNA, 120 bp, synthetic construct
  source 1..120: mol_type = other DNA
ttaatcaaattaggaagaggcactattgcaagcaaaaagtcttgacacacatttgagtcctatggttttaataaaatcttagtgtttcgttcttggcgtttttcctgcattgcagtacca

SEQ ID NO: 47025 - DNA, 120 bp, synthetic construct; identical to SEQ ID NO: 13217
  source 1..120: mol_type = other DNA

SEQ ID NO: 47026 - DNA, 120 bp, synthetic construct
  source 1..120: mol_type = other DNA
atggttgaattaatgaatcattttgaatttgtattcatttgattcaaattaaattttcaaagttggccaatggttgaagacagatatattgaagacgagaaacctaattctacttacatt

SEQ ID NO: 47027 - DNA, 120 bp, synthetic construct
  source 1..120: mol_type = other DNA
acaacaagctccttttacgtcacctaaaaaggcccaaaaatctgtcttctgtttagtagcttctgtacttctgtttagtagtatgcaaaggatttaaataaaagaacaaatttcactaag

SEQ ID NO: 47028 - DNA, 120 bp, synthetic construct
  source 1..120: mol_type = other DNA
ttggggaaaactgtaaagtgcacaataactcttcaggtctgaaaaatatgacttttcaggttcctggaagtagatagattcttattgaggacaaagaatttgtaaaagtgtcatagtgat

SEQ ID NO: 47029 - DNA, 120 bp, synthetic construct
  source 1..120: mol_type = other DNA
atttccacctttaggccactcaacatcttatttttaatgagttatgatttatacaaaatactaatcacattttgaactcattgccttcttttcaatgtagcattccctaatgatgactgt

SEQ ID NO: 47030 - DNA, 120 bp, synthetic construct; identical to SEQ ID NO: 13218
  source 1..120: mol_type = other DNA

SEQ ID NO: 47031 - DNA, 120 bp, synthetic construct
  source 1..120: mol_type = other DNA
cctcatttttttttgttgttgtatgcactaggaggatgtgcatgttgaatgtttccttctaggtcccattgaatgtatttttgaatcaatttgttgtctctttcctatccctgccttgtc

SEQ ID NO: 47032 - DNA, 120 bp, synthetic construct
  source 1..120: mol_type = other DNA
ataaactttggaatcaggccgtcctgggttccagacccacttgccatgtactggctgtgtagcctgttgtagttgctttacctactagtcatccctggtctcatttgtaaaatgaggatt

SEQ ID NO: 47033 - DNA, 120 bp, synthetic construct
  source 1..120: mol_type = other DNA
aatatcagcttctgttattactattaactccttaattgggcttaccaggggcctctgacctggttcccatttgactctgctgcttcacatcccaccacagcccacattttcccagtctat

SEQ ID NO: 47034 - DNA, 120 bp, synthetic construct; identical to SEQ ID NO: 13219
  source 1..120: mol_type = other DNA

SEQ ID NO: 47035 - DNA, 120 bp, synthetic construct
  source 1..120: mol_type = other DNA
tcctactgtatctaatgcaactgaggtcgagcatttaactaagcagtcactgtttgttaggtgtttggtccaaatagtaaaatctttactttcagttagaatagttttagttctgatcac

SEQ ID NO: 47036 - DNA, 120 bp, synthetic construct
  source 1..120: mol_type = other DNA
ttcctttagccataaattttgaatcagtgtagggccttgaaagccactgcaaaattttaaataaagtcaccagaggaattatccagtagatactgattcctcttttttttttttttcata

SEQ ID NO: 47037 - DNA, 120 bp, synthetic construct
  source 1..120: mol_type = other DNA
gaagggaagtgtggtcttgtagccaccactgcctactctagagtagcgtggatattatttaggtctgatgcaaaccaccaaagcagttttaaatagggtgcaggggaaacatacttcctg

SEQ ID NO: 47038 - DNA, 120 bp, synthetic construct; identical to SEQ ID NO: 13220
  source 1..120: mol_type = other DNA

SEQ ID NO: 47039 - DNA, 120 bp, synthetic construct
  source 1..120: mol_type = other DNA
tattatgtatctcatttaatcctaggaagaaatctccaagataagttttattatctttattttatggatggaaagatggatcctgctcagggtctctctggagttttgcctgggtgcatg

SEQ ID NO: 47040 - DNA, 120 bp, synthetic construct
  source 1..120: mol_type = other DNA
gagagaggggaagcttaccatctaatgtcatcagttcagtgctcctgatttaattgatttggtttgcttgcattatctgcctccttcctgactacatttgtaccacagaaaatcaagata

SEQ ID NO: 47041 - DNA, 120 bp, synthetic construct
  source 1..120: mol_type = other DNA
atttgcaaagatgtgtattgtaaaccccaaattttgagtgtgtaggacaatcatttgtgtacaatcgtgtacaactgctgatgagggcaagaagagccgactttatccaacataacaaag

SEQ ID NO: 47042 - DNA, 120 bp, synthetic construct; identical to SEQ ID NO: 13221
  source 1..120: mol_type = other DNA

SEQ ID NO: 47043 - DNA, 120 bp, synthetic construct
  source 1..120: mol_type = other DNA
tgagggaatattttcctccaatttttttcagctctacaactaaaatatagacctagtatatgaacacaactggcctctgtcctgggccttagatggtactctgctgtcattcttctctgg

SEQ ID NO: 47044 - DNA, 120 bp, synthetic construct
  source 1..120: mol_type = other DNA
tggtatctgcagtttgcatggatccttgaagccatcttcctgaaggctgtcattgctactggttgtgcaatctctgcacgagggttgtttaagggatagctctgtgtgtgtgtgtgtctg

SEQ ID NO: 47045 - DNA, 120 bp, synthetic construct
  source 1..120: mol_type = other DNA
gcaaattgattaccagggctcaggatgatgtctctctttaaaccacccatttctgtggaaggactatgaacattgtaggagttctaaagttgtacctggtcttccaagacattgaaaaga

SEQ ID NO: 47046 - DNA, 120 bp, synthetic construct; identical to SEQ ID NO: 13222
  source 1..120: mol_type = other DNA

SEQ ID NO: 47047 - DNA, 120 bp, synthetic construct
  source 1..120: mol_type = other DNA
ttttttttttttttagatttcctagtgccctagttgcatttcttctgtgtattgagagaccaccaggcgggcaaggtgaagtttatctgaatgttttttcctcctattgtaaatatttta

SEQ ID NO: 47048 - DNA, 120 bp, synthetic construct
  source 1..120: mol_type = other DNA
tggttgaaccaacatgaatgcctttgaaagaagatatgggttgggtgcatattttcagtatatgctgcagcagctctttattaaagtataaatcattacgaagtcttcatttcctatggg

SEQ ID NO: 47049 - DNA, 120 bp, synthetic construct; identical to SEQ ID NO: 13223
  source 1..120: mol_type = other DNA

SEQ ID NO: 47050 - DNA, 120 bp, synthetic construct
  source 1..120: mol_type = other DNA
agatggtctggtttggggatctagattcctaattgttatactgtactgagactagtctgccttaattgacataaactacttgtccattatagcatgggtgttggaagactagaggttaag

SEQ ID NO: 47051 - DNA, 120 bp, synthetic construct
  source 1..120: mol_type = other DNA
cctgtcttgtgatctcaatggaaaaatgaagtgtatacctcaagtgatacagtcttggctgaatcatggaacaattatgccatcaggaagtttaggtattctgagtaaaacaggcacttt

SEQ ID NO: 47052 - DNA, 120 bp, synthetic construct
  source 1..120: mol_type = other DNA
tataggtccatctcctggctctaggagaggccctggcaatgtggttaacaagtgtcatcaagtcaaatactacgaaatcttgcagtgccctgaatcttacagctcacatataaaagaaac

SEQ ID NO: 47053 - DNA, 120 bp, synthetic construct
  source 1..120: mol_type = other DNA
tctacatttctaaagggaagactgaattatttttctattctctcaatagagaatattgcaaaatgttattggaagagatgatcaaagagtgtgcaaccaaaaaatataggagaattattt

SEQ ID NO: 47054 - DNA, 120 bp, synthetic construct; identical to SEQ ID NO: 13224
  source 1..120: mol_type = other DNA

SEQ ID NO: 47055 - DNA, 120 bp, synthetic construct
  source 1..120: mol_type = other DNA
ccaaagtgttaggattacaggtgtaagccactgcacccggcctgtatgccattttaattctaaataaatattcactttattcttaattttatattcactttattcttaattttgtattct

SEQ ID NO: 47056 - DNA, 120 bp, synthetic construct
  source 1..120: mol_type = other DNA
cttccccccattgcaaacagagactgaaatctgcattgttatttcacaaaaccaaaatatttttcctccaggtttagctaaacccttcatcattttcctactttagagccccatgccaag

SEQ ID NO: 47057 - DNA, 120 bp, synthetic construct; identical to SEQ ID NO: 13225
  source 1..120: mol_type = other DNA

SEQ ID NO: 47058 - DNA, 120 bp, synthetic construct
  source 1..120: mol_type = other DNA
caggtcagaactgagaaataccacagacttccactggtgttcattggagatgactactattaaaaaaagagaagaaaaaaaaccatagctattttgaaaatttccgactacaggtgtctg

SEQ ID NO: 47059 - DNA, 120 bp, synthetic construct
  source 1..120: mol_type = other DNA
ttctccccttcctctgaattggttaaaatgtctgtgaaaatttttcctaaggtagaaagttatgaaatgctttgctatgcctaggagatgtaaagcctaaaggaactttcatattttttg

SEQ ID NO: 47060 - DNA, 120 bp, synthetic construct; identical to SEQ ID NO: 13226
  source 1..120: mol_type = other DNA

SEQ ID NO: 47061 - DNA, 120 bp, synthetic construct
  source 1..120: mol_type = other DNA
acgctcatagtattggggaagaaaaaaagacaatatgatataatttgtccttcaagtatgtgaaaaggaaaaaaatctaataataacattttatgttcattattttggaatcccttaagt

SEQ ID NO: 47062 - DNA, 120 bp, synthetic construct
  source 1..120: mol_type = other DNA
tcacttctttaggagcctcattccttcctgaatattacattttatgagttattatatgcatcaaggcccaaagcttgagctccagcattctgaccccgaaaatgatggtttcctatcatc

SEQ ID NO: 47063 - DNA, 120 bp, synthetic construct; identical to SEQ ID NO: 13227
  source 1..120: mol_type = other DNA

SEQ ID NO: 47064 - DNA, 120 bp, synthetic construct
  source 1..120: mol_type = other DNA
gaaggcactggtagcaagtcaactaaatgagtcagtttttaaccagtctgtttccccagtcatccttcatgagtcttttgtccactgattgtccatcccttgaccatggtgaactgtaga

SEQ ID NO: 47065 - DNA, 120 bp, synthetic construct
  source 1..120: mol_type = other DNA
ctgggttcaagcgattctcctgcttcagcctcctgagtagctgggattacaggtgtgcaccaacacacttgactaattttgttgttgttgtatttttagtagagacacggtttcaccatg

SEQ ID NO: 47066 - DNA, 120 bp, synthetic construct; identical to SEQ ID NO: 13228
  source 1..120: mol_type = other DNA

SEQ ID NO: 47067 - DNA, 120 bp, synthetic construct
  source 1..120: mol_type = other DNA
ctcagtgaagacccaataaatttctcttgaattgctcaacatttgttttagacttttctgagagtgccactgtaggctttttcattgatttgctcctttattttaatatcataaggcagc

SEQ ID NO: 47068 - DNA, 120 bp, synthetic construct
  source 1..120: mol_type = other DNA
aattttattttctgacttttttttctttgcctttgacatctgaactatacttggcaagaaaaaaaaacataaaaactttccattgcaactcatatctcatggtgattcctgttgcatcaa

SEQ ID NO: 47069 - DNA, 120 bp, synthetic construct
  source 1..120: mol_type = other DNA
aacacaaacctgaactcttatatttgtcatctgtaaaaatcacctaattggtctctgcttatggacaccctttgttctttctctgtcaataacacaggcattgccctcagttaaatctcc

SEQ ID NO: 47070 - DNA, 120 bp, synthetic construct
  source 1..120: mol_type = other DNA
ttggctcctaagagagtgccttgtgctgatgggacacaggaccagtttgatgactacgtgcacagatgaagccaaacctcttgcccatcatctattccacccttcacatccctcatgccc

SEQ ID NO: 47071 - DNA, 120 bp, synthetic construct; identical to SEQ ID NO: 13229
  source 1..120: mol_type = other DNA

SEQ ID NO: 47072 - DNA, 120 bp, synthetic construct
  source 1..120: mol_type = other DNA
gcggatcacgaagtcaggagatcgagaccatcctcgctaacacgatgaaaccctgtctctactaaaagtacaaaaaattagctgggcgtggtggcgggtgcctgtagtcccagctactcg

SEQ ID NO: 47073 - DNA, 120 bp, synthetic construct
  source 1..120: mol_type = other DNA
aaaacaaaactcttactagaatgaaaactctttgagggagaaacttctgtctgattttgccatagctcttagcacagattctcactaattctgtttatgtgttttgtttgttgctgtttg

SEQ ID NO: 47074 - DNA, 120 bp, synthetic construct
  source 1..120: mol_type = other DNA
cctgtagtattgtttgacagaaccataggcttatggaaaatctcgtatgatctgctttgtgtaaattgttctttacagtggagacttgctctgtctgcagtctttagtttctgtgaattt

SEQ ID NO: 47075 - DNA, 120 bp, synthetic construct; identical to SEQ ID NO: 13230
  source 1..120: mol_type = other DNA

SEQ ID NO: 47076 - DNA, 120 bp, synthetic construct
  source 1..120: mol_type = other DNA
ttaaaatgatacatgctaaggagacttaaatatgaggcctttcttacctgggtgcttaataggagtgggtttctaaggatggtcttgaatttggccttcagccttctcgtccaccatagt

SEQ ID NO: 47077 - DNA, 120 bp, synthetic construct
  source 1..120: mol_type = other DNA
ctcctctatgggaattctggagctaccactgacatcacattacatagatttggactggtagtgccctacctgctctatctatagaggaaaaggagatgaaataagaattttaatattctt

SEQ ID NO: 47078 - DNA, 120 bp, synthetic construct
  source 1..120: mol_type = other DNA
ctcccgagtagctgggattgtaggtgcccactaccacacctggctaatttttgtatttttagtagagacagggttttgccatgttggccatgctgctcttgaacttctgacctcaggcaa

SEQ ID NO: 47079 - DNA, 120 bp, synthetic construct; identical to SEQ ID NO: 13231
  source 1..120: mol_type = other DNA

SEQ ID NO: 47080 - DNA, 120 bp, synthetic construct
  source 1..120: mol_type = other DNA
aactgctgcagccgtagttagccccctatgagccaagcctattggctttgttactcccaaggtataacttatttcatatatataagcaacttgactaagtattagatgtctgtgtaagcc

SEQ ID NO: 47081 - DNA, 120 bp, synthetic construct
  source 1..120: mol_type = other DNA
agtgaaaaacaatgcttgacctctgatacaatgtactgttttgattatgatcagcactttaataaaatttatcatcaagaaagtctttggagtgagcccctgaaaagcttgggaaagtga

SEQ ID NO: 47082 - DNA, 120 bp, synthetic construct; identical to SEQ ID NO: 13232
  source 1..120: mol_type = other DNA

SEQ ID NO: 47083 - DNA, 120 bp, synthetic construct
  source 1..120: mol_type = other DNA
tgagaatatgtaaaatgtctttcattgttaaaatagctgttaaataatattaaaggcaaaaaaaaaagtcatgaaaatagtcatttgcgtacttcttcaggcagatagaaaactagtacc

SEQ ID NO: 47084 - DNA, 120 bp, synthetic construct
  source 1..120: mol_type = other DNA
aatacaaaaattagctaggagtggtgggacacgcctataatcccagctactcaggaagctgagccaggagaatcacttgaacccaggagacagtggttgcagtgatccgatatcgcacca

SEQ ID NO: 47085 - DNA, 120 bp, synthetic construct
  source 1..120: mol_type = other DNA
agaagtgatttgaataatttcagtatgattgagacatatgggtgaaagatcaccagagggaaaaatgtctagtctgataactttgaagaaaacatattgaccatgtctagttataataat

SEQ ID NO: 47086 - DNA, 120 bp, synthetic construct; identical to SEQ ID NO: 13233
  source 1..120: mol_type = other DNA

SEQ ID NO: 47087 - DNA, 120 bp, synthetic construct
  source 1..120: mol_type = other DNA
cttgttcttgcctcgaacattaaaagcccaatttaagactggagaatttcttctttgagggttttgtccacccatcataagagatttcaaactatgtaatgagtcattttacttttcccc

SEQ ID NO: 47088 - DNA, 120 bp, synthetic construct
  source 1..120: mol_type = other DNA
cctgtagttttgcccctcactagaacttcaagttgcttaacctaatcaggaatacgggcatctttacataggaagtgcacttcttcatcatatagacatagaggtcaggtattattatct

SEQ ID NO: 47089 - DNA, 120 bp, synthetic construct
  source 1..120: mol_type = other DNA
cacctgaggtcaagagttcaagaccagcctgaccaacatggtgaaaccctatctctactaaaaaatacaaaaattagctgggcatggtggcgggcgcctgtaatcacagctactcgggag

SEQ ID NO: 47090 - DNA, 120 bp, synthetic construct; identical to SEQ ID NO: 13234
  source 1..120: mol_type = other DNA

SEQ ID NO: 47091 - DNA, 120 bp, synthetic construct
  source 1..120: mol_type = other DNA
aggttaagagattgagaccatcctggccaacatggtgaaaccccgtctctactaaaaatacaaaaattaactgggcgtggtggcacgtgcctctagtcccagctattcgggaggctgagg

SEQ ID NO: 47092 - DNA, 120 bp, synthetic construct
  source 1..120: mol_type = other DNA
tgattagcagaaactatttcacttgccatcatagaaagctaagctatacttctgcttttctactactagctttatataaatgttatttttcttgcaacataaaagaaaaattgagtcata

SEQ ID NO: 47093 - DNA, 120 bp, synthetic construct
  source 1..120: mol_type = other DNA
ctgtgtggatcattgtgatgctttgttctcagtggggattttccagcaaagatgagcttcattaaacaatgactgggttcatggatttataattggagtgattttcttcaaactgtaata

SEQ ID NO: 47094 - DNA, 120 bp, synthetic construct; identical to SEQ ID NO: 13235
  source 1..120: mol_type = other DNA

SEQ ID NO: 47095 - DNA, 120 bp, synthetic construct
  source 1..120: mol_type = other DNA
ctaaagggagatatgctttctcacatttgtttccttgaacttacttttaatgttgccttgtagggtcaaaactttagaaatacagctttctcaggaaacttggtcctcagatctttcaga

SEQ ID NO: 47096 - DNA, 120 bp, synthetic construct
  source 1..120: mol_type = other DNA
gaatttatacaatggcaactaaatgccctgcagccaattatgtttatgattcctgcctcatctccaaatggtactagagtttgagtcatatgagaaaattaattgggttgggcttgattg

SEQ ID NO: 47097 - DNA, 120 bp, synthetic construct
  source 1..120: mol_type = other DNA
ccatgccccatctctaactactacattttttcctattgaattctccagtccatgtagcataagtcccttcctgaactcagtttatttttctaaccctggctgcacgttaggatcacctgc

SEQ ID NO: 47098 - DNA, 120 bp, synthetic construct; identical to SEQ ID NO: 13236
  source 1..120: mol_type = other DNA

SEQ ID NO: 47099 - DNA, 120 bp, synthetic construct
  source 1..120: mol_type = other DNA
gagcaaatacaggcctatctaaaagcatacctcacagtaaagatggttaaaaaccaaaaccggaggaggcagagtactcttggtggggctggtagtggggggaatggatgattttccaaa

SEQ ID NO: 47100 - DNA, 120 bp, synthetic construct
  source 1..120: mol_type = other DNA
gcaagtggctgcctggggtgtgtgtccacacaccatatagaggcagttcttcagctctgtcagccatggccaaagcaggcagtatttgaaccaccttggaccactcctgaggggcagcat

SEQ ID NO: 47101 - DNA, 120 bp, synthetic construct
  source 1..120: mol_type = other DNA
atgctcttcttgaccttaaaatccacctgatagatctggtagggaggtagaaattttggtggtaggaaagccagcaattatcaggtcaaagggtttctgataaaaggagttattcagcag

SEQ ID NO: 47102 - DNA, 120 bp, synthetic construct
  source 1..120: mol_type = other DNA
atgacgtaataaaaccactgcaaagccaggagtttgtgatgggaagataggaaatccctttctttttttcccacatgggaaataaaaatctaaagatgtgtggggaagctccttagagtg

SEQ ID NO: 47103 - DNA, 120 bp, synthetic construct; identical to SEQ ID NO: 13237
  source 1..120: mol_type = other DNA

SEQ ID NO: 47104 - DNA, 120 bp, synthetic construct
  source 1..120: mol_type = other DNA
gcaattggtacacatgtgtaaaccactacaaaaagttcacctgagtgtagaaggtagccagtagcctaaaaaccctgtattttggaggctgttacttcataatctctattatgaaattgg

SEQ ID NO: 47105 - DNA, 120 bp, synthetic construct
  source 1..120: mol_type = other DNA
aagatattttcacctttgcaggaagttctattgaacagtgggtctgagaccatcttagatgatacatgtggcttgaaacgtagcaggtgcaaataaggaactgaatttcaaatatagata

SEQ ID NO: 47106 - DNA, 120 bp, synthetic construct
  source 1..120: mol_type = other DNA
cgttcaggtaatttcttagcacctataatcacagtgggacagattaaattacttgtacttttccattcctgtgctttggaattataggctgtttctttgtcctggaaaccagatagtcta

SEQ ID NO: 47107 - DNA, 120 bp, synthetic construct; identical to SEQ ID NO: 13238
  source 1..120: mol_type = other DNA

SEQ ID NO: 47108 - DNA, 120 bp, synthetic construct
  source 1..120: mol_type = other DNA
ccctgtgaataaatttcacccaccttggtcacctctgtgctgtattctcctagaaactcacctttatttggcatgctgtgacttaaatcctccaaaaaaaaaaaaaagcctttgaaaaag

SEQ ID NO: 47109 - DNA, 120 bp, synthetic construct
  source 1..120: mol_type = other DNA
agtcattgaaatggggcttaataagaattacttgataccttaggagtcagacgagccttacatttatcttgggctcagggatttgcattttgagaggttgtgccagctgacatgagcctt

SEQ ID NO: 47110 - DNA, 120 bp, synthetic construct; identical to SEQ ID NO: 13239
  source 1..120: mol_type = other DNA

SEQ ID NO: 47111 - DNA, 120 bp, synthetic construct
  source 1..120: mol_type = other DNA
ctccttccatttccctctgggccttcgttttcagatctcctcagaagccgaggaacgcaggtccttttgaatttctttagatcagtgttgtcctataggactttctgcaatgatgaaagt

SEQ ID NO: 47112 - DNA, 120 bp, synthetic construct
  source 1..120: mol_type = other DNA
atttaactttagttaatttaaatttataaatccatgtgtcctcatggctactgtgtagctctatctagattatgcccttgacttttgaacaatgtgtcttgggagagttctcttggctct

SEQ ID NO: 47113 - DNA, 120 bp, synthetic construct
  source 1..120: mol_type = other DNA
caccaactgtttataccctccatacctggcctcaacatgtccttttttctctgtgactatatccttattctttatccagcaacagcaaatatgcattaattttctgcagataaggtttcc

SEQ ID NO: 47114 - DNA, 120 bp, synthetic construct
  source 1..120: mol_type = other DNA
aatacagagtgaattaaagtccatgtgtacaagctaataaacaagattctatcaacatgtcagcagataagtacagcgcgagggtctgagaacaatggtagatgcttgtaattttagaag

SEQ ID NO: 47115 - DNA, 120 bp, synthetic construct; identical to SEQ ID NO: 13240
  source 1..120: mol_type = other DNA

SEQ ID NO: 47116 - DNA, 120 bp, synthetic construct
  source 1..120: mol_type = other DNA
cacatctgggttctcaccccagaatgagataggtttaatagataagattcagtgtggggcaaatctaaggtgccaaagttaggtacatactagaacttccataaagagttgtcttaagaa

SEQ ID NO: 47117 - DNA, 120 bp, synthetic construct
  source 1..120: mol_type = other DNA
attccccatggatggaaggagccagctgtgttccagaactatgttggaagattgcaccttgaagactgtgtgcatggttctcattttccatcttaaaatcactgctggaatctatcttga

SEQ ID NO: 47118 - DNA, 120 bp, synthetic construct
  source 1..120: mol_type = other DNA
tatcaagagacggagatttgggggaagtgattaagtcatgagtggattagtcccacataaaagggctggaggtaaccagcctggatccttttgcccttccattttctgctatgtgatgac

SEQ ID NO: 47119 - DNA, 120 bp, synthetic construct; identical to SEQ ID NO: 13241
  source 1..120: mol_type = other DNA

SEQ ID NO: 47120 - DNA, 120 bp, synthetic construct
  source 1..120: mol_type = other DNA
ctcctgagtagctgggactacaggcacgcaccatcaagccctagctaatttttgtatttttagtagagacggggtttcgccatattggccaggatggtcttgatttcttgacctcgtgat

SEQ ID NO: 47121 - DNA, 120 bp, synthetic construct
  source 1..120: mol_type = other DNA
agagacctttatgatgtttactgcaaattgcatcaaggtcatgacagcaatgagtaatgcccaggaaaggcgaagatcaaccttacactttttcatctaactgcactgtgagaaaacaag

SEQ ID NO: 47122 - DNA, 120 bp, synthetic construct
  source 1..120: mol_type = other DNA
tttacttcctctgcttgaaaaacatgaagggggaagtttcaaagtgtttggtgttatcttagaaaccaaagtgaatctgaatgtgtctttctgtcctttttgtgtcatttttcaaaatga

SEQ ID NO: 47123 - DNA, 120 bp, synthetic construct; identical to SEQ ID NO: 13242
  source 1..120: mol_type = other DNA

SEQ ID NO: 47124 - DNA, 120 bp, synthetic construct
  source 1..120: mol_type = other DNA
gtacagcagttttatttccttgaaaagtaagccaaacatgattttatttcaatattttagaattccacaatcttaagacacatcattgccttcccatctctgcatgtcaaacttactaat

SEQ ID NO: 47125 - DNA, 120 bp, synthetic construct
  source 1..120: mol_type = other DNA
actgcctgtttgccagacctatgctggttatgaacaatatttcaaaaccagattatttggttctagatcctaaacactcttggcaactttattgtaacgatgattgattccattgtatat

SEQ ID NO: 47126 - DNA, 120 bp, synthetic construct
  source 1..120: mol_type = other DNA
gaatagatttaccaaactcatacttatcttgtcatttgtttcctgcaattttctttggtgtgagagagcattgcatggaatgttacctttctagcaagtgaatgcttgtgtggcattttt

SEQ ID NO: 47127 - DNA, 120 bp, synthetic construct; identical to SEQ ID NO: 13243
  source 1..120: mol_type = other DNA

SEQ ID NO: 47128 - DNA, 120 bp, synthetic construct
  source 1..120: mol_type = other DNA
tgtactggaatgtgtgtaaagttctactcttaaactttttgatggaatatctatttcattgtggagtatcaggaaggatgagggcttgtgtgtcaccattggctttgtcttttatttgct

SEQ ID NO: 47129 - DNA, 120 bp, synthetic construct
  source 1..120: mol_type = other DNA
cagtacttaatactggactaagcatttggtctgcattcgataaatcatgatcatggtaataataattattaacatcacatagatctgatttctaaagtagatgtcctctggccttgaact

SEQ ID NO: 47130 - DNA, 120 bp, synthetic construct
  source 1..120: mol_type = other DNA
gcaggtgaaataatcattaattgtaaacattcaggtggccacaggggcctggcaggggagtaggtgacatgaaggagtgtcagggaggaggcaaatttgaggacacagagactttctcaa

SEQ ID NO: 47131 - DNA, 120 bp, synthetic construct; identical to SEQ ID NO: 13244
  source 1..120: mol_type = other DNA

SEQ ID NO: 47132 - DNA, 120 bp, synthetic construct
  source 1..120: mol_type = other DNA
gaaatcatctgttttgaccaatattttcacatgtttaataaaactgtaattgaaaaacctttcaggtaccaggcatgcacaagaaccccgcagcatattttgaaaaactgaagcaaaagc

SEQ ID NO: 47133 - DNA, 120 bp, synthetic construct
  source 1..120: mol_type = other DNA
atagtcactatcttttaaaaatctgttcttaccagattttgtgttagtttctgcattttccattaagctgcctcagtactttgagataaagaattgtttaaatcctaaatgaataactta

SEQ ID NO: 47134 - DNA, 120 bp, synthetic construct
  source 1..120: mol_type = other DNA
tcttatcctgtcccccttccctcaagggtttaaatatgagggctgtcagaaagcagcacattttcgtttaggttgactaattttgctggtaagtaacaaattactttagttgaattggaa

SEQ ID NO: 47135 - DNA, 120 bp, synthetic construct; identical to SEQ ID NO: 13245
  source 1..120: mol_type = other DNA

SEQ ID NO: 47136 - DNA, 120 bp, synthetic construct
  source 1..120: mol_type = other DNA
cctacattctggtttttgactcatctcatagtccctgcagtcagtctttgccagataaaggcactgttaaagtgagctttatcaatgaaaaacttaagaatttcatgtattgatgacagt

SEQ ID NO: 47137 - DNA, 120 bp, synthetic construct
  source 1..120: mol_type = other DNA
gcacaagtgctagaattctgaaatactgcctttggcaacaatgtgtagatatttccacctgcaagagtcattttaaatgtttagattttgtctcctgttatgtggcctgtatctcagaga

SEQ ID NO: 47138 - DNA, 120 bp, synthetic construct; identical to SEQ ID NO: 13246
  source 1..120: mol_type = other DNA

SEQ ID NO: 47139 - DNA, 120 bp, synthetic construct
  source 1..120: mol_type = other DNA
attggatgaattcatttgagacacaagtaatcattccttaatcccttaatttgtttggtaaatacaaatttatgtttatgcagttttcttaaagcaatcatagcaaactactaaattcat

SEQ ID NO: 47140 - DNA, 120 bp, synthetic construct
  source 1..120: mol_type = other DNA
tatcagctctgtctccatttctgacctcatgtttgcatttaaaggcaagtaactgattcacatgaggttgccgttgttaatgttgcctctcaaactagaatataagccataggagggtag

SEQ ID NO: 47141 - DNA, 120 bp, synthetic construct
  source 1..120: mol_type = other DNA
atggtaggtagtttcagtgtgaaaatatatatgtatgtgtgtgtgtgtgtgtgtgtgtgtgtgtgtgtgtgtgtgtgtgtatagtactgggattacaggcgtgagccaccgcacccggcc

SEQ ID NO: 47142 - DNA, 120 bp, synthetic construct; identical to SEQ ID NO: 13247
  source 1..120: mol_type = other DNA

SEQ ID NO: 47143 - DNA, 120 bp, synthetic construct
  source 1..120: mol_type = other DNA
aaaaagttgcttctcaacctcagttttctacctatttattttccttttacagggccaaataatgtttgattctcatgtccttgcatctactcccagagaccgtctaaatatataagcatg

SEQ ID NO: 47144 - DNA, 120 bp, synthetic construct
  source 1..120: mol_type = other DNA
gatcacgaggtcaggagatcgagaccatcctggctaacacggtgaaaccccgtctctactaaaaatacaaaaaattagccaagcgtggtgttgggcacctgtagtcccagctgctcggga

SEQ ID NO: 47145 - DNA, 120 bp, synthetic construct
  source 1..120: mol_type = other DNA
caataaaagcaataacaacaaaacagaaatggtggtgtgtcaaccagggttccagttgcaagcagatggcaccctcaaattagggagatttaaggagagtttagtaaaacaagtacttac

SEQ ID NO: 47146 - DNA, 120 bp, synthetic construct
  source 1..120: mol_type = other DNA
agtaaatcttggaaatgacctcctgaagagaacctgtgacctccaagtgagggacttggccagctggaaaagattccacagagggagccagaacacagataccttaaatgtgctcctcat

SEQ ID NO: 47147 - DNA, 120 bp, synthetic construct; identical to SEQ ID NO: 13248
  source 1..120: mol_type = other DNA

SEQ ID NO: 47148 - DNA, 120 bp, synthetic construct
  source 1..120: mol_type = other DNA
tccttacaaacaacactgcagcgaatttatcaatgaatatcataaatttttagaagcgaaagtgcgaggcaaaaggctatttgcgtttgcagtgttgattgatatcaataacatgtactc

SEQ ID NO: 47149 - DNA, 120 bp, synthetic construct
  source 1..120: mol_type = other DNA
ggtatgcatttttaatctgcatttcacttgttagcaatgaggttgacatgcttcgcttttagagcttattctctggtgatatgatcaggaagtaatatttaaagtagcgtttttttaaca

SEQ ID NO: 47150 - DNA, 120 bp, synthetic construct
  source 1..120: mol_type = other DNA
ggcattgtcatttcacagagattttagagtattcactttgtcatctctgaaaggttttaaagtattattactacaaaaatatttgcataagaaggagaattgatgccttcaggtcacttg

SEQ ID NO: 47151 - DNA, 120 bp, synthetic construct; identical to SEQ ID NO: 13249
  source 1..120: mol_type = other DNA

SEQ ID NO: 47152 - DNA, 120 bp, synthetic construct
  source 1..120: mol_type = other DNA
caaggtatctgattggcttggggatgtctttcctgaagaattatacagggaatcctctcagattgcttgactttcttctttgttctgggtgggaggaagtgtgtgactagccaatagcct

SEQ ID NO: 47153 - DNA, 120 bp, synthetic construct
  source 1..120: mol_type = other DNA
ctttcagagaacatgtctttcaattctgggcccatatggtgatcagggcctctgggtttgcaatcatttaagaggtcaggctcaagagaaaagcatatggaaagaactggaagatgagaa

SEQ ID NO: 47154 - DNA, 120 bp, synthetic construct; identical to SEQ ID NO: 13250
  source 1..120: mol_type = other DNA

SEQ ID NO: 47155 - DNA, 120 bp, synthetic construct
  source 1..120: mol_type = other DNA
taacagctaaaatcatttgactttaagtaaaagaaatcattctctataatgtgagtgggcctcatccaatcaactgaacagccttaagagcaaaagctgaggtttctgagagaaaaaata

SEQ ID NO: 47156 - DNA, 120 bp, synthetic construct
  source 1..120: mol_type = other DNA
cccacaataccactatgctacacctgcaggttaaaaatattcccaaagtacttgtgtattaatatttgagaagcagtactctaaaacagtaaattctatccaccagtttccatggattat

SEQ ID NO: 47157 - DNA, 120 bp, synthetic construct
  source 1..120: mol_type = other DNA
aacactccagaaaacaacagtcggtagatacatgaattcaatgatacacgaatgcatgaattcagtgatacatgaatgcatttctgacaagtgtttatggttattgttaaaccttgagat

SEQ ID NO: 47158 - DNA, 120 bp, synthetic construct; identical to SEQ ID NO: 13251
  source 1..120: mol_type = other DNA

SEQ ID NO: 47159 - DNA, 120 bp, synthetic construct
  source 1..120: mol_type = other DNA
cctttagtggatggctttctaggtgacagatattcttattggaacttctttctggagaactttatgaataacgaatttgcctattaggggtagaaaattctctaaagatggttagctgct

SEQ ID NO: 47160 - DNA, 120 bp, synthetic construct
  source 1..120: mol_type = other DNA
taatatttacatataacctacacacatcctcccatatcctttaaatcatctctagattacttatacataatacaatgtaaattctatgtaaatagttgttatactgtgttgcttagggaa

SEQ ID NO: 47161 - DNA, 120 bp, synthetic construct
  source 1..120: mol_type = other DNA
ggctgactatatactgccttaatataagaatatcttaactagagagacttagactaatataacaatctggattaaaagtaatgttgaagttgggttagggtttgctatagggttaattag

SEQ ID NO: 47162 - DNA, 120 bp, synthetic construct
  source 1..120: mol_type = other DNA
tttggctttttaaacattatgtattaaacgtaaggagatgttgtttgatatctgaggtcgtggctggtaacatcttttcctgtggtttggagtgcacagatgcaatgtcccatacagcaa

SEQ ID NO: 47163 - DNA, 120 bp, synthetic construct; identical to SEQ ID NO: 13252
  source 1..120: mol_type = other DNA

SEQ ID NO: 47164 - DNA, 120 bp, synthetic construct
  source 1..120: mol_type = other DNA
acctatatcatatagaggaaaagaatactggtttaaaacaaaggttggaatgtatatgacctcaagggctacctggaattgttaaggtggggagtctcctagggtcaactaatagggagt

SEQ ID NO: 47165 - DNA, 120 bp, synthetic construct
  source 1..120: mol_type = other DNA
ttgtgaagtaatatgctgtatcttaggcaactttcctcatatacagtgggtgctcagcatgtgcaaattcttattgtacactgcccttcccaccatatgcctgtgtctatatgcagtaca

SEQ ID NO: 47166 - DNA, 120 bp, synthetic construct
  source 1..120: mol_type = other DNA
ctgcccttcccaccatatgcctgtgtctatatgcagtacagttgcttgtttggcttttcttcaacattcaatggaaaggctttctcttgttgggtctacccatcaagtaacatgtattat

SEQ ID NO: 47167 - DNA, 120 bp, synthetic construct; identical to SEQ ID NO: 13253
  source 1..120: mol_type = other DNA

SEQ ID NO: 47168 - DNA, 120 bp, synthetic construct
  source 1..120: mol_type = other DNA
agcacggagaagaatttctatctgaggtgtgaaagagctaatcacctctccttaggtgcatgtttttcacaagggaactaattccagctatatccaggtgctgtcccctcagcagcataa

SEQ ID NO: 47169 - DNA, 120 bp, synthetic construct
  source 1..120: mol_type = other DNA
atcatctgggcagcttctaaaaatcctgatgcctcagttaccttccagaaaaattaaatcagactatctgggagtgggaccccttcagtattttttaaatttcctcaggtgatggatttc

SEQ ID NO: 47170 - DNA, 120 bp, synthetic construct
  source 1..120: mol_type = other DNA
tttggttttatatttacaaacaacaaaccttcctaatcagcaaatagatgcttgtccaaaacatactctatacaaaaaatacgtatgtatgaaataaacaaaacgtggtttcactttttt

SEQ ID NO: 47171 - DNA, 120 bp, synthetic construct
  source 1..120: mol_type = other DNA
cagttcagagagtatttctgcctatatttttagctaagcatagagctcttggtctgggagacactgagaatttcaaaatagcttgttacctaaaaataaacttcctgaaatgaacttgag

SEQ ID NO: 47172 - DNA, 120 bp, synthetic construct; identical to SEQ ID NO: 13254
  source 1..120: mol_type = other DNA

SEQ ID NO: 47173 - DNA, 120 bp, synthetic construct
  source 1..120: mol_type = other DNA
gcatgtaagtattaattcatgtttgctggttgagtgcctagtagccttgtcatacttcactgactgtccaaactcatgtcttaaacatcatcaccatctcattgaggaagaaaatgggga

SEQ ID NO: 47174 - DNA, 120 bp, synthetic construct
  source 1..120: mol_type = other DNA
tcctctctaatctgagtgaagaagttctgtatcctatcctacatggcatcaagggccaaacatggactccttgtattcatcctgtgttcactcatttatccaataaacatttttgtatgc

SEQ ID NO: 47175 - DNA, 120 bp, synthetic construct
  source 1..120: mol_type = other DNA
tttgtgcagacaataaataaaacagagttgctataggatgaagaggtggcatttgatcagagatcagaaaagtgacaggaagctaaacaaaggtaatagcaagtgaaaggcctgaggagg

SEQ ID NO: 47176 - DNA, 120 bp, synthetic construct; identical to SEQ ID NO: 13255
  source 1..120: mol_type = other DNA

SEQ ID NO: 47177 - DNA, 120 bp, synthetic construct
  source 1..120: mol_type = other DNA
gagcggtgatgctcgcctggctcccacatcctctgtgctgccctctattttgggtcaccctgacttggtctgtttcctgtcttattcaccagctaaactataatttccttaagggtactt

SEQ ID NO: 47178 - DNA, 120 bp, synthetic construct
  source 1..120: mol_type = other DNA
tcaaccaccccaacccctcaccacccctcaccacggtacaatggattttattacaaattgcatacaccagataattctaatctgatgtgaaggaattattttgcctttcttcagattcat

SEQ ID NO: 47179 - DNA, 120 bp, synthetic construct; identical to SEQ ID NO: 13256
  source 1..120: mol_type = other DNA

SEQ ID NO: 47180 - DNA, 120 bp, synthetic construct
  source 1..120: mol_type = other DNA
cataatgtattctcatagtacacacagtcagtgtatctctgtctcctaaatgtaaacacctgttccatttccctttcctttagaccatctctctttcgattattaaatgtagtttctagg

SEQ ID NO: 47181 - DNA, 120 bp, synthetic construct
  source 1..120: mol_type = other DNA
gatcataaaatgatctttaatataataaatctggaaactctttcttgtatcaagaagagggatttgccgcttagtagtcatttaaccgacacctcctcagcaccccatagtgagaccagg

SEQ ID NO: 47182 - DNA, 120 bp, synthetic construct
  source 1..120: mol_type = other DNA
caaaaatggggaatctacttggagaaccacaaaaacaacctgtttttttagtcagaaattctggttatattattcatataaccattgggatagatatgacttctttctctcagctcagaa

SEQ ID NO: 47183 - DNA, 120 bp, synthetic construct
  source 1..120: mol_type = other DNA
tcagcctttcgagtagctgggattacaggtgcccactaccacacctggctaagttttgtatttttagtagagacggggtttcaccatgttggccaggctggtctcgaactcccgacctca

SEQ ID NO: 47184 - DNA, 120 bp, synthetic construct; identical to SEQ ID NO: 13257
  source 1..120: mol_type = other DNA

SEQ ID NO: 47185 - DNA, 120 bp, synthetic construct
  source 1..120: mol_type = other DNA
tctcctggctagttgacaaacaagaatataaacccaaatatctctcccccttttttgggaatgagtcatttgagacccctagaccatgtaaagctagccttgatgatagatctggaaacc

SEQ ID NO: 47186 - DNA, 120 bp, synthetic construct
  source 1..120: mol_type = other DNA
catacttgccaatatgatatgatacctgtccatgtccacttctaggtaacgctttcaaagaaaggatttggacaaagaatgtgttcagaggagagggaccagtgtggttagaggcctaga

SEQ ID NO: 47187 - DNA, 120 bp, synthetic construct
  source 1..120: mol_type = other DNA
attgaaaggctctcaggtagaaaatataataaacatattctgcataactctgaagggtagagggaggatccataacatttgcaaggcaggcagacttgtgctcagcataagtttagacat

SEQ ID NO: 47188 - DNA, 120 bp, synthetic construct; identical to SEQ ID NO: 13258
  source 1..120: mol_type = other DNA

SEQ ID NO: 47189 - DNA, 120 bp, synthetic construct
  source 1..120: mol_type = other DNA
taaagggtaaatacaatgaacattattttgacctgtgctggccaaagaaaattctcccgtgaagccaggggtgttgataatgagaaggggaagtatagggtacgctatagtgccctcctt

SEQ ID NO: 47190 - DNA, 120 bp, synthetic construct
  source 1..120: mol_type = other DNA
agccatcatcccatggctagttgatgcagagaaacaaattcctggttattttgccataatgtggtacatctttgaaggacatcccattttcagagtttccaaggcattcactgaggcctt

SEQ ID NO: 47191 - DNA, 120 bp, synthetic construct; identical to SEQ ID NO: 13259
  source 1..120: mol_type = other DNA

SEQ ID NO: 47192 - DNA, 120 bp, synthetic construct
  source 1..120: mol_type = other DNA
attatttttaaattgagagggagtctcccactgttgcccaggctggagtgcaatggcgtgatctgggctcactgcaacctctgcctcccgggttcgtgcgattctcctgcttcagcttcc

SEQ ID NO: 47193 - DNA, 120 bp, synthetic construct
  source 1..120: mol_type = other DNA
gccaccgtgcccagcctccaaaattaattttatcatgttggttcttctttcagtggaaattgacaacctcttcagtggctcagagcaaatgttgcaggacaaaaaaagaagtccgtattt

SEQ ID NO: 47194 - DNA, 120 bp, synthetic construct
  source 1..120: mol_type = other DNA
agtattacagttgttttctctctgtgatgttagttctctcagtagctaagaggtagaaaaccggaggctctggaagagctgcccaataattatagagcagctttctttcatggctcacag

SEQ ID NO: 47195 - DNA, 120 bp, synthetic construct
  source 1..120: mol_type = other DNA
ggaaggtgttcttgttccatgactacagctgatttgaagactgccaagtagctttggggttaaagatgggtagatttccaaattatacatcatttgttgtatgatcatgccaactttcat

SEQ ID NO: 47196 - DNA, 120 bp, synthetic construct; identical to SEQ ID NO: 13260
  source 1..120: mol_type = other DNA

SEQ ID NO: 47197 - DNA, 120 bp, synthetic construct
  source 1..120: mol_type = other DNA
actggcaccattcctgcctggattgtcctaacccatacccttgcccttatccctttgtcaacatattgtcctttaatgtccttgacttaagcactaaaaaagtggtattggtcaaagttg

SEQ ID NO: 47198 - DNA, 120 bp, synthetic construct
  source 1..120: mol_type = other DNA
ggcagggaggattaggggaaaattggtgagtgagtacatgcatgcattggctcatgtgtgcactcagaatcttcatagaagattactctagcaaaactgactggaccagattagcccttc

SEQ ID NO: 47199 - DNA, 120 bp, synthetic construct; identical to SEQ ID NO: 13261
  source 1..120: mol_type = other DNA

SEQ ID NO: 47200 - DNA, 120 bp, synthetic construct
  source 1..120: mol_type = other DNA
agtagttagtttatgacagcataaaatatttcattgaactgtaaatgaagaacaccctgacatccctttccatttcttttatttatttgttttttttgtttgtttgttttttctgaattg

SEQ ID NO: 47201 - DNA, 120 bp, synthetic construct
  source 1..120: mol_type = other DNA
agcaaacaaaaaaaagaggaactgtgactatttccccaggcatgctctttgaaaacagtatagctagacaggacagattttgccacttaaactaggggtgtgatgtgaggtttgcattac

SEQ ID NO: 47202 - DNA, 120 bp, synthetic construct
  source 1..120: mol_type = other DNA
cgtggaacgctgtctgctccaggtgatgtttataatcacaaatgggttccaagaataaacaaaggaaaaacagaaaagagtagaaaagcataggagactataggacagcctgcgaatgct

SEQ ID NO: 47203 - DNA, 120 bp, synthetic construct
  source 1..120: mol_type = other DNA
ctcgcttccaatgaatctcttcactctaggagaaagaatgacgagaacataacactagagacagtttgccatgaccccaagctcccctaccatgactttattctggaagatgctgcttct

SEQ ID NO: 47204 - DNA, 120 bp, synthetic construct; identical to SEQ ID NO: 13262
  source 1..120: mol_type = other DNA

SEQ ID NO: 47205 - DNA, 120 bp, synthetic construct
  source 1..120: mol_type = other DNA
aggggcttggggagtagcagggtttgttctggttctcatcaaatatggttgactggggcaaacattattatttgtctttgacaaatagtttctttcacctagagcagtgtttctcaaagt

SEQ ID NO: 47206 - DNA, 120 bp, synthetic construct
  source 1..120: mol_type = other DNA
cctcccagtaattctgtgcagctaaaatttggtaactattgttctaaagatttggatggggttgtttaatcttggaggaggactttctttataactgatgttgtttcttgtacatagtcc

SEQ ID NO: 47207 - DNA, 120 bp, synthetic construct
  source 1..120: mol_type = other DNA
gtttacccctagagccaggagaagagtagattagatactagcctccatctttgaagttcagcgtttactcagcttgaaaggaaggcatacactattccctcaatttttaataagaagaga

SEQ ID NO: 47208 - DNA, 120 bp, synthetic construct; identical to SEQ ID NO: 13263
  source 1..120: mol_type = other DNA

SEQ ID NO: 47209 - DNA, 120 bp, synthetic construct
  source 1..120: mol_type = other DNA
aacaagatagaacacatagatatactgtacatcttttaatttagtctcgaatttcatattatctcccacgatggatcttatcatgtccctgttgatggattgtcttcagtttttccactt

SEQ ID NO: 47210 - DNA, 120 bp, synthetic construct; identical to SEQ ID NO: 5846
  source 1..120: mol_type = other DNA

SEQ ID NO: 47211 - DNA, 120 bp, synthetic construct
  source 1..120: mol_type = other DNA
tttagtcaacaataggtctgatttaattaaaaaatctttttgaaatacaaatgctggctctacaccctatctctgcggccatgtgcattccacctgcgagaagctatgtgtcctcgtgtt

SEQ ID NO: 47212 - DNA, 120 bp, synthetic construct; identical to SEQ ID NO: 13264
  source 1..120: mol_type = other DNA

SEQ ID NO: 47213 - DNA, 120 bp, synthetic construct
  source 1..120: mol_type = other DNA
agtaggtgggactgcaggagtgtgccaccatacccagctaatctttgtatttttagtagagacgagtttcaccatgttcgtcagtctggtctcgaactcctgacctcaggtgaataacct

SEQ ID NO: 47214 - DNA, 120 bp, synthetic construct
  source 1..120: mol_type = other DNA
cacctgatattctgacttaccaggtcagctttcttcaagtagatcaccttttaaaagaaggcctaggctaagccaaaggaattaatctctgacagtagaatacccaggcatgtttactag

SEQ ID NO: 47215 - DNA, 120 bp, synthetic construct
  source 1..120: mol_type = other DNA
aatatctttgtcaaaatatatcatgcattttatattttactatgagcctttcagatactaatgacttccattttcagagtctttcaactcaagtgatcatcatgggcatccctcatattt

SEQ ID NO: 47216 - DNA, 120 bp, synthetic construct; identical to SEQ ID NO: 13265
  source 1..120: mol_type = other DNA

SEQ ID NO: 47217 - DNA, 120 bp, synthetic construct
  source 1..120: mol_type = other DNA
ggctcactgcaacctctgcctcctggattcaagcaattctcctgcctcagcctctcaagtagctgggattacaggcatctgccaccatgcccggctaatttttatgtttttagtagagac

SEQ ID NO: 47218 - DNA, 120 bp, synthetic construct
  source 1..120: mol_type = other DNA
actcttaatgttgatttgtctactccaagtccaacaaggtggtgaacacaaaagctatgaagtgcattgtggctgtattattagtagtacagtactcttgttggcaagttcctgatctgc

SEQ ID NO: 47219 - DNA, 120 bp, synthetic construct; identical to SEQ ID NO: 13266
  source 1..120: mol_type = other DNA

SEQ ID NO: 47220 - DNA, 120 bp, synthetic construct
  source 1..120: mol_type = other DNA
tccttttttaattctttccttttttcctctttttatttccttctttctctttatatctctgtatgtttccaaagagataatatatgcatatgataaaaaattcaaatgctagacaaattc

SEQ ID NO: 47221 - DNA, 120 bp, synthetic construct
  source 1..120: mol_type = other DNA
tgtcatagatgccctttcctcagaggactgagatcatggtttttagaatgaaagagttaaagaaaccttgctgtttttttctttgaaccgggtacctacccttaaccctggaatccctca

SEQ ID NO: 47222 - DNA, 120 bp, synthetic construct
  source 1..120: mol_type = other DNA
ccctcccagtctctgaagattccctcctgccagaacattttgtgtagaattctaaggaaatcagagtctatccctgtactaaccaacatataaaattccaattagaagagaagttgtttg

SEQ ID NO: 47223 - DNA, 120 bp, synthetic construct
  source 1..120: mol_type = other DNA
aggaggtaggagaggaaggaatcctgagcaaatagccatgctgtttacttgccaatgacatccccactttgcaaagacatgatatggttattgatctctcactgaacctgtaagaatcaa

SEQ ID NO: 47224 - DNA, 120 bp, synthetic construct; identical to SEQ ID NO: 13267
  source 1..120: mol_type = other DNA

SEQ ID NO: 47225 - DNA, 120 bp, synthetic construct
  source 1..120: mol_type = other DNA
agtagattaatgcatgtaaagtgcttgcaacgttgcctgacatgtcactgtctgttagctgttagcagtagttgggctttttatagagggctggtgacttgtgcttgtctgaatgcagga

SEQ ID NO: 47226 - DNA, 120 bp, synthetic construct
  source 1..120: mol_type = other DNA
gctcactttgctttaatccctgtttcatccagtttctctttttctccacatgccttcacagaggcaaggggagcatgctgagtctagaatttctaatcaaagctaaccacatccctgtca

SEQ ID NO: 47227 - DNA, 120 bp, synthetic construct; identical to SEQ ID NO: 13268
  source 1..120: mol_type = other DNA

SEQ ID NO: 47228 - DNA, 120 bp, synthetic construct
  source 1..120: mol_type = other DNA
aggtgcatcctttcttacttcttcttcccctgattaacgagaacactctacaccaagacacatacctcttctgaacggtataaaccgttgctactgaaagtgtctagaccagcagcagca

SEQ ID NO: 47229 - DNA, 120 bp, synthetic construct
  source 1..120: mol_type = other DNA
ccttcagtgatttgtttgcacactgaagtgtgagaagcactggtgtgaactcaccaggtagggatggaaccagagatggaggtcttattaacttcatgctggtaactccctgagctaatg

SEQ ID NO: 47230 - DNA, 120 bp, synthetic construct
  source 1..120: mol_type = other DNA
acagagctctccagtggcatgtgggtctttttcagcagtgacaatagtttattttttaaatatactccacaaatgttgttctggtgtggatcttaatgtggagaaaatcagacacctttt

SEQ ID NO: 47231 - DNA, 120 bp, synthetic construct; identical to SEQ ID NO: 13269
  source 1..120: mol_type = other DNA

SEQ ID NO: 47232 - DNA, 120 bp, synthetic construct
  source 1..120: mol_type = other DNA
atcttggccatcttgcttttcctgctaacttagaactgaactgcttattctagaaaatgagaggcactggggccatataggaaagggatagcattggacccaagtcctagactttcagta

SEQ ID NO: 47233 - DNA, 120 bp, synthetic construct
  source 1..120: mol_type = other DNA
ggattgcagcctactctgaatgtgtgcacctgtgctaactactttcaggtgtgttgtcttgtttcatagactcattacatttttatgatgaagtgaaacccgtgaattggctcctccaga

SEQ ID NO: 47234 - DNA, 120 bp, synthetic construct
  source 1..120: mol_type = other DNA
tctcttatagaaggaatacccttacccttccacattcccgtggtggtggtgtgtttgcttttttatcagtcttaacccatgggaggctgcacaacttacataagaggctacctgttctgt

SEQ ID NO: 47235 - DNA, 120 bp, synthetic construct; identical to SEQ ID NO: 13270
  source 1..120: mol_type = other DNA

SEQ ID NO: 47236 - DNA, 120 bp, synthetic construct
  source 1..120: mol_type = other DNA
ttcaaatttcttatctttgcctttagctggatgagtgaggagatttgtaccaacgtcatgtattctcctcttccctgcaaattcctccacctgagtcctattgaggtgctccccattata

SEQ ID NO: 47237 - DNA, 120 bp, synthetic construct
  source 1..120: mol_type = other DNA
agaaaggtgttctcctcatgacgacctgtttgcctctgatcttaaggacactttgaagcataccgagcaggggtctgcaaacttctttgataacaggcaagatagtaaatattttcagct

SEQ ID NO: 47238 - DNA, 120 bp, synthetic construct
  source 1..120: mol_type = other DNA
aggccaacccctgatagagatattcatggtttttgtgtttctctctcaaatgctaactaccagaaaagcttagagtcaaatctgaatcatgcttctagcaaatatgtacctacacattta

SEQ ID NO: 47239 - DNA, 120 bp, synthetic construct
  source 1..120: mol_type = other DNA
gtcgttgttgttgtttttgggaatgggataggactgtaagtaaataaatcaattatatcttgctagcttagaaaccaggacttgagtaaccacttctgactcaaagttcaatctatgtgg

SEQ ID NO: 47240 - DNA, 120 bp, synthetic construct; identical to SEQ ID NO: 13271
  source 1..120: mol_type = other DNA

SEQ ID NO: 47241 - DNA, 120 bp, synthetic construct
  source 1..120: mol_type = other DNA
ttacaccatccagcaaacccactctgtgtactgatcgcatgcattgagcattttgttgacttccgttgttttccgagtaagggaagtcttagaaatgctgccctctttctcccaaatctc

SEQ ID NO: 47242 - DNA, 120 bp, synthetic construct
  source 1..120: mol_type = other DNA
tgctgccttggaactgtgcactcacgcctcaaaatagctggctttccagctgtgcatttttgtttcaaaagaaacaaaccagatttactttctggtctaaatgcagaagaaaaaataagt

SEQ ID NO: 47243 - DNA, 120 bp, synthetic construct
  source 1..120: mol_type = other DNA
tttttgttgtgaaccagccttggttagaaagcacacttggaattcatcaatatggccctatgtctggccaaggaaataataaagattttgcatgatagaggacactgtgactcagttgaa

SEQ ID NO: 47244 - DNA, 120 bp, synthetic construct; identical to SEQ ID NO: 13272
  source 1..120: mol_type = other DNA

SEQ ID NO: 47245 - DNA, 120 bp, synthetic construct
  source 1..120: mol_type = other DNA
tgaaattgacttttatttccacccacgtatactccagaggctgtattcaccaccatttggacatctggatgacttgcctttggaaagtccttttgtattctaaatcgctcctgcatgtta

SEQ ID NO: 47246 - DNA, 120 bp, synthetic construct
  source 1..120: mol_type = other DNA
cttttgttgcctaattagaggatatagttggttccaatgtcaagaacaatttctctgaaatgtagtcattaaaattattcccatgtctttcattttccaggccccatcctattcgaaata

SEQ ID NO: 47247 - DNA, 120 bp, synthetic construct; identical to SEQ ID NO: 13273
  source 1..120: mol_type = other DNA

SEQ ID NO: 47248 - DNA, 120 bp, synthetic construct
  source 1..120: mol_type = other DNA
gccttcgaaggttagaggaggagaaaaaccaacacctgttttaccccatccttggaggaatagcaagacactttaagaggggatattattttgttttctacaacaatttacaagcaattg

SEQ ID NO: 47249 - DNA, 120 bp, synthetic construct
  source 1..120: mol_type = other DNA
ttagcttttaaaactgattaaattatacgttaaaggaaagcacattttaaaccttaatgtgtccaaaaggttggatggcaaggtttgggtgctactgccttggcagagacaaggcaggga

SEQ ID NO: 47250 - DNA, 120 bp, synthetic construct; identical to SEQ ID NO: 13274
  source 1..120: mol_type = other DNA

SEQ ID NO: 47251 - DNA, 120 bp, synthetic construct
  source 1..120: mol_type = other DNA
gaaaagaaaatgaaaaaaaatcttgttccaaagaacatatatcaggtgtgaaactctctttgtgggaggacagatgtgtcatcatttcctggacaaagcctggtaccttgtaggcaccct

SEQ ID NO: 47252 - DNA, 120 bp, synthetic construct
  source 1..120: mol_type = other DNA
tgaatcagggttttaatggcctgaaatgaccaattttctaaaacttgacaggtagatgtaaaatcagacatataggttcaaacaatcgattgcaaaggagcacttgtcaaaacactggct

SEQ ID NO: 47253 - DNA, 120 bp, synthetic construct
  source 1..120: mol_type = other DNA
ttaaactccacttggtggaagaggaggtgagagtcctgctgtaatctttgctacacaagttatattccaagtattatatctgtgtctatcaaaacacatgatgaagaatcttaaatagca

SEQ ID NO: 47254 - DNA, 120 bp, synthetic construct; identical to SEQ ID NO: 13275
  source 1..120: mol_type = other DNA

SEQ ID NO: 47255 - DNA, 120 bp, synthetic construct
  source 1..120: mol_type = other DNA
gactttatcccaatatatctgcagttagaaatattgtgatttgattatggaatgataacaaaggaatgatgtccttctaccataacattttcaggcagaggtttcacctctacctctcat

SEQ ID NO: 47256 - DNA, 120 bp, synthetic construct
  source 1..120: mol_type = other DNA
taatacaaaggagactgtgccatgggataggagaggtggcgaatagctttgttctgaaatatgtgcagttggaataaaacaaccacattgattggagagaagacttctttcatcatttga

SEQ ID NO: 47257 - DNA, 120 bp, synthetic construct
  source 1..120: mol_type = other DNA
tttttattgtttgcctaaattggtgtgctttttactaggatgatggatggggaagcatatctcattctacactcctccaccagttaattgactagaaaattatcatgggccattttctca

SEQ ID NO: 47258 - DNA, 120 bp, synthetic construct
  source 1..120: mol_type = other DNA
actgtttagcaagaataaaatttacctctgaaacttgaatgtgtaaatgaatcactgagagaacttttaaatgtagattctgattcagttagttgaggacagcgctaagactctgcattt

SEQ ID NO: 47259 - DNA, 120 bp, synthetic construct; identical to SEQ ID NO: 13276
  source 1..120: mol_type = other DNA

SEQ ID NO: 47260 - DNA, 120 bp, synthetic construct
  source 1..120: mol_type = other DNA
gtgtttttttggttttcatgacattgactttgatttgaataggtcagaccatttcatgtactttataaaggcactttgtagatttgtctgatgatttgattaattcagattaaacatttt

SEQ ID NO: 47261 - DNA, 120 bp, synthetic construct
  source 1..120: mol_type = other DNA
ggatgataaaacaagtttaaaagctcaagaaaatgataactataaaagccaggaatagtgattactttttagaggaagggagggatctccgattgagttggggaacatgaacagacttct

SEQ ID NO: 47262 - DNA, 120 bp, synthetic construct
  source 1..120: mol_type = other DNA
tggaatgaattctttttcacaagagagaaatcagagtaatttctctagttttgagggccatactgtgctcttgggccaagtatattattttaaatacccttaggagaaaggaaagaggaa

SEQ ID NO: 47263 - DNA, 120 bp, synthetic construct; identical to SEQ ID NO: 13277
  source 1..120: mol_type = other DNA

SEQ ID NO: 47264 - DNA, 120 bp, synthetic construct
  source 1..120: mol_type = other DNA
tttgttctttccataccaccaagctatctccttaacaatgaactgtgagatccatttaataattctgaaaatttccagtcacttctgtcactcatagaggccagacttagttgcaaataa

SEQ ID NO: 47265 - DNA, 120 bp, synthetic construct
  source 1..120: mol_type = other DNA
actggcagaaaacctcaaggggaaatcctgtggtatactttcctttggagtgattgaaaagtaaacaatttgtcttataacttgagtatgcatgtgcgcacacacatgcacacgcgcgtg

SEQ ID NO: 47266 - DNA, 120 bp, synthetic construct; identical to SEQ ID NO: 13278
  source 1..120: mol_type = other DNA

SEQ ID NO: 47267 - DNA, 120 bp, synthetic construct
  source 1..120: mol_type = other DNA
ttaatatttgaagtagtttggcaattcctccactcggtaaaggagtttagggtgaacatttagtgggatactaatttatccgagcaatagaaagggacgtggatgacagtttttcgcaca

SEQ ID NO: 47268 - DNA, 120 bp, synthetic construct
  source 1..120: mol_type = other DNA
tatatgcaactggctgagatccaaagaaggaaactgtgctaaagagagatagctgaggggaaggaagaacttcctgtctcaagtcatgttaattataacattaaaaggacagcattcatt

SEQ ID NO: 47269 - DNA, 120 bp, synthetic construct
  source 1..120: mol_type = other DNA
caaggttcagtatcctcctctgtaaaacgggggtaagagaatctaactcatacatagggttattggagaaataaagtagatcatgtttacaaaataaattgtccggtgcctaacccaaca

SEQ ID NO: 47270 - DNA, 120 bp, synthetic construct
  source 1..120: mol_type = other DNA
gttgtccatgtgcagcacaacaaatcaagccaggcagatctcccattggcactagttaccaacttcctagagaaacccatcaatctcaaaattcctgctctagcaagtcctggaaaagag

SEQ ID NO: 47271 - DNA, 120 bp, synthetic construct; identical to SEQ ID NO: 13279
  source 1..120: mol_type = other DNA

SEQ ID NO: 47272 - DNA, 120 bp, synthetic construct
  source 1..120: mol_type = other DNA
caatagcagcagatctaaacaattgaaatgtctaaatggtgagcgtaagtcacatgctgagacgtctgcaacaacaaactcataggtacagctgatactaggaaatattaatttttaatt

SEQ ID NO: 47273 - DNA, 120 bp, synthetic construct
  source 1..120: mol_type = other DNA
ggccttggataaattccacccttatttttaatgcccttcagagctatatctggttcaatgttattactattcatggaaggtcccaatagtgcaacaattatgttttgagctctgctaaga

SEQ ID NO: 47274 - DNA, 120 bp, synthetic construct; identical to SEQ ID NO: 13280
  source 1..120: mol_type = other DNA

SEQ ID NO: 47275 - DNA, 120 bp, synthetic construct
  source 1..120: mol_type = other DNA
ggctggaatgcagtggcaggatcatagtgtgctgccgccttgaactcctgcctcaagtaaagtaatcctcctgcctcagccaccgtaatagctgggactacaggaagcaccacagtgtct

SEQ ID NO: 47276 - DNA, 120 bp, synthetic construct
  source 1..120: mol_type = other DNA
ccaccacacccagcctaaggtcattgccattcttagttggctctcaccaatatgaagtttagagatcaggtatggggttgagatcagaagtctctccaatcaggcaatgctcattgtaaa

SEQ ID NO: 47277 - DNA, 120 bp, synthetic construct
  source 1..120: mol_type = other DNA
tttctatcaattaaatttaaatattctataaaatccttagcacacagccaggaacttagtaagtgttcagtttatgagtttctctgtaactggcggctgatgaaaagaagcatttcctgt

SEQ ID NO: 47278 - DNA, 120 bp, synthetic construct; identical to SEQ ID NO: 13281
  source 1..120: mol_type = other DNA

SEQ ID NO: 47279 - DNA, 120 bp, synthetic construct
  source 1..120: mol_type = other DNA
aaaactttggtttctgacattgaactggggatttctagaatcttcttcagtcagtgccacacataaacttaaggggatttctgtttttgtgtttcctttaggctaaaaaggaattgaaat

SEQ ID NO: 47280 - DNA, 120 bp, synthetic construct
  source 1..120: mol_type = other DNA
taatatttaaattttttcaaattgtatttctcatatgtgaaaaaaaattgactacatattcacatttggccaaagtgaagtctctccagattctgccaatgaggttattaaaataacacc

SEQ ID NO: 47281 - DNA, 120 bp, synthetic construct
  source 1..120: mol_type = other DNA
ctctttaaaaatggggatggaaatcattcttaggtcataggactatacaaaagcaggccatggacttctgagccatagtttgtcaaaccttgctgtaaaatataaaaaatttgagaagta

SEQ ID NO: 47282 - DNA, 120 bp, synthetic construct
  source 1..120: mol_type = other DNA
cctgctttgtcaggagagaagcaatcagataatcaagtggatttctgattataagacattccatgtagttacagacacagagaccggagacaagtgggtacttcaagcaaacacattcat

SEQ ID NO: 47283 - DNA, 120 bp, synthetic construct; identical to SEQ ID NO: 13282
  source 1..120: mol_type = other DNA

SEQ ID NO: 47284 - DNA, 120 bp, synthetic construct
  source 1..120: mol_type = other DNA
ccaaaaaatggtgattttttttttccctcttggttgctggaattctgatatcttggggttacttctctggttactagacccaagattttcatctagaatatatagtcagtggaagttggc

SEQ ID NO: 47285 - DNA, 120 bp, synthetic construct
  source 1..120: mol_type = other DNA
agcgcagtggctcacgcctgtaatcccagcacttttggaggccaaggcgggcagatcacaaggtcaggagttcaagaccagcctggccaacatggtgaaaccccgtctccactaaaaata

SEQ ID NO: 47286 - DNA, 120 bp, synthetic construct; identical to SEQ ID NO: 13283
  source 1..120: mol_type = other DNA

SEQ ID NO: 47287 - DNA, 120 bp, synthetic construct
  source 1..120: mol_type = other DNA
atgtgctggattttatagtcccgtttgaagaggcggtgtctgatttacatagggctcacagattggttcaatcaggtatgacgtttacatagtgcatggggaagactggtcaccccaccc

SEQ ID NO: 47288 - DNA, 120 bp, synthetic construct
  source 1..120: mol_type = other DNA
tcctgctggcattcacccgtgcaagctcccagcttgcctgtctatgtctgaagctcaactttacaggctgctctttgttagaaaatgatttggggctgcttttcattaaaaagaaacacc

SEQ ID NO: 47289 - DNA, 120 bp, synthetic construct
  source 1..120: mol_type = other DNA
ggactatattctcatcacttttttttttctctttaaacacctactgtaggtgaaaactgacaaatgaataatcaaaagatccttttctgacacggagtttggttccataccacctaccca

SEQ ID NO: 47290 - DNA, 120 bp, synthetic construct
  source 1..120: mol_type = other DNA
cccattcttcagagaccaacttaaaggcagttttttgctactgtgccttccatgtttctctaagcttttccacattccactaatatatagattacattgtacatttagcccctatcccag

SEQ ID NO: 47291 - DNA, 120 bp, synthetic construct; identical to SEQ ID NO: 13284
  source 1..120: mol_type = other DNA

SEQ ID NO: 47292 - DNA, 120 bp, synthetic construct
  source 1..120: mol_type = other DNA
ttcatgtccttcttccaaaaaggaaaactatttcaccagagccaacaaggccagcacatgaaacaaagtttgaggcacaagatattatagttagatatctggtgctaaggactctccttg

SEQ ID NO: 47293 - DNA, 120 bp, synthetic construct
  source 1..120: mol_type = other DNA
ccatgtttccattgttgctattaaatatttcagttccatgaaactacaattcgtatgcacactgaaaagaggaatgttgggtggatgtaagataactgtccaaagagatcctttccatgg

SEQ ID NO: 47294 - DNA, 120 bp, synthetic construct; identical to SEQ ID NO: 13285
  source 1..120: mol_type = other DNA

SEQ ID NO: 47295 - DNA, 120 bp, synthetic construct
  source 1..120: mol_type = other DNA
ggggatggcaagagtagggaaagacagatgtgaaatcaagaggtagagtcatagttcatttagtttaagttgtactgaattgttacctaggaaaagtataaggtgctatgaaaatgtata

SEQ ID NO: 47296 - DNA, 120 bp, synthetic construct
  source 1..120: mol_type = other DNA
catgcacttgcatccctgaaataaaaattaacaatatcgtatctacaaaaactatgcagatgctaaaatctatagatgctcaggcatgaacccacttcctgacagtacttacctaccaca

SEQ ID NO: 47297 - DNA, 120 bp, synthetic construct
  source 1..120: mol_type = other DNA
atatctgtcatcatcatcttctactgctaccgcgttaaccggcagcagaagctgagttcaacctgggaaaccggcaagacgcggaagctcatggagttcagcgagcactgtgccatcatc

SEQ ID NO: 47298 - DNA, 120 bp, synthetic construct; identical to SEQ ID NO: 13286
  source 1..120: mol_type = other DNA

SEQ ID NO: 47299 - DNA, 120 bp, synthetic construct
  source 1..120: mol_type = other DNA
catgtcatcagctgggaggacctgcgcaagctgggcagctccctcgcccgggggattgctcacctccacagtgatcacactccatgtgggaggcccaagatgcccatcgtgcacagggac

SEQ ID NO: 47300 - DNA, 120 bp, synthetic construct
  source 1..120: mol_type = other DNA
agttagagctagtgctagatcccctttaccttgagcctggcctcaccctacctcttgatccatatctcctggctcttatctcaaacagccctgtactctggacactggtctagggaatct

SEQ ID NO: 47301 - DNA, 120 bp, synthetic construct
  source 1..120: mol_type = other DNA
cctggatcaatcctcatttctcttccagcaaatgttttttctttgtttcaagcactgttagtactttacctctattttttccctctcttatggttgtactcagtcctttctgctctatac

SEQ ID NO: 47302 - DNA, 120 bp, synthetic construct
  source 1..120: mol_type = other DNA
agtaaaataagtacttgtcgactgagtgagcacttccactcttgaagcactctcacagattaaaatggaaatgtttttggctaagaaactattggaaggtgattggaaatcaccacaaca

SEQ ID NO: 47303 - DNA, 120 bp, synthetic construct; identical to SEQ ID NO: 13287
  source 1..120: mol_type = other DNA

SEQ ID NO: 47304 - DNA, 120 bp, synthetic construct
  source 1..120: mol_type = other DNA
tgagccattctctggaatatttttttcctttttcatatggatccgacgtttgcatattatcagtcatagagattagcacaggcctaaaagtcaaaataaaactacatggcccacaagtta

SEQ ID NO: 47305 - DNA, 120 bp, synthetic construct
  source 1..120: mol_type = other DNA
ttgtactatatcctttgcacactggaatgtgccatgggataaacaaagattaagactcagtcctaaagtgatcaaaactgatagcaattattatttttaccataagtcttggagtttcag

SEQ ID NO: 47306 - DNA, 120 bp, synthetic construct; identical to SEQ ID NO: 13288
  source 1..120: mol_type = other DNA

SEQ ID NO: 47307 - DNA, 120 bp, synthetic construct
  source 1..120: mol_type = other DNA
tattgtgaaaataaaaaggcagctggaattaaatgatgggcctcactgtctgtttttgctataggtgggaactgcaagatacatggctccagaagtcctagaatccaggatgaatttgga

SEQ ID NO: 47308 - DNA, 120 bp, synthetic construct
  source 1..120: mol_type = other DNA
tgggaggtaggtgtggaccagcatcattgtgtagtggtaaacttgtcttcaaaataagatcatgtgttgcttcgagcattattccaggggttacaaagcagttattagagctagttgaga

SEQ ID NO: 47309 - DNA, 120 bp, synthetic construct
  source 1..120: mol_type = other DNA
attactcttctcttgacacatctcttcacagttatttaaatatctggcaagagacgaatactaataaatgtataagaattatctctaatgatcatgtgggtaatattcagataagcatct

SEQ ID NO: 47310 - DNA, 120 bp, synthetic construct; identical to SEQ ID NO: 13289
  source 1..120: mol_type = other DNA

SEQ ID NO: 47311 - DNA, 120 bp, synthetic construct
  source 1..120: mol_type = other DNA
tgctgagtccttttcactgttagaggctgttactactattgaccatgagactgtagatagaatgggcaacaaacatctggggtgccagggtgaggctattgttctaggaagtattatccc

SEQ ID NO: 47312 - DNA, 120 bp, synthetic construct
  source 1..120: mol_type = other DNA
gtccaatgaaagcagcccaacgcaagctctcattgaactagaactgcctttcgctgtctcctgtccactatgtgtttctattcatgtccttcttatttcttaggtgagacagggtcttag

SEQ ID NO: 47313 - DNA, 120 bp, synthetic construct
  source 1..120: mol_type = other DNA
caatggcgcaatctcggctgactgcaacctctgcctcccgggttcaagcaattctcctagctcagcctcttgagtagctgagattacagacatgcaccaccacgctcagctaatatttgt

SEQ ID NO: 47314 - DNA, 120 bp, synthetic construct
  source 1..120: mol_type = other DNA
agcctccattccatgtttaactttttgttttgtgataattttagacttagaaaatagttgtaaaaatagtggagtttctgtatactcttaactcaactttgcctgttgttaatatctaac

SEQ ID NO: 47315 - DNA, 120 bp, synthetic construct; identical to SEQ ID NO: 13290
  source 1..120: mol_type = other DNA

SEQ ID NO: 47316 - DNA, 120 bp, synthetic construct
  source 1..120: mol_type = other DNA
cagggggaataagatgtccatgtgtctggttattaatgttaaatttggtcctttggttaaagtgggacctgctgctatttgtccatttgtaagtaatacatgcctttgacctgtttctaa

SEQ ID NO: 47317 - DNA, 120 bp, synthetic construct
  source 1..120: mol_type = other DNA
ggaagattttctgtttttcttgttccttctatatttattaatatgcattctcctttaaaaaagatctgtctcttctgacaccatcccctgttctttgtttactaattatgtatttatatc

SEQ ID NO: 47318 - DNA, 120 bp, synthetic construct
  source 1..120: mol_type = other DNA
agcaggggatttggggtatttgtttcattatatgagtatccagtattgtcattatttattttgttgctcaggttgccacagcttgggtcactggtccaaactacccaacattttgcccaa

SEQ ID NO: 47319 - DNA, 120 bp, synthetic construct; identical to SEQ ID NO: 5871
  source 1..120: mol_type = other DNA

SEQ ID NO: 47320 - DNA, 120 bp, synthetic construct
  source 1..120: mol_type = other DNA
atgctgttgtcactgtcagaataaatttacctagatttcagtatcattccctatcctttcaactctgttattctataaacatgagctggagattgtgtctctgtctttccctctgtcagt

SEQ ID NO: 47321 - DNA, 120 bp, synthetic construct
  source 1..120: mol_type = other DNA
gctgagtgtggaagaatttaagctaatgaggaaggagttcaccaaattttacaaggtctaaaaacagttagaatataaacaagttttcccaaggaaggaacaggatatggtttattcagc

SEQ ID NO: 47322 - DNA, 120 bp, synthetic construct
  source 1..120: mol_type = other DNA
tttcgtttgatcttaagcccacagtcctatttctcccatctttgctcgggctgcagacaccaaggttatttatccatcctcacgttcgtcctgacacaaagccgttcacttgattaagcg

SEQ ID NO: 47323 - DNA, 120 bp, synthetic construct; identical to SEQ ID NO: 13292
  source 1..120: mol_type = other DNA

SEQ ID NO: 47324 - DNA, 120 bp, synthetic construct
  source 1..120: mol_type = other DNA
atcttacaaattaaataatgaatccccctgtttgatgttagactttaattttaaggtataaggaagagggaaggatgtaaaaggtctttccttaagcttgaacttctgcagtttgcagta

SEQ ID NO: 47325 - DNA, 120 bp, synthetic construct
  source 1..120: mol_type = other DNA
gatgaatcatagatggacagtaaagggaaccagatctccagagtcatcttctctgtaggctctgagtctgtgtgcttgtgggatcatggatcagggccacttctgtgacatgaaaggctt

SEQ ID NO: 47326 - DNA, 120 bp, synthetic construct
  source 1..120: mol_type = other DNA
gtggatcatgaggtcaggagatcgagaccatcctggctaacatggtgaaaccccgtctctactaaaaatacaaaaaaattagccgggcgtggcagcaggcgcctgtagtcccagctactc

SEQ ID NO: 47327 - DNA, 120 bp, synthetic construct; identical to SEQ ID NO: 13293
  source 1..120: mol_type = other DNA

SEQ ID NO: 47328 - DNA, 120 bp, synthetic construct
  source 1..120: mol_type = other DNA
ctctgttcccagttgttaatgagctattgcagaggtgactatttgttttactttcttggatgttaacattacagtactcactacttgaagaaaaatgttctaagcagcagaaggtctaac

SEQ ID NO: 47329 - DNA, 120 bp, synthetic construct
  source 1..120: mol_type = other DNA
cgccacattctcattctgtgttcatcacttcatcatgatggatgtcttttaggtcttacctccaggctttgtctcatgctatttactggcactggaacacttaactagtctgtttttaac

SEQ ID NO: 47330 - DNA, 120 bp, synthetic construct
  source 1..120: mol_type = other DNA
cagctcttaaaggaagaggaagactctggggcatccttctgagttacttctttactagccagtctcccctgaatgcaggggagcacagggaaaacagagaaagaacagcactacactgga

SEQ ID NO: 47331 - DNA, 120 bp, synthetic construct; identical to SEQ ID NO: 13294
  source 1..120: mol_type = other DNA

SEQ ID NO: 47332 - DNA, 120 bp, synthetic construct
  source 1..120: mol_type = other DNA
tgcgaaagttgtggagccaggaatcaaagccctgttgtctgactctgtagctcacaggccttagtattcctggtatactgctagcctggccaatggagaacgtatttaaaatagtagcta

SEQ ID NO: 47333 - DNA, 120 bp, synthetic construct
  source 1..120: mol_type = other DNA
actaaaaattaaaatattagccaggcatggtggcgggtgcctgtaatcgcagctactcaagaggctgaggcagagaattgcttgaacccgggaggcggaggttgcagtgagctgagatcg

SEQ ID NO: 47334 - DNA, 120 bp, synthetic construct
  source 1..120: mol_type = other DNA
tcctggcagtagatatgaagccttccagcagaagctgaggagacaatcacatgtttgaggaacattcagtgatggcctcacttctctgggtgaatccctgttaacagaatccaaggctgt

SEQ ID NO: 47335 - DNA, 120 bp, synthetic construct; identical to SEQ ID NO: 13295
  source 1..120: mol_type = other DNA

SEQ ID NO: 47336 - DNA, 120 bp, synthetic construct
  source 1..120: mol_type = other DNA
agattatgtaatataatgttggagttgggtggggtgggtgggatgattttagaaagaaaaatagacttgggggatagataatgaaagaggctgtcatttcagacattttaatcctctgaa

SEQ ID NO: 47337 - DNA, 120 bp, synthetic construct
  source 1..120: mol_type = other DNA
atcgccattcagcaaggacagaactggagatggcttctcttttacaaagaaatctctgtcccaggctttcagtctgtttggtgttcatacaagtgtttgtgtgttgtgtggaaggcgggt

SEQ ID NO: 47338 - DNA, 120 bp, synthetic construct; identical to SEQ ID NO: 13296
  source 1..120: mol_type = other DNA

SEQ ID NO: 47339 - DNA, 120 bp, synthetic construct
  source 1..120: mol_type = other DNA
acgcttcattttcctggatttcaagggagcacagtctggaaagcagatatgaaaactcgggggtactgctttggggaaaaccatcaacaactttgctgccctgttacattgggactacag

SEQ ID NO: 47340 - DNA, 120 bp, synthetic construct
  source 1..120: mol_type = other DNA
gagccttttgagacaaattaaaagaagctgcgagggccgggcggttgcgggtggcttccatcagtgaaaagactgcagagagaggtggcgggagggagatggaagtaagagaaagtcgtt

SEQ ID NO: 47341 - DNA, 120 bp, synthetic construct
  source 1..120: mol_type = other DNA
cttggtttgatgaactaattctgctgtgtaggcatatgtcttgggtggagtgcctccaaccctggaacaagaatttgagtactagtagtttatttgggaagagattgcaggaaatgccag

SEQ ID NO: 47342 - DNA, 120 bp, synthetic construct
  source 1..120: mol_type = other DNA
ataccacctgactcaaaggaagctgggtgttttatctttccaattcccatcagtttgctggagggctgctccaggccgagctgggagggttcactccagcccttctgcctgttcctcctg

SEQ ID NO: 47343 - DNA, 120 bp, synthetic construct; identical to SEQ ID NO: 13297
  source 1..120: mol_type = other DNA

SEQ ID NO: 47344 - DNA, 120 bp, synthetic construct
  source 1..120: mol_type = other DNA
tctggactcagcccacacactcctgaacttgctttttatgcagttcttcacaagagagaggcccaaggtcaagcatcatttgatcaaatgtgcaaagaggaactgcattaattctattgc

SEQ ID NO: 47345 - DNA, 120 bp, synthetic construct
  source 1..120: mol_type = other DNA
ggtaaataataccagctaaggagagggctgctctttgtaattgtttttttgcatagctggcttagaaattacaaataacaaccacccagcagatcccataaggttccccttctcaaggtt

SEQ ID NO: 47346 - DNA, 120 bp, synthetic construct
  source 1..120: mol_type = other DNA
aatgcttggcagagatgagcaagcatgaaagcttcctaaaaaggcaaaggcaaatttcttcagagtaacagtaataaagtgcacaattctaaatgctcttcctggaatccagtgtactat

SEQ ID NO: 47347 - DNA, 120 bp, synthetic construct; identical to SEQ ID NO: 13298
  source 1..120: mol_type = other DNA

SEQ ID NO: 47348 - DNA, 120 bp, synthetic construct
  source 1..120: mol_type = other DNA
ccaatgaattgagggcaaaacatctgggcttttataaaaaattgattgagaagtgctcatttgcaagtaataagggaaaaattttaatcacttttaatctcactattccacctaagccac

SEQ ID NO: 47349 - DNA, 120 bp, synthetic construct
  source 1..120: mol_type = other DNA
ccatcatgaaaaataaataagatacacagtttggacccaaagattttgccaaagtggattaaacatcccagtctccagctgcctgaaaccctggggaaaaagttgggagtgtcaaaggtc

SEQ ID NO: 47350 - DNA, 120 bp, synthetic construct
  source 1..120: mol_type = other DNA
ctttctgctttctaacctcctctcgcagggttcaggctatctctggccacgatcttcccttcttctgctgagtcaaagcaaatatctgaggcattctgagggacacttagaactgaggag

SEQ ID NO: 47351 - DNA, 120 bp, synthetic construct; identical to SEQ ID NO: 13299
  source 1..120: mol_type = other DNA

SEQ ID NO: 47352 - DNA, 120 bp, synthetic construct
  source 1..120: mol_type = other DNA
aaataggacatttttcagaagttaaagaaaggtcagcctaaatcatgcacacactgcagatccccatccgtactcctaatctgaaaaactaatattaaaggattagagtatgacagttta

SEQ ID NO: 47353 - DNA, 120 bp, synthetic construct
  source 1..120: mol_type = other DNA
ctacccgtgacctcccttccttgtgaaattacccataagtcgaagatgggaagcaggccttgtatcccttgggaatattagggagtctcacaactttccaagattttaggaaaagtagga

SEQ ID NO: 47354 - DNA, 120 bp, synthetic construct
  source 1..120: mol_type = other DNA
ttccccatggaaacttgctttgatccacagagtacctataaaaaaaattacaataaattgtgtagtgtttgtaactaggaagattaggacttggaatgaattggctctgcgtttatagtc

SEQ ID NO: 47355 - DNA, 120 bp, synthetic construct; identical to SEQ ID NO: 13300
  source 1..120: mol_type = other DNA

SEQ ID NO: 47356 - DNA, 120 bp, synthetic construct
  source 1..120: mol_type = other DNA
attcactgagacaaaggcctagggagagaggagaaagcacttccttggcggctgtgttgggccagctttactagaagtggagtctgacacacttttgtgcaatgatttattgaggataag

SEQ ID NO: 47357 - DNA, 120 bp, synthetic construct
  source 1..120: mol_type = other DNA
gcaccatagttacccaccaagagccaagagaattggactgttaaacttcaacattaatttgtcatcggctatacgctgcctctgagagtaaggcggtcatgtccacgaatctctaggata

SEQ ID NO: 47358 - DNA, 120 bp, synthetic construct; identical to SEQ ID NO: 13301
  source 1..120: mol_type = other DNA

SEQ ID NO: 47359 - DNA, 120 bp, synthetic construct
  source 1..120: mol_type = other DNA
catggaggtagctcagttcagtatattcattttatagaagagaagaagtacatgagagtaaacacttactgggaaccagatctgattctcagttttctcttttgcttgaattcaaccgaa

SEQ ID NO: 47360 - DNA, 120 bp, synthetic construct
  source 1..120: mol_type = other DNA
taaggaatgaaagaaaaaaataagagtataaatgctatgcaaatcacaattcagatctcacccaagagcaatgtggattaaatgcttgggtcctttgaggcaaaaagcatgacacacagg

SEQ ID NO: 47361 - DNA, 120 bp, synthetic construct
  source 1..120: mol_type = other DNA
taaatattcaagtagagttctggaaaaggggaaaaaagcaaatgaacaaagaacaaaaacaagccgtcccttttcaaaatgtcatcttgccatgaaagcttcttcaattcgttacctaga

SEQ ID NO: 47362 - DNA, 120 bp, synthetic construct
  source 1..120: mol_type = other DNA
aacagtgttgaatccagcccaatctctcctttcagcccaggcatgttttagtactgggatgttttctatctttttaagtgtcctgtgctctgtttacactatattaatctgctcatttaa

SEQ ID NO: 47363 - DNA, 120 bp, synthetic construct; identical to SEQ ID NO: 13302
  source 1..120: mol_type = other DNA

SEQ ID NO: 47364 - DNA, 120 bp, synthetic construct
  source 1..120: mol_type = other DNA
gaagggttacctcctcctttatcattttctttattgaatataccatcagaggaaaattatcgttttaaaattttgttgatgttgttaatctgtcccctctgtcttcccactaaaacagca

SEQ ID NO: 47365 - DNA, 120 bp, synthetic construct
  source 1..120: mol_type = other DNA
ggtctcaaactcccggagtcaagatatcctccttcagcctcctaaagtgctgggattacacacatgagccacagcacctggcctgtagacaactttttttctaaacactactctccatga

SEQ ID NO: 47366 - DNA, 120 bp, synthetic construct; identical to SEQ ID NO: 13303
  source 1..120: mol_type = other DNA

SEQ ID NO: 47367 - DNA, 120 bp, synthetic construct
  source 1..120: mol_type = other DNA
tttttatgcctcaatacctacatgaaatttaataccacattttaaatctctttgtatactctgggcctttggaggctcacaaaccattgtaatacataagatttttccacttcccaagaa

SEQ ID NO: 47368 - DNA, 120 bp, synthetic construct
  source 1..120: mol_type = other DNA
tgttgtccactgtgtcccccagcgtaacacctagcacattttaagtactcaacaatcatttattgaatacttctctagcccttccccaaccactccttccttcttatcttagccattatt

SEQ ID NO: 47369 - DNA, 120 bp, synthetic construct
  source 1..120: mol_type = other DNA
gtgtttgctggctttcttcacagaagtaaaagattatgagcctccatttggttccaaggtgcgggagcacccctgtgtcgaaagcatgaaggacaacgtgttgagagatcgagggcgacc

SEQ ID NO: 47370 - DNA, 120 bp, synthetic construct
  source 1..120: mol_type = other DNA
gagggaaggtcccattgtgttctatggccctgttaaattttgtttataaagcaaatttcaatacagtggataacccaattattataggctccaaccagctgatatgtactctgagagttc

SEQ ID NO: 47371 - DNA, 120 bp, synthetic construct; identical to SEQ ID NO: 13304
  source 1..120: mol_type = other DNA

SEQ ID NO: 47372 - DNA, 120 bp, synthetic construct
  source 1..120: mol_type = other DNA
gagaccgactcctcactctggaattaaggaaagcaaagaagaggagaatgccctggaaggaacgagaaatctgtctgttgggaacatcctaatggcctcttatttttccttgttaagaaa

SEQ ID NO: 47373 - DNA, 120 bp, synthetic construct
  source 1..120: mol_type = other DNA
ctcataaagaggctgatccaaattgtttgtttgggggcactttgatgagggcaatggtcagagaaaaaagaaaacgataggttgtgagtgagtcagaaccagctatatgtctgacacacc

SEQ ID NO: 47374 - DNA, 120 bp, synthetic construct; identical to SEQ ID NO: 13305
  source 1..120: mol_type = other DNA

SEQ ID NO: 47375 - DNA, 120 bp, synthetic construct
  source 1..120: mol_type = other DNA
gtcacaggcttctctggagttttgagcaaatcctctttgacactaaaactgtaagaatattttgcataaattctgaaatcagaatgtgctggagtgttatgtttctttcaaactctgttg

SEQ ID NO: 47376 - DNA, 120 bp, synthetic construct
  source 1..120: mol_type = other DNA
aatgcttaatatttaatttaatttactgcctgtaattacagtgccagaataaaataaatgttacttgtgtaccaacaatagcactctactcttaacagggccatctgtcaatactgtcaa

SEQ ID NO: 47377 - DNA, 120 bp, synthetic construct
  source 1..120: mol_type = other DNA
aagttgttggtattagaaaacaagtagaaaaagtgccagctctcccaggtagttttgagatttatccatcccactcccagccacctgtgtgagggatcccattagcaatgttgatcttac

SEQ ID NO: 47378 - DNA, 120 bp, synthetic construct
  source 1..120: mol_type = other DNA
aaatgataacaaaaatatttgcaatgcaaaataaaaattaagccagtgagagaaaactcttgccaccttcctgggcaggatctcctggatggtctccttggatgggagcttgattcggtt

SEQ ID NO: 47379 - DNA, 120 bp, synthetic construct; identical to SEQ ID NO: 13306
  source 1..120: mol_type = other DNA

SEQ ID NO: 47380 - DNA, 120 bp, synthetic construct
  source 1..120: mol_type = other DNA
aatttgaggggcagagaaactattccgcatgatactataatggtagatacatgtcattatacatttgtcaaaacccctggaatatacaacaccaagagtgaaccctaatgtaaactatga

SEQ ID NO: 47381 - DNA, 120 bp, synthetic construct
  source 1..120: mol_type = other DNA
aacttctctaaatagaaaggtgttgaaatgatattaagggccactacatggggaattttcaggtgttgggagtgttagtgtaccccagaagcccagcagaggatcattgtgctgtcagga

SEQ ID NO: 47382 - DNA, 120 bp, synthetic construct; identical to SEQ ID NO: 13307
  source 1..120: mol_type = other DNA

SEQ ID NO: 47383 - DNA, 120 bp, synthetic construct
  source 1..120: mol_type = other DNA
gcatctggacaggctctcggggaggagctgctcggaggagaagattcctgaagacggctccctaaacactaccaaatagctcttctggggcaggctgggccatgtccaaagaggctgccc

SEQ ID NO: 47384 - DNA, 120 bp, synthetic construct
  source 1..120: mol_type = other DNA
agtgggtgacatagagcattctatgcctttgacattgtcataggataagctgtgttagcacttcctcaggaaatgagattgatttttacaatagccaataacatttgcactttattaatg

SEQ ID NO: 47385 - DNA, 120 bp, synthetic construct
  source 1..120: mol_type = other DNA
ataccttgaaaagagacaaggaaaaacatcaaatattcccaggaaattggttttattggagaactccagaaccaagcagagaaggaagggacccatgacagcattagcatttgacaatca

SEQ ID NO: 47386 - DNA, 120 bp, synthetic construct
  source 1..120: mol_type = other DNA
cacatgcagtggttctctgactgtaaaacagtgaactttgcatgaggaaagaggctccatgtctcacagccagctatgaccacattgcacttgcttttgcaaaataatcattccctgcct

SEQ ID NO: 47387 - DNA, 120 bp, synthetic construct; identical to SEQ ID NO: 13308
  source 1..120: mol_type = other DNA

SEQ ID NO: 47388 - DNA, 120 bp, synthetic construct
  source 1..120: mol_type = other DNA
gagcaaattctcactctaggctttatcgtgtttactttttcattacacttgacttgattttctagttttctatacaaacaccaatgggttccatctttctgggctcctgattgctcaagc

SEQ ID NO: 47389 - DNA, 120 bp, synthetic construct
  source 1..120: mol_type = other DNA
actttataaatatttggagattttgcaggaaaatctggatccccaggtaaggatagcagatggttttcagttatctccagtccacgttcacaaaatgtgaaggtgtggagacacttacaa

SEQ ID NO: 47390 - DNA, 120 bp, synthetic construct; identical to SEQ ID NO: 13309
  source 1..120: mol_type = other DNA

SEQ ID NO: 47391 - DNA, 120 bp, synthetic construct
  source 1..120: mol_type = other DNA
agagaggatttgaatgtgggacacaaaggtcccatttgcagttagaaaatttgtgtccacaaggacaagaacaaagtatgagctttaaaactccataggaaacttgttaatcaacaaaga

SEQ ID NO: 47392 - DNA, 120 bp, synthetic construct
  source 1..120: mol_type = other DNA
ggtctcattttattgagatttttaagatacatgcaaaggtttggaaatagaacctctaggcaccctcctcagtgtgggtgggctgagagttaaagacagtgtggctgcagtagcatagag

SEQ ID NO: 47393 - DNA, 120 bp, synthetic construct
  source 1..120: mol_type = other DNA
aagagtattctcacttctgggttatcagcataaactggaatgtagtgtcagaggatactgtggcttgttttgtttatgtttttttttcttattcaagaaaaaagaccaaggaataacatt

SEQ ID NO: 47394 - DNA, 120 bp, synthetic construct; identical to SEQ ID NO: 13310
  source 1..120: mol_type = other DNA

SEQ ID NO: 47395 - DNA, 120 bp, synthetic construct; identical to SEQ ID NO: 13311
  source 1..120: mol_type = other DNA

SEQ ID NO: 47396 - DNA, 120 bp, synthetic construct
  source 1..120: mol_type = other DNA
ccaaacagggcagcctgcaggccctgcaccttcaggccccattctcagacacctgtacaaccccttaagccagacggactcacagctgtctctggaaagttcttcgttacctgactcttt

SEQ ID NO: 47397 - DNA, 120 bp, synthetic construct; identical to SEQ ID NO: 5889
  source 1..120: mol_type = other DNA

SEQ ID NO: 47398 - DNA, 120 bp, synthetic construct
  source 1..120: mol_type = other DNA
tctcctgcctcagcctcccgagtagctgggactacaggcacctgccaccatgcctggttaatttttgtatttttagtagagacggggtttcaccatgttggccagaatggtctcgatctc

SEQ ID NO: 47399 - DNA, 120 bp, synthetic construct
  source 1..120: mol_type = other DNA
caaaccagtaaccctaatgaagcgtcttcgtttcaggtgggctcattcaaaacgacattttcaggcttggtgcagtggctcaagcctgtaatcccaaccctttgggaagggaggcagaag

SEQ ID NO: 47400 - DNA, 120 bp, synthetic construct; identical to SEQ ID NO: 13312
  source 1..120: mol_type = other DNA

SEQ ID NO: 47401 - DNA, 120 bp, synthetic construct
  source 1..120: mol_type = other DNA
cctgtgtcccagggtcctctccttgcggcccttcacatcccatggcttctcgtgtgcgggcccctcttcgcctgtgcagttgatgccaccttccagctgccacgtgacaggtgggcagag

SEQ ID NO: 47402 - DNA, 120 bp, synthetic construct
  source 1..120: mol_type = other DNA
ccctcacttaaggccaggcagaacccttcctactgtcaccagtcattaaaataaggttgcatccctcccttcccttctgaaaatccttcctgggctccttctgctgttagtgccttaaat

SEQ ID NO: 47403 - DNA, 120 bp, synthetic construct
  source 1..120: mol_type = other DNA
atcaagtgtggctcaagctgcgtcctccaggaagcctttcattatcactcaggtcagaactggctcccttctgggcacaggacttttccgagccggccgcccacttcactctgcctttct

SEQ ID NO: 47404 - DNA, 120 bp, synthetic construct
  source 1..120: mol_type = other DNA
aatgagaacacactcccagcttccaagaaagatgtgtattctccctaacaacaacaaaagagacctaaatgggctgctccctgaagagagccctcagctcttttaccgtgatgcacactc

SEQ ID NO: 47405 - DNA, 120 bp, synthetic construct; identical to SEQ ID NO: 13313
  source 1..120: mol_type = other DNA

SEQ ID NO: 47406 - DNA, 120 bp, synthetic construct
  source 1..120: mol_type = other DNA
aggatgcagcctgaagagctcagggtttgaaggttgggccttgggcgggagtcagctactatttctagctgttctagaaagacctagaaacttcctgtgtgaaaacaggattaggaagct

SEQ ID NO: 47407 - DNA, 120 bp, synthetic construct
  source 1..120: mol_type = other DNA
gataacctgaggttaggagttccagaccagcctggccaacatggtgaaaccctgtctctactaaaaatacaaaaaaattatctgggcatagtggcgcatgcctgtaatcccagctactca

SEQ ID NO: 47408 - DNA, 120 bp, synthetic construct; identical to SEQ ID NO: 13314
  source 1..120: mol_type = other DNA

SEQ ID NO: 47409 - DNA, 120 bp, synthetic construct
  source 1..120: mol_type = other DNA
gatggcagagggaaagagaaagaagaggaaggccaaagacatggggagtgaataaaaagtgggttccggatcgtgcggaacagtccacagggtcatttacaggtcctcaggagatgacca

SEQ ID NO: 47410 - DNA, 120 bp, synthetic construct
  source 1..120: mol_type = other DNA
taacagaaagacttagttcagttccttggctttgtgctcaggcatcacatagcaggcagcctgcagcctttcttgcctgagagaagagtccagaagagcaggagagtcacctttgaacac

SEQ ID NO: 47411 - DNA, 120 bp, synthetic construct
  source 1..120: mol_type = other DNA
ggatgggacatgacagtccctttctagccacagcttcatagtgttgtccattctccagtcttgctcaaactatctatcaccttaaaggttggaagagattggaatccatttccttttcag

SEQ ID NO: 47412 - DNA, 120 bp, synthetic construct; identical to SEQ ID NO: 13315
  source 1..120: mol_type = other DNA

SEQ ID NO: 47413 - DNA, 120 bp, synthetic construct
  source 1..120: mol_type = other DNA
ctggttgtattcctatgtggagggtggtgggttcctgccctgttgtggcccctgttcctaaactgaggccaggttccatctcagtgctgcagtcctgaggagcaccacgctggcccgcca

SEQ ID NO: 47414 - DNA, 120 bp, synthetic construct
  source 1..120: mol_type = other DNA
gactaccatgggcttggaaggagctacagccccaaatattgcagagccaaaaggaatgggatacatgtctaaaaagtgacaacagtcttgtccctattttaaaaacagaatattgttgct

SEQ ID NO: 47415 - DNA, 120 bp, synthetic construct
  source 1..120: mol_type = other DNA
gtctcacgctggctcctgctctccttgcctgggctccagccacatgaagcaagggcagagagggttgcaactgctctgccttcccaacagcgattccctctccccataaaaccagggcac

SEQ ID NO: 47416 - DNA, 120 bp, synthetic construct
  source 1..120: mol_type = other DNA
cagctgtggagcaaacactgatccctgtgaagtgagcctccagggcacagtcccctttcccttgggccctttgacacttgtttttgggactgtccgctctcagcagctctccaaggaaag

SEQ ID NO: 47417 - DNA, 120 bp, synthetic construct; identical to SEQ ID NO: 13316
  source 1..120: mol_type = other DNA

SEQ ID NO: 47418 - DNA, 120 bp, synthetic construct
  source 1..120: mol_type = other DNA
ggaactggttgatgacctcatattccgccgggtagggctcgttctcttccatctctgagagcagctccagcgcctgctcctcttcctctgtggggtagtggcgcaggaggttggctgccg

SEQ ID NO: 47419 - DNA, 120 bp, synthetic construct
  source 1..120: mol_type = other DNA
atgagttcagaagcccaataagaaaagccaatgacggtggcacactgcagaactaggagacagagggacagcacagaaggggaattagtgagcactccacagctaggatgcttgaggacc

SEQ ID NO: 47420 - DNA, 120 bp, synthetic construct
  source 1..120: mol_type = other DNA
gcagtctgacctgatctaggccagtcagattccatctgtcttaaggagcaaatagggtcatgcagcttgggagctggagtaggcacaccacaattcaaaccagcacagcagtgcaggcac

SEQ ID NO: 47421 - DNA, 120 bp, synthetic construct; identical to SEQ ID NO: 13317
  source 1..120: mol_type = other DNA

SEQ ID NO: 47422 - DNA, 120 bp, synthetic construct
  source 1..120: mol_type = other DNA
agcccccaccggcaactcagacaggatgcccccaccctgtagcagttcctctcccactgtgagcaggctcacggcttacccgttaggatatgggcgaaggcatagcgacgagtgatcttc

SEQ ID NO: 47423 - DNA, 120 bp, synthetic construct
  source 1..120: mol_type = other DNA
attcatgcagaaatctgtagagggagaaccaaattttcacggccccaagtaacacttggtgcaggaagtccccacctagaaggagtttgattcccctccaccacagtcctgggagccagg

SEQ ID NO: 47424 - DNA, 120 bp, synthetic construct; identical to SEQ ID NO: 13318
  source 1..120: mol_type = other DNA

SEQ ID NO: 47425 - DNA, 120 bp, synthetic construct
  source 1..120: mol_type = other DNA
tggagctgagacagccagagaggctaagaccatacaggtcaattaatgctgattctccatttactcactcattcattccctttttgttccaaaaagaagttgaacttgaagatactatgc

SEQ ID NO: 47426 - DNA, 120 bp, synthetic construct; identical to SEQ ID NO: 13319
  source 1..120: mol_type = other DNA

SEQ ID NO: 47427 - DNA, 120 bp, synthetic construct
  source 1..120: mol_type = other DNA
aaaaaaattagctgggcatggtggcgcatgcctatagtcttagctccttaggaggctgaggcaagaggactgcttgcgcccaggagttactgtaagctataatcacaccactgcactcca

SEQ ID NO: 47428 - DNA, 120 bp, synthetic construct
  source 1..120: mol_type = other DNA
agatcgagaccatcttggccaacatggtgaaaccccgtctctaccaaaaatacaaaaattagctgggtgtgatcgcatgcgcctgtagtcccagctactctggaggctgaggcagaagaa

SEQ ID NO: 47429 - DNA, 120 bp, synthetic construct
  source 1..120: mol_type = other DNA
ggctcacacctgtaatcccacactttgggaggccaaggcgggcaaaacacctgaggtcaggagtttgagacaagcctgaccaacatggggaaaccctgtctctactaaaaatacaaaatt

SEQ ID NO: 47430 - DNA, 120 bp, synthetic construct; identical to SEQ ID NO: 13320
  source 1..120: mol_type = other DNA

SEQ ID NO: 47431 - DNA, 120 bp, synthetic construct
  source 1..120: mol_type = other DNA
aaagaattcttttaaaaggcaacccacacaaaaagaaagggaggtataaaacaaggttccaaaaactggaaagtaaagggaaatagacctacctaaaagggactcagcagactcggcaga

SEQ ID NO: 47432 - DNA, 120 bp, synthetic construct; identical to SEQ ID NO: 13321
  source 1..120: mol_type = other DNA

SEQ ID NO: 47433 - DNA, 120 bp, synthetic construct
  source 1..120: mol_type = other DNA
aaaccccgtctctactaaaaatacaaaaattagccggccgtggtggcgcgcgcctgtagtcccagctactcggggggctgaggcaggagaatcgcttgaaccctggagacggaggttgca

SEQ ID NO: 47434 - DNA, 120 bp, synthetic construct
  source 1..120: mol_type = other DNA
ctttgataactatgcaaactgcaaaagctcccagaagcatagggtagaataaaggctgaaccaaaaagaaaccaggccatgattaagtattttaagctttcataaaaagtagaaatgggg

SEQ ID NO: 47435 - DNA, 120 bp, synthetic construct
  source 1..120: mol_type = other DNA
tctctactaaaaatttaaaaaatcagccaggtatggtggcgtgcacctgtagtcccagctactcaggaggctgagacaggagaactgcttgaacctgggaggtggaggttacagtgagcc

SEQ ID NO: 47436 - DNA, 120 bp, synthetic construct; identical to SEQ ID NO: 13322
  source 1..120: mol_type = other DNA

SEQ ID NO: 47437 - DNA, 120 bp, synthetic construct
  source 1..120: mol_type = other DNA
aatctggattttaacaagcagcccaggtaatccccatgcaggtgatccaagccccacacttcaagaaacactggttccagacctcagaggaaggtggactgatgggggaaagtccaggaa

SEQ ID NO: 47438 - DNA, 120 bp, synthetic construct
  source 1..120: mol_type = other DNA
ctgcctcaggctcagagttcgcccagcagaggctggctgggcccagacaaggctcatacacctctgtctggctttgggtcacccacgaagcagccctcagaactatctgtcatgatctct

SEQ ID NO: 47439 - DNA, 120 bp, synthetic construct
  source 1..120: mol_type = other DNA
gaacccagccctgcagagccatagtgcatggggcctcactgaaagaaaagctctaggagacaggggctatctcctggctgtattttaaatcttattaaaagctaagagagttcttcttgg

SEQ ID NO: 47440 - DNA, 120 bp, synthetic construct; identical to SEQ ID NO: 5899
  source 1..120: mol_type = other DNA

SEQ ID NO: 47441 - DNA, 120 bp, synthetic construct
  source 1..120: mol_type = other DNA
tcttatgtttcattatacatgaattttactagtaaggagacatgcacatgataaaaagcttccaagaggacatccctccccttgcggatgtccacctgctcctctccaaaggcaaatatt

SEQ ID NO: 47442 - DNA, 120 bp, synthetic construct
  source 1..120: mol_type = other DNA
aaggtgaagtggcttcctccaggccacacgctgcagagctagattccaaaccatgatcaggctcccctacactgtgctgctcggaatcactaagtaccagactcggccactgtatttttc

SEQ ID NO: 47443 - DNA, 120 bp, synthetic construct
  source 1..120: mol_type = other DNA
gaacagcttgaagcaatgaaatctctctaagaagcaaaaaaggtttgggtcattaagtcctcacatggggaattattgggcaaaacctgccaggcatggtgtctaagctcctgcagcatt

SEQ ID NO: 47444 - DNA, 120 bp, synthetic construct
  source 1..120: mol_type = other DNA
acctctgttctctcatctatcaaatgaaaacaataacatctgccccacccaccaccagggcatgctgggtcagctgacaccgtgcccatgaaagagcagccacctgtgctgttattaacc

SEQ ID NO: 47445 - DNA, 120 bp, synthetic construct; identical to SEQ ID NO: 13324
  source 1..120: mol_type = other DNA

SEQ ID NO: 47446 - DNA, 120 bp, synthetic construct
  source 1..120: mol_type = other DNA
accaaatatgaaattccctttgggtaacgttaacagataccccaggggcctgccccatgtaacaggtgggttttcctcagagggtctcagagcacaccggaagaacaggcagttatccta

SEQ ID NO: 47447 - DNA, 120 bp, synthetic construct
  source 1..120: mol_type = other DNA
ccatgaggggattgctaaagaaaacccctgaaggttatgtatgtaggattttattcgagagagaaatggcatgcaacgcaggaccctaacttgaaattcaagccagtggtgcagtccacg

SEQ ID NO: 47448 - DNA, 120 bp, synthetic construct; identical to SEQ ID NO: 13325
  source 1..120: mol_type = other DNA

SEQ ID NO: 47449 - DNA, 120 bp, synthetic construct
  source 1..120: mol_type = other DNA
tttatgcatctgtgcaacctgctcagcgtctcctcactgtgacctttttagcttccagacaggcctgcgacacaggcctcttaacagagccctctagtgcccagccaggttatcccacag

SEQ ID NO: 47450 - DNA, 120 bp, synthetic construct
  source 1..120: mol_type = other DNA
tgtgattcacctgacttctactccccaacttcctcattctccaaagatgcttcctggggctgttgccagtgccctttggtggccacacttgagaggcagaaaggctcagaagaaatgact

SEQ ID NO: 47451 - DNA, 120 bp, synthetic construct
  source 1..120: mol_type = other DNA
gtcttttttttttttttttaaaggaagggtctcactctgtcacccaggctggagtgcagaggcacgacgatagttcactgcagccttgaactcctggactcaagtgatcctgctggcctc

SEQ ID NO: 47452 - DNA, 120 bp, synthetic construct; identical to SEQ ID NO: 13326
  source 1..120: mol_type = other DNA

SEQ ID NO: 47453 - DNA, 120 bp, synthetic construct
  source 1..120: mol_type = other DNA
cttttgaagtggggctgaaacagtacctaccaaataaagatgctgtttaggaggaaaaaagcaggcatggggtgtgcttagcataatgtcaaaatgtggcactcaggcaggggctgagaa

SEQ ID NO: 47454 - DNA, 120 bp, synthetic construct
  source 1..120: mol_type = other DNA
taatctcagcactttaggaagccaaggtgggtggatcacctgaggtcaggagtttgagatcagcctggtcaacaaggtgaaacctcatctctacgaaaagtacaaaaattagctgggcat

SEQ ID NO: 47455 - DNA, 120 bp, synthetic construct
  source 1..120: mol_type = other DNA
aaaaaaaaaaaaaaaaaactctatatgcaccacatctgtgcttgacagctctgctccctcttgagatgtggaatactccaggctctcaggtcaggatatctgttaggccctgaggatcag

SEQ ID NO: 47456 - DNA, 120 bp, synthetic construct; identical to SEQ ID NO: 13327
  source 1..120: mol_type = other DNA

SEQ ID NO: 47457 - DNA, 120 bp, synthetic construct
  source 1..120: mol_type = other DNA
tcctgcctcagcctcctgggtagttgaggcaccagccactaggcctggctaatttttgtatttttagttgagatggggtttcaccatgttggccaggctgatcttgaactcctgacctca

SEQ ID NO: 47458 - DNA, 120 bp, synthetic construct
  source 1..120: mol_type = other DNA
gcaccaagaatttacttttttttttttttttgagatggagtcttgctctgctctgttgcccaggctggagtgcagtggtgtgatcttgggctcactgcaactcctctacttcctgggttc

SEQ ID NO: 47459 - DNA, 120 bp, synthetic construct
  source 1..120: mol_type = other DNA
gtctccaactcttgacctcaggcaatccacccgcctcggcctcccaaagtgctgggatcagaagtgtgagccagttcctggcctttctttttttttttttttttttgagatggagtttcg

SEQ ID NO: 47460 - DNA, 120 bp, synthetic construct
  source 1..120: mol_type = other DNA
caccacgcccggctcaaaaatttacttttatttttaacatgccttcgacaaggatgcacaccaaagtgaaataattatgagattgctccttatgacagctgaagtaaaacaaaggataaa

SEQ ID NO: 47461 - DNA, 120 bp, synthetic construct; identical to SEQ ID NO: 13328
  source 1..120: mol_type = other DNA

SEQ ID NO: 47462 - DNA, 120 bp, synthetic construct
  source 1..120: mol_type = other DNA
ataactttggctttaatgagccaacccagcaaagagtaccattaaggtgaaatctggaaacaaccagttgtccccaaccttctacaaaatcaccctacagcttctaaaactcaagagaga

SEQ ID NO: 47463 - DNA, 120 bp, synthetic construct
  source 1..120: mol_type = other DNA
ttggaccttttcaccaaatcccagtgcctgaattcttcaggaggtaacacgcagatatctaacaggaagtgcttctgataggcggtgcagtaaacatctggaatgcatcacagccaggga

SEQ ID NO: 47464 - DNA, 120 bp, synthetic construct; identical to SEQ ID NO: 13329
  source 1..120: mol_type = other DNA

SEQ ID NO: 47465 - DNA, 120 bp, synthetic construct
  source 1..120: mol_type = other DNA
cacattccgactgttgtactgcgggtggcaatggaacggtcttccgattacctaaaatgccacagattcccttcttctctaatacgcatccgattaccatagaactctaagatatctttt

SEQ ID NO: 47466 - DNA, 120 bp, synthetic construct
  source 1..120: mol_type = other DNA
agcacccttatcttttctcgatacacagcgtccttcctccagcagaatcctaaaatagcagcagtccggattaacatggctgtgaggagtaggtgcttagctgaataacatcagaattaa

SEQ ID NO: 47467 - DNA, 120 bp, synthetic construct
  source 1..120: mol_type = other DNA
tgtcccccaccgaggctttaagggccagcgcgcagcaccctcacctttcagcaggtccgggtgcacatagcccaacacgtcggagacccccagctcctggcgcgaacaggtgcctccgtg

SEQ ID NO: 47468 - DNA, 120 bp, synthetic construct
  source 1..120: mol_type = other DNA
cctccgccggcgcccgccgggcagccctgcgcctccgggggcgtacatgcccggggccgcccgccgtcgctccgcagtcgctgctggtcgccgccgacctccgcggggcgcgcagagcct

SEQ ID NO: 47469 - DNA, 120 bp, synthetic construct; identical to SEQ ID NO: 13330
  source 1..120: mol_type = other DNA

SEQ ID NO: 47470 - DNA, 120 bp, synthetic construct
  source 1..120: mol_type = other DNA
ggggtgcgacctgtgcgcagaaaagaccctccccacgccgcccactgttcctcaccagtcagcaggccccagggctgggatggtgctgctcagcccagtcacgggcttctcggctgccgg

SEQ ID NO: 47471 - DNA, 120 bp, synthetic construct
  source 1..120: mol_type = other DNA
aaacactgggcacagggggaggtaactgcagtaagtcccgcttggccctggagtccacgcggattttcgaagctggggctggcaagaggccgctggacaccacgctccagtcgtcagccc

SEQ ID NO: 47472 - DNA, 120 bp, synthetic construct
  source 1..120: mol_type = other DNA
ccccggggtcctctaggtccatttcgccgcctggagctcctccgtgcggctaggcccgcatctccctctgctcgccgtgtctgtgccttcgccagctcatccctctgctcatctcgcggc

SEQ ID NO: 47473 - DNA, 120 bp, synthetic construct; identical to SEQ ID NO: 13331
  source 1..120: mol_type = other DNA

SEQ ID NO: 47474 - DNA, 120 bp, synthetic construct
  source 1..120: mol_type = other DNA
cgaaggagttgggggagagggagcatttctctactgtcggggcccctcctccccctagcaaggatttggttggaggaggcctggctgagggctgttccctcaaggcctcttctccctgca

SEQ ID NO: 47475 - DNA, 120 bp, synthetic construct
  source 1..120: mol_type = other DNA
ttctagggcccgcttaggagcccagccagccccagacacaccctccctcctgctttggtagagtgtcctagcagctctccccttgcctgtcacaccctatttccagacaccgcctctgtc

SEQ ID NO: 47476 - DNA, 120 bp, synthetic construct
  source 1..120: mol_type = other DNA
aggagggttagaagccttgaatgttgtacctagaaaagcctcagaggtattcggagagactcaggctcggccaggcgagagggcagtcaggagaccagcctgtctgtagtatgtggactc

SEQ ID NO: 47477 - DNA, 120 bp, synthetic construct
  source 1..120: mol_type = other DNA
gaaatatgctgaaaagggcaggctttggagttagggagacctgggggcaatccagattcttccacccagtagctgtgtggctttcatctctccaggtttatgtagcctcatggatcagtt

SEQ ID NO: 47478 - DNA, 120 bp, synthetic construct; identical to SEQ ID NO: 13332
  source 1..120: mol_type = other DNA

SEQ ID NO: 47479 - DNA, 120 bp, synthetic construct
  source 1..120: mol_type = other DNA
cactttataagtgagtaaacagaatcagagaggtagagcaatttacccaggcttacacagcaagcgattggtgaacctaggcatcaaatccagttctgtccatttccagggcctatgtgt

SEQ ID NO: 47480 - DNA, 120 bp, synthetic construct
  source 1..120: mol_type = other DNA
atatataaatatgtgtggatatatagatcctttatgatcctccatgtttactgggaattttggttcagaatgtgggctgggtttgtcatgtcactgcccacctcacccctcccctagcct

SEQ ID NO: 47481 - DNA, 120 bp, synthetic construct; identical to SEQ ID NO: 13333
  source 1..120: mol_type = other DNA

SEQ ID NO: 47482 - DNA, 120 bp, synthetic construct
  source 1..120: mol_type = other DNA
ggtgtgtttgccattgtcatcattgtgatggtcacctgcccctatgtggtgattcactcacctaatgtttccaaatggcatggaaagtcaagacgacttctggattcatggacatctggt

SEQ ID NO: 47483 - DNA, 120 bp, synthetic construct
  source 1..120: mol_type = other DNA
tagctgggccccactttacatctttgtgacttttgtcagctcacccccagcctggtgccagcccagtatcagttgtagggaaatctggtaacatttctactagctaacacgtgtccagtg

SEQ ID NO: 47484 - DNA, 120 bp, synthetic construct
  source 1..120: mol_type = other DNA
agaccccgtagctggtatgtggcagagcataaatgcaaacccagttcttctggctccagaatcctgccctagacgatgacacttttgatcagcagtggatgcaccccaaatcatgcctct

SEQ ID NO: 47485 - DNA, 120 bp, synthetic construct
  source 1..120: mol_type = other DNA
aaagcagacaggcagctgctcccccagaaccacttcctacttcctcatcactgctgatacggttctccctttagggatgctcttcccctaagatctgcctctaagattccactcaaggga

SEQ ID NO: 47486 - DNA, 120 bp, synthetic construct; identical to SEQ ID NO: 13334
  source 1..120: mol_type = other DNA

SEQ ID NO: 47487 - DNA, 120 bp, synthetic construct
  source 1..120: mol_type = other DNA
aaaaagttaaacgtacatcttcttcacgagccagcagttgtactcctaggtatattcctacgggaaatgaaagcacatgtctgcataaaggttcatgtatgaatattcacagcagcatta

SEQ ID NO: 47488 - DNA, 120 bp, synthetic construct
  source 1..120: mol_type = other DNA
aaattcctgataaacaccacaacatgaatgaattgcaaaagcagtgctctgagtccaagaagctgggcagaaaggagttggtgccctgattccatttttctcaagttgtagaagaaacaa

SEQ ID NO: 47489 - DNA, 120 bp, synthetic construct
  source 1..120: mol_type = other DNA
ttggggtgatggaaatattttgtaccttgctttagatgttggtcagatggaatatacgtttgtggaaacctgccaaactgtacattgaatatctgtgtgtttttaccacatacagttaaa

SEQ ID NO: 47490 - DNA, 120 bp, synthetic construct; identical to SEQ ID NO: 13335
  source 1..120: mol_type = other DNA

SEQ ID NO: 47491 - DNA, 120 bp, synthetic construct
  source 1..120: mol_type = other DNA
catgtcagagagcaaaggcgatgaacccggaggctggatttggtaatcaagggcctagattttaaaaagagaaaggaggatactgagttaatcacagttctttccattgtgatccatccc

SEQ ID NO: 47492 - DNA, 120 bp, synthetic construct
  source 1..120: mol_type = other DNA
ggaatctccatttcttcatcttttgcctgtttttctctattatggtgtttttcttgggcaggcacttcatctgtgatggcaaatgtggccccagcaactggcctacatccaaccacttag

SEQ ID NO: 47493 - DNA, 120 bp, synthetic construct; identical to SEQ ID NO: 5912
  source 1..120: mol_type = other DNA

SEQ ID NO: 47494 - DNA, 120 bp, synthetic construct
  source 1..120: mol_type = other DNA
gccaggcatggaggctcaagcctgtaaccccagcactttgggaggccaaggaggcaggatcgcttgaggtcagaagttcgaaagcagcctgggcaacatagcaagaccccatttctacaa

SEQ ID NO: 47495 - DNA, 120 bp, synthetic construct
  source 1..120: mol_type = other DNA
attggtgggggctagtgggaaccaatggggcagtaggaagaagtctccctgggaaagcaggaatctgggttccagtccttactctccacttgctagacctcagttttccaactgtacggt

SEQ ID NO: 47496 - DNA, 120 bp, synthetic construct
  source 1..120: mol_type = other DNA
ctcccagggccgcgcattgaagacggcaacctcattggctgaggggctctcgcttgtggtgtctcccgacagcatccacagtgtggctccggagaatgaaggaaggctggtgcacatcat

SEQ ID NO: 47497 - DNA, 120 bp, synthetic construct; identical to SEQ ID NO: 13337
  source 1..120: mol_type = other DNA

SEQ ID NO: 47498 - DNA, 120 bp, synthetic construct
  source 1..120: mol_type = other DNA
ccacaaaactaccctgggcaccagagctttcctgttatttgaacaccctgtacgctgttggcaccatgccattgggccatgcagcccaggcctgtactgtgagggtcacagtcacaggca

SEQ ID NO: 47499 - DNA, 120 bp, synthetic construct
  source 1..120: mol_type = other DNA
tcccctgagccaggctttctgggctgacgtgaatgttatcctttatttttttggtttctttgattctgtttgaagcttttgtctgatccaaactatggggtccatcttccggctgtgaaa

SEQ ID NO: 47500 - DNA, 120 bp, synthetic construct
  source 1..120: mol_type = other DNA
aggtgtcaggataacatgcagatgtctttcattttgatacctttgaaactcaagtataacatcttcctatcagaaaagtgtgaaatgatccccaaattaatagccagtgatttggaagtg

SEQ ID NO: 47501 - DNA, 120 bp, synthetic construct; identical to SEQ ID NO: 13338
  source 1..120: mol_type = other DNA

SEQ ID NO: 47502 - DNA, 120 bp, synthetic construct
  source 1..120: mol_type = other DNA
gtgggaggagcaggagaagggcagcttcaagaggccccccgcagggctgtcctggagcagaggatgcagccagatctctgagcccaaagggcagggctgggccccttggtgtaaggccag

SEQ ID NO: 47503 - DNA, 120 bp, synthetic construct
  source 1..120: mol_type = other DNA
tctgccgtatctggggagtctgatctggtagccctgaggttgcttcctgctcagatgcttagagattagactgcctggggcgacgaggctaacccccgtggctgctttgctttccctgca

SEQ ID NO: 47504 - DNA, 120 bp, synthetic construct
  source 1..120: mol_type = other DNA
ctgttggtggggccatgggaaggattcagcaccaggcatcaggatccctgggtgcaagtcttcagagccctgctttcccacccatccattgaggctccctgacccacccctttggctgtg

SEQ ID NO: 47505 - DNA, 120 bp, synthetic construct
  source 1..120: mol_type = other DNA
agcaaaaacttcgaccgagagattggccacaaaaaccccaggtgagagccaggcccaaggcctgagtgcagctttgtctacactggcaggtctccagcctcagtttcttcatctgaataa

SEQ ID NO: 47506 - DNA, 120 bp, synthetic construct; identical to SEQ ID NO: 13339
  source 1..120: mol_type = other DNA

SEQ ID NO: 47507 - DNA, 120 bp, synthetic construct
  source 1..120: mol_type = other DNA
aggccttgttcagcaatggtctgggctgtgccagtaagatggttgggatggaatgctctgggaggggctagtgaggggtgtaaagtccatgcaagatacatctgacagcagtgggtgggg

SEQ ID NO: 47508 - DNA, 120 bp, synthetic construct
  source 1..120: mol_type = other DNA
caggacaagatgtctgctgcgcctgggctaatctggacttgcaggaacccccgggtggggaccctgcccagcacaaacaacccaaagggacccgggcagctcccacaccggtgcccatct

SEQ ID NO: 47509 - DNA, 120 bp, synthetic construct
  source 1..120: mol_type = other DNA
ctccagaggagctcgtgccagaagcacaaggcccccctagggccggagctcccagtactcagccttcagagggctaaaggcacaggatcagtctgcacctttcccagcaccatgctttgg

SEQ ID NO: 47510 - DNA, 120 bp, synthetic construct; identical to SEQ ID NO: 13340
  source 1..120: mol_type = other DNA

SEQ ID NO: 47511 - DNA, 120 bp, synthetic construct
  source 1..120: mol_type = other DNA
ctggggctctgttcctgggcctgacccatgaaggtgggagaggataccaagggcccagatagtcctggggaggctggatgatcctgggcctggcctggccgctttctgtgtgctttgttg

SEQ ID NO: 47512 - DNA, 120 bp, synthetic construct
  source 1..120: mol_type = other DNA
taaggccactcccagtgctgtggtcactctgacttggtgggagagggcacagggaaagcttcctggaggagatggtctaacccaggggaagccgtggacgagacagagtcagaaagaggc

SEQ ID NO: 47513 - DNA, 120 bp, synthetic construct; identical to SEQ ID NO: 13341
  source 1..120: mol_type = other DNA

SEQ ID NO: 47514 - DNA, 120 bp, synthetic construct
  source 1..120: mol_type = other DNA
gccaagtgcagctgagtgggagaggccctctgggtgacggcacagcctgggcacgggtgtggaggtgggagaagagcctgaggggcgtagccgaggcatcctggacctgggcctgggcca

SEQ ID NO: 47515 - DNA, 120 bp, synthetic construct
  source 1..120: mol_type = other DNA
ctcacgtggtaacctggcttcccaggggcagacactaagtcagagcctcacgactttcctggacacagacaccttggtcaatgtcaggagcgcttggacccccttttccctggggaaagg

SEQ ID NO: 47516 - DNA, 120 bp, synthetic construct
  source 1..120: mol_type = other DNA
tctcatagtcgcaccttatgacaggtgttccagtcacacacagaccctctccccaagcccgttttgatctgtcaataattggtcttgcgttcctggcctatgtgcagtcctgccccatcc

SEQ ID NO: 47517 - DNA, 120 bp, synthetic construct
  source 1..120: mol_type = other DNA
tctgtgctcacttccccagccggcacccagtcccgggagggtgggccatggctctcgtgggcgtgtctcccgctggtcacccctcagctctaacaccaggtcctctgaccaggtcactgt

SEQ ID NO: 47518 - DNA, 120 bp, synthetic construct; identical to SEQ ID NO: 13342
  source 1..120: mol_type = other DNA

SEQ ID NO: 47519 - DNA, 120 bp, synthetic construct
  source 1..120: mol_type = other DNA
atctatttatgtttcatgtatactttgtacacatcgcctgaaggtgattttatacaatgcaacccgtcacatggggtcaagtgtgggatttccactagtggcgtcatgttggcattcaga

SEQ ID NO: 47520 - DNA, 120 bp, synthetic construct
  source 1..120: mol_type = other DNA
ctcacagactgtccggtagaggagtgagagtgacagaaactcgtaagtactgatgcatcgtgccgagtgttggaaagaggagaacaggtgctctgataccagtggacgtcagagtagaac

SEQ ID NO: 47521 - DNA, 120 bp, synthetic construct
  source 1..120: mol_type = other DNA
gtctgggcacgaaagggttcaccttctaagggggcacccggagtgctgtggccacagcccagagcggggagagggagtgggtgggggggctccaccaaagtctgtgtccttccagaacat

SEQ ID NO: 47522 - DNA, 120 bp, synthetic construct; identical to SEQ ID NO: 13343
  source 1..120: mol_type = other DNA

SEQ ID NO: 47523 - DNA, 120 bp, synthetic construct
  source 1..120: mol_type = other DNA
tttgttcctattattagatcctcagcagccatctgtcccattagcctccagcttgtggtggtgcttgggcctcaccaactcctggtacctggccagggctagggtgtggtcaggctgttg

SEQ ID NO: 47524 - DNA, 120 bp, synthetic construct
  source 1..120: mol_type = other DNA
aggaggcccagtccaggccttgctctctctcccagggctgaggcccagctcacgcagccgcccctccagagaggagtggatggggcccatggcttaggtaatgccccagaaaggaaggcc

SEQ ID NO: 47525 - DNA, 120 bp, synthetic construct
  source 1..120: mol_type = other DNA
gggtctctgccaagtagaaaaaaggcccagagccaggcaggcagctcagggcaaaagtcaggatgccccgattccagtcccaggggcaggagagtacagctgcccaagcaggcacactgc

SEQ ID NO: 47526 - DNA, 120 bp, synthetic construct; identical to SEQ ID NO: 13344
  source 1..120: mol_type = other DNA

SEQ ID NO: 47527 - DNA, 120 bp, synthetic construct
  source 1..120: mol_type = other DNA
taaataatacttgtaaaacacttaggacagtatcaaataaatggtgagtgataaatgtgacctgtttttgttgttacggactctgagagagggcccgattcagatcagagggtcagggaa

SEQ ID NO: 47528 - DNA, 120 bp, synthetic construct
  source 1..120: mol_type = other DNA
acaggcgagaggacacttgacctggactggggacagcagccagcagggtcagggcactggcagcagggtcggtgtccggggggtgtggcagggctctggcaggtgactgtgtggagaaca

SEQ ID NO: 47529 - DNA, 120 bp, synthetic construct
  source 1..120: mol_type = other DNA
atgtctttcccatagatgtgagtgggtgggtgggtgtgccatgtgctgagatggagaaggcgccagtgtcagcactagacaggctgagatgtcaagtggaaatgtcaaggaggtggtgga

SEQ ID NO: 47530 - DNA, 120 bp, synthetic construct; identical to SEQ ID NO: 13345
  source 1..120: mol_type = other DNA

SEQ ID NO: 47531 - DNA, 120 bp, synthetic construct
  source 1..120: mol_type = other DNA
caggtgctggcaggctctgagctgaggaaggcccgtacgttccacagagatctcatgccttgccctgtgctctgccagatgggcagaaggacttagccctataggaggcttgcccccact

SEQ ID NO: 47532 - DNA, 120 bp, synthetic construct
  source 1..120: mol_type = other DNA
tgcaggaggtgtttcatagagaactaaggagcaactccatgaagacctggggcctgcgggcagctggctggatggccatgttcatgggcctcaaccttatgacacggatcctctacacct

SEQ ID NO: 47533 - DNA, 120 bp, synthetic construct
  source 1..120: mol_type = other DNA
gataccaggcatttggctcatctctgtgtccccgctccatagccttgggatgagggagcagaggaaggcaggcttgagggcaggagctgccaggggccaggctgggtggggccaactctg

SEQ ID NO: 47534 - DNA, 120 bp, synthetic construct; identical to SEQ ID NO: 13346
  source 1..120: mol_type = other DNA

SEQ ID NO: 47535 - DNA, 120 bp, synthetic construct
  source 1..120: mol_type = other DNA
agtgagcccagtaggagacctgtggcccagcgtggttcgggatctgagtgcccagggtgactaagtgcgttctgggcccaggaggatggggttcctcggaggactctccatccaagcctt

SEQ ID NO: 47536 - DNA, 120 bp, synthetic construct
  source 1..120: mol_type = other DNA
atcttgggctgtctgagctggggggaccacctcctttgtttacagttgggaaaacaggcccgggaagggaaggactctccctgagcctttctttggacagctgaattgtgctcagaaaga

SEQ ID NO: 47537 - DNA, 120 bp, synthetic construct
  source 1..120: mol_type = other DNA
tctggagccttggtttcctcgtgtctgtctcagtgggcccttctttggatctctgatgtctgtgatcccaattcactctacgtctggaatgcgccagactcaggacagacttagagtgtg

SEQ ID NO: 47538 - DNA, 120 bp, synthetic construct; identical to SEQ ID NO: 13347
  source 1..120: mol_type = other DNA

SEQ ID NO: 47539 - DNA, 120 bp, synthetic construct
  source 1..120: mol_type = other DNA
aaacatgaactttgcttattataagggctgagtagcagtgctgtatgggaacagatcaggatgaggccaggtagtggcttgcagggtgtgctgcaggcatggtggggcaccagggcttgc

SEQ ID NO: 47540 - DNA, 120 bp, synthetic construct
  source 1..120: mol_type = other DNA
agaatagggtaattcctcatgaatttagctggattctgggctttatcctattggaccaatagtctgtgagattcttgaggagaggccaatgcttaggctaatttatttcctctagcacct

SEQ ID NO: 47541 - DNA, 120 bp, synthetic construct; identical to SEQ ID NO: 13348
  source 1..120: mol_type = other DNA

SEQ ID NO: 47542 - DNA, 120 bp, synthetic construct
  source 1..120: mol_type = other DNA
tgccttccacccactgatcctctcccctcctcatgcatgtagcaacatgggcccatcctcatctagggacaggagagatctgctgagctggtgaggtgtagagcaggtggcacctcatca

SEQ ID NO: 47543 - DNA, 120 bp, synthetic construct
  source 1..120: mol_type = other DNA
gcggctggctggctcttctaccgacccctgtgggccctcctcattgccggcctggcccttgtgcccatccttgttgctcggacacgggtgccagccaaaaagttggagtgaaaagaccct

SEQ ID NO: 47544 - DNA, 120 bp, synthetic construct
  source 1..120: mol_type = other DNA
ctcctcttcaggggccagacttggcagcatgtgcaccaggttggtgttcaccagctcatgtcttccccacatctcttcttgccagtaagcagctttggtgggcagcagcagctcatgaat

SEQ ID NO: 47545 - DNA, 120 bp, synthetic construct
  source 1..120: mol_type = other DNA
tgctgataaagggctcagccttgccgtgtgctgcttctcatcactgcacacaagtgccatgctttgccaccaccaccaagcacatctgtgatcctgaagggcggccgttagtcattactg

SEQ ID NO: 47546 - DNA, 120 bp, synthetic construct; identical to SEQ ID NO: 13349
  source 1..120: mol_type = other DNA

SEQ ID NO: 47547 - DNA, 120 bp, synthetic construct
  source 1..120: mol_type = other DNA
accctttagtctgtcagttgaattcagagcactgaaaggtgttaaattggggtatgtggtttgattgataaaaagttacctctcagtattttgtgtcactgagaagctttacaatggatg

SEQ ID NO: 47548 - DNA, 120 bp, synthetic construct
  source 1..120: mol_type = other DNA
atggtttaaaagattaaagaaacgattaagagaaaaggttggaagctttatactaaatgggctccttcatggtgacgccccgtcaaccacaatcaagaactgaggcctgaggctggttgt

SEQ ID NO: 47549 - DNA, 120 bp, synthetic construct
  source 1..120: mol_type = other DNA
ctaaataagatccacccacacctaagtcacagaatttctaagttccccaactactctcacacccttttaaagataaagtatgttgtaaccaggatgtcttaaatgattctttgtgtacct

SEQ ID NO: 47550 - DNA, 120 bp, synthetic construct; identical to SEQ ID NO: 13350
  source 1..120: mol_type = other DNA

SEQ ID NO: 47551 - DNA, 120 bp, synthetic construct
  source 1..120: mol_type = other DNA
gccgacttcaaaagtgttcttaaaacgaaagataatgttaagaaaaatttgaaagctttggaaaaccaaatttgtaatatcattgtattttttattaaaagttttgtaataaatttctaa

SEQ ID NO: 47552 - DNA, 120 bp, synthetic construct; identical to SEQ ID NO: 13351
  source 1..120: mol_type = other DNA

SEQ ID NO: 47553 - DNA, 120 bp, synthetic construct
  source 1..120: mol_type = other DNA
cacccgcttaccatcatagtcgatgcggccgtcgttgttcttgtctccgtccttcatgagctcctcgatgtcgtcctccgtgatggtctcgcctgtagcctgcagcattatcttcagctc

SEQ ID NO: 47554 - DNA, 120 bp, synthetic construct
  source 1..120: mol_type = other DNA
cacagggtccctaggcctggaatctgagactgccctcctgtacagctcggcttgagtgtgggtcagggtcagaggtcaagggtcacgtgctcacttgtcaaacatgcggaagaggtcaga

SEQ ID NO: 47555 - DNA, 120 bp, synthetic construct; identical to SEQ ID NO: 13352
  source 1..120: mol_type = other DNA

SEQ ID NO: 47556 - DNA, 120 bp, synthetic construct
  source 1..120: mol_type = other DNA
ccttggtgctgatgcagccatcctcagcgcccagcacgaagatgtcgaaggctgccttgaactctgtgttcaggggttggggggcacagtagtcagggctcagcagccaggaccacggag

SEQ ID NO: 47557 - DNA, 120 bp, synthetic construct; identical to SEQ ID NO: 5927
  source 1..120: mol_type = other DNA

SEQ ID NO: 47558 - DNA, 120 bp, synthetic construct
  source 1..120: mol_type = other DNA
acccccttcaggaccaaggtgaccctcagtaacaatagtcagtgaccactcaatgccctttcggcccctgatgaaactcaagctgggtggcccgaaggacagctgtccctcaagttggga

SEQ ID NO: 47559 - DNA, 120 bp, synthetic construct
  source 1..120: mol_type = other DNA
taataaaaccagtgtggaggcaggcaagccacccacggtaacctgaccagggtggccactgggctatttttaacgaggaacaaagttaaacctggtgattgttctggggactttggcatg

SEQ ID NO: 47560 - DNA, 120 bp, synthetic construct
  source 1..120: mol_type = other DNA
cgtgcccccagagctggctatagcacttccctgcccaggagtgagggaggctgagggaggggttcccctggggacagctggccatgccaggatgtccttgctctggggttgggggaggtc

SEQ ID NO: 47561 - DNA, 120 bp, synthetic construct; identical to SEQ ID NO: 13354
  source 1..120: mol_type = other DNA

SEQ ID NO: 47562 - DNA, 120 bp, synthetic construct; identical to SEQ ID NO: 5928
  source 1..120: mol_type = other DNA

SEQ ID NO: 47563 - DNA, 120 bp, synthetic construct; identical to SEQ ID NO: 13355
  source 1..120: mol_type = other DNA

SEQ ID NO: 47564 - DNA, 120 bp, synthetic construct; identical to SEQ ID NO: 13356
  source 1..120: mol_type = other DNA

SEQ ID NO: 47565 - DNA, 120 bp, synthetic construct
  source 1..120: mol_type = other DNA
actctaccctggatgcctaagtatctagttctggagcacttcctgtcttttcaagataatccctgccaattttccccatgcacttcctgtctccctcatgcacttcctgtccccctcatg

SEQ ID NO: 47566 - DNA, 120 bp, synthetic construct; identical to SEQ ID NO: 5929
  source 1..120: mol_type = other DNA

SEQ ID NO: 47567 - DNA, 120 bp, synthetic construct; identical to SEQ ID NO: 13357
  source 1..120: mol_type = other DNA

SEQ ID NO: 47568 - DNA, 120 bp, synthetic construct
  source 1..120: mol_type = other DNA
ctcactgcagcctcaacttcctgggctcaagccatcctctcacctcagactcctgaggagctgggaccacaggtgtgtgccaccatgcccagctaacttttgttctgttttgttttgttt

SEQ ID NO: 47569 - DNA, 120 bp, synthetic construct
  source 1..120: mol_type = other DNA
ttacaggcacccacgaccacgcccagcaaatgtttgtatttttactacaggtggggtttcactgtgttggccaggctggtctcaaactcctgacctcatgatccgcccgccttggcctcc

SEQ ID NO: 47570 - DNA, 120 bp, synthetic construct; identical to SEQ ID NO: 13358
  source 1..120: mol_type = other DNA

SEQ ID NO: 47571 - DNA, 120 bp, synthetic construct
  source 1..120: mol_type = other DNA
caggctggagtgcagtggtgcagtcatagctcactgcaccctcgatctcatgggctcaagcgattttcctgcctcagcctcctgagaagctgcatgccaccaccgtgactggctaattta

SEQ ID NO: 47572 - DNA, 120 bp, synthetic construct
  source 1..120: mol_type = other DNA
gagatggtgtcactgcactccagcaaccgagatggtgtcattgcactccagcctgggcagcagagactccatcgcaaaaaaaaaaaaaaaaggaaattaaaaaaaaattttttttaaacc

SEQ ID NO: 47573 - DNA, 120 bp, synthetic construct
  source 1..120: mol_type = other DNA
tgcatttctgaggaccccttactagctgcttctacctccaactccaagcaccatctgccctcaggcctagggttgttggcacccacagcccttcccctcagcatcctctttcctggcctt

SEQ ID NO: 47574 - DNA, 120 bp, synthetic construct; identical to SEQ ID NO: 13359
  source 1..120: mol_type = other DNA

SEQ ID NO: 47575 - DNA, 120 bp, synthetic construct
  source 1..120: mol_type = other DNA
caaaaccactggcataacctggtccagctacatgcaaatcacaattccctggccagtgcctgagctaatttaccaacatgtgatgccctgagcatgttcactaacttattttctgtttcc

SEQ ID NO: 47576 - DNA, 120 bp, synthetic construct; identical to SEQ ID NO: 13360
  source 1..120: mol_type = other DNA

SEQ ID NO: 47577 - DNA, 120 bp, synthetic construct
  source 1..120: mol_type = other DNA
ctcctgggtctgagggagaaggggctcggggcctggactcctgggtctgagggaggagaaggggctgggggcctggactcctgggtctgagggaggagttgggggcctggactcctgggt

SEQ ID NO: 47578 - DNA, 120 bp, synthetic construct
  source 1..120: mol_type = other DNA
aggaggggctggggactggactcctgggtctgagggaggaggggctggggcctggacttcagggtctgagggaggaggggctggggactggactcctgggtctgagggaggaggggctgg

SEQ ID NO: 47579 - DNA, 120 bp, synthetic construct
  source 1..120: mol_type = other DNA
agggtctgagggaggagaggctggggcctggactccagggtctcagggaggagaggctggggcctggactccagggtctgagggaggaggggctggggcctggactccagggtctgaggg

SEQ ID NO: 47580 - DNA, 120 bp, synthetic construct; identical to SEQ ID NO: 13361
  source 1..120: mol_type = other DNA

SEQ ID NO: 47581 - DNA, 120 bp, synthetic construct
  source 1..120: mol_type = other DNA
ggaggaggggctggggcctggacttcagggtctcagggaggaggggctggggactggactcctgggtctgagggaggaggggctggggcctggactccagggtctgagggaggaggggct

SEQ ID NO: 47582 - DNA, 120 bp, synthetic construct
  source 1..120: mol_type = other DNA
tataattgggtaaggacagccatattggacgcctgggtcccgagcagaagaggggatagaggctgtactgctgaattccgggactagaaacctcgcatccttgggagccggtacctgcag

SEQ ID NO: 47583 - DNA, 120 bp, synthetic construct
  source 1..120: mol_type = other DNA
cagagtctgcagaggggtgggagggaagcgcagcccacccggggcttcaggataaagaccaggcgtggggaaccgcctctgcccttctaaaccctccagtttggtctccactgttccaag

SEQ ID NO: 47584 - DNA, 120 bp, synthetic construct; identical to SEQ ID NO: 13362
  source 1..120: mol_type = other DNA

SEQ ID NO: 47585 - DNA, 120 bp, synthetic construct
  source 1..120: mol_type = other DNA
caccaatctgggtctcttcctttggataggcacttcccatctatccctaagcaagtccgagggcaacggagttccgcccgcaggctgctgtcaccaatccgagcatgaccctctgcaaaa

SEQ ID NO: 47586 - DNA, 120 bp, synthetic construct
  source 1..120: mol_type = other DNA
caccttggcgtgcggctccgtggcataagcgcggtagttggaggagcggcgtctgattggggctggtgcagggcgaggttccctagcctgggttaggaggagtggggaccccatcaccac

SEQ ID NO: 47587 - DNA, 120 bp, synthetic construct
  source 1..120: mol_type = other DNA
tgctctcaccgcatcgctgctcctggaaggagagaaaccaaggaggggggttagtggtgggctgtgtcctgtctcctaagggacccctggagtcccctctgaacaagaggtcgggggacc

SEQ ID NO: 47588 - DNA, 120 bp, synthetic construct; identical to SEQ ID NO: 13363
  source 1..120: mol_type = other DNA

SEQ ID NO: 47589 - DNA, 120 bp, synthetic construct
  source 1..120: mol_type = other DNA
gtcagtgagggggccgcccgggtgaccttcagggtcccagggaccgtcagtctcctccgggctgcttgagactccccgaggacactgagataaagggcgaggacacagactaaatatact

SEQ ID NO: 47590 - DNA, 120 bp, synthetic construct
  source 1..120: mol_type = other DNA
ctggggtgcccaggagggcccgggaactgggggagtgcaggccggaggcaggtgcgagcgaggagcagatctttggtgaaggaggccaggctctatttccagcgcccggtgactttagcc

SEQ ID NO: 47591 - DNA, 120 bp, synthetic construct
  source 1..120: mol_type = other DNA
tggagctgcctccaggggcagaataggacagcagcctgaggctggagggaagcttctccgccccacatttcacccccaccagcaagcagaggccacagggagagaagcacgaggccccgg

SEQ ID NO: 47592 - DNA, 120 bp, synthetic construct; identical to SEQ ID NO: 5936
  source 1..120: mol_type = other DNA

SEQ ID NO: 47593 - DNA, 120 bp, synthetic construct
  source 1..120: mol_type = other DNA
ccaaggagaagcttccaggatgcctcatgggcctcccactgtggggtcccagggccataataggttcaggatatgagagtcccataagaagggcctctgagagctgggcacaaagctgga

SEQ ID NO: 47594 - DNA, 120 bp, synthetic construct
  source 1..120: mol_type = other DNA
ctgcagggtgctgccccaaagtttggcaaatctgtgtcctgttggccggtgcagagttcagtgtggaaccaaaaaaagagaaaaaagtggaaggcacaggactagagaggccataacaat

SEQ ID NO: 47595 - DNA, 120 bp, synthetic construct
  source 1..120: mol_type = other DNA
tgcttggaacagtggttggaacactatagcaataataacaattagtattatctctgtaaccctcacaatcaccctctgaagtatattgtagtgttacctgtggaaatggaggcaaggaac

SEQ ID NO: 47596 - DNA, 120 bp, synthetic construct
  source 1..120: mol_type = other DNA
ctctccgtattgggaggtgggagtaccctgtagccactgcagcctgagcctgcccagcgaggggcttcttgcccagggaggagtggtttggcaggagcagcaaaggagaccttccagggg

SEQ ID NO: 47597 - DNA, 120 bp, synthetic construct; identical to SEQ ID NO: 13365
  source 1..120: mol_type = other DNA

SEQ ID NO: 47598 - DNA, 120 bp, synthetic construct
  source 1..120: mol_type = other DNA
tcaacgtgttggagacccccagggttggaacaccaggaaagtgtctctgctcagccccagcgagctctcagacacttccagcaagcagtcgtcaatgcggtggacatggaacactgctga

SEQ ID NO: 47599 - DNA, 120 bp, synthetic construct
  source 1..120: mol_type = other DNA
gtgagatggagatgctgggcggggacagcatggcggcccacctcatatttctgctgcttgaacttctcctgcaggtcgaacttctctgcctccaagttatagatgctctgccacagctcc

SEQ ID NO: 47600 - DNA, 120 bp, synthetic construct
  source 1..120: mol_type = other DNA
ttcccacctccaggcctgccaagggtaccccagcccaccccctgggcctgacccagcctggggaccagacggcagcacccagtgctcaggaacggacaccagggactgccagggcaaagt

SEQ ID NO: 47601 - DNA, 120 bp, synthetic construct; identical to SEQ ID NO: 13366
  source 1..120: mol_type = other DNA

SEQ ID NO: 47602 - DNA, 120 bp, synthetic construct
  source 1..120: mol_type = other DNA
ttcaggtggtcaatggccagcaccttcctcctctcagccagaatcttcttcttcttttcccgctcagtctgcctcttcccacttttccgctctgtctggagggtgtgggaagcagagtaa

SEQ ID NO: 47603 - DNA, 120 bp, synthetic construct
  source 1..120: mol_type = other DNA
ccaactaccaactacatgtattccctagggaaactgaggtaggggcaagaaggatcacgtcagtctcttccttctttgcctaactaatctctttcacctctcaccagcttcccccctccc

SEQ ID NO: 47604 - DNA, 120 bp, synthetic construct
  source 1..120: mol_type = other DNA
aaccgggaaaccatgagagagaggcccatagaaaaagaccaagacggcaacagagacacagagagaaggcaggaagacaaaggcaaggagagacatggaagagaagattcagatactcgc

SEQ ID NO: 47605 - DNA, 120 bp, synthetic construct; identical to SEQ ID NO: 13367
  source 1..120: mol_type = other DNA

SEQ ID NO: 47606 - DNA, 120 bp, synthetic construct
  source 1..120: mol_type = other DNA
cacatagacactttccatggtagctcatttgagcttctcaaagcatcaaggcaggcaatatgagtgccagttgaggaaaccgaggctcagaggttgcaaaaggtcacacaactgtatgtg

SEQ ID NO: 47607 - DNA, 120 bp, synthetic construct
  source 1..120: mol_type = other DNA
ccattggtgccccaggctctgcctgtagccccctaccccagcaagcccctcctagtgcaagccgcggtcaggctgaaaaccagctcagggctgggcatgaggagacctcagtcttccacc

SEQ ID NO: 47608 - DNA, 120 bp, synthetic construct; identical to SEQ ID NO: 13368
  source 1..120: mol_type = other DNA

SEQ ID NO: 47609 - DNA, 120 bp, synthetic construct
  source 1..120: mol_type = other DNA
tctgagagggtagctcccagcacagtgctggcccacaggagtccactgactgagaaatgactgcgtgattgaatgaggtcctgattcccaaatgtgaggtctcgtcatccccttaagctg

SEQ ID NO: 47610 - DNA, 120 bp, synthetic construct
  source 1..120: mol_type = other DNA
gctggagagtcttataaaataacacgttcataaggacgcaggcatttctgtcttgtttgctgatgtattatcagagccaagacaatgcccagcacttcctaggttgatattgatattgtc

SEQ ID NO: 47611 - DNA, 120 bp, synthetic construct
  source 1..120: mol_type = other DNA
gcgattctcctgcctcagcctcctgagtagctaggatgaccggcatgtgccaccacgcctggctaattttgtatttttagtagagacagggtttctccgttggtcaggatggtctcgaac

SEQ ID NO: 47612 - DNA, 120 bp, synthetic construct
  source 1..120: mol_type = other DNA
ggggcctgggggcccagcaggagctgggagcatggggggcctccatgggcctgggctaggggtcactcacagccaggcggttctgccgctccttctcccgctcattccggatgcgctgct

SEQ ID NO: 47613 - DNA, 120 bp, synthetic construct; identical to SEQ ID NO: 13369
  source 1..120: mol_type = other DNA

SEQ ID NO: 47614 - DNA, 120 bp, synthetic construct
  source 1..120: mol_type = other DNA
ttggatagatggccaagtcattgctccagccagagcagcatgtctgtgggaaggcaagtttgatggggagaaacaaaagcaatcaaagcagcctccacgctctgcaggagaaggatgtgg

SEQ ID NO: 47615 - DNA, 120 bp, synthetic construct
  source 1..120: mol_type = other DNA
ctgggggaggcctgaaacagatcagactcagctctggcagtcaaggagcatccagtaggatggggagggaaggcagggacccgagaaaccagtcagggctgcaggagctgtgcagaatgc

SEQ ID NO: 47616 - DNA, 120 bp, synthetic construct; identical to SEQ ID NO: 13370
  source 1..120: mol_type = other DNA

SEQ ID NO: 47617 - DNA, 120 bp, synthetic construct
  source 1..120: mol_type = other DNA
aagacctctggcagggcctggcgcctggccagggaaggggtaactgtggcctgaacccaggaccacgctcatggatgggcacccagcctggctggtgctgcaccccatcccacctatgct

SEQ ID NO: 47618 - DNA, 120 bp, synthetic construct
  source 1..120: mol_type = other DNA
atcttgggaggcaccaagttgggcatgaacgacctgttggagagaggaatagtcagcatcagccccattctggacccagggactgagggtgtccaggacaggcagggccctgatccttcc

SEQ ID NO: 47619 - DNA, 120 bp, synthetic construct
  source 1..120: mol_type = other DNA
tatttcacttcatgctcatgatatgcccatgaagtgggtaccgttaatctcacttaggagaactgaggctcagggaggtagaatgacttgctcaaagccacacaacttggaatcaaagaa

SEQ ID NO: 47620 - DNA, 120 bp, synthetic construct; identical to SEQ ID NO: 13371
  source 1..120: mol_type = other DNA

SEQ ID NO: 47621 - DNA, 120 bp, synthetic construct
  source 1..120: mol_type = other DNA
ccccagccccccccagcacacaccaccttcaggtgggcttcacgtgtgtggcaccaagccgtcctgccctctctcagctctctgaagccgccatgcctatgctggcacggtttcattgtt

SEQ ID NO: 47622 - DNA, 120 bp, synthetic construct
  source 1..120: mol_type = other DNA
tagaagaacatagccccatccctgctagggtgcacgattggtgatggagtgttgggtggaattcagccctcactcactcccttaggaagagacgcttgtgcagtacacaacttgtacaac

SEQ ID NO: 47623 - DNA, 120 bp, synthetic construct
  source 1..120: mol_type = other DNA
ccaggtgcctccccactcacctgggctttggtttggactcctccattgggccatctggaggagatagaagcacacagccatgggtcagggggccccagaagtggtcccaactccgccctc

SEQ ID NO: 47624 - DNA, 120 bp, synthetic construct; identical to SEQ ID NO: 13372
  source 1..120: mol_type = other DNA

SEQ ID NO: 47625 - DNA, 120 bp, synthetic construct
  source 1..120: mol_type = other DNA
agggcagaagctgatgacatgattccaagccccagctggttgtcccctcccctttggagaagtgactgggaccacttagaaccctggtgaaggctgcagcatgacgatgactgcagcaat

SEQ ID NO: 47626 - DNA, 120 bp, synthetic construct
  source 1..120: mol_type = other DNA
ccattgctctgtccagaccagggggctggacaatggtcccctctcccactgggtgccaccaatgcaacttctctgggagaaggggcaaagttgaaagctcaacatctaaaactttggaag

SEQ ID NO: 47627 - DNA, 120 bp, synthetic construct
  source 1..120: mol_type = other DNA
gcctcccttgtacctctctcctgatatccttaccttcagcctcctttgcttcctcttcttcttcatcttctaaatgaaacacgagaaatcaatcaaggtccttgttctgagctcaagtcc

SEQ ID NO: 47628 - DNA, 120 bp, synthetic construct; identical to SEQ ID NO: 13373
  source 1..120: mol_type = other DNA

SEQ ID NO: 47629 - DNA, 120 bp, synthetic construct
  source 1..120: mol_type = other DNA
cagcatcctcttccgctgcctcctcctgctctggagaagtgaagcagacagagtgaagaagcaggccccactcatgctatcaggcagaacccagagcagagaatgggcagcggggagtgg

SEQ ID NO: 47630 - DNA, 120 bp, synthetic construct
  source 1..120: mol_type = other DNA
cccactcatcccggcaacctccctgatgatgggactccacctcattccccaactttccagcccagaagttccaccccgtgtctggcaccacagaacatgctctgcttaagccgaggtgtc

SEQ ID NO: 47631 - DNA, 120 bp, synthetic construct
  source 1..120: mol_type = other DNA
tcgtactatccagaaagtgggcaggatttttctattttcatctatttgtttggcaggatgtggcccccatctcactcaggcacttggtgtagacagacagacaaacagataagggagaca

SEQ ID NO: 47632 - DNA, 120 bp, synthetic construct
  source 1..120: mol_type = other DNA
caccatcgtgggagaagggttggccttcattccctctgtcctcccttcccaggtctgagtcctctctgaagcctggagatgccttttatttgatccctgcaggagtcttacctcaaaatg

SEQ ID NO: 47633 - DNA, 120 bp, synthetic construct; identical to SEQ ID NO: 13374
  source 1..120: mol_type = other DNA

SEQ ID NO: 47634 - DNA, 120 bp, synthetic construct
  source 1..120: mol_type = other DNA
tccctggctgctctccagaggactctgtccccagaccccccaaccaacacctggccaccctgcttggtgctgtccagctcctaaggagggcccagcatggaacactggggtgtgcgcggg

SEQ ID NO: 47635 - DNA, 120 bp, synthetic construct
  source 1..120: mol_type = other DNA
aggatccaggaaccaggaagaggagccagtggccctgaagttcaggcatgatgatcagcttggaactgtgatcctggcccctgggaggcaggggaggaaacgactgacccactccgtccc

SEQ ID NO: 47636 - DNA, 120 bp, synthetic construct
  source 1..120: mol_type = other DNA
tcttcgtcctctctccagtcctcctcttctgaggttcagggagtggccgcagcggaggggaaaagcgagacaggttagtctgggagcagagagcccgcggcaggagcagccacccagcgc

SEQ ID NO: 47637 - DNA, 120 bp, synthetic construct
  source 1..120: mol_type = other DNA
tcatcagtaaaatgggaatcattctactcacttctcagccgtggtgaggactgaatgacctagcgtgcatagagcgcccagcaggtgcctggcacaagaggagcatgcgatctgtggtaa

SEQ ID NO: 47638 - DNA, 120 bp, synthetic construct; identical to SEQ ID NO: 13375
  source 1..120: mol_type = other DNA

SEQ ID NO: 47639 - DNA, 120 bp, synthetic construct
  source 1..120: mol_type = other DNA
agttgttctacgtacaaatatctgcccaaaaaaacagttccagcaagtggaacaattcctctcctggaagaaggacacctggcattatctatcctgcaggcttagtggacacccatctag

SEQ ID NO: 47640 - DNA, 120 bp, synthetic construct
  source 1..120: mol_type = other DNA
gtggagaatgactctgctaactcacagccaaattctactgtgtgtggcaggcagattggtcccaaatccagagatctatgtctcaaactccaccaccctaaacctgttataaggaagtgg

SEQ ID NO: 47641 - DNA, 120 bp, synthetic construct; identical to SEQ ID NO: 13376
  source 1..120: mol_type = other DNA

SEQ ID NO: 47642 - DNA, 120 bp, synthetic construct
  source 1..120: mol_type = other DNA
tcctaatatctacatgccacatgctgaagtgatacctgagccactaaaaggcagggtccacctgcctggggtgcagggggaggactggagtgaagcctctgagtcatttccatgtgccaa

SEQ ID NO: 47643 - DNA, 120 bp, synthetic construct
  source 1..120: mol_type = other DNA
gaatcatgacaaatcttcatgccgagataagacgtctcagatcactgagcaatttcatactcacaatcgcatttgagaaattactaaatggaatcttttggggcatatcatggcattgtg

SEQ ID NO: 47644 - DNA, 120 bp, synthetic construct
  source 1..120: mol_type = other DNA
gtggagtatagaggaaagaagactggccctaagatgatgattgttgaagctggtaatgggtaccttgggcagggggggccattattattattattgctacctttatgtgcatttaaaatt

SEQ ID NO: 47645 - DNA, 120 bp, synthetic construct
  source 1..120: mol_type = other DNA
gtaggactgattcccattttagaaggcactgttgttggaggatcttgctcagctgagagtgaggagcagggacagatgagctgctttcccagggctcccaggatttccacattgctgagc

SEQ ID NO: 47646 - DNA, 120 bp, synthetic construct; identical to SEQ ID NO: 13377
  source 1..120: mol_type = other DNA

SEQ ID NO: 47647 - DNA, 120 bp, synthetic construct
  source 1..120: mol_type = other DNA
gccagcttggtctcaccagcgttctgctcacttactctttccatctttgcccaagctgtacccctttctagaaagtcctgccctctcccaaatctcttatctttccaaattctacacagg

SEQ ID NO: 47648 - DNA, 120 bp, synthetic construct
  source 1..120: mol_type = other DNA
ctaatttcttctcccagtttatgtcttaacatctcaacaagagtaagttctgtgagggcagtagccgtgcctatacctctgtctcctccctggtgaccactatcctctgtagttattgga

SEQ ID NO: 47649 - DNA, 120 bp, synthetic construct; identical to SEQ ID NO: 13378
  source 1..120: mol_type = other DNA

SEQ ID NO: 47650 - DNA, 120 bp, synthetic construct
  source 1..120: mol_type = other DNA
gggtacaggagtggaaaggaaatggctatatctctcctcggggtgcccaaaacacacacagctacttctacccagaatccgagggacagctgggaggctcctggaccaggtgtcagggca

SEQ ID NO: 47651 - DNA, 120 bp, synthetic construct
  source 1..120: mol_type = other DNA
gagaaaaaagtcagtgcaggtacaaagggaagcctgccttcctcagaagagctctggcccccgttgtacagagatcagcgaggcctagggtgaatctagttccacccctcatgagctgtg

SEQ ID NO: 47652 - DNA, 120 bp, synthetic construct
  source 1..120: mol_type = other DNA
aatactgcctgggatgctgcatttccatttgtgacactcaagacaatgtctgcagtttctcaacctttccatccactctgcccacccccactccacaggatctgttcagcactgtacaaa

SEQ ID NO: 47653 - DNA, 120 bp, synthetic construct
  source 1..120: mol_type = other DNA
catgcccgactaatttttgtatttttagtaaagctgggattttgccacattgcccaggctgtttcgaactcccaggctcaagggatcctcctgcctcagcctctcgaagtgctgagatta

SEQ ID NO: 47654 - DNA, 120 bp, synthetic construct; identical to SEQ ID NO: 13379
  source 1..120: mol_type = other DNA

SEQ ID NO: 47655 - DNA, 120 bp, synthetic construct
  source 1..120: mol_type = other DNA
tgccctcgggagaaactaggcaccgtgtgtaaacgctcgttattaaagacaactgtgtactagtctttaattatgtcaatgaaaattccgattaaaaaatgttcccccagggaactcatt

SEQ ID NO: 47656 - DNA, 120 bp, synthetic construct
  source 1..120: mol_type = other DNA
tcctttctctgtctcatggagataaagtgtacacatcctggctactcagggtctttacgaggctccagttgacattaacaaaaggggaaggcattaggcaacatcaggtgttacaatgag

SEQ ID NO: 47657 - DNA, 120 bp, synthetic construct; identical to SEQ ID NO: 13380
  source 1..120: mol_type = other DNA

SEQ ID NO: 47658 - DNA, 120 bp, synthetic construct
  source 1..120: mol_type = other DNA
tagtgcaatatgccagctccacagccttcctgatgttggcttccaagggagagaatggacagggtgatgtgagagtgaggctaaagtgaggcgggagaagaatccaaatgatgctcagga

SEQ ID NO: 47659 - DNA, 120 bp, synthetic construct
  source 1..120: mol_type = other DNA
ctcactccctcatcacctctccctgcacatcccccccatagtggctgagaccaatcccaggcactcatctgtggacatccagcaagagccagggctctggttgggtggggtgatgtccag

SEQ ID NO: 47660 - DNA, 120 bp, synthetic construct
  source 1..120: mol_type = other DNA
tcccattatgtccagttctgctgggttagaaacaagcatggctgcagcagagtggtccttccgctgctccctctgctggagcagggtgaggacagtgagggaggagccttgtttacaagg

SEQ ID NO: 47661 - DNA, 120 bp, synthetic construct; identical to SEQ ID NO: 13381
  source 1..120: mol_type = other DNA

SEQ ID NO: 47662 - DNA, 120 bp, synthetic construct
  source 1..120: mol_type = other DNA
aaccgtgcatggccagcctgggcgcatagcttctagctttctctctcctctcctactctgcccttccaccagttcagagccactgggcatggtgctggggcctcacaggaggacagagca

SEQ ID NO: 47663 - DNA, 120 bp, synthetic construct
  source 1..120: mol_type = other DNA
aaggcaggacctgatgcaggggaaagaggtgggctgagactgggggctgcagaatgggagagagtcaagaacctggcagggcaaggaaccagaatgtcctgaaacacctgtgtcctcaca

SEQ ID NO: 47664 - DNA, 120 bp, synthetic construct
  source 1..120: mol_type = other DNA
aaagacaatagaaggcataaggcatactgaccttggggtcaaaaaatctgggcttaaaacccagattttgctgtgtggccttatttaagtcacctagcctctctgacttcagttaaccaa

SEQ ID NO: 47665 - DNA, 120 bp, synthetic construct
  source 1..120: mol_type = other DNA
tcctaagccaacagctgttagcccaccaggagagcgggggtaaggggatggggagagggcaggaagagtggaagtgggggtcagaaataggaggcagccagcaacctgatcctctcagat

SEQ ID NO: 47666 - DNA, 120 bp, synthetic construct; identical to SEQ ID NO: 13382
  source 1..120: mol_type = other DNA

SEQ ID NO: 47667 - DNA, 120 bp, synthetic construct
  source 1..120: mol_type = other DNA
ctgccccccaagtgcagctcagctcagggtctgggagctcagctcagctctgggagggaatggcactgagtcagcggcatcaaatggaattcccgcgttggcctggagaggcgctgcaga

SEQ ID NO: 47668 - DNA, 120 bp, synthetic construct
  source 1..120: mol_type = other DNA
gactcaagaaggacctgactggaaaggtataggtgaccctcggcctggaacaagcaatttaggggagtctctgttggttagagcctcattgtatttagagcaggcagaggcctagcaaat

SEQ ID NO: 47669 - DNA, 120 bp, synthetic construct; identical to SEQ ID NO: 13383
  source 1..120: mol_type = other DNA

SEQ ID NO: 47670 - DNA, 120 bp, synthetic construct
  source 1..120: mol_type = other DNA
gccgacagatcctggaggcgtctgctcagtctcagcggggactgggtgaggcagaggatggagagggctttaagcaggcatgtgggctggggcctggtgagccagccctgcggagggagg

SEQ ID NO: 47671 - DNA, 120 bp, synthetic construct; identical to SEQ ID NO: 13384
  source 1..120: mol_type = other DNA

SEQ ID NO: 47672 - DNA, 120 bp, synthetic construct
  source 1..120: mol_type = other DNA
ggagtgcagtgacaggatctcggctcattgcaacctccacctcccgggttcaagcaactctcctgcctcagcctccagagtagctggaactacaggcacgtgccaccatgcccagctaat

SEQ ID NO: 47673 - DNA, 120 bp, synthetic construct
  source 1..120: mol_type = other DNA
atgcctggcccaaatccagtatttatttaaacaactagtgacacttactcgttcctatacatttatgataaatttacccaactcacacacacacacaatgaaaatttgggattctaattg

SEQ ID NO: 47674 - DNA, 120 bp, synthetic construct; identical to SEQ ID NO: 13385
  source 1..120: mol_type = other DNA

SEQ ID NO: 47675 - DNA, 120 bp, synthetic construct
  source 1..120: mol_type = other DNA
cttcgacctcccgagtagctggaattacaggcttacactaccatagctggctgatttttgtattttcagtagagacagggtgtcaccatgttggccaggctgatctcaaacttgacctca

SEQ ID NO: 47676 - DNA, 120 bp, synthetic construct
  source 1..120: mol_type = other DNA
ttctgctggaagataaaattaatatttttctacctactacttatctgccttactaaattctgttaattccataatatttctgagttttggtatactatcctataatcaaaaaggcatata

SEQ ID NO: 47677 - DNA, 120 bp, synthetic construct
  source 1..120: mol_type = other DNA
ttccttttttgttcctcttgaatgcactaaaaccagagtaggctgggcacagtggctcactcctgtagtctcagtgctttgggaggcagaggcgggtggatcatgaggtcaggagttcga

SEQ ID NO: 47678 - DNA, 120 bp, synthetic construct; identical to SEQ ID NO: 13386
  source 1..120: mol_type = other DNA

SEQ ID NO: 47679 - DNA, 120 bp, synthetic construct
  source 1..120: mol_type = other DNA
caacctccgcctcctgggttcaagcgattctcctgcctcagcctcccaagtagctgggattacaggtgcctgccaccacgcctagctactttttgtatttttagtagagacggggtttca

SEQ ID NO: 47680 - DNA, 120 bp, synthetic construct
  source 1..120: mol_type = other DNA
gagacagggtctttctctgttgcctgggctggtctcaagggatcctcccaccttggcctcccaaagtgctgggatcacaggcatgagccaccatacagccccttatactgttcttgatta

SEQ ID NO: 47681 - DNA, 120 bp, synthetic construct
  source 1..120: mol_type = other DNA
cctgaatagctaggactacaggcgcgtgccaccacacccgcctaattttttgtatttttagtagagacggggtttcaccttgttagccaggatggtttcaatctcttgtcctcgtgatct

SEQ ID NO: 47682 - DNA, 120 bp, synthetic construct; identical to SEQ ID NO: 13387
  source 1..120: mol_type = other DNA

SEQ ID NO: 47683 - DNA, 120 bp, synthetic construct
  source 1..120: mol_type = other DNA
cctccgcctcccaggttcaagcaattctcctgtctcagccttcccagtagctgggattataggtgcccaccaccatgcccagctaattttttgtgtttttagtagaggcaggatttcact

SEQ ID NO: 47684 - DNA, 120 bp, synthetic construct
  source 1..120: mol_type = other DNA
attatcttaatgtttaacttattaggaaaattggtattccattatcagtctattactgtgttaaagtgttttcttttttaaggaaatggctactgaaatttaatcaaattcctttcagta

SEQ ID NO: 47685 - DNA, 120 bp, synthetic construct
  source 1..120: mol_type = other DNA
gagttcgaggctagcctggcgacacagtgaaatcctgtctctactaaaaatacaaaaattaacccggcgtggtggcgtgtacctgtagtcccagctacttgggaggctatggcaggagaa

SEQ ID NO: 47686 - DNA, 120 bp, synthetic construct; identical to SEQ ID NO: 13388
  source 1..120: mol_type = other DNA

SEQ ID NO: 47687 - DNA, 120 bp, synthetic construct
  source 1..120: mol_type = other DNA
cgggcgcctgtagtcccagctactcgggaggctgaggcaggagaatggcatgaacctgggaggcagagcttgcagtgagctgagattgagccactgcactccagcctgagtaacagagcg

SEQ ID NO: 47688 - DNA, 120 bp, synthetic construct
  source 1..120: mol_type = other DNA
gtgctgggattacaggtaggtatatttttcatttttaggatgcataccaggttcctttcttttctttttaatgatgaaagcatttaaggctattcaatctcctcagagtacgaattttag

SEQ ID NO: 47689 - DNA, 120 bp, synthetic construct
  source 1..120: mol_type = other DNA
tgcataccaggttcctttcttttctttttaatgatgaaagcatttaaggctattcaatctcctcagagtacgaattttagatttggagacctcgtgttcctaaaatgagggggaaatttt

SEQ ID NO: 47690 - DNA, 120 bp, synthetic construct
  source 1..120: mol_type = other DNA
ccaccgtgcctggccggaaatgttttctaaataaaaaaatagaacatattgatttaaggttgtgaattacaagtttagactgaagccatgaggaaattgggagatttgatttcagatctc

SEQ ID NO: 47691 - DNA, 120 bp, synthetic construct; identical to SEQ ID NO: 13389
  source 1..120: mol_type = other DNA

SEQ ID NO: 47692 - DNA, 120 bp, synthetic construct
  source 1..120: mol_type = other DNA
aagatgagattacaggcgtgcaccaccatgcccagctaattttgtatttttagtagagatggggtttcatcttgttggtcaggctggtctccaactcctgacctcaagtgatccgccggc

SEQ ID NO: 47693 - DNA, 120 bp, synthetic construct
  source 1..120: mol_type = other DNA
agcacagcagaaataaaaacagagctagggacataatctaggaaaaggttgggattgaaagggtggaggatggttgtcaaaaagggagattttctgtttacttgagatctgcagagtagg

SEQ ID NO: 47694 - DNA, 120 bp, synthetic construct
  source 1..120: mol_type = other DNA
aaagggagattttctgtttacttgagatctgcagagtaggtccaagtgtcctcgtcgtaggtgaacacacgtgcacacacacaaatggtaactgtgtgtgatgatggacgtgctgattaa

SEQ ID NO: 47695 - DNA, 120 bp, synthetic construct; identical to SEQ ID NO: 13390
  source 1..120: mol_type = other DNA

SEQ ID NO: 47696 - DNA, 120 bp, synthetic construct
  source 1..120: mol_type = other DNA
cttggggcaaggcaaggggctcctgcttgcaccttcagcctggttgatgagctgacaggctggtggccccagaagcccccctggacagtagcacccactggaccctaacacccatctcca

SEQ ID NO: 47697 - DNA, 120 bp, synthetic construct
  source 1..120: mol_type = other DNA
agccctgaggagcatgggcaggcagtactgagctcctcaacccgactctcctccctatcccaagaagccctttgaaaggttttcctggcagagtttaaagcttcaattcattcagctacc

SEQ ID NO: 47698 - DNA, 120 bp, synthetic construct; identical to SEQ ID NO: 13391
  source 1..120: mol_type = other DNA

SEQ ID NO: 47699 - DNA, 120 bp, synthetic construct
  source 1..120: mol_type = other DNA
ggaggggaggagggacggttggttcctgagttatgaatggagccaccccctcccttgttgtcatgcagcccgcagactgacccagtctccagcctttgttcccctcccggaacccgggca

SEQ ID NO: 47700 - DNA, 120 bp, synthetic construct
  source 1..120: mol_type = other DNA
ggtggcagcaaagttttattgtaaaataagagatcgatataaaaatgggatataaaaagggagaaggaggggaagggtggggtgaaaatgcagatgtgcttgcagaatgtaaaagatgtt

SEQ ID NO: 47701 - DNA, 120 bp, synthetic construct
  source 1..120: mol_type = other DNA
caggagtttgagaccagcctgggcaacactgtgagaccccatctctacaaaacatgcaaaagttggctggccatggtggcatgaacctgtggtcccagctactccggaggctgaggcagg

SEQ ID NO: 47702 - DNA, 120 bp, synthetic construct; identical to SEQ ID NO: 13392
  source 1..120: mol_type = other DNA

SEQ ID NO: 47703 - DNA, 120 bp, synthetic construct
  source 1..120: mol_type = other DNA
ccctcaagggggtcaagttctagaccccatgtaataaaaggtggtttcaaggccagatgtacattatttcattaaccctcacaatgcactctgtgaggtaggtgcaaatgccagcatttc

SEQ ID NO: 47704 - DNA, 120 bp, synthetic construct
  source 1..120: mol_type = other DNA
gaacatttcttacatctcccaaacatccctcacagtaaaaaccttaaaatctaagctggtatgtcctactccccatcctcctccccacaacaaaacaccagtgcaggccaacttgttcag

SEQ ID NO: 47705 - DNA, 120 bp, synthetic construct
  source 1..120: mol_type = other DNA
ctgtcagtggggaacaagaagtggagaatgtcagtctgagtcaggcccttctgtcttgaacatgagttttttatggcgggaggtagactgaccctttttggacttcaggtggctgtagga

SEQ ID NO: 47706 - DNA, 120 bp, synthetic construct; identical to SEQ ID NO: 13393
  source 1..120: mol_type = other DNA

SEQ ID NO: 47707 - DNA, 120 bp, synthetic construct
  source 1..120: mol_type = other DNA
gcctcccgagtaggtagctgggattacaggcatgcatcaccacgcccggctacttttgtatttttagtagagatggggtttctccatgttggtcaggctgggctcaaactcccgacctca

SEQ ID NO: 47708 - DNA, 120 bp, synthetic construct
  source 1..120: mol_type = other DNA
aaggaaactgagtttgacgggggtcacctaggacctgccggtgcatggcagggctgagtatatgacctgaaactctggctgtattcagtattacacaattattaggcccctccttgagac

SEQ ID NO: 47709 - DNA, 120 bp, synthetic construct
  source 1..120: mol_type = other DNA
aagactaaaaaaatgtctgtgcagggctgggacccaatgagatggggtcagctgcctttgaccatgaaggcaggatgagaatggaatcctatggctttccaacctaggaaggcaggggag

SEQ ID NO: 47710 - DNA, 120 bp, synthetic construct; identical to SEQ ID NO: 13394
  source 1..120: mol_type = other DNA

SEQ ID NO: 47711 - DNA, 120 bp, synthetic construct
  source 1..120: mol_type = other DNA
ttggctgattgcaatctccgcctctggggttcaagtgattcttgtgcctcagcctcccgagtagctgggactacaggcgtgtgctaccacacctggctaatttttgtgtttttagtagag

SEQ ID NO: 47712 - DNA, 120 bp, synthetic construct
  source 1..120: mol_type = other DNA
aaattttagagatgatgtcttgctatgttgttcaggctggactcaaactcttgggctcaagagatcctcctgccttagcctctcaagtaactgggactacatgtgcatgcgactgtgcct

SEQ ID NO: 47713 - DNA, 120 bp, synthetic construct
  source 1..120: mol_type = other DNA
gcctcccaagtagctgggattacaggcacctgccatcacgcccggttaatttttgtattttagtagagacggggtttcaccatgttggctaggctggtcttgaactcctgacctcaggtg

SEQ ID NO: 47714 - DNA, 120 bp, synthetic construct; identical to SEQ ID NO: 13395
  source 1..120: mol_type = other DNA

SEQ ID NO: 47715 - DNA, 120 bp, synthetic construct
  source 1..120: mol_type = other DNA
accagcatgggcaacgtagcaagaccttgacttcacagaaaataaaaaattagctgggtgtcgtggcatgtgcctgtagtcctagctacttgggagggtgaaatcaccggagcccaggga

SEQ ID NO: 47716 - DNA, 120 bp, synthetic construct
  source 1..120: mol_type = other DNA
cccagcactttgggaggccgaggcgggcggatcacatggtcagaagttcgagaccagcctggccaacatggtgaaaccctgtctctactaaaaatacaaaaattagctgggcgtggtagc

SEQ ID NO: 47717 - DNA, 120 bp, synthetic construct
  source 1..120: mol_type = other DNA
gactgagtctcaaaaaaataaaataaaataaaataaaaataaataaataaaaattagccaggcatggtggtgcaggcctgtagttgaagcaacttgggaggctgagctgggaggatggat

SEQ ID NO: 47718 - DNA, 120 bp, synthetic construct
  source 1..120: mol_type = other DNA
agtgagactctatctatctacaaaaaattttaaaaattagctgggtatggtggtgtatgcctgtggtcctagctactggggaggcagagttagggggattgcttgagcccaggagggtat

SEQ ID NO: 47719 - DNA, 120 bp, synthetic construct; identical to SEQ ID NO: 13396
  source 1..120: mol_type = other DNA

SEQ ID NO: 47720 - DNA, 120 bp, synthetic construct
  source 1..120: mol_type = other DNA
tgggtgacagagtgagactctgtctccaaaaaaaaaaaaaaaaaaagcaggctaggctaagctatgatgttccttagattaggtgtattaaatccattttcaacttacaatattttcaac

SEQ ID NO: 47721 - DNA, 120 bp, synthetic construct
  source 1..120: mol_type = other DNA
cctttaaaatatatattatggtataagttggtgttctgaagttagttagctacaaccaggagccattgtctttgaggcatcactgccccctgatggcaaatgccccaattgcaggtaaaa

SEQ ID NO: 47722 - DNA, 120 bp, synthetic construct
  source 1..120: mol_type = other DNA
agggtgaaatattctccatccagtggtttcttctttggctggggagaggagctggtgttgttgggcagtgctaggaaagaggcaaggaaaggtgataaaagtgaatctgaggcataactg

SEQ ID NO: 47723 - DNA, 120 bp, synthetic construct; identical to SEQ ID NO: 13397
  source 1..120: mol_type = other DNA

SEQ ID NO: 47724 - DNA, 120 bp, synthetic construct
  source 1..120: mol_type = other DNA
aaactgagtgggagcagtaaggagattccccgccggggatgtgatgagaggtggatgggtagtagtatggaagaaatcggtaagaggtgggcccaggggtcagaggcaagcagaggctgg

SEQ ID NO: 47725 - DNA, 120 bp, synthetic construct
  source 1..120: mol_type = other DNA
ttgtagtggatggtggtacagtcagagccaacctaggagataacacaggcccaagatgaggccagtgcgccttggggagacctgtggcaagcaggggaggccttttttttttttttttga

SEQ ID NO: 47726 - DNA, 120 bp, synthetic construct
  source 1..120: mol_type = other DNA
caggtgcccagcaccacgcccggctaatttttttttgtatttttcagtagagacggggtttcaccgttagccaggatggtctcgatctcccaacctcgtgatccgcctgccttggcctcc

SEQ ID NO: 47727 - DNA, 120 bp, synthetic construct; identical to SEQ ID NO: 13398
  source 1..120: mol_type = other DNA

SEQ ID NO: 47728 - DNA, 120 bp, synthetic construct
  source 1..120: mol_type = other DNA
caatcagtgaggaatcagaggcctggggaccctgggcaaccagccctgtcgtctctccagccccagctgctcaccatcgctatctgagcagcgctcatggtgggggcagcgcctcacaac

SEQ ID NO: 47729 - DNA, 120 bp, synthetic construct
  source 1..120: mol_type = other DNA
gttgagggcaggggagtactgtaggaagaggaaggagacagagttgaaagtcagggcacaagtgaacagataaagcaactggaagacggcagcaaagaaacaaacatgcgtaagcacctc

SEQ ID NO: 47730 - DNA, 120 bp, synthetic construct
  source 1..120: mol_type = other DNA
tcacagctcactgcagcctccatctcctggcctcaagtgatcttcccacctcagcctcctaagtggctgggactataggtgtgcaccaccatgcctggctaattttttgtatttttttgt

SEQ ID NO: 47731 - DNA, 120 bp, synthetic construct; identical to SEQ ID NO: 13399
  source 1..120: mol_type = other DNA

SEQ ID NO: 47732 - DNA, 120 bp, synthetic construct
  source 1..120: mol_type = other DNA
tgggtaaactataaaaaaacactgacaggaagccaaagggtgaagaggaatcccaaagttccaaacaaaagaaatgcagggggatacggccaggcattgaagtctcatggaagccagccc

SEQ ID NO: 47733 - DNA, 120 bp, synthetic construct
  source 1..120: mol_type = other DNA
ggagggggctggtgcaggggccgccggtgtaggagctgctggtgcaggggccacggggggagcagcctctggcattctgggagcttcatctggacctgggtcttcagtgaaccattgttc

SEQ ID NO: 47734 - DNA, 120 bp, synthetic construct
  source 1..120: mol_type = other DNA
ggtccccagccctccaggtccccagcccaacccttgtccttaccagaacgttgttttcaggaagtctgaaagacaagagcagaaagtcagtcccatggaattttcgcttcccacaggtct

SEQ ID NO: 47735 - DNA, 120 bp, synthetic construct
  source 1..120: mol_type = other DNA
actgcggctcctccatggcagtgacccggaaggcagtctggctgctgcaagaggaaaagtggggatccagcatgagacacttccaaccctgggtcacctgggcctgcagagaaggaaccc

SEQ ID NO: 47736 - DNA, 120 bp, synthetic construct; identical to SEQ ID NO: 13400
  source 1..120: mol_type = other DNA

SEQ ID NO: 47737 - DNA, 120 bp, synthetic construct
  source 1..120: mol_type = other DNA
cccgagtagctgggattacaggcgagtaccaccacacccagctaatttttgtatttttagtagagacagggctttgcatgttggccaggctggtctcgaactccttacttcaggtgatcg

SEQ ID NO: 47738 - DNA, 120 bp, synthetic construct
  source 1..120: mol_type = other DNA
cccccttggcccccacccttccccacctgatacacggctccatttctttgattcctttcactgcaaagcttctggaagaacaactgtctcaccgctcacctgcccattctcttcggacac

SEQ ID NO: 47739 - DNA, 120 bp, synthetic construct
  source 1..120: mol_type = other DNA
taatcaactggtggttccttggctagccaggaacatgggggtaggctccttcccgtgcagactttaagtcatcctattttaattcacatcacctcatttgcattctcatagcacttacat

SEQ ID NO: 47740 - DNA, 120 bp, synthetic construct; identical to SEQ ID NO: 13401
  source 1..120: mol_type = other DNA

SEQ ID NO: 47741 - DNA, 120 bp, synthetic construct
  source 1..120: mol_type = other DNA
tttgagatggagtttggctcttttcgcccaggctggagtgcagtggtgcagtctaggctcactgcaacctctgccttctggtttcaagcaattctcctgcctcagcctcccgagtagctg

SEQ ID NO: 47742 - DNA, 120 bp, synthetic construct
  source 1..120: mol_type = other DNA
ctctcaaagcgctgggattacaggtgtgagccactgtgcctggcccgccatgttctttctttctttcttttttcttttgaggcagggtcttgctttgttgcccaagctagggtacagtgg

SEQ ID NO: 47743 - DNA, 120 bp, synthetic construct; identical to SEQ ID NO: 13402
  source 1..120: mol_type = other DNA

SEQ ID NO: 47744 - DNA, 120 bp, synthetic construct
  source 1..120: mol_type = other DNA
ccgcctccgactcccaaagtgctgggattacaggtgtgagccactgcacccggccaatttttgagtttttttgtagaggcagggtttcactatgttgcccaggcaggatgctctctttct

SEQ ID NO: 47745 - DNA, 120 bp, synthetic construct
  source 1..120: mol_type = other DNA
agacagagttttgctctcgtccaggctggagtgcaatggtgcgatctcggctcaccgcaacctctgcctcccaggttcaagcgattctcctgcctcagcctcccgagtagctgggattac

SEQ ID NO: 47746 - DNA, 120 bp, synthetic construct
  source 1..120: mol_type = other DNA
agtgctgggattacaggcatgaaccactgtgcccagcccacttttctgttgtttgcactgacaaaacatcccctaccaaacagctcctttaatggcaggctcttttctttttttatttta

SEQ ID NO: 47747 - DNA, 120 bp, synthetic construct
  source 1..120: mol_type = other DNA
ttctcctgcctcagcctgctgagtagctaggactacaagcatgtgccaccacacctggctaattttgtacttctagtagagacggggtttcaccatgttggtcaggctggtcttgaactc

SEQ ID NO: 47748 - DNA, 120 bp, synthetic construct; identical to SEQ ID NO: 13403
  source 1..120: mol_type = other DNA

SEQ ID NO: 47749 - DNA, 120 bp, synthetic construct
  source 1..120: mol_type = other DNA
caggtctacagacaggtctccctgtctttatctctcaaatcttcagtagcaactaaaatctccgtgtttttcagagcaggaccttcccaggggtaccagcatcagtgggccaggatacaa

SEQ ID NO: 47750 - DNA, 120 bp, synthetic construct
  source 1..120: mol_type = other DNA
agaatcttaacagtggctgctggtatcagtcttgaaggcctatatgtccagtgattccctaaacaatatagtacaagtacttacatacatacttgcatgtacattagcattttcattgta

SEQ ID NO: 47751 - DNA, 120 bp, synthetic construct; identical to SEQ ID NO: 13404
  source 1..120: mol_type = other DNA

SEQ ID NO: 47752 - DNA, 120 bp, synthetic construct
  source 1..120: mol_type = other DNA
ggttcaagcaattcttctgtctcagcctcccaagtagctgggattacaggcgcccaccactacacccagctaattcttgtatttttagtagagacggggtttcaccatgttaggttggtc

SEQ ID NO: 47753 - DNA, 120 bp, synthetic construct
  source 1..120: mol_type = other DNA
cgcgatctcggctcactgcaacctctgcctcccaggtccaagcaattctcctgcctcagcctcctgagtagctgggattagaggtgcccgtcaccacgcctggctgattttttgtatttt

SEQ ID NO: 47754 - DNA, 120 bp, synthetic construct
  source 1..120: mol_type = other DNA
gtatgtatagaatcatactggctgtgaatgtgttttatttcttcctttctaatcgttattttttttctttccttttttttttttttttttgacatggaattttgctcttgtcgcctaggc

SEQ ID NO: 47755 - DNA, 120 bp, synthetic construct
  source 1..120: mol_type = other DNA
ttcttttttttttgagacggagtttttgcttttgtcacccaggctggagtgcaatggtgcaatctcggctcactacaacctccgcctcccaggttcaagcgattctcctgcctaagcctc

SEQ ID NO: 47756 - DNA, 120 bp, synthetic construct; identical to SEQ ID NO: 13405
  source 1..120: mol_type = other DNA

SEQ ID NO: 47757 - DNA, 120 bp, synthetic construct
  source 1..120: mol_type = other DNA
agtcttgctctgtcgcccaggctggagtgcagtggctcgatctcagctcactgcaagctccgccccctgagttcacgccattctcctgcctcagcctcccgagtagctgggactacaggc

SEQ ID NO: 47758 - DNA, 120 bp, synthetic construct
  source 1..120: mol_type = other DNA
ctgggattacaggcctgagccaccgcacccggccctcattatttctttttcttgcctggttaaaacctccagtatggtatcaacgttgtgagagtcaaatccttttctagttcctgatct

SEQ ID NO: 47759 - DNA, 120 bp, synthetic construct
  source 1..120: mol_type = other DNA
tcccgggttcacgccattctctcgcctcagcctcccgagtagctgggactataggcgcccgccaccatgcccggctaattttttgtttttgtatttttagtagagacggggtttcagcat

SEQ ID NO: 47760 - DNA, 120 bp, synthetic construct; identical to SEQ ID NO: 13406
  source 1..120: mol_type = other DNA

SEQ ID NO: 47761 - DNA, 120 bp, synthetic construct
  source 1..120: mol_type = other DNA
caggctggtcttgaaatcctgggctcaagagatcttcctgcctcagcctcctaaaatgttgggattacaggcctgagctactgcaccaggccaatttttgaatgttgaatcagctacaat

SEQ ID NO: 47762 - DNA, 120 bp, synthetic construct
  source 1..120: mol_type = other DNA
cttctgcctcctgggttcaagcgattctcctgcctcagactcccgagtagctgggatttcaggtgcccaccaccatgcccagctaatttttttttttttttgagatgaagtcttgctctg

SEQ ID NO: 47763 - DNA, 120 bp, synthetic construct
  source 1..120: mol_type = other DNA
ggctgatttttgtatttttagtagagatggcgtttcaccacattggtcaggctggtcttgaactcctgacctcgtgatctgcccacctcggcctcccaaagtgctgggattacaggcgtg

SEQ ID NO: 47764 - DNA, 120 bp, synthetic construct; identical to SEQ ID NO: 13407
  source 1..120: mol_type = other DNA

SEQ ID NO: 47765 - DNA, 120 bp, synthetic construct
  source 1..120: mol_type = other DNA
tctcactctgttgcccaggctggagtgcagtggcgcaatctcggctcactgcaacctccgcttcccaggttcaagggattcttgtgcctcagcctcctgagtaactggcattacaggtat

SEQ ID NO: 47766 - DNA, 120 bp, synthetic construct
  source 1..120: mol_type = other DNA
gagattacaggtatgagccaccgcgcccagtctgttcctctgttttctgaagagtttgtgtaagatgggtactgtttcttcctccaacgtttaaagagagcagagaacagaggagataaa

SEQ ID NO: 47767 - DNA, 120 bp, synthetic construct
  source 1..120: mol_type = other DNA
tgagatcctgtcaatacaaaaaaataaaatagttagctgggtgtggtggagtaatcccagctactcgtgaggctgctagaggactgcttgagcccaggggttcgaggctgcagtaagcct

SEQ ID NO: 47768 - DNA, 120 bp, synthetic construct; identical to SEQ ID NO: 13408
  source 1..120: mol_type = other DNA

SEQ ID NO: 47769 - DNA, 120 bp, synthetic construct
  source 1..120: mol_type = other DNA
tgtcctaaacaggacaaggcaaatactgaacataaaaaagataaatccactcctcttaagatactgtaaactctgtaaagcaaacaaataggcaagcaacagatcagaagaaaacattca

SEQ ID NO: 47770 - DNA, 120 bp, synthetic construct
  source 1..120: mol_type = other DNA
gaacatccttagtcaatagagaactgtaaattacaaccacaaggatataccacattagaaagactgacaatacctaatgtccggaaggctgtggcacaaccataataactcccatacctt

SEQ ID NO: 47771 - DNA, 120 bp, synthetic construct
  source 1..120: mol_type = other DNA
tcagagcttctgaaaaagttcaaaatacagctactttttacttccaaactcgcaattcccctcctaagtatttctccaagaaacacgaaaacatatgatcacaaaaagaattgtacaaga

SEQ ID NO: 47772 - DNA, 120 bp, synthetic construct; identical to SEQ ID NO: 13409
  source 1..120: mol_type = other DNA

SEQ ID NO: 47773 - DNA, 120 bp, synthetic construct
  source 1..120: mol_type = other DNA
ccgggttcaagcgattctcctgcctcaccctcccgaatagctgggattacaggcacccaccacgcccagctaatttttgtattttttagtagagacggggattcaccacgttggccacgc

SEQ ID NO: 47774 - DNA, 120 bp, synthetic construct
  source 1..120: mol_type = other DNA
attccattctatatgaagttctccaacaggcaaaatggttatggagatcaaaataaaggtggggtcgggaatcgactgggaagagacgtgatgaaacgtttctgggacgatgaaaagggt

SEQ ID NO: 47775 - DNA, 120 bp, synthetic construct
  source 1..120: mol_type = other DNA
gtgtaaatgccacctcgatttaggaaaaagatgacgtaagtacggcacaaagtggccggtacgcggcaggtgcatgggaagaaactgcggaatgaaacaaccgcgagctaagagatgggg

SEQ ID NO: 47776 - DNA, 120 bp, synthetic construct; identical to SEQ ID NO: 13410
  source 1..120: mol_type = other DNA

SEQ ID NO: 47777 - DNA, 120 bp, synthetic construct
  source 1..120: mol_type = other DNA
catcattgcactctttcaaaatttgattctcagacgtacccattctttttttttttcctccgggaagatgagatatactcattcttgaaaatacctccgggcttgccttctgcacacttc

SEQ ID NO: 47778 - DNA, 120 bp, synthetic construct
  source 1..120: mol_type = other DNA
ggggagggattgaggtttgcatcaaaacaaatacccctgcctttgcaaaggccataactaagtaatccagaaaaagaaatgcaggcggagaatagcagcctccctctgccaagtaagagg

SEQ ID NO: 47779 - DNA, 120 bp, synthetic construct
  source 1..120: mol_type = other DNA
caaacaataacagggctgccgggcctctcagattgcgacggtcctcctcggcctggcgggcaaacccctggtttagcacttctcacttccacgactgacagccttcaattggattttctc

SEQ ID NO: 47780 - DNA, 120 bp, synthetic construct
  source 1..120: mol_type = other DNA
gagccccagttttcactaggatgccatgggctctaaaatatacagctatgagttctcaatgtttcgagatccaaaagtctcagacctcaatgctttgtgcatcttttatttcagggattc

SEQ ID NO: 47781 - DNA, 120 bp, synthetic construct; identical to SEQ ID NO: 13411
  source 1..120: mol_type = other DNA

SEQ ID NO: 47782 - DNA, 120 bp, synthetic construct
  source 1..120: mol_type = other DNA
aatccagggaagcgtgtcaccgtcgtggaaagcacgctcccagcccgaacgcaaagtgtccccggagcccagcagctacctgctccctggacggtggctctagacttttgagaagctcaa

SEQ ID NO: 47783 - DNA, 120 bp, synthetic construct; identical to SEQ ID NO: 13412
  source 1..120: mol_type = other DNA

SEQ ID NO: 47784 - DNA, 120 bp, synthetic construct
  source 1..120: mol_type = other DNA
aaggagaacgccttggatcgagctgagcaggcggaggccgacaagaaggcggcggaagacaggagcaagcaggtctgcgcctccccggccctgcgcccgcgcccagagcgccgggactcg

SEQ ID NO: 47785 - DNA, 120 bp, synthetic construct
  source 1..120: mol_type = other DNA
caggcttagtctaacttagtctggtctgaggacgcttatttcccttctctggttcccatggcccgcgaaatcaagtcctagaggcgctttattctcaggactgggaatcagtttggggga

SEQ ID NO: 47786 - DNA, 120 bp, synthetic construct; identical to SEQ ID NO: 13413
  source 1..120: mol_type = other DNA

SEQ ID NO: 47787 - DNA, 120 bp, synthetic construct
  source 1..120: mol_type = other DNA
ctcgggtaaagaggaagttacctcgggtcctttgcactccaactcggcggcgccccgagcccgaggggccccagccaacccgacgcccgtgtgttgtgtgtgtctaacacccggtccgtg

SEQ ID NO: 47788 - DNA, 120 bp, synthetic construct
  source 1..120: mol_type = other DNA
ggaggacagcctcctggccgccgaagaggccgccgccaaggtacccggggcgcgcggcacggcgtggcgcacgaatggctaactctttctctttctctctctccctccctgtctttccct

SEQ ID NO: 47789 - DNA, 120 bp, synthetic construct
  source 1..120: mol_type = other DNA
agatgagctggtgtcactgcaaaagaaactcaagggcaccgaagatgaactggacaaatactctgaggctctcaaagatgcccaggagaagctggagctggcagagaaaaaggccaccga

SEQ ID NO: 47790 - DNA, 120 bp, synthetic construct; identical to SEQ ID NO: 13414
  source 1..120: mol_type = other DNA

SEQ ID NO: 47791 - DNA, 120 bp, synthetic construct
  source 1..120: mol_type = other DNA
gaggtgtcatcaccaaggtttgtgtagagaatgccaggttttcttcactttctttccttttgccgtttccagtgggtgggaagttctgggtttggtggtgggtctagtcagggttcagag

SEQ ID NO: 47792 - DNA, 120 bp, synthetic construct
  source 1..120: mol_type = other DNA
ccccttaagatctgcctgggaagatgatacttgcttgggtctgcagtctgaaggcactagatccagaaagtaagctgtgagttatatatagctcagtgctttatatggtatagtgagcta

SEQ ID NO: 47793 - DNA, 120 bp, synthetic construct; identical to SEQ ID NO: 13415
  source 1..120: mol_type = other DNA

SEQ ID NO: 47794 - DNA, 120 bp, synthetic construct
  source 1..120: mol_type = other DNA
caaataactgaagggtctcaggtcttgaaattagtgaagtcttttgtagcatgaaaggcttgagatgtatatccaggtgtgctttgtaaatgagaactccagagacgacatttaggatct

SEQ ID NO: 47795 - DNA, 120 bp, synthetic construct
  source 1..120: mol_type = other DNA
catatatgactctgagcctactttgtataatgcagatcagatgcctgctctatatatggctaaatggaagatgcctgcctcccgcaaattctccagcaggacgtttatttagctttttca

SEQ ID NO: 47796 - DNA, 120 bp, synthetic construct
  source 1..120: mol_type = other DNA
agggaaaaaaataggataataattattgtaactatgtagtgctaacatgtctttattgaaaagtcttgttgaagggagcgctggaatggggtggggcagaaatgggaaagaagttattta

SEQ ID NO: 47797 - DNA, 120 bp, synthetic construct; identical to SEQ ID NO: 13416
  source 1..120: mol_type = other DNA

SEQ ID NO: 47798 - DNA, 120 bp, synthetic construct
  source 1..120: mol_type = other DNA
actgtactgaatactgtcaacaattgtaacacaaatcaccaggcgataggaattttttagttctattgtaatcttatgaggctactctcatatatgcagcccctcattgaccaaaacatc

SEQ ID NO: 47799 - DNA, 120 bp, synthetic construct
  source 1..120: mol_type = other DNA
gatgtcactagaaaaagggagaagtccggtaagggagaagtcagcttcctgaggtggaatcgtattacctttgggattaggacatttcattgtcattattcaccagtgtaaaacactttt

SEQ ID NO: 47800 - DNA, 120 bp, synthetic construct
  source 1..120: mol_type = other DNA
tttcgaattttgtgttgtctttccacctaagtcaaaagtgaggctgaaggggatcgaagactccatttttttctggcccccaatctcttccccagtaactgtgatatatctgatatttat

SEQ ID NO: 47801 - DNA, 120 bp, synthetic construct; identical to SEQ ID NO: 13417
  source 1..120: mol_type = other DNA

SEQ ID NO: 47802 - DNA, 120 bp, synthetic construct
  source 1..120: mol_type = other DNA
ggttcccccattctcaatgttggaggcccacagtctctgcacttaggggaccagctgtaacctccccacctgaccagatgaaccgcggggaaacaaagcgagaagctcccacctacagga

SEQ ID NO: 47803 - DNA, 120 bp, synthetic construct
  source 1..120: mol_type = other DNA
gcatgttttctttattattcccacacataagggagctggctttaagagctttctgtgacaaacctgaggagaaaaagccctgagacttagaaggcatttaagaatacagctcaaggggga

SEQ ID NO: 47804 - DNA, 120 bp, synthetic construct
  source 1..120: mol_type = other DNA
ctggattccaggagatctcagaggctggtctgacaccaaagaaggctgtaaagagaagagaccatttggatgactgttttcatggaaagtgagccccagggaggctggcctgagattaca

SEQ ID NO: 47805 - DNA, 120 bp, synthetic construct; identical to SEQ ID NO: 13418
  source 1..120: mol_type = other DNA

SEQ ID NO: 47806 - DNA, 120 bp, synthetic construct
  source 1..120: mol_type = other DNA
caacctaggaaaactgcatttagaacaggaggtctaaccactgtgctctacacgcgggtggttttcacttcgtgaagttttggggaatgggggtagtgcttgggttataatcttgcggtt

SEQ ID NO: 47807 - DNA, 120 bp, synthetic construct
  source 1..120: mol_type = other DNA
tgcccttagcagccagctccgttaccccgggtcaccaccgcgccgcggaggggccctagaagtggaagccagagccctagtgcagtggcctcccggagcgcccagctcaccaggtacccc

SEQ ID NO: 47808 - DNA, 120 bp, synthetic construct
  source 1..120: mol_type = other DNA
gcgcagccctggaggctgcgacttccggactgctcctggccgcagggggcgccgccatcgcacagagaggcctgggcggggcggaccggcgctgggcagccaggacagccgcggcagccg

SEQ ID NO: 47809 - DNA, 120 bp, synthetic construct
  source 1..120: mol_type = other DNA
gcaggcggacgccgctgaggagcgcgcgggcaccctgcagcgcgagctggaccacgagaggaagctgagggagaccgtaagggatacacccatcaccccgcagcccccagaggcgcatcc

SEQ ID NO: 47810 - DNA, 120 bp, synthetic construct; identical to SEQ ID NO: 13419
  source 1..120: mol_type = other DNA

SEQ ID NO: 47811 - DNA, 120 bp, synthetic construct
  source 1..120: mol_type = other DNA
tttgagaaggggcgccgacaggtcaagtgggagaggcactgtggacttggggcccggggatgctacactccgccgttcccgtcgaccctgtggtttcccggcggcctgtgtctccgaggc

SEQ ID NO: 47812 - DNA, 120 bp, synthetic construct
  source 1..120: mol_type = other DNA
tagataatgctttgttaccaagtcttggaaaaagttggcgaaatgtcaacagttattgggtgtattctcttgcgggcttcccctcccccttgttaaatgtaatacctggcttccttcctt

SEQ ID NO: 47813 - DNA, 120 bp, synthetic construct
  source 1..120: mol_type = other DNA
gagttttatgacaattgatagtatgatgtcctgctgtgcttaatatacggggttgttctgagttgagtaaatcgttctagttaagtgtttgtaaatggctgtatggctggccacagaaac

SEQ ID NO: 47814 - DNA, 120 bp, synthetic construct; identical to SEQ ID NO: 13420
  source 1..120: mol_type = other DNA

SEQ ID NO: 47815 - DNA, 120 bp, synthetic construct
  source 1..120: mol_type = other DNA
tcctgtctccactacttactagcagtgggcaagttacttaatctctgtgtttcagttccctgtgtgtaaagtgtggatagtaacagcatctacctgtcggttaaaggagttactatgtaa

SEQ ID NO: 47816 - DNA, 120 bp, synthetic construct
  source 1..120: mol_type = other DNA
ttaaagatggcctgctcatttcatgacatcataaaacacttcatttactgcttttaatcaacatttgttggggcggggggcttgaatgaagaggaagtgggcgggctggtaggcatgttt

SEQ ID NO: 47817 - DNA, 120 bp, synthetic construct
  source 1..120: mol_type = other DNA
gacacaaaagataaattttatgaagggcacattattacttttattcttaccttctcttttgcacgtcgtttttataacagaactcttcctgtgccagttggctaaagatagtactttcgt

SEQ ID NO: 47818 - DNA, 120 bp, synthetic construct; identical to SEQ ID NO: 13421
  source 1..120: mol_type = other DNA

SEQ ID NO: 47819 - DNA, 120 bp, synthetic construct
  source 1..120: mol_type = other DNA
ggccctattaaaccagcccttaccttggaaaaagcagccatcccttacttcctcctagtctgtgtttccaaggtgtgtggatccttcaaaatgttggaatgaggctactttgcttgacat

SEQ ID NO: 47820 - DNA, 120 bp, synthetic construct
  source 1..120: mol_type = other DNA
tgtggccagaaggttcttaattagtaacatgattaaatcatgggaaataaccaatttacaaaaattcccagcactttccctctttacacttggtaagtatttccgggataggaaaaccga

SEQ ID NO: 47821 - DNA, 120 bp, synthetic construct; identical to SEQ ID NO: 13422
  source 1..120: mol_type = other DNA

SEQ ID NO: 47822 - DNA, 120 bp, synthetic construct
  source 1..120: mol_type = other DNA
ctttgatcatcccaagttccactccagttcagtcaggactttggaaacatattccagaggattgatttctagattataatattctcccaccagtattttttcttaataaccttaactgga

SEQ ID NO: 47823 - DNA, 120 bp, synthetic construct
  source 1..120: mol_type = other DNA
aaatctgatttgggataatattatactatggtggggtgggcatgcccttgatttctatatagtaccatgttggggtgggggaatggggtgcatgcccttagaggagggtcatatgcattg

SEQ ID NO: 47824 - DNA, 120 bp, synthetic construct
  source 1..120: mol_type = other DNA
cagtctcttttttgagtagttcattgttagaacacaatagcacttttgaaataaaagaaactagcatcccagattgaaagacttcactggcagtcagcacatgggctgctgttagaagaa

SEQ ID NO: 47825 - DNA, 120 bp, synthetic construct
  source 1..120: mol_type = other DNA
atctctactaaaaatacagcaattagccgagcatggtgtcacgtgcctgtaatcctagctactggggaggctgaggcaggagaatcgcttgaacccgggaggtggaggttgcagtgagcc

SEQ ID NO: 47826 - DNA, 120 bp, synthetic construct; identical to SEQ ID NO: 13423
  source 1..120: mol_type = other DNA

SEQ ID NO: 47827 - DNA, 120 bp, synthetic construct
  source 1..120: mol_type = other DNA
agaaaaaagtggccctgattaaattataaaattaagcatatcttgaattctaacgagccaaacaaaaattctactaggccagtataatagggcctgcagagcctgtcatgggttcagggt

SEQ ID NO: 47828 - DNA, 120 bp, synthetic construct
  source 1..120: mol_type = other DNA
ctgaaacctctggggcagtaggcattgacttctgggctagggagtaaatgttccgtgtccttatgtgagcttcctattacccattagcattgttttatgaagttttcaattttatatcct

SEQ ID NO: 47829 - DNA, 120 bp, synthetic construct
  source 1..120: mol_type = other DNA
ccggagaacatctcaatctgatctcaggagagataaagacacaggagtgagaactgccagttccaaggtttccgtgatgttccgggaagccaggagaagtgacatagtggagagccggca

SEQ ID NO: 47830 - DNA, 120 bp, synthetic construct; identical to SEQ ID NO: 13424
  source 1..120: mol_type = other DNA

SEQ ID NO: 47831 - DNA, 120 bp, synthetic construct
  source 1..120: mol_type = other DNA
ctgcctcagcctcctgagtagctgggattacaggcatgtgccaccatgcctggctaatttttgtgttttttgtagagacggggtttcaccatgttggtcaggctggtctcgaactcctga

SEQ ID NO: 47832 - DNA, 120 bp, synthetic construct
  source 1..120: mol_type = other DNA
ttaatgctcatctctgagttgattctgacactcagccacttgtgggaattgctgatctggacaatgcctagggatccttctagctaaaaaattgagaccctattttttggatttacaggg

SEQ ID NO: 47833 - DNA, 120 bp, synthetic construct
  source 1..120: mol_type = other DNA
tgtatgaagccctgctggctggtattcctgtaggacatattctctgatgtccaggagtctgaggttctacagaatgcccctggggaaacaagagtggcatttagacaacagcattctgta

SEQ ID NO: 47834 - DNA, 120 bp, synthetic construct
  source 1..120: mol_type = other DNA
gaggtgctgtttccttcctttctggtgactcggctgtgtggggagctggggatagagacctgtcacccagagggttctttccccaaagcataaacagtcgtctttctgtgagtacaaagt

SEQ ID NO: 47835 - DNA, 120 bp, synthetic construct; identical to SEQ ID NO: 13425
  source 1..120: mol_type = other DNA

SEQ ID NO: 47836 - DNA, 120 bp, synthetic construct
  source 1..120: mol_type = other DNA
tttgtttgccctttgtttttgcttccgctttgagtctcccccccaccctcaaaaggaatagaattttactggaaaatgaaaatatagaaaagtgaagaaatcttacctgacccaaaagta

SEQ ID NO: 47837 - DNA, 120 bp, synthetic construct
  source 1..120: mol_type = other DNA
acacacacaccagaaacaacagtcatctgccagtaattcctagctgggtccatttaccagctgtgcactgataatgatttactttgtaggcagtacagttgtaaatgctcttcctctgat

SEQ ID NO: 47838 - DNA, 120 bp, synthetic construct
  source 1..120: mol_type = other DNA
cctctcttcccagataaaacttggcatttaaaatcttacaaatctaggtgagcaaagagctgaaggttctcagattcctttgattaaagactatgaccacagtttctaactacatttgca

SEQ ID NO: 47839 - DNA, 120 bp, synthetic construct; identical to SEQ ID NO: 13426
  source 1..120: mol_type = other DNA

SEQ ID NO: 47840 - DNA, 120 bp, synthetic construct
  source 1..120: mol_type = other DNA
tgcacaatatttaaacagccaccagtgcaagtgtgtataatggaccatcatagtcttataagtgttctgaggctcatagcaacaatttcttatgacaggaaaaaaatcattgcctctcaa

SEQ ID NO: 47841 - DNA, 120 bp, synthetic construct
  source 1..120: mol_type = other DNA
cttacatcaaaaacacttgggaaatttgtcttggctctgttccaatgaggccagttattctaaaaggggttactggattgtgttgggccttcatgtggtgtgtattttagaaccactgaa

SEQ ID NO: 47842 - DNA, 120 bp, synthetic construct; identical to SEQ ID NO: 13427
  source 1..120: mol_type = other DNA

SEQ ID NO: 47843 - DNA, 120 bp, synthetic construct
  source 1..120: mol_type = other DNA
aaaaaattagccgggcgttgtggcgggcgcctgtagtcccaactactcgggaggctgaggcaggagaatggcgtgaatccaggaggcggagtttgcagtgagctgagatcgtgccactgc

SEQ ID NO: 47844 - DNA, 120 bp, synthetic construct
  source 1..120: mol_type = other DNA
gagaattgtgtgtatagatttgtgtatacacaaatatggatgttcactgtataaatcaatgtgtaaatgtgtccgagaactccagagttgatgagggcttgtaatgcacttaaaggtagc

SEQ ID NO: 47845 - DNA, 120 bp, synthetic construct
  source 1..120: mol_type = other DNA
ccgacgtagcttctctgaacagacgcatccagctggttgaggaagagttggatcgtgcccaggagcgtctggcaacagctttgcagaagctggaggaagctgagaaggcagcagatgaga

SEQ ID NO: 47846 - DNA, 120 bp, synthetic construct; identical to SEQ ID NO: 13428
  source 1..120: mol_type = other DNA

SEQ ID NO: 47847 - DNA, 120 bp, synthetic construct
  source 1..120: mol_type = other DNA
aagtgtaactttattttataatatacaaggaggcttaggtgtaaataaaggaactgtggactatcagttgtcaaaatagcttaacaaataggtggaagaaaaaacacaaagcagaaacat

SEQ ID NO: 47848 - DNA, 120 bp, synthetic construct; identical to SEQ ID NO: 5996
  source 1..120: mol_type = other DNA

SEQ ID NO: 47849 - DNA, 120 bp, synthetic construct
  source 1..120: mol_type = other DNA
tgacctgggcaagtgaatgcagtcagtcatcttgtccatttcttactctttgaagtgaccctaccactaggtaccaggtataaagagtgatttcagactttaggattaaagaagattttt

SEQ ID NO: 47850 - DNA, 120 bp, synthetic construct; identical to SEQ ID NO: 13429
  source 1..120: mol_type = other DNA

SEQ ID NO: 47851 - DNA, 120 bp, synthetic construct
  source 1..120: mol_type = other DNA
tgtggtggctcacacctgtaatcccagcactttagggggccgaggcgggcagatcacttgaggccagggattcgagaccagcctggctaacgtggcataacccctaaatctactaaaaaa

SEQ ID NO: 47852 - DNA, 120 bp, synthetic construct
  source 1..120: mol_type = other DNA
gcactccaacctgggtgacagagcgagactctgtctcaaaaaataaaaataaaaaaatagtggttcacttatactgcctacttaaattttgataaatgaattccattttacatgacttgt

SEQ ID NO: 47853 - DNA, 120 bp, synthetic construct
  source 1..120: mol_type = other DNA
agtgtcaggcctgtctcccagcattgctgtcatgaaagggttccattataggtaaaacttaatttgatgcattcagttgaaccataagaaattgccattattacttgtctgaaatggtca

SEQ ID NO: 47854 - DNA, 120 bp, synthetic construct; identical to SEQ ID NO: 13430
  source 1..120: mol_type = other DNA

SEQ ID NO: 47855 - DNA, 120 bp, synthetic construct
  source 1..120: mol_type = other DNA
gagttcattcacagtgaacagagagaaatgtgtctcttttttccacctttagctctggaaattgttgtttcctggtttggaaaataaaagtagctctgtgctctattttggtctaccact

SEQ ID NO: 47856 - DNA, 120 bp, synthetic construct
  source 1..120: mol_type = other DNA
tttcttttcagaggcatgaaagtcattgagagtcgagcccaaaaagatgaagaaaaaatggaaattcaggagatccaactgaaagaggccaagcacattgctgaagatgccgaccgcaaa

SEQ ID NO: 47857 - DNA, 120 bp, synthetic construct
  source 1..120: mol_type = other DNA
aatgggtggttttgagaagcagagttcctttgtgtccagaaaacggttctaattttaatcctgctaggggatcccaggctttatcaggaagccaatcagtagcactgcgaagaaggacca

SEQ ID NO: 47858 - DNA, 120 bp, synthetic construct
  source 1..120: mol_type = other DNA
cagagtgacctggcacatccagattgggcagcttagagaccacagacagtttctcagtggattcacagaggcctctctcctcaagggtggtagaaaactattatcaacgcaggttttcag

SEQ ID NO: 47859 - DNA, 120 bp, synthetic construct; identical to SEQ ID NO: 13431
  source 1..120: mol_type = other DNA

SEQ ID NO: 47860 - DNA, 120 bp, synthetic construct
  source 1..120: mol_type = other DNA
catcaaattgatggagttcttaggtttactttgttttcctggcagcccccacctttttagtacatgtctcatcctactgctgtttttgagattgtgaatgtgtattttatccctccttcc

SEQ ID NO: 47861 - DNA, 120 bp, synthetic construct
  source 1..120: mol_type = other DNA
tagagagttgcttctctctggtctaccagaaagaggatcatattgtttgtagacaaaacccttagggcctgatgggatctgatctctacccccatgcccttctgttacacaaagcttgca

SEQ ID NO: 47862 - DNA, 120 bp, synthetic construct
  source 1..120: mol_type = other DNA
ggcgccaggaggccacgaatggggtgctgcagagcagtgactaaacagcatgaccttctggcagctgcacattacctgtttcagctccgggctccttttgtgctcatttgatgtggatga

SEQ ID NO: 47863 - DNA, 120 bp, synthetic construct; identical to SEQ ID NO: 13432
  source 1..120: mol_type = other DNA

SEQ ID NO: 47864 - DNA, 120 bp, synthetic construct
  source 1..120: mol_type = other DNA
tatcttgccttaagtgctttcccttggtcctttatgctcctttgttttcccttcataaatgctctttgggcagccaaaaaaggagccaaattatcgcacttcaaagttgttggatttggt

SEQ ID NO: 47865 - DNA, 120 bp, synthetic construct
  source 1..120: mol_type = other DNA
cctggaaaacctaaacattttaatacctgatgatttggctactttaaggcagcccttcgtctctaggactcagttttcattttttcccatccctctcctttttctctcctccttcctttg

SEQ ID NO: 47866 - DNA, 120 bp, synthetic construct; identical to SEQ ID NO: 13433
  source 1..120: mol_type = other DNA

SEQ ID NO: 47867 - DNA, 120 bp, synthetic construct
  source 1..120: mol_type = other DNA
taaaccaagtgccaagtggataagttatcttgttgttatcccatgtaaaacaataggcaagaaagcagagaatgtattgcagtgtgccatttgatatcagaggttccattacctcctaag

SEQ ID NO: 47868 - DNA, 120 bp, synthetic construct
  source 1..120: mol_type = other DNA
cagatatgaggaagagatcaaggtcctttccgacaagctgaaggaggtaatatgagagttgtggatgaagccaactggattttaaatgagtttgttttcatggaaccggtcagggccttt

SEQ ID NO: 47869 - DNA, 120 bp, synthetic construct
  source 1..120: mol_type = other DNA
ctcacagaggtgactgaaactgacaagtagtttctgatccattttataggtgatgtgcttcattttcatcctctagttttccctatgtttgtagctacaggaaacataaaacttcccaac

SEQ ID NO: 47870 - DNA, 120 bp, synthetic construct; identical to SEQ ID NO: 13434
  source 1..120: mol_type = other DNA

SEQ ID NO: 47871 - DNA, 120 bp, synthetic construct
  source 1..120: mol_type = other DNA
agcttgacttcatgctcattacaagtgtggcaggtttatttttcactgtgagtgaggtgcttattggtgagaatgactctagtatattttatatctttagtgttacttcctaattaaatt

SEQ ID NO: 47872 - DNA, 120 bp, synthetic construct
  source 1..120: mol_type = other DNA
tatcctgaaggaggagggaaaaattatacttaagcatttcttccctaaggcacttaggttttattttagtaataaccactctatctcacagatatcctaaatgttgagctttgaagcttg

SEQ ID NO: 47873 - DNA, 120 bp, synthetic construct
  source 1..120: mol_type = other DNA
aaatggttgcaaaatgatctgccaaagtgcagcaaagtatgaaacctgcagcattacaaaaactaagttgcagacttgccatataaagtgtggcgcccattgcttttcaagcctcctgga

SEQ ID NO: 47874 - DNA, 120 bp, synthetic construct; identical to SEQ ID NO: 13435
  source 1..120: mol_type = other DNA

SEQ ID NO: 47875 - DNA, 120 bp, synthetic construct
  source 1..120: mol_type = other DNA
tctttttcattttattttctaatgggttttgttctctttgtttttgtttcaatttacttaaaacaaaacgcacgcctcctgcattggccacctgctgcggcaccaaccccttcatgcatt

SEQ ID NO: 47876 - DNA, 120 bp, synthetic construct
  source 1..120: mol_type = other DNA
tacgctcagaaactgaagtacaaagccatcagcgaggagctggaccacgctctcaacgatatgacttccatgtaaacgttcatccactctgcctgcttacaccctgccctcatgctaatg

SEQ ID NO: 47877 - DNA, 120 bp, synthetic construct
  source 1..120: mol_type = other DNA
ccaattagattaagtctgtctatacaaaccattttcttttcagaatccgtttattttgtaaacgctgaactagagcagtgaactagaatgagtgaccttgagcactgtccttttgggaaa

SEQ ID NO: 47878 - DNA, 120 bp, synthetic construct; identical to SEQ ID NO: 13436
  source 1..120: mol_type = other DNA

SEQ ID NO: 47879 - DNA, 120 bp, synthetic construct
  source 1..120: mol_type = other DNA
tgtctctactaaaaatacaaaaaaaattagccgggcgtggtggtggatgcctgtagtcccagctactcaggaggctgaggcaggagaatggcatgaacccgggaggtggagcttgcagtc

SEQ ID NO: 47880 - DNA, 120 bp, synthetic construct
  source 1..120: mol_type = other DNA
tttttatgaaaggaattaaaatacccacgataaatatttaccacaacctgtgtcaaataaatgggaaattaaacacagattgtacaatgtgagcttgggagttaatggcccagattttac

SEQ ID NO: 47881 - DNA, 120 bp, synthetic construct
  source 1..120: mol_type = other DNA
attctaacctggaatgtttcagagttcttcattctaatatcaccctgaattccattgaagctggaaatgtcattttccaagcccacctgtcattcatttacccatgcagaaaaaatggta

SEQ ID NO: 47882 - DNA, 120 bp, synthetic construct
  source 1..120: mol_type = other DNA
cctcatttgtaaatgagggggtggagcagatcatctgtctctaaggtctttttcagtgctaaaatgtggtgattctttgggaaaaactttttgcatcaagtatgattaaatattctgaaa

SEQ ID NO: 47883 - DNA, 120 bp, synthetic construct; identical to SEQ ID NO: 13437
  source 1..120: mol_type = other DNA

SEQ ID NO: 47884 - DNA, 120 bp, synthetic construct
  source 1..120: mol_type = other DNA
ggttctctctcttagcatcctgccttagagccaggcacacactgtgctttctattgtacagaagctcttcgtttcagtgtcaaataaacactgtgtaagctatttctgtttgctattctt

SEQ ID NO: 47885 - DNA, 120 bp, synthetic construct
  source 1..120: mol_type = other DNA
agaattatatcaggagtttctaaagcagtagttccttgttgaacttcaaaaaaatacccaggcctgcattccctctcagagttctgattttcaaaggttagaatgaggtctggacatctg

SEQ ID NO: 47886 - DNA, 120 bp, synthetic construct; identical to SEQ ID NO: 13438
  source 1..120: mol_type = other DNA

SEQ ID NO: 47887 - DNA, 120 bp, synthetic construct
  source 1..120: mol_type = other DNA
gccacctttattttgatcatgaaaatgacatcttaggttttctaaatatgattactctgtttagtcgtgatttgttttgtgctttttagcacatactctttgggagggattgtacataat

SEQ ID NO: 47888 - DNA, 120 bp, synthetic construct
  source 1..120: mol_type = other DNA
aagatagttggtggaaattgttcagaagacaattgtatttcatttgggcttctgttttatttcacaaacagcaattaagtgatttttttaaaaaaatacattgcaaaaaatagaacttta

SEQ ID NO: 47889 - DNA, 120 bp, synthetic construct
  source 1..120: mol_type = other DNA
tagcccgagagggctgatataccaccatactcaaataaatttggacaaactcagaagatagtgtcattctcactctacagagacttcaaagcatagaggaaatacttttttttaaagaaa

SEQ ID NO: 47890 - DNA, 120 bp, synthetic construct
  source 1..120: mol_type = other DNA
ggcctgcttctgactatgattccttcctcattcttttttaaattcagaataagagaagtgtacccttctctgagtaaatcctgcttcctgatgtagacaaaatgccaagtctgaaagttc

SEQ ID NO: 47891 - DNA, 120 bp, synthetic construct; identical to SEQ ID NO: 13439
  source 1..120: mol_type = other DNA

SEQ ID NO: 47892 - DNA, 120 bp, synthetic construct
  source 1..120: mol_type = other DNA
accaaaagcatcactgagtttgggcacttgaagtttcagacagctgggagtctccatagaaccggaagggaaaacacttccaaggatatgagcatgtcttgtccctgcctttgggccacc

SEQ ID NO: 47893 - DNA, 120 bp, synthetic construct
  source 1..120: mol_type = other DNA
gttcttccattctagcctggccaaacatttgggctcagcaaactgagacaagctccccacccatggcgacacttcctatgtccatagtgtgaatgtagtaatgggatatatgtcttggaa

SEQ ID NO: 47894 - DNA, 120 bp, synthetic construct
  source 1..120: mol_type = other DNA
gaagcgagtccgaactaataggcatgtgtatttggaggcaacaaggaagagagaaccattctgactgggagctccctggaggaggtagcggacgtttgactggggtttggcatattcaaa

SEQ ID NO: 47895 - DNA, 120 bp, synthetic construct; identical to SEQ ID NO: 13440
  source 1..120: mol_type = other DNA

SEQ ID NO: 47896 - DNA, 120 bp, synthetic construct
  source 1..120: mol_type = other DNA
cctgcacttgttttcccccgtaagcagatcacgtgtcagtgtgtaaaatgtatatcacgctggtcttcatgtaggtgttgcaagtttcgttcattttatacacatccattagcaccacac

SEQ ID NO: 47897 - DNA, 120 bp, synthetic construct
  source 1..120: mol_type = other DNA
ttctggctaacacggtgaaaccccatctctactaaaaaaaatacaaaaaaaattagccaggcgtggtggcgggcgcctgtagtcccagctactagggaggctgaggcaggagattggcat

SEQ ID NO: 47898 - DNA, 120 bp, synthetic construct; identical to SEQ ID NO: 13441
  source 1..120: mol_type = other DNA

SEQ ID NO: 47899 - DNA, 120 bp, synthetic construct
  source 1..120: mol_type = other DNA
ggcaggttgatgtttcacttaagttcaacactgagccctagcaaggggtggatgtcacgctgggctcgcctccagccaggcctgcattcccaaatctattgccagaaaccatgtatggct

SEQ ID NO: 47900 - DNA, 120 bp, synthetic construct
  source 1..120: mol_type = other DNA
tctaccaagctttttagggtctacccttcctggatacaggacaggtgactatggggtaagagtaaactgctcagcaagtgaccagttgctgtcctgcttgaggtctctttgtgttctcta

SEQ ID NO: 47901 - DNA, 120 bp, synthetic construct
  source 1..120: mol_type = other DNA
atgaactaaagctggccctgaatgaggattaaacttaagagtgaaaaaacttgggctgaattctaggcgtggagcccatgtgcagaaaatctaagactgtcctaccttcaactaatagag

SEQ ID NO: 47902 - DNA, 120 bp, synthetic construct
  source 1..120: mol_type = other DNA
tttatggtagaatacttatatcaattcagcactgctccttgaaatagcaggtcctcttgtttgaactgataaataatgaggagcccccccaaaaaatgttttctatttcctgacagccat

SEQ ID NO: 47903 - DNA, 120 bp, synthetic construct; identical to SEQ ID NO: 13442
  source 1..120: mol_type = other DNA

SEQ ID NO: 47904 - DNA, 120 bp, synthetic construct
  source 1..120: mol_type = other DNA
agaaaacctatttatgtcatctttgcttttgtgagtttgtgttaccgcacaactcccagacttttaactgcctgtaccttggaaatgtctgctgttcgtaacttcttcagtttgtataac

SEQ ID NO: 47905 - DNA, 120 bp, synthetic construct
  source 1..120: mol_type = other DNA
ctgctctgtgagaatccgtgccatggctcctttgggtcaaagatgccctcccctccgtcttaggttcttgtctagaaatgagtaatgtcttacaagcatgcctagttctaatcatctcat

SEQ ID NO: 47906 - DNA, 120 bp, synthetic construct
  source 1..120: mol_type = other DNA
tttctaatctcaccacagagaaagtggctcatgccaaagaagaaaaccttagtatgcatcagatgctggatcagactttactggagttaaacaacatgtgaaaacctccttagctgcgac

SEQ ID NO: 47907 - DNA, 120 bp, synthetic construct; identical to SEQ ID NO: 13443
  source 1..120: mol_type = other DNA

SEQ ID NO: 47908 - DNA, 120 bp, synthetic construct
  source 1..120: mol_type = other DNA
ccccctgtggtcttttgttcaacattgtacaatgtagaactctgtccaacactaatttattttgtcttgagttttactacaagatgagactatggatcccgcatgcctgaattcactaaa

SEQ ID NO: 47909 - DNA, 120 bp, synthetic construct
  source 1..120: mol_type = other DNA
cttcatgttaaagatttagacaccacatacaactggtaaaggacgttttcttgagagttttaactatatgtaaacattgtataatgatatggaataaaatgcacattgtaggacattttc

SEQ ID NO: 47910 - DNA, 120 bp, synthetic construct; identical to SEQ ID NO: 13444
  source 1..120: mol_type = other DNA

SEQ ID NO: 47911 - DNA, 120 bp, synthetic construct
  source 1..120: mol_type = other DNA
gtatttctatgagatattagactgtttgtccctatatccctattttactcatggagaaacaaacatagtatgtttagtaaatttttcaaggtcattcactatgtcagaatagcgctggga

SEQ ID NO: 47912 - DNA, 120 bp, synthetic construct
  source 1..120: mol_type = other DNA
aaatctaaaacatctatcatatttgctatttctttactcagtaaattcagcaggctggaggagcagttgagcaataaactttatgcactctcctacccacaagtttagattgtcacctga

SEQ ID NO: 47913 - DNA, 120 bp, synthetic construct; identical to SEQ ID NO: 13445
  source 1..120: mol_type = other DNA

SEQ ID NO: 47914 - DNA, 120 bp, synthetic construct
  source 1..120: mol_type = other DNA
ggccttgctgatggtaattacaatgctagaaaggataactcaatttatttcctgagttaatttgtcataagttcagttgcaattgtaaacatgataaaggtcacagaggcatgactttta

SEQ ID NO: 47915 - DNA, 120 bp, synthetic construct
  source 1..120: mol_type = other DNA
cattggcactgatgaccagttacctaaaatacaagtaagacatctcacgaaggcatttaaggctaaaatgaattccttaaactttgatggcattcatattttgccattatgagaaagaaa

SEQ ID NO: 47916 - DNA, 120 bp, synthetic construct; identical to SEQ ID NO: 13446
  source 1..120: mol_type = other DNA

SEQ ID NO: 47917 - DNA, 120 bp, synthetic construct
  source 1..120: mol_type = other DNA
cccattcttagagcaaagccacaactaaaatagaaatagacaaaaataaaataaaatcattaagcatcaacttattgggtaaattaagtttagatacccatatgatgcaaaagggtcact

SEQ ID NO: 47918 - DNA, 120 bp, synthetic construct
  source 1..120: mol_type = other DNA
attattaagtaaactttaaattagtttgtgtacaaccttatagtgactggaaataagataaatacaagcaccccctcccaccgcagcaaacacacataacagattcttgagacttagacc

SEQ ID NO: 47919 - DNA, 120 bp, synthetic construct
  source 1..120: mol_type = other DNA
ctgtggacaaaacatcacatttttaaaatcttaaagcacttgtaagggtcatacatgtgtgtttactgtccttgttgcttctgtcctggagaatttgcttgaccagagctctctccaggg

SEQ ID NO: 47920 - DNA, 120 bp, synthetic construct; identical to SEQ ID NO: 13447
  source 1..120: mol_type = other DNA

SEQ ID NO: 47921 - DNA, 120 bp, synthetic construct
  source 1..120: mol_type = other DNA
aaaaatggcctggcagagaaagtcaaagttctgatcatatagacatctgttgatgtgcatagcaatcatagagacatagtcacaggtttcaaaatatgagcttatcaatatgcaaagcaa

SEQ ID NO: 47922 - DNA, 120 bp, synthetic construct
  source 1..120: mol_type = other DNA
cagactgtgtgtgtgtgttttataatgtcacagagaggtggtgccaacatctagaagttttatttgcccttactttagaggcaagagctttcctaaggtggcttggttgctctttgagca

SEQ ID NO: 47923 - DNA, 120 bp, synthetic construct
  source 1..120: mol_type = other DNA
aaaagatggcgagtttagcatctcctcacaatcttgggtgcctacaaacttccagtgttttctatcctatccatttgcattctgtcaaccagccatagatttttgcagaaggccaggaaa

SEQ ID NO: 47924 - DNA, 120 bp, synthetic construct
  source 1..120: mol_type = other DNA
gcaaccagggagtattctgattccatttccatgggtcactgggttttcagggatgacaatagtttgaagaatcttgaatttagttatcttttccaatgcatctcatctggaatgatttct

SEQ ID NO: 47925 - DNA, 120 bp, synthetic construct; identical to SEQ ID NO: 13448
  source 1..120: mol_type = other DNA

SEQ ID NO: 47926 - DNA, 120 bp, synthetic construct
  source 1..120: mol_type = other DNA
agcttaaattaaaggctcatgaatatcaggctatagaactgccttcttgtaagacgaagatagcaaatatcattttgatgcaatagatcccccaactgaggttagaatatttgacaccat

SEQ ID NO: 47927 - DNA, 120 bp, synthetic construct
  source 1..120: mol_type = other DNA
gttaatacagaaagataccacatatcttcacctagtttccttcaatggtaacatattgtaaaactatagaacaatattccaactaggaaactggtattgatacaattcacctgtctcatt

SEQ ID NO: 47928 - DNA, 120 bp, synthetic construct
  source 1..120: mol_type = other DNA
gtccagattgacctataattctttttcttatggattttgtaatattactcaaagtatcataagactctgcttatttccctatatttctcacaaccttattatatgaaggattataataag

SEQ ID NO: 47929 - DNA, 120 bp, synthetic construct; identical to SEQ ID NO: 13449
  source 1..120: mol_type = other DNA

SEQ ID NO: 47930 - DNA, 120 bp, synthetic construct
  source 1..120: mol_type = other DNA
aataatgagaaacttgggcattgaattttgtaactgcacatgaatattgattggattctaaaataaatgatcccaaagtttgaatatttagaacctaccatacatctagcaaaatcaaaa

SEQ ID NO: 47931 - DNA, 120 bp, synthetic construct
  source 1..120: mol_type = other DNA
aggcagtaagacacatttaagcatagattcagccagagtactaaggatcagaaatatgtagaaggatttgcgataaatgccacttcaaccattacttgtaactcttccaactatctgcct

SEQ ID NO: 47932 - DNA, 120 bp, synthetic construct
  source 1..120: mol_type = other DNA
atttttacatagatgtagcatctttaatacagaatgatttattacttttaatctcattataaacttacttttctgctttgtgggagacacatcttcagttccttctagtggataaaaaat

SEQ ID NO: 47933 - DNA, 120 bp, synthetic construct; identical to SEQ ID NO: 13450
  source 1..120: mol_type = other DNA

SEQ ID NO: 47934 - DNA, 120 bp, synthetic construct
  source 1..120: mol_type = other DNA
catgcatccctttcctgagaagggatctttgatgctcagaattacaatttggtaagggtaaaatctggctaaagatgaacattttagtcaaaataatcccaaatttggagggacatatgt

SEQ ID NO: 47935 - DNA, 120 bp, synthetic construct
  source 1..120: mol_type = other DNA
tttatgtagtgttgcatagcttgaaactatttctttgaatccctttcttccgattagaagttcttaactggtatccacgaatggggttttgggggtttttctataaaacattgaaataat

SEQ ID NO: 47936 - DNA, 120 bp, synthetic construct
  source 1..120: mol_type = other DNA
cctcagagtgtaatctatataccactagtttcagcatcaattgatttatttatataaatgcagatttttaggttctaactcagatatttaattctagggagacctacagttgatctgtat

SEQ ID NO: 47937 - DNA, 120 bp, synthetic construct; identical to SEQ ID NO: 13451
  source 1..120: mol_type = other DNA

SEQ ID NO: 47938 - DNA, 120 bp, synthetic construct
  source 1..120: mol_type = other DNA
gcacttaaacaaatttacaagaaaaaagcaaacaacctcattacaaagtggtcaaaggacatgaacaggtacttttcaaatgaagacatacattcaatcaacaagcgtatgaaaaaaagc

SEQ ID NO: 47939 - DNA, 120 bp, synthetic construct
  source 1..120: mol_type = other DNA
gagaagagaacacttgtagactgttggtgggtgtgcaaattagttcaactattgtggaaagcagtgtgatgattcctcaaagagctaaaaacagaactatcattcaacccagcaatccca

SEQ ID NO: 47940 - DNA, 120 bp, synthetic construct; identical to SEQ ID NO: 13452
  source 1..120: mol_type = other DNA

SEQ ID NO: 47941 - DNA, 120 bp, synthetic construct
  source 1..120: mol_type = other DNA
ggaacctttcagaaaaaaaatcaagttagctgaagccctcattctacagatggagaaattttgtcctggaaatactttatgaagttcgtacatctggagatcgcaggttttcctgactgt

SEQ ID NO: 47942 - DNA, 120 bp, synthetic construct
  source 1..120: mol_type = other DNA
gtgctgctaatataggtgactcatctcaagtcttcttaataaaatcatggcattcttgtaattcttaatggaatagtgattttgaagtattattcctgtagattggcaaataaatgcatc

SEQ ID NO: 47943 - DNA, 120 bp, synthetic construct
  source 1..120: mol_type = other DNA
aaaaaaaaaagacagacaaaaaccttatagctttgagagaaaacttgtaaatgatccaaagacagcaaactcacctttagctttctttgaagctggtacatcttcaacatcttctagagt

SEQ ID NO: 47944 - DNA, 120 bp, synthetic construct; identical to SEQ ID NO: 13453
  source 1..120: mol_type = other DNA

SEQ ID NO: 47945 - DNA, 120 bp, synthetic construct
  source 1..120: mol_type = other DNA
tacagcctagataaagagatcagtgtctacccacacaatttattagcagattgattagattttagcctttttgacaattctaaaaagcccagaaataaacccatgcacatacatgagtca

SEQ ID NO: 47946 - DNA, 120 bp, synthetic construct
  source 1..120: mol_type = other DNA
accaccccaaaatcaattcaaaatggatttaaagacttaaatgtaaaactgaaacacttttaaaagtaagcactggggaagagcttcttaacattggtattggcaatgattttatgaatc

SEQ ID NO: 47947 - DNA, 120 bp, synthetic construct
  source 1..120: mol_type = other DNA
agaaaatatttgcaagccatatatccaaaggaggttgatacctaaaatatataagacattgatacaactcaataacaaaaaacaaataaatgggcaaaggatctgaacagacacttttcc

SEQ ID NO: 47948 - DNA, 120 bp, synthetic construct
  source 1..120: mol_type = other DNA
aagtcaaatgagatgtgctggtgaggatttaagagaaaagggaactcttgttcacttttgatgggaatgtaaattggtattgccattatagaaagcagtatggaggttcctcaaaaattt

SEQ ID NO: 47949 - DNA, 120 bp, synthetic construct; identical to SEQ ID NO: 13454
  source 1..120: mol_type = other DNA

SEQ ID NO: 47950 - DNA, 120 bp, synthetic construct
  source 1..120: mol_type = other DNA
aattagtggggaaaggaagacactacatttgaactaaagctcaaatacatacacaatgactcttaagttgtattgtgtaaatcacttggtcttttctgcattcaacttacaagcacatat

SEQ ID NO: 47951 - DNA, 120 bp, synthetic construct
  source 1..120: mol_type = other DNA
agattttgcatactaactgttcactaataaatgaaaaaggggtaagatagggtcagtatgcaaatttcgtctaacaggaaagcaatgtgacctttatagaaaaatgctattatgtagaag

SEQ ID NO: 47952 - DNA, 120 bp, synthetic construct; identical to SEQ ID NO: 13455
  source 1..120: mol_type = other DNA

SEQ ID NO: 47953 - DNA, 120 bp, synthetic construct
  source 1..120: mol_type = other DNA
ttaccactagaaaaataaatacaaatggaaggaataaagacctcagtgtcttcagattctatattctgatccagcatcaactggctataagtgacaaaagctggcaagagctgagtcaca

SEQ ID NO: 47954 - DNA, 120 bp, synthetic construct
  source 1..120: mol_type = other DNA
aattcaagaaaggaataaggcacttactgtctacttattcttacaacttgcacgttgagtgagtggtagttttgataaaacaaatatttgactctgagaaggtagaatcatggcagtgaa

SEQ ID NO: 47955 - DNA, 120 bp, synthetic construct
  source 1..120: mol_type = other DNA
gatgccaaaattaaagtgagggcaacaatatgaaaaaaggctagagacagcgaaggacagagatattcagggagtagaggagacgttctggaaaacttggataagattatcatgtggaac

SEQ ID NO: 47956 - DNA, 120 bp, synthetic construct; identical to SEQ ID NO: 13456
  source 1..120: mol_type = other DNA

SEQ ID NO: 47957 - DNA, 120 bp, synthetic construct
  source 1..120: mol_type = other DNA
gatatttgctggggataatgaaaagttcaattctctatgggttgaactgtggtgctaggccagtcatgcagttgcaaatgcttagtaggaaacaagacagagctggcaagatgtctgaaa

SEQ ID NO: 47958 - DNA, 120 bp, synthetic construct
  source 1..120: mol_type = other DNA
aagttatttcatatgtgttaacacgtttgatcctgaacaacaaccatatgaggcaaggacttttttgtttgtttgtttgtttgtttgtttgtttttgtttgttttttgagataagatctc

SEQ ID NO: 47959 - DNA, 120 bp, synthetic construct
  source 1..120: mol_type = other DNA
acaaaactcatgagtggcagagacagaacaagaacataatccaaatctcctatatcagggcctcttgaaagagtgttgaaatttatcccatgaatagtacacctgctatgtgccagccac

SEQ ID NO: 47960 - DNA, 120 bp, synthetic construct
  source 1..120: mol_type = other DNA
acacttttcacctcctcagaatatctgtgaggaatatactcttattgttcctattttataggtgggacaattaaaaatcagagagattcaatgtctcagagctataagaagtgaaagaac

SEQ ID NO: 47961 - DNA, 120 bp, synthetic construct; identical to SEQ ID NO: 13457
  source 1..120: mol_type = other DNA

SEQ ID NO: 47962 - DNA, 120 bp, synthetic construct
  source 1..120: mol_type = other DNA
gtcaacgtgtccttcttcacatggtggtagggagaagaagaatgagaactgagcaaaggggacaaaccctttataaaaccctcagatctcctgagaacgtactcactattgtgagaatag

SEQ ID NO: 47963 - DNA, 120 bp, synthetic construct
  source 1..120: mol_type = other DNA
tgcctctggaggatgaacttctaaacccacttctctctgattctagtacccatgcattatgttgcctaacatacctgctggcaggctctgacagagtcaagttatgcatgagccacacac

SEQ ID NO: 47964 - DNA, 120 bp, synthetic construct
  source 1..120: mol_type = other DNA
ctgcacttctaacaatctactctccctcagtggcgatgaaaagttacttagttgtctttgaaaataaagacaatgaagaggtaagcataatattttttctgtttgcctaaacattataag

SEQ ID NO: 47965 - DNA, 120 bp, synthetic construct; identical to SEQ ID NO: 13458
  source 1..120: mol_type = other DNA

SEQ ID NO: 47966 - DNA, 120 bp, synthetic construct
  source 1..120: mol_type = other DNA
ctggttaactgaaggactttctcctttgtcctaaatccatgacttgcttcatttcacataactgtctgtttctacacttaagaaaagtgttattctgtgatcaagtggaatgcctgaaaa

SEQ ID NO: 47967 - DNA, 120 bp, synthetic construct; identical to SEQ ID NO: 13459
  source 1..120: mol_type = other DNA

SEQ ID NO: 47968 - DNA, 120 bp, synthetic construct
  source 1..120: mol_type = other DNA
ataagtgaattcgcaaattttatactaaaatgcagatttctcattctcagcaagcaatcttatcttggttctacattttattctctagagcggtggctttcacttttttcttcacagaat

SEQ ID NO: 47969 - DNA, 120 bp, synthetic construct
  source 1..120: mol_type = other DNA
cggcactattcacaatagcaaagacttggaaccaacccaaatgttcatcagtgatagactggaataagaaaatgcagcacatatacaccatgtaatactatgcagccataaaaaaaggat

SEQ ID NO: 47970 - DNA, 120 bp, synthetic construct
  source 1..120: mol_type = other DNA
agaacacttggacataggaaggggaacatcacacaccggggcctgtcttgcggtgggaggaggggggagggatagtattaggagatatgcctaatgtaaatgacgagttagtgggtgcag

SEQ ID NO: 47971 - DNA, 120 bp, synthetic construct; identical to SEQ ID NO: 13460
  source 1..120: mol_type = other DNA

SEQ ID NO: 47972 - DNA, 120 bp, synthetic construct
  source 1..120: mol_type = other DNA
ttaccttgaaggtttcctatgatttattcatttaagataaagttacttttccagcaacaactatgagaactacaatgagatatttttctgtgccaggtatgctactaggtactagatttt

SEQ ID NO: 47973 - DNA, 120 bp, synthetic construct; identical to SEQ ID NO: 13461
  source 1..120: mol_type = other DNA

SEQ ID NO: 47974 - DNA, 120 bp, synthetic construct
  source 1..120: mol_type = other DNA
ataactgcgaggtagtttcaagattgaaatggtcaattcctcttacgtagatcaaagaagttttttatggacactcttccactggtgatggactttgaacaatcgtaatgaattgcattg

SEQ ID NO: 47975 - DNA, 120 bp, synthetic construct
  source 1..120: mol_type = other DNA
ttcaattgggctagcacctacaataggtatagaaaatgatcacacacacaaaaaattttaatgtagtttatacctggattatagaggccctagactcctgggcttagaaatgtagaattt

SEQ ID NO: 47976 - DNA, 120 bp, synthetic construct
  source 1..120: mol_type = other DNA
gcctgctggggagtgaatgcaatggtttagaggagaaacagtaaaagcctacatgacttaaaacaaaattagggtccgggacaagtaatactgattggtcaaagtagaattcaaagtttt

SEQ ID NO: 47977 - DNA, 120 bp, synthetic construct
  source 1..120: mol_type = other DNA
gggcaagaagaagtttatgatatgaagatcagttgtaaacttgtgcagacaaagggcgaagttaggaattgaatgtgactggagctgaaaaaataggttaagcttcagaagaattttggg

SEQ ID NO: 47978 - DNA, 120 bp, synthetic construct; identical to SEQ ID NO: 13462
  source 1..120: mol_type = other DNA

SEQ ID NO: 47979 - DNA, 120 bp, synthetic construct
  source 1..120: mol_type = other DNA
ctgcatggaattaaactgaaagagtagagagaaattgctaggagatctagttcagaagtggctgcaaatgcaagcagagcaaaaagacaacagctctgagaagcagaaagggcaaggaaa

SEQ ID NO: 47980 - DNA, 120 bp, synthetic construct
  source 1..120: mol_type = other DNA
aatcttaggagaagcaatgcttcttgatatgagaatgggaggctgatgatagggaatatacaaaagagtaaaaagagattgtaatttggggagaaggcaaactttgaagaacccacattt

SEQ ID NO: 47981 - DNA, 120 bp, synthetic construct; identical to SEQ ID NO: 13463
  source 1..120: mol_type = other DNA

SEQ ID NO: 47982 - DNA, 120 bp, synthetic construct
  source 1..120: mol_type = other DNA
aaattgtgtgtaaccggtttaacagaatattactttctaagagttcacattttcctaagaaatcttaaaaacccacggtagttcaaagcaacatttgacagccagtttattttagctctc

SEQ ID NO: 47983 - DNA, 120 bp, synthetic construct
  source 1..120: mol_type = other DNA
aactatgcagggaaatttcacatttgggattttgtaggcagcacacagtgaagccaggagtgttcaatgaatgtatgcgaccctttcttagtgtctgtcccatcactcccaggataaaca

SEQ ID NO: 47984 - DNA, 120 bp, synthetic construct
  source 1..120: mol_type = other DNA
tacacaacctttctctggagtttagcaaaaggggtgatcagagtggtgagtatgatcactggcacatattaaggagacttcagccaattttttctcctaaaacaaaatcatcatgaattt

SEQ ID NO: 47985 - DNA, 120 bp, synthetic construct
  source 1..120: mol_type = other DNA
tgaaatctgtcccttgctaggggagtaacccattgtcattacataatcatcatcatcctcattcttatagttaccaattaataatcacttatcatataccaatccctattcatgcactct

SEQ ID NO: 47986 - DNA, 120 bp, synthetic construct; identical to SEQ ID NO: 13464
  source 1..120: mol_type = other DNA

SEQ ID NO: 47987 - DNA, 120 bp, synthetic construct
  source 1..120: mol_type = other DNA
tcatatatatgtgtgtgcatttatgtataggtatgtgtatatatgtttataaacacacatatattaaatatatatacacccatgtgtagccagaaataagctttcatccattcattataa

SEQ ID NO: 47988 - DNA, 120 bp, synthetic construct
  source 1..120: mol_type = other DNA
tgatgaagcactcgctaaatttttaatgacataattagttttacacaattgtctagaactgggacgtaagatatcttgttttttaatttagaaaaagaaaggcaataatcttggttaaaa

SEQ ID NO: 47989 - DNA, 120 bp, synthetic construct
  source 1..120: mol_type = other DNA
ctgggtttagaggaagtaaaggaaatcttcaaatagaattgacccttctgtcccagggaaattaaaataaaaaactaaccctgctgatacatgaaaagtggggtcacattaggacaagtg

SEQ ID NO: 47990 - DNA, 120 bp, synthetic construct; identical to SEQ ID NO: 13465
  source 1..120: mol_type = other DNA

SEQ ID NO: 47991 - DNA, 120 bp, synthetic construct
  source 1..120: mol_type = other DNA
ccatggggagtctgagagatggggatcagtctctcagatagccaataggtatttcccaaaggaagttagactgatgagatcatcagctaaagttatgagggactttgtcaagtccaatag

SEQ ID NO: 47992 - DNA, 120 bp, synthetic construct
  source 1..120: mol_type = other DNA
ttcaggatggattcccacaaatggtaaggaactgctgggagtggaataaaagttgagcaagacagggtcagtaaagacaaagaaaaagataaggtcaggtaagtgagaaaaagcaaccca

SEQ ID NO: 47993 - DNA, 120 bp, synthetic construct
  source 1..120: mol_type = other DNA
aattttaagacatgtatatgaattttaagacacgtatagatgtgtgtgactacaaccaaaatcacctccaaaaaatacctttgttctcctcctttatagtgacactccccctctgtccct

SEQ ID NO: 47994 - DNA, 120 bp, synthetic construct; identical to SEQ ID NO: 13466
  source 1..120: mol_type = other DNA

SEQ ID NO: 47995 - DNA, 120 bp, synthetic construct
  source 1..120: mol_type = other DNA
atagctgcaataaacatttatgttcacatttttgggcaaacataaatttttatttctctcatccttcaggagtgagatggttgggtcacaacataagcaactctcagttttctatagtgc

SEQ ID NO: 47996 - DNA, 120 bp, synthetic construct
  source 1..120: mol_type = other DNA
tgttatataatggtggcttagcttgcaattctctaacagctaataatgtcaaatatcttttctggctcttatttgctattcatacatcctctttggtgaactatgtgttaaaatcttttg

SEQ ID NO: 47997 - DNA, 120 bp, synthetic construct
  source 1..120: mol_type = other DNA
gtcttttccacagagcacacatttttaattttgagatggtatacaatttattattttttcttttacaaatagtccttttggtgtcatgtcttgtaactctttgtctaatgttaggtctca

SEQ ID NO: 47998 - DNA, 120 bp, synthetic construct; identical to SEQ ID NO: 13467
  source 1..120: mol_type = other DNA

SEQ ID NO: 47999 - DNA, 120 bp, synthetic construct
  source 1..120: mol_type = other DNA
atgttttagctattgtaaaagagattttatatattaagaaattctgtctgagattttgattgtaattgcattaaattatagatcgatttggggagaactgacctctttgctatgttgaat

SEQ ID NO: 48000 - DNA, 120 bp, synthetic construct
  source 1..120: mol_type = other DNA
atacataagtatttcatattaggtaacacgaactaattttttttaaattttgtttccaattgcatgttgcatgtgggaaataatgagttttctgtattaactttataccctactactttg

SEQ ID NO: 48001 - DNA, 120 bp, synthetic construct
  source 1..120: mol_type = other DNA
ggctgggactacaggtaagtgccaccatgcccggctaatttttgtatttttagcagagacagagtttcaccatcttggccgggctggtctcgaactcctgacctcatgaactgcccgcct

SEQ ID NO: 48002 - DNA, 120 bp, synthetic construct; identical to SEQ ID NO: 13468
  source 1..120: mol_type = other DNA

SEQ ID NO: 48003 - DNA, 120 bp, synthetic construct
  source 1..120: mol_type = other DNA
tcctcatcccaacaaactatagtaacactgcagcagaacaaaggctaagagaacatacttgaagaaggcagagagaaaagatatattacacaggaagaaatgacaattaaattgataaca

SEQ ID NO: 48004 - DNA, 120 bp, synthetic construct
  source 1..120: mol_type = other DNA
ggaatgaaatgatatagaaaagctgtcaagtaagtaaaaactgagaatgttttctactaacagaactctacccaaggcaatttcatagaaggcactactaggaaaagtatgctatcaaaa

SEQ ID NO: 48005 - DNA, 120 bp, synthetic construct
  source 1..120: mol_type = other DNA
aaaattaccatgtaagtcaagattagatgtgttggaatttagatgttttcatattcctctcttgtttagaaggggttttcaagtagcaattttatactttgttaggtgggtatggttaaa

SEQ ID NO: 48006 - DNA, 120 bp, synthetic construct; identical to SEQ ID NO: 13469
  source 1..120: mol_type = other DNA

SEQ ID NO: 48007 - DNA, 120 bp, synthetic construct
  source 1..120: mol_type = other DNA
accaaaagaaagctggaataattatattaatatcagacatactgcataatactcttttttgttttattttgttttgtttttgacacggagtctcactctttggccaggctggagtgcagt

SEQ ID NO: 48008 - DNA, 120 bp, synthetic construct
  source 1..120: mol_type = other DNA
ttagtagagacagggtttcaccatgtaggccaggatggtcttgatctcctgacctcatgatctgcccacctcggccttccaaagtgctgggattacaggcgtgagccactatgcccagcc

SEQ ID NO: 48009 - DNA, 120 bp, synthetic construct
  source 1..120: mol_type = other DNA
ctgatataaaaattgattaaactacagggataaactgataatttctcatcataggaggagatgtcaatatagtttattcagttattgatacttcaaatatacaaaaagtcaaagaagata

SEQ ID NO: 48010 - DNA, 120 bp, synthetic construct; identical to SEQ ID NO: 13470
  source 1..120: mol_type = other DNA

SEQ ID NO: 48011 - DNA, 120 bp, synthetic construct
  source 1..120: mol_type = other DNA
tgctgaaatagtgcttaaaggaaaatttattgctgttacatacatatgtaaaagtagaaaggaaatagattaataaaataagcatacatatttgatatttataaaggaaacagaaaaacc

SEQ ID NO: 48012 - DNA, 120 bp, synthetic construct
  source 1..120: mol_type = other DNA
tactgataaatctgagaagcataacattaagtaaaaaatttcagagtatgttctacaatgtgctacacacacacagagatgagagaccaatacatgtcataaaattagaaaaaagtaatc

SEQ ID NO: 48013 - DNA, 120 bp, synthetic construct; identical to SEQ ID NO: 13471
  source 1..120: mol_type = other DNA

SEQ ID NO: 48014 - DNA, 120 bp, synthetic construct
  source 1..120: mol_type = other DNA
tgaaacaacgtaaaaaaaaagccataaataacagttatatatttatagcaatggattttttttcacaaacaatattaacaaagtagtaaaagagacttaatagtcattttagtttcagca

SEQ ID NO: 48015 - DNA, 120 bp, synthetic construct
  source 1..120: mol_type = other DNA
ttcaaactcattttgtaaagttaagcaaacaatgtttaaagacttgttctataactacatccgaattagactattaaattttcttgtgcagtgctagatatgggactggcatatgttgta

SEQ ID NO: 48016 - DNA, 120 bp, synthetic construct
  source 1..120: mol_type = other DNA
caacttagtctaagataacagaagttacttgatttttgaggtgaatttactctgaagtagcttttaggttgaatttggttatgctagaaagtatcattaatttaattatgtaaaaaagga

SEQ ID NO: 48017 - DNA, 120 bp, synthetic construct; identical to SEQ ID NO: 13472
  source 1..120: mol_type = other DNA

SEQ ID NO: 48018 - DNA, 120 bp, synthetic construct
  source 1..120: mol_type = other DNA
tttcttttcagacgtaagatacactaaacatgtaaattcagaaaaagaatataaacttttatatctatgaaatctgtatttaattttatcttatgcttaaatttcagactaattttcaaa

SEQ ID NO: 48019 - DNA, 120 bp, synthetic construct
  source 1..120: mol_type = other DNA
attaaaagttagaaagcttttgaaaaatcacaaaagtaagatagaaagaaagttgtttaaaaacatggaaatcctaactacttttctagcaggcttggttgaaacttcattataaagtag

SEQ ID NO: 48020 - DNA, 120 bp, synthetic construct
  source 1..120: mol_type = other DNA
aggtaattttgatgaagtgctaatggcaaaaatgctcccctattcaagaaaaaaaaaattacaggaaacatggcaaagttaaacctccgcatacaataatctcaagaaatgttcctacta

SEQ ID NO: 48021 - DNA, 120 bp, synthetic construct; identical to SEQ ID NO: 13473
  source 1..120: mol_type = other DNA

SEQ ID NO: 48022 - DNA, 120 bp, synthetic construct
  source 1..120: mol_type = other DNA
gaatagattgtggtgttatttaaattttaagaatgtgggatttttttgcttttaatttttaaaataataagtactaaatataataaaatctcacacatcctcctcccaatgtcttcctcc

SEQ ID NO: 48023 - DNA, 120 bp, synthetic construct
  source 1..120: mol_type = other DNA
tatttagaaattagaaagcaagaggctgggagcaagatggctgtttagattcagctaatacgagcctcttccatggaaagaaacaaaagtatcaagtagatagtcagactttgaatagat

SEQ ID NO: 48024 - DNA, 120 bp, synthetic construct
  source 1..120: mol_type = other DNA
ggaatatggggaaagtgtaagtaagtgtttcccagggccccacatttcagccacagactaacaatactagatatgggagagttcctcaactcttgcaggcctcaagattaacatggagag

SEQ ID NO: 48025 - DNA, 120 bp, synthetic construct; identical to SEQ ID NO: 13474
  source 1..120: mol_type = other DNA

SEQ ID NO: 48026 - DNA, 120 bp, synthetic construct
  source 1..120: mol_type = other DNA
gttgctacagaaccaaggtgcaagaaaactacgtgtccctagttgcctgcctatgccactctattgagagtggtcccatcatccttagtggcaggcccacagctgtcaccagtctgatag

SEQ ID NO: 48027 - DNA, 120 bp, synthetic construct
  source 1..120: mol_type = other DNA
tgcatagatagcaacataaggatatggaaaacaaaacaagaaaatatgatacctacaaagaaatacaataattgtctagcaatagatcccaatggaaaagaaaatcacaaaatcccacaa

SEQ ID NO: 48028 - DNA, 120 bp, synthetic construct
  source 1..120: mol_type = other DNA
ctattttaaaatagaaccaaattgaaattctgaaactgaggaattcattgataaaatacaaaacacattggaaacctttatcaagtaaaagaaaatcaagtaaaagaaagaaaaatcaag

SEQ ID NO: 48029 - DNA, 120 bp, synthetic construct; identical to SEQ ID NO: 13475
  source 1..120: mol_type = other DNA

SEQ ID NO: 48030 - DNA, 120 bp, synthetic construct
  source 1..120: mol_type = other DNA
aaggacatccatgcaaaaaccccatccaaaggtcaccaacaacaaagatcaaagttagataaatccacgaagatgagaaaaagctagtgcaaaaatgctgaaaattccaaaaactagaat

SEQ ID NO: 48031 - DNA, 120 bp, synthetic construct
  source 1..120: mol_type = other DNA
aagctaaaggagcatgttctgaccaaatgcaaggaagctaagagccatgagaaaagattacaggagctgctaactagaataaccagtttagagaagaacataaatgactgatggagccga

SEQ ID NO: 48032 - DNA, 120 bp, synthetic construct; identical to SEQ ID NO: 13476
  source 1..120: mol_type = other DNA

SEQ ID NO: 48033 - DNA, 120 bp, synthetic construct
  source 1..120: mol_type = other DNA
aagacacatagccatcagattcaccaaggttgaaatgaaagaaaaaatgttaagggcagctagagagaaaggtcaggtcacccacaaagggaagcccatcagactaacagcagatctctc

SEQ ID NO: 48034 - DNA, 120 bp, synthetic construct
  source 1..120: mol_type = other DNA
aaaatcctttacagacaagcaaatgctgagggattttgtcaccaccaggcctgccttacaagagctcctgaagcaagcactaaatatggaaaagaaaaactgttaccagtcactgcaaaa

SEQ ID NO: 48035 - DNA, 120 bp, synthetic construct; identical to SEQ ID NO: 13477
  source 1..120: mol_type = other DNA

SEQ ID NO: 48036 - DNA, 120 bp, synthetic construct
  source 1..120: mol_type = other DNA
gggcattacataatggtaaagggatcaatgcaacaagaagtgctattttaaatatatgatgcacccaatacaggagcacccggattgataaagcaagttcttagaaacctacaaagagac

SEQ ID NO: 48037 - DNA, 120 bp, synthetic construct
  source 1..120: mol_type = other DNA
gacctaacagacatctacagaactctccaaccaaatcagcaaaatatacattcttttcagcaccacatagcacttattccaagattgaccacatagttggaagtaaagcactcctcagca

SEQ ID NO: 48038 - DNA, 120 bp, synthetic construct; identical to SEQ ID NO: 13478
  source 1..120: mol_type = other DNA

SEQ ID NO: 48039 - DNA, 120 bp, synthetic construct
  source 1..120: mol_type = other DNA
acaagaaataaccaagatctgaggagaactgaaggagatagagacacaaaaatcccttctaaaaatcaatgaatctaggagctgttttttgaaatgattagcaaaatagaccactagcca

SEQ ID NO: 48040 - DNA, 120 bp, synthetic construct
  source 1..120: mol_type = other DNA
atgcaaataaactatgaaatctagaagaaatggataaattccaggacacatacaccctcccaagaccaaaccaggaagaagtcaaatccctgaatagaccaataaaacgttctgaaattg

SEQ ID NO: 48041 - DNA, 120 bp, synthetic construct; identical to SEQ ID NO: 13479
  source 1..120: mol_type = other DNA

SEQ ID NO: 48042 - DNA, 120 bp, synthetic construct
  source 1..120: mol_type = other DNA
tggttcaacatgtgcaaattaataaacataatccatcacataaacagaatcaatgacaaaaaccacatgattatctcaatagatgcggaaaagtcctttgattaaattcaacactccttc

SEQ ID NO: 48043 - DNA, 120 bp, synthetic construct
  source 1..120: mol_type = other DNA
ttgaaaactggcacaagacaagtatgtgctctctcaccactcctatttaacatagtgttggaagttctaaccagggcaatcaggcaagagaaagaaagcatattttaataggaagagaag

SEQ ID NO: 48044 - DNA, 120 bp, synthetic construct
  source 1..120: mol_type = other DNA
atgtgcaaaaatcacaagaattcctatacaccaataatagacaaacagagagccaaatcatgagtgaactcccattcacaattgctacaaagagaataaaatatctaggaatacaactaa

SEQ ID NO: 48045 - DNA, 120 bp, synthetic construct; identical to SEQ ID NO: 13480
  source 1..120: mol_type = other DNA

SEQ ID NO: 48046 - DNA, 120 bp, synthetic construct
  source 1..120: mol_type = other DNA
atatatagaccaatgggacagaacaaaggccacagaaataacaccacacatctacaaccacctgatctttgacagacctgacaaaaacaaacaatgggaaaaggattctctatttaataa

SEQ ID NO: 48047 - DNA, 120 bp, synthetic construct
  source 1..120: mol_type = other DNA
tcaataaaattgtgcgttgaaataataaaatcaaaacagccagctagcctaagcaggaatataagaaataagatccaaataaactcagaggaaaaaggagacagtataacagataccaca

SEQ ID NO: 48048 - DNA, 120 bp, synthetic construct
  source 1..120: mol_type = other DNA
agaccctgtctctactgaacatacaaaaattagccaggtgtggtggtgggcacctgtaatcccagctactccagaggctgaggcagaagaattgcttgaacccaggaggcagaagttgca

SEQ ID NO: 48049 - DNA, 120 bp, synthetic construct
  source 1..120: mol_type = other DNA
aaatattggatactgataaactcctgaaaacataaaactcaccaagatcgaatcaagaagaaataggacctgaacagaccaactgtagcaaaatttagtcagtaataaaacaatctctca

SEQ ID NO: 48050 - DNA, 120 bp, synthetic construct; identical to SEQ ID NO: 13481
  source 1..120: mol_type = other DNA

SEQ ID NO: 48051 - DNA, 120 bp, synthetic construct
  source 1..120: mol_type = other DNA
agattgaaggacaacccatttgaaaagtgggcaaatgaacagacatctcgcaaaagaatacatacaatcagccaacaaacatatgaaaacatgctgagcattactaattatgacagaaat

SEQ ID NO: 48052 - DNA, 120 bp, synthetic construct
  source 1..120: mol_type = other DNA
aaattggttcaattcctatggaaaacattatggagagttctcaaagaactaaattagaactaacatttgacccagtaatcccactactgcatatctacccaaaggaaaataaataattat

SEQ ID NO: 48053 - DNA, 120 bp, synthetic construct; identical to SEQ ID NO: 13482
  source 1..120: mol_type = other DNA

SEQ ID NO: 48054 - DNA, 120 bp, synthetic construct
  source 1..120: mol_type = other DNA
aagagaaagaaataaatagaatgtcccagccagaacaatgaaacaggataaagaaataaaaggcatccacattggaaaataattcaaactatcccactttgctgatgatacgatcttata

SEQ ID NO: 48055 - DNA, 120 bp, synthetic construct
  source 1..120: mol_type = other DNA
ctagctgaagaagaaatcaagaaggtaattgcatttataacagctataagaaaaatacctaggaataaatctaatcaagaaaaagaaagatctctacaaggaaaactacaaacactgatt

SEQ ID NO: 48056 - DNA, 120 bp, synthetic construct
  source 1..120: mol_type = other DNA
gatggccacaaagcacagctatttcatgaagctcctttagttaaagagaaacaaatgactgaaaaaaaagtctgagccccaaaacccactcctaccaccaccactagcaaaatatacata

SEQ ID NO: 48057 - DNA, 120 bp, synthetic construct
  source 1..120: mol_type = other DNA
ataataaaaacaataatatgtgctatagaggaaataagcttcatatactcagaaaaccaccttattaaacaatcattccatgatgtctctgatcatttattttaatatggatcacagaaa

SEQ ID NO: 48058 - DNA, 120 bp, synthetic construct; identical to SEQ ID NO: 13483
  source 1..120: mol_type = other DNA

SEQ ID NO: 48059 - DNA, 120 bp, synthetic construct
  source 1..120: mol_type = other DNA
cttggcattacctccttatgtagtcagctctcattacctttggctgtaggggaatggtgtggaatagggcagcttccaagggcctttccttttatctatacattttgtccttgccatcag

SEQ ID NO: 48060 - DNA, 120 bp, synthetic construct
  source 1..120: mol_type = other DNA
tttattgtcttcaatattaacattgggtacagtaggaccttctctatccaatgctgtagccactgactacatggggatttgggaaattgaaatgtgactagcacaagataaaatgtagtg

SEQ ID NO: 48061 - DNA, 120 bp, synthetic construct
  source 1..120: mol_type = other DNA
taaaatattactaaaattatttccacttgttttgttttgtcttttaatgtgtcaactagaaaattaaaataacatattaaaattaaaattacacatatgaaattaaaattacatatatgt

SEQ ID NO: 48062 - DNA, 120 bp, synthetic construct; identical to SEQ ID NO: 13484
  source 1..120: mol_type = other DNA

SEQ ID NO: 48063 - DNA, 120 bp, synthetic construct
  source 1..120: mol_type = other DNA
taggtttcttagatacacaattttatttaggttaacgaacactagaaaacagcagcaaaagcatcactgttcgaccatatgtggtctttaacaaatttctagtgattgacagttaaaggc

SEQ ID NO: 48064 - DNA, 120 bp, synthetic construct
  source 1..120: mol_type = other DNA
aatttcaaataacatagttttttttttaagtttcaacgtaagtaacaataaaagctaataaattcctgtcagaggattcagtttagaataaactatactgaacacttcaaaaataaaaat

SEQ ID NO: 48065 - DNA, 120 bp, synthetic construct
  source 1..120: mol_type = other DNA
tttgtttaactgagataaaatgcaaggaaattataaatcagtggactttataaaaatatctaattattttgtttcttgcttattatttaagaatcaatgaagaaatacagtcatctgttg

SEQ ID NO: 48066 - DNA, 120 bp, synthetic construct; identical to SEQ ID NO: 13485
  source 1..120: mol_type = other DNA

SEQ ID NO: 48067 - DNA, 120 bp, synthetic construct
  source 1..120: mol_type = other DNA
attattatacttagcttgaataaaattactttgcattatgtaacagctaaatattttctttaaaattccaagactttataaaatatatcatttagaattatttttctttcaaagatagat

SEQ ID NO: 48068 - DNA, 120 bp, synthetic construct
  source 1..120: mol_type = other DNA
tttcttattaagctgtatttaggacaaaataactaaggtgaaattattgtcccaaacactagagcagacattctaatttcttgaaaaagactagtaacagttccattctaacattagtct

SEQ ID NO: 48069 - DNA, 120 bp, synthetic construct
  source 1..120: mol_type = other DNA
attcctattaaaaaacattttcagcttggatacatgttttcagtattgttagagtactatgcttcatgcataaaattatgaaataaataatttggaaaactctttcactaagactaacat

SEQ ID NO: 48070 - DNA, 120 bp, synthetic construct; identical to SEQ ID NO: 13486
  source 1..120: mol_type = other DNA

SEQ ID NO: 48071 - DNA, 120 bp, synthetic construct
  source 1..120: mol_type = other DNA
ttgtatttgcagcagcgtaatagaatactgaagtacgaatagatggccttaaccattatagtgtttgaaaacatacaaacttggagccaaatcttgtctgtaccatataaatactcttga

SEQ ID NO: 48072 - DNA, 120 bp, synthetic construct
  source 1..120: mol_type = other DNA
atttttttctcatccttctggctgattatctcaaaggatattaaacaatatttaaaagaatgtttcaatataaaaattgtgcccctatattattctacaaatgtaattgcccttcaattg

SEQ ID NO: 48073 - DNA, 120 bp, synthetic construct
  source 1..120: mol_type = other DNA
gagtcagtgaaaaacaaagctttttctctccctactagagatttatgtatttgctatgaatgaaaatagttgtcttagttatgatatgtttacctagcaccttcgaatttaaagcacttt

SEQ ID NO: 48074 - DNA, 120 bp, synthetic construct
  source 1..120: mol_type = other DNA
tgtctgcattgtgcatgctggcatttgcctattttgtgtctaggttgaattaatttaaaggtctaatttataagcaataaaaaatatattcatgatcttaactatatgttatttagtgat

SEQ ID NO: 48075 - DNA, 120 bp, synthetic construct; identical to SEQ ID NO: 13487
  source 1..120: mol_type = other DNA

SEQ ID NO: 48076 - DNA, 120 bp, synthetic construct
  source 1..120: mol_type = other DNA
attgaagactttcttttcttgttgagactgttaataaggaaaatgtaaattaaaatataaatttttaaagtaaatttccatcaaaattttgtctcacatcaacgaatgaggataatttaa

SEQ ID NO: 48077 - DNA, 120 bp, synthetic construct
  source 1..120: mol_type = other DNA
aacaaaattaactagaatgtatgaaaaatgggtcattctgattaactggatttggagataaacaaaaaagagttattttgttattgacaataattctgatatgtctaagaatgctttcct

SEQ ID NO: 48078 - DNA, 120 bp, synthetic construct; identical to SEQ ID NO: 13488
  source 1..120: mol_type = other DNA

SEQ ID NO: 48079 - DNA, 120 bp, synthetic construct
  source 1..120: mol_type = other DNA
ttagcttcagggctttgcattctattttttattcttttaaaaaattacctttttcttctctaagatgcttcatgtctgctttttctgtatagaagaaacagtaacagggtaatttatttt

SEQ ID NO: 48080 - DNA, 120 bp, synthetic construct
  source 1..120: mol_type = other DNA
aggtatttttcctaatgctatccctccccttaacccccaccctcagagaggccccaatgtgtgatgttcccatccctgtgcccatgtgttctcattgctcaactcccacgtttgagtgag

SEQ ID NO: 48081 - DNA, 120 bp, synthetic construct; identical to SEQ ID NO: 13489
  source 1..120: mol_type = other DNA

SEQ ID NO: 48082 - DNA, 120 bp, synthetic construct
  source 1..120: mol_type = other DNA
tggtatctcagtggttttgatttgcatttctctagtgactggtgatgatgagctttttaaaatatgtttgccttcttttgagaagtgtctgttcatatccttcaaccactttttgatggg

SEQ ID NO: 48083 - DNA, 120 bp, synthetic construct
  source 1..120: mol_type = other DNA
tctgatgatagttccttttgctgtgcagaagctctttactttaattagatcccatttgtcaatcttggcttttgctgcaaatgctttagctgttttagtcatgaagtctttgtccatgtc

SEQ ID NO: 48084 - DNA, 120 bp, synthetic construct
  source 1..120: mol_type = other DNA
gcaccaagctagagtgcagtggcatgatcttggctcactgcaacctctgcctctcaggttcaagtgattctcctgcctcagcctcctgagtagctggaccactggtgtgtgccaccatgc

SEQ ID NO: 48085 - DNA, 120 bp, synthetic construct; identical to SEQ ID NO: 13490
  source 1..120: mol_type = other DNA

SEQ ID NO: 48086 - DNA, 120 bp, synthetic construct
  source 1..120: mol_type = other DNA
tatatttctgttttggtaccagtaccatgctgttttggttactgtagctttgtagtatagtttggagtcaggtagtgtgatgcctccagctttgttctgtttgcttaggattgtcttggc

SEQ ID NO: 48087 - DNA, 120 bp, synthetic construct
  source 1..120: mol_type = other DNA
tcacaatattgattcttcctgtccatgagcatggaaggttttccatttgtttgtgtcctcttttatttccttgagcagtggtttgtagttttcattgaagaggtccttcacatcccttgt

SEQ ID NO: 48088 - DNA, 120 bp, synthetic construct
  source 1..120: mol_type = other DNA
gattttgtatcttgagactttgctgaagttacttaccagctcaaggagttttggggctgtgacgatggggttttctaaatatacaatcatgtcatctgcaaacagtaacaatttgacttc

SEQ ID NO: 48089 - DNA, 120 bp, synthetic construct; identical to SEQ ID NO: 13491
  source 1..120: mol_type = other DNA

SEQ ID NO: 48090 - DNA, 120 bp, synthetic construct
  source 1..120: mol_type = other DNA
ccagccttgcatcccagggatgaagctgacttgattgtggtggataagctttttaatgtgctgctggattcggattgccagtgttttattgaggattttcgcatcgatattcatcaggaa

SEQ ID NO: 48091 - DNA, 120 bp, synthetic construct; identical to SEQ ID NO: 13492
  source 1..120: mol_type = other DNA

SEQ ID NO: 48092 - DNA, 120 bp, synthetic construct
  source 1..120: mol_type = other DNA
tattctctgatggtagtttgtatttctgtggaatcagtggtgatatcccctttgttattttttattgtgtctatttgattcttctctcttttcttctttattagtctgactaatggttta

SEQ ID NO: 48093 - DNA, 120 bp, synthetic construct
  source 1..120: mol_type = other DNA
agctttcgaatttgtttgttcttgcttctgtagttcttttcattgtgatgttagggtgttgattttagatctttcccactttctctgtatcagagtaatatatttattaacaagtcttct

SEQ ID NO: 48094 - DNA, 120 bp, synthetic construct
  source 1..120: mol_type = other DNA
atccttttagatatttaataaaaatgcaataactatatgttttgcatgatgaactgtaatgtactataattatgatatgtgctataaaatcagtgtcttcattttcatcaactgttttta

SEQ ID NO: 48095 - DNA, 120 bp, synthetic construct; identical to SEQ ID NO: 13493
  source 1..120: mol_type = other DNA

SEQ ID NO: 48096 - DNA, 120 bp, synthetic construct
  source 1..120: mol_type = other DNA
ctctctcatttcatttttgttatgcttggtcattctgtttatgtagtcacctatagggtcaaaatttctcctcctcctcctctttggcctcctcttcctcctctaagtcttttactcctc

SEQ ID NO: 48097 - DNA, 120 bp, synthetic construct
  source 1..120: mol_type = other DNA
gagtagcctggtttacttacaggcatgaccctgctacccacttcctccccttttcttttatgctttgaagacaagctaggataagccatgcctttgttaacaagtttaaactagaaacaa

SEQ ID NO: 48098 - DNA, 120 bp, synthetic construct
  source 1..120: mol_type = other DNA
caaaatgtggatccagttttcaaagcagtcttggtaaataataattttcttgctacactttttagacaaaagtgagaagaaaaacaatatttaatgggtgacttataagtttgtatgcgg

SEQ ID NO: 48099 - DNA, 120 bp, synthetic construct; identical to SEQ ID NO: 13494
  source 1..120: mol_type = other DNA

SEQ ID NO: 48100 - DNA, 120 bp, synthetic construct
  source 1..120: mol_type = other DNA
ctgatatttcttcctaaattacaataggcacacatactcaaaatggcaaagaaatgtactgatgattaatatttctgatagctgtaactagacatctattttgaaaatagaacaaatatt

SEQ ID NO: 48101 - DNA, 120 bp, synthetic construct
  source 1..120: mol_type = other DNA
taaaataactaaaatattagaatttttataacacaaaaaatatgataaatgctgatgtgatggataccccatttacttgcctatatcaaaatatctcatgtacccataaatatatacaac

SEQ ID NO: 48102 - DNA, 120 bp, synthetic construct
  source 1..120: mol_type = other DNA
tgttacatttttaatcttcattgatgcatgcaaacattcattcatataatatttattaaagtagcttcatttataagatgctgtcagaaatgcaattgagtgtggtcatgggatgagatt

SEQ ID NO: 48103 - DNA, 120 bp, synthetic construct
  source 1..120: mol_type = other DNA
tcagtaaacttacagattaatatttctaagtataacctggaaagttttttttaaaaaaaactttgtgtcacaaataatttcaaataataacatttccagaaaataaaaattctctggtag

SEQ ID NO: 48104 - DNA, 120 bp, synthetic construct; identical to SEQ ID NO: 13495
  source 1..120: mol_type = other DNA

SEQ ID NO: 48105 - DNA, 120 bp, synthetic construct
  source 1..120: mol_type = other DNA
ttaacgaatctgtcatgtgctgttaagaaaacaggttagttctgggtattaaaacatataaatacaacatccagatacactttggattgaaatgctcaatttttaatccaggttacagtc

SEQ ID NO: 48106 - DNA, 120 bp, synthetic construct
  source 1..120: mol_type = other DNA
ctttaaaaaaattagaaaataaaaagctaatgtgttaaaattaaataaattgaggacatatattatgtgctcttaatttttctcaacccacacaataactgttagaagatctccatactg

SEQ ID NO: 48107 - DNA, 120 bp, synthetic construct
  source 1..120: mol_type = other DNA
acaggtattagttatcatggtaaatgtgttagcaaaccaggtatatcaacagaaaacatgataggcattccctcatacatcctggtccagtgtcatagacctaagaggtgctcaataaat

SEQ ID NO: 48108 - DNA, 120 bp, synthetic construct
  source 1..120: mol_type = other DNA
ttttattgtgcttcgcttaattgcaattctcaggtatcacattttttacaagttgacagtttgtagcaaccctgtatgattaagcctattggtgtaatttttccaatggcgtttgcttcc

SEQ ID NO: 48109 - DNA, 120 bp, synthetic construct; identical to SEQ ID NO: 13496
  source 1..120: mol_type = other DNA

SEQ ID NO: 48110 - DNA, 120 bp, synthetic construct
  source 1..120: mol_type = other DNA
tgaaagctgggataggctgaaagttaggcctcacgtaccaaagagttagccaagttgtaaatgcaaaggaaaagttcttgaaggaaattaaaagtgttactccagtgaccacataaatgc

SEQ ID NO: 48111 - DNA, 120 bp, synthetic construct
  source 1..120: mol_type = other DNA
cttcaattctatgaaggctgagagaagtgaggaaactgcagaagaaaagttggaagctaccagaggttggttcatgaaatttaaggaatgaagccacctgcgtaacgtaaaagtataaga

SEQ ID NO: 48112 - DNA, 120 bp, synthetic construct; identical to SEQ ID NO: 13497
  source 1..120: mol_type = other DNA

SEQ ID NO: 48113 - DNA, 120 bp, synthetic construct
  source 1..120: mol_type = other DNA
ttgaagttgaagccaatgcttattgaccattctgaaaattttaggtcccttaagaattatgccaaatctactctgcctgtgttctataactggaataacaaaatctagatgacagcacat

SEQ ID NO: 48114 - DNA, 120 bp, synthetic construct
  source 1..120: mol_type = other DNA
aatggagctgtacgaggagattaatattgctttcatgcctgtgaacacaacatacattctgcagcccgtgggactaaagagtaattttgacattcaagtcttattacttaataagtacat

SEQ ID NO: 48115 - DNA, 120 bp, synthetic construct
  source 1..120: mol_type = other DNA
gagagggagtccaaatgtcagtatcaacaggagtttgaaagaaattgattttgactcttacggatgacttcgagaggtttaaggattcagtagaagaagtaactgcagatgtggtggaag

SEQ ID NO: 48116 - DNA, 120 bp, synthetic construct
  source 1..120: mol_type = other DNA
ctggtgaagatgttgtgaacatcgtcaaaatcacaacaaaggatttagaacattccataaacttagttgataaagcagaagccaagtttgagatgactgactccaattttgaaagaagtt

SEQ ID NO: 48117 - DNA, 120 bp, synthetic construct; identical to SEQ ID NO: 13498
  source 1..120: mol_type = other DNA

SEQ ID NO: 48118 - DNA, 120 bp, synthetic construct
  source 1..120: mol_type = other DNA
gtgcactgggaaaacaaaaaatggtgtgatttattgtggtggtctgaatgaaacctgcaatacccccgaggtatgccaggacaatgacatctaattttccttgaattgcattttttgaat

SEQ ID NO: 48119 - DNA, 120 bp, synthetic construct
  source 1..120: mol_type = other DNA
ttgctctacccattttcttttagttgtgctttttgtctccaaggtatgcctgtgcacacaatatcctttgtcaaccagactcacttatatggtaatagtataatggctattacattaaca

SEQ ID NO: 48120 - DNA, 120 bp, synthetic construct
  source 1..120: mol_type = other DNA
ctaaaaaggaaaaaagaaaaaaaaagaaaatgagtgataattttctatctatgggtgacatatcagccctttatatttcctatttttgctttttattgtaaaaataagactaaacttata

SEQ ID NO: 48121 - DNA, 120 bp, synthetic construct; identical to SEQ ID NO: 13499
  source 1..120: mol_type = other DNA

SEQ ID NO: 48122 - DNA, 120 bp, synthetic construct
  source 1..120: mol_type = other DNA
ataaaatctcaagaatgaatgggtggtaggtaaaaaaaatcgtaaagacattctatttttttccaatataacatgtcttctaaaatatattaactaaaaacgttaactgtgtcatcgtac

SEQ ID NO: 48123 - DNA, 120 bp, synthetic construct
  source 1..120: mol_type = other DNA
ttttgtagatacattttgtgtttatatatattatatatattatatatcatatgtattatatattatatatattataatatgtattatatattatatatattataatatgtattatatatt

SEQ ID NO: 48124 - DNA, 120 bp, synthetic construct
  source 1..120: mol_type = other DNA
tatataattatatgtaatatgtattatatattatgatatgtattatatataatatatatattatgatatgtattatatataatatatatattatgatatgtattatatataatatataga

SEQ ID NO: 48125 - DNA, 120 bp, synthetic construct
  source 1..120: mol_type = other DNA
ttataatatgtattatatataatatatatattataatatgtattatatataatatatatattataatatgtattatatataatatatattataatatgtattatattataataatatgta

SEQ ID NO: 48126 - DNA, 120 bp, synthetic construct; identical to SEQ ID NO: 13500
  source 1..120: mol_type = other DNA

SEQ ID NO: 48127 - DNA, 120 bp, synthetic construct
  source 1..120: mol_type = other DNA
atggtgtgaacccgggaggtggagcttgcagtgagctgagatggagccactgcactccagcctggagagagagattttgtctcaaaaaaaaaaaaagaagtaacagtgattacctctgga

SEQ ID NO: 48128 - DNA, 120 bp, synthetic construct
  source 1..120: mol_type = other DNA
ttgaatgacattttaaaagaattaagctaacttttagaatggggtaacttctcttttaagaggatatatcaagctgaaattcacaatttgtgaaatttaacctgtgtaatttgacaagat

SEQ ID NO: 48129 - DNA, 120 bp, synthetic construct
  source 1..120: mol_type = other DNA
ctctatcataattgcatgtttggcaatctatgtttgattgacaacaatattgcccttaggtcagataaactagattacactacaaaaccacaggacaacacattaccaggaaacacagtg

SEQ ID NO: 48130 - DNA, 120 bp, synthetic construct
  source 1..120: mol_type = other DNA
tgttcagctttttctagagaaagaaatcaaaattcactggcaatctgtggattctttggcaaatatttcttatttatatatttgcaagtgatcctcagtttacccaagaggcatgcccca

SEQ ID NO: 48131 - DNA, 120 bp, synthetic construct; identical to SEQ ID NO: 13501
  source 1..120: mol_type = other DNA

SEQ ID NO: 48132 - DNA, 120 bp, synthetic construct
  source 1..120: mol_type = other DNA
gaagcaatgcactgctgaacactagtttcttattgaaaatttaaactaaatctgctgtattccagagagtgccacattttgtatttttattgacctgtaccaccctccctttccaggttt

SEQ ID NO: 48133 - DNA, 120 bp, synthetic construct
  source 1..120: mol_type = other DNA
agagatcattctctttcatcaaaagtggaatttaaagtcaaccatatatgtgggatatcttgaatgggattgagaatatctgtcaattgagtaggactctggaacagaccaagtgttacc

SEQ ID NO: 48134 - DNA, 120 bp, synthetic construct; identical to SEQ ID NO: 13502
  source 1..120: mol_type = other DNA

SEQ ID NO: 48135 - DNA, 120 bp, synthetic construct
  source 1..120: mol_type = other DNA
aatacaattcacagattctaggatgtgaatgtgttctgattagagtcattcatttgtgctatatagcctaaaccacttatatgtattcctaagctgtgtcacacgttcacctttgggtct

SEQ ID NO: 48136 - DNA, 120 bp, synthetic construct
  source 1..120: mol_type = other DNA
caatattgaatatatttgctaccacagtgggtaaatatttatgccttcctgagtccaaaagtcatctttaaactcttcatcactatactctctgtgtcacacctgtacagtgaaatgaag

SEQ ID NO: 48137 - DNA, 120 bp, synthetic construct
  source 1..120: mol_type = other DNA
aaagcaaacaaattaaaaacagtatatggttcataacactgacaattgtatatcatttcattttctgttattcattacgtatgtttaaaagatttccaacctaccttaacttactgtgag

SEQ ID NO: 48138 - DNA, 120 bp, synthetic construct
  source 1..120: mol_type = other DNA
attaatcattaattggtagattgatttaacaagaatgttaaatcaatgccatagcaataacattaatttatcactaacaattaaatagcaataacattaatttattattaacagttattt

SEQ ID NO: 48139 - DNA, 120 bp, synthetic construct; identical to SEQ ID NO: 13503
  source 1..120: mol_type = other DNA

SEQ ID NO: 48140 - DNA, 120 bp, synthetic construct
  source 1..120: mol_type = other DNA
tgagtcacaaatacattgagctagcttcttcataattcccaaacatccatacaactgaatgagatactcaggtggccatattaataccttagggtgcaaattaaaggaacatttactaaa

SEQ ID NO: 48141 - DNA, 120 bp, synthetic construct
  source 1..120: mol_type = other DNA
tggatctctcctgaattctattatattttttcctccaagaaactatttaaatccttattatctgattatctcagggaaaaacatgtttcacagagtttttcttttggaatgattattagt

SEQ ID NO: 48142 - DNA, 120 bp, synthetic construct
  source 1..120: mol_type = other DNA
acaggaaaaacttctgaattgcaagagtatgtatcttttctttctcatatgaactaatgatagatggagtgtttttactttaatattttatgttctgttgatcattctctaaggcagact

SEQ ID NO: 48143 - DNA, 120 bp, synthetic construct
  source 1..120: mol_type = other DNA
tttaaaaataagattaaacacctaagtatacatggtaatcaatgcattatatagattttctcatgaattacacataagcttagctcaatcacacttaaagttatgctactctagctatta

SEQ ID NO: 48144 - DNA, 120 bp, synthetic construct; identical to SEQ ID NO: 13504
  source 1..120: mol_type = other DNA

SEQ ID NO: 48145 - DNA, 120 bp, synthetic construct
  source 1..120: mol_type = other DNA
ttgcctcaataaaacagcaaaaacatcttctattcaaattggatgaaagcacaaagaaaatctgtccagctgaaatgtcctttgcagctatcttgctatagaagttttcctaacttaaat

SEQ ID NO: 48146 - DNA, 120 bp, synthetic construct
  source 1..120: mol_type = other DNA
aggaaggagcaattttttatcttcttgtactgatacctccctgggaacccaggaataggtggagaacccaaatttcttacagtgtgaagctggggaagaacaaagttgatgcctttgtgg

SEQ ID NO: 48147 - DNA, 120 bp, synthetic construct
  source 1..120: mol_type = other DNA
aactgatcaaatatcctaagtagaaagtttcactggataacagagaatttaaagagcatggtggtgtaactgaagtaaaagagttgttcctacaagacaatgcatttgatgtacgctcag

SEQ ID NO: 48148 - DNA, 120 bp, synthetic construct; identical to SEQ ID NO: 13505
  source 1..120: mol_type = other DNA

SEQ ID NO: 48149 - DNA, 120 bp, synthetic construct
  source 1..120: mol_type = other DNA
gcaagtatgtttttcacttttcaaagattctggcctaactatattcacaaattgggtacatatttcagcctggaatgaaaaataatattctacagaataatcagggcttgggtagcctca

SEQ ID NO: 48150 - DNA, 120 bp, synthetic construct
  source 1..120: mol_type = other DNA
cttacttctactttctacaaaatgcaagaccaggaataaaaagaaaataagaaagggaaggaagggtgaagaaaataaagagtcaggaaaagaagcatggagaaatgttgatttcttcag

SEQ ID NO: 48151 - DNA, 120 bp, synthetic construct; identical to SEQ ID NO: 13506
  source 1..120: mol_type = other DNA

SEQ ID NO: 48152 - DNA, 120 bp, synthetic construct
  source 1..120: mol_type = other DNA
actacaaataccacctgcaaaatacctggtttaccatgagaaacagtcttttctggtttcactatgtcttgttctgaaaataataaaaagaaaatcttttttaggtatttagaagctggg

SEQ ID NO: 48153 - DNA, 120 bp, synthetic construct
  source 1..120: mol_type = other DNA
aattcttatttacaaaatttttgaaactatagttttcaaaacacaggctgtaataaaacataaatataaaagcacaggttgaaaatacatgattttgaaaacgtttcaatattttttcgt

SEQ ID NO: 48154 - DNA, 120 bp, synthetic construct
  source 1..120: mol_type = other DNA
caataacaaatacaactggttattgtaaatagaactaggcataactagctttaaatagtactgggtttctggttaaagaaaagtaaaactggcaaaaatacaaaatgcttatatctggta

SEQ ID NO: 48155 - DNA, 120 bp, synthetic construct; identical to SEQ ID NO: 13507
  source 1..120: mol_type = other DNA

SEQ ID NO: 48156 - DNA, 120 bp, synthetic construct
  source 1..120: mol_type = other DNA
aaaaacaatgtagacttggaaaggtcatacttttttttaggtcaatgctaccttctaataaaatgatagcattttagggacaatctcttaatgggggtacccagggtttggtgcaaatca

SEQ ID NO: 48157 - DNA, 120 bp, synthetic construct
  source 1..120: mol_type = other DNA
ccatgctgtctgtttctcataatgatatgatgaaagtaaaaatcctatgctagtccttagctcacaatagatgcttaataaattcttgctctcattcccttcaaaccacaatagtctata

SEQ ID NO: 48158 - DNA, 120 bp, synthetic construct
  source 1..120: mol_type = other DNA
aaccttagaaatgtctccagaaacctagagtctctgttgagatttatttaaggccattttctaggtgttttagtctagggaatattcccattctcacctaatccagtgctataaaatcat

SEQ ID NO: 48159 - DNA, 120 bp, synthetic construct
  source 1..120: mol_type = other DNA
agtacttaataaaataaagataatgtcaactctgaatctatataaaataaagctcatgttacctggttttgcttcttttttaatttggggctctgagggagagaaaaggcagaaaattta

SEQ ID NO: 48160 - DNA, 120 bp, synthetic construct; identical to SEQ ID NO: 13508
  source 1..120: mol_type = other DNA

SEQ ID NO: 48161 - DNA, 120 bp, synthetic construct
  source 1..120: mol_type = other DNA
acaacaagagttggaagagactctttgaaatagatctaattgggtacttacgtgatttaggaattgagacaaataatgttatggctcaaatgtgttctcccaaacaatctgttgagtcct

SEQ ID NO: 48162 - DNA, 120 bp, synthetic construct
  source 1..120: mol_type = other DNA
tccttataagaagaggaaaagagacacaaatagagaagatgaccacgcgataatagaggcagagattgaagtcatatatcttcacaccaagaaacaccgaagattgccagaaaacaccag

SEQ ID NO: 48163 - DNA, 120 bp, synthetic construct
  source 1..120: mol_type = other DNA
tttaacttccaaaattgtgagagagaaaaatttctccagttttaagcaacacaatttgtgatattttattgtagccatccaaggaaactaatcaattttggtttaggaacataggtgctg

SEQ ID NO: 48164 - DNA, 120 bp, synthetic construct; identical to SEQ ID NO: 13509
  source 1..120: mol_type = other DNA

SEQ ID NO: 48165 - DNA, 120 bp, synthetic construct
  source 1..120: mol_type = other DNA
tgtatttcttatacttctagagaccgtgaagtttgggattaaggtattagcaggtttggtctctggtttggagataatgccttgttactgtgtccttcagagagaaggaatgctgtgtcc

SEQ ID NO: 48166 - DNA, 120 bp, synthetic construct
  source 1..120: mol_type = other DNA
aaggctccagctgtcaatactatttattacacaggtaacacataaattttgagaaaacacattcaaatcatatagatatatattattgtaagtagaagtagaatgttgctagaaatatga

SEQ ID NO: 48167 - DNA, 120 bp, synthetic construct
  source 1..120: mol_type = other DNA
aaaaaacttagcttaattgtgttcttctgttaggtggaagatggaaatagtaagtgaatacttaaaaatttagctaagaacattttcaagcaaagtatggaaggtgcaaactgatttctc

SEQ ID NO: 48168 - DNA, 120 bp, synthetic construct; identical to SEQ ID NO: 13510
  source 1..120: mol_type = other DNA

SEQ ID NO: 48169 - DNA, 120 bp, synthetic construct
  source 1..120: mol_type = other DNA
aagcaaaaacaatgccagcctggacaaaaaagggacagagacatgataaaatgaagggataatgactccagagaaaagccatgaattcaaacgcctgggttaatgggacctcctgtggtg

SEQ ID NO: 48170 - DNA, 120 bp, synthetic construct
  source 1..120: mol_type = other DNA
ggatttgcttaggactcaggacctctttttattttattgcaatttcttccctttaaaaggggaatgtccatcctatacgtatctcatcattttattttgggagtaaataatttgtttcat

SEQ ID NO: 48171 - DNA, 120 bp, synthetic construct; identical to SEQ ID NO: 13511
  source 1..120: mol_type = other DNA

SEQ ID NO: 48172 - DNA, 120 bp, synthetic construct
  source 1..120: mol_type = other DNA
tcatggggcagtagggtgggtatttaatccaatatgactggtgtacttattagaggagaagggtttacagagctagagacacaaagggagaaggtttccatgtgatgatggaggcagagt

SEQ ID NO: 48173 - DNA, 120 bp, synthetic construct
  source 1..120: mol_type = other DNA
ttttggacatctactctccagaactgtgagacaataaatttctgttgttttaagccacccagtttgtggaatttaagccacccagtttgtggaattttactacagtagccctacaacaat

SEQ ID NO: 48174 - DNA, 120 bp, synthetic construct
  source 1..120: mol_type = other DNA
agcctcaaaagagagaaggatgagagcagatgttttgctgattgaatgtctgtgtcctacaataatcagagaaaatcttggttttgtgggaatcaattcaattacttagttacttcttct

SEQ ID NO: 48175 - DNA, 120 bp, synthetic construct
  source 1..120: mol_type = other DNA
ataaaatatttgtactaggacatgacatttgcaaagagatattgtgctatttattctaaacatggaaatcatatatgtgtataaataaaatatacatacctggcttctcttccttttttc

SEQ ID NO: 48176 - DNA, 120 bp, synthetic construct; identical to SEQ ID NO: 13512
  source 1..120: mol_type = other DNA

SEQ ID NO: 48177 - DNA, 120 bp, synthetic construct
  source 1..120: mol_type = other DNA
ggcagaggttgcagtgagcagagatcacaccactgcccactgcctgggcaacagagtgagactctgtctcaaaaaaattttttttgagaaaataatggaaatctgagctgagatttttaa

SEQ ID NO: 48178 - DNA, 120 bp, synthetic construct
  source 1..120: mol_type = other DNA
ctttaagcaaaatattcaacatgaaatcaagataaataacagcatgcatttaagatttgttttatgtatgtatgtacatatgtacgtgtttgtttattgagcatgcatataacatacgtg

SEQ ID NO: 48179 - DNA, 120 bp, synthetic construct
  source 1..120: mol_type = other DNA
gaaacaatgtagaccccacctatccttttttgttgaaattctatagaatgtgtaacttatggctaagttctttagtgcaagattggcaaactttttctgtaactgtcagatagtgtatat

SEQ ID NO: 48180 - DNA, 120 bp, synthetic construct; identical to SEQ ID NO: 13513
  source 1..120: mol_type = other DNA

SEQ ID NO: 48181 - DNA, 120 bp, synthetic construct
  source 1..120: mol_type = other DNA
gtttctagctccaccattctatggattagtctctctggtcaccaatttcccattactttccaagactaatgaacatatttgaccatattgatcactttccctttctttttaagttcctgt

SEQ ID NO: 48182 - DNA, 120 bp, synthetic construct
  source 1..120: mol_type = other DNA
gaccatattgatcactttccctttctttttaagttcctgttcacttggcttttgggaaaggtaaacataatatgtatgctctactgtaatgagataaatattaatactgccttcttttaa

SEQ ID NO: 48183 - DNA, 120 bp, synthetic construct; identical to SEQ ID NO: 13514
  source 1..120: mol_type = other DNA

SEQ ID NO: 48184 - DNA, 120 bp, synthetic construct
  source 1..120: mol_type = other DNA
agtaaggtagagcagagagcagcagagaagaggaagggagttctggagatgtgtggaaggtgacattaagtcatcagaagagcactgaacagcatatacacacaaataaactacttgagg

SEQ ID NO: 48185 - DNA, 120 bp, synthetic construct
  source 1..120: mol_type = other DNA
ttccattccacgtaaactttatattcagtttgtcaacacacacaaaataattttctgggaattttccataattgcattgactctataggtcaatttggaaagaattgacaccttcataat

SEQ ID NO: 48186 - DNA, 120 bp, synthetic construct
  source 1..120: mol_type = other DNA
tttttttttggctaacctctgcttaaggcctagtttagctgtctctttctcagaagcctttttctgatgcagcggaattgcttactccttttatgtgctaatactacttggtagatctct

SEQ ID NO: 48187 - DNA, 120 bp, synthetic construct; identical to SEQ ID NO: 13515
  source 1..120: mol_type = other DNA

SEQ ID NO: 48188 - DNA, 120 bp, synthetic construct
  source 1..120: mol_type = other DNA
ttacctctcatctttctgatattcaggcggaaaaaaaagcacaaatgttaaaccatttacagtgttcttaagatgtaaatacttactctgtttaagagaagcagagtaatcactggcaat

SEQ ID NO: 48189 - DNA, 120 bp, synthetic construct
  source 1..120: mol_type = other DNA
tgtgatggcttttacagaaccccacctactgctcttaacatgcaccagagatacaatacaaagcacagttcaataagaggaaagtcacttttggcccaataaatgtgatttagggacata

SEQ ID NO: 48190 - DNA, 120 bp, synthetic construct
  source 1..120: mol_type = other DNA
atcctctaagaaacatgaatggaaacaccaaaaaaccctaaaatacacatacaattgtgtgaaaatatgtgtgttcagttgtgctcttaaagcccaactagattaagaaaatgttgactt

SEQ ID NO: 48191 - DNA, 120 bp, synthetic construct; identical to SEQ ID NO: 13516
  source 1..120: mol_type = other DNA

SEQ ID NO: 48192 - DNA, 120 bp, synthetic construct
  source 1..120: mol_type = other DNA
taatccaatatgactagcgttatgatcaaaagaggaaaagagatacagagatggacaaacatagagggaatgtaatatgaagacacacagagagaatactgtgtgacaacagaggcagag

SEQ ID NO: 48193 - DNA, 120 bp, synthetic construct
  source 1..120: mol_type = other DNA
ctataagtctatatagtttagcctgttaacaattctagctccacagtcattattgaataatgtcaataaaggcttgtacataatctgttttataccaaatttcttcctaagatgattaat

SEQ ID NO: 48194 - DNA, 120 bp, synthetic construct
  source 1..120: mol_type = other DNA
gaaactttctgttatatttatattaaactgtataactacatctacaatgtgagataaacatatcaaaaaccaatctagagtgcgctaaagcctatatattatgtggtttagaattttcat

SEQ ID NO: 48195 - DNA, 120 bp, synthetic construct; identical to SEQ ID NO: 13517
  source 1..120: mol_type = other DNA

SEQ ID NO: 48196 - DNA, 120 bp, synthetic construct
  source 1..120: mol_type = other DNA
aaagtttaatacaagataataatttggtataagagcagtaggacattataaattttataatgcaaaaggaaagaattttaaaactgaaaagatcctggaaatcatcggaatagctttttt

SEQ ID NO: 48197 - DNA, 120 bp, synthetic construct
  source 1..120: mol_type = other DNA
aaatacatggaaattaaataacatgcttctgaacgatcattgggtcaacaatgaaatcaagatggacatttaaaaattctttgaactcaatgataatagtgaaacaagctatcaaaaagt

SEQ ID NO: 48198 - DNA, 120 bp, synthetic construct
  source 1..120: mol_type = other DNA
tagacaatctaaggtcacacctcaaggaactagacaaacaagaacaaaccaaacccaaacccagcagaagaaaagaaataactaagatcagaacagaaataaatgaaattgaaacaaaca

SEQ ID NO: 48199 - DNA, 120 bp, synthetic construct
  source 1..120: mol_type = other DNA
ttacaactgacaccacaaaaatatggaagattattcaaggctactatgaacacctttacacacacaagctagaaaacctagatgagatggataaattcctggaaatatgtaaccctccta

SEQ ID NO: 48200 - DNA, 120 bp, synthetic construct; identical to SEQ ID NO: 13518
  source 1..120: mol_type = other DNA

SEQ ID NO: 48201 - DNA, 120 bp, synthetic construct
  source 1..120: mol_type = other DNA
ataaataaaatgcactaactcttgccccccccccaaaaattggtaccaattctgttgacattattcgacaagacagagaaagaaggaatccaccctaaatcattgtatgaagccagcatt

SEQ ID NO: 48202 - DNA, 120 bp, synthetic construct
  source 1..120: mol_type = other DNA
caaaaagacaatccatcatgatcacgtgtgtttcatactagggatgcagggatggtttaacatatacaagtcaataaatatgatataccacataaagagaattaaaaacaaaaatcacat

SEQ ID NO: 48203 - DNA, 120 bp, synthetic construct
  source 1..120: mol_type = other DNA
caaacccacagccagcgtaacactgaatgggaaaaagttgaaagcattccctctgaaaactagaacaggacaaggatgcccactcccaccacttctgttcaacatagtactggaaattct

SEQ ID NO: 48204 - DNA, 120 bp, synthetic construct; identical to SEQ ID NO: 13519
  source 1..120: mol_type = other DNA

SEQ ID NO: 48205 - DNA, 120 bp, synthetic construct
  source 1..120: mol_type = other DNA
caaacaaatggaaacatatcacatgctcatggatggatagaatcagtattgtgaaaatgaccagggtagaatcaatatgtgaaaatgaccacattgcccaaagcaatctacaaattcagt

SEQ ID NO: 48206 - DNA, 120 bp, synthetic construct
  source 1..120: mol_type = other DNA
ctggaggcatcacattacatgatttcaaactatattataaggccacagtcaccaaaacagtgtggtactggtataaaaataggcacaaagaccaatgggaaagaatagagaaccccaaaa

SEQ ID NO: 48207 - DNA, 120 bp, synthetic construct; identical to SEQ ID NO: 13520
  source 1..120: mol_type = other DNA

SEQ ID NO: 48208 - DNA, 120 bp, synthetic construct
  source 1..120: mol_type = other DNA
agtaaacagacaacctacagagtgggagaaaatcttcacaatctatacatctgacaaagaaataatatccagaatctacaaggaactcaaacaaattaaaaaatcccatcaaaaagtggg

SEQ ID NO: 48209 - DNA, 120 bp, synthetic construct
  source 1..120: mol_type = other DNA
accttactcctgcaagaatggccataatcaaaaaattaaaaaataatagatgttgtcatggatgcagtgaaaagagaacacttctacactgctggtgggaatgtaagctttataaccact

SEQ ID NO: 48210 - DNA, 120 bp, synthetic construct
  source 1..120: mol_type = other DNA
cacagacatggttatagcagcagaattcacaattgcaaaaacatggaatcaccccaaatgctcatcaaccaatgagttgatgaagaaattgtagtataggtcgggcatggtggaatacta

SEQ ID NO: 48211 - DNA, 120 bp, synthetic construct; identical to SEQ ID NO: 13521
  source 1..120: mol_type = other DNA

SEQ ID NO: 48212 - DNA, 120 bp, synthetic construct
  source 1..120: mol_type = other DNA
ttaaaaaaacacacacacacatcaggtttcacaaactcttcagcatgtgggggagtgttgtgtgtctgtgttttcccactgagaagtccttgtcagtctaggttctagtgcaatggtcct

SEQ ID NO: 48213 - DNA, 120 bp, synthetic construct
  source 1..120: mol_type = other DNA
aatttgtcacttaacatccttctcaaatgatcctgatggccacttagatgtacaaattattgctctgaagggataaaatcatcattcaccacatatagtgcataaaaggataatttatta

SEQ ID NO: 48214 - DNA, 120 bp, synthetic construct
  source 1..120: mol_type = other DNA
gtatattcagttaagatactggacccatttcaaatctgaagacatttcacagttaagcacatatccaaatatattaatgaatacagtgtctgtatatgtctgtctatccatggtctaagc

SEQ ID NO: 48215 - DNA, 120 bp, synthetic construct; identical to SEQ ID NO: 13522
  source 1..120: mol_type = other DNA

SEQ ID NO: 48216 - DNA, 120 bp, synthetic construct
  source 1..120: mol_type = other DNA
gcaaataaggcttaattagagtcagagagaaagttttcagtctactgagacatcaatagataaagctaaaaacagagcatgcttgtgttgatcatggtatgtcaacttttcaatcccaat

SEQ ID NO: 48217 - DNA, 120 bp, synthetic construct
  source 1..120: mol_type = other DNA
aatggaggtaataattggctgtgtatgatggaatatgtttcaaatagtgagtagcaatataagagtagacacacacacccatatatgtttattgtaatgatagggactttagccttattt

SEQ ID NO: 48218 - DNA, 120 bp, synthetic construct
  source 1..120: mol_type = other DNA
taaaaatataaaggtcacattcaatgaattagcaaaggaattaaaaaggaaaaatcaagtgttccaaaaacacacaataggaaaagaacaatctctttaataaacagtgccaggaaaact

SEQ ID NO: 48219 - DNA, 120 bp, synthetic construct; identical to SEQ ID NO: 13523
  source 1..120: mol_type = other DNA

SEQ ID NO: 48220 - DNA, 120 bp, synthetic construct
  source 1..120: mol_type = other DNA
aacaaacaccttattttaaaatgggcaaagcatgtgaacagacacttctcaaaagaaaatatatgaaaggccaacagatatgtgaaaagatgtttgacatttctaatcatgtgggaaata

SEQ ID NO: 48221 - DNA, 120 bp, synthetic construct
  source 1..120: mol_type = other DNA
aacataaattagtacaggcactttggagaatagcatgaaggctcctcaaaaaaactagaattaccatattcagcaattttcagctagtttacagcaatttcacgtctgttatatccaaag

SEQ ID NO: 48222 - DNA, 120 bp, synthetic construct
  source 1..120: mol_type = other DNA
gtgtgtgtgtgtgtgtgtgtatatatatatacactatatatatatagtatgtatgtatagtgtatatatatatacactatatatagtatgtatgtatagtgtatatatataaaatatgtt

SEQ ID NO: 48223 - DNA, 120 bp, synthetic construct; identical to SEQ ID NO: 13524
  source 1..120: mol_type = other DNA

SEQ ID NO: 48224 - DNA, 120 bp, synthetic construct
  source 1..120: mol_type = other DNA
aggcctagctaaaacagggcctcagtgaaagcagctttcaatcagacacttccactagcgtgccatgtcaatttaccattgccatgacaacactcaggagttactgcccctttccatggc

SEQ ID NO: 48225 - DNA, 120 bp, synthetic construct
  source 1..120: mol_type = other DNA
gcctatggggtagtctcttttccctcagagttacccatcttgagtcaatgtagtgaagccagtgtctaggatgcccagacaagagctatcaacttgggggccccagagccagaatcagtg

SEQ ID NO: 48226 - DNA, 120 bp, synthetic construct
  source 1..120: mol_type = other DNA
gcaagctgtcttgctcaggtaagtttactgggagtcttggacccaagacccagtggaaagtttcccacagtggcagataaacagctgcctgaacatttttctttagtgtctccactactg

SEQ ID NO: 48227 - DNA, 120 bp, synthetic construct; identical to SEQ ID NO: 13525
  source 1..120: mol_type = other DNA

SEQ ID NO: 48228 - DNA, 120 bp, synthetic construct
  source 1..120: mol_type = other DNA
aaagcttactagtttgaagagaatattatgtcttctaaaatttaacagaatttttatctaagtaaatcactgatgttcattggctttaaaatggttaaaatggctttaaatggtgacatg

SEQ ID NO: 48229 - DNA, 120 bp, synthetic construct
  source 1..120: mol_type = other DNA
tgaacttattgtgtggtttaaagtcttaaaatgatagaataatcctcacctatagaatgtcaatgtctgctgggcagttcaggatttcttcctttctaggtttatataaaatgtgccaaa

SEQ ID NO: 48230 - DNA, 120 bp, synthetic construct
  source 1..120: mol_type = other DNA
agaaaaagtactttctggctgggtgcagtggatcacaactgtaatctcagcactttggtaggctgaggcaggcagatcacttaaggtcaggagttggagaccagcctggccaacatggtg

SEQ ID NO: 48231 - DNA, 120 bp, synthetic construct; identical to SEQ ID NO: 13526
  source 1..120: mol_type = other DNA

SEQ ID NO: 48232 - DNA, 120 bp, synthetic construct
  source 1..120: mol_type = other DNA
tggatcaggaggtcaggtgattgggaccatcctggctaacacggtgaaaccctgtctctactaaaaaatacaaaaaattagcctggagtggtggcgggcacctgtagtcccagctaatca

SEQ ID NO: 48233 - DNA, 120 bp, synthetic construct
  source 1..120: mol_type = other DNA
ggtagtataggacaagtcagaaatttcaagcaagttttagatagtctgtgtaatttgtgataagattcataaatggggaatttataaagggaactttgtgtaaaattaaaaacttgctat

SEQ ID NO: 48234 - DNA, 120 bp, synthetic construct
  source 1..120: mol_type = other DNA
ttcagcttttttgtcagctcctgttaatttttctcctctgtttatgactgctgttgtggtctgatggtaaagtgttttgtcctagagatctgtgggagcagtgtttcctccaaatacagc

SEQ ID NO: 48235 - DNA, 120 bp, synthetic construct; identical to SEQ ID NO: 13527
  source 1..120: mol_type = other DNA

SEQ ID NO: 48236 - DNA, 120 bp, synthetic construct
  source 1..120: mol_type = other DNA
ggcccttgaacccctttttagcagtgtgggagccagagactaggagccaggaaatgtatttataaaaattacttgtctgtggacaagtttagctgctgtggtcttagcttatagtaatta

SEQ ID NO: 48237 - DNA, 120 bp, synthetic construct
  source 1..120: mol_type = other DNA
gacttacttttgctaaaacttggaaagaagaatcccctgaagatcaactacaaccaaaatggaagggcccttatcaggtgtcattgagtaccccctctgctgttaaacttcagggaatac

SEQ ID NO: 48238 - DNA, 120 bp, synthetic construct
  source 1..120: mol_type = other DNA
tctcagccagaagtagtaacatgatgctgtgggtgggaatgggagctacagtttttctcttcttcctgattgtaatacttcctttgtatcactttagccaatcccttgggaaacatctct

SEQ ID NO: 48239 - DNA, 120 bp, synthetic construct
  source 1..120: mol_type = other DNA
aaatatttcaacaattattgcatcaggaaatcatcttcacagttgctggatttttcatcaacattcccaggctagagaggtctatcttatggcttacttggaaaatcactcactacaagt

SEQ ID NO: 48240 - DNA, 120 bp, synthetic construct; identical to SEQ ID NO: 13528
  source 1..120: mol_type = other DNA

SEQ ID NO: 48241 - DNA, 120 bp, synthetic construct
  source 1..120: mol_type = other DNA
aatcactgcctagtctggaaaggtaggagtaccccccttctgaaaaataaagattgtcctgccacccccattggaacagggaaaaaatatctctatagacacaacttggaagcaaaggat

SEQ ID NO: 48242 - DNA, 120 bp, synthetic construct
  source 1..120: mol_type = other DNA
tgtcttaggagtagctttcccctgtacatcaaaaacttggaacagagatgaatgtacattggccagcgttgtcccccaggggtcactgtccattatttcataagacccacgaataccaga

SEQ ID NO: 48243 - DNA, 120 bp, synthetic construct
  source 1..120: mol_type = other DNA
accttagctaccaacacaggtcaggcattaaagggaattcaagtgtccttagaccatttggcaaatgtagtttttgataatagactagtgttggattatttaccggctgaacacagtgga

SEQ ID NO: 48244 - DNA, 120 bp, synthetic construct; identical to SEQ ID NO: 13529
  source 1..120: mol_type = other DNA

SEQ ID NO: 48245 - DNA, 120 bp, synthetic construct
  source 1..120: mol_type = other DNA
ttcaggatgaaactgttccacctcagatcatcaggcattagattctcataatgagcatgcaacgtagatcccttgcacacgcagttaacaatagggtttgcactcatatgagatttaatg

SEQ ID NO: 48246 - DNA, 120 bp, synthetic construct
  source 1..120: mol_type = other DNA
gttgggaatccctgttttggggacccctgttttagattaccacgattttaccaagtaaaaacagtgctggcacaaggcttccaagcaattccatctactgacctggagaatggaagtgtc

SEQ ID NO: 48247 - DNA, 120 bp, synthetic construct
  source 1..120: mol_type = other DNA
caagaagcagttacagaaaatgaatcttacccttctgcagtccgttaagattaaggaggagtatctaatctttgagggggcaggaaatgaggaaggaggcaggacttgactccagaggca

SEQ ID NO: 48248 - DNA, 120 bp, synthetic construct; identical to SEQ ID NO: 13530
  source 1..120: mol_type = other DNA

SEQ ID NO: 48249 - DNA, 120 bp, synthetic construct
  source 1..120: mol_type = other DNA
gcttgcccttgaattctttcctaggcaaagccaagaacacttgcaggctaagcttcactttggggctcacctgccctgcatctataatgtattatatattttaaaattgccaaaagaaaa

SEQ ID NO: 48250 - DNA, 120 bp, synthetic construct
  source 1..120: mol_type = other DNA
atatatacacaattattatttatcaattaacgtggtagctcatgcctgtaatcccagcactttggaagaccgaggcaggtggatcactcgagaccaggagtttgagaccgacctggccaa

SEQ ID NO: 48251 - DNA, 120 bp, synthetic construct; identical to SEQ ID NO: 13531
  source 1..120: mol_type = other DNA

SEQ ID NO: 48252 - DNA, 120 bp, synthetic construct
  source 1..120: mol_type = other DNA
ctcaactcgtgatagattttctgctttaatctatcagagcatgtttaactttaagggcgtattaacaaatcttgtttttaagaccagtgattctgatgcagatatatctatgcctaccac

SEQ ID NO: 48253 - DNA, 120 bp, synthetic construct
  source 1..120: mol_type = other DNA
catatattcaataagaagaccattagggggatgcaagaaaatatcataaggactttaatgggatgcttcaatcagtttagaaatgttactacattttacttgaagccattatgattcgga

SEQ ID NO: 48254 - DNA, 120 bp, synthetic construct
  source 1..120: mol_type = other DNA
tataagactctaagagaaaatgccttctgagctgtgtatgaattagagttcacaaacgttcttttttcttccttacttatagaggtattctcatataaggcagtctcatttatcaaatgt

SEQ ID NO: 48255 - DNA, 120 bp, synthetic construct
  source 1..120: mol_type = other DNA
agggaaagaaatggtaaatgctttgaaaatttccctttagtcttttaaaggccatttggtaaacaagaattgtctctgacaattagaacaaatttctggaaaaaattttgcttcatgtca

SEQ ID NO: 48256 - DNA, 120 bp, synthetic construct; identical to SEQ ID NO: 13532
  source 1..120: mol_type = other DNA

SEQ ID NO: 48257 - DNA, 120 bp, synthetic construct
  source 1..120: mol_type = other DNA
gaaaccctttgtgttctgcctcttgatgttcaaaggtgattaaagtgatgttgaagagactgtttagtagcaaatttttgtttgcaccatgatcgagcatgaaagattagaggaagttaa

SEQ ID NO: 48258 - DNA, 120 bp, synthetic construct
  source 1..120: mol_type = other DNA
attcagtaaacatttagtatgtgctaagcacttcagtctcccaagaatttttggccaatcaggcttacctatcaattgaaactgaattcttatggatgagtttaattctgatcatagcca

SEQ ID NO: 48259 - DNA, 120 bp, synthetic construct; identical to SEQ ID NO: 13533
  source 1..120: mol_type = other DNA

SEQ ID NO: 48260 - DNA, 120 bp, synthetic construct
  source 1..120: mol_type = other DNA
tcatccacacatttcctatattagtaaatgataccatacttcacctactcttccaaccagaaggttagaagtcttctaagattcctctccatactcacaagtgtgaataacttcatcata

SEQ ID NO: 48261 - DNA, 120 bp, synthetic construct
  source 1..120: mol_type = other DNA
tagtacataagcatggttagttaaaagaaagaaaaaccggggattgggactaggttctaataatgaaactagccatctctattgtccatagagtcctgttgattctattttgtaaagata

SEQ ID NO: 48262 - DNA, 120 bp, synthetic construct
  source 1..120: mol_type = other DNA
agatgtcctttctcttttttgctacatttcaacataccatgcccatttactaagactcagctcactcttcatctttctctggaagcctttcctgacctccttccaccaagggttagagat

SEQ ID NO: 48263 - DNA, 120 bp, synthetic construct; identical to SEQ ID NO: 13534
  source 1..120: mol_type = other DNA

SEQ ID NO: 48264 - DNA, 120 bp, synthetic construct
  source 1..120: mol_type = other DNA
actctgcagccctttactgaaacatgccattaaaggaaataccactttttctctccacataggagatttttcaaaattatatcatggtcatctagctttgggatatgtgaaaacaaaaca

SEQ ID NO: 48265 - DNA, 120 bp, synthetic construct
  source 1..120: mol_type = other DNA
aatgcattggagataattttctattgattagtaccctctggcacagcatgctttaattgttaagatttattaaactctgtcatcctaatcacctccccatcataccctgatcctttaggt

SEQ ID NO: 48266 - DNA, 120 bp, synthetic construct
  source 1..120: mol_type = other DNA
gggtttgtgagaaggagagcacagtaaaatgtctgaatcttgatggacatggctaaagtagtcaagcatggcccttaaaggaaccattatttgtctcaggtttgctatttgtcacatcca

SEQ ID NO: 48267 - DNA, 120 bp, synthetic construct; identical to SEQ ID NO: 13535
  source 1..120: mol_type = other DNA

SEQ ID NO: 48268 - DNA, 120 bp, synthetic construct
  source 1..120: mol_type = other DNA
aaaaaatgagctaagagcattgttttaaaaactagttaatacattgagcattaaaaatagtatataagcatagttggatgagagaatgaaaaaaggagattgagaataggttcaaataat

SEQ ID NO: 48269 - DNA, 120 bp, synthetic construct
  source 1..120: mol_type = other DNA
tagaaacagaatcctttctaatacagttgacttcttaacagtcaagtgtttaagaagcttccaagtttttcttttaatttagaagaaccacagcatctgcttcctatgtggtaagtaata

SEQ ID NO: 48270 - DNA, 120 bp, synthetic construct
  source 1..120: mol_type = other DNA
tttattttttaaaaggaaagaaaagagcattatttttaaattcccataaagtacataagcaagaaaatcagtctgaagaaagctcaaaaagttcaaattatggcttttggaggagtctca

SEQ ID NO: 48271 - DNA, 120 bp, synthetic construct; identical to SEQ ID NO: 13536
  source 1..120: mol_type = other DNA

SEQ ID NO: 48272 - DNA, 120 bp, synthetic construct
  source 1..120: mol_type = other DNA
tagttttgtaagctaaatggccaataatagtgttctattcagattttgaaagatgtagcaacatttaattctggaaagttgctgtctcatgtacttactagtataatatataactaaaat

SEQ ID NO: 48273 - DNA, 120 bp, synthetic construct
  source 1..120: mol_type = other DNA
tccccttttaacgaattaagaaacaggcttccaggtccattttactacataacttacatatcttattgcacttgatcattcaaatacattaactgggctcttattgtgtgccaggaactg

SEQ ID NO: 48274 - DNA, 120 bp, synthetic construct
  source 1..120: mol_type = other DNA
caaaatagcgcacaatttcaaattttccacctttcctcctaccccattcatctctgtttatattgagaatagaattgtagtggtatttttcaagttctatgttttgtagcaaaataatat

SEQ ID NO: 48275 - DNA, 120 bp, synthetic construct; identical to SEQ ID NO: 13537
  source 1..120: mol_type = other DNA

SEQ ID NO: 48276 - DNA, 120 bp, synthetic construct
  source 1..120: mol_type = other DNA
cttagtaagtactcaataaatgtccttgaactaacatggttaaaaccattagaactttctcaatttattgtacgttttcttgtaataaaccaacctcccagtacatatatgtatgtatgt

SEQ ID NO: 48277 - DNA, 120 bp, synthetic construct
  source 1..120: mol_type = other DNA
atttatgtaatatttcttatcagtcatcacagatattaaccgtttaatgatctttgcattgatacatttcttgagtgtttaggttattcacctatacatcctcaaaggctagcaaggcct

SEQ ID NO: 48278 - DNA, 120 bp, synthetic construct
  source 1..120: mol_type = other DNA
tatttattctactgatgacagatataaactaaatagagtaatcaattagaagtttcttaagtgatatgagccaaagagactctggtgactgatgagtatcgatgcatactgtttttcttt

SEQ ID NO: 48279 - DNA, 120 bp, synthetic construct; identical to SEQ ID NO: 13538
  source 1..120: mol_type = other DNA

SEQ ID NO: 48280 - DNA, 120 bp, synthetic construct
  source 1..120: mol_type = other DNA
aaaacactgaaaagtcaaaaaaataggaccaaacacatccattttgaattagccaagtttgtggcaagagagaagcttgatgtttttctttctggagataagggcagtactgaatgtcta

SEQ ID NO: 48281 - DNA, 120 bp, synthetic construct
  source 1..120: mol_type = other DNA
catcagttcttgatgggccctaagattctatatttctaacaagcagctaggtgatgctgatgttgttctttggaccacactttaaatagtaactgtatagattataaccttttatatttt

SEQ ID NO: 48282 - DNA, 120 bp, synthetic construct
  source 1..120: mol_type = other DNA
atatactgtcagtaattccattttaaagaagctgagacttagaagttaaatcatgatgtcaaatcacttagaagttaaatgatgatgtaaaccactccatatcaattgtcccagagctcc

SEQ ID NO: 48283 - DNA, 120 bp, synthetic construct
  source 1..120: mol_type = other DNA
atgatttcctttccataaagataatgttgttggacctactgtggctatagtggcttttgaaatatttttttctgccttagatattaaagacataactcacagaacagataatataggagc

SEQ ID NO: 48284 - DNA, 120 bp, synthetic construct; identical to SEQ ID NO: 13539
  source 1..120: mol_type = other DNA

SEQ ID NO: 48285 - DNA, 120 bp, synthetic construct
  source 1..120: mol_type = other DNA
aatatgttgagggcagtatgacaatgaatgacagtaacctagcactgttccctacagatgtccattttgtaaagataagtagcataggcttgtggtagatctttaaagagaaaatgtaaa

SEQ ID NO: 48286 - DNA, 120 bp, synthetic construct
  source 1..120: mol_type = other DNA
aacttcgtgcctacttggatgctgggttctgaaacagaaagaagagttgtaaatgactcagaagtttaagccaatgtaactgaatggcaagtcatgacttccatgagataagagcaaaag

SEQ ID NO: 48287 - DNA, 120 bp, synthetic construct; identical to SEQ ID NO: 13540
  source 1..120: mol_type = other DNA

SEQ ID NO: 48288 - DNA, 120 bp, synthetic construct
  source 1..120: mol_type = other DNA
atttttttgtattttagtacagatgcagtttcaccatgttggccaggatggtctggatctcctgacctcatgatccgccagcctcggcctcccaaagtgctgggattaaaggcgtgagac

SEQ ID NO: 48289 - DNA, 120 bp, synthetic construct
  source 1..120: mol_type = other DNA
attgtctgacaaaaaactgtgttttcggtgcacagcattaaacacaggtttctgataattttaaatcaatggaccaaataaaattgtacataaagaaactgatggatccatgaaactgct

SEQ ID NO: 48290 - DNA, 120 bp, synthetic construct
  source 1..120: mol_type = other DNA
atttcaaaaaaagtctttcttaagcaatttggtaaaatatagttgtgtaaacaaagataaaaacatttttcttcttatttaatttctccaaaaatttaaaaactatttgcaaatattttt

SEQ ID NO: 48291 - DNA, 120 bp, synthetic construct; identical to SEQ ID NO: 13541
  source 1..120: mol_type = other DNA

SEQ ID NO: 48292 - DNA, 120 bp, synthetic construct
  source 1..120: mol_type = other DNA
catttttagttattgttatctatctataggctagactaggtcttaaattgttttaggttcctccaattcaactttcttccataaaagtggtaaaatgagaactgctctgtccttaaagcc

SEQ ID NO: 48293 - DNA, 120 bp, synthetic construct
  source 1..120: mol_type = other DNA
aaaaagtttctgttttccacatgaaacaactttccttgagatgttggaacaagattccttattattatgagactcttacacccctcaaggctgcctttttcattgactggataatggcat

SEQ ID NO: 48294 - DNA, 120 bp, synthetic construct
  source 1..120: mol_type = other DNA
tgtactggtaatccttttggtaaagctggtattctctgctttaattcaacccagtcataaactactactcagtggctataacaagtctcagcagaatatgtctagacttttagatatgtt

SEQ ID NO: 48295 - DNA, 120 bp, synthetic construct; identical to SEQ ID NO: 13542
  source 1..120: mol_type = other DNA

SEQ ID NO: 48296 - DNA, 120 bp, synthetic construct
  source 1..120: mol_type = other DNA
agacatgggacagagacaactaggacaggttcatcttggcatgaagggataattaagcctaactgtaaaatgattgattagtgatgctttcagataaggatgttgatcaaaaggggggaa

SEQ ID NO: 48297 - DNA, 120 bp, synthetic construct
  source 1..120: mol_type = other DNA
actcaactaaaacaaagtctagaaaagccagggggagaaaacactcagggcacaaaacagggctccaagaatgtaattctctgcacatacttgactgctggaattgcttgttgtaacctg

SEQ ID NO: 48298 - DNA, 120 bp, synthetic construct
  source 1..120: mol_type = other DNA
gggagctggctaaactttctcgaaaaacaatacataaaatctatcctttcttaataaatcctctaatcttgtctttgttctttagacataatcaaagaccacccagtctgcaggtatgtc

SEQ ID NO: 48299 - DNA, 120 bp, synthetic construct
  source 1..120: mol_type = other DNA
atgtcatgtttgccaccatttttataaaggggtaaagaaaaaaaaagaaatttagtgtccaacaatatgctatgctaaaaataaataattgttatactgttgctccagtatttaaaagca

SEQ ID NO: 48300 - DNA, 120 bp, synthetic construct
  source 1..120: mol_type = other DNA
ctgagaaataagaggtggaaaacattgtctaatattgctgaggggtcataataagcaagaaaaccatcctccggatttggcaataaatgttattggtcacctttataggagaggatttag

SEQ ID NO: 48301 - DNA, 120 bp, synthetic construct; identical to SEQ ID NO: 13543
  source 1..120: mol_type = other DNA

SEQ ID NO: 48302 - DNA, 120 bp, synthetic construct
  source 1..120: mol_type = other DNA
aaaagtagtttgtgcattttcttcacttatgattgatgcatttttttaattcctataaactaatttctgtttccaccactctactgaaaatgctctccaaacattcacaggatgacaggg

SEQ ID NO: 48303 - DNA, 120 bp, synthetic construct
  source 1..120: mol_type = other DNA
ttcccactttttcctgaaagtgtttccactttgggaggctggcacactgtagtccctgatctttctggtaacactttttttctcttcactagttattttgcttttccaagaagttgttct

SEQ ID NO: 48304 - DNA, 120 bp, synthetic construct; identical to SEQ ID NO: 13544
  source 1..120: mol_type = other DNA

SEQ ID NO: 48305 - DNA, 120 bp, synthetic construct
  source 1..120: mol_type = other DNA
cacttaggataacgacttccagctgcatcaattttgcttcaaaggacatgattttattctttttatggctgcatagtattccatcatgtagttgtaccatattttctttatccaatccac

SEQ ID NO: 48306 - DNA, 120 bp, synthetic construct
  source 1..120: mol_type = other DNA
cagtaattggattgctggattgaatggtagttctgtttcaagttctttcagaaatttctaaactagtttccacagtgtctgagctaatttacattcccatcaacaatatataagtattcc

SEQ ID NO: 48307 - DNA, 120 bp, synthetic construct
  source 1..120: mol_type = other DNA
gaaaatctctatgtagagtctccacaagcactcaccccacttgaattccctttgcaacttctagttaatcaccttcatcttcccatgcttcagaccttgtagttatacagaactaatgtc

SEQ ID NO: 48308 - DNA, 120 bp, synthetic construct
  source 1..120: mol_type = other DNA
aacaaaatgtcattagtagttttcaataggtttcaaagctgagtgattttttaaaacttaaaaaatcatttactgaacattagtcatggctctaaataattttgaaagtaatcaatgtta

SEQ ID NO: 48309 - DNA, 120 bp, synthetic construct; identical to SEQ ID NO: 13545
  source 1..120: mol_type = other DNA

SEQ ID NO: 48310 - DNA, 120 bp, synthetic construct
  source 1..120: mol_type = other DNA
ctcattcctgtctctaggctagctcctaaatatagctaccatactgaaactgggccaagtagaaagcatcatttctgtttcatgtaacaaatatgctaggtgagtatgatgagcttcacc

SEQ ID NO: 48311 - DNA, 120 bp, synthetic construct
  source 1..120: mol_type = other DNA
ttaagtaaagttacacccctgaacaaggggcaaagggagtaaaattcatgtatcgctagtataaagccaacactggttccatcatactttatagtaatttccttgtctcagctgctctta

SEQ ID NO: 48312 - DNA, 120 bp, synthetic construct
  source 1..120: mol_type = other DNA
gaactgtgttgtgtaaaaatataaaaaaataaagaggtatatcataactgcataaaatatatgtaggtactagtctgttttgtcatttgttaccataaaatatacaaatatataaatcga

SEQ ID NO: 48313 - DNA, 120 bp, synthetic construct
  source 1..120: mol_type = other DNA
aatgaaattaactatagtacatatggtactactgtagtgattttgtagcctctcttgctactattgtgatgaactgaagttttgtgggtagctgcttaaaatgctgtgtgacattaatct

SEQ ID NO: 48314 - DNA, 120 bp, synthetic construct; identical to SEQ ID NO: 13546
  source 1..120: mol_type = other DNA

SEQ ID NO: 48315 - DNA, 120 bp, synthetic construct
  source 1..120: mol_type = other DNA
aatacttttttatctcattttgataatgtagcttttatgtgggtgcaggattgctataacaaagttgttcctatagactttatcataattgaagaaaaaatgaagtcattatatgacaac

SEQ ID NO: 48316 - DNA, 120 bp, synthetic construct
  source 1..120: mol_type = other DNA
ggttcagccaaccaagagaaggcagcagaaaagttctcagacaccattaagaaaatcattgagaagaaaggatttctgcctgaacaggtttttaatgcaaaggaaagtgacccattttgg

SEQ ID NO: 48317 - DNA, 120 bp, synthetic construct
  source 1..120: mol_type = other DNA
aggactgactttatctagaaatatactaacccccaaggactgaagggaaagcataaacaccagcttcaaatcttttgattatacaagaagacctggacaatgagaacctgtattagtctg

SEQ ID NO: 48318 - DNA, 120 bp, synthetic construct; identical to SEQ ID NO: 13547
  source 1..120: mol_type = other DNA

SEQ ID NO: 48319 - DNA, 120 bp, synthetic construct
  source 1..120: mol_type = other DNA
agtgaggaagtaccttgccagtaaacggttgacttttaacattctcttaataattgaataatgccattggccacccacaactctcttgagttctacacctaaggtgttgaagtggtctac

SEQ ID NO: 48320 - DNA, 120 bp, synthetic construct
  source 1..120: mol_type = other DNA
ctttatggaaaggattgtctgctatagaagagacttttgacagagagaatatcatgaaagtctggaagaattgtattattgaagatgtcatctttgttagaggaaaaagccatgaaagcc

SEQ ID NO: 48321 - DNA, 120 bp, synthetic construct
  source 1..120: mol_type = other DNA
gtcaatcaaaaaaatcatgaaatagacagtagatatggcaaaaaaggtgggaggtgaaggatttcaacattcaggtcttggagaaattaaagcactaatacacaccatgccagaggaatt

SEQ ID NO: 48322 - DNA, 120 bp, synthetic construct; identical to SEQ ID NO: 13548
  source 1..120: mol_type = other DNA

SEQ ID NO: 48323 - DNA, 120 bp, synthetic construct
  source 1..120: mol_type = other DNA
ttcgacttctgccactcctgagagagcaagagcaacccgtccttttcctcctcctcctcagcctactcaacatgaagacgtagatgaagacctttatgatgatacataagtatcatcata

SEQ ID NO: 48324 - DNA, 120 bp, synthetic construct
  source 1..120: mol_type = other DNA
ttaccaggaaggcttatagttaacaggaggctattagtagttaagttttggataagtcaaaagttacatctggattttcaactgcatgggggttaatgaacctaactaccacattgttca

SEQ ID NO: 48325 - DNA, 120 bp, synthetic construct; identical to SEQ ID NO: 13549
  source 1..120: mol_type = other DNA

SEQ ID NO: 48326 - DNA, 120 bp, synthetic construct
  source 1..120: mol_type = other DNA
aaaatgccttaatgctgatttatctttcataataggaaattaaaagcaaataccatataaaaatagacatattctttcctccacttggtttattctgctattaatacttgtgattgcatt

SEQ ID NO: 48327 - DNA, 120 bp, synthetic construct
  source 1..120: mol_type = other DNA
cattagaatgtgctcctttagcttagtgaagatcaattttatccacattctgaagtctacttctgtcatttcagccatctcagactctgctcagttctgatcacttgctggagaggtgat

SEQ ID NO: 48328 - DNA, 120 bp, synthetic construct
  source 1..120: mol_type = other DNA
tggagatttttgtttgtttgtttgtttttgtttttcttttaaaagtctggcctcctttccatagggcttctgtagtttgctgggtgtccactccaatccctagtcacctcaaattttccg

SEQ ID NO: 48329 - DNA, 120 bp, synthetic construct; identical to SEQ ID NO: 13550
  source 1..120: mol_type = other DNA

SEQ ID NO: 48330 - DNA, 120 bp, synthetic construct
  source 1..120: mol_type = other DNA
caaagatttcatgatgaggatgccaaaagcaattgcaacaaaagcaaaaattgacaaatgggatctaattaaaccaacgagcttctgcatagcaaaagaaactatcaacagagtaaacag

SEQ ID NO: 48331 - DNA, 120 bp, synthetic construct
  source 1..120: mol_type = other DNA
gtgggcaaaatacatgaacagacacttttcaatacaagacatacatgcagccaataagcatatgaaaaaaaggcttaatatcactgattattagagaaatgcaaatcaaaaccccaatga

SEQ ID NO: 48332 - DNA, 120 bp, synthetic construct
  source 1..120: mol_type = other DNA
attgtggaaaacagtgtggcgattcatcaaagaccagtgtggcataccatttaacacaacaatctcatcactaggtatatacccagaggaaaataaatccttctgttataaagacacatg

SEQ ID NO: 48333 - DNA, 120 bp, synthetic construct; identical to SEQ ID NO: 13551
  source 1..120: mol_type = other DNA

SEQ ID NO: 48334 - DNA, 120 bp, synthetic construct
  source 1..120: mol_type = other DNA
cttaatacctgggcgatgaaataattggtacaacaaaccccatgacacatctttgcccgtgtaacaaacctgcacatcctgcacatgtacacctgaacttaaaataaaatttaagtaaca

SEQ ID NO: 48335 - DNA, 120 bp, synthetic construct
  source 1..120: mol_type = other DNA
ggaaaggacaacataatgcaccttttatctgattagtgagttttcactactccagtaaaaatgctaacaataataaagcaattttttgtacgcagtttttccttttctgaagatatatct

SEQ ID NO: 48336 - DNA, 120 bp, synthetic construct
  source 1..120: mol_type = other DNA
tgttcaacttttcattgatcttccaaagaatgcatgttttaaaattatataaaattactttaaatgggcatgcttattcactaaaaataagaaaataaacaatttattttgatctgatgg

SEQ ID NO: 48337 - DNA, 120 bp, synthetic construct
  source 1..120: mol_type = other DNA
tttagaccaacatcatgaatgtctgcttttttgtagtatcactttcactctacagagagatatagatatagatacaactttcttttggatagatataaacatataaatctccttataaag

SEQ ID NO: 48338 - DNA, 120 bp, synthetic construct; identical to SEQ ID NO: 13552
  source 1..120: mol_type = other DNA

SEQ ID NO: 48339 - DNA, 120 bp, synthetic construct
  source 1..120: mol_type = other DNA
ggttcataaaactcaatccatgataataataaattttaggcatttgacatgctctgtatggagcctctgacatttaaggtgccctcttagcatttcataaacagtgttcaattgcccagt

SEQ ID NO: 48340 - DNA, 120 bp, synthetic construct
  source 1..120: mol_type = other DNA
gccctcttagcatttcataaacagtgttcaattgcccagtaaataaacaaagagcagcgtatgtgctaatggttctagtgctttgataaacttacccaaaatctgctaccagaaagcaag

SEQ ID NO: 48341 - DNA, 120 bp, synthetic construct; identical to SEQ ID NO: 13553
  source 1..120: mol_type = other DNA

SEQ ID NO: 48342 - DNA, 120 bp, synthetic construct
  source 1..120: mol_type = other DNA
tcaattatagttatatactgttatcaaaatattaatggaatatgtatctttggtaaattataaagtaacttaagcaaaaatactttgattttaaaatccagtttgcaaaaaagtttcatg

SEQ ID NO: 48343 - DNA, 120 bp, synthetic construct
  source 1..120: mol_type = other DNA
tttcctaatttgaccaacttaagcaattttgtctttgactaccatacatttaattcatggggctccacctagtggttaatataattattgttttcctagtatttccgttagtatcaattt

SEQ ID NO: 48344 - DNA, 120 bp, synthetic construct
  source 1..120: mol_type = other DNA
cctaggacaatgtcttttgtccagaaattctgcattctaaaaacaccagtatagaataaattcataccttttttaaactattcaagtaatactcatagcacaaccctaatcaataagata

SEQ ID NO: 48345 - DNA, 120 bp, synthetic construct; identical to SEQ ID NO: 13554
  source 1..120: mol_type = other DNA

SEQ ID NO: 48346 - DNA, 120 bp, synthetic construct
  source 1..120: mol_type = other DNA
aaaaagtagtatcagtgctattaatgcactctgacactctttggcacatatttctccccctttttgacacattcacttagcttggtagatacaccctattttaatgttttctatgtgcca

SEQ ID NO: 48347 - DNA, 120 bp, synthetic construct
  source 1..120: mol_type = other DNA
gtggtatatgatcaacaaatattgttgaaggaatgaatgagtgaaataaatggaatatatagaatgactaaaggctccctgttgggtatctgaagtcctagaagaagttgattcatctta

SEQ ID NO: 48348 - DNA, 120 bp, synthetic construct
  source 1..120: mol_type = other DNA
gtgatgtctttatgtgtccaatgatagcaaatatggcctgcaacaattcaatgataccttcaattattgggtttcctggtgctatgttttgtctcagtcagtttaggctaaagttaattc

SEQ ID NO: 48349 - DNA, 120 bp, synthetic construct
  source 1..120: mol_type = other DNA
gaatctatgctaggtcaacagtacagtttaaactttcaagcaaattagcacaattctagtgatgagaattattttttctggagtacttatggctcaagtgctggtcaattattgacttgc

SEQ ID NO: 48350 - DNA, 120 bp, synthetic construct; identical to SEQ ID NO: 13555
  source 1..120: mol_type = other DNA

SEQ ID NO: 48351 - DNA, 120 bp, synthetic construct
  source 1..120: mol_type = other DNA
aggacacagttcattagcattttgctcatcaataataggtatctatttgaaacagccttgcttcccactctgcacacggctttcactcctgtcaatcatattgtaatcttgaaatgaaat

SEQ ID NO: 48352 - DNA, 120 bp, synthetic construct
  source 1..120: mol_type = other DNA
aatacaaccagaaccaacttcgatcttgtacacagaattttgtaagcactcctatgaaaaggtattatctaacgtgtggctgtgggccctcttactagaatagaactactggctttagtg

SEQ ID NO: 48353 - DNA, 120 bp, synthetic construct
  source 1..120: mol_type = other DNA
ctgactttaaaagcaagctcatttcctaagttttgtgaccttgggcattacttaaaacctcaagtcttcattctgtcattgctaaaatggagaaaataatgtaaaattgatgtgagaatt

SEQ ID NO: 48354 - DNA, 120 bp, synthetic construct; identical to SEQ ID NO: 13556
  source 1..120: mol_type = other DNA

SEQ ID NO: 48355 - DNA, 120 bp, synthetic construct
  source 1..120: mol_type = other DNA
tatatatgaagcttaatgaaaagttataatgagatgcttcaggaaaccaaggacagttgttagttaatactggccattgggactgggaggccagagagacagcaggcgagcatttatttt

SEQ ID NO: 48356 - DNA, 120 bp, synthetic construct
  source 1..120: mol_type = other DNA
attcttgtataataatacaatatctaatttctgtaaacatttgccactgaagcccttcgttttgggctacacgtacaagcattggggaaatatggaaccaaaaagtccccatgctaagtt

SEQ ID NO: 48357 - DNA, 120 bp, synthetic construct; identical to SEQ ID NO: 13557
  source 1..120: mol_type = other DNA

SEQ ID NO: 48358 - DNA, 120 bp, synthetic construct
  source 1..120: mol_type = other DNA
tttgcaaggcaaaagctaaatatcatagatttttttctcaatttattttgttattatcacggttgtttctttagcacatagatatctcacatgtggaataaaataaaataataatcatta

SEQ ID NO: 48359 - DNA, 120 bp, synthetic construct
  source 1..120: mol_type = other DNA
ctctaaccctagtagcatataaacttcatgagtcctgggatgatttttttattttccctaatacatgatagtgcttagactgttctttgcacagaagagagatcaacaaatatttgttga

SEQ ID NO: 48360 - DNA, 120 bp, synthetic construct
  source 1..120: mol_type = other DNA
gtaagtggcaaaactgggatttgaattccgtttccaaagttttaagcacttcaacacacttctataactaaagttgctactgatagaattaaaagctttgaagcatttaatacataaaaa

SEQ ID NO: 48361 - DNA, 120 bp, synthetic construct
  source 1..120: mol_type = other DNA
agaggtttctattttttttcaagccagtctttaaatcatgaatcgtattatatagtttcctacgttgagctggtaaaactaagcagtctgagcattaatagaaaatgaataactctctca

SEQ ID NO: 48362 - DNA, 120 bp, synthetic construct; identical to SEQ ID NO: 13558
  source 1..120: mol_type = other DNA

SEQ ID NO: 48363 - DNA, 120 bp, synthetic construct
  source 1..120: mol_type = other DNA
caggattgctgtgaaaattaaacactacacgtgaagtacttcgaatggtgccaggtacaaagcaaacggtggaggtcaatcatttcactgatattttaaactacttttctcgcacttttc

SEQ ID NO: 48364 - DNA, 120 bp, synthetic construct
  source 1..120: mol_type = other DNA
ttcaggatctcctgaatatttggactttgatgaaaacctgttgctactacttgctattactactattaccactactacacacaaagacacgcaatttcacaactttgttgtggtcctaac

SEQ ID NO: 48365 - DNA, 120 bp, synthetic construct
  source 1..120: mol_type = other DNA
gtcactccaaatagcttgacttcaatgtttcagatatgagataagcctccctaaataagtcttaagaggaatgcttattttgcaaagattcagtctgctatactagatggtatctgattt

SEQ ID NO: 48366 - DNA, 120 bp, synthetic construct; identical to SEQ ID NO: 13559
  source 1..120: mol_type = other DNA

SEQ ID NO: 48367 - DNA, 120 bp, synthetic construct
  source 1..120: mol_type = other DNA
tcaagtgatagttcaacttcattcatgtcaaggagttgcagagatcatttttgccactgcagttgaagaaaaacaaacaaacaggcaaaagctaagcaagcaaacaattcctcagtttga

SEQ ID NO: 48368 - DNA, 120 bp, synthetic construct
  source 1..120: mol_type = other DNA
tagactaaatgatttaacaaatatttcctgagtattcaagtactaatattgaaataacagatctccattgattagatgacaatttggtctgccttattgaagggagcattggcgaacact

SEQ ID NO: 48369 - DNA, 120 bp, synthetic construct
  source 1..120: mol_type = other DNA
ggcgcaatctcggctcactgcaacctccacctcctggattcatgccattctcctgcctcagcctccccagcagctgggactataggtgcctaccaccacgcccagctaatttttgtattt

SEQ ID NO: 48370 - DNA, 120 bp, synthetic construct; identical to SEQ ID NO: 13560
  source 1..120: mol_type = other DNA

SEQ ID NO: 48371 - DNA, 120 bp, synthetic construct
  source 1..120: mol_type = other DNA
cccttacatgtatggaaaaacacattagaactgactcactagacgttgaaccctggtgtgcattatcttcagatatttatatttaatttgtctgtctagtaaaattattcagagtggcta

SEQ ID NO: 48372 - DNA, 120 bp, synthetic construct
  source 1..120: mol_type = other DNA
ctctgtctctgtctctgtccctcttacacacctctcaaacccattaagtcaacaacagaaacaaaacaaaaacaattatggttgataagtttctgtaggtgtagttctaaaatggctcca

SEQ ID NO: 48373 - DNA, 120 bp, synthetic construct
  source 1..120: mol_type = other DNA
cccaatggagtttgatgcttacagaaaaactttgctgagtggacattaaacacataaaatgggccacagggcattctctcttttcagcacagaataaatgcatacattgtccctgcctta

SEQ ID NO: 48374 - DNA, 120 bp, synthetic construct; identical to SEQ ID NO: 13561
  source 1..120: mol_type = other DNA

SEQ ID NO: 48375 - DNA, 120 bp, synthetic construct
  source 1..120: mol_type = other DNA
ttcaatgagttcagaaagttgtgcaaaggccacttaccaaggtaaacaagcaggcattccttagttttcctttactgaggggaagtcactagactcttgcttgtttttctgggtaccagt

SEQ ID NO: 48376 - DNA, 120 bp, synthetic construct
  source 1..120: mol_type = other DNA
gaaataatatattttttaaaatgttaatggacagaagccaggtgtgtggtgcatgcttataattccaggtactcaggaggctgaggcaggaggagctcttgagcccaggagtttgaggcc

SEQ ID NO: 48377 - DNA, 120 bp, synthetic construct; identical to SEQ ID NO: 13562
  source 1..120: mol_type = other DNA

SEQ ID NO: 48378 - DNA, 120 bp, synthetic construct
  source 1..120: mol_type = other DNA
ttgcagagaaaatcctggccccctcaactacttttgaaaataatacatgacctctttccatcctatcaacttgacattttggcataatggacataacaagaaatgtgttaggctgtaaat

SEQ ID NO: 48379 - DNA, 120 bp, synthetic construct
  source 1..120: mol_type = other DNA
attggtcttttttattaatcaacagattatctgtaatcttccttcatgcctagcaaacacaataaaattattacaaagacaaaaattttgactatgtgttaggataagttttgctaatat

SEQ ID NO: 48380 - DNA, 120 bp, synthetic construct
  source 1..120: mol_type = other DNA
tcactgttaacatgacagttgtagtatttctccttaaaatacttcagggcagaattaaatcatgctaagaatttatattagagactaggcaccaagaaactcagaaaaagtacagaaaaa

SEQ ID NO: 48381 - DNA, 120 bp, synthetic construct
  source 1..120: mol_type = other DNA
atatttcgtagaggaggacaatgacatgagtgaagatgacatatgtgaattgcaatactattggaacattttaaaaatttagagtagtgaataaaatatatagattaattgaatcttctt

SEQ ID NO: 48382 - DNA, 120 bp, synthetic construct; identical to SEQ ID NO: 13563
  source 1..120: mol_type = other DNA

SEQ ID NO: 48383 - DNA, 120 bp, synthetic construct
  source 1..120: mol_type = other DNA
tatagaaacaacattgtacctttgcaatgagacacaaaaactagtgacaactgaacatgcaaaattaccaatttctgtaaaataaatagcagagagagtgattactagtattggacttca

SEQ ID NO: 48384 - DNA, 120 bp, synthetic construct
  source 1..120: mol_type = other DNA
ccatgcatggcatgccaacatcttcaaattcagaatacaggttcacaagtgtatctccaacccaaatattttttctgatactcacacccaaatagccagcttccagctctagatttctac

SEQ ID NO: 48385 - DNA, 120 bp, synthetic construct
  source 1..120: mol_type = other DNA
tctcattttgattgaatctggcttctaacatgttgaagcaattttgaaatgtatttctactttttaaaatattatcaggtccatgacattgaattctgagtatattaatatttctcttaa

SEQ ID NO: 48386 - DNA, 120 bp, synthetic construct; identical to SEQ ID NO: 13564
  source 1..120: mol_type = other DNA

SEQ ID NO: 48387 - DNA, 120 bp, synthetic construct
  source 1..120: mol_type = other DNA
tatatgcattgcaatatatttttctaatgtgtggctaatcttcctcttctggatttgctctctttgtgtcttaagaaattctactgtaaccaaaagctatatatattcttctctattttc

SEQ ID NO: 48388 - DNA, 120 bp, synthetic construct
  source 1..120: mol_type = other DNA
atttattttctcaatgatacatctgtcatctaatgtattttcctacatttagggcttcatttctgggctcgctgttatgttctctcagtgtgcgttcctatacccgtactatttccatat

SEQ ID NO: 48389 - DNA, 120 bp, synthetic construct; identical to SEQ ID NO: 13565
  source 1..120: mol_type = other DNA

SEQ ID NO: 48390 - DNA, 120 bp, synthetic construct
  source 1..120: mol_type = other DNA
aatttttgaattattcatcacttatgtttaggaatgctaaacattaattttcataggatgatcttgtatccagaagttttgctaatttctcttattcatactaatattttgtttgtgggt

SEQ ID NO: 48391 - DNA, 120 bp, synthetic construct
  source 1..120: mol_type = other DNA
atttttagtgtgttttatatttaatatttaaacataagtacatatgtataatttgtaatgctatataaatgcatatatgtgatcatattacacatattcatgcacattgatttttgcgtt

SEQ ID NO: 48392 - DNA, 120 bp, synthetic construct
  source 1..120: mol_type = other DNA
aacatatggaaaggcatgtaatggcagaaaatcctgactagccaacacaacttgttcttcattccttctctcacccagaatccctcgcagttaaatgtatcaagaatctaaatcttccct

SEQ ID NO: 48393 - DNA, 120 bp, synthetic construct
  source 1..120: mol_type = other DNA
ggcagaggccgccccaaatgaccacacacccccaaccaacaccaacaccacctgcaaacctatcttattattaattttttcatatgatttggaatttcaggttatatttcagcctgagaa

SEQ ID NO: 48394 - DNA, 120 bp, synthetic construct; identical to SEQ ID NO: 13566
  source 1..120: mol_type = other DNA

SEQ ID NO: 48395 - DNA, 120 bp, synthetic construct
  source 1..120: mol_type = other DNA
acttcagtatctggttaattgcattgagacttgtgtaaaatccctgcttattccaatgaacgttattgccttatgtgatcctggtcagcaattctgtttaaggatccagagcccagcacc

SEQ ID NO: 48396 - DNA, 120 bp, synthetic construct
  source 1..120: mol_type = other DNA
tcattttaaggaatgaagatgagaagagccttcaaatcttgaaaatgcacttccatattcctggaaaatgagagttaaaaagccagagtccttgtctccactacatgattactgaatcag

SEQ ID NO: 48397 - DNA, 120 bp, synthetic construct
  source 1..120: mol_type = other DNA
tgctgtggctatttaagtattataagattaacacataacagattaatttctcatttaattgtgtatgatattgccatattatgtctgatgctcctttaatgaaaccttttaaggagctct

SEQ ID NO: 48398 - DNA, 120 bp, synthetic construct; identical to SEQ ID NO: 13567
  source 1..120: mol_type = other DNA

SEQ ID NO: 48399 - DNA, 120 bp, synthetic construct
  source 1..120: mol_type = other DNA
attaatattctggcaaatttctaggagacatcactgtcactctaagtgggaaaaataaaaatgactaattaaaatcctgacagtaatttaagggctgaatttctaaaataataataataa

SEQ ID NO: 48400 - DNA, 120 bp, synthetic construct
  source 1..120: mol_type = other DNA
tgaggatttagctaatgcatcttcttcaacatgatatatgttgcccctgtccccatcactaatatctctaacgatgaaatggctggtgctagatccaaccacctggtatgggattatgga

SEQ ID NO: 48401 - DNA, 120 bp, synthetic construct
  source 1..120: mol_type = other DNA
tctgcaccttttaaaaatatttccaccttatattggcaaaagaaatatagcatcattgtgtgattaaattacttaatggtatctaaccatttcaacttacattgttatatccaagtcaac

SEQ ID NO: 48402 - DNA, 120 bp, synthetic construct; identical to SEQ ID NO: 13568
  source 1..120: mol_type = other DNA

SEQ ID NO: 48403 - DNA, 120 bp, synthetic construct
  source 1..120: mol_type = other DNA
atggggctgagaaaaaaaatcatgttgtgttcttacatttcattaaataacaattatgtttattttaacattagttgcaaaattaggaaagtatgacttaaggctatagttttatacatt

SEQ ID NO: 48404 - DNA, 120 bp, synthetic construct
  source 1..120: mol_type = other DNA
tctccataccacttccaaccccaatccatgcttatgtaagctcaccagaaatccttctcttatcaataaaaaaatcccagtaagatgaaagttgtacagctaagtccctctactaagtgt

SEQ ID NO: 48405 - DNA, 120 bp, synthetic construct
  source 1..120: mol_type = other DNA
tactttgacaccaggaaatattagacaactctgagcacaatgccatgtccacagaatatacttggattagttagaaattttatgttttacgttgaatttggcaagtttatttgtgtttta

SEQ ID NO: 48406 - DNA, 120 bp, synthetic construct; identical to SEQ ID NO: 13569
  source 1..120: mol_type = other DNA

SEQ ID NO: 48407 - DNA, 120 bp, synthetic construct
  source 1..120: mol_type = other DNA
tcttaaatctttggtttccatggctattcctaagattcgctctttggatatttataaaatgtagattcctccatttcactacagacccatggaatcagaatagcataagactttttaaaa

SEQ ID NO: 48408 - DNA, 120 bp, synthetic construct
  source 1..120: mol_type = other DNA
ttgagagcctgaaaatgaaatgattcattactttgttgcaaataactgaatatgcaaaaggcagatcaatgtggcttcacatttcattgtataatattacctttttcctttagggaagct

SEQ ID NO: 48409 - DNA, 120 bp, synthetic construct
  source 1..120: mol_type = other DNA
taagctgaaagtaagtggaaactttataatgcactttaaaaatggttttactcatatagggacaaagaaacaacagtatagaatacaataagccataaactgatcatttttccttggcac

SEQ ID NO: 48410 - DNA, 120 bp, synthetic construct; identical to SEQ ID NO: 13570
  source 1..120: mol_type = other DNA

SEQ ID NO: 48411 - DNA, 120 bp, synthetic construct
  source 1..120: mol_type = other DNA
taaaactttacttattctaccaccttccaaacacatcttcagtgtaattcagaccatatcatgggctccagacacatatatggtcaatgtctttaacatcattatattcaacagcctaat

SEQ ID NO: 48412 - DNA, 120 bp, synthetic construct
  source 1..120: mol_type = other DNA
agcccctttttctattcccaccatattatttgggtgaaaatacagagactgtgatggtggtgcttgtaaatggagatgccactctagtaaacacttagaattaactgagtccagatagtt

SEQ ID NO: 48413 - DNA, 120 bp, synthetic construct
  source 1..120: mol_type = other DNA
atgtctttggtgacaaataaatgcccatgttgctatttatggtgttgtgtataaatagtgctatttttccatacttcagcatatgaagatgaaatcaagagtcatgaattgaacaaacac

SEQ ID NO: 48414 - DNA, 120 bp, synthetic construct; identical to SEQ ID NO: 13571
  source 1..120: mol_type = other DNA

SEQ ID NO: 48415 - DNA, 120 bp, synthetic construct
  source 1..120: mol_type = other DNA
aatgatctcagaaaataaaagtgatttctatttccaagtttgctactggcaagatgccttcggttcctaggctgagtcatcacttgcactgactttcctacagatcattgattctcagca

SEQ ID NO: 48416 - DNA, 120 bp, synthetic construct
  source 1..120: mol_type = other DNA
attacatggaaactctgcacttctgcattaggaaggagagatacatcagtggtttgagtcaactcttatgacacttttcagcttatctatcttgtttgtcaaaagcagaatattggaaaa

SEQ ID NO: 48417 - DNA, 120 bp, synthetic construct
  source 1..120: mol_type = other DNA
gtcaaaattattgaggcacgaacattgttatggaaaaataattccctaagggataggaaaatggtttcagattttccactgccttacactacccccagagacaaaggcagtaacgaggaa

SEQ ID NO: 48418 - DNA, 120 bp, synthetic construct; identical to SEQ ID NO: 13572
  source 1..120: mol_type = other DNA

SEQ ID NO: 48419 - DNA, 120 bp, synthetic construct
  source 1..120: mol_type = other DNA
tcagaggaggagaaattacttaactactgtgttgcctctttggattcagtttgctgtttctcagtccgtaggtgaatcttccatactcagatatgtcagaccaggagttagaaacaagtt

SEQ ID NO: 48420 - DNA, 120 bp, synthetic construct
  source 1..120: mol_type = other DNA
gaaaaggcttaagtgagtccactggtccaggaaagtcaataactgaaccagcaacaaaagttggcaagacatatcattctcctgattttttttttctttgcaacggtcatccctagaact

SEQ ID NO: 48421 - DNA, 120 bp, synthetic construct
  source 1..120: mol_type = other DNA
ctatatgtccttacttaaaggcaaaagcctaataatgtatctctgaatgcccccagtgactcatggttatcacaactctgataaatgcagctccaaatgatttccttgtaataatgctgg

SEQ ID NO: 48422 - DNA, 120 bp, synthetic construct; identical to SEQ ID NO: 13573
  source 1..120: mol_type = other DNA

SEQ ID NO: 48423 - DNA, 120 bp, synthetic construct
  source 1..120: mol_type = other DNA
cattttgggggcattaatgcagtttgaattaaaaagtagatatatttatatcatcctaaatcaataatcatatgctgcaaacctttatatatgtaattttctagtgattgaaattctaga

SEQ ID NO: 48424 - DNA, 120 bp, synthetic construct
  source 1..120: mol_type = other DNA
cagcatgtgattattgatttaggatgatgtaaaatatacaattgcaacaatattagaaattacaaaagcctacttaatgaagtggtcagtgtggatttatttcctccagataatgttttc

SEQ ID NO: 48425 - DNA, 120 bp, synthetic construct
  source 1..120: mol_type = other DNA
gccccaacctttcttttgagctgctttcatagtgaacaataacatgtggttcaagtattcctgtgatataagtgcagactaaaataaagacattaatgtccccaaatgtcttccatatga

SEQ ID NO: 48426 - DNA, 120 bp, synthetic construct; identical to SEQ ID NO: 13574
  source 1..120: mol_type = other DNA

SEQ ID NO: 48427 - DNA, 120 bp, synthetic construct
  source 1..120: mol_type = other DNA
tataagacccctattctaagacaaaggcagtgtctgtgttaaagtgaaaaaatggaatttaaagtagggcagagatgactttgactcttacctttccctattacccacagtgtgacactg

SEQ ID NO: 48428 - DNA, 120 bp, synthetic construct
  source 1..120: mol_type = other DNA
aaagtaggtatcaaggtgcctggcaaagagtagatgcaccacttttggacttcctccaaacaattaccacacctttaaaggcaaactcttcaccttctcatttacatttcatattatttc

SEQ ID NO: 48429 - DNA, 120 bp, synthetic construct
  source 1..120: mol_type = other DNA
acttctcagagattatagtctatgctttttttgcatcctttgtgtctagtatctgaattaattacatcatattagatgcagaataaataattgttgaatatagcactgatcagtccacac

SEQ ID NO: 48430 - DNA, 120 bp, synthetic construct; identical to SEQ ID NO: 13575
  source 1..120: mol_type = other DNA

SEQ ID NO: 48431 - DNA, 120 bp, synthetic construct
  source 1..120: mol_type = other DNA
aggaaaggcagttagtccattcaggagatggaagttacaaaatttaattaagaatttcatgctttttcatagcaatatagagtgtgacaagactaacgcaggcagaatatgcctcagagc

SEQ ID NO: 48432 - DNA, 120 bp, synthetic construct
  source 1..120: mol_type = other DNA
tcatctccaatgtttaccaagtgcttgggatatattatgcactaaatatatattttaggaatagaaaggagagaatcagagaatttggggacaagtgcttcttaatattctttacttccc

SEQ ID NO: 48433 - DNA, 120 bp, synthetic construct
  source 1..120: mol_type = other DNA
ttagagacaaacaaataaacacaagtttttaaaaatatgtgtgtgacctctgcagttctggtttacatatttgcaaaggggatgcagctaatgtactgtgttctcaataatatatatttc

SEQ ID NO: 48434 - DNA, 120 bp, synthetic construct; identical to SEQ ID NO: 13576
  source 1..120: mol_type = other DNA

SEQ ID NO: 48435 - DNA, 120 bp, synthetic construct
  source 1..120: mol_type = other DNA
gaagaaagatataagaatgatagctaacattgtctacttactacgtgtcaggcaatattctctaccattttctcattcagtgctcacaactccatgaggtatataggttctgttattatt

SEQ ID NO: 48436 - DNA, 120 bp, synthetic construct
  source 1..120: mol_type = other DNA
tgggctcagtgaaggatgtaagaaagtatgtagtactgaggcagaacttgacaagggaaagaaattagacccacaaacatgaaatggaaagaaagacacattttagagaaacagagagag

SEQ ID NO: 48437 - DNA, 120 bp, synthetic construct
  source 1..120: mol_type = other DNA
tgtgacttccaaggcgaaatcaaaaaaggtcatgcagtattcacctgctaatctagtgacacctgctttgggaaatgcagctgccatgtgagtaatctaattaacaccaccatgctggag

SEQ ID NO: 48438 - DNA, 120 bp, synthetic construct; identical to SEQ ID NO: 13577
  source 1..120: mol_type = other DNA

SEQ ID NO: 48439 - DNA, 120 bp, synthetic construct
  source 1..120: mol_type = other DNA
tagggaaagaatttattaattctaattttaaaattggggaaggttttcactgagagtacgccatttagatttaggcttataaattgggtggaatttcattggccaggaaatgccatttta

SEQ ID NO: 48440 - DNA, 120 bp, synthetic construct
  source 1..120: mol_type = other DNA
ggttcaagtgattctcctgcctcagcctcccaagtagctgggattacaggcacccaccagcatgcccggctaatttttgtatttttagtagagacaggttttcaccatactagccaggct

SEQ ID NO: 48441 - DNA, 120 bp, synthetic construct
  source 1..120: mol_type = other DNA
ttaagctgagaatggttcttagagttcttacttggcttacagtaggataattttccctcacctgagatacaaaatgtaaaaaggagaggtctttggaggaagacattatttctgttttga

SEQ ID NO: 48442 - DNA, 120 bp, synthetic construct; identical to SEQ ID NO: 13578
  source 1..120: mol_type = other DNA

SEQ ID NO: 48443 - DNA, 120 bp, synthetic construct
  source 1..120: mol_type = other DNA
aaaataaaccagaaagtgaacaattattttcttaataatatgtgactggtgaaaacacacccacacactaagactagtgttctcagctgttctttttaccggcatgtttcaaatccaatc

SEQ ID NO: 48444 - DNA, 120 bp, synthetic construct
  source 1..120: mol_type = other DNA
atagctatagaagtcgagttttaaataatctgagataaaaactattcattttgaaaataatactcaatagaaatgcatccaggaattttccagtttaagttatgggcctgagtatattta

SEQ ID NO: 48445 - DNA, 120 bp, synthetic construct; identical to SEQ ID NO: 13579
  source 1..120: mol_type = other DNA

SEQ ID NO: 48446 - DNA, 120 bp, synthetic construct
  source 1..120: mol_type = other DNA
ttcagttttatcattagtgacatttagtgagaatgttaatacaaatattttgttggagctttctggcttggtgtcaacattgaacatagctagaacaaaaaaagaaagtgaaattggaaa

SEQ ID NO: 48447 - DNA, 120 bp, synthetic construct
  source 1..120: mol_type = other DNA
ttcttacccagcttgctctactgaagtgctcagaaatataacttcaaaaactctctctctctttctcttttgtagttataagatgcttgctgatctgagatattttttcacgaacataat

SEQ ID NO: 48448 - DNA, 120 bp, synthetic construct
  source 1..120: mol_type = other DNA
aacttataacgcacatcatcacacagcatcaaaaaagaaaataaaattgtctcacaacatcttgtggttgcttcctaatatgatactgcactgttcctaaagttatttaatagtgattaa

SEQ ID NO: 48449 - DNA, 120 bp, synthetic construct; identical to SEQ ID NO: 13580
  source 1..120: mol_type = other DNA

SEQ ID NO: 48450 - DNA, 120 bp, synthetic construct
  source 1..120: mol_type = other DNA
aactttctctttgtcataatgatacatttaactgttttgtattctattgggctaaagaacttggtaaatatagttttttaacattttacatttttttcctgaatatatgttttaaaatct

SEQ ID NO: 48451 - DNA, 120 bp, synthetic construct
  source 1..120: mol_type = other DNA
tcctctatctctaactggacaacccaattaaaaagcataatataaaattttcttgaatgacatctgaacaatgttgtcagtacgtgaagactgtgggaagatattcctcaagaaattgta

SEQ ID NO: 48452 - DNA, 120 bp, synthetic construct
  source 1..120: mol_type = other DNA
acttctttgaagagcttccttaaattacacttgtatattctagacaagctgggctgtattggcatgttaaaacagtgacatatacaaaggcataagaatgtgaaataacagccttatgca

SEQ ID NO: 48453 - DNA, 120 bp, synthetic construct; identical to SEQ ID NO: 13581
  source 1..120: mol_type = other DNA

SEQ ID NO: 48454 - DNA, 120 bp, synthetic construct
  source 1..120: mol_type = other DNA
aaacataaaattagccctcctttatttgataagaaattagatatgcattctattaacttctattttaatgttggggagatgagatgaactaggatatcttagggacagggttggctactg

SEQ ID NO: 48455 - DNA, 120 bp, synthetic construct
  source 1..120: mol_type = other DNA
aatactgtaatttccttgagggcagggctcaaggaaattcctgtatccacgtataatgataaagcattattttgtgtagttaggcattttttaacataagatcgctttaacttctcacct

SEQ ID NO: 48456 - DNA, 120 bp, synthetic construct
  source 1..120: mol_type = other DNA
tgagatgacaaagttagggttaaatttctacactatacctctgggagcatcctggattataaagtagatatcaccacaaattgttcctaaaagtgaacagggtgcctatctgaatcacca

SEQ ID NO: 48457 - DNA, 120 bp, synthetic construct; identical to SEQ ID NO: 13582
  source 1..120: mol_type = other DNA

SEQ ID NO: 48458 - DNA, 120 bp, synthetic construct
  source 1..120: mol_type = other DNA
taatctttgtgtggcaaaagtgtcaagtaaaatgaaatggccaatatctgatagtcttcctggacaaaaaagaaaattacgtatatttaaatccaatgtttacctcacattttatttttt

SEQ ID NO: 48459 - DNA, 120 bp, synthetic construct
  source 1..120: mol_type = other DNA
aatacattctttatttctataacaatgttattcattatattctatattgtcttttgaactttttaaaatggaaatcctgtcctaaaacacatttatgtgggatctcaagaatcattctca

SEQ ID NO: 48460 - DNA, 120 bp, synthetic construct
  source 1..120: mol_type = other DNA
taaaggaggcttttaatatatctttctgctactcatggtataaaatttcaaaatatacttcaaaattaacttagtgaactggactaattcttcgagatttccgtgcactcgagttagtgg

SEQ ID NO: 48461 - DNA, 120 bp, synthetic construct
  source 1..120: mol_type = other DNA
aataataaaaaaaattaatagaccttaatttttagagtagatttatgattacagcaaaactaatcagaaagtgcggagttcctgtacattctttctgtaacagactgaacgtgtcccttc

SEQ ID NO: 48462 - DNA, 120 bp, synthetic construct; identical to SEQ ID NO: 13583
  source 1..120: mol_type = other DNA

SEQ ID NO: 48463 - DNA, 120 bp, synthetic construct
  source 1..120: mol_type = other DNA
aatacaccctcttcaagcacactcaggctccatcactatcagtatccctcaagagtgtggtacatttattaccatccaagaagcaatattgatacatctttatcaaccaaagtccatagt

SEQ ID NO: 48464 - DNA, 120 bp, synthetic construct
  source 1..120: mol_type = other DNA
ctccacctattcacccttctctcctccccaaaccctagtaaccactgagtttttaactttctccatacttttgccttttccagaatgtcatacagttgtaattatacaacatgttgactc

SEQ ID NO: 48465 - DNA, 120 bp, synthetic construct
  source 1..120: mol_type = other DNA
tttatttatctgttcacctattgaaggacatcttggttgcttcctagttttaggaaatacgaataaagctgatataaacatttgtgtgcaggtttttgcatatacataagttttcagctt

SEQ ID NO: 48466 - DNA, 120 bp, synthetic construct; identical to SEQ ID NO: 13584
  source 1..120: mol_type = other DNA

SEQ ID NO: 48467 - DNA, 120 bp, synthetic construct
  source 1..120: mol_type = other DNA
tatttaaaatgtaattgtcaaacccaaggacacctaaatcttctatgttatttcccaggaattttatagttttatgttttacatttaggtctatgatccactttgagttaattttcttgt

SEQ ID NO: 48468 - DNA, 120 bp, synthetic construct
  source 1..120: mol_type = other DNA
tttctcctttgtcaaagatcagctgattatatttttgtgagtgcatttctgagttctctattctctttcattgatttatttgtctattctttcactaatatcatactgtcctgattactg

SEQ ID NO: 48469 - DNA, 120 bp, synthetic construct; identical to SEQ ID NO: 13585
  source 1..120: mol_type = other DNA

SEQ ID NO: 48470 - DNA, 120 bp, synthetic construct
  source 1..120: mol_type = other DNA
gttgtgtttttaatcttgttcattcaaatttttcattactgatataacagagtaactgacttttgcatattaactttgcgccctgaaaccttgttatattctgtgattagttccaggaag

SEQ ID NO: 48471 - DNA, 120 bp, synthetic construct
  source 1..120: mol_type = other DNA
tccttttcttatattgttgcattcgctaaaactttcagtatgatgttgatgaaggggcgtgaaagcgaacatccttgccgtgttcctgacctcagcaagagagcttttaacttcgcacca

SEQ ID NO: 48472 - DNA, 120 bp, synthetic construct
  source 1..120: mol_type = other DNA
tgcttttaccattactattcatagggtcatgtgtttttttcttctttagcctgttgatgttattgattacttaaacacttttcaaatgtcaaactagacttgcatatctggaatacgtat

SEQ ID NO: 48473 - DNA, 120 bp, synthetic construct
  source 1..120: mol_type = other DNA
attgaggtccaagactctcaaaaagggtttggttggagtaaaataaaagccgatgctatttcaacaaaccagaaactgttctttgtgttgtgcttaccagaatgacagagtgtctctcct

SEQ ID NO: 48474 - DNA, 120 bp, synthetic construct; identical to SEQ ID NO: 13586
  source 1..120: mol_type = other DNA

SEQ ID NO: 48475 - DNA, 120 bp, synthetic construct
  source 1..120: mol_type = other DNA
atttcaaacataaaaaaaaaacataagaataccatggagtgtgaaagttcatgtggattcttgaatggagaacgtggggtagaaacagtgaaccttggctggaaagtcacactgaggctt

SEQ ID NO: 48476 - DNA, 120 bp, synthetic construct
  source 1..120: mol_type = other DNA
gccaaacttgttcctgccattgtaccaatgaatttgcaaaattttgctaagagaatatagtacgtactgaaaaactgacagtacaaagtcattattgccatgttgtaaaaataatcagaa

SEQ ID NO: 48477 - DNA, 120 bp, synthetic construct
  source 1..120: mol_type = other DNA
ttttttctgtgtgtatcaagggcatactttctatatcctgtgtgccattattactaattctcatgcttacaaccttacttaaagcattttatgtcatttaatttggtacccaatagcatg

SEQ ID NO: 48478 - DNA, 120 bp, synthetic construct; identical to SEQ ID NO: 13587
  source 1..120: mol_type = other DNA

SEQ ID NO: 48479 - DNA, 120 bp, synthetic construct
  source 1..120: mol_type = other DNA
taaactaagcccaaagttttatttggagatagctctgtgctctattgttcaagcaggttaacattttataattgccactggctatcatcaattatttcttctttgaagaccaaagttgta

SEQ ID NO: 48480 - DNA, 120 bp, synthetic construct
  source 1..120: mol_type = other DNA
gaagtaaaacccagactttacaggtcataatgatgaaaaacttttaactactactttgacattccaagatctgagttaaattttgactcttaaagcattgctttacaactagcttgtaat

SEQ ID NO: 48481 - DNA, 120 bp, synthetic construct
  source 1..120: mol_type = other DNA
cttaatttacaatgagaatacagtaacaatgcatttttacatagggctgatggtttcagattatttctgtgatttaattttagagtatgaaacttaaatttcattaatttggtccaggaa

SEQ ID NO: 48482 - DNA, 120 bp, synthetic construct; identical to SEQ ID NO: 13588
  source 1..120: mol_type = other DNA

SEQ ID NO: 48483 - DNA, 120 bp, synthetic construct
  source 1..120: mol_type = other DNA
tcttttatataatcttgtctagaatgtcaaagggatacataaagttggttatttcctcacagacataattgacacacattgcccattttttggggtgaaattctctttaatgttgaatag

SEQ ID NO: 48484 - DNA, 120 bp, synthetic construct
  source 1..120: mol_type = other DNA
atatgaacttccattgagtacgtattattctgctgtgataagtaggatttagatctttctcttattaaaggaatagtgttagtggaaagaaagagttagaaaagaagggactagaaagta

SEQ ID NO: 48485 - DNA, 120 bp, synthetic construct; identical to SEQ ID NO: 13589
  source 1..120: mol_type = other DNA

SEQ ID NO: 48486 - DNA, 120 bp, synthetic construct
  source 1..120: mol_type = other DNA
cccattccccagcgcctggccagttgtgggcgctcaataaatattaaacaaccaaagcacgaagtattgtcaaaaagtttagaattcacaggaatctataatattatcataatttaacat

SEQ ID NO: 48487 - DNA, 120 bp, synthetic construct
  source 1..120: mol_type = other DNA
ttttaaatgtaaaattgtttctgtctttttttataactttggtacaccaagaaatatgaacattcattatattcaaatggataaagttttctcagggaaatcattactcttagatattat

SEQ ID NO: 48488 - DNA, 120 bp, synthetic construct
  source 1..120: mol_type = other DNA
tttacaaagcttgcaatagcacttgggttttgcctggtgttgtgacaacgtaaaacactattacaattatgtagggaaccattgtttacagaatagcatcaaaagcaaagaaagaaactc

SEQ ID NO: 48489 - DNA, 120 bp, synthetic construct; identical to SEQ ID NO: 13590
  source 1..120: mol_type = other DNA

SEQ ID NO: 48490 - DNA, 120 bp, synthetic construct
  source 1..120: mol_type = other DNA
tcagatcacaaagtgtacttaaactctattaagagtaacaaaaatcatataatttttctaaataaagtccacatgtttaaacaaataaataaaataaatatttaaagagaatttaactat

SEQ ID NO: 48491 - DNA, 120 bp, synthetic construct
  source 1..120: mol_type = other DNA
tttatagaatgtcattattacttctcatattactttattaaaagcacaaaatatctattttttgtatcagttattagtaatagatatactatcataaaaatatgcaaaatatccaaatat

SEQ ID NO: 48492 - DNA, 120 bp, synthetic construct
  source 1..120: mol_type = other DNA
cacaatccaagagcctaagctttaataagataaaagaagattttagtaaacaaaattataaaatcatctgaaggagtaagatcctatctctaagaaccatttccagtctcttgtccacta

SEQ ID NO: 48493 - DNA, 120 bp, synthetic construct
  source 1..120: mol_type = other DNA
tgtttggtactattattagtgtgggtgttttatatctagtcaatcttcttttgatatactgtggctatgaaaacaacctatgaatatcatgagtaatcagcacttttatactagaggggg

SEQ ID NO: 48494 - DNA, 120 bp, synthetic construct; identical to SEQ ID NO: 13591
  source 1..120: mol_type = other DNA

SEQ ID NO: 48495 - DNA, 120 bp, synthetic construct
  source 1..120: mol_type = other DNA
tatatttcagaaactaaaattccactcttcttcaaaaagaaaccaacagaaacatctactgaactgtaaaatttcagagtccccagaagccagaataaattggaaaacattttccatgca

SEQ ID NO: 48496 - DNA, 120 bp, synthetic construct
  source 1..120: mol_type = other DNA
tagtttacttatttgacatgtgagggattgaaggattttcttgatatatttatgtcaaaagatcttaacttctgatattaggatttcatacatttaattgcatctcaaatttgaaggaga

SEQ ID NO: 48497 - DNA, 120 bp, synthetic construct; identical to SEQ ID NO: 13592
  source 1..120: mol_type = other DNA

SEQ ID NO: 48498 - DNA, 120 bp, synthetic construct
  source 1..120: mol_type = other DNA
atatagtatatatcataatatactctatttttgctgttattttcttcattttaacttttacatattttttttcaagcaacagaaatagtttttgcatgtataggattgggccatctttat

SEQ ID NO: 48499 - DNA, 120 bp, synthetic construct
  source 1..120: mol_type = other DNA
taaacagtttggggagtttccctgttcggaactgatattcaaagttcagttacacaaaagaaagaccaacccagattgctgtctcacattctccctggcacagaaaaacatgcaaggaca

SEQ ID NO: 48500 - DNA, 120 bp, synthetic construct
  source 1..120: mol_type = other DNA
cttgctccactgtcttggttgttttctcttccttctttccaggtacagctgcaaaacaaagataaggtttaaagaagagttccagacagaaatactgcttctgctcaaaaaaagcatttt

SEQ ID NO: 48501 - DNA, 120 bp, synthetic construct
  source 1..120: mol_type = other DNA
agtgataatcttctgcctacatttctacaattgtatctgttttattcctttacactccgctttgataaacaagctctacatagaattccacttgacaggactatgattaatctacttgca

SEQ ID NO: 48502 - DNA, 120 bp, synthetic construct; identical to SEQ ID NO: 13593
  source 1..120: mol_type = other DNA

SEQ ID NO: 48503 - DNA, 120 bp, synthetic construct
  source 1..120: mol_type = other DNA
tgatgaggaactgattattgctattgcacccaaatatcaccccacataaaactgaaagaagaaaaaatacaactttaaaatgaagaaatgtgtctgtagccaacttaacccactgatgaa

SEQ ID NO: 48504 - DNA, 120 bp, synthetic construct
  source 1..120: mol_type = other DNA
agctaagccagatttagctttcagtttcatcaaatacaggatgtatagaacattttaaaccatattgtgaagaaataattagaccaatcaaaaatgtctataaggtaactggtcctgatc

SEQ ID NO: 48505 - DNA, 120 bp, synthetic construct
  source 1..120: mol_type = other DNA
tatgcactggttagaaaaaaattccctatatttccaggaaagtaacctattattttacccaattatgaccccaaaatagagcaaaccatgtgactgtgaagcaagggagatgttaaacta

SEQ ID NO: 48506 - DNA, 120 bp, synthetic construct; identical to SEQ ID NO: 13594
  source 1..120: mol_type = other DNA

SEQ ID NO: 48507 - DNA, 120 bp, synthetic construct
  source 1..120: mol_type = other DNA
ttcccttgaagggcaaccacaattctggttattctaagggattatgtgtcctagaagaagaagcaatgaatgttttagagtgcacagtccagttttgccactgaatttctgcaaaaatga

SEQ ID NO: 48508 - DNA, 120 bp, synthetic construct
  source 1..120: mol_type = other DNA
tgaaaacaatttaaggaaatcagcccagtggcagccacataactcattaaatagaagctgttattattttattaacctttgcctaaaacacaatcatctcactttcacaggcaaactcct

SEQ ID NO: 48509 - DNA, 120 bp, synthetic construct
  source 1..120: mol_type = other DNA
atgtaagtaaggagtaaagggcaatgtagaaatacatatctgaagaaatagcctggaattcatcccagagaaacaaaaagatggaaaatatacaagaggttaacagacatagaagataga

SEQ ID NO: 48510 - DNA, 120 bp, synthetic construct; identical to SEQ ID NO: 13595
  source 1..120: mol_type = other DNA

SEQ ID NO: 48511 - DNA, 120 bp, synthetic construct
  source 1..120: mol_type = other DNA
ctatgcagtagtatcacattttggctttaatttcagtctttcctgatacctaataatgccacatgcttttcatatacttatcagcatttagataacctcttctgtggagtgcctctttag

SEQ ID NO: 48512 - DNA, 120 bp, synthetic construct
  source 1..120: mol_type = other DNA
ttcttccacttacatttttttctctctggtttacgttaacaggagtttcaatgataattaaattcaatgtatcaatctttcctttgtaactaatgctttttgtattctatttaaaaagat

SEQ ID NO: 48513 - DNA, 120 bp, synthetic construct; identical to SEQ ID NO: 13596
  source 1..120: mol_type = other DNA

SEQ ID NO: 48514 - DNA, 120 bp, synthetic construct
  source 1..120: mol_type = other DNA
caagaaatctgctaggattttgactgggattatgatgaattaatagatcattttgagaattgatatctttacaaaatcaagtcatctgattggtgaacataaaatatccctccattgagt

SEQ ID NO: 48515 - DNA, 120 bp, synthetic construct
  source 1..120: mol_type = other DNA
cattgtagtcatctttcactttattttccaaagttttgctcttgatttctaaagcagttatgtttcatttgacattttatgcagaaaacttgctagtcactcagttgtagcaattttcct

SEQ ID NO: 48516 - DNA, 120 bp, synthetic construct
  source 1..120: mol_type = other DNA
ggaaaacccactatggtgtgtgatagaactggtgatcgcaaacatccttattttgttttgattagcagggggaaaacctttaatttcctccattaagtatgatgtttgctaatggttttt

SEQ ID NO: 48517 - DNA, 120 bp, synthetic construct; identical to SEQ ID NO: 13597
  source 1..120: mol_type = other DNA

SEQ ID NO: 48518 - DNA, 120 bp, synthetic construct
  source 1..120: mol_type = other DNA
ttttctattctctggaaaatttgatgtaagattggtgctaattttttcttaaatgtttgaaataattcaccagtgaaaccatctggctaaaattgagggaggggaatagaattacaatta

SEQ ID NO: 48519 - DNA, 120 bp, synthetic construct
  source 1..120: mol_type = other DNA
accttctctgttttttcttaatatattttcataagcattcataatttttattgtattttattgataataatattttgacttttcctgttgtactacttgatttctaaataaatagctttg

SEQ ID NO: 48520 - DNA, 120 bp, synthetic construct
  source 1..120: mol_type = other DNA
aagcatataaattttatcatacatttgttcattagatctccaaaatcccacttttttctttgacttatagaatacttagaaatgtattacttacatttaccatagcatctagaattgttc

SEQ ID NO: 48521 - DNA, 120 bp, synthetic construct; identical to SEQ ID NO: 13598
  source 1..120: mol_type = other DNA

SEQ ID NO: 48522 - DNA, 120 bp, synthetic construct
  source 1..120: mol_type = other DNA
caatgtacgctataagaggctagtaagatgtgtagtgcctgagtctattctatgaatgttctgtctcaaatcaacatggaaatgaaacactgacaatttgtaactataatagagccacac

SEQ ID NO: 48523 - DNA, 120 bp, synthetic construct
  source 1..120: mol_type = other DNA
aactgaagtgtgacttacatataaagaccaagttttcttttcaacgatgggttcataatttctggcacacatattaaatagagaaggctagtcccttaaagtgctatgttttttgttgct

SEQ ID NO: 48524 - DNA, 120 bp, synthetic construct
  source 1..120: mol_type = other DNA
caaacattagaaataaacagctcatctaagtaagtgaattttttaacttcttggagtcaaaagaagaccgtcatcagtttctctttctataccacaagatatctggaatatcctttagtg

SEQ ID NO: 48525 - DNA, 120 bp, synthetic construct; identical to SEQ ID NO: 13599
  source 1..120: mol_type = other DNA

SEQ ID NO: 48526 - DNA, 120 bp, synthetic construct
  source 1..120: mol_type = other DNA
aattctccaatacaattgacatccctcccttttttctccgtatcacccatgggggctctgatgtatgccctttattagcagtattagcaggtacttttttttttttatggagttttgcat

SEQ ID NO: 48527 - DNA, 120 bp, synthetic construct
  source 1..120: mol_type = other DNA
catgcctggctaatttttttgtattgttttgttttgtttgttttagtagagacagggtttcaccatgttggtcaggctggtctcgaactcctgacctcaggtgattcacctgcctcggcc

SEQ ID NO: 48528 - DNA, 120 bp, synthetic construct
  source 1..120: mol_type = other DNA
agtggtaagaaaatattgtgccgtttgaagtgtccctcatatgacacatattacttcggagaggtagacctacagccatagcatgataaactattatttccaaagatagaatgctattat

SEQ ID NO: 48529 - DNA, 120 bp, synthetic construct
  source 1..120: mol_type = other DNA
gaaaaaatattgcatcagtttagtctccagatacatattatggtggaaagtggaaacagaggtttctcgtcaattctcaggtgatgctaactacttaatctgttcacaaggctatcactt

SEQ ID NO: 48530 - DNA, 120 bp, synthetic construct; identical to SEQ ID NO: 13600
  source 1..120: mol_type = other DNA

SEQ ID NO: 48531 - DNA, 120 bp, synthetic construct
  source 1..120: mol_type = other DNA
cagtggttctggtagaagacaatgaaggcttgaattagtatggcagtaatggctacaaataagagaaaatatgctcaagaaacagaaacagtaagttggaaagagaaaatgaggacttta

SEQ ID NO: 48532 - DNA, 120 bp, synthetic construct
  source 1..120: mol_type = other DNA
tccgcctcctgggttcacgccattctcctgcctcagcctcccgagtagctgggattacaggcacctgccaccacgcctggctaatttttcgtatttttagtagagacgggatttcaccgt

SEQ ID NO: 48533 - DNA, 120 bp, synthetic construct
  source 1..120: mol_type = other DNA
tattttttattattttaagttccggggtacaagtgcaggaagcgcaggtttgttacataggtaaacgtgtgccatggtggtttgctgtaccttatcaacctatcacctaggtattaagcc

SEQ ID NO: 48534 - DNA, 120 bp, synthetic construct; identical to SEQ ID NO: 13601
  source 1..120: mol_type = other DNA

SEQ ID NO: 48535 - DNA, 120 bp, synthetic construct
  source 1..120: mol_type = other DNA
gcaactgagaaatctagtaacataaggatggaagcattctgttggcttagcaatgatgatgtcatcagcattggctggagcttcagtggcatggtagggacaggagcttagtctttgtgg

SEQ ID NO: 48536 - DNA, 120 bp, synthetic construct
  source 1..120: mol_type = other DNA
gagacagggagagagagagaggtgtaaatcaaggaaaagaagtaattttaatcagagaaaaaacatttccaagatgaggaacaatgccagtaacaagaaagaggaggacgccacaaaatg

SEQ ID NO: 48537 - DNA, 120 bp, synthetic construct; identical to SEQ ID NO: 13602
  source 1..120: mol_type = other DNA

SEQ ID NO: 48538 - DNA, 120 bp, synthetic construct
  source 1..120: mol_type = other DNA
atagtagaatgatttataatcctttaggtatatatacccagtaataggattgccgtgtcaaacagtatttctggttctagatccttgaggaattgccacactgtcttccacaatggttga

SEQ ID NO: 48539 - DNA, 120 bp, synthetic construct
  source 1..120: mol_type = other DNA
gcatgttctcacacataagtgggagtggaacaatgagaacagggaggggaacatcacacactggggcctgtcggtgggtggggggcaaagggagggatagcattaggagaaatacctaat

SEQ ID NO: 48540 - DNA, 120 bp, synthetic construct
  source 1..120: mol_type = other DNA
agatggatatgggttaaataaaaacaccagctactatactattttttattcccagccaactatcttcatcatcatttctcatatacttcactccctctttcctcattcaatttgtcaccc

SEQ ID NO: 48541 - DNA, 120 bp, synthetic construct; identical to SEQ ID NO: 13603
  source 1..120: mol_type = other DNA

SEQ ID NO: 48542 - DNA, 120 bp, synthetic construct
  source 1..120: mol_type = other DNA
ttaatcttgccttttctctccaaagtctttagcttttctttttcattgttattaagaatattaacaatattcttctggcagccagtctgaagaacgctattgtcattaaattatttttct

SEQ ID NO: 48543 - DNA, 120 bp, synthetic construct
  source 1..120: mol_type = other DNA
ctcttccaatctcataactaatgccctagtccaggtcctaacacttttcactacattgttgagaatctttctaatctgcctatttcaaaattttcctttattagttactctccctaaagc

SEQ ID NO: 48544 - DNA, 120 bp, synthetic construct
  source 1..120: mol_type = other DNA
tcctacaatggtcttgagataattactgttcctcatatacatactacaaatttgtatcactttgccttgctctgaaatctatgcccaggatatttttttctaactcatttacatagcaaa

SEQ ID NO: 48545 - DNA, 120 bp, synthetic construct; identical to SEQ ID NO: 13604
  source 1..120: mol_type = other DNA

SEQ ID NO: 48546 - DNA, 120 bp, synthetic construct
  source 1..120: mol_type = other DNA
gcaagctgctatcatattaatgactaaatactatgtatctccaaataaaatatgacttaaaagtaggcttaagataagacaatttatgctgcagataaattgacacattacagtgaacac

SEQ ID NO: 48547 - DNA, 120 bp, synthetic construct
  source 1..120: mol_type = other DNA
tatcttaaaaacaaaaaaaaatacttgcttattctactcacatgtgaaaggctagaggtggaccagttgtaaagtatgctaagtattgtggaatttggggattgggtagtaaatacatga

SEQ ID NO: 48548 - DNA, 120 bp, synthetic construct
  source 1..120: mol_type = other DNA
aaacccttcatgagtttcaaaacagctatggttgctttgaaaaggacacttatttctgttcgtgctgtagttgcaaataaactcaatatgtagaattatatttaaattgagaattggggt

SEQ ID NO: 48549 - DNA, 120 bp, synthetic construct
  source 1..120: mol_type = other DNA
ccaaaatgtttggccatactctataaactcagtgaccattcttagttgaggactctggtgagttcactaattgatggttcaatttcaattctgtctatgtgctaactccaatttgtcctg

SEQ ID NO: 48550 - DNA, 120 bp, synthetic construct; identical to SEQ ID NO: 13605
  source 1..120: mol_type = other DNA

SEQ ID NO: 48551 - DNA, 120 bp, synthetic construct
  source 1..120: mol_type = other DNA
tgtgttaaatataatttggccaaggttttcttctaacaatatccaggctcccattgatgcagagcgcagagtctatggatcagctaccaggagttcaacctttgcttcttaactgtgtct

SEQ ID NO: 48552 - DNA, 120 bp, synthetic construct
  source 1..120: mol_type = other DNA
acaacgtcaagagattgagaccaccctggccaacatggtgaaaccctgtctgtactaaaaatacaaaaattagctgggcgtgatggtgcgtgcctgtagtcccagctactcaggaagctg

SEQ ID NO: 48553 - DNA, 120 bp, synthetic construct
  source 1..120: mol_type = other DNA
taataaaaataaaatctcactccaaaagaaacctatcttctgctatttggacatcttgttgcttttagctttgtctaatttttgaacataagttggccacacttttgtcctttcaacata

SEQ ID NO: 48554 - DNA, 120 bp, synthetic construct; identical to SEQ ID NO: 13606
  source 1..120: mol_type = other DNA

SEQ ID NO: 48555 - DNA, 120 bp, synthetic construct
  source 1..120: mol_type = other DNA
gtacaaatgatgtcaatgaaagatgtatcatgatcacctagctaaaaactgacatcacaaatattagattataagaaaaagaaatgactaggaaatagattttagccctatctactgtaa

SEQ ID NO: 48556 - DNA, 120 bp, synthetic construct
  source 1..120: mol_type = other DNA
ttgctttcccttagagatatatgtatatataaaataatcaataaattaatttatagagtagctaacattaatttatactgtatcaataaacataaatttatattagatattaagttacat

SEQ ID NO: 48557 - DNA, 120 bp, synthetic construct; identical to SEQ ID NO: 13607
  source 1..120: mol_type = other DNA

SEQ ID NO: 48558 - DNA, 120 bp, synthetic construct
  source 1..120: mol_type = other DNA
tattcttgaacaaagtgaatcttgttcatgtgagtacttttagttaaagtttcatttgttcgattcctaatctcttaaggcagtatgttgcactagaatgctctccagatgatggggatc

SEQ ID NO: 48559 - DNA, 120 bp, synthetic construct
  source 1..120: mol_type = other DNA
tggtcctaaaggaataaaactataggctttagaacagtaatgataaaatcttgtgcaaaataggtttgtttctatatcaacgaactagtaaaatcaataaatagagctcttttctaagca

SEQ ID NO: 48560 - DNA, 120 bp, synthetic construct
  source 1..120: mol_type = other DNA
tttaattgaaaccgcaccaatctcctctttggctcgttcagtttctgcaagttcagatattaaaggaatgagaagtggatattagtgatgccaaattcacatcttatactattgagaata

SEQ ID NO: 48561 - DNA, 120 bp, synthetic construct; identical to SEQ ID NO: 13608
  source 1..120: mol_type = other DNA

SEQ ID NO: 48562 - DNA, 120 bp, synthetic construct
  source 1..120: mol_type = other DNA
gcaattcccctgccccagcctcccgagtagctgggactacaaccgcccgccaccatgcccagctaatttttgtatttttagtagagacggggtttcaccatgttggccaggctggtcttg

SEQ ID NO: 48563 - DNA, 120 bp, synthetic construct
  source 1..120: mol_type = other DNA
agcatttaaaagggcttctttgtttagcttttaatcatggttgagtctgctaaaagttgtttaatactgattgcaagcaaacaatatttgacctcaatgaattagttttacactgtaaaa

SEQ ID NO: 48564 - DNA, 120 bp, synthetic construct
  source 1..120: mol_type = other DNA
cttttggtttctctaaatacttagagtggaagacaggagagctgccctgaagtcataatctgaactgttggggctaggacagagtattggatcacaaatcaaagctagttaaagtcaaag

SEQ ID NO: 48565 - DNA, 120 bp, synthetic construct
  source 1..120: mol_type = other DNA
catatatattcttatttttattcttattggtatttgtttgtatcacccttcacccatatatgctcagcactgatgctctgagaacaaccaaatcaaacaaggcgagcctttacacccctc

SEQ ID NO: 48566 - DNA, 120 bp, synthetic construct; identical to SEQ ID NO: 13609
  source 1..120: mol_type = other DNA

SEQ ID NO: 48567 - DNA, 120 bp, synthetic construct
  source 1..120: mol_type = other DNA
tgttttataccttccaggtaaagactttagatcaatggctcttaaacttaagcatgcatcaggttcacgctggagggctattgaaacagatgctgagcgcaaaaggtctgattcagtatg

SEQ ID NO: 48568 - DNA, 120 bp, synthetic construct
  source 1..120: mol_type = other DNA
attcctactgtgagtccccctccctacttacctcagttactaccatgagtttcagccttctagcagaaaacagagtccatatggctctgtatttctcctagaagctgacatacttccaaa

SEQ ID NO: 48569 - DNA, 120 bp, synthetic construct; identical to SEQ ID NO: 13610
  source 1..120: mol_type = other DNA

SEQ ID NO: 48570 - DNA, 120 bp, synthetic construct
  source 1..120: mol_type = other DNA
tgactatttttgcacacagttatcatctgctctactactactatgaatattattaagaatcattcttaaccctgtctgcaccttagaataagctggggagtttttctaagcctatgatat

SEQ ID NO: 48571 - DNA, 120 bp, synthetic construct
  source 1..120: mol_type = other DNA
gagtcactgatatacacaactcatacaattacatgatctctgacctccttggcctcctcaattcagaaaactagaaactccacttctctggcaatttccaactatatttgtaccctcaga

SEQ ID NO: 48572 - DNA, 120 bp, synthetic construct
  source 1..120: mol_type = other DNA
tccattccttgttcttgccactttctcatttttcaagattttcctcatatcctcactttacttcttaccaagcttatgcataaatgagccatagttaaatcactcacgtattttctgttg

SEQ ID NO: 48573 - DNA, 120 bp, synthetic construct
  source 1..120: mol_type = other DNA
caggaccctagaaatctccctctaaaggatcttgggaagaatccttccttgcctcctcctagagtctgctagttgccaggaacccttggcattccttggcttgaagctgcgttgctgcaa

SEQ ID NO: 48574 - DNA, 120 bp, synthetic construct; identical to SEQ ID NO: 13611
  source 1..120: mol_type = other DNA

SEQ ID NO: 48575 - DNA, 120 bp, synthetic construct
  source 1..120: mol_type = other DNA
ttcaaatgtggatcacatttatgagatcacttagcactggccagtaatattaccacagacccaataaagttgctttctcatactcttaacaaaagttgaaaatattctcttccctcctta

SEQ ID NO: 48576 - DNA, 120 bp, synthetic construct
  source 1..120: mol_type = other DNA
cactaccacaccagcacatactcatccatttttctttccagttccaaaaggtgatcagttcctgcccctttttagtaccaatccttccatatttttttctggatcccatctccttttgcc

SEQ ID NO: 48577 - DNA, 120 bp, synthetic construct; identical to SEQ ID NO: 13612
  source 1..120: mol_type = other DNA

SEQ ID NO: 48578 - DNA, 120 bp, synthetic construct
  source 1..120: mol_type = other DNA
cacctaagaaatagaatatcgccaaggcctttgaaacttcttacttttcctactagcactgcacgcttctctatctcaaagttacagttgttctatattttgtaataattatttccttat

SEQ ID NO: 48579 - DNA, 120 bp, synthetic construct
  source 1..120: mol_type = other DNA
gtgtgattttttgagatataactatgttgatatgagtagctgtagttgattaactttaactgctgtctagcattccaatgtttggtctacaaactatggatttattctcctgccagtgga

SEQ ID NO: 48580 - DNA, 120 bp, synthetic construct
  source 1..120: mol_type = other DNA
cctagataaatgacacatttttctccctaaattctgcattcacatcagcagcatacgtgagagtttcttttgctccgtatcactaccatcaccagaataagcctattccctaattttgaa

SEQ ID NO: 48581 - DNA, 120 bp, synthetic construct
  source 1..120: mol_type = other DNA
tcttatatctagtgcccatttttttttctgcccattgtctatcaaggtctttgtcttttttttttttaatttttggagttgttcatctattttttgctattaatctcttgctatttaaat

SEQ ID NO: 48582 - DNA, 120 bp, synthetic construct; identical to SEQ ID NO: 13613
  source 1..120: mol_type = other DNA

SEQ ID NO: 48583 - DNA, 120 bp, synthetic construct
  source 1..120: mol_type = other DNA
ttcttatgtcagatttttgctcaagtgtgatgtattttaagtctctttttttccgtcctattgggaaatttgtttatatctacaccaataccattctaccctttataatacaatatctgg

SEQ ID NO: 48584 - DNA, 120 bp, synthetic construct
  source 1..120: mol_type = other DNA
ccatttgaaatcctgtccctttttcccctacctcttcatgtcttaactgaacctagattttacttctgtcagtattcatcagtctagctctttgtgtcaaccttgatgaacattcttgga

SEQ ID NO: 48585 - DNA, 120 bp, synthetic construct
  source 1..120: mol_type = other DNA
acatcttacctttcctggtacttaaacctcataaaatcatcactctagtgctgtatgagtgctgttttgaatatattctggcagcaccagctgtgatactattagtaattatataatata

SEQ ID NO: 48586 - DNA, 120 bp, synthetic construct; identical to SEQ ID NO: 13614
  source 1..120: mol_type = other DNA

SEQ ID NO: 48587 - DNA, 120 bp, synthetic construct
  source 1..120: mol_type = other DNA
gacatatattagtagattagatgatagatatctgactcacatttaggcactgaagtgtggttaaggagatgaatatagtcaggctcggtggctgaacataacacccaatctgtgcaatgc

SEQ ID NO: 48588 - DNA, 120 bp, synthetic construct
  source 1..120: mol_type = other DNA
ctgaccatgcatatggaatacatgatcccagccctaaggtccttgaggtggaataaagtgacctgggacagtgctacccaaggttctgaaaaatagtgatccttgatgtgatcattgaaa

SEQ ID NO: 48589 - DNA, 120 bp, synthetic construct; identical to SEQ ID NO: 13615
  source 1..120: mol_type = other DNA

SEQ ID NO: 48590 - DNA, 120 bp, synthetic construct
  source 1..120: mol_type = other DNA
agcccaaggtacactttcttcatccacaccacaccctgacacataactttcgatgtggaagcatggagtgctcttctttagcatcgcaccagtaatctgaaaggttttcattttcttgaa

SEQ ID NO: 48591 - DNA, 120 bp, synthetic construct
  source 1..120: mol_type = other DNA
tcttccctatgctgttctcgtgatagtgaataagtctcacaagagctgatggttttaaaaatgggagttctctcacacaagctctctttttgcctgcaaccatccatgtaagatgtgact

SEQ ID NO: 48592 - DNA, 120 bp, synthetic construct
  source 1..120: mol_type = other DNA
gaaaagggactaatatatgctctattctgaaggtgatgtacgtcccaagcttgtccatgtcctccagtatttttcctacagtgatttcgggtgtttcctcaggacctagagtaaacaatc

SEQ ID NO: 48593 - DNA, 120 bp, synthetic construct
  source 1..120: mol_type = other DNA
ggactgactttaaccctgtcaatctcatctatccctttaaattcaacattatggaattgcatcacataaatacatagtttatgttaaattatctatctctatcattctcatttgacctca

SEQ ID NO: 48594 - DNA, 120 bp, synthetic construct; identical to SEQ ID NO: 13616
  source 1..120: mol_type = other DNA

SEQ ID NO: 48595 - DNA, 120 bp, synthetic construct
  source 1..120: mol_type = other DNA
gaaacttatattgtgtttaagatgatttggcaagctaatttgctaatttcctgcaaaatatgctgatctcttcaaaacctgattggatagtctgtttcatagatagcagaacttacagat

SEQ ID NO: 48596 - DNA, 120 bp, synthetic construct
  source 1..120: mol_type = other DNA
caatctaaagctctctcccagtgctacaaaattatcagatttgtttgatatattttcttgattaagcatttctacagactaagtatcagcatagcaaagactccataatatagagttcca

SEQ ID NO: 48597 - DNA, 120 bp, synthetic construct
  source 1..120: mol_type = other DNA
taaaaaaagacattcctatcaagctactcaatatatttttcaatttttatctgatgtatctactgacataatatgtctcaaaaactacttgggaggcttaggcaggagaatcacttgaac

SEQ ID NO: 48598 - DNA, 120 bp, synthetic construct; identical to SEQ ID NO: 13617
  source 1..120: mol_type = other DNA

SEQ ID NO: 48599 - DNA, 120 bp, synthetic construct
  source 1..120: mol_type = other DNA
tcagcattttttcctaagcatattgtcaaagttaccattgctgcaaatgccacagtatgttatggttatcagttaatacttcataatccaagaatagaaaccttaaaagggaattgtcac

SEQ ID NO: 48600 - DNA, 120 bp, synthetic construct
  source 1..120: mol_type = other DNA
tgcctactggtttgatcaactgattaatctttaggataattcagtctgatgtgtactgaagagttcacttattatactgcaaaatgagaaataaaaatgtaacacttcacaaaggggtta

SEQ ID NO: 48601 - DNA, 120 bp, synthetic construct; identical to SEQ ID NO: 13618
  source 1..120: mol_type = other DNA

SEQ ID NO: 48602 - DNA, 120 bp, synthetic construct
  source 1..120: mol_type = other DNA
tgtaaggttatcttaattgtttaaagattgtgtgtataatattggaagctaaagaaaaataagatctgagaaaaggaaaatataatactgtgccatttttctgatataatccaaatatat

SEQ ID NO: 48603 - DNA, 120 bp, synthetic construct
  source 1..120: mol_type = other DNA
tacaggcaaatgcattttcctcaaagtctataaaatagtgtgaaaagaatgagttcacttcataaattattcaaattgatggttttaatttttgaactacagctagttactgctaagttg

SEQ ID NO: 48604 - DNA, 120 bp, synthetic construct
  source 1..120: mol_type = other DNA
caatagtcattctgtatgtctctctgtctttctataatgcacacactatcttaggttcttcttacatgcgtaagtgagaagatgtgttatgcttgaggaaatgcaactctgaaccaacag

SEQ ID NO: 48605 - DNA, 120 bp, synthetic construct
  source 1..120: mol_type = other DNA
aatttataaaaatgtaattgttctatttggtgtttcttccttcactcaataagccatcatcaagcgcccaatgtgtcctggcattacaataggtgctctgggaataaagagaaaaaacag

SEQ ID NO: 48606 - DNA, 120 bp, synthetic construct; identical to SEQ ID NO: 13619
  source 1..120: mol_type = other DNA

SEQ ID NO: 48607 - DNA, 120 bp, synthetic construct
  source 1..120: mol_type = other DNA
acaatactaaataactcagtgaagctccttcagtaggagttagccaggcaaaatcaagaggtgatagttttaaatgagggaaatataaatggtttcagaaattttcatttgaaatgatta

SEQ ID NO: 48608 - DNA, 120 bp, synthetic construct
  source 1..120: mol_type = other DNA
ggtttatttgtcttgtctagttgtttgactctcaatcagtttttttctcatcagaatgtaaatatattttgggcaaaatctacttttgctctcactgcaactcccctgagcactcaggaa

SEQ ID NO: 48609 - DNA, 120 bp, synthetic construct
  source 1..120: mol_type = other DNA
tgcttttacactaaactgtgaaagagtacttcgcaaatactgcacagatgaattcactgagggtcttgtgaagttgcagactctgattcagtaggtcttgagtggggccaaaaatccttc

SEQ ID NO: 48610 - DNA, 120 bp, synthetic construct; identical to SEQ ID NO: 13620
  source 1..120: mol_type = other DNA

SEQ ID NO: 48611 - DNA, 120 bp, synthetic construct
  source 1..120: mol_type = other DNA
tatgtcattcaattgtaattcagtattcaattgcaaatcaaataatattatgaaattgtgagaacagaggaatttaaaaacagttacctggttccacatgtttttctttcttttcctgtt

SEQ ID NO: 48612 - DNA, 120 bp, synthetic construct
  source 1..120: mol_type = other DNA
aagaaacatgcatgtgctgatgccagattgcagcaactaataatggcttacataaaaaggctaagattatatacttaaaataattcttttttccatttatcttgggagtttccttatggg

SEQ ID NO: 48613 - DNA, 120 bp, synthetic construct
  source 1..120: mol_type = other DNA
aaagggtgaaaaaaattaaatttgctattatattagatcaatatgaaataaatttgagtcaaaatagtaagtacaaaagataattattacagctttttaagaaattgcttagtttttctg

SEQ ID NO: 48614 - DNA, 120 bp, synthetic construct; identical to SEQ ID NO: 13621
  source 1..120: mol_type = other DNA

SEQ ID NO: 48615 - DNA, 120 bp, synthetic construct
  source 1..120: mol_type = other DNA
tagcacatttcacgtggactgcctcttctaagaatcttcttacatggaagaaatagctgttaagctaagacaaaggctttgtgaggcatatttaagacactaaaatagaaaaagaagttt

SEQ ID NO: 48616 - DNA, 120 bp, synthetic construct
  source 1..120: mol_type = other DNA
tctcaagattaagctgacatttacattataataagtactaattttataagaattgcaagcactaattttacatgaagtgctatcatctacatttctattcttatttattttgccttgaca

SEQ ID NO: 48617 - DNA, 120 bp, synthetic construct
  source 1..120: mol_type = other DNA
tgaagactagaatatgttcatactgaaagaactctacaaactatattttaaaaatatagagtgtcatagaatgctacggtcatcacatcaatttcccaagtatacaattttgttagtcag

SEQ ID NO: 48618 - DNA, 120 bp, synthetic construct; identical to SEQ ID NO: 13622
  source 1..120: mol_type = other DNA

SEQ ID NO: 48619 - DNA, 120 bp, synthetic construct
  source 1..120: mol_type = other DNA
atcagaatcgaataccagctatacataagattaaaagttaaaataaagtcccctcaatcttatcagaaagctgaaaaatagctgtgctaatttgttcattatataggatagctcatggtg

SEQ ID NO: 48620 - DNA, 120 bp, synthetic construct
  source 1..120: mol_type = other DNA
aattatagctcacaaacatttacaaaatgtacaggatggtctcttgtacttttcatcctgtttcccttaaccataattaaaaatatctgaaaagtgaacaacctttaagttgtgattatt

SEQ ID NO: 48621 - DNA, 120 bp, synthetic construct
  source 1..120: mol_type = other DNA
agtctagatgataaaccatagcaaatgagtgaatttgaaaagaactgataggtgttttgaagaaaactatttcttctccttattgctgcccgagtcacaatctgaggaccttctcaagga

SEQ ID NO: 48622 - DNA, 120 bp, synthetic construct; identical to SEQ ID NO: 13623
  source 1..120: mol_type = other DNA

SEQ ID NO: 48623 - DNA, 120 bp, synthetic construct
  source 1..120: mol_type = other DNA
agttgtagtataatttcacgagtgtctccacagggcattttagagcatttttacaacgttgaatgtctcagcatccttgctttttgtagggccaaaacacataaatatattttaattggt

SEQ ID NO: 48624 - DNA, 120 bp, synthetic construct
  source 1..120: mol_type = other DNA
gttaaatatatcttattttcttcagaggagaacctatatttgtgaaagacatacattaagttattgagcttgactgaattgttagcacacagtcttaatagtgttaaagcaacagtggat

SEQ ID NO: 48625 - DNA, 120 bp, synthetic construct
  source 1..120: mol_type = other DNA
tcacatgggcatgccaaaatatctacagattacaaaaagaaagataggaaaaaagttgtaaaactagcctgtaaaagaacttctagtcaattttcaaaggactgacaactaaccagatta

SEQ ID NO: 48626 - DNA, 120 bp, synthetic construct; identical to SEQ ID NO: 13624
  source 1..120: mol_type = other DNA

SEQ ID NO: 48627 - DNA, 120 bp, synthetic construct
  source 1..120: mol_type = other DNA
tcttaaaactttaaagataaaacgtactaccctacatattgattagactgtaatttttcccacccctccttccaattttctctccttaaatttcacaatgaggtgaaatttcacagtgag

SEQ ID NO: 48628 - DNA, 120 bp, synthetic construct
  source 1..120: mol_type = other DNA
gtaatagtctcttaaacacataaaaacacatgtgaacaagtctaggaggcacaggtatacttgccaaatgaattattcaagaccgaaaggaagaaatcagttcctaattgatgccagtct

SEQ ID NO: 48629 - DNA, 120 bp, synthetic construct
  source 1..120: mol_type = other DNA
tgtttgatactgaaaatttttcaatttcttgttaagtaaacatttctttggaaacaattactgtgaaaggatatgcagtatttatttccattactgcgaaatacttctcatagcagtatt

SEQ ID NO: 48630 - DNA, 120 bp, synthetic construct; identical to SEQ ID NO: 13625
  source 1..120: mol_type = other DNA

SEQ ID NO: 48631 - DNA, 120 bp, synthetic construct
  source 1..120: mol_type = other DNA
gatcatttgtatatttctagaatatgagacttagaaactgttctgttttgtgggaataagtattagagtgaagcaggagtgagaaactctttataaaatatcttatattaataatatttt

SEQ ID NO: 48632 - DNA, 120 bp, synthetic construct
  source 1..120: mol_type = other DNA
tatatgctctgtttccataaagatgcttaggagttcatgaagttaacttgaaactttcatttgttcaatctaagtcagtccaggtgaattatgttgcactgtctttgaataatcaataca

SEQ ID NO: 48633 - DNA, 120 bp, synthetic construct
  source 1..120: mol_type = other DNA
tcgtggtcaaaagacatcgatttcatttatagtagacgggcattcagcctagatctgataaatttattattttctattatttaggccatgaaactttctgctcccaccacttgaaaatga

SEQ ID NO: 48634 - DNA, 120 bp, synthetic construct
  source 1..120: mol_type = other DNA
aattctctattactgaaattagaatcataataatgaactatgaattgatacctgcaaaaggtagctaaattgttttctggcttataattatctggcttggaacctagaacagtagacatt

SEQ ID NO: 48635 - DNA, 120 bp, synthetic construct; identical to SEQ ID NO: 13626
  source 1..120: mol_type = other DNA

SEQ ID NO: 48636 - DNA, 120 bp, synthetic construct
  source 1..120: mol_type = other DNA
taaatatttagggaaatgcttttctcaggatattgctttgtgtctctcagtaatgggcatattaaacactaccctctgaacaataagagagtgttgatgaatttgtggtatattcataca

SEQ ID NO: 48637 - DNA, 120 bp, synthetic construct
  source 1..120: mol_type = other DNA
actttatgtgtgcatgtgagtgtgtatgaagaaagattagaagaaaatatgccaacatactaatggtagttgtggacagattaaataattaggcaagattttattacctctctttctgaa

SEQ ID NO: 48638 - DNA, 120 bp, synthetic construct
  source 1..120: mol_type = other DNA
tgtgtccagcacactacaatgaaaataattttagaatagatttttcttaattaaccccagctctgaaaaccaatgtgaaaaatattcttgctatttagtttgtcatcaggaattttaaat

SEQ ID NO: 48639 - DNA, 120 bp, synthetic construct; identical to SEQ ID NO: 13627
  source 1..120: mol_type = other DNA

SEQ ID NO: 48640 - DNA, 120 bp, synthetic construct
  source 1..120: mol_type = other DNA
agtccagaatacagccaacaggaaaagcacaggaggattatgaagagaacatggtcatgtaggaataaattcaacctaaagtttgggggaaatgtgggaacacagagaagatgaaacatg

SEQ ID NO: 48641 - DNA, 120 bp, synthetic construct
  source 1..120: mol_type = other DNA
ctttctatttcctaataataagaatcaataatatattttatcagatatcaattgtattaaaatgaaagaataaaacacgatatgaagtccagggtcaggcaaatgaaactcaaaatgtca

SEQ ID NO: 48642 - DNA, 120 bp, synthetic construct
  source 1..120: mol_type = other DNA
tagtgcttggagtccaaagatcacatactgaccctgaagagctattaatactagctggtaatattcatgctattaaacttcattatgccctttcagcattcttggctcaaacagcttaaa

SEQ ID NO: 48643 - DNA, 120 bp, synthetic construct; identical to SEQ ID NO: 13628
  source 1..120: mol_type = other DNA

SEQ ID NO: 48644 - DNA, 120 bp, synthetic construct
  source 1..120: mol_type = other DNA
ctactaaaaatacaaaaaaattagccgggtgtggtagcagccgcctgtagtaccaactactcgggagactgaggcaggagagtggcatgaacccgggaggtggagctcgcagtgagcaga

SEQ ID NO: 48645 - DNA, 120 bp, synthetic construct
  source 1..120: mol_type = other DNA
atagcctactagtgctagtactgaagtatcctatctcctttgtggaacctgcctgattgacaactttagtcaactataatactaggaattttgctttgtttttcagcatgatttatcttc

SEQ ID NO: 48646 - DNA, 120 bp, synthetic construct; identical to SEQ ID NO: 13629
  source 1..120: mol_type = other DNA

SEQ ID NO: 48647 - DNA, 120 bp, synthetic construct
  source 1..120: mol_type = other DNA
aggtacctattcatatttcttctgggtattatatttatcttgagtcctgaatattactggtgcgtgcatagaatatatatttgttcagaaatgtgcaaaccaaggaaatgtgctcatcct

SEQ ID NO: 48648 - DNA, 120 bp, synthetic construct
  source 1..120: mol_type = other DNA
gtagagagatacaaatggaagattatacatgcaggaaagtatttttaattggtagtatcagaccaacttctcagagacaggaaaatgtatgaatgttcatagaaggaaaaaggataagct

SEQ ID NO: 48649 - DNA, 120 bp, synthetic construct
  source 1..120: mol_type = other DNA
caccatgatgtcctggcaactttgcacatatccatacaggccatgcaggtaaagttttgaaccacagttaatttaagttttggtaggatgctttgtgattctcccagaacacagaaagac

SEQ ID NO: 48650 - DNA, 120 bp, synthetic construct; identical to SEQ ID NO: 13630
  source 1..120: mol_type = other DNA

SEQ ID NO: 48651 - DNA, 120 bp, synthetic construct
  source 1..120: mol_type = other DNA
cttggtcatgaccttgccttgatgtacgcttaataggcagttaggaaagacgattcagaaaaagaatttaaaaactttaattgaaggttaacacttgtagagtacattcagtgtactcta

SEQ ID NO: 48652 - DNA, 120 bp, synthetic construct
  source 1..120: mol_type = other DNA
gtttttcattttcacctcaggactcctttaaaatcttaactattaaaactcccaaacagcttttatttacgtagcttctttctattgatgcttatcattttaaaaaaattaaagctgagg

SEQ ID NO: 48653 - DNA, 120 bp, synthetic construct
  source 1..120: mol_type = other DNA
gagtgacttttttattacttttgtgactattattaatgtctggtttaatgagaaagcaataggatttgcacatctgcttgggcgtttactgtgttgtattattaccattgtttatcctct

SEQ ID NO: 48654 - DNA, 120 bp, synthetic construct; identical to SEQ ID NO: 13631
  source 1..120: mol_type = other DNA

SEQ ID NO: 48655 - DNA, 120 bp, synthetic construct
  source 1..120: mol_type = other DNA
ggggaaaaagaaaaaaatggggttgaagctgataccaatatttcagtcttgctgcctacaaggagtgttttatatgttttttagctggtcatggacactggatctcttgaatctacaaaa

SEQ ID NO: 48656 - DNA, 120 bp, synthetic construct
  source 1..120: mol_type = other DNA
agagcaatgggagaaaaaaaaaaacagataaaaagcttaaagctgtgaaattgaaacttgactactgttttatataccccaaaggcttagaagactttgatttgaatgccgatgagaatg

SEQ ID NO: 48657 - DNA, 120 bp, synthetic construct
  source 1..120: mol_type = other DNA
tcaaaaagtagctcacccttctgtgtgaggtgaagtagaaaaagcacattcatgcaaaatgtatgcacataatagatccagttatccaaggggaatatagacagaatagcagtcaaaacc

SEQ ID NO: 48658 - DNA, 120 bp, synthetic construct; identical to SEQ ID NO: 13632
  source 1..120: mol_type = other DNA

SEQ ID NO: 48659 - DNA, 120 bp, synthetic construct
  source 1..120: mol_type = other DNA
tacgtagacaagaagtcaaatttatatgtatatgcttagtgtaaattcattttagattttaaattttatatctgaggaaaccacaatctcttctagaaggtcgtaaaatataggctgtga

SEQ ID NO: 48660 - DNA, 120 bp, synthetic construct
  source 1..120: mol_type = other DNA
caatttcaggaagggaaaataaatatcctaccctccttttagcaaacttatgccttcttttacatagagaaaaaggtacagaacactttaatcacctttgaattctggcttcctctgtgc

SEQ ID NO: 48661 - DNA, 120 bp, synthetic construct
  source 1..120: mol_type = other DNA
agaggtgctcaacaggcttagaattgctccaagcaatatgacccctggttctgtgtaatgtttatccaggagccaaaatcattcaggggtatcttaggccacattagttgaatttgagat

SEQ ID NO: 48662 - DNA, 120 bp, synthetic construct; identical to SEQ ID NO: 13633
  source 1..120: mol_type = other DNA

SEQ ID NO: 48663 - DNA, 120 bp, synthetic construct
  source 1..120: mol_type = other DNA
aaagtgaatttacaaataagttaattctactttgggacatttgtttctttttgatgtggttttaactaataatacacaaaatgtatagcagatttatatttacaatgtttttaagttaag

SEQ ID NO: 48664 - DNA, 120 bp, synthetic construct
  source 1..120: mol_type = other DNA
ctgagtttgactcaacagactttgttgttgattctttacattgaaaataagaatttccttcaaaaaattttacaattttcaaaatcatccaatcatgatttggatggatgggtatgggga

SEQ ID NO: 48665 - DNA, 120 bp, synthetic construct
  source 1..120: mol_type = other DNA
caacctgacaaaggccttgaccaacgccaaaaagagggctcagaatgtgaatacatttagcaaaactgtagtttcttacaaattctacagacaagaaagcctctgaaacttaaattcctt

SEQ ID NO: 48666 - DNA, 120 bp, synthetic construct
  source 1..120: mol_type = other DNA
cttttttcccattcttatatatttgatagtttcagtttccagttttcagcgacaatggagatagttgaatgaaggaatttgacctattccatcataactgattctggtttctgttgttgc

SEQ ID NO: 48667 - DNA, 120 bp, synthetic construct; identical to SEQ ID NO: 13634
  source 1..120: mol_type = other DNA

SEQ ID NO: 48668 - DNA, 120 bp, synthetic construct
  source 1..120: mol_type = other DNA
tgttgttctctttctgtgttcttcctatagtatccaggagattcttaatgtttgcttcaggaatccagaagaaaaaagccagtggaaatacactaacacagagtgcacataccccatctt

SEQ ID NO: 48669 - DNA, 120 bp, synthetic construct
  source 1..120: mol_type = other DNA
ttaagccgagttccattacggcatgtgttctctctttggcattttaatatcactaggtgtctacctcatcattgcacctaactgattaaaaaaataattccccatctctctccttccttt

SEQ ID NO: 48670 - DNA, 120 bp, synthetic construct; identical to SEQ ID NO: 13635
  source 1..120: mol_type = other DNA

SEQ ID NO: 48671 - DNA, 120 bp, synthetic construct
  source 1..120: mol_type = other DNA
ccatcctagttgaggttattgtctcatgtcttaatagaaacaaaagccattccttatatctacctaaatttcttagatctccaaattggaatttcctgtagtagtgagatatttattttg

SEQ ID NO: 48672 - DNA, 120 bp, synthetic construct
  source 1..120: mol_type = other DNA
atatgtatggaaagccagatttttaatatgtcctttgttgtaaaagttaaaaataaataaatgaacagatctaatctagccttttaccatgccacaaagatcatgatcaattttgtcact

SEQ ID NO: 48673 - DNA, 120 bp, synthetic construct
  source 1..120: mol_type = other DNA
taaaataaacatatctaagaaagatctatggaggatttgcaaagacgcgaatgatatgcagttctgctttgatgtgtccctgcattggtgtgtcatttttattttagtaaacgcatacac

SEQ ID NO: 48674 - DNA, 120 bp, synthetic construct
  source 1..120: mol_type = other DNA
ttttattccaaaatgataagctctaaggttgacttgtccaatgtagtttaaatcttgaatggttaaatgtagtttaaagagcccatggcctcaagctcaaatatgaatcaaattttcaga

SEQ ID NO: 48675 - DNA, 120 bp, synthetic construct; identical to SEQ ID NO: 13636
  source 1..120: mol_type = other DNA

SEQ ID NO: 48676 - DNA, 120 bp, synthetic construct
  source 1..120: mol_type = other DNA
gtatcatagcttttaatcattctagcttattttgctcacagacaacatcctcgagtcaaatggcatttaacaaacccatgttaccaatattttcgggggtgattctgcatgttgctgggt

SEQ ID NO: 48677 - DNA, 120 bp, synthetic construct
  source 1..120: mol_type = other DNA
ctatgagagccttctacccctgaaaattgtaccaccacctatgtgcatctcctttattgcttgatattatataatctagcatagaagagatgataaagatcttctccagtaaacattgta

SEQ ID NO: 48678 - DNA, 120 bp, synthetic construct
  source 1..120: mol_type = other DNA
ttatcctgaagatatttgtaaatggtgaaattaattttcttagatggctcataaaaataggataattattttgtagccatatctggaaccccatttttacagttttgatgtttatgaagt

SEQ ID NO: 48679 - DNA, 120 bp, synthetic construct; identical to SEQ ID NO: 13637
  source 1..120: mol_type = other DNA

SEQ ID NO: 48680 - DNA, 120 bp, synthetic construct
  source 1..120: mol_type = other DNA
atgtttaaaaaaaggcaatgctttttaaagtgttttattgcttaccttgtgctgcaatttttacagtcccttgtttggtttcagaagcttttcccggctcttggaatgaaaaaaacataa

SEQ ID NO: 48681 - DNA, 120 bp, synthetic construct
  source 1..120: mol_type = other DNA
ttattagaggaattgctgagaatggagcttactgaaagaaaaacatgactgaagcaatttaaatcataagataaagattccaaacactgttttgcctcactgttaactggccatggaata

SEQ ID NO: 48682 - DNA, 120 bp, synthetic construct; identical to SEQ ID NO: 13638
  source 1..120: mol_type = other DNA

SEQ ID NO: 48683 - DNA, 120 bp, synthetic construct
  source 1..120: mol_type = other DNA
gtttttctcctttgttcagaatttttcctttaaagaaaaaggatttattaaaaaaaaacttatatgataaacatttaaatatacttaatcagaatgggaaataatgggtaaataaaaatt

SEQ ID NO: 48684 - DNA, 120 bp, synthetic construct
  source 1..120: mol_type = other DNA
attcactttcattcattcatccatcacatgtttagcaataattatgtgtggacacgaagttaggtggatatgtagtagttgattcacatatatattcaatctttcatttaattattgtca

SEQ ID NO: 48685 - DNA, 120 bp, synthetic construct
  source 1..120: mol_type = other DNA
tgttacataaaataaatattacttgattcataaataattctaattactatagctatttattcagagaaaatatcttttgccaaaactgaattcagtctacccttgatatttacataatta

SEQ ID NO: 48686 - DNA, 120 bp, synthetic construct
  source 1..120: mol_type = other DNA
ttgactaaaacaaatggaagaaaagaagaaaataatatgcccaaaaatttcaacaaatgagcaccattctgctcagatgttttacttcttggagatctcaaaatattagaaaattatact

SEQ ID NO: 48687 - DNA, 120 bp, synthetic construct; identical to SEQ ID NO: 13639
  source 1..120: mol_type = other DNA

SEQ ID NO: 48688 - DNA, 120 bp, synthetic construct
  source 1..120: mol_type = other DNA
caatggggtttacctctttaataaccttagcctgtcctgggttgggctgtgtgcacatagattgggcatgttttagggttccttatctatgggctcttctttctactaagacttagttcc

SEQ ID NO: 48689 - DNA, 120 bp, synthetic construct
  source 1..120: mol_type = other DNA
ggtcattctacaatgtctacctgcaaaagaaagatttcaatggaggaaaatctcgggatcatagcagtatcatgtttgtccctcataactccatctattccttctctgattttaagcttt

SEQ ID NO: 48690 - DNA, 120 bp, synthetic construct
  source 1..120: mol_type = other DNA
aacagtttaaaaccaaatgccttttcagtaagtctgccagcttgcatccaaccaacaaaaatatcatccttgaaactattgaggacacatgcaaagaagatcagatttgacatctgctct

SEQ ID NO: 48691 - DNA, 120 bp, synthetic construct; identical to SEQ ID NO: 13640
  source 1..120: mol_type = other DNA

SEQ ID NO: 48692 - DNA, 120 bp, synthetic construct
  source 1..120: mol_type = other DNA
gataatgagcccaccgtttccaacacctactacagtatttcatctgtactgcctccactacacatattctaatgaaaatttcatcatatcaaatgattttatcttgtcatagttttgttt

SEQ ID NO: 48693 - DNA, 120 bp, synthetic construct
  source 1..120: mol_type = other DNA
tcagagacaggatggacctagattaaaatgtcagcataattcacttgggggtgttttttcaggaaattatcagagaagttagtatttgtagatccctgaaacatgcggtatttatataaa

SEQ ID NO: 48694 - DNA, 120 bp, synthetic construct
  source 1..120: mol_type = other DNA
caaattgtcatgaatcagatgagccaaatgtttcaatgtcttctgattccacagatatggaacaacctgatttacaaaactgaaaagatatcattagtctgcaaacattttgttaaagag

SEQ ID NO: 48695 - DNA, 120 bp, synthetic construct; identical to SEQ ID NO: 13641
  source 1..120: mol_type = other DNA

SEQ ID NO: 48696 - DNA, 120 bp, synthetic construct
  source 1..120: mol_type = other DNA
ttcaaatacctgaataacatgtaagtctcttacttatagtaacaacaaaataaataagaaagactccccccatctgcagtgaagtggctggccattagagagaggaactgacaggggcag

SEQ ID NO: 48697 - DNA, 120 bp, synthetic construct
  source 1..120: mol_type = other DNA
aaatcatataattatttactcgtacaacttcccttcctactaccctataaattctctgagatcactgattgattgtcacttattcaactttataactccagacccaacaaactgctggaa

SEQ ID NO: 48698 - DNA, 120 bp, synthetic construct
  source 1..120: mol_type = other DNA
atgacgcaaaatctctttttctctttgatcactgattatgtgttattcagaaagtgtattaactctaaattttagaactagatttttagtagaatatatggtaacccacattgcaattgg

SEQ ID NO: 48699 - DNA, 120 bp, synthetic construct
  source 1..120: mol_type = other DNA
ttaagagcatgtttgagataaacattttttcaggattcaaattatgaatcaaatttattttattaatcttccaaagaaatgaaaacagctttaaagctgtctcttgctacttcatcaata

SEQ ID NO: 48700 - DNA, 120 bp, synthetic construct; identical to SEQ ID NO: 13642
  source 1..120: mol_type = other DNA

SEQ ID NO: 48701 - DNA, 120 bp, synthetic construct
  source 1..120: mol_type = other DNA
tatagaaaagttgaatggcttttccacagatcaggagttaaattcatgtttattaattcagcagctaaaatttgacccagcattataaaaccttgacccctcaaaatatatacatccttt

SEQ ID NO: 48702 - DNA, 120 bp, synthetic construct
  source 1..120: mol_type = other DNA
agatagtaccaaaatagagaaaggttaacatttaagctaaaagttgctacatacttgaaagctctaggctaagcctcttgtacttataactccaggaaagcatatttcatgggcattgct

SEQ ID NO: 48703 - DNA, 120 bp, synthetic construct; identical to SEQ ID NO: 13643
  source 1..120: mol_type = other DNA

SEQ ID NO: 48704 - DNA, 120 bp, synthetic construct
  source 1..120: mol_type = other DNA
taacttagcattatagtgtttaattcagaaaaaatttgattatttcacggctactaaaataatctatattttaatctaaaaaagactatcgcttccatttaactcatctaagtatttctt

SEQ ID NO: 48705 - DNA, 120 bp, synthetic construct
  source 1..120: mol_type = other DNA
gggaaacatcaatcagaataatgagcatttccccctcatggcattatctagctgtctggatagaatgtgtgagaatgacaagtttcttaagtaatcaacaatttagggttgaagaccaag

SEQ ID NO: 48706 - DNA, 120 bp, synthetic construct
  source 1..120: mol_type = other DNA
ttacatttagactaaggaaaaggtttattccatgtatctaataaaacaacagaatgcaataccatggaagatatgaagtcccatttcttgagatgccagagaaagaaatacctgtcttag

SEQ ID NO: 48707 - DNA, 120 bp, synthetic construct; identical to SEQ ID NO: 13644
  source 1..120: mol_type = other DNA

SEQ ID NO: 48708 - DNA, 120 bp, synthetic construct
  source 1..120: mol_type = other DNA
gtagaaatttgacactttagtgaaataaatgttatgatttggaaaaactattgcattctccatatgagtgattaatttattgggctaggattgattcagactctaagaaaaatatagtaa

SEQ ID NO: 48709 - DNA, 120 bp, synthetic construct
  source 1..120: mol_type = other DNA
aaaggaaacaaaatttctgatttagccatattcttcagttaaaatttcaattttaaaaattaaataaggtctagttgacagggcctctaattttgacagtccccaacatttttggcacca

SEQ ID NO: 48710 - DNA, 120 bp, synthetic construct
  source 1..120: mol_type = other DNA
actgtttcacctcagatcgtcaggcattagttagatcctcatagggagcacacaacctagatccctagcatgagcaattgacaatagggttcaagctcctatgagaatctaaagcccccg

SEQ ID NO: 48711 - DNA, 120 bp, synthetic construct
  source 1..120: mol_type = other DNA
ctaatgcccactttacatataaggtagagagagtgctttcctcattaaagggtgtcatagaacagtatgatctaaatatagcacttaaaaaaccagccccttttttctaatattagtaag

SEQ ID NO: 48712 - DNA, 120 bp, synthetic construct; identical to SEQ ID NO: 13645
  source 1..120: mol_type = other DNA

SEQ ID NO: 48713 - DNA, 120 bp, synthetic construct
  source 1..120: mol_type = other DNA
gtttgaaaagcccatattatatgcctgacaattctaaaccaaatatgtggcaattatcctcacaaaattacgcagacttcttgagccctttttttcctctacagttctatagatgtcaaa

SEQ ID NO: 48714 - DNA, 120 bp, synthetic construct
  source 1..120: mol_type = other DNA
atggagaattctaaatcaagcagcccaaggaagaattcagaggctatttctaagcaaacgctttctggtacacttagtcctcagattaaacagggggttaggggttgaacattatgcaat

SEQ ID NO: 48715 - DNA, 120 bp, synthetic construct; identical to SEQ ID NO: 13646
  source 1..120: mol_type = other DNA

SEQ ID NO: 48716 - DNA, 120 bp, synthetic construct
  source 1..120: mol_type = other DNA
tctactaaaaatacaaaaattagctgggtgtgggggtgctcacctgtaattccagctactaggaaggctgaggcaggagaattgcttgaacccgggaggtggaggttgcagtgagccaag

SEQ ID NO: 48717 - DNA, 120 bp, synthetic construct
  source 1..120: mol_type = other DNA
tgcagagtgaatgacaatgtatcctcctggaattatgaatcaatccagctggagcagaagagtcttgtttgatgttaatgagaagtaaaacacatgaaataagcagaaggccattggcct

SEQ ID NO: 48718 - DNA, 120 bp, synthetic construct; identical to SEQ ID NO: 13647
  source 1..120: mol_type = other DNA

SEQ ID NO: 48719 - DNA, 120 bp, synthetic construct
  source 1..120: mol_type = other DNA
atagacttttgtcttagtacattgagcgctactgcatttttgggcaggaaagttacacggcagtgttttgaagagataaaagtgtccatgattgtctgggaaagggcttctgtcccttta

SEQ ID NO: 48720 - DNA, 120 bp, synthetic construct
  source 1..120: mol_type = other DNA
tggaaaaaaaataagctagatatttaaaagaagaatctaatacaattttgagatttgtttgacatatacagagaaggaaagaaggctgtttgttcaaataagacagattttggacttgat

SEQ ID NO: 48721 - DNA, 120 bp, synthetic construct
  source 1..120: mol_type = other DNA
aagatatggagattctaaagtcatgcacatcgaagtgtaaactgaaattaagagcgtgaacaatttttcccagagacagatgaacagaaggcttcagactaccatcctatcaagaaatat

SEQ ID NO: 48722 - DNA, 120 bp, synthetic construct; identical to SEQ ID NO: 13648
  source 1..120: mol_type = other DNA

SEQ ID NO: 48723 - DNA, 120 bp, synthetic construct
  source 1..120: mol_type = other DNA
ctacaaaggggcttgaagatggcaggaagatcaagcaaaggcttttttcctgttttgtttgaggagaataaagaaacaccaaatggagagaaaaatatggaaaagtctgggaaatgggaa

SEQ ID NO: 48724 - DNA, 120 bp, synthetic construct
  source 1..120: mol_type = other DNA
taaagtacatcttagtctggaaatcaaaattcccctattaaaatagcaggaatacacagctgtttcctagaaggacagtactctgatcaatgatgacaccttgcagagcacaaggaagag

SEQ ID NO: 48725 - DNA, 120 bp, synthetic construct
  source 1..120: mol_type = other DNA
taaaaaaatacaggagaaaagaggaattgaaaaaatgtaagtaatacaaatagaaaatagtgagataaaagatagcagttgaagggaggaaaatgggacaagatatttgatattcaaatt

SEQ ID NO: 48726 - DNA, 120 bp, synthetic construct
  source 1..120: mol_type = other DNA
ttatagggcagcttttccttctcagaccaaaaagaaccacttaataaatagttaagaaatctctaacaaagacagataagccacacttgattatttccttctttctgatattggactctc

SEQ ID NO: 48727 - DNA, 120 bp, synthetic construct; identical to SEQ ID NO: 13649
  source 1..120: mol_type = other DNA

SEQ ID NO: 48728 - DNA, 120 bp, synthetic construct
  source 1..120: mol_type = other DNA
agtgcagtgatgagatctcaggtaactgcaacctccacttcccaagtacaagtaattcttctgcctcagcctcccaagtagctgggattacaggcgtgcaccaccacacctggctaattc

SEQ ID NO: 48729 - DNA, 120 bp, synthetic construct
  source 1..120: mol_type = other DNA
ctcccatggactgttctttagttcacgtttgtgtcatggttctaagagttcaaatgctttaactgtcagctcacatgctaatgctctagataaataaatgggcttctcaatattggcttc

SEQ ID NO: 48730 - DNA, 120 bp, synthetic construct
  source 1..120: mol_type = other DNA
ccccaatgttaggcatgcagatctaaacttaaattggtatttagctggcagcctagtggttctcataatattaatacaagctaaggttactgaatattgacattgcttctggagcccaca

SEQ ID NO: 48731 - DNA, 120 bp, synthetic construct
  source 1..120: mol_type = other DNA
ctagaggttgcctttaaccattgaatattcaaaatccatgcttatatgcacaaataccatattgagtcaatattcaaatgctggagcaatgtgcatagaagtgtttgagagcaagtgagt

SEQ ID NO: 48732 - DNA, 120 bp, synthetic construct; identical to SEQ ID NO: 13650
  source 1..120: mol_type = other DNA

SEQ ID NO: 48733 - DNA, 120 bp, synthetic construct
  source 1..120: mol_type = other DNA
caattggtttctgtattacatgacgaggccggaaatggctaaaggaagggtgcagtagaggttaccgtgataaattctcagaccaaaaagtttagtaattctcatctttcaaccaggctc

SEQ ID NO: 48734 - DNA, 120 bp, synthetic construct
  source 1..120: mol_type = other DNA
tgggtacctaatccaatacttcaagtactacaagcagagaacactcattagattacttacactaagaaaaatctcccatctcttgaaaagcaaatggaagcttaacgatagtccctcagt

SEQ ID NO: 48735 - DNA, 120 bp, synthetic construct
  source 1..120: mol_type = other DNA
ttcatttgttgaattttctagaaaaccagataagcacaaatgcacagattaaaattttagtcagaaacatttttaagccaagtaaaagccaaaatagaatgatgtaggaccaaagaaaac

SEQ ID NO: 48736 - DNA, 120 bp, synthetic construct; identical to SEQ ID NO: 13651
  source 1..120: mol_type = other DNA

SEQ ID NO: 48737 - DNA, 120 bp, synthetic construct
  source 1..120: mol_type = other DNA
tcatatgcatgtatataaaatgaaaagccaatataatttctaaaaggttttgctgtgactcattgtgatagccatatataaacataggaaaatcttttacataaatgtctctgcctttaa

SEQ ID NO: 48738 - DNA, 120 bp, synthetic construct
  source 1..120: mol_type = other DNA
agaagagaaagtattatttcacataacaggaagtccaacatagaagggtttcaaggtttactgattcaaaaacaaaaattgtcgtctttatctctgtgctctccccttgctccaagcctg

SEQ ID NO: 48739 - DNA, 120 bp, synthetic construct
  source 1..120: mol_type = other DNA
ccaagcttaggtgggggtggggtgggggaaatttttatttgaatgaaagttgggagctttgataatatactggattggatgtcttgaaaaaagacaccattgttttattatctgagttga

SEQ ID NO: 48740 - DNA, 120 bp, synthetic construct; identical to SEQ ID NO: 13652
  source 1..120: mol_type = other DNA

SEQ ID NO: 48741 - DNA, 120 bp, synthetic construct
  source 1..120: mol_type = other DNA
tctgtccctttctatgcttgcttttgctgttcagagacatgtttctatctctcctcctaagctgcacactcccataaaattcccatatgcatcttgtttttttcttttggctcatggcac

SEQ ID NO: 48742 - DNA, 120 bp, synthetic construct
  source 1..120: mol_type = other DNA
taaaaaatgtttattattttgaaggatcaaacagcaagggaaaaaagcatggcaatatttttttttgtaaaaattaatcttaaggaaggtaaaagtaaggtctctgccttttataattgc

SEQ ID NO: 48743 - DNA, 120 bp, synthetic construct; identical to SEQ ID NO: 13653
  source 1..120: mol_type = other DNA

SEQ ID NO: 48744 - DNA, 120 bp, synthetic construct
  source 1..120: mol_type = other DNA
tgcattgaaaatgcttataggaggtcctggcaaatagtaagtattcaataccatgtgtttagtgctatttatcttgttcatcccaacactgtgctcacaatacttcatcatcaaaatctc

SEQ ID NO: 48745 - DNA, 120 bp, synthetic construct
  source 1..120: mol_type = other DNA
aagtacaaaattctcatacctatgtcttagagaagtaacttgacaataattgttttgggccaggcacggtggctcatgcctgtaatcccaacactttgggaggccgaggtgggtggatca

SEQ ID NO: 48746 - DNA, 120 bp, synthetic construct
  source 1..120: mol_type = other DNA
gaggcaggagaattgcttgaacccaggacgcagaggttgcagtgagcagagatcgcgccattgcactccagcctgggggacaagagtgagactttttctcaaaaaaaaaaaaaagaattg

SEQ ID NO: 48747 - DNA, 120 bp, synthetic construct; identical to SEQ ID NO: 13654
  source 1..120: mol_type = other DNA

SEQ ID NO: 48748 - DNA, 120 bp, synthetic construct
  source 1..120: mol_type = other DNA
acttttctttaatgcaacactcattaatgaggaacatagactgggtgatgttactcctggaaatggaaataataagtattccttgcttctctttcacactaactacaataataatatcat

SEQ ID NO: 48749 - DNA, 120 bp, synthetic construct
  source 1..120: mol_type = other DNA
aaaatgggtagtagtcagcaacacagctttcacagattctcaaaagcaatatggattagtgaaaagaacataaatattgcagtcagaaaggtcacgctttgaatcttggctttgccattt

SEQ ID NO: 48750 - DNA, 120 bp, synthetic construct
  source 1..120: mol_type = other DNA
attcattcttcctacttttgaatgttagcaaagaaacagattcttctgcttatgtattgcagttattaattctccttaattttgaacacaagcatgacattcacttcacaaaatgtgcct

SEQ ID NO: 48751 - DNA, 120 bp, synthetic construct; identical to SEQ ID NO: 13655
  source 1..120: mol_type = other DNA

SEQ ID NO: 48752 - DNA, 120 bp, synthetic construct
  source 1..120: mol_type = other DNA
caagagatgaagccagagaaagatcaggaaagacattgaaactcttcaattaagactttatcctagggacaaagtaaagctttggcaggtttaagtggagagtgaaataatcagacatgc

SEQ ID NO: 48753 - DNA, 120 bp, synthetic construct
  source 1..120: mol_type = other DNA
agagctgtgggcagatataagagatcaaattggtaagacatttctatgcccaatcacataaagtaaaacagaacaccatgcattttctccccttttgcaagcacctagcatcaggacaat

SEQ ID NO: 48754 - DNA, 120 bp, synthetic construct
  source 1..120: mol_type = other DNA
tattttctcttcacttattgaaactaaaagtattttaagtatatatttattgtgtatccacaataagtgactagggaatttatgacagcaacagcaacaaataaacatagggtcagtgaa

SEQ ID NO: 48755 - DNA, 120 bp, synthetic construct
  source 1..120: mol_type = other DNA
acatatctggacatcacaaatattagtatttaagagtcagctttgagggtgaaatagaatgtgtaattaaaaggaagacagagatgaaagtctgaatctttccaaaggttgtagccttta

SEQ ID NO: 48756 - DNA, 120 bp, synthetic construct; identical to SEQ ID NO: 13656
  source 1..120: mol_type = other DNA

SEQ ID NO: 48757 - DNA, 120 bp, synthetic construct
  source 1..120: mol_type = other DNA
tgggttcaagcgattatccaacctcagcctcacgagtagctggggttacaggtgcccgccaccacgcccagctaatttttgtatttttagtagagacgagctttctccgtgttggcaggg

SEQ ID NO: 48758 - DNA, 120 bp, synthetic construct
  source 1..120: mol_type = other DNA
ccagcctgaataactactttctaaggaagattgattatggcaaataaagggtccttcaagcaacaggatgagtgtgaatatcaaaaggagagtttgcgaatagaggctgaagagaactga

SEQ ID NO: 48759 - DNA, 120 bp, synthetic construct; identical to SEQ ID NO: 13657
  source 1..120: mol_type = other DNA

SEQ ID NO: 48760 - DNA, 120 bp, synthetic construct
  source 1..120: mol_type = other DNA
taaagaaaagtgcttttatggaaaaaaacaaaaggccagcatacagagaattaagaagccagtccatgagctgaaccaagtaagtaagagcagaactcacagagagaagtgatctagggc

SEQ ID NO: 48761 - DNA, 120 bp, synthetic construct
  source 1..120: mol_type = other DNA
ccttctggctggttaatttcatgttgttagcttcaaattggccttggtggaattacgtacaccacggaaatcagcaaacactataacgcagtactatttttatctccccaaaatatagct

SEQ ID NO: 48762 - DNA, 120 bp, synthetic construct
  source 1..120: mol_type = other DNA
cttcccaagtctatattattggaaaacaagggaaatgggtgggagctggggagaacatggtaaatttaaagattaggcagtgctgtccaatatggcagccaataactgtattaagctgtt

SEQ ID NO: 48763 - DNA, 120 bp, synthetic construct; identical to SEQ ID NO: 13658
  source 1..120: mol_type = other DNA

SEQ ID NO: 48764 - DNA, 120 bp, synthetic construct
  source 1..120: mol_type = other DNA
tctttatcaacagactgtaggctcagctgggaacttaccaaactcggatatgtagcttttagtaacttctatgaataaatattttgtggtaaaaagtttaaaaattaactaaaacaatat

SEQ ID NO: 48765 - DNA, 120 bp, synthetic construct
  source 1..120: mol_type = other DNA
tagctaatttagaccttgacagcttccagcagattggaatccccaaaaaatatctaaaatgttcaataattctctgtgttcaaacatagaactaaacatgattacttaaggaggaatgtg

SEQ ID NO: 48766 - DNA, 120 bp, synthetic construct
  source 1..120: mol_type = other DNA
gtttggaatccatgtaatgtgattctgtgaaaaggtcatttaatggtttcatctttctgttctcaacaaattcccagtgttggggcaacagtagcagtaatgccaatgacatcagcatct

SEQ ID NO: 48767 - DNA, 120 bp, synthetic construct
  source 1..120: mol_type = other DNA
ttgttactttaattagaattacatctgaaatcacaccttggtgaaataccagaaagtactggttataaaaaataattaaaatggtgtttctaaagggtgtagaattgaccattactcaaa

SEQ ID NO: 48768 - DNA, 120 bp, synthetic construct; identical to SEQ ID NO: 13659
  source 1..120: mol_type = other DNA

SEQ ID NO: 48769 - DNA, 120 bp, synthetic construct
  source 1..120: mol_type = other DNA
gagatagtcaacagtgtcaaatgcaaaatctttttagtaatgactaaatccagagactctcagaagaggatgaagccccctactcaccattagacatctctaccagattaagagttatcc

SEQ ID NO: 48770 - DNA, 120 bp, synthetic construct
  source 1..120: mol_type = other DNA
gcatcaagcctgcacaatttctctgatcttcaagttcgctatctgatgaagaattaaggttaattttacatgacttctttaattttgatgaacctatgccacatctttgcatttagcatt

SEQ ID NO: 48771 - DNA, 120 bp, synthetic construct; identical to SEQ ID NO: 13660
  source 1..120: mol_type = other DNA

SEQ ID NO: 48772 - DNA, 120 bp, synthetic construct
  source 1..120: mol_type = other DNA
atcttttattctgtatgttgtggaggttttagctgaatagaaaatatatgtgtaataataaagagttcccaatcaagaacttggaagcaggaaaatggaattgccattctgagagttaag

SEQ ID NO: 48773 - DNA, 120 bp, synthetic construct
  source 1..120: mol_type = other DNA
atcttttgattattgctggaaaatgagtaccctaggattattactgatttcattctcctaggtaaaaatgtaatgataatacaattttgaatatcgtttcagttttacttacatctatat

SEQ ID NO: 48774 - DNA, 120 bp, synthetic construct
  source 1..120: mol_type = other DNA
atctactctgtgccagatgccactctaggctctgtgaacacaattattaaacactcagaggcttgtccttttgtagctttgcatacttcttggtaatataaatgtatgatggatatttca

SEQ ID NO: 48775 - DNA, 120 bp, synthetic construct
  source 1..120: mol_type = other DNA
tattgagtgatcaggctgaactatccttacaaactagttacttatttatatttaattttcccatgagacatgatttgacctttagcttatcaaatgctacataccaaacacatacaaatt

SEQ ID NO: 48776 - DNA, 120 bp, synthetic construct; identical to SEQ ID NO: 13661
  source 1..120: mol_type = other DNA

SEQ ID NO: 48777 - DNA, 120 bp, synthetic construct
  source 1..120: mol_type = other DNA
cataaccacaaatatcacaataaaaagaaaatgatgtggtctctctctggattcaagaatactactgttgtagagacctaagaaagaagacctaataaaggtcaatggtacctcagtgat

SEQ ID NO: 48778 - DNA, 120 bp, synthetic construct
  source 1..120: mol_type = other DNA
agcacagaacaacatcagcgaatactttagtcgagtttccatattctagttttatatgtgctcaatagacatatttacctaggaggataagtattattgaaagttttagcactgctgggc

SEQ ID NO: 48779 - DNA, 120 bp, synthetic construct
  source 1..120: mol_type = other DNA
agcagtgtcactaaagttaaggggacagagcaagaggcaactaaacaaattttccagccaacaaaacacacgagaaatgtgtttatgttaattctaattgttttcacttttataattgct

SEQ ID NO: 48780 - DNA, 120 bp, synthetic construct; identical to SEQ ID NO: 13662
  source 1..120: mol_type = other DNA

SEQ ID NO: 48781 - DNA, 120 bp, synthetic construct
  source 1..120: mol_type = other DNA
tagcaagtatcattctcggatatcatactacatgccctttatgatttgtctccttcactggactatgaagttctataaatgcaaaaactttgtctccttgtcaccattattcttttcctc

SEQ ID NO: 48782 - DNA, 120 bp, synthetic construct
  source 1..120: mol_type = other DNA
agtttctcaagtagctaggattacaggcatctgccaccaagcctagctaattttttgtatttttaatagagatggggcttcaccatattggccaggctggacttgagctcctgaccttag

SEQ ID NO: 48783 - DNA, 120 bp, synthetic construct; identical to SEQ ID NO: 13663
  source 1..120: mol_type = other DNA

SEQ ID NO: 48784 - DNA, 120 bp, synthetic construct
  source 1..120: mol_type = other DNA
atcctacaatataaaattttttgatccctattaccaaaatcacagagtgcaatttggttttactttcagctaactgagataggaatggctttccgtgttcagttccagggatacaaatta

SEQ ID NO: 48785 - DNA, 120 bp, synthetic construct
  source 1..120: mol_type = other DNA
tataaagcgaaatcacaaaggtcagccaatgagaagagaaaagaggtttcttttttcctcattcccccacgtatccttgcccttttgtactgtaaattgcacaagctggcatttaaatgc

SEQ ID NO: 48786 - DNA, 120 bp, synthetic construct
  source 1..120: mol_type = other DNA
ctaaagccttcagggccaagctgccaatgatacatcccatctctccggtttctcatatcacagtatttgccctgtggacaaagaagaagtagccaaaggagcactttccttctgacagag

SEQ ID NO: 48787 - DNA, 120 bp, synthetic construct
  source 1..120: mol_type = other DNA
ctgaaccatttcagcccttaaatcacgtttgtaacagtggctatttttgtcaagggctaactccacattttgcttatttggctctcacaattaaaattactcatccaggactgggtaagt

SEQ ID NO: 48788 - DNA, 120 bp, synthetic construct; identical to SEQ ID NO: 13664
  source 1..120: mol_type = other DNA

SEQ ID NO: 48789 - DNA, 120 bp, synthetic construct
  source 1..120: mol_type = other DNA
ataaaaattcaggaccatctacctaagtttccattctttcttttttcctgctccaacataggcaatgataccatacaacatactttcatcccaaacactggcaccctaaaagcagtgatt

SEQ ID NO: 48790 - DNA, 120 bp, synthetic construct
  source 1..120: mol_type = other DNA
tagtttgacaaagtctcatactttgagactttgcaaggtactctttcctctacactcaacccccaaccccaacataaagccactgactccattccatcttctcggtttataaagaaaaag

SEQ ID NO: 48791 - DNA, 120 bp, synthetic construct
  source 1..120: mol_type = other DNA
attctgtttcactgctcatggctgctttttttatgagccttgatgagtgttttgcttacctggcagaagagaatcacccaaggatcatttttaaaatacagttgtctttcttatccttgc

SEQ ID NO: 48792 - DNA, 120 bp, synthetic construct; identical to SEQ ID NO: 13665
  source 1..120: mol_type = other DNA

SEQ ID NO: 48793 - DNA, 120 bp, synthetic construct
  source 1..120: mol_type = other DNA
tatggtaagtacttgaaaatagaaatctgagaggaactggggttaagcagaagtcagcatagtgaattagtttccatgatggagttgctttagcctttacacatgcataattttttaaaa

SEQ ID NO: 48794 - DNA, 120 bp, synthetic construct
  source 1..120: mol_type = other DNA
aagtagctaggactacaggcatgtgccacagccccaggttaattttttaattgtttatagacagggggcgggtctcactatgttgcccaggctggtctcaaactcctagtctcaagtgat

SEQ ID NO: 48795 - DNA, 120 bp, synthetic construct; identical to SEQ ID NO: 13666
  source 1..120: mol_type = other DNA

SEQ ID NO: 48796 - DNA, 120 bp, synthetic construct
  source 1..120: mol_type = other DNA
gtcagtacccagtggagtgattgaaaccttgtaaacaaaagtgaatattgacacaaatggtcaaaccacaggaaaaaggggatcctgaagttttaaggagttaatgcaagcaaagtgctc

SEQ ID NO: 48797 - DNA, 120 bp, synthetic construct
  source 1..120: mol_type = other DNA
tttaaaagcttattttataaagctgtaagaaaacaaatgactttcataaagtttagaaatgactgtcctctgacatgcactagtggtaaaagatggcagctgaaatacaagcagcctttc

SEQ ID NO: 48798 - DNA, 120 bp, synthetic construct
  source 1..120: mol_type = other DNA
tgaaggtcagaggattaataggttttatctgcaatgtgtttgaaaagctaattaagactccacatacagcagaggagactgggaatacaatatttagtttttctctacatgaccacagtg

SEQ ID NO: 48799 - DNA, 120 bp, synthetic construct; identical to SEQ ID NO: 13667
  source 1..120: mol_type = other DNA

SEQ ID NO: 48800 - DNA, 120 bp, synthetic construct
  source 1..120: mol_type = other DNA
tgctcatatgaaaacagtatgtttttaaaaagtcatcatgacagaacggtatctatttccctctgattctttcttttttctaacaacattcttcttccagttaaaagagaggaaacagca

SEQ ID NO: 48801 - DNA, 120 bp, synthetic construct
  source 1..120: mol_type = other DNA
ataatgctttccgtggctctctcctctcaatctgccacgttggattaggccctccttacctgtcaccagcattgttgtaattgacttgagctctgtaatatttattgatataactttcta

SEQ ID NO: 48802 - DNA, 120 bp, synthetic construct
  source 1..120: mol_type = other DNA
aattatccagttgtgcccacaaacttaattatatcagctacctgataggaatatcaggatctttcttcccaatttcatttcccactgtctctgctgttctctcttcatactcgacctgaa

SEQ ID NO: 48803 - DNA, 120 bp, synthetic construct; identical to SEQ ID NO: 13668
  source 1..120: mol_type = other DNA

SEQ ID NO: 48804 - DNA, 120 bp, synthetic construct
  source 1..120: mol_type = other DNA
caggagacctgcttaagtttaggagtttgataccagcctggtcaacagagtgagaccctttctctacaaaaaaaaaaaaaaaaaaattggcccagtgtggcggcccactcctctagtccc

SEQ ID NO: 48805 - DNA, 120 bp, synthetic construct
  source 1..120: mol_type = other DNA
aatatttccaagaaaacaataaaaataacacaacaataaaaatatatacataaattaaaaaccaatacagaataacaactatttacataacatatattttgtattatatattgtaggtaa

SEQ ID NO: 48806 - DNA, 120 bp, synthetic construct
  source 1..120: mol_type = other DNA
agtcgctgggacgtaactgtattcagttctgcccacacatctaacatgttacccaagtttggccaatcagaaaatttccttagaattttgagttcagcatgttttttccttggggttcag

SEQ ID NO: 48807 - DNA, 120 bp, synthetic construct; identical to SEQ ID NO: 13669
  source 1..120: mol_type = other DNA

SEQ ID NO: 48808 - DNA, 120 bp, synthetic construct
  source 1..120: mol_type = other DNA
tagtaatttaggtcaaagtggttaaataaaatggggcaagtttatgtaacaagacttaggcctaacaaaaaaagtcttcagtacttattacctaaggttaaattctagattgcaaacccc

SEQ ID NO: 48809 - DNA, 120 bp, synthetic construct
  source 1..120: mol_type = other DNA
aaaaggtgtaacaggaataaattatggattactatgtagcacaaaggatagtggattttttctaactataattactagcaaagcagataaatgtaacagcgttatgggtagctgtgtcta

SEQ ID NO: 48810 - DNA, 120 bp, synthetic construct
  source 1..120: mol_type = other DNA
ttaaagctcagaataaaattaaaagaagcatttgaattttgtttcctattttattcataagataaaaccaatgaaagttacccctgcttttagttataaaaattttgaaatttacattaa

SEQ ID NO: 48811 - DNA, 120 bp, synthetic construct
  source 1..120: mol_type = other DNA
catttatcagagaagttattttcctcctataagaagtcgtgcagcaaggtgagttatatcaaacataaaatgttttatttagtttgttatctcactctcattattcaagagttttaaagt

SEQ ID NO: 48812 - DNA, 120 bp, synthetic construct; identical to SEQ ID NO: 13670
  source 1..120: mol_type = other DNA

SEQ ID NO: 48813 - DNA, 120 bp, synthetic construct
  source 1..120: mol_type = other DNA
aaataaatcatcttccttttttcctttttacttaaagactatggacagcactctggcctaacttgggtcatgggcccacactcatggggaaagtgacaggtggaacaatgacagtaactt

SEQ ID NO: 48814 - DNA, 120 bp, synthetic construct
  source 1..120: mol_type = other DNA
ttgattcagtctttcagtaggcaagactatgagtttttaatcatcgtatttatataccctacctggccacattcgaaggcacatatggaaactttatgcctcatgttaccaaggcatcaa

SEQ ID NO: 48815 - DNA, 120 bp, synthetic construct
  source 1..120: mol_type = other DNA
gccttctcatcaaggctaaatcctttctatagagaccattttacagcaaagttgaagtcacggctcttttcatatgcattatgttttcataggccctctataaacaagaaaaaacaactc

SEQ ID NO: 48816 - DNA, 120 bp, synthetic construct; identical to SEQ ID NO: 13671
  source 1..120: mol_type = other DNA

SEQ ID NO: 48817 - DNA, 120 bp, synthetic construct
  source 1..120: mol_type = other DNA
atcaacctgggtgcctaagtggctatgatgagtacagcaggtttcccaacttgtgcatgaagaagaaaaaacgttctcatttttcaaagctgctgaaattttcaggggttttcatattgt

SEQ ID NO: 48818 - DNA, 120 bp, synthetic construct
  source 1..120: mol_type = other DNA
tttaataatgaattaaggaagagaaataatggagtcagcagtggctagagagatttaagcctggggaaaaaagggtgtagtaatcttctaataagaggaaaatactgagcatagagccac

SEQ ID NO: 48819 - DNA, 120 bp, synthetic construct
  source 1..120: mol_type = other DNA
ctggatatttaaatggagatggtgaataggcaattggatagatgaaggtgtgattttggagttcagtgagaggccccagttggagacatacatttgagagtcattattataagaatggtt

SEQ ID NO: 48820 - DNA, 120 bp, synthetic construct; identical to SEQ ID NO: 13672
  source 1..120: mol_type = other DNA

SEQ ID NO: 48821 - DNA, 120 bp, synthetic construct
  source 1..120: mol_type = other DNA
gcggggatgagagaccggaaggagaatgtagacaatgcttatgaggagtttagctgtaaaggggatctgagaaatcaggcagcaacctgagaaggatgtgctgtcaataacaggatattt

SEQ ID NO: 48822 - DNA, 120 bp, synthetic construct
  source 1..120: mol_type = other DNA
ccttagaaatcaaaatgaatttgcagaggagagaattgcaggagtgatgctccttagttagcaggtggggaaggcatactgtgcaccagtggaaggatttttcatagaagtatgaacatt

SEQ ID NO: 48823 - DNA, 120 bp, synthetic construct
  source 1..120: mol_type = other DNA
tttattttctgagaaaaaaaggaagcaaataatttggctgatagagaagaagggtaaaaaggtaaaggagttttaaaaaaggaacagtttggagagagtagtctcagaaaagagagagtg

SEQ ID NO: 48824 - DNA, 120 bp, synthetic construct; identical to SEQ ID NO: 13673
  source 1..120: mol_type = other DNA

SEQ ID NO: 48825 - DNA, 120 bp, synthetic construct
  source 1..120: mol_type = other DNA
tacttcatctgttagcattagctacttcatcatttttgaccttatattccaaaattaatatagctaaccggatatgtgcaagtgactaacaaaattacttaattgtttatactgacatta

SEQ ID NO: 48826 - DNA, 120 bp, synthetic construct
  source 1..120: mol_type = other DNA
tatggtctagaaaccatttttccctattttttgcattataaataattattaaactttctttcctaccttaggcttattgtctttggggtttttctactgagatgtctcaagatatttctt

SEQ ID NO: 48827 - DNA, 120 bp, synthetic construct; identical to SEQ ID NO: 13674
  source 1..120: mol_type = other DNA

SEQ ID NO: 48828 - DNA, 120 bp, synthetic construct
  source 1..120: mol_type = other DNA
ttttgaaaaaatagcatcttgtaagtcttcttaaatgtaatgtaatccttcttcttacaggattacctccacaaattcaagaaagatacccactctttctctgtttgaaaacttcaaatg

SEQ ID NO: 48829 - DNA, 120 bp, synthetic construct
  source 1..120: mol_type = other DNA
cctcattcttagggataataaaaagtaagtctacacctaaataggagagtagatcaaagttagaaacatggctttgatgttctctgtttcctgatttccatattacacatccacatttct

SEQ ID NO: 48830 - DNA, 120 bp, synthetic construct
  source 1..120: mol_type = other DNA
tacacataatattttagtgaatgaaacctgcaattttgcttgcttttgttgatcacactgctttattctatgttgggttggttttctaaaatacttaagtatcccctccatagatgacac

SEQ ID NO: 48831 - DNA, 120 bp, synthetic construct; identical to SEQ ID NO: 13675
  source 1..120: mol_type = other DNA

SEQ ID NO: 48832 - DNA, 120 bp, synthetic construct
  source 1..120: mol_type = other DNA
ctaaaataaaccaatcagattattctttcacccacaccacaaaggttagttcaggaatgggcctatgaagactgatactgctcaagtttttatttgacctttcaggacactgatctattc

SEQ ID NO: 48833 - DNA, 120 bp, synthetic construct
  source 1..120: mol_type = other DNA
agagaggtaaatctcctgatgatattgtgtgacctctgcatcaagctaaactcaaagccagtttactccagaatagtagttggataaactaataaattccttctttgagatcatctgcca

SEQ ID NO: 48834 - DNA, 120 bp, synthetic construct
  source 1..120: mol_type = other DNA
ggtggtgtccctgttctagatctctaatagtcactcacctaccacaaaagagaagtaatttctatacttctgccttgatttttgcgtgaggccttgtatttaccctattatagtgctcat

SEQ ID NO: 48835 - DNA, 120 bp, synthetic construct
  source 1..120: mol_type = other DNA
tttttgagtgaatgaatgaaggaaagcataatttctacaagaaaagtaagagtcagacctacaggatctcttctgcattttttcctacatgtttaccactgtctgcaatatcatctgaag

SEQ ID NO: 48836 - DNA, 120 bp, synthetic construct; identical to SEQ ID NO: 13676
  source 1..120: mol_type = other DNA

SEQ ID NO: 48837 - DNA, 120 bp, synthetic construct
  source 1..120: mol_type = other DNA
ggatccctagagaggctgcagttgagggagatatcactttgatgtttttaaagctttacttgcactgaaaggaaaatcttatagacttttaggatatataacgacaaaatttgcctggat

SEQ ID NO: 48838 - DNA, 120 bp, synthetic construct
  source 1..120: mol_type = other DNA
agattaaaaaataactggtgtctaactgacattccatttcttatgccactctgtgtcattttcccaggaaaatttatgatatttgcaagagactactgtataattacattattttattta

SEQ ID NO: 48839 - DNA, 120 bp, synthetic construct; identical to SEQ ID NO: 13677
  source 1..120: mol_type = other DNA

SEQ ID NO: 48840 - DNA, 120 bp, synthetic construct
  source 1..120: mol_type = other DNA
acgtgcccatggtcccagctacacaggaggctgaggtgagagtatctcttgatcccaggaggttgaggcagcagtgaggcgagattacactactgcattaaagccaggtagacagaacaa

SEQ ID NO: 48841 - DNA, 120 bp, synthetic construct
  source 1..120: mol_type = other DNA
gagaccaccctggctaacacggtgaaaccccgtctctactaaaactacaaaaaattagccaagcatggtggcatgtgcctgtagtcccagctactagggaggccgaggcaggagaactgc

SEQ ID NO: 48842 - DNA, 120 bp, synthetic construct
  source 1..120: mol_type = other DNA
cctctcaagttcagaggtgatcttgtttttgtcctcagagagggtagccccaagtccccaaaataagcattaaaaagattaaaaatagtcgcatgtatactagtcctcttttcaggccta

SEQ ID NO: 48843 - DNA, 120 bp, synthetic construct
  source 1..120: mol_type = other DNA
cattcagcccaagctcacttttgtattgttcaaaccaaaagtgaatatgtgaaaagttatctcagatattcccacaataagttatagtggtaactccatcttactttctctaaaacagat

SEQ ID NO: 48844 - DNA, 120 bp, synthetic construct; identical to SEQ ID NO: 13678
  source 1..120: mol_type = other DNA

SEQ ID NO: 48845 - DNA, 120 bp, synthetic construct
  source 1..120: mol_type = other DNA
atctgttgtggaacaaaaggctaacttgaaaggaatctactattgccttgtaattgtggagcctcactaagtcaaggctgggaaatactgattaaaccaggtctaatgtgtactagattt

SEQ ID NO: 48846 - DNA, 120 bp, synthetic construct
  source 1..120: mol_type = other DNA
tcctggattactatcaaatatcctgaaaaaatttatctagatttcaatgtctaacaataccaattggatgcatttgttaaatcttgcccaaatacatatttgcaaaactccagaaaaaag

SEQ ID NO: 48847 - DNA, 120 bp, synthetic construct
  source 1..120: mol_type = other DNA
acttaacatgaatacatatgaaagatactatatgttattttgtccaattataaatgtacacataaatatttaaaataggtttcttttagttacatgtaaatgtagaaatttaagtgatct

SEQ ID NO: 48848 - DNA, 120 bp, synthetic construct; identical to SEQ ID NO: 13679
  source 1..120: mol_type = other DNA

SEQ ID NO: 48849 - DNA, 120 bp, synthetic construct
  source 1..120: mol_type = other DNA
cctgaccaattcaccaccacaaagatgtttcagtgtaaagctctaatggggtattgtaaatgaatgatccttaaagagctttgttaaaatacatttcacaaactttcctcagtgagcaca

SEQ ID NO: 48850 - DNA, 120 bp, synthetic construct
  source 1..120: mol_type = other DNA
gcatgcctctcttttaaggcaatctgcatagaatcctagtcataatttgaaaacatcaactttttaaatatcacagcacctgtggtattatctccaaaaaaaaaaaagagtagttttcac

SEQ ID NO: 48851 - DNA, 120 bp, synthetic construct
  source 1..120: mol_type = other DNA
ttaaagcaaaactagacaaaacacaaaagactttactcctcctacagccgtaatccttcccccttccccgcaaaatctacactttagtctccatttttgcacctcccattccaacctgac

SEQ ID NO: 48852 - DNA, 120 bp, synthetic construct; identical to SEQ ID NO: 13680
  source 1..120: mol_type = other DNA

SEQ ID NO: 48853 - DNA, 120 bp, synthetic construct
  source 1..120: mol_type = other DNA
ccatatttaaaacttcagctcaatctcttccattacacttttaataaagtccaaacacctatacatgttcctgcatattctgactcctagtacaaaccacactccccttcccccacacat

SEQ ID NO: 48854 - DNA, 120 bp, synthetic construct
  source 1..120: mol_type = other DNA
gagaggcctgctctaataatcttatctatttaaataacttcccaccccaacgcattatattctatcattgccttaagtttattttctccactgcccttactcagagttgaacttgtggac

SEQ ID NO: 48855 - DNA, 120 bp, synthetic construct
  source 1..120: mol_type = other DNA
gcattttttaaatatttccttcaagatgcatgcatgcatgaatgaatgaacacattcatttttttctagtagcttatttcagaaaagctatgtggttttaatatccttcttgtaatttat

SEQ ID NO: 48856 - DNA, 120 bp, synthetic construct
  source 1..120: mol_type = other DNA
taaacatataagatgatgacaaatttaactcctaaaagtttacaattgtaactatgaaaaggccaacccaagagcaatgggtcatcttagctttggcctgtttctcttgtgtgtctatat

SEQ ID NO: 48857 - DNA, 120 bp, synthetic construct; identical to SEQ ID NO: 13681
  source 1..120: mol_type = other DNA

SEQ ID NO: 48858 - DNA, 120 bp, synthetic construct
  source 1..120: mol_type = other DNA
catttttatagatactattgatagcctctttcaacttccatttcactccactttcacttgagaaaattggaatgcatcttacagactcacttgcagccagagttctggagacatatcaag

SEQ ID NO: 48859 - DNA, 120 bp, synthetic construct
  source 1..120: mol_type = other DNA
gagaagacagtgctggtgaacaaagcagtctcctaacctgttgatctgccctgatgcttaataatccaaattttgattatttgatttcagttattttagtccttcaataacattgtaggt

SEQ ID NO: 48860 - DNA, 120 bp, synthetic construct
  source 1..120: mol_type = other DNA
ttgcttttttcatggtatttcttcaagtaaaaatgtaccttataacattgcaaaaataccaagatgatttttttttaattttacataatgtttttaattggcaggtatttatttaatttt

SEQ ID NO: 48861 - DNA, 120 bp, synthetic construct; identical to SEQ ID NO: 13682
  source 1..120: mol_type = other DNA

SEQ ID NO: 48862 - DNA, 120 bp, synthetic construct
  source 1..120: mol_type = other DNA
taacactcatatattaaataagcatgtaggcatatcttatgccttataaatttgctatttggggctacagtagtgagatcatatgctctgccatgttcctctactttaggaagaaatgac

SEQ ID NO: 48863 - DNA, 120 bp, synthetic construct
  source 1..120: mol_type = other DNA
taagcttgaaacctgctgtttgtaaaccatattgctgtcacatgaaaatataaagaattattaaaccctaaaaagaaacgagttaaaaactagcactaactgaaactcaatctctctgtc

SEQ ID NO: 48864 - DNA, 120 bp, synthetic construct
  source 1..120: mol_type = other DNA
atcttttatcaggaagttgaactgatttggaaaaatcaatggaattttgtgtaatcaaaagtaaaaatgacaagcatacaaacagaaaactggctccaagaaagacaacactagctgaat

SEQ ID NO: 48865 - DNA, 120 bp, synthetic construct; identical to SEQ ID NO: 13683
  source 1..120: mol_type = other DNA

SEQ ID NO: 48866 - DNA, 120 bp, synthetic construct
  source 1..120: mol_type = other DNA
aaaattacaactcaaaattttcttctgcaactcttttagtaaaattgatggcaaggaagaagtatcttggtttatctttacccctcaatcatgtaattttcacaaatccactgctctaag

SEQ ID NO: 48867 - DNA, 120 bp, synthetic construct
  source 1..120: mol_type = other DNA
agactacaataatacagccttaataatggaaatttggatgcaaaggaatgggcaatcaactcttggacacacagaatgtctggctgatccttcttgctcatttcatgggccacataatca

SEQ ID NO: 48868 - DNA, 120 bp, synthetic construct
  source 1..120: mol_type = other DNA
gctcttctttttagggtcctcaccaccatcattttttccacatacattattactacttagaaaaggaaagattttcactaaaatgccgtctaacccagcctgccctccccagacggttcc

SEQ ID NO: 48869 - DNA, 120 bp, synthetic construct
  source 1..120: mol_type = other DNA
acacaggaaagatctggaaatctcatttactttaagttcttaatagctgagaggaattaggtttttaccccatatacacaagccctagaagatctgcattttaataggggacgattcctt

SEQ ID NO: 48870 - DNA, 120 bp, synthetic construct; identical to SEQ ID NO: 13684
  source 1..120: mol_type = other DNA

SEQ ID NO: 48871 - DNA, 120 bp, synthetic construct
  source 1..120: mol_type = other DNA
ttgcaatgtggtattgttattactatgtatctcttctcaagttcattgtatcttgaccaaggtggtcctcaccttgattaaactttaataggtttctttctgaccttcagcagctcctaa

SEQ ID NO: 48872 - DNA, 120 bp, synthetic construct
  source 1..120: mol_type = other DNA
agtagtgcaattatggtgctcactacagcctcaacctcctgggctcaagcaatgctcctgtcttggccactctagtagctgggacatttacaagccacttttcagtttcacaacccataa

SEQ ID NO: 48873 - DNA, 120 bp, synthetic construct
  source 1..120: mol_type = other DNA
cattgtgaaactacttcttaccatgcagatataagactgaaagtttacgttttgagggggaaaagccaatatgcaaaaacagatgtcctgtgattccccataccagccattacaaacatt

SEQ ID NO: 48874 - DNA, 120 bp, synthetic construct; identical to SEQ ID NO: 13685
  source 1..120: mol_type = other DNA

SEQ ID NO: 48875 - DNA, 120 bp, synthetic construct
  source 1..120: mol_type = other DNA
agggcatgcatgactaccagtgaggcatctaatttatcttgtatagagaaatcttaaatcagccataagtcatgtcaaatatgaataaggtagcaccttcataacagactagtggcttag

SEQ ID NO: 48876 - DNA, 120 bp, synthetic construct
  source 1..120: mol_type = other DNA
catatattgaaaagaatatattgaatgttctctgagctatgaggtcaccagaaccatgtcaaaagttctgaaatctctgaagttcacttgggacatcagataaattatttgaaaacaacc

SEQ ID NO: 48877 - DNA, 120 bp, synthetic construct
  source 1..120: mol_type = other DNA
gttaaagtaaagtagtgaattagagagaattaagcagctgctcttaagaaagaaaaaataatcacagtagtaattttcaaaaagtgtttaggattgaattctctttttaaaaattgacaa

SEQ ID NO: 48878 - DNA, 120 bp, synthetic construct; identical to SEQ ID NO: 13686
  source 1..120: mol_type = other DNA

SEQ ID NO: 48879 - DNA, 120 bp, synthetic construct
  source 1..120: mol_type = other DNA
aaaatatttcctttagggaaatttagtatgaaagcaaaaccaaggttgaaatgaaggatttttgttaagtcagttctgcctccagctagctttgtgactgagcaagtaatttaatcccac

SEQ ID NO: 48880 - DNA, 120 bp, synthetic construct
  source 1..120: mol_type = other DNA
gctcacagtaaatgtgtaacgttgtagactgctaatactgtttacaaataatgaatgtgatagtttgaactttctgaaccaaacaattgtttatctagtgcctaaaagtattgatatata

SEQ ID NO: 48881 - DNA, 120 bp, synthetic construct; identical to SEQ ID NO: 13687
  source 1..120: mol_type = other DNA

SEQ ID NO: 48882 - DNA, 120 bp, synthetic construct
  source 1..120: mol_type = other DNA
tgagggagcaaagacagagaattcacgtgctgcccaggcatagccacatagcaggtggacatccctggacacttttctggtaagcataatcattttagataacaaagtcctgtactaata

SEQ ID NO: 48883 - DNA, 120 bp, synthetic construct
  source 1..120: mol_type = other DNA
aattcctttctctttgtcagttgtctctcatctcaggtacaggtacattcaaagacttccgttacccagaactattataagatcattattatgctaaagaaattcaatatgtagttctag

SEQ ID NO: 48884 - DNA, 120 bp, synthetic construct
  source 1..120: mol_type = other DNA
agacatataatttataaagaacccctttcatgatttctagagataatctaatgtctcagggaaaaatgtattcacactttgtctaaaagtgtctacagcatactattacagctcatccaa

SEQ ID NO: 48885 - DNA, 120 bp, synthetic construct
  source 1..120: mol_type = other DNA
aattctgaatgaagatactttcaagtatcactactttcagcttctctgggagaaattttatgtagtagtgaattttacatcttctctaaataaatgtatatgccagacaattgaatagcc

SEQ ID NO: 48886 - DNA, 120 bp, synthetic construct; identical to SEQ ID NO: 13688
  source 1..120: mol_type = other DNA

SEQ ID NO: 48887 - DNA, 120 bp, synthetic construct
  source 1..120: mol_type = other DNA
gacaatgctcttgtgcaacaaattctacccttcaaattaatatagctggaattttattgtggtgatacagtattcttgtcttcgtccaaattgaattaatgctcctattatacactctgc

SEQ ID NO: 48888 - DNA, 120 bp, synthetic construct
  source 1..120: mol_type = other DNA
atttttatgaattagacctttaagctgtcattatgagacttactttattcatgctgaatttcatttaaaatgtcaacttctcaagattctacatttcctcaagcactattgtctctgtta

SEQ ID NO: 48889 - DNA, 120 bp, synthetic construct
  source 1..120: mol_type = other DNA
tgactttttcttcctcaacagccaagagtactcttccctttctgtctacctgactttgaacacacataaaaaatttcctcttccatctctttctcattggtttgccattttgtttgtaac

SEQ ID NO: 48890 - DNA, 120 bp, synthetic construct; identical to SEQ ID NO: 13689
  source 1..120: mol_type = other DNA

SEQ ID NO: 48891 - DNA, 120 bp, synthetic construct
  source 1..120: mol_type = other DNA
tacaattgcaaagctttctaagatgctgtttccacgaggaaacaaatgcaaaatgttttatttttgtcttatgttttgttcctcccctctttgcccttctagtgtagagattatcctaat

SEQ ID NO: 48892 - DNA, 120 bp, synthetic construct
  source 1..120: mol_type = other DNA
cactgtcaccttgttttcttagagtggcagagattggcctggaacccagctcacaatatgaccatggaaaattttacataagctgaagataagttcaattacacgagtgattattagagt

SEQ ID NO: 48893 - DNA, 120 bp, synthetic construct
  source 1..120: mol_type = other DNA
gctatggcacaccgaatttcattttcctcatttgaaaagtggagctaataaaatctacctcacgcttgtaatcccagcactttgggaggccgaggcgggcggatcacgaggtcaggggat

SEQ ID NO: 48894 - DNA, 120 bp, synthetic construct
  source 1..120: mol_type = other DNA
tggcgtgaaccctggaggcggagcttgcagtgagccgagattgcgccactgcactcccgcctgggccacagagcgagactccgtctcaaaaaaaaaaaaaaaagaaaaaaaaaaaaagtc

SEQ ID NO: 48895 - DNA, 120 bp, synthetic construct; identical to SEQ ID NO: 13690
  source 1..120: mol_type = other DNA

SEQ ID NO: 48896 - DNA, 120 bp, synthetic construct
  source 1..120: mol_type = other DNA
tatgcaactatagatgaatgttgtatcttctgtcttcaaccataaaaggcagagaaatgagtagaatgtgtttgagtcccctttcacctgtttattccttatttaccaagtgaaatatgc

SEQ ID NO: 48897 - DNA, 120 bp, synthetic construct
  source 1..120: mol_type = other DNA
atcatcttgcatttattttctaattttcctgggaatgggtaacctaaaaagagttgcaaatatcgatggcatgttgtctggttttgatatggcttaaaattgtttaaagcaagagaaaag

SEQ ID NO: 48898 - DNA, 120 bp, synthetic construct
  source 1..120: mol_type = other DNA
ttttgaaaattaaagcctgagaccataggaggtggcttggtttttaaaaggtggatcagggtaaacctttctgaatgggcaattggaaagattattgaaaaaagtggaagagctttgggc

SEQ ID NO: 48899 - DNA, 120 bp, synthetic construct; identical to SEQ ID NO: 13691
  source 1..120: mol_type = other DNA

SEQ ID NO: 48900 - DNA, 120 bp, synthetic construct
  source 1..120: mol_type = other DNA
cctttccccattgcttgtttttctcaggtttgtcaaagatcagatagttatagatatgcggcgttatttctgagggctctgttctgttctattgatctatatctctgttttggtaccagt

SEQ ID NO: 48901 - DNA, 120 bp, synthetic construct
  source 1..120: mol_type = other DNA
atatgaactttaaagtagttttttccaattctgtgaagaaagtcattggtagcttgatggggatggcattgaatctgtaaattaccttgggcagtatggccattttcatgatattgattc

SEQ ID NO: 48902 - DNA, 120 bp, synthetic construct
  source 1..120: mol_type = other DNA
ggtattttattctctttgaagcaattgtgaatgggagttcactcatgatttggctctctgtttgtctgttgttggtgtataagaatgcttgtgatttttgtacattgattttgtatcctg

SEQ ID NO: 48903 - DNA, 120 bp, synthetic construct
  source 1..120: mol_type = other DNA
gaataccatttatttccttctcctgcctaattgccctggccagaacttccaacactatgttgaataggagtggtgagagagggcatccctgtcttgtgccagttttcaaagggaatgctt

SEQ ID NO: 48904 - DNA, 120 bp, synthetic construct; identical to SEQ ID NO: 13692
  source 1..120: mol_type = other DNA

SEQ ID NO: 48905 - DNA, 120 bp, synthetic construct
  source 1..120: mol_type = other DNA
ctcttttttggttgtgtctctgccaggctttggtatcagaatgatgctggcctcataaaatgagttggggaggattccctctttttctattgattggaatagtttcagaaggaatggtac

SEQ ID NO: 48906 - DNA, 120 bp, synthetic construct; identical to SEQ ID NO: 13693
  source 1..120: mol_type = other DNA

SEQ ID NO: 48907 - DNA, 120 bp, synthetic construct
  source 1..120: mol_type = other DNA
tgggagaaaattttcgcaacctactcatctgacaaagggctaatatccagaatctacaatgaactcaaacaaatttacaagaaaaaaacaaacaaccccatcaaaaagtgggcaaaggac

SEQ ID NO: 48908 - DNA, 120 bp, synthetic construct
  source 1..120: mol_type = other DNA
ccagttagaatggcaatcattaaaaagtcaggaaacaacaggtgctggagaggatgtggagaaataggaacacttttacactgttggtgggactgtaaactagttcaaccattgtggaag

SEQ ID NO: 48909 - DNA, 120 bp, synthetic construct
  source 1..120: mol_type = other DNA
atgtttattgcggcattattcacgatagcaaagacttggaaccaacccaaatgtccaacaatgatagaccggattaagaaaatgtggcacatatactccatggaatactatgaagccata

SEQ ID NO: 48910 - DNA, 120 bp, synthetic construct
  source 1..120: mol_type = other DNA
tgaacaatgagatcacatggacacaggaaggggaatatcacactctggggactgttgtggggtggggggagtggggagggatagcattgggagatatacctaatgctagatgacaagtta

SEQ ID NO: 48911 - DNA, 120 bp, synthetic construct; identical to SEQ ID NO: 13694
  source 1..120: mol_type = other DNA

SEQ ID NO: 48912 - DNA, 120 bp, synthetic construct
  source 1..120: mol_type = other DNA
ttgagtgctgcagccaagatgtagtagggcagatctcctagaatctttttactggtatgaattttccatttccctgtgagtaacataggaagccagtgagaggtttaagcagagaagtta

SEQ ID NO: 48913 - DNA, 120 bp, synthetic construct
  source 1..120: mol_type = other DNA
aatattcttcttctattttttttttccaaaaatttcctcggaattttatttgggactctggaaggcacgcaactttatagcaacatggtaagagtacctcccttcacattgtaattaggt

SEQ ID NO: 48914 - DNA, 120 bp, synthetic construct; identical to SEQ ID NO: 13695
  source 1..120: mol_type = other DNA

SEQ ID NO: 48915 - DNA, 120 bp, synthetic construct
  source 1..120: mol_type = other DNA
gtaatactaggtgtgacagcagtaagtaagaaagttcataattacaataaggactttgagaaacagtagacgtgaagcatgtgggaatcaagagagacatgcaactccccatggctgagt

SEQ ID NO: 48916 - DNA, 120 bp, synthetic construct
  source 1..120: mol_type = other DNA
agcacgtgttattataaatgccagctgaaggaactgaggtacagtcatagctcatgtcttgcagatgcagttgagaactcagtgaagctatatcattcatgaaataaatgttgtaaagga

SEQ ID NO: 48917 - DNA, 120 bp, synthetic construct
  source 1..120: mol_type = other DNA
aaaaaaaaaggtcgttgtgaatgttagctccagatcaactgcaagaacaaatcagcaatcccaagaggacccacagaccctctgaaggaagcagactgcttctgcaggacctgggagtca

SEQ ID NO: 48918 - DNA, 120 bp, synthetic construct; identical to SEQ ID NO: 13696
  source 1..120: mol_type = other DNA

SEQ ID NO: 48919 - DNA, 120 bp, synthetic construct
  source 1..120: mol_type = other DNA
aaatctggtgtgcagactccacaggcaggggaagaaccaagcccttttcttttgcagctggaaggtgggtagcctcgggcaagttttcaagcccatctcgccctccacctggaaacagac

SEQ ID NO: 48920 - DNA, 120 bp, synthetic construct
  source 1..120: mol_type = other DNA
agagacagccataatcctcctacttacacaactccagtgacctgggaatctcacccccatcccccacagcagctacagcaagacccacccaaggagagtctgagcccagacattcctagc

SEQ ID NO: 48921 - DNA, 120 bp, synthetic construct; identical to SEQ ID NO: 13697
  source 1..120: mol_type = other DNA

SEQ ID NO: 48922 - DNA, 120 bp, synthetic construct
  source 1..120: mol_type = other DNA
tgcagtttggctcacaggaagccacatccataggaaaagggggagagtactacatcaagagaacaccctaggggacaaaagaatctgaacaacagccttcagccctagaccttcactctg

SEQ ID NO: 48923 - DNA, 120 bp, synthetic construct
  source 1..120: mol_type = other DNA
gaaatctctgatttacctgaaaaagaattcaggagttaggttattaagctaatcagggaggcaccagagaaaggtgaagcccagtgcaaggaaatccaaaaaacaatacaagaagtgaag

SEQ ID NO: 48924 - DNA, 120 bp, synthetic construct
  source 1..120: mol_type = other DNA
agaaagaaattcagagctctaagacaaggtctttgaattaacccaatccaataaagacaaagaacagtgaataagaaaatatgaacaaagcttccaagaagtctgggattatgttaaatg

SEQ ID NO: 48925 - DNA, 120 bp, synthetic construct; identical to SEQ ID NO: 13698
  source 1..120: mol_type = other DNA

SEQ ID NO: 48926 - DNA, 120 bp, synthetic construct
  source 1..120: mol_type = other DNA
cagccaagaattttgtatccagtgaaactaagcatcatatatgaaggaaagatgaagtctttttcagacaaacaaatactgagagaattcgccattaccaagccaccagtacaagaactg

SEQ ID NO: 48927 - DNA, 120 bp, synthetic construct
  source 1..120: mol_type = other DNA
taaccaaagtacacaggcaacaaagagcacaatgaatgcaatggtgcctcccatttcaatactaacattgaatgtaaacggcctaaatgctccacttaaaagatacagaaccacagaatg

SEQ ID NO: 48928 - DNA, 120 bp, synthetic construct
  source 1..120: mol_type = other DNA
gcaagcagaggtagctattcttatatcagacaagaaaaacagacaagaaaaaccttaaaccaacagcagtaaaaagagacaaagagggacattatataatggtaaaaggtcttgtccaac

SEQ ID NO: 48929 - DNA, 120 bp, synthetic construct; identical to SEQ ID NO: 13699
  source 1..120: mol_type = other DNA

SEQ ID NO: 48930 - DNA, 120 bp, synthetic construct
  source 1..120: mol_type = other DNA
ctctctcagaccacagtggaataaaactggaaatcaactgcaaaaggaatcttcaaaaccatgcaaatacatggaaattaaataacctgctcccaaatgagcactggctcaaaaacaaaa

SEQ ID NO: 48931 - DNA, 120 bp, synthetic construct
  source 1..120: mol_type = other DNA
caaaaagactaaaaaagcaaaaattgacttctaaggtcacacctcatagaactagagaaacaagagcaaaccaaacccaaacccagcagaagaaagaaataaccaagatcagagcagaaa

SEQ ID NO: 48932 - DNA, 120 bp, synthetic construct
  source 1..120: mol_type = other DNA
gaaaatacaaataacttcactaagaaatgaaacaggagacattacaattgacaccactgaaataaaaaagatcactcaaggctattatgaacacctttacccacataaactaaaaaccta

SEQ ID NO: 48933 - DNA, 120 bp, synthetic construct; identical to SEQ ID NO: 13700
  source 1..120: mol_type = other DNA

SEQ ID NO: 48934 - DNA, 120 bp, synthetic construct
  source 1..120: mol_type = other DNA
gctaacggaatccaataacatatcaaaaagataatccaccatgatcaagtgggtttcataccagggatgaagggatggtttaacatatgcaagtcaataaattcaatacaccacataaac

SEQ ID NO: 48935 - DNA, 120 bp, synthetic construct
  source 1..120: mol_type = other DNA
aatgtaataaaagctttccatgaaaaacccacagccaacatatattgaatgggtaaaagttgaaagcattccctctgagagctggaacaagacaaggatgtccactctcaccacttctct

SEQ ID NO: 48936 - DNA, 120 bp, synthetic construct
  source 1..120: mol_type = other DNA
ttgaaaaacctaaagactcctctagaaagctcctagaactgataaaataattcagcacagtttccagatacaagattaatgtacacatatcagcagttcttctatacatcagcaacaacc

SEQ ID NO: 48937 - DNA, 120 bp, synthetic construct
  source 1..120: mol_type = other DNA
acactgctgaaagcaattatagacaacacaaacaaatggaaacacatcccacgcttatggatggatataatcaatcttgggaaaatgaccatactgccaaaagcaatctgcaaattcaat

SEQ ID NO: 48938 - DNA, 120 bp, synthetic construct; identical to SEQ ID NO: 13701
  source 1..120: mol_type = other DNA

SEQ ID NO: 48939 - DNA, 120 bp, synthetic construct
  source 1..120: mol_type = other DNA
atgaaactggatcttcatctctcaccttatacagaaatcaacccaagatggataaaggatttaaacctaagacatgaaactataaaaattctagaagataacattggaaaaacccttcta

SEQ ID NO: 48940 - DNA, 120 bp, synthetic construct
  source 1..120: mol_type = other DNA
agttggcagagtaaacagacaacccacagagtgggagaaaatcttcacaatctatacatctgacaaaggactaatatccagaatctacaacaaactcaaacaagacagtaagaaaaaaaa

SEQ ID NO: 48941 - DNA, 120 bp, synthetic construct
  source 1..120: mol_type = other DNA
aaatcaaaaccacaatgaaacaccaccttactcctgcaagaatggccataataaaaaaaataaaaaaacagtagtggcatgtatgtggtgattagggaacacttctacactgctggtggg

SEQ ID NO: 48942 - DNA, 120 bp, synthetic construct; identical to SEQ ID NO: 13702
  source 1..120: mol_type = other DNA

SEQ ID NO: 48943 - DNA, 120 bp, synthetic construct
  source 1..120: mol_type = other DNA
gtaactcaggaatggaaaaccaaacatcgggtgttctcactaatttgtgggagctaagctataaggacacaaagacataagaatgatacaatgaactttgcggacttgggggaagagtgg

SEQ ID NO: 48944 - DNA, 120 bp, synthetic construct
  source 1..120: mol_type = other DNA
gtactcaataactgacggaaaaatgttaaaaaatgatatcatactacctttttccctttgagcctccgaaaggtgtgatgaaaggattttaataatcactttattttacatggtcaaaca

SEQ ID NO: 48945 - DNA, 120 bp, synthetic construct; identical to SEQ ID NO: 13703
  source 1..120: mol_type = other DNA

SEQ ID NO: 48946 - DNA, 120 bp, synthetic construct
  source 1..120: mol_type = other DNA
cctgtcggatcagcagctgcattagattctcataggagagcaaaccctcttgtgaactgcacatgcaagggatctaggttgcatgctccttatgagaatctaatgcctgatgatctgaag

SEQ ID NO: 48947 - DNA, 120 bp, synthetic construct
  source 1..120: mol_type = other DNA
tgccaaaaaggttgaggaatgctgatgtaagtgacagaacaaaatttaaatctaaagatgatcacaaaccctgtttctctcctgcaacatggataatgaagcttgagatagatatactct

SEQ ID NO: 48948 - DNA, 120 bp, synthetic construct
  source 1..120: mol_type = other DNA
aagtgccaccttttacttcatcaatgccaaacttatctttcaactgtctcacaaccaaagttatttgacttcacgatttttttttcatatttctgaatttagtatgcaaaaggaaaggta

SEQ ID NO: 48949 - DNA, 120 bp, synthetic construct; identical to SEQ ID NO: 13704
  source 1..120: mol_type = other DNA

SEQ ID NO: 48950 - DNA, 120 bp, synthetic construct
  source 1..120: mol_type = other DNA
tttcagaaggcaaatgctcaaagtttactgacttggactcagaggagaagctcaattcacatgcacttatctctttagataactccataaattacaaatgcttttgtttgtttgtttggt

SEQ ID NO: 48951 - DNA, 120 bp, synthetic construct
  source 1..120: mol_type = other DNA
ataaatataagtttcttttctaacaacttttcatttacaatatcatgttacttacataaaattactgtttccatattttatctatatgtttttctacatttttctgtaattggaaatgga

SEQ ID NO: 48952 - DNA, 120 bp, synthetic construct
  source 1..120: mol_type = other DNA
caaaacatacattaccttaaagtactatttcaaagatactgctatttttataacagttttggacttgatttattaaataaattaataagacccaatagctattttaaaatatgatttgac

SEQ ID NO: 48953 - DNA, 120 bp, synthetic construct; identical to SEQ ID NO: 13705
  source 1..120: mol_type = other DNA

SEQ ID NO: 48954 - DNA, 120 bp, synthetic construct
  source 1..120: mol_type = other DNA
cactttgttacccaggctagagtgcagtcgtgggatctcggctcactgcaacctctgtttcccaggctcaagtgatcctcccacctcatcttcctgagtagctgggactacaggcatatg

SEQ ID NO: 48955 - DNA, 120 bp, synthetic construct
  source 1..120: mol_type = other DNA
ggattacagcattccttatcctttattaaatgagcaatttccaagactgtttactccatctatgtaaaatacacttggtcttgaagatgcagccacttttctcactcattctagagaggg

SEQ ID NO: 48956 - DNA, 120 bp, synthetic construct
  source 1..120: mol_type = other DNA
aaatgttttataaggaaaaattggtacttgtaagcaagagcattggaggaaacattcttttttataaaatgttttatgagaaaatttgctgacacaaggaagtttcacttagaattccat

SEQ ID NO: 48957 - DNA, 120 bp, synthetic construct; identical to SEQ ID NO: 13706
  source 1..120: mol_type = other DNA

SEQ ID NO: 48958 - DNA, 120 bp, synthetic construct
  source 1..120: mol_type = other DNA
ggacagtgagaaaaagttaattgttttcacaaaaggtctttttaataatcaataacaggaaatcaaaaccaatataacaaaagaagaaagttgtaagtttagagatacaagtttcttgtc

SEQ ID NO: 48959 - DNA, 120 bp, synthetic construct
  source 1..120: mol_type = other DNA
ttactcaacagttattaatacttacctacttttccatgacactaagctgaattatacttgttttaacatattaactgaaagatacctatgttacctcaggccaagccctagtacagtgtt

SEQ ID NO: 48960 - DNA, 120 bp, synthetic construct
  source 1..120: mol_type = other DNA
aagattccattcgtaatctagtttcccaagcctccgccatcacagctttctctccaaaattcttttttcttccgaaagcactactaaatcctactagtaaatatcatctggcagatgagg

SEQ ID NO: 48961 - DNA, 120 bp, synthetic construct; identical to SEQ ID NO: 13707
  source 1..120: mol_type = other DNA

SEQ ID NO: 48962 - DNA, 120 bp, synthetic construct
  source 1..120: mol_type = other DNA
gggcctgttatacccttttctctttcatattctctcatctttggctttatcagtttgtattctaatgatatttgtgatagctaattttatgcatcaattcgggtaggctttggtaacact

SEQ ID NO: 48963 - DNA, 120 bp, synthetic construct
  source 1..120: mol_type = other DNA
taatcagttgaaggccttaaagagaaaagactgaagtcccccaaggaggaaggaagtcttctttcagactgccttcagactcaagactgcaaaacaaactattccctgggccctcagact

SEQ ID NO: 48964 - DNA, 120 bp, synthetic construct
  source 1..120: mol_type = other DNA
gtttctctggagaatgctgactaaatcaatgtgttctacatttcctttcttgggtctatgctgtgttctaaacagcctcagattcatggctgacctgctctttagttatgtttgaagcta

SEQ ID NO: 48965 - DNA, 120 bp, synthetic construct
  source 1..120: mol_type = other DNA
cagatttccttaacatacagaatttttggatcctttgatatatgtgtgtgtgcattgtaaatgcaaaagaaaaaatataatatattaagctgcccaaaagtgttttgtcatgaaaactgt

SEQ ID NO: 48966 - DNA, 120 bp, synthetic construct; identical to SEQ ID NO: 13708
  source 1..120: mol_type = other DNA

SEQ ID NO: 48967 - DNA, 120 bp, synthetic construct
  source 1..120: mol_type = other DNA
ataagagcaacatccagagataatacagtaagacaaagagagagatctgggcatctattctctagtttcctcccaggctcactgagaattttacatacatcattttacagagtgttggtt

SEQ ID NO: 48968 - DNA, 120 bp, synthetic construct
  source 1..120: mol_type = other DNA
ataggagtgataaaggcttcctactttggctagctcttggggctccaccataaccctgcaaacctttaaaagtactatattcattaaactcttttaatcactcatgcaagtgttccaggg

SEQ ID NO: 48969 - DNA, 120 bp, synthetic construct
  source 1..120: mol_type = other DNA
ctaacacttaattgccattttaggataatggaaatagactgagccttggtaggagacacctggctttcaattccagttataccatttttagagctgtgttatcttaggcaatttacttga

SEQ ID NO: 48970 - DNA, 120 bp, synthetic construct; identical to SEQ ID NO: 13709
  source 1..120: mol_type = other DNA

SEQ ID NO: 48971 - DNA, 120 bp, synthetic construct
  source 1..120: mol_type = other DNA
gtcatgaaagcaatcaccttactagcttctgtggataccaataaagagctaccataaaattaatggtttttatatgtataagaaatttcctgatgtaaaaaatattaacagcaaccaatg

SEQ ID NO: 48972 - DNA, 120 bp, synthetic construct
  source 1..120: mol_type = other DNA
tcctattaaaaatcaccaaaagatatgactttatttctccacaaaacaaagaaaaatattatattgacctgaagttcaataaaatctattgtgtcatggagttaatgaaataaaaattga

SEQ ID NO: 48973 - DNA, 120 bp, synthetic construct
  source 1..120: mol_type = other DNA
cctgtagaatattgtcttcagatgcatcctatggtaaaaaattatcctataataaattttatataatgttcttttctcctctgtatctatacaaattcaactaacttactctttatggct

SEQ ID NO: 48974 - DNA, 120 bp, synthetic construct; identical to SEQ ID NO: 13710
  source 1..120: mol_type = other DNA

SEQ ID NO: 48975 - DNA, 120 bp, synthetic construct
  source 1..120: mol_type = other DNA
aagaccatgcaactcattagtatcaaagctgagattgggcaggactctggtcttctctctagagttctcttgttcacatacaagtgttagcatttataatattatttataattgcaagac

SEQ ID NO: 48976 - DNA, 120 bp, synthetic construct
  source 1..120: mol_type = other DNA
agtataacttaacttcttccttccacatctttgccacaacagaggagtcctggtaattttatactaaatgcccaataattacatgtgggtgaaagtagtgggaaagaaattatctggtat

SEQ ID NO: 48977 - DNA, 120 bp, synthetic construct
  source 1..120: mol_type = other DNA
cttatacaaggattttatgaaacaacttttctgccttccttggtaatcgggaagagggcgggcaacattgcctgaagttgttctgtttaaccgctgaggattctgagaaatacagttctt

SEQ ID NO: 48978 - DNA, 120 bp, synthetic construct; identical to SEQ ID NO: 13711
  source 1..120: mol_type = other DNA

SEQ ID NO: 48979 - DNA, 120 bp, synthetic construct
  source 1..120: mol_type = other DNA
acaatgaccacaatgatgatgtgaagtggttattgtacaagatcttttcaaaacctattgtagccaatttttcctggccaaacaaattctaaaacataaaataagagtcaaaggaaataa

SEQ ID NO: 48980 - DNA, 120 bp, synthetic construct
  source 1..120: mol_type = other DNA
caaagtaataaaagcttcattatggcagacaaagcacgcaatgtggggacaacacagaaatccaagaaaggcaagaccaatttcaaggcactaaataagtggactgagacaagaagtaca

SEQ ID NO: 48981 - DNA, 120 bp, synthetic construct
  source 1..120: mol_type = other DNA
ggctttaaagacgtgtagtattggctttacagatttgtagtattcttttacccatacagagccacattttttttagatttctactaatgaagttttatttgtttctagtctcctgtgaac

SEQ ID NO: 48982 - DNA, 120 bp, synthetic construct
  source 1..120: mol_type = other DNA
ttagtgccacatgaaagttcctcctttttacataaagcctttattttttttttctttttgcagcttggttctaaggaagttccagactaaaatagtgcatcaagaggactggcataatca

SEQ ID NO: 48983 - DNA, 120 bp, synthetic construct; identical to SEQ ID NO: 13712
  source 1..120: mol_type = other DNA

SEQ ID NO: 48984 - DNA, 120 bp, synthetic construct
  source 1..120: mol_type = other DNA
catcctggctaacacggtgaaaccccgtctctactaaaaatacaaaaaattagccaggcatggtggcgggcgcctgtagtcccagctactcgggaggctgaggcaggagaatggcgtgaa

SEQ ID NO: 48985 - DNA, 120 bp, synthetic construct
  source 1..120: mol_type = other DNA
ataaataaatacaataacagaacctaagcgtcctacttaacaaatgacacatccttttccaagtgacagattgctaagcaaaatatttgctacttggtgttttatgagcctctgctagga

SEQ ID NO: 48986 - DNA, 120 bp, synthetic construct; identical to SEQ ID NO: 13713
  source 1..120: mol_type = other DNA

SEQ ID NO: 48987 - DNA, 120 bp, synthetic construct
  source 1..120: mol_type = other DNA
ttttttttttttggactggttgtttgtaaatcacttgtttactctctaggtaagtgatatacaatagtaacctcttcctggatgaatcctcatgagtgtcatcacttaggctcaagggat

SEQ ID NO: 48988 - DNA, 120 bp, synthetic construct
  source 1..120: mol_type = other DNA
agatcttttccaatttgggactgagctaggtgtttctacccctttctagggtggctgtgatctgaggaagacctccatttgtactgttgtaaaaaattaatgatttagctttaattactg

SEQ ID NO: 48989 - DNA, 120 bp, synthetic construct
  source 1..120: mol_type = other DNA
taagaaatgaatgaagacttaaagaaatgactttaacgttccagcaaaatttattacaaagctgatcttgagacatcatattttcaagaattattagtagtattaaccaccagttgtata

SEQ ID NO: 48990 - DNA, 120 bp, synthetic construct
  source 1..120: mol_type = other DNA
ttagagatggcaaaactcatgaagagttaatttaaataactttccaaatttacaaagctaggaaaaggtggagctcagattcaaacccagcaaatctggcaccagcctcttcagagacta

SEQ ID NO: 48991 - DNA, 120 bp, synthetic construct; identical to SEQ ID NO: 13714
  source 1..120: mol_type = other DNA

SEQ ID NO: 48992 - DNA, 120 bp, synthetic construct
  source 1..120: mol_type = other DNA
tacttgccttcaagggcaggtgatgccggagtgggtctggaagcttgttctgtcggtaagggaggtggaatggctgggctttgtcctacacaatgtagaagtaggaattggaaaaaaaaa

SEQ ID NO: 48993 - DNA, 120 bp, synthetic construct
  source 1..120: mol_type = other DNA
ggagatctttaagaagacaccttcgcggattcagttatcttcagagccatttctgaatatattattttccatagatggatatgcaatgttaaatatatctactggacttcattaatggaa

SEQ ID NO: 48994 - DNA, 120 bp, synthetic construct
  source 1..120: mol_type = other DNA
aactaaaaattctcaaatgatataatataggcaataaaagaaggttgaaattcataggcctttgatattgaacagatacatttttccctaccataataaatgacctgtagttaagtaaat

SEQ ID NO: 48995 - DNA, 120 bp, synthetic construct; identical to SEQ ID NO: 13715
  source 1..120: mol_type = other DNA

SEQ ID NO: 48996 - DNA, 120 bp, synthetic construct
  source 1..120: mol_type = other DNA
cttctgctgtgtgttttttatccagaaatcaacatgcaacatgggcatgtgtaacttctaaaatctcactgacaactagatattatcaaatgtcagcagacctgccttactgaaagtttt

SEQ ID NO: 48997 - DNA, 120 bp, synthetic construct
  source 1..120: mol_type = other DNA
gttcatcatatatggttcttgtagctgttacacccatacaggttgattactgagcatgtttaagtatgtatagaagccaaacatactgtttcataacttacaggccgtatgtctagaaaa

SEQ ID NO: 48998 - DNA, 120 bp, synthetic construct
  source 1..120: mol_type = other DNA
aaagaaggttgatccacattatctttctttccctagctaacaattacatagtgtttactatgtgccaagaatgatccaaatggttttcctgcattaagtcatttaatcttcacaagctct

SEQ ID NO: 48999 - DNA, 120 bp, synthetic construct
  source 1..120: mol_type = other DNA
ttgggatgtgcatattagtctcattttatagtttttaaaactgaggttaaccagagtttaggcttctcagctgctaataagtggaattggatttcaatgcaggttcccaagttgcaattc

SEQ ID NO: 49000 - DNA, 120 bp, synthetic construct; identical to SEQ ID NO: 6261
  source 1..120: mol_type = other DNA

SEQ ID NO: 49001 - DNA, 120 bp, synthetic construct
  source 1..120: mol_type = other DNA
tagatcgatatcttcatagaatggtgcctgttgagtctcagctgctttctaccctgtcatatacctcggtgaatagtagtgggtgtataattatagtcttttatagtcttgagttattga

SEQ ID NO: 49002 - DNA, 120 bp, synthetic construct
  source 1..120: mol_type = other DNA
tattgcatacttattatataccagcaccaaagaattattaaaccccaaccctgccttcaagaagttcccaacatactggctgaaacagacctctagacagatcattacatgatagtgtgt

SEQ ID NO: 49003 - DNA, 120 bp, synthetic construct
  source 1..120: mol_type = other DNA
gccaggtaaggaaggatggggaagacggagggattccaggtggaaggtatgtggtaaattaaaaaaaaaaaaaagcctggatgccaatatatatatatttattagaacacacaaactggt

SEQ ID NO: 49004 - DNA, 120 bp, synthetic construct; identical to SEQ ID NO: 13717
  source 1..120: mol_type = other DNA

SEQ ID NO: 49005 - DNA, 120 bp, synthetic construct
  source 1..120: mol_type = other DNA
caggacaagtttttgttgtgatagggtgcaccaaaacaaatcagatgggtcatacttgaacatgacacacgactttggtcctgactcatataatcagtaatgtcagagaatcttattgaa

SEQ ID NO: 49006 - DNA, 120 bp, synthetic construct
  source 1..120: mol_type = other DNA
tttagtataaagactgcatgcttaggagtcacatgggtattaagcgatagcttcagatctgtcacttagaagctgtgtacatttgaaaatctcataacatctccaagcttcagttaaggt

SEQ ID NO: 49007 - DNA, 120 bp, synthetic construct
  source 1..120: mol_type = other DNA
taagtgatgaagcacccagtgcatggcagatactcaaaatattaattcttttcccgataatgtatttacaatttaaatcccatctaatttcacaagaagatttgaagctgacttttgaag

SEQ ID NO: 49008 - DNA, 120 bp, synthetic construct; identical to SEQ ID NO: 13718
  source 1..120: mol_type = other DNA

SEQ ID NO: 49009 - DNA, 120 bp, synthetic construct
  source 1..120: mol_type = other DNA
tcaaattcttttggggctagtgtacagtgtgcattcattctaatgatctaagttactgatgttttctttactttcctagaaatgatgaatgagattactaaaaatcttgtcaaggtagga

SEQ ID NO: 49010 - DNA, 120 bp, synthetic construct
  source 1..120: mol_type = other DNA
agcctactccctctgtcttgtaacaaatgttaaggctgtttttttctctaccatctaatagagattttatgtcatagaccctcattggattttcctggaagtacggagagttacatccag

SEQ ID NO: 49011 - DNA, 120 bp, synthetic construct
  source 1..120: mol_type = other DNA
aaacacacaatatatgaaatcattacaaatccctgtgtcaatttgttctttcaggttcatagaaggcatttgtaaatctatgactaaaagtaaagtgagaagatgtgagtttaataagga

SEQ ID NO: 49012 - DNA, 120 bp, synthetic construct
  source 1..120: mol_type = other DNA
aatgaaaagatggttttatattttaggctgagacatgtgattgtgctaaggttgtgtgttaatagggacaccttgaccttcatgcttccttactatcacttgcttctgtcttgtactttt

SEQ ID NO: 49013 - DNA, 120 bp, synthetic construct; identical to SEQ ID NO: 13719
  source 1..120: mol_type = other DNA

SEQ ID NO: 49014 - DNA, 120 bp, synthetic construct
  source 1..120: mol_type = other DNA
ttcttttcttccttccaggggcttctcaaccccaaggcaaccataaagtcctatacaaagaaagatacagcagtgtgaaagaggcctggatgaaaaaacaaagacagagccagtgagcca

SEQ ID NO: 49015 - DNA, 120 bp, synthetic construct
  source 1..120: mol_type = other DNA
aaaacgttctcagcactacaacttctgccttgttctgttccagaacagtatgagctcagtactttttcagactctcaattttctacaactaataatttgctctttcagttagtggcaaag

SEQ ID NO: 49016 - DNA, 120 bp, synthetic construct
  source 1..120: mol_type = other DNA
gcttaacgacaaaggttcatctttaatattagagaggcacttttaaaatttatgatgctaagccttttgttctggatatggtatgttgcacaggtctagggactgggatttcagatgtct

SEQ ID NO: 49017 - DNA, 120 bp, synthetic construct
  source 1..120: mol_type = other DNA
ctgaggatacaataatgtatatgatggacaagatacgtaaaagtgccttgaagagacttggtcttgtgaggggacagacaggaaacaggcaattatcacctaacttaggtctgttgtttc

SEQ ID NO: 49018 - DNA, 120 bp, synthetic construct; identical to SEQ ID NO: 13720
  source 1..120: mol_type = other DNA

SEQ ID NO: 49019 - DNA, 120 bp, synthetic construct
  source 1..120: mol_type = other DNA
tggagttttgtgcaaatcacatgaacacacgtagaacattttaggctgctcatgtgactttggatttgtcctaagggcaatagtaagcctttgaactgctttagcatgataggattttaa

SEQ ID NO: 49020 - DNA, 120 bp, synthetic construct
  source 1..120: mol_type = other DNA
tgaaataacccaagctggcttggactacataggagtagtgtaaactcattcattcatgcaagaaatacttactgagtgcctactcagtaccagacccttttctaggacatggagttatag

SEQ ID NO: 49021 - DNA, 120 bp, synthetic construct
  source 1..120: mol_type = other DNA
tgttataaggaatgactttcggagtaatgggtagtgatcttaaatgtatggtcaatgaaaatcagaagttgtagagaagtggataaattcacagtacgttttaaagtagacctaataaga

SEQ ID NO: 49022 - DNA, 120 bp, synthetic construct; identical to SEQ ID NO: 13721
  source 1..120: mol_type = other DNA

SEQ ID NO: 49023 - DNA, 120 bp, synthetic construct
  source 1..120: mol_type = other DNA
taaggtgtttaaaacaccaacagcttaaacttcttagatcaaaggacatcctccaggccaaaatgtttccactggaacggtttctttgcttcctgattaaaagcttccctaatatatttc

SEQ ID NO: 49024 - DNA, 120 bp, synthetic construct
  source 1..120: mol_type = other DNA
ctcacctccaatttatgaagtggaaataattttccatggaatggccaactaaagaaaagaaatatgataaattcagatcatatcattgttccatttatccttgtaccctgtctgtgacag

SEQ ID NO: 49025 - DNA, 120 bp, synthetic construct; identical to SEQ ID NO: 13722
  source 1..120: mol_type = other DNA

SEQ ID NO: 49026 - DNA, 120 bp, synthetic construct
  source 1..120: mol_type = other DNA
cctcagtcgggaagtgcaaggggtcagggagttccccttccgagtcaaagaaaggggtgacggacagcacctggaaaatcgggtcactcccacccgaatactgcgcttttccgacaggct

SEQ ID NO: 49027 - DNA, 120 bp, synthetic construct
  source 1..120: mol_type = other DNA
tgggggaggggcgcccgccattgcccaggctttcttaggaaaacaaagcagccgggaagctcgaactgggtggagcccaccacagctcaaggaggcctgactgcctctgtaggctccacc

SEQ ID NO: 49028 - DNA, 120 bp, synthetic construct; identical to SEQ ID NO: 13723
  source 1..120: mol_type = other DNA

SEQ ID NO: 49029 - DNA, 120 bp, synthetic construct
  source 1..120: mol_type = other DNA
ccacaaagatggggaaaaaacagaacagaaaaactggaaactctaaaaaccagagcgcctctcctcctccaaaggaacgcagttcctcaccagcaatggaacaaagctggatggagaatg

SEQ ID NO: 49030 - DNA, 120 bp, synthetic construct
  source 1..120: mol_type = other DNA
ctagaataaccaatacagagaagtgcttaaaggagctgatggagctgaaaaccaaggcttgagaactacatgaagaatgcagaagcctcaggagccgatgcgatcaactggaagaaaggg

SEQ ID NO: 49031 - DNA, 120 bp, synthetic construct
  source 1..120: mol_type = other DNA
tacgtctgattggtgtacctgaaagtgatggggagaatggaaccaagttggaaaacacactgcaggatattatccaggagaacttccccaatctagcaaggcaggccaacgttcagattc

SEQ ID NO: 49032 - DNA, 120 bp, synthetic construct; identical to SEQ ID NO: 13724
  source 1..120: mol_type = other DNA

SEQ ID NO: 49033 - DNA, 120 bp, synthetic construct
  source 1..120: mol_type = other DNA
aggaagagctaaatatggaaaggaacaaccagtaccagccactgcaaaatcatgccaaaacgtaaagaccatcgagactaggaagaaactgcatcaactaacgagcaaaataaccagcta

SEQ ID NO: 49034 - DNA, 120 bp, synthetic construct
  source 1..120: mol_type = other DNA
tgctgtattcaggaaacccatctcatatgcagagacacacataggctcaaaataaaaggatggaggaagatctaccaagcaaatggaaaacaaaaaaaggcagggattgcaatcctagtc

SEQ ID NO: 49035 - DNA, 120 bp, synthetic construct
  source 1..120: mol_type = other DNA
cataaagcaagtcctgagtgacctacaaagagacttagactcccacacattaataatgggagactttaacaccccactgtcaacattagacagatcaacagacagaaagtcaacaaggat

SEQ ID NO: 49036 - DNA, 120 bp, synthetic construct
  source 1..120: mol_type = other DNA
gaccacatacttggaagtaaagctctcctcagcaaatgtaaaagaacagaaattataacaaactatctctcagaccacagtacaatcaaactagaactcaggattaagaatctcactcaa

SEQ ID NO: 49037 - DNA, 120 bp, synthetic construct; identical to SEQ ID NO: 13725
  source 1..120: mol_type = other DNA

SEQ ID NO: 49038 - DNA, 120 bp, synthetic construct
  source 1..120: mol_type = other DNA
aacaaaattgatagaccactagcaagactaataaagaaaaaaagagagaagaatcaaatagacgcaataaaaaatgataaaggggatatcaccaccgatcccacagaaatacaaactacc

SEQ ID NO: 49039 - DNA, 120 bp, synthetic construct
  source 1..120: mol_type = other DNA
agaccaataacaggatctgaaattgtggcaataatcaatagcttaccaaccaaaaagagtccaggaccagatggattcacagccgaattctaccagaggtacaaggaggaactggtacca

SEQ ID NO: 49040 - DNA, 120 bp, synthetic construct
  source 1..120: mol_type = other DNA
agaccaatatccttgatgaacattgatgcaaaaatcctcaataaaatactggcaaaacgaatccagcagcacatcaaaaagcttatccaccatgatcaagtgggcttcatccctgggatg

SEQ ID NO: 49041 - DNA, 120 bp, synthetic construct; identical to SEQ ID NO: 13726
  source 1..120: mol_type = other DNA

SEQ ID NO: 49042 - DNA, 120 bp, synthetic construct
  source 1..120: mol_type = other DNA
ggaaaagaggaagtgaaattgtccctgtttgcagatgacatgattgtatatctagaaaaccccattgtctcagaccaaaatctccttaagctgataagcaacttcagcaaagtctcagga

SEQ ID NO: 49043 - DNA, 120 bp, synthetic construct
  source 1..120: mol_type = other DNA
atccaacttacaagggatgtgaaggacctcttcaaggagaactacaaaccactgctcaatgaaataaaagaggatacaaacaaatggaagaacattccatgctcatgggtaggaagaatc

SEQ ID NO: 49044 - DNA, 120 bp, synthetic construct
  source 1..120: mol_type = other DNA
caaaaaagagcctacatcgccaagtcaatcctaagccaaaagaacaaagctggaggcatcacactacctgacttcaaactatactacaaggctacagtaaccaaaacagcatggtactgg

SEQ ID NO: 49045 - DNA, 120 bp, synthetic construct; identical to SEQ ID NO: 13727
  source 1..120: mol_type = other DNA

SEQ ID NO: 49046 - DNA, 120 bp, synthetic construct
  source 1..120: mol_type = other DNA
tgggatctaattaaactaaagagcttctgcacagcaaaagaaactaccatcagagtgaacaggcaactacaaaatgggagaaaattttcgcaacctactcatctgacaaagggctaatat

SEQ ID NO: 49047 - DNA, 120 bp, synthetic construct
  source 1..120: mol_type = other DNA
acatgaaaaaatgctcaccatcactggccatcagagaaatacaaatcaaaaccacaatgagataccatctcacaccagttagaatggcaatcattaaaaagtcaggaaacaacaggtgct

SEQ ID NO: 49048 - DNA, 120 bp, synthetic construct
  source 1..120: mol_type = other DNA
acccagccatcccattactgggtatatacccaaaggactataaatcatgctgctataaagacacatgcacacgtatgtttattgtggcattattcacagtagcaaagacttggaaccaac

SEQ ID NO: 49049 - DNA, 120 bp, synthetic construct
  source 1..120: mol_type = other DNA
aatcatcattctcagtaaactatcgcaagaacaaaaaaccaaacaccgcatattctcactcataggtgggaattgaacgatgagatcacatggacacaggaaggggaatatcacactctg

SEQ ID NO: 49050 - DNA, 120 bp, synthetic construct; identical to SEQ ID NO: 13728
  source 1..120: mol_type = other DNA

SEQ ID NO: 49051 - DNA, 120 bp, synthetic construct
  source 1..120: mol_type = other DNA
acattttttacatggtcattttctgtttaaccttagttagacgttgaatggacttgatatatcccacagaagaggcccagtacttaaagaccagtctccatgttagctgaccaatttctg

SEQ ID NO: 49052 - DNA, 120 bp, synthetic construct
  source 1..120: mol_type = other DNA
atcatatttgcgtataggtaaggaaaatgggagatggtgaagacagaagatataggtaaataggtaaatacgaattgcgtttttattttagtacaaagaccaaagctgatagggaaagag

SEQ ID NO: 49053 - DNA, 120 bp, synthetic construct; identical to SEQ ID NO: 13729
  source 1..120: mol_type = other DNA

SEQ ID NO: 49054 - DNA, 120 bp, synthetic construct
  source 1..120: mol_type = other DNA
caaaatatggaccatattaggcaatacatatttagtaaaggaaagagcattattaaaagtgaaaattattgcttaaatgagtgagtaaacaaatgaataattctaaatgtcactctgttt

SEQ ID NO: 49055 - DNA, 120 bp, synthetic construct
  source 1..120: mol_type = other DNA
tttttccccaatcatttatagttctagaccaaagtatttattttctttctgggggaagtttactaatttatgagtagaacactaatctttcaaagaaagttatacatttttccatgatta

SEQ ID NO: 49056 - DNA, 120 bp, synthetic construct
  source 1..120: mol_type = other DNA
agactatgtcaattatctattgtgttatctttcagcctaatgaattctgcactcacatattaaacttgaagagtgttttagcgccagcagagttcactgagaacattgaaacacaaacaa

SEQ ID NO: 49057 - DNA, 120 bp, synthetic construct; identical to SEQ ID NO: 13730
  source 1..120: mol_type = other DNA

SEQ ID NO: 49058 - DNA, 120 bp, synthetic construct
  source 1..120: mol_type = other DNA
tgtaatattccatagtacagtaggaagacattattgaggggcattttaacccttgttttatttgaggataacttaaaatacaaagaacacatattttcaaccatcagttatggtaacgca

SEQ ID NO: 49059 - DNA, 120 bp, synthetic construct
  source 1..120: mol_type = other DNA
ctatagaataaatatcattcatttcattagaaatccatttttctttatggcaaatatttaaaatattagatttatgtataaattgtttaggtccataattaaatatcattaaaaatgact

SEQ ID NO: 49060 - DNA, 120 bp, synthetic construct
  source 1..120: mol_type = other DNA
ctcggcatgcccttcacctctcacatgttaacatactgactcactaataaataaataataactttattcatttaatttaatcgatccctgctatgaatacagaagagatatcagttctca

SEQ ID NO: 49061 - DNA, 120 bp, synthetic construct; identical to SEQ ID NO: 13731
  source 1..120: mol_type = other DNA

SEQ ID NO: 49062 - DNA, 120 bp, synthetic construct
  source 1..120: mol_type = other DNA
gaaaataaataatgcctcctatctcctatctttgctggttgtttgattttaggattctactaaaaaggttattgacagagagcagctggcatagttgattgctaaatcaattcccagact

SEQ ID NO: 49063 - DNA, 120 bp, synthetic construct
  source 1..120: mol_type = other DNA
tttacacttaaaaatctaatcatggaactggatgatattttatcaggccttacagtcagcttaatggatactcacgaaatttaaaagtaaaccatatccaagactctctcaacaattttg

SEQ ID NO: 49064 - DNA, 120 bp, synthetic construct
  source 1..120: mol_type = other DNA
tgctttgtcaattatattgacaaggtttgggtgtgtatgtcatatttaaattataagggaaacagtgattatatatttgtcttaaattatagtacttaggaaacagagtgaagaaaaagg

SEQ ID NO: 49065 - DNA, 120 bp, synthetic construct; identical to SEQ ID NO: 13732
  source 1..120: mol_type = other DNA

SEQ ID NO: 49066 - DNA, 120 bp, synthetic construct
  source 1..120: mol_type = other DNA
aactacctgagttttcctccaattccacttagcacgctaggccaggctctttgtaaatttcctttctcattatccttaaatgcaaggggataatttttaaaagctatcacatggcatgtg

SEQ ID NO: 49067 - DNA, 120 bp, synthetic construct
  source 1..120: mol_type = other DNA
aaactatttccatactacttgatatttggcaaaaggaaggaatgttgcaactgtaatacctcccttccgctttgtttccacctgtgggaaaatgtctttcgtttttttctgttttttggc

SEQ ID NO: 49068 - DNA, 120 bp, synthetic construct
  source 1..120: mol_type = other DNA
aaaaagaaatctggttttggagtttacctcagaaggagaaaaaagaacttgaggttttactttagcagaaaattttctacagggtgctttaataaagatgagaaaacttcacacattttc

SEQ ID NO: 49069 - DNA, 120 bp, synthetic construct; identical to SEQ ID NO: 13733
  source 1..120: mol_type = other DNA

SEQ ID NO: 49070 - DNA, 120 bp, synthetic construct
  source 1..120: mol_type = other DNA
ttaaatcatcaatttgtttctaacagggagtttcaatatgacaatattgtacttttttcatatctatttgcactcacttcctataagaaattggaattggaattgtgcaaacaagtcttt

SEQ ID NO: 49071 - DNA, 120 bp, synthetic construct
  source 1..120: mol_type = other DNA
caaatagggcagtgggcatttgtaagacagaatatcaataatcacgtgtgaataactaaggacagacacaagtatgaatggtctaatttggaagagaacacagtggtacagatcacatct

SEQ ID NO: 49072 - DNA, 120 bp, synthetic construct
  source 1..120: mol_type = other DNA
attattattattattattatttgagaccgagtctcgccctgtcgcccagactggagtgaagtggcacgatctcggctcactacaagctccgcctcccaggttcacgccattctcctgcct

SEQ ID NO: 49073 - DNA, 120 bp, synthetic construct; identical to SEQ ID NO: 13734
  source 1..120: mol_type = other DNA

SEQ ID NO: 49074 - DNA, 120 bp, synthetic construct
  source 1..120: mol_type = other DNA
ctgaagataagcattgataaaacacgccttgataaggcctgttctaaccactgtggccctctctctggaattttgtagagaatataatctgcatcatatgatttagtgcttaattagcac

SEQ ID NO: 49075 - DNA, 120 bp, synthetic construct
  source 1..120: mol_type = other DNA
atactagagattcaataactgctgagattgattaatagaacaactttgagcatagcaactcagatgttgatgaagatgtaaacagaaaaatatactgtctttcaattgtggaacaattat

SEQ ID NO: 49076 - DNA, 120 bp, synthetic construct
  source 1..120: mol_type = other DNA
cgggttgaatagtctataatcagtacaatcagtataatcatcaatgctacaatcagtaacgttaatgttaatattgcaaaattcatttttgtcttcatcttttgcaaatacaaaagcatc

SEQ ID NO: 49077 - DNA, 120 bp, synthetic construct; identical to SEQ ID NO: 13735
  source 1..120: mol_type = other DNA

SEQ ID NO: 49078 - DNA, 120 bp, synthetic construct
  source 1..120: mol_type = other DNA
aattctttgattaaaccttaattttccttgtttctcatgcagcaattcaaattactctgtattatttcttccttttcagactatattagaacatgcttttaatagtcccagtgggttacc

SEQ ID NO: 49079 - DNA, 120 bp, synthetic construct
  source 1..120: mol_type = other DNA
attaatagtgacaaagctagaccaaaaaagccactttaaggaaagttctctcaaagcaaagatatacctacagaacctgcctcctctttcgcaagactaggagacaaaattctaaaattg

SEQ ID NO: 49080 - DNA, 120 bp, synthetic construct
  source 1..120: mol_type = other DNA
acctgaagcattttatcacaatgaaactgactgagagagtggtaacagcttcagaggaaacctccactcagaagtacatggatctatttctgtgtgtattccagttacttacagtgacta

SEQ ID NO: 49081 - DNA, 120 bp, synthetic construct; identical to SEQ ID NO: 13736
  source 1..120: mol_type = other DNA

SEQ ID NO: 49082 - DNA, 120 bp, synthetic construct
  source 1..120: mol_type = other DNA
aattgctgctctgggatgatcatcaaattttttttcattgaaataaatattctacaccctgaacttaattcaacaaacatatcaggtttctggcaaggtatgaggcagtggagatttaaa

SEQ ID NO: 49083 - DNA, 120 bp, synthetic construct
  source 1..120: mol_type = other DNA
tgctatatatgggaaccaccatccacaccaaacacttaaataatgcttattatggttattatagtcaagagggttttatgtgtatgtatatgctcattgcttaaaatatacattaaccct

SEQ ID NO: 49084 - DNA, 120 bp, synthetic construct
  source 1..120: mol_type = other DNA
aatttttttctctcctattcattccatggcttcaaccattttctcttttatttgctcctgaaatccttgtgcagctcattctgtgaatgttgtatcactagtggttttgttatcaggtaa

SEQ ID NO: 49085 - DNA, 120 bp, synthetic construct; identical to SEQ ID NO: 13737
  source 1..120: mol_type = other DNA

SEQ ID NO: 49086 - DNA, 120 bp, synthetic construct
  source 1..120: mol_type = other DNA
acatcttgggttttgggttctcttggtgtaacttctttttttttttttaaccactgttgaatagtaagattgatgataggcttatcgggtattttccctcaatttggagatctagaatat

SEQ ID NO: 49087 - DNA, 120 bp, synthetic construct
  source 1..120: mol_type = other DNA
ttcccgttgatccttcaactaaaagagttaatgttgtaaacattacctgaagcacttggcataatgttctgtctcacagaatcacatttcaagtttgtataaaccaaatagagcatttta

SEQ ID NO: 49088 - DNA, 120 bp, synthetic construct; identical to SEQ ID NO: 13738
  source 1..120: mol_type = other DNA

SEQ ID NO: 49089 - DNA, 120 bp, synthetic construct
  source 1..120: mol_type = other DNA
tgcagtagatagtagaacaaaggctaggagacatcagatggctactatgggcaaaatgagtctggtatgttatttgttgatgtggttctgaaaaaatatttttctgtcattatcaaaatt

SEQ ID NO: 49090 - DNA, 120 bp, synthetic construct
  source 1..120: mol_type = other DNA
ggaaagaaagatatattgctccatttcaggttataaacaggtcaagttctagcagcttccttactgcattatatttttagtggatagtcatgcacatgtcactgttggtcctcctttaag

SEQ ID NO: 49091 - DNA, 120 bp, synthetic construct
  source 1..120: mol_type = other DNA
aatttcttaagtcacacatagtgctcatcaccacccatgaataatggcttcctaaagtttacccttccttccttcaattctatgctttagacacaccagttttggccatattctacaatt

SEQ ID NO: 49092 - DNA, 120 bp, synthetic construct
  source 1..120: mol_type = other DNA
aaagtccttcaaagacttccctttatgccaaatatcacctctttctgattgaccaagtgttctataatctgtcatcaaaacatatacaacgtattattgtctgatgtttgccaattttag

SEQ ID NO: 49093 - DNA, 120 bp, synthetic construct; identical to SEQ ID NO: 13739
  source 1..120: mol_type = other DNA

SEQ ID NO: 49094 - DNA, 120 bp, synthetic construct
  source 1..120: mol_type = other DNA
tgctgagcctgggactgctgagcatgcagaagatatttaatatttatactctaacttattttactcactgtcctagtgaccccttcttcacctctgacctttctccaaaactccacactt

SEQ ID NO: 49095 - DNA, 120 bp, synthetic construct
  source 1..120: mol_type = other DNA
gtatttggcagatgctaaacaaatgatatttggactagaatcttcacatacttcccttttgcagctagataccatctgtggcttgaataatatgtggtgagttcaaagtctcccacttct

SEQ ID NO: 49096 - DNA, 120 bp, synthetic construct; identical to SEQ ID NO: 13740
  source 1..120: mol_type = other DNA

SEQ ID NO: 49097 - DNA, 120 bp, synthetic construct
  source 1..120: mol_type = other DNA
agactgtggaattcggcagtcttggatttgaatctcctgtctgctgctttgtgccaccttggcaaaccacttaagctctttgtgtctcaattctttcatctgtaaaacatggatgataat

SEQ ID NO: 49098 - DNA, 120 bp, synthetic construct
  source 1..120: mol_type = other DNA
ttatcaccttagccttgtatatttttattctaaatttcacacagacatatcctaccaatatctcaaggtctatttcaattgttatgtcttccataccatcttctttggtctttcacacta

SEQ ID NO: 49099 - DNA, 120 bp, synthetic construct
  source 1..120: mol_type = other DNA
taaataaactgagattcaaaaaaacaaaaaacacaagtgaaggatttaaatcttggcttgcgtgaccaccgagtttatatttttcccattggttctcattacactatcagggtccactgg

SEQ ID NO: 49100 - DNA, 120 bp, synthetic construct; identical to SEQ ID NO: 13741
  source 1..120: mol_type = other DNA

SEQ ID NO: 49101 - DNA, 120 bp, synthetic construct
  source 1..120: mol_type = other DNA
aaaatatatcattattgccccatcatcactatgattgtttatagtgttgactgaagtattacatcatcattcaagaagatataaaagaagcctggagacatctttttttttttgagacac

SEQ ID NO: 49102 - DNA, 120 bp, synthetic construct
  source 1..120: mol_type = other DNA
atcagaagatgaatgcagaaagacagagagcagtaagctagactctaatgattagggtaaaattgaaattgattatacaagtgaaatctcagactatgagtcttcataagacaatgaatt

SEQ ID NO: 49103 - DNA, 120 bp, synthetic construct
  source 1..120: mol_type = other DNA
aacaatgaataatgctgaattctatgtatgctgtgttttcttgatctgaaaaccgagatacctaataagtgtctcacagacaggtagcttagagagcgtggatacatcggacaaagggat

SEQ ID NO: 49104 - DNA, 120 bp, synthetic construct; identical to SEQ ID NO: 13742
  source 1..120: mol_type = other DNA

SEQ ID NO: 49105 - DNA, 120 bp, synthetic construct
  source 1..120: mol_type = other DNA
ttctaactgcacaaatgctaaagaaagagaaaggcaggcatccaaaagaaatggacaatgtgaatttaaaaataattgaatgcattattgtaatctatgtttgtaaatacaaaaatgaaa

SEQ ID NO: 49106 - DNA, 120 bp, synthetic construct
  source 1..120: mol_type = other DNA
ctaaaaatagaaaaaaaattagatgggcacggtggcgtgcacctgtagtcccagctactcgcaaggctgaggcaggagaattgcttgaacccgggaggcagaggttgcagtgagccgaga

SEQ ID NO: 49107 - DNA, 120 bp, synthetic construct
  source 1..120: mol_type = other DNA
atgaagatgacattttcttttcaacaaaattatggaccatcaaggtttataaaaattaaagtactacattttgatgatgcacattctagaaaaaccagaagtgataatatataatagaac

SEQ ID NO: 49108 - DNA, 120 bp, synthetic construct
  source 1..120: mol_type = other DNA
atacatctttgaaaacagggaatataagatagaaacattttgttttactatatttaaattcttatcaaaactttcactttccctttatttctactcctgtaaactattagaaaaactaaa

SEQ ID NO: 49109 - DNA, 120 bp, synthetic construct; identical to SEQ ID NO: 13743
  source 1..120: mol_type = other DNA

SEQ ID NO: 49110 - DNA, 120 bp, synthetic construct
  source 1..120: mol_type = other DNA
cagtgagctctgaaatacattaaaccattaaataacagtgactataatgcaattacatttgacctcttctcagcgagatttaaccaaaaatatagttaagcaccactaaagttcaagaaa

SEQ ID NO: 49111 - DNA, 120 bp, synthetic construct
  source 1..120: mol_type = other DNA
ttctgataggtgagtaccctcaatttaaagaaaacaaatgacacaaaaagcagaataaattaccgtgacataattcttggctcaagtaaaagtcagacagtagctgaaattttaatagtg

SEQ ID NO: 49112 - DNA, 120 bp, synthetic construct
  source 1..120: mol_type = other DNA
gtagtggacatttaaattggtttctttatctttagtgaatataaagaggtctgtgaaccatgtgatttcttccttacagaaatttgtctctttaacttgggtgactctgcccagaaaccc

SEQ ID NO: 49113 - DNA, 120 bp, synthetic construct
  source 1..120: mol_type = other DNA
gtcacttaagaaaaatgtgctaagccacacaaaattgaaaaggaaattggaattactggaaggttgataaagataaataaatctggcggaatataccttgaccatccgtactatcaattt

SEQ ID NO: 49114 - DNA, 120 bp, synthetic construct; identical to SEQ ID NO: 13744
  source 1..120: mol_type = other DNA

SEQ ID NO: 49115 - DNA, 120 bp, synthetic construct
  source 1..120: mol_type = other DNA
tggagaaagtatctctggagaggggagatcttcggtgttcataatatacctaaaattacaaaatgtacatacaggtctatgccagttgcccataggaccagtgttgatagcatgcattca

SEQ ID NO: 49116 - DNA, 120 bp, synthetic construct
  source 1..120: mol_type = other DNA
caaccaaatgagcagatctttataatttatactggtttattaagatggtccctataattgaagtgaggattatccctgaccctaggatagtgcatattcaccattcacaacagaaaatca

SEQ ID NO: 49117 - DNA, 120 bp, synthetic construct; identical to SEQ ID NO: 13745
  source 1..120: mol_type = other DNA

SEQ ID NO: 49118 - DNA, 120 bp, synthetic construct
  source 1..120: mol_type = other DNA
ggaagcgcaaatgttttataagtagtggatacatgcagagcaataaacttggcaagaattgtcttattctataattgccagtcagagtcaatgtctcaccacttacattgtctctaaatt

SEQ ID NO: 49119 - DNA, 120 bp, synthetic construct
  source 1..120: mol_type = other DNA
ttgtttaggtacatttacataacatcatatagtttattaaatgaaacaacaggcatattacataggctttccttctctcccttcttccttttcaactcctggacaagaaatactcgcttt

SEQ ID NO: 49120 - DNA, 120 bp, synthetic construct
  source 1..120: mol_type = other DNA
gaattatcttcaggggttggaatactctataatgttgtaggtctgaacttaggactttttagagtatgtttgcatatgcctttagaagggctctctctgtgcggtcgttaacaaaatcat

SEQ ID NO: 49121 - DNA, 120 bp, synthetic construct
  source 1..120: mol_type = other DNA
attgcgactattaaactactagcatccctcgctgaatttcttagtgcatggttctctgtgtcttgagactttcttaggaattatattttatgatcaacaaataactactatgaatgattt

SEQ ID NO: 49122 - DNA, 120 bp, synthetic construct; identical to SEQ ID NO: 13746
  source 1..120: mol_type = other DNA

SEQ ID NO: 49123 - DNA, 120 bp, synthetic construct
  source 1..120: mol_type = other DNA
aagtggctgggattacaggcacccaccaccaaacctggctaatttttgtatttttagtagagacggggtttcaccatgttggccaggctggtctcaaactcctgacctcaggtgatccgc

SEQ ID NO: 49124 - DNA, 120 bp, synthetic construct; identical to SEQ ID NO: 13747
  source 1..120: mol_type = other DNA

SEQ ID NO: 49125 - DNA, 120 bp, synthetic construct
  source 1..120: mol_type = other DNA
tgaggcaggagaatcgcttgaacccaggaggcagaggttgcagtgagccgagatcacaccattgcactccagcctgagtgacgagagtgaggctctgtctcaaaaaaaataaaaaaaata

SEQ ID NO: 49126 - DNA, 120 bp, synthetic construct
  source 1..120: mol_type = other DNA
cccagccctaacattgaatttttgatatatatagactgaaacttgtaagtgttgagaggttctcttcatgtagggaactcaccaggcaggcagtggtgaaatgaacaaattaaagttata

SEQ ID NO: 49127 - DNA, 120 bp, synthetic construct
  source 1..120: mol_type = other DNA
tactagaaaaggatggagttaagaattatcactgtatttctgtccaaagccttgtctttccaccatatcacactaccttcctgaaggtttatttccaattatgctatgatactatacaca

SEQ ID NO: 49128 - DNA, 120 bp, synthetic construct; identical to SEQ ID NO: 13748
  source 1..120: mol_type = other DNA

SEQ ID NO: 49129 - DNA, 120 bp, synthetic construct
  source 1..120: mol_type = other DNA
tctttaagcaattagcttcatttattctaatataaatgagctccttccttaacaatactgtcttcttggaaaagttttcccaaacatgaacatagttctgtcagtttttaaatctgcaaa

SEQ ID NO: 49130 - DNA, 120 bp, synthetic construct
  source 1..120: mol_type = other DNA
aaatccttccccattgttttgaatattaattccaagattatctatctccatcaatagttctttggagtggctaaaccaagttcatgtataagggagaaaattttaaagttttggaaaaca

SEQ ID NO: 49131 - DNA, 120 bp, synthetic construct
  source 1..120: mol_type = other DNA
attcactgcttcacttcaagacattattaaagattttagcattccttatatggagagatattagcacatattttacatttcaactgacttcatttgcaataggccatgcagtgactgaaa

SEQ ID NO: 49132 - DNA, 120 bp, synthetic construct; identical to SEQ ID NO: 13749
  source 1..120: mol_type = other DNA

SEQ ID NO: 49133 - DNA, 120 bp, synthetic construct
  source 1..120: mol_type = other DNA
taaaaaaaataatttgcacttatatgaaaatacagaaggaaagaaagacgacaaatataatgcttcatttcttccatacaaaaataacctcaaaaattgaaaaggactagttcagggtaa

SEQ ID NO: 49134 - DNA, 120 bp, synthetic construct
  source 1..120: mol_type = other DNA
agtttcacaagaggaaattgtttccaacttggagtgttttatcaaatactcagttccagcccttctgctaattgtctctatggagcagcagaatgtcttttccaaaagactatcaggaga

SEQ ID NO: 49135 - DNA, 120 bp, synthetic construct
  source 1..120: mol_type = other DNA
tggagcagcagaatgtcttttccaaaagactatcaggagaactaacctctttgcaacctgttaggtggcctctgaataaaaatgctctttaattgggagagtaaatcaagaacagagtaa

SEQ ID NO: 49136 - DNA, 120 bp, synthetic construct; identical to SEQ ID NO: 13750
  source 1..120: mol_type = other DNA

SEQ ID NO: 49137 - DNA, 120 bp, synthetic construct
  source 1..120: mol_type = other DNA
cgaaggcagctttaggaccaagagagtttattgaatttaagcaacatgttacattcttaattgctccaaattatgcatatcaaacatatgaaataacaaagcttgttactaaacagatac

SEQ ID NO: 49138 - DNA, 120 bp, synthetic construct
  source 1..120: mol_type = other DNA
atataaaaatataatctttttcattaatacctaaataagggcaggccaaaactcataaagttccaaaaatttagatgtattttagttgttgaaattggagcacattttcccacaggagag

SEQ ID NO: 49139 - DNA, 120 bp, synthetic construct
  source 1..120: mol_type = other DNA
agtttctgatcccaggacctgggaaccctatgattgggaaagacataaggttaaggtagaaggtattttctcttttctagacatgagattgttttcctgaacaaaactgtagaactggca

SEQ ID NO: 49140 - DNA, 120 bp, synthetic construct; identical to SEQ ID NO: 13751
  source 1..120: mol_type = other DNA

SEQ ID NO: 49141 - DNA, 120 bp, synthetic construct
  source 1..120: mol_type = other DNA
ttcccaaaataattactcttagaggcactatagactcccatgacagcaaataagagtgtttgtttttatgtatgttggaagtttagaatgcagggagtatttttaatataacatcccctc

SEQ ID NO: 49142 - DNA, 120 bp, synthetic construct
  source 1..120: mol_type = other DNA
acaatgtaatgaaacttttcagcttgtatgttgaaatattatcaaagtacagtcagccctccatttccctgggttccacattggagcattcaacaaaccacacgcctgtaatcccagaac

SEQ ID NO: 49143 - DNA, 120 bp, synthetic construct
  source 1..120: mol_type = other DNA
ctgtaatcccagctactccggaggctgaggcaggagaactgcttgaacccgggaggcagaggttgcagtgagctgagattgtgccactgcactccagcctgggcaacatagtgagattct

SEQ ID NO: 49144 - DNA, 120 bp, synthetic construct; identical to SEQ ID NO: 13752
  source 1..120: mol_type = other DNA

SEQ ID NO: 49145 - DNA, 120 bp, synthetic construct
  source 1..120: mol_type = other DNA
aaaatcattcatttaattaatacaccaacagcccaatgaacttctaattgcaaaaaggaaatttcttatgaattcagaggatgttttttaacttagaaaattatttgttacaacacttag

SEQ ID NO: 49146 - DNA, 120 bp, synthetic construct
  source 1..120: mol_type = other DNA
ttaagttaggatgcccatttccacctgtccttggcaatgaccttaacaacgtataagaattctaggtaggtatgtgttgggaagtctccagtttatctgcttaacctatctaagaataca

SEQ ID NO: 49147 - DNA, 120 bp, synthetic construct
  source 1..120: mol_type = other DNA
aactttcatagttctgagataataatttatataatgttaatttgctcatcattgtaagtactttttccccaaataaacatccttcttggaataacacatgctgtccatttctctccttct

SEQ ID NO: 49148 - DNA, 120 bp, synthetic construct
  source 1..120: mol_type = other DNA
tacattctgggtgcagaatgtcaagaacaacaaaaaatttttaagaaacctgtaatgaggatggggcacatgtggtccagtactctataacagattcacattagctatactttctctgcc

SEQ ID NO: 49149 - DNA, 120 bp, synthetic construct; identical to SEQ ID NO: 13753
  source 1..120: mol_type = other DNA

SEQ ID NO: 49150 - DNA, 120 bp, synthetic construct
  source 1..120: mol_type = other DNA
gagtaactacattgaatatattcatatgtatactatgtaattaaataattactaataaatatgtgtcccatgtgaaaatctgtttccaagtgagtaaaggacctatgagccttatttctt

SEQ ID NO: 49151 - DNA, 120 bp, synthetic construct
  source 1..120: mol_type = other DNA
ctcttgcccaaaaagctaactcaacagttagcttagttgagctaactcaactaagtcatcatataaaattttcaaaaccaaagcctcagaaattaaaaaaaactatatctttatcttgct

SEQ ID NO: 49152 - DNA, 120 bp, synthetic construct
  source 1..120: mol_type = other DNA
aggttaagttttgaatacttacctaatgatacatttatataattgatggcaattgttctcaatactgagacttgctttagcaattgcaattgtttagctgataaaatcacatttgtgctt

SEQ ID NO: 49153 - DNA, 120 bp, synthetic construct; identical to SEQ ID NO: 13754
  source 1..120: mol_type = other DNA

SEQ ID NO: 49154 - DNA, 120 bp, synthetic construct
  source 1..120: mol_type = other DNA
ttgtaggttttcactgatttcatgtgattatttttctttttgaacagcaatctaaagtgtaaaggatttcaggatctaagtaatcataccagtgaatccaaagattatttctgctgtttt

SEQ ID NO: 49155 - DNA, 120 bp, synthetic construct
  source 1..120: mol_type = other DNA
ttttttcatggtgatataatcaccttgaaaattggaaaaagttttagagctcctaagttttaatatgacttatatcttaaaataataaattaaaattatctaaatttaaaggtttgtaga

SEQ ID NO: 49156 - DNA, 120 bp, synthetic construct
  source 1..120: mol_type = other DNA
tcaagagaaaaaagatgaaaatacagtacgagtgcattgcaaatttcatttcttgtgccttatgaggaaaaattaatttcagtttcatcctccaaatagcctgctctgtaataaaattgt

SEQ ID NO: 49157 - DNA, 120 bp, synthetic construct; identical to SEQ ID NO: 13755
  source 1..120: mol_type = other DNA

SEQ ID NO: 49158 - DNA, 120 bp, synthetic construct
  source 1..120: mol_type = other DNA
aaattcaggtttatatgccacctccattgaagtgatatatttttgcaaagtggggatgtaagtttgacatcactcttgctgaagaatggcgaaatatgtcacattcagagctttctaaag

SEQ ID NO: 49159 - DNA, 120 bp, synthetic construct
  source 1..120: mol_type = other DNA
tgcaacagtaatgtatggatagtttttatgatatttactctatatgattccaacatgtaccccttcacaaactccttaggaattgctgtcattttgggggaccactttcctccaaagagt

SEQ ID NO: 49160 - DNA, 120 bp, synthetic construct
  source 1..120: mol_type = other DNA
tcaaaatgcccctttagatctgtgaacacattttagtatttttataaataaatattaattcccaatttactgtatttcttttctgatatatttactttaatgtcttttacccccatttga

SEQ ID NO: 49161 - DNA, 120 bp, synthetic construct; identical to SEQ ID NO: 13756
  source 1..120: mol_type = other DNA

SEQ ID NO: 49162 - DNA, 120 bp, synthetic construct
  source 1..120: mol_type = other DNA
gaaaattggaaaagaaagagggaagaaaggtaagtcacaagtgtttatgttaagaacagtatttttcaggaaaacaatgaaaaatactgttcttaacataaacacttgtgacttaccaga

SEQ ID NO: 49163 - DNA, 120 bp, synthetic construct
  source 1..120: mol_type = other DNA
catttgtagcatgcaggggatggatgtacaggaatttctgtgaaagacaatttccataccaaacagcccagtgaagtagtctccttttataagcacatgatcattttgcttgataactga

SEQ ID NO: 49164 - DNA, 120 bp, synthetic construct
  source 1..120: mol_type = other DNA
aatccattagaagataactgaaagacctatagtctaatgatttggccttagaaaaactgaaagtgaagaaattcagatattggctcctgtttatcttaagtcagcgataattctactagt

SEQ ID NO: 49165 - DNA, 120 bp, synthetic construct; identical to SEQ ID NO: 13757
  source 1..120: mol_type = other DNA

SEQ ID NO: 49166 - DNA, 120 bp, synthetic construct
  source 1..120: mol_type = other DNA
ccactatacaccacagcaactctactgcaatgttggaatcctctatgtcatttgctaatgcactgtgtagcctttattgtcactcatgttaaagaatttgatgaaggccgggcatggcgg

SEQ ID NO: 49167 - DNA, 120 bp, synthetic construct
  source 1..120: mol_type = other DNA
ctgggcgtggtggtgcatgcctgtaatcccagctactcaggaggctgaggcaggagaatcatttgaaccagggaagcggaggttgcagtgagccgagattgcgccattgcaccacaactt

SEQ ID NO: 49168 - DNA, 120 bp, synthetic construct; identical to SEQ ID NO: 13758
  source 1..120: mol_type = other DNA

SEQ ID NO: 49169 - DNA, 120 bp, synthetic construct
  source 1..120: mol_type = other DNA
caaattcatttggcaacaataagctaacctggtcatttagcttggactttctcaaagctgaagtgtattgagaatttttaagaaggggaattatgatacacacattattcaatattgttt

SEQ ID NO: 49170 - DNA, 120 bp, synthetic construct
  source 1..120: mol_type = other DNA
aacctctgcctctcagtttcaaggaattctcctgcctcagcctcccaagtagctgggattacacgcgcctatcaccaagcccagttaattttgtattgttagtagagatggggtttcaca

SEQ ID NO: 49171 - DNA, 120 bp, synthetic construct
  source 1..120: mol_type = other DNA
tatgtttctgtgactgaaaccagcagctttctgcggatgactttaaattgaaatcattccagaattccacactggaatgtttattagtgtctgtctggaaagaaagtttcactggagtgg

SEQ ID NO: 49172 - DNA, 120 bp, synthetic construct; identical to SEQ ID NO: 13759
  source 1..120: mol_type = other DNA

SEQ ID NO: 49173 - DNA, 120 bp, synthetic construct
  source 1..120: mol_type = other DNA
tttttgtttagatagactcttggctctgttgccaggctggagtgcaatggtgcaatcttggctcactgcaacctctgcctcccgggttcaagcaattctcctgcatcagcctcccgagta

SEQ ID NO: 49174 - DNA, 120 bp, synthetic construct
  source 1..120: mol_type = other DNA
tcggcctcccaaagtgctgggattaaatttcttcatggtcaattcacatgcaaaaaaatggctctcccatttgaattaataatgtcttcccatgagcttccatttttctgaatttttatt

SEQ ID NO: 49175 - DNA, 120 bp, synthetic construct
  source 1..120: mol_type = other DNA
atagtgtctagcacaatgcttctttcagagaaaacagaggataaatgtatactggattagcaattttgatggagagagtaaatattccactatactcagatcatatgtataatatagtga

SEQ ID NO: 49176 - DNA, 120 bp, synthetic construct; identical to SEQ ID NO: 13760
  source 1..120: mol_type = other DNA

SEQ ID NO: 49177 - DNA, 120 bp, synthetic construct
  source 1..120: mol_type = other DNA
tctggaaatagataactttgcctcatagtagaaaaaaatgagtgacaactaaacaatgatgtggctataataaagaaaatatcatgaaactaaagcaacacccaacttctatttactttt

SEQ ID NO: 49178 - DNA, 120 bp, synthetic construct
  source 1..120: mol_type = other DNA
tcacccagttttatttaggaaggcattttattcatgacttttgtcaaatggaaaacaaaatggcctaatcaaaaaaaatgacatcagcatatttgattcaatcttggaattagcgtgatc

SEQ ID NO: 49179 - DNA, 120 bp, synthetic construct
  source 1..120: mol_type = other DNA
cataaagaactgcaaactgcttaacttttttctctgcttcagtttctttgcgttaaaaaaaaagaatcgccactgtaactgcctcttcctctatggaagctgtggagatgagtaacactg

SEQ ID NO: 49180 - DNA, 120 bp, synthetic construct
  source 1..120: mol_type = other DNA
tcttggagtttccctagaacttatccacagtttaatgtacagcaggaattactatttcattattattttacatttgaaaaatctaagtatcaaaaagccatttatcaaagatggtgcaac

SEQ ID NO: 49181 - DNA, 120 bp, synthetic construct; identical to SEQ ID NO: 13761
  source 1..120: mol_type = other DNA

SEQ ID NO: 49182 - DNA, 120 bp, synthetic construct
  source 1..120: mol_type = other DNA
cactgacatccacatcaattagacagcctggcccaaacttggctcacctcactcaacttctcttttcatcattgttttcttctttttcttctaccttgtctctgttgtttttaatgaact

SEQ ID NO: 49183 - DNA, 120 bp, synthetic construct
  source 1..120: mol_type = other DNA
cagcaagcagtatgcaacagagcaagaaacatgctgtgttctatgcaagtgcctccagaaatcacagctcttcaaagggagattctactttaactggtcacacctttcaaagatacttta

SEQ ID NO: 49184 - DNA, 120 bp, synthetic construct
  source 1..120: mol_type = other DNA
acatacacatataaaataaaaataaaaagcatatactgtatacaaacatgtatacacatatacacatacatatatatgttttaaacagacacatatatacatatgcatacatatatacac

SEQ ID NO: 49185 - DNA, 120 bp, synthetic construct; identical to SEQ ID NO: 13762
  source 1..120: mol_type = other DNA

SEQ ID NO: 49186 - DNA, 120 bp, synthetic construct
  source 1..120: mol_type = other DNA
gaatatgacttccatgattagtctagataagattgtaatttctgtcttcctgtttctctctcaataggtttaatgaagccagctgtcatgttgatgagactcatgtgtcaaggaactgaa

SEQ ID NO: 49187 - DNA, 120 bp, synthetic construct
  source 1..120: mol_type = other DNA
gtgaacttgcaaatggtgcttcctcagttgaaactaaagatgagactgaagtcctagttaacactttgtttgccaccttgtaagattgtgaaacagaggcctgagctaagccatgcccag

SEQ ID NO: 49188 - DNA, 120 bp, synthetic construct
  source 1..120: mol_type = other DNA
aagaatactcaatgtatactgactgcacctgggtttttagtcttaaccaaatcatataccagttttatgacctggcaaaaatgtttttctctctctctagaggtcactttcttcatctgt

SEQ ID NO: 49189 - DNA, 120 bp, synthetic construct
  source 1..120: mol_type = other DNA
cacttgcatttatgaaacaggagaaacaaaataaaattacatttatttattttaatttaatcttgaaagtaaattcatgttatcttctaaaaatgtttcagtttacaattcatccatatt

SEQ ID NO: 49190 - DNA, 120 bp, synthetic construct; identical to SEQ ID NO: 13763
  source 1..120: mol_type = other DNA

SEQ ID NO: 49191 - DNA, 120 bp, synthetic construct
  source 1..120: mol_type = other DNA
tatggtactttcagttctcaaacttttaaagtaaaaatattgatcaagatttatgcatgaccacttttttttttttttttttatttagacagtctcactctgttgcccaggccggagtgc

SEQ ID NO: 49192 - DNA, 120 bp, synthetic construct
  source 1..120: mol_type = other DNA
tttttactagagacaggatttcaccatgttgtccaggctggttttgaattcctgacctcaagtgattcaccggcctcggcctcccagagtgctggtattacagaggtgagccactgtgcc

SEQ ID NO: 49193 - DNA, 120 bp, synthetic construct
  source 1..120: mol_type = other DNA
ccaatgtcctaaagtgtttccccaatgttttcttcaagtagtttcatagtttcaggtcttacgtttaagtctttaattcagtttgatttgatttttgtatatggtgagagatagaggtct

SEQ ID NO: 49194 - DNA, 120 bp, synthetic construct; identical to SEQ ID NO: 13764
  source 1..120: mol_type = other DNA

SEQ ID NO: 49195 - DNA, 120 bp, synthetic construct
  source 1..120: mol_type = other DNA
caaggtataatactggtcaaaaattgtgaaccaaatatgttattttagtttttttattgctgtggtaacaaattaaaacaaacttagccacttaaaataacacccatttattatcttcca

SEQ ID NO: 49196 - DNA, 120 bp, synthetic construct
  source 1..120: mol_type = other DNA
aattggctttaatgcttattgaacttggaggcagaattcatattcttctcacgttttcaagacagccaatgggcaaaagtactcatacttcaaatctctttgttctctgctgaatctgtc

SEQ ID NO: 49197 - DNA, 120 bp, synthetic construct
  source 1..120: mol_type = other DNA
acatagccatagggatgacaccaaggggtgaatgagggttatggggctcaaaattctgtctaccacatatgatggagctcttcattttcctctcacattatgagattctctattaagtgt

SEQ ID NO: 49198 - DNA, 120 bp, synthetic construct
  source 1..120: mol_type = other DNA
agtaaaaagaatttagttatggaaataataaattgaaaagttacctttcgccagtgtctttgtttctggtttttcttttttctcaattttttccttgtgagttgcttaaacagaaaattt

SEQ ID NO: 49199 - DNA, 120 bp, synthetic construct; identical to SEQ ID NO: 13765
  source 1..120: mol_type = other DNA

SEQ ID NO: 49200 - DNA, 120 bp, synthetic construct
  source 1..120: mol_type = other DNA
gtttcccaaatcatcatacatttttcaatatttacatactattttttcaagaataacaatggtaattaaactacgaaaattaagtagtaaaatatgagatttaattgggcagttaacaaa

SEQ ID NO: 49201 - DNA, 120 bp, synthetic construct
  source 1..120: mol_type = other DNA
atatgtatttaaaaatccattatttttaaatacagttgataaacagtgtcctccagaatcttggagagatgatttaagcctcagaaagcctaatattcagttgaagagcaagtgtcccta

SEQ ID NO: 49202 - DNA, 120 bp, synthetic construct; identical to SEQ ID NO: 13766
  source 1..120: mol_type = other DNA

SEQ ID NO: 49203 - DNA, 120 bp, synthetic construct
  source 1..120: mol_type = other DNA
tttagctactgtaaagtttggaaaaaaaatcacaagaaatagcagattatttcattgagtcagaatacacagagcctagtgctaataattctgcttaacccaatatcagacaagaaatgg

SEQ ID NO: 49204 - DNA, 120 bp, synthetic construct
  source 1..120: mol_type = other DNA
tgaaattttcttttttttctgtaggttattggggtccaggtggtatttggttacatgagtaagctttttagtggtgattggtgagattttggtattttcaagtgtaaatataccataaaa

SEQ ID NO: 49205 - DNA, 120 bp, synthetic construct
  source 1..120: mol_type = other DNA
agctgaaatctggcccagctatcctagacacaatccaccctaaaacaatggcaaaaattaagttagaatcttacttcgtatcatacactgagatggatttttgaggaattaaagttaaat

SEQ ID NO: 49206 - DNA, 120 bp, synthetic construct; identical to SEQ ID NO: 13767
  source 1..120: mol_type = other DNA

SEQ ID NO: 49207 - DNA, 120 bp, synthetic construct
  source 1..120: mol_type = other DNA
aatgaagattcaaagccagaaagaccacaagaaaatgtcagcatatctaaccacctaaaaattcaagaatctaaacatatgcacacatgcatacatacatacatgaactcacacatgtcc

SEQ ID NO: 49208 - DNA, 120 bp, synthetic construct
  source 1..120: mol_type = other DNA
cacacatatcattaggagaaatgggcagtgagtgtgaacagttacacatgatatatacattgctaaaaaccatatttgaatctttcaacttataaatagtaagcagttaaaaatactttg

SEQ ID NO: 49209 - DNA, 120 bp, synthetic construct
  source 1..120: mol_type = other DNA
gggtaacatcacacactggggcttgtcaggggtttgggggcaaggggagggagagcattaggacaaatacctaatgcacgcaaggcttaaaacctagatgacaggttgataggtgcagca

SEQ ID NO: 49210 - DNA, 120 bp, synthetic construct; identical to SEQ ID NO: 13768
  source 1..120: mol_type = other DNA

SEQ ID NO: 49211 - DNA, 120 bp, synthetic construct
  source 1..120: mol_type = other DNA
taacaattaactagattatcaggaaaaaatacagtggaagaacattctcatttaaacactatgcagctttttaaagagaatgaggacaatatttagtgatatgagaagatttcaggatat

SEQ ID NO: 49212 - DNA, 120 bp, synthetic construct
  source 1..120: mol_type = other DNA
ttcacatgagtggtctactgtatgtgggtttggcatgaaatgggagccagtaggctgggagcaaggtgagaggaaggttttcacaaagtatctttatgtgttgagcaattagaacttatt

SEQ ID NO: 49213 - DNA, 120 bp, synthetic construct
  source 1..120: mol_type = other DNA
gatctactttcttacctatcaaactgacaagtatttctgatataatatcctcactgctggctaaggcagtctcaaaactgccagaggaaaaactgacgcaacatttctggaaagttacca

SEQ ID NO: 49214 - DNA, 120 bp, synthetic construct; identical to SEQ ID NO: 13769
  source 1..120: mol_type = other DNA

SEQ ID NO: 49215 - DNA, 120 bp, synthetic construct
  source 1..120: mol_type = other DNA
agatgtttgcacggcagtctttgatgtcaaaatttatcttctgtttttagaaatctttctttaactggattcagattttatgtagttagaggtttaaacttcaagataattacagattta

SEQ ID NO: 49216 - DNA, 120 bp, synthetic construct
  source 1..120: mol_type = other DNA
ttttaaaaaattattatgccatatgccaaaggagcccggctttgatattggatgaatgcttgaaatatgaggatgaaaatatagagacataattttctgatcttgaagcaaagaactatc

SEQ ID NO: 49217 - DNA, 120 bp, synthetic construct
  source 1..120: mol_type = other DNA
tatgagcagtgatctcatcaattattacaacaggactaaaatttaagtcataatcttaccccataccttagtcataattcttattcattatccatgctagaaacatgagactcatcccaa

SEQ ID NO: 49218 - DNA, 120 bp, synthetic construct
  source 1..120: mol_type = other DNA
atttatacaagaatatagaaagaacacttgctatgtgctaaagactctcctcaacaagatagagttcattcctgtcgccatgatgtcaataagctaatgactagtggatgctaagcaaat

SEQ ID NO: 49219 - DNA, 120 bp, synthetic construct; identical to SEQ ID NO: 13770
  source 1..120: mol_type = other DNA

SEQ ID NO: 49220 - DNA, 120 bp, synthetic construct
  source 1..120: mol_type = other DNA
gttacaaatattagtgcctcctcactgcttagtatggtatctgtcacatagtgggtgctatatcaaaataaaaatattttactgctctagtgatctgacattttcttaccaaccccatgt

SEQ ID NO: 49221 - DNA, 120 bp, synthetic construct
  source 1..120: mol_type = other DNA
tgtatgtgtcttccacctagaattaccacacccacattcattcgttttcctttccctattccatgcactctttcctcttggttcaaatgcctccttctctgtaacattttctttgatctc

SEQ ID NO: 49222 - DNA, 120 bp, synthetic construct; identical to SEQ ID NO: 13771
  source 1..120: mol_type = other DNA

SEQ ID NO: 49223 - DNA, 120 bp, synthetic construct
  source 1..120: mol_type = other DNA
attgaaatttctcaaataatcaaaacctaatgagaaaaaggagaaaaaaactcaccttaaaacattgagatattatttttttccacatttaatggttcttttagttgtttattcgctact

SEQ ID NO: 49224 - DNA, 120 bp, synthetic construct
  source 1..120: mol_type = other DNA
ttggcaaaaacaaagcgtcttttaaagtttctctgagggggaaccaagtttgtgtgagataagctgtgctttcagagccctgattggaaagacccacaggggaacacctaatctgtgtct

SEQ ID NO: 49225 - DNA, 120 bp, synthetic construct
  source 1..120: mol_type = other DNA
agcaaagggactgaattcggactgaaattagcatattaatgcctcattcctgttaccctagggagaaatccagttcctcccagttgaagtgttgatttacagaccctgtactgtatgcta

SEQ ID NO: 49226 - DNA, 120 bp, synthetic construct
  source 1..120: mol_type = other DNA
cttcaaactttggcaagactgtgctcaaataccaagttttgaaatgactttcaacacagcaatgcaacaatcagcaactgccttggtaatcactctaaaataaaaatcacctatagagca

SEQ ID NO: 49227 - DNA, 120 bp, synthetic construct; identical to SEQ ID NO: 13772
  source 1..120: mol_type = other DNA

SEQ ID NO: 49228 - DNA, 120 bp, synthetic construct
  source 1..120: mol_type = other DNA
caccctcccatctggcccctttccagccctccccaagctgtgctctgtgtttttgtttttgaccctggcagtcaccaggcagactatgtctttttctcaagtatatcagagctcataatc

SEQ ID NO: 49229 - DNA, 120 bp, synthetic construct
  source 1..120: mol_type = other DNA
atcaaaaattgtaatgccaaaatttgtaaagtactgatttgtataggctactacattcttcaattgatggctagcaaatcaattcaaccaaactctagaacatacttgactttagactac

SEQ ID NO: 49230 - DNA, 120 bp, synthetic construct
  source 1..120: mol_type = other DNA
aaattttactgatttttcttttaactaattcctctcattttcacatttcttgtgcttttttgttaggtattagtgctaaaatactctatagactttaagtaggtgaacatttcaaacagc

SEQ ID NO: 49231 - DNA, 120 bp, synthetic construct; identical to SEQ ID NO: 13773
  source 1..120: mol_type = other DNA

SEQ ID NO: 49232 - DNA, 120 bp, synthetic construct
  source 1..120: mol_type = other DNA
tgataggaatataagaagtaactaccctgaacttctttgtctgtggataagaaaatatgctcataagagtccgtgacagaccaggaaaagaatgtagttatctaattgctaaaccaggac

SEQ ID NO: 49233 - DNA, 120 bp, synthetic construct
  source 1..120: mol_type = other DNA
gaccgaattctccaagcacattatctgtgatctaccttccaataatgcacatacttctttttcataataaaagtactttcatttacctattaaagtgaagatcaggcaaattacccaaag

SEQ ID NO: 49234 - DNA, 120 bp, synthetic construct; identical to SEQ ID NO: 13774
  source 1..120: mol_type = other DNA

SEQ ID NO: 49235 - DNA, 120 bp, synthetic construct
  source 1..120: mol_type = other DNA
agagcatttttataaagggcttcaggatatttaaatatattttaatgtatttgattgcattttgacttttgagcctcaccatcagctaaatcccttgtcagcctatgactccaatcctgc

SEQ ID NO: 49236 - DNA, 120 bp, synthetic construct
  source 1..120: mol_type = other DNA
gttttttgtgcatatgatattgttatgggttgaattgtgtctccccaaaaatatatgttgaagtcattagccccagagcctaagaatgtgactttatttggaaataaggtttttacagag

SEQ ID NO: 49237 - DNA, 120 bp, synthetic construct
  source 1..120: mol_type = other DNA
agaaggatatgcacagagggaatgcatatcctgtgaaaagacagagacacagggagagcatcatttgaagatgaaggcaggaattggagaacttcatctacaaggccccaaagcttgccc

SEQ ID NO: 49238 - DNA, 120 bp, synthetic construct; identical to SEQ ID NO: 13775
  source 1..120: mol_type = other DNA

SEQ ID NO: 49239 - DNA, 120 bp, synthetic construct
  source 1..120: mol_type = other DNA
gtccttccagaaaactgcagacagacttactcaacaactgaggttgccaaaccccaaactacatctctcctcgaggacatctctgtgaagtacttactacacgtggtataattgtgtatt

SEQ ID NO: 49240 - DNA, 120 bp, synthetic construct
  source 1..120: mol_type = other DNA
tgtgaccactttttccatttacactatctgcctgccagaatacaccctattcccgctgtctagcccactctgaagctgaccatatgctgtctctccagtatacatttctgttaagtaaac

SEQ ID NO: 49241 - DNA, 120 bp, synthetic construct
  source 1..120: mol_type = other DNA
ctaccgggccatcctattgtctaggagccttcttggaaaaagttcacatatttagttatatatttaccactgggttcctgtcttttctgatttgttctgttctacaagtaaattgacatg

SEQ ID NO: 49242 - DNA, 120 bp, synthetic construct
  source 1..120: mol_type = other DNA
aataaacaaacaactacatggggggggaaagccagaggaaaattagaaatacattactatttttctccagttaattggattgtgggggtgcggttcctcttttttttttttttttttttt

SEQ ID NO: 49243 - DNA, 120 bp, synthetic construct; identical to SEQ ID NO: 13776
  source 1..120: mol_type = other DNA

SEQ ID NO: 49244 - DNA, 120 bp, synthetic construct
  source 1..120: mol_type = other DNA
acctgagaagactatgagcccatatccctttgttcatggataacaaaacagaatcataaaagggagtggcaaggctgccctagaacatacatgaagacaaacatagttccctccctcagt

SEQ ID NO: 49245 - DNA, 120 bp, synthetic construct
  source 1..120: mol_type = other DNA
ggacttcttaaaggaactgacactccgtatgagaatcaaagaaataagcaggcttttgccaagggactacacaggaagggcttgatggctggagagaagagagcatacaaaaaaagtgca

SEQ ID NO: 49246 - DNA, 120 bp, synthetic construct
  source 1..120: mol_type = other DNA
ctgtgagaaagcttggtaaggaggtagcagaacagggaagacatgataaactacgaagctggaacgctgtaggggtagcagtgatcatatgccaggttggaaaatgtcacttttatctct

SEQ ID NO: 49247 - DNA, 120 bp, synthetic construct; identical to SEQ ID NO: 13777
  source 1..120: mol_type = other DNA

SEQ ID NO: 49248 - DNA, 120 bp, synthetic construct
  source 1..120: mol_type = other DNA
taaacagagggtgcaggccccacttaaaggcatccagttactcattatctaaaacactggctcgtcaaaagaaaccactgtgggatatatttgaactctaagccatgagttcaacagaca

SEQ ID NO: 49249 - DNA, 120 bp, synthetic construct
  source 1..120: mol_type = other DNA
ctatcctggtgatctaaagtgcagtcagggttgagtaccacccctggcaacaatggcttctagatgtttagcatgaataatttgggtggacagtgatgtcagtcattaggacaaagaata

SEQ ID NO: 49250 - DNA, 120 bp, synthetic construct
  source 1..120: mol_type = other DNA
gtgtaaagtcaggtgggaattttataagaaggctcagagactttatattctatactttcagccttttcaaatatcaaaattaattaaccacttgggctcctaaattagttgatggcttaa

SEQ ID NO: 49251 - DNA, 120 bp, synthetic construct; identical to SEQ ID NO: 13778
  source 1..120: mol_type = other DNA

SEQ ID NO: 49252 - DNA, 120 bp, synthetic construct
  source 1..120: mol_type = other DNA
tgaaattttgaaatttcagaaatgttcataaacctgagttccataagcatagtaactttacatcttacttttgctatgctgatacctgaagatatacaaaagtctttgtgataatgctgc

SEQ ID NO: 49253 - DNA, 120 bp, synthetic construct
  source 1..120: mol_type = other DNA
agaaatgcaactcacaaccacattgagatatcatcttacatcattcagaatggttactattaaaaagtcaaaaacaacagatgtcatggatgcataaaatagagaacacttatacactgt

SEQ ID NO: 49254 - DNA, 120 bp, synthetic construct; identical to SEQ ID NO: 13779
  source 1..120: mol_type = other DNA

SEQ ID NO: 49255 - DNA, 120 bp, synthetic construct
  source 1..120: mol_type = other DNA
aatcaaatattgcatgttctcacttacaattgctacacatagacataaagacggaaataacagacactagggatctcaaaaaatggggagattggaatgggaactgaggcttgaaaaatt

SEQ ID NO: 49256 - DNA, 120 bp, synthetic construct
  source 1..120: mol_type = other DNA
ttttaaaaaaaacttgtatttttatatttaattatcagtccctctaaactctgactgactggcatgcatgcttgtcaagacttctttctaaatggggcctttaagtaatcctttgactcc

SEQ ID NO: 49257 - DNA, 120 bp, synthetic construct
  source 1..120: mol_type = other DNA
acgatgctgtttaagtaattagatctggtgatttgaagtttatttattgaaaagacagtggaataggccaaataatggccctctaaagtataactatatcctagtctctggaatctgcga

SEQ ID NO: 49258 - DNA, 120 bp, synthetic construct
  source 1..120: mol_type = other DNA
aactagtacacctatgacaagccatctgacacatctaccaagataagtactgccacatctcatttctcagttgtgttaagactgaaaatagtagaaaggggatttaaagatgcatacagt

SEQ ID NO: 49259 - DNA, 120 bp, synthetic construct; identical to SEQ ID NO: 13780
  source 1..120: mol_type = other DNA

SEQ ID NO: 49260 - DNA, 120 bp, synthetic construct
  source 1..120: mol_type = other DNA
cttgacacaatgattgaatccaggtaaacctacgtattcttagtttaaatggaattatatctactgtgttagattgttctatgaagattaagtgaaatattagacataaaaaattatata

SEQ ID NO: 49261 - DNA, 120 bp, synthetic construct
  source 1..120: mol_type = other DNA
gacacatcttatatttgttcagcctatgatgagacagatatcaaatgatactaaagatagagaaaaaaggaattcagataagaaaactgtaagggactctcatccagttagaggtggtta

SEQ ID NO: 49262 - DNA, 120 bp, synthetic construct; identical to SEQ ID NO: 13781
  source 1..120: mol_type = other DNA

SEQ ID NO: 49263 - DNA, 120 bp, synthetic construct
  source 1..120: mol_type = other DNA
tggaccttttatttatgacaaataacattctctttaattctttgaagttagtctgtatatatctttttatttaaaacatctgtgggcagagttatttatgattacaaaggaaactcagac

SEQ ID NO: 49264 - DNA, 120 bp, synthetic construct
  source 1..120: mol_type = other DNA
aaaactttaatttgaaaccatcaccctaatgtggaatcagcgttcttggaggtaacttgtactagagcactctgcttggtactcaaaactactccattgtggttaactcattctgcctgt

SEQ ID NO: 49265 - DNA, 120 bp, synthetic construct
  source 1..120: mol_type = other DNA
taaattcagaacaaggtcacatacagtattctgattatatttataaaataaaataaatttctacctcttttatgaggtactgtatgtgaccaatacaaggtcacatacagtattctgatt

SEQ ID NO: 49266 - DNA, 120 bp, synthetic construct; identical to SEQ ID NO: 13782
  source 1..120: mol_type = other DNA

SEQ ID NO: 49267 - DNA, 120 bp, synthetic construct
  source 1..120: mol_type = other DNA
atatagaattgttttagaaatatatatcctgtgggattacatattctgtgtgattttttttttgcatccttcttgatgggtcaattatataggtgtagactcccaaggctctcccgatga

SEQ ID NO: 49268 - DNA, 120 bp, synthetic construct
  source 1..120: mol_type = other DNA
acacaccagcttgagcataatgaatctttttggtctcagatatttattgactcatttataatcatcacagactactactacctttcaaatactgtatcttttcttctaagggttcaaaat

SEQ ID NO: 49269 - DNA, 120 bp, synthetic construct
  source 1..120: mol_type = other DNA
attttcactgaactatttgagaataaagagcaggcattagtctaccccatttacagacgggaaactaagcaataaagtgaaatcttttgttcatattcacacagaaaaactgtggaaaac

SEQ ID NO: 49270 - DNA, 120 bp, synthetic construct
  source 1..120: mol_type = other DNA
taatctccagctcagtctttgagaaatttattttagacttcagccaaattcactgtcttaattatggaagacttgctagtttaataaacctactctacagcccactgctcggtctttgac

SEQ ID NO: 49271 - DNA, 120 bp, synthetic construct; identical to SEQ ID NO: 13783
  source 1..120: mol_type = other DNA

SEQ ID NO: 49272 - DNA, 120 bp, synthetic construct
  source 1..120: mol_type = other DNA
tcaactgagtgagcttcaatgttctgattgttgaagaattggctgaccaatctagaatgaattcaaacattaggattaaagacataatatctgtagaatgatttgagcccttcccaaaaa

SEQ ID NO: 49273 - DNA, 120 bp, synthetic construct
  source 1..120: mol_type = other DNA
taattgatacttttattatttgaaaatttactagctgcaactgtggtatttactacagataattttgcattagctggtttatgacatagtaaatactggataaaattccatttttatctc

SEQ ID NO: 49274 - DNA, 120 bp, synthetic construct
  source 1..120: mol_type = other DNA
aaaatcatgtgaaactgaccattgggaaaacctgggcacgcttagaagaatatatttttgaatgtcttgcttcctattagtttctttaaagttttatgactatctctgtcacccacagaa

SEQ ID NO: 49275 - DNA, 120 bp, synthetic construct; identical to SEQ ID NO: 13784
  source 1..120: mol_type = other DNA

SEQ ID NO: 49276 - DNA, 120 bp, synthetic construct
  source 1..120: mol_type = other DNA
taatttaaaaattattacacattttgaagttactttgattccatctattaaatattatttatgttatttatacatttataactgaaattaactgatatacatttataactgaaattaact

SEQ ID NO: 49277 - DNA, 120 bp, synthetic construct
  source 1..120: mol_type = other DNA
tgtttacctttagtttgtattttcctttcaggtttctcttgtttttcagtcttatctttgtgtatttctaagaaaaaatagaatttataattttaaaactctgaaaatgtataaaattta

SEQ ID NO: 49278 - DNA, 120 bp, synthetic construct
  source 1..120: mol_type = other DNA
atttattgaaataagggaaaaattggagttatctcaaaattagagttatttggaaaagcttaaacatttaatagacagagctatgttgtcaccattttcagtgctaaaattggtcacaaa

SEQ ID NO: 49279 - DNA, 120 bp, synthetic construct; identical to SEQ ID NO: 13785
  source 1..120: mol_type = other DNA

SEQ ID NO: 49280 - DNA, 120 bp, synthetic construct
  source 1..120: mol_type = other DNA
cagttaatttggatagaagtgaatttgagattagagtttacaaatatgattgctacctttgaaaagtgacttaatcttaaatatagtgttttttcttagaaaaatgctaatgaggtttac

SEQ ID NO: 49281 - DNA, 120 bp, synthetic construct
  source 1..120: mol_type = other DNA
actaaattaagatcaaccatggcaacaccctaaatatcttcagaaaagacagctactagctttcattcacctgttaaggaggtaaccaccattgtgaaggttttcttcctaatttttctc

SEQ ID NO: 49282 - DNA, 120 bp, synthetic construct
  source 1..120: mol_type = other DNA
tctccaaaatgtaaggaaatatctccaaatgacataggaaatgcccatcttcctgtctctctcaccattttgtttatttcttctctagtctccaaattttactctacagcagggtttctt

SEQ ID NO: 49283 - DNA, 120 bp, synthetic construct; identical to SEQ ID NO: 13786
  source 1..120: mol_type = other DNA

SEQ ID NO: 49284 - DNA, 120 bp, synthetic construct
  source 1..120: mol_type = other DNA
actagattacaaaaacttagaataaaatataagtaaaatacctcattaataatttttatatgaattacattttgaaatgatattttggtcatattgggtgtgatagttttattattggct

SEQ ID NO: 49285 - DNA, 120 bp, synthetic construct
  source 1..120: mol_type = other DNA
cagattttgtataatttggatgggcttctctgatttctttggaaagccttaaaaacaggcctgagattgcccagggcaaaaggagaaattctgcctgtgaatgacaactttggttgacag

SEQ ID NO: 49286 - DNA, 120 bp, synthetic construct
  source 1..120: mol_type = other DNA
tcctgtcatatgggttcaaaaatgcctggccagttcccacaatcgcataatccaattccttgtaataattttttaaaagtataaaagtatctccataatcttctactggttctacttctc

SEQ ID NO: 49287 - DNA, 120 bp, synthetic construct; identical to SEQ ID NO: 13787
  source 1..120: mol_type = other DNA

SEQ ID NO: 49288 - DNA, 120 bp, synthetic construct
  source 1..120: mol_type = other DNA
aagatttagactggtctttggacgtactaagggagttgcctttaagagatcattccttactcctagtaggtattaattggaatatagagatggcatgaaatttttaaaattgaaaaattg

SEQ ID NO: 49289 - DNA, 120 bp, synthetic construct
  source 1..120: mol_type = other DNA
gataccagctgaccattcaaaagaataaagaagggattctggagctcacacgggagaataagacgtgggttagactcttccatagaatccagtgctgaaggccatcttgcctgaaaaaat

SEQ ID NO: 49290 - DNA, 120 bp, synthetic construct; identical to SEQ ID NO: 13788
  source 1..120: mol_type = other DNA

SEQ ID NO: 49291 - DNA, 120 bp, synthetic construct
  source 1..120: mol_type = other DNA
ggagaagggaaatgctagggtaaatgtattatctccctttcccaaatacatgaaagggaggtaactctaaagtgaaaggtaagtacttgcatgttggatatgcttcataataagttttac

SEQ ID NO: 49292 - DNA, 120 bp, synthetic construct
  source 1..120: mol_type = other DNA
tcagtctcacagggaaagcctcattttttattttcctgattctgcacttcagccttagaacaaactaagacaacctcactgctgtgggcagatgcaggcagttgttttgcaagcagaggt

SEQ ID NO: 49293 - DNA, 120 bp, synthetic construct
  source 1..120: mol_type = other DNA
attaatatttctacagaggcaagcatggcaaaacacagcagaactagtaaagacatacacacacctacatttatttgctcaggaagacaaaaaattatttctgatgattcagacttaagg

SEQ ID NO: 49294 - DNA, 120 bp, synthetic construct; identical to SEQ ID NO: 13789
  source 1..120: mol_type = other DNA

SEQ ID NO: 49295 - DNA, 120 bp, synthetic construct
  source 1..120: mol_type = other DNA
aagattcgagtcattaaaggtagaaatttattgtccaacaatcttcaaataaaattaagttttctatattatgttaatactagcttctggttatttaataatttgcaaagataggtgaat

SEQ ID NO: 49296 - DNA, 120 bp, synthetic construct
  source 1..120: mol_type = other DNA
gaagaaaggcaaggcagtcattatttacctccacatatatgtcctttgcaattaggtggatgtccaatgtctctgaaaaggtgttaagtctcagcaccagatgctagttggaatcataag

SEQ ID NO: 49297 - DNA, 120 bp, synthetic construct
  source 1..120: mol_type = other DNA
gaattttgagaagggaagaagggaaaaagacacggaaaaaaagttacaattatcttaatgtgttaggaggcaacaaagggaaatccctttattctactgagtcactggtagctttgccta

SEQ ID NO: 49298 - DNA, 120 bp, synthetic construct; identical to SEQ ID NO: 13790
  source 1..120: mol_type = other DNA

SEQ ID NO: 49299 - DNA, 120 bp, synthetic construct
  source 1..120: mol_type = other DNA
aggaactcagagaatttaaactctgactttcatggtttatcattcaatggcgatagcaatgaaatatatcttcctcacacagactgtttttccaaagtacaatgccaaacagaggaggag

SEQ ID NO: 49300 - DNA, 120 bp, synthetic construct
  source 1..120: mol_type = other DNA
gatctgtaaagaattattttaattattttaataatcctcatatgaaagatgttataaatctatagtatactaatataattaaaatatcatgcattttgataggaaaatgtagacatagat

SEQ ID NO: 49301 - DNA, 120 bp, synthetic construct
  source 1..120: mol_type = other DNA
cacgggagtcaatctgctcaattcaaatctgatttccatacttactagctgtgtgaacttcatttcctcatccataaaataagattaacagtagtgtctaccagataggattatatgggg

SEQ ID NO: 49302 - DNA, 120 bp, synthetic construct
  source 1..120: mol_type = other DNA
aagaattatgtctattttgttccacattaaattttcaatgcctaacatgatgactggaatatactagccacttgagaaatgcatactacttgaaaaaatattcaaccatgattatgagtt

SEQ ID NO: 49303 - DNA, 120 bp, synthetic construct; identical to SEQ ID NO: 13791
  source 1..120: mol_type = other DNA

SEQ ID NO: 49304 - DNA, 120 bp, synthetic construct
  source 1..120: mol_type = other DNA
aaataaataaataaataaataaataaataaataaaaatgagctgggtgtggtggtgcacaactgtagtccagctacttgggaggctgagacaggaggatcccttgagcccaggaggttga

SEQ ID NO: 49305 - DNA, 120 bp, synthetic construct
  source 1..120: mol_type = other DNA
ataaaagagaaaacagaaaaacaactgcaacaattgaaagttttttatatttcagaaattttttcatgtactgttttttctagagcactgaaaagctaaattgtaattatattaaggaca

SEQ ID NO: 49306 - DNA, 120 bp, synthetic construct
  source 1..120: mol_type = other DNA
aacagaaaaaaattgagagcaagatttaaaaccgagcttaaaggaaggaactttaaatttctattccctttgttctgcagatttaatattattacatttctctagcattccttattaatg

SEQ ID NO: 49307 - DNA, 120 bp, synthetic construct; identical to SEQ ID NO: 13792
  source 1..120: mol_type = other DNA

SEQ ID NO: 49308 - DNA, 120 bp, synthetic construct
  source 1..120: mol_type = other DNA
aggccgtttaattctgtcaaaatgtttacataaggtctatgtctaccacagtgccaatggtaatcatcaggccaatacattttccccagactctctgagctcaacttccatatgtaactg

SEQ ID NO: 49309 - DNA, 120 bp, synthetic construct
  source 1..120: mol_type = other DNA
cgtatttctaaattgttttgttatattacatgtgttttgcttatgatcgtttttatctacttatgatcataccaaagcttgctgttgagtagacagatagtttgtaattttgtctaagac

SEQ ID NO: 49310 - DNA, 120 bp, synthetic construct; identical to SEQ ID NO: 13793
  source 1..120: mol_type = other DNA

SEQ ID NO: 49311 - DNA, 120 bp, synthetic construct
  source 1..120: mol_type = other DNA
caacagattaattgtaacagatgaacaagcaaatcttgttatctatttagtggctaattaaataatgccaaacacagctgtttgctgaattattaatattttagataaatattccagatt

SEQ ID NO: 49312 - DNA, 120 bp, synthetic construct
  source 1..120: mol_type = other DNA
tctcccccttgaagcacctagtatgtgtatgacttaatgggcaaccactccagatacagtgataagaagatattaagaacagtttctttcagagatgttgaagcccataaatgtaaatta

SEQ ID NO: 49313 - DNA, 120 bp, synthetic construct
  source 1..120: mol_type = other DNA
actaagatgatatctacctaatctcatttttgccattaaatttgttatctcaggttaattcattttttctcttcgaattttattttctccatctataaatgagatatcatttcccatgtg

SEQ ID NO: 49314 - DNA, 120 bp, synthetic construct
  source 1..120: mol_type = other DNA
ttgatgatgtgctagataagactgatgtgtctgtacatgagaattatctggggagattttaaaacatattcctgagctactactcaaatgttattaatttgtctctcatgacaaggaaat

SEQ ID NO: 49315 - DNA, 120 bp, synthetic construct; identical to SEQ ID NO: 13794
  source 1..120: mol_type = other DNA

SEQ ID NO: 49316 - DNA, 120 bp, synthetic construct
  source 1..120: mol_type = other DNA
caggtgtgagaactgagagccactgaagtgacttgaccatagctggttaacagcagaaagggaaacaataccaatacctccttgttgcattcattcaagcttatctgtcatgtttaaaat

SEQ ID NO: 49317 - DNA, 120 bp, synthetic construct
  source 1..120: mol_type = other DNA
gttaacagtagatttatatacattagccattgtgtgtaaacaaattatgcagttattcatttatctttgactgtctaactcactggcctcaggatgcataaaattccctatttatagcat

SEQ ID NO: 49318 - DNA, 120 bp, synthetic construct
  source 1..120: mol_type = other DNA
aaggcttgacccctacagattgttatttagcaaatcggagatgggaggtaatctagaattctgaattagaaacaaaaattagatgatgtagacatttgtggcattcctgctagaatccag

SEQ ID NO: 49319 - DNA, 120 bp, synthetic construct; identical to SEQ ID NO: 13795
  source 1..120: mol_type = other DNA

SEQ ID NO: 49320 - DNA, 120 bp, synthetic construct
  source 1..120: mol_type = other DNA
ctgctaggagagaaaagcctgcctgagactgaaacaaatgaaacagaggaaggaaagcaggttccagaagtgaagaaagaggatttactaataacatgattaaaaaaaaaaaactatatc

SEQ ID NO: 49321 - DNA, 120 bp, synthetic construct
  source 1..120: mol_type = other DNA
gcgccacctgggctcaccgcaggctccgcctcctggcttcacgccattctcccgcctcagcctccgagtagctgggactacaagcgcccgccacgacgcctggctaattttttgtatttt

SEQ ID NO: 49322 - DNA, 120 bp, synthetic construct
  source 1..120: mol_type = other DNA
ttggattttggtctctcatgagcaaaagagttctaattaagacatcacttgaatctgacacacaaagttgagaaccattggtaagctttctgttatgctttttttgttgttgtttatttt

SEQ ID NO: 49323 - DNA, 120 bp, synthetic construct; identical to SEQ ID NO: 13796
  source 1..120: mol_type = other DNA

SEQ ID NO: 49324 - DNA, 120 bp, synthetic construct
  source 1..120: mol_type = other DNA
ggtttgacccaccattatttgtttcatcctgggtcactttgcgtgccttgacaaagatgagctcttttagtagcacgaagtactacagctgcctgagtcagtgggctcagagtttacttc

SEQ ID NO: 49325 - DNA, 120 bp, synthetic construct
  source 1..120: mol_type = other DNA
acaggtagaagataaagctctaagctcctcatgcagcctgagagcgatatgcgatggtgcagttatggagatgagctttgatctagatttatttagaggagacatccaaagataaatgta

SEQ ID NO: 49326 - DNA, 120 bp, synthetic construct; identical to SEQ ID NO: 13797
  source 1..120: mol_type = other DNA

SEQ ID NO: 49327 - DNA, 120 bp, synthetic construct
  source 1..120: mol_type = other DNA
tgagttaaaatttaccaggcagctcttttcaacttgcagagctttagggaaatttaaacatgcgactatagggggaattgtaatttgttttgctgtaagtgaggaatctcttcctctgcc

SEQ ID NO: 49328 - DNA, 120 bp, synthetic construct
  source 1..120: mol_type = other DNA
aatgtagattggcttctggtgttttcctctaaggcaagagataaacctatagcccataaggccaccatggtcctaaaattaaagatcagtttctcctgtccaaaaaactaaatatgcata

SEQ ID NO: 49329 - DNA, 120 bp, synthetic construct
  source 1..120: mol_type = other DNA
ggatataaatgctgtaattattattcttatatacagatatattatagatggaggtttaagtgagaataaactgtaaaaaggagatagagataggtgtatctgttaagttgcacttaaaag

SEQ ID NO: 49330 - DNA, 120 bp, synthetic construct; identical to SEQ ID NO: 13798
  source 1..120: mol_type = other DNA

SEQ ID NO: 49331 - DNA, 120 bp, synthetic construct
  source 1..120: mol_type = other DNA
tcagttcaatttattaataacatcatataaagatttaccctcttctttatcaaatatacaatgccccaactattctagcttatttactgccttatttgatcatgtattcattaaattttt

SEQ ID NO: 49332 - DNA, 120 bp, synthetic construct
  source 1..120: mol_type = other DNA
ccattactgtcatttactattttatttaataaatgttcatcattagtctttgggaatgtggtaagcaaatagtacatgttctcttccaccagctcattgcttggctcatagaaaacactt

SEQ ID NO: 49333 - DNA, 120 bp, synthetic construct
  source 1..120: mol_type = other DNA
ttaatcccagaaggcataaaacatgtccgaattctgtattagtgattagctaaggatatacattgtaccgtcgtgaatcttagacctctgtgctttgctctcactcagaaacctaggagt

SEQ ID NO: 49334 - DNA, 120 bp, synthetic construct
  source 1..120: mol_type = other DNA
aactctgcatcccttcctacaagttctaaaatttttcatcataagttgaaggattacaagtgatataatttatagattattgtaaatgttgacatttaaaaataaagttgccatatccct

SEQ ID NO: 49335 - DNA, 120 bp, synthetic construct; identical to SEQ ID NO: 13799
  source 1..120: mol_type = other DNA

SEQ ID NO: 49336 - DNA, 120 bp, synthetic construct
  source 1..120: mol_type = other DNA
gccatcgaatgaatggagctttaaaatcacctatctgtggattaatgtattttacagttagaatgagacagcgttcatcaataaatctaaccctatattttacttttaaagatacaagta

SEQ ID NO: 49337 - DNA, 120 bp, synthetic construct
  source 1..120: mol_type = other DNA
attggggcaatgttacttaatttttttgtctccttccaagtaacgttgaataccacaaagaaccaacaacagatttatttatatttgaagtggaaatagtacggttataaaccgggcatg

SEQ ID NO: 49338 - DNA, 120 bp, synthetic construct; identical to SEQ ID NO: 13800
  source 1..120: mol_type = other DNA

SEQ ID NO: 49339 - DNA, 120 bp, synthetic construct
  source 1..120: mol_type = other DNA
cagtgccttggggtctcatcatgaagtgtttagtaatagaacttagtattttaaaattttgacaagttgaaaaatatgcatgaagaatataaagacactaggtactacatgtaataccct

SEQ ID NO: 49340 - DNA, 120 bp, synthetic construct
  source 1..120: mol_type = other DNA
aatcaatactgcaaccctgagattagtcgactacaccattattccataccaaattaaaaactgcaaacttcaaccataaataacaaactggctgaatttttattttgttaagaatagcag

SEQ ID NO: 49341 - DNA, 120 bp, synthetic construct
  source 1..120: mol_type = other DNA
gaatatatatgaattgagaagggtattaatgaagagtcatttagatgtgtaaaaatcaaatgttttaaaagactatcattctacattgcccccaaattccttcttaaaccaacatttgta

SEQ ID NO: 49342 - DNA, 120 bp, synthetic construct
  source 1..120: mol_type = other DNA
ttacctactgctttaaagctctcattgcctctatacttccatgaaagaaaagcttacacataaaaaataataattacaatgaaatagatcttcttgaattcactttcaactaaggtttat

SEQ ID NO: 49343 - DNA, 120 bp, synthetic construct; identical to SEQ ID NO: 13801
  source 1..120: mol_type = other DNA

SEQ ID NO: 49344 - DNA, 120 bp, synthetic construct
  source 1..120: mol_type = other DNA
gcttaattttaaaataatttcaaagaaaaatttaaatcaaaagaaaagattttttattaaatagtaaatatcaatttatgaaaaacatggctttataatagtcttatggaattcagttta

SEQ ID NO: 49345 - DNA, 120 bp, synthetic construct
  source 1..120: mol_type = other DNA
gttcactctctatgggaaatcagctataaatctcttgaagtttatagacaaatctagaatctctaaacctggatttgatggctgaagtctgtcttgagtacttgagttctcattctggat

SEQ ID NO: 49346 - DNA, 120 bp, synthetic construct; identical to SEQ ID NO: 13802
  source 1..120: mol_type = other DNA

SEQ ID NO: 49347 - DNA, 120 bp, synthetic construct
  source 1..120: mol_type = other DNA
actaaaacactgcaattgttttaagtctggcttgaatgttggctgttttctcacaacaaatgtacctcaagatggtactacctgctccccagtgccccttccagatgcagttcctacccc

SEQ ID NO: 49348 - DNA, 120 bp, synthetic construct
  source 1..120: mol_type = other DNA
gcaagtaattcctctacagcacatccaggcacatccaggtaactccactccatgacagtgacacatcacacataccaactggatatgcctttgcctcctaggctgttatgtccctcaccg

SEQ ID NO: 49349 - DNA, 120 bp, synthetic construct
  source 1..120: mol_type = other DNA
atcatgggtgtcattttctgggccatttctaaggctacagaattctcccctcattcctcaaattccagctcatattggtctgtgtataaatgaatccatacaaatctactgaataaggca

SEQ ID NO: 49350 - DNA, 120 bp, synthetic construct; identical to SEQ ID NO: 13803
  source 1..120: mol_type = other DNA

SEQ ID NO: 49351 - DNA, 120 bp, synthetic construct
  source 1..120: mol_type = other DNA
tactttgcttcccaaattccagtttttaagtataaagtttgtttatatacatttatataagattgtttcatttttatgaattcaataaaattgtggcagtgatccaaattatacattata

SEQ ID NO: 49352 - DNA, 120 bp, synthetic construct
  source 1..120: mol_type = other DNA
agtcaaggctgaatacatgatttctgatgactaagactgaccctaaaaagtgttatctaatagatggaatcacagtgctttgttcttttcatactcattcaatggcagcttttatgtggt

SEQ ID NO: 49353 - DNA, 120 bp, synthetic construct
  source 1..120: mol_type = other DNA
agagcacataggttagttgcataattgttaggacatttagaatgtgtccttctattctacaccaccatttggtccaataaatttactcttttgattgtacttttagtaagattgctttct

SEQ ID NO: 49354 - DNA, 120 bp, synthetic construct
  source 1..120: mol_type = other DNA
ctagagataaacttgaaaaataactattttttccaaagaagcatataaatgtgagtttgtattgtggttttatagcagagcataatgagactccctttgctgtaatgctacattaatatt

SEQ ID NO: 49355 - DNA, 120 bp, synthetic construct; identical to SEQ ID NO: 13804
  source 1..120: mol_type = other DNA

SEQ ID NO: 49356 - DNA, 120 bp, synthetic construct
  source 1..120: mol_type = other DNA
atgagatgatgtcagataacaaagaaaagaagccatagatccagtccgtggtttcctccatagcatcacgtaccagttttaaaggatctgagccaatcttggcaatagagcttgctaaaa

SEQ ID NO: 49357 - DNA, 120 bp, synthetic construct
  source 1..120: mol_type = other DNA
tctcctggctacaattttttgcgcagaaatagaaacttcatcttgctataatatgcatgcatgccaagaaagaaaatgcccttgggaagtttataatccaaataagagttagcactggaa

SEQ ID NO: 49358 - DNA, 120 bp, synthetic construct; identical to SEQ ID NO: 13805
  source 1..120: mol_type = other DNA

SEQ ID NO: 49359 - DNA, 120 bp, synthetic construct
  source 1..120: mol_type = other DNA
ctagttggaataggttggatttatcttagtcatccctgtacatgaaataaaaaagtatttgaactgctagtaacttcaatggatagaatctataagtcttcccttttctatgtcctagga

SEQ ID NO: 49360 - DNA, 120 bp, synthetic construct
  source 1..120: mol_type = other DNA
cttccaatcatatgaaaactgctctgaagaggcaagcatagcctttaggatgtgattacagaggtgatctatctagaaatatggtataaattgcatctgattttttatcaagctgtaatt

SEQ ID NO: 49361 - DNA, 120 bp, synthetic construct
  source 1..120: mol_type = other DNA
aagtacatctaattaggcttttactgtgactaacatagtaagtcattggaagatttgagcagaaagatgaagtgatttgacttcctttactgtgttgaagtttgaaagggtgccaggctg

SEQ ID NO: 49362 - DNA, 120 bp, synthetic construct; identical to SEQ ID NO: 13806
  source 1..120: mol_type = other DNA

SEQ ID NO: 49363 - DNA, 120 bp, synthetic construct
  source 1..120: mol_type = other DNA
tgtagacatttgtgtaatgcaacatgatttacaaaagagaagctctaactgaaaacagaaacttcagaatccaacggaagacagaaggtatcaaagccataacaatgagtgagatcacca

SEQ ID NO: 49364 - DNA, 120 bp, synthetic construct
  source 1..120: mol_type = other DNA
agcaagaaagagagagggagaaggaaccaagaaagtgtaatgcaccagatatcaggttaatacattgtttttgaggaggacagagtgatcaactggaaaatgctatggataggtcaagaa

SEQ ID NO: 49365 - DNA, 120 bp, synthetic construct
  source 1..120: mol_type = other DNA
tatttttatgcatatgacagagattgagtaatactagaagaggaactaggatcatagtgagtttttctgtttttaccattgttcaaataggaagaatatcccatggtttatactgatggg

SEQ ID NO: 49366 - DNA, 120 bp, synthetic construct; identical to SEQ ID NO: 13807
  source 1..120: mol_type = other DNA

SEQ ID NO: 49367 - DNA, 120 bp, synthetic construct
  source 1..120: mol_type = other DNA
ggaactggattgttctggcaccattaaaggcatttttagcagtggtatattttatacctaatggaaaaatctgcaaatgagatttttatgatgagaatagattgagactatttctccatt

SEQ ID NO: 49368 - DNA, 120 bp, synthetic construct
  source 1..120: mol_type = other DNA
tatattgcctggttctaaaattgccaaagcaggctatttttatgaagttatcattgctagcttgagatcagcttctgattttctgattttcagccatgtggaccacttcttccaaaacct

SEQ ID NO: 49369 - DNA, 120 bp, synthetic construct
  source 1..120: mol_type = other DNA
gaaaaaatattattcaacgcaaactaaaacttttattgatgtctttttttaagaagatacttaggtaattgtattttcttagctttcatgtttccctaagtttaattatatacatgactg

SEQ ID NO: 49370 - DNA, 120 bp, synthetic construct
  source 1..120: mol_type = other DNA
cataggaaaactaaggcacagataatttaaataagatgcctcaggttacatagtaagtgatggagccacgttttacacccattttaggccatcaaaacaagattcttaactattgtgcta

SEQ ID NO: 49371 - DNA, 120 bp, synthetic construct; identical to SEQ ID NO: 13808
  source 1..120: mol_type = other DNA

SEQ ID NO: 49372 - DNA, 120 bp, synthetic construct
  source 1..120: mol_type = other DNA
taccactgaatgccgggaaaactgctttaggttacttgtggtcagtaattggattcttggcactgatgaaagagtgccaagagagacaagagaggccaagaaaagtttaagtaagatttt

SEQ ID NO: 49373 - DNA, 120 bp, synthetic construct
  source 1..120: mol_type = other DNA
tgttatctttggccatcagtcttagagtgtgtaggtaatatttgacccttctttatttttcatatcctgagaaacattggcacacaatggttacaagcttgggttctgagttcagactga

SEQ ID NO: 49374 - DNA, 120 bp, synthetic construct
  source 1..120: mol_type = other DNA
ttgcattaattttgaaaatttaaactctgcctgaaaatattatttgtttcaatttttgagtgttttggaggactccaattttgcacccatggtacttaactcacttttctctagtcctgg

SEQ ID NO: 49375 - DNA, 120 bp, synthetic construct; identical to SEQ ID NO: 13809
  source 1..120: mol_type = other DNA

SEQ ID NO: 49376 - DNA, 120 bp, synthetic construct
  source 1..120: mol_type = other DNA
caaatcaaatggtacgatgcctgctaattagtaaacatcaacgtgaagaaataagcaagattgtctgttgaatgaccaaaatgttcttttcagcttgctagccagaactaatagcttccc

SEQ ID NO: 49377 - DNA, 120 bp, synthetic construct
  source 1..120: mol_type = other DNA
ctcaaacccaaatgattaaccccaaccttaatgctacccttatgctttccttccaaggaaagaacaactaagaggtggagtctctagatttgcccatctgcatctgtctgatccactcca

SEQ ID NO: 49378 - DNA, 120 bp, synthetic construct
  source 1..120: mol_type = other DNA
ggtgttcactcaagcacagtgtacgtaaactttttggtgtaaagcatgtgtattagtccgtttccatactgctgataaagacacacctgagactgggtaatttataaagaaaaagaggta

SEQ ID NO: 49379 - DNA, 120 bp, synthetic construct; identical to SEQ ID NO: 13810
  source 1..120: mol_type = other DNA

SEQ ID NO: 49380 - DNA, 120 bp, synthetic construct
  source 1..120: mol_type = other DNA
cctcaaacatacaatgctccataaatgcaggctgctataaatattagcatgagatcacttagtcaccacgccctcatagcgaaccttggtaaggtccatgaaatccaaagactgttttca

SEQ ID NO: 49381 - DNA, 120 bp, synthetic construct
  source 1..120: mol_type = other DNA
aggaacaattaaacttggtatatgttgctgtatgtaccttctgtatggtagtactcaatatgagcttggctaagcaaagcagagatttctcttttacaacaattattgagcactgattat

SEQ ID NO: 49382 - DNA, 120 bp, synthetic construct
  source 1..120: mol_type = other DNA
tgaccagtttttctccctttctgtaaatatgtatatgaatatttttgcttctgttggtgaaaattttatcaagttaagaaaaattttagcaaattatgtgtcatttaatatgccctgagt

SEQ ID NO: 49383 - DNA, 120 bp, synthetic construct; identical to SEQ ID NO: 13811
  source 1..120: mol_type = other DNA

SEQ ID NO: 49384 - DNA, 120 bp, synthetic construct
  source 1..120: mol_type = other DNA
aatgctaatttaatttatttctaagcagaatccattggaaacaagaagcttgcacagtgaatttaatagtcttctgagactttgggtcctggagttttcagcatcaacaatactaggcac

SEQ ID NO: 49385 - DNA, 120 bp, synthetic construct
  source 1..120: mol_type = other DNA
ctcataagttgggccacttgtcctgggtatgtttggttgacttcactgatgttagaactgccgtttttaattttgtcatcacggtggaagagatttcaacctcttagagccaaatgcctt

SEQ ID NO: 49386 - DNA, 120 bp, synthetic construct; identical to SEQ ID NO: 13812
  source 1..120: mol_type = other DNA

SEQ ID NO: 49387 - DNA, 120 bp, synthetic construct
  source 1..120: mol_type = other DNA
ttgttgtaaccaaaatagtaataatttatagtcctaaaaccatgttccaaaaatagattttccacacagaagcattttaagagaggctcattttttgagatcctctttttatattcactt

SEQ ID NO: 49388 - DNA, 120 bp, synthetic construct
  source 1..120: mol_type = other DNA
gaaaattgaatccagctactgtgctataatctttgcatttgataattttgtttacagtataaaagagtatttcaaggatcctcacatggacagaaatgtggaataaaagctatgctgtaa

SEQ ID NO: 49389 - DNA, 120 bp, synthetic construct
  source 1..120: mol_type = other DNA
agatgcttctatagagcacctttcagatgcttttgtaaagagaagagtatgaggaaaccacattttcatatatttaaatgccttactttacaaatgagtgaatactttgctattgccata

SEQ ID NO: 49390 - DNA, 120 bp, synthetic construct; identical to SEQ ID NO: 13813
  source 1..120: mol_type = other DNA

SEQ ID NO: 49391 - DNA, 120 bp, synthetic construct; identical to SEQ ID NO: 13814
  source 1..120: mol_type = other DNA

SEQ ID NO: 49392 - DNA, 120 bp, synthetic construct
  source 1..120: mol_type = other DNA
catccagatggccagttcccaccttaactgatgacattccaccacaaaagaagtgaaagtggccggtccctgccttaactgatgacattaccttgtgaaattccttctcctggctcatcc

SEQ ID NO: 49393 - DNA, 120 bp, synthetic construct
  source 1..120: mol_type = other DNA
ccatctcccttcactgactctcttttcagactcagcccgcctgcacccaggtgaaataaacagccttgttgctcactcaaagcctgtttggtggtctcttcacacagacatgagtgaaat

SEQ ID NO: 49394 - DNA, 120 bp, synthetic construct
  source 1..120: mol_type = other DNA
gcccaaggaacacctcaccaattttaaatcgggtaagcagcctctttctactctcttctccaacctctctcactatccttcaacctctttctcctttcaatcttggcgccacacttcaat

SEQ ID NO: 49395 - DNA, 120 bp, synthetic construct; identical to SEQ ID NO: 13815
  source 1..120: mol_type = other DNA

SEQ ID NO: 49396 - DNA, 120 bp, synthetic construct
  source 1..120: mol_type = other DNA
ccttcactatggacaaccttccaccctccattcctccctcttctcccttagcctgtgttctcaaagacctcttcaactcacacctgacctaaaatctaaatgccttattttcttctgtac

SEQ ID NO: 49397 - DNA, 120 bp, synthetic construct
  source 1..120: mol_type = other DNA
ggtgcctgacgtccaggcattcttttacacatcggtccctccctagtctctgttcccaatgcagcttgtcccaaacttccttctttccctcccgcctgtcccctcagtcccaaccccaag

SEQ ID NO: 49398 - DNA, 120 bp, synthetic construct
  source 1..120: mol_type = other DNA
tcccgcaccctataatccttttatcacctcccctcctcacacccggtccggcttacagttgcattctgtgactagccctcccccacctgcccagcaatttcctcttaaaaaggtggctgg

SEQ ID NO: 49399 - DNA, 120 bp, synthetic construct; identical to SEQ ID NO: 13816
  source 1..120: mol_type = other DNA

SEQ ID NO: 49400 - DNA, 120 bp, synthetic construct
  source 1..120: mol_type = other DNA
accccagccacatctccagcacacaagaactccaaacgcctgaactgcagctgccagggattcctccagaacctcctcccccaggaccttgccacaagtgccggaaatccggccactggg

SEQ ID NO: 49401 - DNA, 120 bp, synthetic construct; identical to SEQ ID NO: 13817
  source 1..120: mol_type = other DNA

SEQ ID NO: 49402 - DNA, 120 bp, synthetic construct
  source 1..120: mol_type = other DNA
tcttaaaactccccagctctggtgccaaattagacaatactcttttaagcactccttttaattatccccacctgcccagttccctattaggccgagacactttaactaaattatctgctt

SEQ ID NO: 49403 - DNA, 120 bp, synthetic construct
  source 1..120: mol_type = other DNA
ctccctccttggcaaccgatcatgcaccccttaccatctcattaaaacctaatcacccttaccccaatcaatgccaatatcccatcccacagcatgctttgaaaggattaaagcctgtta

SEQ ID NO: 49404 - DNA, 120 bp, synthetic construct
  source 1..120: mol_type = other DNA
ccaaattgttttgcctatccaccctgtggttccaaacccatatactctcctatcctcaatacctccctccacaatccattattctgttctggatctcaaacatgctttctttactattcc

SEQ ID NO: 49405 - DNA, 120 bp, synthetic construct; identical to SEQ ID NO: 13818
  source 1..120: mol_type = other DNA

SEQ ID NO: 49406 - DNA, 120 bp, synthetic construct
  source 1..120: mol_type = other DNA
ctacctctcagcaagccaaactcattgccttaactcgggccctcactcttacaaaggggctacacatcaatatttatactgactctaaatatgccttccatatcctgcaccaccaagctg

SEQ ID NO: 49407 - DNA, 120 bp, synthetic construct
  source 1..120: mol_type = other DNA
aggccatcaaaaggcatcagatcccatcactcaggacaacgcttatcctgataaggtagctaaaaaagcagccatcaaaagggctcagatcccatcgctcaggacaatgcttatgctgat

SEQ ID NO: 49408 - DNA, 120 bp, synthetic construct; identical to SEQ ID NO: 13819
  source 1..120: mol_type = other DNA

SEQ ID NO: 49409 - DNA, 120 bp, synthetic construct
  source 1..120: mol_type = other DNA
atcaagctcagggatttgcccctgcccaggactggcaaattgactttactcacatgccccgagtcagaaaactaaaataactcttggtctaggtagacactttcactggatgggtagagg

SEQ ID NO: 49410 - DNA, 120 bp, synthetic construct
  source 1..120: mol_type = other DNA
aaatcacccaagcagtttttcaggctcttggtattcagtgaaacatttatataccttacaatcctcaatcttcaggaatggtagaacggactaatggtcttttaaaaacacacctcacca

SEQ ID NO: 49411 - DNA, 120 bp, synthetic construct; identical to SEQ ID NO: 13820
  source 1..120: mol_type = other DNA

SEQ ID NO: 49412 - DNA, 120 bp, synthetic construct
  source 1..120: mol_type = other DNA
caccaataattctatatgacaaatgtttcttctaacaaccccacaatatcaccccttaccacaggatcttccttcagcttaatctctcccactctaggttcccatgccgccccaatccct

SEQ ID NO: 49413 - DNA, 120 bp, synthetic construct
  source 1..120: mol_type = other DNA
gtcagacctctgagcccaagctaagccatcatatcccctgtgacctgcatgtacacatccagatagccagttcctgccttaactgatgacattccaccacaaaagaagtgaaaatgtccg

SEQ ID NO: 49414 - DNA, 120 bp, synthetic construct
  source 1..120: mol_type = other DNA
cctttgactgtaattttcctttacctacccgaatcttataaaatggccgcatccctatctcccttcgctgactctcttttcagactcagcccgcctgcacccaggtgaaataaacagcct

SEQ ID NO: 49415 - DNA, 120 bp, synthetic construct; identical to SEQ ID NO: 13821
  source 1..120: mol_type = other DNA

SEQ ID NO: 49416 - DNA, 120 bp, synthetic construct
  source 1..120: mol_type = other DNA
aaaaaataaaataaaataaagggtaggatgcaaaactcctgaagtacattggattctaaaagataaaatccatttgatttgcaattttgaaaaaataaaatacttgcatctgcaagtatt

SEQ ID NO: 49417 - DNA, 120 bp, synthetic construct
  source 1..120: mol_type = other DNA
attgactgcagaaggaaatgactgtcactttgctaatctacatttgaatagtcatattgtagctccaatccttgcttttcaatatctgaggcatgggcattttccctctgctttaaaaaa

SEQ ID NO: 49418 - DNA, 120 bp, synthetic construct
  source 1..120: mol_type = other DNA
gtggttatttcagtatataattgtttatggcaatgtaaaactaagtttactgatactcaactattacttcttgaggcaaaaggaacattactgaatgcaaatagatgtatatttcacctc

SEQ ID NO: 49419 - DNA, 120 bp, synthetic construct; identical to SEQ ID NO: 13822
  source 1..120: mol_type = other DNA

SEQ ID NO: 49420 - DNA, 120 bp, synthetic construct
  source 1..120: mol_type = other DNA
ggaacacatggttttttgtaggtttatagatttccataaatttgtttccaagctacgattcaacagaaataattttctggtggcataaaagtcaaaatattatactactccagttggatg

SEQ ID NO: 49421 - DNA, 120 bp, synthetic construct
  source 1..120: mol_type = other DNA
ttggaagctttacttttttgtttgtttttgtttttgtttttgtttttaagatagggtctcactctgtcacccaggctggagtgcagtggcgcaagctcaactcagtacaacatccgcctg

SEQ ID NO: 49422 - DNA, 120 bp, synthetic construct
  source 1..120: mol_type = other DNA
ataatctaagaattaagaacacttcttaaaaatgaatactttttttctttatctttttcctcatttcatgaagaattgatacactttttattagagtctgggaaatattgaattatagaa

SEQ ID NO: 49423 - DNA, 120 bp, synthetic construct; identical to SEQ ID NO: 13823
  source 1..120: mol_type = other DNA

SEQ ID NO: 49424 - DNA, 120 bp, synthetic construct
  source 1..120: mol_type = other DNA
tttgggccttccctaaatgattttactctgctaaattcatagcctgacaaaccgtgcacctgcttaactgggctaagcgccaagaaaagaaaaaaagtcaggaaaattaatttccaagag

SEQ ID NO: 49425 - DNA, 120 bp, synthetic construct
  source 1..120: mol_type = other DNA
attgatgcttcctactattatgtctttgctggctctcttctcagattacagatcttacttcctggtaataagattcaaattcaagttacatttaatgagtccctcctatgtgccaggcat

SEQ ID NO: 49426 - DNA, 120 bp, synthetic construct
  source 1..120: mol_type = other DNA
attaccaagtgtgctttgagacacgctggtacaaccatgtaatgatgttttcctctaatggatgaggatgctaatgaatgatgatccttgttcttaggaaggaaaagagttaccacattc

SEQ ID NO: 49427 - DNA, 120 bp, synthetic construct
  source 1..120: mol_type = other DNA
acttcataaataaagcaaaagaaatttgtaagaaatttcaaccaaagcctacaaattctggccccaaaagatcagaatacataatcaaggcaccccttcattttctgagagggaggtctt

SEQ ID NO: 49428 - DNA, 120 bp, synthetic construct; identical to SEQ ID NO: 13824
  source 1..120: mol_type = other DNA

SEQ ID NO: 49429 - DNA, 120 bp, synthetic construct
  source 1..120: mol_type = other DNA
ttggaaacaagacatttttgcaagttttggaaggcacgaatgtggcaataatgaagccattatttattgtctgaaggttggtgtagggcaggtgcttttgcagctcacgctcatgatccc

SEQ ID NO: 49430 - DNA, 120 bp, synthetic construct
  source 1..120: mol_type = other DNA
gcgtcaatttatcctgcagctcatccgcataattgtaatttgtggtggtgagagacaaacaagtcttccactttgttcttgtcagtttcagtttgtcccaagtccctcccattctatcca

SEQ ID NO: 49431 - DNA, 120 bp, synthetic construct
  source 1..120: mol_type = other DNA
atgtaattcagagttgctttcagctattgtgtcaaacattgacagataggcatagtattgtttgaatattatttggatgttacattaagtaagaagtgtggtgtaggtgaaatatctttt

SEQ ID NO: 49432 - DNA, 120 bp, synthetic construct; identical to SEQ ID NO: 13825
  source 1..120: mol_type = other DNA

SEQ ID NO: 49433 - DNA, 120 bp, synthetic construct
  source 1..120: mol_type = other DNA
tcatggcttcacggcatttacctacttttctaaacttccagagagtaactgacagttgccctgactttctggccttccaaatcatttccagtttatttcttttaccactagccttgtttt

SEQ ID NO: 49434 - DNA, 120 bp, synthetic construct
  source 1..120: mol_type = other DNA
agtataatttacattttgaaactgttattgaagccataatttatatagttctttcatttttataatacacatatttcaagaattgcatataaatcaaatatttgtaaagttaacaatgta

SEQ ID NO: 49435 - DNA, 120 bp, synthetic construct; identical to SEQ ID NO: 13826
  source 1..120: mol_type = other DNA

SEQ ID NO: 49436 - DNA, 120 bp, synthetic construct
  source 1..120: mol_type = other DNA
attagacatttatgactctggataaatagcccttttgctttctttgatatcacgggacttttctctacttgttagatgagaatctaactcattggtagtccagctaccaatggtatgctg

SEQ ID NO: 49437 - DNA, 120 bp, synthetic construct
  source 1..120: mol_type = other DNA
acagaagcatggtgctggcatctactcagcttctggtaaggcttcagggtgtttacaatcatggtggaagttgaagggaaggggtagcaggcaggtcacatggatggatggctagaggag

SEQ ID NO: 49438 - DNA, 120 bp, synthetic construct
  source 1..120: mol_type = other DNA
aatccatctctattaaacaataatcttccaagaggccccacgtcgaacactggggattacaatttgacatgagattatatgggacacatatccaaactatataattttatctctggcccc

SEQ ID NO: 49439 - DNA, 120 bp, synthetic construct; identical to SEQ ID NO: 13827
  source 1..120: mol_type = other DNA

SEQ ID NO: 49440 - DNA, 120 bp, synthetic construct
  source 1..120: mol_type = other DNA
tcccaaggaattgggcagctctaccgttgtggttttgcagggttcagccctggaggctgctctcacacattgttgagtgcctgcagcttttctaggtgcagggtggaagctgccagtgga

SEQ ID NO: 49441 - DNA, 120 bp, synthetic construct
  source 1..120: mol_type = other DNA
taatagaggttctctgtttgggctctgccactgcaacaagcttctgcctgggcacccagaatttcccatacattctctgaaatctaggtggaggctgccaagcctctttaactcttgcac

SEQ ID NO: 49442 - DNA, 120 bp, synthetic construct
  source 1..120: mol_type = other DNA
ccaaaatataggcagcactcttctgaggctggccagggcagtggggccctgagcctgacccaggaaacccttcttaactcctagacatctgggcctatgatgggaaagactgttgcaagg

SEQ ID NO: 49443 - DNA, 120 bp, synthetic construct
  source 1..120: mol_type = other DNA
tcaaaaaagctgtttctttctttgtcacatggctaggctgcaaattttccaaatttttatactctgcatcccctttaaagataagttccactttaagtcatttttttgttcccacatctt

SEQ ID NO: 49444 - DNA, 120 bp, synthetic construct; identical to SEQ ID NO: 13828
  source 1..120: mol_type = other DNA

SEQ ID NO: 49445 - DNA, 120 bp, synthetic construct
  source 1..120: mol_type = other DNA
cccaagttgcttccacattttctggtatccttatagcaataccccactactggtgccaattttctgtattaagctcttgcattgctataaagctcttgcattgctataaagaaatactta

SEQ ID NO: 49446 - DNA, 120 bp, synthetic construct
  source 1..120: mol_type = other DNA
ggtagaaggaggagagaggagcaggcatgtcacatggccagagaagagggagagagtggagcagggaggtgccacacacttaaacaaccagatctcatgagaactcactattgtgaggac

SEQ ID NO: 49447 - DNA, 120 bp, synthetic construct; identical to SEQ ID NO: 13829
  source 1..120: mol_type = other DNA

SEQ ID NO: 49448 - DNA, 120 bp, synthetic construct
  source 1..120: mol_type = other DNA
ggagaaagaaaaaaggggaggggagagtacatatgagagaacacattaaaagattaatgaaatgtttcgcttatggtaaaaaagtgataagaataaattcactcatctagtcatgtaaca

SEQ ID NO: 49449 - DNA, 120 bp, synthetic construct
  source 1..120: mol_type = other DNA
caattatatgtaattttgtgaaaaactctctttattttcaggaactcaaaataggatggccggtggcagaagcaaagagtttgtctggcaaggacacttaggaccagatgacagcagggc

SEQ ID NO: 49450 - DNA, 120 bp, synthetic construct
  source 1..120: mol_type = other DNA
caaacgaaatcttcacccaagctttttaactattatctttatgaactgcaacattcaggctttgttcagctcttgcaaataaggatatcaatttcattggaaatcaataagtaccaccga

SEQ ID NO: 49451 - DNA, 120 bp, synthetic construct
  source 1..120: mol_type = other DNA
cctcacactaagatgaaacagaaaccaagcaggaactggaggggacactgtttctttccatttgaattaattttaattttaaagccaaattttatggaacttacctgaaaagtttttgta

SEQ ID NO: 49452 - DNA, 120 bp, synthetic construct; identical to SEQ ID NO: 13830
  source 1..120: mol_type = other DNA

SEQ ID NO: 49453 - DNA, 120 bp, synthetic construct
  source 1..120: mol_type = other DNA
ttcctcagcatttactattctccctaaaactcgtgcgctcatataatcagtgtttctcatctcctaagtcctctgagggagaatcaacacaagtgataaaatggttcaaatggataaaac

SEQ ID NO: 49454 - DNA, 120 bp, synthetic construct
  source 1..120: mol_type = other DNA
ctaagataatgatgttagaaagtcttactatatccagtacctcttttattcctgattttaagagtccacatgttcatgagagaaaattcaaaaaatataaaaataaaataaatagataag

SEQ ID NO: 49455 - DNA, 120 bp, synthetic construct; identical to SEQ ID NO: 13831
  source 1..120: mol_type = other DNA

SEQ ID NO: 49456 - DNA, 120 bp, synthetic construct
  source 1..120: mol_type = other DNA
ctaaatatagaattcctgggacaaataacataatcacttttatagctttgagaatacatgcacgtatttgaaagttagtatcttttaaaaattgtgcatgccagtagttttgttacctta

SEQ ID NO: 49457 - DNA, 120 bp, synthetic construct
  source 1..120: mol_type = other DNA
agaaatgagctgtttgtatgttcgtttttccttggtatttcttttcttgtggatttttcctccatttttctgtaaacctccttttggtggtttctaaaattgcatacatacacacatatg

SEQ ID NO: 49458 - DNA, 120 bp, synthetic construct
  source 1..120: mol_type = other DNA
ataaaattgatactactgtatggctagaaagcctcctggatggagagaaaacatgtctcattatctgggctacacttgactcgtagaaagttaaatctagaagtaactgagagatcatct

SEQ ID NO: 49459 - DNA, 120 bp, synthetic construct
  source 1..120: mol_type = other DNA
agggaaaataaaactctaccaatccaaatatttttgccaaaagcaaagttaaaaaacatttttgtgtattaaaatacagaccatattgtctataataatttaagaattacatgccaagaa

SEQ ID NO: 49460 - DNA, 120 bp, synthetic construct; identical to SEQ ID NO: 13832
  source 1..120: mol_type = other DNA

SEQ ID NO: 49461 - DNA, 120 bp, synthetic construct
  source 1..120: mol_type = other DNA
gagattggaattaactcctggcttctctctgcattacccaaatggctagaaggtcgctattacactacatctctgagtgagaagcatctagatctgatgaatgagattggtaagactcaa

SEQ ID NO: 49462 - DNA, 120 bp, synthetic construct
  source 1..120: mol_type = other DNA
ttatcatcaccactattttcatttattacatcaccttcattgctaccagcacaactatgactctcactacaactacaaatatcactctaagaaaaggctagaaaggcaggattaacctcg

SEQ ID NO: 49463 - DNA, 120 bp, synthetic construct; identical to SEQ ID NO: 13833
  source 1..120: mol_type = other DNA

SEQ ID NO: 49464 - DNA, 120 bp, synthetic construct
  source 1..120: mol_type = other DNA
aacccttcaaacagctatgtacacaggatgcttgtagtataagtgcagtttataagataatttttaagtattggagaaagaaataacactgccagcaaaattaaatactttagttaataa

SEQ ID NO: 49465 - DNA, 120 bp, synthetic construct
  source 1..120: mol_type = other DNA
ctatgactaatcaggaaagaaaatcaaatgcattcaagagcacatactaacaggtggtaaccaaacaaaattagttttttagttattttttagataacagtgataaatttagccccatat

SEQ ID NO: 49466 - DNA, 120 bp, synthetic construct
  source 1..120: mol_type = other DNA
tgtggaatacatatccgaagttcttgaacttaacttagtgaaaatgatagcaagataaaaaaaatacttctaaaacccagatttcacaaactgcacttgaggtggtgctcaagaaggaaa

SEQ ID NO: 49467 - DNA, 120 bp, synthetic construct; identical to SEQ ID NO: 13834
  source 1..120: mol_type = other DNA

SEQ ID NO: 49468 - DNA, 120 bp, synthetic construct
  source 1..120: mol_type = other DNA
ctgctttgtataccgaaactcaaggagtaattttactgagatttgatatgaatgagttgaatcctggtcacattgtaaaaaggctaaacatttaaaacagaacatgaatttatatataca

SEQ ID NO: 49469 - DNA, 120 bp, synthetic construct
  source 1..120: mol_type = other DNA
gttttctaaacaactgacataatatgaattctaaatttgtattcacttaatgatccttccaatccaattatggtacaatttttaaatagatgaaaatgataaattaatactgttatgttt

SEQ ID NO: 49470 - DNA, 120 bp, synthetic construct
  source 1..120: mol_type = other DNA
gtaatctgaaggtcatccttcttaaagaaaattatgtgttgcccttgttatgaaacacattaagttgtacctttcaatttccattcaaaattactgcagaagccacacagagccaagagg

SEQ ID NO: 49471 - DNA, 120 bp, synthetic construct
  source 1..120: mol_type = other DNA
tagttattgatatggcagaaaaaatgagaggtaaatattaccgagcaatttgacatgggctatgcctcttgaaagttggtatctcagaattggagcagagcagctaggatatgtaaagca

SEQ ID NO: 49472 - DNA, 120 bp, synthetic construct; identical to SEQ ID NO: 13835
  source 1..120: mol_type = other DNA

SEQ ID NO: 49473 - DNA, 120 bp, synthetic construct
  source 1..120: mol_type = other DNA
atcgatcagatgaagaaactgccaagtgcacttccatattattattctttatttttcctgtgggacgctgacaatacaatctctttcaggatgctcaaggaagacacctacattctagaa

SEQ ID NO: 49474 - DNA, 120 bp, synthetic construct
  source 1..120: mol_type = other DNA
agcaaatgagagaaaggaagtatatactactgatggcattatatgtgttattcccaaattactttaagaacataattcccaatcacatgaaaaagtgactcttgctatattgtttgtgtt

SEQ ID NO: 49475 - DNA, 120 bp, synthetic construct; identical to SEQ ID NO: 13836
  source 1..120: mol_type = other DNA

SEQ ID NO: 49476 - DNA, 120 bp, synthetic construct
  source 1..120: mol_type = other DNA
ccattcactcttccattgagtggaacggatgaggagtctctcccaggccgcttttataaggtcactaattccattcatgggctccaccttcctgccctaatcactccccagtggccccaa

SEQ ID NO: 49477 - DNA, 120 bp, synthetic construct
  source 1..120: mol_type = other DNA
ggttccatttctagtcccaccactagaaaaagaaattcacttaatggaacagtggattgagtgaaattcacttaatggaacagtggatggagtgggtggcaatttagggctttcatgaaa

SEQ ID NO: 49478 - DNA, 120 bp, synthetic construct
  source 1..120: mol_type = other DNA
aaagaaaatgccaacttcataaggtagggggaaagtgaatttacaggagttaaaataagaaggaacattagcactgttgagaagtaggctatcaaatcacagcaagtgccttcatttgct

SEQ ID NO: 49479 - DNA, 120 bp, synthetic construct; identical to SEQ ID NO: 13837
  source 1..120: mol_type = other DNA

SEQ ID NO: 49480 - DNA, 120 bp, synthetic construct
  source 1..120: mol_type = other DNA
tcccacaaaagacatgatcttgttctttttatggctgcatagtattccatggtgtatatgtaccacattttctttatttaatccgtcattggtgggcatttaggttgatttcatgtcttt

SEQ ID NO: 49481 - DNA, 120 bp, synthetic construct
  source 1..120: mol_type = other DNA
ctttgaggaatcaccatactgctttccacaatagttgaacaaatttatacttccaccaacagtgtataagtgttcccttttctttgcggcctcacatctgttattttttgactttttaat

SEQ ID NO: 49482 - DNA, 120 bp, synthetic construct
  source 1..120: mol_type = other DNA
gaaaagtgtcttttcatgtcctttgcccacttcttaatggagttgtttgttgtcctcttgtaaatttaagttatttatagatgctggatattggacctttgtcagatacatagtttgcaa

SEQ ID NO: 49483 - DNA, 120 bp, synthetic construct
  source 1..120: mol_type = other DNA
ttggtatctttgtcatgaaatctttgcccattcctatgtccaggatgatattgcctaggttgttttccagattttttgtagttttgggttttacatttaagtctttaatccatcttgagt

SEQ ID NO: 49484 - DNA, 120 bp, synthetic construct; identical to SEQ ID NO: 13838
  source 1..120: mol_type = other DNA

SEQ ID NO: 49485 - DNA, 120 bp, synthetic construct
  source 1..120: mol_type = other DNA
tggtagtttgatagaaacagcactgaatctataaattgccttgggcagtatggccattttaatgatattatttttatccgtgagcatgggatgtttttctgtttgttttgccttctctgt

SEQ ID NO: 49486 - DNA, 120 bp, synthetic construct
  source 1..120: mol_type = other DNA
tggctgtcagcttggctgttgttggtgtataggaatgctactgatttttgtacattactttgtattctgacattttgctgaagttgtttatcagcttaaggagctttcaggccaagacta

SEQ ID NO: 49487 - DNA, 120 bp, synthetic construct; identical to SEQ ID NO: 13839
  source 1..120: mol_type = other DNA

SEQ ID NO: 49488 - DNA, 120 bp, synthetic construct
  source 1..120: mol_type = other DNA
ttccatttatttgatgaatcaaatttattgatttgcatatgttgaaccaacctggcatcacagggatgaagactacttgatagtgatcgattagctttttgatgtgctgacggatttggt

SEQ ID NO: 49489 - DNA, 120 bp, synthetic construct
  source 1..120: mol_type = other DNA
taatgagttggagaggagtgcctctgatgtggttaggctcaatgtccctacccaaatctcatcttaaattgtaatccctataatccccacatgtcaagagagagaccaggtggaattaat

SEQ ID NO: 49490 - DNA, 120 bp, synthetic construct
  source 1..120: mol_type = other DNA
ctgaaaagaaggtgccttactttcctttcaccttccaccatgattgtaactttcctgaggcctccccagctatgctgaactgtgagtcaattaaacctctttcctttataaattacacag

SEQ ID NO: 49491 - DNA, 120 bp, synthetic construct; identical to SEQ ID NO: 13840
  source 1..120: mol_type = other DNA

SEQ ID NO: 49492 - DNA, 120 bp, synthetic construct
  source 1..120: mol_type = other DNA
atttaaaatttagaacccccaaaaaacactttaagccttgagaaagatgggactgtgatctgagttacctagagttacaacttctcagattatagattaactcacctgcatatttttctt

SEQ ID NO: 49493 - DNA, 120 bp, synthetic construct
  source 1..120: mol_type = other DNA
tcctctttgttgtcctggtttgcttagaacagatgacagaaaaccatgattattataccctttataaaatatatattaaatgtaccctgtcaaaaagagaccctgcctatcaccaatcaa

SEQ ID NO: 49494 - DNA, 120 bp, synthetic construct
  source 1..120: mol_type = other DNA
aacctctctactttggaacactgacttcattcctttgtagttggtgtttccaagtggtccatcctcacagtttgcacttgaagaaactctctttaaattattagattatgatacttttaa

SEQ ID NO: 49495 - DNA, 120 bp, synthetic construct; identical to SEQ ID NO: 13841
  source 1..120: mol_type = other DNA

SEQ ID NO: 49496 - DNA, 120 bp, synthetic construct
  source 1..120: mol_type = other DNA
atctaactcctcttccaagatttacctcagatgtcaactccttgacaatatttccttaatcttttgacctgaactctactcttcttacttgtaataccatagcattttttgatgaatact

SEQ ID NO: 49497 - DNA, 120 bp, synthetic construct
  source 1..120: mol_type = other DNA
ttgttcttcaacaaggccctaggtagggatcaagtcatctatcctttcatagcacttagcatagcacattttgcacagttaaggccccaatagttattaaatatgagaaatattagaagt

SEQ ID NO: 49498 - DNA, 120 bp, synthetic construct
  source 1..120: mol_type = other DNA
aacattttcatgatatgagaaaacgttgagatgagaggtatgctagtggtagaagtaaaaacatgtctgttcaagagaatctcataagaactgcaaagttttgctggtccaaagaaggct

SEQ ID NO: 49499 - DNA, 120 bp, synthetic construct
  source 1..120: mol_type = other DNA
aaacagagaaaactttttgtaaggagacaatttcagatgttattaaaccttttaaatttccaagtggcaacatctgggagaggtttccaaaaccagattgaagagattaaatgggtagat

SEQ ID NO: 49500 - DNA, 120 bp, synthetic construct; identical to SEQ ID NO: 13842
  source 1..120: mol_type = other DNA

SEQ ID NO: 49501 - DNA, 120 bp, synthetic construct; identical to SEQ ID NO: 13843
  source 1..120: mol_type = other DNA

SEQ ID NO: 49502 - DNA, 120 bp, synthetic construct
  source 1..120: mol_type = other DNA
cagtgggggcgcttttgagccaggatgagccaggagaaggaatttcacaaaacaatgtcatcagttaaggcaggaacaggccattttcacttcttttatggtggaatgttatcagttaag

SEQ ID NO: 49503 - DNA, 120 bp, synthetic construct
  source 1..120: mol_type = other DNA
gtaaagtcttgggacagcaaaaattttgggggatggtatggagagataatgggcgatgtttctcagggctgctttgagtgggattgggggggcgtgggaacctagagtgggagagattaa

SEQ ID NO: 49504 - DNA, 120 bp, synthetic construct
  source 1..120: mol_type = other DNA
gaataagagaaggagaaaaacaggtataaaaggtctaagaattgggatgactcaggacatctgcttagagagtgcctaaggagatcagcatagtcctgccagcaaagattatttatttac

SEQ ID NO: 49505 - DNA, 120 bp, synthetic construct
  source 1..120: mol_type = other DNA
gtgaataggagtatgactagacagaagatagtagggatgacaagtttttggggggcacagtctaagttctggtgtctggaatgagactggggcctaataaaaaggaacgtctatacagga

SEQ ID NO: 49506 - DNA, 120 bp, synthetic construct; identical to SEQ ID NO: 13844
  source 1..120: mol_type = other DNA

SEQ ID NO: 49507 - DNA, 120 bp, synthetic construct
  source 1..120: mol_type = other DNA
tgaaagtgtctacctagactaacaggtattttagttatctgactccgggcatgttgagtaaagctaatttgccagtcctgggtggggccaaatcctcaagcttgatgtgtagggaaggga

SEQ ID NO: 49508 - DNA, 120 bp, synthetic construct
  source 1..120: mol_type = other DNA
ggcttgtactatagcatagcctgcctttgctggtgtgtggcgattaggcctagtggaactgccatcaataaatcaagcgtgatcagggtgaggaacaggaaagaaggaaatatggggaaa

SEQ ID NO: 49509 - DNA, 120 bp, synthetic construct; identical to SEQ ID NO: 13845
  source 1..120: mol_type = other DNA

SEQ ID NO: 49510 - DNA, 120 bp, synthetic construct
  source 1..120: mol_type = other DNA
cttgtgtaagaattctgaccgcactaaccatgcctaggaaggaaaggagttgttgttttgtaagggattgaggtttgggagattaatcggacacgatcagcagggaacgcacgtgtgttt

SEQ ID NO: 49511 - DNA, 120 bp, synthetic construct
  source 1..120: mol_type = other DNA
ggtgtcagggtcagtccaagtgaaagccaagagaggctgggatgaagggtggaaaggaatagtaaagaaagcatgtttgagatccagaacagaataatggattgtggagggaggtattga

SEQ ID NO: 49512 - DNA, 120 bp, synthetic construct
  source 1..120: mol_type = other DNA
ggaattgtaaggagagtttataggctttaaatggccatgctgtagcaggcaagtgataacaggctttaatcctttcaaagcatgctgtgggatgggatattggcattgattggagtaagg

SEQ ID NO: 49513 - DNA, 120 bp, synthetic construct
  source 1..120: mol_type = other DNA
tggattgggaagaagggcagcaatgagatgtagctgtaatccaggaatagtcagggaagcagataatttagttaaagtgtctcggcctaatagggaactgggcaggtggggataattaaa

SEQ ID NO: 49514 - DNA, 120 bp, synthetic construct; identical to SEQ ID NO: 13846
  source 1..120: mol_type = other DNA

SEQ ID NO: 49515 - DNA, 120 bp, synthetic construct
  source 1..120: mol_type = other DNA
ccagtggggttccgtacagatgggacgtggcttaggaggaatcctgggctgcaggcattccttggcctggtggccagatttctggcacttgtagcaagctcctgggggaggaggttctgg

SEQ ID NO: 49516 - DNA, 120 bp, synthetic construct
  source 1..120: mol_type = other DNA
gaaggcgaggttgattaaatcctgttgtggggtttgagggccagaatttaatttttggagttttatttaatgtcgggagcagattgggtaataaaatgtattttgagaataagacggcct

SEQ ID NO: 49517 - DNA, 120 bp, synthetic construct
  source 1..120: mol_type = other DNA
gtctgataaagaaaaaggagcattaaccttgactatgcctttagcttcagccacctttttaagagtaaattgctgggcaggtgagggctagtcacggaatgaaactgtaagccggaccgg

SEQ ID NO: 49518 - DNA, 120 bp, synthetic construct; identical to SEQ ID NO: 13847
  source 1..120: mol_type = other DNA

SEQ ID NO: 49519 - DNA, 120 bp, synthetic construct
  source 1..120: mol_type = other DNA
tttgtattggggtcaagcggcattgcagaagaaaataagacacttagattttaggttagatgagagttgaagaggttttaagttcttaagaacacagactaagggagaagaaggaggaat

SEQ ID NO: 49520 - DNA, 120 bp, synthetic construct; identical to SEQ ID NO: 13848
  source 1..120: mol_type = other DNA

SEQ ID NO: 49521 - DNA, 120 bp, synthetic construct
  source 1..120: mol_type = other DNA
gaggtagagacacagagagaaggggttggggtacttgccccttccccagaaaagcgggacttgccactaaggatgaaggaccaaggcaggcgtccctgcgtggtctgacacctctgaaac

SEQ ID NO: 49522 - DNA, 120 bp, synthetic construct
  source 1..120: mol_type = other DNA
tctaccagaaaatgaaaggaattgaaattaagagaaggaagagattgaagagtggaaaggagaaagtggttgagggacagtgagagaggttggagaagagagtaagaagagtctgcttac

SEQ ID NO: 49523 - DNA, 120 bp, synthetic construct
  source 1..120: mol_type = other DNA
cccctgatctgagtcgcggcaccaaatttcatgtgcgtccgtgtgaagagaccaccaacaggctttgtgtgagcaataaagctgtttatttcacctgggtgcaggtgggctgagtccaaa

SEQ ID NO: 49524 - DNA, 120 bp, synthetic construct
  source 1..120: mol_type = other DNA
agcttttgagccaggatgagccaggagaaggaatttcacaagacaatgtcatcagttaaggcaggaacaggccattttcacttcttttgtggtggaatgttatcagttaaggcaggaact

SEQ ID NO: 49525 - DNA, 120 bp, synthetic construct
  source 1..120: mol_type = other DNA
gtttcttattatgtaagtgaagccttcaggtagcaggcttcagagagaatagatggcaaatgtctcttatcagaccccaaaaggtgctagactctcagttactctctcctgcatcaggac

SEQ ID NO: 49526 - DNA, 120 bp, synthetic construct
  source 1..120: mol_type = other DNA
agggtctgctatctgtcacatgatgctatactagtcaagttggaatctggtatcttattgctacaaagagtctgtttcgcaactcttaaaaatctctgttttaatgttaatgctggcaag

SEQ ID NO: 49527 - DNA, 120 bp, synthetic construct
  source 1..120: mol_type = other DNA
tcaggtttactttggagttccctgggcagagaggaaggagccattcagtaagttggggatttagagttttatttttactttacaaaatgaataaaaatcctgatcatcaatttacaaatg

SEQ ID NO: 49528 - DNA, 120 bp, synthetic construct; identical to SEQ ID NO: 13849
  source 1..120: mol_type = other DNA

SEQ ID NO: 49529 - DNA, 120 bp, synthetic construct
  source 1..120: mol_type = other DNA
taaaataacagaaatcatggccaggattccttattaccactacatgcccaagtagcctaaatcaaaatgtcagagggcactatgtacagtgggacagattagggataaaaattaacagga

SEQ ID NO: 49530 - DNA, 120 bp, synthetic construct
  source 1..120: mol_type = other DNA
aggatttgcccaactttgtgaattagaagtttgcggaaagaatctgcagaaaatctcccaaattatgtgggttcaatctcacggatatagtagcaaggctctggttcttagcaaatatca

SEQ ID NO: 49531 - DNA, 120 bp, synthetic construct
  source 1..120: mol_type = other DNA
actttacctagccccagcattcctcctactaaattgtcccattgtcattgaattgcaaacccactgaaacagaaaagccttgagtaatgacatgccatttcaatttggaaaaaaatacta

SEQ ID NO: 49532 - DNA, 120 bp, synthetic construct; identical to SEQ ID NO: 13850
  source 1..120: mol_type = other DNA

SEQ ID NO: 49533 - DNA, 120 bp, synthetic construct
  source 1..120: mol_type = other DNA
tggaagtgcaagaactaagacccaagtttcttttttaaattttacttttttcagtattcaggcaaatgtgatgaagcaacctgttttttaaaaatatatttaaatataaatgatagtagt

SEQ ID NO: 49534 - DNA, 120 bp, synthetic construct
  source 1..120: mol_type = other DNA
cccaacccccaggccacggacccattaggaaccaggtcacacagcaggaggtgagcagcgggtgggcaggcaacactttatctgtatttacagccactctccagggcttgcattaccgcc

SEQ ID NO: 49535 - DNA, 120 bp, synthetic construct; identical to SEQ ID NO: 13851
  source 1..120: mol_type = other DNA

SEQ ID NO: 49536 - DNA, 120 bp, synthetic construct
  source 1..120: mol_type = other DNA
atagtgaaaccccgtctctactaaaaatacaaaaattagccgggtgtgtggcacatgcctatagtcccaactacttgggaggctgaggcaggagaattgcttgaactctggaagcagagg

SEQ ID NO: 49537 - DNA, 120 bp, synthetic construct
  source 1..120: mol_type = other DNA
tgtgcttaactcatcctgaaaccatgtcccctgccctggcctgtggaaaaattgtcttccacaaaactggtctctggtgccaaaaagaatggaaaccactgttttaaaatatataatcag

SEQ ID NO: 49538 - DNA, 120 bp, synthetic construct
  source 1..120: mol_type = other DNA
taaattggcactttctttagtgactccagaattaatgctattaccacaattgtgtagaaaacaaatccatagagtatttttctctctcatatagtaaaatatttaagaattttgtgagaa

SEQ ID NO: 49539 - DNA, 120 bp, synthetic construct
  source 1..120: mol_type = other DNA
gcagtggcacgatcttggctcactgcaacctccacctcctgggttcaagcaattctcctgcctcagcctcctgagtagctgggattacaggcatgccccaccacgcccagctaatttttg

SEQ ID NO: 49540 - DNA, 120 bp, synthetic construct; identical to SEQ ID NO: 13852
  source 1..120: mol_type = other DNA

SEQ ID NO: 49541 - DNA, 120 bp, synthetic construct
  source 1..120: mol_type = other DNA
aaaaaccagcagcttcctgtgcctttcaaaggacttttaaatgagcttgaagctcctttatgtgcttctgaaaagaacattaaggtattcatgcccatatttcaaaagagcaagcaatta

SEQ ID NO: 49542 - DNA, 120 bp, synthetic construct
  source 1..120: mol_type = other DNA
aaaagctcacacagttttagaaacaggccgataaagctgcacccacctagagagtggggacaagtattcttttcctctttgatatgaaaggaaactgaaaaagaagagttaaaaagaacc

SEQ ID NO: 49543 - DNA, 120 bp, synthetic construct
  source 1..120: mol_type = other DNA
ccaaatagacctaagatgggggtcttaaaatttttgtgaggaagaaatgccactcattggcaactaataaaaggctttttctctgggcaattgcattgctgatagaaactgacttttaaa

SEQ ID NO: 49544 - DNA, 120 bp, synthetic construct; identical to SEQ ID NO: 13853
  source 1..120: mol_type = other DNA

SEQ ID NO: 49545 - DNA, 120 bp, synthetic construct
  source 1..120: mol_type = other DNA
ttccctatcggatcatttcaaatagcttatctgaataggattttactgggaaaaaaatgacaagcccatatttctgacatttaaatcactcaaagcagtaatttctgtggagtgagcttc

SEQ ID NO: 49546 - DNA, 120 bp, synthetic construct
  source 1..120: mol_type = other DNA
gaacctactaagcagcctcccttgaatagtattgatctagggttatgctctgcaagatatctgccattcactgtctgcttctatcttagaaaaaaataagaaaaatgaaaaacagtttag

SEQ ID NO: 49547 - DNA, 120 bp, synthetic construct
  source 1..120: mol_type = other DNA
caaaaatagcatcaattattttacccatgttacttctaattaaacatgtcttctttcaaatactctacaaatcataaaaagagccagatcattaaagagttttgctaaggcagttttcat

SEQ ID NO: 49548 - DNA, 120 bp, synthetic construct; identical to SEQ ID NO: 13854
  source 1..120: mol_type = other DNA

SEQ ID NO: 49549 - DNA, 120 bp, synthetic construct
  source 1..120: mol_type = other DNA
tctggaggaagcggaagtctgaaatcaaagtattgatagggttctttctgaggcctgtgagggaagaatctgtttaagcttctctctttggcttgtagatggctggcttcatgttaacat

SEQ ID NO: 49550 - DNA, 120 bp, synthetic construct
  source 1..120: mol_type = other DNA
ctatgaccaattaagatcatactctgagtttctgggaattagaacttcaacataaggttgtgggaagatacaattcaacctatgacaaatgttatatggtctcctcaccatacaataaaa

SEQ ID NO: 49551 - DNA, 120 bp, synthetic construct; identical to SEQ ID NO: 13855
  source 1..120: mol_type = other DNA

SEQ ID NO: 49552 - DNA, 120 bp, synthetic construct
  source 1..120: mol_type = other DNA
atttgaccagaaattaaatgcagctatttgtccaaattattcattttttcaataaattgaaatattagattctttaaataagattttaacattcaaataaccctattatttttaccttat

SEQ ID NO: 49553 - DNA, 120 bp, synthetic construct
  source 1..120: mol_type = other DNA
gagctttcagagaaagctctactataggttgtagcttttatataatttaattacatcatgtcattttaaaaattgttaaattaaaatatttacaataaaatgtttctccaaaggaaaccc

SEQ ID NO: 49554 - DNA, 120 bp, synthetic construct
  source 1..120: mol_type = other DNA
aatgaaattctggttatgtttgttaaatgattctacaataatttattcaacaaaatccactaccctcagaacctaaaatacagggatcattttaggattaataaacaactgaaaatttat

SEQ ID NO: 49555 - DNA, 120 bp, synthetic construct; identical to SEQ ID NO: 13856
  source 1..120: mol_type = other DNA

SEQ ID NO: 49556 - DNA, 120 bp, synthetic construct
  source 1..120: mol_type = other DNA
gaattcataataatgttaaaatgtgtgttatagcaaaatagcaacatttcctggtgtcctgcaaattatttctcatgaaatttaaactgagaataatctataacatctaagtcttaatta

SEQ ID NO: 49557 - DNA, 120 bp, synthetic construct
  source 1..120: mol_type = other DNA
atgaaacaggattttattattttttatatgacactttctgcagtcatatccttctcagactgtacgatctaaagcaagctcttggtaaatgggacaaagccaatttgccctgcagtggat

SEQ ID NO: 49558 - DNA, 120 bp, synthetic construct
  source 1..120: mol_type = other DNA
aaagagatttggaaatcgaagtgagaaattaaaagcatacaagtaaaggcatactaccttttattgtgcttcactttatcacattgcagatcctgcacttttacaaattgagggttgtag

SEQ ID NO: 49559 - DNA, 120 bp, synthetic construct
  source 1..120: mol_type = other DNA
tctgttacagtgatctgtgatcagtgatttctgacgttactgttgtatttgtttgcacccattaattgtttacaggctccatgaatcccacccattcaagaaggtgaacttgattgataa

SEQ ID NO: 49560 - DNA, 120 bp, synthetic construct; identical to SEQ ID NO: 13857
  source 1..120: mol_type = other DNA

SEQ ID NO: 49561 - DNA, 120 bp, synthetic construct
  source 1..120: mol_type = other DNA
gaaaattcaagtgttctgaatagatcaaaccaaccaaaacactcccttcagccaaagcctaatccagaccaaggcactaactctcttcaattctgtgaaggcttagagaagtaaggaagc

SEQ ID NO: 49562 - DNA, 120 bp, synthetic construct
  source 1..120: mol_type = other DNA
cgaggtgtccagaagatctagctaagatgatggatgaaaatggctacactaaacaacaaactttcaatgtggatgaaacagccttatattgaaagaagatgccatttaggatttttataa

SEQ ID NO: 49563 - DNA, 120 bp, synthetic construct; identical to SEQ ID NO: 6391
  source 1..120: mol_type = other DNA

SEQ ID NO: 49564 - DNA, 120 bp, synthetic construct
  source 1..120: mol_type = other DNA
tagagatgtttaaggagattaatgttgtttttgatgccccctaacacaaaaatcttttctgtggcccatggatcaaagagtaatttttatttctagagttattttttaagaaatacgttt

SEQ ID NO: 49565 - DNA, 120 bp, synthetic construct
  source 1..120: mol_type = other DNA
aaatatcaacattatcaggatttccttaacagttgattccaaccctcatgatcactttaaggggttcaagacttccgtggaggaaacaactgcagatgtaatagaaataggaagagatct

SEQ ID NO: 49566 - DNA, 120 bp, synthetic construct
  source 1..120: mol_type = other DNA
ctactgctggtaaagatgctgtgaacactgttgaaatgacaacaaaggatttagaatattttataaacttagtaaattaaaaaactggcctagttgtagaggattatctccaatattgaa

SEQ ID NO: 49567 - DNA, 120 bp, synthetic construct; identical to SEQ ID NO: 13859
  source 1..120: mol_type = other DNA

SEQ ID NO: 49568 - DNA, 120 bp, synthetic construct
  source 1..120: mol_type = other DNA
ccaaagaattagtgtgatttgttttaatgagataatggctttattgcagtgatctggacctaaatctgaagtatcttcaaggtattcctgtattattttttcctttgaagatgactttag

SEQ ID NO: 49569 - DNA, 120 bp, synthetic construct
  source 1..120: mol_type = other DNA
aagaagagtttgctggggaccctagaggtatcacttcatttgtctaaaaactagtcattttctgcaaatgtaaatcagggactgaccctcccttctacagtgaccaagatcaatggaaag

SEQ ID NO: 49570 - DNA, 120 bp, synthetic construct
  source 1..120: mol_type = other DNA
tgaaagcatgtaatattcaaggtaaatagcagtactcagtaagtgcccttaagggaatgtaccctatagcaaaatcctaagtgcaatagacacgctatcgtgaggttgaagcaaaaataa

SEQ ID NO: 49571 - DNA, 120 bp, synthetic construct; identical to SEQ ID NO: 13860
  source 1..120: mol_type = other DNA

SEQ ID NO: 49572 - DNA, 120 bp, synthetic construct
  source 1..120: mol_type = other DNA
acagtggcagagttgagcaagagtgatatagaccatacagcccacaaaacctaaaacatttactaacaggccctttacaaaaagagttcgccaatttctgctcttttaatctagaaaagt

SEQ ID NO: 49573 - DNA, 120 bp, synthetic construct
  source 1..120: mol_type = other DNA
aaagtagtgctaggatgggacagtgctgggtttgaatcctaactttgtactagcatctgcacctcggtgttctctataaaacagatcattaaaactacctcataggatgatcataaaaaa

SEQ ID NO: 49574 - DNA, 120 bp, synthetic construct
  source 1..120: mol_type = other DNA
ctacaatgtctctctgaggggaaattacttcagctctatccatttattctttgctctgtacatgaaattctaaaattctgagattaaactgctttttcgtggatatgatcattggggtta

SEQ ID NO: 49575 - DNA, 120 bp, synthetic construct
  source 1..120: mol_type = other DNA
gctaaactcattcataactaccattgcaataaagccatgagatgtaaataattcagaaatttatttcttcaaccaatgttcagaatgcataataggtaaaactatgcattttcattcatg

SEQ ID NO: 49576 - DNA, 120 bp, synthetic construct; identical to SEQ ID NO: 13861
  source 1..120: mol_type = other DNA

SEQ ID NO: 49577 - DNA, 120 bp, synthetic construct
  source 1..120: mol_type = other DNA
agcttcagttctttcaggaagccatggatatatgcctccgagatgagataaatgtccttcctggatgtttccagaataccctttttgcacatattggcatattatattgcaattgcctgt

SEQ ID NO: 49578 - DNA, 120 bp, synthetic construct
  source 1..120: mol_type = other DNA
gagttgaatactgaatgccacatgatgccttttatggaatagatgctccaaaaatgtgtactgtattagaaatgaacccctttgtgcccttttgtgttaccgttcccaggcatttattcc

SEQ ID NO: 49579 - DNA, 120 bp, synthetic construct
  source 1..120: mol_type = other DNA
gtagaacaccattgaatcttagccactgcaatagaatctccaggagtaggagctgagaaaggaggaatgccctcctcagaatggaacccgggttgggtgtgtaaaggggaaagatttagc

SEQ ID NO: 49580 - DNA, 120 bp, synthetic construct; identical to SEQ ID NO: 13862
  source 1..120: mol_type = other DNA

SEQ ID NO: 49581 - DNA, 120 bp, synthetic construct
  source 1..120: mol_type = other DNA
ttcataagtacagggataattctactgtccagtttttgcttcccacatttaaactctagagaaaagaattctgcctttgtttagcacaattacatctattgaatagtattatatgcactt

SEQ ID NO: 49582 - DNA, 120 bp, synthetic construct
  source 1..120: mol_type = other DNA
tgtatctacctaattccttattttttccccactctctcaccagaaaaagtagacaatttatctgtgttattataaaaggctggccaagaaaggctatttaaagtataccataatcaattt

SEQ ID NO: 49583 - DNA, 120 bp, synthetic construct
  source 1..120: mol_type = other DNA
acagcagagatagaatttaagtaggtaacaaaatgtcctgcattgacaagtctgacttttgaggaccaaaatttatcaactttctatgaacagcataatgctttaccttacaacaggtta

SEQ ID NO: 49584 - DNA, 120 bp, synthetic construct; identical to SEQ ID NO: 13863
  source 1..120: mol_type = other DNA

SEQ ID NO: 49585 - DNA, 120 bp, synthetic construct
  source 1..120: mol_type = other DNA
tcccagttttgatctacatgaactggggaactctaagctggcaggtaacaaaagaccacttcaaaagtttttacttgtttgttaggttaacaatattatattaatacatttgtgcaacac

SEQ ID NO: 49586 - DNA, 120 bp, synthetic construct
  source 1..120: mol_type = other DNA
gtactggaaaatggtggtatcaagactagaactcagagagctagactttatcaattctattagctggaactaaggtatcaagaataattgtaaatacctaatgaatggtaactatatgtc

SEQ ID NO: 49587 - DNA, 120 bp, synthetic construct
  source 1..120: mol_type = other DNA
aacctaaatgcccatcaaccaacaaatgataaaatgtggcatacataccccatggaataccactcagccataaaacagaatcacgtaatggccattccagcaacttggatggagctgggg

SEQ ID NO: 49588 - DNA, 120 bp, synthetic construct; identical to SEQ ID NO: 13864
  source 1..120: mol_type = other DNA

SEQ ID NO: 49589 - DNA, 120 bp, synthetic construct
  source 1..120: mol_type = other DNA
atttccttccatgtgaagggtactgctgacaacacagagaaactgaactccatgaaaatcatactacttaggataaacttccctctccctgcacttatggtggaaagagcaccttttaaa

SEQ ID NO: 49590 - DNA, 120 bp, synthetic construct
  source 1..120: mol_type = other DNA
ttcatgctattacttcagccaaaggacagttatttaaaaaaaaatcagtatgtgatttagatttatgagattatgcagcagcactaaactgaattttaatgttggatgtattatttaatc

SEQ ID NO: 49591 - DNA, 120 bp, synthetic construct; identical to SEQ ID NO: 13865
  source 1..120: mol_type = other DNA

SEQ ID NO: 49592 - DNA, 120 bp, synthetic construct
  source 1..120: mol_type = other DNA
atttacatatatacctgttttactctttttttttctgtattgaggtctgtgatgatttttcaagacactttattttggtatttgttttgtttttataccatagctaaatattataaaatg

SEQ ID NO: 49593 - DNA, 120 bp, synthetic construct
  source 1..120: mol_type = other DNA
ttatgataatgaaaaagacggacctagactctatactccttaatttttaaagatttgagattctttatactttgcttactgccattgtccatgttccatagattctgaaccctttgctga

SEQ ID NO: 49594 - DNA, 120 bp, synthetic construct
  source 1..120: mol_type = other DNA
cacagcatgcatttctgaagatatcattgggcataaactgaaattagcaattcacatgcatctaataatctacttttctcaaatgcatcagttccaataatgtactcacccctactgata

SEQ ID NO: 49595 - DNA, 120 bp, synthetic construct; identical to SEQ ID NO: 13866
  source 1..120: mol_type = other DNA

SEQ ID NO: 49596 - DNA, 120 bp, synthetic construct
  source 1..120: mol_type = other DNA
aaagcttaaagaatgaaagaagcctacattcatgacattgcaggtctattcacattgccggaggcaaagacacttgtagcaaaatggagagggaaaaggataaagagataggtaggcaga

SEQ ID NO: 49597 - DNA, 120 bp, synthetic construct
  source 1..120: mol_type = other DNA
cttatttaaacagctgggcacagtagttggggtaagactcagaagctaaattagaagattttgcagaaatctagggtttttgtgataagaggccaaactctcagaatgacacgaagaata

SEQ ID NO: 49598 - DNA, 120 bp, synthetic construct
  source 1..120: mol_type = other DNA
gtgttgggaggggtaatgatatgataaatcgagggtggggaaggtcaatgatttgattattagtgttctatttctagaaagtaggtaaataaacagacagtggtgtcattcaccactacg

SEQ ID NO: 49599 - DNA, 120 bp, synthetic construct; identical to SEQ ID NO: 13867
  source 1..120: mol_type = other DNA

SEQ ID NO: 49600 - DNA, 120 bp, synthetic construct
  source 1..120: mol_type = other DNA
tttattctaaatgatacattgtcaaaataaatattttaataattatttaataattattatttccatcaaataattatttatatataaatatatatttatatataatacatataaacacac

SEQ ID NO: 49601 - DNA, 120 bp, synthetic construct
  source 1..120: mol_type = other DNA
agaaataagcagatattttagaagaaagcctgaaataattgacataacacatcagatgtgtaagatgattcatatgattcaagacggtttagtgatggcagccaacaacaaataaagatg

SEQ ID NO: 49602 - DNA, 120 bp, synthetic construct
  source 1..120: mol_type = other DNA
gccaagtgtggttgtatagacttataacccagctactcaggagactgaggcaggagaattgcttgaacctgggaggcggaggttacagtgagccgagattgtgccactgtactctagcct

SEQ ID NO: 49603 - DNA, 120 bp, synthetic construct; identical to SEQ ID NO: 13868
  source 1..120: mol_type = other DNA

SEQ ID NO: 49604 - DNA, 120 bp, synthetic construct
  source 1..120: mol_type = other DNA
tcctgtgaataaagaatttgctaaatatatttatagtgcaagcaagataaaaatgacatttaatgaaattataaagaacaaaattaaataatttagtagaatgagaaagaccgtaaggag

SEQ ID NO: 49605 - DNA, 120 bp, synthetic construct
  source 1..120: mol_type = other DNA
cattttatataagtgcataaatacatctgaccaaatatagacttctattgaacaagcatggtttttttccctttgtttcctatttgctttttttatgccataatttgttgtaccatagat

SEQ ID NO: 49606 - DNA, 120 bp, synthetic construct
  source 1..120: mol_type = other DNA
agtcaacacttttattgttttatttttatatttaagatgttattctttcagtagttactcatatatggtagaaacagaggttcactgattttcttcctgatatataaatgtgtccatgca

SEQ ID NO: 49607 - DNA, 120 bp, synthetic construct
  source 1..120: mol_type = other DNA
tacagttataaattatgggttagatgtgctagttatattgcttctaataagtattcaaagaaatgtatgactattaaaatagaaatgctcatctttatactatatacaatcatctttacc

SEQ ID NO: 49608 - DNA, 120 bp, synthetic construct; identical to SEQ ID NO: 13869
  source 1..120: mol_type = other DNA

SEQ ID NO: 49609 - DNA, 120 bp, synthetic construct
  source 1..120: mol_type = other DNA
aagtaaatatgcttcgtagactaaactcaatgggacttataaaagcagcattgtgctggaaggacataaactcactattgttggtaaaaaataaaataggttattaatgttgatatatgc

SEQ ID NO: 49610 - DNA, 120 bp, synthetic construct
  source 1..120: mol_type = other DNA
attttcagcacatggccctctgctgtatcaaacaagcgtttggataaaggttgtagtctctccgcacatggcttgtgtttgaatttacaaacatgtcatttgtgttgctgcagcaagatt

SEQ ID NO: 49611 - DNA, 120 bp, synthetic construct
  source 1..120: mol_type = other DNA
attaaagcctctttcctttactgttaagctatttcatggcttcacagtctactatgttctagacatgtaactttattaatggcacattcagatttatgctttctcttttagtcttttttt

SEQ ID NO: 49612 - DNA, 120 bp, synthetic construct; identical to SEQ ID NO: 13870
  source 1..120: mol_type = other DNA

SEQ ID NO: 49613 - DNA, 120 bp, synthetic construct
  source 1..120: mol_type = other DNA
tatttagtatctctgtactttaagttccttatctttaagtttcattattaatatgctctatcttctagggcagctatgataatttaatttaaaaaatacttgtcagtcacttgcaattct

SEQ ID NO: 49614 - DNA, 120 bp, synthetic construct
  source 1..120: mol_type = other DNA
atcagtgagaattgaaagcaacttagtaaagggctatatatttcaaatatatggttataactcatttgaatttggcaaaatttatcctgaaatgtgtaggcatttcacaaaagaaacaat

SEQ ID NO: 49615 - DNA, 120 bp, synthetic construct; identical to SEQ ID NO: 13871
  source 1..120: mol_type = other DNA

SEQ ID NO: 49616 - DNA, 120 bp, synthetic construct
  source 1..120: mol_type = other DNA
gaggcaggcagatcacttgaggtcaggaggtcatgaccagcctggccaacatggtgaaaccccgtctctactaaaaatacaaaaattagcagggcatggtggtgtgcgcctgtaatccca

SEQ ID NO: 49617 - DNA, 120 bp, synthetic construct
  source 1..120: mol_type = other DNA
acaaaaacaaaaagaatggaagcagtattcaacaaaaaaggatcagctaagtaaacaatataatgaaatacaatatatccatgcatatatatgtggagtaaaacttatatttactgatag

SEQ ID NO: 49618 - DNA, 120 bp, synthetic construct
  source 1..120: mol_type = other DNA
atagttataatgatgagtgtatcttttttctattttctgtactttcttacttttataactcaagcatatgttatttgtgtatttataaaaaaagaaatccatcttgccaatctcaaactg

SEQ ID NO: 49619 - DNA, 120 bp, synthetic construct; identical to SEQ ID NO: 13872
  source 1..120: mol_type = other DNA

SEQ ID NO: 49620 - DNA, 120 bp, synthetic construct
  source 1..120: mol_type = other DNA
tctattcctagctccttctactgtatctagctaaaaaaggaggcactcggtatatgattgttcagtggatggatgatatataagaaactttccaaataattagaagtaaatttatactag

SEQ ID NO: 49621 - DNA, 120 bp, synthetic construct
  source 1..120: mol_type = other DNA
agtgaacggaatgatttcttgcatgcaatagctattaagagtctccaaaatatactgaagtttcacaagtgccatgtctaatgatgcctcagtaaatgccagggtattaaaaatgttaga

SEQ ID NO: 49622 - DNA, 120 bp, synthetic construct
  source 1..120: mol_type = other DNA
cctctattgcttcctgatgcttgataacatcacttatgttgcccaggaagagctttgagttactgatgactctcattccatgtcgctatgtgttcattcactctgcaatgatttactgaa

SEQ ID NO: 49623 - DNA, 120 bp, synthetic construct
  source 1..120: mol_type = other DNA
tataaatgaacaattgtatctgtgacaaatgctacaaatgagacatatccatgctatgagagcctataatgtaccttcattttaaacagcgacagttggactatgagtagaagttaatgc

SEQ ID NO: 49624 - DNA, 120 bp, synthetic construct; identical to SEQ ID NO: 13873
  source 1..120: mol_type = other DNA

SEQ ID NO: 49625 - DNA, 120 bp, synthetic construct
  source 1..120: mol_type = other DNA
agcacaacaatagaaaaataacacaagggcccaataagctgaatcaactctgagaagactatttaccttagtcatttgtgagcattcttagagctgaaagaagtaatttacttaggaact

SEQ ID NO: 49626 - DNA, 120 bp, synthetic construct
  source 1..120: mol_type = other DNA
aatacttttggaataaccaagagaactgaattgagtagaacaaaaattacgctatattcacaagatatgagagggcaaaaaagaacaatgtaacagttgcccacactgtagtctgcttaa

SEQ ID NO: 49627 - DNA, 120 bp, synthetic construct
  source 1..120: mol_type = other DNA
agcgctcccataatgtttgatcaacataagataaaagaaataaattcatatttatgatgtcctattatgtataagacagtgctggtactttcatatatatagtatatgaactgtcattgt

SEQ ID NO: 49628 - DNA, 120 bp, synthetic construct; identical to SEQ ID NO: 13874
  source 1..120: mol_type = other DNA

SEQ ID NO: 49629 - DNA, 120 bp, synthetic construct
  source 1..120: mol_type = other DNA
ttcttggttcaaacctttcaacttaagtcaaaagctaagaacgatgttcaagattagtgttctacaaaacaaagagtctctataaagacagtggtgatctgccattttcaagttcgaaaa

SEQ ID NO: 49630 - DNA, 120 bp, synthetic construct
  source 1..120: mol_type = other DNA
acccggtctctactaaaaatacagaaaaaaaaaagttatctggggtggggggaggggggagggatagcattaggagatatacctaatgctaaatgatgagttaatgggtgcagcacacca

SEQ ID NO: 49631 - DNA, 120 bp, synthetic construct; identical to SEQ ID NO: 13875
  source 1..120: mol_type = other DNA

SEQ ID NO: 49632 - DNA, 120 bp, synthetic construct
  source 1..120: mol_type = other DNA
caagatgaagacatcttgacataagtatggttaggcacaagtagttttctaaggaaaatattgagtaccagtgcgtggaaatatttaactatagggtagatattaattttctttgacttt

SEQ ID NO: 49633 - DNA, 120 bp, synthetic construct
  source 1..120: mol_type = other DNA
ctcacagtttaagcatattcctgcctagggacagtagacagactagaagtagtctccaggcacataattttttaacatgaataacacttgtgtcttatatgaaactgcttgaggtggtct

SEQ ID NO: 49634 - DNA, 120 bp, synthetic construct
  source 1..120: mol_type = other DNA
caaggaaaagtagtacatttggttaatgacctaaaataagtacaaaggacgactgcatcatccttcacttaccaaagcattgggaaattttatgcattgaacaaatctgaggctcatatt

SEQ ID NO: 49635 - DNA, 120 bp, synthetic construct
  source 1..120: mol_type = other DNA
caacttacattaaaactgggaaacatttccaatttcaattaaaataaacgtaatgatttggtatcagtttaatgaataaatacatttcagcatatatttgcacgttttatgtttcctaat

SEQ ID NO: 49636 - DNA, 120 bp, synthetic construct; identical to SEQ ID NO: 13876
  source 1..120: mol_type = other DNA

SEQ ID NO: 49637 - DNA, 120 bp, synthetic construct
  source 1..120: mol_type = other DNA
tatcattgaaaggtgaaaaaattgtttttagatttggcaggattgaaactatttgatgccacataacaatgaatatgagttggatggcacacaaataaccagtattgtgaactttccttc

SEQ ID NO: 49638 - DNA, 120 bp, synthetic construct
  source 1..120: mol_type = other DNA
ctcacaggatatccattggtttattcatttcagttgaaacctagagactggaagctaaagcagagttattttctagtcaccctttaagatgctctaggatattgctactcaaactgtgct

SEQ ID NO: 49639 - DNA, 120 bp, synthetic construct; identical to SEQ ID NO: 13877
  source 1..120: mol_type = other DNA

SEQ ID NO: 49640 - DNA, 120 bp, synthetic construct
  source 1..120: mol_type = other DNA
attaaaactagctactgactttaagctactgttatactattacactattatatataaaaatacaattttagaaaattatttttaattacacttattgaagatatttatatcaatattata

SEQ ID NO: 49641 - DNA, 120 bp, synthetic construct
  source 1..120: mol_type = other DNA
attaaagacttaaatgtaaggcctgaaaccatgaaactacaggaaaatttaggggaattcctttaaggcaatggtctgggaaaacattttatggaaaagaccacaaaagcacaggaaaca

SEQ ID NO: 49642 - DNA, 120 bp, synthetic construct
  source 1..120: mol_type = other DNA
ttttataagatattaatgtccagaatatacaagaaactcaaacaatagcaaaaacaaataataaacaaatagtgtgattaaaaacctggcaaatgaactgaatagacatcgctcaaaaga

SEQ ID NO: 49643 - DNA, 120 bp, synthetic construct; identical to SEQ ID NO: 13878
  source 1..120: mol_type = other DNA

SEQ ID NO: 49644 - DNA, 120 bp, synthetic construct
  source 1..120: mol_type = other DNA
caagatatgtaatcaacctaagtatccatccacagatgaatgaagaaagcaaatgtggtgtatgcgtctgtgtgtgtatatatgaataatggaatgtgtgtgtgtatgtgtgtgtgtgta

SEQ ID NO: 49645 - DNA, 120 bp, synthetic construct
  source 1..120: mol_type = other DNA
tgagctatgtcaagtgagataggctagacacaaaaagacaaatattatttgttctcactcatatgtggaagctataaaagttgatctcatagacgtagagagtagaatagtggttactag

SEQ ID NO: 49646 - DNA, 120 bp, synthetic construct
  source 1..120: mol_type = other DNA
aacaattttttgcatatttttaatagctagaataatggattttgaatattcccaacaaaaagaaatgataaatatttgatgtgatgaacatgctaattaccctgatttgatcattataca

SEQ ID NO: 49647 - DNA, 120 bp, synthetic construct; identical to SEQ ID NO: 13879
  source 1..120: mol_type = other DNA

SEQ ID NO: 49648 - DNA, 120 bp, synthetic construct
  source 1..120: mol_type = other DNA
aaattatatccataatatacgttatactttacattatttataaagcaggtttgcaaaaaaaaaaaaatcaaatgttttcttttagtgcttcatgcagtgtctgatatgttgtaggaactc

SEQ ID NO: 49649 - DNA, 120 bp, synthetic construct
  source 1..120: mol_type = other DNA
atgatttcttaccacttacaattttgctctgttgttattgttgttttccttcctgaatattttcttttaatactcctcatcaaaggtatgtctacattctgccctttaaataacatccag

SEQ ID NO: 49650 - DNA, 120 bp, synthetic construct
  source 1..120: mol_type = other DNA
tcttgtatcccacattctgatccccatttttttttctctaagtagtcttatttggaagatgtttaagcacaaagattgtttcagaagtttaaaatctgcatgattttatgcaaggattag

SEQ ID NO: 49651 - DNA, 120 bp, synthetic construct; identical to SEQ ID NO: 13880
  source 1..120: mol_type = other DNA

SEQ ID NO: 49652 - DNA, 120 bp, synthetic construct
  source 1..120: mol_type = other DNA
attgcatgtaggtggctgaatatatatacaaacaccattgattatagaacaagtcacagtttgtatttcagaaatgcctgttgagttgaatggaagcaggttcaatgtagcaatattaag

SEQ ID NO: 49653 - DNA, 120 bp, synthetic construct
  source 1..120: mol_type = other DNA
ctagataacttcatttcttggcttgaaagtcattgctacagaaagaataatcttgttcgtcaatgtatcattagttgtcacaatcatgagctctgtgaccttgataaaggaactcctttt

SEQ ID NO: 49654 - DNA, 120 bp, synthetic construct
  source 1..120: mol_type = other DNA
cccaggctggagtgaagtggtgcgatgttggttcactgcaacctctgtctcccgggtcctagtgattctcctgcctcagcctccaagtagctgggatgacaggtgcccgccaacacaccc

SEQ ID NO: 49655 - DNA, 120 bp, synthetic construct
  source 1..120: mol_type = other DNA
gagccactgcactgggcccaggaaaaataaatttgccattctcctatgctaattttatatgagccctctaaaaatttgtcttccagtgagtaagagagagttatagtaatcagatacaca

SEQ ID NO: 49656 - DNA, 120 bp, synthetic construct; identical to SEQ ID NO: 13881
  source 1..120: mol_type = other DNA

SEQ ID NO: 49657 - DNA, 120 bp, synthetic construct
  source 1..120: mol_type = other DNA
ccagataattcagggtcctctctcccgctcgaggttcttaataaaaccacatctgcaaattctcttttccaggtaaggtaacatatttacagattctggggattaggacatgaatatttt

SEQ ID NO: 49658 - DNA, 120 bp, synthetic construct
  source 1..120: mol_type = other DNA
tcaaaatccatggctcacaaccgtgtatcttttgggcattctaatttaaaaaatgcccattcacatttgcaaaattgtcaagttgtgtgacaaccttagttgagaatctgcttttttctc

SEQ ID NO: 49659 - DNA, 120 bp, synthetic construct
  source 1..120: mol_type = other DNA
ttaaatatattttactaaaggaataaatgtgtaaataaatcaatgatgaaactgaagaagtataacaattataaaattgcctagcgtcatgttgaatttggctgaaacaactgtacacta

SEQ ID NO: 49660 - DNA, 120 bp, synthetic construct; identical to SEQ ID NO: 13882
  source 1..120: mol_type = other DNA

SEQ ID NO: 49661 - DNA, 120 bp, synthetic construct
  source 1..120: mol_type = other DNA
tctctttcattatgggcctgcctccaggctgctttaattttttcacagcatagtttcaaaagcaggtatcccaaaccagcaacctggatatgtctggtatttttatgatctaaccttgga

SEQ ID NO: 49662 - DNA, 120 bp, synthetic construct
  source 1..120: mol_type = other DNA
ctctcaagagaagaagagtcaagatcacagtataagaagaacacatgagatgggaaatcttgctgcagccacttttgaaaaatacaatctgtcacatacagacatccatatatgaaataa

SEQ ID NO: 49663 - DNA, 120 bp, synthetic construct; identical to SEQ ID NO: 13883
  source 1..120: mol_type = other DNA

SEQ ID NO: 49664 - DNA, 120 bp, synthetic construct
  source 1..120: mol_type = other DNA
tgagttttaagccactatactacatgattgatttggatctttatccctaattaattggaattagtagggaatttgtttttaaagtctatatgtagttaactagggttgcggctttaaaac

SEQ ID NO: 49665 - DNA, 120 bp, synthetic construct
  source 1..120: mol_type = other DNA
ataagtgcccaggtgatgttgacactgctggtctggggactacacactgacaaactctgatctgggagaataaaacttattcggaattttctcaaagttgttatgtccatatagctcaca

SEQ ID NO: 49666 - DNA, 120 bp, synthetic construct
  source 1..120: mol_type = other DNA
taaatggagatagattatcttttaatccttcttttctcacacactgaggcagagttaggctttccacctcagtaaaacctccttccgttaaattgaatattgaataatttctgagagctt

SEQ ID NO: 49667 - DNA, 120 bp, synthetic construct
  source 1..120: mol_type = other DNA
atgttaacaatagcaatattctaataaagccagcaagtcaaattaaagatgatgtccattggataaaagtgtaccaaggatcctagaaggaggagcctcaacaagcaaaaactcagttgc

SEQ ID NO: 49668 - DNA, 120 bp, synthetic construct; identical to SEQ ID NO: 13884
  source 1..120: mol_type = other DNA

SEQ ID NO: 49669 - DNA, 120 bp, synthetic construct
  source 1..120: mol_type = other DNA
aaaaacaggacgtttctaggagacacccacaaggtcaccctttctccacattttccaattagatttaaacaatccagtttgagtgagcaaggtgtcttcttcatgctgaattcaactttt

SEQ ID NO: 49670 - DNA, 120 bp, synthetic construct
  source 1..120: mol_type = other DNA
ctattggataaacagtgacttttatgcaatgaaacactgtacagaaagaaaaataacaaactctagctacatacaacaacatagatgactcttataaacaaaatgaggaattaatgcagc

SEQ ID NO: 49671 - DNA, 120 bp, synthetic construct; identical to SEQ ID NO: 13885
  source 1..120: mol_type = other DNA

SEQ ID NO: 49672 - DNA, 120 bp, synthetic construct
  source 1..120: mol_type = other DNA
tgagaatctttttaaatgaaagttatagtgcatatgcctggctctctggcctccccttccaactccttaacctcttctgcttctgccaccactgggacagcaaaccaatccttcctcttt

SEQ ID NO: 49673 - DNA, 120 bp, synthetic construct
  source 1..120: mol_type = other DNA
ttttcctttccctagcttacttcattgtaattatctctctctctctatatatatatacagacacacacacacacacacacacacacacaggcacacgcacacacatataacatacaaaat

SEQ ID NO: 49674 - DNA, 120 bp, synthetic construct
  source 1..120: mol_type = other DNA
atatgtgaattttcgactggtaagtcggtgtccttacccttgtgttgttcaagagtcaaccgcatatgtgagttatgaaactttcagagtctgtattttactaaaatgaatttttaagaa

SEQ ID NO: 49675 - DNA, 120 bp, synthetic construct
  source 1..120: mol_type = other DNA
gcgggacagcattattcagtaatcaccacagtgtcctaattctttttacacttgtatatagagttcttgcgcattttggcctctagctcagtattacctaacaacttaattttaagcaag

SEQ ID NO: 49676 - DNA, 120 bp, synthetic construct; identical to SEQ ID NO: 13886
  source 1..120: mol_type = other DNA

SEQ ID NO: 49677 - DNA, 120 bp, synthetic construct
  source 1..120: mol_type = other DNA
tctttttgccctgtatttccctgaggttattgtctttttttttccctttctattatagaattataagtagcaaattgaggcaaacaaataactgattggagaagcaaaatgaccttctca

SEQ ID NO: 49678 - DNA, 120 bp, synthetic construct
  source 1..120: mol_type = other DNA
gcatctatactcatctttatgttcttgttaactgtggtgtagtttatcatctctgataggaaaattttgggggtgtttatggagtcaaaattatggtgagaggtgctactgggtactaat

SEQ ID NO: 49679 - DNA, 120 bp, synthetic construct; identical to SEQ ID NO: 13887
  source 1..120: mol_type = other DNA

SEQ ID NO: 49680 - DNA, 120 bp, synthetic construct
  source 1..120: mol_type = other DNA
ttgctctttcttctgtgttcctgtcctttaatttagaaacattcttcaaatgttaacataagttctcctcctttatgtcagtccctgaccaaccaaatccatccattctcctagcttctt

SEQ ID NO: 49681 - DNA, 120 bp, synthetic construct
  source 1..120: mol_type = other DNA
aacctatctcacaatttttgtatataactttatacatacttctttcaagaaactttgaactggcagcccagtgtcagagagttacatatacaattatctcatcatttcttgaggactaga

SEQ ID NO: 49682 - DNA, 120 bp, synthetic construct
  source 1..120: mol_type = other DNA
gtttgttaggtgcatgcttatcactcagggggtcagacttttcattcctctccatccacaggtaaatgacagagtgataggaagaagataaaatactatgtctcaaagcacctgggtatt

SEQ ID NO: 49683 - DNA, 120 bp, synthetic construct
  source 1..120: mol_type = other DNA
caaatcctgagggactgggcagaaactgagcagtgaaatctggtctacttaattcaagaggtagccaaaattttccggaaactgtcagaactattatttctaatataactctcagtcact

SEQ ID NO: 49684 - DNA, 120 bp, synthetic construct; identical to SEQ ID NO: 13888
  source 1..120: mol_type = other DNA

SEQ ID NO: 49685 - DNA, 120 bp, synthetic construct
  source 1..120: mol_type = other DNA
gtaagctcaaagtagcgtatgtggggatggaaatcagcaatagaggttcaaataatgggagaacactcagatgggatgacagggaactaggaaacataataactgttaaaaacgaatcag

SEQ ID NO: 49686 - DNA, 120 bp, synthetic construct
  source 1..120: mol_type = other DNA
acccaatttcttggcaaggtaagttggtatcccagtcatcccagggctacatcccacagactactaattctcacctacttcctgtctcttttttttttttttgtcatttctgcattgatc

SEQ ID NO: 49687 - DNA, 120 bp, synthetic construct; identical to SEQ ID NO: 13889
  source 1..120: mol_type = other DNA

SEQ ID NO: 49688 - DNA, 120 bp, synthetic construct
  source 1..120: mol_type = other DNA
ttaaaaatactttgttggtggggatggttaatgggtacagaaatatagttagaaagaataatatctagcatttgatagcacaatagtgactacagtcaacagtaattcattgtacattta

SEQ ID NO: 49689 - DNA, 120 bp, synthetic construct
  source 1..120: mol_type = other DNA
tatttcatgcatcccataaatatatacacctactctgagccaacaagattgaaaataaaaaatactttattgctaaaaaatactaacaatcatgtgagccttcagtgagtcataatcttt

SEQ ID NO: 49690 - DNA, 120 bp, synthetic construct
  source 1..120: mol_type = other DNA
tcgatggactccacatttcatgaaagatgtctctgtagtatgtgacattcactgtttgataggattttacccataggagaatttcttttgaaatcagagttaatcctcttaaacccagcc

SEQ ID NO: 49691 - DNA, 120 bp, synthetic construct
  source 1..120: mol_type = other DNA
attcatagaaagcacctcctaggccaggcatggtggctcatgcctgtaatcccagcacgttgggaggccaaggtgggtggatcccttgagaccaggagttcaagaccaccttggccaaca

SEQ ID NO: 49692 - DNA, 120 bp, synthetic construct; identical to SEQ ID NO: 13890
  source 1..120: mol_type = other DNA

SEQ ID NO: 49693 - DNA, 120 bp, synthetic construct
  source 1..120: mol_type = other DNA
aatggtgatattttgacctcctgccatgaatcaaaaatattttttattgttcaattccccatgtaccctagaacttaaagtataataataacaataaaaataaaaaaatttgtaatgtaa

SEQ ID NO: 49694 - DNA, 120 bp, synthetic construct
  source 1..120: mol_type = other DNA
ttttaattttttattattttattttattttattttattttattttttgagacagagttttgctcttgttccccaggctggagtgcagtggcacgatctcggctcactgcagcctccacca

SEQ ID NO: 49695 - DNA, 120 bp, synthetic construct
  source 1..120: mol_type = other DNA
aggctggtcttgaactcctgacctcaggtgatccacccaccttggcctccaaattgctgggattataggcatgagccaccgagcctggcccacaaaatgtatttcttaaaaaatgtcttg

SEQ ID NO: 49696 - DNA, 120 bp, synthetic construct; identical to SEQ ID NO: 13891
  source 1..120: mol_type = other DNA

SEQ ID NO: 49697 - DNA, 120 bp, synthetic construct
  source 1..120: mol_type = other DNA
tcaacttgaagtcaccagctgcattattccctaacaagagtcagcctaaactttgaagctttggagccaggcattgacttctcctatctagctctgaaagtcctggatggcatcttcttc

SEQ ID NO: 49698 - DNA, 120 bp, synthetic construct
  source 1..120: mol_type = other DNA
tccaccttgcacttttatgttgtggagatggcttcttttcttaaacctcatgaaccaacctctgctagcttccaacttttcttctgcagcttccttacctctccacatcttcacagaatt

SEQ ID NO: 49699 - DNA, 120 bp, synthetic construct
  source 1..120: mol_type = other DNA
cttatcattcatgtgttcagtagcacttttaatttccttcaagaacttttcctttgcattcacaacttggctgtttggtgcaagaggcctagctttcagcctatcttggcttttggcatg

SEQ ID NO: 49700 - DNA, 120 bp, synthetic construct; identical to SEQ ID NO: 13892
  source 1..120: mol_type = other DNA

SEQ ID NO: 49701 - DNA, 120 bp, synthetic construct
  source 1..120: mol_type = other DNA
acagagacaggaaatgaacgcatgctgttggaaaaatggtggtgatagctttattcattttctttgaaaaatgcaatatctgtggcatgcaataaagcaaagtgcaataaaaagagacat

SEQ ID NO: 49702 - DNA, 120 bp, synthetic construct
  source 1..120: mol_type = other DNA
tgtgtccacattgtcaggcattcaatttggtacgtaataggtattaaaatattgaataaaaccaaacctctggcatgacatactgcttcataaatctacatctaggatgataattaatac

SEQ ID NO: 49703 - DNA, 120 bp, synthetic construct; identical to SEQ ID NO: 13893
  source 1..120: mol_type = other DNA

SEQ ID NO: 49704 - DNA, 120 bp, synthetic construct
  source 1..120: mol_type = other DNA
tattttgaacgtctgtataaatggaaactgaatctctcacatccacgagctcactaatgccctagaccatattaaaactaagtttgaaatactaagagtttttccttcttttgtttttct

SEQ ID NO: 49705 - DNA, 120 bp, synthetic construct
  source 1..120: mol_type = other DNA
cctataaagaacaggttgctccatttaaattatctttgttcttataggtcaaaatatcatgtctttaacttgtttgggtgaaaaccacatgccctagcttctggcacagataacaaatta

SEQ ID NO: 49706 - DNA, 120 bp, synthetic construct
  source 1..120: mol_type = other DNA
aattctgtgtgtctttgacagcttcacttcaggcatggagatgtggagatgtttgatgtttagagagcattaacttgtatagagcagagcaagactttattcattgcacatttgccaagg

SEQ ID NO: 49707 - DNA, 120 bp, synthetic construct; identical to SEQ ID NO: 13894
  source 1..120: mol_type = other DNA

SEQ ID NO: 49708 - DNA, 120 bp, synthetic construct
  source 1..120: mol_type = other DNA
acatgtccccaacgggtttctttttgtttgaaagaagaaaagaataatgttttaatactatctttaagctccaactaagcataactataaaaccaaaagctttactggaaaatcttaacc

SEQ ID NO: 49709 - DNA, 120 bp, synthetic construct
  source 1..120: mol_type = other DNA
gccaacagtattggaggccttaagtctctatggattcctaagcctttagtataataactgaatagcctcaattcatttttgcattgtaaaagtagcatgaattttaaattacagtcataa

SEQ ID NO: 49710 - DNA, 120 bp, synthetic construct
  source 1..120: mol_type = other DNA
tatggggtggggagaaaaatagttcctattacaaataataataaaaactacaagaaaaagcttcttaacggaacctaacaagggctgacactacacagctatattttctgctcattgtca

SEQ ID NO: 49711 - DNA, 120 bp, synthetic construct; identical to SEQ ID NO: 13895
  source 1..120: mol_type = other DNA

SEQ ID NO: 49712 - DNA, 120 bp, synthetic construct
  source 1..120: mol_type = other DNA
ctggttttcacaatctgcttttttttttttttctattttcctaaagtgaacttgagcagtaaagaataacaagaagtttcagagtcagactaatcaggtttatgtgatacctgcctttca

SEQ ID NO: 49713 - DNA, 120 bp, synthetic construct
  source 1..120: mol_type = other DNA
gacttcttaggctttcaaattgttctcaggttttcccatgacctatctcaaaaacaaactatttctaattaatgtctctaattaatgttaccaataatatgaaactaacctccagattcc

SEQ ID NO: 49714 - DNA, 120 bp, synthetic construct
  source 1..120: mol_type = other DNA
actgttcaatttagagagtaatttgcacttacgaataaatttggtgaccagagaattcactgacccatatatgttatgaaaattaaattcttattaaaagatttactctactaacaacat

SEQ ID NO: 49715 - DNA, 120 bp, synthetic construct; identical to SEQ ID NO: 13896
  source 1..120: mol_type = other DNA

SEQ ID NO: 49716 - DNA, 120 bp, synthetic construct
  source 1..120: mol_type = other DNA
ggttgctaactttttacatttcttttcatctgttctccagattttcttgttcttgttcccaggaacttatttgaagtaactgggttgtttgtactgtagaggttcccagagcctactgcc

SEQ ID NO: 49717 - DNA, 120 bp, synthetic construct
  source 1..120: mol_type = other DNA
agtcagttctagctatcattttaatggttggttgggttttgccttgtattttgccaatagtgtgccttttttgtgacttccagacttttatccatgggtctgtgcattgccctcaagtgc

SEQ ID NO: 49718 - DNA, 120 bp, synthetic construct
  source 1..120: mol_type = other DNA
tttaaaatgtacttataagactaaaaataatatatgtggtatgttgctttatcaggaaaatcaagaacatctcctggaagtgaccagggcttgaaactagtgctacatccctttgtaccc

SEQ ID NO: 49719 - DNA, 120 bp, synthetic construct; identical to SEQ ID NO: 13897
  source 1..120: mol_type = other DNA

SEQ ID NO: 49720 - DNA, 120 bp, synthetic construct
  source 1..120: mol_type = other DNA
aggtttgattgttacagaagcagtgaaacgtgattcggctaatggtaaggaaagaattccacacatagtgcaataattcttctcctgaagcctgaggttatgtaatagtttataagttga

SEQ ID NO: 49721 - DNA, 120 bp, synthetic construct
  source 1..120: mol_type = other DNA
tatatgggattcccagcaacttggatacattacattgcaaggaagataaaggactgtttatagccctaaacctgtgtgctgtttgagtgtaatccagtctgggcctgattcaacctacct

SEQ ID NO: 49722 - DNA, 120 bp, synthetic construct
  source 1..120: mol_type = other DNA
gctatatcacatacagttgtgtgaattctagcacattctttaaactctctcaacttcagcttcctattctctaaacagcaataatattagcctttattctcatttggtggccctgaagat

SEQ ID NO: 49723 - DNA, 120 bp, synthetic construct
  source 1..120: mol_type = other DNA
ttaccctaaaatcctttggagttcaactttgtcctatttctaatttatctattactctgtacctgaaacacaattctgtatttagcattatttcctttcttccactggatgaagtaagcc

SEQ ID NO: 49724 - DNA, 120 bp, synthetic construct; identical to SEQ ID NO: 13898
  source 1..120: mol_type = other DNA

SEQ ID NO: 49725 - DNA, 120 bp, synthetic construct
  source 1..120: mol_type = other DNA
atggatggaaaaggtaattgattgataggtggcataggtctactgatagagtgcttacatttcagtaatgtgtccaaaagtgattgcaagccccaggcgtgatggttcttgcctgtattc

SEQ ID NO: 49726 - DNA, 120 bp, synthetic construct
  source 1..120: mol_type = other DNA
cgtgtctttacaaaaataataataaaaaaaaaattagccaggcatggtggtgcacacctgtagtcctaactacttctgatgctgaggtagaaagattgctggaacccaggagtttgagac

SEQ ID NO: 49727 - DNA, 120 bp, synthetic construct; identical to SEQ ID NO: 13899
  source 1..120: mol_type = other DNA

SEQ ID NO: 49728 - DNA, 120 bp, synthetic construct
  source 1..120: mol_type = other DNA
tattaataaatcattccagaaaacaaaaaaaaatgcataattgatgttcagataacatagatcctatgaactgttaaggcccggaagtggaaaatgaccatcacccaagaattagatggt

SEQ ID NO: 49729 - DNA, 120 bp, synthetic construct
  source 1..120: mol_type = other DNA
atgggtaactccagaaggtcttccaaggcccttttaaacccccgcagagcaaaggcagaaacaaaagctctatttcataatcaagaattttcctgtaaaaagtcttttgaatcaaatgca

SEQ ID NO: 49730 - DNA, 120 bp, synthetic construct
  source 1..120: mol_type = other DNA
ctgaacagaggtagagaaacagaagattaagacgctcgtagctatcttaataacttgtgcagagctaaacaagaagtttttatacatagctttctttaaggcaaactaaaagcaacatga

SEQ ID NO: 49731 - DNA, 120 bp, synthetic construct; identical to SEQ ID NO: 13900
  source 1..120: mol_type = other DNA

SEQ ID NO: 49732 - DNA, 120 bp, synthetic construct
  source 1..120: mol_type = other DNA
ctctcagtaattgttattaatacgaggtgtcagactgaatttctcagtgcaaggtacaaataaggcacttcttataaatattgactaaaaatctccaacagaaattactgtgtgtccata

SEQ ID NO: 49733 - DNA, 120 bp, synthetic construct
  source 1..120: mol_type = other DNA
cttggaagttgttaagagcaccacctgtctgattttcttacagctgtcagaagcaaattttagatccacctccaaaagttttacctcaactagaaccagactgtgtctgtattcaaagta

SEQ ID NO: 49734 - DNA, 120 bp, synthetic construct
  source 1..120: mol_type = other DNA
agctttcagtaaagcattgaaacagaaaatatttattgtaacataaagatagaatttaccatttagaggaaaatgaagaatgaatttacaaaaagaaccagaattctaacacttaattgc

SEQ ID NO: 49735 - DNA, 120 bp, synthetic construct
  source 1..120: mol_type = other DNA
atataaatcatatatatgtatgtgtgttttacataccctagtaggaaaggaaaaacaaatttaaggtctccatttaaaaatatcataaagcagaaatgcttcaaattactttttaagttt

SEQ ID NO: 49736 - DNA, 120 bp, synthetic construct; identical to SEQ ID NO: 13901
  source 1..120: mol_type = other DNA

SEQ ID NO: 49737 - DNA, 120 bp, synthetic construct
  source 1..120: mol_type = other DNA
tcgatttgcatattttttttccttacttgatactatcggaaaatggtagcaataccttcagcagtgatctcagtcatggtggtcgtcaaaagtaaaagtcagttgaaaagttcccgtcaa

SEQ ID NO: 49738 - DNA, 120 bp, synthetic construct
  source 1..120: mol_type = other DNA
tgcctctcctctgcagagttctccccctggaaacaacctaagccctttccaagcagcacttgtggctcagctagaagtatcagcttcaaacaaaaatagcctcatctccctaggactctt

SEQ ID NO: 49739 - DNA, 120 bp, synthetic construct; identical to SEQ ID NO: 13902
  source 1..120: mol_type = other DNA

SEQ ID NO: 49740 - DNA, 120 bp, synthetic construct
  source 1..120: mol_type = other DNA
atgggacccctttaaactgcaagtttgccacacatggttcattcatgattgagttataaaactagattatgtcttagcaaaatctgttcctccgtaatatatttgtggtccatagaagtc

SEQ ID NO: 49741 - DNA, 120 bp, synthetic construct
  source 1..120: mol_type = other DNA
gggaaagggagggaagggttggtctgggggttctcagactctcagggtttccactgaaaggtccattccaatggttaaaccagcctacttatctcagaggatggataatgtggcgctgcg

SEQ ID NO: 49742 - DNA, 120 bp, synthetic construct
  source 1..120: mol_type = other DNA
gagcagataaggactgcaggacggcatggaagagacaggaacacgctcccctgggcacatcgaagagtcccggacaggcaaacaagccacatgggacaagggtcacagcagcagcctagg

SEQ ID NO: 49743 - DNA, 120 bp, synthetic construct; identical to SEQ ID NO: 13903
  source 1..120: mol_type = other DNA

SEQ ID NO: 49744 - DNA, 120 bp, synthetic construct
  source 1..120: mol_type = other DNA
cacctcttagtgctttcagcgagaaaaggtgagtctcattacgcagaacttttgtttgctcttcggttctttccttcttcaagtggtatgctctactatttggtagaaattcacattggc

SEQ ID NO: 49745 - DNA, 120 bp, synthetic construct
  source 1..120: mol_type = other DNA
tgtggtctcagagatcctttcatccccatgaccattttatacatcctcccctcaacaactgctagagttttatctttcccaacaaatataccagaaactatgtgtgctgttgcaaatggg

SEQ ID NO: 49746 - DNA, 120 bp, synthetic construct
  source 1..120: mol_type = other DNA
cttttacccagtaatgtgcggcatggtgggtgaatttttctaattgtcctgggtcgtaacagttcaccttctcagaacagtttggactgtttccccaaccatgtcacataagctttggct

SEQ ID NO: 49747 - DNA, 120 bp, synthetic construct; identical to SEQ ID NO: 13904
  source 1..120: mol_type = other DNA

SEQ ID NO: 49748 - DNA, 120 bp, synthetic construct
  source 1..120: mol_type = other DNA
ttttgaaaatccatcaaagttctatcagatgcagatctgtgtgtttattcacctgcagggactccggagctcatttgctctgcgtcttcctatccccctccccgctaaaactgtagtgca

SEQ ID NO: 49749 - DNA, 120 bp, synthetic construct
  source 1..120: mol_type = other DNA
agacaggtatgctcacccatagtgatttctggatggaggccatccaatcccaatatttatgaataccaagctgcttaattggtttcaaggtagactctgcccttaacgcttattgtacta

SEQ ID NO: 49750 - DNA, 120 bp, synthetic construct
  source 1..120: mol_type = other DNA
aaaaccaaaccaaacctaactactgactctggagttctttgcaacatgaaagcctacatttttaggttgggcaccttcaacatgactccaggtctcattctcccaaccgtagttgaataa

SEQ ID NO: 49751 - DNA, 120 bp, synthetic construct; identical to SEQ ID NO: 13905
  source 1..120: mol_type = other DNA

SEQ ID NO: 49752 - DNA, 120 bp, synthetic construct
  source 1..120: mol_type = other DNA
gtttcaggattcactgatgggatttccttccctttctaagtttgttcacgttttccttttctaaaacggaaccaggaaactagactgtattgggttttaagctttcctttggacaaagct

SEQ ID NO: 49753 - DNA, 120 bp, synthetic construct
  source 1..120: mol_type = other DNA
agaaagcctgcctgaacaggttttctgctggtatagctagggtgacagagtctctaactgtctagtcccctttagttagggatgctagaatatttattgccatgctaaaaaaaaaaaaaa

SEQ ID NO: 49754 - DNA, 120 bp, synthetic construct
  source 1..120: mol_type = other DNA
atgactgaatccttctattctttttaatgaaagatagaaacaggaaagccaagttcactggctccttcctaccaaatccccctgcctcagctggaacaccagaccacagttcttaggctt

SEQ ID NO: 49755 - DNA, 120 bp, synthetic construct
  source 1..120: mol_type = other DNA
gccagcattctcccggactctgtttagactgctctgccattactaacatggagagtgtgatgacatcagctccctggagagtcagcccctgaaagttggaattggtatgaaaaagctgcc

SEQ ID NO: 49756 - DNA, 120 bp, synthetic construct; identical to SEQ ID NO: 13906
  source 1..120: mol_type = other DNA

SEQ ID NO: 49757 - DNA, 120 bp, synthetic construct
  source 1..120: mol_type = other DNA
tatggagaacaggttttaccacctacacaccagcctgtggtcacaatagtaccagcattcaagcaaacaccaaataaataagaggtagtgggggaagaagagacaagagctttcccaaag

SEQ ID NO: 49758 - DNA, 120 bp, synthetic construct
  source 1..120: mol_type = other DNA
ttctagacctgctgctttagatgctgaacttcagaatcaaaaaagcagtcggaaagtctcatgtaaacgctttcatgtaaagacaaccagctttgcaggctatgtcctcctggaagggac

SEQ ID NO: 49759 - DNA, 120 bp, synthetic construct
  source 1..120: mol_type = other DNA
tattgcacaggttcaaaggacgcaaccatttgggggggaaaggaagaaagtaaagctactgaggaacaccaactggcccttggattagaacacactgcgaggtaaatgagagggggttag

SEQ ID NO: 49760 - DNA, 120 bp, synthetic construct; identical to SEQ ID NO: 13907
  source 1..120: mol_type = other DNA

SEQ ID NO: 49761 - DNA, 120 bp, synthetic construct
  source 1..120: mol_type = other DNA
agaaaggctactggtcatgccgtcctcatcacactggctctcgctcttattacgaaataactctcgagccttcatacccaggaagctttttgaactgggaagtgagcccacagtggtggg

SEQ ID NO: 49762 - DNA, 120 bp, synthetic construct
  source 1..120: mol_type = other DNA
acctctgcttccactactgccccgggcgctgctgggcctgggggtcttggtctcaccgttgtggccagatgcctcttcattgtgccctaccatggaatctgagcacccgtcattacaaca

SEQ ID NO: 49763 - DNA, 120 bp, synthetic construct; identical to SEQ ID NO: 13908
  source 1..120: mol_type = other DNA

SEQ ID NO: 49764 - DNA, 120 bp, synthetic construct
  source 1..120: mol_type = other DNA
cacaccacgtgacacagtccttatgctggaattggcagcttagtcccaaggtcatgaatcagttctttgttcctacctttcttctgctgcttcagctgcttctgctttttcttcttcaag

SEQ ID NO: 49765 - DNA, 120 bp, synthetic construct
  source 1..120: mol_type = other DNA
gaaagatacagaccagccagaatataggaagttccacttaataaaaacacaaaagcctttcctgatgaaagttaccttgcctggagtttgacatcctctagatatttcttctgttccaaa

SEQ ID NO: 49766 - DNA, 120 bp, synthetic construct
  source 1..120: mol_type = other DNA
aaatccgtttttgggaggtatcaagcctctgagtctgctggagaacatggcttctgtttttttctagctctttccgataggcggctttcatcatttctacttcctgaaaaaaaaaaaaaa

SEQ ID NO: 49767 - DNA, 120 bp, synthetic construct
  source 1..120: mol_type = other DNA
ctttatggaaagtaagctggtagtattatcctagtaacccttccttgaaatctatccccaagcaaatcatgtgaaacataaatagagattttgcacaaaaataatcatcacagcatattt

SEQ ID NO: 49768 - DNA, 120 bp, synthetic construct; identical to SEQ ID NO: 13909
  source 1..120: mol_type = other DNA

SEQ ID NO: 49769 - DNA, 120 bp, synthetic construct
  source 1..120: mol_type = other DNA
tgctgccgacagattggaacagcttgaaacccagagcaagtacacactaatgctcagaaagaaggcggaaagggtatttttttaagcctgtgttacatttgtgtgtgtatgtttaccgtg

SEQ ID NO: 49770 - DNA, 120 bp, synthetic construct
  source 1..120: mol_type = other DNA
ccaatgcttccttgttatagaacgcaactgattgaaactcagaactggctctcggataatgcggctgttccagctgtgctaaatggctcgacttcagcacagggtggatgaacgcatcta

SEQ ID NO: 49771 - DNA, 120 bp, synthetic construct; identical to SEQ ID NO: 13910
  source 1..120: mol_type = other DNA

SEQ ID NO: 49772 - DNA, 120 bp, synthetic construct
  source 1..120: mol_type = other DNA
gtgatctcggcccactgaaacctccgcctccggggttcaagcgattcccctgcctcagctccccaagtagctgggactacaagtgtgcgccaccacacctggctaattttttgtattttt

SEQ ID NO: 49773 - DNA, 120 bp, synthetic construct
  source 1..120: mol_type = other DNA
ggaaagattttcttgctgaggaataggaagagatgctctcctcttctgtggggacatcattgtgtctgcctgtcatatctgtgcctgtggcacacacctggcaaccatgagtgcagctag

SEQ ID NO: 49774 - DNA, 120 bp, synthetic construct
  source 1..120: mol_type = other DNA
ggccaacttgaccaacctggaactcacctgcctcacaacctcttgtcaagtgaaacaatacagttcttcactgttaagccagttgagtgctttttgtttttgttgtttttttggatattg

SEQ ID NO: 49775 - DNA, 120 bp, synthetic construct
  source 1..120: mol_type = other DNA
caccgtgcccagccctagtttggtttttgttgtctacaattgaaggcatcctgactatcacaactcagctgcatcacccgttttatgaactgggaaacagggccccatggagaggcagct

SEQ ID NO: 49776 - DNA, 120 bp, synthetic construct; identical to SEQ ID NO: 13911
  source 1..120: mol_type = other DNA

SEQ ID NO: 49777 - DNA, 120 bp, synthetic construct
  source 1..120: mol_type = other DNA
gactctttacaaagcacatgcccaagaaacccaaaaagaaggcccatgtgtgatggagaagttagtgacaggaagtatctgaacagctactattaaaattcaattcccacctcattcact

SEQ ID NO: 49778 - DNA, 120 bp, synthetic construct
  source 1..120: mol_type = other DNA
catcccaatgctggccttgttgccaggactgaactaccatctgcagaaatccaacattaaaaggaaaaaaaaaaatggtatgtacagcactctatatccatggtcctgagaggtatgtta

SEQ ID NO: 49779 - DNA, 120 bp, synthetic construct
  source 1..120: mol_type = other DNA
agttaacttcaaagcaacccaataggagaaacaagctcacatggtggctggaaagtgcttgtatagctggaccacggagtagtgggactgccgctccgtcttttaggaaataagtcatca

SEQ ID NO: 49780 - DNA, 120 bp, synthetic construct; identical to SEQ ID NO: 13912
  source 1..120: mol_type = other DNA

SEQ ID NO: 49781 - DNA, 120 bp, synthetic construct
  source 1..120: mol_type = other DNA
caggtggggaggatggtacccaaggacaacaaaaatagacagaaacacacttcagaactgtgctttgcaaaggggacagcacaaatgcagtccatcaaactgaccacccacagaacacct

SEQ ID NO: 49782 - DNA, 120 bp, synthetic construct
  source 1..120: mol_type = other DNA
caaaaacctgaacaaacttttgacatttatgtaaacaaggtatgaagaaagagttccatgggatacacatagagcagggtttaggatggatacttctttgttgcagggggctgcctgtgc

SEQ ID NO: 49783 - DNA, 120 bp, synthetic construct; identical to SEQ ID NO: 13913
  source 1..120: mol_type = other DNA

SEQ ID NO: 49784 - DNA, 120 bp, synthetic construct
  source 1..120: mol_type = other DNA
agagacgtggacatgaagtttgaggaacaccaacaggccagatcacaggcctacctagccaccagcccacagaggactgggaatgccttagctcaacggctctactttcttgggccctca

SEQ ID NO: 49785 - DNA, 120 bp, synthetic construct
  source 1..120: mol_type = other DNA
tgaggctacacagcaaactcacagggatgctgcagaaagattctgaattttcgagggagacgcagcgccatctgttggacactctgtgaattactaactggctggaaatgatgctgtgtc

SEQ ID NO: 49786 - DNA, 120 bp, synthetic construct
  source 1..120: mol_type = other DNA
agataccatgcagtgcccaataggtgcacacgaggcattagtaattgcaattatttttttaaaaattaatttatgtgtattatctgtgaacagctactaagttcttaggacattcgtact

SEQ ID NO: 49787 - DNA, 120 bp, synthetic construct; identical to SEQ ID NO: 13914
  source 1..120: mol_type = other DNA

SEQ ID NO: 49788 - DNA, 120 bp, synthetic construct
  source 1..120: mol_type = other DNA
gtggagcttggttaccatagtgtcacgctgctcctggagctgattgtatctagcttgttctttctgcagactaaccttccacatctggatgtccttctcttgtaacttcaactgatcttt

SEQ ID NO: 49789 - DNA, 120 bp, synthetic construct
  source 1..120: mol_type = other DNA
ccaaaactcttagagctcactactgtcttacttggccttaggtcaaggttttccaaattttacattaagcaaatggatcttaagttgcttaaataaatcttctcagggatcagtttgctt

SEQ ID NO: 49790 - DNA, 120 bp, synthetic construct
  source 1..120: mol_type = other DNA
gcttaccgacataatttcttttaaccatcacaacttaaagagcaggtgctgctattgttatttccattttatagcatggctaacagaggcttcaagaggccacgttacttttctaaggta

SEQ ID NO: 49791 - DNA, 120 bp, synthetic construct; identical to SEQ ID NO: 13915
  source 1..120: mol_type = other DNA

SEQ ID NO: 49792 - DNA, 120 bp, synthetic construct
  source 1..120: mol_type = other DNA
cctccagagctgctgctttgatcaccttgcggaggagccgcctgttccggagggcatgctgctgcctcttaaaacgctcatagagtaactggttgtgcagtaaaagcaactggtctcgga

SEQ ID NO: 49793 - DNA, 120 bp, synthetic construct
  source 1..120: mol_type = other DNA
acaattctttaaaaacaaatcaccactctctttgcaaatgaccacttgactcccagcaacagcaggggggaaagtatggactatgtgtctcccccgtgaaggaatgcaaaaggtcatatc

SEQ ID NO: 49794 - DNA, 120 bp, synthetic construct
  source 1..120: mol_type = other DNA
cactctggtcttctccagggaagcctggcaggaagtctgtattttgcacttatactctcaagcgcatagtacttgccacttttcaaaaataagaaatgctgacttggcaacacttgagat

SEQ ID NO: 49795 - DNA, 120 bp, synthetic construct
  source 1..120: mol_type = other DNA
tggagctaaagtaacaactttacctccaaagtgggtccagtcgacagacttgctgggtaaaggcaacctaggaagaaagtttttgagtaacaaagttaccgatcttaccaagaaaaaaac

SEQ ID NO: 49796 - DNA, 120 bp, synthetic construct; identical to SEQ ID NO: 13916
  source 1..120: mol_type = other DNA

SEQ ID NO: 49797 - DNA, 120 bp, synthetic construct
  source 1..120: mol_type = other DNA
tggcctccgtttctggggccagctctccagagaaactgagtagtcaaacacactgagagccgttttcaaccctgtctgttgaaatatacagggagtacactctgttgtaaagctatgtca

SEQ ID NO: 49798 - DNA, 120 bp, synthetic construct
  source 1..120: mol_type = other DNA
agaaaaataaaaatattccccaagcacctgtaaagtagctaataaaagacggatgggaaaccgtttctcagctagagtcctttctatgaaaacttgggtgcctcagggggtctggagggg

SEQ ID NO: 49799 - DNA, 120 bp, synthetic construct
  source 1..120: mol_type = other DNA
aatattcttatattctttgaaataccataacctcattttcagcctacagcttgcagagggcacatatgaaagcatttgagtgtcctcatagaacagaggcataaaatggcctatataaaa

SEQ ID NO: 49800 - DNA, 120 bp, synthetic construct; identical to SEQ ID NO: 13917
  source 1..120: mol_type = other DNA

SEQ ID NO: 49801 - DNA, 120 bp, synthetic construct
  source 1..120: mol_type = other DNA
tcctctgtgtttccttttgctttctttaacagctcctcagtcttcctgatgacaaaatgatgggctgtctttggcaatgccacctcaaaaagatgatcatacgggggaggctgcccgctt

SEQ ID NO: 49802 - DNA, 120 bp, synthetic construct
  source 1..120: mol_type = other DNA
aggtctatgggagtaaaggcttgctttggtgtgtcaggcccaagcttgtccagggaggagtgtaaaggctcagggttcacgctggcgccctgagaactggaggctgccgagtgggtcttc

SEQ ID NO: 49803 - DNA, 120 bp, synthetic construct; identical to SEQ ID NO: 13918
  source 1..120: mol_type = other DNA

SEQ ID NO: 49804 - DNA, 120 bp, synthetic construct
  source 1..120: mol_type = other DNA
atacaataaaaatcagctgagcatcgtggtgtatgcctgtggtcccagctactcaggaggctgaggtgggcggattgcttgagcctgggaggtcaaggctgcagtgagccatgatcgtac

SEQ ID NO: 49805 - DNA, 120 bp, synthetic construct
  source 1..120: mol_type = other DNA
gaagaaaaatccagcaagcctgtgagcaatggcacaaaatcccagatttatagcagagcgagggtcaggttttatcaactcatagcaatcccacatacattaccttcttctttatctttt

SEQ ID NO: 49806 - DNA, 120 bp, synthetic construct
  source 1..120: mol_type = other DNA
aaatacagtgtaatccctgtaagtgtaaaactgcttacactgtatagaatatgtctgtaataactcttcatgctgaacagagaaggctggacatggctctgtcctggggatactacaaaa

SEQ ID NO: 49807 - DNA, 120 bp, synthetic construct
  source 1..120: mol_type = other DNA
ctgcaatagcttaaaaactgtttttgatattattaggttggtgtttagaattcactactcgtttcattatgtttaggcctcagtattttggatatcccagaatttccttgtttccattta

SEQ ID NO: 49808 - DNA, 120 bp, synthetic construct; identical to SEQ ID NO: 13919
  source 1..120: mol_type = other DNA

SEQ ID NO: 49809 - DNA, 120 bp, synthetic construct
  source 1..120: mol_type = other DNA
caagcgattctcctgcctcagcctccagagtagctgggattacagaaatgcaccaccacgcctggctaatttttgtatttttagtacagacggggtttctccacattggtcaggctggtc

SEQ ID NO: 49810 - DNA, 120 bp, synthetic construct
  source 1..120: mol_type = other DNA
tgtagtcccagcactttgggaggccaaggccagtggatcccttgagctcagcagtttgagactagcctggggaacatggcaaaaccccatctctacaaaaaatttaaaaagtagccgggc

SEQ ID NO: 49811 - DNA, 120 bp, synthetic construct
  source 1..120: mol_type = other DNA
cagagtgagaccctgtctcacacacacaaaataataataataatgagaaagttggagaatcccaagagcttttacgaggcataattattatattagaaaaccaggaaatttttaaaatat

SEQ ID NO: 49812 - DNA, 120 bp, synthetic construct; identical to SEQ ID NO: 13920
  source 1..120: mol_type = other DNA

SEQ ID NO: 49813 - DNA, 120 bp, synthetic construct
  source 1..120: mol_type = other DNA
gctcaagccgttctccatcagctccccgattagctgggactacagatgcacatcaccacacctggctttttttttttttttagttgagatggggttttgcatgttgcccaggctggtctt

SEQ ID NO: 49814 - DNA, 120 bp, synthetic construct
  source 1..120: mol_type = other DNA
ctttgttattacaccaaaatttgataagtgttagtttcttaaagttacaaagtgaaatttgaaaccacatcaatgagcttttcctgtgttaaaacccactagtctaccttgcactttttt

SEQ ID NO: 49815 - DNA, 120 bp, synthetic construct
  source 1..120: mol_type = other DNA
tccgcctcctgggttcaagtgattctcccgcctcagcctcccaagtagctgggattacaggtgcctgccaccatacccggctaatgtctatatttagtagagatggtgtttcaacatgta

SEQ ID NO: 49816 - DNA, 120 bp, synthetic construct; identical to SEQ ID NO: 13921
  source 1..120: mol_type = other DNA

SEQ ID NO: 49817 - DNA, 120 bp, synthetic construct
  source 1..120: mol_type = other DNA
actaactaagcttccacagacttttcggtctcatcataaaagtcctggggcagctatcaagttcatggtagtatatacacgttttttaatatcttgatttccacctgagagttgactttt

SEQ ID NO: 49818 - DNA, 120 bp, synthetic construct
  source 1..120: mol_type = other DNA
tcaaataaaactggcattccatgaaaaaaggcagctacttcacctctcaattcaaataactgcatgagggccagaggtcaccatcataccctggtatgcagtacatgtgccttatgcata

SEQ ID NO: 49819 - DNA, 120 bp, synthetic construct; identical to SEQ ID NO: 13922
  source 1..120: mol_type = other DNA

SEQ ID NO: 49820 - DNA, 120 bp, synthetic construct
  source 1..120: mol_type = other DNA
gtaggaggatcgtttgagtccaggagtttaagactagcctgggcaacatagtgagacctcatctccaccaaaaaaaaaaaaaacttagccaggcatcatggcacatgcctgtagtcccag

SEQ ID NO: 49821 - DNA, 120 bp, synthetic construct
  source 1..120: mol_type = other DNA
aaaaaaaaaaaaaaaatcaagagagtaggtttgacctgctgggttccccacaagagttctgccaaagcagagttttggaaccacccaggggtcggcagatcacaccttgagagcagcttg

SEQ ID NO: 49822 - DNA, 120 bp, synthetic construct
  source 1..120: mol_type = other DNA
ttagtccattttcaattattctgattcaaacccattgcattttaggtcagaattctatctggcataattaggcttctcaaagtgaggcttgcaagtgagtcactgtgcctgggcagaggg

SEQ ID NO: 49823 - DNA, 120 bp, synthetic construct
  source 1..120: mol_type = other DNA
cccagaggagttccttttccacctgcttagagacaagggcagaacatatatgaacactgagcccaactattagaaaaactgccgattttttttcagcctataactattactataaataaa

SEQ ID NO: 49824 - DNA, 120 bp, synthetic construct; identical to SEQ ID NO: 13923
  source 1..120: mol_type = other DNA

SEQ ID NO: 49825 - DNA, 120 bp, synthetic construct
  source 1..120: mol_type = other DNA
agtagcctgggaagttaataaagtacatcagcagtggcaaaggaatgctaagtcatccacgaggtttatatccatggccagtgttcagcttaaatttagctttttcatctagaaaaaggc

SEQ ID NO: 49826 - DNA, 120 bp, synthetic construct
  source 1..120: mol_type = other DNA
tttctttgctaatatcatggatccttaaaagtgactcctgaaatgagcagtgtgaaattttcccaaccacatactaaatctgacccaaagggtcagcttcaccagaaagcagaggagaga

SEQ ID NO: 49827 - DNA, 120 bp, synthetic construct; identical to SEQ ID NO: 13924
  source 1..120: mol_type = other DNA

SEQ ID NO: 49828 - DNA, 120 bp, synthetic construct
  source 1..120: mol_type = other DNA
ttcagagtttctctaaatgctcctttgaaataaagttcaataaggtttgatgtctcattaagcctcaagataacttaaaaaagcacaatacagatgacaacttcagtggctgcaacccac

SEQ ID NO: 49829 - DNA, 120 bp, synthetic construct
  source 1..120: mol_type = other DNA
tatgaggtagagtctggaagtcaaatacttaaacccattttctttcttaagtgttggagacacgtcaccaactctgttggcatacaatcaggtagcagaccaaggacatctaaattaaac

SEQ ID NO: 49830 - DNA, 120 bp, synthetic construct
  source 1..120: mol_type = other DNA
atgttttccagagacaaagttgcaaaacagataagtaccaaagacactttttaccatagctattctgtgtgtcagcataagggctggtggtgacatcggctgaacgatgaggaaagcggg

SEQ ID NO: 49831 - DNA, 120 bp, synthetic construct; identical to SEQ ID NO: 13925
  source 1..120: mol_type = other DNA

SEQ ID NO: 49832 - DNA, 120 bp, synthetic construct
  source 1..120: mol_type = other DNA
tttacaagctaatctgaaacaaatatttcctcaacaaaagactaggtgtagcctcaaaatggaaaaatgaaacataagctatgcagcagagcagcaggcagggaaaaatgtcctttggaa

SEQ ID NO: 49833 - DNA, 120 bp, synthetic construct
  source 1..120: mol_type = other DNA
gcagctgaggctgacttaaggtctcctatcaaggcctcaggtgtcaaatccatccctggaccagaaacagagtataaaaagacaaactaaagaaagtccatgagaatttttttctttttt

SEQ ID NO: 49834 - DNA, 120 bp, synthetic construct
  source 1..120: mol_type = other DNA
agctgggactacaggcacgtgccaccgtgcctggctaatattcttacagaaatggggtctcactttgttgctcatgctggtctcgaacttactggcctcaaatgatcctcccaccttggc

SEQ ID NO: 49835 - DNA, 120 bp, synthetic construct; identical to SEQ ID NO: 13926
  source 1..120: mol_type = other DNA

SEQ ID NO: 49836 - DNA, 120 bp, synthetic construct
  source 1..120: mol_type = other DNA
tgctttttcagggggtgtaataatagttattctatagaatataaccctttggttgaactttgggttatttcttctttccattacaagctgtgctgtgctgaacactgttgtatgtcttga

SEQ ID NO: 49837 - DNA, 120 bp, synthetic construct
  source 1..120: mol_type = other DNA
tacaaaaaattagctgggcgcggtggcgggcgcctgtagtcccagctactcaggaggctgaggcaggagaatggcgtgaacccaggaggcggaatttgcagtgagccgagattacgccac

SEQ ID NO: 49838 - DNA, 120 bp, synthetic construct
  source 1..120: mol_type = other DNA
ttttttttttagacagagtctcactctgtcacccaggctggagttcagtggcgcaatctcgactcactgcaacctccaccttctggattcaagcaattctcctgcctcagtctcccgagt

SEQ ID NO: 49839 - DNA, 120 bp, synthetic construct; identical to SEQ ID NO: 13927
  source 1..120: mol_type = other DNA

SEQ ID NO: 49840 - DNA, 120 bp, synthetic construct
  source 1..120: mol_type = other DNA
ccctgaaaaagcatgcttttagcagatcgatggttgccagaagtgggggaagagacacaaaggaacttttgggatgatggaagtgttctttattatgattgggatttttgtcaaaactta

SEQ ID NO: 49841 - DNA, 120 bp, synthetic construct
  source 1..120: mol_type = other DNA
gcaggcggattacttgaggccaagttcgagaccagcatgggcaacatggcaaaaccccatcttaaaaaaaaaatacaaaaaaaaaaaaaaaattagccaggcatggtggcatgcacctgt

SEQ ID NO: 49842 - DNA, 120 bp, synthetic construct
  source 1..120: mol_type = other DNA
aaaagagaaaagaaaatcatgctttcagctgggcatggtggctcacacctgtaatcccagcactatgggaggccaaggcaggagatcacttgaggccaggggttcaagaccagcctgggc

SEQ ID NO: 49843 - DNA, 120 bp, synthetic construct; identical to SEQ ID NO: 13928
  source 1..120: mol_type = other DNA

SEQ ID NO: 49844 - DNA, 120 bp, synthetic construct
  source 1..120: mol_type = other DNA
ataaaacgcttataatataatcttaaaagaaaaaaagacacaaagctattcagagacacacccgcaaatatatctgactgtagtaagtattcaaatgaaaagaagtgaagttacgaacaa

SEQ ID NO: 49845 - DNA, 120 bp, synthetic construct
  source 1..120: mol_type = other DNA
ataactttgctctatgtgtttctaaggtggttagtaactccatcagagatttgcattttttttccaagtttacagaaaacagcacagcaacactaagggcactccataggtttaccttaa

SEQ ID NO: 49846 - DNA, 120 bp, synthetic construct
  source 1..120: mol_type = other DNA
caaagcatgtgatcctactcaactgttgtaggaagctcattatatcttagatgctgaaaacacggtattaaatacagaaaagaaagtgtccagggcatggggagaatataaggcagcttc

SEQ ID NO: 49847 - DNA, 120 bp, synthetic construct
  source 1..120: mol_type = other DNA
aaagtgattgagagcaggcgttaggacacatgtgtacacacaagaagattgattttagaggagaaaatgagaatcataataaaagaggaatacatttaaatgttttattttaatcaaagt

SEQ ID NO: 49848 - DNA, 120 bp, synthetic construct; identical to SEQ ID NO: 13929
  source 1..120: mol_type = other DNA

SEQ ID NO: 49849 - DNA, 120 bp, synthetic construct
  source 1..120: mol_type = other DNA
cttactattaatgggaagtgaggattgaggactcttccatatatcctttccctcctcctcaatgctctcaaaataaatatgtaactgtttttgttgttttcaaaattgatttcaacatta

SEQ ID NO: 49850 - DNA, 120 bp, synthetic construct
  source 1..120: mol_type = other DNA
tttcctaaatgtattctaacagctctgaaacaatgcctaatataacttttactaatgaaatgcaaagaatccaccaggattattcctcatcttccagaagagctcccttctggagcactc

SEQ ID NO: 49851 - DNA, 120 bp, synthetic construct
  source 1..120: mol_type = other DNA
ctccttcatgattttactctcattttggtggaatacatgctccagtgattaactgaggaaggacatatgggaaggaaatttgagtccatgcatatctgaaagtgtctcatatttgataga

SEQ ID NO: 49852 - DNA, 120 bp, synthetic construct; identical to SEQ ID NO: 13930
  source 1..120: mol_type = other DNA

SEQ ID NO: 49853 - DNA, 120 bp, synthetic construct
  source 1..120: mol_type = other DNA
tcaaacgattctcctgcctcagcctcccaagtagctgggattacaggcacccaccaccatgcccgactaattttttgcagttttagtagagaggaggtttcaccatgttggccaggctgg

SEQ ID NO: 49854 - DNA, 120 bp, synthetic construct
  source 1..120: mol_type = other DNA
ggacttcctgaactgatcattctaaatctctgttctgctcatattaccaagctctatcctttggttctgctttctatttacctatatctcagaaaagtatctcccaattcttttactgaa

SEQ ID NO: 49855 - DNA, 120 bp, synthetic construct; identical to SEQ ID NO: 13931
  source 1..120: mol_type = other DNA

SEQ ID NO: 49856 - DNA, 120 bp, synthetic construct
  source 1..120: mol_type = other DNA
ttttaaatataaacccacaaggaggagaacaggagagagggaatagaaccataagtttttgaaactaaaaaacagacaggcaggtggtaactgacactgcaaatccacaaaagcagaatc

SEQ ID NO: 49857 - DNA, 120 bp, synthetic construct
  source 1..120: mol_type = other DNA
caggtggtaactgacactgcaaatccacaaaagcagaatcctaagctgccactgtctcaaagtgaagagtcaactgattatactacagaatccttaaaatcatgaggaacttatagcatc

SEQ ID NO: 49858 - DNA, 120 bp, synthetic construct
  source 1..120: mol_type = other DNA
cccaagcaacagctcttttctcaccagaaacctggattattctctatagagaataaaacaaggagtacctggataaagtattccagaagtagttgagggcatgagtgccattccaaatga

SEQ ID NO: 49859 - DNA, 120 bp, synthetic construct
  source 1..120: mol_type = other DNA
tagtcagacccctaccagcctgaaaatcagaagactactttctaaaaaacatgaccagctcaagaagaaaacaataccgacaccactatttccaacagatgctcagttcaacatacaaca

SEQ ID NO: 49860 - DNA, 120 bp, synthetic construct
  source 1..120: mol_type = other DNA
cagaaggcctcaaagatttaaaaagaataacacaaaaccgaaaagaaggaagcttagaagaaacagattatgcagggaaaagaaaactccttgtataagtatacagtcatgtgtcactta

SEQ ID NO: 49861 - DNA, 120 bp, synthetic construct; identical to SEQ ID NO: 13932
  source 1..120: mol_type = other DNA

SEQ ID NO: 49862 - DNA, 120 bp, synthetic construct
  source 1..120: mol_type = other DNA
agaacttgaagagcttccagcttgaacaatgagaatagattcataccaacatacatcactggaaatttcagaatattatgacaacaaagagaactccctaccagctcccctagagaaaaa

SEQ ID NO: 49863 - DNA, 120 bp, synthetic construct
  source 1..120: mol_type = other DNA
accagccaaaacactgcatccttcctcaaaaagctcctagaggctatgtcctattaaacaagagtaaaccaagaaagaagacaagatacaggaaatgggagatcctgcacaggagagagg

SEQ ID NO: 49864 - DNA, 120 bp, synthetic construct; identical to SEQ ID NO: 13933
  source 1..120: mol_type = other DNA

SEQ ID NO: 49865 - DNA, 120 bp, synthetic construct
  source 1..120: mol_type = other DNA
cctgcctgccatatttcacgcatgtccagtgccttgcccttgctagaagccttgccagacgctctgatgagggtaagccttgtgtttcccagactcattcatgaccttgtgcactgactt

SEQ ID NO: 49866 - DNA, 120 bp, synthetic construct
  source 1..120: mol_type = other DNA
aaaccttcaactactagtgacaagactgcccttctcttaaccaggctttgcctcctagtcaactagcttttcaaaacaaagcaatacctacagtaaaactacaaagaaaagcaagagaat

SEQ ID NO: 49867 - DNA, 120 bp, synthetic construct
  source 1..120: mol_type = other DNA
gtgtttttgtgttattattaaactttacatacacattttctatacttctctacatataatctcacaataaactgctttaagctggctgaggctctgtgtggtagaggcagtgtctgtggt

SEQ ID NO: 49868 - DNA, 120 bp, synthetic construct
  source 1..120: mol_type = other DNA
cataataagcctggctaccaggcagagacaagcagagggaaggagctgggcctcccacagctcagtctgtaaatttcctttatctccctcgctcagtcttaccctcagttccactctcca

SEQ ID NO: 49869 - DNA, 120 bp, synthetic construct; identical to SEQ ID NO: 13934
  source 1..120: mol_type = other DNA

SEQ ID NO: 49870 - DNA, 120 bp, synthetic construct
  source 1..120: mol_type = other DNA
aactttctccactctgctaaatgttattagtcctccgcctgtgaagagtatgttttaaactcacacaaattttagctgtatgagtgcttccaagtggactgattctgtaagtagaacatc

SEQ ID NO: 49871 - DNA, 120 bp, synthetic construct; identical to SEQ ID NO: 6462
  source 1..120: mol_type = other DNA

SEQ ID NO: 49872 - DNA, 120 bp, synthetic construct
  source 1..120: mol_type = other DNA
agattagtggctgcctagggattggagtggcgaggaagaaaactgaatttcttttcaaaatttccctgtctgccgttaaatacaaaaggtataaatgcagcctatctaaacagtatacta

SEQ ID NO: 49873 - DNA, 120 bp, synthetic construct; identical to SEQ ID NO: 13935
  source 1..120: mol_type = other DNA

SEQ ID NO: 49874 - DNA, 120 bp, synthetic construct
  source 1..120: mol_type = other DNA
tatctatgtatattcccacctcactccaaagacaggaagagtggttttctaaaatgcaaacaaatccgaacacaccagacacccttatttcaaatccatcaatggctccctataagtttt

SEQ ID NO: 49875 - DNA, 120 bp, synthetic construct
  source 1..120: mol_type = other DNA
atgatgatagctctctgtaaaatttatacttttccattgccgaattcagtacgagcttcttgagaaaaaaactgtcttacttatttctcggtgctttgcactggacctgatatttaacaa

SEQ ID NO: 49876 - DNA, 120 bp, synthetic construct
  source 1..120: mol_type = other DNA
taagagtgaaagaaattgaacatcttaatttagccttacctagaccctgtggaaacccacggccacagtatacataaaggtcctccaaaataatggacagaccattcctttttcacaaag

SEQ ID NO: 49877 - DNA, 120 bp, synthetic construct; identical to SEQ ID NO: 13936
  source 1..120: mol_type = other DNA

SEQ ID NO: 49878 - DNA, 120 bp, synthetic construct
  source 1..120: mol_type = other DNA
cttagtcctgtactgctgcaatacagacggaggctgtttttcagtttatcaacaatcataaagttttacatcctaccactcaatttctctgacgactaatccttttaagccaagaaaata

SEQ ID NO: 49879 - DNA, 120 bp, synthetic construct
  source 1..120: mol_type = other DNA
ccttacagcatatgagcaattaatcaataatgaaagcattcacctcacagggcccaacaggtatatgaggagatctgtacctggtttcttcaggcaccatgatgacagacggccaaaaat

SEQ ID NO: 49880 - DNA, 120 bp, synthetic construct; identical to SEQ ID NO: 13937
  source 1..120: mol_type = other DNA

SEQ ID NO: 49881 - DNA, 120 bp, synthetic construct
  source 1..120: mol_type = other DNA
acgagttcaaacttgacttggggacacccaagtcctgcagccttaggatgccctattgatagcagttggatgaaaacaaaaggagctgcttttcaacaaaacacaggagcactgctctgt

SEQ ID NO: 49882 - DNA, 120 bp, synthetic construct
  source 1..120: mol_type = other DNA
agaaattcatatagcactaacaagtcaacttaaaggctcacttcaaagcagtatttagagaccagtaaattaaaatatatatatatggaaacctttcagcacgcctacagtttaaatatt

SEQ ID NO: 49883 - DNA, 120 bp, synthetic construct
  source 1..120: mol_type = other DNA
cacccaatggatactcaatcagctctgactagctagctacagcagctcacctgacccataattaaatcatgaatgtttgccaggtagatgaaattcagatttatgaaacaagatattaat

SEQ ID NO: 49884 - DNA, 120 bp, synthetic construct; identical to SEQ ID NO: 13938
  source 1..120: mol_type = other DNA

SEQ ID NO: 49885 - DNA, 120 bp, synthetic construct
  source 1..120: mol_type = other DNA
accaatccatttagattatattctcatcaatccatttagattatattctcaccaatccattaattagattatattctcatcaatccatttgtttaaaaaacattaagttgttaaaactgt

SEQ ID NO: 49886 - DNA, 120 bp, synthetic construct
  source 1..120: mol_type = other DNA
catggtgctgtagcagatgaatccaatggtactgccatcctggaacaaatactattggatattttcatgtctctgtgaggtacaggcagttaatattaaccacattttcttattttatag

SEQ ID NO: 49887 - DNA, 120 bp, synthetic construct
  source 1..120: mol_type = other DNA
atgcactaaatttagtgcaaaaaatagaatgcaacttagtagaatttacatcaacaaagtcttaattatagctgcaaccagaccatactcctaaatggttaacagaaactttaagccatt

SEQ ID NO: 49888 - DNA, 120 bp, synthetic construct
  source 1..120: mol_type = other DNA
aacccatctgatcgaaatttttccatacttgcatggacaaggtattcaatagtcatagtgatgtatttgagaacttactaagtaccaactctggacaacattctatttgagaaaagccaa

SEQ ID NO: 49889 - DNA, 120 bp, synthetic construct; identical to SEQ ID NO: 13939
  source 1..120: mol_type = other DNA

SEQ ID NO: 49890 - DNA, 120 bp, synthetic construct
  source 1..120: mol_type = other DNA
aagtcttgtctctaatgtaaagcaagggtcatgcagataaaaggtcaaattcaagattttaaaaaccacgttagcaaacaaaacactgctgcatttggcctgacaaaaggcagccagttt

SEQ ID NO: 49891 - DNA, 120 bp, synthetic construct
  source 1..120: mol_type = other DNA
gctggaagcagccacttattgctagagcaacccagcctacatggtttggcctcaagtatcaattaggtagtagaagttacatttcagaccagagtaaacaaaaaaacaagacgggccagg

SEQ ID NO: 49892 - DNA, 120 bp, synthetic construct; identical to SEQ ID NO: 13940
  source 1..120: mol_type = other DNA

SEQ ID NO: 49893 - DNA, 120 bp, synthetic construct
  source 1..120: mol_type = other DNA
ttgtacttgaagcttttccatatcgataaaagtctaaaaattctattcaaagtatgggttgaaagatgggtacctatgggccaaatcatcactatacaattatagtactggaaatgtaag

SEQ ID NO: 49894 - DNA, 120 bp, synthetic construct
  source 1..120: mol_type = other DNA
cctcagcttcctgagtagctgagattataggtgtccaccaccacgcccagctaattttttgtattttttagtagagacggggtttcactgtgttggccaggctggtctcaaactcgtgac

SEQ ID NO: 49895 - DNA, 120 bp, synthetic construct
  source 1..120: mol_type = other DNA
atcatgggtcctacaaagtaatttttatatgtagttataaactgggaacaatgtcatcagtggcgcacagaaatcaaaagaataagctcaggacaagttgcacagtggccgtgcacagaa

SEQ ID NO: 49896 - DNA, 120 bp, synthetic construct; identical to SEQ ID NO: 13941
  source 1..120: mol_type = other DNA

SEQ ID NO: 49897 - DNA, 120 bp, synthetic construct
  source 1..120: mol_type = other DNA
tcatttttattgccttttttttttttttttttttgagatggagtctcactctgttgccaggctggagtgcagtggcacaatctcagctcactgcaacctctgcctcctgggttcaagcaa

SEQ ID NO: 49898 - DNA, 120 bp, synthetic construct
  source 1..120: mol_type = other DNA
atctcctgaccttgtgatccgcccgcctcggcctccccaagtgctgggattacaggcgtgagccgccacacctggccctttattgcttttttaattacaaaaaataatccatatctactg

SEQ ID NO: 49899 - DNA, 120 bp, synthetic construct
  source 1..120: mol_type = other DNA
ccttttctacttgtataaccacacgcacacagccctcatgtccacagacacagacacagtttgtgcatgtgtgtgttttttccactgaacagtatgttgtaaccaccttcccacgtcagc

SEQ ID NO: 49900 - DNA, 120 bp, synthetic construct
  source 1..120: mol_type = other DNA
tcactcaaagctgtaataagatacagattcttataaatggcccaaatggtatgtgttttaaaattgatgactgatgctccaaaaggctgaacatcaattcatattcctgctaacagtgcc

SEQ ID NO: 49901 - DNA, 120 bp, synthetic construct; identical to SEQ ID NO: 13942
  source 1..120: mol_type = other DNA

SEQ ID NO: 49902 - DNA, 120 bp, synthetic construct
  source 1..120: mol_type = other DNA
ctctaaagtcaatctcttctttctagaagataagctaaaaaggatattattttgctaaccagaattgaggttctctttaaagacagctgtcacgtcgtcccgcacacccagcatggggga

SEQ ID NO: 49903 - DNA, 120 bp, synthetic construct
  source 1..120: mol_type = other DNA
gtgtgctacaggttctgaaggttcttcattggggccactaccaaactgagaaaaaggaagatgaacagtcactaaatggccccatttttctccataaaaaaagaaaatacctgcaagaca

SEQ ID NO: 49904 - DNA, 120 bp, synthetic construct
  source 1..120: mol_type = other DNA
aagagggtttctacaaaatataacaatcagaaagaaaccttaaaaactgataccagtcacagcaacttaatgataggatcaaatctaagttttattcctacttctgattctaccttgggt

SEQ ID NO: 49905 - DNA, 120 bp, synthetic construct; identical to SEQ ID NO: 13943
  source 1..120: mol_type = other DNA

SEQ ID NO: 49906 - DNA, 120 bp, synthetic construct
  source 1..120: mol_type = other DNA
agctcattcccaagtgtaactatacacatttacgatttctcccccactttgatctctgaggctatatttgttaaaacaagtaacaacagttatcattcataagcactgtacacctttcac

SEQ ID NO: 49907 - DNA, 120 bp, synthetic construct
  source 1..120: mol_type = other DNA
aaaaccagaggagaaaaactgatattggaagctaggtatgcccgactccaaagccccaagcccttaagtgtcacactaagctaacctgtggttttgatcatcacagcaagtctgtgatgt

SEQ ID NO: 49908 - DNA, 120 bp, synthetic construct; identical to SEQ ID NO: 13944
  source 1..120: mol_type = other DNA

SEQ ID NO: 49909 - DNA, 120 bp, synthetic construct
  source 1..120: mol_type = other DNA
agaccaacctggccaacatggtgaagccccgtctctactaaaaatacaaaaattagctggtgtggtggcgtgtgcctgtagtcccacctactcaggaggctgaggcaggagaatcacttg

SEQ ID NO: 49910 - DNA, 120 bp, synthetic construct
  source 1..120: mol_type = other DNA
cttctgcaagaatgccaaatttaaattagccatgaccccaaaaactgccaggtattaacttgctatcatctatattcttatttaattacaatcttgtgacattcactgattttggctctt

SEQ ID NO: 49911 - DNA, 120 bp, synthetic construct
  source 1..120: mol_type = other DNA
ataggaagttaatttcaaagggctccaaaatgtgagaccaccgttggtaagattctaccgtaaaagttcaaaaccaaaaagcgattagtatggtatcaggtacatataaacactcgctgc

SEQ ID NO: 49912 - DNA, 120 bp, synthetic construct; identical to SEQ ID NO: 13945
  source 1..120: mol_type = other DNA

SEQ ID NO: 49913 - DNA, 120 bp, synthetic construct
  source 1..120: mol_type = other DNA
ccagtcaacttggcgatagtgtgggctaatcagcttgggccacctagcttgtttttccatttgcaaagtaaggttttattctaaaacacattagaaacacgttttggcaacaagtttttc

SEQ ID NO: 49914 - DNA, 120 bp, synthetic construct
  source 1..120: mol_type = other DNA
ttttatgtgagattcttcgcataagtggctcaagttcaagcatttttgacattctaaaaagccctcctaagagttaaatcatagcttttggaatcagtcccacaactagaatatctcctt

SEQ ID NO: 49915 - DNA, 120 bp, synthetic construct
  source 1..120: mol_type = other DNA
aatatgtgtacaaaaaaggggaagaaaccagccctacatggactcagtcaggggtggtggtagtggtggatgaaatatacacatgttaaacacactttacagcctatagaagactggctg

SEQ ID NO: 49916 - DNA, 120 bp, synthetic construct; identical to SEQ ID NO: 13946
  source 1..120: mol_type = other DNA

SEQ ID NO: 49917 - DNA, 120 bp, synthetic construct
  source 1..120: mol_type = other DNA
aaacacccaggtgactccttgactctttcaccacccccaccaccacatctaatccatcagcaaaccctttgctatcacctcagtcgaagcccgcatcatctctcagagacaagggagcag

SEQ ID NO: 49918 - DNA, 120 bp, synthetic construct
  source 1..120: mol_type = other DNA
tcatccaatggcttcccatggaattaataagagccaataacattatggaacttatgaaactcatgagtagcctacaaggcctcataagatccagccagttattaacctcccaacccccct

SEQ ID NO: 49919 - DNA, 120 bp, synthetic construct
  source 1..120: mol_type = other DNA
tccttgcacagctgacggtctcgcagatatctgatgggcctcccctgaccacccaatctaaagcagcagggaggttctcagtcatcacttttcaataaaagatactttgtaattcatgag

SEQ ID NO: 49920 - DNA, 120 bp, synthetic construct; identical to SEQ ID NO: 13947
  source 1..120: mol_type = other DNA

SEQ ID NO: 49921 - DNA, 120 bp, synthetic construct
  source 1..120: mol_type = other DNA
cccgagtagctgagattataggcgcacaccaccatgcctggctaatttttgtatttttcgtagagatggggttttaccatgttggccaggctggtctcgaactcctgacctcatgtgatc

SEQ ID NO: 49922 - DNA, 120 bp, synthetic construct
  source 1..120: mol_type = other DNA
gctattaaaagctggggttttttttgtttcaaaataagaataattgctaaaggcggccaacaatttttagtaattgaagagtaaggatctttgaggcttgccaagctatgaatcccaggt

SEQ ID NO: 49923 - DNA, 120 bp, synthetic construct
  source 1..120: mol_type = other DNA
gtgccagttgagatgatactacacatgtgacatagtgaccacaggagtaacctagcagccggtagtgcccacaaagtatttttcctatattaaaattccaaacttctaaaatctgactac

SEQ ID NO: 49924 - DNA, 120 bp, synthetic construct
  source 1..120: mol_type = other DNA
atgatggtgatatttagcttggggacctcaatgatctgaacacttaaccatttgactttgggttcaaattcatatacagtggacttctaaaaaaggaacagtatgaagtatacacaaaaa

SEQ ID NO: 49925 - DNA, 120 bp, synthetic construct; identical to SEQ ID NO: 13948
  source 1..120: mol_type = other DNA

SEQ ID NO: 49926 - DNA, 120 bp, synthetic construct
  source 1..120: mol_type = other DNA
ttccatccgtggaaatgccggcgcctcaacatttatgaaggatatattctgagacaggatcatccaattcctaaaaactactatagcatataatttatcccccaaaattaatttaaagca

SEQ ID NO: 49927 - DNA, 120 bp, synthetic construct
  source 1..120: mol_type = other DNA
atggaatccggacatcacatttggtttgtttttataaacccatgcagatttctcaggtgcagccagggttaagaacgtctgcactagttaaatgacttgtgccagcacacaggctttaat

SEQ ID NO: 49928 - DNA, 120 bp, synthetic construct; identical to SEQ ID NO: 13949
  source 1..120: mol_type = other DNA

SEQ ID NO: 49929 - DNA, 120 bp, synthetic construct
  source 1..120: mol_type = other DNA
cttacctgttctagcgacaactggtacttcagtttccagtgctgtcaacctggtgtctttcatggtcactgaaggaagaaaacatatgtacaatgaagcaaaatcccagatgtaatcaaa

SEQ ID NO: 49930 - DNA, 120 bp, synthetic construct
  source 1..120: mol_type = other DNA
acactcataatcattggaagcacgtgcctctccccgtctacatttctgaacagctggttgctggaaaattctttatattgtgctgaacttgtaatctctgtcttttgttaatgtctgtta

SEQ ID NO: 49931 - DNA, 120 bp, synthetic construct
  source 1..120: mol_type = other DNA
accgtaagttacctcgtctgtaaagttagaataatgatggcatcaagctcacaaggcttgtggggattacatgagatgatgcattccattgccctcggcacagcacggggcacaccgaag

SEQ ID NO: 49932 - DNA, 120 bp, synthetic construct
  source 1..120: mol_type = other DNA
ccaccaccttgactcactggcctttcagttccttggctaagccacatgctccccattcctgagcctaagagagtctacctttggctcctcctaaactcactcttcatccttaaaatctca

SEQ ID NO: 49933 - DNA, 120 bp, synthetic construct; identical to SEQ ID NO: 13950
  source 1..120: mol_type = other DNA

SEQ ID NO: 49934 - DNA, 120 bp, synthetic construct
  source 1..120: mol_type = other DNA
cactgcaacctcaaactcctaggctcaagtgatcctcccacctcagcctcccgagtagctaggaatacagatgcactccaccaggcccgactaatcggtttcttttagttttaaagatgg

SEQ ID NO: 49935 - DNA, 120 bp, synthetic construct
  source 1..120: mol_type = other DNA
aataaatgtgcaaagcctaattctgccttcaggcagcatgacttaagtttactacaaaagagacataaaatgtttgtgaacagctatcatttttctattttcttcccccttttaccctac

SEQ ID NO: 49936 - DNA, 120 bp, synthetic construct
  source 1..120: mol_type = other DNA
gggtccttcaaactatatttaggtacaatctgatcactagatggtaaactccatgaggacaggaaccatctgggacacctagggcctatcctggcacctggcacacaagaggcaaaaaca

SEQ ID NO: 49937 - DNA, 120 bp, synthetic construct; identical to SEQ ID NO: 13951
  source 1..120: mol_type = other DNA

SEQ ID NO: 49938 - DNA, 120 bp, synthetic construct
  source 1..120: mol_type = other DNA
gcctggccacactcactgcaagtcacagggcttgaattaaagtgcaggagcccaggccaggtgtggtggctcacgcctgtaatcccagcactttgggaggccaaggtgggcggatcacct

SEQ ID NO: 49939 - DNA, 120 bp, synthetic construct
  source 1..120: mol_type = other DNA
caggagaatcacttgaacccaggaggtggaggttgcaatgagtcgagatagtgccactgcactccagcctgggcaacaagagcaaaactccgtttcaaaataaatacataaataaataaa

SEQ ID NO: 49940 - DNA, 120 bp, synthetic construct; identical to SEQ ID NO: 13952
  source 1..120: mol_type = other DNA

SEQ ID NO: 49941 - DNA, 120 bp, synthetic construct
  source 1..120: mol_type = other DNA
cctcaacctcccaagtagctgggaatacaggcacgcaccaccatgcccaactaatttttgtatttttttgtagagacagggtctccctaagtcgcccaggctggtctagaactcctggac

SEQ ID NO: 49942 - DNA, 120 bp, synthetic construct
  source 1..120: mol_type = other DNA
tactgcactaaaaatgataatggtactaaattggtagcaattttatgttggtatgtcaaaggctacctactattctactcttatttatatttttaagtgtttattgacttattcatttgt

SEQ ID NO: 49943 - DNA, 120 bp, synthetic construct
  source 1..120: mol_type = other DNA
cagaacaccagtgtcaatccacgtccttatcttcgaaagccaaatttaaaaagaaacctgcctccagatctagacttttttccctttcatatttgacccaaaagttgtgttctcacttat

SEQ ID NO: 49944 - DNA, 120 bp, synthetic construct; identical to SEQ ID NO: 13953
  source 1..120: mol_type = other DNA

SEQ ID NO: 49945 - DNA, 120 bp, synthetic construct
  source 1..120: mol_type = other DNA
ctttagaatggatttatctgaaattacaggtgaatattcgaatttttcaaaaacaagtgctgtgatatgtggcctagacactaccctctacgactcctcaggactgtatgtaacataaaa

SEQ ID NO: 49946 - DNA, 120 bp, synthetic construct
  source 1..120: mol_type = other DNA
gaaggcagatgtctcttcactataacttgtttcctatattcaattttttatccataaaaattcaaggacaattcagacacaggtccaggcatggatagactattttattatcaggtacag

SEQ ID NO: 49947 - DNA, 120 bp, synthetic construct
  source 1..120: mol_type = other DNA
atctaaaaagggtaagatacttgctcccattctctcttcctatcagtgcctagaaggaaggaaaaaagggtaggaaataactacttactatgtgagagtaaaacagctgatggtaaaacc

SEQ ID NO: 49948 - DNA, 120 bp, synthetic construct; identical to SEQ ID NO: 13954
  source 1..120: mol_type = other DNA

SEQ ID NO: 49949 - DNA, 120 bp, synthetic construct
  source 1..120: mol_type = other DNA
ttcaaaaagacactacgcagagcttctcctaaaagagatacaagcaaactgtgagatatctttaggtttcaggtttataggaccaaaatagaagtattctagggaagaagggtatagttt

SEQ ID NO: 49950 - DNA, 120 bp, synthetic construct
  source 1..120: mol_type = other DNA
ggtggggccttctaggtaattctgacgtccactaaaggttcagaaccactggtctaggaaaaagaaggatgaaggtaaaaaacattcattcattaatatacctcctttgaggttcaaaag

SEQ ID NO: 49951 - DNA, 120 bp, synthetic construct
  source 1..120: mol_type = other DNA
ccgaatgccaagcctgacaagcacgtagcaggttacatacctgggtacactacagaaatttaacaaagtaatttataacccagacagtacataaggccaccttctgacttgggcctttcc

SEQ ID NO: 49952 - DNA, 120 bp, synthetic construct; identical to SEQ ID NO: 13955
  source 1..120: mol_type = other DNA

SEQ ID NO: 49953 - DNA, 120 bp, synthetic construct
  source 1..120: mol_type = other DNA
aaggttcatatcccagcttagccactgaataagtgactataggcaacttactctaagcctgcttcctcttcctatcctgcctcttaaggctgtaagaagttaatggggtatcagacatgt

SEQ ID NO: 49954 - DNA, 120 bp, synthetic construct
  source 1..120: mol_type = other DNA
attgctgggtacataatgcttagcagtctatccatttaacaactggtatttgaaacattgatacaaccattgtataacttaaaatggatacagttcaagtttgttactatgctctgtgaa

SEQ ID NO: 49955 - DNA, 120 bp, synthetic construct
  source 1..120: mol_type = other DNA
ttactccaacacttctgggcctctactgccatcatatttacttaagagagtgacctgtgagttgtagggcagtaactactatgctttattttggactaaagcatggtttttaagacattt

SEQ ID NO: 49956 - DNA, 120 bp, synthetic construct
  source 1..120: mol_type = other DNA
aggtcctgagacagtgtattttatacacagtatataaaatttgcatttttattctctcccatgaaaacagacataaagttactaatttctagcaactacagtcttaaaaagtaaaccaga

SEQ ID NO: 49957 - DNA, 120 bp, synthetic construct; identical to SEQ ID NO: 13956
  source 1..120: mol_type = other DNA

SEQ ID NO: 49958 - DNA, 120 bp, synthetic construct
  source 1..120: mol_type = other DNA
ggctcaaagtcaccaatttgcttggtttttataaaaccattaacaggttgactcaatcgatttagtcagaatatttaaatgacaccccaaaggactttaaatcacagaaatgtaggccta

SEQ ID NO: 49959 - DNA, 120 bp, synthetic construct
  source 1..120: mol_type = other DNA
ttgagatattgctatatttggctcatcggcattcaagaatatccaattaattccaggaaaagctaattttagttcactatggccctggaacccagaaataaacatacctgtagccaaaca

SEQ ID NO: 49960 - DNA, 120 bp, synthetic construct
  source 1..120: mol_type = other DNA
aataaatgaaaatagccagaatgatacttgaagccagtggtcctcaacctccggtgcacataagaatcagtcttcttccaaaatatatatacaaggtgtccgaatatgtaggtctaccta

SEQ ID NO: 49961 - DNA, 120 bp, synthetic construct; identical to SEQ ID NO: 13957
  source 1..120: mol_type = other DNA

SEQ ID NO: 49962 - DNA, 120 bp, synthetic construct
  source 1..120: mol_type = other DNA
aacgtaccaagtgtttatgacaccaggaaatgcatgcagcagagaaagtttacatcatctgcccttctaggcacgtgatataagagtgttttggataagatattaactttagtaagagga

SEQ ID NO: 49963 - DNA, 120 bp, synthetic construct
  source 1..120: mol_type = other DNA
ttgcctgatgcatgactgttaaaggtgcatttccctacacaaccctaaatcagttttcacatttgcatattccagatttactcaggaatgttcaatttaagaatcacaggtggttgctcg

SEQ ID NO: 49964 - DNA, 120 bp, synthetic construct
  source 1..120: mol_type = other DNA
tatctcagaagagtattattctattttagcacttttatagcttactctatgcaacgtgaagtgttatttgtatgctttctatttaaaaaaaaaaaaaagccagcaaggattttagcagga

SEQ ID NO: 49965 - DNA, 120 bp, synthetic construct; identical to SEQ ID NO: 13958
  source 1..120: mol_type = other DNA

SEQ ID NO: 49966 - DNA, 120 bp, synthetic construct
  source 1..120: mol_type = other DNA
gaggtgttaacagtggctgcctcttctctttgtcgtgaggaccaaaggagataatgactgccaagcactttcacagtgcctggcacacagagagcactccattaacgttagctgttgttc

SEQ ID NO: 49967 - DNA, 120 bp, synthetic construct
  source 1..120: mol_type = other DNA
ctcttcatcctccagttcctcaaatgaatgaatgaacgcctaggaggggctctgcaaatagctgtctcttaggaatcccctttgcccactttaaggtaactgtctttcaccaccaattaa

SEQ ID NO: 49968 - DNA, 120 bp, synthetic construct; identical to SEQ ID NO: 13959
  source 1..120: mol_type = other DNA

SEQ ID NO: 49969 - DNA, 120 bp, synthetic construct
  source 1..120: mol_type = other DNA
cccggccgggccagccggagatagcgtgtaataagagggaggggagagctctccgaaccccccttccccgggatccctaccaagcaagtgagtctcttgctccagcccctccgagcctcc

SEQ ID NO: 49970 - DNA, 120 bp, synthetic construct
  source 1..120: mol_type = other DNA
cctacagggcgccgccatcttggacgtacagcacctcccccgtcgtgaaagggccaaggccgacggcggcctccgccacgaaaaagagtccccctccggacctcccctccttctcgaaag

SEQ ID NO: 49971 - DNA, 120 bp, synthetic construct
  source 1..120: mol_type = other DNA
ccgggcggaaggatccgaaaggaggctgcgaagagatcttgtgactccgcgaaggaggcaaaaagaagggccggcgcggcgggaggagccacgcgagagcccgagggggcggggcgggcg

SEQ ID NO: 49972 - DNA, 120 bp, synthetic construct
  source 1..120: mol_type = other DNA
gcgccctccgagggtctctctgtgggcggcctcagagcagcgatcctgtttcccaaggagctgctggggcccgcgtgggtgaagggcctgcttgggagctttggagttgcagctcacctg

SEQ ID NO: 49973 - DNA, 120 bp, synthetic construct; identical to SEQ ID NO: 13960
  source 1..120: mol_type = other DNA

SEQ ID NO: 49974 - DNA, 120 bp, synthetic construct
  source 1..120: mol_type = other DNA
cacaaagccctgtgagaggaggcagagtgagatgaagtcgaactgtgggatatgaaaggcattttgaaggagtaggcatcaggttgggttttaaaggaaatgtaggttttgtgaaatact

SEQ ID NO: 49975 - DNA, 120 bp, synthetic construct
  source 1..120: mol_type = other DNA
aggagcaagagcctaggggcaaaaaagtgttgggtgagttatgggaataacaggttttgtcatgggaaccaattgggtcacagtgcaaggcagccatggttaaggggggccaggtgtgtg

SEQ ID NO: 49976 - DNA, 120 bp, synthetic construct; identical to SEQ ID NO: 13961
  source 1..120: mol_type = other DNA

SEQ ID NO: 49977 - DNA, 120 bp, synthetic construct
  source 1..120: mol_type = other DNA
tgcaacatagggctaataataatgctagttcatggggatttggggtgaagtcagtgagtcattaagctctaagtggcacagagcctactccagttaatgttatttttgataactgttaag

SEQ ID NO: 49978 - DNA, 120 bp, synthetic construct
  source 1..120: mol_type = other DNA
gaagggtctgggttctctcagttccaccaatctgcaaactactttacaggaacagactcttccctttgcattcacaccagggaagggattcaagatttctgaaatcttcagagatttctg

SEQ ID NO: 49979 - DNA, 120 bp, synthetic construct
  source 1..120: mol_type = other DNA
cacaccctgaccttccttggctccatgacctcatcctgcaggaatgcattctgccatggaggagagcagccataagcagagctcatcaactgctcactttccagggggccataaccacat

SEQ ID NO: 49980 - DNA, 120 bp, synthetic construct; identical to SEQ ID NO: 13962
  source 1..120: mol_type = other DNA

SEQ ID NO: 49981 - DNA, 120 bp, synthetic construct
  source 1..120: mol_type = other DNA
taagtcatggcgggtgcgaacgggtctctgctgcaggcggctccgtgacagctcctgcttcacatgggtagaggagagacggcaaacgtcggggctcccaggacttcgcggcggcagtcc

SEQ ID NO: 49982 - DNA, 120 bp, synthetic construct
  source 1..120: mol_type = other DNA
gtagttgagttctcccagggagtgtgggaggaaaggttatgcccaccagagacccagggtcctgacggctggaggtccgcagtggggaaggtgggcagaggtgttgctcagatgtcccca

SEQ ID NO: 49983 - DNA, 120 bp, synthetic construct
  source 1..120: mol_type = other DNA
gaggccaaatcccaggtctgcagagggtaaacagacggagtttatcatcaccgcggaaatactgagagtgagtgagctacctgtgtctttgctaggctagagggaaatgcagagaaggct

SEQ ID NO: 49984 - DNA, 120 bp, synthetic construct; identical to SEQ ID NO: 13963
  source 1..120: mol_type = other DNA

SEQ ID NO: 49985 - DNA, 120 bp, synthetic construct
  source 1..120: mol_type = other DNA
agatgttgatgaaagaaagcccatcttatagatgaggcctgagtatcatcatcttcacaggtaaggatatgtccaggtgttacatgataagatgtgagttcctgggagaagtaggttctt

SEQ ID NO: 49986 - DNA, 120 bp, synthetic construct
  source 1..120: mol_type = other DNA
cctctgcctcccagtttcaagtggttctcctgcctcagcctcctgagtagctgggactacagacacgtgccaccacacccatttaatttttgtatttttagtagagatggagtttcacta

SEQ ID NO: 49987 - DNA, 120 bp, synthetic construct
  source 1..120: mol_type = other DNA
tgagccatcgcacatgggctaggtcgttatcttttatgtgtgtttgtgtctttgtcacacatgcctggcattgtgttttgcccatgagtaaatgctgaatttttgcacttgtaaagtttt

SEQ ID NO: 49988 - DNA, 120 bp, synthetic construct
  source 1..120: mol_type = other DNA
ctgaggtcaggagtttgagaccagcctggccaacatggcgaaaccccgtctctactaaaaataccaaaaattagccggtcatagtggtgggcgcctgtaattccagctactcggggggct

SEQ ID NO: 49989 - DNA, 120 bp, synthetic construct
  source 1..120: mol_type = other DNA
attgtatttcatgttatgttttatctcaatacaacatttgcagttgtgaaaaaaaattgcacattctcaactcctcgggatggagcagtaaagcccctcagtaaatcttttttttttttt

SEQ ID NO: 49990 - DNA, 120 bp, synthetic construct; identical to SEQ ID NO: 13964
  source 1..120: mol_type = other DNA

SEQ ID NO: 49991 - DNA, 120 bp, synthetic construct
  source 1..120: mol_type = other DNA
gcggctcgtcaagtgaatcttgattccagaaagatctgttttaagtctctagtctggaaaatgcagtgggagtctttaggtggtttgtgacttgcagttaaggagaccgtggcctgagca

SEQ ID NO: 49992 - DNA, 120 bp, synthetic construct
  source 1..120: mol_type = other DNA
gcagatttgtgaagtcgcaaaaaccaagaaatttgaagaggtaggtttatccagttgagctactagagagaggcacgtagactattcagagcctgagtttgctttttttaggaacatggt

SEQ ID NO: 49993 - DNA, 120 bp, synthetic construct
  source 1..120: mol_type = other DNA
gttcaagcagttctcctgcctcagcctcctgagtagctgggattacaggcacgcgccaccacacccggctttttgtatttttagtagagacggggtttcgccatgttggccaggctggtc

SEQ ID NO: 49994 - DNA, 120 bp, synthetic construct; identical to SEQ ID NO: 13965
  source 1..120: mol_type = other DNA

SEQ ID NO: 49995 - DNA, 120 bp, synthetic construct
  source 1..120: mol_type = other DNA
aggccgaggtgggtggatcacgaggtcaggagttcaagaccactctggccaacatggcgaaaccccgtctgtactaaaagatgatgagccgggcatggtggcacatgcctgtaatcccag

SEQ ID NO: 49996 - DNA, 120 bp, synthetic construct
  source 1..120: mol_type = other DNA
aaaaaaaggaagagtttgtagtggctgatagaaacgcatgctcactcgctctctcctgttacaagttcaggccaagaaaaatcaagaaagggtttgttccacagagaacaatcctaggca

SEQ ID NO: 49997 - DNA, 120 bp, synthetic construct; identical to SEQ ID NO: 13966
  source 1..120: mol_type = other DNA

SEQ ID NO: 49998 - DNA, 120 bp, synthetic construct
  source 1..120: mol_type = other DNA
tctgaaacgtgctggccgtacgctaccaaagataggtgtaaagaacaggtgtccttagccgggcgcagtggttcacgcctgtaatcccagcactttgggaggccaaggtggatggatcac

SEQ ID NO: 49999 - DNA, 120 bp, synthetic construct
  source 1..120: mol_type = other DNA
agggaggagaatcgcttaaactcaggaggcagaggttgtggtgagctgagattgtgccattgcactgcagcctgggcaacagagcaagactgtctcagaaaacaaaaaaaagaacaagcg

SEQ ID NO: 50000 - DNA, 120 bp, synthetic construct
  source 1..120: mol_type = other DNA
tgcaacggtaagagtattgtcaatgagacaaaggaggtgagagtgccagttgtctgaattggttgggatgttggtcagatgacatctaaaagaacacggccattttgttattatttggtt

SEQ ID NO: 50001 - DNA, 120 bp, synthetic construct; identical to SEQ ID NO: 13967
  source 1..120: mol_type = other DNA

SEQ ID NO: 50002 - DNA, 120 bp, synthetic construct
  source 1..120: mol_type = other DNA
aaggccaggaatgagcctgtggtctgaaagccgtggctgttggttaatgtggagaagggaaggtggtgagagccagcccaaacccctgccgagtgagactgattctggcagctttaggga

SEQ ID NO: 50003 - DNA, 120 bp, synthetic construct
  source 1..120: mol_type = other DNA
gagggcccgatgctggtgtgttcactagaggagagccacaagcagggattctgggtcaggtgcaggcctagggcttagtgtgcacttgtggttctgagactgtcccatgacttcctgcca

SEQ ID NO: 50004 - DNA, 120 bp, synthetic construct
  source 1..120: mol_type = other DNA
ctggggtttgaggaagctctgagccgttccctgtacgaagcctgtggtcatctcaggctgcaggagacacaggagatacgagctttggaggtggggctctcagtcacaagcccccgttgt

SEQ ID NO: 50005 - DNA, 120 bp, synthetic construct
  source 1..120: mol_type = other DNA
cggtcgcggatctgttgcagccggagcggccgctggaggcccggcacgcggtgctggctctgctgaaggccatcgtgcaggggcaggtaaggcccagggcgacgctgggatgggtgacgt

SEQ ID NO: 50006 - DNA, 120 bp, synthetic construct; identical to SEQ ID NO: 13968
  source 1..120: mol_type = other DNA

SEQ ID NO: 50007 - DNA, 120 bp, synthetic construct
  source 1..120: mol_type = other DNA
ccaggcctcttggtgttcctgcctcccctggtcggccacttctactccttcatgtcccagctgctcagaagggccgtccactctcacaggctctcctgggtttcccccactcaggccttg

SEQ ID NO: 50008 - DNA, 120 bp, synthetic construct
  source 1..120: mol_type = other DNA
ccccatacgccgctctgcggtcggccggtgcatccggccccctgccctgtacaatgctgatgctgcagacctgtctcttgcagggcgcctctgtgggaaggagaggggtccagggctgga

SEQ ID NO: 50009 - DNA, 120 bp, synthetic construct; identical to SEQ ID NO: 13969
  source 1..120: mol_type = other DNA

SEQ ID NO: 50010 - DNA, 120 bp, synthetic construct
  source 1..120: mol_type = other DNA
tgcttcatgcacctgggctcacctgcgtggccggagtgcccctgaggcacgtgttaaaaatgcagagtcctggccttcaccccagacctgctgactgtgagtctctggggcttggggcct

SEQ ID NO: 50011 - DNA, 120 bp, synthetic construct
  source 1..120: mol_type = other DNA
accttcctcctgccatcctgtggtgggaggtttccattagtcttgggtctctgtgtcatgattctgggaagtagagaaagaggaggaagagatcggtctgactctggctttgctgttctg

SEQ ID NO: 50012 - DNA, 120 bp, synthetic construct
  source 1..120: mol_type = other DNA
ccgagccactctctgctgggggtggggaacgcccaggagtctggtgatgtcggcgtctcccagcctcgggttgggccctgagtgtacggcatacacacttctgctgccgcctcggcacag

SEQ ID NO: 50013 - DNA, 120 bp, synthetic construct
  source 1..120: mol_type = other DNA
gggcccagtgcgtggtctgtctgttgctgccgggggactgatgatggggtttctggcagtgacgggtttggacacactgtcctgcggcgggagggggaggtgagtgggagatgtagattc

SEQ ID NO: 50014 - DNA, 120 bp, synthetic construct; identical to SEQ ID NO: 13970
  source 1..120: mol_type = other DNA

SEQ ID NO: 50015 - DNA, 120 bp, synthetic construct
  source 1..120: mol_type = other DNA
ttacctcgacgagtacatcgcaaggatggttcagtaagaaaagaattgagatcctgttctgataatggtcctaagttcagctccgcagtgaataaagttgaaaccaccaaaaaaatagag

SEQ ID NO: 50016 - DNA, 120 bp, synthetic construct
  source 1..120: mol_type = other DNA
tcgagaccagcctggccaacatggtgaaaccctgtctctactaaaaatacaaaaattagccgggcatggtggtgggagcctgtaatcccagctactcaggaggctgaggcaggagaattg

SEQ ID NO: 50017 - DNA, 120 bp, synthetic construct
  source 1..120: mol_type = other DNA
cttctgtttagctctcatctgatgtcttggttatctttttgttgtttgtttagaatgttgcatgagctctgtctcactcatgctgaacacccagcaccgagagcagtggctggcgcacag

SEQ ID NO: 50018 - DNA, 120 bp, synthetic construct
  source 1..120: mol_type = other DNA
agaccacagcccgtggtggctcggccatccaggcagtgctgccgggactgagctcggtgctccctgcaggatgatctgtctgctgtgcgtccggaccgcgtcctctgtggacatagaggt

SEQ ID NO: 50019 - DNA, 120 bp, synthetic construct; identical to SEQ ID NO: 13971
  source 1..120: mol_type = other DNA

SEQ ID NO: 50020 - DNA, 120 bp, synthetic construct
  source 1..120: mol_type = other DNA
gggtaggacgggcgtgagccgtctccctctccaccaggtctccctgcaggtgctggacgccgtggtctgctacaactgcctgccggctgagagcctcccgctgttcatcgttaccctctg

SEQ ID NO: 50021 - DNA, 120 bp, synthetic construct
  source 1..120: mol_type = other DNA
ggttgtctgattcttggggtggccagacaatggcctgttgagggacggccagtgtcattttcccaggcagttgagctgaggtcagggttttggtggcattttgagaaccctgctgcctct

SEQ ID NO: 50022 - DNA, 120 bp, synthetic construct
  source 1..120: mol_type = other DNA
acgcattgtgtctcgcagctgatgcggaacctccttggcacccacctgggccacagcgccatctacaacatgtgccacctcatggaggacaggtgagtgtggtgggtggggcgcagggca

SEQ ID NO: 50023 - DNA, 120 bp, synthetic construct; identical to SEQ ID NO: 13972
  source 1..120: mol_type = other DNA

SEQ ID NO: 50024 - DNA, 120 bp, synthetic construct
  source 1..120: mol_type = other DNA
cctggcctcccacccatgctgccagctccccctcctgctctcctgtatccatccgcgcctcctgaagcccactccatgcagcacccgggtggcctttttctgacacagatatgtcggtgt

SEQ ID NO: 50025 - DNA, 120 bp, synthetic construct
  source 1..120: mol_type = other DNA
cctgcatctctcccagccctgcctcggcccctgcatctctcccagccctgcctcggcccctgcatctctcccagccctgcctcggcccctgcatctctcccagccctgcctcggcccctg

SEQ ID NO: 50026 - DNA, 120 bp, synthetic construct
  source 1..120: mol_type = other DNA
ttccttccctccatccttggaaccaggccctggggcccagccctgcctcagccctgcatctctcctagccctgcctcagcccctgcatctctccctccctcctcccgtagaaccaggccc

SEQ ID NO: 50027 - DNA, 120 bp, synthetic construct; identical to SEQ ID NO: 13973
  source 1..120: mol_type = other DNA

SEQ ID NO: 50028 - DNA, 120 bp, synthetic construct
  source 1..120: mol_type = other DNA
acagcgtggtcagcagtgatgggctgccgcctgtgcgcaggagtgaacaagagtgttactgctggcctctgttccctgcccttccccagcggtgctcctgccccccccaagcacagggac

SEQ ID NO: 50029 - DNA, 120 bp, synthetic construct
  source 1..120: mol_type = other DNA
ccctgctgagaggagccgtgttttttgtgggcatggctctctggggagcccaccggctctattctctcaggaactcgccgacatctgtgttgccatcattttaccaggtaaggcggtttc

SEQ ID NO: 50030 - DNA, 120 bp, synthetic construct
  source 1..120: mol_type = other DNA
cagctgggggtgaggtttggggccctttgtaggctttagtcttttttttttttttgagaaggagttctgctctttctgcttggctgactgcaatctccgcctcccggattcaagtgattc

SEQ ID NO: 50031 - DNA, 120 bp, synthetic construct; identical to SEQ ID NO: 13974
  source 1..120: mol_type = other DNA

SEQ ID NO: 50032 - DNA, 120 bp, synthetic construct
  source 1..120: mol_type = other DNA
ctgccacagtgcctggctaatggttttttttttttttttttttttttaatgggacagagtttcgctcttattgcccaggctggagtgcaatggcgcgatcttggctcagcgcaacctccg

SEQ ID NO: 50033 - DNA, 120 bp, synthetic construct
  source 1..120: mol_type = other DNA
caggctggtctcaaactcccgacctcaggtgatccgccagcctcagcctcccaaagtgctggaattataggtatgagtcaccgtgcccggccaaggctaatgttttgtatttttattaga

SEQ ID NO: 50034 - DNA, 120 bp, synthetic construct
  source 1..120: mol_type = other DNA
ctttattctcaagcaaaccttacatcttgcgagtttcaccttctggagttggcagtggaggggtgaacgctgcctcgggggtagccgttctcttgctgttggcggctctgttttgtcaag

SEQ ID NO: 50035 - DNA, 120 bp, synthetic construct; identical to SEQ ID NO: 13975
  source 1..120: mol_type = other DNA

SEQ ID NO: 50036 - DNA, 120 bp, synthetic construct
  source 1..120: mol_type = other DNA
tgcaggcaggcatgggggtggggcccgtctgggtcctgactgtgctggagcatgtagaaacccctcctgggcgccccacctgctgtttctgcggcccctgataaacgtgtggtgggcact

SEQ ID NO: 50037 - DNA, 120 bp, synthetic construct
  source 1..120: mol_type = other DNA
cgaggtggtgtcctatgagatcgtcctgtccatcaccaggctcatcaagaagtataggaaggagctccaggtggtggcgtgggacattctgctgaacatcatcgaacggctccttcagca

SEQ ID NO: 50038 - DNA, 120 bp, synthetic construct
  source 1..120: mol_type = other DNA
gaaccgtgttctctggtgattcgcagtggcgctcatccaccttccaccggagacaggtctgatttttccagacgtggtgcatcgtttaggccccagacaggaatatgcagtaggtgagcc

SEQ ID NO: 50039 - DNA, 120 bp, synthetic construct; identical to SEQ ID NO: 13976
  source 1..120: mol_type = other DNA

SEQ ID NO: 50040 - DNA, 120 bp, synthetic construct
  source 1..120: mol_type = other DNA
ttgcccccgaccgctggtggcagtggcagaggtcatagcctggggcttctaaaagaggctggacctgggagaggcaagaaaggcttgtagttgtggctactcttggccctcctgcccgag

SEQ ID NO: 50041 - DNA, 120 bp, synthetic construct
  source 1..120: mol_type = other DNA
tgggccacgtgggtcagggtggcccctggagaggatctgggggtgtctcaacccatgaggcccggagcggcctcagagggctgggggcgtctgtccccatgcggcccagagcggcctgag

SEQ ID NO: 50042 - DNA, 120 bp, synthetic construct
  source 1..120: mol_type = other DNA
agctcaggaccatcgtccatgacctgttgaccacggtggaggagctgtgtgaccagaacgagttccacgggtctcaggagagatactttgaactggtggagagatgtgcggaccagaggc

SEQ ID NO: 50043 - DNA, 120 bp, synthetic construct; identical to SEQ ID NO: 13977
  source 1..120: mol_type = other DNA

SEQ ID NO: 50044 - DNA, 120 bp, synthetic construct
  source 1..120: mol_type = other DNA
tggacacaagtcttccccgctgccaggagtgcctttgtgtctgggctgtgggctgcaggctgtgaggcggctgggctctgacagcaaaccagcctctcgaccagcagcccagtgtggaga

SEQ ID NO: 50045 - DNA, 120 bp, synthetic construct
  source 1..120: mol_type = other DNA
agaacctgcaggcgctgatggagagattcttcaggtagggggtcctctgtagccttgcctggcacctggagcctggccctgtctctgtctggggcccacccgggctgggtctcaggatgc

SEQ ID NO: 50046 - DNA, 120 bp, synthetic construct
  source 1..120: mol_type = other DNA
tcgggggtcgtctggagagatgctccctgggaagcagagctctgtgccctgtgtgcctggccgcgggaggacccagagtcgggctggcctgcgccaggcagacgggctggtgtggggctg

SEQ ID NO: 50047 - DNA, 120 bp, synthetic construct
  source 1..120: mol_type = other DNA
ctatgaggtgcgtgtccaggcggccgcagctgggggctcagggctatttctccgtgggcgggctgtctctgttgtgcacgtgctcccgcagagccgggctctgcctgggacttcggtcct

SEQ ID NO: 50048 - DNA, 120 bp, synthetic construct; identical to SEQ ID NO: 13978
  source 1..120: mol_type = other DNA

SEQ ID NO: 50049 - DNA, 120 bp, synthetic construct
  source 1..120: mol_type = other DNA
tgtgcctgccagtcatacccctttcccaggaggcgcagcttaggctctgaggctgtcccttcccaccgaactcctccctgcagcctcgcagtcctgccctcctgagagctgcccactctg

SEQ ID NO: 50050 - DNA, 120 bp, synthetic construct
  source 1..120: mol_type = other DNA
tcagggctggtcttgtcctggtctctgttcctgtggaactttttacctgcttctgtgaaaactcacgctgtcctcagcacagcacgcacacacacgcatattcacgcatgcacaggcaca

SEQ ID NO: 50051 - DNA, 120 bp, synthetic construct
  source 1..120: mol_type = other DNA
cttgtgagttgtgggccccgtgtctgtgcccggccgccctgcggtgctcaccagccttctgaacgaggagctggacaggatccctggaaggggccccggggtctctgagtcgcgctcagc

SEQ ID NO: 50052 - DNA, 120 bp, synthetic construct; identical to SEQ ID NO: 13979
  source 1..120: mol_type = other DNA

SEQ ID NO: 50053 - DNA, 120 bp, synthetic construct
  source 1..120: mol_type = other DNA
ggcctctgggccctctgtcctcctcttcgagtgaccggatggctgtgtccgtaggtgaggctcccctccctgcagggtgggtgtcccgaggcctgtgcagggcctgccactgctggattt

SEQ ID NO: 50054 - DNA, 120 bp, synthetic construct
  source 1..120: mol_type = other DNA
cctgcccagccaacagctttgctctttgattttcagatgcattttggtttctgcacagtcactcgggtataaagggcatctttgcttttgagcaataaagatgaaggccgggcacagtgg

SEQ ID NO: 50055 - DNA, 120 bp, synthetic construct
  source 1..120: mol_type = other DNA
agctgcacgtggtggcgggcacctgcaatcccagctgctcaggaggctgaggcaggagaatcgcttgaacctaggaggtgaaggttgcagtgagccaagattctgccactgcactccagc

SEQ ID NO: 50056 - DNA, 120 bp, synthetic construct
  source 1..120: mol_type = other DNA
atcaagaccatcctggctaacacggtgaaaccccatctctactaaaaatacaaaaaattagctgggcgtggtggcgggcgcctgtagtcctagctactggggaggctgaggcaggagaat

SEQ ID NO: 50057 - DNA, 120 bp, synthetic construct; identical to SEQ ID NO: 13980
  source 1..120: mol_type = other DNA

SEQ ID NO: 50058 - DNA, 120 bp, synthetic construct
  source 1..120: mol_type = other DNA
caccagctgcatctgcgttgtgttggagtctgttccccagcgggacccacaccctccctggatttgctgagggtgcggtggtctcagcaggcagcagaaccttcctcctgctcttgtgga

SEQ ID NO: 50059 - DNA, 120 bp, synthetic construct
  source 1..120: mol_type = other DNA
cacctgggaagtaagggtggccctccattcctgccctgcagtccgtttaatatttgcagctgttttgttgagatttaatttacatatcatgcaatttacccattcacagtgaacagttca

SEQ ID NO: 50060 - DNA, 120 bp, synthetic construct; identical to SEQ ID NO: 13981
  source 1..120: mol_type = other DNA

SEQ ID NO: 50061 - DNA, 120 bp, synthetic construct
  source 1..120: mol_type = other DNA
tattccatcatctggaaggagcacattttgtctgtccgttcctccattggtggacatttggcctgtgtccgccttgcagctgcggtgagtggtgctgctgtgaaccttctcctacgaggg

SEQ ID NO: 50062 - DNA, 120 bp, synthetic construct
  source 1..120: mol_type = other DNA
ggagtgaattgttgggccctaggtttagtctgcatttggtgtttcaaggcgataccaggctgttttccactggtgctgtgccattttccatccactcgagcagcatgtaagggttctgat

SEQ ID NO: 50063 - DNA, 120 bp, synthetic construct
  source 1..120: mol_type = other DNA
tctcctacctcagcctcctgagcatctcgtattacaggcacctgccaacatactcggctaattttttgtattattagtagaaactgggtttcaccatgttggccaggctggtcttgaact

SEQ ID NO: 50064 - DNA, 120 bp, synthetic construct; identical to SEQ ID NO: 13982
  source 1..120: mol_type = other DNA

SEQ ID NO: 50065 - DNA, 120 bp, synthetic construct
  source 1..120: mol_type = other DNA
ggggtgcagtgctgtgaccatagctcagtgcagccttgaactcctgtgaccaagtgatcgtcctgcctcggaggcctcccaagtagctgggaccataggcacacgtcaccacacctggct

SEQ ID NO: 50066 - DNA, 120 bp, synthetic construct
  source 1..120: mol_type = other DNA
ccaccacacctggccgtggtgtttgattaaaaaccaggcatcagccgggtgtggtggctcatgcccgtaatcccagcactttgggaggctgaggtgggtggatcacctgaggttgggagt

SEQ ID NO: 50067 - DNA, 120 bp, synthetic construct; identical to SEQ ID NO: 13983
  source 1..120: mol_type = other DNA

SEQ ID NO: 50068 - DNA, 120 bp, synthetic construct
  source 1..120: mol_type = other DNA
aaagaggttctgttgcccttacttggaactccagccctggaggcctgagggtctgggctgcagaactgagatatttcctagttgaggcagagtcctggttctggctgctttcatttcttt

SEQ ID NO: 50069 - DNA, 120 bp, synthetic construct
  source 1..120: mol_type = other DNA
cctcccaggttcaagcaattctcttgcctcagcctcctgagtagctgagatgacaggtgcgcaccaccacacctggctaatttttgtatttttagtagtgacatggtttcaccatgttgg

SEQ ID NO: 50070 - DNA, 120 bp, synthetic construct; identical to SEQ ID NO: 13984
  source 1..120: mol_type = other DNA

SEQ ID NO: 50071 - DNA, 120 bp, synthetic construct; identical to SEQ ID NO: 6508
  source 1..120: mol_type = other DNA

SEQ ID NO: 50072 - DNA, 120 bp, synthetic construct
  source 1..120: mol_type = other DNA
acatggtgaaaccccgtctctactaaaaatacaaaaattagctggatgcggtggtgcgcacctgtaatcccagctactcgggaggctgaggtaggagaatcacttgaacctgggaggtgg

SEQ ID NO: 50073 - DNA, 120 bp, synthetic construct; identical to SEQ ID NO: 13985
  source 1..120: mol_type = other DNA

SEQ ID NO: 50074 - DNA, 120 bp, synthetic construct
  source 1..120: mol_type = other DNA
ggggggtgccaggcactgtgtgaacccccacctccacctcttttttgtccgaggaagggatgttgcttttatgtcataatattttgagatgaggagaaactgttaatcatttaatcatct

SEQ ID NO: 50075 - DNA, 120 bp, synthetic construct
  source 1..120: mol_type = other DNA
gctgggatttacaggcatgcaccaccacacctggctaatttttttttttttttgagacagtcttgctctgtcgcccaggctggagtgcagtggcacgatctcggctcactgcaagctctg

SEQ ID NO: 50076 - DNA, 120 bp, synthetic construct
  source 1..120: mol_type = other DNA
agccaggatggtcttgatctcctgacctcatgatccacccgcctcggcttcccaaagtgctgggattacaggcgtgagccactgtgcccggcctaattttgtatttttagtagagatggg

SEQ ID NO: 50077 - DNA, 120 bp, synthetic construct; identical to SEQ ID NO: 13986
  source 1..120: mol_type = other DNA

SEQ ID NO: 50078 - DNA, 120 bp, synthetic construct
  source 1..120: mol_type = other DNA
cactccccgccccattctgccctgtctgccacgcagctggagcttctccattgaatggactcttcctcacctgttgatgactgccctgatgatgagatgggcacgaggttgggttttact

SEQ ID NO: 50079 - DNA, 120 bp, synthetic construct
  source 1..120: mol_type = other DNA
ctgcgttttcacctcctgcgccgtggtgagctgcgtcctctctctgcagaccaagctgtacaccctgcctgcaagccacgccacgcgtgtgtatgagatgctggtcagccacattcagct

SEQ ID NO: 50080 - DNA, 120 bp, synthetic construct; identical to SEQ ID NO: 13987
  source 1..120: mol_type = other DNA

SEQ ID NO: 50081 - DNA, 120 bp, synthetic construct
  source 1..120: mol_type = other DNA
aggacctgcagcagagggctgggcaggtgggcggcacagggcagagctgagagggcagagctgagacggcagggcagggctggagagggcagagctgagagggcagggcagggatgggca

SEQ ID NO: 50082 - DNA, 120 bp, synthetic construct
  source 1..120: mol_type = other DNA
ggcctcagagtcctgttcagcctgtcgatggaagaagtggcagggctgggagctgagctccgctttctggcagttgggggcgtgtggtgctgccagaggagcgaggcgcccatcccttcc

SEQ ID NO: 50083 - DNA, 120 bp, synthetic construct
  source 1..120: mol_type = other DNA
gttgggatgtgggtgtgtgcacatcagcaggtggccttttctgagtgcctgtggtgctggacgtgggtctgagcaggtgggacgccgcctgtcctgggcctgcacgagcttggctctggc

SEQ ID NO: 50084 - DNA, 120 bp, synthetic construct; identical to SEQ ID NO: 13988
  source 1..120: mol_type = other DNA

SEQ ID NO: 50085 - DNA, 120 bp, synthetic construct
  source 1..120: mol_type = other DNA
tggcccggcgcctgcaggccccgccgtgcggctggggtccgtgccctactccctgctcttccgcgtcctgctgcagtgcttgaagcaggtgagtggggccgggcagggaccatccgtccc

SEQ ID NO: 50086 - DNA, 120 bp, synthetic construct
  source 1..120: mol_type = other DNA
gacagaggcctgcgctgggcaggctcccccggctgagaacagggctccatagcccttgacgctgtgcagccacaaagcagagcctcagatgctagcttccgcctctgtctctagggtcca

SEQ ID NO: 50087 - DNA, 120 bp, synthetic construct
  source 1..120: mol_type = other DNA
cagtgtggaccagctgtgctctgctctctgctccatggtaccatggccggcctggggttggggtgggggacccagtagggtttttccccaaaagactgcgagcctctgggcagagcgagt

SEQ ID NO: 50088 - DNA, 120 bp, synthetic construct; identical to SEQ ID NO: 13989
  source 1..120: mol_type = other DNA

SEQ ID NO: 50089 - DNA, 120 bp, synthetic construct
  source 1..120: mol_type = other DNA
tggccgctggggagaggtttcatgcctggatttggtcatcagctttcaggcccaaagacactggagcggctccgaggcgccccagaaggcttctccagaactgacttgcacctggccgtg

SEQ ID NO: 50090 - DNA, 120 bp, synthetic construct
  source 1..120: mol_type = other DNA
taggccccacatttttctcataaacgagtttctgccaggccagggatgagtgagttggctctgcttccctgggtggctgccagatgcccagagtggggacatccgattccctggtgcttc

SEQ ID NO: 50091 - DNA, 120 bp, synthetic construct
  source 1..120: mol_type = other DNA
cggttggtggagctgggctggttctgaggcgcagggtgggcaggccagagagtctggcttctgcctccctccacgccccatcaggtgccggaaactgtcccttcacctgcgatctgcctc

SEQ ID NO: 50092 - DNA, 120 bp, synthetic construct
  source 1..120: mol_type = other DNA
ctgaggcttggcccatctgtgccccgggcctcagcttctgatggtggccctgtagggagctgttgttgggttcccatccctcaggctcagccccaccctgttgggccccttcagcccctc

SEQ ID NO: 50093 - DNA, 120 bp, synthetic construct; identical to SEQ ID NO: 13990
  source 1..120: mol_type = other DNA

SEQ ID NO: 50094 - DNA, 120 bp, synthetic construct
  source 1..120: mol_type = other DNA
tgcaactgaccggagcagtctgctgtgcagagtctgctcgggtagctcagcactgctggctctgccccacaggcattcagggacttgctaagcctcggctgttctcccggtggagcactc

SEQ ID NO: 50095 - DNA, 120 bp, synthetic construct
  source 1..120: mol_type = other DNA
cagccagtgcgtcgtggccttgtccatctgcagcgtggagatgcctgacatcatcatcaaggcgctgcctgttctggtggtgaagctcacgcacatctcagccacagccagcatggccgt

SEQ ID NO: 50096 - DNA, 120 bp, synthetic construct
  source 1..120: mol_type = other DNA
cctgggtgtctcgccttctgctgcctcagggcctgggcgtctctgcccggctgccatgagtgctctccttcctggctttgaggggcggctcctctcacccctctagtgtccatgtgaacg

SEQ ID NO: 50097 - DNA, 120 bp, synthetic construct; identical to SEQ ID NO: 13991
  source 1..120: mol_type = other DNA

SEQ ID NO: 50098 - DNA, 120 bp, synthetic construct
  source 1..120: mol_type = other DNA
gcactgtgggaggccgaggcgggtggatcacctgaggtcaggagttcgagaccagcctggccaacctggcgaaaccctgtctctactaagaatacaaaaattagccgggtgtggtggcgg

SEQ ID NO: 50099 - DNA, 120 bp, synthetic construct
  source 1..120: mol_type = other DNA
agcgagacaccgtctcaaaaaaaaaaaagagagaagtgaggccgggcacggtggctcacgcctgtaatcccagcactttcggaggccgaggcaggcggatcatgaggtcaggagatcgag

SEQ ID NO: 50100 - DNA, 120 bp, synthetic construct
  source 1..120: mol_type = other DNA
aacccagggggtggagcttgcagtgagccgggatcgcgccactgcactccagcctgggcgacagagccagactcatctcaaaaaaaaaaaaaaaaaaaaaaaaagaggtgcggaagcctt

SEQ ID NO: 50101 - DNA, 120 bp, synthetic construct; identical to SEQ ID NO: 13992
  source 1..120: mol_type = other DNA

SEQ ID NO: 50102 - DNA, 120 bp, synthetic construct
  source 1..120: mol_type = other DNA
cgtggcccccgctaggccttgcggcagaaagccccggcagcctttgtccccaaggcctgagcgcctcggttttttgcacttcatgccctggggatgtttccctgctgccaggatggagtg

SEQ ID NO: 50103 - DNA, 120 bp, synthetic construct
  source 1..120: mol_type = other DNA
taaggtgggctcagggccggtgaaggctgtgtctctcggtaggccagggcttgctttgcccttggctgtccatggtcgggcagagtgacaggcaggtggagggcagtgggagggtgtttg

SEQ ID NO: 50104 - DNA, 120 bp, synthetic construct
  source 1..120: mol_type = other DNA
ggccagggggcacccggcaggcctggtgagggcctccagcccccattgccacccctcactgtctgggtgtgctcactctgccagggcctgcggtccaatgtcctcttgtcttttgatgac

SEQ ID NO: 50105 - DNA, 120 bp, synthetic construct; identical to SEQ ID NO: 13993
  source 1..120: mol_type = other DNA

SEQ ID NO: 50106 - DNA, 120 bp, synthetic construct
  source 1..120: mol_type = other DNA
cctcctctgcagcccccagcctgctgctagccggggactctgcttcatcaccgccgccttgccggaccgcaaagagctgagccagcctctgtgttcttgtttgcatttcatttgaacggc

SEQ ID NO: 50107 - DNA, 120 bp, synthetic construct
  source 1..120: mol_type = other DNA
ctcaactcggaagctgttgtctccagcccctgggggccgggggccaagctcggccattacggccagagactactttctggggtcttggtctcttttcctagtgaccttcagggcctggcc

SEQ ID NO: 50108 - DNA, 120 bp, synthetic construct; identical to SEQ ID NO: 13994
  source 1..120: mol_type = other DNA

SEQ ID NO: 50109 - DNA, 120 bp, synthetic construct
  source 1..120: mol_type = other DNA
ggggcgttggggctccttcctcacccgatagtctgaggatagccagaccccccaaacaaggcttgaataactctccacccgtgaaagaattcaaggagagctctgcagccgaggccttcc

SEQ ID NO: 50110 - DNA, 120 bp, synthetic construct
  source 1..120: mol_type = other DNA
tgcatgacctcatcgtctgcccgtgtcctccctggccagcccagggggagccggtgacgaggggtggaaaggttgcattctgtccccaggccccgtatgagcacgggctggttgcacgca

SEQ ID NO: 50111 - DNA, 120 bp, synthetic construct
  source 1..120: mol_type = other DNA
gcagtgtgggttgggggagacaccactcctggttttggccttttcgtattctctagaatggacgtttttcttcgggctttcttctcaacaaggtttattttttgttgtagctgaaaggga

SEQ ID NO: 50112 - DNA, 120 bp, synthetic construct
  source 1..120: mol_type = other DNA
gcagtgtctgggtgcaggtgtgggctctcgggctctcggctgtcacctgcctgtgggtcatcgctgctggcactggcagaggggatacctgtctcctcctggaagcccgttgcaggccaa

SEQ ID NO: 50113 - DNA, 120 bp, synthetic construct; identical to SEQ ID NO: 13995
  source 1..120: mol_type = other DNA

SEQ ID NO: 50114 - DNA, 120 bp, synthetic construct
  source 1..120: mol_type = other DNA
tgtgcttgccggaggcagcctgcgggcagaatgcaatctgggcctgtctgtgtggcctccgcctctctgcatgactacaccgtttcgccaggaggccgtaacctagtgctcccgtgggct

SEQ ID NO: 50115 - DNA, 120 bp, synthetic construct
  source 1..120: mol_type = other DNA
cgttctctgggacaatgtggtccacgtgattctcaagctgaggctcgctgggccgcccacgccctgttggggtctttccgagcgaggtcctcagccgtgcatgcgttgagctttggccct

SEQ ID NO: 50116 - DNA, 120 bp, synthetic construct; identical to SEQ ID NO: 13996
  source 1..120: mol_type = other DNA

SEQ ID NO: 50117 - DNA, 120 bp, synthetic construct
  source 1..120: mol_type = other DNA
ggttgggaacaagcttgtcactgtgacgacaagcgtgggaaccgggacccggtcgttactaggcctggactcgggggagctgcagtccggcccggagtcgaggtgactgcaccttccttt

SEQ ID NO: 50118 - DNA, 120 bp, synthetic construct
  source 1..120: mol_type = other DNA
ggggtgcatgtgagacagaccaaggaggcgccggccaagctggagtcccaggctgggcagcaggtgtcccgtggggcccgggatcgggtccgttccatgtcgggtgagccttggccccag

SEQ ID NO: 50119 - DNA, 120 bp, synthetic construct
  source 1..120: mol_type = other DNA
tgagccttccacagctcaccccagagccgtggagtggtggagtgtggcccgcttgctgcagaggggcctgctctgggtgctggtgtttcctgcgggttttcagctcggctcagtcctgga

SEQ ID NO: 50120 - DNA, 120 bp, synthetic construct; identical to SEQ ID NO: 13997
  source 1..120: mol_type = other DNA

SEQ ID NO: 50121 - DNA, 120 bp, synthetic construct
  source 1..120: mol_type = other DNA
cgggttcctgtgcaggagaagacgaacctggcggcctatgtgcccctgctgacccagggctgggcggagatcctggtccggaggcccacaggtactgggcggggctggcctgagcgccat

SEQ ID NO: 50122 - DNA, 120 bp, synthetic construct
  source 1..120: mol_type = other DNA
acgctggaacgcagtggcgcaatctcggctcactgcaagctccacctcccgggttcacgccattctcctgcctcagcctcccgagtagctgggaccacaggcgcccgccaccacgcctgg

SEQ ID NO: 50123 - DNA, 120 bp, synthetic construct
  source 1..120: mol_type = other DNA
agccaccgcgcccagccatttgggggtaacttgtaagtctccagaggtgagctgtgaggggcgatccaggtggctgaggtggggcaggggcctgtggcgaaccaagtgacttccatggca

SEQ ID NO: 50124 - DNA, 120 bp, synthetic construct; identical to SEQ ID NO: 13998
  source 1..120: mol_type = other DNA

SEQ ID NO: 50125 - DNA, 120 bp, synthetic construct
  source 1..120: mol_type = other DNA
gcctttgcagaggcccagagcccaggggcgcctgggtgtgccgtggctgaggggtgcaaagagtaggggttccagccctcgtggaggccttgggtccggactgtgaggctgtgggctgga

SEQ ID NO: 50126 - DNA, 120 bp, synthetic construct
  source 1..120: mol_type = other DNA
agggagcatgagggcaaaaccagggcccaggccaggaggcccctggggggccagagatgggtaaggggaggtactggcctcaggccaaaggtgctgccgcctccgcagggaacaccagct

SEQ ID NO: 50127 - DNA, 120 bp, synthetic construct
  source 1..120: mol_type = other DNA
ccctgtacaagtcactgtcggtgccggcagccagcacggccaaaccccctcctctgcctcgctccaacacaggtgagtggcatggcgggccttggcacgggctctgctcccactggcctg

SEQ ID NO: 50128 - DNA, 120 bp, synthetic construct
  source 1..120: mol_type = other DNA
gaggtgtctgccctgctcaggaagctggggctggcagcttcagaagcagtaggggccctgtggagcctctgcccagcatcctccgtggggagtccagcactgcgggctccaggaggctct

SEQ ID NO: 50129 - DNA, 120 bp, synthetic construct; identical to SEQ ID NO: 13999
  source 1..120: mol_type = other DNA

SEQ ID NO: 50130 - DNA, 120 bp, synthetic construct
  source 1..120: mol_type = other DNA
tcctccctgtaccagtccagctgccaaggacagctgcacaggagcgtttcctgggcaggtatcgcctctcagagggaagcggttggctgcagagcgccactctgcctcataggtgctgtg

SEQ ID NO: 50131 - DNA, 120 bp, synthetic construct
  source 1..120: mol_type = other DNA
tgacttggtccctttgtggctgagccctgttcccacgctgtgcgagcactcccggcccagcttcaggcctgaggggtgggggtggcctgagtctccatggtgacatcagctgagctgcag

SEQ ID NO: 50132 - DNA, 120 bp, synthetic construct
  source 1..120: mol_type = other DNA
gtcccaggttgaccaggggccctgcagaccgacctctgcctgttgcccccaagccctggtggggagtgctgtgacctgcatggtgctcccctgccaggtctccacgtgcagacgagctgg

SEQ ID NO: 50133 - DNA, 120 bp, synthetic construct; identical to SEQ ID NO: 14000
  source 1..120: mol_type = other DNA

SEQ ID NO: 50134 - DNA, 120 bp, synthetic construct
  source 1..120: mol_type = other DNA
cctacctggaggcacaggggtggctgctggtggacactagggtgggcagagccgattgcctgcccaacccccgggcactcatgcaggagaggcctgtgtcggggtcacgtgcaggccttc

SEQ ID NO: 50135 - DNA, 120 bp, synthetic construct
  source 1..120: mol_type = other DNA
gggcctggcccagccccacatccagcagccccgtctgtgtcctcccagactccgccgtggtcatggaggagggaagtccgggcgaggttcctgtgctggtggagcccccagggttggagg

SEQ ID NO: 50136 - DNA, 120 bp, synthetic construct
  source 1..120: mol_type = other DNA
ggtgtgcctgcaccctgggaactggctctgaacttgggggagatgttcttccacatccctcgtgcacagacggtctgcactttgcagccatccacctgggccggccctggctgctgggca

SEQ ID NO: 50137 - DNA, 120 bp, synthetic construct; identical to SEQ ID NO: 14001
  source 1..120: mol_type = other DNA

SEQ ID NO: 50138 - DNA, 120 bp, synthetic construct
  source 1..120: mol_type = other DNA
tgagcaagtccagctcctctcccgagctgcagactctgcaggacatcctcggggaccctggggacaaggccgacgtgggccggctgagccctgaggttaaggcccggtcacagtcaggga

SEQ ID NO: 50139 - DNA, 120 bp, synthetic construct
  source 1..120: mol_type = other DNA
ccatctccgactcggccccatcacgcaggggcaagagagtagagagggacgccttaaagagcagagccacagcctccaatgcagagaaagtgccaggcatcaaccccaggtgggcctctt

SEQ ID NO: 50140 - DNA, 120 bp, synthetic construct; identical to SEQ ID NO: 14002
  source 1..120: mol_type = other DNA

SEQ ID NO: 50141 - DNA, 120 bp, synthetic construct
  source 1..120: mol_type = other DNA
gggcccagctctgctgctgggagctcaggcttgcagagggctctggcctaagctccctgtggcagcctgccgtgaccggcctgggtggggcggcctcctgtggacgggcgtctggggctc

SEQ ID NO: 50142 - DNA, 120 bp, synthetic construct
  source 1..120: mol_type = other DNA
ggctgcggggccggcctaggtgcctggacagggccagctgggcctcagcctgcagtgggtagggagtctgggcccccaacgccccacagagctcaacactgccgggtcccctacagcatg

SEQ ID NO: 50143 - DNA, 120 bp, synthetic construct
  source 1..120: mol_type = other DNA
ccggtcgcagggctggggagggcgctgttggtcagtgagctgacagctgagtggtgagggagcgggcagggggagcctgcataaggggtgggggcatcccacacaccagcagcgggggcc

SEQ ID NO: 50144 - DNA, 120 bp, synthetic construct; identical to SEQ ID NO: 14003
  source 1..120: mol_type = other DNA

SEQ ID NO: 50145 - DNA, 120 bp, synthetic construct
  source 1..120: mol_type = other DNA
cctgggtggctgctggaatggatggtcttgtctgcctcagggatcagagtggggctcccggcagagcctgctgggcacccccaccctctgcggggcagggcccggcccgggagtgatgcc

SEQ ID NO: 50146 - DNA, 120 bp, synthetic construct
  source 1..120: mol_type = other DNA
actgccagccggacaaggtgtacctgggaggcctggacgtgtgtggtgaggacggccagttcacctactgctggcacgatgacatcatgcaaggtacggcctggcgcctacccgctcctg

SEQ ID NO: 50147 - DNA, 120 bp, synthetic construct
  source 1..120: mol_type = other DNA
gggcatggaggcagtgatggggctggtggctttgcgtcccaaagccctgcccctggggagagccgaggaccactggccaggcaccagaggacgtggtccccgcaggcccccagagcccct

SEQ ID NO: 50148 - DNA, 120 bp, synthetic construct; identical to SEQ ID NO: 14004
  source 1..120: mol_type = other DNA

SEQ ID NO: 50149 - DNA, 120 bp, synthetic construct
  source 1..120: mol_type = other DNA
gggcacgagcttcaccccgagcctgcgttgtgtcctctgtgccctgaagcctgtggcgcctgctgctgagtgtctgtcaggagtaactggcaagtgcagactgggtgtgctgggtgggca

SEQ ID NO: 50150 - DNA, 120 bp, synthetic construct
  source 1..120: mol_type = other DNA
tcaccctcttcctggaggtgggctgggtcggccagtgtcacagcacggtccgggtgagccccagcatggcggggagagctggcatggcccaggcagggcagataggctggaggcctcact

SEQ ID NO: 50151 - DNA, 120 bp, synthetic construct
  source 1..120: mol_type = other DNA
ggggggggggggcacctgggcggctgaggagggtgtggtggtgccgagatggggtgcacggctcacttcatggctgggcagacggattcggacgtgtggctgcagacaccctgggggccc

SEQ ID NO: 50152 - DNA, 120 bp, synthetic construct; identical to SEQ ID NO: 14005
  source 1..120: mol_type = other DNA

SEQ ID NO: 50153 - DNA, 120 bp, synthetic construct
  source 1..120: mol_type = other DNA
gcaggaaaggtagggccgggtggggccctgcagtgtggcgccaagagccctgggcctggcgtgaccaccaagtctccccagacatggagggccttgtggacaccagcgtggccaagatcg

SEQ ID NO: 50154 - DNA, 120 bp, synthetic construct
  source 1..120: mol_type = other DNA
ccccctgcctacgtccccagatggcctcacaggtgcatcatagccgctccaaccccaccgatatctacccctccaagtggattgcccggctccgccacatcaagcggctccgccagcggg

SEQ ID NO: 50155 - DNA, 120 bp, synthetic construct
  source 1..120: mol_type = other DNA
tctgcgaggaagccgcctactccaaccccagcctacctctggtgcaccctccgtcccatagcaaagcccctgcacagactccagccgagcccacacctggctatgaggtgggccagcgga

SEQ ID NO: 50156 - DNA, 120 bp, synthetic construct; identical to SEQ ID NO: 14006
  source 1..120: mol_type = other DNA

SEQ ID NO: 50157 - DNA, 120 bp, synthetic construct
  source 1..120: mol_type = other DNA
cccccaggaggagtcttttcctctaaccaccctggggtcctctgacatgcctagtcctgctacttgcccagacctgatgccagcaggcctgggcgctgctctcttgctacctggcctggg

SEQ ID NO: 50158 - DNA, 120 bp, synthetic construct
  source 1..120: mol_type = other DNA
acacctaccaagcgcagcaggtgttgggggaggccagctctgggcgcaggcccctcagccctagtgaaaatagtgacatacaaaaatatacacattttaacaccatataaattactgaca

SEQ ID NO: 50159 - DNA, 120 bp, synthetic construct
  source 1..120: mol_type = other DNA
aggctaaccctccctgaagccagcagccttagcagtgggggacatctgcccagggggtggggccgggcacagcccgctgtacctgaggactcggggaaataaattagcatctcagaggct

SEQ ID NO: 50160 - DNA, 120 bp, synthetic construct; identical to SEQ ID NO: 14007
  source 1..120: mol_type = other DNA

SEQ ID NO: 50161 - DNA, 120 bp, synthetic construct
  source 1..120: mol_type = other DNA
tttgttgttgttctttactttttgctgtggctcattgcttaggtgcccaggtttttcaggtgcaattaaaatttagaactaccacacaaaggcattggctgcactctgggacctccaaga

SEQ ID NO: 50162 - DNA, 120 bp, synthetic construct
  source 1..120: mol_type = other DNA
tattcaggcactccttatgtcagagacagcgtaaaatgagcgaacaaagtgttggccgttacactttgctctggtaatatttgtcatgataattttgtgtgacatcatcagagaaaatgt

SEQ ID NO: 50163 - DNA, 120 bp, synthetic construct
  source 1..120: mol_type = other DNA
gtggacaggacatcttcaatggggattttctcaacccactgaggcatacttagacatcaacagtatgttgaggcacaaagattgattaaatgttgagcagggtattcgttccataagaaa

SEQ ID NO: 50164 - DNA, 120 bp, synthetic construct
  source 1..120: mol_type = other DNA
aatccggctatatacagtatgtacatgtcactagcaaatgtattatattcttaggtcaacaattatgaaaagattgaaatgaatatttttgaactttgactcatttaggttgatacaaaa

SEQ ID NO: 50165 - DNA, 120 bp, synthetic construct; identical to SEQ ID NO: 14008
  source 1..120: mol_type = other DNA

SEQ ID NO: 50166 - DNA, 120 bp, synthetic construct
  source 1..120: mol_type = other DNA
aaagcacaggctactgttagaactttgccttcatcaatgctgatatcagatggaagagcttcaattttaggcggaattcctttatggaacaatgacaaaaaaaaggtcttagaatcactg

SEQ ID NO: 50167 - DNA, 120 bp, synthetic construct
  source 1..120: mol_type = other DNA
ttactagttgagctttccagttgtgtcatattagatattcccataaagctgctggaactcatttctacaaaggactcttgcatggaggacatgctttgggcagacatgcttgcaaatttc

SEQ ID NO: 50168 - DNA, 120 bp, synthetic construct
  source 1..120: mol_type = other DNA
gttctcaatactacctctctggaaggttcttcaactagagctgtggagcatagcagatacacagtgaacatcaatgacatctggttaattgatgacatatgacgctgacttacagaaatg

SEQ ID NO: 50169 - DNA, 120 bp, synthetic construct
  source 1..120: mol_type = other DNA
gtcaagagctagctcaatgtctccaaaacatgaatccttatatttctatcattacattacatgcaggtgctaggaatcactaggagaaaaatgattagtcatatagaaagtaattgacat

SEQ ID NO: 50170 - DNA, 120 bp, synthetic construct; identical to SEQ ID NO: 14009
  source 1..120: mol_type = other DNA

SEQ ID NO: 50171 - DNA, 120 bp, synthetic construct
  source 1..120: mol_type = other DNA
cgctgactgatgcatttcggatttcaagggagtatacatttctggagcggcttatgctgacatttgaagaaatagaaatctaagacaaaggaaaaagaaaagaaatgttgaagttcttca

SEQ ID NO: 50172 - DNA, 120 bp, synthetic construct
  source 1..120: mol_type = other DNA
aagagaacattttgtccttcattaatattttgagatctaggctgtgagatgaaggctggagcatctgagagttctttgctcagtgtcaaatcatactgacacttgacgattccttccttg

SEQ ID NO: 50173 - DNA, 120 bp, synthetic construct; identical to SEQ ID NO: 14010
  source 1..120: mol_type = other DNA

SEQ ID NO: 50174 - DNA, 120 bp, synthetic construct
  source 1..120: mol_type = other DNA
agtagaaaatgctttaatctcagcatgagttctgacttcttctgatgcctgtgatgttttagtgatttcctcatggacaatggatttttccagggaggttgctgctgatttcttgacttc

SEQ ID NO: 50175 - DNA, 120 bp, synthetic construct
  source 1..120: mol_type = other DNA
agctttcttctgaggtgtaatttcagaagtcttttgtgtagagactttctgtgcctcagtatcttttatagctaaaaaagaaacctctgtaaggcaaacttaattagaaagagaccccca

SEQ ID NO: 50176 - DNA, 120 bp, synthetic construct
  source 1..120: mol_type = other DNA
tgacttttgagatcactgtaatgattccttaaactaaactgagccaaagatgattcatatgacttaaggaaaaaagtcttgaaaagaatagtcaacggatttaggagataagtggatttg

SEQ ID NO: 50177 - DNA, 120 bp, synthetic construct; identical to SEQ ID NO: 14011
  source 1..120: mol_type = other DNA

SEQ ID NO: 50178 - DNA, 120 bp, synthetic construct
  source 1..120: mol_type = other DNA
tcttgtatgtgtatataaggggggatgtttgaaaatatttccctaatattatcttctgaagaaatgtgggtaaaaacaaaagccaacctaccttttattgttaatttgcagctagaggac

SEQ ID NO: 50179 - DNA, 120 bp, synthetic construct
  source 1..120: mol_type = other DNA
ccctcccttgtcttcagagagtttatatttacctccttgtgtaatggcctgtagaatgcaaatgatttgtgttttaaaaagtgatttcattttaagctttttttgggaagctgaatttag

SEQ ID NO: 50180 - DNA, 120 bp, synthetic construct
  source 1..120: mol_type = other DNA
cactgtctgaagaaacagttgtatcctgcaacccagtaacaattactggttttgaggaaattggttcaggagcttttggttcagtttttctggttactgttgactcagtggttttctgat

SEQ ID NO: 50181 - DNA, 120 bp, synthetic construct; identical to SEQ ID NO: 14012
  source 1..120: mol_type = other DNA

SEQ ID NO: 50182 - DNA, 120 bp, synthetic construct
  source 1..120: mol_type = other DNA
ttttgcaatctctttagaagcttctgctttcaggaactgagtaatctttggtggggcagagactgggaggtgctgaactttctctgttggtgttggttttgtctctgtgggtgatacggc

SEQ ID NO: 50183 - DNA, 120 bp, synthetic construct
  source 1..120: mol_type = other DNA
cctggccttttgaatagtcagagtgaactctgcttcttgtttcccttcactgttttctaccaccacgctgtaattgccctcatcggaagcctggactgaagagatctcaaaggttgattt

SEQ ID NO: 50184 - DNA, 120 bp, synthetic construct
  source 1..120: mol_type = other DNA
ctcgtagacggtcatggaccgtggctttgttagaattcttgctgccaaagtcgtcttgatctttctggttgtggatttttcttccagtgacttttcttctaatgcagcacttttcatttc

SEQ ID NO: 50185 - DNA, 120 bp, synthetic construct
  source 1..120: mol_type = other DNA
aagcttccatctcagatgttttcttaaatgatgaaacagcatacgcctctgttcttgtcagctcagggaaaacagatctggggacctcttcatctctgcgttgggaagcataggtggtat

SEQ ID NO: 50186 - DNA, 120 bp, synthetic construct; identical to SEQ ID NO: 14013
  source 1..120: mol_type = other DNA

SEQ ID NO: 50187 - DNA, 120 bp, synthetic construct
  source 1..120: mol_type = other DNA
tcatacttcctttctgatgtcttctgagtttttaaagcagctttcatggactcatacctggaaaagatatcaaatcttgcagacctctcaaatctcgagagtgatctctcactagacaca

SEQ ID NO: 50188 - DNA, 120 bp, synthetic construct
  source 1..120: mol_type = other DNA
tcaatataagttggagacagggagcgccgtcgtctcagtagtctagacgcagatgaggatgattctctttgagcatgttttgagatttcgtattcttcctcaatttctgttatttctgtc

SEQ ID NO: 50189 - DNA, 120 bp, synthetic construct
  source 1..120: mol_type = other DNA
tgagatttcgtattcttcctcaatttctgttatttctgtcacttctctttgtcgccttgatttctttctagacttttcctcctttgacatgaagtcaagttcgcttttgtattctgagag

SEQ ID NO: 50190 - DNA, 120 bp, synthetic construct; identical to SEQ ID NO: 14014
  source 1..120: mol_type = other DNA

SEQ ID NO: 50191 - DNA, 120 bp, synthetic construct
  source 1..120: mol_type = other DNA
ttcttttcattgctaagtagtcatcaatggggaggagtaattcttcatcagagatgtccccaagagaacgtcttctaggtcggtagtaaaagtcataatcaggagaaggtgtacgccggc

SEQ ID NO: 50192 - DNA, 120 bp, synthetic construct
  source 1..120: mol_type = other DNA
ggatgcgcttgggtcgtttctgtacaactctgtcaagtttcccaggcatttcatactgatcacgtatctttttataccacttcatgtcagacatgggcacgaactgcttgatgcgttggt

SEQ ID NO: 50193 - DNA, 120 bp, synthetic construct
  source 1..120: mol_type = other DNA
tgcttacagccggtttataaaggacagcagcttctctcagagcctctttagctacctgtgtcagtggtacactttcagttccagaaagaatttcagccattctgagggttttgtcaattt

SEQ ID NO: 50194 - DNA, 120 bp, synthetic construct
  source 1..120: mol_type = other DNA
ctctataataacccgtgtcttcaggcaaagtgtccctgatgtgcagagcataataatccaagccttcatggataatttcaatgttaggcccgagggacagtggctgaccatctttctccc

SEQ ID NO: 50195 - DNA, 120 bp, synthetic construct; identical to SEQ ID NO: 14015
  source 1..120: mol_type = other DNA

SEQ ID NO: 50196 - DNA, 120 bp, synthetic construct
  source 1..120: mol_type = other DNA
ggacattttcacctacataagctgtcttattatagagaggcagggtaaattctggtggcctttccaggagtctcattgtgtctgttctgcgcttaattttcttcatggttctacggcagt

SEQ ID NO: 50197 - DNA, 120 bp, synthetic construct
  source 1..120: mol_type = other DNA
catagaggatggccactccatcttcgtaggtgatttcgtatttctcactgttctccagctgtcggacgccaaagtaccaagtcacttgggtagactgatcataattttcaattttgcata

SEQ ID NO: 50198 - DNA, 120 bp, synthetic construct
  source 1..120: mol_type = other DNA
caccaccacaggagatccgggctgctgacacaaccatgttgaggtctttcttgatcagggtgtggtaataacgccggtgttttaatgttctgataactttagtactgactctttctatct

SEQ ID NO: 50199 - DNA, 120 bp, synthetic construct; identical to SEQ ID NO: 14016
  source 1..120: mol_type = other DNA

SEQ ID NO: 50200 - DNA, 120 bp, synthetic construct
  source 1..120: mol_type = other DNA
taatggtagagcttcttctggtttggtaaatgatattttctggtctaatgtcaaagtgtccaatattatgactgtgtaaaaactgaagtgcttcacagacctggtgaacataacttacaa

SEQ ID NO: 50201 - DNA, 120 bp, synthetic construct
  source 1..120: mol_type = other DNA
agatgtttctatgcctagcaatattcagaatggaaatttccttctttaccaaaacctgatcagtccctttgactttaacaaatttggccatgtatgtcttctttgaggatgtttcaacac

SEQ ID NO: 50202 - DNA, 120 bp, synthetic construct; identical to SEQ ID NO: 14017
  source 1..120: mol_type = other DNA

SEQ ID NO: 50203 - DNA, 120 bp, synthetic construct
  source 1..120: mol_type = other DNA
catttttcaacaatgtagttggtgattttgctgccaccatcagaggctggctcagtccatgttaagttgacagaatctcgtgagacatcactaactttgactcctctgggtgggtcagga

SEQ ID NO: 50204 - DNA, 120 bp, synthetic construct
  source 1..120: mol_type = other DNA
gatcttgtgacaataacttggtagtggccattattgtcaatgagatcttgtcctttctgccaggtgatcacaggatctggtttgccactgaaaggaatcttgatgctgaccacttcacct

SEQ ID NO: 50205 - DNA, 120 bp, synthetic construct
  source 1..120: mol_type = other DNA
aagtgcaatagcctccacccccaagttaataactcatttagcctcaacttgatgataatttatttatttttaccttccacttccaaggaggcagtgccagacacagatcccccttggttg

SEQ ID NO: 50206 - DNA, 120 bp, synthetic construct; identical to SEQ ID NO: 14018
  source 1..120: mol_type = other DNA

SEQ ID NO: 50207 - DNA, 120 bp, synthetic construct
  source 1..120: mol_type = other DNA
cactccattcactttccccacctagattttcacatttcacacgaaactcgtattcaagaccttcaataaggtttttcactgaaaagacagtttctcgaatttcttctgttgtcacagaaa

SEQ ID NO: 50208 - DNA, 120 bp, synthetic construct
  source 1..120: mol_type = other DNA
caggccacaacacaagaatcttttgtgacagcagtaatagttggtttgccaggagcacctggcttttctattaaacaaaaaaaagatttgagtcatgagatgaaacaggcagctttatta

SEQ ID NO: 50209 - DNA, 120 bp, synthetic construct
  source 1..120: mol_type = other DNA
tttacaatggggttaggatatatatttctccttttagatatgcaaacattcaattaaagtgaaagaaaaggcacttgtactttatctgaatctttgctatttcctttcaaaatttctttc

SEQ ID NO: 50210 - DNA, 120 bp, synthetic construct; identical to SEQ ID NO: 14019
  source 1..120: mol_type = other DNA

SEQ ID NO: 50211 - DNA, 120 bp, synthetic construct
  source 1..120: mol_type = other DNA
gagttcttcaatagagcttcgatcacaattggtcctgtaggtttgtctggtttatctgttgggggaaaatacaattgtggtggttttcatagtgtgtttttgagatttttttttctttaa

SEQ ID NO: 50212 - DNA, 120 bp, synthetic construct
  source 1..120: mol_type = other DNA
ggacattcttcatgacaagatgagtatagtgctcagtgttttcaatagtaatgttttctgagttttgcaaaagtttctgaccatggaaccaagtcatggcaggtactggacgaccaatgt

SEQ ID NO: 50213 - DNA, 120 bp, synthetic construct
  source 1..120: mol_type = other DNA
gttgcttgcaggagaagcttactactggtttctacttctccaacctcattggtggctatgcaggtataaacaccttcatcttcctgttcctctgtcattactgtaagagtgtgtgtgcgt

SEQ ID NO: 50214 - DNA, 120 bp, synthetic construct; identical to SEQ ID NO: 14020
  source 1..120: mol_type = other DNA

SEQ ID NO: 50215 - DNA, 120 bp, synthetic construct
  source 1..120: mol_type = other DNA
tcctaggatcatatggtaaatagggattcaatgagcacatcgtcacattttatgtagagtgtttttttctctttatgattggaaggggattaataatgtataggcttttaagggactgta

SEQ ID NO: 50216 - DNA, 120 bp, synthetic construct
  source 1..120: mol_type = other DNA
gggaattactcaaggaaagtgctcagttcactccatctaacatctgctgaggttgtgtgcttggaatggtttcctgtagaacttgtcatatttcctgtgtgtgtacttgcttttctttct

SEQ ID NO: 50217 - DNA, 120 bp, synthetic construct
  source 1..120: mol_type = other DNA
aatcataagtagagaaccaaaggctacttacatgtgagtttagtctttatagacatagcagttctgcgaggtctgctcagcccagtctcattctcagcaaaaaccctgaattcatactca

SEQ ID NO: 50218 - DNA, 120 bp, synthetic construct; identical to SEQ ID NO: 14021
  source 1..120: mol_type = other DNA

SEQ ID NO: 50219 - DNA, 120 bp, synthetic construct
  source 1..120: mol_type = other DNA
atggatctttgcaaacaactggttcagaagcagggctggtctcactcaggccaacatcattctgtgcgatgatgcggaactgatactcagcatcgggaacaagccctgtgacagtgtaca

SEQ ID NO: 50220 - DNA, 120 bp, synthetic construct
  source 1..120: mol_type = other DNA
agctaacagaactcttggttacatcgagtacttctggaggattgcttggaggttctggaggatctgtaaatataagtggaaagcacacatgtattagaatacagtcccaagtattataag

SEQ ID NO: 50221 - DNA, 120 bp, synthetic construct
  source 1..120: mol_type = other DNA
cttatgccaaactggttttctgctgaaacacggaaatggtattctacattctctttgaggccttttaccaccagagatgtacctcggactctggaatcaatggtataccaggcggcttta

SEQ ID NO: 50222 - DNA, 120 bp, synthetic construct
  source 1..120: mol_type = other DNA
ggactgttgggacttcctatcaccctgaccttgatgtagacagccttcttgccacatttattttccagaaccaggtcataagtgccagaatcacccctgtctgcttctttgatcacaagc

SEQ ID NO: 50223 - DNA, 120 bp, synthetic construct; identical to SEQ ID NO: 14022
  source 1..120: mol_type = other DNA

SEQ ID NO: 50224 - DNA, 120 bp, synthetic construct
  source 1..120: mol_type = other DNA
acctgtattctgcaccctgaggtaggtgtgttagagtatactctcgaatcttggttggagtggtgttacacttggtccattcatgttgatctactttttgcatttcaatcaagtagcctg

SEQ ID NO: 50225 - DNA, 120 bp, synthetic construct
  source 1..120: mol_type = other DNA
ttttgtggctttcctggaggagctgagaataagaataagaatatactggttaaagttgctgcaaagttgaaaattagctgtgccacctaacaaattcaatgagttgttgaaacggactgt

SEQ ID NO: 50226 - DNA, 120 bp, synthetic construct
  source 1..120: mol_type = other DNA
agttcaagaccagcctggccaacatggtgaaaccgcgtctctactaaaaacataaaaattagccatgcgtggtggcaggcacctgtaatcccagctactcaggaggctgaggcagaagaa

SEQ ID NO: 50227 - DNA, 120 bp, synthetic construct; identical to SEQ ID NO: 14023
  source 1..120: mol_type = other DNA

SEQ ID NO: 50228 - DNA, 120 bp, synthetic construct
  source 1..120: mol_type = other DNA
aaattgactccagagaagaatattaaaaattatttgccagaaatcgctagcagctggggtggggaagggactgattacaaacggacacaagggaactttacggggtaataaaaatattcc

SEQ ID NO: 50229 - DNA, 120 bp, synthetic construct
  source 1..120: mol_type = other DNA
aaaatgtccttaccaattggatccatggcaacgatgggtttggaaggacgacttggtttcccagaccctcttgcattaatggctgtgacacggtgttcatattctaagccttcagtaagg

SEQ ID NO: 50230 - DNA, 120 bp, synthetic construct; identical to SEQ ID NO: 14024
  source 1..120: mol_type = other DNA

SEQ ID NO: 50231 - DNA, 120 bp, synthetic construct
  source 1..120: mol_type = other DNA
tttaaatcatttaattatttaattatttttattaaaaatttttgacttttagcttcaggggtacatgtgcagtttgttacatgggtatattgcatgatgctgaggtttaattttgtactt

SEQ ID NO: 50232 - DNA, 120 bp, synthetic construct
  source 1..120: mol_type = other DNA
tttcttccttccattcctttcttcctaactccctcctcttctctttcataagagtgaagatattaaaaaaaaaatcaagcctaagtgtgttgaaaacctctgagaaaaggaggtttagaa

SEQ ID NO: 50233 - DNA, 120 bp, synthetic construct
  source 1..120: mol_type = other DNA
attaaaaacaaattcttttttgttaacattcagaatcagaggtggggagagtggtggaagggcctgtggacttacggatgctgctgcgacactctatgacctcagactgcaagtaagagc

SEQ ID NO: 50234 - DNA, 120 bp, synthetic construct; identical to SEQ ID NO: 14025
  source 1..120: mol_type = other DNA

SEQ ID NO: 50235 - DNA, 120 bp, synthetic construct
  source 1..120: mol_type = other DNA
caacttgcttgtatctttgtcacacatccttaccaagaatgataactttaatggtttctgaagtagttccggtaacattcttcaattcaagtgtgtattctccagtatctctgatagtgg

SEQ ID NO: 50236 - DNA, 120 bp, synthetic construct
  source 1..120: mol_type = other DNA
gtatcaccagctctactggtctgccagctgggacatggatggtcttctgaggcattgtagaaagatcgattgttggcaacactatgggaaagaaatcaggcatttattcttaagcattat

SEQ ID NO: 50237 - DNA, 120 bp, synthetic construct
  source 1..120: mol_type = other DNA
tggttctgacacacctttctcattttgtgcccttattctaaataagtattgttcaccttcatttaaggaagtaacagtgtgctctaggactgtgggttttaaggtgacaaccttcatcca

SEQ ID NO: 50238 - DNA, 120 bp, synthetic construct; identical to SEQ ID NO: 14026
  source 1..120: mol_type = other DNA

SEQ ID NO: 50239 - DNA, 120 bp, synthetic construct
  source 1..120: mol_type = other DNA
aatttcccaagttatagtcacagaatctcttgatacttccttaactttcactgaaggacagggaccaggagtatctgaaaaacagaatgaaagattcatatttcctatttgcctgatagc

SEQ ID NO: 50240 - DNA, 120 bp, synthetic construct
  source 1..120: mol_type = other DNA
cttaccatagactttaacaaggactgttgctgatttcttgccagattggttttcagcttcaattgtgtattttccagcatcgtaccgattaactttgtccactattagcaatgagtagct

SEQ ID NO: 50241 - DNA, 120 bp, synthetic construct
  source 1..120: mol_type = other DNA
atacagacaccatcaagcgcaaggaggccccagccctgatggtcacagtcttctttagatcatctgcaagctcaagatctggtatttctggaaagttaatgacaaaatttaattaattca

SEQ ID NO: 50242 - DNA, 120 bp, synthetic construct; identical to SEQ ID NO: 14027
  source 1..120: mol_type = other DNA

SEQ ID NO: 50243 - DNA, 120 bp, synthetic construct
  source 1..120: mol_type = other DNA
atccacaactcttggagcagaaggtggtccaggggtatctgtggaatttaaaaagtgagatgcagatattaggcaaataaggaaatgttgagatttgtattttttgttttcaagactcac

SEQ ID NO: 50244 - DNA, 120 bp, synthetic construct
  source 1..120: mol_type = other DNA
ttgctttaggaaagtagatatttcttccctacttctttggccagctttactgtgtgttctctattagctaagctcattacttaaagtacccattcttagggacttttctttagttgctta

SEQ ID NO: 50245 - DNA, 120 bp, synthetic construct
  source 1..120: mol_type = other DNA
agtcccagtgactattcctttatagttcttgggctcagactctgtaaaaggatttgccacttatttttgaagctcttgtcacaattactttgtcagtaacttatgaaaccactagaaact

SEQ ID NO: 50246 - DNA, 120 bp, synthetic construct
  source 1..120: mol_type = other DNA
aatattttttcattaattggaaaatgctgtacaacttttagcaattctaattgctaacttaacagatgtaatagttaaaatgttctctgacttaagctatatttatgatcatgcaaataa

SEQ ID NO: 50247 - DNA, 120 bp, synthetic construct; identical to SEQ ID NO: 14028
  source 1..120: mol_type = other DNA

SEQ ID NO: 50248 - DNA, 120 bp, synthetic construct
  source 1..120: mol_type = other DNA
tgctgatttcattgccaccatcagattcaggttttgtccactgaatgatgatatgctctttgccagtcccaacttcttcaggtatgccgggtggtgatggaatagctgtttatgaaaata

SEQ ID NO: 50249 - DNA, 120 bp, synthetic construct
  source 1..120: mol_type = other DNA
ttctggctacaattggctctgattcaacaggcacaccagggccatatttgtttactgccctcactcggaatatgtactcattgttcttgatgagcctggtaacgacataggatagggttg

SEQ ID NO: 50250 - DNA, 120 bp, synthetic construct
  source 1..120: mol_type = other DNA
cctgtgttactctgctgacggtgagctttccacatgggccaggggaatctgaaacaggtgtaatgacaagccatgatgaagatcattctttctgcccacactggaaaatgctatataaat

SEQ ID NO: 50251 - DNA, 120 bp, synthetic construct
  source 1..120: mol_type = other DNA
cacagcagttgctcgtttgccagtatactgcaaagagactttttcacagagatctagctccttgtctcctttggtccagataattttgggttcaggtttgccaccaactgcagcatccag

SEQ ID NO: 50252 - DNA, 120 bp, synthetic construct; identical to SEQ ID NO: 14029
  source 1..120: mol_type = other DNA

SEQ ID NO: 50253 - DNA, 120 bp, synthetic construct
  source 1..120: mol_type = other DNA
ttgcacttcagccagcgaccatctcctacctcactgactggcttacgctctatgatgtagcccacaaccttgctgcctccatcatacgctggggcagaccaaatcagtgatactgttgat

SEQ ID NO: 50254 - DNA, 120 bp, synthetic construct
  source 1..120: mol_type = other DNA
attgtgatacataccaactggattttgagccattataggtcttgaagcttcgctggccttgctaacacctgcagcattgagtgcataagttctgaactgatattccagtccttctactaa

SEQ ID NO: 50255 - DNA, 120 bp, synthetic construct
  source 1..120: mol_type = other DNA
gggttcttcccaacgaatagacatggcattggcagacacatggtagacctcaggtctggtaggagcgcttggtgggactaaatataaacaaaggtattaagtatgaatacaattttataa

SEQ ID NO: 50256 - DNA, 120 bp, synthetic construct; identical to SEQ ID NO: 14030
  source 1..120: mol_type = other DNA

SEQ ID NO: 50257 - DNA, 120 bp, synthetic construct
  source 1..120: mol_type = other DNA
atgaccacaactgtgacgctaaatgttttaacaccagctgtattttccagggtcaagaagtatcttccagagtcacctctcatgctgtcctttacagtcagtgtggttctgtcttttgtt

SEQ ID NO: 50258 - DNA, 120 bp, synthetic construct
  source 1..120: mol_type = other DNA
gttgtaatgctcactcgatctgtctctttaagtctcatttcttccagtttccatgttactttgggggcaggacgaccactgattggtacgtcaatggtaaatgggcttcctgctttgcaa

SEQ ID NO: 50259 - DNA, 120 bp, synthetic construct; identical to SEQ ID NO: 14031
  source 1..120: mol_type = other DNA

SEQ ID NO: 50260 - DNA, 120 bp, synthetic construct
  source 1..120: mol_type = other DNA
tctggcatttcatagggctcaccaacaccatactcatttactgcagaaacacggaaatagtacggaacaccttcggccaggtcattgaccttgaagatctgacgagtgcatttttcactg

SEQ ID NO: 50261 - DNA, 120 bp, synthetic construct
  source 1..120: mol_type = other DNA
ttgaaggtaattgggccaggtgggcctggagtgtctagcactttcacggtgaatgtgattgacttactaccactgttgttttccacagtaagggtatatttccctgcatcatttctgttg

SEQ ID NO: 50262 - DNA, 120 bp, synthetic construct
  source 1..120: mol_type = other DNA
aagaggcgaatactggccccagctctaacaacatgagtctgtttgaagtttgcatctatgtctaactcaggagctgttaaccggtcaactgctttaattgtgccagtcacttcacagctg

SEQ ID NO: 50263 - DNA, 120 bp, synthetic construct; identical to SEQ ID NO: 14032
  source 1..120: mol_type = other DNA

SEQ ID NO: 50264 - DNA, 120 bp, synthetic construct
  source 1..120: mol_type = other DNA
gtcagaccagtgactttgaatcttgtttcagagattggtcgtttgctgatcacttttacccatcttgtgcttttcttttctcttctttcaaggatatactgttgaatttcactgccacca

SEQ ID NO: 50265 - DNA, 120 bp, synthetic construct
  source 1..120: mol_type = other DNA
tgcatttgcttggaaggttaaacttttgacatagtaccgcttagtaaaaacgcaaacttactatattgtatttgagcaaccactggatcagaatcaagtggcctgccaacaccaaacttg

SEQ ID NO: 50266 - DNA, 120 bp, synthetic construct
  source 1..120: mol_type = other DNA
tcaatgatgtagtgggttatgggagcacaaccgtcattgagtggggcatcccaccacagagtcatcttctccccagtaatattggtgaatcttattggcccaactacttttcctggtgta

SEQ ID NO: 50267 - DNA, 120 bp, synthetic construct
  source 1..120: mol_type = other DNA
cataaattgtagcattaagaagctattttaaaagtaccttgtactttcactttaatttctgcttttgcagaaccagatgcatttttggcttccactgtgtatacaccacgatggtcccga

SEQ ID NO: 50268 - DNA, 120 bp, synthetic construct; identical to SEQ ID NO: 14033
  source 1..120: mol_type = other DNA

SEQ ID NO: 50269 - DNA, 120 bp, synthetic construct
  source 1..120: mol_type = other DNA
gccatatcacaaggccaggaagagtagtgacttctactgtgctaccaaagcctattttgaaagtaggattgataattgagaatttggactatggggttaaatatttgcctattattattc

SEQ ID NO: 50270 - DNA, 120 bp, synthetic construct
  source 1..120: mol_type = other DNA
tcctaatactgctgcacagtcacacaagttcttttaagaggccatcagctgcattcaagcaaggggatgattgtgttgttggatgtatgttgtattttaataacttcagtaaagatggac

SEQ ID NO: 50271 - DNA, 120 bp, synthetic construct
  source 1..120: mol_type = other DNA
taattgatgccaattatttttttcttcttttcatctgaaaggtagaaagacataattcatccacttagcaaccttgggtaatttgtttctgttaccattttacaggccaggggccaaatg

SEQ ID NO: 50272 - DNA, 120 bp, synthetic construct; identical to SEQ ID NO: 14034
  source 1..120: mol_type = other DNA

SEQ ID NO: 50273 - DNA, 120 bp, synthetic construct
  source 1..120: mol_type = other DNA
gcaatggtgggttccatttaagtgtgatggtttcccgggtgacatcaatgtagtcaggagtgccaggtgggtctaaaaaattataaggaaggtaaatgcatcattacatttgtaaccagg

SEQ ID NO: 50274 - DNA, 120 bp, synthetic construct
  source 1..120: mol_type = other DNA
ccatttcatagtctttaaaatgaacttcaaattagtttattagactgacttaaaataattcctcttgctttacatgaccagttctctagtgacaagaagatatgtaagaaggtgatgcag

SEQ ID NO: 50275 - DNA, 120 bp, synthetic construct; identical to SEQ ID NO: 14035
  source 1..120: mol_type = other DNA

SEQ ID NO: 50276 - DNA, 120 bp, synthetic construct
  source 1..120: mol_type = other DNA
gttagtgacatgccatcagaagtcacattgtatataactggctttcctgggggaccaggaatcctgaactggtgttttgccacaataatgcttgagacaagtggttggctgactccgtat

SEQ ID NO: 50277 - DNA, 120 bp, synthetic construct
  source 1..120: mol_type = other DNA
ttctcgatgctgtaacaagtaatttctcctcctccattatcttcaggtacatcccatgacaggatgacactatcagccttgatttcatcaaatcgaatgggtcctttgggctttgatggt

SEQ ID NO: 50278 - DNA, 120 bp, synthetic construct
  source 1..120: mol_type = other DNA
tcagttttactgaagcgaacaaattcactttctttcagtggcaagccatctttcagccaactgatggatggtttgggttttcccttataaggtaattcaaggtgcacattgtgcccaatt

SEQ ID NO: 50279 - DNA, 120 bp, synthetic construct
  source 1..120: mol_type = other DNA
aacactctgaactccaggactgactgctccttaagttggctaacctcaatttcacatgtcttacttatgccagcgtgggaccacgtctgttcacctttacctttcctttctacaacatat

SEQ ID NO: 50280 - DNA, 120 bp, synthetic construct; identical to SEQ ID NO: 14036
  source 1..120: mol_type = other DNA

SEQ ID NO: 50281 - DNA, 120 bp, synthetic construct
  source 1..120: mol_type = other DNA
tgtttaacctgtagtttctggcaggcagctggtgtgtcaagcactttaacactcacagttgaagacttaggttcaccaactccattttctattgtgagaatatattttcctgtatcattg

SEQ ID NO: 50282 - DNA, 120 bp, synthetic construct
  source 1..120: mol_type = other DNA
ttaaagggaatcaacacttgtacatcttcaccagctttggcaataacagaagttctgagagccacatccaggtcaatctctggtgcctctgtagacataaaatggatacatacagtgaat

SEQ ID NO: 50283 - DNA, 120 bp, synthetic construct; identical to SEQ ID NO: 14037
  source 1..120: mol_type = other DNA

SEQ ID NO: 50284 - DNA, 120 bp, synthetic construct
  source 1..120: mol_type = other DNA
ggtgatggatgacttggttgaatctgcgattcttatcttagcaggtggacctggaggatctggaatggccattcacaataaaataattacacaatcatgtacaatttagtcacacaggtg

SEQ ID NO: 50285 - DNA, 120 bp, synthetic construct
  source 1..120: mol_type = other DNA
tcagaaaatggaccctgtccagcagcgtttacagcacaaactctgtattgatagtcactgttttctgtgagtcctgttactttttgtctggtgtcacggatagtctcttttagtacttta

SEQ ID NO: 50286 - DNA, 120 bp, synthetic construct
  source 1..120: mol_type = other DNA
ccatacaacagtcatcgaattcttggtaatctttgtcacttctggtatgcctggtggcccaggtgtaactatttagaaaggaagggaaaacaaggtacaagaatccacattactgataaa

SEQ ID NO: 50287 - DNA, 120 bp, synthetic construct; identical to SEQ ID NO: 14038
  source 1..120: mol_type = other DNA

SEQ ID NO: 50288 - DNA, 120 bp, synthetic construct
  source 1..120: mol_type = other DNA
ttttccacaatgtagtgagtgatttttgcaccaccatcatcagctggaggccgccagagaagggtgatcttctcagcagttacagtcttaaattcaattggtccaccaggtgggcctggt

SEQ ID NO: 50289 - DNA, 120 bp, synthetic construct
  source 1..120: mol_type = other DNA
aatgtaatatgacagtggtctgtattcagcacctaccaaggatctgtactctgatggtggctgaggctgagcccatggcattccttagttttaattcatagcatccactattaaggcgat

SEQ ID NO: 50290 - DNA, 120 bp, synthetic construct
  source 1..120: mol_type = other DNA
tgccagctctgagcttcacagatgtacctgctctgtatttgacaacttctgtatattctagaggcaaatcaattacaggaccacctgcaagaaaaacagatgagaaatatttaaaatatt

SEQ ID NO: 50291 - DNA, 120 bp, synthetic construct; identical to SEQ ID NO: 14039
  source 1..120: mol_type = other DNA

SEQ ID NO: 50292 - DNA, 120 bp, synthetic construct
  source 1..120: mol_type = other DNA
ctcctattctttttcttttcccatcccagttcactgatatccaagtgtggatggttcatgtcagacacttaaagtctgaattctctacccacagagctacataattactggacagatttt

SEQ ID NO: 50293 - DNA, 120 bp, synthetic construct
  source 1..120: mol_type = other DNA
ctcagcatgaagatggaagtggatacttttgcccagacactacagtggctcaattttctcttagcaaatggagatcttttaggtaaagtgtcacaggatacctgactctcatgacgtttt

SEQ ID NO: 50294 - DNA, 120 bp, synthetic construct
  source 1..120: mol_type = other DNA
catccctaacggggaagttacaaaagcactctcagcctcagtttcccttctataagatggctaatatgagggctgtgagaactaagggaaagaattcatgaaaattcctcaataaatgtt

SEQ ID NO: 50295 - DNA, 120 bp, synthetic construct
  source 1..120: mol_type = other DNA
agacctgcctggccaacatggtgaaactccgtccctactaaaaatacaaaaaattagctgggtgtggtggggcatgcctgtaatcccagctactcaggtgactgaggcacgagaatcgtt

SEQ ID NO: 50296 - DNA, 120 bp, synthetic construct; identical to SEQ ID NO: 14040
  source 1..120: mol_type = other DNA

SEQ ID NO: 50297 - DNA, 120 bp, synthetic construct
  source 1..120: mol_type = other DNA
agagggctggaaaggtatttaaggaattttcctcagactcccagctagtccataatttcttccaaaaaccccattaaggcacagagtaaaagttattctataggattagaaccaggaaaa

SEQ ID NO: 50298 - DNA, 120 bp, synthetic construct
  source 1..120: mol_type = other DNA
agcattcctagcaaagacacggaattcatactgggaattctgagtcaagccagagatgatgaattgagtttcagtaacattggtgaagctggccttggtccatctgccatctggaaggtc

SEQ ID NO: 50299 - DNA, 120 bp, synthetic construct
  source 1..120: mol_type = other DNA
ggtaataagagaagcagattagcggcacttataatattttgcttcgcagaagtaagatttgcatttttgttatcagaactgcccttcccatgacaaatacgtaccacaagcatcaattgc

SEQ ID NO: 50300 - DNA, 120 bp, synthetic construct; identical to SEQ ID NO: 14041
  source 1..120: mol_type = other DNA

SEQ ID NO: 50301 - DNA, 120 bp, synthetic construct
  source 1..120: mol_type = other DNA
gacaataacacatttatggtaaaagaaaacctggatctttgaaaagttggacaacttactgtatggtagtttgacagtcacacaagctgaatctatatgatcactgatgccaaagcggtt

SEQ ID NO: 50302 - DNA, 120 bp, synthetic construct
  source 1..120: mol_type = other DNA
tagaatgtagttggtaacttgacttccaccgtcatacttaggtggctcccatttgagagtcacactttcttcagttatatcactaataacaacagggccagttggaggaccaggcctgtc

SEQ ID NO: 50303 - DNA, 120 bp, synthetic construct; identical to SEQ ID NO: 14042
  source 1..120: mol_type = other DNA

SEQ ID NO: 50304 - DNA, 120 bp, synthetic construct
  source 1..120: mol_type = other DNA
caaattttgcttctacacaaaattagacatacctagttgctccttaataagaacaggaagcagaagctctctcgggtcactcaggccagcttgattttcagcaaacactcggaaaaagta

SEQ ID NO: 50305 - DNA, 120 bp, synthetic construct
  source 1..120: mol_type = other DNA
gccatcatgttcaggcttcagccaggtcagggaaacactgtctttggatatacttgttactccaagtttttcaggtgggcttggtttttctaagaaaacaaagcatcaaaagaaagtgaa

SEQ ID NO: 50306 - DNA, 120 bp, synthetic construct
  source 1..120: mol_type = other DNA
ttgattttagtcttcctttttacataacccattttgcttctgaaccaaccaaggctcccacaagctatgtcattacatgctatagcattcaaatccaaattaagggtaaaatgaccagat

SEQ ID NO: 50307 - DNA, 120 bp, synthetic construct
  source 1..120: mol_type = other DNA
aaagaggaacaagatgaacaatcttttaaaaaactttatatacaatttctgtacacacgcacatacacacatatgatatatgtcatacacacatactatatatatataatctgtgtatat

SEQ ID NO: 50308 - DNA, 120 bp, synthetic construct; identical to SEQ ID NO: 14043
  source 1..120: mol_type = other DNA

SEQ ID NO: 50309 - DNA, 120 bp, synthetic construct
  source 1..120: mol_type = other DNA
agatagctccttcttgtaaattggtaactttgtaggagaggcggttacagttgttggtcacagagacccatgctttcttgctggcctcacgtttttctatgtggtaattcttcactggtg

SEQ ID NO: 50310 - DNA, 120 bp, synthetic construct
  source 1..120: mol_type = other DNA
aagcagcactcaaaacattctgaattgttaatgtgtactttccagagtcatttctgttggcattttcaatggtcagtgatgtacgagagtctgtggtatcaacataagctctagtacgga

SEQ ID NO: 50311 - DNA, 120 bp, synthetic construct; identical to SEQ ID NO: 14044
  source 1..120: mol_type = other DNA

SEQ ID NO: 50312 - DNA, 120 bp, synthetic construct
  source 1..120: mol_type = other DNA
gcttaacccaggcaatagttatagttgtcttgcctgagtccacaattttgggtttggatggaggagatggtaggaacactggatcttctgccctaattaagggagaggtttcacttggaa

SEQ ID NO: 50313 - DNA, 120 bp, synthetic construct
  source 1..120: mol_type = other DNA
ggctatttttctctcgcctttcaattatatatccagatatttcactacctccatcactctcgggtcttgaccagcaaagtgtcatagattctttggtcacagaagtaatttccaaagacg

SEQ ID NO: 50314 - DNA, 120 bp, synthetic construct
  source 1..120: mol_type = other DNA
acttggttactttacaggatgtcatctgtaactctccttcacatattgtccatgcaaggtggcttgtttcacgtttttctacgatgtaatagtcgatatctgcaccaccatcttcttggg

SEQ ID NO: 50315 - DNA, 120 bp, synthetic construct; identical to SEQ ID NO: 14045
  source 1..120: mol_type = other DNA

SEQ ID NO: 50316 - DNA, 120 bp, synthetic construct
  source 1..120: mol_type = other DNA
acaataacgtctcggaacttgacatccatcataactcttggaggctcaacatcatctttaactataataggcccagtggattcagatggctcactaactgagtcagcagcattccttgca

SEQ ID NO: 50317 - DNA, 120 bp, synthetic construct
  source 1..120: mol_type = other DNA
atgtatcctgtgatcttagctccaccatcataatgtggtttagaccatttaagtgacactgattttcttgtgatatttgtgacttcaggttgtccaggagggtcacaaggatctcttgca

SEQ ID NO: 50318 - DNA, 120 bp, synthetic construct
  source 1..120: mol_type = other DNA
aggattttatttgcttttgaccaaagaatgctgcttctttctttatactcaagatgatagccaattactcgacttcctccatcattaactggcacttgccaggttacaagcatggtagat

SEQ ID NO: 50319 - DNA, 120 bp, synthetic construct
  source 1..120: mol_type = other DNA
cggaactgatactcacttcctgttgtcaggcgaactattttaatggatgttcttgcaactgcttgtgaaactatgtgccatgttgtagaggtggtttctttcttttcaacaatgtaattg

SEQ ID NO: 50320 - DNA, 120 bp, synthetic construct; identical to SEQ ID NO: 14046
  source 1..120: mol_type = other DNA

SEQ ID NO: 50321 - DNA, 120 bp, synthetic construct
  source 1..120: mol_type = other DNA
cttaagttgttctctagcctttacattgaaagtatggaaaggaagctcaactgaaggctttatttcaatatcccttgcaattactggcactccaagttgtcttggatcacttcttccctt

SEQ ID NO: 50322 - DNA, 120 bp, synthetic construct
  source 1..120: mol_type = other DNA
ttcaaccacataaccagtaattttgctgccaccatcactttctggtttctcccacttaattgtagctgtattacgggtcacatcaacaagagttactcttccaggtgggaggggtggttc

SEQ ID NO: 50323 - DNA, 120 bp, synthetic construct
  source 1..120: mol_type = other DNA
agtgcaattatttgtaatggtagcataggcttttcttgtagtttctcgtttttcgacaatgtagtttgtaatcttagctccaccatcaataagtggtggttcccaggacaacgtcactga

SEQ ID NO: 50324 - DNA, 120 bp, synthetic construct; identical to SEQ ID NO: 14047
  source 1..120: mol_type = other DNA

SEQ ID NO: 50325 - DNA, 120 bp, synthetic construct
  source 1..120: mol_type = other DNA
tttctggtggctctatcctctcctgagcaaccactgagccaggtagagttgcaggttcacctacaccttcagaattgatggcacaaatacggaagttatattcagtgttttctttaagct

SEQ ID NO: 50326 - DNA, 120 bp, synthetic construct
  source 1..120: mol_type = other DNA
ttggcttactccatgccagggagacagaagatctggaagtgtccgtcacttttggattgcttgggggacctggtggatacaaggcatcacacgcacggtagaaaacagatggctcactag

SEQ ID NO: 50327 - DNA, 120 bp, synthetic construct
  source 1..120: mol_type = other DNA
taacgccttccttatctcgtttttcaagaatgtagccctcaatttcggtacctccgtcgtctactgggcgtgcccatgttactaccatagaatctttggtgattgctgagacttcaggtg

SEQ ID NO: 50328 - DNA, 120 bp, synthetic construct; identical to SEQ ID NO: 14048
  source 1..120: mol_type = other DNA

SEQ ID NO: 50329 - DNA, 120 bp, synthetic construct
  source 1..120: mol_type = other DNA
tcaagtacctttacagtgatgggtatagactttgtaccaccaacattgctgagtttcagaatatattgtcctccatcagtccgtatacagtctttgacaacaagagttgttttctgaata

SEQ ID NO: 50330 - DNA, 120 bp, synthetic construct
  source 1..120: mol_type = other DNA
tgaacaacgatgacatctttatattttggatccagagaggcatttggtgcatcaatttcatctcttgcagtaatggcaccactactatcagatggttcactaaagtttccagctgcattt

SEQ ID NO: 50331 - DNA, 120 bp, synthetic construct; identical to SEQ ID NO: 14049
  source 1..120: mol_type = other DNA

SEQ ID NO: 50332 - DNA, 120 bp, synthetic construct
  source 1..120: mol_type = other DNA
tgccaacaatattttcagcagaaactttgaactcatactcaaggccctcatcaagcccagttgttttgaatttggtgtcctgaatgggggtcttatttaacttgacccataaaatactgt

SEQ ID NO: 50333 - DNA, 120 bp, synthetic construct
  source 1..120: mol_type = other DNA
gtccaggttctttaaatggatattgtacaataactgccttagaatccagtggggcactttttccatacctgttttcagcaaaaattctaaactggtactccgtgcctgttttcagtttgg

SEQ ID NO: 50334 - DNA, 120 bp, synthetic construct
  source 1..120: mol_type = other DNA
cccaagatatgactacaaagtctgcactaacttcatcaaaccgaactgggccaactggaggtccaggcttttctaaaacgataacactgagattttctgttgctgtgcctgcactatttg

SEQ ID NO: 50335 - DNA, 120 bp, synthetic construct; identical to SEQ ID NO: 14050
  source 1..120: mol_type = other DNA

SEQ ID NO: 50336 - DNA, 120 bp, synthetic construct
  source 1..120: mol_type = other DNA
ttttcctttctcattataagccttgacacggaactgatattcttgtccagaactcaaaccagtaacaactgcattacagactttggattcagccacaatgctccatttttcagttccttt

SEQ ID NO: 50337 - DNA, 120 bp, synthetic construct
  source 1..120: mol_type = other DNA
aggaggttcagcagctttcacggcatcaacagtttccactggaacaccaactccaaattcattttcagccatgactctgaagtaataaatggctccttctgtaaggttttccactttaaa

SEQ ID NO: 50338 - DNA, 120 bp, synthetic construct
  source 1..120: mol_type = other DNA
gaaggcagaatcttttctcacttctttgactgccaaattctgtggtggtcctggagtgtcaagaactttcacagttacaaaagcagactttgatccactgctgttttccaacttaagaat

SEQ ID NO: 50339 - DNA, 120 bp, synthetic construct
  source 1..120: mol_type = other DNA
cgttggacgacctttgaatggaatgtgaattctggcagatccaccagctcttacaacaattccttttcttaattcggagtcaaggtcaagttcaggtgcttcaagtttatcttctggttt

SEQ ID NO: 50340 - DNA, 120 bp, synthetic construct; identical to SEQ ID NO: 14051
  source 1..120: mol_type = other DNA

SEQ ID NO: 50341 - DNA, 120 bp, synthetic construct
  source 1..120: mol_type = other DNA
gaccctgaattcatactcatgatcttctgttaatcctgtcactcttagacgcaaatctgtaatgcggcgtttattacattttatccatcgaatgccacttctgtctcttttctctacaat

SEQ ID NO: 50342 - DNA, 120 bp, synthetic construct
  source 1..120: mol_type = other DNA
tttcattagtactggtgcagattccaaaggctctccaacaccatatttgttgacagccattatacggaaaacatattcattaccttctaagagtttggtaactttcagagaattggtcac

SEQ ID NO: 50343 - DNA, 120 bp, synthetic construct
  source 1..120: mol_type = other DNA
agaagtgactccagtaacctggactggcccttctggaggtcctggtctatctaatacttttacatttactgggaatgacttagaacctgcaacattggaagctcttaaaatatactgccc

SEQ ID NO: 50344 - DNA, 120 bp, synthetic construct; identical to SEQ ID NO: 14052
  source 1..120: mol_type = other DNA

SEQ ID NO: 50345 - DNA, 120 bp, synthetic construct
  source 1..120: mol_type = other DNA
tgtaaagctagctttcatccaacgaccatcaggcaaatcacgtttctctacaatgtagcctgtaatcatacttccaccatcatacacaggtttggtccactgtaaagtgatttcatttct

SEQ ID NO: 50346 - DNA, 120 bp, synthetic construct
  source 1..120: mol_type = other DNA
atattcaatgccttcttcaagattctgtgctttgaattgggtgtcatgaataatagttttgttgacctttgtccacaaaatactgtttctttcttttctctccaggtggtaacctatgac

SEQ ID NO: 50347 - DNA, 120 bp, synthetic construct; identical to SEQ ID NO: 14053
  source 1..120: mol_type = other DNA

SEQ ID NO: 50348 - DNA, 120 bp, synthetic construct
  source 1..120: mol_type = other DNA
gagggttccaagataatgtaatactttcagcactgacgtcatcaaatttaacaggtccttttggaggatcaggtttatctagagttacaatttcgatggatgctgtcttctgaccaacaa

SEQ ID NO: 50349 - DNA, 120 bp, synthetic construct
  source 1..120: mol_type = other DNA
catctttagtccaggtaatggttggcttaggacgtccagaaattggcacttctattttcaaatcttggccaacctgtacactgtaactactgaatgcaggttttacatctggctcaatta

SEQ ID NO: 50350 - DNA, 120 bp, synthetic construct
  source 1..120: mol_type = other DNA
gaagagactttactcgagcacactctgaccatttctcactgtgtttagcttgcatttccacaatatactgaatgattttactgccaccatcatgttcaggttttgtccaactcagagaga

SEQ ID NO: 50351 - DNA, 120 bp, synthetic construct
  source 1..120: mol_type = other DNA
tgggcaggaaggccaataccatactcattctcagctgtgactctaaagtaataactgcaaccttcttggagctgatcgattttccaagaattcttatggcagttagttacaacagcagca

SEQ ID NO: 50352 - DNA, 120 bp, synthetic construct; identical to SEQ ID NO: 14054
  source 1..120: mol_type = other DNA

SEQ ID NO: 50353 - DNA, 120 bp, synthetic construct
  source 1..120: mol_type = other DNA
aaggagccacctgcccttatatttatgattttccttagttctaggtcaagatcaatgtctggtgcttctaatttttcttcaactataataggtccagggacgtcagcatgttctccaact

SEQ ID NO: 50354 - DNA, 120 bp, synthetic construct
  source 1..120: mol_type = other DNA
aattcctgttggtggagtgcacattgtccattcaccaacactcacatcacatttttcaacaatgtatccttgaatttcacagccaccatcatatattggtttgctccaagaaaggaatac

SEQ ID NO: 50355 - DNA, 120 bp, synthetic construct
  source 1..120: mol_type = other DNA
agcagaaactctgaactcataatcgtgattttctatgagtccagttactctcaggcgcaactctccaatcagacgcttatggcatcttgtccatctaatgccttctttatcccgtttctc

SEQ ID NO: 50356 - DNA, 120 bp, synthetic construct; identical to SEQ ID NO: 14055
  source 1..120: mol_type = other DNA

SEQ ID NO: 50357 - DNA, 120 bp, synthetic construct
  source 1..120: mol_type = other DNA
tttttctgctgtaactcctgagataacaacaggtccttcaggtggccctggtctgtcaagaaccttgacattcacagtaactgatctttctcctgcaacatttttggccttcagtatgta

SEQ ID NO: 50358 - DNA, 120 bp, synthetic construct
  source 1..120: mol_type = other DNA
tggtattggtttgccataaatatctgcatcaaccttgaatgattcaccagcatgaaccacgattgtgtctttgtattttggatccatacttattcgtggtggatctacctcatctctagc

SEQ ID NO: 50359 - DNA, 120 bp, synthetic construct; identical to SEQ ID NO: 14056
  source 1..120: mol_type = other DNA

SEQ ID NO: 50360 - DNA, 120 bp, synthetic construct
  source 1..120: mol_type = other DNA
aaattcatattcaacaccttcttcaaggccagttgtcttaaacttggtttgaggaataggtgttttattcaacttaacccagaggatgctatttctttccttgcgttctagatgatagcc

SEQ ID NO: 50361 - DNA, 120 bp, synthetic construct
  source 1..120: mol_type = other DNA
tacagtaggctctgaattgaggtaggtactcttcccatatctgttttcagctgcaattctaaactgatattcacatccagtcttcagtctgcaagcctttattgttgtccttgcaactgt

SEQ ID NO: 50362 - DNA, 120 bp, synthetic construct
  source 1..120: mol_type = other DNA
cacttcatccattttaactggtccagttggaggccctggtttgtcaagaacgataacattaagggtttcaatagcttcaccagctgagttagtcagtttaaccacataatggccaacatc

SEQ ID NO: 50363 - DNA, 120 bp, synthetic construct
  source 1..120: mol_type = other DNA
gccaatgaatggaacatcaacttttaggtcttcacctgccagtacagtgaaagtattgaacaggagtttgaaggctggtggaatgacaagatctttggcgatcactggcacactcagttg

SEQ ID NO: 50364 - DNA, 120 bp, synthetic construct; identical to SEQ ID NO: 14057
  source 1..120: mol_type = other DNA

SEQ ID NO: 50365 - DNA, 120 bp, synthetic construct
  source 1..120: mol_type = other DNA
gtctaccttccaggaagtcttgtggcagtttgttgcaacagttgaatatgcttttcttgttgattcccgcttttcaacaatatagttcttgatttttgaacctccatcaaggagaggtgg

SEQ ID NO: 50366 - DNA, 120 bp, synthetic construct
  source 1..120: mol_type = other DNA
tacagttagtatatatttgccactgtcaaatctgtttacatttccaacaataagcagggtgtaagagcttgtggattcgatgctagctttatctaaagattctccatggtcccgggccca

SEQ ID NO: 50367 - DNA, 120 bp, synthetic construct
  source 1..120: mol_type = other DNA
gtcttcagcctttggagttccaggaacaagggcaggttccccaagtccttcggaattcatggcatagatgcggatcttatattcctgattctctgtgaggccagtgatagtatacgaagt

SEQ ID NO: 50368 - DNA, 120 bp, synthetic construct; identical to SEQ ID NO: 14058
  source 1..120: mol_type = other DNA

SEQ ID NO: 50369 - DNA, 120 bp, synthetic construct
  source 1..120: mol_type = other DNA
ttttgttgcatttaatccagcgttggccagctttatcacgccgttccacaatataattgatgatttcacttccaccatcagaatcaggatgtccccagcagacaaccatcgaatctttag

SEQ ID NO: 50370 - DNA, 120 bp, synthetic construct
  source 1..120: mol_type = other DNA
atatgtattcattgcctttcaagagtttagtgacctttagctttgttacttggacttctgaggctacatttgtccatgccaatctgctggtttcacgtttctgtactatgtaatgatcaa

SEQ ID NO: 50371 - DNA, 120 bp, synthetic construct
  source 1..120: mol_type = other DNA
aaatgtgtttagcaaagccaccaggattagtcgctgtaagggtataggcaccactatcccttcttgttgaatctttgtttaccagattagtagagaaatctgcaatttttatttctaact

SEQ ID NO: 50372 - DNA, 120 bp, synthetic construct; identical to SEQ ID NO: 14059
  source 1..120: mol_type = other DNA

SEQ ID NO: 50373 - DNA, 120 bp, synthetic construct
  source 1..120: mol_type = other DNA
ctccaaaatgttgctgaagttggccttcagccaccgtccattaggaaggtctctcttttcaacgatataactggtaattttaaagcccccagtatattcaggcttagcccatttaagtgt

SEQ ID NO: 50374 - DNA, 120 bp, synthetic construct
  source 1..120: mol_type = other DNA
cacccggaactcataagcaataccatctgtaagtccacttgatttgaaaatgttgcctggtactaaagctttgctcacagtctgccagagaataccatttcgttcttttctttcaacatg

SEQ ID NO: 50375 - DNA, 120 bp, synthetic construct; identical to SEQ ID NO: 14060
  source 1..120: mol_type = other DNA

SEQ ID NO: 50376 - DNA, 120 bp, synthetic construct
  source 1..120: mol_type = other DNA
catcgttctcaggtgggtcccaagagaaggttacaaaatcagatgaaacttcatcaaatttgattggtccagtaggtggccctgggatatcatggacttgaatggtgatgacatcaccaa

SEQ ID NO: 50377 - DNA, 120 bp, synthetic construct
  source 1..120: mol_type = other DNA
taagaatttggtctccttttttccatgtcactgtgggcttcggtcgaccgagcactggaatttcaactttgatgttgtcaccagctttggcaatgaccagtttctgatagatgccacgga

SEQ ID NO: 50378 - DNA, 120 bp, synthetic construct
  source 1..120: mol_type = other DNA
gattcctcacaacacattctaaccctttcacggttgtgatgtgggtccactggtcagagccttttctttgggcttcaatcacatagccagtgatcttgctgccaccatcgtgtttgggct

SEQ ID NO: 50379 - DNA, 120 bp, synthetic construct; identical to SEQ ID NO: 14061
  source 1..120: mol_type = other DNA

SEQ ID NO: 50380 - DNA, 120 bp, synthetic construct
  source 1..120: mol_type = other DNA
tgtccaagactctgacgttcacaaagccacttttcttcccagccgggttttcaatggtcatgacaaatttaccggtatcatatctgttacattctgggataatcagaagagtaaatgatt

SEQ ID NO: 50381 - DNA, 120 bp, synthetic construct
  source 1..120: mol_type = other DNA
ccgtattttcaatgttggctcggtttttcaggttgatgttatctttggtccatgtcacttcaggagcaggacgacctttaattggcacaaatatcctaatactgagtcctgctctaacaa

SEQ ID NO: 50382 - DNA, 120 bp, synthetic construct
  source 1..120: mol_type = other DNA
tgaagttgtatttttctttagtctgaagatcaggaacaacgaactgagtgattctgagggcggttcctgtggtatcttttatccaggcctcgtctcctactttttgatgctccacgacat

SEQ ID NO: 50383 - DNA, 120 bp, synthetic construct
  source 1..120: mol_type = other DNA
tgcggatttgaaggtggtcctggaggatctgagaaagaaacaaagacacaaaagtatatattcagagtttggcttttgggtaatttagataaaatattggcactctggaatgaacggtgt

SEQ ID NO: 50384 - DNA, 120 bp, synthetic construct; identical to SEQ ID NO: 14062
  source 1..120: mol_type = other DNA

SEQ ID NO: 50385 - DNA, 120 bp, synthetic construct
  source 1..120: mol_type = other DNA
cctaaactctgctataaatgtttccatgtcaattccctcacatgctctacataccaaatctgtctaccattttgacaggttcagactgtacaggttctcctttgccatagtggtttacag

SEQ ID NO: 50386 - DNA, 120 bp, synthetic construct
  source 1..120: mol_type = other DNA
tataggacttaattggtgagccgccatcttccaagggaggtgtccatgtaagtgttgctttttcagcagaaacattactgatttcaacaggacctgggggaccaggtacatcaaggactg

SEQ ID NO: 50387 - DNA, 120 bp, synthetic construct; identical to SEQ ID NO: 14063
  source 1..120: mol_type = other DNA

SEQ ID NO: 50388 - DNA, 120 bp, synthetic construct
  source 1..120: mol_type = other DNA
aaaatggacctaccgtattcatccttgcaaataatggtttctgtactttctgatggagcactgatagcacctgctgtattctttgctctaattctgaattcatattttccaccctcaaca

SEQ ID NO: 50389 - DNA, 120 bp, synthetic construct
  source 1..120: mol_type = other DNA
ctccactatatatccagttaacttatgaccaccgtcatatttaggttcagtccaaatgagagtcactgaattccttgttatgttaataacctcaggttttccaggaggatctaaaacata

SEQ ID NO: 50390 - DNA, 120 bp, synthetic construct
  source 1..120: mol_type = other DNA
ggcttgcccacacctgctaaattgattgccataactcggaattcatattcaagaccttcagttaatcctgtcactttaaagtctctcatccttatcggagtcttgttagctctcttccac

SEQ ID NO: 50391 - DNA, 120 bp, synthetic construct
  source 1..120: mol_type = other DNA
tccatatatattgaacaagtagtcattcttgctagtatctatacttttattacccaagcatagtgccattttttttttcctcttggaatatgcatagttgttgtcttttttggtgaacaa

SEQ ID NO: 50392 - DNA, 120 bp, synthetic construct; identical to SEQ ID NO: 14064
  source 1..120: mol_type = other DNA

SEQ ID NO: 50393 - DNA, 120 bp, synthetic construct
  source 1..120: mol_type = other DNA
aagaagcctcctcaaaaccgtgttttgctttacgtcttctgaatttaagacacttaccaaatggatgtctcgcaacaattggctccgatttcaggccttcccctacaccatatttatttt

SEQ ID NO: 50394 - DNA, 120 bp, synthetic construct
  source 1..120: mol_type = other DNA
cacgtcacccacttgttgttcacagaatccctcttctctaggatatagttggtgatttcagaacctccatcatcctttggaggagcccactttaaggtcatggcttctgctgtgacttca

SEQ ID NO: 50395 - DNA, 120 bp, synthetic construct
  source 1..120: mol_type = other DNA
tggcaatcgtacactataagagttgtgttaaccgcagatgactcaacactgactctagtgtcagttgctagaggatcttcccctttcttccaggagactgatggagctggcttgcctttt

SEQ ID NO: 50396 - DNA, 120 bp, synthetic construct; identical to SEQ ID NO: 14065
  source 1..120: mol_type = other DNA

SEQ ID NO: 50397 - DNA, 120 bp, synthetic construct
  source 1..120: mol_type = other DNA
cagagtactgtaggcttaaggatttcataactcgttgccacttattttcttcagtcaggaaatcaactacatatccaataatccgacttccaccatcactgtgaggctttttccagccaa

SEQ ID NO: 50398 - DNA, 120 bp, synthetic construct
  source 1..120: mol_type = other DNA
aaatgatgggatgatggttcatttgcttacgggaagctttgacagcatcacgagtttcaccgggatcaccaatgccatactcattttcagcaaacactcggaagaagtaggattttccct

SEQ ID NO: 50399 - DNA, 120 bp, synthetic construct; identical to SEQ ID NO: 14066
  source 1..120: mol_type = other DNA

SEQ ID NO: 50400 - DNA, 120 bp, synthetic construct
  source 1..120: mol_type = other DNA
cctttttaccacagctgttctccagggttaagatatattttcctgcatcatatttgttcacattttcacagcgcaagaaagtgtcaaagtcagttgactttatgtccagtccaatcctgt

SEQ ID NO: 50401 - DNA, 120 bp, synthetic construct
  source 1..120: mol_type = other DNA
actccagcacgtaatatgagtgtcttccttaagtccgcatcaagttctccctcaggtggaactgtttaattttgggtgaagaagttaaataaaaatttaatagtcaaatgtatttccagg

SEQ ID NO: 50402 - DNA, 120 bp, synthetic construct
  source 1..120: mol_type = other DNA
cattttccactatgctttaggcttaaccaggttttccccccggaggatctgtacctcctctttcatgagccttatgtactctgaaatgctacatatattaaaaggaaagtagacgattga

SEQ ID NO: 50403 - DNA, 120 bp, synthetic construct
  source 1..120: mol_type = other DNA
taatatcaagtaattcaaataaaggggaaattatcatggaggataagcaaatagaagaaataagaagaagggaaattaagatggagagcccaccagtcacatacttagggagatggtgga

SEQ ID NO: 50404 - DNA, 120 bp, synthetic construct; identical to SEQ ID NO: 14067
  source 1..120: mol_type = other DNA

SEQ ID NO: 50405 - DNA, 120 bp, synthetic construct
  source 1..120: mol_type = other DNA
cttgggatagtgtttatctggcacatcactggggtcactgtatccaatcttattaacggcatacacacggaattgatattgtgtgtcttccatcaggccagtaacctcaaagcgggtttt

SEQ ID NO: 50406 - DNA, 120 bp, synthetic construct
  source 1..120: mol_type = other DNA
cacagagctgcgagttgtatcatatactttagggaaagccggtgggccaggaggatctgagaataaataatgataggaaattttcatgaaaacttccttcctgggtgtttaatgctgctt

SEQ ID NO: 50407 - DNA, 120 bp, synthetic construct; identical to SEQ ID NO: 14068
  source 1..120: mol_type = other DNA

SEQ ID NO: 50408 - DNA, 120 bp, synthetic construct
  source 1..120: mol_type = other DNA
gttaatttcccaggctaaaagataattttaaaaaataaaatgaaaaaccaccgggaaatgttcctaccatatgggtttttggcaattgctggttcagtgaagactggatcgcctactcca

SEQ ID NO: 50409 - DNA, 120 bp, synthetic construct
  source 1..120: mol_type = other DNA
cgtttgtcaacaatatagttggtgatttctgagcctccatcttcaagaggcggttcccaagaaagcatagcacgatctgaatacattttgttgattttaacagatgctggaggacccggt

SEQ ID NO: 50410 - DNA, 120 bp, synthetic construct
  source 1..120: mol_type = other DNA
ggggaatgagtatagagtagaggtctggagacctgggctgcagtctttctattgtcaatttcctatatgacctaggaggttagttaattttttagaatcttagtttcttcacttgtaaaa

SEQ ID NO: 50411 - DNA, 120 bp, synthetic construct
  source 1..120: mol_type = other DNA
atatgggattccaatgaagtttattagttacctaacactttaagcttaatggtggctgatttagaaccacttgaattttcagcagtaatggtatagtctcctgagtccttccggttcacg

SEQ ID NO: 50412 - DNA, 120 bp, synthetic construct; identical to SEQ ID NO: 14069
  source 1..120: mol_type = other DNA

SEQ ID NO: 50413 - DNA, 120 bp, synthetic construct
  source 1..120: mol_type = other DNA
aataactattgaaattatatagttgccacagttgtgtatcttgctttttaatttagcatgttattatgattctccataatcataatgtttgtgtctatatacaaaacatcattttaattt

SEQ ID NO: 50414 - DNA, 120 bp, synthetic construct
  source 1..120: mol_type = other DNA
tggatcagaaggttcagaaggtgggctaatgtttaccgcggtcctggcaatagctctaaattgatactgagctttctcttctaggccagtagctgtgtactcttcctggggaatctggtg

SEQ ID NO: 50415 - DNA, 120 bp, synthetic construct; identical to SEQ ID NO: 14070
  source 1..120: mol_type = other DNA

SEQ ID NO: 50416 - DNA, 120 bp, synthetic construct
  source 1..120: mol_type = other DNA
tatgtcatcttcattgtaagagatagaacatattcttaaatgggagttgtaatcttcagatctctactactctctgtgtcttggagtccaaatcttagactccgagatttaaatgtgcct

SEQ ID NO: 50417 - DNA, 120 bp, synthetic construct
  source 1..120: mol_type = other DNA
gattctgaatgaatactcaagaccttctacaaggccagcacaaggatattcagttgaccggacaagagtatcattggctttcacccacagcaaactgtttctttccttgcgttcaatcag

SEQ ID NO: 50418 - DNA, 120 bp, synthetic construct
  source 1..120: mol_type = other DNA
agacaaggaagatgtcagtttctacattaagtaacaaactagaaagaaaacaactttttttctccttcacaaaaacataccaaatgggaactgcgcaaccatctttggagatgtgagagg

SEQ ID NO: 50419 - DNA, 120 bp, synthetic construct
  source 1..120: mol_type = other DNA
tcggcttacatcacacttctccactatataattggtgatgttactgcctccgtcctccagagggatgtgccatgacagggagcaagcatcagcgtctatatcagaaatgtcaaatggagg

SEQ ID NO: 50420 - DNA, 120 bp, synthetic construct; identical to SEQ ID NO: 14071
  source 1..120: mol_type = other DNA

SEQ ID NO: 50421 - DNA, 120 bp, synthetic construct
  source 1..120: mol_type = other DNA
tgatagttatttgctctggcataaggatctttggtggcactgaaagtaaaatgaaaagatattaattttgggaaggtggataagtttcttctggtggagagctatactggtgcaaattaa

SEQ ID NO: 50422 - DNA, 120 bp, synthetic construct
  source 1..120: mol_type = other DNA
acatcgtctacattaggtattctcctaatgctatccttcccctagcctcccaacccctgacaggccccagtgtgtgatgctcccctccctgtgtccatgtgttttcattgttcagctccc

SEQ ID NO: 50423 - DNA, 120 bp, synthetic construct; identical to SEQ ID NO: 14072
  source 1..120: mol_type = other DNA

SEQ ID NO: 50424 - DNA, 120 bp, synthetic construct
  source 1..120: mol_type = other DNA
aatggttgaactaatttacactcccaccaacagtgtaaaagctttcctatttctccacatcctctctagcacctgttgtttcctgactttttagtgatcaccattctaactggtgtgaga

SEQ ID NO: 50425 - DNA, 120 bp, synthetic construct
  source 1..120: mol_type = other DNA
gaatgcacatgataataaatgggtattgtttcaggaaatgttttttagttatatatgtgtttgtataagtttatttactgtgtgtttttggcccactcatgtgtttgaaagccactgttc

SEQ ID NO: 50426 - DNA, 120 bp, synthetic construct
  source 1..120: mol_type = other DNA
ttgttctttggcttcatacactccttcagcttctcttggcaaactgactccaacagcatttctggccgctactctaaatttgtatttctttccttcctttaggccagtgacaacaaggct

SEQ ID NO: 50427 - DNA, 120 bp, synthetic construct; identical to SEQ ID NO: 14073
  source 1..120: mol_type = other DNA

SEQ ID NO: 50428 - DNA, 120 bp, synthetic construct
  source 1..120: mol_type = other DNA
tatttattacactatttcggtctctacaaatgaaatctctttcagaagtggattaaaatggtattagtatcttgaccttgctaaaataggagactggggttaaaaggaggaagaaagcat

SEQ ID NO: 50429 - DNA, 120 bp, synthetic construct
  source 1..120: mol_type = other DNA
gttactctgaagtaatactcattcccagggacaagattggttacatggaagcttgttttcttaacttctggggtaacggtcgaccatgtctttctgtctgcctcacgtttctccacgata

SEQ ID NO: 50430 - DNA, 120 bp, synthetic construct
  source 1..120: mol_type = other DNA
ttttaaatcagacacaggcccaggagtgtctgtaaagaatcataaaatcagatatacatgtctcctcagcatccctattaacaaattcatttttgaagtgggagggagaagcattttagt

SEQ ID NO: 50431 - DNA, 120 bp, synthetic construct
  source 1..120: mol_type = other DNA
gtgtcaaccagatcaacttgtccttttctgaccacattatcaatgccaacttttcgccaagtgactttaggggctggtcgtcctctcactatagcaaagagacgaatagggcatcctgct

SEQ ID NO: 50432 - DNA, 120 bp, synthetic construct; identical to SEQ ID NO: 14074
  source 1..120: mol_type = other DNA

SEQ ID NO: 50433 - DNA, 120 bp, synthetic construct
  source 1..120: mol_type = other DNA
tcaggagacgcatctgctatttttggtctcatttccacaacatatccaatgatcggtgcaccaccatcatagactggttttccccacccaagagttatggaatgtttggttgtatcaacc

SEQ ID NO: 50434 - DNA, 120 bp, synthetic construct
  source 1..120: mol_type = other DNA
gtgtaattttatatagcctattctcagttaatcaaatataggtcatccaatttttcaattagtgtcctctttattttccttcataaaaatgagaatctactattgtttgtaccttttagg

SEQ ID NO: 50435 - DNA, 120 bp, synthetic construct; identical to SEQ ID NO: 14075
  source 1..120: mol_type = other DNA

SEQ ID NO: 50436 - DNA, 120 bp, synthetic construct
  source 1..120: mol_type = other DNA
gcttttcctttttctccaaaaagtatccagttatagactttccaccatcatattcaggtggattccaaaccacagtcatctcttctttgcttactttagtgacttctgggggatcagggc

SEQ ID NO: 50437 - DNA, 120 bp, synthetic construct
  source 1..120: mol_type = other DNA
ttactgtagtaccaggtgtcaagacagtagcagaataggtagaccaaaccattcgctttgtctcacatttttctagaatataattttggatttcacagccaccatcatcttctggtggat

SEQ ID NO: 50438 - DNA, 120 bp, synthetic construct
  source 1..120: mol_type = other DNA
ccgtaactacatatttacccccatcacttcgctttgctttagtaagagaaaatttagatgaatcagcacgggtatcaatcttgacccttggtgatcttgttaagtctgtagcgtctttgt

SEQ ID NO: 50439 - DNA, 120 bp, synthetic construct
  source 1..120: mol_type = other DNA
agtcttctttcacaacaacttcctctgtcttcacccagtcactttccccaccttcattctttgtttgcactctgaactcataaatctggttttcaacacatctgtcaaccatgtagtgag

SEQ ID NO: 50440 - DNA, 120 bp, synthetic construct; identical to SEQ ID NO: 14076
  source 1..120: mol_type = other DNA

SEQ ID NO: 50441 - DNA, 120 bp, synthetic construct
  source 1..120: mol_type = other DNA
ctatgaagtttgttatttctgagccaccattatctagtgggttttcccaagaaattgtacagttctctttggttacattggtaaccttcaaattctggcaaggcccaggtctgtcaagga

SEQ ID NO: 50442 - DNA, 120 bp, synthetic construct
  source 1..120: mol_type = other DNA
gcttctttaatttgtaactcaacacgaggtagatcctgaataaggtccaccctcttttctcggaccaatactttgccttccttagtccaagttatgtctggttcaggtctgcctttgact

SEQ ID NO: 50443 - DNA, 120 bp, synthetic construct
  source 1..120: mol_type = other DNA
cttggctcaccctctcctacaatattagctgcctttatacggaatctgtactcatttccttcaattagtccaggtaccctaaaggcacattgcctaatgagttcatctttattaatcctg

SEQ ID NO: 50444 - DNA, 120 bp, synthetic construct; identical to SEQ ID NO: 14077
  source 1..120: mol_type = other DNA

SEQ ID NO: 50445 - DNA, 120 bp, synthetic construct
  source 1..120: mol_type = other DNA
ttctcgacgttccatatagtagccagttattggactgccaccatcagattttggcagggtccaagacactgttgctgcattttcagtaatgtcagtaaccactggtttaccaggaggaga

SEQ ID NO: 50446 - DNA, 120 bp, synthetic construct
  source 1..120: mol_type = other DNA
ctcggaaaacatattcacagcccttctgcagatgtgggattttcagctttgtcttactgcttccggaagagacaacaccccacgtgtctttccttgtatcttgtttctcaacaatataat

SEQ ID NO: 50447 - DNA, 120 bp, synthetic construct; identical to SEQ ID NO: 14078
  source 1..120: mol_type = other DNA

SEQ ID NO: 50448 - DNA, 120 bp, synthetic construct
  source 1..120: mol_type = other DNA
gggaatctgactgtggttccagcctttaccacaagaccttcaattaatttcacatctagctccacggatggaggcactgaaaagtaaacatgaaaaaattagattttgattttcacctat

SEQ ID NO: 50449 - DNA, 120 bp, synthetic construct
  source 1..120: mol_type = other DNA
tacacggaatctataggtctttccttgttgtagtccagtaaccacacactctaagtttgtcacagtcttaaatttaatccagtcctgggtgccttcttcttgatattctaccaaatatcc

SEQ ID NO: 50450 - DNA, 120 bp, synthetic construct
  source 1..120: mol_type = other DNA
ttatgatgaaaaagtaatattcttaaagacagtcaaacaatagttttgtattcagagaaagcaacttacggagaggatccaaagccttgattggttttggtgtttcaacaaaaggaccac

SEQ ID NO: 50451 - DNA, 120 bp, synthetic construct; identical to SEQ ID NO: 14079
  source 1..120: mol_type = other DNA

SEQ ID NO: 50452 - DNA, 120 bp, synthetic construct
  source 1..120: mol_type = other DNA
tacttttactgagacagtttttgaaccagctggattctccactgttaaagaataaattccaccatcttcatgggcagcattacgaatttcaagcttgctaccaactggagtcacatcaat

SEQ ID NO: 50453 - DNA, 120 bp, synthetic construct
  source 1..120: mol_type = other DNA
catgttggcatcaagaatcaactcagggggttctagaataaagagaacagaacactcagatttgatccataatgcagattacaattaaacacatacaatcagacatctattttccttgca

SEQ ID NO: 50454 - DNA, 120 bp, synthetic construct
  source 1..120: mol_type = other DNA
accgtcccgaagaccggtgactttatatttagtttcaggacatgactcaggggtgtgattggctcttctccactcttcatctccaactttctggtactcaacaatataacccagaatctt

SEQ ID NO: 50455 - DNA, 120 bp, synthetic construct
  source 1..120: mol_type = other DNA
ttagcatatagctgaaaacaaagttagataacatgaaaactgaataaatccattaatactataccaattggatctttagcaaagactggtttggatggtgggcttggatctccaatacca

SEQ ID NO: 50456 - DNA, 120 bp, synthetic construct; identical to SEQ ID NO: 14080
  source 1..120: mol_type = other DNA

SEQ ID NO: 50457 - DNA, 120 bp, synthetic construct
  source 1..120: mol_type = other DNA
aaagaaacataatgcatactgaaacgatctttggctttcattgaatcagacaccagaggatcacttattccatacagattttcagcatgtatccggaaaatataatcttttccttcaagt

SEQ ID NO: 50458 - DNA, 120 bp, synthetic construct
  source 1..120: mol_type = other DNA
aataatataattggtgattttactgcctccatcatctaaaggaggcttccaagagataaccatgtaatctttggtcacctcatcaaaactaactggtcctactggtggtccaggacggtc

SEQ ID NO: 50459 - DNA, 120 bp, synthetic construct; identical to SEQ ID NO: 14081
  source 1..120: mol_type = other DNA

SEQ ID NO: 50460 - DNA, 120 bp, synthetic construct
  source 1..120: mol_type = other DNA
caccaactcgaatcgtgagcttatctctgaagtcgaggtgaagcgttgggggtgctaaaatttgtaattataaaggcaagtcatttttattgatgtcttattacaaatctacaaatgtgc

SEQ ID NO: 50461 - DNA, 120 bp, synthetic construct
  source 1..120: mol_type = other DNA
tgccttgtccaacaatgttgacagcactgacacggtactcataggtatcaccttcttttaagcctttaacagtgtattttctgctaagcaagttgtcatttgtaactttgtggaacttct

SEQ ID NO: 50462 - DNA, 120 bp, synthetic construct
  source 1..120: mol_type = other DNA
gttacagtatttttagtaacttctttgacttccaggtcttcaggacgctctggtacagctgcgaatataagtataggaattgtggtagaaaaaaatgtcacattaagaatgtagtaggat

SEQ ID NO: 50463 - DNA, 120 bp, synthetic construct; identical to SEQ ID NO: 14082
  source 1..120: mol_type = other DNA

SEQ ID NO: 50464 - DNA, 120 bp, synthetic construct
  source 1..120: mol_type = other DNA
gagaccagcctggccaacatggcaaaaccctgcctctactagaaatagaaaaattagctgggcatggtggtgcatgtctgtaatcccagctactcgggagactgagacacaagaatcact

SEQ ID NO: 50465 - DNA, 120 bp, synthetic construct
  source 1..120: mol_type = other DNA
caatgaattatacatatttgtaaaatctctttcacaatcactgtccaaatactaccaaatcagatactgagtagttgtgtgataactgcttgtcaagtgaatgaaatgtacggcatttat

SEQ ID NO: 50466 - DNA, 120 bp, synthetic construct
  source 1..120: mol_type = other DNA
atggacccatgccaatactattttcagccgcaattcggaaaaagtaggcttttccttgaatgagaccctggacagtagcattttgtcgggtaactgtatatgtcactggggtccatgctc

SEQ ID NO: 50467 - DNA, 120 bp, synthetic construct; identical to SEQ ID NO: 14083
  source 1..120: mol_type = other DNA

SEQ ID NO: 50468 - DNA, 120 bp, synthetic construct
  source 1..120: mol_type = other DNA
cacccaggctggagttcagtggcacaatctcagctcactgcaacctccgcttcccaggttcaagcaattctcctgcctcagcctcccaagtagctgggactacaggcatgtgccaccata

SEQ ID NO: 50469 - DNA, 120 bp, synthetic construct
  source 1..120: mol_type = other DNA
gtgtgagccatagcatcaagccccatatttgttaatgaagtaggtttgcaacagttattggttaccatggttttagtagaggctgaagggaaaataaaaatgctttttaaaagcaatttg

SEQ ID NO: 50470 - DNA, 120 bp, synthetic construct
  source 1..120: mol_type = other DNA
tttatttctggatgaccagtggatcaacaagcagcataggaggccccaaatttcagaatgactttgaggaggttgcaaataattaacgtggaaatgtaccagttctcaaattaaagtaat

SEQ ID NO: 50471 - DNA, 120 bp, synthetic construct; identical to SEQ ID NO: 14084
  source 1..120: mol_type = other DNA

SEQ ID NO: 50472 - DNA, 120 bp, synthetic construct
  source 1..120: mol_type = other DNA
gcattattatgataatttagcgataggggtagagtctcatgatgtgaaatggtcagcactggcaaattgttaaacattcatgtacagtttaaggaaagttgcagattgttaaacattcat

SEQ ID NO: 50473 - DNA, 120 bp, synthetic construct
  source 1..120: mol_type = other DNA
ggccttctagcaatttgagaattgtgtacatgcactctttaggttcactggaaacatggatgcatgtcttcttgttagcatctgttttctcaattatataatttgtaaacttacacccac

SEQ ID NO: 50474 - DNA, 120 bp, synthetic construct
  source 1..120: mol_type = other DNA
agttgcacagacaaattgaaagtatttacctaatacatcaacaataattgtcttctttctttctccggcttcatttttggcaagaagagaatagacgccttgatggctcctctggcagtt

SEQ ID NO: 50475 - DNA, 120 bp, synthetic construct
  source 1..120: mol_type = other DNA
tcggatcacccctccagcatggacaacaattctatctctgacactggcatctagctgaaggtcaggtgaaactggaagcaattgaaaattacaaatgtgatttttccccttcaatctgaa

SEQ ID NO: 50476 - DNA, 120 bp, synthetic construct; identical to SEQ ID NO: 14085
  source 1..120: mol_type = other DNA

SEQ ID NO: 50477 - DNA, 120 bp, synthetic construct
  source 1..120: mol_type = other DNA
ttaactgtttactctgggaaaattgttgctggtttaggttttagggatcagatattacaggcaacactgaatggaataacttggcaggagttatgctttaaaattattgtcaaatgatta

SEQ ID NO: 50478 - DNA, 120 bp, synthetic construct
  source 1..120: mol_type = other DNA
gctattttcctgatttcttaatccaaaaagtatagacagaagttaatgggattgagaataactatgacattttttagtttattcatagtgcatttccttagtgccaagttttcctacctt

SEQ ID NO: 50479 - DNA, 120 bp, synthetic construct; identical to SEQ ID NO: 14086
  source 1..120: mol_type = other DNA

SEQ ID NO: 50480 - DNA, 120 bp, synthetic construct
  source 1..120: mol_type = other DNA
agaaacacccaaagtcatggctttgataggatctcggttaactctcttccatctctttgaagtggtgtctttcatttccagccagtaccctgtcacaggagagcctccatcatattctgg

SEQ ID NO: 50481 - DNA, 120 bp, synthetic construct
  source 1..120: mol_type = other DNA
aaaatggctttgtatgtgaaaatgttctcctacttacagaagaggtttcttgctgtttcaggttcactgtcaagaggttctccaatgccatatttattctgggccatgattcggaataca

SEQ ID NO: 50482 - DNA, 120 bp, synthetic construct
  source 1..120: mol_type = other DNA
gttagcttctcttttctcaattacatagtttgtaatcttagacccaccatcatctttaggtggaaaccaagatagtgtcatttgatctgctgaaacagattcaaattttatgggtcccac

SEQ ID NO: 50483 - DNA, 120 bp, synthetic construct; identical to SEQ ID NO: 14087
  source 1..120: mol_type = other DNA

SEQ ID NO: 50484 - DNA, 120 bp, synthetic construct
  source 1..120: mol_type = other DNA
aggttagtgtcgggaatggcacacctttaattttggccacaatgttaacattggttccttcttcaacctccatgaattcttttagatcaattgatggtgggcctagattatttaaaaaaa

SEQ ID NO: 50485 - DNA, 120 bp, synthetic construct
  source 1..120: mol_type = other DNA
tctttaacactattacgctagtttggggagcaggtacacggggtcagcatcttttattggatctacatgtggctatgtatctgtgcttgcctcactttatttggcatcattatgcatgta

SEQ ID NO: 50486 - DNA, 120 bp, synthetic construct
  source 1..120: mol_type = other DNA
aggtgaattccccttttaagaaatataactgttaataaaaggaaagcaattttccattttgcacaaatttaggacagaaatattcaaagagggtagtgactacagtttcttcacacttag

SEQ ID NO: 50487 - DNA, 120 bp, synthetic construct
  source 1..120: mol_type = other DNA
catatagagaaataaaaacttgattgtgaagataaatgggtctcagcagttgctaagaaaatgactggttactttctgtcccttttgaggagcatgcagagaaattgctttagcctctga

SEQ ID NO: 50488 - DNA, 120 bp, synthetic construct; identical to SEQ ID NO: 14088
  source 1..120: mol_type = other DNA

SEQ ID NO: 50489 - DNA, 120 bp, synthetic construct
  source 1..120: mol_type = other DNA
ccctctactaggtcttcaacagtaaattgcagttcttccacatcacgcttattgcactgcctccaggcttctttctttgtcccagtagggtcccatgcaaggcactcaacaatatagtgg

SEQ ID NO: 50490 - DNA, 120 bp, synthetic construct
  source 1..120: mol_type = other DNA
ggaagtattaagcgttgtttataataatatacttcaattttgagaagatattttaaatttagattttaaagcttacatatcggatctctggcagtggtcctctgaatggtttccacaggt

SEQ ID NO: 50491 - DNA, 120 bp, synthetic construct; identical to SEQ ID NO: 14089
  source 1..120: mol_type = other DNA

SEQ ID NO: 50492 - DNA, 120 bp, synthetic construct
  source 1..120: mol_type = other DNA
tctgtagcaactttcaaagtctttcttacccatgactttaactctgcaatttgcagtcttttgtcctgctttattcttggctgtgatgctgtatttgcctgtatgagatcgtttacactc

SEQ ID NO: 50493 - DNA, 120 bp, synthetic construct
  source 1..120: mol_type = other DNA
attatttttttacctgtgcatcttcgggtatgtcatgaactccatcctattagaaaaggagacagtcagttgtagtataaatactccttatagtgattcagtggaaaaaagaggagaatg

SEQ ID NO: 50494 - DNA, 120 bp, synthetic construct
  source 1..120: mol_type = other DNA
acagcaggaatcctaatctgtgagccagctttacaaaccagacagtcctgtgctccaatgtcaatgaaaacttctggttcctctgtaataccacatacaatttaacaggatttagctcat

SEQ ID NO: 50495 - DNA, 120 bp, synthetic construct; identical to SEQ ID NO: 14090
  source 1..120: mol_type = other DNA

SEQ ID NO: 50496 - DNA, 120 bp, synthetic construct
  source 1..120: mol_type = other DNA
ttggctggaggtttccatcctagtgagatgcttgacttcgttttatctttaacttctgggcaagaaggtggccccggtggaactaataacaaaagaaaaaaaaaagcttcatcagatttt

SEQ ID NO: 50497 - DNA, 120 bp, synthetic construct
  source 1..120: mol_type = other DNA
ctaaaaggaaatacagttgccttctagagaagagaaataaaggaaatggtctattttcctttagcattaatgcaaaaacagagaaagcaaacaactaactgggaatagaaagactacttc

SEQ ID NO: 50498 - DNA, 120 bp, synthetic construct
  source 1..120: mol_type = other DNA
gccacaatatgaaaatttaaaaaggattccatcaatagctagtaaacctttgaacacaaactaatcttaatgccctttagggacaggatcagtgtctacaataatcccataacaatcctt

SEQ ID NO: 50499 - DNA, 120 bp, synthetic construct
  source 1..120: mol_type = other DNA
tagtttgcaaatgaatgaataactacctcattatataggtatatatgctccacatagcacttgagtatttaaaattttctttttaacaaataattgaatttttcttctatagagaatcta

SEQ ID NO: 50500 - DNA, 120 bp, synthetic construct; identical to SEQ ID NO: 14091
  source 1..120: mol_type = other DNA

SEQ ID NO: 50501 - DNA, 120 bp, synthetic construct
  source 1..120: mol_type = other DNA
tttatgtatgtgtgtatgtatatatctgtgcatgtatgtatacacacataaatatatacttccgatagtctatgtgaacatgaaccttttttattttaataaataaaataatttggcata

SEQ ID NO: 50502 - DNA, 120 bp, synthetic construct
  source 1..120: mol_type = other DNA
gttcactgggaggaccaattcctgcagcatttattgccatggctctgaactggtatttaacgccttcaagcaaacgaggaacattaaattccacgcctttcaatcccactttggttattg

SEQ ID NO: 50503 - DNA, 120 bp, synthetic construct
  source 1..120: mol_type = other DNA
tggtgcgtgccaaaacttttggttttcctggaggtccaggaaggcgataaggatcttgaatgactactttatctgatttgcactcatcactgattccatatttattcactgccctgactc

SEQ ID NO: 50504 - DNA, 120 bp, synthetic construct
  source 1..120: mol_type = other DNA
gagggatgactgtaagaagaaataaatatatagactcaaaacatgggaagacagagaaaaggagaaagctttttttaaaataaaaatatgtagatgtattgtacctgatagtggatctca

SEQ ID NO: 50505 - DNA, 120 bp, synthetic construct; identical to SEQ ID NO: 14092
  source 1..120: mol_type = other DNA

SEQ ID NO: 50506 - DNA, 120 bp, synthetic construct
  source 1..120: mol_type = other DNA
tcccatgtcaagtagcaagattcagctttaatgtcagtaacagcaagatttcttggtggggatgggcggtctggaaaggaatcaacagagaatattgagaaggcaattcttaaacagaca

SEQ ID NO: 50507 - DNA, 120 bp, synthetic construct
  source 1..120: mol_type = other DNA
gaccgctttgggaatgctaagctcagtttttgcctcacttcgggatacctcttccttggttatctgaagtgcatcagtgggtttttcaattacagtttcatttttggaccattcaatctt

SEQ ID NO: 50508 - DNA, 120 bp, synthetic construct
  source 1..120: mol_type = other DNA
ggctctcctgccttaactttgatagtgtctcctcgaacactcagacgcaacttaatagttggaggcactgcaaagagaagagaaagaaaaacagtaacaaagtcataaggatgttttttt

SEQ ID NO: 50509 - DNA, 120 bp, synthetic construct; identical to SEQ ID NO: 14093
  source 1..120: mol_type = other DNA

SEQ ID NO: 50510 - DNA, 120 bp, synthetic construct
  source 1..120: mol_type = other DNA
aggacctttagccagaggcaagtgaaaatgattagcatgagataaatattcatgtaagaaataatatttcacttcaacttaattatgtaaaaaatagccttctgtttggcataaccttac

SEQ ID NO: 50511 - DNA, 120 bp, synthetic construct
  source 1..120: mol_type = other DNA
acgtatgcttttttaatttaacattttagattgtttacctttgtaactggggatgcttctaattctactgaactaggaaagtaagtctgtgaagctttgctttgaatgaccagctgagag

SEQ ID NO: 50512 - DNA, 120 bp, synthetic construct; identical to SEQ ID NO: 14094
  source 1..120: mol_type = other DNA

SEQ ID NO: 50513 - DNA, 120 bp, synthetic construct
  source 1..120: mol_type = other DNA
atgggtcttcctcaaagcctttgctttcttagatgggatgtcagtgtgcattactgtgtgtgcaattttagtgtttcgtattgatttctgggagattccctctggttggttttctattct

SEQ ID NO: 50514 - DNA, 120 bp, synthetic construct
  source 1..120: mol_type = other DNA
ttctctttaactactacgctagtaagttttaaaaacccgacttccaatgtgttctactggagagatataatatgtctaaactacttctaggttattattaagcccctgtagatccaagtt

SEQ ID NO: 50515 - DNA, 120 bp, synthetic construct
  source 1..120: mol_type = other DNA
ctttagctatagattttgagactgttgggagtttgaagccataaagctcagtaaataatataactagaagcaaaacattactctataaacacaatgaaaccttctcttttacctagtgga

SEQ ID NO: 50516 - DNA, 120 bp, synthetic construct
  source 1..120: mol_type = other DNA
tcagtctctattggttgtctccaagtatgcatcttggcatcttttctttcaatgataaagcctgttatttcacttcctccatcatcttctggatcagaccagttaagtagacacattttt

SEQ ID NO: 50517 - DNA, 120 bp, synthetic construct; identical to SEQ ID NO: 14095
  source 1..120: mol_type = other DNA

SEQ ID NO: 50518 - DNA, 120 bp, synthetic construct
  source 1..120: mol_type = other DNA
cagccattatttgtattccacccttgacagaaacatccagttccacagctggaggctctgttgaaagagaacagtcatgcattagcccatgaaagattaaaaaatagtcccatatagaga

SEQ ID NO: 50519 - DNA, 120 bp, synthetic construct
  source 1..120: mol_type = other DNA
aatcagcaccctctcggatttctttgacggtgtactgacggaccttgatcatcttctctgtgcagcgtgaccattcatttgtgccaaccaactgcttatcaacaaaatagccaacaattt

SEQ ID NO: 50520 - DNA, 120 bp, synthetic construct; identical to SEQ ID NO: 14096
  source 1..120: mol_type = other DNA

SEQ ID NO: 50521 - DNA, 120 bp, synthetic construct
  source 1..120: mol_type = other DNA
ttcagaaggcttttgttgacacgagaccaatgtgtactgttaacttcacgtttttcaagccagtaacccaaaatggggcttccattatcttttggttcattccatttcactagcatactg

SEQ ID NO: 50522 - DNA, 120 bp, synthetic construct
  source 1..120: mol_type = other DNA
attatataccaaagtacatggtaaaaaggcaaactttagatgccaaaggaaacttaccaaatggatctttagccacaagtggctttgaaacacatggtggacctggcccaaatctgtttt

SEQ ID NO: 50523 - DNA, 120 bp, synthetic construct
  source 1..120: mol_type = other DNA
acaacaatccattctgagtcgggttttgtcttgtctttcttttccaaagtgtagtttatgatttcactgccaccatcatcaaggggtggttcccatttacaaaggactgaggtctttctg

SEQ ID NO: 50524 - DNA, 120 bp, synthetic construct
  source 1..120: mol_type = other DNA
ggaagggttgctatggaaaatataaatgtgagcatgctcctctgacatgatttgtggttttcccacatctatctttgtattccattagctaataaataacaagatcaggtgatttctttt

SEQ ID NO: 50525 - DNA, 120 bp, synthetic construct; identical to SEQ ID NO: 14097
  source 1..120: mol_type = other DNA

SEQ ID NO: 50526 - DNA, 120 bp, synthetic construct
  source 1..120: mol_type = other DNA
ttcacccttccttctcctaaccaagggtgctgcacgcttcttaatttcctctggtacaataacattttcatcctttatccatgtaatagttgggtaaggtgatccagaaatacttgcatc

SEQ ID NO: 50527 - DNA, 120 bp, synthetic construct
  source 1..120: mol_type = other DNA
ttattttcatttatttcaaaatgggaaagtggcaactccatgaaacaaaacttaccaatgggatctacagctttggttggaggagtagcccgagaaggttcactaatacccgcggcgttc

SEQ ID NO: 50528 - DNA, 120 bp, synthetic construct
  source 1..120: mol_type = other DNA
tctatgatgtagcccattatcttgctccctccatcatacaaaggtggcttccatgtaatagtcattgcctccgctgtaggattatgaacctctacatctacaggtggatcagggggttct

SEQ ID NO: 50529 - DNA, 120 bp, synthetic construct; identical to SEQ ID NO: 14098
  source 1..120: mol_type = other DNA

SEQ ID NO: 50530 - DNA, 120 bp, synthetic construct
  source 1..120: mol_type = other DNA
aatgtcacttgctttaatatctttgcatggtccaggtaggcctattacaaaaatggataattattctagtaatcctgaaaaatcagcattttaataatgcacttgtctctaagtggggct

SEQ ID NO: 50531 - DNA, 120 bp, synthetic construct
  source 1..120: mol_type = other DNA
caagcaaaaatggccccacaaatttccagacattatttgcagggctggggggaatgcagaaaatgttactatccctggttaagaacactatgggaaaatgtgaagctgtgcaattaaaaa

SEQ ID NO: 50532 - DNA, 120 bp, synthetic construct
  source 1..120: mol_type = other DNA
agtataaattagtctaataagcgtttagcgatttcatctctttagaattgttttacttctcctatggaaagacataatcagaagtgacatttagtttacaagtggccagttcatgaagcc

SEQ ID NO: 50533 - DNA, 120 bp, synthetic construct; identical to SEQ ID NO: 14099
  source 1..120: mol_type = other DNA

SEQ ID NO: 50534 - DNA, 120 bp, synthetic construct
  source 1..120: mol_type = other DNA
ctttgccatctttatgccaactaacagttggaactgggacagctctgaagggaacaggaatgcttaacttttcaccttcaataacaataatgtcatgagtctccaggtcaattgttggct

SEQ ID NO: 50535 - DNA, 120 bp, synthetic construct
  source 1..120: mol_type = other DNA
accacattttcagagatttcagatggctcgctgacaccaatagcattgactgctctcactctcaggacatattctttgtcaggaacaacaccttcttcaaccttgaatttcaagtccttt

SEQ ID NO: 50536 - DNA, 120 bp, synthetic construct; identical to SEQ ID NO: 14100
  source 1..120: mol_type = other DNA

SEQ ID NO: 50537 - DNA, 120 bp, synthetic construct
  source 1..120: mol_type = other DNA
ttactctgaagttacagtcaggtcctgcagtctttccagctttcacccaacgggtacctaacctttctttcttctcaatgacatatctattgaaacaacaaagcatttcattagcattaa

SEQ ID NO: 50538 - DNA, 120 bp, synthetic construct
  source 1..120: mol_type = other DNA
attctttatgaattaattcaaattctacctctgtattggtcttccaccatcatttttaggtggctcccactttaggtcaacatgtcgttttgtcacatcaaccactgccagggcgtaggg

SEQ ID NO: 50539 - DNA, 120 bp, synthetic construct
  source 1..120: mol_type = other DNA
taagtgcgagagcacttattgtcacaaagattaagtgcaagagcatactaaaggtgtctttggccagcacagagtcctcaatttcggtgtagtcgctttgtcctatagcattttctgcag

SEQ ID NO: 50540 - DNA, 120 bp, synthetic construct; identical to SEQ ID NO: 14101
  source 1..120: mol_type = other DNA

SEQ ID NO: 50541 - DNA, 120 bp, synthetic construct
  source 1..120: mol_type = other DNA
atatcgtagctcacaggcagatattagaagaatttatatatcccagacatcaagagtgacttacatagcttctcccggcaaagcacagggtcactgggttcactgggttcactttcccca

SEQ ID NO: 50542 - DNA, 120 bp, synthetic construct
  source 1..120: mol_type = other DNA
agcatttcaatgacataagactcaatctttgcacctccatcatgttctggttttgtccaattcaaccttactgatgttttgcctacatcttttacagttggttttccagggggccatgga

SEQ ID NO: 50543 - DNA, 120 bp, synthetic construct
  source 1..120: mol_type = other DNA
agttgatttgcttggttttccaggtccagcaagattttcagccaacacacggaatctgtattttttcttattagtgagacctttcactctgaattaggaacaaagtgcatgtgtatcatc

SEQ ID NO: 50544 - DNA, 120 bp, synthetic construct
  source 1..120: mol_type = other DNA
tttttaactgccacacactttagactgggccaaacataccaatctaattataatatctatgacagtggtcattatcataatatactgggggatcaaacactttgaaacttcctgaaggtt

SEQ ID NO: 50545 - DNA, 120 bp, synthetic construct; identical to SEQ ID NO: 14102
  source 1..120: mol_type = other DNA

SEQ ID NO: 50546 - DNA, 120 bp, synthetic construct
  source 1..120: mol_type = other DNA
accatgtgagagtcactgcgtctttagtgatatcagaaggttctaggcgagttggaggaccaggtggatctatagacaggataatggtgtaaaatgttatatgtcctgtatataaatatg

SEQ ID NO: 50547 - DNA, 120 bp, synthetic construct
  source 1..120: mol_type = other DNA
gttattggagaggcctgaactggttcaccaacaccatacatgttttctgcagcaactctgaagatgtactctttattggggattaatttggtggccttgaagtttgtatccttgacggtg

SEQ ID NO: 50548 - DNA, 120 bp, synthetic construct; identical to SEQ ID NO: 14103
  source 1..120: mol_type = other DNA

SEQ ID NO: 50549 - DNA, 120 bp, synthetic construct
  source 1..120: mol_type = other DNA
attcacagcctcaatgatatatgtgccagtgtcacttctcttactatcaacaatagtcactgtggatttcttagggacattttcaatggtaattcttttgtcctgcttcagaatcatatc

SEQ ID NO: 50550 - DNA, 120 bp, synthetic construct
  source 1..120: mol_type = other DNA
tgagaccagcaaggagcttcacatcgaggaagatttctggggcctctgaattggaaaagattatttatgatgttatcaagttcaagcagatttaaggtcagaggcctatttgataagaca

SEQ ID NO: 50551 - DNA, 120 bp, synthetic construct
  source 1..120: mol_type = other DNA
tttaaggccttcacgcggtaggcataccatttgccttcctcaagacctgtcacttccattctgtcagaaaacagaataggatgttttactgtgatgtcgataatcgtttcattgtgtagt

SEQ ID NO: 50552 - DNA, 120 bp, synthetic construct
  source 1..120: mol_type = other DNA
gcaggcagtacattcagcagcacctttaaaaatcagacagatacaccggcagcataggattctcaatgaaaaaagacaaacatttaaattttccccaacaaagcccattttagtgactag

SEQ ID NO: 50553 - DNA, 120 bp, synthetic construct; identical to SEQ ID NO: 14104
  source 1..120: mol_type = other DNA

SEQ ID NO: 50554 - DNA, 120 bp, synthetic construct
  source 1..120: mol_type = other DNA
aagcaaaaacaggcaacaagattaggtaagaaatcatcaagaatgtactcacttgcaggagttgacatatttacaggttcatcaacatatgcaggttctccagggccacatttgttacga

SEQ ID NO: 50555 - DNA, 120 bp, synthetic construct
  source 1..120: mol_type = other DNA
accctttcgccaacccaaaagatttttaccatgaccagggatacaaactgcagttgttttgaatgctagggattattcttacattaatttcatattagggaaaattgcaaagtaggatac

SEQ ID NO: 50556 - DNA, 120 bp, synthetic construct
  source 1..120: mol_type = other DNA
gtaaagaatagtaactaatataaacacaaggaaataatggctgattaggtcaactaaggtattctagtggaataagaagtgtgaccaccagggaaataaatatttactttccacttctag

SEQ ID NO: 50557 - DNA, 120 bp, synthetic construct; identical to SEQ ID NO: 6620
  source 1..120: mol_type = other DNA

SEQ ID NO: 50558 - DNA, 120 bp, synthetic construct
  source 1..120: mol_type = other DNA
tcatcaggtggttcccaagtcaaatgtactgagtccttggttatatcaccaaatttcaattctttgggtgcacttgggcgagctgaaaaaaaatgcactcacgagtcactgttaatagtc

SEQ ID NO: 50559 - DNA, 120 bp, synthetic construct
  source 1..120: mol_type = other DNA
tataaatgcccttgtctgaacgttcacttggagaaatgacaagttcggcataggcagacaaggtcttcattttcacccggtcccctgtttctagtactttatctccaaaacaccaggttg

SEQ ID NO: 50560 - DNA, 120 bp, synthetic construct; identical to SEQ ID NO: 14106
  source 1..120: mol_type = other DNA

SEQ ID NO: 50561 - DNA, 120 bp, synthetic construct
  source 1..120: mol_type = other DNA
tacagttatgtccatgatccacattgaatattcttttttatatgcaaatgacctaccttgtaagtcagttcagggacaagtttcatattgcaacgaatccaattatcttttccttcttcg

SEQ ID NO: 50562 - DNA, 120 bp, synthetic construct
  source 1..120: mol_type = other DNA
agtctgatctgaggaagttaggtttacaggaggacttggtctctctggaataaaagaaggagttggagcataccatttacgttagtgacaatttatgaaaacagtgttgtaatcaattat

SEQ ID NO: 50563 - DNA, 120 bp, synthetic construct
  source 1..120: mol_type = other DNA
tttattttaattgataggcctaatatctggatttcatgcagtaattatttcccttttttgatgggcttaccaattggatcagcaactttgacgaagggtgtggctgcacttggttttcca

SEQ ID NO: 50564 - DNA, 120 bp, synthetic construct; identical to SEQ ID NO: 14107
  source 1..120: mol_type = other DNA

SEQ ID NO: 50565 - DNA, 120 bp, synthetic construct
  source 1..120: mol_type = other DNA
ttacttaaaagctaacttgaatttacttaaaacttcttaccatatttactccttgcttctacaggattgtcagtttctactggctcaccagtgccaactctgtttcttgcactcacacgg

SEQ ID NO: 50566 - DNA, 120 bp, synthetic construct
  source 1..120: mol_type = other DNA
ggtctttctcttaatgtcacgtctttcaacaacgtaacctatgattttgcttccaccatcagttaaaggttcttcccaagcaaggctcacttcaccatcaaatgtttctgtcacttctaa

SEQ ID NO: 50567 - DNA, 120 bp, synthetic construct
  source 1..120: mol_type = other DNA
tttgccaattaagtctgagagacccaagggcttaccaataacttttaaattgatgaatccttctgcttttccatgtttgttctgaagcacaattttatacctccctttgtctcctttctt

SEQ ID NO: 50568 - DNA, 120 bp, synthetic construct; identical to SEQ ID NO: 14108
  source 1..120: mol_type = other DNA

SEQ ID NO: 50569 - DNA, 120 bp, synthetic construct
  source 1..120: mol_type = other DNA
gtgcgtgcaaattagattggagagtagaggattgagaatggcataaaatcataagacatgcattccttgccaaaaatagtaacataggactcagtgtagtgcaaaacatgttttgttttg

SEQ ID NO: 50570 - DNA, 120 bp, synthetic construct
  source 1..120: mol_type = other DNA
aggatgagaacatacctaaaaggcacacaggggtttgtaaagtaggagagtataagaccgtctttagatttgccaagactctcagggtgatagcttagttgtagcctaagttcataaata

SEQ ID NO: 50571 - DNA, 120 bp, synthetic construct
  source 1..120: mol_type = other DNA
gggcttgctagaaatgaaagaccctcacaaggattacctcattaaataactgtgaaatctgaaatctaaactctgtgatattggaaggatattttaaaataaagggactgacctgccagt

SEQ ID NO: 50572 - DNA, 120 bp, synthetic construct; identical to SEQ ID NO: 14109
  source 1..120: mol_type = other DNA

SEQ ID NO: 50573 - DNA, 120 bp, synthetic construct
  source 1..120: mol_type = other DNA
ttccacaaaaagtctagcacgagacttcctgtcttctaccccgcaagcatattcacactcatcatccagcctgcaatcttttataatgagtctgtgtatacttccatctttttcaaattt

SEQ ID NO: 50574 - DNA, 120 bp, synthetic construct
  source 1..120: mol_type = other DNA
ttgatttctctcccatttctgtaccattttacattggctttctctctggagagctggcaggagaagacagcgtcatcgaactcagtgactgtctgatcttccaagtgttccacaaattct

SEQ ID NO: 50575 - DNA, 120 bp, synthetic construct
  source 1..120: mol_type = other DNA
actctgtatgagacacggttgtcaaaaggcacttcttcaccatttttggtccacttcagtgttacattgagacgattcaccttgcaccagaatgtgacagatttcttctccattgtttca

SEQ ID NO: 50576 - DNA, 120 bp, synthetic construct; identical to SEQ ID NO: 14110
  source 1..120: mol_type = other DNA

SEQ ID NO: 50577 - DNA, 120 bp, synthetic construct
  source 1..120: mol_type = other DNA
ccttcacccgggtgtccttaagaggaactacgatcctgagtttttctgaaagcaaccgacaagactttatagtatgaataatgatcaaagtggtaaatacaaatacaaaacaaacaaaca

SEQ ID NO: 50578 - DNA, 120 bp, synthetic construct
  source 1..120: mol_type = other DNA
ctaggaccctctttttaccatcagcaataacgtcatatttatctccagattcaagtgtcttatcatccctcttccactggactggaaagctttcttttgatatagagcagacaaattcag

SEQ ID NO: 50579 - DNA, 120 bp, synthetic construct
  source 1..120: mol_type = other DNA
gtgtgaattgttagaaataaaagattattcactgtagttttcataccatgtactttgactttgccatcggttcgagagcttgggagtcgacagttgtagttgccagcatcctcaaggtga

SEQ ID NO: 50580 - DNA, 120 bp, synthetic construct
  source 1..120: mol_type = other DNA
tttataccaaatcacttctgcgccaggtttggagacttcacaaaccagttttatagtgtctgtttcactaacttcaatgttggcaagatttttggtaaagacagcttcttcttctgcaag

SEQ ID NO: 50581 - DNA, 120 bp, synthetic construct; identical to SEQ ID NO: 14111
  source 1..120: mol_type = other DNA

SEQ ID NO: 50582 - DNA, 120 bp, synthetic construct
  source 1..120: mol_type = other DNA
aagacttcatagtgtgaagaagaaccaaggtggcagacacaaatataaacaaaccccaaaagcaagaacaatcttaccaattactgttaagttagctgctgtgatactattatcagttat

SEQ ID NO: 50583 - DNA, 120 bp, synthetic construct
  source 1..120: mol_type = other DNA
agcaacaggaggtacttagttgaaagaaatataattgctgatatttgactttctgatctaagaaaacagcactttcatatggttcaaactaatatctaaatctcctgattgtgagtccag

SEQ ID NO: 50584 - DNA, 120 bp, synthetic construct; identical to SEQ ID NO: 14112
  source 1..120: mol_type = other DNA

SEQ ID NO: 50585 - DNA, 120 bp, synthetic construct
  source 1..120: mol_type = other DNA
ttccatcttaatagactacaactgactttgaaatcacttgaagctgcccatcaggtatgatgctttgctttttagatatctctttagtttacataaaattatgtggcattctatatgttc

SEQ ID NO: 50586 - DNA, 120 bp, synthetic construct
  source 1..120: mol_type = other DNA
aggaaacttcagacaccagtggcaaagaaacattgtcttatttaaggcacttagcacaatctttgagaaattagcagaattcaaagatagaacacgtgaagcactatggccagccttgtg

SEQ ID NO: 50587 - DNA, 120 bp, synthetic construct
  source 1..120: mol_type = other DNA
tttgtatgggagggtgattaggattttacatctgttatttcattcatctgtagaattaattcagctggtgtataggattagggagctgcccccttgcccttccttctttcagagctccct

SEQ ID NO: 50588 - DNA, 120 bp, synthetic construct; identical to SEQ ID NO: 14113
  source 1..120: mol_type = other DNA

SEQ ID NO: 50589 - DNA, 120 bp, synthetic construct
  source 1..120: mol_type = other DNA
gacattacatttttcaccagaggaagaagtaatgttaaaaaccattagagttctcttcattcaaagagtccaggactcaaaagatccagggcctcactccatcttcttatccattcttat

SEQ ID NO: 50590 - DNA, 120 bp, synthetic construct
  source 1..120: mol_type = other DNA
tttccttccacatggaaatcacttttactttgtttttaaaattaggactccctacttatctttaaaattcagtttctcctcatccatatcaggatatccatacagtaggctgaccccatg

SEQ ID NO: 50591 - DNA, 120 bp, synthetic construct
  source 1..120: mol_type = other DNA
aacacataaaggatcaggttaggtcagtgtcaatactagaagttgccaagaaatgcagttaggccaagaagggcatgcaaaaagtgttgtgttgttttgttgttgtagttattaaagaat

SEQ ID NO: 50592 - DNA, 120 bp, synthetic construct
  source 1..120: mol_type = other DNA
taacaagttttctgaccctgccatcagcaacaatttcatacttcttgcttttgaggatttctgtcccatttttgaaccatttcaccttagcattttctctggagacttcacactccagca

SEQ ID NO: 50593 - DNA, 120 bp, synthetic construct; identical to SEQ ID NO: 14114
  source 1..120: mol_type = other DNA

SEQ ID NO: 50594 - DNA, 120 bp, synthetic construct
  source 1..120: mol_type = other DNA
ctagcttgataataattcttcctccagctggcttttgaaaatctaggatgtgcaataaaaacaatagagatggaaggaggaagtaaaacctatgctagtcaattttggctctttaaaaag

SEQ ID NO: 50595 - DNA, 120 bp, synthetic construct
  source 1..120: mol_type = other DNA
agcctctgccttatacatgtttttaaaataagccttgtaattacctttcacaaagaggttggcgtgagttttgaaatcttttgctgttagttggacttccccagcatcttctaactttac

SEQ ID NO: 50596 - DNA, 120 bp, synthetic construct; identical to SEQ ID NO: 14115
  source 1..120: mol_type = other DNA

SEQ ID NO: 50597 - DNA, 120 bp, synthetic construct
  source 1..120: mol_type = other DNA
cccactaactcatcatctagcattgggtataaggactataaatcatgctgctgtaaagacacatgcacacgtatgtttattgtggcattattcacaatagcaaagacttggaaccaaccc

SEQ ID NO: 50598 - DNA, 120 bp, synthetic construct
  source 1..120: mol_type = other DNA
aagaaaattttagggtttcatagttacctttatataattactaggtggcctttcacattgaaattgcccaggccagtttctgtttacatttgtggtcttttttgcatatgcgtagatata

SEQ ID NO: 50599 - DNA, 120 bp, synthetic construct
  source 1..120: mol_type = other DNA
tatcagctatggcaagctaaaagtaaaccttatgttctgtatgtaaggtgtttgccatgcaacaacaagctataactcttcttcccatttattttagcaattaaacttattttgcaaacc

SEQ ID NO: 50600 - DNA, 120 bp, synthetic construct; identical to SEQ ID NO: 14116
  source 1..120: mol_type = other DNA

SEQ ID NO: 50601 - DNA, 120 bp, synthetic construct
  source 1..120: mol_type = other DNA
aattaagaactgggcatggttagtcacataattatcttaataattgagagtggccaaaaaacataataaggaaaaataacagctaggagggggtagttaaatatgcccttggaacagagc

SEQ ID NO: 50602 - DNA, 120 bp, synthetic construct
  source 1..120: mol_type = other DNA
ttttggctatttgaaaaggtgtctcagtttctaacccacccacagatatattttatctattaatattatgttgctttatcatctgagttcctctgtagctactctaggacactgctcaga

SEQ ID NO: 50603 - DNA, 120 bp, synthetic construct
  source 1..120: mol_type = other DNA
tgcagtagattgtaagaataatgttagagattttaaaaatatttatttatagtggaagcatattaatataatacggtaggcttatgaccatgacaaaactattaaagttttgtatttaaa

SEQ ID NO: 50604 - DNA, 120 bp, synthetic construct
  source 1..120: mol_type = other DNA
aactcatgtctacaagtttctcttcatatttcctattcctacagcttgtttttgcttgtttggttattgtagttttgaaggcgaaaatttttacataaaatgagtattaaagttcggaat

SEQ ID NO: 50605 - DNA, 120 bp, synthetic construct; identical to SEQ ID NO: 14117
  source 1..120: mol_type = other DNA

SEQ ID NO: 50606 - DNA, 120 bp, synthetic construct
  source 1..120: mol_type = other DNA
actgatcttttaataagaagctcttactatgacaaaaagatatttggtaatgaaaaaataatatcatttgtctttaagcagtgttcctatatataaatcatgaatttgcagatctagaaa

SEQ ID NO: 50607 - DNA, 120 bp, synthetic construct
  source 1..120: mol_type = other DNA
caatatttagaagacctcattgtaaggaaggttttgtgatatgtaacttaattcccatgctacaaatggaatgtactgctgctttttctggtcactggaaaaggagaccaagaagatctt

SEQ ID NO: 50608 - DNA, 120 bp, synthetic construct
  source 1..120: mol_type = other DNA
cagttacttgaaggcattgctttcaaatacttcagtcaatgctgtggctttttgttaaactgaatcactttttaattatattcctttaagtcttcaaagtttgatttttgttgagatctt

SEQ ID NO: 50609 - DNA, 120 bp, synthetic construct; identical to SEQ ID NO: 14118
  source 1..120: mol_type = other DNA

SEQ ID NO: 50610 - DNA, 120 bp, synthetic construct
  source 1..120: mol_type = other DNA
ctttcttgtcagtaccatcagttgcactttaaatagtccacttgcattccagatatcgcacagcccagagcacttgaaggttaaaaatagctttggagaaatgcttgaagagcaaatctg

SEQ ID NO: 50611 - DNA, 120 bp, synthetic construct
  source 1..120: mol_type = other DNA
gtgcaccatggctgcagagcgtgcaatcagaaagcctttttgatccttcctgccttctggttaatcaaactatcattcatagtcaatgagtcttgtcttttcttcaaaaaactaaaacat

SEQ ID NO: 50612 - DNA, 120 bp, synthetic construct
  source 1..120: mol_type = other DNA
acagtttcagcagaaatcaggctaaaggcggaaagagaaaggcaaagacagaggaagagacattagaaagagcaaagaataaggaacatacaagtgaaggtggaagaactccagaaaaag

SEQ ID NO: 50613 - DNA, 120 bp, synthetic construct; identical to SEQ ID NO: 14119
  source 1..120: mol_type = other DNA

SEQ ID NO: 50614 - DNA, 120 bp, synthetic construct
  source 1..120: mol_type = other DNA
gagtatatgtaggggccctttcgttctgacgtacaaggtcagcgagaaatctgtgctgcatctgtctctctgccaggcgtcaagttcttcttgctacataaggtatgtgacttccaaaat

SEQ ID NO: 50615 - DNA, 120 bp, synthetic construct
  source 1..120: mol_type = other DNA
taaaatgcccacacagcaaagcttgtctttctggtgctctagttgcacagccacttgagggaagtggtctttaagggttctgagttagattctcattgtatgtgtatctactttcaatga

SEQ ID NO: 50616 - DNA, 120 bp, synthetic construct
  source 1..120: mol_type = other DNA
tacgatttgaaccacttctgtattggaatgtcaaagtggcaaatacaagagagccagtttttgtgttttaataatattttctaactaataaaataggtccaattaatttcactcacattc

SEQ ID NO: 50617 - DNA, 120 bp, synthetic construct; identical to SEQ ID NO: 14120
  source 1..120: mol_type = other DNA

SEQ ID NO: 50618 - DNA, 120 bp, synthetic construct
  source 1..120: mol_type = other DNA
agtaaagcttacaagtactaagaggaaagccacatttattttagctgtataattctgagccaactagcagcatcacagagtatctacaaccttatactcactctgctggatcaaaagtaa

SEQ ID NO: 50619 - DNA, 120 bp, synthetic construct
  source 1..120: mol_type = other DNA
cttttctaattcacacagctcctttaggtgttgacaagttcagaaatagccttacaggtgtttggagtagggcctctcccttgagtttccagttggcgtggatatcatcttcagagattt

SEQ ID NO: 50620 - DNA, 120 bp, synthetic construct; identical to SEQ ID NO: 14121
  source 1..120: mol_type = other DNA

SEQ ID NO: 50621 - DNA, 120 bp, synthetic construct
  source 1..120: mol_type = other DNA
actgtagaataacttcatctttctctacaccagtataatcttgaagttttcctgtaaaatatgggtctccctctgcaagtaaagtataagtgaaaagcttttattaatcaccttagggaa

SEQ ID NO: 50622 - DNA, 120 bp, synthetic construct
  source 1..120: mol_type = other DNA
gggaatcagtgtgtgggatttatcaagatctaatccattcatattgaattttgaaacattttattaacagtagctaaaaagactgaaatttagcttcaaatacaattttgtgttcctcca

SEQ ID NO: 50623 - DNA, 120 bp, synthetic construct
  source 1..120: mol_type = other DNA
atatgttagccttcatgtttaatcttgttgatattaggtggccaagaaaaacaatgaggcttattaatgtaaattatgtaatatcttctcttatgggaaacttgaaaaacattcctctga

SEQ ID NO: 50624 - DNA, 120 bp, synthetic construct
  source 1..120: mol_type = other DNA
aagctagaatcttcattaacttatagtaatgaaggtaaagtgttttagaaataagcctgattacatatgtgatagcttcttaaggagttgggctgctttcatgcaatataacacttagaa

SEQ ID NO: 50625 - DNA, 120 bp, synthetic construct; identical to SEQ ID NO: 14122
  source 1..120: mol_type = other DNA

SEQ ID NO: 50626 - DNA, 120 bp, synthetic construct
  source 1..120: mol_type = other DNA
atttaactcggatgttatcatgagataactccacagtaaatacagcactttccttctctttggcagttacatctttgagaggggtgaggaatttgagccggattcctatcaagaaaaaaa

SEQ ID NO: 50627 - DNA, 120 bp, synthetic construct
  source 1..120: mol_type = other DNA
gtgtgcttatcttcagcttcaaacatgtattttgcttcatcttcaaaagcagctgacttgatcaccattgaatgcttagtgccatcctttataagctcaaatctgtcatcacctgtgatt

SEQ ID NO: 50628 - DNA, 120 bp, synthetic construct; identical to SEQ ID NO: 14123
  source 1..120: mol_type = other DNA

SEQ ID NO: 50629 - DNA, 120 bp, synthetic construct
  source 1..120: mol_type = other DNA
caatgatttcacagtcctgtttggagtgagggttagaaggaaagaaagaacatcatttatatagttattcctacaaatcatcaagatattttatgccttttttcaccctacacaaccaag

SEQ ID NO: 50630 - DNA, 120 bp, synthetic construct
  source 1..120: mol_type = other DNA
gtttcaccaacaaacacctctactccgtacagaggcttttccacttttattagtcgagctgaaatgatacagttttgttagcatgactgaactaataaactgcagattcagatagggtaa

SEQ ID NO: 50631 - DNA, 120 bp, synthetic construct
  source 1..120: mol_type = other DNA
ggcgcaggccatctgccttgatagaatatttgggtgaagggacaatctcttcaccatctttgaaccatttcactggtacatctttgctcacttcacacttcaaagtaatctcatccttct

SEQ ID NO: 50632 - DNA, 120 bp, synthetic construct; identical to SEQ ID NO: 14124
  source 1..120: mol_type = other DNA

SEQ ID NO: 50633 - DNA, 120 bp, synthetic construct
  source 1..120: mol_type = other DNA
cattttttcatgagaaagttcacaaacaaaagttgctgtttcaccttcttttactgtttgatcttcaagaggtgacatgaatttcagtcttatacctgaaatgcaagcatagataatgcc

SEQ ID NO: 50634 - DNA, 120 bp, synthetic construct
  source 1..120: mol_type = other DNA
aggggggttgttttggtaacactgtgaaagttaattagtgatgcattatcacagcttttagaacttggcgtcctatctttaaagtcatatatttgcatgcctttatgggatgtcacagat

SEQ ID NO: 50635 - DNA, 120 bp, synthetic construct
  source 1..120: mol_type = other DNA
tccatcagcgatgatatcaaatttgtcagatgacttaattatatcaggtcctttggaccatataacatttgcctctcgggtgaggacacattcgaatcgagcctgtcgcctttctggaac

SEQ ID NO: 50636 - DNA, 120 bp, synthetic construct; identical to SEQ ID NO: 14125
  source 1..120: mol_type = other DNA

SEQ ID NO: 50637 - DNA, 120 bp, synthetic construct
  source 1..120: mol_type = other DNA
taataaaagtaagcagagaattccctgtcataacattttacacaaattgttcaagttgtccccaaatgatacgtaaaatttctttccttcttggagactttagaagactccattaactcc

SEQ ID NO: 50638 - DNA, 120 bp, synthetic construct
  source 1..120: mol_type = other DNA
tttcagtttccattgtccaggaatgtctgcctctgagatttctgcatcaaagcttgcactttctttctcataaatggtaacgtcctctattggtttaagcagttcaacttcacgctctgt

SEQ ID NO: 50639 - DNA, 120 bp, synthetic construct
  source 1..120: mol_type = other DNA
agattttatacctccaagtgtcagctttgcagggtatctttttccttcaatttccactgcatactcagcaatatcttctggcatagcattcttaattttgaggtacagatgatttccatc

SEQ ID NO: 50640 - DNA, 120 bp, synthetic construct
  source 1..120: mol_type = other DNA
cacatgctggtctcgtataggtttcaccagccaatctctaatgacttctatatgaaaataagatcagaaaaaatgattaaggtctgaacaagtaatatacatagcttccttagtaaattt

SEQ ID NO: 50641 - DNA, 120 bp, synthetic construct; identical to SEQ ID NO: 14126
  source 1..120: mol_type = other DNA

SEQ ID NO: 50642 - DNA, 120 bp, synthetic construct
  source 1..120: mol_type = other DNA
gctctttgtttaactcgcagctcaagtacaatggctgtcctttgaccactgtgacttcctcttccagtgtttttacaaaacgcacaggaagttctatggagaatttcagtatatatttca

SEQ ID NO: 50643 - DNA, 120 bp, synthetic construct
  source 1..120: mol_type = other DNA
agaaattaccttctacaacaagtttagccgtggaggtcttttctttgtttcccaaacgtaaaacacaggtgtattcaccagcatcggaaagttgaacatcaatgatgtgcagctttctgt

SEQ ID NO: 50644 - DNA, 120 bp, synthetic construct
  source 1..120: mol_type = other DNA
gaaggggagaccaaacattcaaagattgctgaagagccaacgaactctgattctgtcaagatgatgtctttgatttctttcacaaacttcagtggcacagcctttagctggtaggtgaac

SEQ ID NO: 50645 - DNA, 120 bp, synthetic construct; identical to SEQ ID NO: 14127
  source 1..120: mol_type = other DNA

SEQ ID NO: 50646 - DNA, 120 bp, synthetic construct
  source 1..120: mol_type = other DNA
tctgccatgtataaataccatgcatatgaaaaatgaagctaagaacttatgggattcactatgctaaaatatagttggatatatatatatatatatatatatatatatatatatatatat

SEQ ID NO: 50647 - DNA, 120 bp, synthetic construct
  source 1..120: mol_type = other DNA
tgaactttggaaattcagagtggaaggttacaatgcaagtactagaaaaatgaatttcacctttgataggaccttttggcttggcagcctcttccttaggtgctttggcttctgaaataa

SEQ ID NO: 50648 - DNA, 120 bp, synthetic construct; identical to SEQ ID NO: 14128
  source 1..120: mol_type = other DNA

SEQ ID NO: 50649 - DNA, 120 bp, synthetic construct
  source 1..120: mol_type = other DNA
gtaagtcctgattatgtgaaccaaggaaataaggttttgtcaataaatcagtgtagggaaaagggaaatggctgagaggttaccaaaagcctttctttttatgtctaaattgggcagaca

SEQ ID NO: 50650 - DNA, 120 bp, synthetic construct
  source 1..120: mol_type = other DNA
tgaagtaaggcagaagcaagagagttctgacatttagagtttgattccattattaatacagggacagtataaactgtggaatgagttctctagcttcagcccccaggataactgagaata

SEQ ID NO: 50651 - DNA, 120 bp, synthetic construct
  source 1..120: mol_type = other DNA
caacaaaatataacacaaatattaaaaattaaactacagtcaaaagaatatagtgtatttttttatgtcattaaacatggtaatgtccaaatattttgagataattttaaataaaaaaat

SEQ ID NO: 50652 - DNA, 120 bp, synthetic construct
  source 1..120: mol_type = other DNA
gccaatttttattattaggttcagaaaattaaattaaaaaatttctctgtcaaactattatggacatttctaaatgttattcccggggcctatgcacatctcactgtggaatgtaacaaa

SEQ ID NO: 50653 - DNA, 120 bp, synthetic construct; identical to SEQ ID NO: 14129
  source 1..120: mol_type = other DNA

SEQ ID NO: 50654 - DNA, 120 bp, synthetic construct
  source 1..120: mol_type = other DNA
gttatgtggatatatttcatgatgctgaggtctgggatatgagtgatctcatcacccagatagtgagccaaagggcaaatagtcaggatgtgtatgtttatcaatgactatcaattacac

SEQ ID NO: 50655 - DNA, 120 bp, synthetic construct
  source 1..120: mol_type = other DNA
gttagaacatttaagaaaattattattgatctaattccttatacagattaaaagactgaaatatggagtctcttttttctttttctttcttattgtggtaaaatatacctaacataaaat

SEQ ID NO: 50656 - DNA, 120 bp, synthetic construct
  source 1..120: mol_type = other DNA
tttaaaaaagagaaattgttccaatagggtataagggaaatttgaagcttcatgggattcttatatgtatacccttacagggtctctgcctgtctccttagtttttatcagccccaaaca

SEQ ID NO: 50657 - DNA, 120 bp, synthetic construct; identical to SEQ ID NO: 14130
  source 1..120: mol_type = other DNA

SEQ ID NO: 50658 - DNA, 120 bp, synthetic construct
  source 1..120: mol_type = other DNA
ggttcaggttccacaggaggtggtttgattgttttcacttctgtagagagaagtccattgcattagtgtatcaatttgtcacttcctaaaaacttatttggtagcttatttgcctcttct

SEQ ID NO: 50659 - DNA, 120 bp, synthetic construct
  source 1..120: mol_type = other DNA
atacatactgactttcacctactatcttttattaagtacatgttatgtgtgtgaatacagaaagaatatgctgttgacattgaggataagcttgctcacctgcttcgggctttggtttcg

SEQ ID NO: 50660 - DNA, 120 bp, synthetic construct
  source 1..120: mol_type = other DNA
gttcaggtgcagggagaggtattgctggcttgatttcaggcactgaaataatttagagtagagggcagattattacaggatttttgaagtttttcacaaagtcaaaactaaaattaagcc

SEQ ID NO: 50661 - DNA, 120 bp, synthetic construct; identical to SEQ ID NO: 14131
  source 1..120: mol_type = other DNA

SEQ ID NO: 50662 - DNA, 120 bp, synthetic construct
  source 1..120: mol_type = other DNA
ggttcaggaatcttcctttccctttttgtaacagtaggtacttcaacctcttcaacaggttttggaggtggtggttctggtactttaagataagattattttttcagtgttaatatttga

SEQ ID NO: 50663 - DNA, 120 bp, synthetic construct
  source 1..120: mol_type = other DNA
catttatttttcttccttttattccatccacttatcttccactccccttagctctctccttctaaatcacttctataatagttcccaataattttgccctttgagaataggctaatgata

SEQ ID NO: 50664 - DNA, 120 bp, synthetic construct
  source 1..120: mol_type = other DNA
agaatgaagtgcagggaaatacatgaatggatttgggaattactataaaaatatttaaacagaaagcagacaatggaaaacagagactacatcacagatgaaatatgaagccatgtttac

SEQ ID NO: 50665 - DNA, 120 bp, synthetic construct
  source 1..120: mol_type = other DNA
tttaggttctactttaggttcttcttcttcaggtctttttcttagaactttaaagacaaaaaggtttatatgtaaaccaagacaaactaatgaagatgttgaataagcttgacaaatgca

SEQ ID NO: 50666 - DNA, 120 bp, synthetic construct; identical to SEQ ID NO: 14132
  source 1..120: mol_type = other DNA

SEQ ID NO: 50667 - DNA, 120 bp, synthetic construct
  source 1..120: mol_type = other DNA
ttcttcatttgactatcttgtttctcattctttaatattttattagtcagaaagaaatgttcagttttttaaaaatgttatttattagttgtggtgatcctgtgtcacactttaaaactg

SEQ ID NO: 50668 - DNA, 120 bp, synthetic construct
  source 1..120: mol_type = other DNA
acttagttatgtctattaacattttaaatttcaaaatactgtgaatgctcacaaaatttctgtcttttttttttaaaaaaaaagatctggaaatgacatttttcttaattttcaatgaaa

SEQ ID NO: 50669 - DNA, 120 bp, synthetic construct; identical to SEQ ID NO: 14133
  source 1..120: mol_type = other DNA

SEQ ID NO: 50670 - DNA, 120 bp, synthetic construct
  source 1..120: mol_type = other DNA
tacatttcaagttatctcctctgcaaatatctatacagccttgtgatgaaattcaactccattaactgcaggcaaatgtattcattttaaatgcatgtagaggatgttgctccatactga

SEQ ID NO: 50671 - DNA, 120 bp, synthetic construct
  source 1..120: mol_type = other DNA
cgatgttatctacccaaccactaaatgtatgaaaatgatactggcaagtgttagtgccatcattcagtcttctccactgagggaagaaggtggccaagagttccggtttgtgactttgat

SEQ ID NO: 50672 - DNA, 120 bp, synthetic construct
  source 1..120: mol_type = other DNA
tggtgttggaagctcgtttttcatgaataagaaaatgttcttaaattcattcaaattaaggaacgcaaggaattcaaaatttcctgttgcgtctacagtgaatactgagcatggtggatg

SEQ ID NO: 50673 - DNA, 120 bp, synthetic construct
  source 1..120: mol_type = other DNA
taatttaaaacagtatttatttgtattgtgtaactatttgctattaggaatctgaatttttagatatttctataaaacttcctatttagggctttaaacaagatatttgcaattcattaa

SEQ ID NO: 50674 - DNA, 120 bp, synthetic construct; identical to SEQ ID NO: 14134
  source 1..120: mol_type = other DNA

SEQ ID NO: 50675 - DNA, 120 bp, synthetic construct
  source 1..120: mol_type = other DNA
tctgtgcattttttatattattatttgattttaaaaatcttattgatgtttgagaacccaacattgtagctattatttttaaagtcattatatgtgattatatgctattttaatgtttat

SEQ ID NO: 50676 - DNA, 120 bp, synthetic construct
  source 1..120: mol_type = other DNA
tccccaaaatttcagagtgaccagaaacagtcttaatttctaggtctgaatgtgttgattacttgaacagaacactactacccattagaaaaattatgtttatttttgatagatgttttc

SEQ ID NO: 50677 - DNA, 120 bp, synthetic construct
  source 1..120: mol_type = other DNA
tttctgaaatgtgagttccgtacccctcagagaatgacttagagccagtgagaagagagtgacatgaaagtcctaaggaaatccctacaaataaccttaataatataaaaggaagatagg

SEQ ID NO: 50678 - DNA, 120 bp, synthetic construct
  source 1..120: mol_type = other DNA
accagtaaaatttgttatttttaagtttaggaaaatgcaagaagacatatgtagatgagacaaagatagaccatgtctatacatgtatgaaatggatgggagacaaaggaagcaacactc

SEQ ID NO: 50679 - DNA, 120 bp, synthetic construct; identical to SEQ ID NO: 14135
  source 1..120: mol_type = other DNA

SEQ ID NO: 50680 - DNA, 120 bp, synthetic construct
  source 1..120: mol_type = other DNA
tcaaagaacatacaagcagcattcgaaccatgaaaacagactgcagttttactccaaagttcagtagttaattaaagaccagcagaaaaagaagacaatttttgttattggcaggaggaa

SEQ ID NO: 50681 - DNA, 120 bp, synthetic construct
  source 1..120: mol_type = other DNA
gctatgagggttgtagagggcaagaatcaccagcagcaatgtcttatgctggaagactgtggtttgaagatacataggtctgtatagggaaagtgcatatctaagattatatctagataa

SEQ ID NO: 50682 - DNA, 120 bp, synthetic construct
  source 1..120: mol_type = other DNA
tgtgtcaattcatagaaaaatcaaaatataagaagggggaagggaagtttaataataaatgctggataccaaatgtcttcataaccactctttccagctcccctgagaaccacacagaac

SEQ ID NO: 50683 - DNA, 120 bp, synthetic construct; identical to SEQ ID NO: 14136
  source 1..120: mol_type = other DNA

SEQ ID NO: 50684 - DNA, 120 bp, synthetic construct
  source 1..120: mol_type = other DNA
tatcttgcaaggatttcttatacattccttaagcataagatcgcaatgatatgtatagcaatcaggctttgaaatcagaaaactctttctccccactccacaaaagaaagttaattggac

SEQ ID NO: 50685 - DNA, 120 bp, synthetic construct
  source 1..120: mol_type = other DNA
aacccaggaaccatggggcagcagaagagacagctctatgcaatctcacagtacaatcatgtctgaaagtacacacttctaaaagtcatacatttcttgcaagcatcatttcagatggct

SEQ ID NO: 50686 - DNA, 120 bp, synthetic construct
  source 1..120: mol_type = other DNA
tcttccttaggtggagcaggtggaggaggtgggggtcttggtttgagttttggcttctcaataaccttttcaggttcaggttcttgaaagagtatttcagaggtgttagtatatgtatat

SEQ ID NO: 50687 - DNA, 120 bp, synthetic construct
  source 1..120: mol_type = other DNA
ccaacataaaacacagaacataaaacataaaaatatcaaccctttacaaagatgatgagaaatacagcaaaggcaccaataacaacaacaaacaaagcatccagacaagccacagttgac

SEQ ID NO: 50688 - DNA, 120 bp, synthetic construct; identical to SEQ ID NO: 14137
  source 1..120: mol_type = other DNA

SEQ ID NO: 50689 - DNA, 120 bp, synthetic construct
  source 1..120: mol_type = other DNA
caattcatacaaattcatgtatagaaaaattcacgtataagaaaaagttcttttacttgaactgcctattaattagattattcaatgtatattgatggcaaatgagatgacttttaaaat

SEQ ID NO: 50690 - DNA, 120 bp, synthetic construct
  source 1..120: mol_type = other DNA
agaagtgtaactatttcaaaaataaagcagtcaaacatgctagactgctcttgtatataatttcaagaaggaatattgtcctgtaaatgcttttgtaattctaacaggaatcttcaggag

SEQ ID NO: 50691 - DNA, 120 bp, synthetic construct
  source 1..120: mol_type = other DNA
aaaaaacatagtattttattttagactatatttagaacagaatactgcaactactattctaacatatcaacctagttacattaagtaacactctataacagattattcagatgacccccc

SEQ ID NO: 50692 - DNA, 120 bp, synthetic construct; identical to SEQ ID NO: 14138
  source 1..120: mol_type = other DNA

SEQ ID NO: 50693 - DNA, 120 bp, synthetic construct
  source 1..120: mol_type = other DNA
tcttctcagctttcttcatttgcttctagtcctctgtgtacacttaaatgaaggtggtctaactttgacacttaaaaaaatttgctctacattttctgagtaattgttcctgcacactca

SEQ ID NO: 50694 - DNA, 120 bp, synthetic construct
  source 1..120: mol_type = other DNA
aacttttatgctttaaaggtgaaaagcacatctaccattttcctctaacgttagttcagagacccaatgaaccattcttttggccatctagctttaaaccttacaatgatcttgggctcc

SEQ ID NO: 50695 - DNA, 120 bp, synthetic construct
  source 1..120: mol_type = other DNA
ctgccgccacggatcttgtccaactcttaaagaccttaaataattgcaatgggtctttactatttagtagctgaaattgctgccagttatctttctaaagcccaaatcctattaatatgt

SEQ ID NO: 50696 - DNA, 120 bp, synthetic construct; identical to SEQ ID NO: 14139
  source 1..120: mol_type = other DNA

SEQ ID NO: 50697 - DNA, 120 bp, synthetic construct
  source 1..120: mol_type = other DNA
aagcaattctcctgcctcagcctcccaagtagctgggattacaggcacatatcaccacccccagctaatttttgtatttttagtagagacggggtttcaccatgttggccaggctggtct

SEQ ID NO: 50698 - DNA, 120 bp, synthetic construct
  source 1..120: mol_type = other DNA
ttaaattcagtttaacacagcttcccatgatgcctctgcctgaacttaatcttttcttgccgtgtgtttctgcagcccttttgtattcacttgctatgtgtaatcacttcctgtctgtat

SEQ ID NO: 50699 - DNA, 120 bp, synthetic construct
  source 1..120: mol_type = other DNA
ttgagctgttttacacattgaatgagagaaggttcttttctactagttgtagccatgtgatatatcacagcacaactgaatcccactcattttttcactcctgcttgtctgtttcatttt

SEQ ID NO: 50700 - DNA, 120 bp, synthetic construct; identical to SEQ ID NO: 14140
  source 1..120: mol_type = other DNA

SEQ ID NO: 50701 - DNA, 120 bp, synthetic construct
  source 1..120: mol_type = other DNA
atcagaatactttcttttttatgatgccaacgatgaagtgaatacctttagctgctggtgtttctggcttcttaacagttgggaccttcttcactggaacaactttctttggcatctcag

SEQ ID NO: 50702 - DNA, 120 bp, synthetic construct
  source 1..120: mol_type = other DNA
acacacaataagaagagtgtaaaattgtagacaccacaaaaatgaagtattcattttaacatgagtacctttaggaggcggtgcttctggttttttgatgacaggaactttcttctctgg

SEQ ID NO: 50703 - DNA, 120 bp, synthetic construct
  source 1..120: mol_type = other DNA
atgtgggaccaaattctgtgggtccaaagttttatgtgtagaaataacttttgttcttaatgtagtcagatttcaggcaacaagatacaagactgatattttgccttaaggaagatatat

SEQ ID NO: 50704 - DNA, 120 bp, synthetic construct; identical to SEQ ID NO: 14141
  source 1..120: mol_type = other DNA

SEQ ID NO: 50705 - DNA, 120 bp, synthetic construct
  source 1..120: mol_type = other DNA
acttctttgtctattgattcaaatgcttgcaaagcccttttagtgtttaatgtcatttataatcattagttctcctgccttactttctatgtacattggagaagctttgtttaatatagc

SEQ ID NO: 50706 - DNA, 120 bp, synthetic construct
  source 1..120: mol_type = other DNA
agacaaataattaaaggttagaaaatgaccaagaaataatgagttaggaaggaagaagaacaaagcttaaattagaaatagtcgcaagtggcaaggtcattaatcaccggtctcacgtgt

SEQ ID NO: 50707 - DNA, 120 bp, synthetic construct
  source 1..120: mol_type = other DNA
gttgagaagtatattaaatttataccacatcgacttcacattttgctcaaataacccagggacagatccaagaacaaatttcacaataaggtcagtgatctgtctttggaccctcatata

SEQ ID NO: 50708 - DNA, 120 bp, synthetic construct; identical to SEQ ID NO: 14142
  source 1..120: mol_type = other DNA

SEQ ID NO: 50709 - DNA, 120 bp, synthetic construct
  source 1..120: mol_type = other DNA
gaacttcaggcacttcaaatatattagtattttaacattagaaacaatcaccagtaaacattcatcacatttacacagaacaaaacccttttagaagctgggggctccatccgcccccat

SEQ ID NO: 50710 - DNA, 120 bp, synthetic construct
  source 1..120: mol_type = other DNA
ggaacaacctccttgggcacctcgggcactataaaagatattagtagttgtttaagctcatggtttcaatgaaatgtgaaaatcatgaagcagaacagtagaatatgacacttcaaagaa

SEQ ID NO: 50711 - DNA, 120 bp, synthetic construct; identical to SEQ ID NO: 14143
  source 1..120: mol_type = other DNA

SEQ ID NO: 50712 - DNA, 120 bp, synthetic construct
  source 1..120: mol_type = other DNA
tcctcaggctcctcgaacactttaaagacatgagctcattttaatgccagaattgactaaaactgagatagtttgcaaaaaaatgtttttacaacactaaggaaagatttttttaaaaaa

SEQ ID NO: 50713 - DNA, 120 bp, synthetic construct
  source 1..120: mol_type = other DNA
atattattattttcattgttagacaaagtaaagacaaacaaacaatatcaaacacagcaccatgagggtgtctaccttttgtgggtggcacttcaggctttttaggaggaggcactggca

SEQ ID NO: 50714 - DNA, 120 bp, synthetic construct
  source 1..120: mol_type = other DNA
atctgaagcctaaaatcagtgacaaatacctttaacaggtgtgacttcaggctttttaggaggagccgctggcactttcttttcaggaacaacttctttcggagcctctggcacttaaaa

SEQ ID NO: 50715 - DNA, 120 bp, synthetic construct
  source 1..120: mol_type = other DNA
ttcaggctttttaggaggagccgagggcactttcttttcaggaacaacctctttgggagcctctggtacttaaaagatattagtgaaattacatttaggggttatgaagaccactagaaa

SEQ ID NO: 50716 - DNA, 120 bp, synthetic construct; identical to SEQ ID NO: 14144
  source 1..120: mol_type = other DNA

SEQ ID NO: 50717 - DNA, 120 bp, synthetic construct
  source 1..120: mol_type = other DNA
catttaggggttatgaagaccactggaacaaaatgtcttcaactgcaaaagaattagatcatctgaagcctaaggtcagtgacaaatacctttaacaggtgggacttcaggctttttagg

SEQ ID NO: 50718 - DNA, 120 bp, synthetic construct
  source 1..120: mol_type = other DNA
attggatcttctgaagcttaaggtcaaatgacaagtacctgtaacaggtggaacttctggctttttaggaagcaccagtgttttcttttctggcacaatttcttgtgggacttcaggcac

SEQ ID NO: 50719 - DNA, 120 bp, synthetic construct; identical to SEQ ID NO: 14145
  source 1..120: mol_type = other DNA

SEQ ID NO: 50720 - DNA, 120 bp, synthetic construct
  source 1..120: mol_type = other DNA
gagcttctggttttttgggtggagccacgggaatttctttttctgcggcttcttgaggaacttctggcacttgaaagatattagtagttttatacttaggttaatgaagaggaatggact

SEQ ID NO: 50721 - DNA, 120 bp, synthetic construct
  source 1..120: mol_type = other DNA
ggacaacttcttgagcagcttcaggcacttgaaagatattagtatttttataatttatgaatggcgaaggtatatattacagtgattgtgaggggtacagacagtaagttattcttagca

SEQ ID NO: 50722 - DNA, 120 bp, synthetic construct; identical to SEQ ID NO: 14146
  source 1..120: mol_type = other DNA

SEQ ID NO: 50723 - DNA, 120 bp, synthetic construct
  source 1..120: mol_type = other DNA
ttccttcggtggcagcacttcaggcacttcaaagatatttgtaatttgtgtttagaaaaggtgaaaatgatggatgccttttgcatataaacacccaccaagatattttggatagtgatt

SEQ ID NO: 50724 - DNA, 120 bp, synthetic construct
  source 1..120: mol_type = other DNA
agggggaggactttccggtttgggaggaatagcttcaggcaccttcttttctgggacagctgcctttggcacctctgggactttaaagatattagtattttcattattagacaaagtaaa

SEQ ID NO: 50725 - DNA, 120 bp, synthetic construct; identical to SEQ ID NO: 14147
  source 1..120: mol_type = other DNA

SEQ ID NO: 50726 - DNA, 120 bp, synthetic construct
  source 1..120: mol_type = other DNA
tcttgtgggacttcaggcacttgaaagatattagtagtttttcacttaggttaatgagacaaatggagtaaaatatttctaagatcagaagagatatttcttctgcagaaaaaggacagg

SEQ ID NO: 50727 - DNA, 120 bp, synthetic construct
  source 1..120: mol_type = other DNA
taagttaatgaagagaaatgggctaaaattgtttacagtaggagaggagatatctcttctgcagaatgaagtcagggctaaagtgtacctgggacaatcggagcttctggttttttgggt

SEQ ID NO: 50728 - DNA, 120 bp, synthetic construct
  source 1..120: mol_type = other DNA
aagagagatttcttctgcaggataaggttgagctgacatgtacctgtaactgcgggggcttctggttttttgattggtgccttgggaattttcttttctgggacaacttcttgagcagct

SEQ ID NO: 50729 - DNA, 120 bp, synthetic construct
  source 1..120: mol_type = other DNA
ttttgcacgtggggcttccggttttttgggcacagccacagatgctttcttttcaagtacaacttctttaggagcttcaggaactttgaagatattagtatcttttagttagaagctata

SEQ ID NO: 50730 - DNA, 120 bp, synthetic construct; identical to SEQ ID NO: 14148
  source 1..120: mol_type = other DNA

SEQ ID NO: 50731 - DNA, 120 bp, synthetic construct
  source 1..120: mol_type = other DNA
tcctagttaaaataacagttatttttctcctatagtttgtatagctttggcattaccttcagggggaggactttccggtttgggaggaatagcttcaggcaccttcttttctgggacagc

SEQ ID NO: 50732 - DNA, 120 bp, synthetic construct; identical to SEQ ID NO: 14149
  source 1..120: mol_type = other DNA

SEQ ID NO: 50733 - DNA, 120 bp, synthetic construct
  source 1..120: mol_type = other DNA
ccaacgacaaaaaccacatgattatctcaatagatgcagaaagggcctttgacaaaattcaacagcccttcatgctaaagactctcaataaattaggtattgatgggacgtatctcaaaa

SEQ ID NO: 50734 - DNA, 120 bp, synthetic construct
  source 1..120: mol_type = other DNA
acatagtgttggaagttctggccagggcaatcaggcaggagaaagaaataaagggtattcaataaggaaaagaggaagtcaaattgtccctgtttgcagatggcatgattgtatatctag

SEQ ID NO: 50735 - DNA, 120 bp, synthetic construct
  source 1..120: mol_type = other DNA
cagagagccaaatcgtgagtgacctcccattcacagttgcttcaaagagaataaaatacctaggaatccaacttacaagggatgtgaaggacctcttcaaggagaactacaaaccactgc

SEQ ID NO: 50736 - DNA, 120 bp, synthetic construct; identical to SEQ ID NO: 14150
  source 1..120: mol_type = other DNA

SEQ ID NO: 50737 - DNA, 120 bp, synthetic construct
  source 1..120: mol_type = other DNA
ctgatctttgacaaacctgacaaaaacaagaaatggggaaagggttccctatttagcaaatggtgctgggaaaactggctagccatatgtagaaagctgaaattggatcccttccttaca

SEQ ID NO: 50738 - DNA, 120 bp, synthetic construct
  source 1..120: mol_type = other DNA
atgtctaaaataccaaaagcaatggtaacaaaagccaaaattgacagataggatcgaattaaactaaagagcttctgcacagcaaaggaaactaccatcagaatgaacaggcaacccaca

SEQ ID NO: 50739 - DNA, 120 bp, synthetic construct; identical to SEQ ID NO: 14151
  source 1..120: mol_type = other DNA

SEQ ID NO: 50740 - DNA, 120 bp, synthetic construct
  source 1..120: mol_type = other DNA
cagtgtggcgattcctcagggatctagaactagaaataccatttgacccagccatcccattactgggtatatacccaaaggattataaatcatgctgctataaagacacgtgcacacgta

SEQ ID NO: 50741 - DNA, 120 bp, synthetic construct
  source 1..120: mol_type = other DNA
aaaatgatgagttcatgtcctttgtagggacatggatgaaactggaaaccatcattcttggcaaactatcacaaggataaaaaaccaaacattgcatgttctcattcataggtgggaatt

SEQ ID NO: 50742 - DNA, 120 bp, synthetic construct
  source 1..120: mol_type = other DNA
gggtgcagcacaccaacatggcacatgtatacatacgtaacaacctgcacgttgtgcacatgtaccctagaacttaaagtataataaaaatatatatatatataaaaagaaaaatatttt

SEQ ID NO: 50743 - DNA, 120 bp, synthetic construct; identical to SEQ ID NO: 14152
  source 1..120: mol_type = other DNA

SEQ ID NO: 50744 - DNA, 120 bp, synthetic construct; identical to SEQ ID NO: 14153
  source 1..120: mol_type = other DNA

SEQ ID NO: 50745 - DNA, 120 bp, synthetic construct
  source 1..120: mol_type = other DNA
gggctaaaattgtttacagtaggagaggagatatctcttctgcagaatgaagtcagggctaaagtgtacctgggacaattggagcttctggttttttgggtggagccacgggaatttctt

SEQ ID NO: 50746 - DNA, 120 bp, synthetic construct; identical to SEQ ID NO: 14154
  source 1..120: mol_type = other DNA

SEQ ID NO: 50747 - DNA, 120 bp, synthetic construct
  source 1..120: mol_type = other DNA
ggttttttgggcacagccacagatgctttcttttcaagtacaacttctttaggagcttcaggaactttgaagatattagtatcttttagttagaagctataaagggggaatatcgactcc

SEQ ID NO: 50748 - DNA, 120 bp, synthetic construct
  source 1..120: mol_type = other DNA
tttttggcaggaggcaccggtactttcttttctgggaccacttccttcggtggcagcacttcaggcacttcaaagatatttgtaatttgtgtttagaaaaggtgaaaatgatggatgcct

SEQ ID NO: 50749 - DNA, 120 bp, synthetic construct
  source 1..120: mol_type = other DNA
taggatttttaacatgtaatttcctagttaaaataacagttatttttctcctatagtttgtatagctttggcattaccttcagggggaggactttccggtttgggaggaatagcttcagg

SEQ ID NO: 50750 - DNA, 120 bp, synthetic construct; identical to SEQ ID NO: 14155
  source 1..120: mol_type = other DNA

SEQ ID NO: 50751 - DNA, 120 bp, synthetic construct
  source 1..120: mol_type = other DNA
gcgctttcttttcaggaactacttctttgggaggctctggtacttaaaagatattagcaaaattacattcagaagttatgaagaccactggaaaaaatatcttcaagagcaaaagaatga

SEQ ID NO: 50752 - DNA, 120 bp, synthetic construct; identical to SEQ ID NO: 14156
  source 1..120: mol_type = other DNA

SEQ ID NO: 50753 - DNA, 120 bp, synthetic construct
  source 1..120: mol_type = other DNA
tagatacaaagacattttcaagaacaaaagagctatttttttctcctgagctgagatcagtggtaacaagttcccataataggtggtgtttcaggttttagaggaggaacttccggtatt

SEQ ID NO: 50754 - DNA, 120 bp, synthetic construct
  source 1..120: mol_type = other DNA
aaaactagaaaggtggtcctttctatcgccccacccactatcccaccataaaaagacagttaagaatgtacctttgacaggtacaacttcagccctttggggaggatgcactttcttttc

SEQ ID NO: 50755 - DNA, 120 bp, synthetic construct; identical to SEQ ID NO: 14157
  source 1..120: mol_type = other DNA

SEQ ID NO: 50756 - DNA, 120 bp, synthetic construct
  source 1..120: mol_type = other DNA
tctctttttttggaaggaactgtcttggcaggaataatttcttgaggagcttcgggcgcttgaaagatattagcaattcacatttaagagttaaaatgattaatggaaaacagtaaccac

SEQ ID NO: 50757 - DNA, 120 bp, synthetic construct
  source 1..120: mol_type = other DNA
cagaacctcacagagctctcgcgacactctacactctcattataaaggatttgttgaatgaatacttccagcaggagtgttttctgttttggcagaaacagccataaataatttcttttt

SEQ ID NO: 50758 - DNA, 120 bp, synthetic construct
  source 1..120: mol_type = other DNA
cttccacatttgttcagaggtaacgtacttttcatacgtggagtttctggctcttcaggtacatcctcaaatattttcatttcagggacaacttctttcatagcttctggtgctttgaag

SEQ ID NO: 50759 - DNA, 120 bp, synthetic construct
  source 1..120: mol_type = other DNA
atcttgaggagaggaaccacatattaattgtctttgtttattattctccagttccctagcaccctgtacatgctaagcactctaataaatgaaggaaggaatggcaggatgaacgatacc

SEQ ID NO: 50760 - DNA, 120 bp, synthetic construct; identical to SEQ ID NO: 14158
  source 1..120: mol_type = other DNA

SEQ ID NO: 50761 - DNA, 120 bp, synthetic construct
  source 1..120: mol_type = other DNA
aatcggatcttttgtagcagtgtgagtatttggttataagcggctgttttcttggtcacctcaggcactatcagtattagtaattttatttcttggaatggtagatgcatagaaaactag

SEQ ID NO: 50762 - DNA, 120 bp, synthetic construct
  source 1..120: mol_type = other DNA
tcgaaaaatctaggtcggcatttttttgtattcacacctcaggcaccttaaaaaggtgagtgtttttcaagtttaggagagaggagaacaaccaaaagattccagactgagaaaaaatat

SEQ ID NO: 50763 - DNA, 120 bp, synthetic construct; identical to SEQ ID NO: 6670
  source 1..120: mol_type = other DNA

SEQ ID NO: 50764 - DNA, 120 bp, synthetic construct; identical to SEQ ID NO: 14159
  source 1..120: mol_type = other DNA

SEQ ID NO: 50765 - DNA, 120 bp, synthetic construct
  source 1..120: mol_type = other DNA
tgagattaaaaaggtgactttcttccaacttgtacctgttggtgatggtgtttttcttcttttaacaataggagtttctccctctggaatgacttccttgaagacttcaaactctttaaa

SEQ ID NO: 50766 - DNA, 120 bp, synthetic construct
  source 1..120: mol_type = other DNA
aatattttatctttgtatattatatgtgtgggacttgactttcttgggggcaagtcataggtcattctttgttgtgggtatatcagatcctttaaacacagtattttaacattagaggtt

SEQ ID NO: 50767 - DNA, 120 bp, synthetic construct
  source 1..120: mol_type = other DNA
attataccttcagttggaggatgttctggaatttcaggaatagcctcaggtggctccacctctggaaaaatgcctctggttgtatcaggttctttaaagatattagtaggtttacattta

SEQ ID NO: 50768 - DNA, 120 bp, synthetic construct; identical to SEQ ID NO: 14160
  source 1..120: mol_type = other DNA

SEQ ID NO: 50769 - DNA, 120 bp, synthetic construct
  source 1..120: mol_type = other DNA
gttatataccttttgctagtttgggttttgtcttttgaggttgagtcacaagtactttttcttctaggactgcttcttcagatgcttcataaactttaaagatattagtatttaaataat

SEQ ID NO: 50770 - DNA, 120 bp, synthetic construct
  source 1..120: mol_type = other DNA
ggggatagcctcactcccagtttcatgatgtaagactctaagcatttctctatgatgatgataataaaatggaggaattgttcaggcaaggactatataattcttcattttgccttaaga

SEQ ID NO: 50771 - DNA, 120 bp, synthetic construct
  source 1..120: mol_type = other DNA
taagtcttttccctttctagaagcctcattatctatattttcaaatcacatctaatatatggtttcacagtttaatatgaatgtaaaagccatttagggtttggaggcagaaaattaaaa

SEQ ID NO: 50772 - DNA, 120 bp, synthetic construct; identical to SEQ ID NO: 14161
  source 1..120: mol_type = other DNA

SEQ ID NO: 50773 - DNA, 120 bp, synthetic construct
  source 1..120: mol_type = other DNA
gggcctggtggtaggcacctgtaatcccagccactcgggaggctggggcaggagaatagcttgaacccaggagacggaggttgcagtgagccaagatcgtgccactgcactgcagcctgg

SEQ ID NO: 50774 - DNA, 120 bp, synthetic construct
  source 1..120: mol_type = other DNA
attatttcataattcaaattatttaaacctaattttgtatgaaacccccccccaaaaaaaaaggtcgtgagaattcttttgaggtttgagtggccttgtaaacctagggtcctttgagca

SEQ ID NO: 50775 - DNA, 120 bp, synthetic construct
  source 1..120: mol_type = other DNA
gaaaataaattgcttcaaagcaaaagacacttgtatacagaataggttaggaaaatttaacaagacaactgacttttctgaaatcatacactctgataagtagagtatttcttttttaaa

SEQ ID NO: 50776 - DNA, 120 bp, synthetic construct
  source 1..120: mol_type = other DNA
caaacatagtgaatttaaggacataaatgaaacgaaaaagaaccactaatttttctacactcactgtacatctctgtgtcttcagaaataacaataggtgatttttcttcttgaacactt

SEQ ID NO: 50777 - DNA, 120 bp, synthetic construct; identical to SEQ ID NO: 14162
  source 1..120: mol_type = other DNA

SEQ ID NO: 50778 - DNA, 120 bp, synthetic construct
  source 1..120: mol_type = other DNA
gtcaactataagtcaaatgtagtcattgcatttctctgaattgctttgtcgatgagttcttgattcattatatcagaaacactttgctctttggagatagtatcattttctattgccatt

SEQ ID NO: 50779 - DNA, 120 bp, synthetic construct
  source 1..120: mol_type = other DNA
gataactttgggcttatgtctttacgcctaaaacattgcctcaaaaggcaggattatgttatagaacataaattgaagtttatgtcattcatagccatcttgtggcattgagaagagaaa

SEQ ID NO: 50780 - DNA, 120 bp, synthetic construct
  source 1..120: mol_type = other DNA
ccacaattttcttaggcacctccggtactttaaagataatagtaataatttcttttatttttaaatatacaattttttaacaagcagagcatgagagatataaacacagaacagaacaca

SEQ ID NO: 50781 - DNA, 120 bp, synthetic construct; identical to SEQ ID NO: 14163
  source 1..120: mol_type = other DNA

SEQ ID NO: 50782 - DNA, 120 bp, synthetic construct
  source 1..120: mol_type = other DNA
atcagtaagcatgttagtgaatatataaccaaatagcaccaaaggaggaaatttgggctcactatttggttactagagatatttgctttggttgttttaggtataacaacagtgactgtc

SEQ ID NO: 50783 - DNA, 120 bp, synthetic construct
  source 1..120: mol_type = other DNA
taaagcaaccaaggtgctattgtatgtaaagttaagtagtaatttttcacaaagaagatacctttagctggtggctcttttcgaggaacaactttagtgggcggtttttttggagggatg

SEQ ID NO: 50784 - DNA, 120 bp, synthetic construct
  source 1..120: mol_type = other DNA
attttctcagatatctcaggcccttcaaagatattagtattttggtttagaatgaactcttgaagtattttggagcactactactaacgttagtacaatgaggggtcacaaaattcttta

SEQ ID NO: 50785 - DNA, 120 bp, synthetic construct; identical to SEQ ID NO: 14164
  source 1..120: mol_type = other DNA

SEQ ID NO: 50786 - DNA, 120 bp, synthetic construct
  source 1..120: mol_type = other DNA
tcctcagtgaactgaggagtttctttttcacttaaccaatgacactggtcagttattttggtacctgtaacaattgtgtaacattcttagtcagatttaaaaaataatccccaaattcat

SEQ ID NO: 50787 - DNA, 120 bp, synthetic construct
  source 1..120: mol_type = other DNA
ttcatggggtttctaatcttccaaactgaacacaaaatttactttcaaaggaaagttagagcaagatataagaatttgtagtatttgaagaattccctatacctttaggtggagcttttg

SEQ ID NO: 50788 - DNA, 120 bp, synthetic construct
  source 1..120: mol_type = other DNA
gaaactcgccttcttcaaaatattcttcaacttcatggaactcttcttcttccggaatttcttccacttctgcttctactacttctaattctagtctttcttttactactacttcttggc

SEQ ID NO: 50789 - DNA, 120 bp, synthetic construct; identical to SEQ ID NO: 14165
  source 1..120: mol_type = other DNA

SEQ ID NO: 50790 - DNA, 120 bp, synthetic construct
  source 1..120: mol_type = other DNA
cgaaaaaagacagaagaggaagtcaggtttaaaagagaagatgtacctttggctgggggtgcctcttttttctgaacaggaacaggtactttttcctcaggaattttctttgacacttta

SEQ ID NO: 50791 - DNA, 120 bp, synthetic construct
  source 1..120: mol_type = other DNA
acatccattttagaggcaataaagatactttctcaaatcactcatttgttctaacattcctatagaagaagaaatgtccacaaagtacctgtgccattcttttttttttcttttaataac

SEQ ID NO: 50792 - DNA, 120 bp, synthetic construct; identical to SEQ ID NO: 14166
  source 1..120: mol_type = other DNA

SEQ ID NO: 50793 - DNA, 120 bp, synthetic construct
  source 1..120: mol_type = other DNA
aactccgttccacttatggaataaaatctaaaatgtggggaagagggatccattgctatgtgtataagtatatagagacatactaatatattaaaattctcagttaagaagcttctagaa

SEQ ID NO: 50794 - DNA, 120 bp, synthetic construct
  source 1..120: mol_type = other DNA
aaggcagtcaaaaaagaaaatgttgcttttaagaaagaaaattaatgggaagttaaagatattaataatgaggatttgatatacctttagctggtggtgcctccacttttttaggaacag

SEQ ID NO: 50795 - DNA, 120 bp, synthetic construct
  source 1..120: mol_type = other DNA
gtgatgagcagaacaccacccatataccaataaataaatatcacaaaacattgacttatttttaaaagatattagcaacctaaatggtaataataaatgtggagtaggaaccctagaggt

SEQ ID NO: 50796 - DNA, 120 bp, synthetic construct
  source 1..120: mol_type = other DNA
agaaatagattccccccatattaatattaaaaacaaaattaaggattgaaatctaggagaaactattatagtagggcctggtcagaaaaaaattcaatcgccaataacaaaatagtaatc

SEQ ID NO: 50797 - DNA, 120 bp, synthetic construct; identical to SEQ ID NO: 14167
  source 1..120: mol_type = other DNA

SEQ ID NO: 50798 - DNA, 120 bp, synthetic construct
  source 1..120: mol_type = other DNA
agtgataatatctgaaaactgctcagccttcgaaacgcttgtgtaaactcactagtccttaaaaaatctctactgggtcttcaaaatatgttaggcatatcccagcatttgtgaactgga

SEQ ID NO: 50799 - DNA, 120 bp, synthetic construct
  source 1..120: mol_type = other DNA
gttgcctactaagtcatttgatgaaaaatttcccacagcaaatacagtttcccttcatgaattctaattaaaataaaacaaatagcaaacagacaaacaggctgaacatgcaaagagatt

SEQ ID NO: 50800 - DNA, 120 bp, synthetic construct; identical to SEQ ID NO: 14168
  source 1..120: mol_type = other DNA

SEQ ID NO: 50801 - DNA, 120 bp, synthetic construct
  source 1..120: mol_type = other DNA
tgaaacattgacatttcacagaatcggttaatgagaaaagaataaaaaggtttgtggtttaagatttagggtttattaaagagaaattctactttttactgctggagcctctatttcttt

SEQ ID NO: 50802 - DNA, 120 bp, synthetic construct
  source 1..120: mol_type = other DNA
catacatagagaaacgatgtaaagcacaccaacaccaagtgaaaaaatggacacaacacaaacttgggtgcaaaagagtcagaaatgacgaatgtgaatgacagaccatacaatgcacac

SEQ ID NO: 50803 - DNA, 120 bp, synthetic construct
  source 1..120: mol_type = other DNA
acctttggcaggaggggccactgctttcttaagaccaggaggagggaccttcttttctggctcaggtttcttaggtaccacagacactttaaaaatattattttattttataagttcagt

SEQ ID NO: 50804 - DNA, 120 bp, synthetic construct
  source 1..120: mol_type = other DNA
ataggagaaggaaggaaatggcatagtctaatttacttcggaatagcaatacctttggcagggggagcctcctctttcttgggaatgaccactttcttctctgtcactttcttcttaatt

SEQ ID NO: 50805 - DNA, 120 bp, synthetic construct; identical to SEQ ID NO: 14169
  source 1..120: mol_type = other DNA

SEQ ID NO: 50806 - DNA, 120 bp, synthetic construct
  source 1..120: mol_type = other DNA
tagtaatttattgtctagaaagtatttctgaatcgttgatatccaataaaagatcagctttactatttcatttgattatataactatatggcctgatgcgagggttatgctgattttaag

SEQ ID NO: 50807 - DNA, 120 bp, synthetic construct
  source 1..120: mol_type = other DNA
tagactactttaataccttactttatttaattctcaccataatagctgagcccattaagactgatattagcatccccaatttacaggaaaataacttcaggctcaggttggttaaaggac

SEQ ID NO: 50808 - DNA, 120 bp, synthetic construct
  source 1..120: mol_type = other DNA
gaagacataactattattctgtgttttgataaatacattcatctttttttctttttagcctggtgttaaaaaggcatttaatataaatggttgaaggaagaaatttaagaatatttattc

SEQ ID NO: 50809 - DNA, 120 bp, synthetic construct; identical to SEQ ID NO: 14170
  source 1..120: mol_type = other DNA

SEQ ID NO: 50810 - DNA, 120 bp, synthetic construct
  source 1..120: mol_type = other DNA
tttaggggcgggaacagggactttcttctctggtacaggtttctttggcacttcaggcacttaaaaacatttcatttgaaggcattaaaaaccacatatacatggtcatatatatatata

SEQ ID NO: 50811 - DNA, 120 bp, synthetic construct
  source 1..120: mol_type = other DNA
aagaacacacatgtctggaatgttttctaagatttaggtggtcaatcacagagggtaaaggattatagataaaactggagatgaacaaaaggatgggaaagcagaattcaacacaaaaga

SEQ ID NO: 50812 - DNA, 120 bp, synthetic construct
  source 1..120: mol_type = other DNA
cttcaggtacaaattcttcttcctcaggtacatattcttcttcgggaggaacttcctcttcctcaggtggaatttcctcttcttcaggtagaacttcctcttcttcaggtagaacttcct

SEQ ID NO: 50813 - DNA, 120 bp, synthetic construct
  source 1..120: mol_type = other DNA
tcctgaggtagagctacaggaactggaactggttcacgtttctttggcactttaaagatatttattcaagggtacaaacatcacttttatgtaaaatattcacaacaatgaagaagctta

SEQ ID NO: 50814 - DNA, 120 bp, synthetic construct; identical to SEQ ID NO: 14171
  source 1..120: mol_type = other DNA

SEQ ID NO: 50815 - DNA, 120 bp, synthetic construct
  source 1..120: mol_type = other DNA
tgtatgtgagtatacatagatgtgagttttttcccccaagtactctaagtgatgaaattatgtaccttttgcaggtggagcctccactttcttaggagcaggaactggcaccttcttctc

SEQ ID NO: 50816 - DNA, 120 bp, synthetic construct
  source 1..120: mol_type = other DNA
tccaagcatagtttcaaaagattaagataaggtaataaaagtatgacaaaggtattccaagaagcattttatttttaaaataaaatatttaattttctctaaagagttgcatcccaaaga

SEQ ID NO: 50817 - DNA, 120 bp, synthetic construct; identical to SEQ ID NO: 14172
  source 1..120: mol_type = other DNA

SEQ ID NO: 50818 - DNA, 120 bp, synthetic construct
  source 1..120: mol_type = other DNA
ctggtgataaagacaagacacaatgcctggtaaatgatggttttgtccattttgatatgcaaaaggaatgtattttacttgaagaactttccactaaagaggaggagccaaccattgagc

SEQ ID NO: 50819 - DNA, 120 bp, synthetic construct
  source 1..120: mol_type = other DNA
tatggctcaccaagttatgctgcatgggtgaattatcatgctattccactgatggattataaggatgtaccttttgctggcggaggcttctcctttttaggaataagcacaggaactttc

SEQ ID NO: 50820 - DNA, 120 bp, synthetic construct
  source 1..120: mol_type = other DNA
cacacacacaaggttttgaactcagaagaaagttaactatttctaggcagatgaagtctcttagatacccgtcaatgaatggtggtgtaccttttgccggtggagcttccttcttcttgg

SEQ ID NO: 50821 - DNA, 120 bp, synthetic construct
  source 1..120: mol_type = other DNA
tagaaatcatatttcagcatctaaaaatatctgctttaaagtaagcaatcattggtgctgccaataacccccagaatctgaccaaatcagacccccaaactccaaagatgctgttgcaca

SEQ ID NO: 50822 - DNA, 120 bp, synthetic construct; identical to SEQ ID NO: 14173
  source 1..120: mol_type = other DNA

SEQ ID NO: 50823 - DNA, 120 bp, synthetic construct
  source 1..120: mol_type = other DNA
agacaccttagaaacacaggcccatttataacagaagaaaggacaagatttacttttcccacaaaagaagttttcacacacagaactgaagaggaattcaacagcaaaagacgaacaaaa

SEQ ID NO: 50824 - DNA, 120 bp, synthetic construct
  source 1..120: mol_type = other DNA
aaccctcttgggcttcatgggcacttgaaatatgaagtataaggaaattttattgtcagtaaaaggccacccagccaatgcttgttttgctgtactttaagcagatagaataatgtatct

SEQ ID NO: 50825 - DNA, 120 bp, synthetic construct
  source 1..120: mol_type = other DNA
gcagagcccaaatgtgaaatgaggtttagtgttcaaatatctctgcttgaaagaaatatccttcctgaaaagtgaaatttacttctcaattagtatacttcatacttagtatgaatcagg

SEQ ID NO: 50826 - DNA, 120 bp, synthetic construct; identical to SEQ ID NO: 14174
  source 1..120: mol_type = other DNA

SEQ ID NO: 50827 - DNA, 120 bp, synthetic construct
  source 1..120: mol_type = other DNA
tcaaaagaggcatcagaaaagatcacaatcgaggaaggaaatcattatacctttagcagcgggttcagtcacctgctctttttcacgtttggtaattgaaatacgtattttttcctcaaa

SEQ ID NO: 50828 - DNA, 120 bp, synthetic construct
  source 1..120: mol_type = other DNA
gaacatcctactcagcaaaaacacagaccatcagacgggctaggaagacatgattttagaacatacataacaaagttgtttttggtgattattactcagtaatgtacctttgggtggtgg

SEQ ID NO: 50829 - DNA, 120 bp, synthetic construct
  source 1..120: mol_type = other DNA
aagagattttaaaaattgaaacaggtttctcaaggctagcaagaacaaaaagttaagaaagacaaatacaacataatattcccaaacacacacataatttgtacactgccacttttacat

SEQ ID NO: 50830 - DNA, 120 bp, synthetic construct; identical to SEQ ID NO: 14175
  source 1..120: mol_type = other DNA

SEQ ID NO: 50831 - DNA, 120 bp, synthetic construct
  source 1..120: mol_type = other DNA
ccttcttgctattttctttaattaggtaattcttacatattaaaattctcatttcatttcaggtagataaattcctggctgaaactcccctataatatggtttttttaaagctatcagta

SEQ ID NO: 50832 - DNA, 120 bp, synthetic construct
  source 1..120: mol_type = other DNA
tgaagcccaaactatatgccaacaaatttgaccttcattaggtaaaacacaacagcttgtgttagcttacatctctatcttaacttttgaagcagtcattgtcaagttttgataatggga

SEQ ID NO: 50833 - DNA, 120 bp, synthetic construct
  source 1..120: mol_type = other DNA
aaacttgtaacctttttgaaaaagaaacttagggacatttgctattttgcatacgagcaaaaatgaggggggtattagattattcccggaacaaaagtctaacaataaccttaagattta

SEQ ID NO: 50834 - DNA, 120 bp, synthetic construct; identical to SEQ ID NO: 14176
  source 1..120: mol_type = other DNA

SEQ ID NO: 50835 - DNA, 120 bp, synthetic construct
  source 1..120: mol_type = other DNA
cttcttcccgttgtactgaaacagcttcttcttctagggtataagccctttctttctcttccattatagttacttctgaaacaatattaacaacaggcagcactttactttaaagcactt

SEQ ID NO: 50836 - DNA, 120 bp, synthetic construct
  source 1..120: mol_type = other DNA
ttagcaattgtgatttcaaatgttatataccctgcccttaatcaacaataagctaataaagtataggagtcagattgggaactagaaggcaaagagccagatagtttcatgcctcacatt

SEQ ID NO: 50837 - DNA, 120 bp, synthetic construct
  source 1..120: mol_type = other DNA
ttaaaagtgaattgcaagattctgaaaatgtgtgtgtgaagagaaattttgttcaaacaattcaaggacaaagacaaccataacagtgcctgattaaactttcatttaaaaagcaagaaa

SEQ ID NO: 50838 - DNA, 120 bp, synthetic construct; identical to SEQ ID NO: 14177
  source 1..120: mol_type = other DNA

SEQ ID NO: 50839 - DNA, 120 bp, synthetic construct
  source 1..120: mol_type = other DNA
atacgtttagaagaagcctcacttttttttaagaaaaaagtactttctgttatcaaaaatgtttagttttgaagtgatatgcattaacaaacttatattgcttactttatactatgtctt

SEQ ID NO: 50840 - DNA, 120 bp, synthetic construct
  source 1..120: mol_type = other DNA
gtttgagtttcagaactttttcttctgggacagctctcttcggttcctctggcactttaaagagagatttcactttaaagtattgtttccctctttcaaaccacaaaaaggcagccataa

SEQ ID NO: 50841 - DNA, 120 bp, synthetic construct; identical to SEQ ID NO: 14178
  source 1..120: mol_type = other DNA

SEQ ID NO: 50842 - DNA, 120 bp, synthetic construct
  source 1..120: mol_type = other DNA
acaaggcacacacacaaaaacatcacaagtaatactctacccaaagacaccattgtcacccaccaacatataaacagtatgacccaaagaacagcagcagagagaaagaaagacaagcca

SEQ ID NO: 50843 - DNA, 120 bp, synthetic construct
  source 1..120: mol_type = other DNA
aacctttttttctggaactggtttctttggctcttctggcacttaaaagataccaggcaataccatcaaacatacgatatggaaaacactaaacacaggcacacttattttctggttaat

SEQ ID NO: 50844 - DNA, 120 bp, synthetic construct
  source 1..120: mol_type = other DNA
aactttcttttctggcacaattttcttaggtgcttcaggaactttagaaagattaggtttaagaatatgagtttgccttacatatgaagtgacacagttgtggggcttagcattcacttt

SEQ ID NO: 50845 - DNA, 120 bp, synthetic construct
  source 1..120: mol_type = other DNA
atgtgaaggtattattatatacattaaaataaatagtgttgcatttctttgaaagaaatcatacctttagccggtggaggctcctctattttagcaggaatttttggtttcagtacaatt

SEQ ID NO: 50846 - DNA, 120 bp, synthetic construct; identical to SEQ ID NO: 14179
  source 1..120: mol_type = other DNA

SEQ ID NO: 50847 - DNA, 120 bp, synthetic construct
  source 1..120: mol_type = other DNA
cacttcaaagagtaatcaaaatagcaaaagtttaacccttgccaaacccctgcttgttcctatttaaaatactcaaagagcattttaatcaaagcacatgcgttaatgaagagtatggga

SEQ ID NO: 50848 - DNA, 120 bp, synthetic construct
  source 1..120: mol_type = other DNA
caagtacgggacaagaaacgattataatagctgagttaataagaacagaagaatttgaagatgagtttcacaaatagcagagcactgtagatttgaaggccacagggcagaaacatactt

SEQ ID NO: 50849 - DNA, 120 bp, synthetic construct; identical to SEQ ID NO: 14180
  source 1..120: mol_type = other DNA

SEQ ID NO: 50850 - DNA, 120 bp, synthetic construct
  source 1..120: mol_type = other DNA
tcctgcctcagcctcccaagtagctgggactacaggcgcccgccactacgcccggctaattttttgtatttttagtagagacggggtttcaccgttttagccgggatggtctcgatctcc

SEQ ID NO: 50851 - DNA, 120 bp, synthetic construct
  source 1..120: mol_type = other DNA
atgcagtggtgtaatcacagctcactgtaacctcgaactcctgggttcaaatgatcctcctgcatcagcctcctgagtagctgggactagaggtgcatgccaccatgcctagctgttttt

SEQ ID NO: 50852 - DNA, 120 bp, synthetic construct
  source 1..120: mol_type = other DNA
ctggtcaaagttaaataaggaatagaagtgtctggttaaaaacatatctgctccttacgctgaaagtaaacctaacaagccacccatctttggggcataatgagaacataaaaataatca

SEQ ID NO: 50853 - DNA, 120 bp, synthetic construct
  source 1..120: mol_type = other DNA
tctaccagcttcctgacttatgtccaccatcatggcctcttccaggaagcacaacagagttaatggatttcctcctgggagtcatgtcccatcttggcctattccaaggcattccactaa

SEQ ID NO: 50854 - DNA, 120 bp, synthetic construct; identical to SEQ ID NO: 14181
  source 1..120: mol_type = other DNA

SEQ ID NO: 50855 - DNA, 120 bp, synthetic construct
  source 1..120: mol_type = other DNA
aaagatctgagtaacaagtcagtctgatcccatatataacacaatggttttctccatatgtaaaatacaggaaagccttatgtgttcagggcttcagactcacaaatatggcattgactc

SEQ ID NO: 50856 - DNA, 120 bp, synthetic construct
  source 1..120: mol_type = other DNA
aaaattaaaggattataatataaaatatatttctgtctgtggattgtggtacaagcaatgtttgagaaacaccaattaggcattaggctactaaggtaaagcttatgccagcccaccatg

SEQ ID NO: 50857 - DNA, 120 bp, synthetic construct
  source 1..120: mol_type = other DNA
gaaatacactggatttctctaatctagtataatcctcctgaatcttgtgttttgatcaaaatattcatttaatgagactggtagatgttcactgaatttgtgtcacttttttctgtctct

SEQ ID NO: 50858 - DNA, 120 bp, synthetic construct; identical to SEQ ID NO: 14182
  source 1..120: mol_type = other DNA

SEQ ID NO: 50859 - DNA, 120 bp, synthetic construct
  source 1..120: mol_type = other DNA
ctcactataagaaggaggaagctaatttaagatgagggcaagtacagcccaagactgagaatgatacttgagttatgtccaagtgtggccactttcaaaattataacattttcgggactc

SEQ ID NO: 50860 - DNA, 120 bp, synthetic construct
  source 1..120: mol_type = other DNA
tctaaagtaaacaatcacatgtggaagaagaagagactttgaggaaacacacacaaactcatttatcccctgacttccgattatataccttcgtgccgcgtgacttccactctttgagga

SEQ ID NO: 50861 - DNA, 120 bp, synthetic construct
  source 1..120: mol_type = other DNA
ctcactttctagaatttggggaagagttgcacagtacaccactttgactagcaaaatgggaaaacaagttacatatcacaaggacataaacacaaaagtttcactgcaagtgagacaatg

SEQ ID NO: 50862 - DNA, 120 bp, synthetic construct; identical to SEQ ID NO: 14183
  source 1..120: mol_type = other DNA

SEQ ID NO: 50863 - DNA, 120 bp, synthetic construct
  source 1..120: mol_type = other DNA
gggaagatggagaaacaataccttttggtggtggtggaacttcttcctccttccgaggaacaggtttcctttcttcaggaactttcttctttggtatttctggcacttaaaggatagtat

SEQ ID NO: 50864 - DNA, 120 bp, synthetic construct
  source 1..120: mol_type = other DNA
aagtacctgctggtggtggagattcctctctttgagttacaatggttattttttcttctgtcacaactcccttctgtacttcaggaacttgaagagacatttttagaattgactttatat

SEQ ID NO: 50865 - DNA, 120 bp, synthetic construct; identical to SEQ ID NO: 14184
  source 1..120: mol_type = other DNA

SEQ ID NO: 50866 - DNA, 120 bp, synthetic construct
  source 1..120: mol_type = other DNA
gggacaggtttctttggcacctctgggacttaaagtttttgaaacacaatgttagttcagacatatatcacttttatgaaagaacataggcacatgcacaaatctttatgtagtacatta

SEQ ID NO: 50867 - DNA, 120 bp, synthetic construct
  source 1..120: mol_type = other DNA
aaatgagttatgtaacaaagttgtgcacagaattcatcctttatatattgtatgaccttgctaaaaacaaattagtgatgacacaaacaatcaagaatgtggatatggtatatagaaaac

SEQ ID NO: 50868 - DNA, 120 bp, synthetic construct
  source 1..120: mol_type = other DNA
cttccccacatttctcctctcatttttggggggtgtgcctgtagtgaattcaaaactcaggaaacactctagagtaggtctctcaatctgatacccatgtgttaatgactttacagagct

SEQ ID NO: 50869 - DNA, 120 bp, synthetic construct
  source 1..120: mol_type = other DNA
agaatggataatgttgactttttaattggaagatgaattttaacagcatgcattattggcaataattgttctcattttaaatacaatattggcagcttttgtgaatccctgcacctctgc

SEQ ID NO: 50870 - DNA, 120 bp, synthetic construct; identical to SEQ ID NO: 14185
  source 1..120: mol_type = other DNA

SEQ ID NO: 50871 - DNA, 120 bp, synthetic construct
  source 1..120: mol_type = other DNA
ttaatggttagataatcaaaagaattttgaaagagccaagagtttgagaaagagagaagcatatttgattcaggaagaaaatagaaacattgcaaagtcaggccaagggaacactattca

SEQ ID NO: 50872 - DNA, 120 bp, synthetic construct
  source 1..120: mol_type = other DNA
tgccttttatcgccaaaaaaatcccaaacaaaccaaagcaagggatttgtgatataccacagcagcacattttcattcaaacatacctctgtgaaaggtactttgactagctaattagat

SEQ ID NO: 50873 - DNA, 120 bp, synthetic construct; identical to SEQ ID NO: 14186
  source 1..120: mol_type = other DNA

SEQ ID NO: 50874 - DNA, 120 bp, synthetic construct
  source 1..120: mol_type = other DNA
gacatagttacttcctttaacaatactttttggtgatgtcttaggaatattcagtataataaataaagtatgtcaagagcatggcacggaagctgacaaacagtaaaaacacaagaagaa

SEQ ID NO: 50875 - DNA, 120 bp, synthetic construct
  source 1..120: mol_type = other DNA
agcaggttccttcttaggcacaggaactggctttttctcctctggcacgggtttcttgggaacctcaggaactttaaagatacaattgttgaaataatgtggaatattctagtcaccttc

SEQ ID NO: 50876 - DNA, 120 bp, synthetic construct
  source 1..120: mol_type = other DNA
gtggtagaaatgaaagctaaatacctcaacaccatatagacattacatacattacacaagcagacaaagacccagttagcgtgatctggagtttagaaatgttaccaatacttgtataac

SEQ ID NO: 50877 - DNA, 120 bp, synthetic construct; identical to SEQ ID NO: 14187
  source 1..120: mol_type = other DNA

SEQ ID NO: 50878 - DNA, 120 bp, synthetic construct
  source 1..120: mol_type = other DNA
ttctggagctggtttctcaggtagctcagggactttaaaagaaaagtgccatttttgagaaagtgtgcatttgacaaggcatatgttgttgtaagacttagaattaaatagagattccct

SEQ ID NO: 50879 - DNA, 120 bp, synthetic construct
  source 1..120: mol_type = other DNA
tcaggaacaggtaggagcaatcctccctcggaggtgcctgtgtcagttcctcagaaaccagctttttatgaacatcgataactatgaagttagtttttttttttgtaacctttactttta

SEQ ID NO: 50880 - DNA, 120 bp, synthetic construct
  source 1..120: mol_type = other DNA
aggtggtataaacactccctcccaccctggctgtcaaggtgatgtcattgtcctggagttggaaagagatgtgcagtagtacattatatggcatttccaccacacagacacaaagatgga

SEQ ID NO: 50881 - DNA, 120 bp, synthetic construct
  source 1..120: mol_type = other DNA
ttattggactgtaaatttacataatctaatttttaataatggtggtgttaaactactgactggcaaaattcctgaaaatgtaaccataggctctggtgagctagcatgaactggctccag

SEQ ID NO: 50882 - DNA, 120 bp, synthetic construct; identical to SEQ ID NO: 14188
  source 1..120: mol_type = other DNA

SEQ ID NO: 50883 - DNA, 120 bp, synthetic construct
  source 1..120: mol_type = other DNA
cttttggaaatggcaacgtgaattttctcttcagtaacaatttccttttgtacctcggggacttaaaaaaatgtacattttaattactgatatgccatgttgtgggtggtaattgtaatt

SEQ ID NO: 50884 - DNA, 120 bp, synthetic construct
  source 1..120: mol_type = other DNA
aatctgcctaaaacccttccatttgagcccccacattccagtttgccttatacctgtgactgacacctcctcctctgtgtgagaagcaaagaacatcttttcttctgaaataaccatctt

SEQ ID NO: 50885 - DNA, 120 bp, synthetic construct
  source 1..120: mol_type = other DNA
tgggttaatatggtagcttgagaacaaattcagtattgacaagaaaacaaatcatgttttgatctatagggacaaacaatgcatgcagccttcatcaaacattcttaaatgagaatcaaa

SEQ ID NO: 50886 - DNA, 120 bp, synthetic construct
  source 1..120: mol_type = other DNA
tattatatgcaatggaatgcattgcatagtgaagttagcaaactactaattaaacacaaaccttctttataataaaaaaatgtaatttttaagcagaactagaaacaaagtagataatgt

SEQ ID NO: 50887 - DNA, 120 bp, synthetic construct; identical to SEQ ID NO: 14189
  source 1..120: mol_type = other DNA

SEQ ID NO: 50888 - DNA, 120 bp, synthetic construct
  source 1..120: mol_type = other DNA
tacttgtgtacatgggtgctaggaatgttttaaataatacctttggtgacttgaactttttcttcctccattcttcgagaagtcttttcaattttttcaattactggcttctttataact

SEQ ID NO: 50889 - DNA, 120 bp, synthetic construct
  source 1..120: mol_type = other DNA
tgtatcattttttaaagagagagatgagttcggtttttttttctttgacctttacgcacaactttgaactctgggtacaagtttctgtacttaacatattttggttatatttaagtttac

SEQ ID NO: 50890 - DNA, 120 bp, synthetic construct
  source 1..120: mol_type = other DNA
tgatttatacattgctgccaaacaagccatgataatgatgttgatgctctagtctatttaaatatttctaattacttacctttaggaggtggtggtgctttcttttcaggtactttggct

SEQ ID NO: 50891 - DNA, 120 bp, synthetic construct; identical to SEQ ID NO: 14190
  source 1..120: mol_type = other DNA

SEQ ID NO: 50892 - DNA, 120 bp, synthetic construct
  source 1..120: mol_type = other DNA
taagatcattttaactatttcacataaactgcaaatcaggttcatagcattgaaaatttaatgaactgagcaaaaatgaagaaaagagggaaacaagtcattcagtttatacataccttc

SEQ ID NO: 50893 - DNA, 120 bp, synthetic construct
  source 1..120: mol_type = other DNA
ttcccattcctcgtgaacttcttttttagcttctaccttaatctcttcatagtcttcatctggttcttcataataaggttgttcaaatggctctgtgtatggttctacctccagttcgtc

SEQ ID NO: 50894 - DNA, 120 bp, synthetic construct
  source 1..120: mol_type = other DNA
tacttcttcagctttagaggatacatcaatgatttcaggagctaaaatagataaagatactattagcatattaattctatccatccaactgcttcactaaacaaaaatctacctagttaa

SEQ ID NO: 50895 - DNA, 120 bp, synthetic construct; identical to SEQ ID NO: 14191
  source 1..120: mol_type = other DNA

SEQ ID NO: 50896 - DNA, 120 bp, synthetic construct
  source 1..120: mol_type = other DNA
tatgatcccttagtcagtttcataaaaacaacatttaaaattatgtaaccaagttaattaggtacttttagataacagatttttaaagttcttaagggctctcattatttatatgactct

SEQ ID NO: 50897 - DNA, 120 bp, synthetic construct
  source 1..120: mol_type = other DNA
ttgcacagaggcagcataaacatctgcctgggtttgttttcctgggaaaggggcaatatgaaatagccatcatttctaatgctaaatttaacacagcagaggagactccacaactttcaa

SEQ ID NO: 50898 - DNA, 120 bp, synthetic construct; identical to SEQ ID NO: 14192
  source 1..120: mol_type = other DNA

SEQ ID NO: 50899 - DNA, 120 bp, synthetic construct
  source 1..120: mol_type = other DNA
ctatgcaaggccatattaacaaaaatcaaacatgcaaaaggccaaagtttgattctagtttagattgatttaagatcatttaaattggttctagtttagattgatttctaataagttaac

SEQ ID NO: 50900 - DNA, 120 bp, synthetic construct
  source 1..120: mol_type = other DNA
gatgtttcacaaatgaccactcagaaaagtctgaatgatgaatgatgccttgtgtttccatattttccttctttatggaggttgctgtactctaatcttagtcaaatgagttaaaactat

SEQ ID NO: 50901 - DNA, 120 bp, synthetic construct
  source 1..120: mol_type = other DNA
atcacctaaatcaggaaagatactgaggtgggttgcagcaacctcttaaaattagcagcaacccttgatcttacattgatgtgactttatcaagaccagctgttgggtacttccatgttc

SEQ ID NO: 50902 - DNA, 120 bp, synthetic construct; identical to SEQ ID NO: 14193
  source 1..120: mol_type = other DNA

SEQ ID NO: 50903 - DNA, 120 bp, synthetic construct
  source 1..120: mol_type = other DNA
tgcacagagtggtgaatatagttaataatagtgtactgtacatttcaaaatcgctaagagtaaatttcaaatattctcaccacaaaaatgttaagtatttgaggtgatggatatgttaat

SEQ ID NO: 50904 - DNA, 120 bp, synthetic construct
  source 1..120: mol_type = other DNA
tagctgttggatttctgggcaagaccttctttaaattttcatccagaaataaccagaatacactggtgttgtcattggttcccaggggctcaggaggacaggaaagagaaaagggggaaa

SEQ ID NO: 50905 - DNA, 120 bp, synthetic construct
  source 1..120: mol_type = other DNA
aaagttttggccaagaaaaaagtgttaagactgctttttgattaattataataccttcacgtggtgtcatctctttgggctttgcaacaacttttttggcatctttcttcacagcctttt

SEQ ID NO: 50906 - DNA, 120 bp, synthetic construct
  source 1..120: mol_type = other DNA
gtagcgagattctgcatattactacaagatatttgttttggaaagatctaggactagatgcaaaaaaattgttttggagggatatagaaaatgtactgtgatcttacatcttcactgatt

SEQ ID NO: 50907 - DNA, 120 bp, synthetic construct; identical to SEQ ID NO: 14194
  source 1..120: mol_type = other DNA

SEQ ID NO: 50908 - DNA, 120 bp, synthetic construct
  source 1..120: mol_type = other DNA
ccacaccattctcctgcctcagcctcccgagtagctgggactacaggcgcccgccaccgcgcccggctaattttttgtatttttagtagagacggggtttcaccgtgttagccaagatgg

SEQ ID NO: 50909 - DNA, 120 bp, synthetic construct
  source 1..120: mol_type = other DNA
cggagtctcactctgtcacccaggctggagtgcagtggctcgatctcggctcattgcaagctccgcctcccgggttcacgccattctcctgcctcagcctctctgagtagctgggactac

SEQ ID NO: 50910 - DNA, 120 bp, synthetic construct; identical to SEQ ID NO: 14195
  source 1..120: mol_type = other DNA

SEQ ID NO: 50911 - DNA, 120 bp, synthetic construct
  source 1..120: mol_type = other DNA
atcataaaaatgcttctctttgttaatgaggttgcattagtcacaaaattggaagtttctaattgaatttcctctaaggctggctgaaaaataggtcaagcgtttaatgccaattatagc

SEQ ID NO: 50912 - DNA, 120 bp, synthetic construct
  source 1..120: mol_type = other DNA
agcatttctgaactccctataactccagaaagtcccaggaaatctgttgtctaatttagttgagaagctttgggacacaaatactacaacttctctactgagtatttgagaggagcaatt

SEQ ID NO: 50913 - DNA, 120 bp, synthetic construct
  source 1..120: mol_type = other DNA
agttaatactataaattgagaaaagccacaagctataatttgcaatttggctgtaaactactatggtttatttctataagctgcactagaaattggttccattattctttttgttataca

SEQ ID NO: 50914 - DNA, 120 bp, synthetic construct
  source 1..120: mol_type = other DNA
gcacataacttacacatttagttagctaatactttgagaaagtaatttacattttgaaaggcaattccacctcttgaccactagagggccaatgcgttgtattaagcaacatttttcggg

SEQ ID NO: 50915 - DNA, 120 bp, synthetic construct; identical to SEQ ID NO: 14196
  source 1..120: mol_type = other DNA

SEQ ID NO: 50916 - DNA, 120 bp, synthetic construct
  source 1..120: mol_type = other DNA
attgctcactgaagaatatgacatggaaggttttgttctgactctgctgcagtttggtcgctggtataaaatttcgtacagattcctagtgctagaatattgctgctccaagctcagatg

SEQ ID NO: 50917 - DNA, 120 bp, synthetic construct
  source 1..120: mol_type = other DNA
taggcatggttgggattggaactctggagtcaggaatatctggaaagggacatgtaataagcatagagagactgagaacaagctatttattagaaaactaaggtgtgtttgatttattag

SEQ ID NO: 50918 - DNA, 120 bp, synthetic construct
  source 1..120: mol_type = other DNA
tctgtggctattctatttaacatgattctagcatcagctgagtgagaccttattatctctaatttgccagactcacaaggtttaacattttattatttgactgaaagtaattctactgca

SEQ ID NO: 50919 - DNA, 120 bp, synthetic construct; identical to SEQ ID NO: 14197
  source 1..120: mol_type = other DNA

SEQ ID NO: 50920 - DNA, 120 bp, synthetic construct
  source 1..120: mol_type = other DNA
tttgttttctgatatgttgcaaataacacttctttacttcaatatacgtatgtgtttatttacacttgtcttttctaaaaaagcattctagatagaatgagagcatgagcgcatacaggg

SEQ ID NO: 50921 - DNA, 120 bp, synthetic construct
  source 1..120: mol_type = other DNA
cctgaagttgtatttctggctctctgtcagttctgttggtcctttgtaccatgttacaatggcatcatcaaaggacacttcacactcaaaggtggcagactgatgctcactcaccacgat

SEQ ID NO: 50922 - DNA, 120 bp, synthetic construct; identical to SEQ ID NO: 14198
  source 1..120: mol_type = other DNA

SEQ ID NO: 50923 - DNA, 120 bp, synthetic construct
  source 1..120: mol_type = other DNA
caaacttgattgtactctacaacttattcctctgtgaaattctttcttgcctcagtaaaataatttttgctattcaggatctataattgtttatctaatatgtataacttttcctgtaaa

SEQ ID NO: 50924 - DNA, 120 bp, synthetic construct
  source 1..120: mol_type = other DNA
gctttctagaagaggctggaggggagggtcttatatgtataacagtaccataaagtcttagaaatcacagtactctggtgagctctatttactaaagaattatattaaaaatatcaatta

SEQ ID NO: 50925 - DNA, 120 bp, synthetic construct
  source 1..120: mol_type = other DNA
atgtcatatatttgtgtttcagcaactacgaatgggcaccaatagctgaaagcagatgctattatcatagccaaaatttttctcaatacagtttgagggtgtctttggaaaatgtgtata

SEQ ID NO: 50926 - DNA, 120 bp, synthetic construct
  source 1..120: mol_type = other DNA
ttgcacatgacatgtttatgttatctatataattttgtacagagaaagtcagactaagtcctataaacaaaatatcaattcctagccaagatcctccagatttacatctatgagatcttg

SEQ ID NO: 50927 - DNA, 120 bp, synthetic construct; identical to SEQ ID NO: 14199
  source 1..120: mol_type = other DNA

SEQ ID NO: 50928 - DNA, 120 bp, synthetic construct
  source 1..120: mol_type = other DNA
tgcaggtgtactgaccctggtcttctgctcgaacatctgcaatggtcaatttatggactttgtgttccacttctgttttatgtctaccttggggtttaaggattctgccatttctgaacc

SEQ ID NO: 50929 - DNA, 120 bp, synthetic construct
  source 1..120: mol_type = other DNA
cattttgttcaatatcacacgcagatgtgctcaacagtaatttaaatctcacaagtatttcataagccttttctaacttaccaattacagttagtttagcgctagcgatgtgtggaccac

SEQ ID NO: 50930 - DNA, 120 bp, synthetic construct
  source 1..120: mol_type = other DNA
accacgaaagcttgatttctggataattaattttaatgtcaatttcaaagacagcatcattatctttcaaaactgtctgattttcaatgtccttgatcagagtgacaggctaggagaata

SEQ ID NO: 50931 - DNA, 120 bp, synthetic construct; identical to SEQ ID NO: 14200
  source 1..120: mol_type = other DNA

SEQ ID NO: 50932 - DNA, 120 bp, synthetic construct
  source 1..120: mol_type = other DNA
tgatgctatatatgaaggagcataccagtctatgtgtctcttcttcttggctttgcttgagcagttcaaatgcttgaagaagacctcggaagtcagtgattccatacatgcgggcatatt

SEQ ID NO: 50933 - DNA, 120 bp, synthetic construct
  source 1..120: mol_type = other DNA
acctgtcttctacttatttttaattgtctatcatcattcaaagattatatacttcattaaggttttctatgttctttattcaataaatattaattttaccatgttagctgtgaaacaatt

SEQ ID NO: 50934 - DNA, 120 bp, synthetic construct
  source 1..120: mol_type = other DNA
aaactttataaccaaagagcctagctaatgaattataatatcagaaaaaataataatagcaatggaaaactttaataatagaatagtatacatatcacggaaacgatgtgtggaaattga

SEQ ID NO: 50935 - DNA, 120 bp, synthetic construct; identical to SEQ ID NO: 14201
  source 1..120: mol_type = other DNA

SEQ ID NO: 50936 - DNA, 120 bp, synthetic construct
  source 1..120: mol_type = other DNA
gttctttaacaatctgaatcttgagatggatggcccatgactcttgagagattctttttgtgaatgggacattacagtcatccctctctatgcctgggagattggcttcaggaggcctgt

SEQ ID NO: 50937 - DNA, 120 bp, synthetic construct; identical to SEQ ID NO: 6710
  source 1..120: mol_type = other DNA

SEQ ID NO: 50938 - DNA, 120 bp, synthetic construct; identical to SEQ ID NO: 14202
  source 1..120: mol_type = other DNA

SEQ ID NO: 50939 - DNA, 120 bp, synthetic construct
  source 1..120: mol_type = other DNA
gttcttccaaaattaaatcataagtaaaaggtataagatagatgaagatgtacttctcatgaagtgcacttactttctacgactctgatactctgaggttctgacacaaaaaagagtctt

SEQ ID NO: 50940 - DNA, 120 bp, synthetic construct
  source 1..120: mol_type = other DNA
gccttaggaggttggcagtttgataagtaagtactgcagaattctctttctatgtaagggtgggttacagaagataaagcagcttctcagacatttatgctaatgatagctatcaaaggt

SEQ ID NO: 50941 - DNA, 120 bp, synthetic construct
  source 1..120: mol_type = other DNA
ctatcgcattattatagcatcatttttggaactgcgttaattacatcttaatggatatggtgaaaagaagttcaagaaatagggtggtaaacttgtagtaatttcagatactttgtattg

SEQ ID NO: 50942 - DNA, 120 bp, synthetic construct; identical to SEQ ID NO: 14203
  source 1..120: mol_type = other DNA

SEQ ID NO: 50943 - DNA, 120 bp, synthetic construct
  source 1..120: mol_type = other DNA
taattggctcagatccctggacatggcagctgagctgcacgtattctccttcactcactgttactggagtaaggtgctgatcaaatacaggtggcttcttaggttctggaattgaaaagg

SEQ ID NO: 50944 - DNA, 120 bp, synthetic construct
  source 1..120: mol_type = other DNA
ccacaagagaaacaaataaagagaaaaactggcctctaacaggtaacactgttgctgtagtaggacagaattatgtgcctggtttattcctctctaaagacaatagtttaaatttgttgg

SEQ ID NO: 50945 - DNA, 120 bp, synthetic construct
  source 1..120: mol_type = other DNA
cttactaagcactgcagacattggcagttactatgaacttctttgccatatagcacactattaattctctcaaacctgtgtacagcggtgtttttgctgaaccctgaaaatgaagggctt

SEQ ID NO: 50946 - DNA, 120 bp, synthetic construct; identical to SEQ ID NO: 14204
  source 1..120: mol_type = other DNA

SEQ ID NO: 50947 - DNA, 120 bp, synthetic construct
  source 1..120: mol_type = other DNA
cctttaaaaacattttataaatagcttcagaattctatagaaagcatttatctgcccatggtaaaaccatcatgagtgtaaatcatgaagataagccactgctaagtatatatttttcat

SEQ ID NO: 50948 - DNA, 120 bp, synthetic construct
  source 1..120: mol_type = other DNA
cttactacctgtgcactgtgagataactaaccagatcataagagttggtaattaattccaggctgctctaggaggttagtttttaatgtgattttgatgaagctatgttgtaattactgg

SEQ ID NO: 50949 - DNA, 120 bp, synthetic construct
  source 1..120: mol_type = other DNA
acccattatttttctttttgggcaaatgttacccttttgtctgggattaatatttgtttgcaggtcaaacgctttgggcaatatacattaaacaataatcctttagaaatacacttggaa

SEQ ID NO: 50950 - DNA, 120 bp, synthetic construct
  source 1..120: mol_type = other DNA
catatgcacacatttcagagtacgctgaaacttctaactacctaaaggaattttaggatatgatttagaaacctaagatattagtccgttaaatgacacctccttcgggaagccacataa

SEQ ID NO: 50951 - DNA, 120 bp, synthetic construct; identical to SEQ ID NO: 14205
  source 1..120: mol_type = other DNA

SEQ ID NO: 50952 - DNA, 120 bp, synthetic construct
  source 1..120: mol_type = other DNA
gttggttgtatctctatattatttttgtaccaggcaacagttataggttgggaaccagccacacgtccctcaagtttgaaagaattcccttctgtttcttctactgtctctgagagtctt

SEQ ID NO: 50953 - DNA, 120 bp, synthetic construct
  source 1..120: mol_type = other DNA
taaaaatcaaggctaaccaactaaatacactatatcagaatatgttcctaaacatttcagcctccttctacgagcttattctaaactgttctttgacttacaaggtggatgataagaagt

SEQ ID NO: 50954 - DNA, 120 bp, synthetic construct
  source 1..120: mol_type = other DNA
taatcccagcactttgggaggccaaggcgggtggatcacttgaggtcaggagctccagaccaacctggccaacatggtgaaaccccgtttctaccaaaaaatacaaaaattagttggtca

SEQ ID NO: 50955 - DNA, 120 bp, synthetic construct; identical to SEQ ID NO: 14206
  source 1..120: mol_type = other DNA

SEQ ID NO: 50956 - DNA, 120 bp, synthetic construct
  source 1..120: mol_type = other DNA
tcccacttcattcacagcatagcaggtatattgtccagaatctcctttgtctactttgaggactgtcaggtgggcgctgttttccagataactaatctggtactttccgccacttcgtat

SEQ ID NO: 50957 - DNA, 120 bp, synthetic construct
  source 1..120: mol_type = other DNA
tgggttcttcccctctaatagtagagcagaaagacaaggtttcaggctcaatatctggaccatgtcagtttactgaaatagaaatttctccctaagttcatatttgattataatacttta

SEQ ID NO: 50958 - DNA, 120 bp, synthetic construct
  source 1..120: mol_type = other DNA
ttttaaaaatattgagtgtggctgtattgtctaaaaatgatgtttgtacatttgggctgtctttcaatggcttgccgtctttataccaagacacggagataggttctgatccacttatgg

SEQ ID NO: 50959 - DNA, 120 bp, synthetic construct; identical to SEQ ID NO: 14207
  source 1..120: mol_type = other DNA

SEQ ID NO: 50960 - DNA, 120 bp, synthetic construct
  source 1..120: mol_type = other DNA
tctcttgaattaacttggagataaagaaaagcatatagatttctggagcaaaagtatcactctgagaccaaccctaatgcacagtaggtgcaaaacagtatgaaaaccaataaagcaatt

SEQ ID NO: 50961 - DNA, 120 bp, synthetic construct
  source 1..120: mol_type = other DNA
aaaaagatttaattatagaagcaaatgattgcataatccttccaattaaagatttagtcatattatctctctgtagaatccatagaaaaagataagccactaactgtaaataggattact

SEQ ID NO: 50962 - DNA, 120 bp, synthetic construct
  source 1..120: mol_type = other DNA
acggtaaggaaagttgatgcagaaacttctcccacgctgttttcagctttgcagatatattctccactatcattaatatcaacctggttgaaaaccagtgtagcaacattattcctaaaa

SEQ ID NO: 50963 - DNA, 120 bp, synthetic construct; identical to SEQ ID NO: 14208
  source 1..120: mol_type = other DNA

SEQ ID NO: 50964 - DNA, 120 bp, synthetic construct
  source 1..120: mol_type = other DNA
tttcagtcgtagttatattacacctctgagaaggagttacatttatgccatttttcttccaggtaaccgaaatgggaggagttccagtgaatgtaccctctaggatcaggggttttcctt

SEQ ID NO: 50965 - DNA, 120 bp, synthetic construct
  source 1..120: mol_type = other DNA
ataaatctagaagagcagtctgacaaaccttttatgtagagatgtgttgtacaagaagccttgccagcttcattgctaactatgcaagtatattctccactttgtgatgtatctacatcg

SEQ ID NO: 50966 - DNA, 120 bp, synthetic construct
  source 1..120: mol_type = other DNA
ccagctaacactgaaaggaggtgttccttttacgatacttgtgaaagttacattggtcccagttaaaacatccatgggatcaggtttctgaacaaaagatggtggttctaaacacaaaag

SEQ ID NO: 50967 - DNA, 120 bp, synthetic construct; identical to SEQ ID NO: 14209
  source 1..120: mol_type = other DNA

SEQ ID NO: 50968 - DNA, 120 bp, synthetic construct
  source 1..120: mol_type = other DNA
gattggaggtgacccatagactttacactccattacaactgaggagccggatagaccatttgtctctttcaattttcttgtgaatgaaggaggaacggttcggtctgaatgatacaaaac

SEQ ID NO: 50969 - DNA, 120 bp, synthetic construct
  source 1..120: mol_type = other DNA
aaaactcctctatgggttcacactatcaaaagcttggagaatcagtgggcagaatgtgatggttgacttgctagggattttgttctctctttgccgtgaagaattatgtggtgaattatt

SEQ ID NO: 50970 - DNA, 120 bp, synthetic construct
  source 1..120: mol_type = other DNA
gaaagggatataacttttgaacatggttttcttctaattctacagatggtattgcctctgaatttgctgattcagaagatgtcggactcatgttatcctatagaagatgtaacaacccat

SEQ ID NO: 50971 - DNA, 120 bp, synthetic construct; identical to SEQ ID NO: 14210
  source 1..120: mol_type = other DNA

SEQ ID NO: 50972 - DNA, 120 bp, synthetic construct
  source 1..120: mol_type = other DNA
ctggcttttctacaattgttgcaggctctggaatgaaatgtaaaagatatccatattttaaactcaaattgaaaaactaaagaaaatacagatcctggtgagtgtgtgccttgtatctgt

SEQ ID NO: 50973 - DNA, 120 bp, synthetic construct
  source 1..120: mol_type = other DNA
ctgtaaggttgcaatgttttctgaataagaaatccatatgttgtcactttctctaacgatttctcccttatctttgaaccacaccactgaaatgggttcagcgccttcaatggtagtctg

SEQ ID NO: 50974 - DNA, 120 bp, synthetic construct; identical to SEQ ID NO: 14211
  source 1..120: mol_type = other DNA

SEQ ID NO: 50975 - DNA, 120 bp, synthetic construct
  source 1..120: mol_type = other DNA
aattacaacattatctaaaaggatattcagtaggatttggaaaagggaagcagactaaacagaaaaggacttggagaggaaacaaagggaaagtggaataggctgctagtgataagactg

SEQ ID NO: 50976 - DNA, 120 bp, synthetic construct
  source 1..120: mol_type = other DNA
atttgtggctttacactgatattccccaatgtctgcagcatcgacattcaggatgtggatactggttaggaagttctcagacattatcttgtacttcttgccgctcctaagttctctctt

SEQ ID NO: 50977 - DNA, 120 bp, synthetic construct
  source 1..120: mol_type = other DNA
agctcacattcaaggtgaacatcagctcctttcagtgtctctataggatgaggctttttgcggaaaatgggtggttctaaaattggaaaaaaggaaaatacggatgtattctgtaagtat

SEQ ID NO: 50978 - DNA, 120 bp, synthetic construct
  source 1..120: mol_type = other DNA
cctttccctattttaaaacatcgttgaagagtcaaacaggaagttaagaggacaattaaagaggaggctaatgtgaaaaacacacaggtggggagagcgctgacctttaacttttaagga

SEQ ID NO: 50979 - DNA, 120 bp, synthetic construct; identical to SEQ ID NO: 14212
  source 1..120: mol_type = other DNA

SEQ ID NO: 50980 - DNA, 120 bp, synthetic construct
  source 1..120: mol_type = other DNA
ggaaaaacacagggtaagggatggaacagatgcatataattcaagatgaggtggaaaaaataatctttgctagagaggtctttagctctggaaaacaaatttatgcagttcaaggaagaa

SEQ ID NO: 50981 - DNA, 120 bp, synthetic construct
  source 1..120: mol_type = other DNA
cctctccccagcaaaagagtcccttctctagtgccaagatcagagataatagcatgtatctgtcagtggaagccctctgaggtccacggggaatgagaatttgattactgtcttgtatat

SEQ ID NO: 50982 - DNA, 120 bp, synthetic construct
  source 1..120: mol_type = other DNA
gtgttaaatgggtatttcctcaaccttcataattttcctttgaagtgtgtgagagtaatgatttcctcattaactgaagcaaaaaattcaggcatagggaagtaaaagtgattagctata

SEQ ID NO: 50983 - DNA, 120 bp, synthetic construct; identical to SEQ ID NO: 14213
  source 1..120: mol_type = other DNA

SEQ ID NO: 50984 - DNA, 120 bp, synthetic construct
  source 1..120: mol_type = other DNA
gctatgccttagagggacaaaatccattcatttactaagtactgtgggaaaaaagtcatttgcaataacttcgcttttgtcctatgataccgtctttcaaactaggattttcttgcaatt

SEQ ID NO: 50985 - DNA, 120 bp, synthetic construct
  source 1..120: mol_type = other DNA
atttggaaggtccttgatccacttgatccattttcatcactagaccctggtcctaaacatagctctctctcaagcacacccaccctcctatattttaagatactgaaaatgtaaaagaga

SEQ ID NO: 50986 - DNA, 120 bp, synthetic construct; identical to SEQ ID NO: 14214
  source 1..120: mol_type = other DNA

SEQ ID NO: 50987 - DNA, 120 bp, synthetic construct
  source 1..120: mol_type = other DNA
agaatgaagaccaacatggtgatttttatttccatgctctcacatacagagcagaaactaaatggcaccagccttttggtggcctggagcagtgaagctgctttacaatgaagagggtac

SEQ ID NO: 50988 - DNA, 120 bp, synthetic construct
  source 1..120: mol_type = other DNA
tgctacattatgaacaaaagatgtctgcaaattagcatcatctttcaaaagaaccccatccttgtaccaagacacttgaagaggttctgagccattgatgcggcattcaaatgcaactgg

SEQ ID NO: 50989 - DNA, 120 bp, synthetic construct
  source 1..120: mol_type = other DNA
tcaattcataaaagttttaacgtttttaagaaaatgaatctgttcacacacactaggttaaacaacaccatcacctttgataacaagcacagctgaagaagcgactgcccccacactgtt

SEQ ID NO: 50990 - DNA, 120 bp, synthetic construct; identical to SEQ ID NO: 14215
  source 1..120: mol_type = other DNA

SEQ ID NO: 50991 - DNA, 120 bp, synthetic construct
  source 1..120: mol_type = other DNA
tatcttgaccagcctcattttctatcaggcagctgtactgtgcataatcctctattgtgctctcaagaatttccagtatggtagatttttctgtcatagtaatactgcatctctcagatt

SEQ ID NO: 50992 - DNA, 120 bp, synthetic construct
  source 1..120: mol_type = other DNA
cttcctgtctcaacactgaaatcagccaatcttttcacaaaggtggctggttctataaggagaaaacatgtgggtaaaattcttgccttctaatgaagacttaagagaaattttaaaaga

SEQ ID NO: 50993 - DNA, 120 bp, synthetic construct
  source 1..120: mol_type = other DNA
ggcaagaatagtctccactttctaatggctgcacctcaaacaactccagttctgtgacaaaatcttccagagagatgttgcatgactccccaggcaccagttccctgctgcctttaaacc

SEQ ID NO: 50994 - DNA, 120 bp, synthetic construct; identical to SEQ ID NO: 14216
  source 1..120: mol_type = other DNA

SEQ ID NO: 50995 - DNA, 120 bp, synthetic construct
  source 1..120: mol_type = other DNA
atgcctgtgtcggagggctccaacaagctcagattcaaagtacagacgttttccgaaaagctggactgacatttgggcccactaacaatctcatttccatcctgaaaccagccaactgaa

SEQ ID NO: 50996 - DNA, 120 bp, synthetic construct
  source 1..120: mol_type = other DNA
gttttgcgtttaaagagaagttttattctgtgcccctccaccccctggaaatattgtatattcataaaaatctcattctactcaccagaaacatggacggatacagtgcagttacttttg

SEQ ID NO: 50997 - DNA, 120 bp, synthetic construct
  source 1..120: mol_type = other DNA
tctcttccatctttgaaccacttggctgagagttctggtgttccagtcactacacactctaatgcaaaaggatttccagtagtgacagtcatgggttcgggcttctctatgattcttgct

SEQ ID NO: 50998 - DNA, 120 bp, synthetic construct
  source 1..120: mol_type = other DNA
ttgattttttctctggctgtgctttgctactaacctagtacagtcaagactgcagagcattctctcattccagcatcgtttttgatttggcatatatattttccagaattagatgcttct

SEQ ID NO: 50999 - DNA, 120 bp, synthetic construct; identical to SEQ ID NO: 14217
  source 1..120: mol_type = other DNA

SEQ ID NO: 51000 - DNA, 120 bp, synthetic construct
  source 1..120: mol_type = other DNA
gaacttgacagagcaagaacacgtgtcacttcccacctcattagtagctttgcagtgatattccccgacatcggaggcttcaagattaaggatatgaagacttgtatcaaaatgttttga

SEQ ID NO: 51001 - DNA, 120 bp, synthetic construct
  source 1..120: mol_type = other DNA
tttcacattggagaatcacatcagaacctttaagagctcctactggagaaggcttctgggtgaaaacaggaggtgctaccagaaaaaaggagataaacaatgagaacacttgcttactat

SEQ ID NO: 51002 - DNA, 120 bp, synthetic construct; identical to SEQ ID NO: 14218
  source 1..120: mol_type = other DNA

SEQ ID NO: 51003 - DNA, 120 bp, synthetic construct
  source 1..120: mol_type = other DNA
atgaagttcgctgtcatttcggaaccatgaaactttgatttctggggagccacttattttacattccagttgaatggattctccctgctttgcaacttttgaagcttctaatttcttaac

SEQ ID NO: 51004 - DNA, 120 bp, synthetic construct
  source 1..120: mol_type = other DNA
tattaagaatatactttctgaggattttacagtaaaataagttatcttttaagttaaataatctcataacattttttttttagttttttaaaatttattattattatactttaagtttta

SEQ ID NO: 51005 - DNA, 120 bp, synthetic construct
  source 1..120: mol_type = other DNA
aatcagaatgccatataacaagaaagcattaaaaaatggactagatagttaaaacaacatttaacaaatttcaattaaacaatactttttgataagattacacttagagttacactaatg

SEQ ID NO: 51006 - DNA, 120 bp, synthetic construct
  source 1..120: mol_type = other DNA
aagacaattatgcaaatatggtaaggaacaaatattgtcaaaagtcatggaatgataccttttacactgagctgagctgagcacatgtctttgccaacatcattggttgcttggcaagta

SEQ ID NO: 51007 - DNA, 120 bp, synthetic construct; identical to SEQ ID NO: 14219
  source 1..120: mol_type = other DNA

SEQ ID NO: 51008 - DNA, 120 bp, synthetic construct
  source 1..120: mol_type = other DNA
gagtctagcactagaagatgctgttccaagtgggttggaagctgagcaagagtactggccagagtgactcaagtcagtttgcaaaatttttaaagttgccacattatctacaaatgaagt

SEQ ID NO: 51009 - DNA, 120 bp, synthetic construct
  source 1..120: mol_type = other DNA
ctttaattgtcttgcaaaagaaggtgggagttggcgctctgtagggagacatgtaatacttaaggtgttaggagatgaaatgagaagttcaccataaagatacaagagttaaggaaaaaa

SEQ ID NO: 51010 - DNA, 120 bp, synthetic construct; identical to SEQ ID NO: 14220
  source 1..120: mol_type = other DNA

SEQ ID NO: 51011 - DNA, 120 bp, synthetic construct
  source 1..120: mol_type = other DNA
aactatgctacatgttagaagaatgcaaatgatttaagagacaataagacaacacacctaatgtagataccagagctccacaaacatcccttcctgcctcattttcaatctcgcaggaat

SEQ ID NO: 51012 - DNA, 120 bp, synthetic construct
  source 1..120: mol_type = other DNA
gaggtagttatgttaaaaccatcctttttccaagtgacagaaattggaagtgttccagtgtaggtgctctccagaattatggacttccctggttctacagaatgatcacttaatctcttc

SEQ ID NO: 51013 - DNA, 120 bp, synthetic construct
  source 1..120: mol_type = other DNA
agacgggtagtgcaagatgcttggccagcgttgttagaaaccacacaggtgtattccccactctgagatatgtcaatattaaataattccagttctgccacagtgtcttcaaaatagatg

SEQ ID NO: 51014 - DNA, 120 bp, synthetic construct
  source 1..120: mol_type = other DNA
tgtgaaggttacatttttgcctggtagtacttccaaaggttcaggttctttcacaaaagagggtggttctatatagacatggagaacaattaaaagatcctgtaagcttcagatggagtt

SEQ ID NO: 51015 - DNA, 120 bp, synthetic construct; identical to SEQ ID NO: 14221
  source 1..120: mol_type = other DNA

SEQ ID NO: 51016 - DNA, 120 bp, synthetic construct
  source 1..120: mol_type = other DNA
cagtcttcgtgtgaaagagggaggaactgctcggtctgtgtgaggaaaggtaagagactcatcatgatttgaaagaatagaagagacttgaaagaaggaaacttgtaaaaggaatttgca

SEQ ID NO: 51017 - DNA, 120 bp, synthetic construct
  source 1..120: mol_type = other DNA
aacctggaaagtgtatgtgcctgcatcttgcctttcaactgagagaatccttaaggaagagattttgttgtagaagctaaatttgtgtttttggctgctggtcaacagctttccatcctt

SEQ ID NO: 51018 - DNA, 120 bp, synthetic construct; identical to SEQ ID NO: 14222
  source 1..120: mol_type = other DNA

SEQ ID NO: 51019 - DNA, 120 bp, synthetic construct
  source 1..120: mol_type = other DNA
caattattcttaagaaatatatgttcgtgcatgactcaacttcaaaacaatttaaacaatgtgcattagatagtatatattgatttccacttgaccctctgtagatcaaagtctacaggt

SEQ ID NO: 51020 - DNA, 120 bp, synthetic construct
  source 1..120: mol_type = other DNA
tgccaacctttggagttcttgttagttttaacaattactcttgtagcacatgctgggctctgtattctttcatgcttaatcaaagagagtcatgattgtatctgctaattgatatagaca

SEQ ID NO: 51021 - DNA, 120 bp, synthetic construct
  source 1..120: mol_type = other DNA
atagttctagaagaaactcagaaaaagaatctgccagtaactcttagtaattcattccagcatttggcaccagtttctatcgtgggctattgtaccaacctaagaccatcagtgtggcca

SEQ ID NO: 51022 - DNA, 120 bp, synthetic construct; identical to SEQ ID NO: 14223
  source 1..120: mol_type = other DNA

SEQ ID NO: 51023 - DNA, 120 bp, synthetic construct
  source 1..120: mol_type = other DNA
aaaaaagtaggattttgcacatttatgacatttctgccatgtggatgaactatatttacctttcaattttacagtacaaacacaagtatcacttcccacttcattctgtgctttgcagtg

SEQ ID NO: 51024 - DNA, 120 bp, synthetic construct
  source 1..120: mol_type = other DNA
ctcaaacggtggtgttcccgaaagttcacattcaagactgacttcagcatttttaagggtttctactataggagggaagctgctaaaaacaggtggctctgcaaaaaacaagaatttctc

SEQ ID NO: 51025 - DNA, 120 bp, synthetic construct
  source 1..120: mol_type = other DNA
cagcctcagaagccatttgccttcacaagataaccagctagatgggcagagaacccagatagatcctagatgtcgttactgaacagttcaacattctatctactacaccttactgatgta

SEQ ID NO: 51026 - DNA, 120 bp, synthetic construct; identical to SEQ ID NO: 14224
  source 1..120: mol_type = other DNA

SEQ ID NO: 51027 - DNA, 120 bp, synthetic construct
  source 1..120: mol_type = other DNA
cttgagagagaaggaaaaaatattattgtcctgttttaaacataagtttaaaacctgtattgctttcactttgcatagatatagtaaaagtgcttgttattaatgatatagattatagtg

SEQ ID NO: 51028 - DNA, 120 bp, synthetic construct
  source 1..120: mol_type = other DNA
acatcacgtttgatgtttggcaaatgtgttgaggtaatcagaattatgacactggaataacaaaaatatttcataatgactagttacatgtaagcaaaattcaagaaggaaaccatctaa

SEQ ID NO: 51029 - DNA, 120 bp, synthetic construct
  source 1..120: mol_type = other DNA
acacaagaacaagatgtctaccttttactataaccttggtactgcagcttgtgctgccagcgggattctgagcctcacaaatgaaatctccactgtcctcagtactgagattgttcatct

SEQ ID NO: 51030 - DNA, 120 bp, synthetic construct
  source 1..120: mol_type = other DNA
gtgaagagtcacctgctttcacaattttggaggcttctaatttctttacaaactttggtggttctaaagagtcaggaaagaggagagtatcagggaacagaaataaataacaatagttaa

SEQ ID NO: 51031 - DNA, 120 bp, synthetic construct; identical to SEQ ID NO: 14225
  source 1..120: mol_type = other DNA

SEQ ID NO: 51032 - DNA, 120 bp, synthetic construct
  source 1..120: mol_type = other DNA
gtattgccttaaattccactgtagaatcaggtatggcttgctgtcgcccaggtttcactaggaagcttggtggttctatagattttaagagagatatatttaattaaattgcttgcagtt

SEQ ID NO: 51033 - DNA, 120 bp, synthetic construct
  source 1..120: mol_type = other DNA
tctaaaggatacaaaggcaagagtgatacatttaagaagcattcgcaaggaagaatcaagaagaggtaaagaaattctaacctttcacagttaagatgccactgcatgcatcatctcctg

SEQ ID NO: 51034 - DNA, 120 bp, synthetic construct
  source 1..120: mol_type = other DNA
ttccatccttaaaccactgagcactaatgggaagtgaaccagacaccttgcactccatatgaatagaagagcccagaactttatccattttggttaattttttggtgaatgatggaggaa

SEQ ID NO: 51035 - DNA, 120 bp, synthetic construct; identical to SEQ ID NO: 14226
  source 1..120: mol_type = other DNA

SEQ ID NO: 51036 - DNA, 120 bp, synthetic construct
  source 1..120: mol_type = other DNA
atttagctttctctacgatttgagctggttctgtagtaaaaatgaaaatgtggatgagttacattggtaactccactagaaataatgtctgctaatgaaactgtcgctatagactatctt

SEQ ID NO: 51037 - DNA, 120 bp, synthetic construct
  source 1..120: mol_type = other DNA
tgaagtgtggccacactgtccacaaatgaaatatagacattatcatcttcatcaagaatctgatcatcctttagccaggttatagaaataggaggagaacctgccacggtactctgaaag

SEQ ID NO: 51038 - DNA, 120 bp, synthetic construct; identical to SEQ ID NO: 14227
  source 1..120: mol_type = other DNA

SEQ ID NO: 51039 - DNA, 120 bp, synthetic construct
  source 1..120: mol_type = other DNA
ttcaaacggaggtgttcccgtaacttcacactccagctccacgtcactatattttactacctccacaggcttcagctctctgataaaggtggggggttctaaagattcaaaaggaagaca

SEQ ID NO: 51040 - DNA, 120 bp, synthetic construct
  source 1..120: mol_type = other DNA
ttcgagcttcacacacataagtcccactattttctaccctggcaccagaaatctggaaagtggctaaaccatcaatgaaggaaatgccatgtttctgaatggctgttatttcattcccgt

SEQ ID NO: 51041 - DNA, 120 bp, synthetic construct
  source 1..120: mol_type = other DNA
aagatggaaaaagaattgtgatgttgaatatttttaaaaacaggtcactgggcaaaactgctgtcttaagcgtcccccgccccggcccaccccaggcaagaaaatctagacaagcaagaa

SEQ ID NO: 51042 - DNA, 120 bp, synthetic construct; identical to SEQ ID NO: 14228
  source 1..120: mol_type = other DNA

SEQ ID NO: 51043 - DNA, 120 bp, synthetic construct
  source 1..120: mol_type = other DNA
caataaaggtgaaaatttagaaatgaaacaaaaatattttgtaagttcttgataagtggaaataaaatttgccaacctttgactgtcagatgcccactgcattggttgtgccctgcctta

SEQ ID NO: 51044 - DNA, 120 bp, synthetic construct
  source 1..120: mol_type = other DNA
tctttgaaccactggatgcttatgggatgtgacccagccactatacattctaaatcaatgaaagaacctttaatgctgtccattttcttcagctttttggtgaatgaaggaggtatgata

SEQ ID NO: 51045 - DNA, 120 bp, synthetic construct
  source 1..120: mol_type = other DNA
aagggaagaaggagcatggaaatgcccaatcctctctgtagaagaacaataccaacctaatacattaattctagccttgcagctgctcctcccaacatcattttggacctcgaaagtata

SEQ ID NO: 51046 - DNA, 120 bp, synthetic construct
  source 1..120: mol_type = other DNA
aatctccttagtccctgaaaatttaacctgcaaagtggctgggtctccttgggtgacatctatagacacagcttcctcggtgattgttgcaggttctgtagaaaacaaagggatagatgt

SEQ ID NO: 51047 - DNA, 120 bp, synthetic construct; identical to SEQ ID NO: 14229
  source 1..120: mol_type = other DNA

SEQ ID NO: 51048 - DNA, 120 bp, synthetic construct
  source 1..120: mol_type = other DNA
ggtactctcgatcttctttatgaaggatgggggttctaacagaagaatgaattctcaatcaatattatccctatagcaaaagtggcttaaaaaaaagaattgactcttcagaaaagccag

SEQ ID NO: 51049 - DNA, 120 bp, synthetic construct
  source 1..120: mol_type = other DNA
cactggtattcgccagcatctgcagctacaaacttgaggatctgcaggctaaccagatgatcctgaatgaaagtcttatactttctaccacttcgcaggattgtgttatctttgaaccaa

SEQ ID NO: 51050 - DNA, 120 bp, synthetic construct; identical to SEQ ID NO: 14230
  source 1..120: mol_type = other DNA

SEQ ID NO: 51051 - DNA, 120 bp, synthetic construct
  source 1..120: mol_type = other DNA
aagacattctgtgtttgctgctctccttaatttctctatcatttgcaaaccatgttattttaattggaggggtaccagttactttgcaggctagctgggtggcatctcccttctttaaca

SEQ ID NO: 51052 - DNA, 120 bp, synthetic construct
  source 1..120: mol_type = other DNA
acaatgcaaaccttttacaaacaagtttgcactgcattccacccctccagcgacattgctgactttacatgtgtacgtgcccgaatcagaggtttttactaaatagagttccagggaact

SEQ ID NO: 51053 - DNA, 120 bp, synthetic construct
  source 1..120: mol_type = other DNA
gccaggcagaacatcctttgagccgggtttagttacaaaactgggtggttctgaagaaggggtataagaaagaatttcaaagagttaagagggttgatctaagggaagatgacttaattt

SEQ ID NO: 51054 - DNA, 120 bp, synthetic construct
  source 1..120: mol_type = other DNA
cccacggaatttgtggctcgacaagtgaaattccctgcatcattcatgtctactctgatgatctccaaagaggctgtgccttccacaaatgctatcctgtatctgtcagaagcagctatt

SEQ ID NO: 51055 - DNA, 120 bp, synthetic construct; identical to SEQ ID NO: 14231
  source 1..120: mol_type = other DNA

SEQ ID NO: 51056 - DNA, 120 bp, synthetic construct
  source 1..120: mol_type = other DNA
acattgtttttaaaacttattcggtattttttactggcgaccaagggtctcccatctttgtaccatttgggcttcagttctggcgtgcctgccactgtgtactccagtgtggcgggatct

SEQ ID NO: 51057 - DNA, 120 bp, synthetic construct
  source 1..120: mol_type = other DNA
gaggtttaaatgttcctacacaaacctttaactattaattccccaacagatgtttggcttccagcttcattttcagccaggcacgtgtatttgcctccaaaactaatctgaacatcaggg

SEQ ID NO: 51058 - DNA, 120 bp, synthetic construct; identical to SEQ ID NO: 14232
  source 1..120: mol_type = other DNA

SEQ ID NO: 51059 - DNA, 120 bp, synthetic construct
  source 1..120: mol_type = other DNA
aggcatagatgatacatgtttgtcagctgacaaaatggcttattattcccttttgttatcagataatagatatttacactagtctcgggaaaaagaccaggtgaaagttactgactttgt

SEQ ID NO: 51060 - DNA, 120 bp, synthetic construct
  source 1..120: mol_type = other DNA
ggggtaagaaagctagtttgacaatttattaaagagacattagtttttcaagcactaacctttgagtaagtgggttgccatgcagccacacttgccgacttcattagcaacaacacattc

SEQ ID NO: 51061 - DNA, 120 bp, synthetic construct
  source 1..120: mol_type = other DNA
tactacttcgaatttgtttcttgtctttgaaccagctaatttcaaatggtccagtgcctgagacttcacactgaagtagagcatttgttcctctcactatgtctgcaggctcaagagttt

SEQ ID NO: 51062 - DNA, 120 bp, synthetic construct
  source 1..120: mol_type = other DNA
ttgataactatttcagtactgcagctatcactgccgacgtcattcactgcttcacatgagtaactcccactgtcttcaacttttacatccgtaatatcaagtatagcctcagaattgaca

SEQ ID NO: 51063 - DNA, 120 bp, synthetic construct; identical to SEQ ID NO: 14233
  source 1..120: mol_type = other DNA

SEQ ID NO: 51064 - DNA, 120 bp, synthetic construct
  source 1..120: mol_type = other DNA
aagacactttcccagtctcttgatttaaaataaaacaacaataaacagactacctacacaaagaagaattttataaaagaagatagttaagaattgctcagacacttggagttttttctt

SEQ ID NO: 51065 - DNA, 120 bp, synthetic construct
  source 1..120: mol_type = other DNA
atgtttgctgaatgacattattttaataacaaagtgtactgactgaattgtttgccaacagtttttctactgaggattccttgcagagaagggactagaaaatacattcacacgtttctt

SEQ ID NO: 51066 - DNA, 120 bp, synthetic construct
  source 1..120: mol_type = other DNA
tcagtttggccaaaggaatctcaagtgttgctattttatcttcaaaacagatcttataatctttccctggggggagtttttgcccatctttgctccacgtaactgtgacttttctgtctt

SEQ ID NO: 51067 - DNA, 120 bp, synthetic construct; identical to SEQ ID NO: 14234
  source 1..120: mol_type = other DNA

SEQ ID NO: 51068 - DNA, 120 bp, synthetic construct; identical to SEQ ID NO: 6740
  source 1..120: mol_type = other DNA

SEQ ID NO: 51069 - DNA, 120 bp, synthetic construct
  source 1..120: mol_type = other DNA
agacatcactttacttgtctctatcaaagaaaagacaagcgttcctttattaagtaacattactaaagatttgtccattttagtggctgcttgtttaattatttgataagctattgagct

SEQ ID NO: 51070 - DNA, 120 bp, synthetic construct
  source 1..120: mol_type = other DNA
ctaaccctcatgtcaactgcctggaaattcttatatggcttaactatgaatgcatcctctaggccaactcaaacttgtaaaaatatttaatagcagcaacttcccctttccattctgcat

SEQ ID NO: 51071 - DNA, 120 bp, synthetic construct; identical to SEQ ID NO: 14235
  source 1..120: mol_type = other DNA

SEQ ID NO: 51072 - DNA, 120 bp, synthetic construct
  source 1..120: mol_type = other DNA
catcgttttcacattcaagagatgtgctgcatttgcccttccccttgatattctcattgacaaagaagaccaagggacagccttccccaacagtccaagtatggcttgactgtacctcta

SEQ ID NO: 51073 - DNA, 120 bp, synthetic construct
  source 1..120: mol_type = other DNA
gaaggtaggaagaaaggaagaaaagcttgctactaatattttggttaatgaaggcattcaagtatttgatgagtgttaactatttgaaagtcaccctacatatcaattagaaaattggga

SEQ ID NO: 51074 - DNA, 120 bp, synthetic construct
  source 1..120: mol_type = other DNA
ctcctggcttcaagcaattctcctgcctcagcctcccaagtagctgggactacaggtgcgtgacaccacgcctggctaattttttatatttttagtagagatcgggtttcactgtgttag

SEQ ID NO: 51075 - DNA, 120 bp, synthetic construct; identical to SEQ ID NO: 14236
  source 1..120: mol_type = other DNA

SEQ ID NO: 51076 - DNA, 120 bp, synthetic construct
  source 1..120: mol_type = other DNA
gcaccaaactgtcctgatatgttttatatgaagggccaagctgagctcatttgattacttaactttgttctcaaataataaattattttttctttggtcagtagtagaaatgtgactgta

SEQ ID NO: 51077 - DNA, 120 bp, synthetic construct
  source 1..120: mol_type = other DNA
gtaatacaagcatttcccacacatgtacagaaagcaaaaaggacaacaatatgaaatgaagtgacaacatctgtgccaatgtatggcatttacctgtcacagttagtgtggctgtacagc

SEQ ID NO: 51078 - DNA, 120 bp, synthetic construct; identical to SEQ ID NO: 14237
  source 1..120: mol_type = other DNA

SEQ ID NO: 51079 - DNA, 120 bp, synthetic construct
  source 1..120: mol_type = other DNA
aacttttgttgctgttaatggagtaaaacagttgaaattggtgagatggattacagcagtttaaggcaagtgactggaaaatgagaaagatcattgaaggcaaaagaagacaataagctt

SEQ ID NO: 51080 - DNA, 120 bp, synthetic construct
  source 1..120: mol_type = other DNA
actgaaaataatgtgaagaaacatgatatactaaataaagtgatgaagtgaaacaacaacaaaaaataaacagaaaaaagaaacagacaactaatcatggttattttaaatctaagggtg

SEQ ID NO: 51081 - DNA, 120 bp, synthetic construct
  source 1..120: mol_type = other DNA
atatgttttatttttaaaataaatagtaccatggatatgatagcatagcacccaacagggcagtaagggaaaaggtgagttcataaccatgattatgtctgtgatttcattcttactcta

SEQ ID NO: 51082 - DNA, 120 bp, synthetic construct; identical to SEQ ID NO: 14238
  source 1..120: mol_type = other DNA

SEQ ID NO: 51083 - DNA, 120 bp, synthetic construct
  source 1..120: mol_type = other DNA
tattctcaaaataccaattcacctctttagcatttgttatggatgttgtgaggtgtacaatatcaccttcctcagaaacagtgtccactaaaggtgtatgtatcatggggccatcctctt

SEQ ID NO: 51084 - DNA, 120 bp, synthetic construct
  source 1..120: mol_type = other DNA
agacaacagctgaagcaacccctttagtgacaggtgtggcatccaaatatttaaccctactttgcacgttaaaataactgacctcttcagttgagatcagatatttagattcaacttctg

SEQ ID NO: 51085 - DNA, 120 bp, synthetic construct
  source 1..120: mol_type = other DNA
atataatagcacacaaagcatccctaagttccattttcaggttagccatttgaggatcaacatcttcaataatgatggttacttcttctgttacagactttgccgaagtaacaaggtaca

SEQ ID NO: 51086 - DNA, 120 bp, synthetic construct
  source 1..120: mol_type = other DNA
cccggcagatttgaattttcaggtttaatctctgctcttctggaataccagaaagcaagctttccttagaaagaaggtcccttccctgtacctcctgcactttctttattgccacgggct

SEQ ID NO: 51087 - DNA, 120 bp, synthetic construct; identical to SEQ ID NO: 14239
  source 1..120: mol_type = other DNA

SEQ ID NO: 51088 - DNA, 120 bp, synthetic construct
  source 1..120: mol_type = other DNA
tgcttttgaagagtcactctttgctctctgttggtgtcagatactgtcttttcttttggtgaaagtacttcctcagccacagaggttagataagaatgcattggaggttctattgaagac

SEQ ID NO: 51089 - DNA, 120 bp, synthetic construct
  source 1..120: mol_type = other DNA
tgtgtctcaggctcttcaggcattagaataccttctttggagaaggttttctgggactgtacaatctgcagctgtaggttgggagatggttccttgagaggctgaaagtgaatactgcca

SEQ ID NO: 51090 - DNA, 120 bp, synthetic construct
  source 1..120: mol_type = other DNA
tcataagatagttgctggttttcttctgtaattaaagcagctttcaaaatggtgtcttttacaaacgttgcaatttcctgctctgagtcaagtgcttcaactgcgggaccctttaagggt

SEQ ID NO: 51091 - DNA, 120 bp, synthetic construct; identical to SEQ ID NO: 14240
  source 1..120: mol_type = other DNA

SEQ ID NO: 51092 - DNA, 120 bp, synthetic construct
  source 1..120: mol_type = other DNA
ggacctcccagcttttccagagattttgccactgctgattctgtttcagtgtctttgtgaccctctcctttggaattaatttttagataggcactacatattgtctttccatagtcatta

SEQ ID NO: 51093 - DNA, 120 bp, synthetic construct
  source 1..120: mol_type = other DNA
aagaaccactgaattttaggtttggggatgccaatgacagttacagacagtgtagccacatcccccatgcttatatcagcatttgacacttctttgatgaaaattgggccagtgccttcc

SEQ ID NO: 51094 - DNA, 120 bp, synthetic construct; identical to SEQ ID NO: 14241
  source 1..120: mol_type = other DNA

SEQ ID NO: 51095 - DNA, 120 bp, synthetic construct
  source 1..120: mol_type = other DNA
ttcatctgtgatagagttcatgttttaaaaatgctctcatgagtttttcttgagatataattccaattttaaagtttgaaaaactgctaattaaatagttataataatccagcattattt

SEQ ID NO: 51096 - DNA, 120 bp, synthetic construct
  source 1..120: mol_type = other DNA
ctgcctctaaagtcattattaaaaataagaggctacaggaaatgtttaatttggatttgtaagagaaccactgttttcagtttctagaaatgcaggccttctttcatctatgtaaatcac

SEQ ID NO: 51097 - DNA, 120 bp, synthetic construct
  source 1..120: mol_type = other DNA
atacagaaccactgagcaagaaacaaagcagtgcataacagagactctttaaacagtatcctggatgacaggatgaaagacatgtaattttaaacaaggaattcgattttttattaaacc

SEQ ID NO: 51098 - DNA, 120 bp, synthetic construct; identical to SEQ ID NO: 14242
  source 1..120: mol_type = other DNA

SEQ ID NO: 51099 - DNA, 120 bp, synthetic construct
  source 1..120: mol_type = other DNA
tcacttaacttcgcatttaatctacaatacataattcgcgttacctttcccttcacttgaactcacaaaatatctgtaaagggagtgaatgtgaatacagttaaaatacccttactcact

SEQ ID NO: 51100 - DNA, 120 bp, synthetic construct
  source 1..120: mol_type = other DNA
gttgtggtagcagctattaattgtctaaactcaactatgtgcaatacaataaattctttatccagaatcagagaaattaatattttggggttttatgttacgtgccattgagtcagaaaa

SEQ ID NO: 51101 - DNA, 120 bp, synthetic construct
  source 1..120: mol_type = other DNA
ccaaggcttacttttctttattcagtcactgttattctgcgtatactcaagctcaccatacttgaaactaacagaattacagaattctaatgagcaaaaccaaacaaagccctctttact

SEQ ID NO: 51102 - DNA, 120 bp, synthetic construct
  source 1..120: mol_type = other DNA
ttttaagaaacaaggtttgaactgttgctgtgctgtatgatgtttgagtaaagcatgcttgtcatgtttgcctcaatctgagtttctcgttaattttaacatccattatgtgactaagtg

SEQ ID NO: 51103 - DNA, 120 bp, synthetic construct; identical to SEQ ID NO: 14243
  source 1..120: mol_type = other DNA

SEQ ID NO: 51104 - DNA, 120 bp, synthetic construct
  source 1..120: mol_type = other DNA
attaaatttaaattgtttacatttctaattaaaattagcattttaaatatgataatggtacttaaatattgctaaatgcaggtgacaaatgtagccattaagtaacaataagtaatttaa

SEQ ID NO: 51105 - DNA, 120 bp, synthetic construct
  source 1..120: mol_type = other DNA
tgtattgttgaatgatcacctctaaggtcttttggtcctacccttcattttcagaattttttatatttgtcgagtcttatatgagaagacttgggtccacattagtatataggtaagata

SEQ ID NO: 51106 - DNA, 120 bp, synthetic construct
  source 1..120: mol_type = other DNA
atgaaattcagtgaaactgataggaaagcttgttatcttgttatttatatataatctgaaatacaaattaccatattgtctcaattctaaaaatatcccacctttttttaaattttaaag

SEQ ID NO: 51107 - DNA, 120 bp, synthetic construct; identical to SEQ ID NO: 14244
  source 1..120: mol_type = other DNA

SEQ ID NO: 51108 - DNA, 120 bp, synthetic construct
  source 1..120: mol_type = other DNA
gagtttggatgcaaaggggttaaaattccaaaaataacttagaatgggagcagagagatttgcccttaccaatttgtctgcgtggtcatctgatatggtctccacttttacattgtactt

SEQ ID NO: 51109 - DNA, 120 bp, synthetic construct
  source 1..120: mol_type = other DNA
tgatattacacagcatgattgacacaagtgatgattccacagttcagataacaaaatatttacatgtattacaaagatgagatttctacatagagattatttctttaggggtctccaagg

SEQ ID NO: 51110 - DNA, 120 bp, synthetic construct
  source 1..120: mol_type = other DNA
gttaaggtgagtgctgcaaagctctcagccattcctgatttgtttgtagctacacacctatactctccttcatcactctttactaagcttgttataaacaggttatggaaccctgtgcca

SEQ ID NO: 51111 - DNA, 120 bp, synthetic construct; identical to SEQ ID NO: 14245
  source 1..120: mol_type = other DNA

SEQ ID NO: 51112 - DNA, 120 bp, synthetic construct
  source 1..120: mol_type = other DNA
cagacatttcgaattttaagagtgtgacttcccttctcctcgctaatcacgtatttaatattatctggctcaatacacatatattctttataccacttaacttcgggagtcgggatccct

SEQ ID NO: 51113 - DNA, 120 bp, synthetic construct
  source 1..120: mol_type = other DNA
ccctcccttgaatccatatttggatctacaaaattaaatggaagaacatctagactcacaatcatacttttatggtcaggagtaaattcgggaactgtcactattttcacctgcttctca

SEQ ID NO: 51114 - DNA, 120 bp, synthetic construct
  source 1..120: mol_type = other DNA
ttccaaatcaaactccatgacatgctgatgtgttactggaggtggtagtgccaccactctttcttcctggggcattatgtctacatttgcaaagctctttgcttcccctatgatgtttac

SEQ ID NO: 51115 - DNA, 120 bp, synthetic construct
  source 1..120: mol_type = other DNA
ataccatttcacaccaggaactggaagaccttcaacttcaacaatgaagcctagtgttgtgttttcatataccttccttttggtcagaggttcaataaaagatggaggcatttcattgtc

SEQ ID NO: 51116 - DNA, 120 bp, synthetic construct; identical to SEQ ID NO: 14246
  source 1..120: mol_type = other DNA

SEQ ID NO: 51117 - DNA, 120 bp, synthetic construct
  source 1..120: mol_type = other DNA
ctagagtctctcctggaggtgtggagtatctctctagtgtctcccctgggggtgtggagtatctttctcctacctcaccttcggaaggtgttgaatatctttcagcaacttcccctaaag

SEQ ID NO: 51118 - DNA, 120 bp, synthetic construct
  source 1..120: mol_type = other DNA
tcaggggactttggagattcaaaatattcaacagatgatggtggggtataaaactgatctaactcagatatttcttcactggttgtacttcccacaccaatggaaatgtcagactcagga

SEQ ID NO: 51119 - DNA, 120 bp, synthetic construct; identical to SEQ ID NO: 14247
  source 1..120: mol_type = other DNA

SEQ ID NO: 51120 - DNA, 120 bp, synthetic construct
  source 1..120: mol_type = other DNA
ttcttctccagaggcatgaatgtttgtacttatttgttcacctggattctgttgttcttcagtcatcaagagtgggaagcactgactcagggagagctgtctatggagtgtgtcagcttc

SEQ ID NO: 51121 - DNA, 120 bp, synthetic construct
  source 1..120: mol_type = other DNA
ccctaaaggcttttcctcacttgctgcttttttcaaatgtgagatggaacttctgcctccattttctagaggacaacttttctcagaaagatcagtttcttctatatctgcagatgaggt

SEQ ID NO: 51122 - DNA, 120 bp, synthetic construct
  source 1..120: mol_type = other DNA
ggaattttcatcaatactacttttctccaccatagttctatttgaaagctcttgactggaagaaatttcttgactggcaaatacattattttgcacacttttagagatattgtgtgtgtc

SEQ ID NO: 51123 - DNA, 120 bp, synthetic construct; identical to SEQ ID NO: 14248
  source 1..120: mol_type = other DNA

SEQ ID NO: 51124 - DNA, 120 bp, synthetic construct
  source 1..120: mol_type = other DNA
agaggaaagcagctttaaatttattgcaatgttagatgaatctgattcagtatttggagacattttctctgcctgatacatatttgcatttagattgcttgatcttgattctctttgctt

SEQ ID NO: 51125 - DNA, 120 bp, synthetic construct
  source 1..120: mol_type = other DNA
cttcacctttttccccgggtagtgtatctcttcaccaagggattcttcatatacaatggcagatgaatcttttgtattgtaactgtcagaaattctctcagagtgaatatttggtaaata

SEQ ID NO: 51126 - DNA, 120 bp, synthetic construct
  source 1..120: mol_type = other DNA
accctctgcttggtgcagctttgatttttcacttacatgtctctctttcccttcagcctgacattgtatgaattcagccctgatgggcttgctgatttttatggttcttgaagcaccatg

SEQ ID NO: 51127 - DNA, 120 bp, synthetic construct; identical to SEQ ID NO: 14249
  source 1..120: mol_type = other DNA

SEQ ID NO: 51128 - DNA, 120 bp, synthetic construct
  source 1..120: mol_type = other DNA
atataattggtggctacaattaacttcttcaaactgaaacttctggttctgctttaaaaggactccattttgaaaccatgttacaactggctggggctcaccagatattaaacattcaag

SEQ ID NO: 51129 - DNA, 120 bp, synthetic construct
  source 1..120: mol_type = other DNA
atcttgaggcattgctttaggttccagctcctcagtttgaaacacttctttagactctttatcctgttctgggataggagtagctgctgttacctgaatttctacaggaaaggaaagcaa

SEQ ID NO: 51130 - DNA, 120 bp, synthetic construct
  source 1..120: mol_type = other DNA
ttcttcctcatccaagtagtcatggaacactgggactttatgtgctttgacatcatgtttttgttttgctttcactttaagcatactggttgtttttactgttccatattggttaaatag

SEQ ID NO: 51131 - DNA, 120 bp, synthetic construct; identical to SEQ ID NO: 14250
  source 1..120: mol_type = other DNA

SEQ ID NO: 51132 - DNA, 120 bp, synthetic construct
  source 1..120: mol_type = other DNA
actagctatttcttcactttcttcaacatttacaagtgtaccaaaagattcgctggcatgtggtgtaatagcttgagacacattttcaggagtctcatatacttcctccttctcacatac

SEQ ID NO: 51133 - DNA, 120 bp, synthetic construct
  source 1..120: mol_type = other DNA
actttcctttaccagtgcttcttggctcattcttatttcagtctggaaaatttcttcatcaacaatagtttgaaagcttgtgggaagttcctcagattctatattttgatccatttgatt

SEQ ID NO: 51134 - DNA, 120 bp, synthetic construct
  source 1..120: mol_type = other DNA
actagcttcacttctcaaagttcttgagcttatttcagaagacgtatctaaaagagataatttctttttctccattaatgtttttctagcctcccttaaacgttgcaacttcactttggt

SEQ ID NO: 51135 - DNA, 120 bp, synthetic construct
  source 1..120: mol_type = other DNA
tatagttctcatcattcccttttgttccacatcttgttttttgttaaagggagagccagtaaacctcaggtcaacctttatcctatcttctcccctttcaactaaagcctccacattttc

SEQ ID NO: 51136 - DNA, 120 bp, synthetic construct; identical to SEQ ID NO: 14251
  source 1..120: mol_type = other DNA

SEQ ID NO: 51137 - DNA, 120 bp, synthetic construct
  source 1..120: mol_type = other DNA
ggagcttgtagatgatattctacttgcatatcttttagcagccatggatttgtggtctatgtcttcagaatctgaaaaggcgtcacgtgtatccctttctgaatgttcagattccccctc

SEQ ID NO: 51138 - DNA, 120 bp, synthetic construct
  source 1..120: mol_type = other DNA
caaatccatagaaaaattcactcaccatatttgttcgaataaacgcaacaccatgctctgtttaaaagattctgacacgaaaatcgttcgttgtctggtcttttcttcaaactgttgaaa

SEQ ID NO: 51139 - DNA, 120 bp, synthetic construct; identical to SEQ ID NO: 14252
  source 1..120: mol_type = other DNA

SEQ ID NO: 51140 - DNA, 120 bp, synthetic construct
  source 1..120: mol_type = other DNA
tcacaatgttatgcaaagaaaagcaggcaataaggatcacataaggcagctatctgcaagccagtgtaagagacatatcaatgttaaaatgatatatgtgaatgaagtgtaaaccagatg

SEQ ID NO: 51141 - DNA, 120 bp, synthetic construct
  source 1..120: mol_type = other DNA
ttttgaaaacaaacttctacttcatgatttcatgcattaagatgacaacttctcctaatatacacttttggaaatgactgcaaacataaagttgaatttggctgataaattttaaataca

SEQ ID NO: 51142 - DNA, 120 bp, synthetic construct
  source 1..120: mol_type = other DNA
tttttctcaataatactaagagaaagaaggcaactcaaggatcctattaatcctttagaatttctacttaaatctcacatccattataacaatacctttcatttccatctcaatctcttg

SEQ ID NO: 51143 - DNA, 120 bp, synthetic construct
  source 1..120: mol_type = other DNA
tttttattataacaacagaaaactacattccccaaatttaccaaaaagtccatgccaaacaaactattgagctgataaaacacatgacaatgttgacagaaagatttaaaacatttttat

SEQ ID NO: 51144 - DNA, 120 bp, synthetic construct; identical to SEQ ID NO: 14253
  source 1..120: mol_type = other DNA

SEQ ID NO: 51145 - DNA, 120 bp, synthetic construct
  source 1..120: mol_type = other DNA
gcagctccttgggaaaggctggggctctcgtatcactctcagtcttcagtccacgtggtatcctgtcagtagactttattcccttgttctcagtttcttacggtttttggcatgaagtta

SEQ ID NO: 51146 - DNA, 120 bp, synthetic construct
  source 1..120: mol_type = other DNA
ctctggcttgcgattcttttgctaggtaagaataaagttagggaaaggcataaattagctgtgtttgtaagaatgaaaaacatgctgaatgtggagaagatggaatgtcattaggatgag

SEQ ID NO: 51147 - DNA, 120 bp, synthetic construct
  source 1..120: mol_type = other DNA
agacttccaggggtttgacattcctacttgatcttggtggataactctgtagcctatatgaacttattaagccaaaataaaaaaggaacatataaagactggcctatgtcaaataattag

SEQ ID NO: 51148 - DNA, 120 bp, synthetic construct; identical to SEQ ID NO: 14254
  source 1..120: mol_type = other DNA

SEQ ID NO: 51149 - DNA, 120 bp, synthetic construct
  source 1..120: mol_type = other DNA
tgactctgtgtgattactgtgctagccagcagctgtagtgaaattgagggtcaactctctggctggtggaattttctatctaatttacataactagacctcagttcttgagatattgcct

SEQ ID NO: 51150 - DNA, 120 bp, synthetic construct
  source 1..120: mol_type = other DNA
taggtgttgcggatacattatatgaatcaataaactgtattctctgtactgggtaggaagaaaggccactgtttcaaaattctgtgcagagatggctgtgcacctacatagcactgcatt

SEQ ID NO: 51151 - DNA, 120 bp, synthetic construct; identical to SEQ ID NO: 14255
  source 1..120: mol_type = other DNA

SEQ ID NO: 51152 - DNA, 120 bp, synthetic construct
  source 1..120: mol_type = other DNA
agaaaattatacaattccaggaggattttaagcctgtaaaagcagcatcatttatggagaaatatctagagacttctaattttggtccagagagagctttgttattttcagtgcccaatt

SEQ ID NO: 51153 - DNA, 120 bp, synthetic construct
  source 1..120: mol_type = other DNA
gcctcagcctcctgagtagttgggattacaggcatgcaccaacatccaacatgcctggctaatttttgtatttttagtagagatggggtttcaccatattagccaggctggtctcaaact

SEQ ID NO: 51154 - DNA, 120 bp, synthetic construct
  source 1..120: mol_type = other DNA
cagatgtgaaaataaagaggagataagaattgttgaacctcttgctattaaaacaattaaactgaaatttaccacagtatctggcacaataataaatacccaataagtacttctcagaat

SEQ ID NO: 51155 - DNA, 120 bp, synthetic construct
  source 1..120: mol_type = other DNA
ctagactggtaagttaaattttcaggataatcatggccaatgacttggctgactttcagaagtcacttatgaatagggtgctaatttagagatattctaattaatatattcgtcgattga

SEQ ID NO: 51156 - DNA, 120 bp, synthetic construct; identical to SEQ ID NO: 14256
  source 1..120: mol_type = other DNA

SEQ ID NO: 51157 - DNA, 120 bp, synthetic construct
  source 1..120: mol_type = other DNA
gtggactctttagcacattccttagatagctcagtgctttctgcaatttgtgaaagggatgcagtatggcacaactgtgtatcttgaacagatgcagctgtgtggatggaactttgagat

SEQ ID NO: 51158 - DNA, 120 bp, synthetic construct
  source 1..120: mol_type = other DNA
gtggactctcttacatctttcccagaactttgcctatctagggcttgcactgtataatcaagtgacaagaaaaagaaaagaatattaagatctaagctttgtcacttgcccatgttagta

SEQ ID NO: 51159 - DNA, 120 bp, synthetic construct; identical to SEQ ID NO: 14257
  source 1..120: mol_type = other DNA

SEQ ID NO: 51160 - DNA, 120 bp, synthetic construct
  source 1..120: mol_type = other DNA
agtaagtaatactgtacttactttaagtacagtaagtaataatcagcaaatagatcatttaatgatgcaatgatacaatattgcttagaagagtaaagaagccaagcaaaggtggtgcct

SEQ ID NO: 51161 - DNA, 120 bp, synthetic construct
  source 1..120: mol_type = other DNA
aggacctagcgggagttattgcatgttattttattagtaagttatggactgaccacagtatgcaataaaacaaacagcagagactctcattagtaacagtgggactgagaggtatacagc

SEQ ID NO: 51162 - DNA, 120 bp, synthetic construct
  source 1..120: mol_type = other DNA
agtaagcatcaactataagcattaaagccatgcctgtggactcctcaaaatggaaaactacatcttttgttggtagaattagctgctggttatgaaaccattggatttctggcttgggaa

SEQ ID NO: 51163 - DNA, 120 bp, synthetic construct
  source 1..120: mol_type = other DNA
agacatgccattgggagtttgatgtattttcttcaaatttgctaaatcctgaaaagaagcataccaatttttaatgtcttaccttgcactgaaaccagaactcatttggagttgtctaca

SEQ ID NO: 51164 - DNA, 120 bp, synthetic construct; identical to SEQ ID NO: 14258
  source 1..120: mol_type = other DNA

SEQ ID NO: 51165 - DNA, 120 bp, synthetic construct
  source 1..120: mol_type = other DNA
tatatttgctcaggaaaaatagtaccactatataaaaatgctatccttgtttgaatcaaattccccatgttactgaggaagtgtttctgattacaatttaagagccccaactaacagaaa

SEQ ID NO: 51166 - DNA, 120 bp, synthetic construct
  source 1..120: mol_type = other DNA
attcttgagaggaggatgaatatagctcgctggtgtacagacctgaaacggtctagcttttgtgaaatcaaaattgtgtcagcatgataggaggatgataacactcttagatgtttttaa

SEQ ID NO: 51167 - DNA, 120 bp, synthetic construct
  source 1..120: mol_type = other DNA
tacaaattgttacagagaaaaagcggggccaaatgaaacgtgatggtctatgattcacaatgaaaagtggtaaaggagaggcgagaccatggcatataacagggaaataattagttgaat

SEQ ID NO: 51168 - DNA, 120 bp, synthetic construct; identical to SEQ ID NO: 14259
  source 1..120: mol_type = other DNA

SEQ ID NO: 51169 - DNA, 120 bp, synthetic construct
  source 1..120: mol_type = other DNA
tttacctgcaaacacaatgttaataatactagtgcctacatttcatatttgacttaataacatgatacttttctctgggcatgccatatctactattgttaaatgatttcctttcatctt

SEQ ID NO: 51170 - DNA, 120 bp, synthetic construct
  source 1..120: mol_type = other DNA
agcagagacaagattttgacatattcagtgactttgagaaaaagacagtcctaagaagagtcatcaggaaaggtttgatctgggcttgtagttgccttctgggacaggaaatgagaaaaa

SEQ ID NO: 51171 - DNA, 120 bp, synthetic construct
  source 1..120: mol_type = other DNA
atgagcaaaaggtttcagtacgcagtatatatggcacaaataattgtagagaaaataattttttaaataaagagggtgatttattatggtatttgagcatcttagatacatttgactctt

SEQ ID NO: 51172 - DNA, 120 bp, synthetic construct; identical to SEQ ID NO: 14260
  source 1..120: mol_type = other DNA

SEQ ID NO: 51173 - DNA, 120 bp, synthetic construct
  source 1..120: mol_type = other DNA
tgcccatgatggtagatgtgtataaatggcaggttctcctcttagagtaacaaatctgttcagttccttagatagtaaggtaaagtagaagatgaaatcctggccaggcgcggtgcttca

SEQ ID NO: 51174 - DNA, 120 bp, synthetic construct
  source 1..120: mol_type = other DNA
gtgtggtggcacacacctataatcccagctattcaggaggctcaggcaggagaatagcttgaacccgggagggggaggttgcagtgagccgagatctccagcctggtgacagagcaagac

SEQ ID NO: 51175 - DNA, 120 bp, synthetic construct
  source 1..120: mol_type = other DNA
gcgtaataatttatgggctattcgttgcatataattgctgtgagaattaaatgatataacacacatggaagggctttataagccactggcacaagtcagtcattatagcaagaatatcta

SEQ ID NO: 51176 - DNA, 120 bp, synthetic construct; identical to SEQ ID NO: 14261
  source 1..120: mol_type = other DNA

SEQ ID NO: 51177 - DNA, 120 bp, synthetic construct
  source 1..120: mol_type = other DNA
aaaacttttcttggtagtggacttggtgcttgtggctgtgatgccatgatctgcgttactcattagcctctcgtgtcttctttgaggccattcttctcccatattactacttctgcaata

SEQ ID NO: 51178 - DNA, 120 bp, synthetic construct
  source 1..120: mol_type = other DNA
tctttccctatcacagtatcacttctaaaaagtaaacctgatcatggtacccaggggcttaaaaatcctgcagtgtctcctaaatgtaaacaagatcaattccaaaatcttcagcataga

SEQ ID NO: 51179 - DNA, 120 bp, synthetic construct; identical to SEQ ID NO: 14262
  source 1..120: mol_type = other DNA

SEQ ID NO: 51180 - DNA, 120 bp, synthetic construct
  source 1..120: mol_type = other DNA
ccttaaaggcaagagcaagatctgcaccccagcacctagggtaatatctcaatagcagggaaacaataaatggtagaattaaaattgcacagatgcttaaatgaataacagacaatatca

SEQ ID NO: 51181 - DNA, 120 bp, synthetic construct
  source 1..120: mol_type = other DNA
attctgcttttccaaattactcctctaccagtaggtggcactggagaccttcaataggtaacattttcgctgttagaaacagcacctggttgctcagggccacgtttcatgcttcagaaa

SEQ ID NO: 51182 - DNA, 120 bp, synthetic construct
  source 1..120: mol_type = other DNA
tttagtcccagtggtatgaaactatgtgagttggcaagtttttgaagggtcattctatttaatgaatttaatttctttcatatagaaaacaaatttataagaggatgctaaaaccactat

SEQ ID NO: 51183 - DNA, 120 bp, synthetic construct; identical to SEQ ID NO: 14263
  source 1..120: mol_type = other DNA

SEQ ID NO: 51184 - DNA, 120 bp, synthetic construct
  source 1..120: mol_type = other DNA
attgtgttagtaggatattatcaaatcagtcctcatttattaatatttagcatttcttgaacactatccctcaaatatacagtctatggtatttgtccatactggccatacaatactaaa

SEQ ID NO: 51185 - DNA, 120 bp, synthetic construct
  source 1..120: mol_type = other DNA
aaaatcaaataggtctattagatttctagatcaccatctccattcctgaggaggaaataattgggtcagaagaccaactgaagtactaacctgttgagaaaaataaatcttgacaaggta

SEQ ID NO: 51186 - DNA, 120 bp, synthetic construct
  source 1..120: mol_type = other DNA
tggctgggaaactctcaaataattgtgattatagacaatcagttatgacttgaagtggttccacatatattgtctcattctaccaagatcagattcctgggatgaggaaattggctggtg

SEQ ID NO: 51187 - DNA, 120 bp, synthetic construct
  source 1..120: mol_type = other DNA
aagtgtttggtaacagtcatttaaccatcattaattagtccagtcaacaattacttatggagtatctactatgtatcaggtgatattctggggcaaccatccactcttgttttcatagag

SEQ ID NO: 51188 - DNA, 120 bp, synthetic construct; identical to SEQ ID NO: 14264
  source 1..120: mol_type = other DNA

SEQ ID NO: 51189 - DNA, 120 bp, synthetic construct
  source 1..120: mol_type = other DNA
aaattaaagtgcagctacaatcataaagggaacatgaccttttttaatattagtgaaaaacactaatttttttattgtgataaagaacacataacataacataaacaaccattattaagg

SEQ ID NO: 51190 - DNA, 120 bp, synthetic construct
  source 1..120: mol_type = other DNA
gacagaatgtttttcccatgtaattatttgtaagtattggcaatgacaccttttgttcttaaacctacctgttccagaaacccggcattgaaaacgggctggctgcccttcagaagtgac

SEQ ID NO: 51191 - DNA, 120 bp, synthetic construct
  source 1..120: mol_type = other DNA
aaagaaaccacaagatttgtcatgattaagtcaccatagagacctcacagaagggagcatgtaggtttatcttaatttatttcactgcagagtgctttcaaagttgggtagcaatctact

SEQ ID NO: 51192 - DNA, 120 bp, synthetic construct; identical to SEQ ID NO: 14265
  source 1..120: mol_type = other DNA

SEQ ID NO: 51193 - DNA, 120 bp, synthetic construct
  source 1..120: mol_type = other DNA
cagaacttggggcggttcaggagctaggagtaaatgttgacaaatagcccatgaaaaagtgtaaaaacacaagagagcatgcaaaactctacattaatttgttgctggctagttatacat

SEQ ID NO: 51194 - DNA, 120 bp, synthetic construct
  source 1..120: mol_type = other DNA
tcagaatattagaacattctttgtgctaagaatgaagaaagcacttggaatttgtccacatgcagagggaatagcttcagaaagatatttttgatatttggggggcatgctgagagtgcc

SEQ ID NO: 51195 - DNA, 120 bp, synthetic construct
  source 1..120: mol_type = other DNA
tggtgaagaggctcatatcattccagtttgtttgttttgcaagtatttgtgtttatgtcatagtcattttgttatgtaccagtgccagtaaaatgcaatcagtaagtattgaatgaatga

SEQ ID NO: 51196 - DNA, 120 bp, synthetic construct; identical to SEQ ID NO: 14266
  source 1..120: mol_type = other DNA

SEQ ID NO: 51197 - DNA, 120 bp, synthetic construct
  source 1..120: mol_type = other DNA
gattacccctggagttcctgcatctgcctcaggggtattttattcaaagagatatggcctaggatgagaataggaagggaggttccatttttctcttgcatctaggttagactcaaaaca

SEQ ID NO: 51198 - DNA, 120 bp, synthetic construct
  source 1..120: mol_type = other DNA
ccaaagtaagagcccctgttcttagagcttggggtagagaggatcgagttccacattgcctgaggctctctaggccttccagggtctcaaagaggacttttgagttctcccaggcactcc

SEQ ID NO: 51199 - DNA, 120 bp, synthetic construct; identical to SEQ ID NO: 14267
  source 1..120: mol_type = other DNA

SEQ ID NO: 51200 - DNA, 120 bp, synthetic construct
  source 1..120: mol_type = other DNA
aatttagtgacttaaacaggaggattatttctgatggatccacaaaatatgctgaaatctgtccctacataccattgacatagagagtgacagaactcctgttccttcctgccacaaagg

SEQ ID NO: 51201 - DNA, 120 bp, synthetic construct
  source 1..120: mol_type = other DNA
tcttgaacttggaaattgatttcaatgccatctttataccagtgggcatcaacatcgtcttcattgacctcaaattcaacaacagcacgctgtttctcaatgacctgttgatggaacaac

SEQ ID NO: 51202 - DNA, 120 bp, synthetic construct
  source 1..120: mol_type = other DNA
tgattatagcactctctaatttttcctgcctagtattggacaaatggtacataaacttctcttgtagagaattgtgtttacagctgcatggaggaaaggagctgccccaaagagacaatt

SEQ ID NO: 51203 - DNA, 120 bp, synthetic construct
  source 1..120: mol_type = other DNA
ataactttgtgggctaggtaggaattattatcctcattttaagagtgagaacactgaggttcagaattggcaaataaatgatggaagacatctccaggttatctgagtcctcattgaagc

SEQ ID NO: 51204 - DNA, 120 bp, synthetic construct; identical to SEQ ID NO: 14268
  source 1..120: mol_type = other DNA

SEQ ID NO: 51205 - DNA, 120 bp, synthetic construct
  source 1..120: mol_type = other DNA
ttggacagggctttctcttagacttcacagaaagtatttctagccactaagttccttgacacttgcctctccacagatagaaaccttctgagaaaatatcaccttgttctaaatttcctt

SEQ ID NO: 51206 - DNA, 120 bp, synthetic construct
  source 1..120: mol_type = other DNA
tagacagtgaaatttctacagctgctttaattaacgtatttagacagctgctagggacacccttattccctgagtggaaactgtgactaaattgaggtcagcataagagagtctaagcca

SEQ ID NO: 51207 - DNA, 120 bp, synthetic construct
  source 1..120: mol_type = other DNA
gattatggactactgatgatttttcaaaacatttagtatgtagacaatacctgaacctcctttttaatacttcggatgcgaacatctctgccttctacaaagagttttgcagttgacacg

SEQ ID NO: 51208 - DNA, 120 bp, synthetic construct; identical to SEQ ID NO: 14269
  source 1..120: mol_type = other DNA

SEQ ID NO: 51209 - DNA, 120 bp, synthetic construct
  source 1..120: mol_type = other DNA
gttcagaaacttcacattcaaacatggctcgcttcttctccagtaccttaatgtccttaatgtgtttcctaaattctatatgacgagctggaaaatagcatgtagaaaaattaacatttt

SEQ ID NO: 51210 - DNA, 120 bp, synthetic construct
  source 1..120: mol_type = other DNA
cattccccaagaagaaatcatgtaacccttagccatcaccccaaggacttttctattgtctcccctgtagacctaagcaaccaccaatctacatctctatagatttgtgtatcttggaca

SEQ ID NO: 51211 - DNA, 120 bp, synthetic construct
  source 1..120: mol_type = other DNA
gctgaatgatatcccatcgtatggctatcccacattttatttatccattcattaattgatacactaaattttataaagcatgtatgacattttttctatggatctaatatgtatgaaacc

SEQ ID NO: 51212 - DNA, 120 bp, synthetic construct
  source 1..120: mol_type = other DNA
atctggcacttgtcagttgatttgatttccacaccattctttaaccatttgtaagagatgccttcatagttcactgtcacctcaaaagtaatagtgtctttttcttcagcgttgatgtct

SEQ ID NO: 51213 - DNA, 120 bp, synthetic construct; identical to SEQ ID NO: 14270
  source 1..120: mol_type = other DNA

SEQ ID NO: 51214 - DNA, 120 bp, synthetic construct
  source 1..120: mol_type = other DNA
tttgaggcaggttctcactttgtcgcccaggctgcagtgcagtgccgtgattgtggctcactgcagccttggccttctgggcccaagcgatcttcccacctcagcctcctgagtagctgg

SEQ ID NO: 51215 - DNA, 120 bp, synthetic construct
  source 1..120: mol_type = other DNA
ctgccttggcctcccaaagtgctgggattacaggcttgagccaccctgcccacccaatcaaggatttttgagtggtcagcaaagtgtaggatatagaatatcaatgaatctactgaatat

SEQ ID NO: 51216 - DNA, 120 bp, synthetic construct
  source 1..120: mol_type = other DNA
gctggtgttcatgatgatcagctgatggagttttccctgcacaactatcttgaacttttcactcatctcaatttccacaccattcttcagccacatggaagggacattgaagtgggacac

SEQ ID NO: 51217 - DNA, 120 bp, synthetic construct; identical to SEQ ID NO: 14271
  source 1..120: mol_type = other DNA

SEQ ID NO: 51218 - DNA, 120 bp, synthetic construct
  source 1..120: mol_type = other DNA
tggaacagtgtcatgggaaacactaacttcaaaggcaacagtggcattttccaaggctgtcacatcctttggctttttaatgatcttgacagctaagaggaaaattggagcaattcagtg

SEQ ID NO: 51219 - DNA, 120 bp, synthetic construct
  source 1..120: mol_type = other DNA
actcatccacgatggcacagtttttaatcctcagagagtaaattgttcctttgacagagatagcatacttttcattggattccagcacaactccatttttgatccactggacacctttga

SEQ ID NO: 51220 - DNA, 120 bp, synthetic construct; identical to SEQ ID NO: 14272
  source 1..120: mol_type = other DNA

SEQ ID NO: 51221 - DNA, 120 bp, synthetic construct
  source 1..120: mol_type = other DNA
gggtgaaagacgaatggagaatcagtgtctgatttagctgtttcacagagctttaacctaagaaatggcttttttgcataaacgcatttgataagcaattttgtaccttgtggaatgtgt

SEQ ID NO: 51222 - DNA, 120 bp, synthetic construct
  source 1..120: mol_type = other DNA
ggacaaatcctatgttacttgccttcaactttgagtttggcagatgttttggaggtggccaccttgtaggtatattctccaatgtcatctaatttggtggcagcaatgataagtctcctt

SEQ ID NO: 51223 - DNA, 120 bp, synthetic construct
  source 1..120: mol_type = other DNA
tcagctacggtctgatctgtgagtggcttggagatggccccacctttggaacaagagatgtacagtatgagtcctttaaacatattcacacaatgggaaaatctttgcagaagtaaatat

SEQ ID NO: 51224 - DNA, 120 bp, synthetic construct
  source 1..120: mol_type = other DNA
gaaatactggaatcagaaaagttttgtgaagaaaaaataactgttgaattaataggaaattcttagaacagtataccaccaggatagtctctaacccaattccttcttcttcaaaagcat

SEQ ID NO: 51225 - DNA, 120 bp, synthetic construct; identical to SEQ ID NO: 14273
  source 1..120: mol_type = other DNA

SEQ ID NO: 51226 - DNA, 120 bp, synthetic construct
  source 1..120: mol_type = other DNA
ttatttagttttgtgtcctgagtttctacaagtgtctgaccaatggtaggtactttaaaaacactgggtgaaatcacagaggagttcatagtttattcctgtttccacacatttaaaaca

SEQ ID NO: 51227 - DNA, 120 bp, synthetic construct
  source 1..120: mol_type = other DNA
taccaaataagacaaatcattaccatatgacttgcttcaatactagatgtaatggacaacacgatctgaatgtaacatctcaactcctcaaaatttaaactgtaatgaaccaaacaaatt

SEQ ID NO: 51228 - DNA, 120 bp, synthetic construct
  source 1..120: mol_type = other DNA
cattaagctgtattttgaaaatatttattgatttcattaaaaagtaggaagaaaataaaaggcacaaaggctaaagaagcaagaatggctaaaaaaggaaataattctttagagtaagga

SEQ ID NO: 51229 - DNA, 120 bp, synthetic construct; identical to SEQ ID NO: 14274
  source 1..120: mol_type = other DNA

SEQ ID NO: 51230 - DNA, 120 bp, synthetic construct
  source 1..120: mol_type = other DNA
aggctggtgggaatggtgttgcaagtactattggctttgggaacagcataagcagaggcatggaagtgggaaactgaaaggaattttgggggaaatgaataataatttcttaaaataaca

SEQ ID NO: 51231 - DNA, 120 bp, synthetic construct
  source 1..120: mol_type = other DNA
agaactgtcaatttatatatttttccatgtgcttcaattttatatttagaactgggcttgatttccttgtccttaaaattccacaggacatcaattccagagtgggacagctcaacctca

SEQ ID NO: 51232 - DNA, 120 bp, synthetic construct
  source 1..120: mol_type = other DNA
aagtaattattagataggtagaataatccttactttctacagagagattacagttggtttcaactctgccaactatcagcttgtaaggtccttcgtctgaagcatgagttcggttaatga

SEQ ID NO: 51233 - DNA, 120 bp, synthetic construct; identical to SEQ ID NO: 14275
  source 1..120: mol_type = other DNA

SEQ ID NO: 51234 - DNA, 120 bp, synthetic construct
  source 1..120: mol_type = other DNA
tttatgttgcttaatagtgtaaacataaaattttataattaggactcactatagacagagacacgcccactggtggagaggccaagggctggaatggtgaaagagtaatttccagcatct

SEQ ID NO: 51235 - DNA, 120 bp, synthetic construct
  source 1..120: mol_type = other DNA
gagactttaacttcaagctgaacaatgtcaccctcacagactttttggtcactaagtccttgtaggatagcaatggggcgggctgtgaaatatggggagaaaaagaatgttatgatcatt

SEQ ID NO: 51236 - DNA, 120 bp, synthetic construct; identical to SEQ ID NO: 14276
  source 1..120: mol_type = other DNA

SEQ ID NO: 51237 - DNA, 120 bp, synthetic construct
  source 1..120: mol_type = other DNA
tggagaggtatgcatctagacttaggatagagatgatgtcttgtatgtcttttatctcccccatactatcaggtgtattcttaatatctacccgctgatgggctgagagataaattttca

SEQ ID NO: 51238 - DNA, 120 bp, synthetic construct
  source 1..120: mol_type = other DNA
aaaaatcaagataatactactttaaaaaatccaaatggtcaaattgttaacattcttaattacgaacataaatttatgattctggctatgaaacttatagtcaatttccaaataattgtt

SEQ ID NO: 51239 - DNA, 120 bp, synthetic construct
  source 1..120: mol_type = other DNA
gttgttgaataccttcaacaataagtttagcagtcgttttgacattttcatcttccacaagtacacagctgtaatcttcagcatcagacgtatcaatggtcagtatggagaggaagtgaa

SEQ ID NO: 51240 - DNA, 120 bp, synthetic construct
  source 1..120: mol_type = other DNA
ggttctgaagtttcacattcaaaggttgccatagtgtctttttccttagcaacaacatcttgtaattcctgtgtgaaagtgatcaattgcttggctacaagaaaaaggtgggggaaaaag

SEQ ID NO: 51241 - DNA, 120 bp, synthetic construct; identical to SEQ ID NO: 14277
  source 1..120: mol_type = other DNA

SEQ ID NO: 51242 - DNA, 120 bp, synthetic construct
  source 1..120: mol_type = other DNA
ccttggcccactgtttggctctggattctttcgaagatttttggagcctccatactaggacttagttcaatcttgtcaggtttaaaagttggaatcgtgattttgccttcttcggcaaga

SEQ ID NO: 51243 - DNA, 120 bp, synthetic construct
  source 1..120: mol_type = other DNA
gcttcataatagccctcttctgttctgcgcttgaatttactgcgcagctcttccgactcttcaggcactttttcatgggtaattctttcagcccttttcaacttcacaacttctttggtt

SEQ ID NO: 51244 - DNA, 120 bp, synthetic construct
  source 1..120: mol_type = other DNA
ctctgttgaatctcaagcttcactttatgctctatcacaccttcaggattttccgcggtgaccttcacttcacctgtgtcatatgatttgcagtccacgatgtccaggtaatggatacca

SEQ ID NO: 51245 - DNA, 120 bp, synthetic construct; identical to SEQ ID NO: 6780
  source 1..120: mol_type = other DNA

SEQ ID NO: 51246 - DNA, 120 bp, synthetic construct
  source 1..120: mol_type = other DNA
tgttccatatttgttagtggctctgcaagtaatgataccactgtctctagaatatgcaacgccataatcaaggctgcagtacccaaattcattgatcatacggagcctgttggctgcttc

SEQ ID NO: 51247 - DNA, 120 bp, synthetic construct
  source 1..120: mol_type = other DNA
gaaaaatggtttctgttgtttctctttgtcatagagatcaccttcttcccattgctcttggccatatcgcaaatggaggggctccagttctggggctgcaatctcctttgctctatatgt

SEQ ID NO: 51248 - DNA, 120 bp, synthetic construct; identical to SEQ ID NO: 14279
  source 1..120: mol_type = other DNA

SEQ ID NO: 51249 - DNA, 120 bp, synthetic construct
  source 1..120: mol_type = other DNA
tctgactttcatttcaagtcgggaaccttcctttatattgacatttttcagtttttctacaaacatcggttttacctgatgttccacagctgaaagagaaaggtcatgatttagagggag

SEQ ID NO: 51250 - DNA, 120 bp, synthetic construct
  source 1..120: mol_type = other DNA
ggcaaccacagtccattccccagaatcactgggtgtggcagggacaataattagtgattgagtaccatcttctttaatgactactttatgggtatagtcattgacaatttgctggcctgt

SEQ ID NO: 51251 - DNA, 120 bp, synthetic construct
  source 1..120: mol_type = other DNA
tgaaaccagaacgtctctggcataggtctaccaacaacctttaagtcaaatctggcagtttgcccttctaaacatttgaaagaaacaggttttaacacaaagactggtttatatagtctc

SEQ ID NO: 51252 - DNA, 120 bp, synthetic construct
  source 1..120: mol_type = other DNA
ctgctcactgaacgtggagagagagatctgcaaaacaaagacacacaatactttcgtgaggcataaagaaaactcagcaaaacaaacttcattttgtcttattcattattcatgttattt

SEQ ID NO: 51253 - DNA, 120 bp, synthetic construct; identical to SEQ ID NO: 14280
  source 1..120: mol_type = other DNA

SEQ ID NO: 51254 - DNA, 120 bp, synthetic construct
  source 1..120: mol_type = other DNA
aggaaaacatagaaatgaatttggaaacaaaacaaagcaaaacaagactccatctacacattgcagccagactgacttggagtttgaatgctggcaccaccgcttacaggctggatgaat

SEQ ID NO: 51255 - DNA, 120 bp, synthetic construct
  source 1..120: mol_type = other DNA
agagctattgtgatattagctatagcactaggaaaataaacagtatgttacactgatgaaaattctttgctcatcttacacaggggcaagaaataaaaacttctggcaattgttggtgtt

SEQ ID NO: 51256 - DNA, 120 bp, synthetic construct; identical to SEQ ID NO: 14281
  source 1..120: mol_type = other DNA

SEQ ID NO: 51257 - DNA, 120 bp, synthetic construct
  source 1..120: mol_type = other DNA
tatacgcagactagctctgccatcttgtagaaagtccatttggtatctttctccatgtttgatgcgcttgccatctttgtaccaagcaatctgcaaagaataccatgcatgtatgaataa

SEQ ID NO: 51258 - DNA, 120 bp, synthetic construct
  source 1..120: mol_type = other DNA
acacccatcccctcaagaattctataattcttgattcttgaatcaaatcctgattcaacagcttcagattcagaaatgtcaactgccatcttttcttctccatcttcttcaagaagttct

SEQ ID NO: 51259 - DNA, 120 bp, synthetic construct
  source 1..120: mol_type = other DNA
tataaattatttaaggagatgtatctgagctagactgttgaagtttttagctgggagaagaatctagaggactttttggtttgtttgttttaatctgcattatggtcatctttcccagtg

SEQ ID NO: 51260 - DNA, 120 bp, synthetic construct; identical to SEQ ID NO: 14282
  source 1..120: mol_type = other DNA

SEQ ID NO: 51261 - DNA, 120 bp, synthetic construct
  source 1..120: mol_type = other DNA
agcaacagtgaacttggaccttctaatagctgtctaaccccgagctcatcacttgaaaatgaaaatatcaaataaaaaaaggaaagtataatttatgaaattgtttggttggtcattact

SEQ ID NO: 51262 - DNA, 120 bp, synthetic construct
  source 1..120: mol_type = other DNA
ggtgctgtttctccaactttaggttcttgaacaaatgcagtcacttgtgtctgataaagcatttcttgctgggacttcatcagtaactcataatcagctaagagttaagaacatcagtta

SEQ ID NO: 51263 - DNA, 120 bp, synthetic construct
  source 1..120: mol_type = other DNA
attttctagatggaatttggaaaccaaactaacactaacaaatccaaccagccattacaattgtagaaagaattttatattagcagtcagttttggggggatctaccacggaggacttcc

SEQ ID NO: 51264 - DNA, 120 bp, synthetic construct
  source 1..120: mol_type = other DNA
gagtgtgagccagttcactgtaaatgtgaacagtctagcatgaaagctgttacatttgttttcaagttataaacattgaaaatcctgacttccaggttttctttaagatatcaggagctc

SEQ ID NO: 51265 - DNA, 120 bp, synthetic construct; identical to SEQ ID NO: 14283
  source 1..120: mol_type = other DNA

SEQ ID NO: 51266 - DNA, 120 bp, synthetic construct
  source 1..120: mol_type = other DNA
ctccttgtatttcagttcttatcatgcacatagaaactggagttgcacttaccttcttcaagcaaggaagcagatgcagaagtttctccatgcttattgcgaacaacaatagtgtattct

SEQ ID NO: 51267 - DNA, 120 bp, synthetic construct
  source 1..120: mol_type = other DNA
ttctgtgggtaaaataattggacttatctgtgagtggatctgtggtataaaattcaatgaccctaaacatatgactaagctccacaatagattataagattgctgaaaattgagaaaaat

SEQ ID NO: 51268 - DNA, 120 bp, synthetic construct
  source 1..120: mol_type = other DNA
cacttaaacaacaggtattttctctttgttcgttatttttctcattatttcattcagagatcaaatgaataattaaaacaataaattccttcaaatatttcagtattaactctctggtac

SEQ ID NO: 51269 - DNA, 120 bp, synthetic construct; identical to SEQ ID NO: 14284
  source 1..120: mol_type = other DNA

SEQ ID NO: 51270 - DNA, 120 bp, synthetic construct
  source 1..120: mol_type = other DNA
atagctttatttcttaggaagactttgcacaaaaaaaatgtaaaaatacctcaaaacaaactaagaaggctccacaatgaaagagcctatgctcagggtcggtggggtgagtaaattcta

SEQ ID NO: 51271 - DNA, 120 bp, synthetic construct
  source 1..120: mol_type = other DNA
ctctaggcttcatgcacgtattatacaagtcacagagaactctatattcagccatcaaaatacctgtatccagtggttagaggaacaccagattttttccagtatacatggggctttggg

SEQ ID NO: 51272 - DNA, 120 bp, synthetic construct
  source 1..120: mol_type = other DNA
ctagtatcagtcataaccacatctcttgactcaacaaagctggaaagagaattcccctcatattagcttccgggttgcaatttgccaatactggtggggctgaaagtcaaaatggtacta

SEQ ID NO: 51273 - DNA, 120 bp, synthetic construct; identical to SEQ ID NO: 14285
  source 1..120: mol_type = other DNA

SEQ ID NO: 51274 - DNA, 120 bp, synthetic construct
  source 1..120: mol_type = other DNA
atcgcccgctgtcttccgcaaatgcttcgcgaatcataagacgagcaattccactctggaaggttatctggaagtcaatggaactttcgatttggtagtcttccctgtaccatgtcactg

SEQ ID NO: 51275 - DNA, 120 bp, synthetic construct
  source 1..120: mol_type = other DNA
tcggggatgggtatccagagatgtggcactccaaggtgacagattcaccttctatgacagtcacattttttaagccctgaagagaggagaaaaaataaataatgatacgtgtgcatattc

SEQ ID NO: 51276 - DNA, 120 bp, synthetic construct
  source 1..120: mol_type = other DNA
atactaatatattagtaaagagctgtaaggctcaatagcaaatgctacctattcaacaaagctttgccatggtatcaccaactggaatgaatctatgcctcccatggattctccttctgt

SEQ ID NO: 51277 - DNA, 120 bp, synthetic construct; identical to SEQ ID NO: 14286
  source 1..120: mol_type = other DNA

SEQ ID NO: 51278 - DNA, 120 bp, synthetic construct
  source 1..120: mol_type = other DNA
tgatttgaggagatatgaatagggtccagcattatcaacttctttactcaccgagaccaaagttggtggagtaacaggaatttcaacaggtgctggtactcttgctgtttctgttaccta

SEQ ID NO: 51279 - DNA, 120 bp, synthetic construct
  source 1..120: mol_type = other DNA
aaatgatctctgacccatactatgctccataaaaatcaagtcttagtatggcaaaggagaaaggcaagactccactggctacttttcagtacaaactagccaaccacctggccctgctca

SEQ ID NO: 51280 - DNA, 120 bp, synthetic construct
  source 1..120: mol_type = other DNA
ttcacctcaacgccagcttcactcttgtaagtatctggtgtgtcagcgaaggggaactgtggcaagggtgtgggctctgcccttactctagtctcactgggcttcacagtaggagccttc

SEQ ID NO: 51281 - DNA, 120 bp, synthetic construct; identical to SEQ ID NO: 14287
  source 1..120: mol_type = other DNA

SEQ ID NO: 51282 - DNA, 120 bp, synthetic construct
  source 1..120: mol_type = other DNA
gaactccttattttacagcttttatcataaaaggacaggatcttctaaagcttagtcacgaattttcacttaaccattccgatgaatgccacttttgaaaataccacagtgggagattca

SEQ ID NO: 51283 - DNA, 120 bp, synthetic construct
  source 1..120: mol_type = other DNA
ttaaaggtttccttactgcttttattctgttgtggtctatggttatttgttttgtaatttgggactaaatcaaatataggcattatatgtaacttacagttctttgaaggcatagaaggt

SEQ ID NO: 51284 - DNA, 120 bp, synthetic construct; identical to SEQ ID NO: 14288
  source 1..120: mol_type = other DNA

SEQ ID NO: 51285 - DNA, 120 bp, synthetic construct
  source 1..120: mol_type = other DNA
tcattagaacaatagtaatcaaaacaattgagtttgagctgtccctgaaatgtgaactagagagaagcctgtgtggatttgtctctcctcagaggtataagataaccacttgtgactcta

SEQ ID NO: 51286 - DNA, 120 bp, synthetic construct
  source 1..120: mol_type = other DNA
cacatcaccaaaaaagaatcctccattggcctaccccagagatgctctgtttcacaggttagatacttatttcctttaaacatttctgtatcatgctctgtaacttcttacctcatatcc

SEQ ID NO: 51287 - DNA, 120 bp, synthetic construct
  source 1..120: mol_type = other DNA
atctttccgttgttagatctgtagttttcttgatctgcattgaaatgaaactcagtgataccattgatcaccagatgaccacagcagtgaggcttgctttaccatgaacaaggtgaaaaa

SEQ ID NO: 51288 - DNA, 120 bp, synthetic construct
  source 1..120: mol_type = other DNA
gttctgaggctggacgttggggaggctcagctacctttgcggcggaaatgcgttccttatatccgtactccaaagtggtctgctgagcataggattcttcaagatgcccaggctctctgg

SEQ ID NO: 51289 - DNA, 120 bp, synthetic construct; identical to SEQ ID NO: 6790
  source 1..120: mol_type = other DNA

SEQ ID NO: 51290 - DNA, 120 bp, synthetic construct
  source 1..120: mol_type = other DNA
aaattttctagaatttttccaggcagacaatcaatcagcaattggaaaatcagaattttggagctggttcttttcactgattatttttattatcttgttgaccatttagtctggtattaa

SEQ ID NO: 51291 - DNA, 120 bp, synthetic construct
  source 1..120: mol_type = other DNA
acagagtgagcatatgaatttacttatgattccctaagggtaagattgtttaatctatcagaaaatacctttcttaaaacacacagatgacaaagagaaccccgtgcaaataaaaatatt

SEQ ID NO: 51292 - DNA, 120 bp, synthetic construct; identical to SEQ ID NO: 14290
  source 1..120: mol_type = other DNA

SEQ ID NO: 51293 - DNA, 120 bp, synthetic construct
  source 1..120: mol_type = other DNA
agaatgcatcagaaacattcttcaactatgctacctgcatatctttaaaaattattctctgaaccattcaagatataaatgagatttttctgagatggaattgggtctttagtgatcatg

SEQ ID NO: 51294 - DNA, 120 bp, synthetic construct
  source 1..120: mol_type = other DNA
ttcatctgcctcgaaggactgcaaataccatcttcactttagattgcatcatctcagaaaaaaacataaaatacacatgaggcttaggtgagttaagtttgtccatttatttttttcttt

SEQ ID NO: 51295 - DNA, 120 bp, synthetic construct
  source 1..120: mol_type = other DNA
ccactatatctcatttgaaccttttagccagtctgctatgaagtagtcagcttaagtcttaattttattttaacaatgataaaagaaactgtcaaagaaactgtcatatgactaaatatc

SEQ ID NO: 51296 - DNA, 120 bp, synthetic construct; identical to SEQ ID NO: 14291
  source 1..120: mol_type = other DNA

SEQ ID NO: 51297 - DNA, 120 bp, synthetic construct
  source 1..120: mol_type = other DNA
ctgacttttcactactagaaatgctcactgttcaactggaggatggactgaatctaaccatctctattgttttattgatcagttaaacaattagatggaacactagaagcacaattcacg

SEQ ID NO: 51298 - DNA, 120 bp, synthetic construct
  source 1..120: mol_type = other DNA
ccttctctagtcattggcggtgtggctggttcagcagattttgcagtggtaactactacttcaggtataaacattttctcagcttccatccttagctaatttttaacaaaaacaagatag

SEQ ID NO: 51299 - DNA, 120 bp, synthetic construct
  source 1..120: mol_type = other DNA
gttagatttgagtaaaggtttaaaaagtttatcttaaatcatatcttagaaaaaaaagatgtagagtcagaaaatgacactgagggaaatacaaataggattcaggccatcctgctaatg

SEQ ID NO: 51300 - DNA, 120 bp, synthetic construct; identical to SEQ ID NO: 14292
  source 1..120: mol_type = other DNA

SEQ ID NO: 51301 - DNA, 120 bp, synthetic construct
  source 1..120: mol_type = other DNA
acataatatactgaatttatgacccttcaaaacacacatcttcttgacagtgagtaagagtcatcatttacttatacatcttccgtgtttttaaaaaatgttcatgggcctcttaaaatt

SEQ ID NO: 51302 - DNA, 120 bp, synthetic construct
  source 1..120: mol_type = other DNA
tggagaaagggatatgtagtaatattaacaataataaatttttttagtttccaattatttaattgtctaaaaaataaatttggttaatagtgactcatacataagaaattcagagacttg

SEQ ID NO: 51303 - DNA, 120 bp, synthetic construct
  source 1..120: mol_type = other DNA
acaatagtcacctttccatgggtaacttggatttgttcttgtctagtagccatagtttctctagttctcagtattgtttcttgttctttggctttagcagtagcaactgctattgtagac

SEQ ID NO: 51304 - DNA, 120 bp, synthetic construct; identical to SEQ ID NO: 14293
  source 1..120: mol_type = other DNA

SEQ ID NO: 51305 - DNA, 120 bp, synthetic construct
  source 1..120: mol_type = other DNA
ttacagatggatgaaaatcaaatgtgcagataaaattaatgataatcagtctcatatttaccattttgtttttagttagggattttaaaaggcaaatacagattaataattcataccata

SEQ ID NO: 51306 - DNA, 120 bp, synthetic construct
  source 1..120: mol_type = other DNA
acctcttgatactaaatcttgttctttgactttgggtgtggcaactatgactttaggtacaactgttttcctagtttccttcattatctgatcatacaaaagaaagtaagaaaatagtca

SEQ ID NO: 51307 - DNA, 120 bp, synthetic construct
  source 1..120: mol_type = other DNA
ccatactgtttcactggcaaaaatatcaaaacaataagtccagtttaaaagaaaaaaatgtgattagcaataaaagactaatgagtgctattttgtacttttcacattttttaaaactgc

SEQ ID NO: 51308 - DNA, 120 bp, synthetic construct
  source 1..120: mol_type = other DNA
agtaacaagccaaagaaagtctgaaagttaggaatgaattgacagtgaaaggtagctgtgtgggaaaagaaattttctatttgcattataagaagaggtggaagtgaagaagtgatgatt

SEQ ID NO: 51309 - DNA, 120 bp, synthetic construct; identical to SEQ ID NO: 14294
  source 1..120: mol_type = other DNA

SEQ ID NO: 51310 - DNA, 120 bp, synthetic construct
  source 1..120: mol_type = other DNA
tgcttaatacatagactgctttcctgaggaatgggcttcttttctgcccacatgcgccttagcaaattgtcctagaactgaacatatctcatcttgagacatgtcaacgtgttagggaac

SEQ ID NO: 51311 - DNA, 120 bp, synthetic construct
  source 1..120: mol_type = other DNA
ctgctttcaaaatgtctcactcacagtaaggagagggaaattcagtcagcagcctctggtcagccttttaagtgtacaaggttctcaactggacctttaaagaaagtagctctaagatca

SEQ ID NO: 51312 - DNA, 120 bp, synthetic construct
  source 1..120: mol_type = other DNA
attttagtgacactgagattgtcctcacacagctctacggcacaacagcagcaaatgcttctaggtcactgtttatcaaccgtgaattgaaggaatttttttttttgaggaagtatttgc

SEQ ID NO: 51313 - DNA, 120 bp, synthetic construct; identical to SEQ ID NO: 14295
  source 1..120: mol_type = other DNA

SEQ ID NO: 51314 - DNA, 120 bp, synthetic construct
  source 1..120: mol_type = other DNA
caataacaaaaaatatacaaccaaagacttctccatttaagggttttgactataagctacctgcagctggctgtaatgtgatattgtcaacaaactacaaaatatttagaaaatcagact

SEQ ID NO: 51315 - DNA, 120 bp, synthetic construct
  source 1..120: mol_type = other DNA
ttttcttatctgcaaagaatgatttaagaaaaaactttatttcctgatgcccaatgaaataatatggtgtttattaaatataacaacataggaatttgaagatgtaaaatcccttttctg

SEQ ID NO: 51316 - DNA, 120 bp, synthetic construct
  source 1..120: mol_type = other DNA
ttttgaacagcagaattgtagtcttctttaaaatgacttccaatgtttacaaatagatctatggcaatattattctgtactaattctgtcatctaaaggtaatcttagaatatatatcag

SEQ ID NO: 51317 - DNA, 120 bp, synthetic construct; identical to SEQ ID NO: 14296
  source 1..120: mol_type = other DNA
